United States Patent Application Publication US 2011/0112168 A1 - sequence listing, part 2

SEQ ID NO: 29974 - RNA, 21 nt, Artificial Sequence
  Chemically synthesized
ggaguggcauaaguuugaggu

SEQ ID NO: 29975 - RNA, 21 nt, Artificial Sequence
  Chemically synthesized
ccaccucuacauccugcucua

SEQ ID NO: 29976 - RNA, 21 nt, Artificial Sequence
  Chemically synthesized
ggaaaagucucgccuuauguu

SEQ ID NO: 29977 - RNA, 21 nt, Artificial Sequence
  Chemically synthesized
gaaauccgaaauaccacccug

SEQ ID NO: 29978 - RNA, 21 nt, Artificial Sequence
  Chemically synthesized
agaaauccgaaauaccacccu

SEQ ID NO: 29979 - RNA, 21 nt, Artificial Sequence
  Chemically synthesized
caauuugugcggcuacgggau

SEQ ID NO: 29980 - RNA, 21 nt, Artificial Sequence
  Chemically synthesized
gaacaauuugugcggcuacgg

SEQ ID NO: 29981 - RNA, 21 nt, Artificial Sequence
  Chemically synthesized
agagcgagaggaccauguguu

SEQ ID NO: 29982 - RNA, 21 nt, Artificial Sequence
  Chemically synthesized
cucaccucuguucuuccuauu

SEQ ID NO: 29983 - RNA, 21 nt, Artificial Sequence
  Chemically synthesized
caccauuaugagaacuucuag

SEQ ID NO: 29984 - RNA, 21 nt, Artificial Sequence
  Chemically synthesized
aguguucuguaagaagaucua

SEQ ID NO: 29985 - RNA, 21 nt, Artificial Sequence
  Chemically synthesized
cccuuuugccuccauccucaa

SEQ ID NO: 29986 - RNA, 21 nt, Artificial Sequence
  Chemically synthesized
ggcauaaguuugaggugucag

SEQ ID NO: 29987 - RNA, 21 nt, Artificial Sequence
  Chemically synthesized
cuggccaucauguaugucuuu

SEQ ID NO: 29988 - RNA, 21 nt, Artificial Sequence
  Chemically synthesized
ggcaagaagguaacgucauuc

SEQ ID NO: 29989 - RNA, 21 nt, Artificial Sequence
  Chemically synthesized
cgacauugagacugaguugac

SEQ ID NO: 29990 - RNA, 21 nt, Artificial Sequence
  Chemically synthesized
cgagaucuccaacaacugccu

SEQ ID NO: 29991 - RNA, 21 nt, Artificial Sequence
  Chemically synthesized
gcuguuuaacuuggaggaaga

SEQ ID NO: 29992 - RNA, 21 nt, Artificial Sequence
  Chemically synthesized
ccucuguuguucgugacuauu

SEQ ID NO: 29993 - RNA, 21 nt, Artificial Sequence
  Chemically synthesized
caaugucuuugucuggcauaa

SEQ ID NO: 29994 - RNA, 21 nt, Artificial Sequence
  Chemically synthesized
cggagcaaugacacuguacug

SEQ ID NO: 29995 - RNA, 21 nt, Artificial Sequence
  Chemically synthesized
ucccggagcaaugacacugua

SEQ ID NO: 29996 - RNA, 21 nt, Artificial Sequence
  Chemically synthesized
ccauuaugagaacuucuaggc

SEQ ID NO: 29997 - RNA, 21 nt, Artificial Sequence
  Chemically synthesized
gcacaucuacaucacccagcu

SEQ ID NO: 29998 - RNA, 21 nt, Artificial Sequence
  Chemically synthesized
caggaguggcauaaguuugag

SEQ ID NO: 29999 - RNA, 21 nt, Artificial Sequence
  Chemically synthesized
cauguaugucuuugccuccca

SEQ ID NO: 30000 - RNA, 21 nt, Artificial Sequence
  Chemically synthesized
ggccaucauguaugucuuugc

SEQ ID NO: 30001 - RNA, 21 nt, Artificial Sequence
  Chemically synthesized
ccuggccaucauguaugucuu

SEQ ID NO: 30002 - RNA, 21 nt, Artificial Sequence
  Chemically synthesized
ccagcaucucuuucauguucu

SEQ ID NO: 30003 - RNA, 21 nt, Artificial Sequence
  Chemically synthesized
aggaaaagucucgccuuaugu

SEQ ID NO: 30004 - RNA, 21 nt, Artificial Sequence
  Chemically synthesized
ugaccuggugcugcuguuuaa

SEQ ID NO: 30005 - RNA, 21 nt, Artificial Sequence
  Chemically synthesized
ccggaugagaaauuucaagag

SEQ ID NO: 30006 - RNA, 21 nt, Artificial Sequence
  Chemically synthesized
cuguuguucgugacuauuuug

SEQ ID NO: 30007 - RNA, 21 nt, Artificial Sequence
  Chemically synthesized
cauguguugguugaagaugug

SEQ ID NO: 30008 - RNA, 21 nt, Artificial Sequence
  Chemically synthesized
gcgauuugaugggugguacaa

SEQ ID NO: 30009 - RNA, 21 nt, Artificial Sequence
  Chemically synthesized
gcauaaguuugaggugucagu

SEQ ID NO: 30010 - RNA, 21 nt, Artificial Sequence
  Chemically synthesized
uggcauaaguuugagguguca

SEQ ID NO: 30011 - RNA, 21 nt, Artificial Sequence
  Chemically synthesized
guggcauaaguuugagguguc

SEQ ID NO: 30012 - RNA, 21 nt, Artificial Sequence
  Chemically synthesized
gggcuuugaguacaagucagg

SEQ ID NO: 30013 - RNA, 21 nt, Artificial Sequence
  Chemically synthesized
guaacgucauuccagcccuug

SEQ ID NO: 30014 - RNA, 21 nt, Artificial Sequence
  Chemically synthesized
uggcaagaagguaacgucauu

SEQ ID NO: 30015 - RNA, 21 nt, Artificial Sequence
  Chemically synthesized
cugcuguuuaacuuggaggaa

SEQ ID NO: 30016 - RNA, 21 nt, Artificial Sequence
  Chemically synthesized
cgugacuauuuugagggcagu

SEQ ID NO: 30017 - RNA, 21 nt, Artificial Sequence
  Chemically synthesized
aaugucuuugucuggcauaaa

SEQ ID NO: 30018 - RNA, 21 nt, Artificial Sequence
  Chemically synthesized
ugcagcccaaugucuuugucu

SEQ ID NO: 30019 - RNA, 21 nt, Artificial Sequence
  Chemically synthesized
caaagugcugaagauguggau

SEQ ID NO: 30020 - RNA, 21 nt, Artificial Sequence
  Chemically synthesized
ccuggcgucuacaugagaaau

SEQ ID NO: 30021 - RNA, 21 nt, Artificial Sequence
  Chemically synthesized
ccauuuacagaaacccacucg

SEQ ID NO: 30022 - RNA, 21 nt, Artificial Sequence
  Chemically synthesized
gggacuagagugagaaguagg

SEQ ID NO: 30023 - RNA, 21 nt, Artificial Sequence
  Chemically synthesized
ccaguugagcagagguuugag

SEQ ID NO: 30024 - RNA, 21 nt, Artificial Sequence
  Chemically synthesized
ugggaggugcagcgauuugau

SEQ ID NO: 30025 - RNA, 21 nt, Artificial Sequence
  Chemically synthesized
ugaguacaagucagggcagug

SEQ ID NO: 30026 - RNA, 21 nt, Artificial Sequence
  Chemically synthesized
gccaucauguaugucuuugcc

SEQ ID NO: 30027 - RNA, 21 nt, Artificial Sequence
  Chemically synthesized
agaaguauuacuggugguucu

SEQ ID NO: 30028 - RNA, 21 nt, Artificial Sequence
  Chemically synthesized
caagaagguaacgucauucca

SEQ ID NO: 30029 - RNA, 21 nt, Artificial Sequence
  Chemically synthesized
gcaagaagguaacgucauucc

SEQ ID NO: 30030 - RNA, 21 nt, Artificial Sequence
  Chemically synthesized
ggugcugcuguuuaacuugga

SEQ ID NO: 30031 - RNA, 21 nt, Artificial Sequence
  Chemically synthesized
caacuucguccuguccagcaa

SEQ ID NO: 30032 - RNA, 21 nt, Artificial Sequence
  Chemically synthesized
ggaugagaaauuucaagaggc

SEQ ID NO: 30033 - RNA, 21 nt, Artificial Sequence
  Chemically synthesized
ucuguuguucgugacuauuuu

SEQ ID NO: 30034 - RNA, 21 nt, Artificial Sequence
  Chemically synthesized
cucuguuguucgugacuauuu

SEQ ID NO: 30035 - RNA, 21 nt, Artificial Sequence
  Chemically synthesized
cugcagcccaaugucuuuguc

SEQ ID NO: 30036 - RNA, 21 nt, Artificial Sequence
  Chemically synthesized
ccggagcaaugacacuguacu

SEQ ID NO: 30037 - RNA, 21 nt, Artificial Sequence
  Chemically synthesized
ugguugaagaugugcgggauu

SEQ ID NO: 30038 - RNA, 21 nt, Artificial Sequence
  Chemically synthesized
cuauguaugcaaugcuccuca

SEQ ID NO: 30039 - RNA, 21 nt, Artificial Sequence
  Chemically synthesized
agcuaugcagauggcguguac

SEQ ID NO: 30040 - RNA, 21 nt, Artificial Sequence
  Chemically synthesized
cgauuugaugggugguacaac

SEQ ID NO: 30041 - RNA, 21 nt, Artificial Sequence
  Chemically synthesized
gccaaguguucuguaagaaga

SEQ ID NO: 30042 - RNA, 21 nt, Artificial Sequence
  Chemically synthesized
cucaucauccaugguagcuuu

SEQ ID NO: 30043 - RNA, 21 nt, Artificial Sequence
  Chemically synthesized
caccucuacauccugcucuau

SEQ ID NO: 30044 - RNA, 21 nt, Artificial Sequence
  Chemically synthesized
guccucacagucuuacacagu

SEQ ID NO: 30045 - RNA, 21 nt, Artificial Sequence
  Chemically synthesized
ucguccucacagucuuacaca

SEQ ID NO: 30046 - RNA, 21 nt, Artificial Sequence
  Chemically synthesized
uccuacaucuugcucaccaug

SEQ ID NO: 30047 - RNA, 21 nt, Artificial Sequence
  Chemically synthesized
ggagguuuggcaagaagguaa

SEQ ID NO: 30048 - RNA, 21 nt, Artificial Sequence
  Chemically synthesized
acauugagacugaguugacac

SEQ ID NO: 30049 - RNA, 21 nt, Artificial Sequence
  Chemically synthesized
cauguacgacuuugaugggaa

SEQ ID NO: 30050 - RNA, 21 nt, Artificial Sequence
  Chemically synthesized
guggucuucaugaaaggcucu

SEQ ID NO: 30051 - RNA, 21 nt, Artificial Sequence
  Chemically synthesized
gguggucuucaugaaaggcuc

SEQ ID NO: 30052 - RNA, 21 nt, Artificial Sequence
  Chemically synthesized
cuguuuaacuuggaggaagag

SEQ ID NO: 30053 - RNA, 21 nt, Artificial Sequence
  Chemically synthesized
ccuggugcugcuguuuaacuu

SEQ ID NO: 30054 - RNA, 21 nt, Artificial Sequence
  Chemically synthesized
gaccuggugcugcuguuuaac

SEQ ID NO: 30055 - RNA, 21 nt, Artificial Sequence
  Chemically synthesized
ucgugacuauuuugagggcag

SEQ ID NO: 30056 - RNA, 21 nt, Artificial Sequence
  Chemically synthesized
ccaguagucucccuuccaaau

SEQ ID NO: 30057 - RNA, 21 nt, Artificial Sequence
  Chemically synthesized
gcaugucuguauguguguugg

SEQ ID NO: 30058 - RNA, 21 nt, Artificial Sequence
  Chemically synthesized
agcugaccugacaaguacuau

SEQ ID NO: 30059 - RNA, 21 nt, Artificial Sequence
  Chemically synthesized
ccucaccucuguucuuccuau

SEQ ID NO: 30060 - RNA, 21 nt, Artificial Sequence
  Chemically synthesized
agcgauuugaugggugguaca

SEQ ID NO: 30061 - RNA, 21 nt, Artificial Sequence
  Chemically synthesized
ugccaaguguucuguaagaag

SEQ ID NO: 30062 - RNA, 21 nt, Artificial Sequence
  Chemically synthesized
agccagcaucucuuucauguu

SEQ ID NO: 30063 - RNA, 21 nt, Artificial Sequence
  Chemically synthesized
agcgacauugagacugaguug

SEQ ID NO: 30064 - RNA, 21 nt, Artificial Sequence
  Chemically synthesized
ugacaugggaagauuuucacu

SEQ ID NO: 30065 - RNA, 21 nt, Artificial Sequence
  Chemically synthesized
cugacaugggaagauuuucac

SEQ ID NO: 30066 - RNA, 21 nt, Artificial Sequence
  Chemically synthesized
auguacgacuuugaugggaau

SEQ ID NO: 30067 - RNA, 21 nt, Artificial Sequence
  Chemically synthesized
gcauguacgacuuugauggga

SEQ ID NO: 30068 - RNA, 21 nt, Artificial Sequence
  Chemically synthesized
cgcauguacgacuuugauggg

SEQ ID NO: 30069 - RNA, 21 nt, Artificial Sequence
  Chemically synthesized
gcugcuguuuaacuuggagga

SEQ ID NO: 30070 - RNA, 21 nt, Artificial Sequence
  Chemically synthesized
cuggugcugcuguuuaacuug

SEQ ID NO: 30071 - RNA, 21 nt, Artificial Sequence
  Chemically synthesized
guaugaccuggugcugcuguu

SEQ ID NO: 30072 - RNA, 21 nt, Artificial Sequence
  Chemically synthesized
auggaagcuuuggaauggcaa

SEQ ID NO: 30073 - RNA, 21 nt, Artificial Sequence
  Chemically synthesized
gagaaauuucaagaggcucca

SEQ ID NO: 30074 - RNA, 21 nt, Artificial Sequence
  Chemically synthesized
cggaugagaaauuucaagagg

SEQ ID NO: 30075 - RNA, 21 nt, Artificial Sequence
  Chemically synthesized
uccggaugagaaauuucaaga

SEQ ID NO: 30076 - RNA, 21 nt, Artificial Sequence
  Chemically synthesized
gacuauuuugagggcagugga

SEQ ID NO: 30077 - RNA, 21 nt, Artificial Sequence
  Chemically synthesized
gugacuauuuugagggcagug

SEQ ID NO: 30078 - RNA, 21 nt, Artificial Sequence
  Chemically synthesized
accaucguccuugaacaauuu

SEQ ID NO: 30079 - RNA, 21 nt, Artificial Sequence
  Chemically synthesized
gcaaugacacuguacuggagg

SEQ ID NO: 30080 - RNA, 21 nt, Artificial Sequence
  Chemically synthesized
gagcaaugacacuguacugga

SEQ ID NO: 30081 - RNA, 21 nt, Artificial Sequence
  Chemically synthesized
caucgccaccuaccagaacau

SEQ ID NO: 30082 - RNA, 21 nt, Artificial Sequence
  Chemically synthesized
gggucuucuuuggcuaucacg

SEQ ID NO: 30083 - RNA, 21 nt, Artificial Sequence
  Chemically synthesized
gcagcgauuugauggguggua

SEQ ID NO: 30084 - RNA, 21 nt, Artificial Sequence
  Chemically synthesized
ggucuucaagucauccgucag

SEQ ID NO: 30085 - RNA, 21 nt, Artificial Sequence
  Chemically synthesized
gaggugucaguguuaguggga

SEQ ID NO: 30086 - RNA, 21 nt, Artificial Sequence
  Chemically synthesized
cagaugugccagauacccaaa

SEQ ID NO: 30087 - RNA, 21 nt, Artificial Sequence
  Chemically synthesized
cagcaucucuuucauguucuc

SEQ ID NO: 30088 - RNA, 21 nt, Artificial Sequence
  Chemically synthesized
ggaacugacaugggaagauuu

SEQ ID NO: 30089 - RNA, 21 nt, Artificial Sequence
  Chemically synthesized
gugcugcuguuuaacuuggag

SEQ ID NO: 30090 - RNA, 21 nt, Artificial Sequence
  Chemically synthesized
agaaauuucaagaggcuccag

SEQ ID NO: 30091 - RNA, 21 nt, Artificial Sequence
  Chemically synthesized
gaugagaaauuucaagaggcu

SEQ ID NO: 30092 - RNA, 21 nt, Artificial Sequence
  Chemically synthesized
cuauuuugagggcaguggauu

SEQ ID NO: 30093 - RNA, 21 nt, Artificial Sequence
  Chemically synthesized
cucccucuguuguucgugacu

SEQ ID NO: 30094 - RNA, 21 nt, Artificial Sequence
  Chemically synthesized
caagaaggagauugaagaaau

SEQ ID NO: 30095 - RNA, 21 nt, Artificial Sequence
  Chemically synthesized
ccaucguccuugaacaauuug

SEQ ID NO: 30096 - RNA, 21 nt, Artificial Sequence
  Chemically synthesized
gguugaagaugugcgggauuu

SEQ ID NO: 30097 - RNA, 21 nt, Artificial Sequence
  Chemically synthesized
cuacaaagugcugaagaugug

SEQ ID NO: 30098 - RNA, 21 nt, Artificial Sequence
  Chemically synthesized
gaccuuagcaacaccaucuca

SEQ ID NO: 30099 - RNA, 21 nt, Artificial Sequence
  Chemically synthesized
caacaaccucauggagcacag

SEQ ID NO: 30100 - RNA, 21 nt, Artificial Sequence
  Chemically synthesized
cacaucuacaucacccagcug

SEQ ID NO: 30101 - RNA, 21 nt, Artificial Sequence
  Chemically synthesized
ccuuuugccuccauccucaaa

SEQ ID NO: 30102 - RNA, 21 nt, Artificial Sequence
  Chemically synthesized
ucaucauccaugguagcuuug

SEQ ID NO: 30103 - RNA, 21 nt, Artificial Sequence
  Chemically synthesized
gaauguguaccuguucuccau

SEQ ID NO: 30104 - RNA, 21 nt, Artificial Sequence
  Chemically synthesized
gagguuuggcaagaagguaac

SEQ ID NO: 30105 - RNA, 21 nt, Artificial Sequence
  Chemically synthesized
cggagguuuggcaagaaggua

SEQ ID NO: 30106 - RNA, 21 nt, Artificial Sequence
  Chemically synthesized
gcgacauugagacugaguuga

SEQ ID NO: 30107 - RNA, 21 nt, Artificial Sequence
  Chemically synthesized
ggacaaggaggaacugacaug

SEQ ID NO: 30108 - RNA, 21 nt, Artificial Sequence
  Chemically synthesized
ucccucuguuguucgugacua

SEQ ID NO: 30109 - RNA, 21 nt, Artificial Sequence
  Chemically synthesized
uugguugaagaugugcgggau

SEQ ID NO: 30110 - RNA, 21 nt, Artificial Sequence
  Chemically synthesized
ggaccauguguugguugaaga

SEQ ID NO: 30111 - RNA, 21 nt, Artificial Sequence
  Chemically synthesized
acgugcuuucagaccugguga

SEQ ID NO: 30112 - RNA, 21 nt, Artificial Sequence
  Chemically synthesized
cagcgauuugaugggugguac

SEQ ID NO: 30113 - RNA, 21 nt, Artificial Sequence
  Chemically synthesized
ugaguggcuggcugacaucau

SEQ ID NO: 30114 - RNA, 21 nt, Artificial Sequence
  Chemically synthesized
guugaagaugugcgggauuuc

SEQ ID NO: 30115 - RNA, 21 nt, Artificial Sequence
  Chemically synthesized
agaacaucgcuguguaugagu

SEQ ID NO: 30116 - RNA, 21 nt, Artificial Sequence
  Chemically synthesized
accucuguucuuccuauuucu

SEQ ID NO: 30117 - RNA, 21 nt, Artificial Sequence
  Chemically synthesized
auccgucagcugccaaguguu

SEQ ID NO: 30118 - RNA, 21 nt, Artificial Sequence
  Chemically synthesized
cucuauguccugcucaucauc

SEQ ID NO: 30119 - RNA, 21 nt, Artificial Sequence
  Chemically synthesized
ugucuuugccucccaccacuu

SEQ ID NO: 30120 - RNA, 21 nt, Artificial Sequence
  Chemically synthesized
gccagcaucucuuucauguuc

SEQ ID NO: 30121 - RNA, 21 nt, Artificial Sequence
  Chemically synthesized
aaggaggaacugacaugggaa

SEQ ID NO: 30122 - RNA, 21 nt, Artificial Sequence
  Chemically synthesized
ccaagaaggagauugaagaaa

SEQ ID NO: 30123 - RNA, 21 nt, Artificial Sequence
  Chemically synthesized
cagcaucuccucagaguucgu

SEQ ID NO: 30124 - RNA, 21 nt, Artificial Sequence
  Chemically synthesized
cccaauaccuauguaugcaau

SEQ ID NO: 30125 - RNA, 21 nt, Artificial Sequence
  Chemically synthesized
gcccaauaccuauguaugcaa

SEQ ID NO: 30126 - RNA, 21 nt, Artificial Sequence
  Chemically synthesized
acaaccucauggagcacagau

SEQ ID NO: 30127 - RNA, 21 nt, Artificial Sequence
  Chemically synthesized
ccucuguucuuccuauuucug

SEQ ID NO: 30128 - RNA, 21 nt, Artificial Sequence
  Chemically synthesized
acagaugugccagauacccaa

SEQ ID NO: 30129 - RNA, 21 nt, Artificial Sequence
  Chemically synthesized
gggucuccauuuugggacauu

SEQ ID NO: 30130 - RNA, 21 nt, Artificial Sequence
  Chemically synthesized
gaggaccauguguugguugaa

SEQ ID NO: 30131 - RNA, 21 nt, Artificial Sequence
  Chemically synthesized
ccaucuaugguuccucgcauu

SEQ ID NO: 30132 - RNA, 21 nt, Artificial Sequence
  Chemically synthesized
acccuggcccaauaccuaugu

SEQ ID NO: 30133 - RNA, 21 nt, Artificial Sequence
  Chemically synthesized
aacuaauuucacccaagguuu

SEQ ID NO: 30134 - RNA, 21 nt, Artificial Sequence
  Chemically synthesized
ccacaccucaccucuguucuu

SEQ ID NO: 30135 - RNA, 21 nt, Artificial Sequence
  Chemically synthesized
cugccaaguguucuguaagaa

SEQ ID NO: 30136 - RNA, 21 nt, Artificial Sequence
  Chemically synthesized
aaguuugaggugucaguguua

SEQ ID NO: 30137 - RNA, 21 nt, Artificial Sequence
  Chemically synthesized
agugugggccauguggugaau

SEQ ID NO: 30138 - RNA, 21 nt, Artificial Sequence
  Chemically synthesized
gaagauguggaugcacugcug

SEQ ID NO: 30139 - RNA, 21 nt, Artificial Sequence
  Chemically synthesized
guagucucccuuccaaauaaa

SEQ ID NO: 30140 - RNA, 21 nt, Artificial Sequence
  Chemically synthesized
cuaauuucacccaagguuuua

SEQ ID NO: 30141 - RNA, 21 nt, Artificial Sequence
  Chemically synthesized
agccauuuacagaaacccacu

SEQ ID NO: 30142 - RNA, 21 nt, Artificial Sequence
  Chemically synthesized
gaacugacaugggaagauuuu

SEQ ID NO: 30143 - RNA, 21 nt, Artificial Sequence
  Chemically synthesized
aggaacugacaugggaagauu

SEQ ID NO: 30144 - RNA, 21 nt, Artificial Sequence
  Chemically synthesized
gcugagauccuucaucgagau

SEQ ID NO: 30145 - RNA, 21 nt, Artificial Sequence
  Chemically synthesized
ggacauccugguggucuucau

SEQ ID NO: 30146 - RNA, 21 nt, Artificial Sequence
  Chemically synthesized
gcccuguacaaccaggacuua

SEQ ID NO: 30147 - RNA, 21 nt, Artificial Sequence
  Chemically synthesized
ggcaucuuagaacccucccua

SEQ ID NO: 30148 - RNA, 21 nt, Artificial Sequence
  Chemically synthesized
gaaacaaaucucagaagacaa

SEQ ID NO: 30149 - RNA, 21 nt, Artificial Sequence
  Chemically synthesized
uagggacuagagugagaagua

SEQ ID NO: 30150 - RNA, 21 nt, Artificial Sequence
  Chemically synthesized
ggaaaaggccugucagcucau

SEQ ID NO: 30151 - RNA, 21 nt, Artificial Sequence
  Chemically synthesized
cuguaagaagaucuacuucau

SEQ ID NO: 30152 - RNA, 21 nt, Artificial Sequence
  Chemically synthesized
uacuacgccuuugccgcacau

SEQ ID NO: 30153 - RNA, 21 nt, Artificial Sequence
  Chemically synthesized
ggugcaacaguucaagcgcuu

SEQ ID NO: 30154 - RNA, 21 nt, Artificial Sequence
  Chemically synthesized
ccaggauaugaucugucccuc

SEQ ID NO: 30155 - RNA, 21 nt, Artificial Sequence
  Chemically synthesized
cccuggcccaauaccuaugua

SEQ ID NO: 30156 - RNA, 21 nt, Artificial Sequence
  Chemically synthesized
caacuaauuucacccaagguu

SEQ ID NO: 30157 - RNA, 21 nt, Artificial Sequence
  Chemically synthesized
gccauuuacagaaacccacuc

SEQ ID NO: 30158 - RNA, 21 nt, Artificial Sequence
  Chemically synthesized
ggacccauggcaagccauuua

SEQ ID NO: 30159 - RNA, 21 nt, Artificial Sequence
  Chemically synthesized
ccaccaggaguggcauaaguu

SEQ ID NO: 30160 - RNA, 21 nt, Artificial Sequence
  Chemically synthesized
cuguaccuugauggaccauuu

SEQ ID NO: 30161 - RNA, 21 nt, Artificial Sequence
  Chemically synthesized
cagggcuuugaguacaaguca

SEQ ID NO: 30162 - RNA, 21 nt, Artificial Sequence
  Chemically synthesized
ccagggcuuugaguacaaguc

SEQ ID NO: 30163 - RNA, 21 nt, Artificial Sequence
  Chemically synthesized
ccaugguagcuuugcccugau

SEQ ID NO: 30164 - RNA, 21 nt, Artificial Sequence
  Chemically synthesized
ccagaaguauuacuggugguu

SEQ ID NO: 30165 - RNA, 21 nt, Artificial Sequence
  Chemically synthesized
cucuuucauguucuccuacau

SEQ ID NO: 30166 - RNA, 21 nt, Artificial Sequence
  Chemically synthesized
ggaggaacugacaugggaaga

SEQ ID NO: 30167 - RNA, 21 nt, Artificial Sequence
  Chemically synthesized
ccacagaaggucaacuucguc

SEQ ID NO: 30168 - RNA, 21 nt, Artificial Sequence
  Chemically synthesized
cccaaugucuuugucuggcau

SEQ ID NO: 30169 - RNA, 21 nt, Artificial Sequence
  Chemically synthesized
ggagauugaagaaauccgaaa

SEQ ID NO: 30170 - RNA, 21 nt, Artificial Sequence
  Chemically synthesized
ugaccgcuacugguuugagaa

SEQ ID NO: 30171 - RNA, 21 nt, Artificial Sequence
  Chemically synthesized
gaccauguguugguugaagau

SEQ ID NO: 30172 - RNA, 21 nt, Artificial Sequence
  Chemically synthesized
ccagcuuccugcagaaaacac

SEQ ID NO: 30173 - RNA, 21 nt, Artificial Sequence
  Chemically synthesized
cgaguuccucaacauucgcau

SEQ ID NO: 30174 - RNA, 21 nt, Artificial Sequence
  Chemically synthesized
gcaaaugccuugcaggaggua

SEQ ID NO: 30175 - RNA, 21 nt, Artificial Sequence
  Chemically synthesized
gaauguggaaaaggccuguca

SEQ ID NO: 30176 - RNA, 21 nt, Artificial Sequence
  Chemically synthesized
cagaagguucugaaccggagu

SEQ ID NO: 30177 - RNA, 21 nt, Artificial Sequence
  Chemically synthesized
ccuggccucuuccaugaugau

SEQ ID NO: 30178 - RNA, 21 nt, Artificial Sequence
  Chemically synthesized
ccugcgagaaaccuuccucaa

SEQ ID NO: 30179 - RNA, 21 nt, Artificial Sequence
  Chemically synthesized
cacagcagccagcaucucuuu

SEQ ID NO: 30180 - RNA, 21 nt, Artificial Sequence
  Chemically synthesized
ggauuccaggacaaggaggaa

SEQ ID NO: 30181 - RNA, 21 nt, Artificial Sequence
  Chemically synthesized
cugacaaggauggcaauggcu

SEQ ID NO: 30182 - RNA, 21 nt, Artificial Sequence
  Chemically synthesized
ggaggcauggaagcuuuggaa

SEQ ID NO: 30183 - RNA, 21 nt, Artificial Sequence
  Chemically synthesized
gaaugggcuguucuccaagaa

SEQ ID NO: 30184 - RNA, 21 nt, Artificial Sequence
  Chemically synthesized
gcaccaucguccuugaacaau

SEQ ID NO: 30185 - RNA, 21 nt, Artificial Sequence
  Chemically synthesized
agcaccaucguccuugaacaa

SEQ ID NO: 30186 - RNA, 21 nt, Artificial Sequence
  Chemically synthesized
cgagaggaccauguguugguu

SEQ ID NO: 30187 - RNA, 21 nt, Artificial Sequence
  Chemically synthesized
cccagcuuccugcagaaaaca

SEQ ID NO: 30188 - RNA, 21 nt, Artificial Sequence
  Chemically synthesized
ugcccagcuuccugcagaaaa

SEQ ID NO: 30189 - RNA, 21 nt, Artificial Sequence
  Chemically synthesized
ccaauaccuauguaugcaaug

SEQ ID NO: 30190 - RNA, 21 nt, Artificial Sequence
  Chemically synthesized
ccuuagcaacaccaucucaag

SEQ ID NO: 30191 - RNA, 21 nt, Artificial Sequence
  Chemically synthesized
acccaagguuuuaagcacguu

SEQ ID NO: 30192 - RNA, 21 nt, Artificial Sequence
  Chemically synthesized
ccgagaccuuagcaacaccau

SEQ ID NO: 30193 - RNA, 21 nt, Artificial Sequence
  Chemically synthesized
gcaucuuagaacccucccuac

SEQ ID NO: 30194 - RNA, 21 nt, Artificial Sequence
  Chemically synthesized
ccauagucagucaccaugugu

SEQ ID NO: 30195 - RNA, 21 nt, Artificial Sequence
  Chemically synthesized
gccauagucagucaccaugug

SEQ ID NO: 30196 - RNA, 21 nt, Artificial Sequence
  Chemically synthesized
agcugccaaguguucuguaag

SEQ ID NO: 30197 - RNA, 21 nt, Artificial Sequence
  Chemically synthesized
agggucuccauuuugggacau

SEQ ID NO: 30198 - RNA, 21 nt, Artificial Sequence
  Chemically synthesized
agggccuacuacuacgccuuu

SEQ ID NO: 30199 - RNA, 21 nt, Artificial Sequence
  Chemically synthesized
ugggaagauuuucacuucaug

SEQ ID NO: 30200 - RNA, 21 nt, Artificial Sequence
  Chemically synthesized
ccugguggucuucaugaaagg

SEQ ID NO: 30201 - RNA, 21 nt, Artificial Sequence
  Chemically synthesized
gcccaaugucuuugucuggca

SEQ ID NO: 30202 - RNA, 21 nt, Artificial Sequence
  Chemically synthesized
cuggucgcuguuaucaacauu

SEQ ID NO: 30203 - RNA, 21 nt, Artificial Sequence
  Chemically synthesized
caccaucguccuugaacaauu

SEQ ID NO: 30204 - RNA, 21 nt, Artificial Sequence
  Chemically synthesized
cccuguacaaccaggacuuau

SEQ ID NO: 30205 - RNA, 21 nt, Artificial Sequence
  Chemically synthesized
ccuggcccaauaccuauguau

SEQ ID NO: 30206 - RNA, 21 nt, Artificial Sequence
  Chemically synthesized
acguucuuucaucagacccug

SEQ ID NO: 30207 - RNA, 21 nt, Artificial Sequence
  Chemically synthesized
cgagaccuuagcaacaccauc

SEQ ID NO: 30208 - RNA, 21 nt, Artificial Sequence
  Chemically synthesized
ggccauagucagucaccaugu

SEQ ID NO: 30209 - RNA, 21 nt, Artificial Sequence
  Chemically synthesized
gggugguacaacaaccucaug

SEQ ID NO: 30210 - RNA, 21 nt, Artificial Sequence
  Chemically synthesized
ugccucagccuucucugauuu

SEQ ID NO: 30211 - RNA, 21 nt, Artificial Sequence
  Chemically synthesized
ugggugguacaacaaccucau

SEQ ID NO: 30212 - RNA, 21 nt, Artificial Sequence
  Chemically synthesized
ucagcucaucaacaggcagga

SEQ ID NO: 30213 - RNA, 21 nt, Artificial Sequence
  Chemically synthesized
ccucaggaccacuaugcugua

SEQ ID NO: 30214 - RNA, 21 nt, Artificial Sequence
  Chemically synthesized
guucuguaagaagaucuacuu

SEQ ID NO: 30215 - RNA, 21 nt, Artificial Sequence
  Chemically synthesized
ggcucuagcauggacacuucu

SEQ ID NO: 30216 - RNA, 21 nt, Artificial Sequence
  Chemically synthesized
gcucuauguccugcucaucau

SEQ ID NO: 30217 - RNA, 21 nt, Artificial Sequence
  Chemically synthesized
ggccauguggugaauguguac

SEQ ID NO: 30218 - RNA, 21 nt, Artificial Sequence
  Chemically synthesized
caagcgcuucauugagaacua

SEQ ID NO: 30219 - RNA, 21 nt, Artificial Sequence
  Chemically synthesized
agaaguuccaacgcagcuguc

SEQ ID NO: 30220 - RNA, 21 nt, Artificial Sequence
  Chemically synthesized
gggaagauuuucacuucaugc

SEQ ID NO: 30221 - RNA, 21 nt, Artificial Sequence
  Chemically synthesized
augggaagauuuucacuucau

SEQ ID NO: 30222 - RNA, 21 nt, Artificial Sequence
  Chemically synthesized
ccugaggaaaagucucgccuu

SEQ ID NO: 30223 - RNA, 21 nt, Artificial Sequence
  Chemically synthesized
aggagauugaagaaauccgaa

SEQ ID NO: 30224 - RNA, 21 nt, Artificial Sequence
  Chemically synthesized
ccgcuacugguuugagaacac

SEQ ID NO: 30225 - RNA, 21 nt, Artificial Sequence
  Chemically synthesized
ugcccuguacaaccaggacuu

SEQ ID NO: 30226 - RNA, 21 nt, Artificial Sequence
  Chemically synthesized
ccacugaaguuuucccgcaca

SEQ ID NO: 30227 - RNA, 21 nt, Artificial Sequence
  Chemically synthesized
gccaucuaugguuccucgcau

SEQ ID NO: 30228 - RNA, 21 nt, Artificial Sequence
  Chemically synthesized
accuuagcaacaccaucucaa

SEQ ID NO: 30229 - RNA, 21 nt, Artificial Sequence
  Chemically synthesized
gccucagccuucucugauuuc

SEQ ID NO: 30230 - RNA, 21 nt, Artificial Sequence
  Chemically synthesized
guucgaccucaggaccacuau

SEQ ID NO: 30231 - RNA, 21 nt, Artificial Sequence
  Chemically synthesized
accuugauggaccauuuggag

SEQ ID NO: 30232 - RNA, 21 nt, Artificial Sequence
  Chemically synthesized
agcuguaccuugauggaccau

SEQ ID NO: 30233 - RNA, 21 nt, Artificial Sequence
  Chemically synthesized
cccagaaguauuacugguggu

SEQ ID NO: 30234 - RNA, 21 nt, Artificial Sequence
  Chemically synthesized
gggccauguggugaaugugua

SEQ ID NO: 30235 - RNA, 21 nt, Artificial Sequence
  Chemically synthesized
cuccauuuugggacauucuaa

SEQ ID NO: 30236 - RNA, 21 nt, Artificial Sequence
  Chemically synthesized
agcagccagcaucucuuucau

SEQ ID NO: 30237 - RNA, 21 nt, Artificial Sequence
  Chemically synthesized
ggauaugaucugucccucucc

SEQ ID NO: 30238 - RNA, 21 nt, Artificial Sequence
  Chemically synthesized
cuacaucagccaggauaugau

SEQ ID NO: 30239 - RNA, 21 nt, Artificial Sequence
  Chemically synthesized
gaggaacugacaugggaagau

SEQ ID NO: 30240 - RNA, 21 nt, Artificial Sequence
  Chemically synthesized
cuucaucgagaucuccaacaa

SEQ ID NO: 30241 - RNA, 21 nt, Artificial Sequence
  Chemically synthesized
caggaugcugagauccuucau

SEQ ID NO: 30242 - RNA, 21 nt, Artificial Sequence
  Chemically synthesized
ugaggaaaagucucgccuuau

SEQ ID NO: 30243 - RNA, 21 nt, Artificial Sequence
  Chemically synthesized
gacauccugguggucuucaug

SEQ ID NO: 30244 - RNA, 21 nt, Artificial Sequence
  Chemically synthesized
gccuccacagaaggucaacuu

SEQ ID NO: 30245 - RNA, 21 nt, Artificial Sequence
  Chemically synthesized
cggcuccggaugagaaauuuc

SEQ ID NO: 30246 - RNA, 21 nt, Artificial Sequence
  Chemically synthesized
gagauugaagaaauccgaaau

SEQ ID NO: 30247 - RNA, 21 nt, Artificial Sequence
  Chemically synthesized
cuguucuccaagaaggagauu

SEQ ID NO: 30248 - RNA, 21 nt, Artificial Sequence
  Chemically synthesized
ccauguguugguugaagaugu

SEQ ID NO: 30249 - RNA, 21 nt, Artificial Sequence
  Chemically synthesized
ggaacucaagugucuccagag

SEQ ID NO: 30250 - RNA, 21 nt, Artificial Sequence
  Chemically synthesized
gcagaaaacacucccggagua

SEQ ID NO: 30251 - RNA, 21 nt, Artificial Sequence
  Chemically synthesized
ugcagaaaacacucccggagu

SEQ ID NO: 30252 - RNA, 21 nt, Artificial Sequence
  Chemically synthesized
gcacguucuuucaucagaccc

SEQ ID NO: 30253 - RNA, 21 nt, Artificial Sequence
  Chemically synthesized
gagcauggaugcuggcaucuu

SEQ ID NO: 30254 - RNA, 21 nt, Artificial Sequence
  Chemically synthesized
gcuuccagacuucagaaacaa

SEQ ID NO: 30255 - RNA, 21 nt, Artificial Sequence
  Chemically synthesized
gugguacaacaaccucaugga

SEQ ID NO: 30256 - RNA, 21 nt, Artificial Sequence
  Chemically synthesized
accuuguuccagguggccaua

SEQ ID NO: 30257 - RNA, 21 nt, Artificial Sequence
  Chemically synthesized
cccaccauuaugagaacuucu

SEQ ID NO: 30258 - RNA, 21 nt, Artificial Sequence
  Chemically synthesized
ggacucacuucucccaccauu

SEQ ID NO: 30259 - RNA, 21 nt, Artificial Sequence
  Chemically synthesized
cacaucuucuuccugguccca

SEQ ID NO: 30260 - RNA, 21 nt, Artificial Sequence
  Chemically synthesized
gccucuuccaugaugaugggu

SEQ ID NO: 30261 - RNA, 21 nt, Artificial Sequence
  Chemically synthesized
uccauuuugggacauucuaau

SEQ ID NO: 30262 - RNA, 21 nt, Artificial Sequence
  Chemically synthesized
guggacuuccaucgccucauu

SEQ ID NO: 30263 - RNA, 21 nt, Artificial Sequence
  Chemically synthesized
gucuccauuuugggacauucu

SEQ ID NO: 30264 - RNA, 21 nt, Artificial Sequence
  Chemically synthesized
uuucauguucuccuacaucuu

SEQ ID NO: 30265 - RNA, 21 nt, Artificial Sequence
  Chemically synthesized
guucaagcgcuucauugagaa

SEQ ID NO: 30266 - RNA, 21 nt, Artificial Sequence
  Chemically synthesized
gugcaacaguucaagcgcuuc

SEQ ID NO: 30267 - RNA, 21 nt, Artificial Sequence
  Chemically synthesized
gucauuccagcccuugcuguu

SEQ ID NO: 30268 - RNA, 21 nt, Artificial Sequence
  Chemically synthesized
ccucauuuccaaggaugaguu

SEQ ID NO: 30269 - RNA, 21 nt, Artificial Sequence
  Chemically synthesized
uggccucauuuccaaggauga

SEQ ID NO: 30270 - RNA, 21 nt, Artificial Sequence
  Chemically synthesized
cgccuuauguuccgcauguac

SEQ ID NO: 30271 - RNA, 21 nt, Artificial Sequence
  Chemically synthesized
cugaggaaaagucucgccuua

SEQ ID NO: 30272 - RNA, 21 nt, Artificial Sequence
  Chemically synthesized
ggcucuccugaggaaaagucu

SEQ ID NO: 30273 - RNA, 21 nt, Artificial Sequence
  Chemically synthesized
acagaaggucaacuucguccu

SEQ ID NO: 30274 - RNA, 21 nt, Artificial Sequence
  Chemically synthesized
gaggcauggaagcuuuggaau

SEQ ID NO: 30275 - RNA, 21 nt, Artificial Sequence
  Chemically synthesized
ccagagcaucgugucugagaa

SEQ ID NO: 30276 - RNA, 21 nt, Artificial Sequence
  Chemically synthesized
ccggcuccggaugagaaauuu

SEQ ID NO: 30277 - RNA, 21 nt, Artificial Sequence
  Chemically synthesized
ggucgcuguuaucaacauuga

SEQ ID NO: 30278 - RNA, 21 nt, Artificial Sequence
  Chemically synthesized
cgugcuggucgcuguuaucaa

SEQ ID NO: 30279 - RNA, 21 nt, Artificial Sequence
  Chemically synthesized
cugguuugagaacaccaggaa

SEQ ID NO: 30280 - RNA, 21 nt, Artificial Sequence
  Chemically synthesized
cacugggcuugucucccauua

SEQ ID NO: 30281 - RNA, 21 nt, Artificial Sequence
  Chemically synthesized
ugagcacccaagccuacaaag

SEQ ID NO: 30282 - RNA, 21 nt, Artificial Sequence
  Chemically synthesized
caaucggaacucaagugucuc

SEQ ID NO: 30283 - RNA, 21 nt, Artificial Sequence
  Chemically synthesized
cagaaaacacucccggaguau

SEQ ID NO: 30284 - RNA, 21 nt, Artificial Sequence
  Chemically synthesized
caguagucucccuuccaaaua

SEQ ID NO: 30285 - RNA, 21 nt, Artificial Sequence
  Chemically synthesized
cacccaagguuuuaagcacgu

SEQ ID NO: 30286 - RNA, 21 nt, Artificial Sequence
  Chemically synthesized
gacccauggcaagccauuuac

SEQ ID NO: 30287 - RNA, 21 nt, Artificial Sequence
  Chemically synthesized
agacuucagaaacaaaucuca

SEQ ID NO: 30288 - RNA, 21 nt, Artificial Sequence
  Chemically synthesized
ccagacuucagaaacaaaucu

SEQ ID NO: 30289 - RNA, 21 nt, Artificial Sequence
  Chemically synthesized
gaaaccucugcuuccagacuu

SEQ ID NO: 30290 - RNA, 21 nt, Artificial Sequence
  Chemically synthesized
guggccauagucagucaccau

SEQ ID NO: 30291 - RNA, 21 nt, Artificial Sequence
  Chemically synthesized
cucccaccauuaugagaacuu

SEQ ID NO: 30292 - RNA, 21 nt, Artificial Sequence
  Chemically synthesized
ggcaugaccaagaauguggaa

SEQ ID NO: 30293 - RNA, 21 nt, Artificial Sequence
  Chemically synthesized
ccaggaguggcauaaguuuga

SEQ ID NO: 30294 - RNA, 21 nt, Artificial Sequence
  Chemically synthesized
ccaaagcuguaccuugaugga

SEQ ID NO: 30295 - RNA, 21 nt, Artificial Sequence
  Chemically synthesized
cccuauuauuuucaucauggg

SEQ ID NO: 30296 - RNA, 21 nt, Artificial Sequence
  Chemically synthesized
cucaucaccuuccugcgagaa

SEQ ID NO: 30297 - RNA, 21 nt, Artificial Sequence
  Chemically synthesized
ggucuccauuuugggacauuc

SEQ ID NO: 30298 - RNA, 21 nt, Artificial Sequence
  Chemically synthesized
ggaugcugagauccuucaucg

SEQ ID NO: 30299 - RNA, 21 nt, Artificial Sequence
  Chemically synthesized
ucgccuuauguuccgcaugua

SEQ ID NO: 30300 - RNA, 21 nt, Artificial Sequence
  Chemically synthesized
ggacauguuuguggaguccau

SEQ ID NO: 30301 - RNA, 21 nt, Artificial Sequence
  Chemically synthesized
gcaccuccuggagaccuuuuu

SEQ ID NO: 30302 - RNA, 21 nt, Artificial Sequence
  Chemically synthesized
gucgcuguuaucaacauugac

SEQ ID NO: 30303 - RNA, 21 nt, Artificial Sequence
  Chemically synthesized
ugguuugagaacaccaggaau

SEQ ID NO: 30304 - RNA, 21 nt, Artificial Sequence
  Chemically synthesized
uggugaccgcuacugguuuga

SEQ ID NO: 30305 - RNA, 21 nt, Artificial Sequence
  Chemically synthesized
ggacuuauccuggcuagagcu

SEQ ID NO: 30306 - RNA, 21 nt, Artificial Sequence
  Chemically synthesized
cuggcccaauaccuauguaug

SEQ ID NO: 30307 - RNA, 21 nt, Artificial Sequence
  Chemically synthesized
agaccuuagcaacaccaucuc

SEQ ID NO: 30308 - RNA, 21 nt, Artificial Sequence
  Chemically synthesized
ggcaagccauuuacagaaacc

SEQ ID NO: 30309 - RNA, 21 nt, Artificial Sequence
  Chemically synthesized
ugcuggcaucuuagaacccuc

SEQ ID NO: 30310 - RNA, 21 nt, Artificial Sequence
  Chemically synthesized
ucagaaacaaaucucagaaga

SEQ ID NO: 30311 - RNA, 21 nt, Artificial Sequence
  Chemically synthesized
uccagacuucagaaacaaauc

SEQ ID NO: 30312 - RNA, 21 nt, Artificial Sequence
  Chemically synthesized
ccuucucugauuucccaccuc

SEQ ID NO: 30313 - RNA, 21 nt, Artificial Sequence
  Chemically synthesized
accacuaugcuguacaucugu

SEQ ID NO: 30314 - RNA, 21 nt, Artificial Sequence
  Chemically synthesized
uggcucuagcauggacacuuc

SEQ ID NO: 30315 - RNA, 21 nt, Artificial Sequence
  Chemically synthesized
gcuguaccuugauggaccauu

SEQ ID NO: 30316 - RNA, 21 nt, Artificial Sequence
  Chemically synthesized
guauuacuggugguucuucca

SEQ ID NO: 30317 - RNA, 21 nt, Artificial Sequence
  Chemically synthesized
cucuuccaugaugaugggucu

SEQ ID NO: 30318 - RNA, 21 nt, Artificial Sequence
  Chemically synthesized
cucacagucuuacacagugug

SEQ ID NO: 30319 - RNA, 21 nt, Artificial Sequence
  Chemically synthesized
gagaaguuccaacgcagcugu

SEQ ID NO: 30320 - RNA, 21 nt, Artificial Sequence
  Chemically synthesized
caggauaugaucugucccucu

SEQ ID NO: 30321 - RNA, 21 nt, Artificial Sequence
  Chemically synthesized
cuccaacaacugccuguccaa

SEQ ID NO: 30322 - RNA, 21 nt, Artificial Sequence
  Chemically synthesized
gggaauggccucauuuccaag

SEQ ID NO: 30323 - RNA, 21 nt, Artificial Sequence
  Chemically synthesized
auguuccgcauguacgacuuu

SEQ ID NO: 30324 - RNA, 21 nt, Artificial Sequence
  Chemically synthesized
guccauguucucucuggcuga

SEQ ID NO: 30325 - RNA, 21 nt, Artificial Sequence
  Chemically synthesized
gaguccauguucucucuggcu

SEQ ID NO: 30326 - RNA, 21 nt, Artificial Sequence
  Chemically synthesized
ccaggacauguuuguggaguc

SEQ ID NO: 30327 - RNA, 21 nt, Artificial Sequence
  Chemically synthesized
ggaaugggcuguucuccaaga

SEQ ID NO: 30328 - RNA, 21 nt, Artificial Sequence
  Chemically synthesized
uucagcaccaucguccuugaa

SEQ ID NO: 30329 - RNA, 21 nt, Artificial Sequence
  Chemically synthesized
ccaggacuuauccuggcuaga

SEQ ID NO: 30330 - RNA, 21 nt, Artificial Sequence
  Chemically synthesized
ccuguacaaccaggacuuauc

SEQ ID NO: 30331 - RNA, 21 nt, Artificial Sequence
  Chemically synthesized
gccuacaaagugcugaagaug

SEQ ID NO: 30332 - RNA, 21 nt, Artificial Sequence
  Chemically synthesized
gugagcacccaagccuacaaa

SEQ ID NO: 30333 - RNA, 21 nt, Artificial Sequence
  Chemically synthesized
guauacaggauaccggccauu

SEQ ID NO: 30334 - RNA, 21 nt, Artificial Sequence
  Chemically synthesized
uggcaagccauuuacagaaac

SEQ ID NO: 30335 - RNA, 21 nt, Artificial Sequence
  Chemically synthesized
cagaaacaaaucucagaagac

SEQ ID NO: 30336 - RNA, 21 nt, Artificial Sequence
  Chemically synthesized
cagacuucagaaacaaaucuc

SEQ ID NO: 30337 - RNA, 21 nt, Artificial Sequence
  Chemically synthesized
cuuccagacuucagaaacaaa

SEQ ID NO: 30338 - RNA, 21 nt, Artificial Sequence
  Chemically synthesized
guacaucugugagcggcacuu

SEQ ID NO: 30339 - RNA, 21 nt, Artificial Sequence
  Chemically synthesized
cacuaugcuguacaucuguga

SEQ ID NO: 30340 - RNA, 21 nt, Artificial Sequence
  Chemically synthesized
ccacuaugcuguacaucugug

SEQ ID NO: 30341 - RNA, 21 nt, Artificial Sequence
  Chemically synthesized
ggaccacuaugcuguacaucu

SEQ ID NO: 30342 - RNA, 21 nt, Artificial Sequence
  Chemically synthesized
ggacauucuaaucccugagcc

SEQ ID NO: 30343 - RNA, 21 nt, Artificial Sequence
  Chemically synthesized
ccucacagucuuacacagugu

SEQ ID NO: 30344 - RNA, 21 nt, Artificial Sequence
  Chemically synthesized
ucaucaccuuccugcgagaaa

SEQ ID NO: 30345 - RNA, 21 nt, Artificial Sequence
  Chemically synthesized
cuccuacaucagccaggauau

SEQ ID NO: 30346 - RNA, 21 nt, Artificial Sequence
  Chemically synthesized
gccugaagucaucaaggaccu

SEQ ID NO: 30347 - RNA, 21 nt, Artificial Sequence
  Chemically synthesized
ggaggugccugaagucaucaa

SEQ ID NO: 30348 - RNA, 21 nt, Artificial Sequence
  Chemically synthesized
gaagauuuucacuucaugcug

SEQ ID NO: 30349 - RNA, 21 nt, Artificial Sequence
  Chemically synthesized
ggaagauuuucacuucaugcu

SEQ ID NO: 30350 - RNA, 21 nt, Artificial Sequence
  Chemically synthesized
uuccgcauguacgacuuugau

SEQ ID NO: 30351 - RNA, 21 nt, Artificial Sequence
  Chemically synthesized
uggcaauggcuaccuguccuu

SEQ ID NO: 30352 - RNA, 21 nt, Artificial Sequence
  Chemically synthesized
ccauguucucucuggcugaca

SEQ ID NO: 30353 - RNA, 21 nt, Artificial Sequence
  Chemically synthesized
gcuccggaugagaaauuucaa

SEQ ID NO: 30354 - RNA, 21 nt, Artificial Sequence
  Chemically synthesized
ggcuccggaugagaaauuuca

SEQ ID NO: 30355 - RNA, 21 nt, Artificial Sequence
  Chemically synthesized
gcagcccaaugucuuugucug

SEQ ID NO: 30356 - RNA, 21 nt, Artificial Sequence
  Chemically synthesized
uggucgcuguuaucaacauug

SEQ ID NO: 30357 - RNA, 21 nt, Artificial Sequence
  Chemically synthesized
gcuguucuccaagaaggagau

SEQ ID NO: 30358 - RNA, 21 nt, Artificial Sequence
  Chemically synthesized
ccaagccuacaaagugcugaa

SEQ ID NO: 30359 - RNA, 21 nt, Artificial Sequence
  Chemically synthesized
cggaacucaagugucuccaga

SEQ ID NO: 30360 - RNA, 21 nt, Artificial Sequence
  Chemically synthesized
ucggaacucaagugucuccag

SEQ ID NO: 30361 - RNA, 21 nt, Artificial Sequence
  Chemically synthesized
cgucuacaugagaaaugccag

SEQ ID NO: 30362 - RNA, 21 nt, Artificial Sequence
  Chemically synthesized
uagucucccuuccaaauaaau

SEQ ID NO: 30363 - RNA, 21 nt, Artificial Sequence
  Chemically synthesized
cuucagaaacaaaucucagaa

SEQ ID NO: 30364 - RNA, 21 nt, Artificial Sequence
  Chemically synthesized
gacuucagaaacaaaucucag

SEQ ID NO: 30365 - RNA, 21 nt, Artificial Sequence
  Chemically synthesized
cugccucagccuucucugauu

SEQ ID NO: 30366 - RNA, 21 nt, Artificial Sequence
  Chemically synthesized
cugucagcucaucaacaggca

SEQ ID NO: 30367 - RNA, 21 nt, Artificial Sequence
  Chemically synthesized
cuggugucugugcacaucuac

SEQ ID NO: 30368 - RNA, 21 nt, Artificial Sequence
  Chemically synthesized
ccuggugucugugcacaucua

SEQ ID NO: 30369 - RNA, 21 nt, Artificial Sequence
  Chemically synthesized
ccucaaagaccuggucuucaa

SEQ ID NO: 30370 - RNA, 21 nt, Artificial Sequence
  Chemically synthesized
caccaggaguggcauaaguuu

SEQ ID NO: 30371 - RNA, 21 nt, Artificial Sequence
  Chemically synthesized
cuggucccagcaaucaucuau

SEQ ID NO: 30372 - RNA, 21 nt, Artificial Sequence
  Chemically synthesized
ccuggucccagcaaucaucua

SEQ ID NO: 30373 - RNA, 21 nt, Artificial Sequence
  Chemically synthesized
ccugauccuggccaucaugua

SEQ ID NO: 30374 - RNA, 21 nt, Artificial Sequence
  Chemically synthesized
ugggacauucuaaucccugag

SEQ ID NO: 30375 - RNA, 21 nt, Artificial Sequence
  Chemically synthesized
guggugaauguguaccuguuc

SEQ ID NO: 30376 - RNA, 21 nt, Artificial Sequence
  Chemically synthesized
ccauguggugaauguguaccu

SEQ ID NO: 30377 - RNA, 21 nt, Artificial Sequence
  Chemically synthesized
caccuuccugcgagaaaccuu

SEQ ID NO: 30378 - RNA, 21 nt, Artificial Sequence
  Chemically synthesized
agguaacgucauuccagcccu

SEQ ID NO: 30379 - RNA, 21 nt, Artificial Sequence
  Chemically synthesized
gacugaguugacaccucagag

SEQ ID NO: 30380 - RNA, 21 nt, Artificial Sequence
  Chemically synthesized
gcagcgacauugagacugagu

SEQ ID NO: 30381 - RNA, 21 nt, Artificial Sequence
  Chemically synthesized
gccaggauaugaucugucccu

SEQ ID NO: 30382 - RNA, 21 nt, Artificial Sequence
  Chemically synthesized
ccuccuacaucagccaggaua

SEQ ID NO: 30383 - RNA, 21 nt, Artificial Sequence
  Chemically synthesized
uccuucaucgagaucuccaac

SEQ ID NO: 30384 - RNA, 21 nt, Artificial Sequence
  Chemically synthesized
caaggaugaguucaucaggau

SEQ ID NO: 30385 - RNA, 21 nt, Artificial Sequence
  Chemically synthesized
cuggcugacaaggauggcaau

SEQ ID NO: 30386 - RNA, 21 nt, Artificial Sequence
  Chemically synthesized
guggaguccauguucucucug

SEQ ID NO: 30387 - RNA, 21 nt, Artificial Sequence
  Chemically synthesized
gaccuuuuucaggcaccuuuu

SEQ ID NO: 30388 - RNA, 21 nt, Artificial Sequence
  Chemically synthesized
gaaggucaacuucguccuguc

SEQ ID NO: 30389 - RNA, 21 nt, Artificial Sequence
  Chemically synthesized
gcauggaagcuuuggaauggc

SEQ ID NO: 30390 - RNA, 21 nt, Artificial Sequence
  Chemically synthesized
gagcaucgugucugagaagcu

SEQ ID NO: 30391 - RNA, 21 nt, Artificial Sequence
  Chemically synthesized
aggaaugggcuguucuccaag

SEQ ID NO: 30392 - RNA, 21 nt, Artificial Sequence
  Chemically synthesized
gcuacugguuugagaacacca

SEQ ID NO: 30393 - RNA, 21 nt, Artificial Sequence
  Chemically synthesized
cgcuacugguuugagaacacc

SEQ ID NO: 30394 - RNA, 21 nt, Artificial Sequence
  Chemically synthesized
caaccaggacuuauccuggcu

SEQ ID NO: 30395 - RNA, 21 nt, Artificial Sequence
  Chemically synthesized
cuacaugagaaaugccagcug

SEQ ID NO: 30396 - RNA, 21 nt, Artificial Sequence
  Chemically synthesized
gcgucuacaugagaaaugcca

SEQ ID NO: 30397 - RNA, 21 nt, Artificial Sequence
  Chemically synthesized
acucccggaguauacaggaua

SEQ ID NO: 30398 - RNA, 21 nt, Artificial Sequence
  Chemically synthesized
ucuuuggcuaucacgugcuuu

SEQ ID NO: 30399 - RNA, 21 nt, Artificial Sequence
  Chemically synthesized
uucuuuggcuaucacgugcuu

SEQ ID NO: 30400 - RNA, 21 nt, Artificial Sequence
  Chemically synthesized
ccugagaaaccgcacaguguu

SEQ ID NO: 30401 - RNA, 21 nt, Artificial Sequence
  Chemically synthesized
uccaguagucucccuuccaaa

SEQ ID NO: 30402 - RNA, 21 nt, Artificial Sequence
  Chemically synthesized
ggcccaauaccuauguaugca

SEQ ID NO: 30403 - RNA, 21 nt, Artificial Sequence
  Chemically synthesized
ucaucagacccuggcccaaua

SEQ ID NO: 30404 - RNA, 21 nt, Artificial Sequence
  Chemically synthesized
gcaaagugaaaccucugcuuc

SEQ ID NO: 30405 - RNA, 21 nt, Artificial Sequence
  Chemically synthesized
gccuucucugauuucccaccu

SEQ ID NO: 30406 - RNA, 21 nt, Artificial Sequence
  Chemically synthesized
caugaccaagaauguggaaaa

SEQ ID NO: 30407 - RNA, 21 nt, Artificial Sequence
  Chemically synthesized
gcaugaccaagaauguggaaa

SEQ ID NO: 30408 - RNA, 21 nt, Artificial Sequence
  Chemically synthesized
gaagguucugaaccggagucu

SEQ ID NO: 30409 - RNA, 21 nt, Artificial Sequence
  Chemically synthesized
ucaggaccacuaugcuguaca

SEQ ID NO: 30410 - RNA, 21 nt, Artificial Sequence
  Chemically synthesized
accuggugucugugcacaucu

SEQ ID NO: 30411 - RNA, 21 nt, Artificial Sequence
  Chemically synthesized
guguucuguaagaagaucuac

SEQ ID NO: 30412 - RNA, 21 nt, Artificial Sequence
  Chemically synthesized
cuagcauggacacuucugguu

SEQ ID NO: 30413 - RNA, 21 nt, Artificial Sequence
  Chemically synthesized
cccaaagcuguaccuugaugg

SEQ ID NO: 30414 - RNA, 21 nt, Artificial Sequence
  Chemically synthesized
gggacauucuaaucccugagc

SEQ ID NO: 30415 - RNA, 21 nt, Artificial Sequence
  Chemically synthesized
cagaaguauuacuggugguuc

SEQ ID NO: 30416 - RNA, 21 nt, Artificial Sequence
  Chemically synthesized
uccuggccucuuccaugauga

SEQ ID NO: 30417 - RNA, 21 nt, Artificial Sequence
  Chemically synthesized
agcguccucucuugccucuuu

SEQ ID NO: 30418 - RNA, 21 nt, Artificial Sequence
  Chemically synthesized
uggacuuccaucgccucauug

SEQ ID NO: 30419 - RNA, 21 nt, Artificial Sequence
  Chemically synthesized
acaguucaagcgcuucauuga

SEQ ID NO: 30420 - RNA, 21 nt, Artificial Sequence
  Chemically synthesized
ugagacugaguugacaccuca

SEQ ID NO: 30421 - RNA, 21 nt, Artificial Sequence
  Chemically synthesized
cugagauccuucaucgagauc

SEQ ID NO: 30422 - RNA, 21 nt, Artificial Sequence
  Chemically synthesized
ugaguucaucaggaugcugag

SEQ ID NO: 30423 - RNA, 21 nt, Artificial Sequence
  Chemically synthesized
gccucauuuccaaggaugagu

SEQ ID NO: 30424 - RNA, 21 nt, Artificial Sequence
  Chemically synthesized
gaauggccucauuuccaagga

SEQ ID NO: 30425 - RNA, 21 nt, Artificial Sequence
  Chemically synthesized
ugaaaggcucuccugaggaaa

SEQ ID NO: 30426 - RNA, 21 nt, Artificial Sequence
  Chemically synthesized
agaccuuuuucaggcaccuuu

SEQ ID NO: 30427 - RNA, 21 nt, Artificial Sequence
  Chemically synthesized
ccuccacagaaggucaacuuc

SEQ ID NO: 30428 - RNA, 21 nt, Artificial Sequence
  Chemically synthesized
cagagcaucgugucugagaag

SEQ ID NO: 30429 - RNA, 21 nt, Artificial Sequence
  Chemically synthesized
gaacaccaggaaugggcuguu

SEQ ID NO: 30430 - RNA, 21 nt, Artificial Sequence
  Chemically synthesized
agccuacaaagugcugaagau

SEQ ID NO: 30431 - RNA, 21 nt, Artificial Sequence
  Chemically synthesized
cacccaagccuacaaagugcu

SEQ ID NO: 30432 - RNA, 21 nt, Artificial Sequence
  Chemically synthesized
agaaaacacucccggaguaua

SEQ ID NO: 30433 - RNA, 21 nt, Artificial Sequence
  Chemically synthesized
cuaccagaacaucgcugugua

SEQ ID NO: 30434 - RNA, 21 nt, Artificial Sequence
  Chemically synthesized
guaaggaugcagugggagcau

SEQ ID NO: 30435 - RNA, 21 nt, Artificial Sequence
  Chemically synthesized
gacaagcugaccugacaagua

SEQ ID NO: 30436 - RNA, 21 nt, Artificial Sequence
  Chemically synthesized
cucugcuuccagacuucagaa

SEQ ID NO: 30437 - RNA, 21 nt, Artificial Sequence
  Chemically synthesized
ucccaccauuaugagaacuuc

SEQ ID NO: 30438 - RNA, 21 nt, Artificial Sequence
  Chemically synthesized
cacuucucccaccauuaugag

SEQ ID NO: 30439 - RNA, 21 nt, Artificial Sequence
  Chemically synthesized
cuugggugaaauuaguugugg

SEQ ID NO: 30440 - RNA, 21 nt, Artificial Sequence
  Chemically synthesized
uugaguuccgauugaugaccc

SEQ ID NO: 30441 - RNA, 21 nt, Artificial Sequence
  Chemically synthesized
accuugggugaaauuaguugu

SEQ ID NO: 30442 - RNA, 21 nt, Artificial Sequence
  Chemically synthesized
uugggugaaauuaguuguggu

SEQ ID NO: 30443 - RNA, 21 nt, Artificial Sequence
  Chemically synthesized
uaugccagacaaagacauugg

SEQ ID NO: 30444 - RNA, 21 nt, Artificial Sequence
  Chemically synthesized
aagaacgugcuuaaaaccuug

SEQ ID NO: 30445 - RNA, 21 nt, Artificial Sequence
  Chemically synthesized
gauuagaaugucccaaaaugg

SEQ ID NO: 30446 - RNA, 21 nt, Artificial Sequence
  Chemically synthesized
augaagcgcuugaacuguugc

SEQ ID NO: 30447 - RNA, 21 nt, Artificial Sequence
  Chemically synthesized
agaacgugcuuaaaaccuugg

SEQ ID NO: 30448 - RNA, 21 nt, Artificial Sequence
  Chemically synthesized
aucuucuuacagaacacuugg

SEQ ID NO: 30449 - RNA, 21 nt, Artificial Sequence
  Chemically synthesized
aagaaccaccaguaauacuuc

SEQ ID NO: 30450 - RNA, 21 nt, Artificial Sequence
  Chemically synthesized
gaacgugcuuaaaaccuuggg

SEQ ID NO: 30451 - RNA, 21 nt, Artificial Sequence
  Chemically synthesized
uaagacugugaggacgauggc

SEQ ID NO: 30452 - RNA, 21 nt, Artificial Sequence
  Chemically synthesized
uaggagaacaugaaagagaug

SEQ ID NO: 30453 - RNA, 21 nt, Artificial Sequence
  Chemically synthesized
agccgcacaaauuguucaagg

SEQ ID NO: 30454 - RNA, 21 nt, Artificial Sequence
  Chemically synthesized
ugaaagaacgugcuuaaaacc

SEQ ID NO: 30455 - RNA, 21 nt, Artificial Sequence
  Chemically synthesized
ccuugggugaaauuaguugug

SEQ ID NO: 30456 - RNA, 21 nt, Artificial Sequence
  Chemically synthesized
uagaaguucucauaauggugg

SEQ ID NO: 30457 - RNA, 21 nt, Artificial Sequence
  Chemically synthesized
guagcgguugaggaagguuuc

SEQ ID NO: 30458 - RNA, 21 nt, Artificial Sequence
  Chemically synthesized
aaugaagcgcuugaacuguug

SEQ ID NO: 30459 - RNA, 21 nt, Artificial Sequence
  Chemically synthesized
uugaacuguugcaccgucugg

SEQ ID NO: 30460 - RNA, 21 nt, Artificial Sequence
  Chemically synthesized
auagucacgaacaacagaggg

SEQ ID NO: 30461 - RNA, 21 nt, Artificial Sequence
  Chemically synthesized
uagccgcacaaauuguucaag

SEQ ID NO: 30462 - RNA, 21 nt, Artificial Sequence
  Chemically synthesized
uuucucauguagacgccaggg

SEQ ID NO: 30463 - RNA, 21 nt, Artificial Sequence
  Chemically synthesized
uagcgguugaggaagguuucu

SEQ ID NO: 30464 - RNA, 21 nt, Artificial Sequence
  Chemically synthesized
auggugagcaagauguaggag

SEQ ID NO: 30465 - RNA, 21 nt, Artificial Sequence
  Chemically synthesized
aggagaacaugaaagagaugc

SEQ ID NO: 30466 - RNA, 21 nt, Artificial Sequence
  Chemically synthesized
caugaaagagaugcuggcugc

SEQ ID NO: 30467 - RNA, 21 nt, Artificial Sequence
  Chemically synthesized
aagggcuggaaugacguuacc

SEQ ID NO: 30468 - RNA, 21 nt, Artificial Sequence
  Chemically synthesized
aaagggaagcaacagaggguc

SEQ ID NO: 30469 - RNA, 21 nt, Artificial Sequence
  Chemically synthesized
aaauaggaagaacagagguga

SEQ ID NO: 30470 - RNA, 21 nt, Artificial Sequence
  Chemically synthesized
uaauggugggagaagugaguc

SEQ ID NO: 30471 - RNA, 21 nt, Artificial Sequence
  Chemically synthesized
aggcaaagacauacaugaugg

SEQ ID NO: 30472 - RNA, 21 nt, Artificial Sequence
  Chemically synthesized
caggaaugcgaggaaccauag

SEQ ID NO: 30473 - RNA, 21 nt, Artificial Sequence
  Chemically synthesized
auguacagcauagugguccug

SEQ ID NO: 30474 - RNA, 21 nt, Artificial Sequence
  Chemically synthesized
accucaaacuuaugccacucc

SEQ ID NO: 30475 - RNA, 21 nt, Artificial Sequence
  Chemically synthesized
uagagcaggauguagaggugg

SEQ ID NO: 30476 - RNA, 21 nt, Artificial Sequence
  Chemically synthesized
aacauaaggcgagacuuuucc

SEQ ID NO: 30477 - RNA, 21 nt, Artificial Sequence
  Chemically synthesized
cagggugguauuucggauuuc

SEQ ID NO: 30478 - RNA, 21 nt, Artificial Sequence
  Chemically synthesized
agggugguauuucggauuucu

SEQ ID NO: 30479 - RNA, 21 nt, Artificial Sequence
  Chemically synthesized
aucccguagccgcacaaauug

SEQ ID NO: 30480 - RNA, 21 nt, Artificial Sequence
  Chemically synthesized
ccguagccgcacaaauuguuc

SEQ ID NO: 30481 - RNA, 21 nt, Artificial Sequence
  Chemically synthesized
aacacaugguccucucgcucu

SEQ ID NO: 30482 - RNA, 21 nt, Artificial Sequence
  Chemically synthesized
aauaggaagaacagaggugag

SEQ ID NO: 30483 - RNA, 21 nt, Artificial Sequence
  Chemically synthesized
cuagaaguucucauaauggug

SEQ ID NO: 30484 - RNA, 21 nt, Artificial Sequence
  Chemically synthesized
uagaucuucuuacagaacacu

SEQ ID NO: 30485 - RNA, 21 nt, Artificial Sequence
  Chemically synthesized
uugaggauggaggcaaaaggg

SEQ ID NO: 30486 - RNA, 21 nt, Artificial Sequence
  Chemically synthesized
cugacaccucaaacuuaugcc

SEQ ID NO: 30487 - RNA, 21 nt, Artificial Sequence
  Chemically synthesized
aaagacauacaugauggccag

SEQ ID NO: 30488 - RNA, 21 nt, Artificial Sequence
  Chemically synthesized
gaaugacguuaccuucuugcc

SEQ ID NO: 30489 - RNA, 21 nt, Artificial Sequence
  Chemically synthesized
gucaacucagucucaaugucg

SEQ ID NO: 30490 - RNA, 21 nt, Artificial Sequence
  Chemically synthesized
aggcaguuguuggagaucucg

SEQ ID NO: 30491 - RNA, 21 nt, Artificial Sequence
  Chemically synthesized
ucuuccuccaaguuaaacagc

SEQ ID NO: 30492 - RNA, 21 nt, Artificial Sequence
  Chemically synthesized
aauagucacgaacaacagagg

SEQ ID NO: 30493 - RNA, 21 nt, Artificial Sequence
  Chemically synthesized
uuaugccagacaaagacauug

SEQ ID NO: 30494 - RNA, 21 nt, Artificial Sequence
  Chemically synthesized
caguacagugucauugcuccg

SEQ ID NO: 30495 - RNA, 21 nt, Artificial Sequence
  Chemically synthesized
uacagugucauugcuccggga

SEQ ID NO: 30496 - RNA, 21 nt, Artificial Sequence
  Chemically synthesized
gccuagaaguucucauaaugg

SEQ ID NO: 30497 - RNA, 21 nt, Artificial Sequence
  Chemically synthesized
agcugggugauguagaugugc

SEQ ID NO: 30498 - RNA, 21 nt, Artificial Sequence
  Chemically synthesized
cucaaacuuaugccacuccug

SEQ ID NO: 30499 - RNA, 21 nt, Artificial Sequence
  Chemically synthesized
ugggaggcaaagacauacaug

SEQ ID NO: 30500 - RNA, 21 nt, Artificial Sequence
  Chemically synthesized
gcaaagacauacaugauggcc

SEQ ID NO: 30501 - RNA, 21 nt, Artificial Sequence
  Chemically synthesized
aagacauacaugauggccagg

SEQ ID NO: 30502 - RNA, 21 nt, Artificial Sequence
  Chemically synthesized
agaacaugaaagagaugcugg

SEQ ID NO: 30503 - RNA, 21 nt, Artificial Sequence
  Chemically synthesized
acauaaggcgagacuuuuccu

SEQ ID NO: 30504 - RNA, 21 nt, Artificial Sequence
  Chemically synthesized
uuaaacagcagcaccagguca

SEQ ID NO: 30505 - RNA, 21 nt, Artificial Sequence
  Chemically synthesized
cucuugaaauuucucauccgg

SEQ ID NO: 30506 - RNA, 21 nt, Artificial Sequence
  Chemically synthesized
caaaauagucacgaacaacag

SEQ ID NO: 30507 - RNA, 21 nt, Artificial Sequence
  Chemically synthesized
cacaucuucaaccaacacaug

SEQ ID NO: 30508 - RNA, 21 nt, Artificial Sequence
  Chemically synthesized
uuguaccacccaucaaaucgc

SEQ ID NO: 30509 - RNA, 21 nt, Artificial Sequence
  Chemically synthesized
acugacaccucaaacuuaugc

SEQ ID NO: 30510 - RNA, 21 nt, Artificial Sequence
  Chemically synthesized
ugacaccucaaacuuaugcca

SEQ ID NO: 30511 - RNA, 21 nt, Artificial Sequence
  Chemically synthesized
gacaccucaaacuuaugccac

SEQ ID NO: 30512 - RNA, 21 nt, Artificial Sequence
  Chemically synthesized
ccugacuuguacucaaagccc

SEQ ID NO: 30513 - RNA, 21 nt, Artificial Sequence
  Chemically synthesized
caagggcuggaaugacguuac

SEQ ID NO: 30514 - RNA, 21 nt, Artificial Sequence
  Chemically synthesized
aaugacguuaccuucuugcca

SEQ ID NO: 30515 - RNA, 21 nt, Artificial Sequence
  Chemically synthesized
uuccuccaaguuaaacagcag

SEQ ID NO: 30516 - RNA, 21 nt, Artificial Sequence
  Chemically synthesized
acugcccucaaaauagucacg

SEQ ID NO: 30517 - RNA, 21 nt, Artificial Sequence
  Chemically synthesized
uuuaugccagacaaagacauu

SEQ ID NO: 30518 - RNA, 21 nt, Artificial Sequence
  Chemically synthesized
agacaaagacauugggcugca

SEQ ID NO: 30519 - RNA, 21 nt, Artificial Sequence
  Chemically synthesized
auccacaucuucagcacuuug

SEQ ID NO: 30520 - RNA, 21 nt, Artificial Sequence
  Chemically synthesized
auuucucauguagacgccagg

SEQ ID NO: 30521 - RNA, 21 nt, Artificial Sequence
  Chemically synthesized
cgaguggguuucuguaaaugg

SEQ ID NO: 30522 - RNA, 21 nt, Artificial Sequence
  Chemically synthesized
ccuacuucucacucuaguccc

SEQ ID NO: 30523 - RNA, 21 nt, Artificial Sequence
  Chemically synthesized
cucaaaccucugcucaacugg

SEQ ID NO: 30524 - RNA, 21 nt, Artificial Sequence
  Chemically synthesized
aucaaaucgcugcaccuccca

SEQ ID NO: 30525 - RNA, 21 nt, Artificial Sequence
  Chemically synthesized
cacugcccugacuuguacuca

SEQ ID NO: 30526 - RNA, 21 nt, Artificial Sequence
  Chemically synthesized
ggcaaagacauacaugauggc

SEQ ID NO: 30527 - RNA, 21 nt, Artificial Sequence
  Chemically synthesized
agaaccaccaguaauacuucu

SEQ ID NO: 30528 - RNA, 21 nt, Artificial Sequence
  Chemically synthesized
uggaaugacguuaccuucuug

SEQ ID NO: 30529 - RNA, 21 nt, Artificial Sequence
  Chemically synthesized
ggaaugacguuaccuucuugc

SEQ ID NO: 30530 - RNA, 21 nt, Artificial Sequence
  Chemically synthesized
uccaaguuaaacagcagcacc

SEQ ID NO: 30531 - RNA, 21 nt, Artificial Sequence
  Chemically synthesized
uugcuggacaggacgaaguug

SEQ ID NO: 30532 - RNA, 21 nt, Artificial Sequence
  Chemically synthesized
gccucuugaaauuucucaucc

SEQ ID NO: 30533 - RNA, 21 nt, Artificial Sequence
  Chemically synthesized
aaaauagucacgaacaacaga

SEQ ID NO: 30534 - RNA, 21 nt, Artificial Sequence
  Chemically synthesized
aaauagucacgaacaacagag

SEQ ID NO: 30535 - RNA, 21 nt, Artificial Sequence
  Chemically synthesized
gacaaagacauugggcugcag

SEQ ID NO: 30536 - RNA, 21 nt, Artificial Sequence
  Chemically synthesized
aguacagugucauugcuccgg

SEQ ID NO: 30537 - RNA, 21 nt, Artificial Sequence
  Chemically synthesized
aaucccgcacaucuucaacca

SEQ ID NO: 30538 - RNA, 21 nt, Artificial Sequence
  Chemically synthesized
ugaggagcauugcauacauag

SEQ ID NO: 30539 - RNA, 21 nt, Artificial Sequence
  Chemically synthesized
guacacgccaucugcauagcu

SEQ ID NO: 30540 - RNA, 21 nt, Artificial Sequence
  Chemically synthesized
guuguaccacccaucaaaucg

SEQ ID NO: 30541 - RNA, 21 nt, Artificial Sequence
  Chemically synthesized
ucuucuuacagaacacuuggc

SEQ ID NO: 30542 - RNA, 21 nt, Artificial Sequence
  Chemically synthesized
aaagcuaccauggaugaugag

SEQ ID NO: 30543 - RNA, 21 nt, Artificial Sequence
  Chemically synthesized
auagagcaggauguagaggug

SEQ ID NO: 30544 - RNA, 21 nt, Artificial Sequence
  Chemically synthesized
acuguguaagacugugaggac

SEQ ID NO: 30545 - RNA, 21 nt, Artificial Sequence
  Chemically synthesized
uguguaagacugugaggacga

SEQ ID NO: 30546 - RNA, 21 nt, Artificial Sequence
  Chemically synthesized
cauggugagcaagauguagga

SEQ ID NO: 30547 - RNA, 21 nt, Artificial Sequence
  Chemically synthesized
uuaccuucuugccaaaccucc

SEQ ID NO: 30548 - RNA, 21 nt, Artificial Sequence
  Chemically synthesized
gugucaacucagucucaaugu

SEQ ID NO: 30549 - RNA, 21 nt, Artificial Sequence
  Chemically synthesized
uucccaucaaagucguacaug

SEQ ID NO: 30550 - RNA, 21 nt, Artificial Sequence
  Chemically synthesized
agagccuuucaugaagaccac

SEQ ID NO: 30551 - RNA, 21 nt, Artificial Sequence
  Chemically synthesized
gagccuuucaugaagaccacc

SEQ ID NO: 30552 - RNA, 21 nt, Artificial Sequence
  Chemically synthesized
cucuuccuccaaguuaaacag

SEQ ID NO: 30553 - RNA, 21 nt, Artificial Sequence
  Chemically synthesized
aaguuaaacagcagcaccagg

SEQ ID NO: 30554 - RNA, 21 nt, Artificial Sequence
  Chemically synthesized
guuaaacagcagcaccagguc

SEQ ID NO: 30555 - RNA, 21 nt, Artificial Sequence
  Chemically synthesized
cugcccucaaaauagucacga

SEQ ID NO: 30556 - RNA, 21 nt, Artificial Sequence
  Chemically synthesized
auuuggaagggagacuacugg

SEQ ID NO: 30557 - RNA, 21 nt, Artificial Sequence
  Chemically synthesized
ccaacacacauacagacaugc

SEQ ID NO: 30558 - RNA, 21 nt, Artificial Sequence
  Chemically synthesized
auaguacuugucaggucagcu

SEQ ID NO: 30559 - RNA, 21 nt, Artificial Sequence
  Chemically synthesized
auaggaagaacagaggugagg

SEQ ID NO: 30560 - RNA, 21 nt, Artificial Sequence
  Chemically synthesized
uguaccacccaucaaaucgcu

SEQ ID NO: 30561 - RNA, 21 nt, Artificial Sequence
  Chemically synthesized
cuucuuacagaacacuuggca

SEQ ID NO: 30562 - RNA, 21 nt, Artificial Sequence
  Chemically synthesized
aacaugaaagagaugcuggcu

SEQ ID NO: 30563 - RNA, 21 nt, Artificial Sequence
  Chemically synthesized
caacucagucucaaugucgcu

SEQ ID NO: 30564 - RNA, 21 nt, Artificial Sequence
  Chemically synthesized
agugaaaaucuucccauguca

SEQ ID NO: 30565 - RNA, 21 nt, Artificial Sequence
  Chemically synthesized
gugaaaaucuucccaugucag

SEQ ID NO: 30566 - RNA, 21 nt, Artificial Sequence
  Chemically synthesized
auucccaucaaagucguacau

SEQ ID NO: 30567 - RNA, 21 nt, Artificial Sequence
  Chemically synthesized
ucccaucaaagucguacaugc

SEQ ID NO: 30568 - RNA, 21 nt, Artificial Sequence
  Chemically synthesized
cccaucaaagucguacaugcg

SEQ ID NO: 30569 - RNA, 21 nt, Artificial Sequence
  Chemically synthesized
uccuccaaguuaaacagcagc

SEQ ID NO: 30570 - RNA, 21 nt, Artificial Sequence
  Chemically synthesized
caaguuaaacagcagcaccag

SEQ ID NO: 30571 - RNA, 21 nt, Artificial Sequence
  Chemically synthesized
aacagcagcaccaggucauac

SEQ ID NO: 30572 - RNA, 21 nt, Artificial Sequence
  Chemically synthesized
uugccauuccaaagcuuccau

SEQ ID NO: 30573 - RNA, 21 nt, Artificial Sequence
  Chemically synthesized
uggagccucuugaaauuucuc

SEQ ID NO: 30574 - RNA, 21 nt, Artificial Sequence
  Chemically synthesized
ccucuugaaauuucucauccg

SEQ ID NO: 30575 - RNA, 21 nt, Artificial Sequence
  Chemically synthesized
ucuugaaauuucucauccgga

SEQ ID NO: 30576 - RNA, 21 nt, Artificial Sequence
  Chemically synthesized
uccacugcccucaaaauaguc

SEQ ID NO: 30577 - RNA, 21 nt, Artificial Sequence
  Chemically synthesized
cacugcccucaaaauagucac

SEQ ID NO: 30578 - RNA, 21 nt, Artificial Sequence
  Chemically synthesized
aaauuguucaaggacgauggu

SEQ ID NO: 30579 - RNA, 21 nt, Artificial Sequence
  Chemically synthesized
ccuccaguacagugucauugc

SEQ ID NO: 30580 - RNA, 21 nt, Artificial Sequence
  Chemically synthesized
uccaguacagugucauugcuc

SEQ ID NO: 30581 - RNA, 21 nt, Artificial Sequence
  Chemically synthesized
auguucugguagguggcgaug

SEQ ID NO: 30582 - RNA, 21 nt, Artificial Sequence
  Chemically synthesized
cgugauagccaaagaagaccc

SEQ ID NO: 30583 - RNA, 21 nt, Artificial Sequence
  Chemically synthesized
uaccacccaucaaaucgcugc

SEQ ID NO: 30584 - RNA, 21 nt, Artificial Sequence
  Chemically synthesized
cugacggaugacuugaagacc

SEQ ID NO: 30585 - RNA, 21 nt, Artificial Sequence
  Chemically synthesized
ucccacuaacacugacaccuc

SEQ ID NO: 30586 - RNA, 21 nt, Artificial Sequence
  Chemically synthesized
uuuggguaucuggcacaucug

SEQ ID NO: 30587 - RNA, 21 nt, Artificial Sequence
  Chemically synthesized
gagaacaugaaagagaugcug

SEQ ID NO: 30588 - RNA, 21 nt, Artificial Sequence
  Chemically synthesized
aaaucuucccaugucaguucc

SEQ ID NO: 30589 - RNA, 21 nt, Artificial Sequence
  Chemically synthesized
cuccaaguuaaacagcagcac

SEQ ID NO: 30590 - RNA, 21 nt, Artificial Sequence
  Chemically synthesized
cuggagccucuugaaauuucu

SEQ ID NO: 30591 - RNA, 21 nt, Artificial Sequence
  Chemically synthesized
agccucuugaaauuucucauc

SEQ ID NO: 30592 - RNA, 21 nt, Artificial Sequence
  Chemically synthesized
aauccacugcccucaaaauag

SEQ ID NO: 30593 - RNA, 21 nt, Artificial Sequence
  Chemically synthesized
agucacgaacaacagagggag

SEQ ID NO: 30594 - RNA, 21 nt, Artificial Sequence
  Chemically synthesized
auuucuucaaucuccuucuug

SEQ ID NO: 30595 - RNA, 21 nt, Artificial Sequence
  Chemically synthesized
caaauuguucaaggacgaugg

SEQ ID NO: 30596 - RNA, 21 nt, Artificial Sequence
  Chemically synthesized
aaaucccgcacaucuucaacc

SEQ ID NO: 30597 - RNA, 21 nt, Artificial Sequence
  Chemically synthesized
cacaucuucagcacuuuguag

SEQ ID NO: 30598 - RNA, 21 nt, Artificial Sequence
  Chemically synthesized
ugagaugguguugcuaagguc

SEQ ID NO: 30599 - RNA, 21 nt, Artificial Sequence
  Chemically synthesized
cugugcuccaugagguuguug

SEQ ID NO: 30600 - RNA, 21 nt, Artificial Sequence
  Chemically synthesized
cagcugggugauguagaugug

SEQ ID NO: 30601 - RNA, 21 nt, Artificial Sequence
  Chemically synthesized
uuugaggauggaggcaaaagg

SEQ ID NO: 30602 - RNA, 21 nt, Artificial Sequence
  Chemically synthesized
caaagcuaccauggaugauga

SEQ ID NO: 30603 - RNA, 21 nt, Artificial Sequence
  Chemically synthesized
auggagaacagguacacauuc

SEQ ID NO: 30604 - RNA, 21 nt, Artificial Sequence
  Chemically synthesized
guuaccuucuugccaaaccuc

SEQ ID NO: 30605 - RNA, 21 nt, Artificial Sequence
  Chemically synthesized
uaccuucuugccaaaccuccg

SEQ ID NO: 30606 - RNA, 21 nt, Artificial Sequence
  Chemically synthesized
ucaacucagucucaaugucgc

SEQ ID NO: 30607 - RNA, 21 nt, Artificial Sequence
  Chemically synthesized
caugucaguuccuccuugucc

SEQ ID NO: 30608 - RNA, 21 nt, Artificial Sequence
  Chemically synthesized
uagucacgaacaacagaggga

SEQ ID NO: 30609 - RNA, 21 nt, Artificial Sequence
  Chemically synthesized
aucccgcacaucuucaaccaa

SEQ ID NO: 30610 - RNA, 21 nt, Artificial Sequence
  Chemically synthesized
ucuucaaccaacacauggucc

SEQ ID NO: 30611 - RNA, 21 nt, Artificial Sequence
  Chemically synthesized
ucaccaggucugaaagcacgu

SEQ ID NO: 30612 - RNA, 21 nt, Artificial Sequence
  Chemically synthesized
guaccacccaucaaaucgcug

SEQ ID NO: 30613 - RNA, 21 nt, Artificial Sequence
  Chemically synthesized
augaugucagccagccacuca

SEQ ID NO: 30614 - RNA, 21 nt, Artificial Sequence
  Chemically synthesized
gaaaucccgcacaucuucaac

SEQ ID NO: 30615 - RNA, 21 nt, Artificial Sequence
  Chemically synthesized
acucauacacagcgauguucu

SEQ ID NO: 30616 - RNA, 21 nt, Artificial Sequence
  Chemically synthesized
agaaauaggaagaacagaggu

SEQ ID NO: 30617 - RNA, 21 nt, Artificial Sequence
  Chemically synthesized
aacacuuggcagcugacggau

SEQ ID NO: 30618 - RNA, 21 nt, Artificial Sequence
  Chemically synthesized
gaugaugagcaggacauagag

SEQ ID NO: 30619 - RNA, 21 nt, Artificial Sequence
  Chemically synthesized
aaguggugggaggcaaagaca

SEQ ID NO: 30620 - RNA, 21 nt, Artificial Sequence
  Chemically synthesized
gaacaugaaagagaugcuggc

SEQ ID NO: 30621 - RNA, 21 nt, Artificial Sequence
  Chemically synthesized
uucccaugucaguuccuccuu

SEQ ID NO: 30622 - RNA, 21 nt, Artificial Sequence
  Chemically synthesized
uuucuucaaucuccuucuugg

SEQ ID NO: 30623 - RNA, 21 nt, Artificial Sequence
  Chemically synthesized
acgaacucugaggagaugcug

SEQ ID NO: 30624 - RNA, 21 nt, Artificial Sequence
  Chemically synthesized
auugcauacauagguauuggg

SEQ ID NO: 30625 - RNA, 21 nt, Artificial Sequence
  Chemically synthesized
uugcauacauagguauugggc

SEQ ID NO: 30626 - RNA, 21 nt, Artificial Sequence
  Chemically synthesized
aucugugcuccaugagguugu

SEQ ID NO: 30627 - RNA, 21 nt, Artificial Sequence
  Chemically synthesized
cagaaauaggaagaacagagg

SEQ ID NO: 30628 - RNA, 21 nt, Artificial Sequence
  Chemically synthesized
uuggguaucuggcacaucugu

SEQ ID NO: 30629 - RNA, 21 nt, Artificial Sequence
  Chemically synthesized
aaugucccaaaauggagaccc

SEQ ID NO: 30630 - RNA, 21 nt, Artificial Sequence
  Chemically synthesized
uucaaccaacacaugguccuc

SEQ ID NO: 30631 - RNA, 21 nt, Artificial Sequence
  Chemically synthesized
aaugcgaggaaccauagaugg

SEQ ID NO: 30632 - RNA, 21 nt, Artificial Sequence
  Chemically synthesized
acauagguauugggccagggu

SEQ ID NO: 30633 - RNA, 21 nt, Artificial Sequence
  Chemically synthesized
aaaccuugggugaaauuaguu

SEQ ID NO: 30634 - RNA, 21 nt, Artificial Sequence
  Chemically synthesized
aagaacagaggugaggugugg

SEQ ID NO: 30635 - RNA, 21 nt, Artificial Sequence
  Chemically synthesized
uucuuacagaacacuuggcag

SEQ ID NO: 30636 - RNA, 21 nt, Artificial Sequence
  Chemically synthesized
uaacacugacaccucaaacuu

SEQ ID NO: 30637 - RNA, 21 nt, Artificial Sequence
  Chemically synthesized
auucaccacauggcccacacu

SEQ ID NO: 30638 - RNA, 21 nt, Artificial Sequence
  Chemically synthesized
cagcagugcauccacaucuuc

SEQ ID NO: 30639 - RNA, 21 nt, Artificial Sequence
  Chemically synthesized
uuuauuuggaagggagacuac

SEQ ID NO: 30640 - RNA, 21 nt, Artificial Sequence
  Chemically synthesized
uaaaaccuugggugaaauuag

SEQ ID NO: 30641 - RNA, 21 nt, Artificial Sequence
  Chemically synthesized
aguggguuucuguaaauggcu

SEQ ID NO: 30642 - RNA, 21 nt, Artificial Sequence
  Chemically synthesized
aaaaucuucccaugucaguuc

SEQ ID NO: 30643 - RNA, 21 nt, Artificial Sequence
  Chemically synthesized
aaucuucccaugucaguuccu

SEQ ID NO: 30644 - RNA, 21 nt, Artificial Sequence
  Chemically synthesized
aucucgaugaaggaucucagc

SEQ ID NO: 30645 - RNA, 21 nt, Artificial Sequence
  Chemically synthesized
augaagaccaccaggaugucc

SEQ ID NO: 30646 - RNA, 21 nt, Artificial Sequence
  Chemically synthesized
uaaguccugguuguacagggc

SEQ ID NO: 30647 - RNA, 21 nt, Artificial Sequence
  Chemically synthesized
uagggaggguucuaagaugcc

SEQ ID NO: 30648 - RNA, 21 nt, Artificial Sequence
  Chemically synthesized
uugucuucugagauuuguuuc

SEQ ID NO: 30649 - RNA, 21 nt, Artificial Sequence
  Chemically synthesized
uacuucucacucuagucccua

SEQ ID NO: 30650 - RNA, 21 nt, Artificial Sequence
  Chemically synthesized
augagcugacaggccuuuucc

SEQ ID NO: 30651 - RNA, 21 nt, Artificial Sequence
  Chemically synthesized
augaaguagaucuucuuacag

SEQ ID NO: 30652 - RNA, 21 nt, Artificial Sequence
  Chemically synthesized
augugcggcaaaggcguagua

SEQ ID NO: 30653 - RNA, 21 nt, Artificial Sequence
  Chemically synthesized
aagcgcuugaacuguugcacc

SEQ ID NO: 30654 - RNA, 21 nt, Artificial Sequence
  Chemically synthesized
gagggacagaucauauccugg

SEQ ID NO: 30655 - RNA, 21 nt, Artificial Sequence
  Chemically synthesized
uacauagguauugggccaggg

SEQ ID NO: 30656 - RNA, 21 nt, Artificial Sequence
  Chemically synthesized
aaccuugggugaaauuaguug

SEQ ID NO: 30657 - RNA, 21 nt, Artificial Sequence
  Chemically synthesized
gaguggguuucuguaaauggc

SEQ ID NO: 30658 - RNA, 21 nt, Artificial Sequence
  Chemically synthesized
uaaauggcuugccaugggucc

SEQ ID NO: 30659 - RNA, 21 nt, Artificial Sequence
  Chemically synthesized
aacuuaugccacuccuggugg

SEQ ID NO: 30660 - RNA, 21 nt, Artificial Sequence
  Chemically synthesized
aaaugguccaucaagguacag

SEQ ID NO: 30661 - RNA, 21 nt, Artificial Sequence
  Chemically synthesized
ugacuuguacucaaagcccug

SEQ ID NO: 30662 - RNA, 21 nt, Artificial Sequence
  Chemically synthesized
gacuuguacucaaagcccugg

SEQ ID NO: 30663 - RNA, 21 nt, Artificial Sequence
  Chemically synthesized
aucagggcaaagcuaccaugg

SEQ ID NO: 30664 - RNA, 21 nt, Artificial Sequence
  Chemically synthesized
aaccaccaguaauacuucugg

SEQ ID NO: 30665 - RNA, 21 nt, Artificial Sequence
  Chemically synthesized
auguaggagaacaugaaagag

SEQ ID NO: 30666 - RNA, 21 nt, Artificial Sequence
  Chemically synthesized
ucuucccaugucaguuccucc

SEQ ID NO: 30667 - RNA, 21 nt, Artificial Sequence
  Chemically synthesized
gacgaaguugaccuucugugg

SEQ ID NO: 30668 - RNA, 21 nt, Artificial Sequence
  Chemically synthesized
augccagacaaagacauuggg

SEQ ID NO: 30669 - RNA, 21 nt, Artificial Sequence
  Chemically synthesized
uuucggauuucuucaaucucc

SEQ ID NO: 30670 - RNA, 21 nt, Artificial Sequence
  Chemically synthesized
uucucaaaccaguagcgguca

SEQ ID NO: 30671 - RNA, 21 nt, Artificial Sequence
  Chemically synthesized
aucuucaaccaacacaugguc

SEQ ID NO: 30672 - RNA, 21 nt, Artificial Sequence
  Chemically synthesized
guguuuucugcaggaagcugg

SEQ ID NO: 30673 - RNA, 21 nt, Artificial Sequence
  Chemically synthesized
augcgaauguugaggaacucg

SEQ ID NO: 30674 - RNA, 21 nt, Artificial Sequence
  Chemically synthesized
uaccuccugcaaggcauuugc

SEQ ID NO: 30675 - RNA, 21 nt, Artificial Sequence
  Chemically synthesized
ugacaggccuuuuccacauuc

SEQ ID NO: 30676 - RNA, 21 nt, Artificial Sequence
  Chemically synthesized
acuccgguucagaaccuucug

SEQ ID NO: 30677 - RNA, 21 nt, Artificial Sequence
  Chemically synthesized
aucaucauggaagaggccagg

SEQ ID NO: 30678 - RNA, 21 nt, Artificial Sequence
  Chemically synthesized
uugaggaagguuucucgcagg

SEQ ID NO: 30679 - RNA, 21 nt, Artificial Sequence
  Chemically synthesized
aaagagaugcuggcugcugug

SEQ ID NO: 30680 - RNA, 21 nt, Artificial Sequence
  Chemically synthesized
uuccuccuuguccuggaaucc

SEQ ID NO: 30681 - RNA, 21 nt, Artificial Sequence
  Chemically synthesized
agccauugccauccuugucag

SEQ ID NO: 30682 - RNA, 21 nt, Artificial Sequence
  Chemically synthesized
uuccaaagcuuccaugccucc

SEQ ID NO: 30683 - RNA, 21 nt, Artificial Sequence
  Chemically synthesized
uucuuggagaacagcccauuc

SEQ ID NO: 30684 - RNA, 21 nt, Artificial Sequence
  Chemically synthesized
auuguucaaggacgauggugc

SEQ ID NO: 30685 - RNA, 21 nt, Artificial Sequence
  Chemically synthesized
uuguucaaggacgauggugcu

SEQ ID NO: 30686 - RNA, 21 nt, Artificial Sequence
  Chemically synthesized
aaccaacacaugguccucucg

SEQ ID NO: 30687 - RNA, 21 nt, Artificial Sequence
  Chemically synthesized
uguuuucugcaggaagcuggg

SEQ ID NO: 30688 - RNA, 21 nt, Artificial Sequence
  Chemically synthesized
uuuucugcaggaagcugggca

SEQ ID NO: 30689 - RNA, 21 nt, Artificial Sequence
  Chemically synthesized
cauugcauacauagguauugg

SEQ ID NO: 30690 - RNA, 21 nt, Artificial Sequence
  Chemically synthesized
cuugagaugguguugcuaagg

SEQ ID NO: 30691 - RNA, 21 nt, Artificial Sequence
  Chemically synthesized
aacgugcuuaaaaccuugggu

SEQ ID NO: 30692 - RNA, 21 nt, Artificial Sequence
  Chemically synthesized
augguguugcuaaggucucgg

SEQ ID NO: 30693 - RNA, 21 nt, Artificial Sequence
  Chemically synthesized
guagggaggguucuaagaugc

SEQ ID NO: 30694 - RNA, 21 nt, Artificial Sequence
  Chemically synthesized
acacauggugacugacuaugg

SEQ ID NO: 30695 - RNA, 21 nt, Artificial Sequence
  Chemically synthesized
cacauggugacugacuauggc

SEQ ID NO: 30696 - RNA, 21 nt, Artificial Sequence
  Chemically synthesized
cuuacagaacacuuggcagcu

SEQ ID NO: 30697 - RNA, 21 nt, Artificial Sequence
  Chemically synthesized
augucccaaaauggagacccu

SEQ ID NO: 30698 - RNA, 21 nt, Artificial Sequence
  Chemically synthesized
aaaggcguaguaguaggcccu

SEQ ID NO: 30699 - RNA, 21 nt, Artificial Sequence
  Chemically synthesized
caugaagugaaaaucuuccca

SEQ ID NO: 30700 - RNA, 21 nt, Artificial Sequence
  Chemically synthesized
ccuuucaugaagaccaccagg

SEQ ID NO: 30701 - RNA, 21 nt, Artificial Sequence
  Chemically synthesized
ugccagacaaagacauugggc

SEQ ID NO: 30702 - RNA, 21 nt, Artificial Sequence
  Chemically synthesized
aauguugauaacagcgaccag

SEQ ID NO: 30703 - RNA, 21 nt, Artificial Sequence
  Chemically synthesized
aauuguucaaggacgauggug

SEQ ID NO: 30704 - RNA, 21 nt, Artificial Sequence
  Chemically synthesized
auaaguccugguuguacaggg

SEQ ID NO: 30705 - RNA, 21 nt, Artificial Sequence
  Chemically synthesized
auacauagguauugggccagg

SEQ ID NO: 30706 - RNA, 21 nt, Artificial Sequence
  Chemically synthesized
cagggucugaugaaagaacgu

SEQ ID NO: 30707 - RNA, 21 nt, Artificial Sequence
  Chemically synthesized
gaugguguugcuaaggucucg

SEQ ID NO: 30708 - RNA, 21 nt, Artificial Sequence
  Chemically synthesized
acauggugacugacuauggcc

SEQ ID NO: 30709 - RNA, 21 nt, Artificial Sequence
  Chemically synthesized
caugagguuguuguaccaccc

SEQ ID NO: 30710 - RNA, 21 nt, Artificial Sequence
  Chemically synthesized
aaaucagagaaggcugaggca

SEQ ID NO: 30711 - RNA, 21 nt, Artificial Sequence
  Chemically synthesized
augagguuguuguaccaccca

SEQ ID NO: 30712 - RNA, 21 nt, Artificial Sequence
  Chemically synthesized
uccugccuguugaugagcuga

SEQ ID NO: 30713 - RNA, 21 nt, Artificial Sequence
  Chemically synthesized
uacagcauagugguccugagg

SEQ ID NO: 30714 - RNA, 21 nt, Artificial Sequence
  Chemically synthesized
aaguagaucuucuuacagaac

SEQ ID NO: 30715 - RNA, 21 nt, Artificial Sequence
  Chemically synthesized
agaaguguccaugcuagagcc

SEQ ID NO: 30716 - RNA, 21 nt, Artificial Sequence
  Chemically synthesized
augaugagcaggacauagagc

SEQ ID NO: 30717 - RNA, 21 nt, Artificial Sequence
  Chemically synthesized
guacacauucaccacauggcc

SEQ ID NO: 30718 - RNA, 21 nt, Artificial Sequence
  Chemically synthesized
uaguucucaaugaagcgcuug

SEQ ID NO: 30719 - RNA, 21 nt, Artificial Sequence
  Chemically synthesized
gacagcugcguuggaacuucu

SEQ ID NO: 30720 - RNA, 21 nt, Artificial Sequence
  Chemically synthesized
gcaugaagugaaaaucuuccc

SEQ ID NO: 30721 - RNA, 21 nt, Artificial Sequence
  Chemically synthesized
augaagugaaaaucuucccau

SEQ ID NO: 30722 - RNA, 21 nt, Artificial Sequence
  Chemically synthesized
aaggcgagacuuuuccucagg

SEQ ID NO: 30723 - RNA, 21 nt, Artificial Sequence
  Chemically synthesized
uucggauuucuucaaucuccu

SEQ ID NO: 30724 - RNA, 21 nt, Artificial Sequence
  Chemically synthesized
guguucucaaaccaguagcgg

SEQ ID NO: 30725 - RNA, 21 nt, Artificial Sequence
  Chemically synthesized
aaguccugguuguacagggca

SEQ ID NO: 30726 - RNA, 21 nt, Artificial Sequence
  Chemically synthesized
ugugcgggaaaacuucagugg

SEQ ID NO: 30727 - RNA, 21 nt, Artificial Sequence
  Chemically synthesized
augcgaggaaccauagauggc

SEQ ID NO: 30728 - RNA, 21 nt, Artificial Sequence
  Chemically synthesized
uugagaugguguugcuaaggu

SEQ ID NO: 30729 - RNA, 21 nt, Artificial Sequence
  Chemically synthesized
gaaaucagagaaggcugaggc

SEQ ID NO: 30730 - RNA, 21 nt, Artificial Sequence
  Chemically synthesized
auagugguccugaggucgaac

SEQ ID NO: 30731 - RNA, 21 nt, Artificial Sequence
  Chemically synthesized
cuccaaaugguccaucaaggu

SEQ ID NO: 30732 - RNA, 21 nt, Artificial Sequence
  Chemically synthesized
augguccaucaagguacagcu

SEQ ID NO: 30733 - RNA, 21 nt, Artificial Sequence
  Chemically synthesized
accaccaguaauacuucuggg

SEQ ID NO: 30734 - RNA, 21 nt, Artificial Sequence
  Chemically synthesized
uacacauucaccacauggccc

SEQ ID NO: 30735 - RNA, 21 nt, Artificial Sequence
  Chemically synthesized
uuagaaugucccaaaauggag

SEQ ID NO: 30736 - RNA, 21 nt, Artificial Sequence
  Chemically synthesized
augaaagagaugcuggcugcu

SEQ ID NO: 30737 - RNA, 21 nt, Artificial Sequence
  Chemically synthesized
ggagagggacagaucauaucc

SEQ ID NO: 30738 - RNA, 21 nt, Artificial Sequence
  Chemically synthesized
aucauauccuggcugauguag

SEQ ID NO: 30739 - RNA, 21 nt, Artificial Sequence
  Chemically synthesized
aucuucccaugucaguuccuc

SEQ ID NO: 30740 - RNA, 21 nt, Artificial Sequence
  Chemically synthesized
uuguuggagaucucgaugaag

SEQ ID NO: 30741 - RNA, 21 nt, Artificial Sequence
  Chemically synthesized
augaaggaucucagcauccug

SEQ ID NO: 30742 - RNA, 21 nt, Artificial Sequence
  Chemically synthesized
auaaggcgagacuuuuccuca

SEQ ID NO: 30743 - RNA, 21 nt, Artificial Sequence
  Chemically synthesized
caugaagaccaccaggauguc

SEQ ID NO: 30744 - RNA, 21 nt, Artificial Sequence
  Chemically synthesized
aaguugaccuucuguggaggc

SEQ ID NO: 30745 - RNA, 21 nt, Artificial Sequence
  Chemically synthesized
gaaauuucucauccggagccg

SEQ ID NO: 30746 - RNA, 21 nt, Artificial Sequence
  Chemically synthesized
auuucggauuucuucaaucuc

SEQ ID NO: 30747 - RNA, 21 nt, Artificial Sequence
  Chemically synthesized
aaucuccuucuuggagaacag

SEQ ID NO: 30748 - RNA, 21 nt, Artificial Sequence
  Chemically synthesized
acaucuucaaccaacacaugg

SEQ ID NO: 30749 - RNA, 21 nt, Artificial Sequence
  Chemically synthesized
cucuggagacacuugaguucc

SEQ ID NO: 30750 - RNA, 21 nt, Artificial Sequence
  Chemically synthesized
uacuccgggaguguuuucugc

SEQ ID NO: 30751 - RNA, 21 nt, Artificial Sequence
  Chemically synthesized
acuccgggaguguuuucugca

SEQ ID NO: 30752 - RNA, 21 nt, Artificial Sequence
  Chemically synthesized
gggucugaugaaagaacgugc

SEQ ID NO: 30753 - RNA, 21 nt, Artificial Sequence
  Chemically synthesized
aagaugccagcauccaugcuc

SEQ ID NO: 30754 - RNA, 21 nt, Artificial Sequence
  Chemically synthesized
uuguuucugaagucuggaagc

SEQ ID NO: 30755 - RNA, 21 nt, Artificial Sequence
  Chemically synthesized
uccaugagguuguuguaccac

SEQ ID NO: 30756 - RNA, 21 nt, Artificial Sequence
  Chemically synthesized
uauggccaccuggaacaaggu

SEQ ID NO: 30757 - RNA, 21 nt, Artificial Sequence
  Chemically synthesized
agaaguucucauaaugguggg

SEQ ID NO: 30758 - RNA, 21 nt, Artificial Sequence
  Chemically synthesized
aauggugggagaagugagucc

SEQ ID NO: 30759 - RNA, 21 nt, Artificial Sequence
  Chemically synthesized
ugggaccaggaagaagaugug

SEQ ID NO: 30760 - RNA, 21 nt, Artificial Sequence
  Chemically synthesized
acccaucaucauggaagaggc

SEQ ID NO: 30761 - RNA, 21 nt, Artificial Sequence
  Chemically synthesized
auuagaaugucccaaaaugga

SEQ ID NO: 30762 - RNA, 21 nt, Artificial Sequence
  Chemically synthesized
aaugaggcgauggaaguccac

SEQ ID NO: 30763 - RNA, 21 nt, Artificial Sequence
  Chemically synthesized
agaaugucccaaaauggagac

SEQ ID NO: 30764 - RNA, 21 nt, Artificial Sequence
  Chemically synthesized
aagauguaggagaacaugaaa

SEQ ID NO: 30765 - RNA, 21 nt, Artificial Sequence
  Chemically synthesized
uucucaaugaagcgcuugaac

SEQ ID NO: 30766 - RNA, 21 nt, Artificial Sequence
  Chemically synthesized
gaagcgcuugaacuguugcac

SEQ ID NO: 30767 - RNA, 21 nt, Artificial Sequence
  Chemically synthesized
aacagcaagggcuggaaugac

SEQ ID NO: 30768 - RNA, 21 nt, Artificial Sequence
  Chemically synthesized
aacucauccuuggaaaugagg

SEQ ID NO: 30769 - RNA, 21 nt, Artificial Sequence
  Chemically synthesized
ucauccuuggaaaugaggcca

SEQ ID NO: 30770 - RNA, 21 nt, Artificial Sequence
  Chemically synthesized
guacaugcggaacauaaggcg

SEQ ID NO: 30771 - RNA, 21 nt, Artificial Sequence
  Chemically synthesized
uaaggcgagacuuuuccucag

SEQ ID NO: 30772 - RNA, 21 nt, Artificial Sequence
  Chemically synthesized
agacuuuuccucaggagagcc

SEQ ID NO: 30773 - RNA, 21 nt, Artificial Sequence
  Chemically synthesized
aggacgaaguugaccuucugu

SEQ ID NO: 30774 - RNA, 21 nt, Artificial Sequence
  Chemically synthesized
auuccaaagcuuccaugccuc

SEQ ID NO: 30775 - RNA, 21 nt, Artificial Sequence
  Chemically synthesized
uucucagacacgaugcucugg

SEQ ID NO: 30776 - RNA, 21 nt, Artificial Sequence
  Chemically synthesized
aaauuucucauccggagccgg

SEQ ID NO: 30777 - RNA, 21 nt, Artificial Sequence
  Chemically synthesized
ucaauguugauaacagcgacc

SEQ ID NO: 30778 - RNA, 21 nt, Artificial Sequence
  Chemically synthesized
uugauaacagcgaccagcacg

SEQ ID NO: 30779 - RNA, 21 nt, Artificial Sequence
  Chemically synthesized
uuccugguguucucaaaccag

SEQ ID NO: 30780 - RNA, 21 nt, Artificial Sequence
  Chemically synthesized
uaaugggagacaagcccagug

SEQ ID NO: 30781 - RNA, 21 nt, Artificial Sequence
  Chemically synthesized
cuuuguaggcuugggugcuca

SEQ ID NO: 30782 - RNA, 21 nt, Artificial Sequence
  Chemically synthesized
gagacacuugaguuccgauug

SEQ ID NO: 30783 - RNA, 21 nt, Artificial Sequence
  Chemically synthesized
auacuccgggaguguuuucug

SEQ ID NO: 30784 - RNA, 21 nt, Artificial Sequence
  Chemically synthesized
uauuuggaagggagacuacug

SEQ ID NO: 30785 - RNA, 21 nt, Artificial Sequence
  Chemically synthesized
acgugcuuaaaaccuugggug

SEQ ID NO: 30786 - RNA, 21 nt, Artificial Sequence
  Chemically synthesized
guaaauggcuugccauggguc

SEQ ID NO: 30787 - RNA, 21 nt, Artificial Sequence
  Chemically synthesized
ugagauuuguuucugaagucu

SEQ ID NO: 30788 - RNA, 21 nt, Artificial Sequence
  Chemically synthesized
agauuuguuucugaagucugg

SEQ ID NO: 30789 - RNA, 21 nt, Artificial Sequence
  Chemically synthesized
aagucuggaagcagagguuuc

SEQ ID NO: 30790 - RNA, 21 nt, Artificial Sequence
  Chemically synthesized
auggugacugacuauggccac

SEQ ID NO: 30791 - RNA, 21 nt, Artificial Sequence
  Chemically synthesized
aaguucucauaauggugggag

SEQ ID NO: 30792 - RNA, 21 nt, Artificial Sequence
  Chemically synthesized
uuccacauucuuggucaugcc

SEQ ID NO: 30793 - RNA, 21 nt, Artificial Sequence
  Chemically synthesized
ucaaacuuaugccacuccugg

SEQ ID NO: 30794 - RNA, 21 nt, Artificial Sequence
  Chemically synthesized
uccaucaagguacagcuuugg

SEQ ID NO: 30795 - RNA, 21 nt, Artificial Sequence
  Chemically synthesized
cccaugaugaaaauaauaggg

SEQ ID NO: 30796 - RNA, 21 nt, Artificial Sequence
  Chemically synthesized
uucucgcaggaaggugaugag

SEQ ID NO: 30797 - RNA, 21 nt, Artificial Sequence
  Chemically synthesized
gaaugucccaaaauggagacc

SEQ ID NO: 30798 - RNA, 21 nt, Artificial Sequence
  Chemically synthesized
cgaugaaggaucucagcaucc

SEQ ID NO: 30799 - RNA, 21 nt, Artificial Sequence
  Chemically synthesized
uacaugcggaacauaaggcga

SEQ ID NO: 30800 - RNA, 21 nt, Artificial Sequence
  Chemically synthesized
auggacuccacaaacaugucc

SEQ ID NO: 30801 - RNA, 21 nt, Artificial Sequence
  Chemically synthesized
aaaaaggucuccaggaggugc

SEQ ID NO: 30802 - RNA, 21 nt, Artificial Sequence
  Chemically synthesized
gucaauguugauaacagcgac

SEQ ID NO: 30803 - RNA, 21 nt, Artificial Sequence
  Chemically synthesized
auuccugguguucucaaacca

SEQ ID NO: 30804 - RNA, 21 nt, Artificial Sequence
  Chemically synthesized
ucaaaccaguagcggucacca

SEQ ID NO: 30805 - RNA, 21 nt, Artificial Sequence
  Chemically synthesized
agcucuagccaggauaagucc

SEQ ID NO: 30806 - RNA, 21 nt, Artificial Sequence
  Chemically synthesized
cauacauagguauugggccag

SEQ ID NO: 30807 - RNA, 21 nt, Artificial Sequence
  Chemically synthesized
gagaugguguugcuaaggucu

SEQ ID NO: 30808 - RNA, 21 nt, Artificial Sequence
  Chemically synthesized
gguuucuguaaauggcuugcc

SEQ ID NO: 30809 - RNA, 21 nt, Artificial Sequence
  Chemically synthesized
gaggguucuaagaugccagca

SEQ ID NO: 30810 - RNA, 21 nt, Artificial Sequence
  Chemically synthesized
ucuucugagauuuguuucuga

SEQ ID NO: 30811 - RNA, 21 nt, Artificial Sequence
  Chemically synthesized
gauuuguuucugaagucugga

SEQ ID NO: 30812 - RNA, 21 nt, Artificial Sequence
  Chemically synthesized
gaggugggaaaucagagaagg

SEQ ID NO: 30813 - RNA, 21 nt, Artificial Sequence
  Chemically synthesized
acagauguacagcauaguggu

SEQ ID NO: 30814 - RNA, 21 nt, Artificial Sequence
  Chemically synthesized
gaaguguccaugcuagagcca

SEQ ID NO: 30815 - RNA, 21 nt, Artificial Sequence
  Chemically synthesized
aaugguccaucaagguacagc

SEQ ID NO: 30816 - RNA, 21 nt, Artificial Sequence
  Chemically synthesized
uggaagaaccaccaguaauac

SEQ ID NO: 30817 - RNA, 21 nt, Artificial Sequence
  Chemically synthesized
agacccaucaucauggaagag

SEQ ID NO: 30818 - RNA, 21 nt, Artificial Sequence
  Chemically synthesized
cacacuguguaagacugugag

SEQ ID NO: 30819 - RNA, 21 nt, Artificial Sequence
  Chemically synthesized
acagcugcguuggaacuucuc

SEQ ID NO: 30820 - RNA, 21 nt, Artificial Sequence
  Chemically synthesized
agagggacagaucauauccug

SEQ ID NO: 30821 - RNA, 21 nt, Artificial Sequence
  Chemically synthesized
uuggacaggcaguuguuggag

SEQ ID NO: 30822 - RNA, 21 nt, Artificial Sequence
  Chemically synthesized
cuuggaaaugaggccauuccc

SEQ ID NO: 30823 - RNA, 21 nt, Artificial Sequence
  Chemically synthesized
aaagucguacaugcggaacau

SEQ ID NO: 30824 - RNA, 21 nt, Artificial Sequence
  Chemically synthesized
ucagccagagagaacauggac

SEQ ID NO: 30825 - RNA, 21 nt, Artificial Sequence
  Chemically synthesized
agccagagagaacauggacuc

SEQ ID NO: 30826 - RNA, 21 nt, Artificial Sequence
  Chemically synthesized
gacuccacaaacauguccugg

SEQ ID NO: 30827 - RNA, 21 nt, Artificial Sequence
  Chemically synthesized
ucuuggagaacagcccauucc

SEQ ID NO: 30828 - RNA, 21 nt, Artificial Sequence
  Chemically synthesized
uucaaggacgauggugcugaa

SEQ ID NO: 30829 - RNA, 21 nt, Artificial Sequence
  Chemically synthesized
ucuagccaggauaaguccugg

SEQ ID NO: 30830 - RNA, 21 nt, Artificial Sequence
  Chemically synthesized
gauaaguccugguuguacagg

SEQ ID NO: 30831 - RNA, 21 nt, Artificial Sequence
  Chemically synthesized
caucuucagcacuuuguaggc

SEQ ID NO: 30832 - RNA, 21 nt, Artificial Sequence
  Chemically synthesized
uuuguaggcuugggugcucac

SEQ ID NO: 30833 - RNA, 21 nt, Artificial Sequence
  Chemically synthesized
aauggccgguauccuguauac

SEQ ID NO: 30834 - RNA, 21 nt, Artificial Sequence
  Chemically synthesized
guuucuguaaauggcuugcca

SEQ ID NO: 30835 - RNA, 21 nt, Artificial Sequence
  Chemically synthesized
gucuucugagauuuguuucug

SEQ ID NO: 30836 - RNA, 21 nt, Artificial Sequence
  Chemically synthesized
gagauuuguuucugaagucug

SEQ ID NO: 30837 - RNA, 21 nt, Artificial Sequence
  Chemically synthesized
uuuguuucugaagucuggaag

SEQ ID NO: 30838 - RNA, 21 nt, Artificial Sequence
  Chemically synthesized
aagugccgcucacagauguac

SEQ ID NO: 30839 - RNA, 21 nt, Artificial Sequence
  Chemically synthesized
ucacagauguacagcauagug

SEQ ID NO: 30840 - RNA, 21 nt, Artificial Sequence
  Chemically synthesized
cacagauguacagcauagugg

SEQ ID NO: 30841 - RNA, 21 nt, Artificial Sequence
  Chemically synthesized
agauguacagcauaguggucc

SEQ ID NO: 30842 - RNA, 21 nt, Artificial Sequence
  Chemically synthesized
ggcucagggauuagaaugucc

SEQ ID NO: 30843 - RNA, 21 nt, Artificial Sequence
  Chemically synthesized
acacuguguaagacugugagg

SEQ ID NO: 30844 - RNA, 21 nt, Artificial Sequence
  Chemically synthesized
uuucucgcaggaaggugauga

SEQ ID NO: 30845 - RNA, 21 nt, Artificial Sequence
  Chemically synthesized
auauccuggcugauguaggag

SEQ ID NO: 30846 - RNA, 21 nt, Artificial Sequence
  Chemically synthesized
agguccuugaugacuucaggc

SEQ ID NO: 30847 - RNA, 21 nt, Artificial Sequence
  Chemically synthesized
uugaugacuucaggcaccucc

SEQ ID NO: 30848 - RNA, 21 nt, Artificial Sequence
  Chemically synthesized
cagcaugaagugaaaaucuuc

SEQ ID NO: 30849 - RNA, 21 nt, Artificial Sequence
  Chemically synthesized
agcaugaagugaaaaucuucc

SEQ ID NO: 30850 - RNA, 21 nt, Artificial Sequence
  Chemically synthesized
aucaaagucguacaugcggaa

SEQ ID NO: 30851 - RNA, 21 nt, Artificial Sequence
  Chemically synthesized
aaggacagguagccauugcca

SEQ ID NO: 30852 - RNA, 21 nt, Artificial Sequence
  Chemically synthesized
ugucagccagagagaacaugg

SEQ ID NO: 30853 - RNA, 21 nt, Artificial Sequence
  Chemically synthesized
uugaaauuucucauccggagc

SEQ ID NO: 30854 - RNA, 21 nt, Artificial Sequence
  Chemically synthesized
ugaaauuucucauccggagcc

SEQ ID NO: 30855 - RNA, 21 nt, Artificial Sequence
  Chemically synthesized
cagacaaagacauugggcugc

SEQ ID NO: 30856 - RNA, 21 nt, Artificial Sequence
  Chemically synthesized
caauguugauaacagcgacca

SEQ ID NO: 30857 - RNA, 21 nt, Artificial Sequence
  Chemically synthesized
aucuccuucuuggagaacagc

SEQ ID NO: 30858 - RNA, 21 nt, Artificial Sequence
  Chemically synthesized
uucagcacuuuguaggcuugg

SEQ ID NO: 30859 - RNA, 21 nt, Artificial Sequence
  Chemically synthesized
ucuggagacacuugaguuccg

SEQ ID NO: 30860 - RNA, 21 nt, Artificial Sequence
  Chemically synthesized
cuggagacacuugaguuccga

SEQ ID NO: 30861 - RNA, 21 nt, Artificial Sequence
  Chemically synthesized
cuggcauuucucauguagacg

SEQ ID NO: 30862 - RNA, 21 nt, Artificial Sequence
  Chemically synthesized
auuuauuuggaagggagacua

SEQ ID NO: 30863 - RNA, 21 nt, Artificial Sequence
  Chemically synthesized
uucugagauuuguuucugaag

SEQ ID NO: 30864 - RNA, 21 nt, Artificial Sequence
  Chemically synthesized
cugagauuuguuucugaaguc

SEQ ID NO: 30865 - RNA, 21 nt, Artificial Sequence
  Chemically synthesized
aaucagagaaggcugaggcag

SEQ ID NO: 30866 - RNA, 21 nt, Artificial Sequence
  Chemically synthesized
ugccuguugaugagcugacag

SEQ ID NO: 30867 - RNA, 21 nt, Artificial Sequence
  Chemically synthesized
guagaugugcacagacaccag

SEQ ID NO: 30868 - RNA, 21 nt, Artificial Sequence
  Chemically synthesized
uagaugugcacagacaccagg

SEQ ID NO: 30869 - RNA, 21 nt, Artificial Sequence
  Chemically synthesized
uugaagaccaggucuuugagg

SEQ ID NO: 30870 - RNA, 21 nt, Artificial Sequence
  Chemically synthesized
aaacuuaugccacuccuggug

SEQ ID NO: 30871 - RNA, 21 nt, Artificial Sequence
  Chemically synthesized
auagaugauugcugggaccag

SEQ ID NO: 30872 - RNA, 21 nt, Artificial Sequence
  Chemically synthesized
uagaugauugcugggaccagg

SEQ ID NO: 30873 - RNA, 21 nt, Artificial Sequence
  Chemically synthesized
uacaugauggccaggaucagg

SEQ ID NO: 30874 - RNA, 21 nt, Artificial Sequence
  Chemically synthesized
cucagggauuagaauguccca

SEQ ID NO: 30875 - RNA, 21 nt, Artificial Sequence
  Chemically synthesized
gaacagguacacauucaccac

SEQ ID NO: 30876 - RNA, 21 nt, Artificial Sequence
  Chemically synthesized
agguacacauucaccacaugg

SEQ ID NO: 30877 - RNA, 21 nt, Artificial Sequence
  Chemically synthesized
aagguuucucgcaggaaggug

SEQ ID NO: 30878 - RNA, 21 nt, Artificial Sequence
  Chemically synthesized
agggcuggaaugacguuaccu

SEQ ID NO: 30879 - RNA, 21 nt, Artificial Sequence
  Chemically synthesized
cucugaggugucaacucaguc

SEQ ID NO: 30880 - RNA, 21 nt, Artificial Sequence
  Chemically synthesized
acucagucucaaugucgcugc

SEQ ID NO: 30881 - RNA, 21 nt, Artificial Sequence
  Chemically synthesized
agggacagaucauauccuggc

SEQ ID NO: 30882 - RNA, 21 nt, Artificial Sequence
  Chemically synthesized
uauccuggcugauguaggagg

SEQ ID NO: 30883 - RNA, 21 nt, Artificial Sequence
  Chemically synthesized
guuggagaucucgaugaagga

SEQ ID NO: 30884 - RNA, 21 nt, Artificial Sequence
  Chemically synthesized
auccugaugaacucauccuug

SEQ ID NO: 30885 - RNA, 21 nt, Artificial Sequence
  Chemically synthesized
auugccauccuugucagccag

SEQ ID NO: 30886 - RNA, 21 nt, Artificial Sequence
  Chemically synthesized
cagagagaacauggacuccac

SEQ ID NO: 30887 - RNA, 21 nt, Artificial Sequence
  Chemically synthesized
aaaaggugccugaaaaagguc

SEQ ID NO: 30888 - RNA, 21 nt, Artificial Sequence
  Chemically synthesized
gacaggacgaaguugaccuuc

SEQ ID NO: 30889 - RNA, 21 nt, Artificial Sequence
  Chemically synthesized
gccauuccaaagcuuccaugc

SEQ ID NO: 30890 - RNA, 21 nt, Artificial Sequence
  Chemically synthesized
agcuucucagacacgaugcuc

SEQ ID NO: 30891 - RNA, 21 nt, Artificial Sequence
  Chemically synthesized
cuuggagaacagcccauuccu

SEQ ID NO: 30892 - RNA, 21 nt, Artificial Sequence
  Chemically synthesized
ugguguucucaaaccaguagc

SEQ ID NO: 30893 - RNA, 21 nt, Artificial Sequence
  Chemically synthesized
gguguucucaaaccaguagcg

SEQ ID NO: 30894 - RNA, 21 nt, Artificial Sequence
  Chemically synthesized
agccaggauaaguccugguug

SEQ ID NO: 30895 - RNA, 21 nt, Artificial Sequence
  Chemically synthesized
cagcuggcauuucucauguag

SEQ ID NO: 30896 - RNA, 21 nt, Artificial Sequence
  Chemically synthesized
uggcauuucucauguagacgc

SEQ ID NO: 30897 - RNA, 21 nt, Artificial Sequence
  Chemically synthesized
uauccuguauacuccgggagu

SEQ ID NO: 30898 - RNA, 21 nt, Artificial Sequence
  Chemically synthesized
aaagcacgugauagccaaaga

SEQ ID NO: 30899 - RNA, 21 nt, Artificial Sequence
  Chemically synthesized
aagcacgugauagccaaagaa

SEQ ID NO: 30900 - RNA, 21 nt, Artificial Sequence
  Chemically synthesized
aacacugugcgguuucucagg

SEQ ID NO: 30901 - RNA, 21 nt, Artificial Sequence
  Chemically synthesized
uuuggaagggagacuacugga

SEQ ID NO: 30902 - RNA, 21 nt, Artificial Sequence
  Chemically synthesized
ugcauacauagguauugggcc

SEQ ID NO: 30903 - RNA, 21 nt, Artificial Sequence
  Chemically synthesized
uauugggccagggucugauga

SEQ ID NO: 30904 - RNA, 21 nt, Artificial Sequence
  Chemically synthesized
gaagcagagguuucacuuugc

SEQ ID NO: 30905 - RNA, 21 nt, Artificial Sequence
  Chemically synthesized
aggugggaaaucagagaaggc

SEQ ID NO: 30906 - RNA, 21 nt, Artificial Sequence
  Chemically synthesized
uuuuccacauucuuggucaug

SEQ ID NO: 30907 - RNA, 21 nt, Artificial Sequence
  Chemically synthesized
uuuccacauucuuggucaugc

SEQ ID NO: 30908 - RNA, 21 nt, Artificial Sequence
  Chemically synthesized
agacuccgguucagaaccuuc

SEQ ID NO: 30909 - RNA, 21 nt, Artificial Sequence
  Chemically synthesized
uguacagcauagugguccuga

SEQ ID NO: 30910 - RNA, 21 nt, Artificial Sequence
  Chemically synthesized
agaugugcacagacaccaggu

SEQ ID NO: 30911 - RNA, 21 nt, Artificial Sequence
  Chemically synthesized
guagaucuucuuacagaacac

SEQ ID NO: 30912 - RNA, 21 nt, Artificial Sequence
  Chemically synthesized
aaccagaaguguccaugcuag

SEQ ID NO: 30913 - RNA, 21 nt, Artificial Sequence
  Chemically synthesized
ccaucaagguacagcuuuggg

SEQ ID NO: 30914 - RNA, 21 nt, Artificial Sequence
  Chemically synthesized
gcucagggauuagaauguccc

SEQ ID NO: 30915 - RNA, 21 nt, Artificial Sequence
  Chemically synthesized
gaaccaccaguaauacuucug

SEQ ID NO: 30916 - RNA, 21 nt, Artificial Sequence
  Chemically synthesized
ucaucauggaagaggccagga

SEQ ID NO: 30917 - RNA, 21 nt, Artificial Sequence
  Chemically synthesized
aaagaggcaagagaggacgcu

SEQ ID NO: 30918 - RNA, 21 nt, Artificial Sequence
  Chemically synthesized
caaugaggcgauggaagucca

SEQ ID NO: 30919 - RNA, 21 nt, Artificial Sequence
  Chemically synthesized
ucaaugaagcgcuugaacugu

SEQ ID NO: 30920 - RNA, 21 nt, Artificial Sequence
  Chemically synthesized
ugaggugucaacucagucuca

SEQ ID NO: 30921 - RNA, 21 nt, Artificial Sequence
  Chemically synthesized
gaucucgaugaaggaucucag

SEQ ID NO: 30922 - RNA, 21 nt, Artificial Sequence
  Chemically synthesized
cucagcauccugaugaacuca

SEQ ID NO: 30923 - RNA, 21 nt, Artificial Sequence
  Chemically synthesized
acucauccuuggaaaugaggc

SEQ ID NO: 30924 - RNA, 21 nt, Artificial Sequence
  Chemically synthesized
uccuuggaaaugaggccauuc

SEQ ID NO: 30925 - RNA, 21 nt, Artificial Sequence
  Chemically synthesized
uuuccucaggagagccuuuca

SEQ ID NO: 30926 - RNA, 21 nt, Artificial Sequence
  Chemically synthesized
aaaggugccugaaaaaggucu

SEQ ID NO: 30927 - RNA, 21 nt, Artificial Sequence
  Chemically synthesized
gaaguugaccuucuguggagg

SEQ ID NO: 30928 - RNA, 21 nt, Artificial Sequence
  Chemically synthesized
cuucucagacacgaugcucug

SEQ ID NO: 30929 - RNA, 21 nt, Artificial Sequence
  Chemically synthesized
aacagcccauuccugguguuc

SEQ ID NO: 30930 - RNA, 21 nt, Artificial Sequence
  Chemically synthesized
aucuucagcacuuuguaggcu

SEQ ID NO: 30931 - RNA, 21 nt, Artificial Sequence
  Chemically synthesized
agcacuuuguaggcuugggug

SEQ ID NO: 30932 - RNA, 21 nt, Artificial Sequence
  Chemically synthesized
uauacuccgggaguguuuucu

SEQ ID NO: 30933 - RNA, 21 nt, Artificial Sequence
  Chemically synthesized
uacacagcgauguucugguag

SEQ ID NO: 30934 - RNA, 21 nt, Artificial Sequence
  Chemically synthesized
augcucccacugcauccuuac

SEQ ID NO: 30935 - RNA, 21 nt, Artificial Sequence
  Chemically synthesized
uacuugucaggucagcuuguc

SEQ ID NO: 30936 - RNA, 21 nt, Artificial Sequence
  Chemically synthesized
uucugaagucuggaagcagag

SEQ ID NO: 30937 - RNA, 21 nt, Artificial Sequence
  Chemically synthesized
gaaguucucauaaugguggga

SEQ ID NO: 30938 - RNA, 21 nt, Artificial Sequence
  Chemically synthesized
cucauaauggugggagaagug

SEQ ID NO: 30939 - RNA, 23 nt, Artificial Sequence
  Chemically synthesized
ccaguaauuagauguagaaucuu

SEQ ID NO: 30940 - RNA, 23 nt, Artificial Sequence
  Chemically synthesized
accaguaauuagauguagaaucu

SEQ ID NO: 30941 - RNA, 23 nt, Artificial Sequence
  Chemically synthesized
uaccaguaauuagauguagaauc

SEQ ID NO: 30942 - RNA, 23 nt, Artificial Sequence
  Chemically synthesized
guaccaguaauuagauguagaau

SEQ ID NO: 30943 - RNA, 23 nt, Artificial Sequence
  Chemically synthesized
gguaccaguaauuagauguagaa

SEQ ID NO: 30944 - RNA, 23 nt, Artificial Sequence
  Chemically synthesized
ccaagaauuaaaccaagacaaag

SEQ ID NO: 30945 - RNA, 23 nt, Artificial Sequence
  Chemically synthesized
cccaagaauuaaaccaagacaaa

SEQ ID NO: 30946 - RNA, 23 nt, Artificial Sequence
  Chemically synthesized
acccaagaauuaaaccaagacaa

SEQ ID NO: 30947 - RNA, 23 nt, Artificial Sequence
  Chemically synthesized
uacccaagaauuaaaccaagaca

SEQ ID NO: 30948 - RNA, 23 nt, Artificial Sequence
  Chemically synthesized
guacccaagaauuaaaccaagac

SEQ ID NO: 30949 - RNA, 23 nt, Artificial Sequence
  Chemically synthesized
uguacccaagaauuaaaccaaga

SEQ ID NO: 30950 - RNA, 23 nt, Artificial Sequence
  Chemically synthesized
ggauccaaguuuaaaaagaaaug

SEQ ID NO: 30951 - RNA, 23 nt, Artificial Sequence
  Chemically synthesized
aggauccaaguuuaaaaagaaau

SEQ ID NO: 30952 - RNA, 23 nt, Artificial Sequence
  Chemically synthesized
caggauccaaguuuaaaaagaaa

SEQ ID NO: 30953 - RNA, 23 nt, Artificial Sequence
  Chemically synthesized
ucaggauccaaguuuaaaaagaa

SEQ ID NO: 30954 - RNA, 23 nt, Artificial Sequence
  Chemically synthesized
cucaggauccaaguuuaaaaaga

SEQ ID NO: 30955 - RNA, 23 nt, Artificial Sequence
  Chemically synthesized
caagaauuaaaccaagacaaagg

SEQ ID NO: 30956 - RNA, 23 nt, Artificial Sequence
  Chemically synthesized
ccaacuaaauuacugccuuucuu

SEQ ID NO: 30957 - RNA, 23 nt, Artificial Sequence
  Chemically synthesized
cccaacuaaauuacugccuuucu

SEQ ID NO: 30958 - RNA, 23 nt, Artificial Sequence
  Chemically synthesized
gcccaacuaaauuacugccuuuc

SEQ ID NO: 30959 - RNA, 23 nt, Artificial Sequence
  Chemically synthesized
agcccaacuaaauuacugccuuu

SEQ ID NO: 30960 - RNA, 23 nt, Artificial Sequence
  Chemically synthesized
cagcccaacuaaauuacugccuu

SEQ ID NO: 30961 - RNA, 23 nt, Artificial Sequence
  Chemically synthesized
ggauugaagaauucaccauuaga

SEQ ID NO: 30962 - RNA, 23 nt, Artificial Sequence
  Chemically synthesized
aggauugaagaauucaccauuag

SEQ ID NO: 30963 - RNA, 23 nt, Artificial Sequence
  Chemically synthesized
aaggauugaagaauucaccauua

SEQ ID NO: 30964 - RNA, 23 nt, Artificial Sequence
  Chemically synthesized
gaaggauugaagaauucaccauu

SEQ ID NO: 30965 - RNA, 23 nt, Artificial Sequence
  Chemically synthesized
ugaaggauugaagaauucaccau

SEQ ID NO: 30966 - RNA, 23 nt, Artificial Sequence
  Chemically synthesized
ggacuguacccaagaauuaaacc

SEQ ID NO: 30967 - RNA, 23 nt, Artificial Sequence
  Chemically synthesized
gggacuguacccaagaauuaaac

SEQ ID NO: 30968 - RNA, 23 nt, Artificial Sequence
  Chemically synthesized
ugggacuguacccaagaauuaaa

SEQ ID NO: 30969 - RNA, 23 nt, Artificial Sequence
  Chemically synthesized
cugggacuguacccaagaauuaa

SEQ ID NO: 30970 - RNA, 23 nt, Artificial Sequence
  Chemically synthesized
gcugggacuguacccaagaauua

SEQ ID NO: 30971 - RNA, 23 nt, Artificial Sequence
  Chemically synthesized
ccacagggaagacgaagaugaaa

SEQ ID NO: 30972 - RNA, 23 nt, Artificial Sequence
  Chemically synthesized
uccacagggaagacgaagaugaa

SEQ ID NO: 30973 - RNA, 23 nt, Artificial Sequence
  Chemically synthesized
auccacagggaagacgaagauga

SEQ ID NO: 30974 - RNA, 23 nt, Artificial Sequence
  Chemically synthesized
cauccacagggaagacgaagaug

SEQ ID NO: 30975 - RNA, 23 nt, Artificial Sequence
  Chemically synthesized
ucauccacagggaagacgaagau

SEQ ID NO: 30976 - RNA, 23 nt, Artificial Sequence
  Chemically synthesized
ucccaucauacccauccaaguca

SEQ ID NO: 30977 - RNA, 23 nt, Artificial Sequence
  Chemically synthesized
gucccaucauacccauccaaguc

SEQ ID NO: 30978 - RNA, 23 nt, Artificial Sequence
  Chemically synthesized
ugucccaucauacccauccaagu

SEQ ID NO: 30979 - RNA, 23 nt, Artificial Sequence
  Chemically synthesized
cugucccaucauacccauccaag

SEQ ID NO: 30980 - RNA, 23 nt, Artificial Sequence
  Chemically synthesized
ucugucccaucauacccauccaa

SEQ ID NO: 30981 - RNA, 23 nt, Artificial Sequence
  Chemically synthesized
gcguugaccaagacucauaccag

SEQ ID NO: 30982 - RNA, 23 nt, Artificial Sequence
  Chemically synthesized
cgcguugaccaagacucauacca

SEQ ID NO: 30983 - RNA, 23 nt, Artificial Sequence
  Chemically synthesized
gcgcguugaccaagacucauacc

SEQ ID NO: 30984 - RNA, 23 nt, Artificial Sequence
  Chemically synthesized
agcgcguugaccaagacucauac

SEQ ID NO: 30985 - RNA, 23 nt, Artificial Sequence
  Chemically synthesized
gagcgcguugaccaagacucaua

SEQ ID NO: 30986 - RNA, 23 nt, Artificial Sequence
  Chemically synthesized
acaccuuacuuccacccuucaga

SEQ ID NO: 30987 - RNA, 23 nt, Artificial Sequence
  Chemically synthesized
gacaccuuacuuccacccuucag

SEQ ID NO: 30988 - RNA, 23 nt, Artificial Sequence
  Chemically synthesized
agacaccuuacuuccacccuuca

SEQ ID NO: 30989 - RNA, 23 nt, Artificial Sequence
  Chemically synthesized
aagacaccuuacuuccacccuuc

SEQ ID NO: 30990 - RNA, 23 nt, Artificial Sequence
  Chemically synthesized
aaagacaccuuacuuccacccuu

SEQ ID NO: 30991 - RNA, 23 nt, Artificial Sequence
  Chemically synthesized
cgguaccaguaauuagauguaga

SEQ ID NO: 30992 - RNA, 23 nt, Artificial Sequence
  Chemically synthesized
acgguaccaguaauuagauguag

SEQ ID NO: 30993 - RNA, 23 nt, Artificial Sequence
  Chemically synthesized
uacgguaccaguaauuagaugua

SEQ ID NO: 30994 - RNA, 23 nt, Artificial Sequence
  Chemically synthesized
cgcugagggagaaagagaagaaa

SEQ ID NO: 30995 - RNA, 23 nt, Artificial Sequence
  Chemically synthesized
ccgcugagggagaaagagaagaa

SEQ ID NO: 30996 - RNA, 23 nt, Artificial Sequence
  Chemically synthesized
uccgcugagggagaaagagaaga

SEQ ID NO: 30997 - RNA, 23 nt, Artificial Sequence
  Chemically synthesized
uuccgcugagggagaaagagaag

SEQ ID NO: 30998 - RNA, 23 nt, Artificial Sequence
  Chemically synthesized
guuccgcugagggagaaagagaa

SEQ ID NO: 30999 - RNA, 23 nt, Artificial Sequence
  Chemically synthesized
ggaucugacucuugcugaacuuc

SEQ ID NO: 31000 - RNA, 23 nt, Artificial Sequence
  Chemically synthesized
uggaucugacucuugcugaacuu

SEQ ID NO: 31001 - RNA, 23 nt, Artificial Sequence
  Chemically synthesized
auggaucugacucuugcugaacu

SEQ ID NO: 31002 - RNA, 23 nt, Artificial Sequence
  Chemically synthesized
gauggaucugacucuugcugaac

SEQ ID NO: 31003 - RNA, 23 nt, Artificial Sequence
  Chemically synthesized
ggauggaucugacucuugcugaa

SEQ ID NO: 31004 - RNA, 23 nt, Artificial Sequence
  Chemically synthesized
gcaaaaauuucacaagacuuauu

SEQ ID NO: 31005 - RNA, 23 nt, Artificial Sequence
  Chemically synthesized
ggcaaaaauuucacaagacuuau

SEQ ID NO: 31006 - RNA, 23 nt, Artificial Sequence
  Chemically synthesized
uggcaaaaauuucacaagacuua

SEQ ID NO: 31007 - RNA, 23 nt, Artificial Sequence
  Chemically synthesized
uuggcaaaaauuucacaagacuu

SEQ ID NO: 31008 - RNA, 23 nt, Artificial Sequence
  Chemically synthesized
uuuggcaaaaauuucacaagacu

SEQ ID NO: 31009 - RNA, 23 nt, Artificial Sequence
  Chemically synthesized
uuuuggcaaaaauuucacaagac

SEQ ID NO: 31010 - RNA, 23 nt, Artificial Sequence
  Chemically synthesized
cuguacccaagaauuaaaccaag

SEQ ID NO: 31011 - RNA, 23 nt, Artificial Sequence
  Chemically synthesized
acuguacccaagaauuaaaccaa

SEQ ID NO: 31012 - RNA, 23 nt, Artificial Sequence
  Chemically synthesized
gacuguacccaagaauuaaacca

SEQ ID NO: 31013 - RNA, 23 nt, Artificial Sequence
  Chemically synthesized
ggagucauuuaugcgcuuuggga

SEQ ID NO: 31014 - RNA, 23 nt, Artificial Sequence
  Chemically synthesized
aggagucauuuaugcgcuuuggg

SEQ ID NO: 31015 - RNA, 23 nt, Artificial Sequence
  Chemically synthesized
aaggagucauuuaugcgcuuugg

SEQ ID NO: 31016 - RNA, 23 nt, Artificial Sequence
  Chemically synthesized
aaaggagucauuuaugcgcuuug

SEQ ID NO: 31017 - RNA, 23 nt, Artificial Sequence
  Chemically synthesized
uaaaggagucauuuaugcgcuuu

SEQ ID NO: 31018 - RNA, 23 nt, Artificial Sequence
  Chemically synthesized
guccaaguguguaaguuuuuggu

SEQ ID NO: 31019 - RNA, 23 nt, Artificial Sequence
  Chemically synthesized
cguccaaguguguaaguuuuugg

SEQ ID NO: 31020 - RNA, 23 nt, Artificial Sequence
  Chemically synthesized
acguccaaguguguaaguuuuug

SEQ ID NO: 31021 - RNA, 23 nt, Artificial Sequence
  Chemically synthesized
aacguccaaguguguaaguuuuu

SEQ ID NO: 31022 - RNA, 23 nt, Artificial Sequence
  Chemically synthesized
caacguccaaguguguaaguuuu

SEQ ID NO: 31023 - RNA, 23 nt, Artificial Sequence
  Chemically synthesized
gggagaauuugaccuuguacaga

SEQ ID NO: 31024 - RNA, 23 nt, Artificial Sequence
  Chemically synthesized
agggagaauuugaccuuguacag

SEQ ID NO: 31025 - RNA, 23 nt, Artificial Sequence
  Chemically synthesized
gagggagaauuugaccuuguaca

SEQ ID NO: 31026 - RNA, 23 nt, Artificial Sequence
  Chemically synthesized
ggagggagaauuugaccuuguac

SEQ ID NO: 31027 - RNA, 23 nt, Artificial Sequence
  Chemically synthesized
uggagggagaauuugaccuugua

SEQ ID NO: 31028 - RNA, 23 nt, Artificial Sequence
  Chemically synthesized
ggacaaacuugcguaaaacuggc

SEQ ID NO: 31029 - RNA, 23 nt, Artificial Sequence
  Chemically synthesized
aggacaaacuugcguaaaacugg

SEQ ID NO: 31030 - RNA, 23 nt, Artificial Sequence
  Chemically synthesized
aaggacaaacuugcguaaaacug

SEQ ID NO: 31031 - RNA, 23 nt, Artificial Sequence
  Chemically synthesized
aaaggacaaacuugcguaaaacu

SEQ ID NO: 31032 - RNA, 23 nt, Artificial Sequence
  Chemically synthesized
aaaaggacaaacuugcguaaaac

SEQ ID NO: 31033 - RNA, 23 nt, Artificial Sequence
  Chemically synthesized
ccauccaagucagcuucugugac

SEQ ID NO: 31034 - RNA, 23 nt, Artificial Sequence
  Chemically synthesized
cccauccaagucagcuucuguga

SEQ ID NO: 31035 - RNA, 23 nt, Artificial Sequence
  Chemically synthesized
acccauccaagucagcuucugug

SEQ ID NO: 31036 - RNA, 23 nt, Artificial Sequence
  Chemically synthesized
uacccauccaagucagcuucugu

SEQ ID NO: 31037 - RNA, 23 nt, Artificial Sequence
  Chemically synthesized
auacccauccaagucagcuucug

SEQ ID NO: 31038 - RNA, 23 nt, Artificial Sequence
  Chemically synthesized
gaauaagcguaauucagaagugg

SEQ ID NO: 31039 - RNA, 23 nt, Artificial Sequence
  Chemically synthesized
ugaauaagcguaauucagaagug

SEQ ID NO: 31040 - RNA, 23 nt, Artificial Sequence
  Chemically synthesized
uugaauaagcguaauucagaagu

SEQ ID NO: 31041 - RNA, 23 nt, Artificial Sequence
  Chemically synthesized
uuugaauaagcguaauucagaag

SEQ ID NO: 31042 - RNA, 23 nt, Artificial Sequence
  Chemically synthesized
guuugaauaagcguaauucagaa

SEQ ID NO: 31043 - RNA, 23 nt, Artificial Sequence
  Chemically synthesized
ggaaauugaacagaugaauaauu

SEQ ID NO: 31044 - RNA, 23 nt, Artificial Sequence
  Chemically synthesized
aggaaauugaacagaugaauaau

SEQ ID NO: 31045 - RNA, 23 nt, Artificial Sequence
  Chemically synthesized
gaggaaauugaacagaugaauaa

SEQ ID NO: 31046 - RNA, 23 nt, Artificial Sequence
  Chemically synthesized
ggaggaaauugaacagaugaaua

SEQ ID NO: 31047 - RNA, 23 nt, Artificial Sequence
  Chemically synthesized
uggaggaaauugaacagaugaau

SEQ ID NO: 31048 - RNA, 23 nt, Artificial Sequence
  Chemically synthesized
ggagaacgguguuaauaguccua

SEQ ID NO: 31049 - RNA, 23 nt, Artificial Sequence
  Chemically synthesized
aggagaacgguguuaauaguccu

SEQ ID NO: 31050 - RNA, 23 nt, Artificial Sequence
  Chemically synthesized
aaggagaacgguguuaauagucc

SEQ ID NO: 31051 - RNA, 23 nt, Artificial Sequence
  Chemically synthesized
aaaggagaacgguguuaauaguc

SEQ ID NO: 31052 - RNA, 23 nt, Artificial Sequence
  Chemically synthesized
gaaaggagaacgguguuaauagu

SEQ ID NO: 31053 - RNA, 23 nt, Artificial Sequence
  Chemically synthesized
agaaaggagaacgguguuaauag

SEQ ID NO: 31054 - RNA, 23 nt, Artificial Sequence
  Chemically synthesized
aagaaaggagaacgguguuaaua

SEQ ID NO: 31055 - RNA, 23 nt, Artificial Sequence
  Chemically synthesized
gaagaaaggagaacgguguuaau

SEQ ID NO: 31056 - RNA, 23 nt, Artificial Sequence
  Chemically synthesized
cgaagaaaggagaacgguguuaa

SEQ ID NO: 31057 - RNA, 23 nt, Artificial Sequence
  Chemically synthesized
gucuuuuguaucucagaaauuag

SEQ ID NO: 31058 - RNA, 23 nt, Artificial Sequence
  Chemically synthesized
ugucuuuuguaucucagaaauua

SEQ ID NO: 31059 - RNA, 23 nt, Artificial Sequence
  Chemically synthesized
uugucuuuuguaucucagaaauu

SEQ ID NO: 31060 - RNA, 23 nt, Artificial Sequence
  Chemically synthesized
auugucuuuuguaucucagaaau

SEQ ID NO: 31061 - RNA, 23 nt, Artificial Sequence
  Chemically synthesized
uauugucuuuuguaucucagaaa

SEQ ID NO: 31062 - RNA, 23 nt, Artificial Sequence
  Chemically synthesized
ggaagacgaagaugaaaucgaau

SEQ ID NO: 31063 - RNA, 23 nt, Artificial Sequence
  Chemically synthesized
gggaagacgaagaugaaaucgaa

SEQ ID NO: 31064 - RNA, 23 nt, Artificial Sequence
  Chemically synthesized
agggaagacgaagaugaaaucga

SEQ ID NO: 31065 - RNA, 23 nt, Artificial Sequence
  Chemically synthesized
cagggaagacgaagaugaaaucg

SEQ ID NO: 31066 - RNA, 23 nt, Artificial Sequence
  Chemically synthesized
acagggaagacgaagaugaaauc

SEQ ID NO: 31067 - RNA, 23 nt, Artificial Sequence
  Chemically synthesized
ccaaguguguaaguuuuuggugg

SEQ ID NO: 31068 - RNA, 23 nt, Artificial Sequence
  Chemically synthesized
uccaaguguguaaguuuuuggug

SEQ ID NO: 31069 - RNA, 23 nt, Artificial Sequence
  Chemically synthesized
gccacacagaaaucguuaaguuc

SEQ ID NO: 31070 - RNA, 23 nt, Artificial Sequence
  Chemically synthesized
ggccacacagaaaucguuaaguu

SEQ ID NO: 31071 - RNA, 23 nt, Artificial Sequence
  Chemically synthesized
aggccacacagaaaucguuaagu

SEQ ID NO: 31072 - RNA, 23 nt, Artificial Sequence
  Chemically synthesized
caggccacacagaaaucguuaag

SEQ ID NO: 31073 - RNA, 23 nt, Artificial Sequence
  Chemically synthesized
gcaggccacacagaaaucguuaa

SEQ ID NO: 31074 - RNA, 23 nt, Artificial Sequence
  Chemically synthesized
ggcuccacaugugcuugaugugu

SEQ ID NO: 31075 - RNA, 23 nt, Artificial Sequence
  Chemically synthesized
aggcuccacaugugcuugaugug

SEQ ID NO: 31076 - RNA, 23 nt, Artificial Sequence
  Chemically synthesized
gaggcuccacaugugcuugaugu

SEQ ID NO: 31077 - RNA, 23 nt, Artificial Sequence
  Chemically synthesized
agaggcuccacaugugcuugaug

SEQ ID NO: 31078 - RNA, 23 nt, Artificial Sequence
  Chemically synthesized
cagaggcuccacaugugcuugau

SEQ ID NO: 31079 - RNA, 23 nt, Artificial Sequence
  Chemically synthesized
cccaucauacccauccaagucag

SEQ ID NO: 31080 - RNA, 23 nt, Artificial Sequence
  Chemically synthesized
cucugucccaucauacccaucca

SEQ ID NO: 31081 - RNA, 23 nt, Artificial Sequence
  Chemically synthesized
ccaucucugucccaucauaccca

SEQ ID NO: 31082 - RNA, 23 nt, Artificial Sequence
  Chemically synthesized
accaucucugucccaucauaccc

SEQ ID NO: 31083 - RNA, 23 nt, Artificial Sequence
  Chemically synthesized
gaccaucucugucccaucauacc

SEQ ID NO: 31084 - RNA, 23 nt, Artificial Sequence
  Chemically synthesized
agaccaucucugucccaucauac

SEQ ID NO: 31085 - RNA, 23 nt, Artificial Sequence
  Chemically synthesized
gagaccaucucugucccaucaua

SEQ ID NO: 31086 - RNA, 23 nt, Artificial Sequence
  Chemically synthesized
caacuaaauuacugccuuucuua

SEQ ID NO: 31087 - RNA, 23 nt, Artificial Sequence
  Chemically synthesized
ccaugaaaacgaaagaauuccuc

SEQ ID NO: 31088 - RNA, 23 nt, Artificial Sequence
  Chemically synthesized
accaugaaaacgaaagaauuccu

SEQ ID NO: 31089 - RNA, 23 nt, Artificial Sequence
  Chemically synthesized
aaccaugaaaacgaaagaauucc

SEQ ID NO: 31090 - RNA, 23 nt, Artificial Sequence
  Chemically synthesized
gaaccaugaaaacgaaagaauuc

SEQ ID NO: 31091 - RNA, 23 nt, Artificial Sequence
  Chemically synthesized
agaaccaugaaaacgaaagaauu

SEQ ID NO: 31092 - RNA, 23 nt, Artificial Sequence
  Chemically synthesized
ggcugcuucacaaacuaaaggcu

SEQ ID NO: 31093 - RNA, 23 nt, Artificial Sequence
  Chemically synthesized
gggcugcuucacaaacuaaaggc

SEQ ID NO: 31094 - RNA, 23 nt, Artificial Sequence
  Chemically synthesized
ggggcugcuucacaaacuaaagg

SEQ ID NO: 31095 - RNA, 23 nt, Artificial Sequence
  Chemically synthesized
uggggcugcuucacaaacuaaag

SEQ ID NO: 31096 - RNA, 23 nt, Artificial Sequence
  Chemically synthesized
cuggggcugcuucacaaacuaaa

SEQ ID NO: 31097 - RNA, 23 nt, Artificial Sequence
  Chemically synthesized
cucuacagcaaaaagaaaaucua

SEQ ID NO: 31098 - RNA, 23 nt, Artificial Sequence
  Chemically synthesized
gcucuacagcaaaaagaaaaucu

SEQ ID NO: 31099 - RNA, 23 nt, Artificial Sequence
  Chemically synthesized
agcucuacagcaaaaagaaaauc

SEQ ID NO: 31100 - RNA, 23 nt, Artificial Sequence
  Chemically synthesized
cagcucuacagcaaaaagaaaau

SEQ ID NO: 31101 - RNA, 23 nt, Artificial Sequence
  Chemically synthesized
gcagcucuacagcaaaaagaaaa

SEQ ID NO: 31102 - RNA, 23 nt, Artificial Sequence
  Chemically synthesized
ucgaagaaaggagaacgguguua

SEQ ID NO: 31103 - RNA, 23 nt, Artificial Sequence
  Chemically synthesized
ggcugaauuuuaaucuguauuua

SEQ ID NO: 31104 - RNA, 23 nt, Artificial Sequence
  Chemically synthesized
aggcugaauuuuaaucuguauuu

SEQ ID NO: 31105 - RNA, 23 nt, Artificial Sequence
  Chemically synthesized
uaggcugaauuuuaaucuguauu

SEQ ID NO: 31106 - RNA, 23 nt, Artificial Sequence
  Chemically synthesized
guaggcugaauuuuaaucuguau

SEQ ID NO: 31107 - RNA, 23 nt, Artificial Sequence
  Chemically synthesized
uguaggcugaauuuuaaucugua

SEQ ID NO: 31108 - RNA, 23 nt, Artificial Sequence
  Chemically synthesized
gaaugaaggauugaagaauucac

SEQ ID NO: 31109 - RNA, 23 nt, Artificial Sequence
  Chemically synthesized
agaaugaaggauugaagaauuca

SEQ ID NO: 31110 - RNA, 23 nt, Artificial Sequence
  Chemically synthesized
gagaaugaaggauugaagaauuc

SEQ ID NO: 31111 - RNA, 23 nt, Artificial Sequence
  Chemically synthesized
agagaaugaaggauugaagaauu

SEQ ID NO: 31112 - RNA, 23 nt, Artificial Sequence
  Chemically synthesized
aagagaaugaaggauugaagaau

SEQ ID NO: 31113 - RNA, 23 nt, Artificial Sequence
  Chemically synthesized
ggauuaugaaccucagaaugaug

SEQ ID NO: 31114 - RNA, 23 nt, Artificial Sequence
  Chemically synthesized
gggauuaugaaccucagaaugau

SEQ ID NO: 31115 - RNA, 23 nt, Artificial Sequence
  Chemically synthesized
ugggauuaugaaccucagaauga

SEQ ID NO: 31116 - RNA, 23 nt, Artificial Sequence
  Chemically synthesized
uugggauuaugaaccucagaaug

SEQ ID NO: 31117 - RNA, 23 nt, Artificial Sequence
  Chemically synthesized
uuugggauuaugaaccucagaau

SEQ ID NO: 31118 - RNA, 23 nt, Artificial Sequence
  Chemically synthesized
gcauaaugaauaaaggagucauu

SEQ ID NO: 31119 - RNA, 23 nt, Artificial Sequence
  Chemically synthesized
ggcauaaugaauaaaggagucau

SEQ ID NO: 31120 - RNA, 23 nt, Artificial Sequence
  Chemically synthesized
gggcauaaugaauaaaggaguca

SEQ ID NO: 31121 - RNA, 23 nt, Artificial Sequence
  Chemically synthesized
ugggcauaaugaauaaaggaguc

SEQ ID NO: 31122 - RNA, 23 nt, Artificial Sequence
  Chemically synthesized
augggcauaaugaauaaaggagu

SEQ ID NO: 31123 - RNA, 23 nt, Artificial Sequence
  Chemically synthesized
acacagaaaucguuaaguuccug

SEQ ID NO: 31124 - RNA, 23 nt, Artificial Sequence
  Chemically synthesized
cacacagaaaucguuaaguuccu

SEQ ID NO: 31125 - RNA, 23 nt, Artificial Sequence
  Chemically synthesized
ccacacagaaaucguuaaguucc

SEQ ID NO: 31126 - RNA, 23 nt, Artificial Sequence
  Chemically synthesized
uuggagggagaauuugaccuugu

SEQ ID NO: 31127 - RNA, 23 nt, Artificial Sequence
  Chemically synthesized
uuuggagggagaauuugaccuug

SEQ ID NO: 31128 - RNA, 23 nt, Artificial Sequence
  Chemically synthesized
cuuuggagggagaauuugaccuu

SEQ ID NO: 31129 - RNA, 23 nt, Artificial Sequence
  Chemically synthesized
cauacccauccaagucagcuucu

SEQ ID NO: 31130 - RNA, 23 nt, Artificial Sequence
  Chemically synthesized
gcgaauguuugauguucuucaac

SEQ ID NO: 31131 - RNA, 23 nt, Artificial Sequence
  Chemically synthesized
agcgaauguuugauguucuucaa

SEQ ID NO: 31132 - RNA, 23 nt, Artificial Sequence
  Chemically synthesized
gagcgaauguuugauguucuuca

SEQ ID NO: 31133 - RNA, 23 nt, Artificial Sequence
  Chemically synthesized
ugagcgaauguuugauguucuuc

SEQ ID NO: 31134 - RNA, 23 nt, Artificial Sequence
  Chemically synthesized
augagcgaauguuugauguucuu

SEQ ID NO: 31135 - RNA, 23 nt, Artificial Sequence
  Chemically synthesized
ucagcccaacuaaauuacugccu

SEQ ID NO: 31136 - RNA, 23 nt, Artificial Sequence
  Chemically synthesized
ggagaaccaugaaaacgaaagaa

SEQ ID NO: 31137 - RNA, 23 nt, Artificial Sequence
  Chemically synthesized
aggagaaccaugaaaacgaaaga

SEQ ID NO: 31138 - RNA, 23 nt, Artificial Sequence
  Chemically synthesized
caggagaaccaugaaaacgaaag

SEQ ID NO: 31139 - RNA, 23 nt, Artificial Sequence
  Chemically synthesized
ucaggagaaccaugaaaacgaaa

SEQ ID NO: 31140 - RNA, 23 nt, Artificial Sequence
  Chemically synthesized
uucaggagaaccaugaaaacgaa

SEQ ID NO: 31141 - RNA, 23 nt, Artificial Sequence
  Chemically synthesized
gcacccagagaacauuuauucca

SEQ ID NO: 31142 - RNA, 23 nt, Artificial Sequence
  Chemically synthesized
agcacccagagaacauuuauucc

SEQ ID NO: 31143 - RNA, 23 nt, Artificial Sequence
  Chemically synthesized
cagcacccagagaacauuuauuc

SEQ ID NO: 31144 - RNA, 23 nt, Artificial Sequence
  Chemically synthesized
gcagcacccagagaacauuuauu

SEQ ID NO: 31145 - RNA, 23 nt, Artificial Sequence
  Chemically synthesized
agcagcacccagagaacauuuau

SEQ ID NO: 31146 - RNA, 23 nt, Artificial Sequence
  Chemically synthesized
caccuuacuuccacccuucagaa

SEQ ID NO: 31147 - RNA, 23 nt, Artificial Sequence
  Chemically synthesized
gccuuauuuuggacaaacuaauc

SEQ ID NO: 31148 - RNA, 23 nt, Artificial Sequence
  Chemically synthesized
ugccuuauuuuggacaaacuaau

SEQ ID NO: 31149 - RNA, 23 nt, Artificial Sequence
  Chemically synthesized
uugccuuauuuuggacaaacuaa

SEQ ID NO: 31150 - RNA, 23 nt, Artificial Sequence
  Chemically synthesized
uuugccuuauuuuggacaaacua

SEQ ID NO: 31151 - RNA, 23 nt, Artificial Sequence
  Chemically synthesized
auuugccuuauuuuggacaaacu

SEQ ID NO: 31152 - RNA, 23 nt, Artificial Sequence
  Chemically synthesized
ccagagcagugaagauaucuugc

SEQ ID NO: 31153 - RNA, 23 nt, Artificial Sequence
  Chemically synthesized
accagagcagugaagauaucuug

SEQ ID NO: 31154 - RNA, 23 nt, Artificial Sequence
  Chemically synthesized
aaccagagcagugaagauaucuu

SEQ ID NO: 31155 - RNA, 23 nt, Artificial Sequence
  Chemically synthesized
gaaccagagcagugaagauaucu

SEQ ID NO: 31156 - RNA, 23 nt, Artificial Sequence
  Chemically synthesized
agaaccagagcagugaagauauc

SEQ ID NO: 31157 - RNA, 23 nt, Artificial Sequence
  Chemically synthesized
uccuucaaaugcagaucuuuucc

SEQ ID NO: 31158 - RNA, 23 nt, Artificial Sequence
  Chemically synthesized
guccuucaaaugcagaucuuuuc

SEQ ID NO: 31159 - RNA, 23 nt, Artificial Sequence
  Chemically synthesized
aguccuucaaaugcagaucuuuu

SEQ ID NO: 31160 - RNA, 23 nt, Artificial Sequence
  Chemically synthesized
gaguccuucaaaugcagaucuuu

SEQ ID NO: 31161 - RNA, 23 nt, Artificial Sequence
  Chemically synthesized
ggaguccuucaaaugcagaucuu

SEQ ID NO: 31162 - RNA, 23 nt, Artificial Sequence
  Chemically synthesized
ccaguuacuccagaaacaauaug

SEQ ID NO: 31163 - RNA, 23 nt, Artificial Sequence
  Chemically synthesized
uccaguuacuccagaaacaauau

SEQ ID NO: 31164 - RNA, 23 nt, Artificial Sequence
  Chemically synthesized
uuccaguuacuccagaaacaaua

SEQ ID NO: 31165 - RNA, 23 nt, Artificial Sequence
  Chemically synthesized
guuccaguuacuccagaaacaau

SEQ ID NO: 31166 - RNA, 23 nt, Artificial Sequence
  Chemically synthesized
aguuccaguuacuccagaaacaa

SEQ ID NO: 31167 - RNA, 23 nt, Artificial Sequence
  Chemically synthesized
caaauugaaucaagagcagaaug

SEQ ID NO: 31168 - RNA, 23 nt, Artificial Sequence
  Chemically synthesized
acaaauugaaucaagagcagaau

SEQ ID NO: 31169 - RNA, 23 nt, Artificial Sequence
  Chemically synthesized
aacaaauugaaucaagagcagaa

SEQ ID NO: 31170 - RNA, 23 nt, Artificial Sequence
  Chemically synthesized
aaacaaauugaaucaagagcaga

SEQ ID NO: 31171 - RNA, 23 nt, Artificial Sequence
  Chemically synthesized
gaaacaaauugaaucaagagcag

SEQ ID NO: 31172 - RNA, 23 nt, Artificial Sequence
  Chemically synthesized
agaaacaaauugaaucaagagca

SEQ ID NO: 31173 - RNA, 23 nt, Artificial Sequence
  Chemically synthesized
ggcugugucaaaaguagaagaac

SEQ ID NO: 31174 - RNA, 23 nt, Artificial Sequence
  Chemically synthesized
uggcugugucaaaaguagaagaa

SEQ ID NO: 31175 - RNA, 23 nt, Artificial Sequence
  Chemically synthesized
cuggcugugucaaaaguagaaga

SEQ ID NO: 31176 - RNA, 23 nt, Artificial Sequence
  Chemically synthesized
ccuggcugugucaaaaguagaag

SEQ ID NO: 31177 - RNA, 23 nt, Artificial Sequence
  Chemically synthesized
uccuggcugugucaaaaguagaa

SEQ ID NO: 31178 - RNA, 23 nt, Artificial Sequence
  Chemically synthesized
ccagcaaaaacagagggagcucg

SEQ ID NO: 31179 - RNA, 23 nt, Artificial Sequence
  Chemically synthesized
uccagcaaaaacagagggagcuc

SEQ ID NO: 31180 - RNA, 23 nt, Artificial Sequence
  Chemically synthesized
uuccagcaaaaacagagggagcu

SEQ ID NO: 31181 - RNA, 23 nt, Artificial Sequence
  Chemically synthesized
guuccagcaaaaacagagggagc

SEQ ID NO: 31182 - RNA, 23 nt, Artificial Sequence
  Chemically synthesized
uguuccagcaaaaacagagggag

SEQ ID NO: 31183 - RNA, 23 nt, Artificial Sequence
  Chemically synthesized
ggaagcuaagcuaaaaaaaguga

SEQ ID NO: 31184 - RNA, 23 nt, Artificial Sequence
  Chemically synthesized
aggaagcuaagcuaaaaaaagug

SEQ ID NO: 31185 - RNA, 23 nt, Artificial Sequence
  Chemically synthesized
caggaagcuaagcuaaaaaaagu

SEQ ID NO: 31186 - RNA, 23 nt, Artificial Sequence
  Chemically synthesized
ucaggaagcuaagcuaaaaaaag

SEQ ID NO: 31187 - RNA, 23 nt, Artificial Sequence
  Chemically synthesized
aucaggaagcuaagcuaaaaaaa

SEQ ID NO: 31188 - RNA, 23 nt, Artificial Sequence
  Chemically synthesized
ccguguaucucaguaacaaugag

SEQ ID NO: 31189 - RNA, 23 nt, Artificial Sequence
  Chemically synthesized
accguguaucucaguaacaauga

SEQ ID NO: 31190 - RNA, 23 nt, Artificial Sequence
  Chemically synthesized
uaccguguaucucaguaacaaug

SEQ ID NO: 31191 - RNA, 23 nt, Artificial Sequence
  Chemically synthesized
uuaccguguaucucaguaacaau

SEQ ID NO: 31192 - RNA, 23 nt, Artificial Sequence
  Chemically synthesized
cuuaccguguaucucaguaacaa

SEQ ID NO: 31193 - RNA, 23 nt, Artificial Sequence
  Chemically synthesized
cuacgguaccaguaauuagaugu

SEQ ID NO: 31194 - RNA, 23 nt, Artificial Sequence
  Chemically synthesized
gcuacgguaccaguaauuagaug

SEQ ID NO: 31195 - RNA, 23 nt, Artificial Sequence
  Chemically synthesized
gcgugaugaaauaaagcaucuac

SEQ ID NO: 31196 - RNA, 23 nt, Artificial Sequence
  Chemically synthesized
agcgugaugaaauaaagcaucua

SEQ ID NO: 31197 - RNA, 23 nt, Artificial Sequence
  Chemically synthesized
uagcgugaugaaauaaagcaucu

SEQ ID NO: 31198 - RNA, 23 nt, Artificial Sequence
  Chemically synthesized
uuagcgugaugaaauaaagcauc

SEQ ID NO: 31199 - RNA, 23 nt, Artificial Sequence
  Chemically synthesized
uuuagcgugaugaaauaaagcau

SEQ ID NO: 31200 - RNA, 23 nt, Artificial Sequence
  Chemically synthesized
gaagagaaugaaggauugaagaa

SEQ ID NO: 31201 - RNA, 23 nt, Artificial Sequence
  Chemically synthesized
agaagagaaugaaggauugaaga

SEQ ID NO: 31202 - RNA, 23 nt, Artificial Sequence
  Chemically synthesized
uagaagagaaugaaggauugaag

SEQ ID NO: 31203 - RNA, 23 nt, Artificial Sequence
  Chemically synthesized
acaguuugguguaaauguaaaug

SEQ ID NO: 31204 - RNA, 23 nt, Artificial Sequence
  Chemically synthesized
uacaguuugguguaaauguaaau

SEQ ID NO: 31205 - RNA, 23 nt, Artificial Sequence
  Chemically synthesized
guacaguuugguguaaauguaaa

SEQ ID NO: 31206 - RNA, 23 nt, Artificial Sequence
  Chemically synthesized
gguacaguuugguguaaauguaa

SEQ ID NO: 31207 - RNA, 23 nt, Artificial Sequence
  Chemically synthesized
ugguacaguuugguguaaaugua

SEQ ID NO: 31208 - RNA, 23 nt, Artificial Sequence
  Chemically synthesized
ugaccuuguacagagaauuauuu

SEQ ID NO: 31209 - RNA, 23 nt, Artificial Sequence
  Chemically synthesized
uugaccuuguacagagaauuauu

SEQ ID NO: 31210 - RNA, 23 nt, Artificial Sequence
  Chemically synthesized
uuugaccuuguacagagaauuau

SEQ ID NO: 31211 - RNA, 23 nt, Artificial Sequence
  Chemically synthesized
auuugaccuuguacagagaauua

SEQ ID NO: 31212 - RNA, 23 nt, Artificial Sequence
  Chemically synthesized
aauuugaccuuguacagagaauu

SEQ ID NO: 31213 - RNA, 23 nt, Artificial Sequence
  Chemically synthesized
cugguaaaaggacaaacuugcgu

SEQ ID NO: 31214 - RNA, 23 nt, Artificial Sequence
  Chemically synthesized
ccugguaaaaggacaaacuugcg

SEQ ID NO: 31215 - RNA, 23 nt, Artificial Sequence
  Chemically synthesized
uccugguaaaaggacaaacuugc

SEQ ID NO: 31216 - RNA, 23 nt, Artificial Sequence
  Chemically synthesized
cuccugguaaaaggacaaacuug

SEQ ID NO: 31217 - RNA, 23 nt, Artificial Sequence
  Chemically synthesized
ccuccugguaaaaggacaaacuu

SEQ ID NO: 31218 - RNA, 23 nt, Artificial Sequence
  Chemically synthesized
gcccaaaucuccagaauaaccca

SEQ ID NO: 31219 - RNA, 23 nt, Artificial Sequence
  Chemically synthesized
agcccaaaucuccagaauaaccc

SEQ ID NO: 31220 - RNA, 23 nt, Artificial Sequence
  Chemically synthesized
cagcccaaaucuccagaauaacc

SEQ ID NO: 31221 - RNA, 23 nt, Artificial Sequence
  Chemically synthesized
acagcccaaaucuccagaauaac

SEQ ID NO: 31222 - RNA, 23 nt, Artificial Sequence
  Chemically synthesized
aacagcccaaaucuccagaauaa

SEQ ID NO: 31223 - RNA, 23 nt, Artificial Sequence
  Chemically synthesized
ucauacccauccaagucagcuuc

SEQ ID NO: 31224 - RNA, 23 nt, Artificial Sequence
  Chemically synthesized
gagaaccaugaaaacgaaagaau

SEQ ID NO: 31225 - RNA, 23 nt, Artificial Sequence
  Chemically synthesized
cacccagagaacauuuauuccaa

SEQ ID NO: 31226 - RNA, 23 nt, Artificial Sequence
  Chemically synthesized
cuacagcaaaaagaaaaucuacc

SEQ ID NO: 31227 - RNA, 23 nt, Artificial Sequence
  Chemically synthesized
ucuacagcaaaaagaaaaucuac

SEQ ID NO: 31228 - RNA, 23 nt, Artificial Sequence
  Chemically synthesized
cugcagcuaagaaacaaauugaa

SEQ ID NO: 31229 - RNA, 23 nt, Artificial Sequence
  Chemically synthesized
gcugcagcuaagaaacaaauuga

SEQ ID NO: 31230 - RNA, 23 nt, Artificial Sequence
  Chemically synthesized
agcugcagcuaagaaacaaauug

SEQ ID NO: 31231 - RNA, 23 nt, Artificial Sequence
  Chemically synthesized
gagcugcagcuaagaaacaaauu

SEQ ID NO: 31232 - RNA, 23 nt, Artificial Sequence
  Chemically synthesized
ggagcugcagcuaagaaacaaau

SEQ ID NO: 31233 - RNA, 23 nt, Artificial Sequence
  Chemically synthesized
aggagcugcagcuaagaaacaaa

SEQ ID NO: 31234 - RNA, 23 nt, Artificial Sequence
  Chemically synthesized
aaucaggaagcuaagcuaaaaaa

SEQ ID NO: 31235 - RNA, 23 nt, Artificial Sequence
  Chemically synthesized
gaaucaggaagcuaagcuaaaaa

SEQ ID NO: 31236 - RNA, 23 nt, Artificial Sequence
  Chemically synthesized
gcgacaacagcaacaaguugcug

SEQ ID NO: 31237 - RNA, 23 nt, Artificial Sequence
  Chemically synthesized
agcgacaacagcaacaaguugcu

SEQ ID NO: 31238 - RNA, 23 nt, Artificial Sequence
  Chemically synthesized
cagcgacaacagcaacaaguugc

SEQ ID NO: 31239 - RNA, 23 nt, Artificial Sequence
  Chemically synthesized
ucagcgacaacagcaacaaguug

SEQ ID NO: 31240 - RNA, 23 nt, Artificial Sequence
  Chemically synthesized
aucagcgacaacagcaacaaguu

SEQ ID NO: 31241 - RNA, 23 nt, Artificial Sequence
  Chemically synthesized
cccguaauauuugucaagaucau

SEQ ID NO: 31242 - RNA, 23 nt, Artificial Sequence
  Chemically synthesized
acccguaauauuugucaagauca

SEQ ID NO: 31243 - RNA, 23 nt, Artificial Sequence
  Chemically synthesized
uacccguaauauuugucaagauc

SEQ ID NO: 31244 - RNA, 23 nt, Artificial Sequence
  Chemically synthesized
uuacccguaauauuugucaagau

SEQ ID NO: 31245 - RNA, 23 nt, Artificial Sequence
  Chemically synthesized
cuuacccguaauauuugucaaga

SEQ ID NO: 31246 - RNA, 23 nt, Artificial Sequence
  Chemically synthesized
augaaggauugaagaauucacca

SEQ ID NO: 31247 - RNA, 23 nt, Artificial Sequence
  Chemically synthesized
aaugaaggauugaagaauucacc

SEQ ID NO: 31248 - RNA, 23 nt, Artificial Sequence
  Chemically synthesized
uuuuuggcaaaaauuucacaaga

SEQ ID NO: 31249 - RNA, 23 nt, Artificial Sequence
  Chemically synthesized
cacacagaauuuuagucaaugaa

SEQ ID NO: 31250 - RNA, 23 nt, Artificial Sequence
  Chemically synthesized
ccacacagaauuuuagucaauga

SEQ ID NO: 31251 - RNA, 23 nt, Artificial Sequence
  Chemically synthesized
uccacacagaauuuuagucaaug

SEQ ID NO: 31252 - RNA, 23 nt, Artificial Sequence
  Chemically synthesized
uuccacacagaauuuuagucaau

SEQ ID NO: 31253 - RNA, 23 nt, Artificial Sequence
  Chemically synthesized
cuuccacacagaauuuuagucaa

SEQ ID NO: 31254 - RNA, 23 nt, Artificial Sequence
  Chemically synthesized
acuuccacacagaauuuuaguca

SEQ ID NO: 31255 - RNA, 23 nt, Artificial Sequence
  Chemically synthesized
auaaaggagucauuuaugcgcuu

SEQ ID NO: 31256 - RNA, 23 nt, Artificial Sequence
  Chemically synthesized
gaugggcauaaugaauaaaggag

SEQ ID NO: 31257 - RNA, 23 nt, Artificial Sequence
  Chemically synthesized
acaacguccaaguguguaaguuu

SEQ ID NO: 31258 - RNA, 23 nt, Artificial Sequence
  Chemically synthesized
aacaacguccaaguguguaaguu

SEQ ID NO: 31259 - RNA, 23 nt, Artificial Sequence
  Chemically synthesized
accuuguacagagaauuauuuau

SEQ ID NO: 31260 - RNA, 23 nt, Artificial Sequence
  Chemically synthesized
gaccuuguacagagaauuauuua

SEQ ID NO: 31261 - RNA, 23 nt, Artificial Sequence
  Chemically synthesized
gaaugagggugaaauucaacccc

SEQ ID NO: 31262 - RNA, 23 nt, Artificial Sequence
  Chemically synthesized
ggaaugagggugaaauucaaccc

SEQ ID NO: 31263 - RNA, 23 nt, Artificial Sequence
  Chemically synthesized
uggaaugagggugaaauucaacc

SEQ ID NO: 31264 - RNA, 23 nt, Artificial Sequence
  Chemically synthesized
auggaaugagggugaaauucaac

SEQ ID NO: 31265 - RNA, 23 nt, Artificial Sequence
  Chemically synthesized
cauggaaugagggugaaauucaa

SEQ ID NO: 31266 - RNA, 23 nt, Artificial Sequence
  Chemically synthesized
gcguaaaacuggcucagagcgua

SEQ ID NO: 31267 - RNA, 23 nt, Artificial Sequence
  Chemically synthesized
ugcguaaaacuggcucagagcgu

SEQ ID NO: 31268 - RNA, 23 nt, Artificial Sequence
  Chemically synthesized
uugcguaaaacuggcucagagcg

SEQ ID NO: 31269 - RNA, 23 nt, Artificial Sequence
  Chemically synthesized
cuugcguaaaacuggcucagagc

SEQ ID NO: 31270 - RNA, 23 nt, Artificial Sequence
  Chemically synthesized
acuugcguaaaacuggcucagag

SEQ ID NO: 31271 - RNA, 23 nt, Artificial Sequence
  Chemically synthesized
ccagaauccauauuuacaugugg

SEQ ID NO: 31272 - RNA, 23 nt, Artificial Sequence
  Chemically synthesized
uccagaauccauauuuacaugug

SEQ ID NO: 31273 - RNA, 23 nt, Artificial Sequence
  Chemically synthesized
auccagaauccauauuuacaugu

SEQ ID NO: 31274 - RNA, 23 nt, Artificial Sequence
  Chemically synthesized
aauccagaauccauauuuacaug

SEQ ID NO: 31275 - RNA, 23 nt, Artificial Sequence
  Chemically synthesized
aaauccagaauccauauuuacau

SEQ ID NO: 31276 - RNA, 23 nt, Artificial Sequence
  Chemically synthesized
gccaaauauucagaagcuuuuau

SEQ ID NO: 31277 - RNA, 23 nt, Artificial Sequence
  Chemically synthesized
ggccaaauauucagaagcuuuua

SEQ ID NO: 31278 - RNA, 23 nt, Artificial Sequence
  Chemically synthesized
gggccaaauauucagaagcuuuu

SEQ ID NO: 31279 - RNA, 23 nt, Artificial Sequence
  Chemically synthesized
ugggccaaauauucagaagcuuu

SEQ ID NO: 31280 - RNA, 23 nt, Artificial Sequence
  Chemically synthesized
augggccaaauauucagaagcuu

SEQ ID NO: 31281 - RNA, 23 nt, Artificial Sequence
  Chemically synthesized
cuaaauuacugccuuucuuaucu

SEQ ID NO: 31282 - RNA, 23 nt, Artificial Sequence
  Chemically synthesized
acuaaauuacugccuuucuuauc

SEQ ID NO: 31283 - RNA, 23 nt, Artificial Sequence
  Chemically synthesized
aacuaaauuacugccuuucuuau

SEQ ID NO: 31284 - RNA, 23 nt, Artificial Sequence
  Chemically synthesized
gaacauuuauuccaauagccagg

SEQ ID NO: 31285 - RNA, 23 nt, Artificial Sequence
  Chemically synthesized
agaacauuuauuccaauagccag

SEQ ID NO: 31286 - RNA, 23 nt, Artificial Sequence
  Chemically synthesized
gagaacauuuauuccaauagcca

SEQ ID NO: 31287 - RNA, 23 nt, Artificial Sequence
  Chemically synthesized
agagaacauuuauuccaauagcc

SEQ ID NO: 31288 - RNA, 23 nt, Artificial Sequence
  Chemically synthesized
cagagaacauuuauuccaauagc

SEQ ID NO: 31289 - RNA, 23 nt, Artificial Sequence
  Chemically synthesized
cagcagcacccagagaacauuua

SEQ ID NO: 31290 - RNA, 23 nt, Artificial Sequence
  Chemically synthesized
ccagaaucaacagcagcacccag

SEQ ID NO: 31291 - RNA, 23 nt, Artificial Sequence
  Chemically synthesized
cccagaaucaacagcagcaccca

SEQ ID NO: 31292 - RNA, 23 nt, Artificial Sequence
  Chemically synthesized
gcccagaaucaacagcagcaccc

SEQ ID NO: 31293 - RNA, 23 nt, Artificial Sequence
  Chemically synthesized
ugcccagaaucaacagcagcacc

SEQ ID NO: 31294 - RNA, 23 nt, Artificial Sequence
  Chemically synthesized
cugcccagaaucaacagcagcac

SEQ ID NO: 31295 - RNA, 23 nt, Artificial Sequence
  Chemically synthesized
agagcgcguugaccaagacucau

SEQ ID NO: 31296 - RNA, 23 nt, Artificial Sequence
  Chemically synthesized
gcagcaaguucaauauauuccau

SEQ ID NO: 31297 - RNA, 23 nt, Artificial Sequence
  Chemically synthesized
ggcagcaaguucaauauauucca

SEQ ID NO: 31298 - RNA, 23 nt, Artificial Sequence
  Chemically synthesized
uggcagcaaguucaauauauucc

SEQ ID NO: 31299 - RNA, 23 nt, Artificial Sequence
  Chemically synthesized
guggcagcaaguucaauauauuc

SEQ ID NO: 31300 - RNA, 23 nt, Artificial Sequence
  Chemically synthesized
cguggcagcaaguucaauauauu

SEQ ID NO: 31301 - RNA, 23 nt, Artificial Sequence
  Chemically synthesized
agaagaaagugcguccguucuca

SEQ ID NO: 31302 - RNA, 23 nt, Artificial Sequence
  Chemically synthesized
gagaagaaagugcguccguucuc

SEQ ID NO: 31303 - RNA, 23 nt, Artificial Sequence
  Chemically synthesized
agagaagaaagugcguccguucu

SEQ ID NO: 31304 - RNA, 23 nt, Artificial Sequence
  Chemically synthesized
aagagaagaaagugcguccguuc

SEQ ID NO: 31305 - RNA, 23 nt, Artificial Sequence
  Chemically synthesized
aaagagaagaaagugcguccguu

SEQ ID NO: 31306 - RNA, 23 nt, Artificial Sequence
  Chemically synthesized
ccaaggcucugcuucuguaccuc

SEQ ID NO: 31307 - RNA, 23 nt, Artificial Sequence
  Chemically synthesized
gccaaggcucugcuucuguaccu

SEQ ID NO: 31308 - RNA, 23 nt, Artificial Sequence
  Chemically synthesized
agccaaggcucugcuucuguacc

SEQ ID NO: 31309 - RNA, 23 nt, Artificial Sequence
  Chemically synthesized
aagccaaggcucugcuucuguac

SEQ ID NO: 31310 - RNA, 23 nt, Artificial Sequence
  Chemically synthesized
caagccaaggcucugcuucugua

SEQ ID NO: 31311 - RNA, 23 nt, Artificial Sequence
  Chemically synthesized
ugauuggaguccuucaaaugcag

SEQ ID NO: 31312 - RNA, 23 nt, Artificial Sequence
  Chemically synthesized
cugauuggaguccuucaaaugca

SEQ ID NO: 31313 - RNA, 23 nt, Artificial Sequence
  Chemically synthesized
ccugauuggaguccuucaaaugc

SEQ ID NO: 31314 - RNA, 23 nt, Artificial Sequence
  Chemically synthesized
cccugauuggaguccuucaaaug

SEQ ID NO: 31315 - RNA, 23 nt, Artificial Sequence
  Chemically synthesized
gcccugauuggaguccuucaaau

SEQ ID NO: 31316 - RNA, 23 nt, Artificial Sequence
  Chemically synthesized
ucuggggcugcuucacaaacuaa

SEQ ID NO: 31317 - RNA, 23 nt, Artificial Sequence
  Chemically synthesized
ggaagaagaaggcagcucuacag

SEQ ID NO: 31318 - RNA, 23 nt, Artificial Sequence
  Chemically synthesized
uggaagaagaaggcagcucuaca

SEQ ID NO: 31319 - RNA, 23 nt, Artificial Sequence
  Chemically synthesized
guggaagaagaaggcagcucuac

SEQ ID NO: 31320 - RNA, 23 nt, Artificial Sequence
  Chemically synthesized
uguggaagaagaaggcagcucua

SEQ ID NO: 31321 - RNA, 23 nt, Artificial Sequence
  Chemically synthesized
cuguggaagaagaaggcagcucu

SEQ ID NO: 31322 - RNA, 23 nt, Artificial Sequence
  Chemically synthesized
ggauaagcguguuaaugagcuga

SEQ ID NO: 31323 - RNA, 23 nt, Artificial Sequence
  Chemically synthesized
uggauaagcguguuaaugagcug

SEQ ID NO: 31324 - RNA, 23 nt, Artificial Sequence
  Chemically synthesized
auggauaagcguguuaaugagcu

SEQ ID NO: 31325 - RNA, 23 nt, Artificial Sequence
  Chemically synthesized
cauggauaagcguguuaaugagc

SEQ ID NO: 31326 - RNA, 23 nt, Artificial Sequence
  Chemically synthesized
ucauggauaagcguguuaaugag

SEQ ID NO: 31327 - RNA, 23 nt, Artificial Sequence
  Chemically synthesized
cagagggaguguuugaauaagcg

SEQ ID NO: 31328 - RNA, 23 nt, Artificial Sequence
  Chemically synthesized
acagagggaguguuugaauaagc

SEQ ID NO: 31329 - RNA, 23 nt, Artificial Sequence
  Chemically synthesized
aacagagggaguguuugaauaag

SEQ ID NO: 31330 - RNA, 23 nt, Artificial Sequence
  Chemically synthesized
caacagagggaguguuugaauaa

SEQ ID NO: 31331 - RNA, 23 nt, Artificial Sequence
  Chemically synthesized
acaacagagggaguguuugaaua

SEQ ID NO: 31332 - RNA, 23 nt, Artificial Sequence
  Chemically synthesized
caacaacagagggaguguuugaa

SEQ ID NO: 31333 - RNA, 23 nt, Artificial Sequence
  Chemically synthesized
acaacaacagagggaguguuuga

SEQ ID NO: 31334 - RNA, 23 nt, Artificial Sequence
  Chemically synthesized
uacaacaacagagggaguguuug

SEQ ID NO: 31335 - RNA, 23 nt, Artificial Sequence
  Chemically synthesized
cuacaacaacagagggaguguuu

SEQ ID NO: 31336 - RNA, 23 nt, Artificial Sequence
  Chemically synthesized
gcuacaacaacagagggaguguu

SEQ ID NO: 31337 - RNA, 23 nt, Artificial Sequence
  Chemically synthesized
agaaucaggaagcuaagcuaaaa

SEQ ID NO: 31338 - RNA, 23 nt, Artificial Sequence
  Chemically synthesized
acaacaagaucagcgacaacagc

SEQ ID NO: 31339 - RNA, 23 nt, Artificial Sequence
  Chemically synthesized
aacaacaagaucagcgacaacag

SEQ ID NO: 31340 - RNA, 23 nt, Artificial Sequence
  Chemically synthesized
aaacaacaagaucagcgacaaca

SEQ ID NO: 31341 - RNA, 23 nt, Artificial Sequence
  Chemically synthesized
gaaacaacaagaucagcgacaac

SEQ ID NO: 31342 - RNA, 23 nt, Artificial Sequence
  Chemically synthesized
ugaaacaacaagaucagcgacaa

SEQ ID NO: 31343 - RNA, 23 nt, Artificial Sequence
  Chemically synthesized
cgcuuaaaguuuuugaaacaaca

SEQ ID NO: 31344 - RNA, 23 nt, Artificial Sequence
  Chemically synthesized
gcgcuuaaaguuuuugaaacaac

SEQ ID NO: 31345 - RNA, 23 nt, Artificial Sequence
  Chemically synthesized
agcgcuuaaaguuuuugaaacaa

SEQ ID NO: 31346 - RNA, 23 nt, Artificial Sequence
  Chemically synthesized
cagcgcuuaaaguuuuugaaaca

SEQ ID NO: 31347 - RNA, 23 nt, Artificial Sequence
  Chemically synthesized
acagcgcuuaaaguuuuugaaac

SEQ ID NO: 31348 - RNA, 23 nt, Artificial Sequence
  Chemically synthesized
cuaaggaacagcgcuuaaaguuu

SEQ ID NO: 31349 - RNA, 23 nt, Artificial Sequence
  Chemically synthesized
acuaaggaacagcgcuuaaaguu

SEQ ID NO: 31350 - RNA, 23 nt, Artificial Sequence
  Chemically synthesized
aacuaaggaacagcgcuuaaagu

SEQ ID NO: 31351 - RNA, 23 nt, Artificial Sequence
  Chemically synthesized
caacuaaggaacagcgcuuaaag

SEQ ID NO: 31352 - RNA, 23 nt, Artificial Sequence
  Chemically synthesized
gcaacuaaggaacagcgcuuaaa

SEQ ID NO: 31353 - RNA, 23 nt, Artificial Sequence
  Chemically synthesized
gcaacagauugaagcccagcaac

SEQ ID NO: 31354 - RNA, 23 nt, Artificial Sequence
  Chemically synthesized
agcaacagauugaagcccagcaa

SEQ ID NO: 31355 - RNA, 23 nt, Artificial Sequence
  Chemically synthesized
cagcaacagauugaagcccagca

SEQ ID NO: 31356 - RNA, 23 nt, Artificial Sequence
  Chemically synthesized
gcagcaacagauugaagcccagc

SEQ ID NO: 31357 - RNA, 23 nt, Artificial Sequence
  Chemically synthesized
agcagcaacagauugaagcccag

SEQ ID NO: 31358 - RNA, 23 nt, Artificial Sequence
  Chemically synthesized
gccagcagcaacagauugaagcc

SEQ ID NO: 31359 - RNA, 23 nt, Artificial Sequence
  Chemically synthesized
cgccagcagcaacagauugaagc

SEQ ID NO: 31360 - RNA, 23 nt, Artificial Sequence
  Chemically synthesized
ucgccagcagcaacagauugaag

SEQ ID NO: 31361 - RNA, 23 nt, Artificial Sequence
  Chemically synthesized
cucgccagcagcaacagauugaa

SEQ ID NO: 31362 - RNA, 23 nt, Artificial Sequence
  Chemically synthesized
ucucgccagcagcaacagauuga

SEQ ID NO: 31363 - RNA, 23 nt, Artificial Sequence
  Chemically synthesized
uuauugucuuuuguaucucagaa

SEQ ID NO: 31364 - RNA, 23 nt, Artificial Sequence
  Chemically synthesized
gaguuuuuguagcaucuuaagaa

SEQ ID NO: 31365 - RNA, 23 nt, Artificial Sequence
  Chemically synthesized
ugaguuuuuguagcaucuuaaga

SEQ ID NO: 31366 - RNA, 23 nt, Artificial Sequence
  Chemically synthesized
augaguuuuuguagcaucuuaag

SEQ ID NO: 31367 - RNA, 23 nt, Artificial Sequence
  Chemically synthesized
uaugaguuuuuguagcaucuuaa

SEQ ID NO: 31368 - RNA, 23 nt, Artificial Sequence
  Chemically synthesized
auaugaguuuuuguagcaucuua

SEQ ID NO: 31369 - RNA, 23 nt, Artificial Sequence
  Chemically synthesized
gcacugcacacuuguauauuguc

SEQ ID NO: 31370 - RNA, 23 nt, Artificial Sequence
  Chemically synthesized
ggcacugcacacuuguauauugu

SEQ ID NO: 31371 - RNA, 23 nt, Artificial Sequence
  Chemically synthesized
aggcacugcacacuuguauauug

SEQ ID NO: 31372 - RNA, 23 nt, Artificial Sequence
  Chemically synthesized
aaggcacugcacacuuguauauu

SEQ ID NO: 31373 - RNA, 23 nt, Artificial Sequence
  Chemically synthesized
gaaggcacugcacacuuguauau

SEQ ID NO: 31374 - RNA, 23 nt, Artificial Sequence
  Chemically synthesized
ccuggugaauaucgaagaaagga

SEQ ID NO: 31375 - RNA, 23 nt, Artificial Sequence
  Chemically synthesized
uccuggugaauaucgaagaaagg

SEQ ID NO: 31376 - RNA, 23 nt, Artificial Sequence
  Chemically synthesized
uuccuggugaauaucgaagaaag

SEQ ID NO: 31377 - RNA, 23 nt, Artificial Sequence
  Chemically synthesized
guuccuggugaauaucgaagaaa

SEQ ID NO: 31378 - RNA, 23 nt, Artificial Sequence
  Chemically synthesized
aguuccuggugaauaucgaagaa

SEQ ID NO: 31379 - RNA, 23 nt, Artificial Sequence
  Chemically synthesized
cuagaagagaaugaaggauugaa

SEQ ID NO: 31380 - RNA, 23 nt, Artificial Sequence
  Chemically synthesized
ucuagaagagaaugaaggauuga

SEQ ID NO: 31381 - RNA, 23 nt, Artificial Sequence
  Chemically synthesized
cucuagaagagaaugaaggauug

SEQ ID NO: 31382 - RNA, 23 nt, Artificial Sequence
  Chemically synthesized
gaagaugaaaucgaaugguggug

SEQ ID NO: 31383 - RNA, 23 nt, Artificial Sequence
  Chemically synthesized
cgaagaugaaaucgaaugguggu

SEQ ID NO: 31384 - RNA, 23 nt, Artificial Sequence
  Chemically synthesized
acgaagaugaaaucgaauggugg

SEQ ID NO: 31385 - RNA, 23 nt, Artificial Sequence
  Chemically synthesized
gacgaagaugaaaucgaauggug

SEQ ID NO: 31386 - RNA, 23 nt, Artificial Sequence
  Chemically synthesized
agacgaagaugaaaucgaauggu

SEQ ID NO: 31387 - RNA, 23 nt, Artificial Sequence
  Chemically synthesized
agaugggcauaaugaauaaagga

SEQ ID NO: 31388 - RNA, 23 nt, Artificial Sequence
  Chemically synthesized
aagaugggcauaaugaauaaagg

SEQ ID NO: 31389 - RNA, 23 nt, Artificial Sequence
  Chemically synthesized
gaagaugggcauaaugaauaaag

SEQ ID NO: 31390 - RNA, 23 nt, Artificial Sequence
  Chemically synthesized
agaagaugggcauaaugaauaaa

SEQ ID NO: 31391 - RNA, 23 nt, Artificial Sequence
  Chemically synthesized
gagaagaugggcauaaugaauaa

SEQ ID NO: 31392 - RNA, 23 nt, Artificial Sequence
  Chemically synthesized
guaaguuuuugguggagucagga

SEQ ID NO: 31393 - RNA, 23 nt, Artificial Sequence
  Chemically synthesized
uguaaguuuuugguggagucagg

SEQ ID NO: 31394 - RNA, 23 nt, Artificial Sequence
  Chemically synthesized
guguaaguuuuugguggagucag

SEQ ID NO: 31395 - RNA, 23 nt, Artificial Sequence
  Chemically synthesized
uguguaaguuuuugguggaguca

SEQ ID NO: 31396 - RNA, 23 nt, Artificial Sequence
  Chemically synthesized
guguguaaguuuuugguggaguc

SEQ ID NO: 31397 - RNA, 23 nt, Artificial Sequence
  Chemically synthesized
aguguguaaguuuuugguggagu

SEQ ID NO: 31398 - RNA, 23 nt, Artificial Sequence
  Chemically synthesized
aaguguguaaguuuuugguggag

SEQ ID NO: 31399 - RNA, 23 nt, Artificial Sequence
  Chemically synthesized
ugcaggccacacagaaaucguua

SEQ ID NO: 31400 - RNA, 23 nt, Artificial Sequence
  Chemically synthesized
cggcucuucacaaugcugugugu

SEQ ID NO: 31401 - RNA, 23 nt, Artificial Sequence
  Chemically synthesized
acggcucuucacaaugcugugug

SEQ ID NO: 31402 - RNA, 23 nt, Artificial Sequence
  Chemically synthesized
cacggcucuucacaaugcugugu

SEQ ID NO: 31403 - RNA, 23 nt, Artificial Sequence
  Chemically synthesized
ucacggcucuucacaaugcugug

SEQ ID NO: 31404 - RNA, 23 nt, Artificial Sequence
  Chemically synthesized
aucacggcucuucacaaugcugu

SEQ ID NO: 31405 - RNA, 23 nt, Artificial Sequence
  Chemically synthesized
ccuuguacagagaauuauuuaug

SEQ ID NO: 31406 - RNA, 23 nt, Artificial Sequence
  Chemically synthesized
ccaguagaaauccagaauccaua

SEQ ID NO: 31407 - RNA, 23 nt, Artificial Sequence
  Chemically synthesized
cccaguagaaauccagaauccau

SEQ ID NO: 31408 - RNA, 23 nt, Artificial Sequence
  Chemically synthesized
gcccaguagaaauccagaaucca

SEQ ID NO: 31409 - RNA, 23 nt, Artificial Sequence
  Chemically synthesized
agcccaguagaaauccagaaucc

SEQ ID NO: 31410 - RNA, 23 nt, Artificial Sequence
  Chemically synthesized
aagcccaguagaaauccagaauc

SEQ ID NO: 31411 - RNA, 23 nt, Artificial Sequence
  Chemically synthesized
uacgaaagaaacugucuaacgca

SEQ ID NO: 31412 - RNA, 23 nt, Artificial Sequence
  Chemically synthesized
uuacgaaagaaacugucuaacgc

SEQ ID NO: 31413 - RNA, 23 nt, Artificial Sequence
  Chemically synthesized
cuuacgaaagaaacugucuaacg

SEQ ID NO: 31414 - RNA, 23 nt, Artificial Sequence
  Chemically synthesized
ccuuacgaaagaaacugucuaac

SEQ ID NO: 31415 - RNA, 23 nt, Artificial Sequence
  Chemically synthesized
gccuuacgaaagaaacugucuaa

SEQ ID NO: 31416 - RNA, 23 nt, Artificial Sequence
  Chemically synthesized
cggauaaugagcgaauguuugau

SEQ ID NO: 31417 - RNA, 23 nt, Artificial Sequence
  Chemically synthesized
gcggauaaugagcgaauguuuga

SEQ ID NO: 31418 - RNA, 23 nt, Artificial Sequence
  Chemically synthesized
ugcggauaaugagcgaauguuug

SEQ ID NO: 31419 - RNA, 23 nt, Artificial Sequence
  Chemically synthesized
uugcggauaaugagcgaauguuu

SEQ ID NO: 31420 - RNA, 23 nt, Artificial Sequence
  Chemically synthesized
guugcggauaaugagcgaauguu

SEQ ID NO: 31421 - RNA, 23 nt, Artificial Sequence
  Chemically synthesized
gcugcccagaaucaacagcagca

SEQ ID NO: 31422 - RNA, 23 nt, Artificial Sequence
  Chemically synthesized
gaccaagacucauaccagagggc

SEQ ID NO: 31423 - RNA, 23 nt, Artificial Sequence
  Chemically synthesized
ugaccaagacucauaccagaggg

SEQ ID NO: 31424 - RNA, 23 nt, Artificial Sequence
  Chemically synthesized
uugaccaagacucauaccagagg

SEQ ID NO: 31425 - RNA, 23 nt, Artificial Sequence
  Chemically synthesized
guugaccaagacucauaccagag

SEQ ID NO: 31426 - RNA, 23 nt, Artificial Sequence
  Chemically synthesized
cguugaccaagacucauaccaga

SEQ ID NO: 31427 - RNA, 23 nt, Artificial Sequence
  Chemically synthesized
ccguggcagcaaguucaauauau

SEQ ID NO: 31428 - RNA, 23 nt, Artificial Sequence
  Chemically synthesized
gggaacuaaaccaaaaccagcag

SEQ ID NO: 31429 - RNA, 23 nt, Artificial Sequence
  Chemically synthesized
ugggaacuaaaccaaaaccagca

SEQ ID NO: 31430 - RNA, 23 nt, Artificial Sequence
  Chemically synthesized
augggaacuaaaccaaaaccagc

SEQ ID NO: 31431 - RNA, 23 nt, Artificial Sequence
  Chemically synthesized
caugggaacuaaaccaaaaccag

SEQ ID NO: 31432 - RNA, 23 nt, Artificial Sequence
  Chemically synthesized
ccaugggaacuaaaccaaaacca

SEQ ID NO: 31433 - RNA, 23 nt, Artificial Sequence
  Chemically synthesized
cuacaaaaccaaaacagauuaau

SEQ ID NO: 31434 - RNA, 23 nt, Artificial Sequence
  Chemically synthesized
ccuacaaaaccaaaacagauuaa

SEQ ID NO: 31435 - RNA, 23 nt, Artificial Sequence
  Chemically synthesized
uccuacaaaaccaaaacagauua

SEQ ID NO: 31436 - RNA, 23 nt, Artificial Sequence
  Chemically synthesized
uuccuacaaaaccaaaacagauu

SEQ ID NO: 31437 - RNA, 23 nt, Artificial Sequence
  Chemically synthesized
guuccuacaaaaccaaaacagau

SEQ ID NO: 31438 - RNA, 23 nt, Artificial Sequence
  Chemically synthesized
uguuccuacaaaaccaaaacaga

SEQ ID NO: 31439 - RNA, 23 nt, Artificial Sequence
  Chemically synthesized
cuguuccuacaaaaccaaaacag

SEQ ID NO: 31440 - RNA, 23 nt, Artificial Sequence
  Chemically synthesized
cgagagugauugccauuuggcug

SEQ ID NO: 31441 - RNA, 23 nt, Artificial Sequence
  Chemically synthesized
gcgagagugauugccauuuggcu

SEQ ID NO: 31442 - RNA, 23 nt, Artificial Sequence
  Chemically synthesized
ggcgagagugauugccauuuggc

SEQ ID NO: 31443 - RNA, 23 nt, Artificial Sequence
  Chemically synthesized
cggcgagagugauugccauuugg

SEQ ID NO: 31444 - RNA, 23 nt, Artificial Sequence
  Chemically synthesized
ccggcgagagugauugccauuug

SEQ ID NO: 31445 - RNA, 23 nt, Artificial Sequence
  Chemically synthesized
ccaagaugaugccgauguuucuu

SEQ ID NO: 31446 - RNA, 23 nt, Artificial Sequence
  Chemically synthesized
uccaagaugaugccgauguuucu

SEQ ID NO: 31447 - RNA, 23 nt, Artificial Sequence
  Chemically synthesized
guccaagaugaugccgauguuuc

SEQ ID NO: 31448 - RNA, 23 nt, Artificial Sequence
  Chemically synthesized
gguccaagaugaugccgauguuu

SEQ ID NO: 31449 - RNA, 23 nt, Artificial Sequence
  Chemically synthesized
ggguccaagaugaugccgauguu

SEQ ID NO: 31450 - RNA, 23 nt, Artificial Sequence
  Chemically synthesized
gguugcaaauaaaaauguggcua

SEQ ID NO: 31451 - RNA, 23 nt, Artificial Sequence
  Chemically synthesized
agguugcaaauaaaaauguggcu

SEQ ID NO: 31452 - RNA, 23 nt, Artificial Sequence
  Chemically synthesized
cagguugcaaauaaaaauguggc

SEQ ID NO: 31453 - RNA, 23 nt, Artificial Sequence
  Chemically synthesized
ucagguugcaaauaaaaaugugg

SEQ ID NO: 31454 - RNA, 23 nt, Artificial Sequence
  Chemically synthesized
cucagguugcaaauaaaaaugug

SEQ ID NO: 31455 - RNA, 23 nt, Artificial Sequence
  Chemically synthesized
agagcagugaagauaucuugcgg

SEQ ID NO: 31456 - RNA, 23 nt, Artificial Sequence
  Chemically synthesized
cagagcagugaagauaucuugcg

SEQ ID NO: 31457 - RNA, 23 nt, Artificial Sequence
  Chemically synthesized
uggaguccuucaaaugcagaucu

SEQ ID NO: 31458 - RNA, 23 nt, Artificial Sequence
  Chemically synthesized
ccagaaacaauaugcagagacgu

SEQ ID NO: 31459 - RNA, 23 nt, Artificial Sequence
  Chemically synthesized
uccagaaacaauaugcagagacg

SEQ ID NO: 31460 - RNA, 23 nt, Artificial Sequence
  Chemically synthesized
cuccagaaacaauaugcagagac

SEQ ID NO: 31461 - RNA, 23 nt, Artificial Sequence
  Chemically synthesized
acuccagaaacaauaugcagaga

SEQ ID NO: 31462 - RNA, 23 nt, Artificial Sequence
  Chemically synthesized
uacuccagaaacaauaugcagag

SEQ ID NO: 31463 - RNA, 23 nt, Artificial Sequence
  Chemically synthesized
ggccugaauugcuggugaagcca

SEQ ID NO: 31464 - RNA, 23 nt, Artificial Sequence
  Chemically synthesized
aggccugaauugcuggugaagcc

SEQ ID NO: 31465 - RNA, 23 nt, Artificial Sequence
  Chemically synthesized
aaggccugaauugcuggugaagc

SEQ ID NO: 31466 - RNA, 23 nt, Artificial Sequence
  Chemically synthesized
caaggccugaauugcuggugaag

SEQ ID NO: 31467 - RNA, 23 nt, Artificial Sequence
  Chemically synthesized
ucaaggccugaauugcuggugaa

SEQ ID NO: 31468 - RNA, 23 nt, Artificial Sequence
  Chemically synthesized
gaaaaucuaccaguuucaucuga

SEQ ID NO: 31469 - RNA, 23 nt, Artificial Sequence
  Chemically synthesized
agaaaaucuaccaguuucaucug

SEQ ID NO: 31470 - RNA, 23 nt, Artificial Sequence
  Chemically synthesized
aagaaaaucuaccaguuucaucu

SEQ ID NO: 31471 - RNA, 23 nt, Artificial Sequence
  Chemically synthesized
aaagaaaaucuaccaguuucauc

SEQ ID NO: 31472 - RNA, 23 nt, Artificial Sequence
  Chemically synthesized
aaaagaaaaucuaccaguuucau

SEQ ID NO: 31473 - RNA, 23 nt, Artificial Sequence
  Chemically synthesized
gcguaauucagaaguggcaguca

SEQ ID NO: 31474 - RNA, 23 nt, Artificial Sequence
  Chemically synthesized
agcguaauucagaaguggcaguc

SEQ ID NO: 31475 - RNA, 23 nt, Artificial Sequence
  Chemically synthesized
aagcguaauucagaaguggcagu

SEQ ID NO: 31476 - RNA, 23 nt, Artificial Sequence
  Chemically synthesized
uaagcguaauucagaaguggcag

SEQ ID NO: 31477 - RNA, 23 nt, Artificial Sequence
  Chemically synthesized
auaagcguaauucagaaguggca

SEQ ID NO: 31478 - RNA, 23 nt, Artificial Sequence
  Chemically synthesized
guguuugaauaagcguaauucag

SEQ ID NO: 31479 - RNA, 23 nt, Artificial Sequence
  Chemically synthesized
aguguuugaauaagcguaauuca

SEQ ID NO: 31480 - RNA, 23 nt, Artificial Sequence
  Chemically synthesized
gaguguuugaauaagcguaauuc

SEQ ID NO: 31481 - RNA, 23 nt, Artificial Sequence
  Chemically synthesized
ggaguguuugaauaagcguaauu

SEQ ID NO: 31482 - RNA, 23 nt, Artificial Sequence
  Chemically synthesized
gggaguguuugaauaagcguaau

SEQ ID NO: 31483 - RNA, 23 nt, Artificial Sequence
  Chemically synthesized
agagggaguguuugaauaagcgu

SEQ ID NO: 31484 - RNA, 23 nt, Artificial Sequence
  Chemically synthesized
ccaagcuacaacaacagagggag

SEQ ID NO: 31485 - RNA, 23 nt, Artificial Sequence
  Chemically synthesized
gccaagcuacaacaacagaggga

SEQ ID NO: 31486 - RNA, 23 nt, Artificial Sequence
  Chemically synthesized
ugccaagcuacaacaacagaggg

SEQ ID NO: 31487 - RNA, 23 nt, Artificial Sequence
  Chemically synthesized
augccaagcuacaacaacagagg

SEQ ID NO: 31488 - RNA, 23 nt, Artificial Sequence
  Chemically synthesized
aaugccaagcuacaacaacagag

SEQ ID NO: 31489 - RNA, 23 nt, Artificial Sequence
  Chemically synthesized
ugcagcuaagaaacaaauugaau

SEQ ID NO: 31490 - RNA, 23 nt, Artificial Sequence
  Chemically synthesized
caaaaguagaagaacugaccagg

SEQ ID NO: 31491 - RNA, 23 nt, Artificial Sequence
  Chemically synthesized
ucaaaaguagaagaacugaccag

SEQ ID NO: 31492 - RNA, 23 nt, Artificial Sequence
  Chemically synthesized
gucaaaaguagaagaacugacca

SEQ ID NO: 31493 - RNA, 23 nt, Artificial Sequence
  Chemically synthesized
ugucaaaaguagaagaacugacc

SEQ ID NO: 31494 - RNA, 23 nt, Artificial Sequence
  Chemically synthesized
gugucaaaaguagaagaacugac

SEQ ID NO: 31495 - RNA, 23 nt, Artificial Sequence
  Chemically synthesized
ugugucaaaaguagaagaacuga

SEQ ID NO: 31496 - RNA, 23 nt, Artificial Sequence
  Chemically synthesized
cugugucaaaaguagaagaacug

SEQ ID NO: 31497 - RNA, 23 nt, Artificial Sequence
  Chemically synthesized
gcugugucaaaaguagaagaacu

SEQ ID NO: 31498 - RNA, 23 nt, Artificial Sequence
  Chemically synthesized
guggaggaaauugaacagaugaa

SEQ ID NO: 31499 - RNA, 23 nt, Artificial Sequence
  Chemically synthesized
uguggaggaaauugaacagauga

SEQ ID NO: 31500 - RNA, 23 nt, Artificial Sequence
  Chemically synthesized
uuguggaggaaauugaacagaug

SEQ ID NO: 31501 - RNA, 23 nt, Artificial Sequence
  Chemically synthesized
ggagaaacuuaaaaggcuaaaag

SEQ ID NO: 31502 - RNA, 23 nt, Artificial Sequence
  Chemically synthesized
aggagaaacuuaaaaggcuaaaa

SEQ ID NO: 31503 - RNA, 23 nt, Artificial Sequence
  Chemically synthesized
caggagaaacuuaaaaggcuaaa

SEQ ID NO: 31504 - RNA, 23 nt, Artificial Sequence
  Chemically synthesized
gcaggagaaacuuaaaaggcuaa

SEQ ID NO: 31505 - RNA, 23 nt, Artificial Sequence
  Chemically synthesized
agcaggagaaacuuaaaaggcua

SEQ ID NO: 31506 - RNA, 23 nt, Artificial Sequence
  Chemically synthesized
aacagcgcuuaaaguuuuugaaa

SEQ ID NO: 31507 - RNA, 23 nt, Artificial Sequence
  Chemically synthesized
ucugacucuugcugaacuucagg

SEQ ID NO: 31508 - RNA, 23 nt, Artificial Sequence
  Chemically synthesized
aucugacucuugcugaacuucag

SEQ ID NO: 31509 - RNA, 23 nt, Artificial Sequence
  Chemically synthesized
gaucugacucuugcugaacuuca

SEQ ID NO: 31510 - RNA, 23 nt, Artificial Sequence
  Chemically synthesized
cuaagcuacgguaccaguaauua

SEQ ID NO: 31511 - RNA, 23 nt, Artificial Sequence
  Chemically synthesized
acuaagcuacgguaccaguaauu

SEQ ID NO: 31512 - RNA, 23 nt, Artificial Sequence
  Chemically synthesized
aacuaagcuacgguaccaguaau

SEQ ID NO: 31513 - RNA, 23 nt, Artificial Sequence
  Chemically synthesized
aaacuaagcuacgguaccaguaa

SEQ ID NO: 31514 - RNA, 23 nt, Artificial Sequence
  Chemically synthesized
gaaacuaagcuacgguaccagua

SEQ ID NO: 31515 - RNA, 23 nt, Artificial Sequence
  Chemically synthesized
cuggugaauaucgaagaaaggag

SEQ ID NO: 31516 - RNA, 23 nt, Artificial Sequence
  Chemically synthesized
gauugaagaauucaccauuagag

SEQ ID NO: 31517 - RNA, 23 nt, Artificial Sequence
  Chemically synthesized
ucucuagaagagaaugaaggauu

SEQ ID NO: 31518 - RNA, 23 nt, Artificial Sequence
  Chemically synthesized
gucucuagaagagaaugaaggau

SEQ ID NO: 31519 - RNA, 23 nt, Artificial Sequence
  Chemically synthesized
ccaugaccuacagugacaugcag

SEQ ID NO: 31520 - RNA, 23 nt, Artificial Sequence
  Chemically synthesized
gccaugaccuacagugacaugca

SEQ ID NO: 31521 - RNA, 23 nt, Artificial Sequence
  Chemically synthesized
ugccaugaccuacagugacaugc

SEQ ID NO: 31522 - RNA, 23 nt, Artificial Sequence
  Chemically synthesized
uugccaugaccuacagugacaug

SEQ ID NO: 31523 - RNA, 23 nt, Artificial Sequence
  Chemically synthesized
uuugccaugaccuacagugacau

SEQ ID NO: 31524 - RNA, 23 nt, Artificial Sequence
  Chemically synthesized
cucauguaacaacguccaagugu

SEQ ID NO: 31525 - RNA, 23 nt, Artificial Sequence
  Chemically synthesized
ccucauguaacaacguccaagug

SEQ ID NO: 31526 - RNA, 23 nt, Artificial Sequence
  Chemically synthesized
gccucauguaacaacguccaagu

SEQ ID NO: 31527 - RNA, 23 nt, Artificial Sequence
  Chemically synthesized
ugccucauguaacaacguccaag

SEQ ID NO: 31528 - RNA, 23 nt, Artificial Sequence
  Chemically synthesized
cugccucauguaacaacguccaa

SEQ ID NO: 31529 - RNA, 23 nt, Artificial Sequence
  Chemically synthesized
gcugccucauguaacaacgucca

SEQ ID NO: 31530 - RNA, 23 nt, Artificial Sequence
  Chemically synthesized
gugcaggccacacagaaaucguu

SEQ ID NO: 31531 - RNA, 23 nt, Artificial Sequence
  Chemically synthesized
ggagaauuugaccuuguacagag

SEQ ID NO: 31532 - RNA, 23 nt, Artificial Sequence
  Chemically synthesized
ccagaggcuccacaugugcuuga

SEQ ID NO: 31533 - RNA, 23 nt, Artificial Sequence
  Chemically synthesized
uccagaggcuccacaugugcuug

SEQ ID NO: 31534 - RNA, 23 nt, Artificial Sequence
  Chemically synthesized
auccagaggcuccacaugugcuu

SEQ ID NO: 31535 - RNA, 23 nt, Artificial Sequence
  Chemically synthesized
ucucugucccaucauacccaucc

SEQ ID NO: 31536 - RNA, 23 nt, Artificial Sequence
  Chemically synthesized
aucucugucccaucauacccauc

SEQ ID NO: 31537 - RNA, 23 nt, Artificial Sequence
  Chemically synthesized
caucucugucccaucauacccau

SEQ ID NO: 31538 - RNA, 23 nt, Artificial Sequence
  Chemically synthesized
ccgaaaccagagugaugcugacc

SEQ ID NO: 31539 - RNA, 23 nt, Artificial Sequence
  Chemically synthesized
accgaaaccagagugaugcugac

SEQ ID NO: 31540 - RNA, 23 nt, Artificial Sequence
  Chemically synthesized
uaccgaaaccagagugaugcuga

SEQ ID NO: 31541 - RNA, 23 nt, Artificial Sequence
  Chemically synthesized
uuaccgaaaccagagugaugcug

SEQ ID NO: 31542 - RNA, 23 nt, Artificial Sequence
  Chemically synthesized
cuuaccgaaaccagagugaugcu

SEQ ID NO: 31543 - RNA, 23 nt, Artificial Sequence
  Chemically synthesized
gcaaguucaauauauuccaugua

SEQ ID NO: 31544 - RNA, 23 nt, Artificial Sequence
  Chemically synthesized
agcaaguucaauauauuccaugu

SEQ ID NO: 31545 - RNA, 23 nt, Artificial Sequence
  Chemically synthesized
cagcaaguucaauauauuccaug

SEQ ID NO: 31546 - RNA, 23 nt, Artificial Sequence
  Chemically synthesized
cccggcgagagugauugccauuu

SEQ ID NO: 31547 - RNA, 23 nt, Artificial Sequence
  Chemically synthesized
ugcaaauaaaaauguggcuaaag

SEQ ID NO: 31548 - RNA, 23 nt, Artificial Sequence
  Chemically synthesized
uugcaaauaaaaauguggcuaaa

SEQ ID NO: 31549 - RNA, 23 nt, Artificial Sequence
  Chemically synthesized
guugcaaauaaaaauguggcuaa

SEQ ID NO: 31550 - RNA, 23 nt, Artificial Sequence
  Chemically synthesized
gcucagguugcaaauaaaaaugu

SEQ ID NO: 31551 - RNA, 23 nt, Artificial Sequence
  Chemically synthesized
ugcucagguugcaaauaaaaaug

SEQ ID NO: 31552 - RNA, 23 nt, Artificial Sequence
  Chemically synthesized
augcucagguugcaaauaaaaau

SEQ ID NO: 31553 - RNA, 23 nt, Artificial Sequence
  Chemically synthesized
gaugcucagguugcaaauaaaaa

SEQ ID NO: 31554 - RNA, 23 nt, Artificial Sequence
  Chemically synthesized
ggaugcucagguugcaaauaaaa

SEQ ID NO: 31555 - RNA, 23 nt, Artificial Sequence
  Chemically synthesized
cgugguggaucugugcaaagaac

SEQ ID NO: 31556 - RNA, 23 nt, Artificial Sequence
  Chemically synthesized
acgugguggaucugugcaaagaa

SEQ ID NO: 31557 - RNA, 23 nt, Artificial Sequence
  Chemically synthesized
gacgugguggaucugugcaaaga

SEQ ID NO: 31558 - RNA, 23 nt, Artificial Sequence
  Chemically synthesized
agacgugguggaucugugcaaag

SEQ ID NO: 31559 - RNA, 23 nt, Artificial Sequence
  Chemically synthesized
gagacgugguggaucugugcaaa

SEQ ID NO: 31560 - RNA, 23 nt, Artificial Sequence
  Chemically synthesized
agagacgugguggaucugugcaa

SEQ ID NO: 31561 - RNA, 23 nt, Artificial Sequence
  Chemically synthesized
cgaugaaaauacagacacugccc

SEQ ID NO: 31562 - RNA, 23 nt, Artificial Sequence
  Chemically synthesized
ccgaugaaaauacagacacugcc

SEQ ID NO: 31563 - RNA, 23 nt, Artificial Sequence
  Chemically synthesized
gccgaugaaaauacagacacugc

SEQ ID NO: 31564 - RNA, 23 nt, Artificial Sequence
  Chemically synthesized
ggccgaugaaaauacagacacug

SEQ ID NO: 31565 - RNA, 23 nt, Artificial Sequence
  Chemically synthesized
gggccgaugaaaauacagacacu

SEQ ID NO: 31566 - RNA, 23 nt, Artificial Sequence
  Chemically synthesized
cgucuacuaugccucggaugccc

SEQ ID NO: 31567 - RNA, 23 nt, Artificial Sequence
  Chemically synthesized
ucgucuacuaugccucggaugcc

SEQ ID NO: 31568 - RNA, 23 nt, Artificial Sequence
  Chemically synthesized
gucgucuacuaugccucggaugc

SEQ ID NO: 31569 - RNA, 23 nt, Artificial Sequence
  Chemically synthesized
agucgucuacuaugccucggaug

SEQ ID NO: 31570 - RNA, 23 nt, Artificial Sequence
  Chemically synthesized
cagucgucuacuaugccucggau

SEQ ID NO: 31571 - RNA, 23 nt, Artificial Sequence
  Chemically synthesized
caaaaagaaaaucuaccaguuuc

SEQ ID NO: 31572 - RNA, 23 nt, Artificial Sequence
  Chemically synthesized
gcaaaaagaaaaucuaccaguuu

SEQ ID NO: 31573 - RNA, 23 nt, Artificial Sequence
  Chemically synthesized
agcaaaaagaaaaucuaccaguu

SEQ ID NO: 31574 - RNA, 23 nt, Artificial Sequence
  Chemically synthesized
cagcaaaaagaaaaucuaccagu

SEQ ID NO: 31575 - RNA, 23 nt, Artificial Sequence
  Chemically synthesized
acagcaaaaagaaaaucuaccag

SEQ ID NO: 31576 - RNA, 23 nt, Artificial Sequence
  Chemically synthesized
gaagaaggcagcucuacagcaaa

SEQ ID NO: 31577 - RNA, 23 nt, Artificial Sequence
  Chemically synthesized
agaagaaggcagcucuacagcaa

SEQ ID NO: 31578 - RNA, 23 nt, Artificial Sequence
  Chemically synthesized
aagaagaaggcagcucuacagca

SEQ ID NO: 31579 - RNA, 23 nt, Artificial Sequence
  Chemically synthesized
gaagaagaaggcagcucuacagc

SEQ ID NO: 31580 - RNA, 23 nt, Artificial Sequence
  Chemically synthesized
aacaacagagggaguguuugaau

SEQ ID NO: 31581 - RNA, 23 nt, Artificial Sequence
  Chemically synthesized
ucacagaaguuccaguuacucca

SEQ ID NO: 31582 - RNA, 23 nt, Artificial Sequence
  Chemically synthesized
uucacagaaguuccaguuacucc

SEQ ID NO: 31583 - RNA, 23 nt, Artificial Sequence
  Chemically synthesized
cuucacagaaguuccaguuacuc

SEQ ID NO: 31584 - RNA, 23 nt, Artificial Sequence
  Chemically synthesized
acuucacagaaguuccaguuacu

SEQ ID NO: 31585 - RNA, 23 nt, Artificial Sequence
  Chemically synthesized
cacuucacagaaguuccaguuac

SEQ ID NO: 31586 - RNA, 23 nt, Artificial Sequence
  Chemically synthesized
gaauaauuuguuccagcaaaaac

SEQ ID NO: 31587 - RNA, 23 nt, Artificial Sequence
  Chemically synthesized
ugaauaauuuguuccagcaaaaa

SEQ ID NO: 31588 - RNA, 23 nt, Artificial Sequence
  Chemically synthesized
augaauaauuuguuccagcaaaa

SEQ ID NO: 31589 - RNA, 23 nt, Artificial Sequence
  Chemically synthesized
gaugaauaauuuguuccagcaaa

SEQ ID NO: 31590 - RNA, 23 nt, Artificial Sequence
  Chemically synthesized
agaugaauaauuuguuccagcaa

SEQ ID NO: 31591 - RNA, 23 nt, Artificial Sequence
  Chemically synthesized
cuaaaagaaauagcugagaauca

SEQ ID NO: 31592 - RNA, 23 nt, Artificial Sequence
  Chemically synthesized
gcuaaaagaaauagcugagaauc

SEQ ID NO: 31593 - RNA, 23 nt, Artificial Sequence
  Chemically synthesized
ggcuaaaagaaauagcugagaau

SEQ ID NO: 31594 - RNA, 23 nt, Artificial Sequence
  Chemically synthesized
aggcuaaaagaaauagcugagaa

SEQ ID NO: 31595 - RNA, 23 nt, Artificial Sequence
  Chemically synthesized
aaggcuaaaagaaauagcugaga

SEQ ID NO: 31596 - RNA, 23 nt, Artificial Sequence
  Chemically synthesized
acagauugaagcccagcaacaau

SEQ ID NO: 31597 - RNA, 23 nt, Artificial Sequence
  Chemically synthesized
aacagauugaagcccagcaacaa

SEQ ID NO: 31598 - RNA, 23 nt, Artificial Sequence
  Chemically synthesized
caacagauugaagcccagcaaca

SEQ ID NO: 31599 - RNA, 23 nt, Artificial Sequence
  Chemically synthesized
gaaacuugcuacagacuuacccg

SEQ ID NO: 31600 - RNA, 23 nt, Artificial Sequence
  Chemically synthesized
agaaacuugcuacagacuuaccc

SEQ ID NO: 31601 - RNA, 23 nt, Artificial Sequence
  Chemically synthesized
uagaaacuugcuacagacuuacc

SEQ ID NO: 31602 - RNA, 23 nt, Artificial Sequence
  Chemically synthesized
uuagaaacuugcuacagacuuac

SEQ ID NO: 31603 - RNA, 23 nt, Artificial Sequence
  Chemically synthesized
auuagaaacuugcuacagacuua

SEQ ID NO: 31604 - RNA, 23 nt, Artificial Sequence
  Chemically synthesized
aucgaagaaaggagaacgguguu

SEQ ID NO: 31605 - RNA, 23 nt, Artificial Sequence
  Chemically synthesized
uaucgaagaaaggagaacggugu

SEQ ID NO: 31606 - RNA, 23 nt, Artificial Sequence
  Chemically synthesized
agcuacgguaccaguaauuagau

SEQ ID NO: 31607 - RNA, 23 nt, Artificial Sequence
  Chemically synthesized
gaauaucgaagaaaggagaacgg

SEQ ID NO: 31608 - RNA, 23 nt, Artificial Sequence
  Chemically synthesized
ugaauaucgaagaaaggagaacg

SEQ ID NO: 31609 - RNA, 23 nt, Artificial Sequence
  Chemically synthesized
gugaauaucgaagaaaggagaac

SEQ ID NO: 31610 - RNA, 23 nt, Artificial Sequence
  Chemically synthesized
ggugaauaucgaagaaaggagaa

SEQ ID NO: 31611 - RNA, 23 nt, Artificial Sequence
  Chemically synthesized
uggugaauaucgaagaaaggaga

SEQ ID NO: 31612 - RNA, 23 nt, Artificial Sequence
  Chemically synthesized
cgacaauccuguuuucuacaaga

SEQ ID NO: 31613 - RNA, 23 nt, Artificial Sequence
  Chemically synthesized
gcgacaauccuguuuucuacaag

SEQ ID NO: 31614 - RNA, 23 nt, Artificial Sequence
  Chemically synthesized
agcgacaauccuguuuucuacaa

SEQ ID NO: 31615 - RNA, 23 nt, Artificial Sequence
  Chemically synthesized
cagcgacaauccuguuuucuaca

SEQ ID NO: 31616 - RNA, 23 nt, Artificial Sequence
  Chemically synthesized
acagcgacaauccuguuuucuac

SEQ ID NO: 31617 - RNA, 23 nt, Artificial Sequence
  Chemically synthesized
agauaaguauacagcgacaaucc

SEQ ID NO: 31618 - RNA, 23 nt, Artificial Sequence
  Chemically synthesized
cagauaaguauacagcgacaauc

SEQ ID NO: 31619 - RNA, 23 nt, Artificial Sequence
  Chemically synthesized
ucagauaaguauacagcgacaau

SEQ ID NO: 31620 - RNA, 23 nt, Artificial Sequence
  Chemically synthesized
cucagauaaguauacagcgacaa

SEQ ID NO: 31621 - RNA, 23 nt, Artificial Sequence
  Chemically synthesized
acucagauaaguauacagcgaca

SEQ ID NO: 31622 - RNA, 23 nt, Artificial Sequence
  Chemically synthesized
cacucagauaaguauacagcgac

SEQ ID NO: 31623 - RNA, 23 nt, Artificial Sequence
  Chemically synthesized
gcacucagauaaguauacagcga

SEQ ID NO: 31624 - RNA, 23 nt, Artificial Sequence
  Chemically synthesized
ggacauuuagcgugaugaaauaa

SEQ ID NO: 31625 - RNA, 23 nt, Artificial Sequence
  Chemically synthesized
aggacauuuagcgugaugaaaua

SEQ ID NO: 31626 - RNA, 23 nt, Artificial Sequence
  Chemically synthesized
gaggacauuuagcgugaugaaau

SEQ ID NO: 31627 - RNA, 23 nt, Artificial Sequence
  Chemically synthesized
agaggacauuuagcgugaugaaa

SEQ ID NO: 31628 - RNA, 23 nt, Artificial Sequence
  Chemically synthesized
uagaggacauuuagcgugaugaa

SEQ ID NO: 31629 - RNA, 23 nt, Artificial Sequence
  Chemically synthesized
cacagaauuuuagucaaugaaga

SEQ ID NO: 31630 - RNA, 23 nt, Artificial Sequence
  Chemically synthesized
acacagaauuuuagucaaugaag

SEQ ID NO: 31631 - RNA, 23 nt, Artificial Sequence
  Chemically synthesized
guaacuugcugggacuguaccca

SEQ ID NO: 31632 - RNA, 23 nt, Artificial Sequence
  Chemically synthesized
cguaacuugcugggacuguaccc

SEQ ID NO: 31633 - RNA, 23 nt, Artificial Sequence
  Chemically synthesized
acguaacuugcugggacuguacc

SEQ ID NO: 31634 - RNA, 23 nt, Artificial Sequence
  Chemically synthesized
cacguaacuugcugggacuguac

SEQ ID NO: 31635 - RNA, 23 nt, Artificial Sequence
  Chemically synthesized
ccacguaacuugcugggacugua

SEQ ID NO: 31636 - RNA, 23 nt, Artificial Sequence
  Chemically synthesized
cacagggaagacgaagaugaaau

SEQ ID NO: 31637 - RNA, 23 nt, Artificial Sequence
  Chemically synthesized
uaacaacguccaaguguguaagu

SEQ ID NO: 31638 - RNA, 23 nt, Artificial Sequence
  Chemically synthesized
guaacaacguccaaguguguaag

SEQ ID NO: 31639 - RNA, 23 nt, Artificial Sequence
  Chemically synthesized
uguaacaacguccaaguguguaa

SEQ ID NO: 31640 - RNA, 23 nt, Artificial Sequence
  Chemically synthesized
ucauguaacaacguccaagugug

SEQ ID NO: 31641 - RNA, 23 nt, Artificial Sequence
  Chemically synthesized
ugcugccucauguaacaacgucc

SEQ ID NO: 31642 - RNA, 23 nt, Artificial Sequence
  Chemically synthesized
gugcugccucauguaacaacguc

SEQ ID NO: 31643 - RNA, 23 nt, Artificial Sequence
  Chemically synthesized
ggacuccauuacauugugcugcc

SEQ ID NO: 31644 - RNA, 23 nt, Artificial Sequence
  Chemically synthesized
uggacuccauuacauugugcugc

SEQ ID NO: 31645 - RNA, 23 nt, Artificial Sequence
  Chemically synthesized
auggacuccauuacauugugcug

SEQ ID NO: 31646 - RNA, 23 nt, Artificial Sequence
  Chemically synthesized
gauggacuccauuacauugugcu

SEQ ID NO: 31647 - RNA, 23 nt, Artificial Sequence
  Chemically synthesized
ggauggacuccauuacauugugc

SEQ ID NO: 31648 - RNA, 23 nt, Artificial Sequence
  Chemically synthesized
uggauggacuccauuacauugug

SEQ ID NO: 31649 - RNA, 23 nt, Artificial Sequence
  Chemically synthesized
aaauguaaaugcugcugauagug

SEQ ID NO: 31650 - RNA, 23 nt, Artificial Sequence
  Chemically synthesized
uaaauguaaaugcugcugauagu

SEQ ID NO: 31651 - RNA, 23 nt, Artificial Sequence
  Chemically synthesized
guaaauguaaaugcugcugauag

SEQ ID NO: 31652 - RNA, 23 nt, Artificial Sequence
  Chemically synthesized
uguaaauguaaaugcugcugaua

SEQ ID NO: 31653 - RNA, 23 nt, Artificial Sequence
  Chemically synthesized
guguaaauguaaaugcugcugau

SEQ ID NO: 31654 - RNA, 23 nt, Artificial Sequence
  Chemically synthesized
ucauggaaugagggugaaauuca

SEQ ID NO: 31655 - RNA, 23 nt, Artificial Sequence
  Chemically synthesized
ccaaauauucagaagcuuuuaua

SEQ ID NO: 31656 - RNA, 23 nt, Artificial Sequence
  Chemically synthesized
gaaacguaguucuauuacagagc

SEQ ID NO: 31657 - RNA, 23 nt, Artificial Sequence
  Chemically synthesized
agaaacguaguucuauuacagag

SEQ ID NO: 31658 - RNA, 23 nt, Artificial Sequence
  Chemically synthesized
aagaaacguaguucuauuacaga

SEQ ID NO: 31659 - RNA, 23 nt, Artificial Sequence
  Chemically synthesized
aaagaaacguaguucuauuacag

SEQ ID NO: 31660 - RNA, 23 nt, Artificial Sequence
  Chemically synthesized
uaaagaaacguaguucuauuaca

SEQ ID NO: 31661 - RNA, 23 nt, Artificial Sequence
  Chemically synthesized
agccuuacgaaagaaacugucua

SEQ ID NO: 31662 - RNA, 23 nt, Artificial Sequence
  Chemically synthesized
cuaauccuuaccgaaaccagagu

SEQ ID NO: 31663 - RNA, 23 nt, Artificial Sequence
  Chemically synthesized
ucuaauccuuaccgaaaccagag

SEQ ID NO: 31664 - RNA, 23 nt, Artificial Sequence
  Chemically synthesized
aucuaauccuuaccgaaaccaga

SEQ ID NO: 31665 - RNA, 23 nt, Artificial Sequence
  Chemically synthesized
uaucuaauccuuaccgaaaccag

SEQ ID NO: 31666 - RNA, 23 nt, Artificial Sequence
  Chemically synthesized
uuaucuaauccuuaccgaaacca

SEQ ID NO: 31667 - RNA, 23 nt, Artificial Sequence
  Chemically synthesized
cucagcccaacuaaauuacugcc

SEQ ID NO: 31668 - RNA, 23 nt, Artificial Sequence
  Chemically synthesized
ggcgccaggaaaaaacuuccagc

SEQ ID NO: 31669 - RNA, 23 nt, Artificial Sequence
  Chemically synthesized
aggcgccaggaaaaaacuuccag

SEQ ID NO: 31670 - RNA, 23 nt, Artificial Sequence
  Chemically synthesized
caggcgccaggaaaaaacuucca

SEQ ID NO: 31671 - RNA, 23 nt, Artificial Sequence
  Chemically synthesized
gcaggcgccaggaaaaaacuucc

SEQ ID NO: 31672 - RNA, 23 nt, Artificial Sequence
  Chemically synthesized
agcaggcgccaggaaaaaacuuc

SEQ ID NO: 31673 - RNA, 23 nt, Artificial Sequence
  Chemically synthesized
ccuuauuuuggacaaacuaauca

SEQ ID NO: 31674 - RNA, 23 nt, Artificial Sequence
  Chemically synthesized
gguggaucugugcaaagaacccg

SEQ ID NO: 31675 - RNA, 23 nt, Artificial Sequence
  Chemically synthesized
ugguggaucugugcaaagaaccc

SEQ ID NO: 31676 - RNA, 23 nt, Artificial Sequence
  Chemically synthesized
gugguggaucugugcaaagaacc

SEQ ID NO: 31677 - RNA, 23 nt, Artificial Sequence
  Chemically synthesized
uuggaguccuucaaaugcagauc

SEQ ID NO: 31678 - RNA, 23 nt, Artificial Sequence
  Chemically synthesized
auuggaguccuucaaaugcagau

SEQ ID NO: 31679 - RNA, 23 nt, Artificial Sequence
  Chemically synthesized
ggggccgaugaaaauacagacac

SEQ ID NO: 31680 - RNA, 23 nt, Artificial Sequence
  Chemically synthesized
aggggccgaugaaaauacagaca

SEQ ID NO: 31681 - RNA, 23 nt, Artificial Sequence
  Chemically synthesized
aguuucaucugauggaaaucuuc

SEQ ID NO: 31682 - RNA, 23 nt, Artificial Sequence
  Chemically synthesized
caguuucaucugauggaaaucuu

SEQ ID NO: 31683 - RNA, 23 nt, Artificial Sequence
  Chemically synthesized
ccaguuucaucugauggaaaucu

SEQ ID NO: 31684 - RNA, 23 nt, Artificial Sequence
  Chemically synthesized
accaguuucaucugauggaaauc

SEQ ID NO: 31685 - RNA, 23 nt, Artificial Sequence
  Chemically synthesized
uaccaguuucaucugauggaaau

SEQ ID NO: 31686 - RNA, 23 nt, Artificial Sequence
  Chemically synthesized
gcguguuaaugagcugagggacc

SEQ ID NO: 31687 - RNA, 23 nt, Artificial Sequence
  Chemically synthesized
agcguguuaaugagcugagggac

SEQ ID NO: 31688 - RNA, 23 nt, Artificial Sequence
  Chemically synthesized
aagcguguuaaugagcugaggga

SEQ ID NO: 31689 - RNA, 23 nt, Artificial Sequence
  Chemically synthesized
uaagcguguuaaugagcugaggg

SEQ ID NO: 31690 - RNA, 23 nt, Artificial Sequence
  Chemically synthesized
auaagcguguuaaugagcugagg

SEQ ID NO: 31691 - RNA, 23 nt, Artificial Sequence
  Chemically synthesized
gucauggauaagcguguuaauga

SEQ ID NO: 31692 - RNA, 23 nt, Artificial Sequence
  Chemically synthesized
agucauggauaagcguguuaaug

SEQ ID NO: 31693 - RNA, 23 nt, Artificial Sequence
  Chemically synthesized
cagucauggauaagcguguuaau

SEQ ID NO: 31694 - RNA, 23 nt, Artificial Sequence
  Chemically synthesized
gcagucauggauaagcguguuaa

SEQ ID NO: 31695 - RNA, 23 nt, Artificial Sequence
  Chemically synthesized
aauaagcguaauucagaaguggc

SEQ ID NO: 31696 - RNA, 23 nt, Artificial Sequence
  Chemically synthesized
gagggaguguuugaauaagcgua

SEQ ID NO: 31697 - RNA, 23 nt, Artificial Sequence
  Chemically synthesized
agcuacaacaacagagggagugu

SEQ ID NO: 31698 - RNA, 23 nt, Artificial Sequence
  Chemically synthesized
aagcuacaacaacagagggagug

SEQ ID NO: 31699 - RNA, 23 nt, Artificial Sequence
  Chemically synthesized
caagcuacaacaacagagggagu

SEQ ID NO: 31700 - RNA, 23 nt, Artificial Sequence
  Chemically synthesized
cacagaaguuccaguuacuccag

SEQ ID NO: 31701 - RNA, 23 nt, Artificial Sequence
  Chemically synthesized
cagaugaauaauuuguuccagca

SEQ ID NO: 31702 - RNA, 23 nt, Artificial Sequence
  Chemically synthesized
acagaagagacuaagcaauggga

SEQ ID NO: 31703 - RNA, 23 nt, Artificial Sequence
  Chemically synthesized
aacagaagagacuaagcaauggg

SEQ ID NO: 31704 - RNA, 23 nt, Artificial Sequence
  Chemically synthesized
gaacagaagagacuaagcaaugg

SEQ ID NO: 31705 - RNA, 23 nt, Artificial Sequence
  Chemically synthesized
ggaacagaagagacuaagcaaug

SEQ ID NO: 31706 - RNA, 23 nt, Artificial Sequence
  Chemically synthesized
uggaacagaagagacuaagcaau

SEQ ID NO: 31707 - RNA, 23 nt, Artificial Sequence
  Chemically synthesized
guggaacagaagagacuaagcaa

SEQ ID NO: 31708 - RNA, 23 nt, Artificial Sequence
  Chemically synthesized
cguggaacagaagagacuaagca

SEQ ID NO: 31709 - RNA, 23 nt, Artificial Sequence
  Chemically synthesized
acguggaacagaagagacuaagc

SEQ ID NO: 31710 - RNA, 23 nt, Artificial Sequence
  Chemically synthesized
cacguggaacagaagagacuaag

SEQ ID NO: 31711 - RNA, 23 nt, Artificial Sequence
  Chemically synthesized
ccacguggaacagaagagacuaa

SEQ ID NO: 31712 - RNA, 23 nt, Artificial Sequence
  Chemically synthesized
guaacaaugagcagcacuucaca

SEQ ID NO: 31713 - RNA, 23 nt, Artificial Sequence
  Chemically synthesized
aguaacaaugagcagcacuucac

SEQ ID NO: 31714 - RNA, 23 nt, Artificial Sequence
  Chemically synthesized
caguaacaaugagcagcacuuca

SEQ ID NO: 31715 - RNA, 23 nt, Artificial Sequence
  Chemically synthesized
ucaguaacaaugagcagcacuuc

SEQ ID NO: 31716 - RNA, 23 nt, Artificial Sequence
  Chemically synthesized
cucaguaacaaugagcagcacuu

SEQ ID NO: 31717 - RNA, 23 nt, Artificial Sequence
  Chemically synthesized
gcuaaaaaaagugagagcacuua

SEQ ID NO: 31718 - RNA, 23 nt, Artificial Sequence
  Chemically synthesized
agcuaaaaaaagugagagcacuu

SEQ ID NO: 31719 - RNA, 23 nt, Artificial Sequence
  Chemically synthesized
aagcuaaaaaaagugagagcacu

SEQ ID NO: 31720 - RNA, 23 nt, Artificial Sequence
  Chemically synthesized
uaagcuaaaaaaagugagagcac

SEQ ID NO: 31721 - RNA, 23 nt, Artificial Sequence
  Chemically synthesized
cuaagcuaaaaaaagugagagca

SEQ ID NO: 31722 - RNA, 23 nt, Artificial Sequence
  Chemically synthesized
gcuaagcuaaaaaaagugagagc

SEQ ID NO: 31723 - RNA, 23 nt, Artificial Sequence
  Chemically synthesized
agcuaagcuaaaaaaagugagag

SEQ ID NO: 31724 - RNA, 23 nt, Artificial Sequence
  Chemically synthesized
aagcuaagcuaaaaaaagugaga

SEQ ID NO: 31725 - RNA, 23 nt, Artificial Sequence
  Chemically synthesized
gaagcuaagcuaaaaaaagugag

SEQ ID NO: 31726 - RNA, 23 nt, Artificial Sequence
  Chemically synthesized
uugaaacaacaagaucagcgaca

SEQ ID NO: 31727 - RNA, 23 nt, Artificial Sequence
  Chemically synthesized
uuugaaacaacaagaucagcgac

SEQ ID NO: 31728 - RNA, 23 nt, Artificial Sequence
  Chemically synthesized
uuuugaaacaacaagaucagcga

SEQ ID NO: 31729 - RNA, 23 nt, Artificial Sequence
  Chemically synthesized
gaacagcgcuuaaaguuuuugaa

SEQ ID NO: 31730 - RNA, 23 nt, Artificial Sequence
  Chemically synthesized
ggaacagcgcuuaaaguuuuuga

SEQ ID NO: 31731 - RNA, 23 nt, Artificial Sequence
  Chemically synthesized
aggaacagcgcuuaaaguuuuug

SEQ ID NO: 31732 - RNA, 23 nt, Artificial Sequence
  Chemically synthesized
aaggaacagcgcuuaaaguuuuu

SEQ ID NO: 31733 - RNA, 23 nt, Artificial Sequence
  Chemically synthesized
uaaggaacagcgcuuaaaguuuu

SEQ ID NO: 31734 - RNA, 23 nt, Artificial Sequence
  Chemically synthesized
cugacuuuaaaaacaguuguaau

SEQ ID NO: 31735 - RNA, 23 nt, Artificial Sequence
  Chemically synthesized
gcugacuuuaaaaacaguuguaa

SEQ ID NO: 31736 - RNA, 23 nt, Artificial Sequence
  Chemically synthesized
agcugacuuuaaaaacaguugua

SEQ ID NO: 31737 - RNA, 23 nt, Artificial Sequence
  Chemically synthesized
uagcugacuuuaaaaacaguugu

SEQ ID NO: 31738 - RNA, 23 nt, Artificial Sequence
  Chemically synthesized
auagcugacuuuaaaaacaguug

SEQ ID NO: 31739 - RNA, 23 nt, Artificial Sequence
  Chemically synthesized
uauaugaguuuuuguagcaucuu

SEQ ID NO: 31740 - RNA, 23 nt, Artificial Sequence
  Chemically synthesized
uuaguugguugucagugaacaau

SEQ ID NO: 31741 - RNA, 23 nt, Artificial Sequence
  Chemically synthesized
guuaguugguugucagugaacaa

SEQ ID NO: 31742 - RNA, 23 nt, Artificial Sequence
  Chemically synthesized
uguuaguugguugucagugaaca

SEQ ID NO: 31743 - RNA, 23 nt, Artificial Sequence
  Chemically synthesized
cuguuaguugguugucagugaac

SEQ ID NO: 31744 - RNA, 23 nt, Artificial Sequence
  Chemically synthesized
acuguuaguugguugucagugaa

SEQ ID NO: 31745 - RNA, 23 nt, Artificial Sequence
  Chemically synthesized
gaagaacuguuaguugguuguca

SEQ ID NO: 31746 - RNA, 23 nt, Artificial Sequence
  Chemically synthesized
ugaagaacuguuaguugguuguc

SEQ ID NO: 31747 - RNA, 23 nt, Artificial Sequence
  Chemically synthesized
gugaagaacuguuaguugguugu

SEQ ID NO: 31748 - RNA, 23 nt, Artificial Sequence
  Chemically synthesized
agugaagaacuguuaguugguug

SEQ ID NO: 31749 - RNA, 23 nt, Artificial Sequence
  Chemically synthesized
cagugaagaacuguuaguugguu

SEQ ID NO: 31750 - RNA, 23 nt, Artificial Sequence
  Chemically synthesized
gcacacuuguauauugucaguga

SEQ ID NO: 31751 - RNA, 23 nt, Artificial Sequence
  Chemically synthesized
ugcacacuuguauauugucagug

SEQ ID NO: 31752 - RNA, 23 nt, Artificial Sequence
  Chemically synthesized
cugcacacuuguauauugucagu

SEQ ID NO: 31753 - RNA, 23 nt, Artificial Sequence
  Chemically synthesized
acugcacacuuguauauugucag

SEQ ID NO: 31754 - RNA, 23 nt, Artificial Sequence
  Chemically synthesized
cacugcacacuuguauauuguca

SEQ ID NO: 31755 - RNA, 23 nt, Artificial Sequence
  Chemically synthesized
gucuaguaaauaggaucauuuau

SEQ ID NO: 31756 - RNA, 23 nt, Artificial Sequence
  Chemically synthesized
ugucuaguaaauaggaucauuua

SEQ ID NO: 31757 - RNA, 23 nt, Artificial Sequence
  Chemically synthesized
cugucuaguaaauaggaucauuu

SEQ ID NO: 31758 - RNA, 23 nt, Artificial Sequence
  Chemically synthesized
ccugucuaguaaauaggaucauu

SEQ ID NO: 31759 - RNA, 23 nt, Artificial Sequence
  Chemically synthesized
uccugucuaguaaauaggaucau

SEQ ID NO: 31760 - RNA, 23 nt, Artificial Sequence
  Chemically synthesized
agaauccugucuaguaaauagga

SEQ ID NO: 31761 - RNA, 23 nt, Artificial Sequence
  Chemically synthesized
aagaauccugucuaguaaauagg

SEQ ID NO: 31762 - RNA, 23 nt, Artificial Sequence
  Chemically synthesized
caagaauccugucuaguaaauag

SEQ ID NO: 31763 - RNA, 23 nt, Artificial Sequence
  Chemically synthesized
acaagaauccugucuaguaaaua

SEQ ID NO: 31764 - RNA, 23 nt, Artificial Sequence
  Chemically synthesized
uacaagaauccugucuaguaaau

SEQ ID NO: 31765 - RNA, 23 nt, Artificial Sequence
  Chemically synthesized
uacagcgacaauccuguuuucua

SEQ ID NO: 31766 - RNA, 23 nt, Artificial Sequence
  Chemically synthesized
gauaaguauacagcgacaauccu

SEQ ID NO: 31767 - RNA, 23 nt, Artificial Sequence
  Chemically synthesized
gcgaugaagaaugucucuagaag

SEQ ID NO: 31768 - RNA, 23 nt, Artificial Sequence
  Chemically synthesized
agcgaugaagaaugucucuagaa

SEQ ID NO: 31769 - RNA, 23 nt, Artificial Sequence
  Chemically synthesized
aagcgaugaagaaugucucuaga

SEQ ID NO: 31770 - RNA, 23 nt, Artificial Sequence
  Chemically synthesized
aaagcgaugaagaaugucucuag

SEQ ID NO: 31771 - RNA, 23 nt, Artificial Sequence
  Chemically synthesized
gaaagcgaugaagaaugucucua

SEQ ID NO: 31772 - RNA, 23 nt, Artificial Sequence
  Chemically synthesized
ugacaauguagcuugaaagcgau

SEQ ID NO: 31773 - RNA, 23 nt, Artificial Sequence
  Chemically synthesized
augacaauguagcuugaaagcga

SEQ ID NO: 31774 - RNA, 23 nt, Artificial Sequence
  Chemically synthesized
aaugacaauguagcuugaaagcg

SEQ ID NO: 31775 - RNA, 23 nt, Artificial Sequence
  Chemically synthesized
uaaugacaauguagcuugaaagc

SEQ ID NO: 31776 - RNA, 23 nt, Artificial Sequence
  Chemically synthesized
uuaaugacaauguagcuugaaag

SEQ ID NO: 31777 - RNA, 23 nt, Artificial Sequence
  Chemically synthesized
gagucauuuaugcgcuuugggau

SEQ ID NO: 31778 - RNA, 23 nt, Artificial Sequence
  Chemically synthesized
aggagaagaugggcauaaugaau

SEQ ID NO: 31779 - RNA, 23 nt, Artificial Sequence
  Chemically synthesized
caggagaagaugggcauaaugaa

SEQ ID NO: 31780 - RNA, 23 nt, Artificial Sequence
  Chemically synthesized
ucaggagaagaugggcauaauga

SEQ ID NO: 31781 - RNA, 23 nt, Artificial Sequence
  Chemically synthesized
uucaggagaagaugggcauaaug

SEQ ID NO: 31782 - RNA, 23 nt, Artificial Sequence
  Chemically synthesized
guucaggagaagaugggcauaau

SEQ ID NO: 31783 - RNA, 23 nt, Artificial Sequence
  Chemically synthesized
gaggaaggcuacacucagugcuc

SEQ ID NO: 31784 - RNA, 23 nt, Artificial Sequence
  Chemically synthesized
ggaggaaggcuacacucagugcu

SEQ ID NO: 31785 - RNA, 23 nt, Artificial Sequence
  Chemically synthesized
uggaggaaggcuacacucagugc

SEQ ID NO: 31786 - RNA, 23 nt, Artificial Sequence
  Chemically synthesized
auggaggaaggcuacacucagug

SEQ ID NO: 31787 - RNA, 23 nt, Artificial Sequence
  Chemically synthesized
aauggaggaaggcuacacucagu

SEQ ID NO: 31788 - RNA, 23 nt, Artificial Sequence
  Chemically synthesized
caaguguguaaguuuuuggugga

SEQ ID NO: 31789 - RNA, 23 nt, Artificial Sequence
  Chemically synthesized
ugguguaaauguaaaugcugcug

SEQ ID NO: 31790 - RNA, 23 nt, Artificial Sequence
  Chemically synthesized
uugguguaaauguaaaugcugcu

SEQ ID NO: 31791 - RNA, 23 nt, Artificial Sequence
  Chemically synthesized
uuugguguaaauguaaaugcugc

SEQ ID NO: 31792 - RNA, 23 nt, Artificial Sequence
  Chemically synthesized
guuugguguaaauguaaaugcug

SEQ ID NO: 31793 - RNA, 23 nt, Artificial Sequence
  Chemically synthesized
aguuugguguaaauguaaaugcu

SEQ ID NO: 31794 - RNA, 23 nt, Artificial Sequence
  Chemically synthesized
caguuugguguaaauguaaaugc

SEQ ID NO: 31795 - RNA, 23 nt, Artificial Sequence
  Chemically synthesized
ucguuaaguuccugguacaguuu

SEQ ID NO: 31796 - RNA, 23 nt, Artificial Sequence
  Chemically synthesized
aucguuaaguuccugguacaguu

SEQ ID NO: 31797 - RNA, 23 nt, Artificial Sequence
  Chemically synthesized
aaucguuaaguuccugguacagu

SEQ ID NO: 31798 - RNA, 23 nt, Artificial Sequence
  Chemically synthesized
aaaucguuaaguuccugguacag

SEQ ID NO: 31799 - RNA, 23 nt, Artificial Sequence
  Chemically synthesized
gaaaucguuaaguuccugguaca

SEQ ID NO: 31800 - RNA, 23 nt, Artificial Sequence
  Chemically synthesized
gaauuugaccuuguacagagaau

SEQ ID NO: 31801 - RNA, 23 nt, Artificial Sequence
  Chemically synthesized
gagaauuugaccuuguacagaga

SEQ ID NO: 31802 - RNA, 23 nt, Artificial Sequence
  Chemically synthesized
cgucuuuggagggagaauuugac

SEQ ID NO: 31803 - RNA, 23 nt, Artificial Sequence
  Chemically synthesized
ucgucuuuggagggagaauuuga

SEQ ID NO: 31804 - RNA, 23 nt, Artificial Sequence
  Chemically synthesized
uucgucuuuggagggagaauuug

SEQ ID NO: 31805 - RNA, 23 nt, Artificial Sequence
  Chemically synthesized
auucgucuuuggagggagaauuu

SEQ ID NO: 31806 - RNA, 23 nt, Artificial Sequence
  Chemically synthesized
gauucgucuuuggagggagaauu

SEQ ID NO: 31807 - RNA, 23 nt, Artificial Sequence
  Chemically synthesized
cuccacaugugcuugauguguac

SEQ ID NO: 31808 - RNA, 23 nt, Artificial Sequence
  Chemically synthesized
gcuccacaugugcuugaugugua

SEQ ID NO: 31809 - RNA, 23 nt, Artificial Sequence
  Chemically synthesized
cgauuuggaagucagaggaacga

SEQ ID NO: 31810 - RNA, 23 nt, Artificial Sequence
  Chemically synthesized
acgauuuggaagucagaggaacg

SEQ ID NO: 31811 - RNA, 23 nt, Artificial Sequence
  Chemically synthesized
aacgauuuggaagucagaggaac

SEQ ID NO: 31812 - RNA, 23 nt, Artificial Sequence
  Chemically synthesized
caacgauuuggaagucagaggaa

SEQ ID NO: 31813 - RNA, 23 nt, Artificial Sequence
  Chemically synthesized
ucaacgauuuggaagucagagga

SEQ ID NO: 31814 - RNA, 23 nt, Artificial Sequence
  Chemically synthesized
ucagaaagcccaguagaaaucca

SEQ ID NO: 31815 - RNA, 23 nt, Artificial Sequence
  Chemically synthesized
cucagaaagcccaguagaaaucc

SEQ ID NO: 31816 - RNA, 23 nt, Artificial Sequence
  Chemically synthesized
gcucagaaagcccaguagaaauc

SEQ ID NO: 31817 - RNA, 23 nt, Artificial Sequence
  Chemically synthesized
agcucagaaagcccaguagaaau

SEQ ID NO: 31818 - RNA, 23 nt, Artificial Sequence
  Chemically synthesized
cagcucagaaagcccaguagaaa

SEQ ID NO: 31819 - RNA, 23 nt, Artificial Sequence
  Chemically synthesized
gaaacugucuaacgcaccaaggc

SEQ ID NO: 31820 - RNA, 23 nt, Artificial Sequence
  Chemically synthesized
agaaacugucuaacgcaccaagg

SEQ ID NO: 31821 - RNA, 23 nt, Artificial Sequence
  Chemically synthesized
aagaaacugucuaacgcaccaag

SEQ ID NO: 31822 - RNA, 23 nt, Artificial Sequence
  Chemically synthesized
aaagaaacugucuaacgcaccaa

SEQ ID NO: 31823 - RNA, 23 nt, Artificial Sequence
  Chemically synthesized
gaaagaaacugucuaacgcacca

SEQ ID NO: 31824 - RNA, 23 nt, Artificial Sequence
  Chemically synthesized
gagugaugcugaccuagaagccu

SEQ ID NO: 31825 - RNA, 23 nt, Artificial Sequence
  Chemically synthesized
agagugaugcugaccuagaagcc

SEQ ID NO: 31826 - RNA, 23 nt, Artificial Sequence
  Chemically synthesized
cagagugaugcugaccuagaagc

SEQ ID NO: 31827 - RNA, 23 nt, Artificial Sequence
  Chemically synthesized
ccagagugaugcugaccuagaag

SEQ ID NO: 31828 - RNA, 23 nt, Artificial Sequence
  Chemically synthesized
accagagugaugcugaccuagaa

SEQ ID NO: 31829 - RNA, 23 nt, Artificial Sequence
  Chemically synthesized
ggauaaugagcgaauguuugaug

SEQ ID NO: 31830 - RNA, 23 nt, Artificial Sequence
  Chemically synthesized
cuaucucccagcauaccuucggu

SEQ ID NO: 31831 - RNA, 23 nt, Artificial Sequence
  Chemically synthesized
gcuaucucccagcauaccuucgg

SEQ ID NO: 31832 - RNA, 23 nt, Artificial Sequence
  Chemically synthesized
ugcuaucucccagcauaccuucg

SEQ ID NO: 31833 - RNA, 23 nt, Artificial Sequence
  Chemically synthesized
cugcuaucucccagcauaccuuc

SEQ ID NO: 31834 - RNA, 23 nt, Artificial Sequence
  Chemically synthesized
gcugcuaucucccagcauaccuu

SEQ ID NO: 31835 - RNA, 23 nt, Artificial Sequence
  Chemically synthesized
gcaguugucaacaguuguuccgu

SEQ ID NO: 31836 - RNA, 23 nt, Artificial Sequence
  Chemically synthesized
agcaguugucaacaguuguuccg

SEQ ID NO: 31837 - RNA, 23 nt, Artificial Sequence
  Chemically synthesized
cagcaguugucaacaguuguucc

SEQ ID NO: 31838 - RNA, 23 nt, Artificial Sequence
  Chemically synthesized
ucagcaguugucaacaguuguuc

SEQ ID NO: 31839 - RNA, 23 nt, Artificial Sequence
  Chemically synthesized
cucagcaguugucaacaguuguu

SEQ ID NO: 31840 - RNA, 23 nt, Artificial Sequence
  Chemically synthesized
gaagauaucuugcgggaugcuca

SEQ ID NO: 31841 - RNA, 23 nt, Artificial Sequence
  Chemically synthesized
ugaagauaucuugcgggaugcuc

SEQ ID NO: 31842 - RNA, 23 nt, Artificial Sequence
  Chemically synthesized
gugaagauaucuugcgggaugcu

SEQ ID NO: 31843 - RNA, 23 nt, Artificial Sequence
  Chemically synthesized
agugaagauaucuugcgggaugc

SEQ ID NO: 31844 - RNA, 23 nt, Artificial Sequence
  Chemically synthesized
cagugaagauaucuugcgggaug

SEQ ID NO: 31845 - RNA, 23 nt, Artificial Sequence
  Chemically synthesized
ccuuugguacucugaggaagaac

SEQ ID NO: 31846 - RNA, 23 nt, Artificial Sequence
  Chemically synthesized
uccuuugguacucugaggaagaa

SEQ ID NO: 31847 - RNA, 23 nt, Artificial Sequence
  Chemically synthesized
uuccuuugguacucugaggaaga

SEQ ID NO: 31848 - RNA, 23 nt, Artificial Sequence
  Chemically synthesized
cuuccuuugguacucugaggaag

SEQ ID NO: 31849 - RNA, 23 nt, Artificial Sequence
  Chemically synthesized
ccuuccuuugguacucugaggaa

SEQ ID NO: 31850 - RNA, 23 nt, Artificial Sequence
  Chemically synthesized
ugcguccguucucaauguuugau

SEQ ID NO: 31851 - RNA, 23 nt, Artificial Sequence
  Chemically synthesized
gugcguccguucucaauguuuga

SEQ ID NO: 31852 - RNA, 23 nt, Artificial Sequence
  Chemically synthesized
agugcguccguucucaauguuug

SEQ ID NO: 31853 - RNA, 23 nt, Artificial Sequence
  Chemically synthesized
aagugcguccguucucaauguuu

SEQ ID NO: 31854 - RNA, 23 nt, Artificial Sequence
  Chemically synthesized
aaagugcguccguucucaauguu

SEQ ID NO: 31855 - RNA, 23 nt, Artificial Sequence
  Chemically synthesized
ggaaugcucuggaucaaguugau

SEQ ID NO: 31856 - RNA, 23 nt, Artificial Sequence
  Chemically synthesized
gggaaugcucuggaucaaguuga

SEQ ID NO: 31857 - RNA, 23 nt, Artificial Sequence
  Chemically synthesized
ugggaaugcucuggaucaaguug

SEQ ID NO: 31858 - RNA, 23 nt, Artificial Sequence
  Chemically synthesized
cugggaaugcucuggaucaaguu

SEQ ID NO: 31859 - RNA, 23 nt, Artificial Sequence
  Chemically synthesized
acugggaaugcucuggaucaagu

SEQ ID NO: 31860 - RNA, 23 nt, Artificial Sequence
  Chemically synthesized
ccuucaaaugcagaucuuuuccc

SEQ ID NO: 31861 - RNA, 23 nt, Artificial Sequence
  Chemically synthesized
ggcccugauuggaguccuucaaa

SEQ ID NO: 31862 - RNA, 23 nt, Artificial Sequence
  Chemically synthesized
cuaccaguuucaucugauggaaa

SEQ ID NO: 31863 - RNA, 23 nt, Artificial Sequence
  Chemically synthesized
caguuacuccagaaacaauaugc

SEQ ID NO: 31864 - RNA, 23 nt, Artificial Sequence
  Chemically synthesized
ggcagucauggauaagcguguua

SEQ ID NO: 31865 - RNA, 23 nt, Artificial Sequence
  Chemically synthesized
agggaguguuugaauaagcguaa

SEQ ID NO: 31866 - RNA, 23 nt, Artificial Sequence
  Chemically synthesized
cuuguggaggaaauugaacagau

SEQ ID NO: 31867 - RNA, 23 nt, Artificial Sequence
  Chemically synthesized
ucucaguaacaaugagcagcacu

SEQ ID NO: 31868 - RNA, 23 nt, Artificial Sequence
  Chemically synthesized
aucucaguaacaaugagcagcac

SEQ ID NO: 31869 - RNA, 23 nt, Artificial Sequence
  Chemically synthesized
uaucucaguaacaaugagcagca

SEQ ID NO: 31870 - RNA, 23 nt, Artificial Sequence
  Chemically synthesized
gagcaggagaaacuuaaaaggcu

SEQ ID NO: 31871 - RNA, 23 nt, Artificial Sequence
  Chemically synthesized
ugagcaggagaaacuuaaaaggc

SEQ ID NO: 31872 - RNA, 23 nt, Artificial Sequence
  Chemically synthesized
cugagcaggagaaacuuaaaagg

SEQ ID NO: 31873 - RNA, 23 nt, Artificial Sequence
  Chemically synthesized
gcugagcaggagaaacuuaaaag

SEQ ID NO: 31874 - RNA, 23 nt, Artificial Sequence
  Chemically synthesized
ugcugagcaggagaaacuuaaaa

SEQ ID NO: 31875 - RNA, 23 nt, Artificial Sequence
  Chemically synthesized
cguguaucucaguaacaaugagc

SEQ ID NO: 31876 - RNA, 23 nt, Artificial Sequence
  Chemically synthesized
aggauggaucugacucuugcuga

SEQ ID NO: 31877 - RNA, 23 nt, Artificial Sequence
  Chemically synthesized
uaggauggaucugacucuugcug

SEQ ID NO: 31878 - RNA, 23 nt, Artificial Sequence
  Chemically synthesized
cuaggauggaucugacucuugcu

SEQ ID NO: 31879 - RNA, 23 nt, Artificial Sequence
  Chemically synthesized
ccuaggauggaucugacucuugc

SEQ ID NO: 31880 - RNA, 23 nt, Artificial Sequence
  Chemically synthesized
uccuaggauggaucugacucuug

SEQ ID NO: 31881 - RNA, 23 nt, Artificial Sequence
  Chemically synthesized
guccuaggauggaucugacucuu

SEQ ID NO: 31882 - RNA, 23 nt, Artificial Sequence
  Chemically synthesized
aguccuaggauggaucugacucu

SEQ ID NO: 31883 - RNA, 23 nt, Artificial Sequence
  Chemically synthesized
ccguaauauuugucaagaucaua

SEQ ID NO: 31884 - RNA, 23 nt, Artificial Sequence
  Chemically synthesized
acuuacccguaauauuugucaag

SEQ ID NO: 31885 - RNA, 23 nt, Artificial Sequence
  Chemically synthesized
cucagaaauuagaaacuugcuac

SEQ ID NO: 31886 - RNA, 23 nt, Artificial Sequence
  Chemically synthesized
ucucagaaauuagaaacuugcua

SEQ ID NO: 31887 - RNA, 23 nt, Artificial Sequence
  Chemically synthesized
aucucagaaauuagaaacuugcu

SEQ ID NO: 31888 - RNA, 23 nt, Artificial Sequence
  Chemically synthesized
uaucucagaaauuagaaacuugc

SEQ ID NO: 31889 - RNA, 23 nt, Artificial Sequence
  Chemically synthesized
guaucucagaaauuagaaacuug

SEQ ID NO: 31890 - RNA, 23 nt, Artificial Sequence
  Chemically synthesized
auaucgaagaaaggagaacggug

SEQ ID NO: 31891 - RNA, 23 nt, Artificial Sequence
  Chemically synthesized
uugaaacuaagcuacgguaccag

SEQ ID NO: 31892 - RNA, 23 nt, Artificial Sequence
  Chemically synthesized
auugaaacuaagcuacgguacca

SEQ ID NO: 31893 - RNA, 23 nt, Artificial Sequence
  Chemically synthesized
uauugaaacuaagcuacgguacc

SEQ ID NO: 31894 - RNA, 23 nt, Artificial Sequence
  Chemically synthesized
auauugaaacuaagcuacgguac

SEQ ID NO: 31895 - RNA, 23 nt, Artificial Sequence
  Chemically synthesized
aauauugaaacuaagcuacggua

SEQ ID NO: 31896 - RNA, 23 nt, Artificial Sequence
  Chemically synthesized
ggaucauuuauugggcaguuggg

SEQ ID NO: 31897 - RNA, 23 nt, Artificial Sequence
  Chemically synthesized
aggaucauuuauugggcaguugg

SEQ ID NO: 31898 - RNA, 23 nt, Artificial Sequence
  Chemically synthesized
uaggaucauuuauugggcaguug

SEQ ID NO: 31899 - RNA, 23 nt, Artificial Sequence
  Chemically synthesized
auaggaucauuuauugggcaguu

SEQ ID NO: 31900 - RNA, 23 nt, Artificial Sequence
  Chemically synthesized
aauaggaucauuuauugggcagu

SEQ ID NO: 31901 - RNA, 23 nt, Artificial Sequence
  Chemically synthesized
ugaaauaaagcaucuacgucagc

SEQ ID NO: 31902 - RNA, 23 nt, Artificial Sequence
  Chemically synthesized
augaaauaaagcaucuacgucag

SEQ ID NO: 31903 - RNA, 23 nt, Artificial Sequence
  Chemically synthesized
gaugaaauaaagcaucuacguca

SEQ ID NO: 31904 - RNA, 23 nt, Artificial Sequence
  Chemically synthesized
ugaugaaauaaagcaucuacguc

SEQ ID NO: 31905 - RNA, 23 nt, Artificial Sequence
  Chemically synthesized
gugaugaaauaaagcaucuacgu

SEQ ID NO: 31906 - RNA, 23 nt, Artificial Sequence
  Chemically synthesized
auuuagcgugaugaaauaaagca

SEQ ID NO: 31907 - RNA, 23 nt, Artificial Sequence
  Chemically synthesized
cgaugaagaaugucucuagaaga

SEQ ID NO: 31908 - RNA, 23 nt, Artificial Sequence
  Chemically synthesized
ugaaagcgaugaagaaugucucu

SEQ ID NO: 31909 - RNA, 23 nt, Artificial Sequence
  Chemically synthesized
uugaaagcgaugaagaaugucuc

SEQ ID NO: 31910 - RNA, 23 nt, Artificial Sequence
  Chemically synthesized
cuugaaagcgaugaagaaugucu

SEQ ID NO: 31911 - RNA, 23 nt, Artificial Sequence
  Chemically synthesized
gcuugaaagcgaugaagaauguc

SEQ ID NO: 31912 - RNA, 23 nt, Artificial Sequence
  Chemically synthesized
agcuugaaagcgaugaagaaugu

SEQ ID NO: 31913 - RNA, 23 nt, Artificial Sequence
  Chemically synthesized
uuuaaugacaauguagcuugaaa

SEQ ID NO: 31914 - RNA, 23 nt, Artificial Sequence
  Chemically synthesized
cucuguuaagaagaaguaauacg

SEQ ID NO: 31915 - RNA, 23 nt, Artificial Sequence
  Chemically synthesized
ucucuguuaagaagaaguaauac

SEQ ID NO: 31916 - RNA, 23 nt, Artificial Sequence
  Chemically synthesized
aucucuguuaagaagaaguaaua

SEQ ID NO: 31917 - RNA, 23 nt, Artificial Sequence
  Chemically synthesized
aaucucuguuaagaagaaguaau

SEQ ID NO: 31918 - RNA, 23 nt, Artificial Sequence
  Chemically synthesized
uaaucucuguuaagaagaaguaa

SEQ ID NO: 31919 - RNA, 23 nt, Artificial Sequence
  Chemically synthesized
ucucaggauccaaguuuaaaaag

SEQ ID NO: 31920 - RNA, 23 nt, Artificial Sequence
  Chemically synthesized
aucucaggauccaaguuuaaaaa

SEQ ID NO: 31921 - RNA, 23 nt, Artificial Sequence
  Chemically synthesized
gaucucaggauccaaguuuaaaa

SEQ ID NO: 31922 - RNA, 23 nt, Artificial Sequence
  Chemically synthesized
aguucaggagaagaugggcauaa

SEQ ID NO: 31923 - RNA, 23 nt, Artificial Sequence
  Chemically synthesized
gugcucccaauuucuuuauggag

SEQ ID NO: 31924 - RNA, 23 nt, Artificial Sequence
  Chemically synthesized
agugcucccaauuucuuuaugga

SEQ ID NO: 31925 - RNA, 23 nt, Artificial Sequence
  Chemically synthesized
cagugcucccaauuucuuuaugg

SEQ ID NO: 31926 - RNA, 23 nt, Artificial Sequence
  Chemically synthesized
ucagugcucccaauuucuuuaug

SEQ ID NO: 31927 - RNA, 23 nt, Artificial Sequence
  Chemically synthesized
cucagugcucccaauuucuuuau

SEQ ID NO: 31928 - RNA, 23 nt, Artificial Sequence
  Chemically synthesized
aggaaauggaggaaggcuacacu

SEQ ID NO: 31929 - RNA, 23 nt, Artificial Sequence
  Chemically synthesized
gaggaaauggaggaaggcuacac

SEQ ID NO: 31930 - RNA, 23 nt, Artificial Sequence
  Chemically synthesized
cgaggaaauggaggaaggcuaca

SEQ ID NO: 31931 - RNA, 23 nt, Artificial Sequence
  Chemically synthesized
gcgaggaaauggaggaaggcuac

SEQ ID NO: 31932 - RNA, 23 nt, Artificial Sequence
  Chemically synthesized
ugcgaggaaauggaggaaggcua

SEQ ID NO: 31933 - RNA, 23 nt, Artificial Sequence
  Chemically synthesized
cagauaagugcgaggaaauggag

SEQ ID NO: 31934 - RNA, 23 nt, Artificial Sequence
  Chemically synthesized
gcagauaagugcgaggaaaugga

SEQ ID NO: 31935 - RNA, 23 nt, Artificial Sequence
  Chemically synthesized
ugcagauaagugcgaggaaaugg

SEQ ID NO: 31936 - RNA, 23 nt, Artificial Sequence
  Chemically synthesized
cugcagauaagugcgaggaaaug

SEQ ID NO: 31937 - RNA, 23 nt, Artificial Sequence
  Chemically synthesized
gcugcagauaagugcgaggaaau

SEQ ID NO: 31938 - RNA, 23 nt, Artificial Sequence
  Chemically synthesized
auguaacaacguccaagugugua

SEQ ID NO: 31939 - RNA, 23 nt, Artificial Sequence
  Chemically synthesized
cauguaacaacguccaagugugu

SEQ ID NO: 31940 - RNA, 23 nt, Artificial Sequence
  Chemically synthesized
acaugugcuugauguguaccugg

SEQ ID NO: 31941 - RNA, 23 nt, Artificial Sequence
  Chemically synthesized
cacaugugcuugauguguaccug

SEQ ID NO: 31942 - RNA, 23 nt, Artificial Sequence
  Chemically synthesized
ccacaugugcuugauguguaccu

SEQ ID NO: 31943 - RNA, 23 nt, Artificial Sequence
  Chemically synthesized
uccacaugugcuugauguguacc

SEQ ID NO: 31944 - RNA, 23 nt, Artificial Sequence
  Chemically synthesized
cccagaagaaccaaauccagagg

SEQ ID NO: 31945 - RNA, 23 nt, Artificial Sequence
  Chemically synthesized
acccagaagaaccaaauccagag

SEQ ID NO: 31946 - RNA, 23 nt, Artificial Sequence
  Chemically synthesized
aacccagaagaaccaaauccaga

SEQ ID NO: 31947 - RNA, 23 nt, Artificial Sequence
  Chemically synthesized
uaacccagaagaaccaaauccag

SEQ ID NO: 31948 - RNA, 23 nt, Artificial Sequence
  Chemically synthesized
auaacccagaagaaccaaaucca

SEQ ID NO: 31949 - RNA, 23 nt, Artificial Sequence
  Chemically synthesized
caacagcccaaaucuccagaaua

SEQ ID NO: 31950 - RNA, 23 nt, Artificial Sequence
  Chemically synthesized
acaacagcccaaaucuccagaau

SEQ ID NO: 31951 - RNA, 23 nt, Artificial Sequence
  Chemically synthesized
gacaacagcccaaaucuccagaa

SEQ ID NO: 31952 - RNA, 23 nt, Artificial Sequence
  Chemically synthesized
gccuugauuaugagccugaggga

SEQ ID NO: 31953 - RNA, 23 nt, Artificial Sequence
  Chemically synthesized
ggccuugauuaugagccugaggg

SEQ ID NO: 31954 - RNA, 23 nt, Artificial Sequence
  Chemically synthesized
aggccuugauuaugagccugagg

SEQ ID NO: 31955 - RNA, 23 nt, Artificial Sequence
  Chemically synthesized
caggccuugauuaugagccugag

SEQ ID NO: 31956 - RNA, 23 nt, Artificial Sequence
  Chemically synthesized
ccaggccuugauuaugagccuga

SEQ ID NO: 31957 - RNA, 23 nt, Artificial Sequence
  Chemically synthesized
ggaaugccaguacagagaacagu

SEQ ID NO: 31958 - RNA, 23 nt, Artificial Sequence
  Chemically synthesized
gggaaugccaguacagagaacag

SEQ ID NO: 31959 - RNA, 23 nt, Artificial Sequence
  Chemically synthesized
ggggaaugccaguacagagaaca

SEQ ID NO: 31960 - RNA, 23 nt, Artificial Sequence
  Chemically synthesized
uggggaaugccaguacagagaac

SEQ ID NO: 31961 - RNA, 23 nt, Artificial Sequence
  Chemically synthesized
guggggaaugccaguacagagaa

SEQ ID NO: 31962 - RNA, 23 nt, Artificial Sequence
  Chemically synthesized
gaaauccagaauccauauuuaca

SEQ ID NO: 31963 - RNA, 23 nt, Artificial Sequence
  Chemically synthesized
agaaauccagaauccauauuuac

SEQ ID NO: 31964 - RNA, 23 nt, Artificial Sequence
  Chemically synthesized
uagaaauccagaauccauauuua

SEQ ID NO: 31965 - RNA, 23 nt, Artificial Sequence
  Chemically synthesized
guagaaauccagaauccauauuu

SEQ ID NO: 31966 - RNA, 23 nt, Artificial Sequence
  Chemically synthesized
aguagaaauccagaauccauauu

SEQ ID NO: 31967 - RNA, 23 nt, Artificial Sequence
  Chemically synthesized
agaaagcccaguagaaauccaga

SEQ ID NO: 31968 - RNA, 23 nt, Artificial Sequence
  Chemically synthesized
cagaaagcccaguagaaauccag

SEQ ID NO: 31969 - RNA, 23 nt, Artificial Sequence
  Chemically synthesized
ccagcucagaaagcccaguagaa

SEQ ID NO: 31970 - RNA, 23 nt, Artificial Sequence
  Chemically synthesized
aaacugucuaacgcaccaaggcc

SEQ ID NO: 31971 - RNA, 23 nt, Artificial Sequence
  Chemically synthesized
aagccuuacgaaagaaacugucu

SEQ ID NO: 31972 - RNA, 23 nt, Artificial Sequence
  Chemically synthesized
gaagccuuacgaaagaaacuguc

SEQ ID NO: 31973 - RNA, 23 nt, Artificial Sequence
  Chemically synthesized
ccuuaccgaaaccagagugaugc

SEQ ID NO: 31974 - RNA, 23 nt, Artificial Sequence
  Chemically synthesized
uccuuaccgaaaccagagugaug

SEQ ID NO: 31975 - RNA, 23 nt, Artificial Sequence
  Chemically synthesized
auccuuaccgaaaccagagugau

SEQ ID NO: 31976 - RNA, 23 nt, Artificial Sequence
  Chemically synthesized
aauccuuaccgaaaccagaguga

SEQ ID NO: 31977 - RNA, 23 nt, Artificial Sequence
  Chemically synthesized
uaauccuuaccgaaaccagagug

SEQ ID NO: 31978 - RNA, 23 nt, Artificial Sequence
  Chemically synthesized
ccuuucuuaucuaauccuuaccg

SEQ ID NO: 31979 - RNA, 23 nt, Artificial Sequence
  Chemically synthesized
gccuuucuuaucuaauccuuacc

SEQ ID NO: 31980 - RNA, 23 nt, Artificial Sequence
  Chemically synthesized
ugccuuucuuaucuaauccuuac

SEQ ID NO: 31981 - RNA, 23 nt, Artificial Sequence
  Chemically synthesized
cugccuuucuuaucuaauccuua

SEQ ID NO: 31982 - RNA, 23 nt, Artificial Sequence
  Chemically synthesized
acugccuuucuuaucuaauccuu

SEQ ID NO: 31983 - RNA, 23 nt, Artificial Sequence
  Chemically synthesized
uacugccuuucuuaucuaauccu

SEQ ID NO: 31984 - RNA, 23 nt, Artificial Sequence
  Chemically synthesized
acagcagcacccagagaacauuu

SEQ ID NO: 31985 - RNA, 23 nt, Artificial Sequence
  Chemically synthesized
guauaugguaagccuguaauugc

SEQ ID NO: 31986 - RNA, 23 nt, Artificial Sequence
  Chemically synthesized
uguauaugguaagccuguaauug

SEQ ID NO: 31987 - RNA, 23 nt, Artificial Sequence
  Chemically synthesized
guguauaugguaagccuguaauu

SEQ ID NO: 31988 - RNA, 23 nt, Artificial Sequence
  Chemically synthesized
aguguauaugguaagccuguaau

SEQ ID NO: 31989 - RNA, 23 nt, Artificial Sequence
  Chemically synthesized
aaguguauaugguaagccuguaa

SEQ ID NO: 31990 - RNA, 23 nt, Artificial Sequence
  Chemically synthesized
ccaagaccagacccuuucuccag

SEQ ID NO: 31991 - RNA, 23 nt, Artificial Sequence
  Chemically synthesized
gccaagaccagacccuuucucca

SEQ ID NO: 31992 - RNA, 23 nt, Artificial Sequence
  Chemically synthesized
ggccaagaccagacccuuucucc

SEQ ID NO: 31993 - RNA, 23 nt, Artificial Sequence
  Chemically synthesized
uggccaagaccagacccuuucuc

SEQ ID NO: 31994 - RNA, 23 nt, Artificial Sequence
  Chemically synthesized
uuggccaagaccagacccuuucu

SEQ ID NO: 31995 - RNA, 23 nt, Artificial Sequence
  Chemically synthesized
ggaacuaaaccaaaaccagcagg

SEQ ID NO: 31996 - RNA, 23 nt, Artificial Sequence
  Chemically synthesized
gcaaauaaaaauguggcuaaagu

SEQ ID NO: 31997 - RNA, 23 nt, Artificial Sequence
  Chemically synthesized
gagcagugaagauaucuugcggg

SEQ ID NO: 31998 - RNA, 23 nt, Artificial Sequence
  Chemically synthesized
aagaaccagagcagugaagauau

SEQ ID NO: 31999 - RNA, 23 nt, Artificial Sequence
  Chemically synthesized
guggaucugugcaaagaacccgg

SEQ ID NO: 32000 - RNA, 23 nt, Artificial Sequence
  Chemically synthesized
cucaauguuugaugcaguagacc

SEQ ID NO: 32001 - RNA, 23 nt, Artificial Sequence
  Chemically synthesized
ucucaauguuugaugcaguagac

SEQ ID NO: 32002 - RNA, 23 nt, Artificial Sequence
  Chemically synthesized
uucucaauguuugaugcaguaga

SEQ ID NO: 32003 - RNA, 23 nt, Artificial Sequence
  Chemically synthesized
guucucaauguuugaugcaguag

SEQ ID NO: 32004 - RNA, 23 nt, Artificial Sequence
  Chemically synthesized
cguucucaauguuugaugcagua

SEQ ID NO: 32005 - RNA, 23 nt, Artificial Sequence
  Chemically synthesized
gggagaaagagaagaaagugcgu

SEQ ID NO: 32006 - RNA, 23 nt, Artificial Sequence
  Chemically synthesized
agggagaaagagaagaaagugcg

SEQ ID NO: 32007 - RNA, 23 nt, Artificial Sequence
  Chemically synthesized
gagggagaaagagaagaaagugc

SEQ ID NO: 32008 - RNA, 23 nt, Artificial Sequence
  Chemically synthesized
ugagggagaaagagaagaaagug

SEQ ID NO: 32009 - RNA, 23 nt, Artificial Sequence
  Chemically synthesized
cugagggagaaagagaagaaagu

SEQ ID NO: 32010 - RNA, 23 nt, Artificial Sequence
  Chemically synthesized
cacugggaaugcucuggaucaag

SEQ ID NO: 32011 - RNA, 23 nt, Artificial Sequence
  Chemically synthesized
gcacugggaaugcucuggaucaa

SEQ ID NO: 32012 - RNA, 23 nt, Artificial Sequence
  Chemically synthesized
agcacugggaaugcucuggauca

SEQ ID NO: 32013 - RNA, 23 nt, Artificial Sequence
  Chemically synthesized
aagcacugggaaugcucuggauc

SEQ ID NO: 32014 - RNA, 23 nt, Artificial Sequence
  Chemically synthesized
aaagcacugggaaugcucuggau

SEQ ID NO: 32015 - RNA, 23 nt, Artificial Sequence
  Chemically synthesized
aggcucuaaaauccauccaguug

SEQ ID NO: 32016 - RNA, 23 nt, Artificial Sequence
  Chemically synthesized
aaggcucuaaaauccauccaguu

SEQ ID NO: 32017 - RNA, 23 nt, Artificial Sequence
  Chemically synthesized
aaaggcucuaaaauccauccagu

SEQ ID NO: 32018 - RNA, 23 nt, Artificial Sequence
  Chemically synthesized
uaaaggcucuaaaauccauccag

SEQ ID NO: 32019 - RNA, 23 nt, Artificial Sequence
  Chemically synthesized
cuaaaggcucuaaaauccaucca

SEQ ID NO: 32020 - RNA, 23 nt, Artificial Sequence
  Chemically synthesized
acuaaaggcucuaaaauccaucc

SEQ ID NO: 32021 - RNA, 23 nt, Artificial Sequence
  Chemically synthesized
aacuaaaggcucuaaaauccauc

SEQ ID NO: 32022 - RNA, 23 nt, Artificial Sequence
  Chemically synthesized
aaacuaaaggcucuaaaauccau

SEQ ID NO: 32023 - RNA, 23 nt, Artificial Sequence
  Chemically synthesized
agaaacaauaugcagagacgugg

SEQ ID NO: 32024 - RNA, 23 nt, Artificial Sequence
  Chemically synthesized
cagaaacaauaugcagagacgug

SEQ ID NO: 32025 - RNA, 23 nt, Artificial Sequence
  Chemically synthesized
gaggggccgaugaaaauacagac

SEQ ID NO: 32026 - RNA, 23 nt, Artificial Sequence
  Chemically synthesized
agaggggccgaugaaaauacaga

SEQ ID NO: 32027 - RNA, 23 nt, Artificial Sequence
  Chemically synthesized
aguuacuccagaaacaauaugca

SEQ ID NO: 32028 - RNA, 23 nt, Artificial Sequence
  Chemically synthesized
uucaucugauggaaaucuucccc

SEQ ID NO: 32029 - RNA, 23 nt, Artificial Sequence
  Chemically synthesized
uuucaucugauggaaaucuuccc

SEQ ID NO: 32030 - RNA, 23 nt, Artificial Sequence
  Chemically synthesized
guuucaucugauggaaaucuucc

SEQ ID NO: 32031 - RNA, 23 nt, Artificial Sequence
  Chemically synthesized
guguuaaugagcugagggaccgg

SEQ ID NO: 32032 - RNA, 23 nt, Artificial Sequence
  Chemically synthesized
cguguuaaugagcugagggaccg

SEQ ID NO: 32033 - RNA, 23 nt, Artificial Sequence
  Chemically synthesized
guaauucagaaguggcagucaug

SEQ ID NO: 32034 - RNA, 23 nt, Artificial Sequence
  Chemically synthesized
cguaauucagaaguggcagucau

SEQ ID NO: 32035 - RNA, 23 nt, Artificial Sequence
  Chemically synthesized
gaaugccaagcuacaacaacaga

SEQ ID NO: 32036 - RNA, 23 nt, Artificial Sequence
  Chemically synthesized
gcagcuaagaaacaaauugaauc

SEQ ID NO: 32037 - RNA, 23 nt, Artificial Sequence
  Chemically synthesized
gccacguggaacagaagagacua

SEQ ID NO: 32038 - RNA, 23 nt, Artificial Sequence
  Chemically synthesized
ggccacguggaacagaagagacu

SEQ ID NO: 32039 - RNA, 23 nt, Artificial Sequence
  Chemically synthesized
aggccacguggaacagaagagac

SEQ ID NO: 32040 - RNA, 23 nt, Artificial Sequence
  Chemically synthesized
aaggccacguggaacagaagaga

SEQ ID NO: 32041 - RNA, 23 nt, Artificial Sequence
  Chemically synthesized
gagaaucaggaagcuaagcuaaa

SEQ ID NO: 32042 - RNA, 23 nt, Artificial Sequence
  Chemically synthesized
ugagaaucaggaagcuaagcuaa

SEQ ID NO: 32043 - RNA, 23 nt, Artificial Sequence
  Chemically synthesized
cugagaaucaggaagcuaagcua

SEQ ID NO: 32044 - RNA, 23 nt, Artificial Sequence
  Chemically synthesized
gcuggcaacuaaggaacagcgcu

SEQ ID NO: 32045 - RNA, 23 nt, Artificial Sequence
  Chemically synthesized
ugcuggcaacuaaggaacagcgc

SEQ ID NO: 32046 - RNA, 23 nt, Artificial Sequence
  Chemically synthesized
uugcuggcaacuaaggaacagcg

SEQ ID NO: 32047 - RNA, 23 nt, Artificial Sequence
  Chemically synthesized
auugcuggcaacuaaggaacagc

SEQ ID NO: 32048 - RNA, 23 nt, Artificial Sequence
  Chemically synthesized
aauugcuggcaacuaaggaacag

SEQ ID NO: 32049 - RNA, 23 nt, Artificial Sequence
  Chemically synthesized
agacuuacccguaauauuuguca

SEQ ID NO: 32050 - RNA, 23 nt, Artificial Sequence
  Chemically synthesized
cagacuuacccguaauauuuguc

SEQ ID NO: 32051 - RNA, 23 nt, Artificial Sequence
  Chemically synthesized
acagacuuacccguaauauuugu

SEQ ID NO: 32052 - RNA, 23 nt, Artificial Sequence
  Chemically synthesized
uacagacuuacccguaauauuug

SEQ ID NO: 32053 - RNA, 23 nt, Artificial Sequence
  Chemically synthesized
cuacagacuuacccguaauauuu

SEQ ID NO: 32054 - RNA, 23 nt, Artificial Sequence
  Chemically synthesized
agaacuguuaguugguugucagu

SEQ ID NO: 32055 - RNA, 23 nt, Artificial Sequence
  Chemically synthesized
aagaacuguuaguugguugucag

SEQ ID NO: 32056 - RNA, 23 nt, Artificial Sequence
  Chemically synthesized
cauuuagcgugaugaaauaaagc

SEQ ID NO: 32057 - RNA, 23 nt, Artificial Sequence
  Chemically synthesized
acauuuagcgugaugaaauaaag

SEQ ID NO: 32058 - RNA, 23 nt, Artificial Sequence
  Chemically synthesized
gacauuuagcgugaugaaauaaa

SEQ ID NO: 32059 - RNA, 23 nt, Artificial Sequence
  Chemically synthesized
uugaagaauucaccauuagagga

SEQ ID NO: 32060 - RNA, 23 nt, Artificial Sequence
  Chemically synthesized
auugaagaauucaccauuagagg

SEQ ID NO: 32061 - RNA, 23 nt, Artificial Sequence
  Chemically synthesized
caaaggagcuuggccugaaacuu

SEQ ID NO: 32062 - RNA, 23 nt, Artificial Sequence
  Chemically synthesized
acaaaggagcuuggccugaaacu

SEQ ID NO: 32063 - RNA, 23 nt, Artificial Sequence
  Chemically synthesized
gacaaaggagcuuggccugaaac

SEQ ID NO: 32064 - RNA, 23 nt, Artificial Sequence
  Chemically synthesized
agacaaaggagcuuggccugaaa

SEQ ID NO: 32065 - RNA, 23 nt, Artificial Sequence
  Chemically synthesized
aagacaaaggagcuuggccugaa

SEQ ID NO: 32066 - RNA, 23 nt, Artificial Sequence
  Chemically synthesized
uuaaugauaaggagggauauguu

SEQ ID NO: 32067 - RNA, 23 nt, Artificial Sequence
  Chemically synthesized
cuuaaugauaaggagggauaugu

SEQ ID NO: 32068 - RNA, 23 nt, Artificial Sequence
  Chemically synthesized
ccuuaaugauaaggagggauaug

SEQ ID NO: 32069 - RNA, 23 nt, Artificial Sequence
  Chemically synthesized
gccuuaaugauaaggagggauau

SEQ ID NO: 32070 - RNA, 23 nt, Artificial Sequence
  Chemically synthesized
cgccuuaaugauaaggagggaua

SEQ ID NO: 32071 - RNA, 23 nt, Artificial Sequence
  Chemically synthesized
gaaggagacugcaugacaaucau

SEQ ID NO: 32072 - RNA, 23 nt, Artificial Sequence
  Chemically synthesized
agaaggagacugcaugacaauca

SEQ ID NO: 32073 - RNA, 23 nt, Artificial Sequence
  Chemically synthesized
aagaaggagacugcaugacaauc

SEQ ID NO: 32074 - RNA, 23 nt, Artificial Sequence
  Chemically synthesized
aaagaaggagacugcaugacaau

SEQ ID NO: 32075 - RNA, 23 nt, Artificial Sequence
  Chemically synthesized
gaaagaaggagacugcaugacaa

SEQ ID NO: 32076 - RNA, 23 nt, Artificial Sequence
  Chemically synthesized
uuaugcgcuuugggauuaugaac

SEQ ID NO: 32077 - RNA, 23 nt, Artificial Sequence
  Chemically synthesized
uuuaugcgcuuugggauuaugaa

SEQ ID NO: 32078 - RNA, 23 nt, Artificial Sequence
  Chemically synthesized
auuuaugcgcuuugggauuauga

SEQ ID NO: 32079 - RNA, 23 nt, Artificial Sequence
  Chemically synthesized
cauuuaugcgcuuugggauuaug

SEQ ID NO: 32080 - RNA, 23 nt, Artificial Sequence
  Chemically synthesized
ucauuuaugcgcuuugggauuau

SEQ ID NO: 32081 - RNA, 23 nt, Artificial Sequence
  Chemically synthesized
gacuccauuacauugugcugccu

SEQ ID NO: 32082 - RNA, 23 nt, Artificial Sequence
  Chemically synthesized
gucuuuggagggagaauuugacc

SEQ ID NO: 32083 - RNA, 23 nt, Artificial Sequence
  Chemically synthesized
uaaaaggacaaacuugcguaaaa

SEQ ID NO: 32084 - RNA, 23 nt, Artificial Sequence
  Chemically synthesized
uacauguggagcccgaaaaggag

SEQ ID NO: 32085 - RNA, 23 nt, Artificial Sequence
  Chemically synthesized
uuacauguggagcccgaaaagga

SEQ ID NO: 32086 - RNA, 23 nt, Artificial Sequence
  Chemically synthesized
uuuacauguggagcccgaaaagg

SEQ ID NO: 32087 - RNA, 23 nt, Artificial Sequence
  Chemically synthesized
auuuacauguggagcccgaaaag

SEQ ID NO: 32088 - RNA, 23 nt, Artificial Sequence
  Chemically synthesized
uauuuacauguggagcccgaaaa

SEQ ID NO: 32089 - RNA, 23 nt, Artificial Sequence
  Chemically synthesized
ggagaccaucucugucccaucau

SEQ ID NO: 32090 - RNA, 23 nt, Artificial Sequence
  Chemically synthesized
aaugggccaaauauucagaagcu

SEQ ID NO: 32091 - RNA, 23 nt, Artificial Sequence
  Chemically synthesized
uaaugggccaaauauucagaagc

SEQ ID NO: 32092 - RNA, 23 nt, Artificial Sequence
  Chemically synthesized
cuaaugggccaaauauucagaag

SEQ ID NO: 32093 - RNA, 23 nt, Artificial Sequence
  Chemically synthesized
gaauguuugauguucuucaacga

SEQ ID NO: 32094 - RNA, 23 nt, Artificial Sequence
  Chemically synthesized
cgaauguuugauguucuucaacg

SEQ ID NO: 32095 - RNA, 23 nt, Artificial Sequence
  Chemically synthesized
acguaguucuauuacagagccag

SEQ ID NO: 32096 - RNA, 23 nt, Artificial Sequence
  Chemically synthesized
aacguaguucuauuacagagcca

SEQ ID NO: 32097 - RNA, 23 nt, Artificial Sequence
  Chemically synthesized
aaacguaguucuauuacagagcc

SEQ ID NO: 32098 - RNA, 23 nt, Artificial Sequence
  Chemically synthesized
ccucuaaagaaacguaguucuau

SEQ ID NO: 32099 - RNA, 23 nt, Artificial Sequence
  Chemically synthesized
gccucuaaagaaacguaguucua

SEQ ID NO: 32100 - RNA, 23 nt, Artificial Sequence
  Chemically synthesized
ggccucuaaagaaacguaguucu

SEQ ID NO: 32101 - RNA, 23 nt, Artificial Sequence
  Chemically synthesized
aggccucuaaagaaacguaguuc

SEQ ID NO: 32102 - RNA, 23 nt, Artificial Sequence
  Chemically synthesized
aaggccucuaaagaaacguaguu

SEQ ID NO: 32103 - RNA, 23 nt, Artificial Sequence
  Chemically synthesized
aaugagcgaauguuugauguucu

SEQ ID NO: 32104 - RNA, 23 nt, Artificial Sequence
  Chemically synthesized
agaagccuuacgaaagaaacugu

SEQ ID NO: 32105 - RNA, 23 nt, Artificial Sequence
  Chemically synthesized
uagaagccuuacgaaagaaacug

SEQ ID NO: 32106 - RNA, 23 nt, Artificial Sequence
  Chemically synthesized
cuagaagccuuacgaaagaaacu

SEQ ID NO: 32107 - RNA, 23 nt, Artificial Sequence
  Chemically synthesized
ccuagaagccuuacgaaagaaac

SEQ ID NO: 32108 - RNA, 23 nt, Artificial Sequence
  Chemically synthesized
accuagaagccuuacgaaagaaa

SEQ ID NO: 32109 - RNA, 23 nt, Artificial Sequence
  Chemically synthesized
aguugcggauaaugagcgaaugu

SEQ ID NO: 32110 - RNA, 23 nt, Artificial Sequence
  Chemically synthesized
accguggcagcaaguucaauaua

SEQ ID NO: 32111 - RNA, 23 nt, Artificial Sequence
  Chemically synthesized
gaccguggcagcaaguucaauau

SEQ ID NO: 32112 - RNA, 23 nt, Artificial Sequence
  Chemically synthesized
agaccguggcagcaaguucaaua

SEQ ID NO: 32113 - RNA, 23 nt, Artificial Sequence
  Chemically synthesized
ccguucucaauguuugaugcagu

SEQ ID NO: 32114 - RNA, 23 nt, Artificial Sequence
  Chemically synthesized
uccguucucaauguuugaugcag

SEQ ID NO: 32115 - RNA, 23 nt, Artificial Sequence
  Chemically synthesized
guccguucucaauguuugaugca

SEQ ID NO: 32116 - RNA, 23 nt, Artificial Sequence
  Chemically synthesized
cguccguucucaauguuugaugc

SEQ ID NO: 32117 - RNA, 23 nt, Artificial Sequence
  Chemically synthesized
gcguccguucucaauguuugaug

SEQ ID NO: 32118 - RNA, 23 nt, Artificial Sequence
  Chemically synthesized
gaaagugcguccguucucaaugu

SEQ ID NO: 32119 - RNA, 23 nt, Artificial Sequence
  Chemically synthesized
gcugagggagaaagagaagaaag

SEQ ID NO: 32120 - RNA, 23 nt, Artificial Sequence
  Chemically synthesized
ugcucuggaucaaguugaugaug

SEQ ID NO: 32121 - RNA, 23 nt, Artificial Sequence
  Chemically synthesized
augcucuggaucaaguugaugau

SEQ ID NO: 32122 - RNA, 23 nt, Artificial Sequence
  Chemically synthesized
aaugcucuggaucaaguugauga

SEQ ID NO: 32123 - RNA, 23 nt, Artificial Sequence
  Chemically synthesized
gaaugcucuggaucaaguugaug

SEQ ID NO: 32124 - RNA, 23 nt, Artificial Sequence
  Chemically synthesized
cucugcuucuguaccucaaagca

SEQ ID NO: 32125 - RNA, 23 nt, Artificial Sequence
  Chemically synthesized
gcucugcuucuguaccucaaagc

SEQ ID NO: 32126 - RNA, 23 nt, Artificial Sequence
  Chemically synthesized
ggcucugcuucuguaccucaaag

SEQ ID NO: 32127 - RNA, 23 nt, Artificial Sequence
  Chemically synthesized
aggcucugcuucuguaccucaaa

SEQ ID NO: 32128 - RNA, 23 nt, Artificial Sequence
  Chemically synthesized
aaggcucugcuucuguaccucaa

SEQ ID NO: 32129 - RNA, 23 nt, Artificial Sequence
  Chemically synthesized
gauuggaguccuucaaaugcaga

SEQ ID NO: 32130 - RNA, 23 nt, Artificial Sequence
  Chemically synthesized
cggguccaagaugaugccgaugu

SEQ ID NO: 32131 - RNA, 23 nt, Artificial Sequence
  Chemically synthesized
ucggguccaagaugaugccgaug

SEQ ID NO: 32132 - RNA, 23 nt, Artificial Sequence
  Chemically synthesized
uucggguccaagaugaugccgau

SEQ ID NO: 32133 - RNA, 23 nt, Artificial Sequence
  Chemically synthesized
agaaguggcagucauggauaagc

SEQ ID NO: 32134 - RNA, 23 nt, Artificial Sequence
  Chemically synthesized
cagaaguggcagucauggauaag

SEQ ID NO: 32135 - RNA, 23 nt, Artificial Sequence
  Chemically synthesized
ucagaaguggcagucauggauaa

SEQ ID NO: 32136 - RNA, 23 nt, Artificial Sequence
  Chemically synthesized
uucagaaguggcagucauggaua

SEQ ID NO: 32137 - RNA, 23 nt, Artificial Sequence
  Chemically synthesized
auucagaaguggcagucauggau

SEQ ID NO: 32138 - RNA, 23 nt, Artificial Sequence
  Chemically synthesized
agaaugccaagcuacaacaacag

SEQ ID NO: 32139 - RNA, 23 nt, Artificial Sequence
  Chemically synthesized
gagaaacuuaaaaggcuaaaaga

SEQ ID NO: 32140 - RNA, 23 nt, Artificial Sequence
  Chemically synthesized
uugcugagcaggagaaacuuaaa

SEQ ID NO: 32141 - RNA, 23 nt, Artificial Sequence
  Chemically synthesized
guugcugagcaggagaaacuuaa

SEQ ID NO: 32142 - RNA, 23 nt, Artificial Sequence
  Chemically synthesized
guguaucucaguaacaaugagca

SEQ ID NO: 32143 - RNA, 23 nt, Artificial Sequence
  Chemically synthesized
ccagcagcaacagauugaagccc

SEQ ID NO: 32144 - RNA, 23 nt, Artificial Sequence
  Chemically synthesized
gguguuaauaguccuaggaugga

SEQ ID NO: 32145 - RNA, 23 nt, Artificial Sequence
  Chemically synthesized
cgguguuaauaguccuaggaugg

SEQ ID NO: 32146 - RNA, 23 nt, Artificial Sequence
  Chemically synthesized
acgguguuaauaguccuaggaug

SEQ ID NO: 32147 - RNA, 23 nt, Artificial Sequence
  Chemically synthesized
aacgguguuaauaguccuaggau

SEQ ID NO: 32148 - RNA, 23 nt, Artificial Sequence
  Chemically synthesized
gaacgguguuaauaguccuagga

SEQ ID NO: 32149 - RNA, 23 nt, Artificial Sequence
  Chemically synthesized
agaacgguguuaauaguccuagg

SEQ ID NO: 32150 - RNA, 23 nt, Artificial Sequence
  Chemically synthesized
gacuuacccguaauauuugucaa

SEQ ID NO: 32151 - RNA, 23 nt, Artificial Sequence
  Chemically synthesized
cuuguuuguaggcugaauuuuaa

SEQ ID NO: 32152 - RNA, 23 nt, Artificial Sequence
  Chemically synthesized
ucuuguuuguaggcugaauuuua

SEQ ID NO: 32153 - RNA, 23 nt, Artificial Sequence
  Chemically synthesized
aucuuguuuguaggcugaauuuu

SEQ ID NO: 32154 - RNA, 23 nt, Artificial Sequence
  Chemically synthesized
aaucuuguuuguaggcugaauuu

SEQ ID NO: 32155 - RNA, 23 nt, Artificial Sequence
  Chemically synthesized
gaaucuuguuuguaggcugaauu

SEQ ID NO: 32156 - RNA, 23 nt, Artificial Sequence
  Chemically synthesized
agauguagaaucuuguuuguagg

SEQ ID NO: 32157 - RNA, 23 nt, Artificial Sequence
  Chemically synthesized
uagauguagaaucuuguuuguag

SEQ ID NO: 32158 - RNA, 23 nt, Artificial Sequence
  Chemically synthesized
uuagauguagaaucuuguuugua

SEQ ID NO: 32159 - RNA, 23 nt, Artificial Sequence
  Chemically synthesized
auuagauguagaaucuuguuugu

SEQ ID NO: 32160 - RNA, 23 nt, Artificial Sequence
  Chemically synthesized
aauuagauguagaaucuuguuug

SEQ ID NO: 32161 - RNA, 23 nt, Artificial Sequence
  Chemically synthesized
gucagugaacaauaacuuuauua

SEQ ID NO: 32162 - RNA, 23 nt, Artificial Sequence
  Chemically synthesized
ugucagugaacaauaacuuuauu

SEQ ID NO: 32163 - RNA, 23 nt, Artificial Sequence
  Chemically synthesized
uugucagugaacaauaacuuuau

SEQ ID NO: 32164 - RNA, 23 nt, Artificial Sequence
  Chemically synthesized
guugucagugaacaauaacuuua

SEQ ID NO: 32165 - RNA, 23 nt, Artificial Sequence
  Chemically synthesized
gguugucagugaacaauaacuuu

SEQ ID NO: 32166 - RNA, 23 nt, Artificial Sequence
  Chemically synthesized
cgaaggcacugcacacuuguaua

SEQ ID NO: 32167 - RNA, 23 nt, Artificial Sequence
  Chemically synthesized
ucgaaggcacugcacacuuguau

SEQ ID NO: 32168 - RNA, 23 nt, Artificial Sequence
  Chemically synthesized
aaaaguuccuggugaauaucgaa

SEQ ID NO: 32169 - RNA, 23 nt, Artificial Sequence
  Chemically synthesized
uaaaaguuccuggugaauaucga

SEQ ID NO: 32170 - RNA, 23 nt, Artificial Sequence
  Chemically synthesized
guaaaaguuccuggugaauaucg

SEQ ID NO: 32171 - RNA, 23 nt, Artificial Sequence
  Chemically synthesized
uguaaaaguuccuggugaauauc

SEQ ID NO: 32172 - RNA, 23 nt, Artificial Sequence
  Chemically synthesized
guguaaaaguuccuggugaauau

SEQ ID NO: 32173 - RNA, 23 nt, Artificial Sequence
  Chemically synthesized
uuagaggacauuuagcgugauga

SEQ ID NO: 32174 - RNA, 23 nt, Artificial Sequence
  Chemically synthesized
auuagaggacauuuagcgugaug

SEQ ID NO: 32175 - RNA, 23 nt, Artificial Sequence
  Chemically synthesized
cauuagaggacauuuagcgugau

SEQ ID NO: 32176 - RNA, 23 nt, Artificial Sequence
  Chemically synthesized
uccacguaacuugcugggacugu

SEQ ID NO: 32177 - RNA, 23 nt, Artificial Sequence
  Chemically synthesized
uuccacguaacuugcugggacug

SEQ ID NO: 32178 - RNA, 23 nt, Artificial Sequence
  Chemically synthesized
guuccacguaacuugcugggacu

SEQ ID NO: 32179 - RNA, 23 nt, Artificial Sequence
  Chemically synthesized
ugauaaggagggauauguuccac

SEQ ID NO: 32180 - RNA, 23 nt, Artificial Sequence
  Chemically synthesized
augauaaggagggauauguucca

SEQ ID NO: 32181 - RNA, 23 nt, Artificial Sequence
  Chemically synthesized
aaugauaaggagggauauguucc

SEQ ID NO: 32182 - RNA, 23 nt, Artificial Sequence
  Chemically synthesized
uaaugauaaggagggauauguuc

SEQ ID NO: 32183 - RNA, 23 nt, Artificial Sequence
  Chemically synthesized
uuaugaaccucagaaugaugaug

SEQ ID NO: 32184 - RNA, 23 nt, Artificial Sequence
  Chemically synthesized
auuaugaaccucagaaugaugau

SEQ ID NO: 32185 - RNA, 23 nt, Artificial Sequence
  Chemically synthesized
gauuaugaaccucagaaugauga

SEQ ID NO: 32186 - RNA, 23 nt, Artificial Sequence
  Chemically synthesized
ggagaagaugggcauaaugaaua

SEQ ID NO: 32187 - RNA, 23 nt, Artificial Sequence
  Chemically synthesized
caauuucuuuauggaguucagga

SEQ ID NO: 32188 - RNA, 23 nt, Artificial Sequence
  Chemically synthesized
ccaauuucuuuauggaguucagg

SEQ ID NO: 32189 - RNA, 23 nt, Artificial Sequence
  Chemically synthesized
cccaauuucuuuauggaguucag

SEQ ID NO: 32190 - RNA, 23 nt, Artificial Sequence
  Chemically synthesized
ucccaauuucuuuauggaguuca

SEQ ID NO: 32191 - RNA, 23 nt, Artificial Sequence
  Chemically synthesized
cucccaauuucuuuauggaguuc

SEQ ID NO: 32192 - RNA, 23 nt, Artificial Sequence
  Chemically synthesized
ggaaauggaggaaggcuacacuc

SEQ ID NO: 32193 - RNA, 23 nt, Artificial Sequence
  Chemically synthesized
gguguaaauguaaaugcugcuga

SEQ ID NO: 32194 - RNA, 23 nt, Artificial Sequence
  Chemically synthesized
cucauggaaugagggugaaauuc

SEQ ID NO: 32195 - RNA, 23 nt, Artificial Sequence
  Chemically synthesized
gcucauggaaugagggugaaauu

SEQ ID NO: 32196 - RNA, 23 nt, Artificial Sequence
  Chemically synthesized
cgcucauggaaugagggugaaau

SEQ ID NO: 32197 - RNA, 23 nt, Artificial Sequence
  Chemically synthesized
ugcuugauguguaccuggaggag

SEQ ID NO: 32198 - RNA, 23 nt, Artificial Sequence
  Chemically synthesized
gugcuugauguguaccuggagga

SEQ ID NO: 32199 - RNA, 23 nt, Artificial Sequence
  Chemically synthesized
ugugcuugauguguaccuggagg

SEQ ID NO: 32200 - RNA, 23 nt, Artificial Sequence
  Chemically synthesized
augugcuugauguguaccuggag

SEQ ID NO: 32201 - RNA, 23 nt, Artificial Sequence
  Chemically synthesized
caugugcuugauguguaccugga

SEQ ID NO: 32202 - RNA, 23 nt, Artificial Sequence
  Chemically synthesized
uucaacgauuuggaagucagagg

SEQ ID NO: 32203 - RNA, 23 nt, Artificial Sequence
  Chemically synthesized
cuucaacgauuuggaagucagag

SEQ ID NO: 32204 - RNA, 23 nt, Artificial Sequence
  Chemically synthesized
ucuucaacgauuuggaagucaga

SEQ ID NO: 32205 - RNA, 23 nt, Artificial Sequence
  Chemically synthesized
uucuucaacgauuuggaagucag

SEQ ID NO: 32206 - RNA, 23 nt, Artificial Sequence
  Chemically synthesized
ccaguacagagaacagugacaug

SEQ ID NO: 32207 - RNA, 23 nt, Artificial Sequence
  Chemically synthesized
gccaguacagagaacagugacau

SEQ ID NO: 32208 - RNA, 23 nt, Artificial Sequence
  Chemically synthesized
ugccaguacagagaacagugaca

SEQ ID NO: 32209 - RNA, 23 nt, Artificial Sequence
  Chemically synthesized
augccaguacagagaacagugac

SEQ ID NO: 32210 - RNA, 23 nt, Artificial Sequence
  Chemically synthesized
aaugccaguacagagaacaguga

SEQ ID NO: 32211 - RNA, 23 nt, Artificial Sequence
  Chemically synthesized
uguggggaaugccaguacagaga

SEQ ID NO: 32212 - RNA, 23 nt, Artificial Sequence
  Chemically synthesized
ccuaaugggccaaauauucagaa

SEQ ID NO: 32213 - RNA, 23 nt, Artificial Sequence
  Chemically synthesized
cuaaagaaacguaguucuauuac

SEQ ID NO: 32214 - RNA, 23 nt, Artificial Sequence
  Chemically synthesized
uuacugccuuucuuaucuaaucc

SEQ ID NO: 32215 - RNA, 23 nt, Artificial Sequence
  Chemically synthesized
auuacugccuuucuuaucuaauc

SEQ ID NO: 32216 - RNA, 23 nt, Artificial Sequence
  Chemically synthesized
aauuacugccuuucuuaucuaau

SEQ ID NO: 32217 - RNA, 23 nt, Artificial Sequence
  Chemically synthesized
aaauuacugccuuucuuaucuaa

SEQ ID NO: 32218 - RNA, 23 nt, Artificial Sequence
  Chemically synthesized
uaaauuacugccuuucuuaucua

SEQ ID NO: 32219 - RNA, 23 nt, Artificial Sequence
  Chemically synthesized
uucuccagguucuaagcaagaaa

SEQ ID NO: 32220 - RNA, 23 nt, Artificial Sequence
  Chemically synthesized
uuucuccagguucuaagcaagaa

SEQ ID NO: 32221 - RNA, 23 nt, Artificial Sequence
  Chemically synthesized
cuuucuccagguucuaagcaaga

SEQ ID NO: 32222 - RNA, 23 nt, Artificial Sequence
  Chemically synthesized
ccuuucuccagguucuaagcaag

SEQ ID NO: 32223 - RNA, 23 nt, Artificial Sequence
  Chemically synthesized
cccuuucuccagguucuaagcaa

SEQ ID NO: 32224 - RNA, 23 nt, Artificial Sequence
  Chemically synthesized
cggaaguucucagcaguugucaa

SEQ ID NO: 32225 - RNA, 23 nt, Artificial Sequence
  Chemically synthesized
acggaaguucucagcaguuguca

SEQ ID NO: 32226 - RNA, 23 nt, Artificial Sequence
  Chemically synthesized
gacggaaguucucagcaguuguc

SEQ ID NO: 32227 - RNA, 23 nt, Artificial Sequence
  Chemically synthesized
agacggaaguucucagcaguugu

SEQ ID NO: 32228 - RNA, 23 nt, Artificial Sequence
  Chemically synthesized
cagacggaaguucucagcaguug

SEQ ID NO: 32229 - RNA, 23 nt, Artificial Sequence
  Chemically synthesized
ccagacggaaguucucagcaguu

SEQ ID NO: 32230 - RNA, 23 nt, Artificial Sequence
  Chemically synthesized
gccagacggaaguucucagcagu

SEQ ID NO: 32231 - RNA, 23 nt, Artificial Sequence
  Chemically synthesized
agccagacggaaguucucagcag

SEQ ID NO: 32232 - RNA, 23 nt, Artificial Sequence
  Chemically synthesized
gaagaaccagagcagugaagaua

SEQ ID NO: 32233 - RNA, 23 nt, Artificial Sequence
  Chemically synthesized
ggaagaaccagagcagugaagau

SEQ ID NO: 32234 - RNA, 23 nt, Artificial Sequence
  Chemically synthesized
aggaagaaccagagcagugaaga

SEQ ID NO: 32235 - RNA, 23 nt, Artificial Sequence
  Chemically synthesized
gaggaagaaccagagcagugaag

SEQ ID NO: 32236 - RNA, 23 nt, Artificial Sequence
  Chemically synthesized
ugaggaagaaccagagcagugaa

SEQ ID NO: 32237 - RNA, 23 nt, Artificial Sequence
  Chemically synthesized
cugaggaagaaccagagcaguga

SEQ ID NO: 32238 - RNA, 23 nt, Artificial Sequence
  Chemically synthesized
agaaagugcguccguucucaaug

SEQ ID NO: 32239 - RNA, 23 nt, Artificial Sequence
  Chemically synthesized
aagaaagugcguccguucucaau

SEQ ID NO: 32240 - RNA, 23 nt, Artificial Sequence
  Chemically synthesized
gaagaaagugcguccguucucaa

SEQ ID NO: 32241 - RNA, 23 nt, Artificial Sequence
  Chemically synthesized
cugcuucuguaccucaaagcacu

SEQ ID NO: 32242 - RNA, 23 nt, Artificial Sequence
  Chemically synthesized
ucugcuucuguaccucaaagcac

SEQ ID NO: 32243 - RNA, 23 nt, Artificial Sequence
  Chemically synthesized
guccuggcugugucaaaaguaga

SEQ ID NO: 32244 - RNA, 23 nt, Artificial Sequence
  Chemically synthesized
cguccuggcugugucaaaaguag

SEQ ID NO: 32245 - RNA, 23 nt, Artificial Sequence
  Chemically synthesized
ucguccuggcugugucaaaagua

SEQ ID NO: 32246 - RNA, 23 nt, Artificial Sequence
  Chemically synthesized
gaacuucaggaaauggcaucucg

SEQ ID NO: 32247 - RNA, 23 nt, Artificial Sequence
  Chemically synthesized
ugaacuucaggaaauggcaucuc

SEQ ID NO: 32248 - RNA, 23 nt, Artificial Sequence
  Chemically synthesized
cugaacuucaggaaauggcaucu

SEQ ID NO: 32249 - RNA, 23 nt, Artificial Sequence
  Chemically synthesized
gcugaacuucaggaaauggcauc

SEQ ID NO: 32250 - RNA, 23 nt, Artificial Sequence
  Chemically synthesized
ugcugaacuucaggaaauggcau

SEQ ID NO: 32251 - RNA, 23 nt, Artificial Sequence
  Chemically synthesized
guguuaauaguccuaggauggau

SEQ ID NO: 32252 - RNA, 23 nt, Artificial Sequence
  Chemically synthesized
gagaacgguguuaauaguccuag

SEQ ID NO: 32253 - RNA, 23 nt, Artificial Sequence
  Chemically synthesized
aauuagaaacuugcuacagacuu

SEQ ID NO: 32254 - RNA, 23 nt, Artificial Sequence
  Chemically synthesized
gaaauuagaaacuugcuacagac

SEQ ID NO: 32255 - RNA, 23 nt, Artificial Sequence
  Chemically synthesized
agaaauuagaaacuugcuacaga

SEQ ID NO: 32256 - RNA, 23 nt, Artificial Sequence
  Chemically synthesized
cagaaauuagaaacuugcuacag

SEQ ID NO: 32257 - RNA, 23 nt, Artificial Sequence
  Chemically synthesized
ucagaaauuagaaacuugcuaca

SEQ ID NO: 32258 - RNA, 23 nt, Artificial Sequence
  Chemically synthesized
agaaucuuguuuguaggcugaau

SEQ ID NO: 32259 - RNA, 23 nt, Artificial Sequence
  Chemically synthesized
uagaaucuuguuuguaggcugaa

SEQ ID NO: 32260 - RNA, 23 nt, Artificial Sequence
  Chemically synthesized
guagaaucuuguuuguaggcuga

SEQ ID NO: 32261 - RNA, 23 nt, Artificial Sequence
  Chemically synthesized
auguagaaucuuguuuguaggcu

SEQ ID NO: 32262 - RNA, 23 nt, Artificial Sequence
  Chemically synthesized
acacuuguauauugucagugaag

SEQ ID NO: 32263 - RNA, 23 nt, Artificial Sequence
  Chemically synthesized
cacacuuguauauugucagugaa

SEQ ID NO: 32264 - RNA, 23 nt, Artificial Sequence
  Chemically synthesized
ugcuccuaaaccaguccuccugc

SEQ ID NO: 32265 - RNA, 23 nt, Artificial Sequence
  Chemically synthesized
cugcuccuaaaccaguccuccug

SEQ ID NO: 32266 - RNA, 23 nt, Artificial Sequence
  Chemically synthesized
gcugcuccuaaaccaguccuccu

SEQ ID NO: 32267 - RNA, 23 nt, Artificial Sequence
  Chemically synthesized
agcugcuccuaaaccaguccucc

SEQ ID NO: 32268 - RNA, 23 nt, Artificial Sequence
  Chemically synthesized
cagcugcuccuaaaccaguccuc

SEQ ID NO: 32269 - RNA, 23 nt, Artificial Sequence
  Chemically synthesized
ugaguguuuucagcagcugcucc

SEQ ID NO: 32270 - RNA, 23 nt, Artificial Sequence
  Chemically synthesized
uugaguguuuucagcagcugcuc

SEQ ID NO: 32271 - RNA, 23 nt, Artificial Sequence
  Chemically synthesized
guugaguguuuucagcagcugcu

SEQ ID NO: 32272 - RNA, 23 nt, Artificial Sequence
  Chemically synthesized
uguugaguguuuucagcagcugc

SEQ ID NO: 32273 - RNA, 23 nt, Artificial Sequence
  Chemically synthesized
cuguugaguguuuucagcagcug

SEQ ID NO: 32274 - RNA, 23 nt, Artificial Sequence
  Chemically synthesized
aaguuccuggugaauaucgaaga

SEQ ID NO: 32275 - RNA, 23 nt, Artificial Sequence
  Chemically synthesized
gcaguugggaaaucagcucucug

SEQ ID NO: 32276 - RNA, 23 nt, Artificial Sequence
  Chemically synthesized
ggcaguugggaaaucagcucucu

SEQ ID NO: 32277 - RNA, 23 nt, Artificial Sequence
  Chemically synthesized
gggcaguugggaaaucagcucuc

SEQ ID NO: 32278 - RNA, 23 nt, Artificial Sequence
  Chemically synthesized
ugggcaguugggaaaucagcucu

SEQ ID NO: 32279 - RNA, 23 nt, Artificial Sequence
  Chemically synthesized
uugggcaguugggaaaucagcuc

SEQ ID NO: 32280 - RNA, 23 nt, Artificial Sequence
  Chemically synthesized
gaucauuuauugggcaguuggga

SEQ ID NO: 32281 - RNA, 23 nt, Artificial Sequence
  Chemically synthesized
gaauccugucuaguaaauaggau

SEQ ID NO: 32282 - RNA, 23 nt, Artificial Sequence
  Chemically synthesized
gguguaaaaguuccuggugaaua

SEQ ID NO: 32283 - RNA, 23 nt, Artificial Sequence
  Chemically synthesized
ugguguaaaaguuccuggugaau

SEQ ID NO: 32284 - RNA, 23 nt, Artificial Sequence
  Chemically synthesized
augguguaaaaguuccuggugaa

SEQ ID NO: 32285 - RNA, 23 nt, Artificial Sequence
  Chemically synthesized
gauguuucuuaccguguaucuca

SEQ ID NO: 32286 - RNA, 23 nt, Artificial Sequence
  Chemically synthesized
cgauguuucuuaccguguaucuc

SEQ ID NO: 32287 - RNA, 23 nt, Artificial Sequence
  Chemically synthesized
ccgauguuucuuaccguguaucu

SEQ ID NO: 32288 - RNA, 23 nt, Artificial Sequence
  Chemically synthesized
gccgauguuucuuaccguguauc

SEQ ID NO: 32289 - RNA, 23 nt, Artificial Sequence
  Chemically synthesized
ugccgauguuucuuaccguguau

SEQ ID NO: 32290 - RNA, 23 nt, Artificial Sequence
  Chemically synthesized
aacuuccacacagaauuuuaguc

SEQ ID NO: 32291 - RNA, 23 nt, Artificial Sequence
  Chemically synthesized
aaaggagcuuggccugaaacuuc

SEQ ID NO: 32292 - RNA, 23 nt, Artificial Sequence
  Chemically synthesized
ugaaccucagaaugaugaugagc

SEQ ID NO: 32293 - RNA, 23 nt, Artificial Sequence
  Chemically synthesized
augaaccucagaaugaugaugag

SEQ ID NO: 32294 - RNA, 23 nt, Artificial Sequence
  Chemically synthesized
uaugaaccucagaaugaugauga

SEQ ID NO: 32295 - RNA, 23 nt, Artificial Sequence
  Chemically synthesized
ugcucccaauuucuuuauggagu

SEQ ID NO: 32296 - RNA, 23 nt, Artificial Sequence
  Chemically synthesized
gacauugugaguggaccaagauc

SEQ ID NO: 32297 - RNA, 23 nt, Artificial Sequence
  Chemically synthesized
ggacauugugaguggaccaagau

SEQ ID NO: 32298 - RNA, 23 nt, Artificial Sequence
  Chemically synthesized
gggacauugugaguggaccaaga

SEQ ID NO: 32299 - RNA, 23 nt, Artificial Sequence
  Chemically synthesized
agggacauugugaguggaccaag

SEQ ID NO: 32300 - RNA, 23 nt, Artificial Sequence
  Chemically synthesized
cagggacauugugaguggaccaa

SEQ ID NO: 32301 - RNA, 23 nt, Artificial Sequence
  Chemically synthesized
gugcgaggaaauggaggaaggcu

SEQ ID NO: 32302 - RNA, 23 nt, Artificial Sequence
  Chemically synthesized
agugcgaggaaauggaggaaggc

SEQ ID NO: 32303 - RNA, 23 nt, Artificial Sequence
  Chemically synthesized
aagugcgaggaaauggaggaagg

SEQ ID NO: 32304 - RNA, 23 nt, Artificial Sequence
  Chemically synthesized
uaagugcgaggaaauggaggaag

SEQ ID NO: 32305 - RNA, 23 nt, Artificial Sequence
  Chemically synthesized
auaagugcgaggaaauggaggaa

SEQ ID NO: 32306 - RNA, 23 nt, Artificial Sequence
  Chemically synthesized
uguaaaugcugcugauagugaug

SEQ ID NO: 32307 - RNA, 23 nt, Artificial Sequence
  Chemically synthesized
auguaaaugcugcugauagugau

SEQ ID NO: 32308 - RNA, 23 nt, Artificial Sequence
  Chemically synthesized
aauguaaaugcugcugauaguga

SEQ ID NO: 32309 - RNA, 23 nt, Artificial Sequence
  Chemically synthesized
ucgcucauggaaugagggugaaa

SEQ ID NO: 32310 - RNA, 23 nt, Artificial Sequence
  Chemically synthesized
ggaagucagaggaacgaaguucg

SEQ ID NO: 32311 - RNA, 23 nt, Artificial Sequence
  Chemically synthesized
uggaagucagaggaacgaaguuc

SEQ ID NO: 32312 - RNA, 23 nt, Artificial Sequence
  Chemically synthesized
uuggaagucagaggaacgaaguu

SEQ ID NO: 32313 - RNA, 23 nt, Artificial Sequence
  Chemically synthesized
uuuggaagucagaggaacgaagu

SEQ ID NO: 32314 - RNA, 23 nt, Artificial Sequence
  Chemically synthesized
auuuggaagucagaggaacgaag

SEQ ID NO: 32315 - RNA, 23 nt, Artificial Sequence
  Chemically synthesized
cccaaaucuccagaauaacccag

SEQ ID NO: 32316 - RNA, 23 nt, Artificial Sequence
  Chemically synthesized
ucuaaagaaacguaguucuauua

SEQ ID NO: 32317 - RNA, 23 nt, Artificial Sequence
  Chemically synthesized
cucuaaagaaacguaguucuauu

SEQ ID NO: 32318 - RNA, 23 nt, Artificial Sequence
  Chemically synthesized
uaaugagcgaauguuugauguuc

SEQ ID NO: 32319 - RNA, 23 nt, Artificial Sequence
  Chemically synthesized
auaaugagcgaauguuugauguu

SEQ ID NO: 32320 - RNA, 23 nt, Artificial Sequence
  Chemically synthesized
cagaccguggcagcaaguucaau

SEQ ID NO: 32321 - RNA, 23 nt, Artificial Sequence
  Chemically synthesized
agaaaguccaccugcugcugccg

SEQ ID NO: 32322 - RNA, 23 nt, Artificial Sequence
  Chemically synthesized
aagaaaguccaccugcugcugcc

SEQ ID NO: 32323 - RNA, 23 nt, Artificial Sequence
  Chemically synthesized
caagaaaguccaccugcugcugc

SEQ ID NO: 32324 - RNA, 23 nt, Artificial Sequence
  Chemically synthesized
gcaagaaaguccaccugcugcug

SEQ ID NO: 32325 - RNA, 23 nt, Artificial Sequence
  Chemically synthesized
agcaagaaaguccaccugcugcu

SEQ ID NO: 32326 - RNA, 23 nt, Artificial Sequence
  Chemically synthesized
caaaacagauuaauuugccuuau

SEQ ID NO: 32327 - RNA, 23 nt, Artificial Sequence
  Chemically synthesized
ccaaaacagauuaauuugccuua

SEQ ID NO: 32328 - RNA, 23 nt, Artificial Sequence
  Chemically synthesized
accaaaacagauuaauuugccuu

SEQ ID NO: 32329 - RNA, 23 nt, Artificial Sequence
  Chemically synthesized
aaccaaaacagauuaauuugccu

SEQ ID NO: 32330 - RNA, 23 nt, Artificial Sequence
  Chemically synthesized
aaaccaaaacagauuaauuugcc

SEQ ID NO: 32331 - RNA, 23 nt, Artificial Sequence
  Chemically synthesized
uugguacucugaggaagaaccag

SEQ ID NO: 32332 - RNA, 23 nt, Artificial Sequence
  Chemically synthesized
uuugguacucugaggaagaacca

SEQ ID NO: 32333 - RNA, 23 nt, Artificial Sequence
  Chemically synthesized
cuuugguacucugaggaagaacc

SEQ ID NO: 32334 - RNA, 23 nt, Artificial Sequence
  Chemically synthesized
caauguuugaugcaguagaccag

SEQ ID NO: 32335 - RNA, 23 nt, Artificial Sequence
  Chemically synthesized
ucaauguuugaugcaguagacca

SEQ ID NO: 32336 - RNA, 23 nt, Artificial Sequence
  Chemically synthesized
gggugaaauucaacccccuugcu

SEQ ID NO: 32337 - RNA, 23 nt, Artificial Sequence
  Chemically synthesized
agggugaaauucaacccccuugc

SEQ ID NO: 32338 - RNA, 23 nt, Artificial Sequence
  Chemically synthesized
gagggugaaauucaacccccuug

SEQ ID NO: 32339 - RNA, 23 nt, Artificial Sequence
  Chemically synthesized
ugagggugaaauucaacccccuu

SEQ ID NO: 32340 - RNA, 23 nt, Artificial Sequence
  Chemically synthesized
augagggugaaauucaacccccu

SEQ ID NO: 32341 - RNA, 23 nt, Artificial Sequence
  Chemically synthesized
acccagagaacauuuauuccaau

SEQ ID NO: 32342 - RNA, 23 nt, Artificial Sequence
  Chemically synthesized
cacccagagaacauuuauuccaa

SEQ ID NO: 32343 - RNA, 23 nt, Artificial Sequence
  Chemically synthesized
gcacccagagaacauuuauucca

SEQ ID NO: 32344 - RNA, 23 nt, Artificial Sequence
  Chemically synthesized
agcacccagagaacauuuauucc

SEQ ID NO: 32345 - RNA, 23 nt, Artificial Sequence
  Chemically synthesized
cagcacccagagaacauuuauuc

SEQ ID NO: 32346 - RNA, 23 nt, Artificial Sequence
  Chemically synthesized
aaugagggugaaauucaaccccc

SEQ ID NO: 32347 - RNA, 23 nt, Artificial Sequence
  Chemically synthesized
gaaugagggugaaauucaacccc

SEQ ID NO: 32348 - RNA, 23 nt, Artificial Sequence
  Chemically synthesized
agaauuugaccuuguacagagaa

SEQ ID NO: 32349 - RNA, 23 nt, Artificial Sequence
  Chemically synthesized
cuguuaagaagaaguaauacgau

SEQ ID NO: 32350 - RNA, 23 nt, Artificial Sequence
  Chemically synthesized
gaaguaauacgauuauuuuuggc

SEQ ID NO: 32351 - RNA, 23 nt, Artificial Sequence
  Chemically synthesized
gagaauuauuuaugagguugaug

SEQ ID NO: 32352 - RNA, 23 nt, Artificial Sequence
  Chemically synthesized
cagagaauuauuuaugagguuga

SEQ ID NO: 32353 - RNA, 23 nt, Artificial Sequence
  Chemically synthesized
acagagaauuauuuaugagguug

SEQ ID NO: 32354 - RNA, 23 nt, Artificial Sequence
  Chemically synthesized
caauauauuccauguauacgcaa

SEQ ID NO: 32355 - RNA, 23 nt, Artificial Sequence
  Chemically synthesized
gaauuauuuaugagguugaugac

SEQ ID NO: 32356 - RNA, 23 nt, Artificial Sequence
  Chemically synthesized
guacagagaauuauuuaugaggu

SEQ ID NO: 32357 - RNA, 23 nt, Artificial Sequence
  Chemically synthesized
gaaggcagcucuacagcaaaaag

SEQ ID NO: 32358 - RNA, 23 nt, Artificial Sequence
  Chemically synthesized
auauuuacauguggagcccgaaa

SEQ ID NO: 32359 - RNA, 23 nt, Artificial Sequence
  Chemically synthesized
ucaaaugcagaucuuuucccaag

SEQ ID NO: 32360 - RNA, 23 nt, Artificial Sequence
  Chemically synthesized
agaaggcagcucuacagcaaaaa

SEQ ID NO: 32361 - RNA, 23 nt, Artificial Sequence
  Chemically synthesized
ggucucucugguuccugaaucau

SEQ ID NO: 32362 - RNA, 23 nt, Artificial Sequence
  Chemically synthesized
uucuuaucuaauccuuaccgaaa

SEQ ID NO: 32363 - RNA, 23 nt, Artificial Sequence
  Chemically synthesized
aggcagcucuacagcaaaaagaa

SEQ ID NO: 32364 - RNA, 23 nt, Artificial Sequence
  Chemically synthesized
gcuaagaaacaaauugaaucaag

SEQ ID NO: 32365 - RNA, 23 nt, Artificial Sequence
  Chemically synthesized
agaagagacuaagcaaugggaaa

SEQ ID NO: 32366 - RNA, 23 nt, Artificial Sequence
  Chemically synthesized
cucgaaggcacugcacacuugua

SEQ ID NO: 32367 - RNA, 23 nt, Artificial Sequence
  Chemically synthesized
cuagauucgucuuuggagggaga

SEQ ID NO: 32368 - RNA, 23 nt, Artificial Sequence
  Chemically synthesized
gcuuuacugcuagauucgucuuu

SEQ ID NO: 32369 - RNA, 23 nt, Artificial Sequence
  Chemically synthesized
acaaacuaaucagccaccuucag

SEQ ID NO: 32370 - RNA, 23 nt, Artificial Sequence
  Chemically synthesized
cgggaugcucagguugcaaauaa

SEQ ID NO: 32371 - RNA, 23 nt, Artificial Sequence
  Chemically synthesized
ggagaaagagaagaaagugcguc

SEQ ID NO: 32372 - RNA, 23 nt, Artificial Sequence
  Chemically synthesized
cagaagagacuaagcaaugggaa

SEQ ID NO: 32373 - RNA, 23 nt, Artificial Sequence
  Chemically synthesized
ugaaauauugaaacuaagcuacg

SEQ ID NO: 32374 - RNA, 23 nt, Artificial Sequence
  Chemically synthesized
gucauuuaugcgcuuugggauua

SEQ ID NO: 32375 - RNA, 23 nt, Artificial Sequence
  Chemically synthesized
gucucucugguuccugaaucauu

SEQ ID NO: 32376 - RNA, 23 nt, Artificial Sequence
  Chemically synthesized
ccauuuggcugaaguguggugug

SEQ ID NO: 32377 - RNA, 23 nt, Artificial Sequence
  Chemically synthesized
uucaaaugcagaucuuuucccaa

SEQ ID NO: 32378 - RNA, 23 nt, Artificial Sequence
  Chemically synthesized
uucacaaacuaaaggcucuaaaa

SEQ ID NO: 32379 - RNA, 23 nt, Artificial Sequence
  Chemically synthesized
cuauaaggagcugcagcuaagaa

SEQ ID NO: 32380 - RNA, 23 nt, Artificial Sequence
  Chemically synthesized
gaguucaggagaagaugggcaua

SEQ ID NO: 32381 - RNA, 23 nt, Artificial Sequence
  Chemically synthesized
cugcugcagauaagugcgaggaa

SEQ ID NO: 32382 - RNA, 23 nt, Artificial Sequence
  Chemically synthesized
uagauucgucuuuggagggagaa

SEQ ID NO: 32383 - RNA, 23 nt, Artificial Sequence
  Chemically synthesized
guaaaacuggcucagagcguauc

SEQ ID NO: 32384 - RNA, 23 nt, Artificial Sequence
  Chemically synthesized
ccagagggccacacuuuucaagu

SEQ ID NO: 32385 - RNA, 23 nt, Artificial Sequence
  Chemically synthesized
gcugcaguaggucccuauaucca

SEQ ID NO: 32386 - RNA, 23 nt, Artificial Sequence
  Chemically synthesized
aaauuagaaacuugcuacagacu

SEQ ID NO: 32387 - RNA, 23 nt, Artificial Sequence
  Chemically synthesized
ugcuagauucgucuuuggaggga

SEQ ID NO: 32388 - RNA, 23 nt, Artificial Sequence
  Chemically synthesized
ccaucauacccauccaagucagc

SEQ ID NO: 32389 - RNA, 23 nt, Artificial Sequence
  Chemically synthesized
gaaagagaagaaagugcguccgu

SEQ ID NO: 32390 - RNA, 23 nt, Artificial Sequence
  Chemically synthesized
acaauaugcagagacguggugga

SEQ ID NO: 32391 - RNA, 23 nt, Artificial Sequence
  Chemically synthesized
ggcagcucuacagcaaaaagaaa

SEQ ID NO: 32392 - RNA, 23 nt, Artificial Sequence
  Chemically synthesized
caccaugacaaucagucugcagu

SEQ ID NO: 32393 - RNA, 23 nt, Artificial Sequence
  Chemically synthesized
uaaaccaguccuccugccagaaa

SEQ ID NO: 32394 - RNA, 23 nt, Artificial Sequence
  Chemically synthesized
guaaaaggacaaacuugcguaaa

SEQ ID NO: 32395 - RNA, 23 nt, Artificial Sequence
  Chemically synthesized
gguaaaaggacaaacuugcguaa

SEQ ID NO: 32396 - RNA, 23 nt, Artificial Sequence
  Chemically synthesized
cucauaccagagggccacacuuu

SEQ ID NO: 32397 - RNA, 23 nt, Artificial Sequence
  Chemically synthesized
ucaaguugaugauggagagguuc

SEQ ID NO: 32398 - RNA, 23 nt, Artificial Sequence
  Chemically synthesized
caauaugcagagacgugguggau

SEQ ID NO: 32399 - RNA, 23 nt, Artificial Sequence
  Chemically synthesized
aggucccuauauccagucgucua

SEQ ID NO: 32400 - RNA, 23 nt, Artificial Sequence
  Chemically synthesized
gcaaugggaaacuuguggaggaa

SEQ ID NO: 32401 - RNA, 23 nt, Artificial Sequence
  Chemically synthesized
uguuuguaggcugaauuuuaauc

SEQ ID NO: 32402 - RNA, 23 nt, Artificial Sequence
  Chemically synthesized
ccauuagaggacauuuagcguga

SEQ ID NO: 32403 - RNA, 23 nt, Artificial Sequence
  Chemically synthesized
acaauguagcuugaaagcgauga

SEQ ID NO: 32404 - RNA, 23 nt, Artificial Sequence
  Chemically synthesized
gaaaugguguaaaaguuccuggu

SEQ ID NO: 32405 - RNA, 23 nt, Artificial Sequence
  Chemically synthesized
ccuugauuaugagccugagggag

SEQ ID NO: 32406 - RNA, 23 nt, Artificial Sequence
  Chemically synthesized
ucagaagcuuuuauaucagagga

SEQ ID NO: 32407 - RNA, 23 nt, Artificial Sequence
  Chemically synthesized
ggaaguucucagcaguugucaac

SEQ ID NO: 32408 - RNA, 23 nt, Artificial Sequence
  Chemically synthesized
cuaaaccaguccuccugccagaa

SEQ ID NO: 32409 - RNA, 23 nt, Artificial Sequence
  Chemically synthesized
ucauuuauugggcaguugggaaa

SEQ ID NO: 32410 - RNA, 23 nt, Artificial Sequence
  Chemically synthesized
caauguagcuugaaagcgaugaa

SEQ ID NO: 32411 - RNA, 23 nt, Artificial Sequence
  Chemically synthesized
uuacugcuagauucgucuuugga

SEQ ID NO: 32412 - RNA, 23 nt, Artificial Sequence
  Chemically synthesized
cagaagcuuuuauaucagaggac

SEQ ID NO: 32413 - RNA, 23 nt, Artificial Sequence
  Chemically synthesized
ugaugauggagagguuccgcuga

SEQ ID NO: 32414 - RNA, 23 nt, Artificial Sequence
  Chemically synthesized
ucacaaacuaaaggcucuaaaau

SEQ ID NO: 32415 - RNA, 23 nt, Artificial Sequence
  Chemically synthesized
cguaauauuugucaagaucauag

SEQ ID NO: 32416 - RNA, 23 nt, Artificial Sequence
  Chemically synthesized
ccaaauccagaggcuccacaugu

SEQ ID NO: 32417 - RNA, 23 nt, Artificial Sequence
  Chemically synthesized
guacagagaacagugacaugcca

SEQ ID NO: 32418 - RNA, 23 nt, Artificial Sequence
  Chemically synthesized
gaaucaacagcagcacccagaga

SEQ ID NO: 32419 - RNA, 23 nt, Artificial Sequence
  Chemically synthesized
guucucagcaguugucaacaguu

SEQ ID NO: 32420 - RNA, 23 nt, Artificial Sequence
  Chemically synthesized
gcacuucacagaaguuccaguua

SEQ ID NO: 32421 - RNA, 23 nt, Artificial Sequence
  Chemically synthesized
agaauuaaaccaagacaaaggag

SEQ ID NO: 32422 - RNA, 23 nt, Artificial Sequence
  Chemically synthesized
ggcaguccagaaccugaaacaga

SEQ ID NO: 32423 - RNA, 23 nt, Artificial Sequence
  Chemically synthesized
caacagcagcacccagagaacau

SEQ ID NO: 32424 - RNA, 23 nt, Artificial Sequence
  Chemically synthesized
accuuacuuccacccuucagaaa

SEQ ID NO: 32425 - RNA, 23 nt, Artificial Sequence
  Chemically synthesized
cccagccuuccaaagacaccuua

SEQ ID NO: 32426 - RNA, 23 nt, Artificial Sequence
  Chemically synthesized
ucaagagcagaaugccaagcuac

SEQ ID NO: 32427 - RNA, 23 nt, Artificial Sequence
  Chemically synthesized
acaaguugcugagcaggagaaac

SEQ ID NO: 32428 - RNA, 23 nt, Artificial Sequence
  Chemically synthesized
gaaaucagcucucuguccuguug

SEQ ID NO: 32429 - RNA, 23 nt, Artificial Sequence
  Chemically synthesized
gaagacgaagaugaaaucgaaug

SEQ ID NO: 32430 - RNA, 23 nt, Artificial Sequence
  Chemically synthesized
gcuacacucagugcucccaauuu

SEQ ID NO: 32431 - RNA, 23 nt, Artificial Sequence
  Chemically synthesized
uaaguuuuugguggagucaggag

SEQ ID NO: 32432 - RNA, 23 nt, Artificial Sequence
  Chemically synthesized
ucaacagcagcacccagagaaca

SEQ ID NO: 32433 - RNA, 23 nt, Artificial Sequence
  Chemically synthesized
ccaaagacaccuuacuuccaccc

SEQ ID NO: 32434 - RNA, 23 nt, Artificial Sequence
  Chemically synthesized
gugauugccauuuggcugaagug

SEQ ID NO: 32435 - RNA, 23 nt, Artificial Sequence
  Chemically synthesized
gagugauugccauuuggcugaag

SEQ ID NO: 32436 - RNA, 23 nt, Artificial Sequence
  Chemically synthesized
gcagugaagauaucuugcgggau

SEQ ID NO: 32437 - RNA, 23 nt, Artificial Sequence
  Chemically synthesized
cccaccuuccuuugguacucuga

SEQ ID NO: 32438 - RNA, 23 nt, Artificial Sequence
  Chemically synthesized
aaaauacagacacugcccaacau

SEQ ID NO: 32439 - RNA, 23 nt, Artificial Sequence
  Chemically synthesized
ugaaaauacagacacugcccaac

SEQ ID NO: 32440 - RNA, 23 nt, Artificial Sequence
  Chemically synthesized
caggcagcuagagaugcucaaga

SEQ ID NO: 32441 - RNA, 23 nt, Artificial Sequence
  Chemically synthesized
ggaaacuuguggaggaaauugaa

SEQ ID NO: 32442 - RNA, 23 nt, Artificial Sequence
  Chemically synthesized
cuaaaaaaagugagagcacuuaa

SEQ ID NO: 32443 - RNA, 23 nt, Artificial Sequence
  Chemically synthesized
ugcugggacuguacccaagaauu

SEQ ID NO: 32444 - RNA, 23 nt, Artificial Sequence
  Chemically synthesized
ugaugaugagcugcccaugaaag

SEQ ID NO: 32445 - RNA, 23 nt, Artificial Sequence
  Chemically synthesized
ggaguucaggagaagaugggcau

SEQ ID NO: 32446 - RNA, 23 nt, Artificial Sequence
  Chemically synthesized
gguggucucucugguuccugaau

SEQ ID NO: 32447 - RNA, 23 nt, Artificial Sequence
  Chemically synthesized
ccacucagcccaacuaaauuacu

SEQ ID NO: 32448 - RNA, 23 nt, Artificial Sequence
  Chemically synthesized
ggccacacuuuucaaguguauau

SEQ ID NO: 32449 - RNA, 23 nt, Artificial Sequence
  Chemically synthesized
ccagccuuccaaagacaccuuac

SEQ ID NO: 32450 - RNA, 23 nt, Artificial Sequence
  Chemically synthesized
ugauugccauuuggcugaagugu

SEQ ID NO: 32451 - RNA, 23 nt, Artificial Sequence
  Chemically synthesized
agugauugccauuuggcugaagu

SEQ ID NO: 32452 - RNA, 23 nt, Artificial Sequence
  Chemically synthesized
caguaauuagauguagaaucuug

SEQ ID NO: 32453 - RNA, 23 nt, Artificial Sequence
  Chemically synthesized
agaauucaccauuagaggacauu

SEQ ID NO: 32454 - RNA, 23 nt, Artificial Sequence
  Chemically synthesized
ggagggauauguuccacguaacu

SEQ ID NO: 32455 - RNA, 23 nt, Artificial Sequence
  Chemically synthesized
acaaacuugcguaaaacuggcuc

SEQ ID NO: 32456 - RNA, 23 nt, Artificial Sequence
  Chemically synthesized
gaacguccaguugcggauaauga

SEQ ID NO: 32457 - RNA, 23 nt, Artificial Sequence
  Chemically synthesized
gggaugcucagguugcaaauaaa

SEQ ID NO: 32458 - RNA, 23 nt, Artificial Sequence
  Chemically synthesized
gcgggaugcucagguugcaaaua

SEQ ID NO: 32459 - RNA, 23 nt, Artificial Sequence
  Chemically synthesized
caagaugaugccgauguuucuua

SEQ ID NO: 32460 - RNA, 23 nt, Artificial Sequence
  Chemically synthesized
cuucacaaacuaaaggcucuaaa

SEQ ID NO: 32461 - RNA, 23 nt, Artificial Sequence
  Chemically synthesized
aagaaggcagcucuacagcaaaa

SEQ ID NO: 32462 - RNA, 23 nt, Artificial Sequence
  Chemically synthesized
ccguguagcacucagauaaguau

SEQ ID NO: 32463 - RNA, 23 nt, Artificial Sequence
  Chemically synthesized
cuuuauggaguucaggagaagau

SEQ ID NO: 32464 - RNA, 23 nt, Artificial Sequence
  Chemically synthesized
acacucagugcucccaauuucuu

SEQ ID NO: 32465 - RNA, 23 nt, Artificial Sequence
  Chemically synthesized
ugcugauagugauggauggacuc

SEQ ID NO: 32466 - RNA, 23 nt, Artificial Sequence
  Chemically synthesized
gcugcugauagugauggauggac

SEQ ID NO: 32467 - RNA, 23 nt, Artificial Sequence
  Chemically synthesized
caaacuugcguaaaacuggcuca

SEQ ID NO: 32468 - RNA, 23 nt, Artificial Sequence
  Chemically synthesized
gaggguccuaaugggccaaauau

SEQ ID NO: 32469 - RNA, 23 nt, Artificial Sequence
  Chemically synthesized
gaaagaauuccucggccacucag

SEQ ID NO: 32470 - RNA, 23 nt, Artificial Sequence
  Chemically synthesized
cccagagaacauuuauuccaaua

SEQ ID NO: 32471 - RNA, 23 nt, Artificial Sequence
  Chemically synthesized
gggccacacuuuucaaguguaua

SEQ ID NO: 32472 - RNA, 23 nt, Artificial Sequence
  Chemically synthesized
ccuuacuuccacccuucagaaaa

SEQ ID NO: 32473 - RNA, 23 nt, Artificial Sequence
  Chemically synthesized
agaccagacccuuucuccagguu

SEQ ID NO: 32474 - RNA, 23 nt, Artificial Sequence
  Chemically synthesized
ccuccuguuccuacaaaaccaaa

SEQ ID NO: 32475 - RNA, 23 nt, Artificial Sequence
  Chemically synthesized
gggaaacuuguggaggaaauuga

SEQ ID NO: 32476 - RNA, 23 nt, Artificial Sequence
  Chemically synthesized
ugggaaacuuguggaggaaauug

SEQ ID NO: 32477 - RNA, 23 nt, Artificial Sequence
  Chemically synthesized
caaugggaaacuuguggaggaaa

SEQ ID NO: 32478 - RNA, 23 nt, Artificial Sequence
  Chemically synthesized
gaaugucucuagaagagaaugaa

SEQ ID NO: 32479 - RNA, 23 nt, Artificial Sequence
  Chemically synthesized
cuugcugggacuguacccaagaa

SEQ ID NO: 32480 - RNA, 23 nt, Artificial Sequence
  Chemically synthesized
gagggauauguuccacguaacuu

SEQ ID NO: 32481 - RNA, 23 nt, Artificial Sequence
  Chemically synthesized
gcaugacaaucauccacagggaa

SEQ ID NO: 32482 - RNA, 23 nt, Artificial Sequence
  Chemically synthesized
agaucucaggauccaaguuuaaa

SEQ ID NO: 32483 - RNA, 23 nt, Artificial Sequence
  Chemically synthesized
caagaucucaggauccaaguuua

SEQ ID NO: 32484 - RNA, 23 nt, Artificial Sequence
  Chemically synthesized
gacaugcagacugcugcagauaa

SEQ ID NO: 32485 - RNA, 23 nt, Artificial Sequence
  Chemically synthesized
ggcucuucacaaugcugugugug

SEQ ID NO: 32486 - RNA, 23 nt, Artificial Sequence
  Chemically synthesized
agaggguccuaaugggccaaaua

SEQ ID NO: 32487 - RNA, 23 nt, Artificial Sequence
  Chemically synthesized
gcugaccuagaagccuuacgaaa

SEQ ID NO: 32488 - RNA, 23 nt, Artificial Sequence
  Chemically synthesized
ccguccaugggaacuaaaccaaa

SEQ ID NO: 32489 - RNA, 23 nt, Artificial Sequence
  Chemically synthesized
guggcugcaguaggucccuauau

SEQ ID NO: 32490 - RNA, 23 nt, Artificial Sequence
  Chemically synthesized
gcagaaugccaagcuacaacaac

SEQ ID NO: 32491 - RNA, 23 nt, Artificial Sequence
  Chemically synthesized
gaaacuuguggaggaaauugaac

SEQ ID NO: 32492 - RNA, 23 nt, Artificial Sequence
  Chemically synthesized
caacagcaacaaguugcugagca

SEQ ID NO: 32493 - RNA, 23 nt, Artificial Sequence
  Chemically synthesized
ggcaacuaaggaacagcgcuuaa

SEQ ID NO: 32494 - RNA, 23 nt, Artificial Sequence
  Chemically synthesized
caagaucauagcugacuuuaaaa

SEQ ID NO: 32495 - RNA, 23 nt, Artificial Sequence
  Chemically synthesized
guguuuucagcagcugcuccuaa

SEQ ID NO: 32496 - RNA, 23 nt, Artificial Sequence
  Chemically synthesized
cguguagcacucagauaaguaua

SEQ ID NO: 32497 - RNA, 23 nt, Artificial Sequence
  Chemically synthesized
gaauucaccauuagaggacauuu

SEQ ID NO: 32498 - RNA, 23 nt, Artificial Sequence
  Chemically synthesized
gucaaugaagaauuaaucucugu

SEQ ID NO: 32499 - RNA, 23 nt, Artificial Sequence
  Chemically synthesized
caaucauccacagggaagacgaa

SEQ ID NO: 32500 - RNA, 23 nt, Artificial Sequence
  Chemically synthesized
uccauuacauugugcugccucau

SEQ ID NO: 32501 - RNA, 23 nt, Artificial Sequence
  Chemically synthesized
uccugguacaguuugguguaaau

SEQ ID NO: 32502 - RNA, 23 nt, Artificial Sequence
  Chemically synthesized
cguaaaacuggcucagagcguau

SEQ ID NO: 32503 - RNA, 23 nt, Artificial Sequence
  Chemically synthesized
gaagcuuuuauaucagaggacca

SEQ ID NO: 32504 - RNA, 23 nt, Artificial Sequence
  Chemically synthesized
ucggccacucagcccaacuaaau

SEQ ID NO: 32505 - RNA, 23 nt, Artificial Sequence
  Chemically synthesized
ccuguaauugcugcugcccagaa

SEQ ID NO: 32506 - RNA, 23 nt, Artificial Sequence
  Chemically synthesized
ccaguugcggauaaugagcgaau

SEQ ID NO: 32507 - RNA, 23 nt, Artificial Sequence
  Chemically synthesized
cagccuuccaaagacaccuuacu

SEQ ID NO: 32508 - RNA, 23 nt, Artificial Sequence
  Chemically synthesized
cuccagguucuaagcaagaaagu

SEQ ID NO: 32509 - RNA, 23 nt, Artificial Sequence
  Chemically synthesized
aaucagccaccuucagacauuaa

SEQ ID NO: 32510 - RNA, 23 nt, Artificial Sequence
  Chemically synthesized
gcuucacaaacuaaaggcucuaa

SEQ ID NO: 32511 - RNA, 23 nt, Artificial Sequence
  Chemically synthesized
gcaguaggucccuauauccaguc

SEQ ID NO: 32512 - RNA, 23 nt, Artificial Sequence
  Chemically synthesized
gccaccaugacaaucagucugca

SEQ ID NO: 32513 - RNA, 23 nt, Artificial Sequence
  Chemically synthesized
agaucagcgacaacagcaacaag

SEQ ID NO: 32514 - RNA, 23 nt, Artificial Sequence
  Chemically synthesized
gucaagaucauagcugacuuuaa

SEQ ID NO: 32515 - RNA, 23 nt, Artificial Sequence
  Chemically synthesized
ugcuacagacuuacccguaauau

SEQ ID NO: 32516 - RNA, 23 nt, Artificial Sequence
  Chemically synthesized
ugaaacuaagcuacgguaccagu

SEQ ID NO: 32517 - RNA, 23 nt, Artificial Sequence
  Chemically synthesized
acuuguauauugucagugaagaa

SEQ ID NO: 32518 - RNA, 23 nt, Artificial Sequence
  Chemically synthesized
ggccugaaacuuccacacagaau

SEQ ID NO: 32519 - RNA, 23 nt, Artificial Sequence
  Chemically synthesized
ccaagaucucaggauccaaguuu

SEQ ID NO: 32520 - RNA, 23 nt, Artificial Sequence
  Chemically synthesized
ggcuacacucagugcucccaauu

SEQ ID NO: 32521 - RNA, 23 nt, Artificial Sequence
  Chemically synthesized
uuacauugugcugccucauguaa

SEQ ID NO: 32522 - RNA, 23 nt, Artificial Sequence
  Chemically synthesized
cguuaaguuccugguacaguuug

SEQ ID NO: 32523 - RNA, 23 nt, Artificial Sequence
  Chemically synthesized
ugguaaaaggacaaacuugcgua

SEQ ID NO: 32524 - RNA, 23 nt, Artificial Sequence
  Chemically synthesized
cagaauaacccagaagaaccaaa

SEQ ID NO: 32525 - RNA, 23 nt, Artificial Sequence
  Chemically synthesized
cgaaaccagagugaugcugaccu

SEQ ID NO: 32526 - RNA, 23 nt, Artificial Sequence
  Chemically synthesized
ggccacucagcccaacuaaauua

SEQ ID NO: 32527 - RNA, 23 nt, Artificial Sequence
  Chemically synthesized
cggccacucagcccaacuaaauu

SEQ ID NO: 32528 - RNA, 23 nt, Artificial Sequence
  Chemically synthesized
ccagagaacauuuauuccaauag

SEQ ID NO: 32529 - RNA, 23 nt, Artificial Sequence
  Chemically synthesized
gccuuccaaagacaccuuacuuc

SEQ ID NO: 32530 - RNA, 23 nt, Artificial Sequence
  Chemically synthesized
gagugcugcuaucucccagcaua

SEQ ID NO: 32531 - RNA, 23 nt, Artificial Sequence
  Chemically synthesized
agacauuaagccagacggaaguu

SEQ ID NO: 32532 - RNA, 23 nt, Artificial Sequence
  Chemically synthesized
ggcugagcuugaucgccucuaua

SEQ ID NO: 32533 - RNA, 23 nt, Artificial Sequence
  Chemically synthesized
ccaugacaaucagucugcagugg

SEQ ID NO: 32534 - RNA, 23 nt, Artificial Sequence
  Chemically synthesized
ccaccaugacaaucagucugcag

SEQ ID NO: 32535 - RNA, 23 nt, Artificial Sequence
  Chemically synthesized
agagcacuuaaaggccacgugga

SEQ ID NO: 32536 - RNA, 23 nt, Artificial Sequence
  Chemically synthesized
cauagcugacuuuaaaaacaguu

SEQ ID NO: 32537 - RNA, 23 nt, Artificial Sequence
  Chemically synthesized
uugucaagaucauagcugacuuu

SEQ ID NO: 32538 - RNA, 23 nt, Artificial Sequence
  Chemically synthesized
uugcuacagacuuacccguaaua

SEQ ID NO: 32539 - RNA, 23 nt, Artificial Sequence
  Chemically synthesized
cuuguauauugucagugaagaac

SEQ ID NO: 32540 - RNA, 23 nt, Artificial Sequence
  Chemically synthesized
ucagcagcugcuccuaaaccagu

SEQ ID NO: 32541 - RNA, 23 nt, Artificial Sequence
  Chemically synthesized
gcucucuguccuguugaguguuu

SEQ ID NO: 32542 - RNA, 23 nt, Artificial Sequence
  Chemically synthesized
cccguguagcacucagauaagua

SEQ ID NO: 32543 - RNA, 23 nt, Artificial Sequence
  Chemically synthesized
gacaauguagcuugaaagcgaug

SEQ ID NO: 32544 - RNA, 23 nt, Artificial Sequence
  Chemically synthesized
gaaacuuccacacagaauuuuag

SEQ ID NO: 32545 - RNA, 23 nt, Artificial Sequence
  Chemically synthesized
ugaaacuuccacacagaauuuua

SEQ ID NO: 32546 - RNA, 23 nt, Artificial Sequence
  Chemically synthesized
uggccugaaacuuccacacagaa

SEQ ID NO: 32547 - RNA, 23 nt, Artificial Sequence
  Chemically synthesized
aagaucucaggauccaaguuuaa

SEQ ID NO: 32548 - RNA, 23 nt, Artificial Sequence
  Chemically synthesized
accaagaucucaggauccaaguu

SEQ ID NO: 32549 - RNA, 23 nt, Artificial Sequence
  Chemically synthesized
aggcuacacucagugcucccaau

SEQ ID NO: 32550 - RNA, 23 nt, Artificial Sequence
  Chemically synthesized
ugcugcagauaagugcgaggaaa

SEQ ID NO: 32551 - RNA, 23 nt, Artificial Sequence
  Chemically synthesized
cugguacaguuugguguaaaugu

SEQ ID NO: 32552 - RNA, 23 nt, Artificial Sequence
  Chemically synthesized
ccugguacaguuugguguaaaug

SEQ ID NO: 32553 - RNA, 23 nt, Artificial Sequence
  Chemically synthesized
agguggucucucugguuccugaa

SEQ ID NO: 32554 - RNA, 23 nt, Artificial Sequence
  Chemically synthesized
aggguccuaaugggccaaauauu

SEQ ID NO: 32555 - RNA, 23 nt, Artificial Sequence
  Chemically synthesized
ugauguucuucaacgauuuggaa

SEQ ID NO: 32556 - RNA, 23 nt, Artificial Sequence
  Chemically synthesized
ugcugaccuagaagccuuacgaa

SEQ ID NO: 32557 - RNA, 23 nt, Artificial Sequence
  Chemically synthesized
cgaaagaauuccucggccacuca

SEQ ID NO: 32558 - RNA, 23 nt, Artificial Sequence
  Chemically synthesized
guaauugcugcugcccagaauca

SEQ ID NO: 32559 - RNA, 23 nt, Artificial Sequence
  Chemically synthesized
ucauaccagagggccacacuuuu

SEQ ID NO: 32560 - RNA, 23 nt, Artificial Sequence
  Chemically synthesized
caggaaaaaacuuccagcaggcu

SEQ ID NO: 32561 - RNA, 23 nt, Artificial Sequence
  Chemically synthesized
caaagacaccuuacuuccacccu

SEQ ID NO: 32562 - RNA, 23 nt, Artificial Sequence
  Chemically synthesized
cuaaucagccaccuucagacauu

SEQ ID NO: 32563 - RNA, 23 nt, Artificial Sequence
  Chemically synthesized
ccaccuuccuuugguacucugag

SEQ ID NO: 32564 - RNA, 23 nt, Artificial Sequence
  Chemically synthesized
ccuauauccagucgucuacuaug

SEQ ID NO: 32565 - RNA, 23 nt, Artificial Sequence
  Chemically synthesized
gcugagcuugaucgccucuauaa

SEQ ID NO: 32566 - RNA, 23 nt, Artificial Sequence
  Chemically synthesized
caacaaguugcugagcaggagaa

SEQ ID NO: 32567 - RNA, 23 nt, Artificial Sequence
  Chemically synthesized
ucaagaucauagcugacuuuaaa

SEQ ID NO: 32568 - RNA, 23 nt, Artificial Sequence
  Chemically synthesized
aguauacagcgacaauccuguuu

SEQ ID NO: 32569 - RNA, 23 nt, Artificial Sequence
  Chemically synthesized
gugucccguguagcacucagaua

SEQ ID NO: 32570 - RNA, 23 nt, Artificial Sequence
  Chemically synthesized
ggauauguuccacguaacuugcu

SEQ ID NO: 32571 - RNA, 23 nt, Artificial Sequence
  Chemically synthesized
ggaccaagaucucaggauccaag

SEQ ID NO: 32572 - RNA, 23 nt, Artificial Sequence
  Chemically synthesized
ugacaugcagacugcugcagaua

SEQ ID NO: 32573 - RNA, 23 nt, Artificial Sequence
  Chemically synthesized
gugacaugcagacugcugcagau

SEQ ID NO: 32574 - RNA, 23 nt, Artificial Sequence
  Chemically synthesized
gccuccugguaaaaggacaaacu

SEQ ID NO: 32575 - RNA, 23 nt, Artificial Sequence
  Chemically synthesized
cugccuccugguaaaaggacaaa

SEQ ID NO: 32576 - RNA, 23 nt, Artificial Sequence
  Chemically synthesized
caacagcaggcgccaggaaaaaa

SEQ ID NO: 32577 - RNA, 23 nt, Artificial Sequence
  Chemically synthesized
caccuucagacauuaagccagac

SEQ ID NO: 32578 - RNA, 23 nt, Artificial Sequence
  Chemically synthesized
ccaccuucagacauuaagccaga

SEQ ID NO: 32579 - RNA, 23 nt, Artificial Sequence
  Chemically synthesized
acuaaucagccaccuucagacau

SEQ ID NO: 32580 - RNA, 23 nt, Artificial Sequence
  Chemically synthesized
ccaccuccuguuccuacaaaacc

SEQ ID NO: 32581 - RNA, 23 nt, Artificial Sequence
  Chemically synthesized
cugcuucacaaacuaaaggcucu

SEQ ID NO: 32582 - RNA, 23 nt, Artificial Sequence
  Chemically synthesized
gcugcuucacaaacuaaaggcuc

SEQ ID NO: 32583 - RNA, 23 nt, Artificial Sequence
  Chemically synthesized
agaaauagcugagaaucaggaag

SEQ ID NO: 32584 - RNA, 23 nt, Artificial Sequence
  Chemically synthesized
aaagaaauagcugagaaucagga

SEQ ID NO: 32585 - RNA, 23 nt, Artificial Sequence
  Chemically synthesized
cgacaacagcaacaaguugcuga

SEQ ID NO: 32586 - RNA, 23 nt, Artificial Sequence
  Chemically synthesized
caagaucagcgacaacagcaaca

SEQ ID NO: 32587 - RNA, 23 nt, Artificial Sequence
  Chemically synthesized
gcaacaauugcuggcaacuaagg

SEQ ID NO: 32588 - RNA, 23 nt, Artificial Sequence
  Chemically synthesized
gcgccuuaaugauaaggagggau

SEQ ID NO: 32589 - RNA, 23 nt, Artificial Sequence
  Chemically synthesized
gaaugaugaugagcugcccauga

SEQ ID NO: 32590 - RNA, 23 nt, Artificial Sequence
  Chemically synthesized
auagugauggauggacuccauua

SEQ ID NO: 32591 - RNA, 23 nt, Artificial Sequence
  Chemically synthesized
cagaaaucguuaaguuccuggua

SEQ ID NO: 32592 - RNA, 23 nt, Artificial Sequence
  Chemically synthesized
agaauaacccagaagaaccaaau

SEQ ID NO: 32593 - RNA, 23 nt, Artificial Sequence
  Chemically synthesized
cagaggguccuaaugggccaaau

SEQ ID NO: 32594 - RNA, 23 nt, Artificial Sequence
  Chemically synthesized
cguaguucuauuacagagccaga

SEQ ID NO: 32595 - RNA, 23 nt, Artificial Sequence
  Chemically synthesized
acgaaagaaacugucuaacgcac

SEQ ID NO: 32596 - RNA, 23 nt, Artificial Sequence
  Chemically synthesized
auguuugauguucuucaacgauu

SEQ ID NO: 32597 - RNA, 23 nt, Artificial Sequence
  Chemically synthesized
ucaguucaggagaaccaugaaaa

SEQ ID NO: 32598 - RNA, 23 nt, Artificial Sequence
  Chemically synthesized
caaguguauaugguaagccugua

SEQ ID NO: 32599 - RNA, 23 nt, Artificial Sequence
  Chemically synthesized
cgccaggaaaaaacuuccagcag

SEQ ID NO: 32600 - RNA, 23 nt, Artificial Sequence
  Chemically synthesized
agagugcugcuaucucccagcau

SEQ ID NO: 32601 - RNA, 23 nt, Artificial Sequence
  Chemically synthesized
gacauuaagccagacggaaguuc

SEQ ID NO: 32602 - RNA, 23 nt, Artificial Sequence
  Chemically synthesized
ccuguuccuacaaaaccaaaaca

SEQ ID NO: 32603 - RNA, 23 nt, Artificial Sequence
  Chemically synthesized
cuccuguuccuacaaaaccaaaa

SEQ ID NO: 32604 - RNA, 23 nt, Artificial Sequence
  Chemically synthesized
accuccuguuccuacaaaaccaa

SEQ ID NO: 32605 - RNA, 23 nt, Artificial Sequence
  Chemically synthesized
caaagaacccggcgagagugauu

SEQ ID NO: 32606 - RNA, 23 nt, Artificial Sequence
  Chemically synthesized
ccggaugguuccuuggucauuca

SEQ ID NO: 32607 - RNA, 23 nt, Artificial Sequence
  Chemically synthesized
cccuauauccagucgucuacuau

SEQ ID NO: 32608 - RNA, 23 nt, Artificial Sequence
  Chemically synthesized
ucccuauauccagucgucuacua

SEQ ID NO: 32609 - RNA, 23 nt, Artificial Sequence
  Chemically synthesized
uguggcugcaguaggucccuaua

SEQ ID NO: 32610 - RNA, 23 nt, Artificial Sequence
  Chemically synthesized
agaugcucaagaacggcaggauc

SEQ ID NO: 32611 - RNA, 23 nt, Artificial Sequence
  Chemically synthesized
agagaugcucaagaacggcagga

SEQ ID NO: 32612 - RNA, 23 nt, Artificial Sequence
  Chemically synthesized
cagcaacaaguugcugagcagga

SEQ ID NO: 32613 - RNA, 23 nt, Artificial Sequence
  Chemically synthesized
uggcaacuaaggaacagcgcuua

SEQ ID NO: 32614 - RNA, 23 nt, Artificial Sequence
  Chemically synthesized
ucauagcugacuuuaaaaacagu

SEQ ID NO: 32615 - RNA, 23 nt, Artificial Sequence
  Chemically synthesized
ugucaagaucauagcugacuuua

SEQ ID NO: 32616 - RNA, 23 nt, Artificial Sequence
  Chemically synthesized
guauacagcgacaauccuguuuu

SEQ ID NO: 32617 - RNA, 23 nt, Artificial Sequence
  Chemically synthesized
guagcuugaaagcgaugaagaau

SEQ ID NO: 32618 - RNA, 23 nt, Artificial Sequence
  Chemically synthesized
uguagcuugaaagcgaugaagaa

SEQ ID NO: 32619 - RNA, 23 nt, Artificial Sequence
  Chemically synthesized
gaaccucagaaugaugaugagcu

SEQ ID NO: 32620 - RNA, 23 nt, Artificial Sequence
  Chemically synthesized
ugauggauggacuccauuacauu

SEQ ID NO: 32621 - RNA, 23 nt, Artificial Sequence
  Chemically synthesized
cucagagcguaucgcucauggaa

SEQ ID NO: 32622 - RNA, 23 nt, Artificial Sequence
  Chemically synthesized
ccauauuuacauguggagcccga

SEQ ID NO: 32623 - RNA, 23 nt, Artificial Sequence
  Chemically synthesized
uucaguucaggagaaccaugaaa

SEQ ID NO: 32624 - RNA, 23 nt, Artificial Sequence
  Chemically synthesized
gcaguccagaaccugaaacagag

SEQ ID NO: 32625 - RNA, 23 nt, Artificial Sequence
  Chemically synthesized
cacuuuucaaguguauaugguaa

SEQ ID NO: 32626 - RNA, 23 nt, Artificial Sequence
  Chemically synthesized
agccuuccaaagacaccuuacuu

SEQ ID NO: 32627 - RNA, 23 nt, Artificial Sequence
  Chemically synthesized
acccuuucuccagguucuaagca

SEQ ID NO: 32628 - RNA, 23 nt, Artificial Sequence
  Chemically synthesized
caagagcagaaugccaagcuaca

SEQ ID NO: 32629 - RNA, 23 nt, Artificial Sequence
  Chemically synthesized
accaggcagcuagagaugcucaa

SEQ ID NO: 32630 - RNA, 23 nt, Artificial Sequence
  Chemically synthesized
cucguccuggcugugucaaaagu

SEQ ID NO: 32631 - RNA, 23 nt, Artificial Sequence
  Chemically synthesized
agcaaaaacagagggagcucguc

SEQ ID NO: 32632 - RNA, 23 nt, Artificial Sequence
  Chemically synthesized
gcagcacuucacagaaguuccag

SEQ ID NO: 32633 - RNA, 23 nt, Artificial Sequence
  Chemically synthesized
gcacuuaaaggccacguggaaca

SEQ ID NO: 32634 - RNA, 23 nt, Artificial Sequence
  Chemically synthesized
ccgucacaucgcugucucugauu

SEQ ID NO: 32635 - RNA, 23 nt, Artificial Sequence
  Chemically synthesized
agaaaggaccagugccgucacau

SEQ ID NO: 32636 - RNA, 23 nt, Artificial Sequence
  Chemically synthesized
guguagcacucagauaaguauac

SEQ ID NO: 32637 - RNA, 23 nt, Artificial Sequence
  Chemically synthesized
gaaauaaagcaucuacgucagca

SEQ ID NO: 32638 - RNA, 23 nt, Artificial Sequence
  Chemically synthesized
agaaugucucuagaagagaauga

SEQ ID NO: 32639 - RNA, 23 nt, Artificial Sequence
  Chemically synthesized
gaagaaugucucuagaagagaau

SEQ ID NO: 32640 - RNA, 23 nt, Artificial Sequence
  Chemically synthesized
cuuugggauuaugaaccucagaa

SEQ ID NO: 32641 - RNA, 23 nt, Artificial Sequence
  Chemically synthesized
gcuuugggauuaugaaccucaga

SEQ ID NO: 32642 - RNA, 23 nt, Artificial Sequence
  Chemically synthesized
cacucagugcucccaauuucuuu

SEQ ID NO: 32643 - RNA, 23 nt, Artificial Sequence
  Chemically synthesized
gaaauggaggaaggcuacacuca

SEQ ID NO: 32644 - RNA, 23 nt, Artificial Sequence
  Chemically synthesized
gaccuacagugacaugcagacug

SEQ ID NO: 32645 - RNA, 23 nt, Artificial Sequence
  Chemically synthesized
acagaaaucguuaaguuccuggu

SEQ ID NO: 32646 - RNA, 23 nt, Artificial Sequence
  Chemically synthesized
ucgcuucuuccuucgucaugaac

SEQ ID NO: 32647 - RNA, 23 nt, Artificial Sequence
  Chemically synthesized
agauucgucuuuggagggagaau

SEQ ID NO: 32648 - RNA, 23 nt, Artificial Sequence
  Chemically synthesized
ccagaauaacccagaagaaccaa

SEQ ID NO: 32649 - RNA, 23 nt, Artificial Sequence
  Chemically synthesized
ucuaacgcaccaaggccucuaaa

SEQ ID NO: 32650 - RNA, 23 nt, Artificial Sequence
  Chemically synthesized
ugaugcugaccuagaagccuuac

SEQ ID NO: 32651 - RNA, 23 nt, Artificial Sequence
  Chemically synthesized
aauguuugauguucuucaacgau

SEQ ID NO: 32652 - RNA, 23 nt, Artificial Sequence
  Chemically synthesized
gccacucagcccaacuaaauuac

SEQ ID NO: 32653 - RNA, 23 nt, Artificial Sequence
  Chemically synthesized
cuguaauugcugcugcccagaau

SEQ ID NO: 32654 - RNA, 23 nt, Artificial Sequence
  Chemically synthesized
gccacacuuuucaaguguauaug

SEQ ID NO: 32655 - RNA, 23 nt, Artificial Sequence
  Chemically synthesized
agggccacacuuuucaaguguau

SEQ ID NO: 32656 - RNA, 23 nt, Artificial Sequence
  Chemically synthesized
gcgccaggaaaaaacuuccagca

SEQ ID NO: 32657 - RNA, 23 nt, Artificial Sequence
  Chemically synthesized
cagcaggcgccaggaaaaaacuu

SEQ ID NO: 32658 - RNA, 23 nt, Artificial Sequence
  Chemically synthesized
ccagacccuuucuccagguucua

SEQ ID NO: 32659 - RNA, 23 nt, Artificial Sequence
  Chemically synthesized
cguccaugggaacuaaaccaaaa

SEQ ID NO: 32660 - RNA, 23 nt, Artificial Sequence
  Chemically synthesized
ugcgggaugcucagguugcaaau

SEQ ID NO: 32661 - RNA, 23 nt, Artificial Sequence
  Chemically synthesized
agagugauugccauuuggcugaa

SEQ ID NO: 32662 - RNA, 23 nt, Artificial Sequence
  Chemically synthesized
uggcccugauuggaguccuucaa

SEQ ID NO: 32663 - RNA, 23 nt, Artificial Sequence
  Chemically synthesized
caaacuaaaggcucuaaaaucca

SEQ ID NO: 32664 - RNA, 23 nt, Artificial Sequence
  Chemically synthesized
ugguuccuuggucauucaggcuu

SEQ ID NO: 32665 - RNA, 23 nt, Artificial Sequence
  Chemically synthesized
cggaugguuccuuggucauucag

SEQ ID NO: 32666 - RNA, 23 nt, Artificial Sequence
  Chemically synthesized
ugccggaugguuccuuggucauu

SEQ ID NO: 32667 - RNA, 23 nt, Artificial Sequence
  Chemically synthesized
agcagaaugccaagcuacaacaa

SEQ ID NO: 32668 - RNA, 23 nt, Artificial Sequence
  Chemically synthesized
ccucuauaaggagcugcagcuaa

SEQ ID NO: 32669 - RNA, 23 nt, Artificial Sequence
  Chemically synthesized
ugagcagcacuucacagaaguuc

SEQ ID NO: 32670 - RNA, 23 nt, Artificial Sequence
  Chemically synthesized
agacuaagcaaugggaaacuugu

SEQ ID NO: 32671 - RNA, 23 nt, Artificial Sequence
  Chemically synthesized
ugagagcacuuaaaggccacgug

SEQ ID NO: 32672 - RNA, 23 nt, Artificial Sequence
  Chemically synthesized
gcaacaaguugcugagcaggaga

SEQ ID NO: 32673 - RNA, 23 nt, Artificial Sequence
  Chemically synthesized
cugacucuugcugaacuucagga

SEQ ID NO: 32674 - RNA, 23 nt, Artificial Sequence
  Chemically synthesized
gcuacagacuuacccguaauauu

SEQ ID NO: 32675 - RNA, 23 nt, Artificial Sequence
  Chemically synthesized
gaacuguuaguugguugucagug

SEQ ID NO: 32676 - RNA, 23 nt, Artificial Sequence
  Chemically synthesized
guagcacucagauaaguauacag

SEQ ID NO: 32677 - RNA, 23 nt, Artificial Sequence
  Chemically synthesized
gccugaaacuuccacacagaauu

SEQ ID NO: 32678 - RNA, 23 nt, Artificial Sequence
  Chemically synthesized
aaggagggauauguuccacguaa

SEQ ID NO: 32679 - RNA, 23 nt, Artificial Sequence
  Chemically synthesized
uaaggagggauauguuccacgua

SEQ ID NO: 32680 - RNA, 23 nt, Artificial Sequence
  Chemically synthesized
cuacagugacaugcagacugcug

SEQ ID NO: 32681 - RNA, 23 nt, Artificial Sequence
  Chemically synthesized
agaaaucguuaaguuccugguac

SEQ ID NO: 32682 - RNA, 23 nt, Artificial Sequence
  Chemically synthesized
gcaucacggcucuucacaaugcu

SEQ ID NO: 32683 - RNA, 23 nt, Artificial Sequence
  Chemically synthesized
aaguucgcuucuuccuucgucau

SEQ ID NO: 32684 - RNA, 23 nt, Artificial Sequence
  Chemically synthesized
cgaaguucgcuucuuccuucguc

SEQ ID NO: 32685 - RNA, 23 nt, Artificial Sequence
  Chemically synthesized
ggucucucugccuccugguaaaa

SEQ ID NO: 32686 - RNA, 23 nt, Artificial Sequence
  Chemically synthesized
caguagaaauccagaauccauau

SEQ ID NO: 32687 - RNA, 23 nt, Artificial Sequence
  Chemically synthesized
gaaagcccaguagaaauccagaa

SEQ ID NO: 32688 - RNA, 23 nt, Artificial Sequence
  Chemically synthesized
ggguccuaaugggccaaauauuc

SEQ ID NO: 32689 - RNA, 23 nt, Artificial Sequence
  Chemically synthesized
cuaacgcaccaaggccucuaaag

SEQ ID NO: 32690 - RNA, 23 nt, Artificial Sequence
  Chemically synthesized
gucuaacgcaccaaggccucuaa

SEQ ID NO: 32691 - RNA, 23 nt, Artificial Sequence
  Chemically synthesized
guuugauguucuucaacgauuug

SEQ ID NO: 32692 - RNA, 23 nt, Artificial Sequence
  Chemically synthesized
gugaugcugaccuagaagccuua

SEQ ID NO: 32693 - RNA, 23 nt, Artificial Sequence
  Chemically synthesized
gaaaccagagugaugcugaccua

SEQ ID NO: 32694 - RNA, 23 nt, Artificial Sequence
  Chemically synthesized
ccuguuucuucaguucaggagaa

SEQ ID NO: 32695 - RNA, 23 nt, Artificial Sequence
  Chemically synthesized
ccagaaccugaaacagagccugu

SEQ ID NO: 32696 - RNA, 23 nt, Artificial Sequence
  Chemically synthesized
acucauaccagagggccacacuu

SEQ ID NO: 32697 - RNA, 23 nt, Artificial Sequence
  Chemically synthesized
cagacccuuucuccagguucuaa

SEQ ID NO: 32698 - RNA, 23 nt, Artificial Sequence
  Chemically synthesized
uccguccaugggaacuaaaccaa

SEQ ID NO: 32699 - RNA, 23 nt, Artificial Sequence
  Chemically synthesized
ggacaaacuaaucagccaccuuc

SEQ ID NO: 32700 - RNA, 23 nt, Artificial Sequence
  Chemically synthesized
uugcgggaugcucagguugcaaa

SEQ ID NO: 32701 - RNA, 23 nt, Artificial Sequence
  Chemically synthesized
ugcuucacaaacuaaaggcucua

SEQ ID NO: 32702 - RNA, 23 nt, Artificial Sequence
  Chemically synthesized
agagacuaagcaaugggaaacuu

SEQ ID NO: 32703 - RNA, 23 nt, Artificial Sequence
  Chemically synthesized
gagcacuuaaaggccacguggaa

SEQ ID NO: 32704 - RNA, 23 nt, Artificial Sequence
  Chemically synthesized
aguugcugagcaggagaaacuua

SEQ ID NO: 32705 - RNA, 23 nt, Artificial Sequence
  Chemically synthesized
cucucuguccuguugaguguuuu

SEQ ID NO: 32706 - RNA, 23 nt, Artificial Sequence
  Chemically synthesized
ggaaaucagcucucuguccuguu

SEQ ID NO: 32707 - RNA, 23 nt, Artificial Sequence
  Chemically synthesized
ucccguguagcacucagauaagu

SEQ ID NO: 32708 - RNA, 23 nt, Artificial Sequence
  Chemically synthesized
ccaaguuuaaaaagaaauggugu

SEQ ID NO: 32709 - RNA, 23 nt, Artificial Sequence
  Chemically synthesized
gugauggauggacuccauuacau

SEQ ID NO: 32710 - RNA, 23 nt, Artificial Sequence
  Chemically synthesized
gcuugauguguaccuggaggagu

SEQ ID NO: 32711 - RNA, 23 nt, Artificial Sequence
  Chemically synthesized
ccaaggccucuaaagaaacguag

SEQ ID NO: 32712 - RNA, 23 nt, Artificial Sequence
  Chemically synthesized
accaaggccucuaaagaaacgua

SEQ ID NO: 32713 - RNA, 23 nt, Artificial Sequence
  Chemically synthesized
gaccuagaagccuuacgaaagaa

SEQ ID NO: 32714 - RNA, 23 nt, Artificial Sequence
  Chemically synthesized
ucaaguguauaugguaagccugu

SEQ ID NO: 32715 - RNA, 23 nt, Artificial Sequence
  Chemically synthesized
acacuuuucaaguguauauggua

SEQ ID NO: 32716 - RNA, 23 nt, Artificial Sequence
  Chemically synthesized
ccacacuuuucaaguguauaugg

SEQ ID NO: 32717 - RNA, 23 nt, Artificial Sequence
  Chemically synthesized
gagggccacacuuuucaagugua

SEQ ID NO: 32718 - RNA, 23 nt, Artificial Sequence
  Chemically synthesized
gccaggaaaaaacuuccagcagg

SEQ ID NO: 32719 - RNA, 23 nt, Artificial Sequence
  Chemically synthesized
gccaccuucagacauuaagccag

SEQ ID NO: 32720 - RNA, 23 nt, Artificial Sequence
  Chemically synthesized
guaccaccuccuguuccuacaaa

SEQ ID NO: 32721 - RNA, 23 nt, Artificial Sequence
  Chemically synthesized
ggcuaaaguaccaccuccuguuc

SEQ ID NO: 32722 - RNA, 23 nt, Artificial Sequence
  Chemically synthesized
agcagugaagauaucuugcggga

SEQ ID NO: 32723 - RNA, 23 nt, Artificial Sequence
  Chemically synthesized
agaaguuccaguuacuccagaaa

SEQ ID NO: 32724 - RNA, 23 nt, Artificial Sequence
  Chemically synthesized
gccucuauaaggagcugcagcua

SEQ ID NO: 32725 - RNA, 23 nt, Artificial Sequence
  Chemically synthesized
gacaaucagucugcaguggcuga

SEQ ID NO: 32726 - RNA, 23 nt, Artificial Sequence
  Chemically synthesized
agcacuucacagaaguuccaguu

SEQ ID NO: 32727 - RNA, 23 nt, Artificial Sequence
  Chemically synthesized
caaugagcagcacuucacagaag

SEQ ID NO: 32728 - RNA, 23 nt, Artificial Sequence
  Chemically synthesized
acaaugagcagcacuucacagaa

SEQ ID NO: 32729 - RNA, 23 nt, Artificial Sequence
  Chemically synthesized
cgucacaucgcugucucugauug

SEQ ID NO: 32730 - RNA, 23 nt, Artificial Sequence
  Chemically synthesized
gggaaaucagcucucuguccugu

SEQ ID NO: 32731 - RNA, 23 nt, Artificial Sequence
  Chemically synthesized
acaauccuguuuucuacaagaau

SEQ ID NO: 32732 - RNA, 23 nt, Artificial Sequence
  Chemically synthesized
ugaagaaugucucuagaagagaa

SEQ ID NO: 32733 - RNA, 23 nt, Artificial Sequence
  Chemically synthesized
guuucuuaccguguaucucagua

SEQ ID NO: 32734 - RNA, 23 nt, Artificial Sequence
  Chemically synthesized
caagacaaaggagcuuggccuga

SEQ ID NO: 32735 - RNA, 23 nt, Artificial Sequence
  Chemically synthesized
ccauuacauugugcugccucaug

SEQ ID NO: 32736 - RNA, 23 nt, Artificial Sequence
  Chemically synthesized
cgcuucuuccuucgucaugaacg

SEQ ID NO: 32737 - RNA, 23 nt, Artificial Sequence
  Chemically synthesized
gaaggcaucacggcucuucacaa

SEQ ID NO: 32738 - RNA, 23 nt, Artificial Sequence
  Chemically synthesized
acgaaguucgcuucuuccuucgu

SEQ ID NO: 32739 - RNA, 23 nt, Artificial Sequence
  Chemically synthesized
ugcuuuacugcuagauucgucuu

SEQ ID NO: 32740 - RNA, 23 nt, Artificial Sequence
  Chemically synthesized
ggaacgaaguucgcuucuuccuu

SEQ ID NO: 32741 - RNA, 23 nt, Artificial Sequence
  Chemically synthesized
aggucucucugccuccugguaaa

SEQ ID NO: 32742 - RNA, 23 nt, Artificial Sequence
  Chemically synthesized
gguccuaaugggccaaauauuca

SEQ ID NO: 32743 - RNA, 23 nt, Artificial Sequence
  Chemically synthesized
acgcaccaaggccucuaaagaaa

SEQ ID NO: 32744 - RNA, 23 nt, Artificial Sequence
  Chemically synthesized
aggaaaaaacuuccagcaggcug

SEQ ID NO: 32745 - RNA, 23 nt, Artificial Sequence
  Chemically synthesized
agguucuaagcaagaaaguccac

SEQ ID NO: 32746 - RNA, 23 nt, Artificial Sequence
  Chemically synthesized
uggacaaacuaaucagccaccuu

SEQ ID NO: 32747 - RNA, 23 nt, Artificial Sequence
  Chemically synthesized
acagaaguuccaguuacuccaga

SEQ ID NO: 32748 - RNA, 23 nt, Artificial Sequence
  Chemically synthesized
cagcacuucacagaaguuccagu

SEQ ID NO: 32749 - RNA, 23 nt, Artificial Sequence
  Chemically synthesized
gaacagaugaauaauuuguucca

SEQ ID NO: 32750 - RNA, 23 nt, Artificial Sequence
  Chemically synthesized
caauugcuggcaacuaaggaaca

SEQ ID NO: 32751 - RNA, 23 nt, Artificial Sequence
  Chemically synthesized
gacucuugcugaacuucaggaaa

SEQ ID NO: 32752 - RNA, 23 nt, Artificial Sequence
  Chemically synthesized
uccuguuuucuacaagaauccug

SEQ ID NO: 32753 - RNA, 23 nt, Artificial Sequence
  Chemically synthesized
cugaaacuuccacacagaauuuu

SEQ ID NO: 32754 - RNA, 23 nt, Artificial Sequence
  Chemically synthesized
guggaccaagaucucaggaucca

SEQ ID NO: 32755 - RNA, 23 nt, Artificial Sequence
  Chemically synthesized
aagauucuacaucuaauuacugg

SEQ ID NO: 32756 - RNA, 23 nt, Artificial Sequence
  Chemically synthesized
agauucuacaucuaauuacuggu

SEQ ID NO: 32757 - RNA, 23 nt, Artificial Sequence
  Chemically synthesized
gauucuacaucuaauuacuggua

SEQ ID NO: 32758 - RNA, 23 nt, Artificial Sequence
  Chemically synthesized
auucuacaucuaauuacugguac

SEQ ID NO: 32759 - RNA, 23 nt, Artificial Sequence
  Chemically synthesized
uucuacaucuaauuacugguacc

SEQ ID NO: 32760 - RNA, 23 nt, Artificial Sequence
  Chemically synthesized
cuuugucuugguuuaauucuugg

SEQ ID NO: 32761 - RNA, 23 nt, Artificial Sequence
  Chemically synthesized
uuugucuugguuuaauucuuggg

SEQ ID NO: 32762 - RNA, 23 nt, Artificial Sequence
  Chemically synthesized
uugucuugguuuaauucuugggu

SEQ ID NO: 32763 - RNA, 23 nt, Artificial Sequence
  Chemically synthesized
ugucuugguuuaauucuugggua

SEQ ID NO: 32764 - RNA, 23 nt, Artificial Sequence
  Chemically synthesized
gucuugguuuaauucuuggguac

SEQ ID NO: 32765 - RNA, 23 nt, Artificial Sequence
  Chemically synthesized
ucuugguuuaauucuuggguaca

SEQ ID NO: 32766 - RNA, 23 nt, Artificial Sequence
  Chemically synthesized
cauuucuuuuuaaacuuggaucc

SEQ ID NO: 32767 - RNA, 23 nt, Artificial Sequence
  Chemically synthesized
auuucuuuuuaaacuuggauccu

SEQ ID NO: 32768 - RNA, 23 nt, Artificial Sequence
  Chemically synthesized
uuucuuuuuaaacuuggauccug

SEQ ID NO: 32769 - RNA, 23 nt, Artificial Sequence
  Chemically synthesized
uucuuuuuaaacuuggauccuga

SEQ ID NO: 32770 - RNA, 23 nt, Artificial Sequence
  Chemically synthesized
ucuuuuuaaacuuggauccugag

SEQ ID NO: 32771 - RNA, 23 nt, Artificial Sequence
  Chemically synthesized
ccuuugucuugguuuaauucuug

SEQ ID NO: 32772 - RNA, 23 nt, Artificial Sequence
  Chemically synthesized
aagaaaggcaguaauuuaguugg

SEQ ID NO: 32773 - RNA, 23 nt, Artificial Sequence
  Chemically synthesized
agaaaggcaguaauuuaguuggg

SEQ ID NO: 32774 - RNA, 23 nt, Artificial Sequence
  Chemically synthesized
gaaaggcaguaauuuaguugggc

SEQ ID NO: 32775 - RNA, 23 nt, Artificial Sequence
  Chemically synthesized
aaaggcaguaauuuaguugggcu

SEQ ID NO: 32776 - RNA, 23 nt, Artificial Sequence
  Chemically synthesized
aaggcaguaauuuaguugggcug

SEQ ID NO: 32777 - RNA, 23 nt, Artificial Sequence
  Chemically synthesized
ucuaauggugaauucuucaaucc

SEQ ID NO: 32778 - RNA, 23 nt, Artificial Sequence
  Chemically synthesized
cuaauggugaauucuucaauccu

SEQ ID NO: 32779 - RNA, 23 nt, Artificial Sequence
  Chemically synthesized
uaauggugaauucuucaauccuu

SEQ ID NO: 32780 - RNA, 23 nt, Artificial Sequence
  Chemically synthesized
aauggugaauucuucaauccuuc

SEQ ID NO: 32781 - RNA, 23 nt, Artificial Sequence
  Chemically synthesized
auggugaauucuucaauccuuca

SEQ ID NO: 32782 - RNA, 23 nt, Artificial Sequence
  Chemically synthesized
gguuuaauucuuggguacagucc

SEQ ID NO: 32783 - RNA, 23 nt, Artificial Sequence
  Chemically synthesized
guuuaauucuuggguacaguccc

SEQ ID NO: 32784 - RNA, 23 nt, Artificial Sequence
  Chemically synthesized
uuuaauucuuggguacaguccca

SEQ ID NO: 32785 - RNA, 23 nt, Artificial Sequence
  Chemically synthesized
uuaauucuuggguacagucccag

SEQ ID NO: 32786 - RNA, 23 nt, Artificial Sequence
  Chemically synthesized
uaauucuuggguacagucccagc

SEQ ID NO: 32787 - RNA, 23 nt, Artificial Sequence
  Chemically synthesized
uuucaucuucgucuucccugugg

SEQ ID NO: 32788 - RNA, 23 nt, Artificial Sequence
  Chemically synthesized
uucaucuucgucuucccugugga

SEQ ID NO: 32789 - RNA, 23 nt, Artificial Sequence
  Chemically synthesized
ucaucuucgucuucccuguggau

SEQ ID NO: 32790 - RNA, 23 nt, Artificial Sequence
  Chemically synthesized
caucuucgucuucccuguggaug

SEQ ID NO: 32791 - RNA, 23 nt, Artificial Sequence
  Chemically synthesized
aucuucgucuucccuguggauga

SEQ ID NO: 32792 - RNA, 23 nt, Artificial Sequence
  Chemically synthesized
ugacuuggauggguaugauggga

SEQ ID NO: 32793 - RNA, 23 nt, Artificial Sequence
  Chemically synthesized
gacuuggauggguaugaugggac

SEQ ID NO: 32794 - RNA, 23 nt, Artificial Sequence
  Chemically synthesized
acuuggauggguaugaugggaca

SEQ ID NO: 32795 - RNA, 23 nt, Artificial Sequence
  Chemically synthesized
cuuggauggguaugaugggacag

SEQ ID NO: 32796 - RNA, 23 nt, Artificial Sequence
  Chemically synthesized
uuggauggguaugaugggacaga

SEQ ID NO: 32797 - RNA, 23 nt, Artificial Sequence
  Chemically synthesized
cugguaugagucuuggucaacgc

SEQ ID NO: 32798 - RNA, 23 nt, Artificial Sequence
  Chemically synthesized
ugguaugagucuuggucaacgcg

SEQ ID NO: 32799 - RNA, 23 nt, Artificial Sequence
  Chemically synthesized
gguaugagucuuggucaacgcgc

SEQ ID NO: 32800 - RNA, 23 nt, Artificial Sequence
  Chemically synthesized
guaugagucuuggucaacgcgcu

SEQ ID NO: 32801 - RNA, 23 nt, Artificial Sequence
  Chemically synthesized
uaugagucuuggucaacgcgcuc

SEQ ID NO: 32802 - RNA, 23 nt, Artificial Sequence
  Chemically synthesized
ucugaaggguggaaguaaggugu

SEQ ID NO: 32803 - RNA, 23 nt, Artificial Sequence
  Chemically synthesized
cugaaggguggaaguaagguguc

SEQ ID NO: 32804 - RNA, 23 nt, Artificial Sequence
  Chemically synthesized
ugaaggguggaaguaaggugucu

SEQ ID NO: 32805 - RNA, 23 nt, Artificial Sequence
  Chemically synthesized
gaaggguggaaguaaggugucuu

SEQ ID NO: 32806 - RNA, 23 nt, Artificial Sequence
  Chemically synthesized
aaggguggaaguaaggugucuuu

SEQ ID NO: 32807 - RNA, 23 nt, Artificial Sequence
  Chemically synthesized
ucuacaucuaauuacugguaccg

SEQ ID NO: 32808 - RNA, 23 nt, Artificial Sequence
  Chemically synthesized
cuacaucuaauuacugguaccgu

SEQ ID NO: 32809 - RNA, 23 nt, Artificial Sequence
  Chemically synthesized
uacaucuaauuacugguaccgua

SEQ ID NO: 32810 - RNA, 23 nt, Artificial Sequence
  Chemically synthesized
uuucuucucuuucucccucagcg

SEQ ID NO: 32811 - RNA, 23 nt, Artificial Sequence
  Chemically synthesized
uucuucucuuucucccucagcgg

SEQ ID NO: 32812 - RNA, 23 nt, Artificial Sequence
  Chemically synthesized
ucuucucuuucucccucagcgga

SEQ ID NO: 32813 - RNA, 23 nt, Artificial Sequence
  Chemically synthesized
cuucucuuucucccucagcggaa

SEQ ID NO: 32814 - RNA, 23 nt, Artificial Sequence
  Chemically synthesized
uucucuuucucccucagcggaac

SEQ ID NO: 32815 - RNA, 23 nt, Artificial Sequence
  Chemically synthesized
gaaguucagcaagagucagaucc

SEQ ID NO: 32816 - RNA, 23 nt, Artificial Sequence
  Chemically synthesized
aaguucagcaagagucagaucca

SEQ ID NO: 32817 - RNA, 23 nt, Artificial Sequence
  Chemically synthesized
aguucagcaagagucagauccau

SEQ ID NO: 32818 - RNA, 23 nt, Artificial Sequence
  Chemically synthesized
guucagcaagagucagauccauc

SEQ ID NO: 32819 - RNA, 23 nt, Artificial Sequence
  Chemically synthesized
uucagcaagagucagauccaucc

SEQ ID NO: 32820 - RNA, 23 nt, Artificial Sequence
  Chemically synthesized
aauaagucuugugaaauuuuugc

SEQ ID NO: 32821 - RNA, 23 nt, Artificial Sequence
  Chemically synthesized
auaagucuugugaaauuuuugcc

SEQ ID NO: 32822 - RNA, 23 nt, Artificial Sequence
  Chemically synthesized
uaagucuugugaaauuuuugcca

SEQ ID NO: 32823 - RNA, 23 nt, Artificial Sequence
  Chemically synthesized
aagucuugugaaauuuuugccaa

SEQ ID NO: 32824 - RNA, 23 nt, Artificial Sequence
  Chemically synthesized
agucuugugaaauuuuugccaaa

SEQ ID NO: 32825 - RNA, 23 nt, Artificial Sequence
  Chemically synthesized
gucuugugaaauuuuugccaaaa

SEQ ID NO: 32826 - RNA, 23 nt, Artificial Sequence
  Chemically synthesized
cuugguuuaauucuuggguacag

SEQ ID NO: 32827 - RNA, 23 nt, Artificial Sequence
  Chemically synthesized
uugguuuaauucuuggguacagu

SEQ ID NO: 32828 - RNA, 23 nt, Artificial Sequence
  Chemically synthesized
ugguuuaauucuuggguacaguc

SEQ ID NO: 32829 - RNA, 23 nt, Artificial Sequence
  Chemically synthesized
ucccaaagcgcauaaaugacucc

SEQ ID NO: 32830 - RNA, 23 nt, Artificial Sequence
  Chemically synthesized
cccaaagcgcauaaaugacuccu

SEQ ID NO: 32831 - RNA, 23 nt, Artificial Sequence
  Chemically synthesized
ccaaagcgcauaaaugacuccuu

SEQ ID NO: 32832 - RNA, 23 nt, Artificial Sequence
  Chemically synthesized
caaagcgcauaaaugacuccuuu

SEQ ID NO: 32833 - RNA, 23 nt, Artificial Sequence
  Chemically synthesized
aaagcgcauaaaugacuccuuua

SEQ ID NO: 32834 - RNA, 23 nt, Artificial Sequence
  Chemically synthesized
accaaaaacuuacacacuuggac

SEQ ID NO: 32835 - RNA, 23 nt, Artificial Sequence
  Chemically synthesized
ccaaaaacuuacacacuuggacg

SEQ ID NO: 32836 - RNA, 23 nt, Artificial Sequence
  Chemically synthesized
caaaaacuuacacacuuggacgu

SEQ ID NO: 32837 - RNA, 23 nt, Artificial Sequence
  Chemically synthesized
aaaaacuuacacacuuggacguu

SEQ ID NO: 32838 - RNA, 23 nt, Artificial Sequence
  Chemically synthesized
aaaacuuacacacuuggacguug

SEQ ID NO: 32839 - RNA, 23 nt, Artificial Sequence
  Chemically synthesized
ucuguacaaggucaaauucuccc

SEQ ID NO: 32840 - RNA, 23 nt, Artificial Sequence
  Chemically synthesized
cuguacaaggucaaauucucccu

SEQ ID NO: 32841 - RNA, 23 nt, Artificial Sequence
  Chemically synthesized
uguacaaggucaaauucucccuc

SEQ ID NO: 32842 - RNA, 23 nt, Artificial Sequence
  Chemically synthesized
guacaaggucaaauucucccucc

SEQ ID NO: 32843 - RNA, 23 nt, Artificial Sequence
  Chemically synthesized
uacaaggucaaauucucccucca

SEQ ID NO: 32844 - RNA, 23 nt, Artificial Sequence
  Chemically synthesized
gccaguuuuacgcaaguuugucc

SEQ ID NO: 32845 - RNA, 23 nt, Artificial Sequence
  Chemically synthesized
ccaguuuuacgcaaguuuguccu

SEQ ID NO: 32846 - RNA, 23 nt, Artificial Sequence
  Chemically synthesized
caguuuuacgcaaguuuguccuu

SEQ ID NO: 32847 - RNA, 23 nt, Artificial Sequence
  Chemically synthesized
aguuuuacgcaaguuuguccuuu

SEQ ID NO: 32848 - RNA, 23 nt, Artificial Sequence
  Chemically synthesized
guuuuacgcaaguuuguccuuuu

SEQ ID NO: 32849 - RNA, 23 nt, Artificial Sequence
  Chemically synthesized
gucacagaagcugacuuggaugg

SEQ ID NO: 32850 - RNA, 23 nt, Artificial Sequence
  Chemically synthesized
ucacagaagcugacuuggauggg

SEQ ID NO: 32851 - RNA, 23 nt, Artificial Sequence
  Chemically synthesized
cacagaagcugacuuggaugggu

SEQ ID NO: 32852 - RNA, 23 nt, Artificial Sequence
  Chemically synthesized
acagaagcugacuuggaugggua

SEQ ID NO: 32853 - RNA, 23 nt, Artificial Sequence
  Chemically synthesized
cagaagcugacuuggauggguau

SEQ ID NO: 32854 - RNA, 23 nt, Artificial Sequence
  Chemically synthesized
ccacuucugaauuacgcuuauuc

SEQ ID NO: 32855 - RNA, 23 nt, Artificial Sequence
  Chemically synthesized
cacuucugaauuacgcuuauuca

SEQ ID NO: 32856 - RNA, 23 nt, Artificial Sequence
  Chemically synthesized
acuucugaauuacgcuuauucaa

SEQ ID NO: 32857 - RNA, 23 nt, Artificial Sequence
  Chemically synthesized
cuucugaauuacgcuuauucaaa

SEQ ID NO: 32858 - RNA, 23 nt, Artificial Sequence
  Chemically synthesized
uucugaauuacgcuuauucaaac

SEQ ID NO: 32859 - RNA, 23 nt, Artificial Sequence
  Chemically synthesized
aauuauucaucuguucaauuucc

SEQ ID NO: 32860 - RNA, 23 nt, Artificial Sequence
  Chemically synthesized
auuauucaucuguucaauuuccu

SEQ ID NO: 32861 - RNA, 23 nt, Artificial Sequence
  Chemically synthesized
uuauucaucuguucaauuuccuc

SEQ ID NO: 32862 - RNA, 23 nt, Artificial Sequence
  Chemically synthesized
uauucaucuguucaauuuccucc

SEQ ID NO: 32863 - RNA, 23 nt, Artificial Sequence
  Chemically synthesized
auucaucuguucaauuuccucca

SEQ ID NO: 32864 - RNA, 23 nt, Artificial Sequence
  Chemically synthesized
uaggacuauuaacaccguucucc

SEQ ID NO: 32865 - RNA, 23 nt, Artificial Sequence
  Chemically synthesized
aggacuauuaacaccguucuccu

SEQ ID NO: 32866 - RNA, 23 nt, Artificial Sequence
  Chemically synthesized
ggacuauuaacaccguucuccuu

SEQ ID NO: 32867 - RNA, 23 nt, Artificial Sequence
  Chemically synthesized
gacuauuaacaccguucuccuuu

SEQ ID NO: 32868 - RNA, 23 nt, Artificial Sequence
  Chemically synthesized
acuauuaacaccguucuccuuuc

SEQ ID NO: 32869 - RNA, 23 nt, Artificial Sequence
  Chemically synthesized
cuauuaacaccguucuccuuucu

SEQ ID NO: 32870 - RNA, 23 nt, Artificial Sequence
  Chemically synthesized
uauuaacaccguucuccuuucuu

SEQ ID NO: 32871 - RNA, 23 nt, Artificial Sequence
  Chemically synthesized
auuaacaccguucuccuuucuuc

SEQ ID NO: 32872 - RNA, 23 nt, Artificial Sequence
  Chemically synthesized
uuaacaccguucuccuuucuucg

SEQ ID NO: 32873 - RNA, 23 nt, Artificial Sequence
  Chemically synthesized
cuaauuucugagauacaaaagac

SEQ ID NO: 32874 - RNA, 23 nt, Artificial Sequence
  Chemically synthesized
uaauuucugagauacaaaagaca

SEQ ID NO: 32875 - RNA, 23 nt, Artificial Sequence
  Chemically synthesized
aauuucugagauacaaaagacaa

SEQ ID NO: 32876 - RNA, 23 nt, Artificial Sequence
  Chemically synthesized
auuucugagauacaaaagacaau

SEQ ID NO: 32877 - RNA, 23 nt, Artificial Sequence
  Chemically synthesized
uuucugagauacaaaagacaaua

SEQ ID NO: 32878 - RNA, 23 nt, Artificial Sequence
  Chemically synthesized
auucgauuucaucuucgucuucc

SEQ ID NO: 32879 - RNA, 23 nt, Artificial Sequence
  Chemically synthesized
uucgauuucaucuucgucuuccc

SEQ ID NO: 32880 - RNA, 23 nt, Artificial Sequence
  Chemically synthesized
ucgauuucaucuucgucuucccu

SEQ ID NO: 32881 - RNA, 23 nt, Artificial Sequence
  Chemically synthesized
cgauuucaucuucgucuucccug

SEQ ID NO: 32882 - RNA, 23 nt, Artificial Sequence
  Chemically synthesized
gauuucaucuucgucuucccugu

SEQ ID NO: 32883 - RNA, 23 nt, Artificial Sequence
  Chemically synthesized
ccaccaaaaacuuacacacuugg

SEQ ID NO: 32884 - RNA, 23 nt, Artificial Sequence
  Chemically synthesized
caccaaaaacuuacacacuugga

SEQ ID NO: 32885 - RNA, 23 nt, Artificial Sequence
  Chemically synthesized
gaacuuaacgauuucuguguggc

SEQ ID NO: 32886 - RNA, 23 nt, Artificial Sequence
  Chemically synthesized
aacuuaacgauuucuguguggcc

SEQ ID NO: 32887 - RNA, 23 nt, Artificial Sequence
  Chemically synthesized
acuuaacgauuucuguguggccu

SEQ ID NO: 32888 - RNA, 23 nt, Artificial Sequence
  Chemically synthesized
cuuaacgauuucuguguggccug

SEQ ID NO: 32889 - RNA, 23 nt, Artificial Sequence
  Chemically synthesized
uuaacgauuucuguguggccugc

SEQ ID NO: 32890 - RNA, 23 nt, Artificial Sequence
  Chemically synthesized
acacaucaagcacauguggagcc

SEQ ID NO: 32891 - RNA, 23 nt, Artificial Sequence
  Chemically synthesized
cacaucaagcacauguggagccu

SEQ ID NO: 32892 - RNA, 23 nt, Artificial Sequence
  Chemically synthesized
acaucaagcacauguggagccuc

SEQ ID NO: 32893 - RNA, 23 nt, Artificial Sequence
  Chemically synthesized
caucaagcacauguggagccucu

SEQ ID NO: 32894 - RNA, 23 nt, Artificial Sequence
  Chemically synthesized
aucaagcacauguggagccucug

SEQ ID NO: 32895 - RNA, 23 nt, Artificial Sequence
  Chemically synthesized
cugacuuggauggguaugauggg

SEQ ID NO: 32896 - RNA, 23 nt, Artificial Sequence
  Chemically synthesized
uggauggguaugaugggacagag

SEQ ID NO: 32897 - RNA, 23 nt, Artificial Sequence
  Chemically synthesized
uggguaugaugggacagagaugg

SEQ ID NO: 32898 - RNA, 23 nt, Artificial Sequence
  Chemically synthesized
ggguaugaugggacagagauggu

SEQ ID NO: 32899 - RNA, 23 nt, Artificial Sequence
  Chemically synthesized
gguaugaugggacagagaugguc

SEQ ID NO: 32900 - RNA, 23 nt, Artificial Sequence
  Chemically synthesized
guaugaugggacagagauggucu

SEQ ID NO: 32901 - RNA, 23 nt, Artificial Sequence
  Chemically synthesized
uaugaugggacagagauggucuc

SEQ ID NO: 32902 - RNA, 23 nt, Artificial Sequence
  Chemically synthesized
uaagaaaggcaguaauuuaguug

SEQ ID NO: 32903 - RNA, 23 nt, Artificial Sequence
  Chemically synthesized
gaggaauucuuucguuuucaugg

SEQ ID NO: 32904 - RNA, 23 nt, Artificial Sequence
  Chemically synthesized
aggaauucuuucguuuucauggu

SEQ ID NO: 32905 - RNA, 23 nt, Artificial Sequence
  Chemically synthesized
ggaauucuuucguuuucaugguu

SEQ ID NO: 32906 - RNA, 23 nt, Artificial Sequence
  Chemically synthesized
gaauucuuucguuuucaugguuc

SEQ ID NO: 32907 - RNA, 23 nt, Artificial Sequence
  Chemically synthesized
aauucuuucguuuucaugguucu

SEQ ID NO: 32908 - RNA, 23 nt, Artificial Sequence
  Chemically synthesized
agccuuuaguuugugaagcagcc

SEQ ID NO: 32909 - RNA, 23 nt, Artificial Sequence
  Chemically synthesized
gccuuuaguuugugaagcagccc

SEQ ID NO: 32910 - RNA, 23 nt, Artificial Sequence
  Chemically synthesized
ccuuuaguuugugaagcagcccc

SEQ ID NO: 32911 - RNA, 23 nt, Artificial Sequence
  Chemically synthesized
cuuuaguuugugaagcagcccca

SEQ ID NO: 32912 - RNA, 23 nt, Artificial Sequence
  Chemically synthesized
uuuaguuugugaagcagccccag

SEQ ID NO: 32913 - RNA, 23 nt, Artificial Sequence
  Chemically synthesized
uagauuuucuuuuugcuguagag

SEQ ID NO: 32914 - RNA, 23 nt, Artificial Sequence
  Chemically synthesized
agauuuucuuuuugcuguagagc

SEQ ID NO: 32915 - RNA, 23 nt, Artificial Sequence
  Chemically synthesized
gauuuucuuuuugcuguagagcu

SEQ ID NO: 32916 - RNA, 23 nt, Artificial Sequence
  Chemically synthesized
auuuucuuuuugcuguagagcug

SEQ ID NO: 32917 - RNA, 23 nt, Artificial Sequence
  Chemically synthesized
uuuucuuuuugcuguagagcugc

SEQ ID NO: 32918 - RNA, 23 nt, Artificial Sequence
  Chemically synthesized
uaacaccguucuccuuucuucga

SEQ ID NO: 32919 - RNA, 23 nt, Artificial Sequence
  Chemically synthesized
uaaauacagauuaaaauucagcc

SEQ ID NO: 32920 - RNA, 23 nt, Artificial Sequence
  Chemically synthesized
aaauacagauuaaaauucagccu

SEQ ID NO: 32921 - RNA, 23 nt, Artificial Sequence
  Chemically synthesized
aauacagauuaaaauucagccua

SEQ ID NO: 32922 - RNA, 23 nt, Artificial Sequence
  Chemically synthesized
auacagauuaaaauucagccuac

SEQ ID NO: 32923 - RNA, 23 nt, Artificial Sequence
  Chemically synthesized
uacagauuaaaauucagccuaca

SEQ ID NO: 32924 - RNA, 23 nt, Artificial Sequence
  Chemically synthesized
gugaauucuucaauccuucauuc

SEQ ID NO: 32925 - RNA, 23 nt, Artificial Sequence
  Chemically synthesized
ugaauucuucaauccuucauucu

SEQ ID NO: 32926 - RNA, 23 nt, Artificial Sequence
  Chemically synthesized
gaauucuucaauccuucauucuc

SEQ ID NO: 32927 - RNA, 23 nt, Artificial Sequence
  Chemically synthesized
aauucuucaauccuucauucucu

SEQ ID NO: 32928 - RNA, 23 nt, Artificial Sequence
  Chemically synthesized
auucuucaauccuucauucucuu

SEQ ID NO: 32929 - RNA, 23 nt, Artificial Sequence
  Chemically synthesized
caucauucugagguucauaaucc

SEQ ID NO: 32930 - RNA, 23 nt, Artificial Sequence
  Chemically synthesized
aucauucugagguucauaauccc

SEQ ID NO: 32931 - RNA, 23 nt, Artificial Sequence
  Chemically synthesized
ucauucugagguucauaauccca

SEQ ID NO: 32932 - RNA, 23 nt, Artificial Sequence
  Chemically synthesized
cauucugagguucauaaucccaa

SEQ ID NO: 32933 - RNA, 23 nt, Artificial Sequence
  Chemically synthesized
auucugagguucauaaucccaaa

SEQ ID NO: 32934 - RNA, 23 nt, Artificial Sequence
  Chemically synthesized
aaugacuccuuuauucauuaugc

SEQ ID NO: 32935 - RNA, 23 nt, Artificial Sequence
  Chemically synthesized
augacuccuuuauucauuaugcc

SEQ ID NO: 32936 - RNA, 23 nt, Artificial Sequence
  Chemically synthesized
ugacuccuuuauucauuaugccc

SEQ ID NO: 32937 - RNA, 23 nt, Artificial Sequence
  Chemically synthesized
gacuccuuuauucauuaugccca

SEQ ID NO: 32938 - RNA, 23 nt, Artificial Sequence
  Chemically synthesized
acuccuuuauucauuaugcccau

SEQ ID NO: 32939 - RNA, 23 nt, Artificial Sequence
  Chemically synthesized
caggaacuuaacgauuucugugu

SEQ ID NO: 32940 - RNA, 23 nt, Artificial Sequence
  Chemically synthesized
aggaacuuaacgauuucugugug

SEQ ID NO: 32941 - RNA, 23 nt, Artificial Sequence
  Chemically synthesized
ggaacuuaacgauuucugugugg

SEQ ID NO: 32942 - RNA, 23 nt, Artificial Sequence
  Chemically synthesized
acaaggucaaauucucccuccaa

SEQ ID NO: 32943 - RNA, 23 nt, Artificial Sequence
  Chemically synthesized
caaggucaaauucucccuccaaa

SEQ ID NO: 32944 - RNA, 23 nt, Artificial Sequence
  Chemically synthesized
aaggucaaauucucccuccaaag

SEQ ID NO: 32945 - RNA, 23 nt, Artificial Sequence
  Chemically synthesized
agaagcugacuuggauggguaug

SEQ ID NO: 32946 - RNA, 23 nt, Artificial Sequence
  Chemically synthesized
guugaagaacaucaaacauucgc

SEQ ID NO: 32947 - RNA, 23 nt, Artificial Sequence
  Chemically synthesized
uugaagaacaucaaacauucgcu

SEQ ID NO: 32948 - RNA, 23 nt, Artificial Sequence
  Chemically synthesized
ugaagaacaucaaacauucgcuc

SEQ ID NO: 32949 - RNA, 23 nt, Artificial Sequence
  Chemically synthesized
gaagaacaucaaacauucgcuca

SEQ ID NO: 32950 - RNA, 23 nt, Artificial Sequence
  Chemically synthesized
aagaacaucaaacauucgcucau

SEQ ID NO: 32951 - RNA, 23 nt, Artificial Sequence
  Chemically synthesized
aggcaguaauuuaguugggcuga

SEQ ID NO: 32952 - RNA, 23 nt, Artificial Sequence
  Chemically synthesized
uucuuucguuuucaugguucucc

SEQ ID NO: 32953 - RNA, 23 nt, Artificial Sequence
  Chemically synthesized
ucuuucguuuucaugguucuccu

SEQ ID NO: 32954 - RNA, 23 nt, Artificial Sequence
  Chemically synthesized
cuuucguuuucaugguucuccug

SEQ ID NO: 32955 - RNA, 23 nt, Artificial Sequence
  Chemically synthesized
uuucguuuucaugguucuccuga

SEQ ID NO: 32956 - RNA, 23 nt, Artificial Sequence
  Chemically synthesized
uucguuuucaugguucuccugaa

SEQ ID NO: 32957 - RNA, 23 nt, Artificial Sequence
  Chemically synthesized
uggaauaaauguucucugggugc

SEQ ID NO: 32958 - RNA, 23 nt, Artificial Sequence
  Chemically synthesized
ggaauaaauguucucugggugcu

SEQ ID NO: 32959 - RNA, 23 nt, Artificial Sequence
  Chemically synthesized
gaauaaauguucucugggugcug

SEQ ID NO: 32960 - RNA, 23 nt, Artificial Sequence
  Chemically synthesized
aauaaauguucucugggugcugc

SEQ ID NO: 32961 - RNA, 23 nt, Artificial Sequence
  Chemically synthesized
auaaauguucucugggugcugcu

SEQ ID NO: 32962 - RNA, 23 nt, Artificial Sequence
  Chemically synthesized
uucugaaggguggaaguaaggug

SEQ ID NO: 32963 - RNA, 23 nt, Artificial Sequence
  Chemically synthesized
gauuaguuuguccaaaauaaggc

SEQ ID NO: 32964 - RNA, 23 nt, Artificial Sequence
  Chemically synthesized
auuaguuuguccaaaauaaggca

SEQ ID NO: 32965 - RNA, 23 nt, Artificial Sequence
  Chemically synthesized
uuaguuuguccaaaauaaggcaa

SEQ ID NO: 32966 - RNA, 23 nt, Artificial Sequence
  Chemically synthesized
uaguuuguccaaaauaaggcaaa

SEQ ID NO: 32967 - RNA, 23 nt, Artificial Sequence
  Chemically synthesized
aguuuguccaaaauaaggcaaau

SEQ ID NO: 32968 - RNA, 23 nt, Artificial Sequence
  Chemically synthesized
gcaagauaucuucacugcucugg

SEQ ID NO: 32969 - RNA, 23 nt, Artificial Sequence
  Chemically synthesized
caagauaucuucacugcucuggu

SEQ ID NO: 32970 - RNA, 23 nt, Artificial Sequence
  Chemically synthesized
aagauaucuucacugcucugguu

SEQ ID NO: 32971 - RNA, 23 nt, Artificial Sequence
  Chemically synthesized
agauaucuucacugcucugguuc

SEQ ID NO: 32972 - RNA, 23 nt, Artificial Sequence
  Chemically synthesized
gauaucuucacugcucugguucu

SEQ ID NO: 32973 - RNA, 23 nt, Artificial Sequence
  Chemically synthesized
ggaaaagaucugcauuugaagga

SEQ ID NO: 32974 - RNA, 23 nt, Artificial Sequence
  Chemically synthesized
gaaaagaucugcauuugaaggac

SEQ ID NO: 32975 - RNA, 23 nt, Artificial Sequence
  Chemically synthesized
aaaagaucugcauuugaaggacu

SEQ ID NO: 32976 - RNA, 23 nt, Artificial Sequence
  Chemically synthesized
aaagaucugcauuugaaggacuc

SEQ ID NO: 32977 - RNA, 23 nt, Artificial Sequence
  Chemically synthesized
aagaucugcauuugaaggacucc

SEQ ID NO: 32978 - RNA, 23 nt, Artificial Sequence
  Chemically synthesized
cauauuguuucuggaguaacugg

SEQ ID NO: 32979 - RNA, 23 nt, Artificial Sequence
  Chemically synthesized
auauuguuucuggaguaacugga

SEQ ID NO: 32980 - RNA, 23 nt, Artificial Sequence
  Chemically synthesized
uauuguuucuggaguaacuggaa

SEQ ID NO: 32981 - RNA, 23 nt, Artificial Sequence
  Chemically synthesized
auuguuucuggaguaacuggaac

SEQ ID NO: 32982 - RNA, 23 nt, Artificial Sequence
  Chemically synthesized
uuguuucuggaguaacuggaacu

SEQ ID NO: 32983 - RNA, 23 nt, Artificial Sequence
  Chemically synthesized
cauucugcucuugauucaauuug

SEQ ID NO: 32984 - RNA, 23 nt, Artificial Sequence
  Chemically synthesized
auucugcucuugauucaauuugu

SEQ ID NO: 32985 - RNA, 23 nt, Artificial Sequence
  Chemically synthesized
uucugcucuugauucaauuuguu

SEQ ID NO: 32986 - RNA, 23 nt, Artificial Sequence
  Chemically synthesized
ucugcucuugauucaauuuguuu

SEQ ID NO: 32987 - RNA, 23 nt, Artificial Sequence
  Chemically synthesized
cugcucuugauucaauuuguuuc

SEQ ID NO: 32988 - RNA, 23 nt, Artificial Sequence
  Chemically synthesized
ugcucuugauucaauuuguuucu

SEQ ID NO: 32989 - RNA, 23 nt, Artificial Sequence
  Chemically synthesized
guucuucuacuuuugacacagcc

SEQ ID NO: 32990 - RNA, 23 nt, Artificial Sequence
  Chemically synthesized
uucuucuacuuuugacacagcca

SEQ ID NO: 32991 - RNA, 23 nt, Artificial Sequence
  Chemically synthesized
ucuucuacuuuugacacagccag

SEQ ID NO: 32992 - RNA, 23 nt, Artificial Sequence
  Chemically synthesized
cuucuacuuuugacacagccagg

SEQ ID NO: 32993 - RNA, 23 nt, Artificial Sequence
  Chemically synthesized
uucuacuuuugacacagccagga

SEQ ID NO: 32994 - RNA, 23 nt, Artificial Sequence
  Chemically synthesized
cgagcucccucuguuuuugcugg

SEQ ID NO: 32995 - RNA, 23 nt, Artificial Sequence
  Chemically synthesized
gagcucccucuguuuuugcugga

SEQ ID NO: 32996 - RNA, 23 nt, Artificial Sequence
  Chemically synthesized
agcucccucuguuuuugcuggaa

SEQ ID NO: 32997 - RNA, 23 nt, Artificial Sequence
  Chemically synthesized
gcucccucuguuuuugcuggaac

SEQ ID NO: 32998 - RNA, 23 nt, Artificial Sequence
  Chemically synthesized
cucccucuguuuuugcuggaaca

SEQ ID NO: 32999 - RNA, 23 nt, Artificial Sequence
  Chemically synthesized
ucacuuuuuuuagcuuagcuucc

SEQ ID NO: 33000 - RNA, 23 nt, Artificial Sequence
  Chemically synthesized
cacuuuuuuuagcuuagcuuccu

SEQ ID NO: 33001 - RNA, 23 nt, Artificial Sequence
  Chemically synthesized
acuuuuuuuagcuuagcuuccug

SEQ ID NO: 33002 - RNA, 23 nt, Artificial Sequence
  Chemically synthesized
cuuuuuuuagcuuagcuuccuga

SEQ ID NO: 33003 - RNA, 23 nt, Artificial Sequence
  Chemically synthesized
uuuuuuuagcuuagcuuccugau

SEQ ID NO: 33004 - RNA, 23 nt, Artificial Sequence
  Chemically synthesized
cucauuguuacugagauacacgg

SEQ ID NO: 33005 - RNA, 23 nt, Artificial Sequence
  Chemically synthesized
ucauuguuacugagauacacggu

SEQ ID NO: 33006 - RNA, 23 nt, Artificial Sequence
  Chemically synthesized
cauuguuacugagauacacggua

SEQ ID NO: 33007 - RNA, 23 nt, Artificial Sequence
  Chemically synthesized
auuguuacugagauacacgguaa

SEQ ID NO: 33008 - RNA, 23 nt, Artificial Sequence
  Chemically synthesized
uuguuacugagauacacgguaag

SEQ ID NO: 33009 - RNA, 23 nt, Artificial Sequence
  Chemically synthesized
acaucuaauuacugguaccguag

SEQ ID NO: 33010 - RNA, 23 nt, Artificial Sequence
  Chemically synthesized
caucuaauuacugguaccguagc

SEQ ID NO: 33011 - RNA, 23 nt, Artificial Sequence
  Chemically synthesized
guagaugcuuuauuucaucacgc

SEQ ID NO: 33012 - RNA, 23 nt, Artificial Sequence
  Chemically synthesized
uagaugcuuuauuucaucacgcu

SEQ ID NO: 33013 - RNA, 23 nt, Artificial Sequence
  Chemically synthesized
agaugcuuuauuucaucacgcua

SEQ ID NO: 33014 - RNA, 23 nt, Artificial Sequence
  Chemically synthesized
gaugcuuuauuucaucacgcuaa

SEQ ID NO: 33015 - RNA, 23 nt, Artificial Sequence
  Chemically synthesized
augcuuuauuucaucacgcuaaa

SEQ ID NO: 33016 - RNA, 23 nt, Artificial Sequence
  Chemically synthesized
uucuucaauccuucauucucuuc

SEQ ID NO: 33017 - RNA, 23 nt, Artificial Sequence
  Chemically synthesized
ucuucaauccuucauucucuucu

SEQ ID NO: 33018 - RNA, 23 nt, Artificial Sequence
  Chemically synthesized
cuucaauccuucauucucuucua

SEQ ID NO: 33019 - RNA, 23 nt, Artificial Sequence
  Chemically synthesized
cauuuacauuuacaccaaacugu

SEQ ID NO: 33020 - RNA, 23 nt, Artificial Sequence
  Chemically synthesized
auuuacauuuacaccaaacugua

SEQ ID NO: 33021 - RNA, 23 nt, Artificial Sequence
  Chemically synthesized
uuuacauuuacaccaaacuguac

SEQ ID NO: 33022 - RNA, 23 nt, Artificial Sequence
  Chemically synthesized
uuacauuuacaccaaacuguacc

SEQ ID NO: 33023 - RNA, 23 nt, Artificial Sequence
  Chemically synthesized
uacauuuacaccaaacuguacca

SEQ ID NO: 33024 - RNA, 23 nt, Artificial Sequence
  Chemically synthesized
aaauaauucucuguacaagguca

SEQ ID NO: 33025 - RNA, 23 nt, Artificial Sequence
  Chemically synthesized
aauaauucucuguacaaggucaa

SEQ ID NO: 33026 - RNA, 23 nt, Artificial Sequence
  Chemically synthesized
auaauucucuguacaaggucaaa

SEQ ID NO: 33027 - RNA, 23 nt, Artificial Sequence
  Chemically synthesized
uaauucucuguacaaggucaaau

SEQ ID NO: 33028 - RNA, 23 nt, Artificial Sequence
  Chemically synthesized
aauucucuguacaaggucaaauu

SEQ ID NO: 33029 - RNA, 23 nt, Artificial Sequence
  Chemically synthesized
acgcaaguuuguccuuuuaccag

SEQ ID NO: 33030 - RNA, 23 nt, Artificial Sequence
  Chemically synthesized
cgcaaguuuguccuuuuaccagg

SEQ ID NO: 33031 - RNA, 23 nt, Artificial Sequence
  Chemically synthesized
gcaaguuuguccuuuuaccagga

SEQ ID NO: 33032 - RNA, 23 nt, Artificial Sequence
  Chemically synthesized
caaguuuguccuuuuaccaggag

SEQ ID NO: 33033 - RNA, 23 nt, Artificial Sequence
  Chemically synthesized
aaguuuguccuuuuaccaggagg

SEQ ID NO: 33034 - RNA, 23 nt, Artificial Sequence
  Chemically synthesized
uggguuauucuggagauuugggc

SEQ ID NO: 33035 - RNA, 23 nt, Artificial Sequence
  Chemically synthesized
ggguuauucuggagauuugggcu

SEQ ID NO: 33036 - RNA, 23 nt, Artificial Sequence
  Chemically synthesized
gguuauucuggagauuugggcug

SEQ ID NO: 33037 - RNA, 23 nt, Artificial Sequence
  Chemically synthesized
guuauucuggagauuugggcugu

SEQ ID NO: 33038 - RNA, 23 nt, Artificial Sequence
  Chemically synthesized
uuauucuggagauuugggcuguu

SEQ ID NO: 33039 - RNA, 23 nt, Artificial Sequence
  Chemically synthesized
gaagcugacuuggauggguauga

SEQ ID NO: 33040 - RNA, 23 nt, Artificial Sequence
  Chemically synthesized
auucuuucguuuucaugguucuc

SEQ ID NO: 33041 - RNA, 23 nt, Artificial Sequence
  Chemically synthesized
uuggaauaaauguucucugggug

SEQ ID NO: 33042 - RNA, 23 nt, Artificial Sequence
  Chemically synthesized
gguagauuuucuuuuugcuguag

SEQ ID NO: 33043 - RNA, 23 nt, Artificial Sequence
  Chemically synthesized
guagauuuucuuuuugcuguaga

SEQ ID NO: 33044 - RNA, 23 nt, Artificial Sequence
  Chemically synthesized
uucaauuuguuucuuagcugcag

SEQ ID NO: 33045 - RNA, 23 nt, Artificial Sequence
  Chemically synthesized
ucaauuuguuucuuagcugcagc

SEQ ID NO: 33046 - RNA, 23 nt, Artificial Sequence
  Chemically synthesized
caauuuguuucuuagcugcagcu

SEQ ID NO: 33047 - RNA, 23 nt, Artificial Sequence
  Chemically synthesized
aauuuguuucuuagcugcagcuc

SEQ ID NO: 33048 - RNA, 23 nt, Artificial Sequence
  Chemically synthesized
auuuguuucuuagcugcagcucc

SEQ ID NO: 33049 - RNA, 23 nt, Artificial Sequence
  Chemically synthesized
uuuguuucuuagcugcagcuccu

SEQ ID NO: 33050 - RNA, 23 nt, Artificial Sequence
  Chemically synthesized
uuuuuuagcuuagcuuccugauu

SEQ ID NO: 33051 - RNA, 23 nt, Artificial Sequence
  Chemically synthesized
uuuuuagcuuagcuuccugauuc

SEQ ID NO: 33052 - RNA, 23 nt, Artificial Sequence
  Chemically synthesized
cagcaacuuguugcuguugucgc

SEQ ID NO: 33053 - RNA, 23 nt, Artificial Sequence
  Chemically synthesized
agcaacuuguugcuguugucgcu

SEQ ID NO: 33054 - RNA, 23 nt, Artificial Sequence
  Chemically synthesized
gcaacuuguugcuguugucgcug

SEQ ID NO: 33055 - RNA, 23 nt, Artificial Sequence
  Chemically synthesized
caacuuguugcuguugucgcuga

SEQ ID NO: 33056 - RNA, 23 nt, Artificial Sequence
  Chemically synthesized
aacuuguugcuguugucgcugau

SEQ ID NO: 33057 - RNA, 23 nt, Artificial Sequence
  Chemically synthesized
augaucuugacaaauauuacggg

SEQ ID NO: 33058 - RNA, 23 nt, Artificial Sequence
  Chemically synthesized
ugaucuugacaaauauuacgggu

SEQ ID NO: 33059 - RNA, 23 nt, Artificial Sequence
  Chemically synthesized
gaucuugacaaauauuacgggua

SEQ ID NO: 33060 - RNA, 23 nt, Artificial Sequence
  Chemically synthesized
aucuugacaaauauuacggguaa

SEQ ID NO: 33061 - RNA, 23 nt, Artificial Sequence
  Chemically synthesized
ucuugacaaauauuacggguaag

SEQ ID NO: 33062 - RNA, 23 nt, Artificial Sequence
  Chemically synthesized
uggugaauucuucaauccuucau

SEQ ID NO: 33063 - RNA, 23 nt, Artificial Sequence
  Chemically synthesized
ggugaauucuucaauccuucauu

SEQ ID NO: 33064 - RNA, 23 nt, Artificial Sequence
  Chemically synthesized
ucuugugaaauuuuugccaaaaa

SEQ ID NO: 33065 - RNA, 23 nt, Artificial Sequence
  Chemically synthesized
uucauugacuaaaauucugugug

SEQ ID NO: 33066 - RNA, 23 nt, Artificial Sequence
  Chemically synthesized
ucauugacuaaaauucugugugg

SEQ ID NO: 33067 - RNA, 23 nt, Artificial Sequence
  Chemically synthesized
cauugacuaaaauucugugugga

SEQ ID NO: 33068 - RNA, 23 nt, Artificial Sequence
  Chemically synthesized
auugacuaaaauucuguguggaa

SEQ ID NO: 33069 - RNA, 23 nt, Artificial Sequence
  Chemically synthesized
uugacuaaaauucuguguggaag

SEQ ID NO: 33070 - RNA, 23 nt, Artificial Sequence
  Chemically synthesized
ugacuaaaauucuguguggaagu

SEQ ID NO: 33071 - RNA, 23 nt, Artificial Sequence
  Chemically synthesized
aagcgcauaaaugacuccuuuau

SEQ ID NO: 33072 - RNA, 23 nt, Artificial Sequence
  Chemically synthesized
cuccuuuauucauuaugcccauc

SEQ ID NO: 33073 - RNA, 23 nt, Artificial Sequence
  Chemically synthesized
aaacuuacacacuuggacguugu

SEQ ID NO: 33074 - RNA, 23 nt, Artificial Sequence
  Chemically synthesized
aacuuacacacuuggacguuguu

SEQ ID NO: 33075 - RNA, 23 nt, Artificial Sequence
  Chemically synthesized
auaaauaauucucuguacaaggu

SEQ ID NO: 33076 - RNA, 23 nt, Artificial Sequence
  Chemically synthesized
uaaauaauucucuguacaagguc

SEQ ID NO: 33077 - RNA, 23 nt, Artificial Sequence
  Chemically synthesized
gggguugaauuucacccucauuc

SEQ ID NO: 33078 - RNA, 23 nt, Artificial Sequence
  Chemically synthesized
ggguugaauuucacccucauucc

SEQ ID NO: 33079 - RNA, 23 nt, Artificial Sequence
  Chemically synthesized
gguugaauuucacccucauucca

SEQ ID NO: 33080 - RNA, 23 nt, Artificial Sequence
  Chemically synthesized
guugaauuucacccucauuccau

SEQ ID NO: 33081 - RNA, 23 nt, Artificial Sequence
  Chemically synthesized
uugaauuucacccucauuccaug

SEQ ID NO: 33082 - RNA, 23 nt, Artificial Sequence
  Chemically synthesized
uacgcucugagccaguuuuacgc

SEQ ID NO: 33083 - RNA, 23 nt, Artificial Sequence
  Chemically synthesized
acgcucugagccaguuuuacgca

SEQ ID NO: 33084 - RNA, 23 nt, Artificial Sequence
  Chemically synthesized
cgcucugagccaguuuuacgcaa

SEQ ID NO: 33085 - RNA, 23 nt, Artificial Sequence
  Chemically synthesized
gcucugagccaguuuuacgcaag

SEQ ID NO: 33086 - RNA, 23 nt, Artificial Sequence
  Chemically synthesized
cucugagccaguuuuacgcaagu

SEQ ID NO: 33087 - RNA, 23 nt, Artificial Sequence
  Chemically synthesized
ccacauguaaauauggauucugg

SEQ ID NO: 33088 - RNA, 23 nt, Artificial Sequence
  Chemically synthesized
cacauguaaauauggauucugga

SEQ ID NO: 33089 - RNA, 23 nt, Artificial Sequence
  Chemically synthesized
acauguaaauauggauucuggau

SEQ ID NO: 33090 - RNA, 23 nt, Artificial Sequence
  Chemically synthesized
cauguaaauauggauucuggauu

SEQ ID NO: 33091 - RNA, 23 nt, Artificial Sequence
  Chemically synthesized
auguaaauauggauucuggauuu

SEQ ID NO: 33092 - RNA, 23 nt, Artificial Sequence
  Chemically synthesized
auaaaagcuucugaauauuuggc

SEQ ID NO: 33093 - RNA, 23 nt, Artificial Sequence
  Chemically synthesized
uaaaagcuucugaauauuuggcc

SEQ ID NO: 33094 - RNA, 23 nt, Artificial Sequence
  Chemically synthesized
aaaagcuucugaauauuuggccc

SEQ ID NO: 33095 - RNA, 23 nt, Artificial Sequence
  Chemically synthesized
aaagcuucugaauauuuggccca

SEQ ID NO: 33096 - RNA, 23 nt, Artificial Sequence
  Chemically synthesized
aagcuucugaauauuuggcccau

SEQ ID NO: 33097 - RNA, 23 nt, Artificial Sequence
  Chemically synthesized
agauaagaaaggcaguaauuuag

SEQ ID NO: 33098 - RNA, 23 nt, Artificial Sequence
  Chemically synthesized
gauaagaaaggcaguaauuuagu

SEQ ID NO: 33099 - RNA, 23 nt, Artificial Sequence
  Chemically synthesized
auaagaaaggcaguaauuuaguu

SEQ ID NO: 33100 - RNA, 23 nt, Artificial Sequence
  Chemically synthesized
ccuggcuauuggaauaaauguuc

SEQ ID NO: 33101 - RNA, 23 nt, Artificial Sequence
  Chemically synthesized
cuggcuauuggaauaaauguucu

SEQ ID NO: 33102 - RNA, 23 nt, Artificial Sequence
  Chemically synthesized
uggcuauuggaauaaauguucuc

SEQ ID NO: 33103 - RNA, 23 nt, Artificial Sequence
  Chemically synthesized
ggcuauuggaauaaauguucucu

SEQ ID NO: 33104 - RNA, 23 nt, Artificial Sequence
  Chemically synthesized
gcuauuggaauaaauguucucug

SEQ ID NO: 33105 - RNA, 23 nt, Artificial Sequence
  Chemically synthesized
uaaauguucucugggugcugcug

SEQ ID NO: 33106 - RNA, 23 nt, Artificial Sequence
  Chemically synthesized
cugggugcugcuguugauucugg

SEQ ID NO: 33107 - RNA, 23 nt, Artificial Sequence
  Chemically synthesized
ugggugcugcuguugauucuggg

SEQ ID NO: 33108 - RNA, 23 nt, Artificial Sequence
  Chemically synthesized
gggugcugcuguugauucugggc

SEQ ID NO: 33109 - RNA, 23 nt, Artificial Sequence
  Chemically synthesized
ggugcugcuguugauucugggca

SEQ ID NO: 33110 - RNA, 23 nt, Artificial Sequence
  Chemically synthesized
gugcugcuguugauucugggcag

SEQ ID NO: 33111 - RNA, 23 nt, Artificial Sequence
  Chemically synthesized
augagucuuggucaacgcgcucu

SEQ ID NO: 33112 - RNA, 23 nt, Artificial Sequence
  Chemically synthesized
auggaauauauugaacuugcugc

SEQ ID NO: 33113 - RNA, 23 nt, Artificial Sequence
  Chemically synthesized
uggaauauauugaacuugcugcc

SEQ ID NO: 33114 - RNA, 23 nt, Artificial Sequence
  Chemically synthesized
ggaauauauugaacuugcugcca

SEQ ID NO: 33115 - RNA, 23 nt, Artificial Sequence
  Chemically synthesized
gaauauauugaacuugcugccac

SEQ ID NO: 33116 - RNA, 23 nt, Artificial Sequence
  Chemically synthesized
aauauauugaacuugcugccacg

SEQ ID NO: 33117 - RNA, 23 nt, Artificial Sequence
  Chemically synthesized
ugagaacggacgcacuuucuucu

SEQ ID NO: 33118 - RNA, 23 nt, Artificial Sequence
  Chemically synthesized
gagaacggacgcacuuucuucuc

SEQ ID NO: 33119 - RNA, 23 nt, Artificial Sequence
  Chemically synthesized
agaacggacgcacuuucuucucu

SEQ ID NO: 33120 - RNA, 23 nt, Artificial Sequence
  Chemically synthesized
gaacggacgcacuuucuucucuu

SEQ ID NO: 33121 - RNA, 23 nt, Artificial Sequence
  Chemically synthesized
aacggacgcacuuucuucucuuu

SEQ ID NO: 33122 - RNA, 23 nt, Artificial Sequence
  Chemically synthesized
gagguacagaagcagagccuugg

SEQ ID NO: 33123 - RNA, 23 nt, Artificial Sequence
  Chemically synthesized
agguacagaagcagagccuuggc

SEQ ID NO: 33124 - RNA, 23 nt, Artificial Sequence
  Chemically synthesized
gguacagaagcagagccuuggcu

SEQ ID NO: 33125 - RNA, 23 nt, Artificial Sequence
  Chemically synthesized
guacagaagcagagccuuggcuu

SEQ ID NO: 33126 - RNA, 23 nt, Artificial Sequence
  Chemically synthesized
uacagaagcagagccuuggcuug

SEQ ID NO: 33127 - RNA, 23 nt, Artificial Sequence
  Chemically synthesized
cugcauuugaaggacuccaauca

SEQ ID NO: 33128 - RNA, 23 nt, Artificial Sequence
  Chemically synthesized
ugcauuugaaggacuccaaucag

SEQ ID NO: 33129 - RNA, 23 nt, Artificial Sequence
  Chemically synthesized
gcauuugaaggacuccaaucagg

SEQ ID NO: 33130 - RNA, 23 nt, Artificial Sequence
  Chemically synthesized
cauuugaaggacuccaaucaggg

SEQ ID NO: 33131 - RNA, 23 nt, Artificial Sequence
  Chemically synthesized
auuugaaggacuccaaucagggc

SEQ ID NO: 33132 - RNA, 23 nt, Artificial Sequence
  Chemically synthesized
uuaguuugugaagcagccccaga

SEQ ID NO: 33133 - RNA, 23 nt, Artificial Sequence
  Chemically synthesized
cuguagagcugccuucuucuucc

SEQ ID NO: 33134 - RNA, 23 nt, Artificial Sequence
  Chemically synthesized
uguagagcugccuucuucuucca

SEQ ID NO: 33135 - RNA, 23 nt, Artificial Sequence
  Chemically synthesized
guagagcugccuucuucuuccac

SEQ ID NO: 33136 - RNA, 23 nt, Artificial Sequence
  Chemically synthesized
uagagcugccuucuucuuccaca

SEQ ID NO: 33137 - RNA, 23 nt, Artificial Sequence
  Chemically synthesized
agagcugccuucuucuuccacag

SEQ ID NO: 33138 - RNA, 23 nt, Artificial Sequence
  Chemically synthesized
ucagcucauuaacacgcuuaucc

SEQ ID NO: 33139 - RNA, 23 nt, Artificial Sequence
  Chemically synthesized
cagcucauuaacacgcuuaucca

SEQ ID NO: 33140 - RNA, 23 nt, Artificial Sequence
  Chemically synthesized
agcucauuaacacgcuuauccau

SEQ ID NO: 33141 - RNA, 23 nt, Artificial Sequence
  Chemically synthesized
gcucauuaacacgcuuauccaug

SEQ ID NO: 33142 - RNA, 23 nt, Artificial Sequence
  Chemically synthesized
cucauuaacacgcuuauccauga

SEQ ID NO: 33143 - RNA, 23 nt, Artificial Sequence
  Chemically synthesized
cgcuuauucaaacacucccucug

SEQ ID NO: 33144 - RNA, 23 nt, Artificial Sequence
  Chemically synthesized
gcuuauucaaacacucccucugu

SEQ ID NO: 33145 - RNA, 23 nt, Artificial Sequence
  Chemically synthesized
cuuauucaaacacucccucuguu

SEQ ID NO: 33146 - RNA, 23 nt, Artificial Sequence
  Chemically synthesized
uuauucaaacacucccucuguug

SEQ ID NO: 33147 - RNA, 23 nt, Artificial Sequence
  Chemically synthesized
uauucaaacacucccucuguugu

SEQ ID NO: 33148 - RNA, 23 nt, Artificial Sequence
  Chemically synthesized
uucaaacacucccucuguuguug

SEQ ID NO: 33149 - RNA, 23 nt, Artificial Sequence
  Chemically synthesized
ucaaacacucccucuguuguugu

SEQ ID NO: 33150 - RNA, 23 nt, Artificial Sequence
  Chemically synthesized
caaacacucccucuguuguugua

SEQ ID NO: 33151 - RNA, 23 nt, Artificial Sequence
  Chemically synthesized
aaacacucccucuguuguuguag

SEQ ID NO: 33152 - RNA, 23 nt, Artificial Sequence
  Chemically synthesized
aacacucccucuguuguuguagc

SEQ ID NO: 33153 - RNA, 23 nt, Artificial Sequence
  Chemically synthesized
uuuuagcuuagcuuccugauucu

SEQ ID NO: 33154 - RNA, 23 nt, Artificial Sequence
  Chemically synthesized
gcuguugucgcugaucuuguugu

SEQ ID NO: 33155 - RNA, 23 nt, Artificial Sequence
  Chemically synthesized
cuguugucgcugaucuuguuguu

SEQ ID NO: 33156 - RNA, 23 nt, Artificial Sequence
  Chemically synthesized
uguugucgcugaucuuguuguuu

SEQ ID NO: 33157 - RNA, 23 nt, Artificial Sequence
  Chemically synthesized
guugucgcugaucuuguuguuuc

SEQ ID NO: 33158 - RNA, 23 nt, Artificial Sequence
  Chemically synthesized
uugucgcugaucuuguuguuuca

SEQ ID NO: 33159 - RNA, 23 nt, Artificial Sequence
  Chemically synthesized
uguuguuucaaaaacuuuaagcg

SEQ ID NO: 33160 - RNA, 23 nt, Artificial Sequence
  Chemically synthesized
guuguuucaaaaacuuuaagcgc

SEQ ID NO: 33161 - RNA, 23 nt, Artificial Sequence
  Chemically synthesized
uuguuucaaaaacuuuaagcgcu

SEQ ID NO: 33162 - RNA, 23 nt, Artificial Sequence
  Chemically synthesized
uguuucaaaaacuuuaagcgcug

SEQ ID NO: 33163 - RNA, 23 nt, Artificial Sequence
  Chemically synthesized
guuucaaaaacuuuaagcgcugu

SEQ ID NO: 33164 - RNA, 23 nt, Artificial Sequence
  Chemically synthesized
aaacuuuaagcgcuguuccuuag

SEQ ID NO: 33165 - RNA, 23 nt, Artificial Sequence
  Chemically synthesized
aacuuuaagcgcuguuccuuagu

SEQ ID NO: 33166 - RNA, 23 nt, Artificial Sequence
  Chemically synthesized
acuuuaagcgcuguuccuuaguu

SEQ ID NO: 33167 - RNA, 23 nt, Artificial Sequence
  Chemically synthesized
cuuuaagcgcuguuccuuaguug

SEQ ID NO: 33168 - RNA, 23 nt, Artificial Sequence
  Chemically synthesized
uuuaagcgcuguuccuuaguugc

SEQ ID NO: 33169 - RNA, 23 nt, Artificial Sequence
  Chemically synthesized
guugcugggcuucaaucuguugc

SEQ ID NO: 33170 - RNA, 23 nt, Artificial Sequence
  Chemically synthesized
uugcugggcuucaaucuguugcu

SEQ ID NO: 33171 - RNA, 23 nt, Artificial Sequence
  Chemically synthesized
ugcugggcuucaaucuguugcug

SEQ ID NO: 33172 - RNA, 23 nt, Artificial Sequence
  Chemically synthesized
gcugggcuucaaucuguugcugc

SEQ ID NO: 33173 - RNA, 23 nt, Artificial Sequence
  Chemically synthesized
cugggcuucaaucuguugcugcu

SEQ ID NO: 33174 - RNA, 23 nt, Artificial Sequence
  Chemically synthesized
ggcuucaaucuguugcugcuggc

SEQ ID NO: 33175 - RNA, 23 nt, Artificial Sequence
  Chemically synthesized
gcuucaaucuguugcugcuggcg

SEQ ID NO: 33176 - RNA, 23 nt, Artificial Sequence
  Chemically synthesized
cuucaaucuguugcugcuggcga

SEQ ID NO: 33177 - RNA, 23 nt, Artificial Sequence
  Chemically synthesized
uucaaucuguugcugcuggcgag

SEQ ID NO: 33178 - RNA, 23 nt, Artificial Sequence
  Chemically synthesized
ucaaucuguugcugcuggcgaga

SEQ ID NO: 33179 - RNA, 23 nt, Artificial Sequence
  Chemically synthesized
uucugagauacaaaagacaauaa

SEQ ID NO: 33180 - RNA, 23 nt, Artificial Sequence
  Chemically synthesized
uucuuaagaugcuacaaaaacuc

SEQ ID NO: 33181 - RNA, 23 nt, Artificial Sequence
  Chemically synthesized
ucuuaagaugcuacaaaaacuca

SEQ ID NO: 33182 - RNA, 23 nt, Artificial Sequence
  Chemically synthesized
cuuaagaugcuacaaaaacucau

SEQ ID NO: 33183 - RNA, 23 nt, Artificial Sequence
  Chemically synthesized
uuaagaugcuacaaaaacucaua

SEQ ID NO: 33184 - RNA, 23 nt, Artificial Sequence
  Chemically synthesized
uaagaugcuacaaaaacucauau

SEQ ID NO: 33185 - RNA, 23 nt, Artificial Sequence
  Chemically synthesized
gacaauauacaagugugcagugc

SEQ ID NO: 33186 - RNA, 23 nt, Artificial Sequence
  Chemically synthesized
acaauauacaagugugcagugcc

SEQ ID NO: 33187 - RNA, 23 nt, Artificial Sequence
  Chemically synthesized
caauauacaagugugcagugccu

SEQ ID NO: 33188 - RNA, 23 nt, Artificial Sequence
  Chemically synthesized
aauauacaagugugcagugccuu

SEQ ID NO: 33189 - RNA, 23 nt, Artificial Sequence
  Chemically synthesized
auauacaagugugcagugccuuc

SEQ ID NO: 33190 - RNA, 23 nt, Artificial Sequence
  Chemically synthesized
uccuuucuucgauauucaccagg

SEQ ID NO: 33191 - RNA, 23 nt, Artificial Sequence
  Chemically synthesized
ccuuucuucgauauucaccagga

SEQ ID NO: 33192 - RNA, 23 nt, Artificial Sequence
  Chemically synthesized
cuuucuucgauauucaccaggaa

SEQ ID NO: 33193 - RNA, 23 nt, Artificial Sequence
  Chemically synthesized
uuucuucgauauucaccaggaac

SEQ ID NO: 33194 - RNA, 23 nt, Artificial Sequence
  Chemically synthesized
uucuucgauauucaccaggaacu

SEQ ID NO: 33195 - RNA, 23 nt, Artificial Sequence
  Chemically synthesized
uucaauccuucauucucuucuag

SEQ ID NO: 33196 - RNA, 23 nt, Artificial Sequence
  Chemically synthesized
ucaauccuucauucucuucuaga

SEQ ID NO: 33197 - RNA, 23 nt, Artificial Sequence
  Chemically synthesized
caauccuucauucucuucuagag

SEQ ID NO: 33198 - RNA, 23 nt, Artificial Sequence
  Chemically synthesized
caccaccauucgauuucaucuuc

SEQ ID NO: 33199 - RNA, 23 nt, Artificial Sequence
  Chemically synthesized
accaccauucgauuucaucuucg

SEQ ID NO: 33200 - RNA, 23 nt, Artificial Sequence
  Chemically synthesized
ccaccauucgauuucaucuucgu

SEQ ID NO: 33201 - RNA, 23 nt, Artificial Sequence
  Chemically synthesized
caccauucgauuucaucuucguc

SEQ ID NO: 33202 - RNA, 23 nt, Artificial Sequence
  Chemically synthesized
accauucgauuucaucuucgucu

SEQ ID NO: 33203 - RNA, 23 nt, Artificial Sequence
  Chemically synthesized
uccuuuauucauuaugcccaucu

SEQ ID NO: 33204 - RNA, 23 nt, Artificial Sequence
  Chemically synthesized
ccuuuauucauuaugcccaucuu

SEQ ID NO: 33205 - RNA, 23 nt, Artificial Sequence
  Chemically synthesized
cuuuauucauuaugcccaucuuc

SEQ ID NO: 33206 - RNA, 23 nt, Artificial Sequence
  Chemically synthesized
uuuauucauuaugcccaucuucu

SEQ ID NO: 33207 - RNA, 23 nt, Artificial Sequence
  Chemically synthesized
uuauucauuaugcccaucuucuc

SEQ ID NO: 33208 - RNA, 23 nt, Artificial Sequence
  Chemically synthesized
uccugacuccaccaaaaacuuac

SEQ ID NO: 33209 - RNA, 23 nt, Artificial Sequence
  Chemically synthesized
ccugacuccaccaaaaacuuaca

SEQ ID NO: 33210 - RNA, 23 nt, Artificial Sequence
  Chemically synthesized
cugacuccaccaaaaacuuacac

SEQ ID NO: 33211 - RNA, 23 nt, Artificial Sequence
  Chemically synthesized
ugacuccaccaaaaacuuacaca

SEQ ID NO: 33212 - RNA, 23 nt, Artificial Sequence
  Chemically synthesized
gacuccaccaaaaacuuacacac

SEQ ID NO: 33213 - RNA, 23 nt, Artificial Sequence
  Chemically synthesized
acuccaccaaaaacuuacacacu

SEQ ID NO: 33214 - RNA, 23 nt, Artificial Sequence
  Chemically synthesized
cuccaccaaaaacuuacacacuu

SEQ ID NO: 33215 - RNA, 23 nt, Artificial Sequence
  Chemically synthesized
uaacgauuucuguguggccugca

SEQ ID NO: 33216 - RNA, 23 nt, Artificial Sequence
  Chemically synthesized
acacacagcauugugaagagccg

SEQ ID NO: 33217 - RNA, 23 nt, Artificial Sequence
  Chemically synthesized
cacacagcauugugaagagccgu

SEQ ID NO: 33218 - RNA, 23 nt, Artificial Sequence
  Chemically synthesized
acacagcauugugaagagccgug

SEQ ID NO: 33219 - RNA, 23 nt, Artificial Sequence
  Chemically synthesized
cacagcauugugaagagccguga

SEQ ID NO: 33220 - RNA, 23 nt, Artificial Sequence
  Chemically synthesized
acagcauugugaagagccgugau

SEQ ID NO: 33221 - RNA, 23 nt, Artificial Sequence
  Chemically synthesized
cauaaauaauucucuguacaagg

SEQ ID NO: 33222 - RNA, 23 nt, Artificial Sequence
  Chemically synthesized
uauggauucuggauuucuacugg

SEQ ID NO: 33223 - RNA, 23 nt, Artificial Sequence
  Chemically synthesized
auggauucuggauuucuacuggg

SEQ ID NO: 33224 - RNA, 23 nt, Artificial Sequence
  Chemically synthesized
uggauucuggauuucuacugggc

SEQ ID NO: 33225 - RNA, 23 nt, Artificial Sequence
  Chemically synthesized
ggauucuggauuucuacugggcu

SEQ ID NO: 33226 - RNA, 23 nt, Artificial Sequence
  Chemically synthesized
gauucuggauuucuacugggcuu

SEQ ID NO: 33227 - RNA, 23 nt, Artificial Sequence
  Chemically synthesized
ugcguuagacaguuucuuucgua

SEQ ID NO: 33228 - RNA, 23 nt, Artificial Sequence
  Chemically synthesized
gcguuagacaguuucuuucguaa

SEQ ID NO: 33229 - RNA, 23 nt, Artificial Sequence
  Chemically synthesized
cguuagacaguuucuuucguaag

SEQ ID NO: 33230 - RNA, 23 nt, Artificial Sequence
  Chemically synthesized
guuagacaguuucuuucguaagg

SEQ ID NO: 33231 - RNA, 23 nt, Artificial Sequence
  Chemically synthesized
uuagacaguuucuuucguaaggc

SEQ ID NO: 33232 - RNA, 23 nt, Artificial Sequence
  Chemically synthesized
aucaaacauucgcucauuauccg

SEQ ID NO: 33233 - RNA, 23 nt, Artificial Sequence
  Chemically synthesized
ucaaacauucgcucauuauccgc

SEQ ID NO: 33234 - RNA, 23 nt, Artificial Sequence
  Chemically synthesized
caaacauucgcucauuauccgca

SEQ ID NO: 33235 - RNA, 23 nt, Artificial Sequence
  Chemically synthesized
aaacauucgcucauuauccgcaa

SEQ ID NO: 33236 - RNA, 23 nt, Artificial Sequence
  Chemically synthesized
aacauucgcucauuauccgcaac

SEQ ID NO: 33237 - RNA, 23 nt, Artificial Sequence
  Chemically synthesized
ugcugcuguugauucugggcagc

SEQ ID NO: 33238 - RNA, 23 nt, Artificial Sequence
  Chemically synthesized
gcccucugguaugagucuugguc

SEQ ID NO: 33239 - RNA, 23 nt, Artificial Sequence
  Chemically synthesized
cccucugguaugagucuugguca

SEQ ID NO: 33240 - RNA, 23 nt, Artificial Sequence
  Chemically synthesized
ccucugguaugagucuuggucaa

SEQ ID NO: 33241 - RNA, 23 nt, Artificial Sequence
  Chemically synthesized
cucugguaugagucuuggucaac

SEQ ID NO: 33242 - RNA, 23 nt, Artificial Sequence
  Chemically synthesized
ucugguaugagucuuggucaacg

SEQ ID NO: 33243 - RNA, 23 nt, Artificial Sequence
  Chemically synthesized
auauauugaacuugcugccacgg

SEQ ID NO: 33244 - RNA, 23 nt, Artificial Sequence
  Chemically synthesized
cugcugguuuugguuuaguuccc

SEQ ID NO: 33245 - RNA, 23 nt, Artificial Sequence
  Chemically synthesized
ugcugguuuugguuuaguuccca

SEQ ID NO: 33246 - RNA, 23 nt, Artificial Sequence
  Chemically synthesized
gcugguuuugguuuaguucccau

SEQ ID NO: 33247 - RNA, 23 nt, Artificial Sequence
  Chemically synthesized
cugguuuugguuuaguucccaug

SEQ ID NO: 33248 - RNA, 23 nt, Artificial Sequence
  Chemically synthesized
ugguuuugguuuaguucccaugg

SEQ ID NO: 33249 - RNA, 23 nt, Artificial Sequence
  Chemically synthesized
auuaaucuguuuugguuuuguag

SEQ ID NO: 33250 - RNA, 23 nt, Artificial Sequence
  Chemically synthesized
uuaaucuguuuugguuuuguagg

SEQ ID NO: 33251 - RNA, 23 nt, Artificial Sequence
  Chemically synthesized
uaaucuguuuugguuuuguagga

SEQ ID NO: 33252 - RNA, 23 nt, Artificial Sequence
  Chemically synthesized
aaucuguuuugguuuuguaggaa

SEQ ID NO: 33253 - RNA, 23 nt, Artificial Sequence
  Chemically synthesized
aucuguuuugguuuuguaggaac

SEQ ID NO: 33254 - RNA, 23 nt, Artificial Sequence
  Chemically synthesized
ucuguuuugguuuuguaggaaca

SEQ ID NO: 33255 - RNA, 23 nt, Artificial Sequence
  Chemically synthesized
cuguuuugguuuuguaggaacag

SEQ ID NO: 33256 - RNA, 23 nt, Artificial Sequence
  Chemically synthesized
cagccaaauggcaaucacucucg

SEQ ID NO: 33257 - RNA, 23 nt, Artificial Sequence
  Chemically synthesized
agccaaauggcaaucacucucgc

SEQ ID NO: 33258 - RNA, 23 nt, Artificial Sequence
  Chemically synthesized
gccaaauggcaaucacucucgcc

SEQ ID NO: 33259 - RNA, 23 nt, Artificial Sequence
  Chemically synthesized
ccaaauggcaaucacucucgccg

SEQ ID NO: 33260 - RNA, 23 nt, Artificial Sequence
  Chemically synthesized
caaauggcaaucacucucgccgg

SEQ ID NO: 33261 - RNA, 23 nt, Artificial Sequence
  Chemically synthesized
aagaaacaucggcaucaucuugg

SEQ ID NO: 33262 - RNA, 23 nt, Artificial Sequence
  Chemically synthesized
agaaacaucggcaucaucuugga

SEQ ID NO: 33263 - RNA, 23 nt, Artificial Sequence
  Chemically synthesized
gaaacaucggcaucaucuuggac

SEQ ID NO: 33264 - RNA, 23 nt, Artificial Sequence
  Chemically synthesized
aaacaucggcaucaucuuggacc

SEQ ID NO: 33265 - RNA, 23 nt, Artificial Sequence
  Chemically synthesized
aacaucggcaucaucuuggaccc

SEQ ID NO: 33266 - RNA, 23 nt, Artificial Sequence
  Chemically synthesized
uagccacauuuuuauuugcaacc

SEQ ID NO: 33267 - RNA, 23 nt, Artificial Sequence
  Chemically synthesized
agccacauuuuuauuugcaaccu

SEQ ID NO: 33268 - RNA, 23 nt, Artificial Sequence
  Chemically synthesized
gccacauuuuuauuugcaaccug

SEQ ID NO: 33269 - RNA, 23 nt, Artificial Sequence
  Chemically synthesized
ccacauuuuuauuugcaaccuga

SEQ ID NO: 33270 - RNA, 23 nt, Artificial Sequence
  Chemically synthesized
cacauuuuuauuugcaaccugag

SEQ ID NO: 33271 - RNA, 23 nt, Artificial Sequence
  Chemically synthesized
ccgcaagauaucuucacugcucu

SEQ ID NO: 33272 - RNA, 23 nt, Artificial Sequence
  Chemically synthesized
cgcaagauaucuucacugcucug

SEQ ID NO: 33273 - RNA, 23 nt, Artificial Sequence
  Chemically synthesized
agaucugcauuugaaggacucca

SEQ ID NO: 33274 - RNA, 23 nt, Artificial Sequence
  Chemically synthesized
acgucucugcauauuguuucugg

SEQ ID NO: 33275 - RNA, 23 nt, Artificial Sequence
  Chemically synthesized
cgucucugcauauuguuucugga

SEQ ID NO: 33276 - RNA, 23 nt, Artificial Sequence
  Chemically synthesized
gucucugcauauuguuucuggag

SEQ ID NO: 33277 - RNA, 23 nt, Artificial Sequence
  Chemically synthesized
ucucugcauauuguuucuggagu

SEQ ID NO: 33278 - RNA, 23 nt, Artificial Sequence
  Chemically synthesized
cucugcauauuguuucuggagua

SEQ ID NO: 33279 - RNA, 23 nt, Artificial Sequence
  Chemically synthesized
uggcuucaccagcaauucaggcc

SEQ ID NO: 33280 - RNA, 23 nt, Artificial Sequence
  Chemically synthesized
ggcuucaccagcaauucaggccu

SEQ ID NO: 33281 - RNA, 23 nt, Artificial Sequence
  Chemically synthesized
gcuucaccagcaauucaggccuu

SEQ ID NO: 33282 - RNA, 23 nt, Artificial Sequence
  Chemically synthesized
cuucaccagcaauucaggccuug

SEQ ID NO: 33283 - RNA, 23 nt, Artificial Sequence
  Chemically synthesized
uucaccagcaauucaggccuuga

SEQ ID NO: 33284 - RNA, 23 nt, Artificial Sequence
  Chemically synthesized
ucagaugaaacugguagauuuuc

SEQ ID NO: 33285 - RNA, 23 nt, Artificial Sequence
  Chemically synthesized
cagaugaaacugguagauuuucu

SEQ ID NO: 33286 - RNA, 23 nt, Artificial Sequence
  Chemically synthesized
agaugaaacugguagauuuucuu

SEQ ID NO: 33287 - RNA, 23 nt, Artificial Sequence
  Chemically synthesized
gaugaaacugguagauuuucuuu

SEQ ID NO: 33288 - RNA, 23 nt, Artificial Sequence
  Chemically synthesized
augaaacugguagauuuucuuuu

SEQ ID NO: 33289 - RNA, 23 nt, Artificial Sequence
  Chemically synthesized
ugacugccacuucugaauuacgc

SEQ ID NO: 33290 - RNA, 23 nt, Artificial Sequence
  Chemically synthesized
gacugccacuucugaauuacgcu

SEQ ID NO: 33291 - RNA, 23 nt, Artificial Sequence
  Chemically synthesized
acugccacuucugaauuacgcuu

SEQ ID NO: 33292 - RNA, 23 nt, Artificial Sequence
  Chemically synthesized
cugccacuucugaauuacgcuua

SEQ ID NO: 33293 - RNA, 23 nt, Artificial Sequence
  Chemically synthesized
ugccacuucugaauuacgcuuau

SEQ ID NO: 33294 - RNA, 23 nt, Artificial Sequence
  Chemically synthesized
cugaauuacgcuuauucaaacac

SEQ ID NO: 33295 - RNA, 23 nt, Artificial Sequence
  Chemically synthesized
ugaauuacgcuuauucaaacacu

SEQ ID NO: 33296 - RNA, 23 nt, Artificial Sequence
  Chemically synthesized
gaauuacgcuuauucaaacacuc

SEQ ID NO: 33297 - RNA, 23 nt, Artificial Sequence
  Chemically synthesized
aauuacgcuuauucaaacacucc

SEQ ID NO: 33298 - RNA, 23 nt, Artificial Sequence
  Chemically synthesized
auuacgcuuauucaaacacuccc

SEQ ID NO: 33299 - RNA, 23 nt, Artificial Sequence
  Chemically synthesized
acgcuuauucaaacacucccucu

SEQ ID NO: 33300 - RNA, 23 nt, Artificial Sequence
  Chemically synthesized
cucccucuguuguuguagcuugg

SEQ ID NO: 33301 - RNA, 23 nt, Artificial Sequence
  Chemically synthesized
ucccucuguuguuguagcuuggc

SEQ ID NO: 33302 - RNA, 23 nt, Artificial Sequence
  Chemically synthesized
cccucuguuguuguagcuuggca

SEQ ID NO: 33303 - RNA, 23 nt, Artificial Sequence
  Chemically synthesized
ccucuguuguuguagcuuggcau

SEQ ID NO: 33304 - RNA, 23 nt, Artificial Sequence
  Chemically synthesized
cucuguuguuguagcuuggcauu

SEQ ID NO: 33305 - RNA, 23 nt, Artificial Sequence
  Chemically synthesized
auucaauuuguuucuuagcugca

SEQ ID NO: 33306 - RNA, 23 nt, Artificial Sequence
  Chemically synthesized
ccuggucaguucuucuacuuuug

SEQ ID NO: 33307 - RNA, 23 nt, Artificial Sequence
  Chemically synthesized
cuggucaguucuucuacuuuuga

SEQ ID NO: 33308 - RNA, 23 nt, Artificial Sequence
  Chemically synthesized
uggucaguucuucuacuuuugac

SEQ ID NO: 33309 - RNA, 23 nt, Artificial Sequence
  Chemically synthesized
ggucaguucuucuacuuuugaca

SEQ ID NO: 33310 - RNA, 23 nt, Artificial Sequence
  Chemically synthesized
gucaguucuucuacuuuugacac

SEQ ID NO: 33311 - RNA, 23 nt, Artificial Sequence
  Chemically synthesized
ucaguucuucuacuuuugacaca

SEQ ID NO: 33312 - RNA, 23 nt, Artificial Sequence
  Chemically synthesized
caguucuucuacuuuugacacag

SEQ ID NO: 33313 - RNA, 23 nt, Artificial Sequence
  Chemically synthesized
aguucuucuacuuuugacacagc

SEQ ID NO: 33314 - RNA, 23 nt, Artificial Sequence
  Chemically synthesized
uucaucuguucaauuuccuccac

SEQ ID NO: 33315 - RNA, 23 nt, Artificial Sequence
  Chemically synthesized
ucaucuguucaauuuccuccaca

SEQ ID NO: 33316 - RNA, 23 nt, Artificial Sequence
  Chemically synthesized
caucuguucaauuuccuccacaa

SEQ ID NO: 33317 - RNA, 23 nt, Artificial Sequence
  Chemically synthesized
cuuuuagccuuuuaaguuucucc

SEQ ID NO: 33318 - RNA, 23 nt, Artificial Sequence
  Chemically synthesized
uuuuagccuuuuaaguuucuccu

SEQ ID NO: 33319 - RNA, 23 nt, Artificial Sequence
  Chemically synthesized
uuuagccuuuuaaguuucuccug

SEQ ID NO: 33320 - RNA, 23 nt, Artificial Sequence
  Chemically synthesized
uuagccuuuuaaguuucuccugc

SEQ ID NO: 33321 - RNA, 23 nt, Artificial Sequence
  Chemically synthesized
uagccuuuuaaguuucuccugcu

SEQ ID NO: 33322 - RNA, 23 nt, Artificial Sequence
  Chemically synthesized
uuucaaaaacuuuaagcgcuguu

SEQ ID NO: 33323 - RNA, 23 nt, Artificial Sequence
  Chemically synthesized
ccugaaguucagcaagagucaga

SEQ ID NO: 33324 - RNA, 23 nt, Artificial Sequence
  Chemically synthesized
cugaaguucagcaagagucagau

SEQ ID NO: 33325 - RNA, 23 nt, Artificial Sequence
  Chemically synthesized
ugaaguucagcaagagucagauc

SEQ ID NO: 33326 - RNA, 23 nt, Artificial Sequence
  Chemically synthesized
uaauuacugguaccguagcuuag

SEQ ID NO: 33327 - RNA, 23 nt, Artificial Sequence
  Chemically synthesized
aauuacugguaccguagcuuagu

SEQ ID NO: 33328 - RNA, 23 nt, Artificial Sequence
  Chemically synthesized
auuacugguaccguagcuuaguu

SEQ ID NO: 33329 - RNA, 23 nt, Artificial Sequence
  Chemically synthesized
uuacugguaccguagcuuaguuu

SEQ ID NO: 33330 - RNA, 23 nt, Artificial Sequence
  Chemically synthesized
uacugguaccguagcuuaguuuc

SEQ ID NO: 33331 - RNA, 23 nt, Artificial Sequence
  Chemically synthesized
cuccuuucuucgauauucaccag

SEQ ID NO: 33332 - RNA, 23 nt, Artificial Sequence
  Chemically synthesized
cucuaauggugaauucuucaauc

SEQ ID NO: 33333 - RNA, 23 nt, Artificial Sequence
  Chemically synthesized
aauccuucauucucuucuagaga

SEQ ID NO: 33334 - RNA, 23 nt, Artificial Sequence
  Chemically synthesized
auccuucauucucuucuagagac

SEQ ID NO: 33335 - RNA, 23 nt, Artificial Sequence
  Chemically synthesized
cugcaugucacuguaggucaugg

SEQ ID NO: 33336 - RNA, 23 nt, Artificial Sequence
  Chemically synthesized
ugcaugucacuguaggucauggc

SEQ ID NO: 33337 - RNA, 23 nt, Artificial Sequence
  Chemically synthesized
gcaugucacuguaggucauggca

SEQ ID NO: 33338 - RNA, 23 nt, Artificial Sequence
  Chemically synthesized
caugucacuguaggucauggcaa

SEQ ID NO: 33339 - RNA, 23 nt, Artificial Sequence
  Chemically synthesized
augucacuguaggucauggcaaa

SEQ ID NO: 33340 - RNA, 23 nt, Artificial Sequence
  Chemically synthesized
acacuuggacguuguuacaugag

SEQ ID NO: 33341 - RNA, 23 nt, Artificial Sequence
  Chemically synthesized
cacuuggacguuguuacaugagg

SEQ ID NO: 33342 - RNA, 23 nt, Artificial Sequence
  Chemically synthesized
acuuggacguuguuacaugaggc

SEQ ID NO: 33343 - RNA, 23 nt, Artificial Sequence
  Chemically synthesized
cuuggacguuguuacaugaggca

SEQ ID NO: 33344 - RNA, 23 nt, Artificial Sequence
  Chemically synthesized
uuggacguuguuacaugaggcag

SEQ ID NO: 33345 - RNA, 23 nt, Artificial Sequence
  Chemically synthesized
uggacguuguuacaugaggcagc

SEQ ID NO: 33346 - RNA, 23 nt, Artificial Sequence
  Chemically synthesized
aacgauuucuguguggccugcac

SEQ ID NO: 33347 - RNA, 23 nt, Artificial Sequence
  Chemically synthesized
cucuguacaaggucaaauucucc

SEQ ID NO: 33348 - RNA, 23 nt, Artificial Sequence
  Chemically synthesized
ucaagcacauguggagccucugg

SEQ ID NO: 33349 - RNA, 23 nt, Artificial Sequence
  Chemically synthesized
caagcacauguggagccucugga

SEQ ID NO: 33350 - RNA, 23 nt, Artificial Sequence
  Chemically synthesized
aagcacauguggagccucuggau

SEQ ID NO: 33351 - RNA, 23 nt, Artificial Sequence
  Chemically synthesized
ggauggguaugaugggacagaga

SEQ ID NO: 33352 - RNA, 23 nt, Artificial Sequence
  Chemically synthesized
gauggguaugaugggacagagau

SEQ ID NO: 33353 - RNA, 23 nt, Artificial Sequence
  Chemically synthesized
auggguaugaugggacagagaug

SEQ ID NO: 33354 - RNA, 23 nt, Artificial Sequence
  Chemically synthesized
ggucagcaucacucugguuucgg

SEQ ID NO: 33355 - RNA, 23 nt, Artificial Sequence
  Chemically synthesized
gucagcaucacucugguuucggu

SEQ ID NO: 33356 - RNA, 23 nt, Artificial Sequence
  Chemically synthesized
ucagcaucacucugguuucggua

SEQ ID NO: 33357 - RNA, 23 nt, Artificial Sequence
  Chemically synthesized
cagcaucacucugguuucgguaa

SEQ ID NO: 33358 - RNA, 23 nt, Artificial Sequence
  Chemically synthesized
agcaucacucugguuucgguaag

SEQ ID NO: 33359 - RNA, 23 nt, Artificial Sequence
  Chemically synthesized
uacauggaauauauugaacuugc

SEQ ID NO: 33360 - RNA, 23 nt, Artificial Sequence
  Chemically synthesized
acauggaauauauugaacuugcu

SEQ ID NO: 33361 - RNA, 23 nt, Artificial Sequence
  Chemically synthesized
cauggaauauauugaacuugcug

SEQ ID NO: 33362 - RNA, 23 nt, Artificial Sequence
  Chemically synthesized
aaauggcaaucacucucgccggg

SEQ ID NO: 33363 - RNA, 23 nt, Artificial Sequence
  Chemically synthesized
cuuuagccacauuuuuauuugca

SEQ ID NO: 33364 - RNA, 23 nt, Artificial Sequence
  Chemically synthesized
uuuagccacauuuuuauuugcaa

SEQ ID NO: 33365 - RNA, 23 nt, Artificial Sequence
  Chemically synthesized
uuagccacauuuuuauuugcaac

SEQ ID NO: 33366 - RNA, 23 nt, Artificial Sequence
  Chemically synthesized
acauuuuuauuugcaaccugagc

SEQ ID NO: 33367 - RNA, 23 nt, Artificial Sequence
  Chemically synthesized
cauuuuuauuugcaaccugagca

SEQ ID NO: 33368 - RNA, 23 nt, Artificial Sequence
  Chemically synthesized
auuuuuauuugcaaccugagcau

SEQ ID NO: 33369 - RNA, 23 nt, Artificial Sequence
  Chemically synthesized
uuuuuauuugcaaccugagcauc

SEQ ID NO: 33370 - RNA, 23 nt, Artificial Sequence
  Chemically synthesized
uuuuauuugcaaccugagcaucc

SEQ ID NO: 33371 - RNA, 23 nt, Artificial Sequence
  Chemically synthesized
guucuuugcacagauccaccacg

SEQ ID NO: 33372 - RNA, 23 nt, Artificial Sequence
  Chemically synthesized
uucuuugcacagauccaccacgu

SEQ ID NO: 33373 - RNA, 23 nt, Artificial Sequence
  Chemically synthesized
ucuuugcacagauccaccacguc

SEQ ID NO: 33374 - RNA, 23 nt, Artificial Sequence
  Chemically synthesized
cuuugcacagauccaccacgucu

SEQ ID NO: 33375 - RNA, 23 nt, Artificial Sequence
  Chemically synthesized
uuugcacagauccaccacgucuc

SEQ ID NO: 33376 - RNA, 23 nt, Artificial Sequence
  Chemically synthesized
uugcacagauccaccacgucucu

SEQ ID NO: 33377 - RNA, 23 nt, Artificial Sequence
  Chemically synthesized
gggcagugucuguauuuucaucg

SEQ ID NO: 33378 - RNA, 23 nt, Artificial Sequence
  Chemically synthesized
ggcagugucuguauuuucaucgg

SEQ ID NO: 33379 - RNA, 23 nt, Artificial Sequence
  Chemically synthesized
gcagugucuguauuuucaucggc

SEQ ID NO: 33380 - RNA, 23 nt, Artificial Sequence
  Chemically synthesized
cagugucuguauuuucaucggcc

SEQ ID NO: 33381 - RNA, 23 nt, Artificial Sequence
  Chemically synthesized
agugucuguauuuucaucggccc

SEQ ID NO: 33382 - RNA, 23 nt, Artificial Sequence
  Chemically synthesized
gggcauccgaggcauaguagacg

SEQ ID NO: 33383 - RNA, 23 nt, Artificial Sequence
  Chemically synthesized
ggcauccgaggcauaguagacga

SEQ ID NO: 33384 - RNA, 23 nt, Artificial Sequence
  Chemically synthesized
gcauccgaggcauaguagacgac

SEQ ID NO: 33385 - RNA, 23 nt, Artificial Sequence
  Chemically synthesized
cauccgaggcauaguagacgacu

SEQ ID NO: 33386 - RNA, 23 nt, Artificial Sequence
  Chemically synthesized
auccgaggcauaguagacgacug

SEQ ID NO: 33387 - RNA, 23 nt, Artificial Sequence
  Chemically synthesized
gaaacugguagauuuucuuuuug

SEQ ID NO: 33388 - RNA, 23 nt, Artificial Sequence
  Chemically synthesized
aaacugguagauuuucuuuuugc

SEQ ID NO: 33389 - RNA, 23 nt, Artificial Sequence
  Chemically synthesized
aacugguagauuuucuuuuugcu

SEQ ID NO: 33390 - RNA, 23 nt, Artificial Sequence
  Chemically synthesized
acugguagauuuucuuuuugcug

SEQ ID NO: 33391 - RNA, 23 nt, Artificial Sequence
  Chemically synthesized
cugguagauuuucuuuuugcugu

SEQ ID NO: 33392 - RNA, 23 nt, Artificial Sequence
  Chemically synthesized
uuugcuguagagcugccuucuuc

SEQ ID NO: 33393 - RNA, 23 nt, Artificial Sequence
  Chemically synthesized
uugcuguagagcugccuucuucu

SEQ ID NO: 33394 - RNA, 23 nt, Artificial Sequence
  Chemically synthesized
ugcuguagagcugccuucuucuu

SEQ ID NO: 33395 - RNA, 23 nt, Artificial Sequence
  Chemically synthesized
gcuguagagcugccuucuucuuc

SEQ ID NO: 33396 - RNA, 23 nt, Artificial Sequence
  Chemically synthesized
auucaaacacucccucuguuguu

SEQ ID NO: 33397 - RNA, 23 nt, Artificial Sequence
  Chemically synthesized
uggaguaacuggaacuucuguga

SEQ ID NO: 33398 - RNA, 23 nt, Artificial Sequence
  Chemically synthesized
ggaguaacuggaacuucugugaa

SEQ ID NO: 33399 - RNA, 23 nt, Artificial Sequence
  Chemically synthesized
gaguaacuggaacuucugugaag

SEQ ID NO: 33400 - RNA, 23 nt, Artificial Sequence
  Chemically synthesized
aguaacuggaacuucugugaagu

SEQ ID NO: 33401 - RNA, 23 nt, Artificial Sequence
  Chemically synthesized
guaacuggaacuucugugaagug

SEQ ID NO: 33402 - RNA, 23 nt, Artificial Sequence
  Chemically synthesized
guuuuugcuggaacaaauuauuc

SEQ ID NO: 33403 - RNA, 23 nt, Artificial Sequence
  Chemically synthesized
uuuuugcuggaacaaauuauuca

SEQ ID NO: 33404 - RNA, 23 nt, Artificial Sequence
  Chemically synthesized
uuuugcuggaacaaauuauucau

SEQ ID NO: 33405 - RNA, 23 nt, Artificial Sequence
  Chemically synthesized
uuugcuggaacaaauuauucauc

SEQ ID NO: 33406 - RNA, 23 nt, Artificial Sequence
  Chemically synthesized
uugcuggaacaaauuauucaucu

SEQ ID NO: 33407 - RNA, 23 nt, Artificial Sequence
  Chemically synthesized
ugauucucagcuauuucuuuuag

SEQ ID NO: 33408 - RNA, 23 nt, Artificial Sequence
  Chemically synthesized
gauucucagcuauuucuuuuagc

SEQ ID NO: 33409 - RNA, 23 nt, Artificial Sequence
  Chemically synthesized
auucucagcuauuucuuuuagcc

SEQ ID NO: 33410 - RNA, 23 nt, Artificial Sequence
  Chemically synthesized
uucucagcuauuucuuuuagccu

SEQ ID NO: 33411 - RNA, 23 nt, Artificial Sequence
  Chemically synthesized
ucucagcuauuucuuuuagccuu

SEQ ID NO: 33412 - RNA, 23 nt, Artificial Sequence
  Chemically synthesized
auuguugcugggcuucaaucugu

SEQ ID NO: 33413 - RNA, 23 nt, Artificial Sequence
  Chemically synthesized
uuguugcugggcuucaaucuguu

SEQ ID NO: 33414 - RNA, 23 nt, Artificial Sequence
  Chemically synthesized
uguugcugggcuucaaucuguug

SEQ ID NO: 33415 - RNA, 23 nt, Artificial Sequence
  Chemically synthesized
cggguaagucuguagcaaguuuc

SEQ ID NO: 33416 - RNA, 23 nt, Artificial Sequence
  Chemically synthesized
ggguaagucuguagcaaguuucu

SEQ ID NO: 33417 - RNA, 23 nt, Artificial Sequence
  Chemically synthesized
gguaagucuguagcaaguuucua

SEQ ID NO: 33418 - RNA, 23 nt, Artificial Sequence
  Chemically synthesized
guaagucuguagcaaguuucuaa

SEQ ID NO: 33419 - RNA, 23 nt, Artificial Sequence
  Chemically synthesized
uaagucuguagcaaguuucuaau

SEQ ID NO: 33420 - RNA, 23 nt, Artificial Sequence
  Chemically synthesized
aacaccguucuccuuucuucgau

SEQ ID NO: 33421 - RNA, 23 nt, Artificial Sequence
  Chemically synthesized
acaccguucuccuuucuucgaua

SEQ ID NO: 33422 - RNA, 23 nt, Artificial Sequence
  Chemically synthesized
aucuaauuacugguaccguagcu

SEQ ID NO: 33423 - RNA, 23 nt, Artificial Sequence
  Chemically synthesized
ccguucuccuuucuucgauauuc

SEQ ID NO: 33424 - RNA, 23 nt, Artificial Sequence
  Chemically synthesized
cguucuccuuucuucgauauuca

SEQ ID NO: 33425 - RNA, 23 nt, Artificial Sequence
  Chemically synthesized
guucuccuuucuucgauauucac

SEQ ID NO: 33426 - RNA, 23 nt, Artificial Sequence
  Chemically synthesized
uucuccuuucuucgauauucacc

SEQ ID NO: 33427 - RNA, 23 nt, Artificial Sequence
  Chemically synthesized
ucuccuuucuucgauauucacca

SEQ ID NO: 33428 - RNA, 23 nt, Artificial Sequence
  Chemically synthesized
ucuuguagaaaacaggauugucg

SEQ ID NO: 33429 - RNA, 23 nt, Artificial Sequence
  Chemically synthesized
cuuguagaaaacaggauugucgc

SEQ ID NO: 33430 - RNA, 23 nt, Artificial Sequence
  Chemically synthesized
uuguagaaaacaggauugucgcu

SEQ ID NO: 33431 - RNA, 23 nt, Artificial Sequence
  Chemically synthesized
uguagaaaacaggauugucgcug

SEQ ID NO: 33432 - RNA, 23 nt, Artificial Sequence
  Chemically synthesized
guagaaaacaggauugucgcugu

SEQ ID NO: 33433 - RNA, 23 nt, Artificial Sequence
  Chemically synthesized
ggauugucgcuguauacuuaucu

SEQ ID NO: 33434 - RNA, 23 nt, Artificial Sequence
  Chemically synthesized
gauugucgcuguauacuuaucug

SEQ ID NO: 33435 - RNA, 23 nt, Artificial Sequence
  Chemically synthesized
auugucgcuguauacuuaucuga

SEQ ID NO: 33436 - RNA, 23 nt, Artificial Sequence
  Chemically synthesized
uugucgcuguauacuuaucugag

SEQ ID NO: 33437 - RNA, 23 nt, Artificial Sequence
  Chemically synthesized
ugucgcuguauacuuaucugagu

SEQ ID NO: 33438 - RNA, 23 nt, Artificial Sequence
  Chemically synthesized
gucgcuguauacuuaucugagug

SEQ ID NO: 33439 - RNA, 23 nt, Artificial Sequence
  Chemically synthesized
ucgcuguauacuuaucugagugc

SEQ ID NO: 33440 - RNA, 23 nt, Artificial Sequence
  Chemically synthesized
uuauuucaucacgcuaaaugucc

SEQ ID NO: 33441 - RNA, 23 nt, Artificial Sequence
  Chemically synthesized
uauuucaucacgcuaaauguccu

SEQ ID NO: 33442 - RNA, 23 nt, Artificial Sequence
  Chemically synthesized
auuucaucacgcuaaauguccuc

SEQ ID NO: 33443 - RNA, 23 nt, Artificial Sequence
  Chemically synthesized
uuucaucacgcuaaauguccucu

SEQ ID NO: 33444 - RNA, 23 nt, Artificial Sequence
  Chemically synthesized
uucaucacgcuaaauguccucua

SEQ ID NO: 33445 - RNA, 23 nt, Artificial Sequence
  Chemically synthesized
ucuucauugacuaaaauucugug

SEQ ID NO: 33446 - RNA, 23 nt, Artificial Sequence
  Chemically synthesized
cuucauugacuaaaauucugugu

SEQ ID NO: 33447 - RNA, 23 nt, Artificial Sequence
  Chemically synthesized
uggguacagucccagcaaguuac

SEQ ID NO: 33448 - RNA, 23 nt, Artificial Sequence
  Chemically synthesized
ggguacagucccagcaaguuacg

SEQ ID NO: 33449 - RNA, 23 nt, Artificial Sequence
  Chemically synthesized
gguacagucccagcaaguuacgu

SEQ ID NO: 33450 - RNA, 23 nt, Artificial Sequence
  Chemically synthesized
guacagucccagcaaguuacgug

SEQ ID NO: 33451 - RNA, 23 nt, Artificial Sequence
  Chemically synthesized
uacagucccagcaaguuacgugg

SEQ ID NO: 33452 - RNA, 23 nt, Artificial Sequence
  Chemically synthesized
auuucaucuucgucuucccugug

SEQ ID NO: 33453 - RNA, 23 nt, Artificial Sequence
  Chemically synthesized
acuuacacacuuggacguuguua

SEQ ID NO: 33454 - RNA, 23 nt, Artificial Sequence
  Chemically synthesized
cuuacacacuuggacguuguuac

SEQ ID NO: 33455 - RNA, 23 nt, Artificial Sequence
  Chemically synthesized
uuacacacuuggacguuguuaca

SEQ ID NO: 33456 - RNA, 23 nt, Artificial Sequence
  Chemically synthesized
cacacuuggacguuguuacauga

SEQ ID NO: 33457 - RNA, 23 nt, Artificial Sequence
  Chemically synthesized
ggacguuguuacaugaggcagca

SEQ ID NO: 33458 - RNA, 23 nt, Artificial Sequence
  Chemically synthesized
gacguuguuacaugaggcagcac

SEQ ID NO: 33459 - RNA, 23 nt, Artificial Sequence
  Chemically synthesized
ggcagcacaauguaauggagucc

SEQ ID NO: 33460 - RNA, 23 nt, Artificial Sequence
  Chemically synthesized
gcagcacaauguaauggagucca

SEQ ID NO: 33461 - RNA, 23 nt, Artificial Sequence
  Chemically synthesized
cagcacaauguaauggaguccau

SEQ ID NO: 33462 - RNA, 23 nt, Artificial Sequence
  Chemically synthesized
agcacaauguaauggaguccauc

SEQ ID NO: 33463 - RNA, 23 nt, Artificial Sequence
  Chemically synthesized
gcacaauguaauggaguccaucc

SEQ ID NO: 33464 - RNA, 23 nt, Artificial Sequence
  Chemically synthesized
cacaauguaauggaguccaucca

SEQ ID NO: 33465 - RNA, 23 nt, Artificial Sequence
  Chemically synthesized
cacuaucagcagcauuuacauuu

SEQ ID NO: 33466 - RNA, 23 nt, Artificial Sequence
  Chemically synthesized
acuaucagcagcauuuacauuua

SEQ ID NO: 33467 - RNA, 23 nt, Artificial Sequence
  Chemically synthesized
cuaucagcagcauuuacauuuac

SEQ ID NO: 33468 - RNA, 23 nt, Artificial Sequence
  Chemically synthesized
uaucagcagcauuuacauuuaca

SEQ ID NO: 33469 - RNA, 23 nt, Artificial Sequence
  Chemically synthesized
aucagcagcauuuacauuuacac

SEQ ID NO: 33470 - RNA, 23 nt, Artificial Sequence
  Chemically synthesized
ugaauuucacccucauuccauga

SEQ ID NO: 33471 - RNA, 23 nt, Artificial Sequence
  Chemically synthesized
uauaaaagcuucugaauauuugg

SEQ ID NO: 33472 - RNA, 23 nt, Artificial Sequence
  Chemically synthesized
gcucuguaauagaacuacguuuc

SEQ ID NO: 33473 - RNA, 23 nt, Artificial Sequence
  Chemically synthesized
cucuguaauagaacuacguuucu

SEQ ID NO: 33474 - RNA, 23 nt, Artificial Sequence
  Chemically synthesized
ucuguaauagaacuacguuucuu

SEQ ID NO: 33475 - RNA, 23 nt, Artificial Sequence
  Chemically synthesized
cuguaauagaacuacguuucuuu

SEQ ID NO: 33476 - RNA, 23 nt, Artificial Sequence
  Chemically synthesized
uguaauagaacuacguuucuuua

SEQ ID NO: 33477 - RNA, 23 nt, Artificial Sequence
  Chemically synthesized
uagacaguuucuuucguaaggcu

SEQ ID NO: 33478 - RNA, 23 nt, Artificial Sequence
  Chemically synthesized
acucugguuucgguaaggauuag

SEQ ID NO: 33479 - RNA, 23 nt, Artificial Sequence
  Chemically synthesized
cucugguuucgguaaggauuaga

SEQ ID NO: 33480 - RNA, 23 nt, Artificial Sequence
  Chemically synthesized
ucugguuucgguaaggauuagau

SEQ ID NO: 33481 - RNA, 23 nt, Artificial Sequence
  Chemically synthesized
cugguuucgguaaggauuagaua

SEQ ID NO: 33482 - RNA, 23 nt, Artificial Sequence
  Chemically synthesized
ugguuucgguaaggauuagauaa

SEQ ID NO: 33483 - RNA, 23 nt, Artificial Sequence
  Chemically synthesized
ggcaguaauuuaguugggcugag

SEQ ID NO: 33484 - RNA, 23 nt, Artificial Sequence
  Chemically synthesized
gcuggaaguuuuuuccuggcgcc

SEQ ID NO: 33485 - RNA, 23 nt, Artificial Sequence
  Chemically synthesized
cuggaaguuuuuuccuggcgccu

SEQ ID NO: 33486 - RNA, 23 nt, Artificial Sequence
  Chemically synthesized
uggaaguuuuuuccuggcgccug

SEQ ID NO: 33487 - RNA, 23 nt, Artificial Sequence
  Chemically synthesized
ggaaguuuuuuccuggcgccugc

SEQ ID NO: 33488 - RNA, 23 nt, Artificial Sequence
  Chemically synthesized
gaaguuuuuuccuggcgccugcu

SEQ ID NO: 33489 - RNA, 23 nt, Artificial Sequence
  Chemically synthesized
ugauuaguuuguccaaaauaagg

SEQ ID NO: 33490 - RNA, 23 nt, Artificial Sequence
  Chemically synthesized
cggguucuuugcacagauccacc

SEQ ID NO: 33491 - RNA, 23 nt, Artificial Sequence
  Chemically synthesized
ggguucuuugcacagauccacca

SEQ ID NO: 33492 - RNA, 23 nt, Artificial Sequence
  Chemically synthesized
gguucuuugcacagauccaccac

SEQ ID NO: 33493 - RNA, 23 nt, Artificial Sequence
  Chemically synthesized
gaucugcauuugaaggacuccaa

SEQ ID NO: 33494 - RNA, 23 nt, Artificial Sequence
  Chemically synthesized
aucugcauuugaaggacuccaau

SEQ ID NO: 33495 - RNA, 23 nt, Artificial Sequence
  Chemically synthesized
gugucuguauuuucaucggcccc

SEQ ID NO: 33496 - RNA, 23 nt, Artificial Sequence
  Chemically synthesized
ugucuguauuuucaucggccccu

SEQ ID NO: 33497 - RNA, 23 nt, Artificial Sequence
  Chemically synthesized
gaagauuuccaucagaugaaacu

SEQ ID NO: 33498 - RNA, 23 nt, Artificial Sequence
  Chemically synthesized
aagauuuccaucagaugaaacug

SEQ ID NO: 33499 - RNA, 23 nt, Artificial Sequence
  Chemically synthesized
agauuuccaucagaugaaacugg

SEQ ID NO: 33500 - RNA, 23 nt, Artificial Sequence
  Chemically synthesized
gauuuccaucagaugaaacuggu

SEQ ID NO: 33501 - RNA, 23 nt, Artificial Sequence
  Chemically synthesized
auuuccaucagaugaaacuggua

SEQ ID NO: 33502 - RNA, 23 nt, Artificial Sequence
  Chemically synthesized
ggucccucagcucauuaacacgc

SEQ ID NO: 33503 - RNA, 23 nt, Artificial Sequence
  Chemically synthesized
gucccucagcucauuaacacgcu

SEQ ID NO: 33504 - RNA, 23 nt, Artificial Sequence
  Chemically synthesized
ucccucagcucauuaacacgcuu

SEQ ID NO: 33505 - RNA, 23 nt, Artificial Sequence
  Chemically synthesized
cccucagcucauuaacacgcuua

SEQ ID NO: 33506 - RNA, 23 nt, Artificial Sequence
  Chemically synthesized
ccucagcucauuaacacgcuuau

SEQ ID NO: 33507 - RNA, 23 nt, Artificial Sequence
  Chemically synthesized
ucauuaacacgcuuauccaugac

SEQ ID NO: 33508 - RNA, 23 nt, Artificial Sequence
  Chemically synthesized
cauuaacacgcuuauccaugacu

SEQ ID NO: 33509 - RNA, 23 nt, Artificial Sequence
  Chemically synthesized
auuaacacgcuuauccaugacug

SEQ ID NO: 33510 - RNA, 23 nt, Artificial Sequence
  Chemically synthesized
uuaacacgcuuauccaugacugc

SEQ ID NO: 33511 - RNA, 23 nt, Artificial Sequence
  Chemically synthesized
gccacuucugaauuacgcuuauu

SEQ ID NO: 33512 - RNA, 23 nt, Artificial Sequence
  Chemically synthesized
uacgcuuauucaaacacucccuc

SEQ ID NO: 33513 - RNA, 23 nt, Artificial Sequence
  Chemically synthesized
acacucccucuguuguuguagcu

SEQ ID NO: 33514 - RNA, 23 nt, Artificial Sequence
  Chemically synthesized
cacucccucuguuguuguagcuu

SEQ ID NO: 33515 - RNA, 23 nt, Artificial Sequence
  Chemically synthesized
acucccucuguuguuguagcuug

SEQ ID NO: 33516 - RNA, 23 nt, Artificial Sequence
  Chemically synthesized
cuggaguaacuggaacuucugug

SEQ ID NO: 33517 - RNA, 23 nt, Artificial Sequence
  Chemically synthesized
ugcuggaacaaauuauucaucug

SEQ ID NO: 33518 - RNA, 23 nt, Artificial Sequence
  Chemically synthesized
ucccauugcuuagucucuucugu

SEQ ID NO: 33519 - RNA, 23 nt, Artificial Sequence
  Chemically synthesized
cccauugcuuagucucuucuguu

SEQ ID NO: 33520 - RNA, 23 nt, Artificial Sequence
  Chemically synthesized
ccauugcuuagucucuucuguuc

SEQ ID NO: 33521 - RNA, 23 nt, Artificial Sequence
  Chemically synthesized
cauugcuuagucucuucuguucc

SEQ ID NO: 33522 - RNA, 23 nt, Artificial Sequence
  Chemically synthesized
auugcuuagucucuucuguucca

SEQ ID NO: 33523 - RNA, 23 nt, Artificial Sequence
  Chemically synthesized
uugcuuagucucuucuguuccac

SEQ ID NO: 33524 - RNA, 23 nt, Artificial Sequence
  Chemically synthesized
ugcuuagucucuucuguuccacg

SEQ ID NO: 33525 - RNA, 23 nt, Artificial Sequence
  Chemically synthesized
gcuuagucucuucuguuccacgu

SEQ ID NO: 33526 - RNA, 23 nt, Artificial Sequence
  Chemically synthesized
cuuagucucuucuguuccacgug

SEQ ID NO: 33527 - RNA, 23 nt, Artificial Sequence
  Chemically synthesized
uuagucucuucuguuccacgugg

SEQ ID NO: 33528 - RNA, 23 nt, Artificial Sequence
  Chemically synthesized
ugugaagugcugcucauuguuac

SEQ ID NO: 33529 - RNA, 23 nt, Artificial Sequence
  Chemically synthesized
gugaagugcugcucauuguuacu

SEQ ID NO: 33530 - RNA, 23 nt, Artificial Sequence
  Chemically synthesized
ugaagugcugcucauuguuacug

SEQ ID NO: 33531 - RNA, 23 nt, Artificial Sequence
  Chemically synthesized
gaagugcugcucauuguuacuga

SEQ ID NO: 33532 - RNA, 23 nt, Artificial Sequence
  Chemically synthesized
aagugcugcucauuguuacugag

SEQ ID NO: 33533 - RNA, 23 nt, Artificial Sequence
  Chemically synthesized
uaagugcucucacuuuuuuuagc

SEQ ID NO: 33534 - RNA, 23 nt, Artificial Sequence
  Chemically synthesized
aagugcucucacuuuuuuuagcu

SEQ ID NO: 33535 - RNA, 23 nt, Artificial Sequence
  Chemically synthesized
agugcucucacuuuuuuuagcuu

SEQ ID NO: 33536 - RNA, 23 nt, Artificial Sequence
  Chemically synthesized
gugcucucacuuuuuuuagcuua

SEQ ID NO: 33537 - RNA, 23 nt, Artificial Sequence
  Chemically synthesized
ugcucucacuuuuuuuagcuuag

SEQ ID NO: 33538 - RNA, 23 nt, Artificial Sequence
  Chemically synthesized
gcucucacuuuuuuuagcuuagc

SEQ ID NO: 33539 - RNA, 23 nt, Artificial Sequence
  Chemically synthesized
cucucacuuuuuuuagcuuagcu

SEQ ID NO: 33540 - RNA, 23 nt, Artificial Sequence
  Chemically synthesized
ucucacuuuuuuuagcuuagcuu

SEQ ID NO: 33541 - RNA, 23 nt, Artificial Sequence
  Chemically synthesized
cucacuuuuuuuagcuuagcuuc

SEQ ID NO: 33542 - RNA, 23 nt, Artificial Sequence
  Chemically synthesized
ugucgcugaucuuguuguuucaa

SEQ ID NO: 33543 - RNA, 23 nt, Artificial Sequence
  Chemically synthesized
gucgcugaucuuguuguuucaaa

SEQ ID NO: 33544 - RNA, 23 nt, Artificial Sequence
  Chemically synthesized
ucgcugaucuuguuguuucaaaa

SEQ ID NO: 33545 - RNA, 23 nt, Artificial Sequence
  Chemically synthesized
uucaaaaacuuuaagcgcuguuc

SEQ ID NO: 33546 - RNA, 23 nt, Artificial Sequence
  Chemically synthesized
ucaaaaacuuuaagcgcuguucc

SEQ ID NO: 33547 - RNA, 23 nt, Artificial Sequence
  Chemically synthesized
caaaaacuuuaagcgcuguuccu

SEQ ID NO: 33548 - RNA, 23 nt, Artificial Sequence
  Chemically synthesized
aaaaacuuuaagcgcuguuccuu

SEQ ID NO: 33549 - RNA, 23 nt, Artificial Sequence
  Chemically synthesized
aaaacuuuaagcgcuguuccuua

SEQ ID NO: 33550 - RNA, 23 nt, Artificial Sequence
  Chemically synthesized
auuacaacuguuuuuaaagucag

SEQ ID NO: 33551 - RNA, 23 nt, Artificial Sequence
  Chemically synthesized
uuacaacuguuuuuaaagucagc

SEQ ID NO: 33552 - RNA, 23 nt, Artificial Sequence
  Chemically synthesized
uacaacuguuuuuaaagucagcu

SEQ ID NO: 33553 - RNA, 23 nt, Artificial Sequence
  Chemically synthesized
acaacuguuuuuaaagucagcua

SEQ ID NO: 33554 - RNA, 23 nt, Artificial Sequence
  Chemically synthesized
caacuguuuuuaaagucagcuau

SEQ ID NO: 33555 - RNA, 23 nt, Artificial Sequence
  Chemically synthesized
aagaugcuacaaaaacucauaua

SEQ ID NO: 33556 - RNA, 23 nt, Artificial Sequence
  Chemically synthesized
auuguucacugacaaccaacuaa

SEQ ID NO: 33557 - RNA, 23 nt, Artificial Sequence
  Chemically synthesized
uuguucacugacaaccaacuaac

SEQ ID NO: 33558 - RNA, 23 nt, Artificial Sequence
  Chemically synthesized
uguucacugacaaccaacuaaca

SEQ ID NO: 33559 - RNA, 23 nt, Artificial Sequence
  Chemically synthesized
guucacugacaaccaacuaacag

SEQ ID NO: 33560 - RNA, 23 nt, Artificial Sequence
  Chemically synthesized
uucacugacaaccaacuaacagu

SEQ ID NO: 33561 - RNA, 23 nt, Artificial Sequence
  Chemically synthesized
ugacaaccaacuaacaguucuuc

SEQ ID NO: 33562 - RNA, 23 nt, Artificial Sequence
  Chemically synthesized
gacaaccaacuaacaguucuuca

SEQ ID NO: 33563 - RNA, 23 nt, Artificial Sequence
  Chemically synthesized
acaaccaacuaacaguucuucac

SEQ ID NO: 33564 - RNA, 23 nt, Artificial Sequence
  Chemically synthesized
caaccaacuaacaguucuucacu

SEQ ID NO: 33565 - RNA, 23 nt, Artificial Sequence
  Chemically synthesized
aaccaacuaacaguucuucacug

SEQ ID NO: 33566 - RNA, 23 nt, Artificial Sequence
  Chemically synthesized
ucacugacaauauacaagugugc

SEQ ID NO: 33567 - RNA, 23 nt, Artificial Sequence
  Chemically synthesized
cacugacaauauacaagugugca

SEQ ID NO: 33568 - RNA, 23 nt, Artificial Sequence
  Chemically synthesized
acugacaauauacaagugugcag

SEQ ID NO: 33569 - RNA, 23 nt, Artificial Sequence
  Chemically synthesized
cugacaauauacaagugugcagu

SEQ ID NO: 33570 - RNA, 23 nt, Artificial Sequence
  Chemically synthesized
ugacaauauacaagugugcagug

SEQ ID NO: 33571 - RNA, 23 nt, Artificial Sequence
  Chemically synthesized
auaaaugauccuauuuacuagac

SEQ ID NO: 33572 - RNA, 23 nt, Artificial Sequence
  Chemically synthesized
uaaaugauccuauuuacuagaca

SEQ ID NO: 33573 - RNA, 23 nt, Artificial Sequence
  Chemically synthesized
aaaugauccuauuuacuagacag

SEQ ID NO: 33574 - RNA, 23 nt, Artificial Sequence
  Chemically synthesized
aaugauccuauuuacuagacagg

SEQ ID NO: 33575 - RNA, 23 nt, Artificial Sequence
  Chemically synthesized
augauccuauuuacuagacagga

SEQ ID NO: 33576 - RNA, 23 nt, Artificial Sequence
  Chemically synthesized
uccuauuuacuagacaggauucu

SEQ ID NO: 33577 - RNA, 23 nt, Artificial Sequence
  Chemically synthesized
ccuauuuacuagacaggauucuu

SEQ ID NO: 33578 - RNA, 23 nt, Artificial Sequence
  Chemically synthesized
cuauuuacuagacaggauucuug

SEQ ID NO: 33579 - RNA, 23 nt, Artificial Sequence
  Chemically synthesized
uauuuacuagacaggauucuugu

SEQ ID NO: 33580 - RNA, 23 nt, Artificial Sequence
  Chemically synthesized
auuuacuagacaggauucuugua

SEQ ID NO: 33581 - RNA, 23 nt, Artificial Sequence
  Chemically synthesized
uagaaaacaggauugucgcugua

SEQ ID NO: 33582 - RNA, 23 nt, Artificial Sequence
  Chemically synthesized
aggauugucgcuguauacuuauc

SEQ ID NO: 33583 - RNA, 23 nt, Artificial Sequence
  Chemically synthesized
cuucuagagacauucuucaucgc

SEQ ID NO: 33584 - RNA, 23 nt, Artificial Sequence
  Chemically synthesized
uucuagagacauucuucaucgcu

SEQ ID NO: 33585 - RNA, 23 nt, Artificial Sequence
  Chemically synthesized
ucuagagacauucuucaucgcuu

SEQ ID NO: 33586 - RNA, 23 nt, Artificial Sequence
  Chemically synthesized
cuagagacauucuucaucgcuuu

SEQ ID NO: 33587 - RNA, 23 nt, Artificial Sequence
  Chemically synthesized
uagagacauucuucaucgcuuuc

SEQ ID NO: 33588 - RNA, 23 nt, Artificial Sequence
  Chemically synthesized
aucgcuuucaagcuacauuguca

SEQ ID NO: 33589 - RNA, 23 nt, Artificial Sequence
  Chemically synthesized
ucgcuuucaagcuacauugucau

SEQ ID NO: 33590 - RNA, 23 nt, Artificial Sequence
  Chemically synthesized
cgcuuucaagcuacauugucauu

SEQ ID NO: 33591 - RNA, 23 nt, Artificial Sequence
  Chemically synthesized
gcuuucaagcuacauugucauua

SEQ ID NO: 33592 - RNA, 23 nt, Artificial Sequence
  Chemically synthesized
cuuucaagcuacauugucauuaa

SEQ ID NO: 33593 - RNA, 23 nt, Artificial Sequence
  Chemically synthesized
aucccaaagcgcauaaaugacuc

SEQ ID NO: 33594 - RNA, 23 nt, Artificial Sequence
  Chemically synthesized
auucauuaugcccaucuucuccu

SEQ ID NO: 33595 - RNA, 23 nt, Artificial Sequence
  Chemically synthesized
uucauuaugcccaucuucuccug

SEQ ID NO: 33596 - RNA, 23 nt, Artificial Sequence
  Chemically synthesized
ucauuaugcccaucuucuccuga

SEQ ID NO: 33597 - RNA, 23 nt, Artificial Sequence
  Chemically synthesized
cauuaugcccaucuucuccugaa

SEQ ID NO: 33598 - RNA, 23 nt, Artificial Sequence
  Chemically synthesized
auuaugcccaucuucuccugaac

SEQ ID NO: 33599 - RNA, 23 nt, Artificial Sequence
  Chemically synthesized
gagcacugaguguagccuuccuc

SEQ ID NO: 33600 - RNA, 23 nt, Artificial Sequence
  Chemically synthesized
agcacugaguguagccuuccucc

SEQ ID NO: 33601 - RNA, 23 nt, Artificial Sequence
  Chemically synthesized
gcacugaguguagccuuccucca

SEQ ID NO: 33602 - RNA, 23 nt, Artificial Sequence
  Chemically synthesized
cacugaguguagccuuccuccau

SEQ ID NO: 33603 - RNA, 23 nt, Artificial Sequence
  Chemically synthesized
acugaguguagccuuccuccauu

SEQ ID NO: 33604 - RNA, 23 nt, Artificial Sequence
  Chemically synthesized
uccaccaaaaacuuacacacuug

SEQ ID NO: 33605 - RNA, 23 nt, Artificial Sequence
  Chemically synthesized
cagcagcauuuacauuuacacca

SEQ ID NO: 33606 - RNA, 23 nt, Artificial Sequence
  Chemically synthesized
agcagcauuuacauuuacaccaa

SEQ ID NO: 33607 - RNA, 23 nt, Artificial Sequence
  Chemically synthesized
gcagcauuuacauuuacaccaaa

SEQ ID NO: 33608 - RNA, 23 nt, Artificial Sequence
  Chemically synthesized
cagcauuuacauuuacaccaaac

SEQ ID NO: 33609 - RNA, 23 nt, Artificial Sequence
  Chemically synthesized
agcauuuacauuuacaccaaacu

SEQ ID NO: 33610 - RNA, 23 nt, Artificial Sequence
  Chemically synthesized
gcauuuacauuuacaccaaacug

SEQ ID NO: 33611 - RNA, 23 nt, Artificial Sequence
  Chemically synthesized
aaacuguaccaggaacuuaacga

SEQ ID NO: 33612 - RNA, 23 nt, Artificial Sequence
  Chemically synthesized
aacuguaccaggaacuuaacgau

SEQ ID NO: 33613 - RNA, 23 nt, Artificial Sequence
  Chemically synthesized
acuguaccaggaacuuaacgauu

SEQ ID NO: 33614 - RNA, 23 nt, Artificial Sequence
  Chemically synthesized
cuguaccaggaacuuaacgauuu

SEQ ID NO: 33615 - RNA, 23 nt, Artificial Sequence
  Chemically synthesized
uguaccaggaacuuaacgauuuc

SEQ ID NO: 33616 - RNA, 23 nt, Artificial Sequence
  Chemically synthesized
auucucuguacaaggucaaauuc

SEQ ID NO: 33617 - RNA, 23 nt, Artificial Sequence
  Chemically synthesized
ucucuguacaaggucaaauucuc

SEQ ID NO: 33618 - RNA, 23 nt, Artificial Sequence
  Chemically synthesized
gucaaauucucccuccaaagacg

SEQ ID NO: 33619 - RNA, 23 nt, Artificial Sequence
  Chemically synthesized
ucaaauucucccuccaaagacga

SEQ ID NO: 33620 - RNA, 23 nt, Artificial Sequence
  Chemically synthesized
caaauucucccuccaaagacgaa

SEQ ID NO: 33621 - RNA, 23 nt, Artificial Sequence
  Chemically synthesized
aaauucucccuccaaagacgaau

SEQ ID NO: 33622 - RNA, 23 nt, Artificial Sequence
  Chemically synthesized
aauucucccuccaaagacgaauc

SEQ ID NO: 33623 - RNA, 23 nt, Artificial Sequence
  Chemically synthesized
guacacaucaagcacauguggag

SEQ ID NO: 33624 - RNA, 23 nt, Artificial Sequence
  Chemically synthesized
uacacaucaagcacauguggagc

SEQ ID NO: 33625 - RNA, 23 nt, Artificial Sequence
  Chemically synthesized
ucguuccucugacuuccaaaucg

SEQ ID NO: 33626 - RNA, 23 nt, Artificial Sequence
  Chemically synthesized
cguuccucugacuuccaaaucgu

SEQ ID NO: 33627 - RNA, 23 nt, Artificial Sequence
  Chemically synthesized
guuccucugacuuccaaaucguu

SEQ ID NO: 33628 - RNA, 23 nt, Artificial Sequence
  Chemically synthesized
uuccucugacuuccaaaucguug

SEQ ID NO: 33629 - RNA, 23 nt, Artificial Sequence
  Chemically synthesized
uccucugacuuccaaaucguuga

SEQ ID NO: 33630 - RNA, 23 nt, Artificial Sequence
  Chemically synthesized
uggauuucuacugggcuuucuga

SEQ ID NO: 33631 - RNA, 23 nt, Artificial Sequence
  Chemically synthesized
ggauuucuacugggcuuucugag

SEQ ID NO: 33632 - RNA, 23 nt, Artificial Sequence
  Chemically synthesized
gauuucuacugggcuuucugagc

SEQ ID NO: 33633 - RNA, 23 nt, Artificial Sequence
  Chemically synthesized
auuucuacugggcuuucugagcu

SEQ ID NO: 33634 - RNA, 23 nt, Artificial Sequence
  Chemically synthesized
uuucuacugggcuuucugagcug

SEQ ID NO: 33635 - RNA, 23 nt, Artificial Sequence
  Chemically synthesized
gccuuggugcguuagacaguuuc

SEQ ID NO: 33636 - RNA, 23 nt, Artificial Sequence
  Chemically synthesized
ccuuggugcguuagacaguuucu

SEQ ID NO: 33637 - RNA, 23 nt, Artificial Sequence
  Chemically synthesized
cuuggugcguuagacaguuucuu

SEQ ID NO: 33638 - RNA, 23 nt, Artificial Sequence
  Chemically synthesized
uuggugcguuagacaguuucuuu

SEQ ID NO: 33639 - RNA, 23 nt, Artificial Sequence
  Chemically synthesized
uggugcguuagacaguuucuuuc

SEQ ID NO: 33640 - RNA, 23 nt, Artificial Sequence
  Chemically synthesized
aggcuucuaggucagcaucacuc

SEQ ID NO: 33641 - RNA, 23 nt, Artificial Sequence
  Chemically synthesized
ggcuucuaggucagcaucacucu

SEQ ID NO: 33642 - RNA, 23 nt, Artificial Sequence
  Chemically synthesized
gcuucuaggucagcaucacucug

SEQ ID NO: 33643 - RNA, 23 nt, Artificial Sequence
  Chemically synthesized
cuucuaggucagcaucacucugg

SEQ ID NO: 33644 - RNA, 23 nt, Artificial Sequence
  Chemically synthesized
uucuaggucagcaucacucuggu

SEQ ID NO: 33645 - RNA, 23 nt, Artificial Sequence
  Chemically synthesized
caucaaacauucgcucauuaucc

SEQ ID NO: 33646 - RNA, 23 nt, Artificial Sequence
  Chemically synthesized
accgaagguaugcugggagauag

SEQ ID NO: 33647 - RNA, 23 nt, Artificial Sequence
  Chemically synthesized
ccgaagguaugcugggagauagc

SEQ ID NO: 33648 - RNA, 23 nt, Artificial Sequence
  Chemically synthesized
cgaagguaugcugggagauagca

SEQ ID NO: 33649 - RNA, 23 nt, Artificial Sequence
  Chemically synthesized
gaagguaugcugggagauagcag

SEQ ID NO: 33650 - RNA, 23 nt, Artificial Sequence
  Chemically synthesized
aagguaugcugggagauagcagc

SEQ ID NO: 33651 - RNA, 23 nt, Artificial Sequence
  Chemically synthesized
acggaacaacuguugacaacugc

SEQ ID NO: 33652 - RNA, 23 nt, Artificial Sequence
  Chemically synthesized
cggaacaacuguugacaacugcu

SEQ ID NO: 33653 - RNA, 23 nt, Artificial Sequence
  Chemically synthesized
ggaacaacuguugacaacugcug

SEQ ID NO: 33654 - RNA, 23 nt, Artificial Sequence
  Chemically synthesized
gaacaacuguugacaacugcuga

SEQ ID NO: 33655 - RNA, 23 nt, Artificial Sequence
  Chemically synthesized
aacaacuguugacaacugcugag

SEQ ID NO: 33656 - RNA, 23 nt, Artificial Sequence
  Chemically synthesized
ugagcaucccgcaagauaucuuc

SEQ ID NO: 33657 - RNA, 23 nt, Artificial Sequence
  Chemically synthesized
gagcaucccgcaagauaucuuca

SEQ ID NO: 33658 - RNA, 23 nt, Artificial Sequence
  Chemically synthesized
agcaucccgcaagauaucuucac

SEQ ID NO: 33659 - RNA, 23 nt, Artificial Sequence
  Chemically synthesized
gcaucccgcaagauaucuucacu

SEQ ID NO: 33660 - RNA, 23 nt, Artificial Sequence
  Chemically synthesized
caucccgcaagauaucuucacug

SEQ ID NO: 33661 - RNA, 23 nt, Artificial Sequence
  Chemically synthesized
guucuuccucagaguaccaaagg

SEQ ID NO: 33662 - RNA, 23 nt, Artificial Sequence
  Chemically synthesized
uucuuccucagaguaccaaagga

SEQ ID NO: 33663 - RNA, 23 nt, Artificial Sequence
  Chemically synthesized
ucuuccucagaguaccaaaggaa

SEQ ID NO: 33664 - RNA, 23 nt, Artificial Sequence
  Chemically synthesized
cuuccucagaguaccaaaggaag

SEQ ID NO: 33665 - RNA, 23 nt, Artificial Sequence
  Chemically synthesized
uuccucagaguaccaaaggaagg

SEQ ID NO: 33666 - RNA, 23 nt, Artificial Sequence
  Chemically synthesized
aucaaacauugagaacggacgca

SEQ ID NO: 33667 - RNA, 23 nt, Artificial Sequence
  Chemically synthesized
ucaaacauugagaacggacgcac

SEQ ID NO: 33668 - RNA, 23 nt, Artificial Sequence
  Chemically synthesized
caaacauugagaacggacgcacu

SEQ ID NO: 33669 - RNA, 23 nt, Artificial Sequence
  Chemically synthesized
aaacauugagaacggacgcacuu

SEQ ID NO: 33670 - RNA, 23 nt, Artificial Sequence
  Chemically synthesized
aacauugagaacggacgcacuuu

SEQ ID NO: 33671 - RNA, 23 nt, Artificial Sequence
  Chemically synthesized
aucaacuugauccagagcauucc

SEQ ID NO: 33672 - RNA, 23 nt, Artificial Sequence
  Chemically synthesized
ucaacuugauccagagcauuccc

SEQ ID NO: 33673 - RNA, 23 nt, Artificial Sequence
  Chemically synthesized
caacuugauccagagcauuccca

SEQ ID NO: 33674 - RNA, 23 nt, Artificial Sequence
  Chemically synthesized
aacuugauccagagcauucccag

SEQ ID NO: 33675 - RNA, 23 nt, Artificial Sequence
  Chemically synthesized
acuugauccagagcauucccagu

SEQ ID NO: 33676 - RNA, 23 nt, Artificial Sequence
  Chemically synthesized
gggaaaagaucugcauuugaagg

SEQ ID NO: 33677 - RNA, 23 nt, Artificial Sequence
  Chemically synthesized
uuugaaggacuccaaucagggcc

SEQ ID NO: 33678 - RNA, 23 nt, Artificial Sequence
  Chemically synthesized
uuuccaucagaugaaacugguag

SEQ ID NO: 33679 - RNA, 23 nt, Artificial Sequence
  Chemically synthesized
gcauauuguuucuggaguaacug

SEQ ID NO: 33680 - RNA, 23 nt, Artificial Sequence
  Chemically synthesized
uaacacgcuuauccaugacugcc

SEQ ID NO: 33681 - RNA, 23 nt, Artificial Sequence
  Chemically synthesized
uuacgcuuauucaaacacucccu

SEQ ID NO: 33682 - RNA, 23 nt, Artificial Sequence
  Chemically synthesized
aucuguucaauuuccuccacaag

SEQ ID NO: 33683 - RNA, 23 nt, Artificial Sequence
  Chemically synthesized
agugcugcucauuguuacugaga

SEQ ID NO: 33684 - RNA, 23 nt, Artificial Sequence
  Chemically synthesized
gugcugcucauuguuacugagau

SEQ ID NO: 33685 - RNA, 23 nt, Artificial Sequence
  Chemically synthesized
ugcugcucauuguuacugagaua

SEQ ID NO: 33686 - RNA, 23 nt, Artificial Sequence
  Chemically synthesized
agccuuuuaaguuucuccugcuc

SEQ ID NO: 33687 - RNA, 23 nt, Artificial Sequence
  Chemically synthesized
gccuuuuaaguuucuccugcuca

SEQ ID NO: 33688 - RNA, 23 nt, Artificial Sequence
  Chemically synthesized
ccuuuuaaguuucuccugcucag

SEQ ID NO: 33689 - RNA, 23 nt, Artificial Sequence
  Chemically synthesized
cuuuuaaguuucuccugcucagc

SEQ ID NO: 33690 - RNA, 23 nt, Artificial Sequence
  Chemically synthesized
uuuuaaguuucuccugcucagca

SEQ ID NO: 33691 - RNA, 23 nt, Artificial Sequence
  Chemically synthesized
gcucauuguuacugagauacacg

SEQ ID NO: 33692 - RNA, 23 nt, Artificial Sequence
  Chemically synthesized
ucagcaagagucagauccauccu

SEQ ID NO: 33693 - RNA, 23 nt, Artificial Sequence
  Chemically synthesized
cagcaagagucagauccauccua

SEQ ID NO: 33694 - RNA, 23 nt, Artificial Sequence
  Chemically synthesized
agcaagagucagauccauccuag

SEQ ID NO: 33695 - RNA, 23 nt, Artificial Sequence
  Chemically synthesized
gcaagagucagauccauccuagg

SEQ ID NO: 33696 - RNA, 23 nt, Artificial Sequence
  Chemically synthesized
caagagucagauccauccuagga

SEQ ID NO: 33697 - RNA, 23 nt, Artificial Sequence
  Chemically synthesized
aagagucagauccauccuaggac

SEQ ID NO: 33698 - RNA, 22 nt, Artificial Sequence
  Chemically synthesized
agagucagauccauccuaggac

SEQ ID NO: 33699 - RNA, 23 nt, Artificial Sequence
  Chemically synthesized
uaugaucuugacaaauauuacgg

SEQ ID NO: 33700 - RNA, 23 nt, Artificial Sequence
  Chemically synthesized
cuugacaaauauuacggguaagu

SEQ ID NO: 33701 - RNA, 23 nt, Artificial Sequence
  Chemically synthesized
guagcaaguuucuaauuucugag

SEQ ID NO: 33702 - RNA, 23 nt, Artificial Sequence
  Chemically synthesized
uagcaaguuucuaauuucugaga

SEQ ID NO: 33703 - RNA, 23 nt, Artificial Sequence
  Chemically synthesized
agcaaguuucuaauuucugagau

SEQ ID NO: 33704 - RNA, 23 nt, Artificial Sequence
  Chemically synthesized
gcaaguuucuaauuucugagaua

SEQ ID NO: 33705 - RNA, 23 nt, Artificial Sequence
  Chemically synthesized
caaguuucuaauuucugagauac

SEQ ID NO: 33706 - RNA, 23 nt, Artificial Sequence
  Chemically synthesized
caccguucuccuuucuucgauau

SEQ ID NO: 33707 - RNA, 23 nt, Artificial Sequence
  Chemically synthesized
cugguaccguagcuuaguuucaa

SEQ ID NO: 33708 - RNA, 23 nt, Artificial Sequence
  Chemically synthesized
ugguaccguagcuuaguuucaau

SEQ ID NO: 33709 - RNA, 23 nt, Artificial Sequence
  Chemically synthesized
gguaccguagcuuaguuucaaua

SEQ ID NO: 33710 - RNA, 23 nt, Artificial Sequence
  Chemically synthesized
guaccguagcuuaguuucaauau

SEQ ID NO: 33711 - RNA, 23 nt, Artificial Sequence
  Chemically synthesized
uaccguagcuuaguuucaauauu

SEQ ID NO: 33712 - RNA, 23 nt, Artificial Sequence
  Chemically synthesized
cccaacugcccaauaaaugaucc

SEQ ID NO: 33713 - RNA, 23 nt, Artificial Sequence
  Chemically synthesized
ccaacugcccaauaaaugauccu

SEQ ID NO: 33714 - RNA, 23 nt, Artificial Sequence
  Chemically synthesized
caacugcccaauaaaugauccua

SEQ ID NO: 33715 - RNA, 23 nt, Artificial Sequence
  Chemically synthesized
aacugcccaauaaaugauccuau

SEQ ID NO: 33716 - RNA, 23 nt, Artificial Sequence
  Chemically synthesized
acugcccaauaaaugauccuauu

SEQ ID NO: 33717 - RNA, 23 nt, Artificial Sequence
  Chemically synthesized
gcugacguagaugcuuuauuuca

SEQ ID NO: 33718 - RNA, 23 nt, Artificial Sequence
  Chemically synthesized
cugacguagaugcuuuauuucau

SEQ ID NO: 33719 - RNA, 23 nt, Artificial Sequence
  Chemically synthesized
ugacguagaugcuuuauuucauc

SEQ ID NO: 33720 - RNA, 23 nt, Artificial Sequence
  Chemically synthesized
gacguagaugcuuuauuucauca

SEQ ID NO: 33721 - RNA, 23 nt, Artificial Sequence
  Chemically synthesized
acguagaugcuuuauuucaucac

SEQ ID NO: 33722 - RNA, 23 nt, Artificial Sequence
  Chemically synthesized
ugcuuuauuucaucacgcuaaau

SEQ ID NO: 33723 - RNA, 23 nt, Artificial Sequence
  Chemically synthesized
ucuucuagagacauucuucaucg

SEQ ID NO: 33724 - RNA, 23 nt, Artificial Sequence
  Chemically synthesized
agagacauucuucaucgcuuuca

SEQ ID NO: 33725 - RNA, 23 nt, Artificial Sequence
  Chemically synthesized
gagacauucuucaucgcuuucaa

SEQ ID NO: 33726 - RNA, 23 nt, Artificial Sequence
  Chemically synthesized
agacauucuucaucgcuuucaag

SEQ ID NO: 33727 - RNA, 23 nt, Artificial Sequence
  Chemically synthesized
gacauucuucaucgcuuucaagc

SEQ ID NO: 33728 - RNA, 23 nt, Artificial Sequence
  Chemically synthesized
acauucuucaucgcuuucaagcu

SEQ ID NO: 33729 - RNA, 23 nt, Artificial Sequence
  Chemically synthesized
uuucaagcuacauugucauuaaa

SEQ ID NO: 33730 - RNA, 23 nt, Artificial Sequence
  Chemically synthesized
cguauuacuucuucuuaacagag

SEQ ID NO: 33731 - RNA, 23 nt, Artificial Sequence
  Chemically synthesized
guauuacuucuucuuaacagaga

SEQ ID NO: 33732 - RNA, 23 nt, Artificial Sequence
  Chemically synthesized
uauuacuucuucuuaacagagau

SEQ ID NO: 33733 - RNA, 23 nt, Artificial Sequence
  Chemically synthesized
auuacuucuucuuaacagagauu

SEQ ID NO: 33734 - RNA, 23 nt, Artificial Sequence
  Chemically synthesized
uuacuucuucuuaacagagauua

SEQ ID NO: 33735 - RNA, 23 nt, Artificial Sequence
  Chemically synthesized
cuuuuuaaacuuggauccugaga

SEQ ID NO: 33736 - RNA, 23 nt, Artificial Sequence
  Chemically synthesized
uuuuuaaacuuggauccugagau

SEQ ID NO: 33737 - RNA, 23 nt, Artificial Sequence
  Chemically synthesized
uuuuaaacuuggauccugagauc

SEQ ID NO: 33738 - RNA, 23 nt, Artificial Sequence
  Chemically synthesized
uuaugcccaucuucuccugaacu

SEQ ID NO: 33739 - RNA, 23 nt, Artificial Sequence
  Chemically synthesized
cuccauaaagaaauugggagcac

SEQ ID NO: 33740 - RNA, 23 nt, Artificial Sequence
  Chemically synthesized
uccauaaagaaauugggagcacu

SEQ ID NO: 33741 - RNA, 23 nt, Artificial Sequence
  Chemically synthesized
ccauaaagaaauugggagcacug

SEQ ID NO: 33742 - RNA, 23 nt, Artificial Sequence
  Chemically synthesized
cauaaagaaauugggagcacuga

SEQ ID NO: 33743 - RNA, 23 nt, Artificial Sequence
  Chemically synthesized
auaaagaaauugggagcacugag

SEQ ID NO: 33744 - RNA, 23 nt, Artificial Sequence
  Chemically synthesized
aguguagccuuccuccauuuccu

SEQ ID NO: 33745 - RNA, 23 nt, Artificial Sequence
  Chemically synthesized
guguagccuuccuccauuuccuc

SEQ ID NO: 33746 - RNA, 23 nt, Artificial Sequence
  Chemically synthesized
uguagccuuccuccauuuccucg

SEQ ID NO: 33747 - RNA, 23 nt, Artificial Sequence
  Chemically synthesized
guagccuuccuccauuuccucgc

SEQ ID NO: 33748 - RNA, 23 nt, Artificial Sequence
  Chemically synthesized
uagccuuccuccauuuccucgca

SEQ ID NO: 33749 - RNA, 23 nt, Artificial Sequence
  Chemically synthesized
cuccauuuccucgcacuuaucug

SEQ ID NO: 33750 - RNA, 23 nt, Artificial Sequence
  Chemically synthesized
uccauuuccucgcacuuaucugc

SEQ ID NO: 33751 - RNA, 23 nt, Artificial Sequence
  Chemically synthesized
ccauuuccucgcacuuaucugca

SEQ ID NO: 33752 - RNA, 23 nt, Artificial Sequence
  Chemically synthesized
cauuuccucgcacuuaucugcag

SEQ ID NO: 33753 - RNA, 23 nt, Artificial Sequence
  Chemically synthesized
auuuccucgcacuuaucugcagc

SEQ ID NO: 33754 - RNA, 23 nt, Artificial Sequence
  Chemically synthesized
uacacacuuggacguuguuacau

SEQ ID NO: 33755 - RNA, 23 nt, Artificial Sequence
  Chemically synthesized
acacacuuggacguuguuacaug

SEQ ID NO: 33756 - RNA, 23 nt, Artificial Sequence
  Chemically synthesized
ccagguacacaucaagcacaugu

SEQ ID NO: 33757 - RNA, 23 nt, Artificial Sequence
  Chemically synthesized
cagguacacaucaagcacaugug

SEQ ID NO: 33758 - RNA, 23 nt, Artificial Sequence
  Chemically synthesized
agguacacaucaagcacaugugg

SEQ ID NO: 33759 - RNA, 23 nt, Artificial Sequence
  Chemically synthesized
gguacacaucaagcacaugugga

SEQ ID NO: 33760 - RNA, 23 nt, Artificial Sequence
  Chemically synthesized
ccucuggauuugguucuucuggg

SEQ ID NO: 33761 - RNA, 23 nt, Artificial Sequence
  Chemically synthesized
cucuggauuugguucuucugggu

SEQ ID NO: 33762 - RNA, 23 nt, Artificial Sequence
  Chemically synthesized
ucuggauuugguucuucuggguu

SEQ ID NO: 33763 - RNA, 23 nt, Artificial Sequence
  Chemically synthesized
cuggauuugguucuucuggguua

SEQ ID NO: 33764 - RNA, 23 nt, Artificial Sequence
  Chemically synthesized
uggauuugguucuucuggguuau

SEQ ID NO: 33765 - RNA, 23 nt, Artificial Sequence
  Chemically synthesized
uauucuggagauuugggcuguug

SEQ ID NO: 33766 - RNA, 23 nt, Artificial Sequence
  Chemically synthesized
auucuggagauuugggcuguugu

SEQ ID NO: 33767 - RNA, 23 nt, Artificial Sequence
  Chemically synthesized
uucuggagauuugggcuguuguc

SEQ ID NO: 33768 - RNA, 23 nt, Artificial Sequence
  Chemically synthesized
ucccucaggcucauaaucaaggc

SEQ ID NO: 33769 - RNA, 23 nt, Artificial Sequence
  Chemically synthesized
cccucaggcucauaaucaaggcc

SEQ ID NO: 33770 - RNA, 23 nt, Artificial Sequence
  Chemically synthesized
ccucaggcucauaaucaaggccu

SEQ ID NO: 33771 - RNA, 23 nt, Artificial Sequence
  Chemically synthesized
cucaggcucauaaucaaggccug

SEQ ID NO: 33772 - RNA, 23 nt, Artificial Sequence
  Chemically synthesized
ucaggcucauaaucaaggccugg

SEQ ID NO: 33773 - RNA, 23 nt, Artificial Sequence
  Chemically synthesized
acuguucucuguacuggcauucc

SEQ ID NO: 33774 - RNA, 23 nt, Artificial Sequence
  Chemically synthesized
cuguucucuguacuggcauuccc

SEQ ID NO: 33775 - RNA, 23 nt, Artificial Sequence
  Chemically synthesized
uguucucuguacuggcauucccc

SEQ ID NO: 33776 - RNA, 23 nt, Artificial Sequence
  Chemically synthesized
guucucuguacuggcauucccca

SEQ ID NO: 33777 - RNA, 23 nt, Artificial Sequence
  Chemically synthesized
uucucuguacuggcauuccccac

SEQ ID NO: 33778 - RNA, 23 nt, Artificial Sequence
  Chemically synthesized
uguaaauauggauucuggauuuc

SEQ ID NO: 33779 - RNA, 23 nt, Artificial Sequence
  Chemically synthesized
guaaauauggauucuggauuucu

SEQ ID NO: 33780 - RNA, 23 nt, Artificial Sequence
  Chemically synthesized
uaaauauggauucuggauuucua

SEQ ID NO: 33781 - RNA, 23 nt, Artificial Sequence
  Chemically synthesized
aaauauggauucuggauuucuac

SEQ ID NO: 33782 - RNA, 23 nt, Artificial Sequence
  Chemically synthesized
aauauggauucuggauuucuacu

SEQ ID NO: 33783 - RNA, 23 nt, Artificial Sequence
  Chemically synthesized
ucuggauuucuacugggcuuucu

SEQ ID NO: 33784 - RNA, 23 nt, Artificial Sequence
  Chemically synthesized
cuggauuucuacugggcuuucug

SEQ ID NO: 33785 - RNA, 23 nt, Artificial Sequence
  Chemically synthesized
uucuacugggcuuucugagcugg

SEQ ID NO: 33786 - RNA, 23 nt, Artificial Sequence
  Chemically synthesized
ggccuuggugcguuagacaguuu

SEQ ID NO: 33787 - RNA, 23 nt, Artificial Sequence
  Chemically synthesized
agacaguuucuuucguaaggcuu

SEQ ID NO: 33788 - RNA, 23 nt, Artificial Sequence
  Chemically synthesized
gacaguuucuuucguaaggcuuc

SEQ ID NO: 33789 - RNA, 23 nt, Artificial Sequence
  Chemically synthesized
gcaucacucugguuucgguaagg

SEQ ID NO: 33790 - RNA, 23 nt, Artificial Sequence
  Chemically synthesized
caucacucugguuucgguaagga

SEQ ID NO: 33791 - RNA, 23 nt, Artificial Sequence
  Chemically synthesized
aucacucugguuucgguaaggau

SEQ ID NO: 33792 - RNA, 23 nt, Artificial Sequence
  Chemically synthesized
ucacucugguuucgguaaggauu

SEQ ID NO: 33793 - RNA, 23 nt, Artificial Sequence
  Chemically synthesized
cacucugguuucgguaaggauua

SEQ ID NO: 33794 - RNA, 23 nt, Artificial Sequence
  Chemically synthesized
cgguaaggauuagauaagaaagg

SEQ ID NO: 33795 - RNA, 23 nt, Artificial Sequence
  Chemically synthesized
gguaaggauuagauaagaaaggc

SEQ ID NO: 33796 - RNA, 23 nt, Artificial Sequence
  Chemically synthesized
guaaggauuagauaagaaaggca

SEQ ID NO: 33797 - RNA, 23 nt, Artificial Sequence
  Chemically synthesized
uaaggauuagauaagaaaggcag

SEQ ID NO: 33798 - RNA, 23 nt, Artificial Sequence
  Chemically synthesized
aaggauuagauaagaaaggcagu

SEQ ID NO: 33799 - RNA, 23 nt, Artificial Sequence
  Chemically synthesized
aggauuagauaagaaaggcagua

SEQ ID NO: 33800 - RNA, 23 nt, Artificial Sequence
  Chemically synthesized
aaauguucucugggugcugcugu

SEQ ID NO: 33801 - RNA, 23 nt, Artificial Sequence
  Chemically synthesized
gcaauuacaggcuuaccauauac

SEQ ID NO: 33802 - RNA, 23 nt, Artificial Sequence
  Chemically synthesized
caauuacaggcuuaccauauaca

SEQ ID NO: 33803 - RNA, 23 nt, Artificial Sequence
  Chemically synthesized
aauuacaggcuuaccauauacac

SEQ ID NO: 33804 - RNA, 23 nt, Artificial Sequence
  Chemically synthesized
auuacaggcuuaccauauacacu

SEQ ID NO: 33805 - RNA, 23 nt, Artificial Sequence
  Chemically synthesized
uuacaggcuuaccauauacacuu

SEQ ID NO: 33806 - RNA, 23 nt, Artificial Sequence
  Chemically synthesized
cuggagaaagggucuggucuugg

SEQ ID NO: 33807 - RNA, 23 nt, Artificial Sequence
  Chemically synthesized
uggagaaagggucuggucuuggc

SEQ ID NO: 33808 - RNA, 23 nt, Artificial Sequence
  Chemically synthesized
ggagaaagggucuggucuuggcc

SEQ ID NO: 33809 - RNA, 23 nt, Artificial Sequence
  Chemically synthesized
gagaaagggucuggucuuggcca

SEQ ID NO: 33810 - RNA, 23 nt, Artificial Sequence
  Chemically synthesized
agaaagggucuggucuuggccaa

SEQ ID NO: 33811 - RNA, 23 nt, Artificial Sequence
  Chemically synthesized
ccugcugguuuugguuuaguucc

SEQ ID NO: 33812 - RNA, 23 nt, Artificial Sequence
  Chemically synthesized
acuuuagccacauuuuuauuugc

SEQ ID NO: 33813 - RNA, 23 nt, Artificial Sequence
  Chemically synthesized
cccgcaagauaucuucacugcuc

SEQ ID NO: 33814 - RNA, 23 nt, Artificial Sequence
  Chemically synthesized
auaucuucacugcucugguucuu

SEQ ID NO: 33815 - RNA, 23 nt, Artificial Sequence
  Chemically synthesized
ccggguucuuugcacagauccac

SEQ ID NO: 33816 - RNA, 23 nt, Artificial Sequence
  Chemically synthesized
ggucuacugcaucaaacauugag

SEQ ID NO: 33817 - RNA, 23 nt, Artificial Sequence
  Chemically synthesized
gucuacugcaucaaacauugaga

SEQ ID NO: 33818 - RNA, 23 nt, Artificial Sequence
  Chemically synthesized
ucuacugcaucaaacauugagaa

SEQ ID NO: 33819 - RNA, 23 nt, Artificial Sequence
  Chemically synthesized
cuacugcaucaaacauugagaac

SEQ ID NO: 33820 - RNA, 23 nt, Artificial Sequence
  Chemically synthesized
uacugcaucaaacauugagaacg

SEQ ID NO: 33821 - RNA, 23 nt, Artificial Sequence
  Chemically synthesized
acgcacuuucuucucuuucuccc

SEQ ID NO: 33822 - RNA, 23 nt, Artificial Sequence
  Chemically synthesized
cgcacuuucuucucuuucucccu

SEQ ID NO: 33823 - RNA, 23 nt, Artificial Sequence
  Chemically synthesized
gcacuuucuucucuuucucccuc

SEQ ID NO: 33824 - RNA, 23 nt, Artificial Sequence
  Chemically synthesized
cacuuucuucucuuucucccuca

SEQ ID NO: 33825 - RNA, 23 nt, Artificial Sequence
  Chemically synthesized
acuuucuucucuuucucccucag

SEQ ID NO: 33826 - RNA, 23 nt, Artificial Sequence
  Chemically synthesized
cuugauccagagcauucccagug

SEQ ID NO: 33827 - RNA, 23 nt, Artificial Sequence
  Chemically synthesized
uugauccagagcauucccagugc

SEQ ID NO: 33828 - RNA, 23 nt, Artificial Sequence
  Chemically synthesized
ugauccagagcauucccagugcu

SEQ ID NO: 33829 - RNA, 23 nt, Artificial Sequence
  Chemically synthesized
gauccagagcauucccagugcuu

SEQ ID NO: 33830 - RNA, 23 nt, Artificial Sequence
  Chemically synthesized
auccagagcauucccagugcuuu

SEQ ID NO: 33831 - RNA, 23 nt, Artificial Sequence
  Chemically synthesized
caacuggauggauuuuagagccu

SEQ ID NO: 33832 - RNA, 23 nt, Artificial Sequence
  Chemically synthesized
aacuggauggauuuuagagccuu

SEQ ID NO: 33833 - RNA, 23 nt, Artificial Sequence
  Chemically synthesized
acuggauggauuuuagagccuuu

SEQ ID NO: 33834 - RNA, 23 nt, Artificial Sequence
  Chemically synthesized
cuggauggauuuuagagccuuua

SEQ ID NO: 33835 - RNA, 23 nt, Artificial Sequence
  Chemically synthesized
uggauggauuuuagagccuuuag

SEQ ID NO: 33836 - RNA, 23 nt, Artificial Sequence
  Chemically synthesized
ggauggauuuuagagccuuuagu

SEQ ID NO: 33837 - RNA, 23 nt, Artificial Sequence
  Chemically synthesized
gauggauuuuagagccuuuaguu

SEQ ID NO: 33838 - RNA, 23 nt, Artificial Sequence
  Chemically synthesized
auggauuuuagagccuuuaguuu

SEQ ID NO: 33839 - RNA, 23 nt, Artificial Sequence
  Chemically synthesized
ccacgucucugcauauuguuucu

SEQ ID NO: 33840 - RNA, 23 nt, Artificial Sequence
  Chemically synthesized
cacgucucugcauauuguuucug

SEQ ID NO: 33841 - RNA, 23 nt, Artificial Sequence
  Chemically synthesized
gucuguauuuucaucggccccuc

SEQ ID NO: 33842 - RNA, 23 nt, Artificial Sequence
  Chemically synthesized
ucuguauuuucaucggccccucu

SEQ ID NO: 33843 - RNA, 23 nt, Artificial Sequence
  Chemically synthesized
ugcauauuguuucuggaguaacu

SEQ ID NO: 33844 - RNA, 23 nt, Artificial Sequence
  Chemically synthesized
ggggaagauuuccaucagaugaa

SEQ ID NO: 33845 - RNA, 23 nt, Artificial Sequence
  Chemically synthesized
gggaagauuuccaucagaugaaa

SEQ ID NO: 33846 - RNA, 23 nt, Artificial Sequence
  Chemically synthesized
ggaagauuuccaucagaugaaac

SEQ ID NO: 33847 - RNA, 23 nt, Artificial Sequence
  Chemically synthesized
ccggucccucagcucauuaacac

SEQ ID NO: 33848 - RNA, 23 nt, Artificial Sequence
  Chemically synthesized
cggucccucagcucauuaacacg

SEQ ID NO: 33849 - RNA, 23 nt, Artificial Sequence
  Chemically synthesized
caugacugccacuucugaauuac

SEQ ID NO: 33850 - RNA, 23 nt, Artificial Sequence
  Chemically synthesized
augacugccacuucugaauuacg

SEQ ID NO: 33851 - RNA, 23 nt, Artificial Sequence
  Chemically synthesized
ucuguuguuguagcuuggcauuc

SEQ ID NO: 33852 - RNA, 23 nt, Artificial Sequence
  Chemically synthesized
gauucaauuuguuucuuagcugc

SEQ ID NO: 33853 - RNA, 23 nt, Artificial Sequence
  Chemically synthesized
uagucucuucuguuccacguggc

SEQ ID NO: 33854 - RNA, 23 nt, Artificial Sequence
  Chemically synthesized
agucucuucuguuccacguggcc

SEQ ID NO: 33855 - RNA, 23 nt, Artificial Sequence
  Chemically synthesized
gucucuucuguuccacguggccu

SEQ ID NO: 33856 - RNA, 23 nt, Artificial Sequence
  Chemically synthesized
ucucuucuguuccacguggccuu

SEQ ID NO: 33857 - RNA, 23 nt, Artificial Sequence
  Chemically synthesized
uuuagcuuagcuuccugauucuc

SEQ ID NO: 33858 - RNA, 23 nt, Artificial Sequence
  Chemically synthesized
uuagcuuagcuuccugauucuca

SEQ ID NO: 33859 - RNA, 23 nt, Artificial Sequence
  Chemically synthesized
uagcuuagcuuccugauucucag

SEQ ID NO: 33860 - RNA, 23 nt, Artificial Sequence
  Chemically synthesized
agcgcuguuccuuaguugccagc

SEQ ID NO: 33861 - RNA, 23 nt, Artificial Sequence
  Chemically synthesized
gcgcuguuccuuaguugccagca

SEQ ID NO: 33862 - RNA, 23 nt, Artificial Sequence
  Chemically synthesized
cgcuguuccuuaguugccagcaa

SEQ ID NO: 33863 - RNA, 23 nt, Artificial Sequence
  Chemically synthesized
gcuguuccuuaguugccagcaau

SEQ ID NO: 33864 - RNA, 23 nt, Artificial Sequence
  Chemically synthesized
cuguuccuuaguugccagcaauu

SEQ ID NO: 33865 - RNA, 23 nt, Artificial Sequence
  Chemically synthesized
ugacaaauauuacggguaagucu

SEQ ID NO: 33866 - RNA, 23 nt, Artificial Sequence
  Chemically synthesized
gacaaauauuacggguaagucug

SEQ ID NO: 33867 - RNA, 23 nt, Artificial Sequence
  Chemically synthesized
acaaauauuacggguaagucugu

SEQ ID NO: 33868 - RNA, 23 nt, Artificial Sequence
  Chemically synthesized
caaauauuacggguaagucugua

SEQ ID NO: 33869 - RNA, 23 nt, Artificial Sequence
  Chemically synthesized
aaauauuacggguaagucuguag

SEQ ID NO: 33870 - RNA, 23 nt, Artificial Sequence
  Chemically synthesized
acugacaaccaacuaacaguucu

SEQ ID NO: 33871 - RNA, 23 nt, Artificial Sequence
  Chemically synthesized
cugacaaccaacuaacaguucuu

SEQ ID NO: 33872 - RNA, 23 nt, Artificial Sequence
  Chemically synthesized
gcuuuauuucaucacgcuaaaug

SEQ ID NO: 33873 - RNA, 23 nt, Artificial Sequence
  Chemically synthesized
cuuuauuucaucacgcuaaaugu

SEQ ID NO: 33874 - RNA, 23 nt, Artificial Sequence
  Chemically synthesized
uuuauuucaucacgcuaaauguc

SEQ ID NO: 33875 - RNA, 23 nt, Artificial Sequence
  Chemically synthesized
uccucuaauggugaauucuucaa

SEQ ID NO: 33876 - RNA, 23 nt, Artificial Sequence
  Chemically synthesized
ccucuaauggugaauucuucaau

SEQ ID NO: 33877 - RNA, 23 nt, Artificial Sequence
  Chemically synthesized
aaguuucaggccaagcuccuuug

SEQ ID NO: 33878 - RNA, 23 nt, Artificial Sequence
  Chemically synthesized
aguuucaggccaagcuccuuugu

SEQ ID NO: 33879 - RNA, 23 nt, Artificial Sequence
  Chemically synthesized
guuucaggccaagcuccuuuguc

SEQ ID NO: 33880 - RNA, 23 nt, Artificial Sequence
  Chemically synthesized
uuucaggccaagcuccuuugucu

SEQ ID NO: 33881 - RNA, 23 nt, Artificial Sequence
  Chemically synthesized
uucaggccaagcuccuuugucuu

SEQ ID NO: 33882 - RNA, 23 nt, Artificial Sequence
  Chemically synthesized
aacauaucccuccuuaucauuaa

SEQ ID NO: 33883 - RNA, 23 nt, Artificial Sequence
  Chemically synthesized
acauaucccuccuuaucauuaag

SEQ ID NO: 33884 - RNA, 23 nt, Artificial Sequence
  Chemically synthesized
cauaucccuccuuaucauuaagg

SEQ ID NO: 33885 - RNA, 23 nt, Artificial Sequence
  Chemically synthesized
auaucccuccuuaucauuaaggc

SEQ ID NO: 33886 - RNA, 23 nt, Artificial Sequence
  Chemically synthesized
uaucccuccuuaucauuaaggcg

SEQ ID NO: 33887 - RNA, 23 nt, Artificial Sequence
  Chemically synthesized
augauugucaugcagucuccuuc

SEQ ID NO: 33888 - RNA, 23 nt, Artificial Sequence
  Chemically synthesized
ugauugucaugcagucuccuucu

SEQ ID NO: 33889 - RNA, 23 nt, Artificial Sequence
  Chemically synthesized
gauugucaugcagucuccuucuu

SEQ ID NO: 33890 - RNA, 23 nt, Artificial Sequence
  Chemically synthesized
auugucaugcagucuccuucuuu

SEQ ID NO: 33891 - RNA, 23 nt, Artificial Sequence
  Chemically synthesized
uugucaugcagucuccuucuuuc

SEQ ID NO: 33892 - RNA, 23 nt, Artificial Sequence
  Chemically synthesized
guucauaaucccaaagcgcauaa

SEQ ID NO: 33893 - RNA, 23 nt, Artificial Sequence
  Chemically synthesized
uucauaaucccaaagcgcauaaa

SEQ ID NO: 33894 - RNA, 23 nt, Artificial Sequence
  Chemically synthesized
ucauaaucccaaagcgcauaaau

SEQ ID NO: 33895 - RNA, 23 nt, Artificial Sequence
  Chemically synthesized
cauaaucccaaagcgcauaaaug

SEQ ID NO: 33896 - RNA, 23 nt, Artificial Sequence
  Chemically synthesized
auaaucccaaagcgcauaaauga

SEQ ID NO: 33897 - RNA, 23 nt, Artificial Sequence
  Chemically synthesized
aggcagcacaauguaauggaguc

SEQ ID NO: 33898 - RNA, 23 nt, Artificial Sequence
  Chemically synthesized
ggucaaauucucccuccaaagac

SEQ ID NO: 33899 - RNA, 23 nt, Artificial Sequence
  Chemically synthesized
uuuuacgcaaguuuguccuuuua

SEQ ID NO: 33900 - RNA, 23 nt, Artificial Sequence
  Chemically synthesized
cuccuuuucgggcuccacaugua

SEQ ID NO: 33901 - RNA, 23 nt, Artificial Sequence
  Chemically synthesized
uccuuuucgggcuccacauguaa

SEQ ID NO: 33902 - RNA, 23 nt, Artificial Sequence
  Chemically synthesized
ccuuuucgggcuccacauguaaa

SEQ ID NO: 33903 - RNA, 23 nt, Artificial Sequence
  Chemically synthesized
cuuuucgggcuccacauguaaau

SEQ ID NO: 33904 - RNA, 23 nt, Artificial Sequence
  Chemically synthesized
uuuucgggcuccacauguaaaua

SEQ ID NO: 33905 - RNA, 23 nt, Artificial Sequence
  Chemically synthesized
augaugggacagagauggucucc

SEQ ID NO: 33906 - RNA, 23 nt, Artificial Sequence
  Chemically synthesized
agcuucugaauauuuggcccauu

SEQ ID NO: 33907 - RNA, 23 nt, Artificial Sequence
  Chemically synthesized
gcuucugaauauuuggcccauua

SEQ ID NO: 33908 - RNA, 23 nt, Artificial Sequence
  Chemically synthesized
cuucugaauauuuggcccauuag

SEQ ID NO: 33909 - RNA, 23 nt, Artificial Sequence
  Chemically synthesized
ucguugaagaacaucaaacauuc

SEQ ID NO: 33910 - RNA, 23 nt, Artificial Sequence
  Chemically synthesized
cguugaagaacaucaaacauucg

SEQ ID NO: 33911 - RNA, 23 nt, Artificial Sequence
  Chemically synthesized
cuggcucuguaauagaacuacgu

SEQ ID NO: 33912 - RNA, 23 nt, Artificial Sequence
  Chemically synthesized
uggcucuguaauagaacuacguu

SEQ ID NO: 33913 - RNA, 23 nt, Artificial Sequence
  Chemically synthesized
ggcucuguaauagaacuacguuu

SEQ ID NO: 33914 - RNA, 23 nt, Artificial Sequence
  Chemically synthesized
auagaacuacguuucuuuagagg

SEQ ID NO: 33915 - RNA, 23 nt, Artificial Sequence
  Chemically synthesized
uagaacuacguuucuuuagaggc

SEQ ID NO: 33916 - RNA, 23 nt, Artificial Sequence
  Chemically synthesized
agaacuacguuucuuuagaggcc

SEQ ID NO: 33917 - RNA, 23 nt, Artificial Sequence
  Chemically synthesized
gaacuacguuucuuuagaggccu

SEQ ID NO: 33918 - RNA, 23 nt, Artificial Sequence
  Chemically synthesized
aacuacguuucuuuagaggccuu

SEQ ID NO: 33919 - RNA, 23 nt, Artificial Sequence
  Chemically synthesized
agaacaucaaacauucgcucauu

SEQ ID NO: 33920 - RNA, 23 nt, Artificial Sequence
  Chemically synthesized
acaguuucuuucguaaggcuucu

SEQ ID NO: 33921 - RNA, 23 nt, Artificial Sequence
  Chemically synthesized
caguuucuuucguaaggcuucua

SEQ ID NO: 33922 - RNA, 23 nt, Artificial Sequence
  Chemically synthesized
aguuucuuucguaaggcuucuag

SEQ ID NO: 33923 - RNA, 23 nt, Artificial Sequence
  Chemically synthesized
guuucuuucguaaggcuucuagg

SEQ ID NO: 33924 - RNA, 23 nt, Artificial Sequence
  Chemically synthesized
uuucuuucguaaggcuucuaggu

SEQ ID NO: 33925 - RNA, 23 nt, Artificial Sequence
  Chemically synthesized
acauucgcucauuauccgcaacu

SEQ ID NO: 33926 - RNA, 23 nt, Artificial Sequence
  Chemically synthesized
uauauugaacuugcugccacggu

SEQ ID NO: 33927 - RNA, 23 nt, Artificial Sequence
  Chemically synthesized
auauugaacuugcugccacgguc

SEQ ID NO: 33928 - RNA, 23 nt, Artificial Sequence
  Chemically synthesized
uauugaacuugcugccacggucu

SEQ ID NO: 33929 - RNA, 23 nt, Artificial Sequence
  Chemically synthesized
acugcaucaaacauugagaacgg

SEQ ID NO: 33930 - RNA, 23 nt, Artificial Sequence
  Chemically synthesized
cugcaucaaacauugagaacgga

SEQ ID NO: 33931 - RNA, 23 nt, Artificial Sequence
  Chemically synthesized
ugcaucaaacauugagaacggac

SEQ ID NO: 33932 - RNA, 23 nt, Artificial Sequence
  Chemically synthesized
gcaucaaacauugagaacggacg

SEQ ID NO: 33933 - RNA, 23 nt, Artificial Sequence
  Chemically synthesized
caucaaacauugagaacggacgc

SEQ ID NO: 33934 - RNA, 23 nt, Artificial Sequence
  Chemically synthesized
acauugagaacggacgcacuuuc

SEQ ID NO: 33935 - RNA, 23 nt, Artificial Sequence
  Chemically synthesized
cuuucuucucuuucucccucagc

SEQ ID NO: 33936 - RNA, 23 nt, Artificial Sequence
  Chemically synthesized
caucaucaacuugauccagagca

SEQ ID NO: 33937 - RNA, 23 nt, Artificial Sequence
  Chemically synthesized
aucaucaacuugauccagagcau

SEQ ID NO: 33938 - RNA, 23 nt, Artificial Sequence
  Chemically synthesized
ucaucaacuugauccagagcauu

SEQ ID NO: 33939 - RNA, 23 nt, Artificial Sequence
  Chemically synthesized
caucaacuugauccagagcauuc

SEQ ID NO: 33940 - RNA, 23 nt, Artificial Sequence
  Chemically synthesized
ugcuuugagguacagaagcagag

SEQ ID NO: 33941 - RNA, 23 nt, Artificial Sequence
  Chemically synthesized
gcuuugagguacagaagcagagc

SEQ ID NO: 33942 - RNA, 23 nt, Artificial Sequence
  Chemically synthesized
cuuugagguacagaagcagagcc

SEQ ID NO: 33943 - RNA, 23 nt, Artificial Sequence
  Chemically synthesized
uuugagguacagaagcagagccu

SEQ ID NO: 33944 - RNA, 23 nt, Artificial Sequence
  Chemically synthesized
uugagguacagaagcagagccuu

SEQ ID NO: 33945 - RNA, 23 nt, Artificial Sequence
  Chemically synthesized
ucugcauuugaaggacuccaauc

SEQ ID NO: 33946 - RNA, 23 nt, Artificial Sequence
  Chemically synthesized
acaucggcaucaucuuggacccg

SEQ ID NO: 33947 - RNA, 23 nt, Artificial Sequence
  Chemically synthesized
caucggcaucaucuuggacccga

SEQ ID NO: 33948 - RNA, 23 nt, Artificial Sequence
  Chemically synthesized
aucggcaucaucuuggacccgaa

SEQ ID NO: 33949 - RNA, 23 nt, Artificial Sequence
  Chemically synthesized
gcuuauccaugacugccacuucu

SEQ ID NO: 33950 - RNA, 23 nt, Artificial Sequence
  Chemically synthesized
cuuauccaugacugccacuucug

SEQ ID NO: 33951 - RNA, 23 nt, Artificial Sequence
  Chemically synthesized
uuauccaugacugccacuucuga

SEQ ID NO: 33952 - RNA, 23 nt, Artificial Sequence
  Chemically synthesized
uauccaugacugccacuucugaa

SEQ ID NO: 33953 - RNA, 23 nt, Artificial Sequence
  Chemically synthesized
auccaugacugccacuucugaau

SEQ ID NO: 33954 - RNA, 23 nt, Artificial Sequence
  Chemically synthesized
cuguuguuguagcuuggcauucu

SEQ ID NO: 33955 - RNA, 23 nt, Artificial Sequence
  Chemically synthesized
ucuuuuagccuuuuaaguuucuc

SEQ ID NO: 33956 - RNA, 23 nt, Artificial Sequence
  Chemically synthesized
uuuaaguuucuccugcucagcaa

SEQ ID NO: 33957 - RNA, 23 nt, Artificial Sequence
  Chemically synthesized
uuaaguuucuccugcucagcaac

SEQ ID NO: 33958 - RNA, 23 nt, Artificial Sequence
  Chemically synthesized
ugcucauuguuacugagauacac

SEQ ID NO: 33959 - RNA, 23 nt, Artificial Sequence
  Chemically synthesized
gggcuucaaucuguugcugcugg

SEQ ID NO: 33960 - RNA, 23 nt, Artificial Sequence
  Chemically synthesized
uccauccuaggacuauuaacacc

SEQ ID NO: 33961 - RNA, 23 nt, Artificial Sequence
  Chemically synthesized
ccauccuaggacuauuaacaccg

SEQ ID NO: 33962 - RNA, 23 nt, Artificial Sequence
  Chemically synthesized
cauccuaggacuauuaacaccgu

SEQ ID NO: 33963 - RNA, 23 nt, Artificial Sequence
  Chemically synthesized
auccuaggacuauuaacaccguu

SEQ ID NO: 33964 - RNA, 23 nt, Artificial Sequence
  Chemically synthesized
uccuaggacuauuaacaccguuc

SEQ ID NO: 33965 - RNA, 23 nt, Artificial Sequence
  Chemically synthesized
ccuaggacuauuaacaccguucu

SEQ ID NO: 33966 - RNA, 23 nt, Artificial Sequence
  Chemically synthesized
uugacaaauauuacggguaaguc

SEQ ID NO: 33967 - RNA, 23 nt, Artificial Sequence
  Chemically synthesized
uuaaaauucagccuacaaacaag

SEQ ID NO: 33968 - RNA, 23 nt, Artificial Sequence
  Chemically synthesized
uaaaauucagccuacaaacaaga

SEQ ID NO: 33969 - RNA, 23 nt, Artificial Sequence
  Chemically synthesized
aaaauucagccuacaaacaagau

SEQ ID NO: 33970 - RNA, 23 nt, Artificial Sequence
  Chemically synthesized
aaauucagccuacaaacaagauu

SEQ ID NO: 33971 - RNA, 23 nt, Artificial Sequence
  Chemically synthesized
aauucagccuacaaacaagauuc

SEQ ID NO: 33972 - RNA, 23 nt, Artificial Sequence
  Chemically synthesized
ccuacaaacaagauucuacaucu

SEQ ID NO: 33973 - RNA, 23 nt, Artificial Sequence
  Chemically synthesized
cuacaaacaagauucuacaucua

SEQ ID NO: 33974 - RNA, 23 nt, Artificial Sequence
  Chemically synthesized
uacaaacaagauucuacaucuaa

SEQ ID NO: 33975 - RNA, 23 nt, Artificial Sequence
  Chemically synthesized
acaaacaagauucuacaucuaau

SEQ ID NO: 33976 - RNA, 23 nt, Artificial Sequence
  Chemically synthesized
caaacaagauucuacaucuaauu

SEQ ID NO: 33977 - RNA, 23 nt, Artificial Sequence
  Chemically synthesized
uaauaaaguuauuguucacugac

SEQ ID NO: 33978 - RNA, 23 nt, Artificial Sequence
  Chemically synthesized
aauaaaguuauuguucacugaca

SEQ ID NO: 33979 - RNA, 23 nt, Artificial Sequence
  Chemically synthesized
auaaaguuauuguucacugacaa

SEQ ID NO: 33980 - RNA, 23 nt, Artificial Sequence
  Chemically synthesized
uaaaguuauuguucacugacaac

SEQ ID NO: 33981 - RNA, 23 nt, Artificial Sequence
  Chemically synthesized
aaaguuauuguucacugacaacc

SEQ ID NO: 33982 - RNA, 23 nt, Artificial Sequence
  Chemically synthesized
uauacaagugugcagugccuucg

SEQ ID NO: 33983 - RNA, 23 nt, Artificial Sequence
  Chemically synthesized
auacaagugugcagugccuucga

SEQ ID NO: 33984 - RNA, 23 nt, Artificial Sequence
  Chemically synthesized
uucgauauucaccaggaacuuuu

SEQ ID NO: 33985 - RNA, 23 nt, Artificial Sequence
  Chemically synthesized
ucgauauucaccaggaacuuuua

SEQ ID NO: 33986 - RNA, 23 nt, Artificial Sequence
  Chemically synthesized
cgauauucaccaggaacuuuuac

SEQ ID NO: 33987 - RNA, 23 nt, Artificial Sequence
  Chemically synthesized
gauauucaccaggaacuuuuaca

SEQ ID NO: 33988 - RNA, 23 nt, Artificial Sequence
  Chemically synthesized
auauucaccaggaacuuuuacac

SEQ ID NO: 33989 - RNA, 23 nt, Artificial Sequence
  Chemically synthesized
ucaucacgcuaaauguccucuaa

SEQ ID NO: 33990 - RNA, 23 nt, Artificial Sequence
  Chemically synthesized
caucacgcuaaauguccucuaau

SEQ ID NO: 33991 - RNA, 23 nt, Artificial Sequence
  Chemically synthesized
aucacgcuaaauguccucuaaug

SEQ ID NO: 33992 - RNA, 23 nt, Artificial Sequence
  Chemically synthesized
acagucccagcaaguuacgugga

SEQ ID NO: 33993 - RNA, 23 nt, Artificial Sequence
  Chemically synthesized
cagucccagcaaguuacguggaa

SEQ ID NO: 33994 - RNA, 23 nt, Artificial Sequence
  Chemically synthesized
agucccagcaaguuacguggaac

SEQ ID NO: 33995 - RNA, 23 nt, Artificial Sequence
  Chemically synthesized
guggaacauaucccuccuuauca

SEQ ID NO: 33996 - RNA, 23 nt, Artificial Sequence
  Chemically synthesized
uggaacauaucccuccuuaucau

SEQ ID NO: 33997 - RNA, 23 nt, Artificial Sequence
  Chemically synthesized
ggaacauaucccuccuuaucauu

SEQ ID NO: 33998 - RNA, 23 nt, Artificial Sequence
  Chemically synthesized
gaacauaucccuccuuaucauua

SEQ ID NO: 33999 - RNA, 23 nt, Artificial Sequence
  Chemically synthesized
caucaucauucugagguucauaa

SEQ ID NO: 34000 - RNA, 23 nt, Artificial Sequence
  Chemically synthesized
aucaucauucugagguucauaau

SEQ ID NO: 34001 - RNA, 23 nt, Artificial Sequence
  Chemically synthesized
ucaucauucugagguucauaauc

SEQ ID NO: 34002 - RNA, 23 nt, Artificial Sequence
  Chemically synthesized
uauucauuaugcccaucuucucc

SEQ ID NO: 34003 - RNA, 23 nt, Artificial Sequence
  Chemically synthesized
uccugaacuccauaaagaaauug

SEQ ID NO: 34004 - RNA, 23 nt, Artificial Sequence
  Chemically synthesized
ccugaacuccauaaagaaauugg

SEQ ID NO: 34005 - RNA, 23 nt, Artificial Sequence
  Chemically synthesized
cugaacuccauaaagaaauuggg

SEQ ID NO: 34006 - RNA, 23 nt, Artificial Sequence
  Chemically synthesized
ugaacuccauaaagaaauuggga

SEQ ID NO: 34007 - RNA, 23 nt, Artificial Sequence
  Chemically synthesized
gaacuccauaaagaaauugggag

SEQ ID NO: 34008 - RNA, 23 nt, Artificial Sequence
  Chemically synthesized
gaguguagccuuccuccauuucc

SEQ ID NO: 34009 - RNA, 23 nt, Artificial Sequence
  Chemically synthesized
ucagcagcauuuacauuuacacc

SEQ ID NO: 34010 - RNA, 23 nt, Artificial Sequence
  Chemically synthesized
gaauuucacccucauuccaugag

SEQ ID NO: 34011 - RNA, 23 nt, Artificial Sequence
  Chemically synthesized
aauuucacccucauuccaugagc

SEQ ID NO: 34012 - RNA, 23 nt, Artificial Sequence
  Chemically synthesized
auuucacccucauuccaugagcg

SEQ ID NO: 34013 - RNA, 23 nt, Artificial Sequence
  Chemically synthesized
cuccuccagguacacaucaagca

SEQ ID NO: 34014 - RNA, 23 nt, Artificial Sequence
  Chemically synthesized
uccuccagguacacaucaagcac

SEQ ID NO: 34015 - RNA, 23 nt, Artificial Sequence
  Chemically synthesized
ccuccagguacacaucaagcaca

SEQ ID NO: 34016 - RNA, 23 nt, Artificial Sequence
  Chemically synthesized
cuccagguacacaucaagcacau

SEQ ID NO: 34017 - RNA, 23 nt, Artificial Sequence
  Chemically synthesized
uccagguacacaucaagcacaug

SEQ ID NO: 34018 - RNA, 23 nt, Artificial Sequence
  Chemically synthesized
ccucugacuuccaaaucguugaa

SEQ ID NO: 34019 - RNA, 23 nt, Artificial Sequence
  Chemically synthesized
cucugacuuccaaaucguugaag

SEQ ID NO: 34020 - RNA, 23 nt, Artificial Sequence
  Chemically synthesized
ucugacuuccaaaucguugaaga

SEQ ID NO: 34021 - RNA, 23 nt, Artificial Sequence
  Chemically synthesized
cugacuuccaaaucguugaagaa

SEQ ID NO: 34022 - RNA, 23 nt, Artificial Sequence
  Chemically synthesized
caugucacuguucucuguacugg

SEQ ID NO: 34023 - RNA, 23 nt, Artificial Sequence
  Chemically synthesized
augucacuguucucuguacuggc

SEQ ID NO: 34024 - RNA, 23 nt, Artificial Sequence
  Chemically synthesized
ugucacuguucucuguacuggca

SEQ ID NO: 34025 - RNA, 23 nt, Artificial Sequence
  Chemically synthesized
gucacuguucucuguacuggcau

SEQ ID NO: 34026 - RNA, 23 nt, Artificial Sequence
  Chemically synthesized
ucacuguucucuguacuggcauu

SEQ ID NO: 34027 - RNA, 23 nt, Artificial Sequence
  Chemically synthesized
ucucuguacuggcauuccccaca

SEQ ID NO: 34028 - RNA, 23 nt, Artificial Sequence
  Chemically synthesized
uucugaauauuuggcccauuagg

SEQ ID NO: 34029 - RNA, 23 nt, Artificial Sequence
  Chemically synthesized
guaauagaacuacguuucuuuag

SEQ ID NO: 34030 - RNA, 23 nt, Artificial Sequence
  Chemically synthesized
ggauuagauaagaaaggcaguaa

SEQ ID NO: 34031 - RNA, 23 nt, Artificial Sequence
  Chemically synthesized
gauuagauaagaaaggcaguaau

SEQ ID NO: 34032 - RNA, 23 nt, Artificial Sequence
  Chemically synthesized
auuagauaagaaaggcaguaauu

SEQ ID NO: 34033 - RNA, 23 nt, Artificial Sequence
  Chemically synthesized
uuagauaagaaaggcaguaauuu

SEQ ID NO: 34034 - RNA, 23 nt, Artificial Sequence
  Chemically synthesized
uagauaagaaaggcaguaauuua

SEQ ID NO: 34035 - RNA, 23 nt, Artificial Sequence
  Chemically synthesized
uuucuugcuuagaaccuggagaa

SEQ ID NO: 34036 - RNA, 23 nt, Artificial Sequence
  Chemically synthesized
uucuugcuuagaaccuggagaaa

SEQ ID NO: 34037 - RNA, 23 nt, Artificial Sequence
  Chemically synthesized
ucuugcuuagaaccuggagaaag

SEQ ID NO: 34038 - RNA, 23 nt, Artificial Sequence
  Chemically synthesized
cuugcuuagaaccuggagaaagg

SEQ ID NO: 34039 - RNA, 23 nt, Artificial Sequence
  Chemically synthesized
uugcuuagaaccuggagaaaggg

SEQ ID NO: 34040 - RNA, 23 nt, Artificial Sequence
  Chemically synthesized
uugacaacugcugagaacuuccg

SEQ ID NO: 34041 - RNA, 23 nt, Artificial Sequence
  Chemically synthesized
ugacaacugcugagaacuuccgu

SEQ ID NO: 34042 - RNA, 23 nt, Artificial Sequence
  Chemically synthesized
gacaacugcugagaacuuccguc

SEQ ID NO: 34043 - RNA, 23 nt, Artificial Sequence
  Chemically synthesized
acaacugcugagaacuuccgucu

SEQ ID NO: 34044 - RNA, 23 nt, Artificial Sequence
  Chemically synthesized
caacugcugagaacuuccgucug

SEQ ID NO: 34045 - RNA, 23 nt, Artificial Sequence
  Chemically synthesized
aacugcugagaacuuccgucugg

SEQ ID NO: 34046 - RNA, 23 nt, Artificial Sequence
  Chemically synthesized
acugcugagaacuuccgucuggc

SEQ ID NO: 34047 - RNA, 23 nt, Artificial Sequence
  Chemically synthesized
cugcugagaacuuccgucuggcu

SEQ ID NO: 34048 - RNA, 23 nt, Artificial Sequence
  Chemically synthesized
uaucuucacugcucugguucuuc

SEQ ID NO: 34049 - RNA, 23 nt, Artificial Sequence
  Chemically synthesized
aucuucacugcucugguucuucc

SEQ ID NO: 34050 - RNA, 23 nt, Artificial Sequence
  Chemically synthesized
ucuucacugcucugguucuuccu

SEQ ID NO: 34051 - RNA, 23 nt, Artificial Sequence
  Chemically synthesized
cuucacugcucugguucuuccuc

SEQ ID NO: 34052 - RNA, 23 nt, Artificial Sequence
  Chemically synthesized
uucacugcucugguucuuccuca

SEQ ID NO: 34053 - RNA, 23 nt, Artificial Sequence
  Chemically synthesized
ucacugcucugguucuuccucag

SEQ ID NO: 34054 - RNA, 23 nt, Artificial Sequence
  Chemically synthesized
cauugagaacggacgcacuuucu

SEQ ID NO: 34055 - RNA, 23 nt, Artificial Sequence
  Chemically synthesized
auugagaacggacgcacuuucuu

SEQ ID NO: 34056 - RNA, 23 nt, Artificial Sequence
  Chemically synthesized
uugagaacggacgcacuuucuuc

SEQ ID NO: 34057 - RNA, 23 nt, Artificial Sequence
  Chemically synthesized
agugcuuugagguacagaagcag

SEQ ID NO: 34058 - RNA, 23 nt, Artificial Sequence
  Chemically synthesized
gugcuuugagguacagaagcaga

SEQ ID NO: 34059 - RNA, 23 nt, Artificial Sequence
  Chemically synthesized
ucuacuuuugacacagccaggac

SEQ ID NO: 34060 - RNA, 23 nt, Artificial Sequence
  Chemically synthesized
cuacuuuugacacagccaggacg

SEQ ID NO: 34061 - RNA, 23 nt, Artificial Sequence
  Chemically synthesized
uacuuuugacacagccaggacga

SEQ ID NO: 34062 - RNA, 23 nt, Artificial Sequence
  Chemically synthesized
cgagaugccauuuccugaaguuc

SEQ ID NO: 34063 - RNA, 23 nt, Artificial Sequence
  Chemically synthesized
gagaugccauuuccugaaguuca

SEQ ID NO: 34064 - RNA, 23 nt, Artificial Sequence
  Chemically synthesized
agaugccauuuccugaaguucag

SEQ ID NO: 34065 - RNA, 23 nt, Artificial Sequence
  Chemically synthesized
gaugccauuuccugaaguucagc

SEQ ID NO: 34066 - RNA, 23 nt, Artificial Sequence
  Chemically synthesized
augccauuuccugaaguucagca

SEQ ID NO: 34067 - RNA, 23 nt, Artificial Sequence
  Chemically synthesized
auccauccuaggacuauuaacac

SEQ ID NO: 34068 - RNA, 23 nt, Artificial Sequence
  Chemically synthesized
cuaggacuauuaacaccguucuc

SEQ ID NO: 34069 - RNA, 23 nt, Artificial Sequence
  Chemically synthesized
aagucuguagcaaguuucuaauu

SEQ ID NO: 34070 - RNA, 23 nt, Artificial Sequence
  Chemically synthesized
gucuguagcaaguuucuaauuuc

SEQ ID NO: 34071 - RNA, 23 nt, Artificial Sequence
  Chemically synthesized
ucuguagcaaguuucuaauuucu

SEQ ID NO: 34072 - RNA, 23 nt, Artificial Sequence
  Chemically synthesized
cuguagcaaguuucuaauuucug

SEQ ID NO: 34073 - RNA, 23 nt, Artificial Sequence
  Chemically synthesized
uguagcaaguuucuaauuucuga

SEQ ID NO: 34074 - RNA, 23 nt, Artificial Sequence
  Chemically synthesized
auucagccuacaaacaagauucu

SEQ ID NO: 34075 - RNA, 23 nt, Artificial Sequence
  Chemically synthesized
uucagccuacaaacaagauucua

SEQ ID NO: 34076 - RNA, 23 nt, Artificial Sequence
  Chemically synthesized
ucagccuacaaacaagauucuac

SEQ ID NO: 34077 - RNA, 23 nt, Artificial Sequence
  Chemically synthesized
agccuacaaacaagauucuacau

SEQ ID NO: 34078 - RNA, 23 nt, Artificial Sequence
  Chemically synthesized
cuucacugacaauauacaagugu

SEQ ID NO: 34079 - RNA, 23 nt, Artificial Sequence
  Chemically synthesized
uucacugacaauauacaagugug

SEQ ID NO: 34080 - RNA, 23 nt, Artificial Sequence
  Chemically synthesized
gcaggaggacugguuuaggagca

SEQ ID NO: 34081 - RNA, 23 nt, Artificial Sequence
  Chemically synthesized
caggaggacugguuuaggagcag

SEQ ID NO: 34082 - RNA, 23 nt, Artificial Sequence
  Chemically synthesized
aggaggacugguuuaggagcagc

SEQ ID NO: 34083 - RNA, 23 nt, Artificial Sequence
  Chemically synthesized
ggaggacugguuuaggagcagcu

SEQ ID NO: 34084 - RNA, 23 nt, Artificial Sequence
  Chemically synthesized
gaggacugguuuaggagcagcug

SEQ ID NO: 34085 - RNA, 23 nt, Artificial Sequence
  Chemically synthesized
ggagcagcugcugaaaacacuca

SEQ ID NO: 34086 - RNA, 23 nt, Artificial Sequence
  Chemically synthesized
gagcagcugcugaaaacacucaa

SEQ ID NO: 34087 - RNA, 23 nt, Artificial Sequence
  Chemically synthesized
agcagcugcugaaaacacucaac

SEQ ID NO: 34088 - RNA, 23 nt, Artificial Sequence
  Chemically synthesized
gcagcugcugaaaacacucaaca

SEQ ID NO: 34089 - RNA, 23 nt, Artificial Sequence
  Chemically synthesized
cagcugcugaaaacacucaacag

SEQ ID NO: 34090 - RNA, 23 nt, Artificial Sequence
  Chemically synthesized
ucuucgauauucaccaggaacuu

SEQ ID NO: 34091 - RNA, 23 nt, Artificial Sequence
  Chemically synthesized
cagagagcugauuucccaacugc

SEQ ID NO: 34092 - RNA, 23 nt, Artificial Sequence
  Chemically synthesized
agagagcugauuucccaacugcc

SEQ ID NO: 34093 - RNA, 23 nt, Artificial Sequence
  Chemically synthesized
gagagcugauuucccaacugccc

SEQ ID NO: 34094 - RNA, 23 nt, Artificial Sequence
  Chemically synthesized
agagcugauuucccaacugccca

SEQ ID NO: 34095 - RNA, 23 nt, Artificial Sequence
  Chemically synthesized
gagcugauuucccaacugcccaa

SEQ ID NO: 34096 - RNA, 23 nt, Artificial Sequence
  Chemically synthesized
ucccaacugcccaauaaaugauc

SEQ ID NO: 34097 - RNA, 23 nt, Artificial Sequence
  Chemically synthesized
auccuauuuacuagacaggauuc

SEQ ID NO: 34098 - RNA, 23 nt, Artificial Sequence
  Chemically synthesized
uauucaccaggaacuuuuacacc

SEQ ID NO: 34099 - RNA, 23 nt, Artificial Sequence
  Chemically synthesized
auucaccaggaacuuuuacacca

SEQ ID NO: 34100 - RNA, 23 nt, Artificial Sequence
  Chemically synthesized
uucaccaggaacuuuuacaccau

SEQ ID NO: 34101 - RNA, 23 nt, Artificial Sequence
  Chemically synthesized
ugagauacacgguaagaaacauc

SEQ ID NO: 34102 - RNA, 23 nt, Artificial Sequence
  Chemically synthesized
gagauacacgguaagaaacaucg

SEQ ID NO: 34103 - RNA, 23 nt, Artificial Sequence
  Chemically synthesized
agauacacgguaagaaacaucgg

SEQ ID NO: 34104 - RNA, 23 nt, Artificial Sequence
  Chemically synthesized
gauacacgguaagaaacaucggc

SEQ ID NO: 34105 - RNA, 23 nt, Artificial Sequence
  Chemically synthesized
auacacgguaagaaacaucggca

SEQ ID NO: 34106 - RNA, 23 nt, Artificial Sequence
  Chemically synthesized
gacuaaaauucuguguggaaguu

SEQ ID NO: 34107 - RNA, 23 nt, Artificial Sequence
  Chemically synthesized
gaaguuucaggccaagcuccuuu

SEQ ID NO: 34108 - RNA, 23 nt, Artificial Sequence
  Chemically synthesized
gcucaucaucauucugagguuca

SEQ ID NO: 34109 - RNA, 23 nt, Artificial Sequence
  Chemically synthesized
cucaucaucauucugagguucau

SEQ ID NO: 34110 - RNA, 23 nt, Artificial Sequence
  Chemically synthesized
ucaucaucauucugagguucaua

SEQ ID NO: 34111 - RNA, 23 nt, Artificial Sequence
  Chemically synthesized
acuccauaaagaaauugggagca

SEQ ID NO: 34112 - RNA, 23 nt, Artificial Sequence
  Chemically synthesized
gaucuugguccacucacaauguc

SEQ ID NO: 34113 - RNA, 23 nt, Artificial Sequence
  Chemically synthesized
aucuugguccacucacaaugucc

SEQ ID NO: 34114 - RNA, 23 nt, Artificial Sequence
  Chemically synthesized
ucuugguccacucacaauguccc

SEQ ID NO: 34115 - RNA, 23 nt, Artificial Sequence
  Chemically synthesized
cuugguccacucacaaugucccu

SEQ ID NO: 34116 - RNA, 23 nt, Artificial Sequence
  Chemically synthesized
uugguccacucacaaugucccug

SEQ ID NO: 34117 - RNA, 23 nt, Artificial Sequence
  Chemically synthesized
agccuuccuccauuuccucgcac

SEQ ID NO: 34118 - RNA, 23 nt, Artificial Sequence
  Chemically synthesized
gccuuccuccauuuccucgcacu

SEQ ID NO: 34119 - RNA, 23 nt, Artificial Sequence
  Chemically synthesized
ccuuccuccauuuccucgcacuu

SEQ ID NO: 34120 - RNA, 23 nt, Artificial Sequence
  Chemically synthesized
cuuccuccauuuccucgcacuua

SEQ ID NO: 34121 - RNA, 23 nt, Artificial Sequence
  Chemically synthesized
uuccuccauuuccucgcacuuau

SEQ ID NO: 34122 - RNA, 23 nt, Artificial Sequence
  Chemically synthesized
caucacuaucagcagcauuuaca

SEQ ID NO: 34123 - RNA, 23 nt, Artificial Sequence
  Chemically synthesized
aucacuaucagcagcauuuacau

SEQ ID NO: 34124 - RNA, 23 nt, Artificial Sequence
  Chemically synthesized
ucacuaucagcagcauuuacauu

SEQ ID NO: 34125 - RNA, 23 nt, Artificial Sequence
  Chemically synthesized
uuucacccucauuccaugagcga

SEQ ID NO: 34126 - RNA, 23 nt, Artificial Sequence
  Chemically synthesized
cgaacuucguuccucugacuucc

SEQ ID NO: 34127 - RNA, 23 nt, Artificial Sequence
  Chemically synthesized
gaacuucguuccucugacuucca

SEQ ID NO: 34128 - RNA, 23 nt, Artificial Sequence
  Chemically synthesized
aacuucguuccucugacuuccaa

SEQ ID NO: 34129 - RNA, 23 nt, Artificial Sequence
  Chemically synthesized
acuucguuccucugacuuccaaa

SEQ ID NO: 34130 - RNA, 23 nt, Artificial Sequence
  Chemically synthesized
cuucguuccucugacuuccaaau

SEQ ID NO: 34131 - RNA, 23 nt, Artificial Sequence
  Chemically synthesized
cuggguuauucuggagauuuggg

SEQ ID NO: 34132 - RNA, 23 nt, Artificial Sequence
  Chemically synthesized
uaauagaacuacguuucuuuaga

SEQ ID NO: 34133 - RNA, 23 nt, Artificial Sequence
  Chemically synthesized
aauagaacuacguuucuuuagag

SEQ ID NO: 34134 - RNA, 23 nt, Artificial Sequence
  Chemically synthesized
gaacaucaaacauucgcucauua

SEQ ID NO: 34135 - RNA, 23 nt, Artificial Sequence
  Chemically synthesized
aacaucaaacauucgcucauuau

SEQ ID NO: 34136 - RNA, 23 nt, Artificial Sequence
  Chemically synthesized
auugaacuugcugccacggucug

SEQ ID NO: 34137 - RNA, 23 nt, Artificial Sequence
  Chemically synthesized
cggcagcagcagguggacuuucu

SEQ ID NO: 34138 - RNA, 23 nt, Artificial Sequence
  Chemically synthesized
ggcagcagcagguggacuuucuu

SEQ ID NO: 34139 - RNA, 23 nt, Artificial Sequence
  Chemically synthesized
gcagcagcagguggacuuucuug

SEQ ID NO: 34140 - RNA, 23 nt, Artificial Sequence
  Chemically synthesized
cagcagcagguggacuuucuugc

SEQ ID NO: 34141 - RNA, 23 nt, Artificial Sequence
  Chemically synthesized
agcagcagguggacuuucuugcu

SEQ ID NO: 34142 - RNA, 23 nt, Artificial Sequence
  Chemically synthesized
auaaggcaaauuaaucuguuuug

SEQ ID NO: 34143 - RNA, 23 nt, Artificial Sequence
  Chemically synthesized
uaaggcaaauuaaucuguuuugg

SEQ ID NO: 34144 - RNA, 23 nt, Artificial Sequence
  Chemically synthesized
aaggcaaauuaaucuguuuuggu

SEQ ID NO: 34145 - RNA, 23 nt, Artificial Sequence
  Chemically synthesized
aggcaaauuaaucuguuuugguu

SEQ ID NO: 34146 - RNA, 23 nt, Artificial Sequence
  Chemically synthesized
ggcaaauuaaucuguuuugguuu

SEQ ID NO: 34147 - RNA, 23 nt, Artificial Sequence
  Chemically synthesized
cugguucuuccucagaguaccaa

SEQ ID NO: 34148 - RNA, 23 nt, Artificial Sequence
  Chemically synthesized
ugguucuuccucagaguaccaaa

SEQ ID NO: 34149 - RNA, 23 nt, Artificial Sequence
  Chemically synthesized
gguucuuccucagaguaccaaag

SEQ ID NO: 34150 - RNA, 23 nt, Artificial Sequence
  Chemically synthesized
cuggucuacugcaucaaacauug

SEQ ID NO: 34151 - RNA, 23 nt, Artificial Sequence
  Chemically synthesized
uggucuacugcaucaaacauuga

SEQ ID NO: 34152 - RNA, 23 nt, Artificial Sequence
  Chemically synthesized
agcaaggggguugaauuucaccc

SEQ ID NO: 34153 - RNA, 23 nt, Artificial Sequence
  Chemically synthesized
gcaaggggguugaauuucacccu

SEQ ID NO: 34154 - RNA, 23 nt, Artificial Sequence
  Chemically synthesized
caaggggguugaauuucacccuc

SEQ ID NO: 34155 - RNA, 23 nt, Artificial Sequence
  Chemically synthesized
aaggggguugaauuucacccuca

SEQ ID NO: 34156 - RNA, 23 nt, Artificial Sequence
  Chemically synthesized
aggggguugaauuucacccucau

SEQ ID NO: 34157 - RNA, 23 nt, Artificial Sequence
  Chemically synthesized
auuggaauaaauguucucugggu

SEQ ID NO: 34158 - RNA, 23 nt, Artificial Sequence
  Chemically synthesized
uuggaauaaauguucucugggug

SEQ ID NO: 34159 - RNA, 23 nt, Artificial Sequence
  Chemically synthesized
uggaauaaauguucucugggugc

SEQ ID NO: 34160 - RNA, 23 nt, Artificial Sequence
  Chemically synthesized
ggaauaaauguucucugggugcu

SEQ ID NO: 34161 - RNA, 23 nt, Artificial Sequence
  Chemically synthesized
gaauaaauguucucugggugcug

SEQ ID NO: 34162 - RNA, 23 nt, Artificial Sequence
  Chemically synthesized
ggggguugaauuucacccucauu

SEQ ID NO: 34163 - RNA, 23 nt, Artificial Sequence
  Chemically synthesized
gggguugaauuucacccucauuc

SEQ ID NO: 34164 - RNA, 23 nt, Artificial Sequence
  Chemically synthesized
uucucuguacaaggucaaauucu

SEQ ID NO: 34165 - RNA, 23 nt, Artificial Sequence
  Chemically synthesized
aucguauuacuucuucuuaacag

SEQ ID NO: 34166 - RNA, 23 nt, Artificial Sequence
  Chemically synthesized
gccaaaaauaaucguauuacuuc

SEQ ID NO: 34167 - RNA, 23 nt, Artificial Sequence
  Chemically synthesized
caucaaccucauaaauaauucuc

SEQ ID NO: 34168 - RNA, 23 nt, Artificial Sequence
  Chemically synthesized
ucaaccucauaaauaauucucug

SEQ ID NO: 34169 - RNA, 23 nt, Artificial Sequence
  Chemically synthesized
caaccucauaaauaauucucugu

SEQ ID NO: 34170 - RNA, 23 nt, Artificial Sequence
  Chemically synthesized
uugcguauacauggaauauauug

SEQ ID NO: 34171 - RNA, 23 nt, Artificial Sequence
  Chemically synthesized
gucaucaaccucauaaauaauuc

SEQ ID NO: 34172 - RNA, 23 nt, Artificial Sequence
  Chemically synthesized
accucauaaauaauucucuguac

SEQ ID NO: 34173 - RNA, 23 nt, Artificial Sequence
  Chemically synthesized
cuuuuugcuguagagcugccuuc

SEQ ID NO: 34174 - RNA, 23 nt, Artificial Sequence
  Chemically synthesized
uuucgggcuccacauguaaauau

SEQ ID NO: 34175 - RNA, 23 nt, Artificial Sequence
  Chemically synthesized
cuugggaaaagaucugcauuuga

SEQ ID NO: 34176 - RNA, 23 nt, Artificial Sequence
  Chemically synthesized
uuuuugcuguagagcugccuucu

SEQ ID NO: 34177 - RNA, 23 nt, Artificial Sequence
  Chemically synthesized
augauucaggaaccagagagacc

SEQ ID NO: 34178 - RNA, 23 nt, Artificial Sequence
  Chemically synthesized
uuucgguaaggauuagauaagaa

SEQ ID NO: 34179 - RNA, 23 nt, Artificial Sequence
  Chemically synthesized
uucuuuuugcuguagagcugccu

SEQ ID NO: 34180 - RNA, 23 nt, Artificial Sequence
  Chemically synthesized
cuugauucaauuuguuucuuagc

SEQ ID NO: 34181 - RNA, 23 nt, Artificial Sequence
  Chemically synthesized
uuucccauugcuuagucucuucu

SEQ ID NO: 34182 - RNA, 23 nt, Artificial Sequence
  Chemically synthesized
uacaagugugcagugccuucgag

SEQ ID NO: 34183 - RNA, 23 nt, Artificial Sequence
  Chemically synthesized
ucucccuccaaagacgaaucuag

SEQ ID NO: 34184 - RNA, 23 nt, Artificial Sequence
  Chemically synthesized
aaagacgaaucuagcaguaaagc

SEQ ID NO: 34185 - RNA, 23 nt, Artificial Sequence
  Chemically synthesized
cugaagguggcugauuaguuugu

SEQ ID NO: 34186 - RNA, 23 nt, Artificial Sequence
  Chemically synthesized
uuauuugcaaccugagcaucccg

SEQ ID NO: 34187 - RNA, 23 nt, Artificial Sequence
  Chemically synthesized
gacgcacuuucuucucuuucucc

SEQ ID NO: 34188 - RNA, 23 nt, Artificial Sequence
  Chemically synthesized
uucccauugcuuagucucuucug

SEQ ID NO: 34189 - RNA, 23 nt, Artificial Sequence
  Chemically synthesized
cguagcuuaguuucaauauuuca

SEQ ID NO: 34190 - RNA, 23 nt, Artificial Sequence
  Chemically synthesized
uaaucccaaagcgcauaaaugac

SEQ ID NO: 34191 - RNA, 23 nt, Artificial Sequence
  Chemically synthesized
aaugauucaggaaccagagagac

SEQ ID NO: 34192 - RNA, 23 nt, Artificial Sequence
  Chemically synthesized
cacaccacacuucagccaaaugg

SEQ ID NO: 34193 - RNA, 23 nt, Artificial Sequence
  Chemically synthesized
uugggaaaagaucugcauuugaa

SEQ ID NO: 34194 - RNA, 23 nt, Artificial Sequence
  Chemically synthesized
uuuuagagccuuuaguuugugaa

SEQ ID NO: 34195 - RNA, 23 nt, Artificial Sequence
  Chemically synthesized
uucuuagcugcagcuccuuauag

SEQ ID NO: 34196 - RNA, 23 nt, Artificial Sequence
  Chemically synthesized
uaugcccaucuucuccugaacuc

SEQ ID NO: 34197 - RNA, 23 nt, Artificial Sequence
  Chemically synthesized
uuccucgcacuuaucugcagcag

SEQ ID NO: 34198 - RNA, 23 nt, Artificial Sequence
  Chemically synthesized
uucucccuccaaagacgaaucua

SEQ ID NO: 34199 - RNA, 23 nt, Artificial Sequence
  Chemically synthesized
gauacgcucugagccaguuuuac

SEQ ID NO: 34200 - RNA, 23 nt, Artificial Sequence
  Chemically synthesized
acuugaaaaguguggcccucugg

SEQ ID NO: 34201 - RNA, 23 nt, Artificial Sequence
  Chemically synthesized
uggauauagggaccuacugcagc

SEQ ID NO: 34202 - RNA, 23 nt, Artificial Sequence
  Chemically synthesized
agucuguagcaaguuucuaauuu

SEQ ID NO: 34203 - RNA, 23 nt, Artificial Sequence
  Chemically synthesized
ucccuccaaagacgaaucuagca

SEQ ID NO: 34204 - RNA, 23 nt, Artificial Sequence
  Chemically synthesized
gcugacuuggauggguaugaugg

SEQ ID NO: 34205 - RNA, 23 nt, Artificial Sequence
  Chemically synthesized
acggacgcacuuucuucucuuuc

SEQ ID NO: 34206 - RNA, 23 nt, Artificial Sequence
  Chemically synthesized
uccaccacgucucugcauauugu

SEQ ID NO: 34207 - RNA, 23 nt, Artificial Sequence
  Chemically synthesized
uuucuuuuugcuguagagcugcc

SEQ ID NO: 34208 - RNA, 23 nt, Artificial Sequence
  Chemically synthesized
acugcagacugauugucauggug

SEQ ID NO: 34209 - RNA, 23 nt, Artificial Sequence
  Chemically synthesized
uuucuggcaggaggacugguuua

SEQ ID NO: 34210 - RNA, 23 nt, Artificial Sequence
  Chemically synthesized
uuuacgcaaguuuguccuuuuac

SEQ ID NO: 34211 - RNA, 23 nt, Artificial Sequence
  Chemically synthesized
uuacgcaaguuuguccuuuuacc

SEQ ID NO: 34212 - RNA, 23 nt, Artificial Sequence
  Chemically synthesized
aaaguguggcccucugguaugag

SEQ ID NO: 34213 - RNA, 23 nt, Artificial Sequence
  Chemically synthesized
gaaccucuccaucaucaacuuga

SEQ ID NO: 34214 - RNA, 23 nt, Artificial Sequence
  Chemically synthesized
auccaccacgucucugcauauug

SEQ ID NO: 34215 - RNA, 23 nt, Artificial Sequence
  Chemically synthesized
uagacgacuggauauagggaccu

SEQ ID NO: 34216 - RNA, 23 nt, Artificial Sequence
  Chemically synthesized
uuccuccacaaguuucccauugc

SEQ ID NO: 34217 - RNA, 23 nt, Artificial Sequence
  Chemically synthesized
gauuaaaauucagccuacaaaca

SEQ ID NO: 34218 - RNA, 23 nt, Artificial Sequence
  Chemically synthesized
ucacgcuaaauguccucuaaugg

SEQ ID NO: 34219 - RNA, 23 nt, Artificial Sequence
  Chemically synthesized
ucaucgcuuucaagcuacauugu

SEQ ID NO: 34220 - RNA, 23 nt, Artificial Sequence
  Chemically synthesized
accaggaacuuuuacaccauuuc

SEQ ID NO: 34221 - RNA, 23 nt, Artificial Sequence
  Chemically synthesized
cucccucaggcucauaaucaagg

SEQ ID NO: 34222 - RNA, 23 nt, Artificial Sequence
  Chemically synthesized
uccucugauauaaaagcuucuga

SEQ ID NO: 34223 - RNA, 23 nt, Artificial Sequence
  Chemically synthesized
guugacaacugcugagaacuucc

SEQ ID NO: 34224 - RNA, 23 nt, Artificial Sequence
  Chemically synthesized
uucuggcaggaggacugguuuag

SEQ ID NO: 34225 - RNA, 23 nt, Artificial Sequence
  Chemically synthesized
uuucccaacugcccaauaaauga

SEQ ID NO: 34226 - RNA, 23 nt, Artificial Sequence
  Chemically synthesized
uucaucgcuuucaagcuacauug

SEQ ID NO: 34227 - RNA, 23 nt, Artificial Sequence
  Chemically synthesized
uccaaagacgaaucuagcaguaa

SEQ ID NO: 34228 - RNA, 23 nt, Artificial Sequence
  Chemically synthesized
guccucugauauaaaagcuucug

SEQ ID NO: 34229 - RNA, 23 nt, Artificial Sequence
  Chemically synthesized
ucagcggaaccucuccaucauca

SEQ ID NO: 34230 - RNA, 23 nt, Artificial Sequence
  Chemically synthesized
auuuuagagccuuuaguuuguga

SEQ ID NO: 34231 - RNA, 23 nt, Artificial Sequence
  Chemically synthesized
cuaugaucuugacaaauauuacg

SEQ ID NO: 34232 - RNA, 23 nt, Artificial Sequence
  Chemically synthesized
acauguggagccucuggauuugg

SEQ ID NO: 34233 - RNA, 23 nt, Artificial Sequence
  Chemically synthesized
uggcaugucacuguucucuguac

SEQ ID NO: 34234 - RNA, 23 nt, Artificial Sequence
  Chemically synthesized
ucucugggugcugcuguugauuc

SEQ ID NO: 34235 - RNA, 23 nt, Artificial Sequence
  Chemically synthesized
aacuguugacaacugcugagaac

SEQ ID NO: 34236 - RNA, 23 nt, Artificial Sequence
  Chemically synthesized
uaacuggaacuucugugaagugc

SEQ ID NO: 34237 - RNA, 23 nt, Artificial Sequence
  Chemically synthesized
cuccuuugucuugguuuaauucu

SEQ ID NO: 34238 - RNA, 23 nt, Artificial Sequence
  Chemically synthesized
ucuguuucagguucuggacugcc

SEQ ID NO: 34239 - RNA, 23 nt, Artificial Sequence
  Chemically synthesized
auguucucugggugcugcuguug

SEQ ID NO: 34240 - RNA, 23 nt, Artificial Sequence
  Chemically synthesized
uuucugaaggguggaaguaaggu

SEQ ID NO: 34241 - RNA, 23 nt, Artificial Sequence
  Chemically synthesized
uaaggugucuuuggaaggcuggg

SEQ ID NO: 34242 - RNA, 23 nt, Artificial Sequence
  Chemically synthesized
guagcuuggcauucugcucuuga

SEQ ID NO: 34243 - RNA, 23 nt, Artificial Sequence
  Chemically synthesized
guuucuccugcucagcaacuugu

SEQ ID NO: 34244 - RNA, 23 nt, Artificial Sequence
  Chemically synthesized
caacaggacagagagcugauuuc

SEQ ID NO: 34245 - RNA, 23 nt, Artificial Sequence
  Chemically synthesized
cauucgauuucaucuucgucuuc

SEQ ID NO: 34246 - RNA, 23 nt, Artificial Sequence
  Chemically synthesized
aaauugggagcacugaguguagc

SEQ ID NO: 34247 - RNA, 23 nt, Artificial Sequence
  Chemically synthesized
cuccugacuccaccaaaaacuua

SEQ ID NO: 34248 - RNA, 23 nt, Artificial Sequence
  Chemically synthesized
uguucucugggugcugcuguuga

SEQ ID NO: 34249 - RNA, 23 nt, Artificial Sequence
  Chemically synthesized
ggguggaaguaaggugucuuugg

SEQ ID NO: 34250 - RNA, 23 nt, Artificial Sequence
  Chemically synthesized
cacuucagccaaauggcaaucac

SEQ ID NO: 34251 - RNA, 23 nt, Artificial Sequence
  Chemically synthesized
cuucagccaaauggcaaucacuc

SEQ ID NO: 34252 - RNA, 23 nt, Artificial Sequence
  Chemically synthesized
aucccgcaagauaucuucacugc

SEQ ID NO: 34253 - RNA, 23 nt, Artificial Sequence
  Chemically synthesized
ucagaguaccaaaggaagguggg

SEQ ID NO: 34254 - RNA, 23 nt, Artificial Sequence
  Chemically synthesized
auguugggcagugucuguauuuu

SEQ ID NO: 34255 - RNA, 23 nt, Artificial Sequence
  Chemically synthesized
guugggcagugucuguauuuuca

SEQ ID NO: 34256 - RNA, 23 nt, Artificial Sequence
  Chemically synthesized
ucuugagcaucucuagcugccug

SEQ ID NO: 34257 - RNA, 23 nt, Artificial Sequence
  Chemically synthesized
uucaauuuccuccacaaguuucc

SEQ ID NO: 34258 - RNA, 23 nt, Artificial Sequence
  Chemically synthesized
uuaagugcucucacuuuuuuuag

SEQ ID NO: 34259 - RNA, 23 nt, Artificial Sequence
  Chemically synthesized
aauucuuggguacagucccagca

SEQ ID NO: 34260 - RNA, 23 nt, Artificial Sequence
  Chemically synthesized
cuuucaugggcagcucaucauca

SEQ ID NO: 34261 - RNA, 23 nt, Artificial Sequence
  Chemically synthesized
augcccaucuucuccugaacucc

SEQ ID NO: 34262 - RNA, 23 nt, Artificial Sequence
  Chemically synthesized
auucaggaaccagagagaccacc

SEQ ID NO: 34263 - RNA, 23 nt, Artificial Sequence
  Chemically synthesized
aguaauuuaguugggcugagugg

SEQ ID NO: 34264 - RNA, 23 nt, Artificial Sequence
  Chemically synthesized
auauacacuugaaaaguguggcc

SEQ ID NO: 34265 - RNA, 23 nt, Artificial Sequence
  Chemically synthesized
guaaggugucuuuggaaggcugg

SEQ ID NO: 34266 - RNA, 23 nt, Artificial Sequence
  Chemically synthesized
acacuucagccaaauggcaauca

SEQ ID NO: 34267 - RNA, 23 nt, Artificial Sequence
  Chemically synthesized
acuucagccaaauggcaaucacu

SEQ ID NO: 34268 - RNA, 23 nt, Artificial Sequence
  Chemically synthesized
caagauucuacaucuaauuacug

SEQ ID NO: 34269 - RNA, 23 nt, Artificial Sequence
  Chemically synthesized
aauguccucuaauggugaauucu

SEQ ID NO: 34270 - RNA, 23 nt, Artificial Sequence
  Chemically synthesized
aguuacguggaacauaucccucc

SEQ ID NO: 34271 - RNA, 23 nt, Artificial Sequence
  Chemically synthesized
gagccaguuuuacgcaaguuugu

SEQ ID NO: 34272 - RNA, 23 nt, Artificial Sequence
  Chemically synthesized
ucauuauccgcaacuggacguuc

SEQ ID NO: 34273 - RNA, 23 nt, Artificial Sequence
  Chemically synthesized
uuuauuugcaaccugagcauccc

SEQ ID NO: 34274 - RNA, 23 nt, Artificial Sequence
  Chemically synthesized
uauuugcaaccugagcaucccgc

SEQ ID NO: 34275 - RNA, 23 nt, Artificial Sequence
  Chemically synthesized
uaagaaacaucggcaucaucuug

SEQ ID NO: 34276 - RNA, 23 nt, Artificial Sequence
  Chemically synthesized
uuuagagccuuuaguuugugaag

SEQ ID NO: 34277 - RNA, 23 nt, Artificial Sequence
  Chemically synthesized
uuuugcuguagagcugccuucuu

SEQ ID NO: 34278 - RNA, 23 nt, Artificial Sequence
  Chemically synthesized
auacuuaucugagugcuacacgg

SEQ ID NO: 34279 - RNA, 23 nt, Artificial Sequence
  Chemically synthesized
aucuucuccugaacuccauaaag

SEQ ID NO: 34280 - RNA, 23 nt, Artificial Sequence
  Chemically synthesized
aagaaauugggagcacugagugu

SEQ ID NO: 34281 - RNA, 23 nt, Artificial Sequence
  Chemically synthesized
gaguccauccaucacuaucagca

SEQ ID NO: 34282 - RNA, 23 nt, Artificial Sequence
  Chemically synthesized
guccauccaucacuaucagcagc

SEQ ID NO: 34283 - RNA, 23 nt, Artificial Sequence
  Chemically synthesized
ugagccaguuuuacgcaaguuug

SEQ ID NO: 34284 - RNA, 23 nt, Artificial Sequence
  Chemically synthesized
auauuuggcccauuaggacccuc

SEQ ID NO: 34285 - RNA, 23 nt, Artificial Sequence
  Chemically synthesized
cugaguggccgaggaauucuuuc

SEQ ID NO: 34286 - RNA, 23 nt, Artificial Sequence
  Chemically synthesized
uauuggaauaaauguucucuggg

SEQ ID NO: 34287 - RNA, 23 nt, Artificial Sequence
  Chemically synthesized
uauacacuugaaaaguguggccc

SEQ ID NO: 34288 - RNA, 23 nt, Artificial Sequence
  Chemically synthesized
uuuucugaaggguggaaguaagg

SEQ ID NO: 34289 - RNA, 23 nt, Artificial Sequence
  Chemically synthesized
aaccuggagaaagggucuggucu

SEQ ID NO: 34290 - RNA, 23 nt, Artificial Sequence
  Chemically synthesized
uuugguuuuguaggaacaggagg

SEQ ID NO: 34291 - RNA, 23 nt, Artificial Sequence
  Chemically synthesized
ucaauuuccuccacaaguuuccc

SEQ ID NO: 34292 - RNA, 23 nt, Artificial Sequence
  Chemically synthesized
caauuuccuccacaaguuuccca

SEQ ID NO: 34293 - RNA, 23 nt, Artificial Sequence
  Chemically synthesized
uuuccuccacaaguuucccauug

SEQ ID NO: 34294 - RNA, 23 nt, Artificial Sequence
  Chemically synthesized
uucauucucuucuagagacauuc

SEQ ID NO: 34295 - RNA, 23 nt, Artificial Sequence
  Chemically synthesized
uucuuggguacagucccagcaag

SEQ ID NO: 34296 - RNA, 23 nt, Artificial Sequence
  Chemically synthesized
aaguuacguggaacauaucccuc

SEQ ID NO: 34297 - RNA, 23 nt, Artificial Sequence
  Chemically synthesized
uucccuguggaugauugucaugc

SEQ ID NO: 34298 - RNA, 23 nt, Artificial Sequence
  Chemically synthesized
uuuaaacuuggauccugagaucu

SEQ ID NO: 34299 - RNA, 23 nt, Artificial Sequence
  Chemically synthesized
uaaacuuggauccugagaucuug

SEQ ID NO: 34300 - RNA, 23 nt, Artificial Sequence
  Chemically synthesized
uuaucugcagcagucugcauguc

SEQ ID NO: 34301 - RNA, 23 nt, Artificial Sequence
  Chemically synthesized
cacacacagcauugugaagagcc

SEQ ID NO: 34302 - RNA, 23 nt, Artificial Sequence
  Chemically synthesized
uauuuggcccauuaggacccucu

SEQ ID NO: 34303 - RNA, 23 nt, Artificial Sequence
  Chemically synthesized
uuucguaaggcuucuaggucagc

SEQ ID NO: 34304 - RNA, 23 nt, Artificial Sequence
  Chemically synthesized
uuugguuuaguucccauggacgg

SEQ ID NO: 34305 - RNA, 23 nt, Artificial Sequence
  Chemically synthesized
auauagggaccuacugcagccac

SEQ ID NO: 34306 - RNA, 23 nt, Artificial Sequence
  Chemically synthesized
guuguuguagcuuggcauucugc

SEQ ID NO: 34307 - RNA, 23 nt, Artificial Sequence
  Chemically synthesized
guucaauuuccuccacaaguuuc

SEQ ID NO: 34308 - RNA, 23 nt, Artificial Sequence
  Chemically synthesized
ugcucagcaacuuguugcuguug

SEQ ID NO: 34309 - RNA, 23 nt, Artificial Sequence
  Chemically synthesized
uuaagcgcuguuccuuaguugcc

SEQ ID NO: 34310 - RNA, 23 nt, Artificial Sequence
  Chemically synthesized
uuuuaaagucagcuaugaucuug

SEQ ID NO: 34311 - RNA, 23 nt, Artificial Sequence
  Chemically synthesized
uuaggagcagcugcugaaaacac

SEQ ID NO: 34312 - RNA, 23 nt, Artificial Sequence
  Chemically synthesized
uauacuuaucugagugcuacacg

SEQ ID NO: 34313 - RNA, 23 nt, Artificial Sequence
  Chemically synthesized
aaauguccucuaauggugaauuc

SEQ ID NO: 34314 - RNA, 23 nt, Artificial Sequence
  Chemically synthesized
acagagauuaauucuucauugac

SEQ ID NO: 34315 - RNA, 23 nt, Artificial Sequence
  Chemically synthesized
uucgucuucccuguggaugauug

SEQ ID NO: 34316 - RNA, 23 nt, Artificial Sequence
  Chemically synthesized
augaggcagcacaauguaaugga

SEQ ID NO: 34317 - RNA, 23 nt, Artificial Sequence
  Chemically synthesized
auuuacaccaaacuguaccagga

SEQ ID NO: 34318 - RNA, 23 nt, Artificial Sequence
  Chemically synthesized
auacgcucugagccaguuuuacg

SEQ ID NO: 34319 - RNA, 23 nt, Artificial Sequence
  Chemically synthesized
ugguccucugauauaaaagcuuc

SEQ ID NO: 34320 - RNA, 23 nt, Artificial Sequence
  Chemically synthesized
auuuaguugggcugaguggccga

SEQ ID NO: 34321 - RNA, 23 nt, Artificial Sequence
  Chemically synthesized
uucugggcagcagcaauuacagg

SEQ ID NO: 34322 - RNA, 23 nt, Artificial Sequence
  Chemically synthesized
auucgcucauuauccgcaacugg

SEQ ID NO: 34323 - RNA, 23 nt, Artificial Sequence
  Chemically synthesized
aguaaggugucuuuggaaggcug

SEQ ID NO: 34324 - RNA, 23 nt, Artificial Sequence
  Chemically synthesized
acuuucuugcuuagaaccuggag

SEQ ID NO: 34325 - RNA, 23 nt, Artificial Sequence
  Chemically synthesized
uuaaugucugaagguggcugauu

SEQ ID NO: 34326 - RNA, 23 nt, Artificial Sequence
  Chemically synthesized
uuagagccuuuaguuugugaagc

SEQ ID NO: 34327 - RNA, 23 nt, Artificial Sequence
  Chemically synthesized
gacuggauauagggaccuacugc

SEQ ID NO: 34328 - RNA, 23 nt, Artificial Sequence
  Chemically synthesized
ugcagacugauugucaugguggc

SEQ ID NO: 34329 - RNA, 23 nt, Artificial Sequence
  Chemically synthesized
cuuguugcuguugucgcugaucu

SEQ ID NO: 34330 - RNA, 23 nt, Artificial Sequence
  Chemically synthesized
uuaaagucagcuaugaucuugac

SEQ ID NO: 34331 - RNA, 23 nt, Artificial Sequence
  Chemically synthesized
auauuacggguaagucuguagca

SEQ ID NO: 34332 - RNA, 23 nt, Artificial Sequence
  Chemically synthesized
acugguaccguagcuuaguuuca

SEQ ID NO: 34333 - RNA, 23 nt, Artificial Sequence
  Chemically synthesized
uucuucacugacaauauacaagu

SEQ ID NO: 34334 - RNA, 23 nt, Artificial Sequence
  Chemically synthesized
auucuguguggaaguuucaggcc

SEQ ID NO: 34335 - RNA, 23 nt, Artificial Sequence
  Chemically synthesized
aaacuuggauccugagaucuugg

SEQ ID NO: 34336 - RNA, 23 nt, Artificial Sequence
  Chemically synthesized
aauugggagcacugaguguagcc

SEQ ID NO: 34337 - RNA, 23 nt, Artificial Sequence
  Chemically synthesized
uuacaugaggcagcacaauguaa

SEQ ID NO: 34338 - RNA, 23 nt, Artificial Sequence
  Chemically synthesized
caaacuguaccaggaacuuaacg

SEQ ID NO: 34339 - RNA, 23 nt, Artificial Sequence
  Chemically synthesized
uacgcaaguuuguccuuuuacca

SEQ ID NO: 34340 - RNA, 23 nt, Artificial Sequence
  Chemically synthesized
uuugguucuucuggguuauucug

SEQ ID NO: 34341 - RNA, 23 nt, Artificial Sequence
  Chemically synthesized
aggucagcaucacucugguuucg

SEQ ID NO: 34342 - RNA, 23 nt, Artificial Sequence
  Chemically synthesized
uaauuuaguugggcugaguggcc

SEQ ID NO: 34343 - RNA, 23 nt, Artificial Sequence
  Chemically synthesized
aauuuaguugggcugaguggccg

SEQ ID NO: 34344 - RNA, 23 nt, Artificial Sequence
  Chemically synthesized
cuauuggaauaaauguucucugg

SEQ ID NO: 34345 - RNA, 23 nt, Artificial Sequence
  Chemically synthesized
gaaguaaggugucuuuggaaggc

SEQ ID NO: 34346 - RNA, 23 nt, Artificial Sequence
  Chemically synthesized
uaugcugggagauagcagcacuc

SEQ ID NO: 34347 - RNA, 23 nt, Artificial Sequence
  Chemically synthesized
aacuuccgucuggcuuaaugucu

SEQ ID NO: 34348 - RNA, 23 nt, Artificial Sequence
  Chemically synthesized
uauagaggcgaucaagcucagcc

SEQ ID NO: 34349 - RNA, 23 nt, Artificial Sequence
  Chemically synthesized
ccacugcagacugauugucaugg

SEQ ID NO: 34350 - RNA, 23 nt, Artificial Sequence
  Chemically synthesized
cugcagacugauugucauggugg

SEQ ID NO: 34351 - RNA, 23 nt, Artificial Sequence
  Chemically synthesized
uccacguggccuuuaagugcucu

SEQ ID NO: 34352 - RNA, 23 nt, Artificial Sequence
  Chemically synthesized
aacuguuuuuaaagucagcuaug

SEQ ID NO: 34353 - RNA, 23 nt, Artificial Sequence
  Chemically synthesized
aaagucagcuaugaucuugacaa

SEQ ID NO: 34354 - RNA, 23 nt, Artificial Sequence
  Chemically synthesized
uauuacggguaagucuguagcaa

SEQ ID NO: 34355 - RNA, 23 nt, Artificial Sequence
  Chemically synthesized
guucuucacugacaauauacaag

SEQ ID NO: 34356 - RNA, 23 nt, Artificial Sequence
  Chemically synthesized
acugguuuaggagcagcugcuga

SEQ ID NO: 34357 - RNA, 23 nt, Artificial Sequence
  Chemically synthesized
aaacacucaacaggacagagagc

SEQ ID NO: 34358 - RNA, 23 nt, Artificial Sequence
  Chemically synthesized
uacuuaucugagugcuacacggg

SEQ ID NO: 34359 - RNA, 23 nt, Artificial Sequence
  Chemically synthesized
caucgcuuucaagcuacauuguc

SEQ ID NO: 34360 - RNA, 23 nt, Artificial Sequence
  Chemically synthesized
cuaaaauucuguguggaaguuuc

SEQ ID NO: 34361 - RNA, 23 nt, Artificial Sequence
  Chemically synthesized
uaaaauucuguguggaaguuuca

SEQ ID NO: 34362 - RNA, 23 nt, Artificial Sequence
  Chemically synthesized
uucuguguggaaguuucaggcca

SEQ ID NO: 34363 - RNA, 23 nt, Artificial Sequence
  Chemically synthesized
uuaaacuuggauccugagaucuu

SEQ ID NO: 34364 - RNA, 23 nt, Artificial Sequence
  Chemically synthesized
aacuuggauccugagaucuuggu

SEQ ID NO: 34365 - RNA, 23 nt, Artificial Sequence
  Chemically synthesized
auugggagcacugaguguagccu

SEQ ID NO: 34366 - RNA, 23 nt, Artificial Sequence
  Chemically synthesized
uuuccucgcacuuaucugcagca

SEQ ID NO: 34367 - RNA, 23 nt, Artificial Sequence
  Chemically synthesized
acauuuacaccaaacuguaccag

SEQ ID NO: 34368 - RNA, 23 nt, Artificial Sequence
  Chemically synthesized
cauuuacaccaaacuguaccagg

SEQ ID NO: 34369 - RNA, 23 nt, Artificial Sequence
  Chemically synthesized
uucaggaaccagagagaccaccu

SEQ ID NO: 34370 - RNA, 23 nt, Artificial Sequence
  Chemically synthesized
aauauuuggcccauuaggacccu

SEQ ID NO: 34371 - RNA, 23 nt, Artificial Sequence
  Chemically synthesized
uuccaaaucguugaagaacauca

SEQ ID NO: 34372 - RNA, 23 nt, Artificial Sequence
  Chemically synthesized
uucguaaggcuucuaggucagca

SEQ ID NO: 34373 - RNA, 23 nt, Artificial Sequence
  Chemically synthesized
ugaguggccgaggaauucuuucg

SEQ ID NO: 34374 - RNA, 23 nt, Artificial Sequence
  Chemically synthesized
ugauucugggcagcagcaauuac

SEQ ID NO: 34375 - RNA, 23 nt, Artificial Sequence
  Chemically synthesized
aaaaguguggcccucugguauga

SEQ ID NO: 34376 - RNA, 23 nt, Artificial Sequence
  Chemically synthesized
agccugcuggaaguuuuuuccug

SEQ ID NO: 34377 - RNA, 23 nt, Artificial Sequence
  Chemically synthesized
aggguggaaguaaggugucuuug

SEQ ID NO: 34378 - RNA, 23 nt, Artificial Sequence
  Chemically synthesized
aaugucugaagguggcugauuag

SEQ ID NO: 34379 - RNA, 23 nt, Artificial Sequence
  Chemically synthesized
cucagaguaccaaaggaaggugg

SEQ ID NO: 34380 - RNA, 23 nt, Artificial Sequence
  Chemically synthesized
cauaguagacgacuggauauagg

SEQ ID NO: 34381 - RNA, 23 nt, Artificial Sequence
  Chemically synthesized
uuauagaggcgaucaagcucagc

SEQ ID NO: 34382 - RNA, 23 nt, Artificial Sequence
  Chemically synthesized
uucuccugcucagcaacuuguug

SEQ ID NO: 34383 - RNA, 23 nt, Artificial Sequence
  Chemically synthesized
uuuaaagucagcuaugaucuuga

SEQ ID NO: 34384 - RNA, 23 nt, Artificial Sequence
  Chemically synthesized
aaacaggauugucgcuguauacu

SEQ ID NO: 34385 - RNA, 23 nt, Artificial Sequence
  Chemically synthesized
uaucugagugcuacacgggacac

SEQ ID NO: 34386 - RNA, 23 nt, Artificial Sequence
  Chemically synthesized
agcaaguuacguggaacauaucc

SEQ ID NO: 34387 - RNA, 23 nt, Artificial Sequence
  Chemically synthesized
cuuggauccugagaucuuggucc

SEQ ID NO: 34388 - RNA, 23 nt, Artificial Sequence
  Chemically synthesized
uaucugcagcagucugcauguca

SEQ ID NO: 34389 - RNA, 23 nt, Artificial Sequence
  Chemically synthesized
aucugcagcagucugcaugucac

SEQ ID NO: 34390 - RNA, 23 nt, Artificial Sequence
  Chemically synthesized
aguuuguccuuuuaccaggaggc

SEQ ID NO: 34391 - RNA, 23 nt, Artificial Sequence
  Chemically synthesized
uuuguccuuuuaccaggaggcag

SEQ ID NO: 34392 - RNA, 23 nt, Artificial Sequence
  Chemically synthesized
uuuuuuccuggcgccugcuguug

SEQ ID NO: 34393 - RNA, 23 nt, Artificial Sequence
  Chemically synthesized
gucuggcuuaaugucugaaggug

SEQ ID NO: 34394 - RNA, 23 nt, Artificial Sequence
  Chemically synthesized
ucuggcuuaaugucugaaggugg

SEQ ID NO: 34395 - RNA, 23 nt, Artificial Sequence
  Chemically synthesized
augucugaagguggcugauuagu

SEQ ID NO: 34396 - RNA, 23 nt, Artificial Sequence
  Chemically synthesized
gguuuuguaggaacaggaggugg

SEQ ID NO: 34397 - RNA, 23 nt, Artificial Sequence
  Chemically synthesized
agagccuuuaguuugugaagcag

SEQ ID NO: 34398 - RNA, 23 nt, Artificial Sequence
  Chemically synthesized
gagccuuuaguuugugaagcagc

SEQ ID NO: 34399 - RNA, 23 nt, Artificial Sequence
  Chemically synthesized
cuuccugauucucagcuauuucu

SEQ ID NO: 34400 - RNA, 23 nt, Artificial Sequence
  Chemically synthesized
uccugauucucagcuauuucuuu

SEQ ID NO: 34401 - RNA, 23 nt, Artificial Sequence
  Chemically synthesized
ucagcaacuuguugcuguugucg

SEQ ID NO: 34402 - RNA, 23 nt, Artificial Sequence
  Chemically synthesized
uguugcuguugucgcugaucuug

SEQ ID NO: 34403 - RNA, 23 nt, Artificial Sequence
  Chemically synthesized
ccuuaguugccagcaauuguugc

SEQ ID NO: 34404 - RNA, 23 nt, Artificial Sequence
  Chemically synthesized
aucccuccuuaucauuaaggcgc

SEQ ID NO: 34405 - RNA, 23 nt, Artificial Sequence
  Chemically synthesized
ucaugggcagcucaucaucauuc

SEQ ID NO: 34406 - RNA, 23 nt, Artificial Sequence
  Chemically synthesized
uaauggaguccauccaucacuau

SEQ ID NO: 34407 - RNA, 23 nt, Artificial Sequence
  Chemically synthesized
uaccaggaacuuaacgauuucug

SEQ ID NO: 34408 - RNA, 23 nt, Artificial Sequence
  Chemically synthesized
auuugguucuucuggguuauucu

SEQ ID NO: 34409 - RNA, 23 nt, Artificial Sequence
  Chemically synthesized
auuuggcccauuaggacccucug

SEQ ID NO: 34410 - RNA, 23 nt, Artificial Sequence
  Chemically synthesized
ucuggcucuguaauagaacuacg

SEQ ID NO: 34411 - RNA, 23 nt, Artificial Sequence
  Chemically synthesized
gugcguuagacaguuucuuucgu

SEQ ID NO: 34412 - RNA, 23 nt, Artificial Sequence
  Chemically synthesized
aaucguugaagaacaucaaacau

SEQ ID NO: 34413 - RNA, 23 nt, Artificial Sequence
  Chemically synthesized
uuuucaugguucuccugaacuga

SEQ ID NO: 34414 - RNA, 23 nt, Artificial Sequence
  Chemically synthesized
uacaggcuuaccauauacacuug

SEQ ID NO: 34415 - RNA, 23 nt, Artificial Sequence
  Chemically synthesized
cugcuggaaguuuuuuccuggcg

SEQ ID NO: 34416 - RNA, 23 nt, Artificial Sequence
  Chemically synthesized
augcugggagauagcagcacucu

SEQ ID NO: 34417 - RNA, 23 nt, Artificial Sequence
  Chemically synthesized
gaacuuccgucuggcuuaauguc

SEQ ID NO: 34418 - RNA, 23 nt, Artificial Sequence
  Chemically synthesized
uguuuugguuuuguaggaacagg

SEQ ID NO: 34419 - RNA, 23 nt, Artificial Sequence
  Chemically synthesized
uuuugguuuuguaggaacaggag

SEQ ID NO: 34420 - RNA, 23 nt, Artificial Sequence
  Chemically synthesized
uugguuuuguaggaacaggaggu

SEQ ID NO: 34421 - RNA, 23 nt, Artificial Sequence
  Chemically synthesized
aaucacucucgccggguucuuug

SEQ ID NO: 34422 - RNA, 23 nt, Artificial Sequence
  Chemically synthesized
ugaaugaccaaggaaccauccgg

SEQ ID NO: 34423 - RNA, 23 nt, Artificial Sequence
  Chemically synthesized
auaguagacgacuggauauaggg

SEQ ID NO: 34424 - RNA, 23 nt, Artificial Sequence
  Chemically synthesized
uaguagacgacuggauauaggga

SEQ ID NO: 34425 - RNA, 23 nt, Artificial Sequence
  Chemically synthesized
uauagggaccuacugcagccaca

SEQ ID NO: 34426 - RNA, 23 nt, Artificial Sequence
  Chemically synthesized
gauccugccguucuugagcaucu

SEQ ID NO: 34427 - RNA, 23 nt, Artificial Sequence
  Chemically synthesized
uccugccguucuugagcaucucu

SEQ ID NO: 34428 - RNA, 23 nt, Artificial Sequence
  Chemically synthesized
uccugcucagcaacuuguugcug

SEQ ID NO: 34429 - RNA, 23 nt, Artificial Sequence
  Chemically synthesized
uaagcgcuguuccuuaguugcca

SEQ ID NO: 34430 - RNA, 23 nt, Artificial Sequence
  Chemically synthesized
acuguuuuuaaagucagcuauga

SEQ ID NO: 34431 - RNA, 23 nt, Artificial Sequence
  Chemically synthesized
uaaagucagcuaugaucuugaca

SEQ ID NO: 34432 - RNA, 23 nt, Artificial Sequence
  Chemically synthesized
aaaacaggauugucgcuguauac

SEQ ID NO: 34433 - RNA, 23 nt, Artificial Sequence
  Chemically synthesized
auucuucaucgcuuucaagcuac

SEQ ID NO: 34434 - RNA, 23 nt, Artificial Sequence
  Chemically synthesized
uucuucaucgcuuucaagcuaca

SEQ ID NO: 34435 - RNA, 23 nt, Artificial Sequence
  Chemically synthesized
agcucaucaucauucugagguuc

SEQ ID NO: 34436 - RNA, 23 nt, Artificial Sequence
  Chemically synthesized
aauguaauggaguccauccauca

SEQ ID NO: 34437 - RNA, 23 nt, Artificial Sequence
  Chemically synthesized
uuccaugagcgauacgcucugag

SEQ ID NO: 34438 - RNA, 23 nt, Artificial Sequence
  Chemically synthesized
ucgggcuccacauguaaauaugg

SEQ ID NO: 34439 - RNA, 23 nt, Artificial Sequence
  Chemically synthesized
uuucaugguucuccugaacugaa

SEQ ID NO: 34440 - RNA, 23 nt, Artificial Sequence
  Chemically synthesized
cucuguuucagguucuggacugc

SEQ ID NO: 34441 - RNA, 23 nt, Artificial Sequence
  Chemically synthesized
uuaccauauacacuugaaaagug

SEQ ID NO: 34442 - RNA, 23 nt, Artificial Sequence
  Chemically synthesized
aaguaaggugucuuuggaaggcu

SEQ ID NO: 34443 - RNA, 23 nt, Artificial Sequence
  Chemically synthesized
ugcuuagaaccuggagaaagggu

SEQ ID NO: 34444 - RNA, 23 nt, Artificial Sequence
  Chemically synthesized
uguagcuuggcauucugcucuug

SEQ ID NO: 34445 - RNA, 23 nt, Artificial Sequence
  Chemically synthesized
uugagcaucucuagcugccuggu

SEQ ID NO: 34446 - RNA, 23 nt, Artificial Sequence
  Chemically synthesized
acuuuugacacagccaggacgag

SEQ ID NO: 34447 - RNA, 23 nt, Artificial Sequence
  Chemically synthesized
gacgagcucccucuguuuuugcu

SEQ ID NO: 34448 - RNA, 23 nt, Artificial Sequence
  Chemically synthesized
cuggaacuucugugaagugcugc

SEQ ID NO: 34449 - RNA, 23 nt, Artificial Sequence
  Chemically synthesized
uguuccacguggccuuuaagugc

SEQ ID NO: 34450 - RNA, 23 nt, Artificial Sequence
  Chemically synthesized
aaucagagacagcgaugugacgg

SEQ ID NO: 34451 - RNA, 23 nt, Artificial Sequence
  Chemically synthesized
augugacggcacugguccuuucu

SEQ ID NO: 34452 - RNA, 23 nt, Artificial Sequence
  Chemically synthesized
guauacuuaucugagugcuacac

SEQ ID NO: 34453 - RNA, 23 nt, Artificial Sequence
  Chemically synthesized
ugcugacguagaugcuuuauuuc

SEQ ID NO: 34454 - RNA, 23 nt, Artificial Sequence
  Chemically synthesized
ucauucucuucuagagacauucu

SEQ ID NO: 34455 - RNA, 23 nt, Artificial Sequence
  Chemically synthesized
auucucuucuagagacauucuuc

SEQ ID NO: 34456 - RNA, 23 nt, Artificial Sequence
  Chemically synthesized
uucugagguucauaaucccaaag

SEQ ID NO: 34457 - RNA, 23 nt, Artificial Sequence
  Chemically synthesized
ucugagguucauaaucccaaagc

SEQ ID NO: 34458 - RNA, 23 nt, Artificial Sequence
  Chemically synthesized
aaagaaauugggagcacugagug

SEQ ID NO: 34459 - RNA, 23 nt, Artificial Sequence
  Chemically synthesized
ugaguguagccuuccuccauuuc

SEQ ID NO: 34460 - RNA, 23 nt, Artificial Sequence
  Chemically synthesized
cagucugcaugucacuguagguc

SEQ ID NO: 34461 - RNA, 23 nt, Artificial Sequence
  Chemically synthesized
accaggaacuuaacgauuucugu

SEQ ID NO: 34462 - RNA, 23 nt, Artificial Sequence
  Chemically synthesized
guucaugacgaaggaagaagcga

SEQ ID NO: 34463 - RNA, 23 nt, Artificial Sequence
  Chemically synthesized
auucucccuccaaagacgaaucu

SEQ ID NO: 34464 - RNA, 23 nt, Artificial Sequence
  Chemically synthesized
uugguucuucuggguuauucugg

SEQ ID NO: 34465 - RNA, 23 nt, Artificial Sequence
  Chemically synthesized
uuuagaggccuuggugcguuaga

SEQ ID NO: 34466 - RNA, 23 nt, Artificial Sequence
  Chemically synthesized
guaaggcuucuaggucagcauca

SEQ ID NO: 34467 - RNA, 23 nt, Artificial Sequence
  Chemically synthesized
aucguugaagaacaucaaacauu

SEQ ID NO: 34468 - RNA, 23 nt, Artificial Sequence
  Chemically synthesized
guaauuuaguugggcugaguggc

SEQ ID NO: 34469 - RNA, 23 nt, Artificial Sequence
  Chemically synthesized
auucugggcagcagcaauuacag

SEQ ID NO: 34470 - RNA, 23 nt, Artificial Sequence
  Chemically synthesized
cauauacacuugaaaaguguggc

SEQ ID NO: 34471 - RNA, 23 nt, Artificial Sequence
  Chemically synthesized
auacacuugaaaaguguggcccu

SEQ ID NO: 34472 - RNA, 23 nt, Artificial Sequence
  Chemically synthesized
ugcuggaaguuuuuuccuggcgc

SEQ ID NO: 34473 - RNA, 23 nt, Artificial Sequence
  Chemically synthesized
aaguuuuuuccuggcgccugcug

SEQ ID NO: 34474 - RNA, 23 nt, Artificial Sequence
  Chemically synthesized
uagaaccuggagaaagggucugg

SEQ ID NO: 34475 - RNA, 23 nt, Artificial Sequence
  Chemically synthesized
uuuugguuuaguucccauggacg

SEQ ID NO: 34476 - RNA, 23 nt, Artificial Sequence
  Chemically synthesized
auuugcaaccugagcaucccgca

SEQ ID NO: 34477 - RNA, 23 nt, Artificial Sequence
  Chemically synthesized
uucagccaaauggcaaucacucu

SEQ ID NO: 34478 - RNA, 23 nt, Artificial Sequence
  Chemically synthesized
uugaaggacuccaaucagggcca

SEQ ID NO: 34479 - RNA, 23 nt, Artificial Sequence
  Chemically synthesized
uggauuuuagagccuuuaguuug

SEQ ID NO: 34480 - RNA, 23 nt, Artificial Sequence
  Chemically synthesized
aagccugaaugaccaaggaacca

SEQ ID NO: 34481 - RNA, 23 nt, Artificial Sequence
  Chemically synthesized
cugaaugaccaaggaaccauccg

SEQ ID NO: 34482 - RNA, 23 nt, Artificial Sequence
  Chemically synthesized
aaugaccaaggaaccauccggca

SEQ ID NO: 34483 - RNA, 23 nt, Artificial Sequence
  Chemically synthesized
uuguuguagcuuggcauucugcu

SEQ ID NO: 34484 - RNA, 23 nt, Artificial Sequence
  Chemically synthesized
uuagcugcagcuccuuauagagg

SEQ ID NO: 34485 - RNA, 23 nt, Artificial Sequence
  Chemically synthesized
gaacuucugugaagugcugcuca

SEQ ID NO: 34486 - RNA, 23 nt, Artificial Sequence
  Chemically synthesized
acaaguuucccauugcuuagucu

SEQ ID NO: 34487 - RNA, 23 nt, Artificial Sequence
  Chemically synthesized
cacguggccuuuaagugcucuca

SEQ ID NO: 34488 - RNA, 23 nt, Artificial Sequence
  Chemically synthesized
ucuccugcucagcaacuuguugc

SEQ ID NO: 34489 - RNA, 23 nt, Artificial Sequence
  Chemically synthesized
uccugaaguucagcaagagucag

SEQ ID NO: 34490 - RNA, 23 nt, Artificial Sequence
  Chemically synthesized
aauauuacggguaagucuguagc

SEQ ID NO: 34491 - RNA, 23 nt, Artificial Sequence
  Chemically synthesized
cacugacaaccaacuaacaguuc

SEQ ID NO: 34492 - RNA, 23 nt, Artificial Sequence
  Chemically synthesized
cuguauacuuaucugagugcuac

SEQ ID NO: 34493 - RNA, 23 nt, Artificial Sequence
  Chemically synthesized
aauucuguguggaaguuucaggc

SEQ ID NO: 34494 - RNA, 23 nt, Artificial Sequence
  Chemically synthesized
uuacguggaacauaucccuccuu

SEQ ID NO: 34495 - RNA, 23 nt, Artificial Sequence
  Chemically synthesized
uacguggaacauaucccuccuua

SEQ ID NO: 34496 - RNA, 23 nt, Artificial Sequence
  Chemically synthesized
cagcagucugcaugucacuguag

SEQ ID NO: 34497 - RNA, 23 nt, Artificial Sequence
  Chemically synthesized
guaccaggaacuuaacgauuucu

SEQ ID NO: 34498 - RNA, 23 nt, Artificial Sequence
  Chemically synthesized
agcauugugaagagccgugaugc

SEQ ID NO: 34499 - RNA, 23 nt, Artificial Sequence
  Chemically synthesized
augacgaaggaagaagcgaacuu

SEQ ID NO: 34500 - RNA, 23 nt, Artificial Sequence
  Chemically synthesized
gacgaaggaagaagcgaacuucg

SEQ ID NO: 34501 - RNA, 23 nt, Artificial Sequence
  Chemically synthesized
uuuuaccaggaggcagagagacc

SEQ ID NO: 34502 - RNA, 23 nt, Artificial Sequence
  Chemically synthesized
auauggauucuggauuucuacug

SEQ ID NO: 34503 - RNA, 23 nt, Artificial Sequence
  Chemically synthesized
uucuggauuucuacugggcuuuc

SEQ ID NO: 34504 - RNA, 23 nt, Artificial Sequence
  Chemically synthesized
gaauauuuggcccauuaggaccc

SEQ ID NO: 34505 - RNA, 23 nt, Artificial Sequence
  Chemically synthesized
cuuuagaggccuuggugcguuag

SEQ ID NO: 34506 - RNA, 23 nt, Artificial Sequence
  Chemically synthesized
uuagaggccuuggugcguuagac

SEQ ID NO: 34507 - RNA, 23 nt, Artificial Sequence
  Chemically synthesized
caaaucguugaagaacaucaaac

SEQ ID NO: 34508 - RNA, 23 nt, Artificial Sequence
  Chemically synthesized
uaaggcuucuaggucagcaucac

SEQ ID NO: 34509 - RNA, 23 nt, Artificial Sequence
  Chemically synthesized
uaggucagcaucacucugguuuc

SEQ ID NO: 34510 - RNA, 23 nt, Artificial Sequence
  Chemically synthesized
uucuccugaacugaagaaacagg

SEQ ID NO: 34511 - RNA, 23 nt, Artificial Sequence
  Chemically synthesized
acaggcucuguuucagguucugg

SEQ ID NO: 34512 - RNA, 23 nt, Artificial Sequence
  Chemically synthesized
aaguguggcccucugguaugagu

SEQ ID NO: 34513 - RNA, 23 nt, Artificial Sequence
  Chemically synthesized
uuagaaccuggagaaagggucug

SEQ ID NO: 34514 - RNA, 23 nt, Artificial Sequence
  Chemically synthesized
uugguuuaguucccauggacgga

SEQ ID NO: 34515 - RNA, 23 nt, Artificial Sequence
  Chemically synthesized
gaagguggcugauuaguuugucc

SEQ ID NO: 34516 - RNA, 23 nt, Artificial Sequence
  Chemically synthesized
uuugcaaccugagcaucccgcaa

SEQ ID NO: 34517 - RNA, 23 nt, Artificial Sequence
  Chemically synthesized
uagagccuuuaguuugugaagca

SEQ ID NO: 34518 - RNA, 23 nt, Artificial Sequence
  Chemically synthesized
aaguuucccauugcuuagucucu

SEQ ID NO: 34519 - RNA, 23 nt, Artificial Sequence
  Chemically synthesized
uuccacguggccuuuaagugcuc

SEQ ID NO: 34520 - RNA, 23 nt, Artificial Sequence
  Chemically synthesized
uaaguuucuccugcucagcaacu

SEQ ID NO: 34521 - RNA, 23 nt, Artificial Sequence
  Chemically synthesized
aaaacacucaacaggacagagag

SEQ ID NO: 34522 - RNA, 23 nt, Artificial Sequence
  Chemically synthesized
aacaggacagagagcugauuucc

SEQ ID NO: 34523 - RNA, 23 nt, Artificial Sequence
  Chemically synthesized
acuuaucugagugcuacacggga

SEQ ID NO: 34524 - RNA, 23 nt, Artificial Sequence
  Chemically synthesized
acaccauuucuuuuuaaacuugg

SEQ ID NO: 34525 - RNA, 23 nt, Artificial Sequence
  Chemically synthesized
auguaauggaguccauccaucac

SEQ ID NO: 34526 - RNA, 23 nt, Artificial Sequence
  Chemically synthesized
acuccuccagguacacaucaagc

SEQ ID NO: 34527 - RNA, 23 nt, Artificial Sequence
  Chemically synthesized
cuacguuucuuuagaggccuugg

SEQ ID NO: 34528 - RNA, 23 nt, Artificial Sequence
  Chemically synthesized
uacguuucuuuagaggccuuggu

SEQ ID NO: 34529 - RNA, 23 nt, Artificial Sequence
  Chemically synthesized
uucuuucguaaggcuucuagguc

SEQ ID NO: 34530 - RNA, 23 nt, Artificial Sequence
  Chemically synthesized
acaggcuuaccauauacacuuga

SEQ ID NO: 34531 - RNA, 23 nt, Artificial Sequence
  Chemically synthesized
uaccauauacacuugaaaagugu

SEQ ID NO: 34532 - RNA, 23 nt, Artificial Sequence
  Chemically synthesized
ccauauacacuugaaaagugugg

SEQ ID NO: 34533 - RNA, 23 nt, Artificial Sequence
  Chemically synthesized
uacacuugaaaaguguggcccuc

SEQ ID NO: 34534 - RNA, 23 nt, Artificial Sequence
  Chemically synthesized
ccugcuggaaguuuuuuccuggc

SEQ ID NO: 34535 - RNA, 23 nt, Artificial Sequence
  Chemically synthesized
cuggcuuaaugucugaagguggc

SEQ ID NO: 34536 - RNA, 23 nt, Artificial Sequence
  Chemically synthesized
uuuguaggaacaggaggugguac

SEQ ID NO: 34537 - RNA, 23 nt, Artificial Sequence
  Chemically synthesized
gaacaggaggugguacuuuagcc

SEQ ID NO: 34538 - RNA, 23 nt, Artificial Sequence
  Chemically synthesized
ucccgcaagauaucuucacugcu

SEQ ID NO: 34539 - RNA, 23 nt, Artificial Sequence
  Chemically synthesized
uuucuggaguaacuggaacuucu

SEQ ID NO: 34540 - RNA, 23 nt, Artificial Sequence
  Chemically synthesized
uagcugcagcuccuuauagaggc

SEQ ID NO: 34541 - RNA, 23 nt, Artificial Sequence
  Chemically synthesized
ucagccacugcagacugauuguc

SEQ ID NO: 34542 - RNA, 23 nt, Artificial Sequence
  Chemically synthesized
aacuggaacuucugugaagugcu

SEQ ID NO: 34543 - RNA, 23 nt, Artificial Sequence
  Chemically synthesized
cuucugugaagugcugcucauug

SEQ ID NO: 34544 - RNA, 23 nt, Artificial Sequence
  Chemically synthesized
uucugugaagugcugcucauugu

SEQ ID NO: 34545 - RNA, 23 nt, Artificial Sequence
  Chemically synthesized
caaucagagacagcgaugugacg

SEQ ID NO: 34546 - RNA, 23 nt, Artificial Sequence
  Chemically synthesized
acaggacagagagcugauuuccc

SEQ ID NO: 34547 - RNA, 23 nt, Artificial Sequence
  Chemically synthesized
auucuuguagaaaacaggauugu

SEQ ID NO: 34548 - RNA, 23 nt, Artificial Sequence
  Chemically synthesized
uucucuucuagagacauucuuca

SEQ ID NO: 34549 - RNA, 23 nt, Artificial Sequence
  Chemically synthesized
uacugagauacacgguaagaaac

SEQ ID NO: 34550 - RNA, 23 nt, Artificial Sequence
  Chemically synthesized
ucaggccaagcuccuuugucuug

SEQ ID NO: 34551 - RNA, 23 nt, Artificial Sequence
  Chemically synthesized
caugaggcagcacaauguaaugg

SEQ ID NO: 34552 - RNA, 23 nt, Artificial Sequence
  Chemically synthesized
cguucaugacgaaggaagaagcg

SEQ ID NO: 34553 - RNA, 23 nt, Artificial Sequence
  Chemically synthesized
uugugaagagccgugaugccuuc

SEQ ID NO: 34554 - RNA, 23 nt, Artificial Sequence
  Chemically synthesized
acgaaggaagaagcgaacuucgu

SEQ ID NO: 34555 - RNA, 23 nt, Artificial Sequence
  Chemically synthesized
aagacgaaucuagcaguaaagca

SEQ ID NO: 34556 - RNA, 23 nt, Artificial Sequence
  Chemically synthesized
aaggaagaagcgaacuucguucc

SEQ ID NO: 34557 - RNA, 23 nt, Artificial Sequence
  Chemically synthesized
uuuaccaggaggcagagagaccu

SEQ ID NO: 34558 - RNA, 23 nt, Artificial Sequence
  Chemically synthesized
ugaauauuuggcccauuaggacc

SEQ ID NO: 34559 - RNA, 23 nt, Artificial Sequence
  Chemically synthesized
uuucuuuagaggccuuggugcgu

SEQ ID NO: 34560 - RNA, 23 nt, Artificial Sequence
  Chemically synthesized
cagccugcuggaaguuuuuuccu

SEQ ID NO: 34561 - RNA, 23 nt, Artificial Sequence
  Chemically synthesized
guggacuuucuugcuuagaaccu

SEQ ID NO: 34562 - RNA, 23 nt, Artificial Sequence
  Chemically synthesized
aagguggcugauuaguuugucca

SEQ ID NO: 34563 - RNA, 23 nt, Artificial Sequence
  Chemically synthesized
ucuggaguaacuggaacuucugu

SEQ ID NO: 34564 - RNA, 23 nt, Artificial Sequence
  Chemically synthesized
acuggaacuucugugaagugcug

SEQ ID NO: 34565 - RNA, 23 nt, Artificial Sequence
  Chemically synthesized
uggaacaaauuauucaucuguuc

SEQ ID NO: 34566 - RNA, 23 nt, Artificial Sequence
  Chemically synthesized
uguuccuuaguugccagcaauug

SEQ ID NO: 34567 - RNA, 23 nt, Artificial Sequence
  Chemically synthesized
uuuccugaaguucagcaagaguc

SEQ ID NO: 34568 - RNA, 23 nt, Artificial Sequence
  Chemically synthesized
caggauucuuguagaaaacagga

SEQ ID NO: 34569 - RNA, 23 nt, Artificial Sequence
  Chemically synthesized
aaaauucuguguggaaguuucag

SEQ ID NO: 34570 - RNA, 23 nt, Artificial Sequence
  Chemically synthesized
uggauccugagaucuugguccac

SEQ ID NO: 34571 - RNA, 23 nt, Artificial Sequence
  Chemically synthesized
cgcaccugaagaaugugaaggag

SEQ ID NO: 34572 - RNA, 23 nt, Artificial Sequence
  Chemically synthesized
ucgcaccugaagaaugugaagga

SEQ ID NO: 34573 - RNA, 23 nt, Artificial Sequence
  Chemically synthesized
cucgcaccugaagaaugugaagg

SEQ ID NO: 34574 - RNA, 23 nt, Artificial Sequence
  Chemically synthesized
acucgcaccugaagaaugugaag

SEQ ID NO: 34575 - RNA, 23 nt, Artificial Sequence
  Chemically synthesized
uacucgcaccugaagaaugugaa

SEQ ID NO: 34576 - RNA, 23 nt, Artificial Sequence
  Chemically synthesized
ggagaugcuucagaggauucgga

SEQ ID NO: 34577 - RNA, 23 nt, Artificial Sequence
  Chemically synthesized
aggagaugcuucagaggauucgg

SEQ ID NO: 34578 - RNA, 23 nt, Artificial Sequence
  Chemically synthesized
caggagaugcuucagaggauucg

SEQ ID NO: 34579 - RNA, 23 nt, Artificial Sequence
  Chemically synthesized
gcaggagaugcuucagaggauuc

SEQ ID NO: 34580 - RNA, 23 nt, Artificial Sequence
  Chemically synthesized
cgcaggagaugcuucagaggauu

SEQ ID NO: 34581 - RNA, 23 nt, Artificial Sequence
  Chemically synthesized
ccaccuucaagucucuccagugu

SEQ ID NO: 34582 - RNA, 23 nt, Artificial Sequence
  Chemically synthesized
cccaccuucaagucucuccagug

SEQ ID NO: 34583 - RNA, 23 nt, Artificial Sequence
  Chemically synthesized
ccccaccuucaagucucuccagu

SEQ ID NO: 34584 - RNA, 23 nt, Artificial Sequence
  Chemically synthesized
cccccaccuucaagucucuccag

SEQ ID NO: 34585 - RNA, 23 nt, Artificial Sequence
  Chemically synthesized
gcccccaccuucaagucucucca

SEQ ID NO: 34586 - RNA, 23 nt, Artificial Sequence
  Chemically synthesized
ucaagucucuccagugugugggg

SEQ ID NO: 34587 - RNA, 23 nt, Artificial Sequence
  Chemically synthesized
uucaagucucuccaguguguggg

SEQ ID NO: 34588 - RNA, 23 nt, Artificial Sequence
  Chemically synthesized
cuucaagucucuccagugugugg

SEQ ID NO: 34589 - RNA, 23 nt, Artificial Sequence
  Chemically synthesized
ccuucaagucucuccagugugug

SEQ ID NO: 34590 - RNA, 23 nt, Artificial Sequence
  Chemically synthesized
accuucaagucucuccagugugu

SEQ ID NO: 34591 - RNA, 23 nt, Artificial Sequence
  Chemically synthesized
caccuucaagucucuccagugug

SEQ ID NO: 34592 - RNA, 23 nt, Artificial Sequence
  Chemically synthesized
gaaucugcuuugucuucuacucg

SEQ ID NO: 34593 - RNA, 23 nt, Artificial Sequence
  Chemically synthesized
agaaucugcuuugucuucuacuc

SEQ ID NO: 34594 - RNA, 23 nt, Artificial Sequence
  Chemically synthesized
cagaaucugcuuugucuucuacu

SEQ ID NO: 34595 - RNA, 23 nt, Artificial Sequence
  Chemically synthesized
gcagaaucugcuuugucuucuac

SEQ ID NO: 34596 - RNA, 23 nt, Artificial Sequence
  Chemically synthesized
ggcagaaucugcuuugucuucua

SEQ ID NO: 34597 - RNA, 23 nt, Artificial Sequence
  Chemically synthesized
ccucagauuuggacagcuuuccu

SEQ ID NO: 34598 - RNA, 23 nt, Artificial Sequence
  Chemically synthesized
accucagauuuggacagcuuucc

SEQ ID NO: 34599 - RNA, 23 nt, Artificial Sequence
  Chemically synthesized
gaccucagauuuggacagcuuuc

SEQ ID NO: 34600 - RNA, 23 nt, Artificial Sequence
  Chemically synthesized
ugaccucagauuuggacagcuuu

SEQ ID NO: 34601 - RNA, 23 nt, Artificial Sequence
  Chemically synthesized
cugaccucagauuuggacagcuu

SEQ ID NO: 34602 - RNA, 23 nt, Artificial Sequence
  Chemically synthesized
ccgcaggagaugcuucagaggau

SEQ ID NO: 34603 - RNA, 23 nt, Artificial Sequence
  Chemically synthesized
gcacuguuucuuucaccucaaaa

SEQ ID NO: 34604 - RNA, 23 nt, Artificial Sequence
  Chemically synthesized
ugcacuguuucuuucaccucaaa

SEQ ID NO: 34605 - RNA, 23 nt, Artificial Sequence
  Chemically synthesized
cugcacuguuucuuucaccucaa

SEQ ID NO: 34606 - RNA, 23 nt, Artificial Sequence
  Chemically synthesized
acugcacuguuucuuucaccuca

SEQ ID NO: 34607 - RNA, 23 nt, Artificial Sequence
  Chemically synthesized
aacugcacuguuucuuucaccuc

SEQ ID NO: 34608 - RNA, 23 nt, Artificial Sequence
  Chemically synthesized
gucuucuacucgcaccugaagaa

SEQ ID NO: 34609 - RNA, 23 nt, Artificial Sequence
  Chemically synthesized
ugucuucuacucgcaccugaaga

SEQ ID NO: 34610 - RNA, 23 nt, Artificial Sequence
  Chemically synthesized
uugucuucuacucgcaccugaag

SEQ ID NO: 34611 - RNA, 23 nt, Artificial Sequence
  Chemically synthesized
uuugucuucuacucgcaccugaa

SEQ ID NO: 34612 - RNA, 23 nt, Artificial Sequence
  Chemically synthesized
cuuugucuucuacucgcaccuga

SEQ ID NO: 34613 - RNA, 23 nt, Artificial Sequence
  Chemically synthesized
gggaugacaucacagcucaggug

SEQ ID NO: 34614 - RNA, 23 nt, Artificial Sequence
  Chemically synthesized
ugggaugacaucacagcucaggu

SEQ ID NO: 34615 - RNA, 23 nt, Artificial Sequence
  Chemically synthesized
cugggaugacaucacagcucagg

SEQ ID NO: 34616 - RNA, 23 nt, Artificial Sequence
  Chemically synthesized
ccugggaugacaucacagcucag

SEQ ID NO: 34617 - RNA, 23 nt, Artificial Sequence
  Chemically synthesized
accugggaugacaucacagcuca

SEQ ID NO: 34618 - RNA, 23 nt, Artificial Sequence
  Chemically synthesized
uccucacagugacacacaaccgc

SEQ ID NO: 34619 - RNA, 23 nt, Artificial Sequence
  Chemically synthesized
uuccucacagugacacacaaccg

SEQ ID NO: 34620 - RNA, 23 nt, Artificial Sequence
  Chemically synthesized
cuuccucacagugacacacaacc

SEQ ID NO: 34621 - RNA, 23 nt, Artificial Sequence
  Chemically synthesized
ccuuccucacagugacacacaac

SEQ ID NO: 34622 - RNA, 23 nt, Artificial Sequence
  Chemically synthesized
accuuccucacagugacacacaa

SEQ ID NO: 34623 - RNA, 23 nt, Artificial Sequence
  Chemically synthesized
gcaccugaagaaugugaaggagg

SEQ ID NO: 34624 - RNA, 23 nt, Artificial Sequence
  Chemically synthesized
gcuuugucuucuacucgcaccug

SEQ ID NO: 34625 - RNA, 23 nt, Artificial Sequence
  Chemically synthesized
ugcuuugucuucuacucgcaccu

SEQ ID NO: 34626 - RNA, 23 nt, Artificial Sequence
  Chemically synthesized
cugcuuugucuucuacucgcacc

SEQ ID NO: 34627 - RNA, 23 nt, Artificial Sequence
  Chemically synthesized
ucugcuuugucuucuacucgcac

SEQ ID NO: 34628 - RNA, 23 nt, Artificial Sequence
  Chemically synthesized
aucugcuuugucuucuacucgca

SEQ ID NO: 34629 - RNA, 23 nt, Artificial Sequence
  Chemically synthesized
aaacugcacuguuucuuucaccu

SEQ ID NO: 34630 - RNA, 23 nt, Artificial Sequence
  Chemically synthesized
ccugugagcaacaaaacugcacu

SEQ ID NO: 34631 - RNA, 23 nt, Artificial Sequence
  Chemically synthesized
cccugugagcaacaaaacugcac

SEQ ID NO: 34632 - RNA, 23 nt, Artificial Sequence
  Chemically synthesized
ucccugugagcaacaaaacugca

SEQ ID NO: 34633 - RNA, 23 nt, Artificial Sequence
  Chemically synthesized
gucccugugagcaacaaaacugc

SEQ ID NO: 34634 - RNA, 23 nt, Artificial Sequence
  Chemically synthesized
ggucccugugagcaacaaaacug

SEQ ID NO: 34635 - RNA, 23 nt, Artificial Sequence
  Chemically synthesized
gggaugaucuggaugagcagauc

SEQ ID NO: 34636 - RNA, 23 nt, Artificial Sequence
  Chemically synthesized
cgggaugaucuggaugagcagau

SEQ ID NO: 34637 - RNA, 23 nt, Artificial Sequence
  Chemically synthesized
ccgggaugaucuggaugagcaga

SEQ ID NO: 34638 - RNA, 23 nt, Artificial Sequence
  Chemically synthesized
uccgggaugaucuggaugagcag

SEQ ID NO: 34639 - RNA, 23 nt, Artificial Sequence
  Chemically synthesized
uuccgggaugaucuggaugagca

SEQ ID NO: 34640 - RNA, 23 nt, Artificial Sequence
  Chemically synthesized
accugaagaaugugaaggaggua

SEQ ID NO: 34641 - RNA, 23 nt, Artificial Sequence
  Chemically synthesized
caccugaagaaugugaaggaggu

SEQ ID NO: 34642 - RNA, 23 nt, Artificial Sequence
  Chemically synthesized
cuacucgcaccugaagaauguga

SEQ ID NO: 34643 - RNA, 23 nt, Artificial Sequence
  Chemically synthesized
ucuacucgcaccugaagaaugug

SEQ ID NO: 34644 - RNA, 23 nt, Artificial Sequence
  Chemically synthesized
uucuacucgcaccugaagaaugu

SEQ ID NO: 34645 - RNA, 23 nt, Artificial Sequence
  Chemically synthesized
cuucuacucgcaccugaagaaug

SEQ ID NO: 34646 - RNA, 23 nt, Artificial Sequence
  Chemically synthesized
ucuucuacucgcaccugaagaau

SEQ ID NO: 34647 - RNA, 23 nt, Artificial Sequence
  Chemically synthesized
cgagggcgaagaguucuuugcgg

SEQ ID NO: 34648 - RNA, 23 nt, Artificial Sequence
  Chemically synthesized
ucgagggcgaagaguucuuugcg

SEQ ID NO: 34649 - RNA, 23 nt, Artificial Sequence
  Chemically synthesized
uucgagggcgaagaguucuuugc

SEQ ID NO: 34650 - RNA, 23 nt, Artificial Sequence
  Chemically synthesized
guucgagggcgaagaguucuuug

SEQ ID NO: 34651 - RNA, 23 nt, Artificial Sequence
  Chemically synthesized
uguucgagggcgaagaguucuuu

SEQ ID NO: 34652 - RNA, 23 nt, Artificial Sequence
  Chemically synthesized
ugcugcagguggaauucuugcgu

SEQ ID NO: 34653 - RNA, 23 nt, Artificial Sequence
  Chemically synthesized
cugcugcagguggaauucuugcg

SEQ ID NO: 34654 - RNA, 23 nt, Artificial Sequence
  Chemically synthesized
gcugcugcagguggaauucuugc

SEQ ID NO: 34655 - RNA, 23 nt, Artificial Sequence
  Chemically synthesized
agcugcugcagguggaauucuug

SEQ ID NO: 34656 - RNA, 23 nt, Artificial Sequence
  Chemically synthesized
cagcugcugcagguggaauucuu

SEQ ID NO: 34657 - RNA, 23 nt, Artificial Sequence
  Chemically synthesized
ccugaagaaugugaaggagguau

SEQ ID NO: 34658 - RNA, 23 nt, Artificial Sequence
  Chemically synthesized
gggcagaaucugcuuugucuucu

SEQ ID NO: 34659 - RNA, 23 nt, Artificial Sequence
  Chemically synthesized
agaguucuuugcggccuucgagc

SEQ ID NO: 34660 - RNA, 23 nt, Artificial Sequence
  Chemically synthesized
aagaguucuuugcggccuucgag

SEQ ID NO: 34661 - RNA, 23 nt, Artificial Sequence
  Chemically synthesized
gaagaguucuuugcggccuucga

SEQ ID NO: 34662 - RNA, 23 nt, Artificial Sequence
  Chemically synthesized
cgaagaguucuuugcggccuucg

SEQ ID NO: 34663 - RNA, 23 nt, Artificial Sequence
  Chemically synthesized
gcgaagaguucuuugcggccuuc

SEQ ID NO: 34664 - RNA, 23 nt, Artificial Sequence
  Chemically synthesized
guggaauucuugcgucugagcac

SEQ ID NO: 34665 - RNA, 23 nt, Artificial Sequence
  Chemically synthesized
gguggaauucuugcgucugagca

SEQ ID NO: 34666 - RNA, 23 nt, Artificial Sequence
  Chemically synthesized
agguggaauucuugcgucugagc

SEQ ID NO: 34667 - RNA, 23 nt, Artificial Sequence
  Chemically synthesized
cagguggaauucuugcgucugag

SEQ ID NO: 34668 - RNA, 23 nt, Artificial Sequence
  Chemically synthesized
gcagguggaauucuugcgucuga

SEQ ID NO: 34669 - RNA, 23 nt, Artificial Sequence
  Chemically synthesized
cugacacgguggagauguucgag

SEQ ID NO: 34670 - RNA, 23 nt, Artificial Sequence
  Chemically synthesized
ucugacacgguggagauguucga

SEQ ID NO: 34671 - RNA, 23 nt, Artificial Sequence
  Chemically synthesized
cucugacacgguggagauguucg

SEQ ID NO: 34672 - RNA, 23 nt, Artificial Sequence
  Chemically synthesized
ccucugacacgguggagauguuc

SEQ ID NO: 34673 - RNA, 23 nt, Artificial Sequence
  Chemically synthesized
cccucugacacgguggagauguu

SEQ ID NO: 34674 - RNA, 23 nt, Artificial Sequence
  Chemically synthesized
ggaugacaucacagcucaggugg

SEQ ID NO: 34675 - RNA, 23 nt, Artificial Sequence
  Chemically synthesized
ccugaccucagauuuggacagcu

SEQ ID NO: 34676 - RNA, 23 nt, Artificial Sequence
  Chemically synthesized
agauccgucacaugcucuucucc

SEQ ID NO: 34677 - RNA, 23 nt, Artificial Sequence
  Chemically synthesized
cagauccgucacaugcucuucuc

SEQ ID NO: 34678 - RNA, 23 nt, Artificial Sequence
  Chemically synthesized
gcagauccgucacaugcucuucu

SEQ ID NO: 34679 - RNA, 23 nt, Artificial Sequence
  Chemically synthesized
agcagauccgucacaugcucuuc

SEQ ID NO: 34680 - RNA, 23 nt, Artificial Sequence
  Chemically synthesized
gagcagauccgucacaugcucuu

SEQ ID NO: 34681 - RNA, 23 nt, Artificial Sequence
  Chemically synthesized
ugaagaaugugaaggagguauac

SEQ ID NO: 34682 - RNA, 23 nt, Artificial Sequence
  Chemically synthesized
cugaagaaugugaaggagguaua

SEQ ID NO: 34683 - RNA, 23 nt, Artificial Sequence
  Chemically synthesized
ggcgaagaguucuuugcggccuu

SEQ ID NO: 34684 - RNA, 23 nt, Artificial Sequence
  Chemically synthesized
gggcgaagaguucuuugcggccu

SEQ ID NO: 34685 - RNA, 23 nt, Artificial Sequence
  Chemically synthesized
ugcaccgugugaaccucaucgcu

SEQ ID NO: 34686 - RNA, 23 nt, Artificial Sequence
  Chemically synthesized
cugcaccgugugaaccucaucgc

SEQ ID NO: 34687 - RNA, 23 nt, Artificial Sequence
  Chemically synthesized
gcugcaccgugugaaccucaucg

SEQ ID NO: 34688 - RNA, 23 nt, Artificial Sequence
  Chemically synthesized
ggcugcaccgugugaaccucauc

SEQ ID NO: 34689 - RNA, 23 nt, Artificial Sequence
  Chemically synthesized
cggcugcaccgugugaaccucau

SEQ ID NO: 34690 - RNA, 23 nt, Artificial Sequence
  Chemically synthesized
caccugggaugacaucacagcuc

SEQ ID NO: 34691 - RNA, 23 nt, Artificial Sequence
  Chemically synthesized
ccaccugggaugacaucacagcu

SEQ ID NO: 34692 - RNA, 23 nt, Artificial Sequence
  Chemically synthesized
gccaccugggaugacaucacagc

SEQ ID NO: 34693 - RNA, 23 nt, Artificial Sequence
  Chemically synthesized
agccaccugggaugacaucacag

SEQ ID NO: 34694 - RNA, 23 nt, Artificial Sequence
  Chemically synthesized
cagccaccugggaugacaucaca

SEQ ID NO: 34695 - RNA, 23 nt, Artificial Sequence
  Chemically synthesized
uccgucacaugcucuucuccugg

SEQ ID NO: 34696 - RNA, 23 nt, Artificial Sequence
  Chemically synthesized
auccgucacaugcucuucuccug

SEQ ID NO: 34697 - RNA, 23 nt, Artificial Sequence
  Chemically synthesized
gauccgucacaugcucuucuccu

SEQ ID NO: 34698 - RNA, 23 nt, Artificial Sequence
  Chemically synthesized
cucagauuuggacagcuuuccug

SEQ ID NO: 34699 - RNA, 23 nt, Artificial Sequence
  Chemically synthesized
acuguguggagggcagaaucugc

SEQ ID NO: 34700 - RNA, 23 nt, Artificial Sequence
  Chemically synthesized
gacuguguggagggcagaaucug

SEQ ID NO: 34701 - RNA, 23 nt, Artificial Sequence
  Chemically synthesized
ugacuguguggagggcagaaucu

SEQ ID NO: 34702 - RNA, 23 nt, Artificial Sequence
  Chemically synthesized
cugacuguguggagggcagaauc

SEQ ID NO: 34703 - RNA, 23 nt, Artificial Sequence
  Chemically synthesized
ccugacuguguggagggcagaau

SEQ ID NO: 34704 - RNA, 23 nt, Artificial Sequence
  Chemically synthesized
uggaauucuugcgucugagcacu

SEQ ID NO: 34705 - RNA, 23 nt, Artificial Sequence
  Chemically synthesized
auguucgagggcgaagaguucuu

SEQ ID NO: 34706 - RNA, 23 nt, Artificial Sequence
  Chemically synthesized
cacuucuccugguuccuuguggu

SEQ ID NO: 34707 - RNA, 23 nt, Artificial Sequence
  Chemically synthesized
ccacuucuccugguuccuugugg

SEQ ID NO: 34708 - RNA, 23 nt, Artificial Sequence
  Chemically synthesized
cccacuucuccugguuccuugug

SEQ ID NO: 34709 - RNA, 23 nt, Artificial Sequence
  Chemically synthesized
ccccacuucuccugguuccuugu

SEQ ID NO: 34710 - RNA, 23 nt, Artificial Sequence
  Chemically synthesized
gccccacuucuccugguuccuug

SEQ ID NO: 34711 - RNA, 23 nt, Artificial Sequence
  Chemically synthesized
gucacaugcucuucuccugggcu

SEQ ID NO: 34712 - RNA, 23 nt, Artificial Sequence
  Chemically synthesized
cgucacaugcucuucuccugggc

SEQ ID NO: 34713 - RNA, 23 nt, Artificial Sequence
  Chemically synthesized
ccgucacaugcucuucuccuggg

SEQ ID NO: 34714 - RNA, 23 nt, Artificial Sequence
  Chemically synthesized
acacgguggagauguucgagggc

SEQ ID NO: 34715 - RNA, 23 nt, Artificial Sequence
  Chemically synthesized
gacacgguggagauguucgaggg

SEQ ID NO: 34716 - RNA, 23 nt, Artificial Sequence
  Chemically synthesized
ugacacgguggagauguucgagg

SEQ ID NO: 34717 - RNA, 23 nt, Artificial Sequence
  Chemically synthesized
cuguuccugaccucagauuugga

SEQ ID NO: 34718 - RNA, 23 nt, Artificial Sequence
  Chemically synthesized
acuguuccugaccucagauuugg

SEQ ID NO: 34719 - RNA, 23 nt, Artificial Sequence
  Chemically synthesized
gacuguuccugaccucagauuug

SEQ ID NO: 34720 - RNA, 23 nt, Artificial Sequence
  Chemically synthesized
agacuguuccugaccucagauuu

SEQ ID NO: 34721 - RNA, 23 nt, Artificial Sequence
  Chemically synthesized
cagacuguuccugaccucagauu

SEQ ID NO: 34722 - RNA, 23 nt, Artificial Sequence
  Chemically synthesized
caacaaaacugcacuguuucuuu

SEQ ID NO: 34723 - RNA, 23 nt, Artificial Sequence
  Chemically synthesized
gcaacaaaacugcacuguuucuu

SEQ ID NO: 34724 - RNA, 23 nt, Artificial Sequence
  Chemically synthesized
agcaacaaaacugcacuguuucu

SEQ ID NO: 34725 - RNA, 23 nt, Artificial Sequence
  Chemically synthesized
gagcaacaaaacugcacuguuuc

SEQ ID NO: 34726 - RNA, 23 nt, Artificial Sequence
  Chemically synthesized
ugagcaacaaaacugcacuguuu

SEQ ID NO: 34727 - RNA, 23 nt, Artificial Sequence
  Chemically synthesized
cgcucuugcugucucacaacugc

SEQ ID NO: 34728 - RNA, 23 nt, Artificial Sequence
  Chemically synthesized
gcgcucuugcugucucacaacug

SEQ ID NO: 34729 - RNA, 23 nt, Artificial Sequence
  Chemically synthesized
ugcgcucuugcugucucacaacu

SEQ ID NO: 34730 - RNA, 23 nt, Artificial Sequence
  Chemically synthesized
gugcgcucuugcugucucacaac

SEQ ID NO: 34731 - RNA, 23 nt, Artificial Sequence
  Chemically synthesized
ggugcgcucuugcugucucacaa

SEQ ID NO: 34732 - RNA, 23 nt, Artificial Sequence
  Chemically synthesized
accuggaccugagcuucaacagc

SEQ ID NO: 34733 - RNA, 23 nt, Artificial Sequence
  Chemically synthesized
caccuggaccugagcuucaacag

SEQ ID NO: 34734 - RNA, 23 nt, Artificial Sequence
  Chemically synthesized
ccaccuggaccugagcuucaaca

SEQ ID NO: 34735 - RNA, 23 nt, Artificial Sequence
  Chemically synthesized
cccaccuggaccugagcuucaac

SEQ ID NO: 34736 - RNA, 23 nt, Artificial Sequence
  Chemically synthesized
gcccaccuggaccugagcuucaa

SEQ ID NO: 34737 - RNA, 23 nt, Artificial Sequence
  Chemically synthesized
gccucgaucucucucagaaucug

SEQ ID NO: 34738 - RNA, 23 nt, Artificial Sequence
  Chemically synthesized
cgccucgaucucucucagaaucu

SEQ ID NO: 34739 - RNA, 23 nt, Artificial Sequence
  Chemically synthesized
gcgccucgaucucucucagaauc

SEQ ID NO: 34740 - RNA, 23 nt, Artificial Sequence
  Chemically synthesized
agcgccucgaucucucucagaau

SEQ ID NO: 34741 - RNA, 23 nt, Artificial Sequence
  Chemically synthesized
cagcgccucgaucucucucagaa

SEQ ID NO: 34742 - RNA, 23 nt, Artificial Sequence
  Chemically synthesized
ucaacagccuggagacacugccg

SEQ ID NO: 34743 - RNA, 23 nt, Artificial Sequence
  Chemically synthesized
uucaacagccuggagacacugcc

SEQ ID NO: 34744 - RNA, 23 nt, Artificial Sequence
  Chemically synthesized
cuucaacagccuggagacacugc

SEQ ID NO: 34745 - RNA, 23 nt, Artificial Sequence
  Chemically synthesized
gcuucaacagccuggagacacug

SEQ ID NO: 34746 - RNA, 23 nt, Artificial Sequence
  Chemically synthesized
agcuucaacagccuggagacacu

SEQ ID NO: 34747 - RNA, 23 nt, Artificial Sequence
  Chemically synthesized
ggagggcagaaucugcuuugucu

SEQ ID NO: 34748 - RNA, 23 nt, Artificial Sequence
  Chemically synthesized
uggagggcagaaucugcuuuguc

SEQ ID NO: 34749 - RNA, 23 nt, Artificial Sequence
  Chemically synthesized
guggagggcagaaucugcuuugu

SEQ ID NO: 34750 - RNA, 23 nt, Artificial Sequence
  Chemically synthesized
uguggagggcagaaucugcuuug

SEQ ID NO: 34751 - RNA, 23 nt, Artificial Sequence
  Chemically synthesized
guguggagggcagaaucugcuuu

SEQ ID NO: 34752 - RNA, 23 nt, Artificial Sequence
  Chemically synthesized
acccuugaaucugggagaugccg

SEQ ID NO: 34753 - RNA, 23 nt, Artificial Sequence
  Chemically synthesized
cacccuugaaucugggagaugcc

SEQ ID NO: 34754 - RNA, 23 nt, Artificial Sequence
  Chemically synthesized
gcacccuugaaucugggagaugc

SEQ ID NO: 34755 - RNA, 23 nt, Artificial Sequence
  Chemically synthesized
ggcacccuugaaucugggagaug

SEQ ID NO: 34756 - RNA, 23 nt, Artificial Sequence
  Chemically synthesized
uggcacccuugaaucugggagau

SEQ ID NO: 34757 - RNA, 23 nt, Artificial Sequence
  Chemically synthesized
uuggcacccuugaaucugggaga

SEQ ID NO: 34758 - RNA, 23 nt, Artificial Sequence
  Chemically synthesized
gggucccugugagcaacaaaacu

SEQ ID NO: 34759 - RNA, 23 nt, Artificial Sequence
  Chemically synthesized
cgggucccugugagcaacaaaac

SEQ ID NO: 34760 - RNA, 23 nt, Artificial Sequence
  Chemically synthesized
acgggucccugugagcaacaaaa

SEQ ID NO: 34761 - RNA, 23 nt, Artificial Sequence
  Chemically synthesized
agggcagaaucugcuuugucuuc

SEQ ID NO: 34762 - RNA, 23 nt, Artificial Sequence
  Chemically synthesized
gagggcagaaucugcuuugucuu

SEQ ID NO: 34763 - RNA, 23 nt, Artificial Sequence
  Chemically synthesized
cacgcuaccuccugagauuggag

SEQ ID NO: 34764 - RNA, 23 nt, Artificial Sequence
  Chemically synthesized
acacgcuaccuccugagauugga

SEQ ID NO: 34765 - RNA, 23 nt, Artificial Sequence
  Chemically synthesized
gacacgcuaccuccugagauugg

SEQ ID NO: 34766 - RNA, 23 nt, Artificial Sequence
  Chemically synthesized
ggacacgcuaccuccugagauug

SEQ ID NO: 34767 - RNA, 23 nt, Artificial Sequence
  Chemically synthesized
uggacacgcuaccuccugagauu

SEQ ID NO: 34768 - RNA, 23 nt, Artificial Sequence
  Chemically synthesized
caaaacugcacuguuucuuucac

SEQ ID NO: 34769 - RNA, 23 nt, Artificial Sequence
  Chemically synthesized
acaaaacugcacuguuucuuuca

SEQ ID NO: 34770 - RNA, 23 nt, Artificial Sequence
  Chemically synthesized
aacaaaacugcacuguuucuuuc

SEQ ID NO: 34771 - RNA, 23 nt, Artificial Sequence
  Chemically synthesized
gcaaguaccaggacagcauccga

SEQ ID NO: 34772 - RNA, 23 nt, Artificial Sequence
  Chemically synthesized
cgcaaguaccaggacagcauccg

SEQ ID NO: 34773 - RNA, 23 nt, Artificial Sequence
  Chemically synthesized
ccgcaaguaccaggacagcaucc

SEQ ID NO: 34774 - RNA, 23 nt, Artificial Sequence
  Chemically synthesized
gccgcaaguaccaggacagcauc

SEQ ID NO: 34775 - RNA, 23 nt, Artificial Sequence
  Chemically synthesized
cgccgcaaguaccaggacagcau

SEQ ID NO: 34776 - RNA, 23 nt, Artificial Sequence
  Chemically synthesized
cuggaccugagcuucaacagccu

SEQ ID NO: 34777 - RNA, 23 nt, Artificial Sequence
  Chemically synthesized
ccuggaccugagcuucaacagcc

SEQ ID NO: 34778 - RNA, 23 nt, Artificial Sequence
  Chemically synthesized
gcuuucugacgcagagcaaccug

SEQ ID NO: 34779 - RNA, 23 nt, Artificial Sequence
  Chemically synthesized
ggcuuucugacgcagagcaaccu

SEQ ID NO: 34780 - RNA, 23 nt, Artificial Sequence
  Chemically synthesized
cggcuuucugacgcagagcaacc

SEQ ID NO: 34781 - RNA, 23 nt, Artificial Sequence
  Chemically synthesized
ccggcuuucugacgcagagcaac

SEQ ID NO: 34782 - RNA, 23 nt, Artificial Sequence
  Chemically synthesized
accggcuuucugacgcagagcaa

SEQ ID NO: 34783 - RNA, 23 nt, Artificial Sequence
  Chemically synthesized
agaccuaccuggaggaagaggca

SEQ ID NO: 34784 - RNA, 23 nt, Artificial Sequence
  Chemically synthesized
gagaccuaccuggaggaagaggc

SEQ ID NO: 34785 - RNA, 23 nt, Artificial Sequence
  Chemically synthesized
ggagaccuaccuggaggaagagg

SEQ ID NO: 34786 - RNA, 23 nt, Artificial Sequence
  Chemically synthesized
uggagaccuaccuggaggaagag

SEQ ID NO: 34787 - RNA, 23 nt, Artificial Sequence
  Chemically synthesized
cuggagaccuaccuggaggaaga

SEQ ID NO: 34788 - RNA, 23 nt, Artificial Sequence
  Chemically synthesized
ccucgaucucucucagaaucugc

SEQ ID NO: 34789 - RNA, 23 nt, Artificial Sequence
  Chemically synthesized
cucuugcugucucacaacugccu

SEQ ID NO: 34790 - RNA, 23 nt, Artificial Sequence
  Chemically synthesized
gcucuugcugucucacaacugcc

SEQ ID NO: 34791 - RNA, 23 nt, Artificial Sequence
  Chemically synthesized
agagcaaccugcugaguguggcu

SEQ ID NO: 34792 - RNA, 23 nt, Artificial Sequence
  Chemically synthesized
cagagcaaccugcugaguguggc

SEQ ID NO: 34793 - RNA, 23 nt, Artificial Sequence
  Chemically synthesized
gcagagcaaccugcugagugugg

SEQ ID NO: 34794 - RNA, 23 nt, Artificial Sequence
  Chemically synthesized
cgcagagcaaccugcugagugug

SEQ ID NO: 34795 - RNA, 23 nt, Artificial Sequence
  Chemically synthesized
acgcagagcaaccugcugagugu

SEQ ID NO: 34796 - RNA, 23 nt, Artificial Sequence
  Chemically synthesized
cucugguacaccaccaagaacug

SEQ ID NO: 34797 - RNA, 23 nt, Artificial Sequence
  Chemically synthesized
gcucugguacaccaccaagaacu

SEQ ID NO: 34798 - RNA, 23 nt, Artificial Sequence
  Chemically synthesized
ggcucugguacaccaccaagaac

SEQ ID NO: 34799 - RNA, 23 nt, Artificial Sequence
  Chemically synthesized
uggcucugguacaccaccaagaa

SEQ ID NO: 34800 - RNA, 23 nt, Artificial Sequence
  Chemically synthesized
cuggcucugguacaccaccaaga

SEQ ID NO: 34801 - RNA, 23 nt, Artificial Sequence
  Chemically synthesized
ccugguuccuugugguuucccgc

SEQ ID NO: 34802 - RNA, 23 nt, Artificial Sequence
  Chemically synthesized
uccugguuccuugugguuucccg

SEQ ID NO: 34803 - RNA, 23 nt, Artificial Sequence
  Chemically synthesized
cuccugguuccuugugguuuccc

SEQ ID NO: 34804 - RNA, 23 nt, Artificial Sequence
  Chemically synthesized
ucuccugguuccuugugguuucc

SEQ ID NO: 34805 - RNA, 23 nt, Artificial Sequence
  Chemically synthesized
uucuccugguuccuugugguuuc

SEQ ID NO: 34806 - RNA, 23 nt, Artificial Sequence
  Chemically synthesized
cucgaucucucucagaaucugcu

SEQ ID NO: 34807 - RNA, 23 nt, Artificial Sequence
  Chemically synthesized
gugagcaacaaaacugcacuguu

SEQ ID NO: 34808 - RNA, 23 nt, Artificial Sequence
  Chemically synthesized
ugugagcaacaaaacugcacugu

SEQ ID NO: 34809 - RNA, 23 nt, Artificial Sequence
  Chemically synthesized
cugugagcaacaaaacugcacug

SEQ ID NO: 34810 - RNA, 23 nt, Artificial Sequence
  Chemically synthesized
gacgggucccugugagcaacaaa

SEQ ID NO: 34811 - RNA, 23 nt, Artificial Sequence
  Chemically synthesized
ugagcuucaacagccuggagaca

SEQ ID NO: 34812 - RNA, 23 nt, Artificial Sequence
  Chemically synthesized
cugagcuucaacagccuggagac

SEQ ID NO: 34813 - RNA, 23 nt, Artificial Sequence
  Chemically synthesized
ccugagcuucaacagccuggaga

SEQ ID NO: 34814 - RNA, 23 nt, Artificial Sequence
  Chemically synthesized
accugagcuucaacagccuggag

SEQ ID NO: 34815 - RNA, 23 nt, Artificial Sequence
  Chemically synthesized
gaccugagcuucaacagccugga

SEQ ID NO: 34816 - RNA, 23 nt, Artificial Sequence
  Chemically synthesized
cuccuuggcacccuugaaucugg

SEQ ID NO: 34817 - RNA, 23 nt, Artificial Sequence
  Chemically synthesized
ucuccuuggcacccuugaaucug

SEQ ID NO: 34818 - RNA, 23 nt, Artificial Sequence
  Chemically synthesized
cucuccuuggcacccuugaaucu

SEQ ID NO: 34819 - RNA, 23 nt, Artificial Sequence
  Chemically synthesized
ccucuccuuggcacccuugaauc

SEQ ID NO: 34820 - RNA, 23 nt, Artificial Sequence
  Chemically synthesized
gccucuccuuggcacccuugaau

SEQ ID NO: 34821 - RNA, 23 nt, Artificial Sequence
  Chemically synthesized
ugcagguggaauucuugcgucug

SEQ ID NO: 34822 - RNA, 23 nt, Artificial Sequence
  Chemically synthesized
cugcagguggaauucuugcgucu

SEQ ID NO: 34823 - RNA, 23 nt, Artificial Sequence
  Chemically synthesized
gcugcagguggaauucuugcguc

SEQ ID NO: 34824 - RNA, 23 nt, Artificial Sequence
  Chemically synthesized
ccagacuguuccugaccucagau

SEQ ID NO: 34825 - RNA, 23 nt, Artificial Sequence
  Chemically synthesized
cccagacuguuccugaccucaga

SEQ ID NO: 34826 - RNA, 23 nt, Artificial Sequence
  Chemically synthesized
agcccucauuccagaaaugccca

SEQ ID NO: 34827 - RNA, 23 nt, Artificial Sequence
  Chemically synthesized
cagcccucauuccagaaaugccc

SEQ ID NO: 34828 - RNA, 23 nt, Artificial Sequence
  Chemically synthesized
gcagcccucauuccagaaaugcc

SEQ ID NO: 34829 - RNA, 23 nt, Artificial Sequence
  Chemically synthesized
ggcagcccucauuccagaaaugc

SEQ ID NO: 34830 - RNA, 23 nt, Artificial Sequence
  Chemically synthesized
uggcagcccucauuccagaaaug

SEQ ID NO: 34831 - RNA, 23 nt, Artificial Sequence
  Chemically synthesized
guggcagcccucauuccagaaau

SEQ ID NO: 34832 - RNA, 23 nt, Artificial Sequence
  Chemically synthesized
aguggcagcccucauuccagaaa

SEQ ID NO: 34833 - RNA, 23 nt, Artificial Sequence
  Chemically synthesized
ugccccacuucuccugguuccuu

SEQ ID NO: 34834 - RNA, 23 nt, Artificial Sequence
  Chemically synthesized
uccugaccucagauuuggacagc

SEQ ID NO: 34835 - RNA, 23 nt, Artificial Sequence
  Chemically synthesized
uuccugaccucagauuuggacag

SEQ ID NO: 34836 - RNA, 23 nt, Artificial Sequence
  Chemically synthesized
guuccugaccucagauuuggaca

SEQ ID NO: 34837 - RNA, 23 nt, Artificial Sequence
  Chemically synthesized
uguuccugaccucagauuuggac

SEQ ID NO: 34838 - RNA, 23 nt, Artificial Sequence
  Chemically synthesized
uccuuguccugcacagcaaccuc

SEQ ID NO: 34839 - RNA, 23 nt, Artificial Sequence
  Chemically synthesized
cuccuuguccugcacagcaaccu

SEQ ID NO: 34840 - RNA, 23 nt, Artificial Sequence
  Chemically synthesized
gcuccuuguccugcacagcaacc

SEQ ID NO: 34841 - RNA, 23 nt, Artificial Sequence
  Chemically synthesized
ggcuccuuguccugcacagcaac

SEQ ID NO: 34842 - RNA, 23 nt, Artificial Sequence
  Chemically synthesized
cggcuccuuguccugcacagcaa

SEQ ID NO: 34843 - RNA, 23 nt, Artificial Sequence
  Chemically synthesized
cuuuuaggcuggcccagauauuc

SEQ ID NO: 34844 - RNA, 23 nt, Artificial Sequence
  Chemically synthesized
acuuuuaggcuggcccagauauu

SEQ ID NO: 34845 - RNA, 23 nt, Artificial Sequence
  Chemically synthesized
gacuuuuaggcuggcccagauau

SEQ ID NO: 34846 - RNA, 23 nt, Artificial Sequence
  Chemically synthesized
agacuuuuaggcuggcccagaua

SEQ ID NO: 34847 - RNA, 23 nt, Artificial Sequence
  Chemically synthesized
cagacuuuuaggcuggcccagau

SEQ ID NO: 34848 - RNA, 23 nt, Artificial Sequence
  Chemically synthesized
agauguucgagggcgaagaguuc

SEQ ID NO: 34849 - RNA, 23 nt, Artificial Sequence
  Chemically synthesized
gagauguucgagggcgaagaguu

SEQ ID NO: 34850 - RNA, 23 nt, Artificial Sequence
  Chemically synthesized
ggagauguucgagggcgaagagu

SEQ ID NO: 34851 - RNA, 23 nt, Artificial Sequence
  Chemically synthesized
uggagauguucgagggcgaagag

SEQ ID NO: 34852 - RNA, 23 nt, Artificial Sequence
  Chemically synthesized
guggagauguucgagggcgaaga

SEQ ID NO: 34853 - RNA, 23 nt, Artificial Sequence
  Chemically synthesized
cuucuccugguuccuugugguuu

SEQ ID NO: 34854 - RNA, 23 nt, Artificial Sequence
  Chemically synthesized
acuucuccugguuccuugugguu

SEQ ID NO: 34855 - RNA, 23 nt, Artificial Sequence
  Chemically synthesized
gcuaccuccugagauuggaggcc

SEQ ID NO: 34856 - RNA, 23 nt, Artificial Sequence
  Chemically synthesized
cgcuaccuccugagauuggaggc

SEQ ID NO: 34857 - RNA, 23 nt, Artificial Sequence
  Chemically synthesized
acgcuaccuccugagauuggagg

SEQ ID NO: 34858 - RNA, 23 nt, Artificial Sequence
  Chemically synthesized
cuggacacgcuaccuccugagau

SEQ ID NO: 34859 - RNA, 23 nt, Artificial Sequence
  Chemically synthesized
cucagaaucugcuggacacgcua

SEQ ID NO: 34860 - RNA, 23 nt, Artificial Sequence
  Chemically synthesized
ucucagaaucugcuggacacgcu

SEQ ID NO: 34861 - RNA, 23 nt, Artificial Sequence
  Chemically synthesized
cucucagaaucugcuggacacgc

SEQ ID NO: 34862 - RNA, 23 nt, Artificial Sequence
  Chemically synthesized
ucucucagaaucugcuggacacg

SEQ ID NO: 34863 - RNA, 23 nt, Artificial Sequence
  Chemically synthesized
cucucucagaaucugcuggacac

SEQ ID NO: 34864 - RNA, 23 nt, Artificial Sequence
  Chemically synthesized
ucaccuuccucacagugacacac

SEQ ID NO: 34865 - RNA, 23 nt, Artificial Sequence
  Chemically synthesized
cucaccuuccucacagugacaca

SEQ ID NO: 34866 - RNA, 23 nt, Artificial Sequence
  Chemically synthesized
ccucaccuuccucacagugacac

SEQ ID NO: 34867 - RNA, 23 nt, Artificial Sequence
  Chemically synthesized
cccucaccuuccucacagugaca

SEQ ID NO: 34868 - RNA, 23 nt, Artificial Sequence
  Chemically synthesized
gcccucaccuuccucacagugac

SEQ ID NO: 34869 - RNA, 23 nt, Artificial Sequence
  Chemically synthesized
ugguacaccaccaagaacugugu

SEQ ID NO: 34870 - RNA, 23 nt, Artificial Sequence
  Chemically synthesized
cugguacaccaccaagaacugug

SEQ ID NO: 34871 - RNA, 23 nt, Artificial Sequence
  Chemically synthesized
ucugguacaccaccaagaacugu

SEQ ID NO: 34872 - RNA, 23 nt, Artificial Sequence
  Chemically synthesized
gcagcugcugcagguggaauucu

SEQ ID NO: 34873 - RNA, 23 nt, Artificial Sequence
  Chemically synthesized
ugcagcugcugcagguggaauuc

SEQ ID NO: 34874 - RNA, 23 nt, Artificial Sequence
  Chemically synthesized
cugcagcugcugcagguggaauu

SEQ ID NO: 34875 - RNA, 23 nt, Artificial Sequence
  Chemically synthesized
gagcuucaacagccuggagacac

SEQ ID NO: 34876 - RNA, 23 nt, Artificial Sequence
  Chemically synthesized
ugaucuggaugagcagauccguc

SEQ ID NO: 34877 - RNA, 23 nt, Artificial Sequence
  Chemically synthesized
augaucuggaugagcagauccgu

SEQ ID NO: 34878 - RNA, 23 nt, Artificial Sequence
  Chemically synthesized
gaugaucuggaugagcagauccg

SEQ ID NO: 34879 - RNA, 23 nt, Artificial Sequence
  Chemically synthesized
ggaugaucuggaugagcagaucc

SEQ ID NO: 34880 - RNA, 23 nt, Artificial Sequence
  Chemically synthesized
ugaaccucaucgcucugcagcgg

SEQ ID NO: 34881 - RNA, 23 nt, Artificial Sequence
  Chemically synthesized
gugaaccucaucgcucugcagcg

SEQ ID NO: 34882 - RNA, 23 nt, Artificial Sequence
  Chemically synthesized
ugugaaccucaucgcucugcagc

SEQ ID NO: 34883 - RNA, 23 nt, Artificial Sequence
  Chemically synthesized
gugugaaccucaucgcucugcag

SEQ ID NO: 34884 - RNA, 23 nt, Artificial Sequence
  Chemically synthesized
cgugugaaccucaucgcucugca

SEQ ID NO: 34885 - RNA, 23 nt, Artificial Sequence
  Chemically synthesized
ugacaucacagcucagguggucc

SEQ ID NO: 34886 - RNA, 23 nt, Artificial Sequence
  Chemically synthesized
augacaucacagcucaggugguc

SEQ ID NO: 34887 - RNA, 23 nt, Artificial Sequence
  Chemically synthesized
gaugacaucacagcucagguggu

SEQ ID NO: 34888 - RNA, 23 nt, Artificial Sequence
  Chemically synthesized
gggucaaagucaucuuccccccu

SEQ ID NO: 34889 - RNA, 23 nt, Artificial Sequence
  Chemically synthesized
ggggucaaagucaucuucccccc

SEQ ID NO: 34890 - RNA, 23 nt, Artificial Sequence
  Chemically synthesized
uggggucaaagucaucuuccccc

SEQ ID NO: 34891 - RNA, 23 nt, Artificial Sequence
  Chemically synthesized
cuggggucaaagucaucuucccc

SEQ ID NO: 34892 - RNA, 23 nt, Artificial Sequence
  Chemically synthesized
ccuggggucaaagucaucuuccc

SEQ ID NO: 34893 - RNA, 23 nt, Artificial Sequence
  Chemically synthesized
cccacagacuuuuaggcuggccc

SEQ ID NO: 34894 - RNA, 23 nt, Artificial Sequence
  Chemically synthesized
ccccacagacuuuuaggcuggcc

SEQ ID NO: 34895 - RNA, 23 nt, Artificial Sequence
  Chemically synthesized
gccccacagacuuuuaggcuggc

SEQ ID NO: 34896 - RNA, 23 nt, Artificial Sequence
  Chemically synthesized
ggccccacagacuuuuaggcugg

SEQ ID NO: 34897 - RNA, 23 nt, Artificial Sequence
  Chemically synthesized
aggccccacagacuuuuaggcug

SEQ ID NO: 34898 - RNA, 23 nt, Artificial Sequence
  Chemically synthesized
uggacagcuuuccugugaccccu

SEQ ID NO: 34899 - RNA, 23 nt, Artificial Sequence
  Chemically synthesized
uuggacagcuuuccugugacccc

SEQ ID NO: 34900 - RNA, 23 nt, Artificial Sequence
  Chemically synthesized
uuuggacagcuuuccugugaccc

SEQ ID NO: 34901 - RNA, 23 nt, Artificial Sequence
  Chemically synthesized
auuuggacagcuuuccugugacc

SEQ ID NO: 34902 - RNA, 23 nt, Artificial Sequence
  Chemically synthesized
gauuuggacagcuuuccugugac

SEQ ID NO: 34903 - RNA, 23 nt, Artificial Sequence
  Chemically synthesized
ccacagacuuuuaggcuggccca

SEQ ID NO: 34904 - RNA, 23 nt, Artificial Sequence
  Chemically synthesized
ggaccugagcuucaacagccugg

SEQ ID NO: 34905 - RNA, 23 nt, Artificial Sequence
  Chemically synthesized
uggaccugagcuucaacagccug

SEQ ID NO: 34906 - RNA, 23 nt, Artificial Sequence
  Chemically synthesized
guuccgggaugaucuggaugagc

SEQ ID NO: 34907 - RNA, 23 nt, Artificial Sequence
  Chemically synthesized
aguuccgggaugaucuggaugag

SEQ ID NO: 34908 - RNA, 23 nt, Artificial Sequence
  Chemically synthesized
gaguuccgggaugaucuggauga

SEQ ID NO: 34909 - RNA, 23 nt, Artificial Sequence
  Chemically synthesized
cgaguuccgggaugaucuggaug

SEQ ID NO: 34910 - RNA, 23 nt, Artificial Sequence
  Chemically synthesized
acgaguuccgggaugaucuggau

SEQ ID NO: 34911 - RNA, 23 nt, Artificial Sequence
  Chemically synthesized
ccgugugaaccucaucgcucugc

SEQ ID NO: 34912 - RNA, 23 nt, Artificial Sequence
  Chemically synthesized
accgugugaaccucaucgcucug

SEQ ID NO: 34913 - RNA, 23 nt, Artificial Sequence
  Chemically synthesized
caccgugugaaccucaucgcucu

SEQ ID NO: 34914 - RNA, 23 nt, Artificial Sequence
  Chemically synthesized
ccagaaaugcccagacuguuccu

SEQ ID NO: 34915 - RNA, 23 nt, Artificial Sequence
  Chemically synthesized
uccagaaaugcccagacuguucc

SEQ ID NO: 34916 - RNA, 23 nt, Artificial Sequence
  Chemically synthesized
uuccagaaaugcccagacuguuc

SEQ ID NO: 34917 - RNA, 23 nt, Artificial Sequence
  Chemically synthesized
auuccagaaaugcccagacuguu

SEQ ID NO: 34918 - RNA, 23 nt, Artificial Sequence
  Chemically synthesized
cauuccagaaaugcccagacugu

SEQ ID NO: 34919 - RNA, 23 nt, Artificial Sequence
  Chemically synthesized
agaaucugcuggacacgcuaccu

SEQ ID NO: 34920 - RNA, 23 nt, Artificial Sequence
  Chemically synthesized
cagaaucugcuggacacgcuacc

SEQ ID NO: 34921 - RNA, 23 nt, Artificial Sequence
  Chemically synthesized
ucagaaucugcuggacacgcuac

SEQ ID NO: 34922 - RNA, 23 nt, Artificial Sequence
  Chemically synthesized
ucucucucagaaucugcuggaca

SEQ ID NO: 34923 - RNA, 23 nt, Artificial Sequence
  Chemically synthesized
aucucucucagaaucugcuggac

SEQ ID NO: 34924 - RNA, 23 nt, Artificial Sequence
  Chemically synthesized
cgaucucucucagaaucugcugg

SEQ ID NO: 34925 - RNA, 23 nt, Artificial Sequence
  Chemically synthesized
ucgaucucucucagaaucugcug

SEQ ID NO: 34926 - RNA, 23 nt, Artificial Sequence
  Chemically synthesized
cccuugaaucugggagaugccga

SEQ ID NO: 34927 - RNA, 23 nt, Artificial Sequence
  Chemically synthesized
acaacugccucucugagcugccu

SEQ ID NO: 34928 - RNA, 23 nt, Artificial Sequence
  Chemically synthesized
cacaacugccucucugagcugcc

SEQ ID NO: 34929 - RNA, 23 nt, Artificial Sequence
  Chemically synthesized
ucacaacugccucucugagcugc

SEQ ID NO: 34930 - RNA, 23 nt, Artificial Sequence
  Chemically synthesized
cucacaacugccucucugagcug

SEQ ID NO: 34931 - RNA, 23 nt, Artificial Sequence
  Chemically synthesized
ucucacaacugccucucugagcu

SEQ ID NO: 34932 - RNA, 23 nt, Artificial Sequence
  Chemically synthesized
acaccaccaagaacuguguggga

SEQ ID NO: 34933 - RNA, 23 nt, Artificial Sequence
  Chemically synthesized
uacaccaccaagaacuguguggg

SEQ ID NO: 34934 - RNA, 23 nt, Artificial Sequence
  Chemically synthesized
guacaccaccaagaacugugugg

SEQ ID NO: 34935 - RNA, 23 nt, Artificial Sequence
  Chemically synthesized
gguacaccaccaagaacugugug

SEQ ID NO: 34936 - RNA, 23 nt, Artificial Sequence
  Chemically synthesized
gaauucuugcgucugagcacuca

SEQ ID NO: 34937 - RNA, 23 nt, Artificial Sequence
  Chemically synthesized
ggaauucuugcgucugagcacuc

SEQ ID NO: 34938 - RNA, 23 nt, Artificial Sequence
  Chemically synthesized
cagauuuggacagcuuuccugug

SEQ ID NO: 34939 - RNA, 23 nt, Artificial Sequence
  Chemically synthesized
uggaugagcagauccgucacaug

SEQ ID NO: 34940 - RNA, 23 nt, Artificial Sequence
  Chemically synthesized
cucauuccagaaaugcccagacu

SEQ ID NO: 34941 - RNA, 23 nt, Artificial Sequence
  Chemically synthesized
ugcugucucacaacugccucucu

SEQ ID NO: 34942 - RNA, 23 nt, Artificial Sequence
  Chemically synthesized
ucauuccagaaaugcccagacug

SEQ ID NO: 34943 - RNA, 23 nt, Artificial Sequence
  Chemically synthesized
ccucauuccagaaaugcccagac

SEQ ID NO: 34944 - RNA, 23 nt, Artificial Sequence
  Chemically synthesized
cuccuucacauucuucaggugcg

SEQ ID NO: 34945 - RNA, 23 nt, Artificial Sequence
  Chemically synthesized
uccuucacauucuucaggugcga

SEQ ID NO: 34946 - RNA, 23 nt, Artificial Sequence
  Chemically synthesized
ccuucacauucuucaggugcgag

SEQ ID NO: 34947 - RNA, 23 nt, Artificial Sequence
  Chemically synthesized
cuucacauucuucaggugcgagu

SEQ ID NO: 34948 - RNA, 23 nt, Artificial Sequence
  Chemically synthesized
uucacauucuucaggugcgagua

SEQ ID NO: 34949 - RNA, 23 nt, Artificial Sequence
  Chemically synthesized
uccgaauccucugaagcaucucc

SEQ ID NO: 34950 - RNA, 23 nt, Artificial Sequence
  Chemically synthesized
ccgaauccucugaagcaucuccu

SEQ ID NO: 34951 - RNA, 23 nt, Artificial Sequence
  Chemically synthesized
cgaauccucugaagcaucuccug

SEQ ID NO: 34952 - RNA, 23 nt, Artificial Sequence
  Chemically synthesized
gaauccucugaagcaucuccugc

SEQ ID NO: 34953 - RNA, 23 nt, Artificial Sequence
  Chemically synthesized
aauccucugaagcaucuccugcg

SEQ ID NO: 34954 - RNA, 23 nt, Artificial Sequence
  Chemically synthesized
acacuggagagacuugaaggugg

SEQ ID NO: 34955 - RNA, 23 nt, Artificial Sequence
  Chemically synthesized
cacuggagagacuugaagguggg

SEQ ID NO: 34956 - RNA, 23 nt, Artificial Sequence
  Chemically synthesized
acuggagagacuugaaggugggg

SEQ ID NO: 34957 - RNA, 23 nt, Artificial Sequence
  Chemically synthesized
cuggagagacuugaagguggggg

SEQ ID NO: 34958 - RNA, 23 nt, Artificial Sequence
  Chemically synthesized
uggagagacuugaaggugggggc

SEQ ID NO: 34959 - RNA, 23 nt, Artificial Sequence
  Chemically synthesized
ccccacacacuggagagacuuga

SEQ ID NO: 34960 - RNA, 23 nt, Artificial Sequence
  Chemically synthesized
cccacacacuggagagacuugaa

SEQ ID NO: 34961 - RNA, 23 nt, Artificial Sequence
  Chemically synthesized
ccacacacuggagagacuugaag

SEQ ID NO: 34962 - RNA, 23 nt, Artificial Sequence
  Chemically synthesized
cacacacuggagagacuugaagg

SEQ ID NO: 34963 - RNA, 23 nt, Artificial Sequence
  Chemically synthesized
acacacuggagagacuugaaggu

SEQ ID NO: 34964 - RNA, 23 nt, Artificial Sequence
  Chemically synthesized
cacacuggagagacuugaaggug

SEQ ID NO: 34965 - RNA, 23 nt, Artificial Sequence
  Chemically synthesized
cgaguagaagacaaagcagauuc

SEQ ID NO: 34966 - RNA, 23 nt, Artificial Sequence
  Chemically synthesized
gaguagaagacaaagcagauucu

SEQ ID NO: 34967 - RNA, 23 nt, Artificial Sequence
  Chemically synthesized
aguagaagacaaagcagauucug

SEQ ID NO: 34968 - RNA, 23 nt, Artificial Sequence
  Chemically synthesized
guagaagacaaagcagauucugc

SEQ ID NO: 34969 - RNA, 23 nt, Artificial Sequence
  Chemically synthesized
uagaagacaaagcagauucugcc

SEQ ID NO: 34970 - RNA, 23 nt, Artificial Sequence
  Chemically synthesized
aggaaagcuguccaaaucugagg

SEQ ID NO: 34971 - RNA, 23 nt, Artificial Sequence
  Chemically synthesized
ggaaagcuguccaaaucugaggu

SEQ ID NO: 34972 - RNA, 23 nt, Artificial Sequence
  Chemically synthesized
gaaagcuguccaaaucugagguc

SEQ ID NO: 34973 - RNA, 23 nt, Artificial Sequence
  Chemically synthesized
aaagcuguccaaaucugagguca

SEQ ID NO: 34974 - RNA, 23 nt, Artificial Sequence
  Chemically synthesized
aagcuguccaaaucugaggucag

SEQ ID NO: 34975 - RNA, 23 nt, Artificial Sequence
  Chemically synthesized
auccucugaagcaucuccugcgg

SEQ ID NO: 34976 - RNA, 23 nt, Artificial Sequence
  Chemically synthesized
uuuugaggugaaagaaacagugc

SEQ ID NO: 34977 - RNA, 23 nt, Artificial Sequence
  Chemically synthesized
uuugaggugaaagaaacagugca

SEQ ID NO: 34978 - RNA, 23 nt, Artificial Sequence
  Chemically synthesized
uugaggugaaagaaacagugcag

SEQ ID NO: 34979 - RNA, 23 nt, Artificial Sequence
  Chemically synthesized
ugaggugaaagaaacagugcagu

SEQ ID NO: 34980 - RNA, 23 nt, Artificial Sequence
  Chemically synthesized
gaggugaaagaaacagugcaguu

SEQ ID NO: 34981 - RNA, 23 nt, Artificial Sequence
  Chemically synthesized
uucuucaggugcgaguagaagac

SEQ ID NO: 34982 - RNA, 23 nt, Artificial Sequence
  Chemically synthesized
ucuucaggugcgaguagaagaca

SEQ ID NO: 34983 - RNA, 23 nt, Artificial Sequence
  Chemically synthesized
cuucaggugcgaguagaagacaa

SEQ ID NO: 34984 - RNA, 23 nt, Artificial Sequence
  Chemically synthesized
uucaggugcgaguagaagacaaa

SEQ ID NO: 34985 - RNA, 23 nt, Artificial Sequence
  Chemically synthesized
ucaggugcgaguagaagacaaag

SEQ ID NO: 34986 - RNA, 23 nt, Artificial Sequence
  Chemically synthesized
caccugagcugugaugucauccc

SEQ ID NO: 34987 - RNA, 23 nt, Artificial Sequence
  Chemically synthesized
accugagcugugaugucauccca

SEQ ID NO: 34988 - RNA, 23 nt, Artificial Sequence
  Chemically synthesized
ccugagcugugaugucaucccag

SEQ ID NO: 34989 - RNA, 23 nt, Artificial Sequence
  Chemically synthesized
cugagcugugaugucaucccagg

SEQ ID NO: 34990 - RNA, 23 nt, Artificial Sequence
  Chemically synthesized
ugagcugugaugucaucccaggu

SEQ ID NO: 34991 - RNA, 23 nt, Artificial Sequence
  Chemically synthesized
gcgguugugugucacugugagga

SEQ ID NO: 34992 - RNA, 23 nt, Artificial Sequence
  Chemically synthesized
cgguugugugucacugugaggaa

SEQ ID NO: 34993 - RNA, 23 nt, Artificial Sequence
  Chemically synthesized
gguugugugucacugugaggaag

SEQ ID NO: 34994 - RNA, 23 nt, Artificial Sequence
  Chemically synthesized
guugugugucacugugaggaagg

SEQ ID NO: 34995 - RNA, 23 nt, Artificial Sequence
  Chemically synthesized
uugugugucacugugaggaaggu

SEQ ID NO: 34996 - RNA, 23 nt, Artificial Sequence
  Chemically synthesized
ccuccuucacauucuucaggugc

SEQ ID NO: 34997 - RNA, 23 nt, Artificial Sequence
  Chemically synthesized
caggugcgaguagaagacaaagc

SEQ ID NO: 34998 - RNA, 23 nt, Artificial Sequence
  Chemically synthesized
aggugcgaguagaagacaaagca

SEQ ID NO: 34999 - RNA, 23 nt, Artificial Sequence
  Chemically synthesized
ggugcgaguagaagacaaagcag

SEQ ID NO: 35000 - RNA, 23 nt, Artificial Sequence
  Chemically synthesized
gugcgaguagaagacaaagcaga

SEQ ID NO: 35001 - RNA, 23 nt, Artificial Sequence
  Chemically synthesized
ugcgaguagaagacaaagcagau

SEQ ID NO: 35002 - RNA, 23 nt, Artificial Sequence
  Chemically synthesized
aggugaaagaaacagugcaguuu

SEQ ID NO: 35003 - RNA, 23 nt, Artificial Sequence
  Chemically synthesized
agugcaguuuuguugcucacagg

SEQ ID NO: 35004 - RNA, 23 nt, Artificial Sequence
  Chemically synthesized
gugcaguuuuguugcucacaggg

SEQ ID NO: 35005 - RNA, 23 nt, Artificial Sequence
  Chemically synthesized
ugcaguuuuguugcucacaggga

SEQ ID NO: 35006 - RNA, 23 nt, Artificial Sequence
  Chemically synthesized
gcaguuuuguugcucacagggac

SEQ ID NO: 35007 - RNA, 23 nt, Artificial Sequence
  Chemically synthesized
caguuuuguugcucacagggacc

SEQ ID NO: 35008 - RNA, 23 nt, Artificial Sequence
  Chemically synthesized
gaucugcucauccagaucauccc

SEQ ID NO: 35009 - RNA, 23 nt, Artificial Sequence
  Chemically synthesized
aucugcucauccagaucaucccg

SEQ ID NO: 35010 - RNA, 23 nt, Artificial Sequence
  Chemically synthesized
ucugcucauccagaucaucccgg

SEQ ID NO: 35011 - RNA, 23 nt, Artificial Sequence
  Chemically synthesized
cugcucauccagaucaucccgga

SEQ ID NO: 35012 - RNA, 23 nt, Artificial Sequence
  Chemically synthesized
ugcucauccagaucaucccggaa

SEQ ID NO: 35013 - RNA, 23 nt, Artificial Sequence
  Chemically synthesized
uaccuccuucacauucuucaggu

SEQ ID NO: 35014 - RNA, 23 nt, Artificial Sequence
  Chemically synthesized
accuccuucacauucuucaggug

SEQ ID NO: 35015 - RNA, 23 nt, Artificial Sequence
  Chemically synthesized
ucacauucuucaggugcgaguag

SEQ ID NO: 35016 - RNA, 23 nt, Artificial Sequence
  Chemically synthesized
cacauucuucaggugcgaguaga

SEQ ID NO: 35017 - RNA, 23 nt, Artificial Sequence
  Chemically synthesized
acauucuucaggugcgaguagaa

SEQ ID NO: 35018 - RNA, 23 nt, Artificial Sequence
  Chemically synthesized
cauucuucaggugcgaguagaag

SEQ ID NO: 35019 - RNA, 23 nt, Artificial Sequence
  Chemically synthesized
auucuucaggugcgaguagaaga

SEQ ID NO: 35020 - RNA, 23 nt, Artificial Sequence
  Chemically synthesized
ccgcaaagaacucuucgcccucg

SEQ ID NO: 35021 - RNA, 23 nt, Artificial Sequence
  Chemically synthesized
cgcaaagaacucuucgcccucga

SEQ ID NO: 35022 - RNA, 23 nt, Artificial Sequence
  Chemically synthesized
gcaaagaacucuucgcccucgaa

SEQ ID NO: 35023 - RNA, 23 nt, Artificial Sequence
  Chemically synthesized
caaagaacucuucgcccucgaac

SEQ ID NO: 35024 - RNA, 23 nt, Artificial Sequence
  Chemically synthesized
aaagaacucuucgcccucgaaca

SEQ ID NO: 35025 - RNA, 23 nt, Artificial Sequence
  Chemically synthesized
acgcaagaauuccaccugcagca

SEQ ID NO: 35026 - RNA, 23 nt, Artificial Sequence
  Chemically synthesized
cgcaagaauuccaccugcagcag

SEQ ID NO: 35027 - RNA, 23 nt, Artificial Sequence
  Chemically synthesized
gcaagaauuccaccugcagcagc

SEQ ID NO: 35028 - RNA, 23 nt, Artificial Sequence
  Chemically synthesized
caagaauuccaccugcagcagcu

SEQ ID NO: 35029 - RNA, 23 nt, Artificial Sequence
  Chemically synthesized
aagaauuccaccugcagcagcug

SEQ ID NO: 35030 - RNA, 23 nt, Artificial Sequence
  Chemically synthesized
auaccuccuucacauucuucagg

SEQ ID NO: 35031 - RNA, 23 nt, Artificial Sequence
  Chemically synthesized
agaagacaaagcagauucugccc

SEQ ID NO: 35032 - RNA, 23 nt, Artificial Sequence
  Chemically synthesized
gcucgaaggccgcaaagaacucu

SEQ ID NO: 35033 - RNA, 23 nt, Artificial Sequence
  Chemically synthesized
cucgaaggccgcaaagaacucuu

SEQ ID NO: 35034 - RNA, 23 nt, Artificial Sequence
  Chemically synthesized
ucgaaggccgcaaagaacucuuc

SEQ ID NO: 35035 - RNA, 23 nt, Artificial Sequence
  Chemically synthesized
cgaaggccgcaaagaacucuucg

SEQ ID NO: 35036 - RNA, 23 nt, Artificial Sequence
  Chemically synthesized
gaaggccgcaaagaacucuucgc

SEQ ID NO: 35037 - RNA, 23 nt, Artificial Sequence
  Chemically synthesized
gugcucagacgcaagaauuccac

SEQ ID NO: 35038 - RNA, 23 nt, Artificial Sequence
  Chemically synthesized
ugcucagacgcaagaauuccacc

SEQ ID NO: 35039 - RNA, 23 nt, Artificial Sequence
  Chemically synthesized
gcucagacgcaagaauuccaccu

SEQ ID NO: 35040 - RNA, 23 nt, Artificial Sequence
  Chemically synthesized
cucagacgcaagaauuccaccug

SEQ ID NO: 35041 - RNA, 23 nt, Artificial Sequence
  Chemically synthesized
ucagacgcaagaauuccaccugc

SEQ ID NO: 35042 - RNA, 23 nt, Artificial Sequence
  Chemically synthesized
cucgaacaucuccaccgugucag

SEQ ID NO: 35043 - RNA, 23 nt, Artificial Sequence
  Chemically synthesized
ucgaacaucuccaccgugucaga

SEQ ID NO: 35044 - RNA, 23 nt, Artificial Sequence
  Chemically synthesized
cgaacaucuccaccgugucagag

SEQ ID NO: 35045 - RNA, 23 nt, Artificial Sequence
  Chemically synthesized
gaacaucuccaccgugucagagg

SEQ ID NO: 35046 - RNA, 23 nt, Artificial Sequence
  Chemically synthesized
aacaucuccaccgugucagaggg

SEQ ID NO: 35047 - RNA, 23 nt, Artificial Sequence
  Chemically synthesized
ccaccugagcugugaugucaucc

SEQ ID NO: 35048 - RNA, 23 nt, Artificial Sequence
  Chemically synthesized
agcuguccaaaucugaggucagg

SEQ ID NO: 35049 - RNA, 23 nt, Artificial Sequence
  Chemically synthesized
ggagaagagcaugugacggaucu

SEQ ID NO: 35050 - RNA, 23 nt, Artificial Sequence
  Chemically synthesized
gagaagagcaugugacggaucug

SEQ ID NO: 35051 - RNA, 23 nt, Artificial Sequence
  Chemically synthesized
agaagagcaugugacggaucugc

SEQ ID NO: 35052 - RNA, 23 nt, Artificial Sequence
  Chemically synthesized
gaagagcaugugacggaucugcu

SEQ ID NO: 35053 - RNA, 23 nt, Artificial Sequence
  Chemically synthesized
aagagcaugugacggaucugcuc

SEQ ID NO: 35054 - RNA, 23 nt, Artificial Sequence
  Chemically synthesized
guauaccuccuucacauucuuca

SEQ ID NO: 35055 - RNA, 23 nt, Artificial Sequence
  Chemically synthesized
uauaccuccuucacauucuucag

SEQ ID NO: 35056 - RNA, 23 nt, Artificial Sequence
  Chemically synthesized
aaggccgcaaagaacucuucgcc

SEQ ID NO: 35057 - RNA, 23 nt, Artificial Sequence
  Chemically synthesized
aggccgcaaagaacucuucgccc

SEQ ID NO: 35058 - RNA, 23 nt, Artificial Sequence
  Chemically synthesized
agcgaugagguucacacggugca

SEQ ID NO: 35059 - RNA, 23 nt, Artificial Sequence
  Chemically synthesized
gcgaugagguucacacggugcag

SEQ ID NO: 35060 - RNA, 23 nt, Artificial Sequence
  Chemically synthesized
cgaugagguucacacggugcagc

SEQ ID NO: 35061 - RNA, 23 nt, Artificial Sequence
  Chemically synthesized
gaugagguucacacggugcagcc

SEQ ID NO: 35062 - RNA, 23 nt, Artificial Sequence
  Chemically synthesized
augagguucacacggugcagccg

SEQ ID NO: 35063 - RNA, 23 nt, Artificial Sequence
  Chemically synthesized
gagcugugaugucaucccaggug

SEQ ID NO: 35064 - RNA, 23 nt, Artificial Sequence
  Chemically synthesized
agcugugaugucaucccaggugg

SEQ ID NO: 35065 - RNA, 23 nt, Artificial Sequence
  Chemically synthesized
gcugugaugucaucccagguggc

SEQ ID NO: 35066 - RNA, 23 nt, Artificial Sequence
  Chemically synthesized
cugugaugucaucccagguggcu

SEQ ID NO: 35067 - RNA, 23 nt, Artificial Sequence
  Chemically synthesized
ugugaugucaucccagguggcug

SEQ ID NO: 35068 - RNA, 23 nt, Artificial Sequence
  Chemically synthesized
ccaggagaagagcaugugacgga

SEQ ID NO: 35069 - RNA, 23 nt, Artificial Sequence
  Chemically synthesized
caggagaagagcaugugacggau

SEQ ID NO: 35070 - RNA, 23 nt, Artificial Sequence
  Chemically synthesized
aggagaagagcaugugacggauc

SEQ ID NO: 35071 - RNA, 23 nt, Artificial Sequence
  Chemically synthesized
caggaaagcuguccaaaucugag

SEQ ID NO: 35072 - RNA, 23 nt, Artificial Sequence
  Chemically synthesized
gcagauucugcccuccacacagu

SEQ ID NO: 35073 - RNA, 23 nt, Artificial Sequence
  Chemically synthesized
cagauucugcccuccacacaguc

SEQ ID NO: 35074 - RNA, 23 nt, Artificial Sequence
  Chemically synthesized
agauucugcccuccacacaguca

SEQ ID NO: 35075 - RNA, 23 nt, Artificial Sequence
  Chemically synthesized
gauucugcccuccacacagucag

SEQ ID NO: 35076 - RNA, 23 nt, Artificial Sequence
  Chemically synthesized
auucugcccuccacacagucagg

SEQ ID NO: 35077 - RNA, 23 nt, Artificial Sequence
  Chemically synthesized
agugcucagacgcaagaauucca

SEQ ID NO: 35078 - RNA, 23 nt, Artificial Sequence
  Chemically synthesized
aagaacucuucgcccucgaacau

SEQ ID NO: 35079 - RNA, 23 nt, Artificial Sequence
  Chemically synthesized
accacaaggaaccaggagaagug

SEQ ID NO: 35080 - RNA, 23 nt, Artificial Sequence
  Chemically synthesized
ccacaaggaaccaggagaagugg

SEQ ID NO: 35081 - RNA, 23 nt, Artificial Sequence
  Chemically synthesized
cacaaggaaccaggagaaguggg

SEQ ID NO: 35082 - RNA, 23 nt, Artificial Sequence
  Chemically synthesized
acaaggaaccaggagaagugggg

SEQ ID NO: 35083 - RNA, 23 nt, Artificial Sequence
  Chemically synthesized
caaggaaccaggagaaguggggc

SEQ ID NO: 35084 - RNA, 23 nt, Artificial Sequence
  Chemically synthesized
agcccaggagaagagcaugugac

SEQ ID NO: 35085 - RNA, 23 nt, Artificial Sequence
  Chemically synthesized
gcccaggagaagagcaugugacg

SEQ ID NO: 35086 - RNA, 23 nt, Artificial Sequence
  Chemically synthesized
cccaggagaagagcaugugacgg

SEQ ID NO: 35087 - RNA, 23 nt, Artificial Sequence
  Chemically synthesized
gcccucgaacaucuccaccgugu

SEQ ID NO: 35088 - RNA, 23 nt, Artificial Sequence
  Chemically synthesized
cccucgaacaucuccaccguguc

SEQ ID NO: 35089 - RNA, 23 nt, Artificial Sequence
  Chemically synthesized
ccucgaacaucuccaccguguca

SEQ ID NO: 35090 - RNA, 23 nt, Artificial Sequence
  Chemically synthesized
uccaaaucugaggucaggaacag

SEQ ID NO: 35091 - RNA, 23 nt, Artificial Sequence
  Chemically synthesized
ccaaaucugaggucaggaacagu

SEQ ID NO: 35092 - RNA, 23 nt, Artificial Sequence
  Chemically synthesized
caaaucugaggucaggaacaguc

SEQ ID NO: 35093 - RNA, 23 nt, Artificial Sequence
  Chemically synthesized
aaaucugaggucaggaacagucu

SEQ ID NO: 35094 - RNA, 23 nt, Artificial Sequence
  Chemically synthesized
aaucugaggucaggaacagucug

SEQ ID NO: 35095 - RNA, 23 nt, Artificial Sequence
  Chemically synthesized
aaagaaacagugcaguuuuguug

SEQ ID NO: 35096 - RNA, 23 nt, Artificial Sequence
  Chemically synthesized
aagaaacagugcaguuuuguugc

SEQ ID NO: 35097 - RNA, 23 nt, Artificial Sequence
  Chemically synthesized
agaaacagugcaguuuuguugcu

SEQ ID NO: 35098 - RNA, 23 nt, Artificial Sequence
  Chemically synthesized
gaaacagugcaguuuuguugcuc

SEQ ID NO: 35099 - RNA, 23 nt, Artificial Sequence
  Chemically synthesized
aaacagugcaguuuuguugcuca

SEQ ID NO: 35100 - RNA, 23 nt, Artificial Sequence
  Chemically synthesized
gcaguugugagacagcaagagcg

SEQ ID NO: 35101 - RNA, 23 nt, Artificial Sequence
  Chemically synthesized
caguugugagacagcaagagcgc

SEQ ID NO: 35102 - RNA, 23 nt, Artificial Sequence
  Chemically synthesized
aguugugagacagcaagagcgca

SEQ ID NO: 35103 - RNA, 23 nt, Artificial Sequence
  Chemically synthesized
guugugagacagcaagagcgcac

SEQ ID NO: 35104 - RNA, 23 nt, Artificial Sequence
  Chemically synthesized
uugugagacagcaagagcgcacc

SEQ ID NO: 35105 - RNA, 23 nt, Artificial Sequence
  Chemically synthesized
gcuguugaagcucagguccaggu

SEQ ID NO: 35106 - RNA, 23 nt, Artificial Sequence
  Chemically synthesized
cuguugaagcucagguccaggug

SEQ ID NO: 35107 - RNA, 23 nt, Artificial Sequence
  Chemically synthesized
uguugaagcucagguccaggugg

SEQ ID NO: 35108 - RNA, 23 nt, Artificial Sequence
  Chemically synthesized
guugaagcucagguccagguggg

SEQ ID NO: 35109 - RNA, 23 nt, Artificial Sequence
  Chemically synthesized
uugaagcucagguccaggugggc

SEQ ID NO: 35110 - RNA, 23 nt, Artificial Sequence
  Chemically synthesized
cagauucugagagagaucgaggc

SEQ ID NO: 35111 - RNA, 23 nt, Artificial Sequence
  Chemically synthesized
agauucugagagagaucgaggcg

SEQ ID NO: 35112 - RNA, 23 nt, Artificial Sequence
  Chemically synthesized
gauucugagagagaucgaggcgc

SEQ ID NO: 35113 - RNA, 23 nt, Artificial Sequence
  Chemically synthesized
auucugagagagaucgaggcgcu

SEQ ID NO: 35114 - RNA, 23 nt, Artificial Sequence
  Chemically synthesized
uucugagagagaucgaggcgcug

SEQ ID NO: 35115 - RNA, 23 nt, Artificial Sequence
  Chemically synthesized
cggcagugucuccaggcuguuga

SEQ ID NO: 35116 - RNA, 23 nt, Artificial Sequence
  Chemically synthesized
ggcagugucuccaggcuguugaa

SEQ ID NO: 35117 - RNA, 23 nt, Artificial Sequence
  Chemically synthesized
gcagugucuccaggcuguugaag

SEQ ID NO: 35118 - RNA, 23 nt, Artificial Sequence
  Chemically synthesized
cagugucuccaggcuguugaagc

SEQ ID NO: 35119 - RNA, 23 nt, Artificial Sequence
  Chemically synthesized
agugucuccaggcuguugaagcu

SEQ ID NO: 35120 - RNA, 23 nt, Artificial Sequence
  Chemically synthesized
agacaaagcagauucugcccucc

SEQ ID NO: 35121 - RNA, 23 nt, Artificial Sequence
  Chemically synthesized
gacaaagcagauucugcccucca

SEQ ID NO: 35122 - RNA, 23 nt, Artificial Sequence
  Chemically synthesized
acaaagcagauucugcccuccac

SEQ ID NO: 35123 - RNA, 23 nt, Artificial Sequence
  Chemically synthesized
caaagcagauucugcccuccaca

SEQ ID NO: 35124 - RNA, 23 nt, Artificial Sequence
  Chemically synthesized
aaagcagauucugcccuccacac

SEQ ID NO: 35125 - RNA, 23 nt, Artificial Sequence
  Chemically synthesized
cggcaucucccagauucaagggu

SEQ ID NO: 35126 - RNA, 23 nt, Artificial Sequence
  Chemically synthesized
ggcaucucccagauucaagggug

SEQ ID NO: 35127 - RNA, 23 nt, Artificial Sequence
  Chemically synthesized
gcaucucccagauucaagggugc

SEQ ID NO: 35128 - RNA, 23 nt, Artificial Sequence
  Chemically synthesized
caucucccagauucaagggugcc

SEQ ID NO: 35129 - RNA, 23 nt, Artificial Sequence
  Chemically synthesized
aucucccagauucaagggugcca

SEQ ID NO: 35130 - RNA, 23 nt, Artificial Sequence
  Chemically synthesized
ucucccagauucaagggugccaa

SEQ ID NO: 35131 - RNA, 23 nt, Artificial Sequence
  Chemically synthesized
aguuuuguugcucacagggaccc

SEQ ID NO: 35132 - RNA, 23 nt, Artificial Sequence
  Chemically synthesized
guuuuguugcucacagggacccg

SEQ ID NO: 35133 - RNA, 23 nt, Artificial Sequence
  Chemically synthesized
uuuuguugcucacagggacccgu

SEQ ID NO: 35134 - RNA, 23 nt, Artificial Sequence
  Chemically synthesized
gaagacaaagcagauucugcccu

SEQ ID NO: 35135 - RNA, 23 nt, Artificial Sequence
  Chemically synthesized
aagacaaagcagauucugcccuc

SEQ ID NO: 35136 - RNA, 23 nt, Artificial Sequence
  Chemically synthesized
cuccaaucucaggagguagcgug

SEQ ID NO: 35137 - RNA, 23 nt, Artificial Sequence
  Chemically synthesized
uccaaucucaggagguagcgugu

SEQ ID NO: 35138 - RNA, 23 nt, Artificial Sequence
  Chemically synthesized
ccaaucucaggagguagcguguc

SEQ ID NO: 35139 - RNA, 23 nt, Artificial Sequence
  Chemically synthesized
caaucucaggagguagcgugucc

SEQ ID NO: 35140 - RNA, 23 nt, Artificial Sequence
  Chemically synthesized
aaucucaggagguagcgugucca

SEQ ID NO: 35141 - RNA, 23 nt, Artificial Sequence
  Chemically synthesized
gugaaagaaacagugcaguuuug

SEQ ID NO: 35142 - RNA, 23 nt, Artificial Sequence
  Chemically synthesized
ugaaagaaacagugcaguuuugu

SEQ ID NO: 35143 - RNA, 23 nt, Artificial Sequence
  Chemically synthesized
gaaagaaacagugcaguuuuguu

SEQ ID NO: 35144 - RNA, 23 nt, Artificial Sequence
  Chemically synthesized
ucggaugcuguccugguacuugc

SEQ ID NO: 35145 - RNA, 23 nt, Artificial Sequence
  Chemically synthesized
cggaugcuguccugguacuugcg

SEQ ID NO: 35146 - RNA, 23 nt, Artificial Sequence
  Chemically synthesized
ggaugcuguccugguacuugcgg

SEQ ID NO: 35147 - RNA, 23 nt, Artificial Sequence
  Chemically synthesized
gaugcuguccugguacuugcggc

SEQ ID NO: 35148 - RNA, 23 nt, Artificial Sequence
  Chemically synthesized
augcuguccugguacuugcggcg

SEQ ID NO: 35149 - RNA, 23 nt, Artificial Sequence
  Chemically synthesized
aggcuguugaagcucagguccag

SEQ ID NO: 35150 - RNA, 23 nt, Artificial Sequence
  Chemically synthesized
ggcuguugaagcucagguccagg

SEQ ID NO: 35151 - RNA, 23 nt, Artificial Sequence
  Chemically synthesized
cagguugcucugcgucagaaagc

SEQ ID NO: 35152 - RNA, 23 nt, Artificial Sequence
  Chemically synthesized
agguugcucugcgucagaaagcc

SEQ ID NO: 35153 - RNA, 23 nt, Artificial Sequence
  Chemically synthesized
gguugcucugcgucagaaagccg

SEQ ID NO: 35154 - RNA, 23 nt, Artificial Sequence
  Chemically synthesized
guugcucugcgucagaaagccgg

SEQ ID NO: 35155 - RNA, 23 nt, Artificial Sequence
  Chemically synthesized
uugcucugcgucagaaagccggu

SEQ ID NO: 35156 - RNA, 23 nt, Artificial Sequence
  Chemically synthesized
ugccucuuccuccagguaggucu

SEQ ID NO: 35157 - RNA, 23 nt, Artificial Sequence
  Chemically synthesized
gccucuuccuccagguaggucuc

SEQ ID NO: 35158 - RNA, 23 nt, Artificial Sequence
  Chemically synthesized
ccucuuccuccagguaggucucc

SEQ ID NO: 35159 - RNA, 23 nt, Artificial Sequence
  Chemically synthesized
cucuuccuccagguaggucucca

SEQ ID NO: 35160 - RNA, 23 nt, Artificial Sequence
  Chemically synthesized
ucuuccuccagguaggucuccag

SEQ ID NO: 35161 - RNA, 23 nt, Artificial Sequence
  Chemically synthesized
gcagauucugagagagaucgagg

SEQ ID NO: 35162 - RNA, 23 nt, Artificial Sequence
  Chemically synthesized
aggcaguugugagacagcaagag

SEQ ID NO: 35163 - RNA, 23 nt, Artificial Sequence
  Chemically synthesized
ggcaguugugagacagcaagagc

SEQ ID NO: 35164 - RNA, 23 nt, Artificial Sequence
  Chemically synthesized
agccacacucagcagguugcucu

SEQ ID NO: 35165 - RNA, 23 nt, Artificial Sequence
  Chemically synthesized
gccacacucagcagguugcucug

SEQ ID NO: 35166 - RNA, 23 nt, Artificial Sequence
  Chemically synthesized
ccacacucagcagguugcucugc

SEQ ID NO: 35167 - RNA, 23 nt, Artificial Sequence
  Chemically synthesized
cacacucagcagguugcucugcg

SEQ ID NO: 35168 - RNA, 23 nt, Artificial Sequence
  Chemically synthesized
acacucagcagguugcucugcgu

SEQ ID NO: 35169 - RNA, 23 nt, Artificial Sequence
  Chemically synthesized
caguucuuggugguguaccagag

SEQ ID NO: 35170 - RNA, 23 nt, Artificial Sequence
  Chemically synthesized
aguucuuggugguguaccagagc

SEQ ID NO: 35171 - RNA, 23 nt, Artificial Sequence
  Chemically synthesized
guucuuggugguguaccagagcc

SEQ ID NO: 35172 - RNA, 23 nt, Artificial Sequence
  Chemically synthesized
uucuuggugguguaccagagcca

SEQ ID NO: 35173 - RNA, 23 nt, Artificial Sequence
  Chemically synthesized
ucuuggugguguaccagagccag

SEQ ID NO: 35174 - RNA, 23 nt, Artificial Sequence
  Chemically synthesized
gcgggaaaccacaaggaaccagg

SEQ ID NO: 35175 - RNA, 23 nt, Artificial Sequence
  Chemically synthesized
cgggaaaccacaaggaaccagga

SEQ ID NO: 35176 - RNA, 23 nt, Artificial Sequence
  Chemically synthesized
gggaaaccacaaggaaccaggag

SEQ ID NO: 35177 - RNA, 23 nt, Artificial Sequence
  Chemically synthesized
ggaaaccacaaggaaccaggaga

SEQ ID NO: 35178 - RNA, 23 nt, Artificial Sequence
  Chemically synthesized
gaaaccacaaggaaccaggagaa

SEQ ID NO: 35179 - RNA, 23 nt, Artificial Sequence
  Chemically synthesized
agcagauucugagagagaucgag

SEQ ID NO: 35180 - RNA, 23 nt, Artificial Sequence
  Chemically synthesized
aacagugcaguuuuguugcucac

SEQ ID NO: 35181 - RNA, 23 nt, Artificial Sequence
  Chemically synthesized
acagugcaguuuuguugcucaca

SEQ ID NO: 35182 - RNA, 23 nt, Artificial Sequence
  Chemically synthesized
cagugcaguuuuguugcucacag

SEQ ID NO: 35183 - RNA, 23 nt, Artificial Sequence
  Chemically synthesized
uuuguugcucacagggacccguc

SEQ ID NO: 35184 - RNA, 23 nt, Artificial Sequence
  Chemically synthesized
ugucuccaggcuguugaagcuca

SEQ ID NO: 35185 - RNA, 23 nt, Artificial Sequence
  Chemically synthesized
gucuccaggcuguugaagcucag

SEQ ID NO: 35186 - RNA, 23 nt, Artificial Sequence
  Chemically synthesized
ucuccaggcuguugaagcucagg

SEQ ID NO: 35187 - RNA, 23 nt, Artificial Sequence
  Chemically synthesized
cuccaggcuguugaagcucaggu

SEQ ID NO: 35188 - RNA, 23 nt, Artificial Sequence
  Chemically synthesized
uccaggcuguugaagcucagguc

SEQ ID NO: 35189 - RNA, 23 nt, Artificial Sequence
  Chemically synthesized
ccagauucaagggugccaaggag

SEQ ID NO: 35190 - RNA, 23 nt, Artificial Sequence
  Chemically synthesized
cagauucaagggugccaaggaga

SEQ ID NO: 35191 - RNA, 23 nt, Artificial Sequence
  Chemically synthesized
agauucaagggugccaaggagag

SEQ ID NO: 35192 - RNA, 23 nt, Artificial Sequence
  Chemically synthesized
gauucaagggugccaaggagagg

SEQ ID NO: 35193 - RNA, 23 nt, Artificial Sequence
  Chemically synthesized
auucaagggugccaaggagaggc

SEQ ID NO: 35194 - RNA, 23 nt, Artificial Sequence
  Chemically synthesized
cagacgcaagaauuccaccugca

SEQ ID NO: 35195 - RNA, 23 nt, Artificial Sequence
  Chemically synthesized
agacgcaagaauuccaccugcag

SEQ ID NO: 35196 - RNA, 23 nt, Artificial Sequence
  Chemically synthesized
gacgcaagaauuccaccugcagc

SEQ ID NO: 35197 - RNA, 23 nt, Artificial Sequence
  Chemically synthesized
aucugaggucaggaacagucugg

SEQ ID NO: 35198 - RNA, 23 nt, Artificial Sequence
  Chemically synthesized
ucugaggucaggaacagucuggg

SEQ ID NO: 35199 - RNA, 23 nt, Artificial Sequence
  Chemically synthesized
ugggcauuucuggaaugagggcu

SEQ ID NO: 35200 - RNA, 23 nt, Artificial Sequence
  Chemically synthesized
gggcauuucuggaaugagggcug

SEQ ID NO: 35201 - RNA, 23 nt, Artificial Sequence
  Chemically synthesized
ggcauuucuggaaugagggcugc

SEQ ID NO: 35202 - RNA, 23 nt, Artificial Sequence
  Chemically synthesized
gcauuucuggaaugagggcugcc

SEQ ID NO: 35203 - RNA, 23 nt, Artificial Sequence
  Chemically synthesized
cauuucuggaaugagggcugcca

SEQ ID NO: 35204 - RNA, 23 nt, Artificial Sequence
  Chemically synthesized
auuucuggaaugagggcugccac

SEQ ID NO: 35205 - RNA, 23 nt, Artificial Sequence
  Chemically synthesized
uuucuggaaugagggcugccacu

SEQ ID NO: 35206 - RNA, 23 nt, Artificial Sequence
  Chemically synthesized
aaggaaccaggagaaguggggca

SEQ ID NO: 35207 - RNA, 23 nt, Artificial Sequence
  Chemically synthesized
gcuguccaaaucugaggucagga

SEQ ID NO: 35208 - RNA, 23 nt, Artificial Sequence
  Chemically synthesized
cuguccaaaucugaggucaggaa

SEQ ID NO: 35209 - RNA, 23 nt, Artificial Sequence
  Chemically synthesized
uguccaaaucugaggucaggaac

SEQ ID NO: 35210 - RNA, 23 nt, Artificial Sequence
  Chemically synthesized
guccaaaucugaggucaggaaca

SEQ ID NO: 35211 - RNA, 23 nt, Artificial Sequence
  Chemically synthesized
gagguugcugugcaggacaagga

SEQ ID NO: 35212 - RNA, 23 nt, Artificial Sequence
  Chemically synthesized
agguugcugugcaggacaaggag

SEQ ID NO: 35213 - RNA, 23 nt, Artificial Sequence
  Chemically synthesized
gguugcugugcaggacaaggagc

SEQ ID NO: 35214 - RNA, 23 nt, Artificial Sequence
  Chemically synthesized
guugcugugcaggacaaggagcc

SEQ ID NO: 35215 - RNA, 23 nt, Artificial Sequence
  Chemically synthesized
uugcugugcaggacaaggagccg

SEQ ID NO: 35216 - RNA, 23 nt, Artificial Sequence
  Chemically synthesized
gaauaucugggccagccuaaaag

SEQ ID NO: 35217 - RNA, 23 nt, Artificial Sequence
  Chemically synthesized
aauaucugggccagccuaaaagu

SEQ ID NO: 35218 - RNA, 23 nt, Artificial Sequence
  Chemically synthesized
auaucugggccagccuaaaaguc

SEQ ID NO: 35219 - RNA, 23 nt, Artificial Sequence
  Chemically synthesized
uaucugggccagccuaaaagucu

SEQ ID NO: 35220 - RNA, 23 nt, Artificial Sequence
  Chemically synthesized
aucugggccagccuaaaagucug

SEQ ID NO: 35221 - RNA, 23 nt, Artificial Sequence
  Chemically synthesized
gaacucuucgcccucgaacaucu

SEQ ID NO: 35222 - RNA, 23 nt, Artificial Sequence
  Chemically synthesized
aacucuucgcccucgaacaucuc

SEQ ID NO: 35223 - RNA, 23 nt, Artificial Sequence
  Chemically synthesized
acucuucgcccucgaacaucucc

SEQ ID NO: 35224 - RNA, 23 nt, Artificial Sequence
  Chemically synthesized
cucuucgcccucgaacaucucca

SEQ ID NO: 35225 - RNA, 23 nt, Artificial Sequence
  Chemically synthesized
ucuucgcccucgaacaucuccac

SEQ ID NO: 35226 - RNA, 23 nt, Artificial Sequence
  Chemically synthesized
aaaccacaaggaaccaggagaag

SEQ ID NO: 35227 - RNA, 23 nt, Artificial Sequence
  Chemically synthesized
aaccacaaggaaccaggagaagu

SEQ ID NO: 35228 - RNA, 23 nt, Artificial Sequence
  Chemically synthesized
ggccuccaaucucaggagguagc

SEQ ID NO: 35229 - RNA, 23 nt, Artificial Sequence
  Chemically synthesized
gccuccaaucucaggagguagcg

SEQ ID NO: 35230 - RNA, 23 nt, Artificial Sequence
  Chemically synthesized
ccuccaaucucaggagguagcgu

SEQ ID NO: 35231 - RNA, 23 nt, Artificial Sequence
  Chemically synthesized
aucucaggagguagcguguccag

SEQ ID NO: 35232 - RNA, 23 nt, Artificial Sequence
  Chemically synthesized
uagcguguccagcagauucugag

SEQ ID NO: 35233 - RNA, 23 nt, Artificial Sequence
  Chemically synthesized
agcguguccagcagauucugaga

SEQ ID NO: 35234 - RNA, 23 nt, Artificial Sequence
  Chemically synthesized
gcguguccagcagauucugagag

SEQ ID NO: 35235 - RNA, 23 nt, Artificial Sequence
  Chemically synthesized
cguguccagcagauucugagaga

SEQ ID NO: 35236 - RNA, 23 nt, Artificial Sequence
  Chemically synthesized
guguccagcagauucugagagag

SEQ ID NO: 35237 - RNA, 23 nt, Artificial Sequence
  Chemically synthesized
gugugucacugugaggaagguga

SEQ ID NO: 35238 - RNA, 23 nt, Artificial Sequence
  Chemically synthesized
ugugucacugugaggaaggugag

SEQ ID NO: 35239 - RNA, 23 nt, Artificial Sequence
  Chemically synthesized
gugucacugugaggaaggugagg

SEQ ID NO: 35240 - RNA, 23 nt, Artificial Sequence
  Chemically synthesized
ugucacugugaggaaggugaggg

SEQ ID NO: 35241 - RNA, 23 nt, Artificial Sequence
  Chemically synthesized
gucacugugaggaaggugagggc

SEQ ID NO: 35242 - RNA, 23 nt, Artificial Sequence
  Chemically synthesized
acacaguucuuggugguguacca

SEQ ID NO: 35243 - RNA, 23 nt, Artificial Sequence
  Chemically synthesized
cacaguucuuggugguguaccag

SEQ ID NO: 35244 - RNA, 23 nt, Artificial Sequence
  Chemically synthesized
acaguucuuggugguguaccaga

SEQ ID NO: 35245 - RNA, 23 nt, Artificial Sequence
  Chemically synthesized
agaauuccaccugcagcagcugc

SEQ ID NO: 35246 - RNA, 23 nt, Artificial Sequence
  Chemically synthesized
gaauuccaccugcagcagcugca

SEQ ID NO: 35247 - RNA, 23 nt, Artificial Sequence
  Chemically synthesized
aauuccaccugcagcagcugcag

SEQ ID NO: 35248 - RNA, 23 nt, Artificial Sequence
  Chemically synthesized
gugucuccaggcuguugaagcuc

SEQ ID NO: 35249 - RNA, 23 nt, Artificial Sequence
  Chemically synthesized
gacggaucugcucauccagauca

SEQ ID NO: 35250 - RNA, 23 nt, Artificial Sequence
  Chemically synthesized
acggaucugcucauccagaucau

SEQ ID NO: 35251 - RNA, 23 nt, Artificial Sequence
  Chemically synthesized
cggaucugcucauccagaucauc

SEQ ID NO: 35252 - RNA, 23 nt, Artificial Sequence
  Chemically synthesized
ggaucugcucauccagaucaucc

SEQ ID NO: 35253 - RNA, 23 nt, Artificial Sequence
  Chemically synthesized
ccgcugcagagcgaugagguuca

SEQ ID NO: 35254 - RNA, 23 nt, Artificial Sequence
  Chemically synthesized
cgcugcagagcgaugagguucac

SEQ ID NO: 35255 - RNA, 23 nt, Artificial Sequence
  Chemically synthesized
gcugcagagcgaugagguucaca

SEQ ID NO: 35256 - RNA, 23 nt, Artificial Sequence
  Chemically synthesized
cugcagagcgaugagguucacac

SEQ ID NO: 35257 - RNA, 23 nt, Artificial Sequence
  Chemically synthesized
ugcagagcgaugagguucacacg

SEQ ID NO: 35258 - RNA, 23 nt, Artificial Sequence
  Chemically synthesized
ggaccaccugagcugugauguca

SEQ ID NO: 35259 - RNA, 23 nt, Artificial Sequence
  Chemically synthesized
gaccaccugagcugugaugucau

SEQ ID NO: 35260 - RNA, 23 nt, Artificial Sequence
  Chemically synthesized
accaccugagcugugaugucauc

SEQ ID NO: 35261 - RNA, 23 nt, Artificial Sequence
  Chemically synthesized
aggggggaagaugacuuugaccc

SEQ ID NO: 35262 - RNA, 23 nt, Artificial Sequence
  Chemically synthesized
ggggggaagaugacuuugacccc

SEQ ID NO: 35263 - RNA, 23 nt, Artificial Sequence
  Chemically synthesized
gggggaagaugacuuugacccca

SEQ ID NO: 35264 - RNA, 23 nt, Artificial Sequence
  Chemically synthesized
ggggaagaugacuuugaccccag

SEQ ID NO: 35265 - RNA, 23 nt, Artificial Sequence
  Chemically synthesized
gggaagaugacuuugaccccagg

SEQ ID NO: 35266 - RNA, 23 nt, Artificial Sequence
  Chemically synthesized
gggccagccuaaaagucuguggg

SEQ ID NO: 35267 - RNA, 23 nt, Artificial Sequence
  Chemically synthesized
ggccagccuaaaagucugugggg

SEQ ID NO: 35268 - RNA, 23 nt, Artificial Sequence
  Chemically synthesized
gccagccuaaaagucuguggggc

SEQ ID NO: 35269 - RNA, 23 nt, Artificial Sequence
  Chemically synthesized
ccagccuaaaagucuguggggcc

SEQ ID NO: 35270 - RNA, 23 nt, Artificial Sequence
  Chemically synthesized
cagccuaaaagucuguggggccu

SEQ ID NO: 35271 - RNA, 23 nt, Artificial Sequence
  Chemically synthesized
aggggucacaggaaagcugucca

SEQ ID NO: 35272 - RNA, 23 nt, Artificial Sequence
  Chemically synthesized
ggggucacaggaaagcuguccaa

SEQ ID NO: 35273 - RNA, 23 nt, Artificial Sequence
  Chemically synthesized
gggucacaggaaagcuguccaaa

SEQ ID NO: 35274 - RNA, 23 nt, Artificial Sequence
  Chemically synthesized
ggucacaggaaagcuguccaaau

SEQ ID NO: 35275 - RNA, 23 nt, Artificial Sequence
  Chemically synthesized
gucacaggaaagcuguccaaauc

SEQ ID NO: 35276 - RNA, 23 nt, Artificial Sequence
  Chemically synthesized
ugggccagccuaaaagucugugg

SEQ ID NO: 35277 - RNA, 23 nt, Artificial Sequence
  Chemically synthesized
ccaggcuguugaagcucaggucc

SEQ ID NO: 35278 - RNA, 23 nt, Artificial Sequence
  Chemically synthesized
caggcuguugaagcucaggucca

SEQ ID NO: 35279 - RNA, 23 nt, Artificial Sequence
  Chemically synthesized
gcucauccagaucaucccggaac

SEQ ID NO: 35280 - RNA, 23 nt, Artificial Sequence
  Chemically synthesized
cucauccagaucaucccggaacu

SEQ ID NO: 35281 - RNA, 23 nt, Artificial Sequence
  Chemically synthesized
ucauccagaucaucccggaacuc

SEQ ID NO: 35282 - RNA, 23 nt, Artificial Sequence
  Chemically synthesized
cauccagaucaucccggaacucg

SEQ ID NO: 35283 - RNA, 23 nt, Artificial Sequence
  Chemically synthesized
auccagaucaucccggaacucgu

SEQ ID NO: 35284 - RNA, 23 nt, Artificial Sequence
  Chemically synthesized
gcagagcgaugagguucacacgg

SEQ ID NO: 35285 - RNA, 23 nt, Artificial Sequence
  Chemically synthesized
cagagcgaugagguucacacggu

SEQ ID NO: 35286 - RNA, 23 nt, Artificial Sequence
  Chemically synthesized
agagcgaugagguucacacggug

SEQ ID NO: 35287 - RNA, 23 nt, Artificial Sequence
  Chemically synthesized
aggaacagucugggcauuucugg

SEQ ID NO: 35288 - RNA, 23 nt, Artificial Sequence
  Chemically synthesized
ggaacagucugggcauuucugga

SEQ ID NO: 35289 - RNA, 23 nt, Artificial Sequence
  Chemically synthesized
gaacagucugggcauuucuggaa

SEQ ID NO: 35290 - RNA, 23 nt, Artificial Sequence
  Chemically synthesized
aacagucugggcauuucuggaau

SEQ ID NO: 35291 - RNA, 23 nt, Artificial Sequence
  Chemically synthesized
acagucugggcauuucuggaaug

SEQ ID NO: 35292 - RNA, 23 nt, Artificial Sequence
  Chemically synthesized
agguagcguguccagcagauucu

SEQ ID NO: 35293 - RNA, 23 nt, Artificial Sequence
  Chemically synthesized
gguagcguguccagcagauucug

SEQ ID NO: 35294 - RNA, 23 nt, Artificial Sequence
  Chemically synthesized
guagcguguccagcagauucuga

SEQ ID NO: 35295 - RNA, 23 nt, Artificial Sequence
  Chemically synthesized
uguccagcagauucugagagaga

SEQ ID NO: 35296 - RNA, 23 nt, Artificial Sequence
  Chemically synthesized
guccagcagauucugagagagau

SEQ ID NO: 35297 - RNA, 23 nt, Artificial Sequence
  Chemically synthesized
ccagcagauucugagagagaucg

SEQ ID NO: 35298 - RNA, 23 nt, Artificial Sequence
  Chemically synthesized
cagcagauucugagagagaucga

SEQ ID NO: 35299 - RNA, 23 nt, Artificial Sequence
  Chemically synthesized
ucggcaucucccagauucaaggg

SEQ ID NO: 35300 - RNA, 23 nt, Artificial Sequence
  Chemically synthesized
aggcagcucagagaggcaguugu

SEQ ID NO: 35301 - RNA, 23 nt, Artificial Sequence
  Chemically synthesized
ggcagcucagagaggcaguugug

SEQ ID NO: 35302 - RNA, 23 nt, Artificial Sequence
  Chemically synthesized
gcagcucagagaggcaguuguga

SEQ ID NO: 35303 - RNA, 23 nt, Artificial Sequence
  Chemically synthesized
cagcucagagaggcaguugugag

SEQ ID NO: 35304 - RNA, 23 nt, Artificial Sequence
  Chemically synthesized
agcucagagaggcaguugugaga

SEQ ID NO: 35305 - RNA, 23 nt, Artificial Sequence
  Chemically synthesized
ucccacacaguucuugguggugu

SEQ ID NO: 35306 - RNA, 23 nt, Artificial Sequence
  Chemically synthesized
cccacacaguucuugguggugua

SEQ ID NO: 35307 - RNA, 23 nt, Artificial Sequence
  Chemically synthesized
ccacacaguucuuggugguguac

SEQ ID NO: 35308 - RNA, 23 nt, Artificial Sequence
  Chemically synthesized
cacacaguucuuggugguguacc

SEQ ID NO: 35309 - RNA, 23 nt, Artificial Sequence
  Chemically synthesized
ugagugcucagacgcaagaauuc

SEQ ID NO: 35310 - RNA, 23 nt, Artificial Sequence
  Chemically synthesized
gagugcucagacgcaagaauucc

SEQ ID NO: 35311 - RNA, 23 nt, Artificial Sequence
  Chemically synthesized
cacaggaaagcuguccaaaucug

SEQ ID NO: 35312 - RNA, 23 nt, Artificial Sequence
  Chemically synthesized
caugugacggaucugcucaucca

SEQ ID NO: 35313 - RNA, 23 nt, Artificial Sequence
  Chemically synthesized
agucugggcauuucuggaaugag

SEQ ID NO: 35314 - RNA, 23 nt, Artificial Sequence
  Chemically synthesized
agagaggcaguugugagacagca

SEQ ID NO: 35315 - RNA, 23 nt, Artificial Sequence
  Chemically synthesized
cagucugggcauuucuggaauga

SEQ ID NO: 35316 - RNA, 23 nt, Artificial Sequence
  Chemically synthesized
gucugggcauuucuggaaugagg

SEQ ID NO: 35317 - RNA, 23 nt, Artificial Sequence
  Chemically synthesized
uaccaggaauuacuauguucggg

SEQ ID NO: 35318 - RNA, 23 nt, Artificial Sequence
  Chemically synthesized
uuaccaggaauuacuauguucgg

SEQ ID NO: 35319 - RNA, 23 nt, Artificial Sequence
  Chemically synthesized
uuuaccaggaauuacuauguucg

SEQ ID NO: 35320 - RNA, 23 nt, Artificial Sequence
  Chemically synthesized
cuuuaccaggaauuacuauguuc

SEQ ID NO: 35321 - RNA, 23 nt, Artificial Sequence
  Chemically synthesized
ccuuuaccaggaauuacuauguu

SEQ ID NO: 35322 - RNA, 23 nt, Artificial Sequence
  Chemically synthesized
ccaggaauuacuauguucgggcc

SEQ ID NO: 35323 - RNA, 23 nt, Artificial Sequence
  Chemically synthesized
accaggaauuacuauguucgggc

SEQ ID NO: 35324 - RNA, 23 nt, Artificial Sequence
  Chemically synthesized
ggaauuacuauguucgggccguc

SEQ ID NO: 35325 - RNA, 23 nt, Artificial Sequence
  Chemically synthesized
aggaauuacuauguucgggccgu

SEQ ID NO: 35326 - RNA, 23 nt, Artificial Sequence
  Chemically synthesized
caggaauuacuauguucgggccg

SEQ ID NO: 35327 - RNA, 23 nt, Artificial Sequence
  Chemically synthesized
gggcccuuuaccaggaauuacua

SEQ ID NO: 35328 - RNA, 23 nt, Artificial Sequence
  Chemically synthesized
cgggcccuuuaccaggaauuacu

SEQ ID NO: 35329 - RNA, 23 nt, Artificial Sequence
  Chemically synthesized
ucgggcccuuuaccaggaauuac

SEQ ID NO: 35330 - RNA, 23 nt, Artificial Sequence
  Chemically synthesized
uucgggcccuuuaccaggaauua

SEQ ID NO: 35331 - RNA, 23 nt, Artificial Sequence
  Chemically synthesized
guucgggcccuuuaccaggaauu

SEQ ID NO: 35332 - RNA, 23 nt, Artificial Sequence
  Chemically synthesized
agaaguacaugaccgccguggug

SEQ ID NO: 35333 - RNA, 23 nt, Artificial Sequence
  Chemically synthesized
cagaaguacaugaccgccguggu

SEQ ID NO: 35334 - RNA, 23 nt, Artificial Sequence
  Chemically synthesized
acagaaguacaugaccgccgugg

SEQ ID NO: 35335 - RNA, 23 nt, Artificial Sequence
  Chemically synthesized
gacagaaguacaugaccgccgug

SEQ ID NO: 35336 - RNA, 23 nt, Artificial Sequence
  Chemically synthesized
ggacagaaguacaugaccgccgu

SEQ ID NO: 35337 - RNA, 23 nt, Artificial Sequence
  Chemically synthesized
ggcccuuuaccaggaauuacuau

SEQ ID NO: 35338 - RNA, 23 nt, Artificial Sequence
  Chemically synthesized
cccuuuaccaggaauuacuaugu

SEQ ID NO: 35339 - RNA, 23 nt, Artificial Sequence
  Chemically synthesized
gcccuuuaccaggaauuacuaug

SEQ ID NO: 35340 - RNA, 23 nt, Artificial Sequence
  Chemically synthesized
gcuucacccagugguacuuuggu

SEQ ID NO: 35341 - RNA, 23 nt, Artificial Sequence
  Chemically synthesized
cgcuucacccagugguacuuugg

SEQ ID NO: 35342 - RNA, 23 nt, Artificial Sequence
  Chemically synthesized
gcgcuucacccagugguacuuug

SEQ ID NO: 35343 - RNA, 23 nt, Artificial Sequence
  Chemically synthesized
ggcgcuucacccagugguacuuu

SEQ ID NO: 35344 - RNA, 23 nt, Artificial Sequence
  Chemically synthesized
gggcgcuucacccagugguacuu

SEQ ID NO: 35345 - RNA, 23 nt, Artificial Sequence
  Chemically synthesized
gugguacuuuggugccuacucca

SEQ ID NO: 35346 - RNA, 23 nt, Artificial Sequence
  Chemically synthesized
agugguacuuuggugccuacucc

SEQ ID NO: 35347 - RNA, 23 nt, Artificial Sequence
  Chemically synthesized
cagugguacuuuggugccuacuc

SEQ ID NO: 35348 - RNA, 23 nt, Artificial Sequence
  Chemically synthesized
ccagugguacuuuggugccuacu

SEQ ID NO: 35349 - RNA, 23 nt, Artificial Sequence
  Chemically synthesized
cccagugguacuuuggugccuac

SEQ ID NO: 35350 - RNA, 23 nt, Artificial Sequence
  Chemically synthesized
acccagugguacuuuggugccua

SEQ ID NO: 35351 - RNA, 23 nt, Artificial Sequence
  Chemically synthesized
gggacagaaguacaugaccgccg

SEQ ID NO: 35352 - RNA, 23 nt, Artificial Sequence
  Chemically synthesized
ggggacagaaguacaugaccgcc

SEQ ID NO: 35353 - RNA, 23 nt, Artificial Sequence
  Chemically synthesized
uggggacagaaguacaugaccgc

SEQ ID NO: 35354 - RNA, 23 nt, Artificial Sequence
  Chemically synthesized
cuggggacagaaguacaugaccg

SEQ ID NO: 35355 - RNA, 23 nt, Artificial Sequence
  Chemically synthesized
cacccagugguacuuuggugccu

SEQ ID NO: 35356 - RNA, 23 nt, Artificial Sequence
  Chemically synthesized
ucacccagugguacuuuggugcc

SEQ ID NO: 35357 - RNA, 23 nt, Artificial Sequence
  Chemically synthesized
uucacccagugguacuuuggugc

SEQ ID NO: 35358 - RNA, 23 nt, Artificial Sequence
  Chemically synthesized
cuucacccagugguacuuuggug

SEQ ID NO: 35359 - RNA, 23 nt, Artificial Sequence
  Chemically synthesized
agaucggaggcaccaucaagcag

SEQ ID NO: 35360 - RNA, 23 nt, Artificial Sequence
  Chemically synthesized
cagaucggaggcaccaucaagca

SEQ ID NO: 35361 - RNA, 23 nt, Artificial Sequence
  Chemically synthesized
gcagaucggaggcaccaucaagc

SEQ ID NO: 35362 - RNA, 23 nt, Artificial Sequence
  Chemically synthesized
cgcagaucggaggcaccaucaag

SEQ ID NO: 35363 - RNA, 23 nt, Artificial Sequence
  Chemically synthesized
ccgcagaucggaggcaccaucaa

SEQ ID NO: 35364 - RNA, 23 nt, Artificial Sequence
  Chemically synthesized
ugcacccaccugcaauaaaugca

SEQ ID NO: 35365 - RNA, 23 nt, Artificial Sequence
  Chemically synthesized
gugcacccaccugcaauaaaugc

SEQ ID NO: 35366 - RNA, 23 nt, Artificial Sequence
  Chemically synthesized
ggugcacccaccugcaauaaaug

SEQ ID NO: 35367 - RNA, 23 nt, Artificial Sequence
  Chemically synthesized
aggugcacccaccugcaauaaau

SEQ ID NO: 35368 - RNA, 23 nt, Artificial Sequence
  Chemically synthesized
caggugcacccaccugcaauaaa

SEQ ID NO: 35369 - RNA, 23 nt, Artificial Sequence
  Chemically synthesized
ccaggugcacccaccugcaauaa

SEQ ID NO: 35370 - RNA, 23 nt, Artificial Sequence
  Chemically synthesized
uggggacagaaguacaugaccgc

SEQ ID NO: 35371 - RNA, 23 nt, Artificial Sequence
  Chemically synthesized
cuggggacagaaguacaugaccg

SEQ ID NO: 35372 - RNA, 23 nt, Artificial Sequence
  Chemically synthesized
gcuggggacagaaguacaugacc

SEQ ID NO: 35373 - RNA, 23 nt, Artificial Sequence
  Chemically synthesized
cgcuggggacagaaguacaugac

SEQ ID NO: 35374 - RNA, 23 nt, Artificial Sequence
  Chemically synthesized
gcgcuggggacagaaguacauga

SEQ ID NO: 35375 - RNA, 23 nt, Artificial Sequence
  Chemically synthesized
guguuugugugccugcuggagua

SEQ ID NO: 35376 - RNA, 23 nt, Artificial Sequence
  Chemically synthesized
uguucgggcccuuuaccaggaau

SEQ ID NO: 35377 - RNA, 23 nt, Artificial Sequence
  Chemically synthesized
gguacuuuggugccuacuccauu

SEQ ID NO: 35378 - RNA, 23 nt, Artificial Sequence
  Chemically synthesized
ugguacuuuggugccuacuccau

SEQ ID NO: 35379 - RNA, 23 nt, Artificial Sequence
  Chemically synthesized
cccgaacauaguaauuccuggua

SEQ ID NO: 35380 - RNA, 23 nt, Artificial Sequence
  Chemically synthesized
ccgaacauaguaauuccugguaa

SEQ ID NO: 35381 - RNA, 23 nt, Artificial Sequence
  Chemically synthesized
cgaacauaguaauuccugguaaa

SEQ ID NO: 35382 - RNA, 23 nt, Artificial Sequence
  Chemically synthesized
gaacauaguaauuccugguaaag

SEQ ID NO: 35383 - RNA, 23 nt, Artificial Sequence
  Chemically synthesized
aacauaguaauuccugguaaagg

SEQ ID NO: 35384 - RNA, 23 nt, Artificial Sequence
  Chemically synthesized
ggcccgaacauaguaauuccugg

SEQ ID NO: 35385 - RNA, 23 nt, Artificial Sequence
  Chemically synthesized
gcccgaacauaguaauuccuggu

SEQ ID NO: 35386 - RNA, 23 nt, Artificial Sequence
  Chemically synthesized
gacggcccgaacauaguaauucc

SEQ ID NO: 35387 - RNA, 23 nt, Artificial Sequence
  Chemically synthesized
acggcccgaacauaguaauuccu

SEQ ID NO: 35388 - RNA, 23 nt, Artificial Sequence
  Chemically synthesized
cggcccgaacauaguaauuccug

SEQ ID NO: 35389 - RNA, 23 nt, Artificial Sequence
  Chemically synthesized
uaguaauuccugguaaagggccc

SEQ ID NO: 35390 - RNA, 23 nt, Artificial Sequence
  Chemically synthesized
aguaauuccugguaaagggcccg

SEQ ID NO: 35391 - RNA, 23 nt, Artificial Sequence
  Chemically synthesized
guaauuccugguaaagggcccga

SEQ ID NO: 35392 - RNA, 23 nt, Artificial Sequence
  Chemically synthesized
uaauuccugguaaagggcccgaa

SEQ ID NO: 35393 - RNA, 23 nt, Artificial Sequence
  Chemically synthesized
aauuccugguaaagggcccgaac

SEQ ID NO: 35394 - RNA, 23 nt, Artificial Sequence
  Chemically synthesized
caccacggcggucauguacuucu

SEQ ID NO: 35395 - RNA, 23 nt, Artificial Sequence
  Chemically synthesized
accacggcggucauguacuucug

SEQ ID NO: 35396 - RNA, 23 nt, Artificial Sequence
  Chemically synthesized
ccacggcggucauguacuucugu

SEQ ID NO: 35397 - RNA, 23 nt, Artificial Sequence
  Chemically synthesized
cacggcggucauguacuucuguc

SEQ ID NO: 35398 - RNA, 23 nt, Artificial Sequence
  Chemically synthesized
acggcggucauguacuucugucc

SEQ ID NO: 35399 - RNA, 23 nt, Artificial Sequence
  Chemically synthesized
auaguaauuccugguaaagggcc

SEQ ID NO: 35400 - RNA, 23 nt, Artificial Sequence
  Chemically synthesized
acauaguaauuccugguaaaggg

SEQ ID NO: 35401 - RNA, 23 nt, Artificial Sequence
  Chemically synthesized
cauaguaauuccugguaaagggc

SEQ ID NO: 35402 - RNA, 23 nt, Artificial Sequence
  Chemically synthesized
accaaaguaccacugggugaagc

SEQ ID NO: 35403 - RNA, 23 nt, Artificial Sequence
  Chemically synthesized
ccaaaguaccacugggugaagcg

SEQ ID NO: 35404 - RNA, 23 nt, Artificial Sequence
  Chemically synthesized
caaaguaccacugggugaagcgc

SEQ ID NO: 35405 - RNA, 23 nt, Artificial Sequence
  Chemically synthesized
aaaguaccacugggugaagcgcc

SEQ ID NO: 35406 - RNA, 23 nt, Artificial Sequence
  Chemically synthesized
aaguaccacugggugaagcgccc

SEQ ID NO: 35407 - RNA, 23 nt, Artificial Sequence
  Chemically synthesized
uggaguaggcaccaaaguaccac

SEQ ID NO: 35408 - RNA, 23 nt, Artificial Sequence
  Chemically synthesized
ggaguaggcaccaaaguaccacu

SEQ ID NO: 35409 - RNA, 23 nt, Artificial Sequence
  Chemically synthesized
gaguaggcaccaaaguaccacug

SEQ ID NO: 35410 - RNA, 23 nt, Artificial Sequence
  Chemically synthesized
aguaggcaccaaaguaccacugg

SEQ ID NO: 35411 - RNA, 23 nt, Artificial Sequence
  Chemically synthesized
guaggcaccaaaguaccacuggg

SEQ ID NO: 35412 - RNA, 23 nt, Artificial Sequence
  Chemically synthesized
uaggcaccaaaguaccacugggu

SEQ ID NO: 35413 - RNA, 23 nt, Artificial Sequence
  Chemically synthesized
cggcggucauguacuucuguccc

SEQ ID NO: 35414 - RNA, 23 nt, Artificial Sequence
  Chemically synthesized
ggcggucauguacuucugucccc

SEQ ID NO: 35415 - RNA, 23 nt, Artificial Sequence
  Chemically synthesized
gcggucauguacuucugucccca

SEQ ID NO: 35416 - RNA, 23 nt, Artificial Sequence
  Chemically synthesized
cggucauguacuucuguccccag

SEQ ID NO: 35417 - RNA, 23 nt, Artificial Sequence
  Chemically synthesized
aggcaccaaaguaccacugggug

SEQ ID NO: 35418 - RNA, 23 nt, Artificial Sequence
  Chemically synthesized
ggcaccaaaguaccacuggguga

SEQ ID NO: 35419 - RNA, 23 nt, Artificial Sequence
  Chemically synthesized
gcaccaaaguaccacugggugaa

SEQ ID NO: 35420 - RNA, 23 nt, Artificial Sequence
  Chemically synthesized
caccaaaguaccacugggugaag

SEQ ID NO: 35421 - RNA, 23 nt, Artificial Sequence
  Chemically synthesized
cugcuugauggugccuccgaucu

SEQ ID NO: 35422 - RNA, 23 nt, Artificial Sequence
  Chemically synthesized
ugcuugauggugccuccgaucug

SEQ ID NO: 35423 - RNA, 23 nt, Artificial Sequence
  Chemically synthesized
gcuugauggugccuccgaucugc

SEQ ID NO: 35424 - RNA, 23 nt, Artificial Sequence
  Chemically synthesized
cuugauggugccuccgaucugcg

SEQ ID NO: 35425 - RNA, 23 nt, Artificial Sequence
  Chemically synthesized
uugauggugccuccgaucugcgg

SEQ ID NO: 35426 - RNA, 23 nt, Artificial Sequence
  Chemically synthesized
ugcauuuauugcaggugggugca

SEQ ID NO: 35427 - RNA, 23 nt, Artificial Sequence
  Chemically synthesized
gcauuuauugcaggugggugcac

SEQ ID NO: 35428 - RNA, 23 nt, Artificial Sequence
  Chemically synthesized
cauuuauugcaggugggugcacc

SEQ ID NO: 35429 - RNA, 23 nt, Artificial Sequence
  Chemically synthesized
auuuauugcaggugggugcaccu

SEQ ID NO: 35430 - RNA, 23 nt, Artificial Sequence
  Chemically synthesized
uuuauugcaggugggugcaccug

SEQ ID NO: 35431 - RNA, 23 nt, Artificial Sequence
  Chemically synthesized
uuauugcaggugggugcaccugg

SEQ ID NO: 35432 - RNA, 23 nt, Artificial Sequence
  Chemically synthesized
gcggucauguacuucugucccca

SEQ ID NO: 35433 - RNA, 23 nt, Artificial Sequence
  Chemically synthesized
cggucauguacuucuguccccag

SEQ ID NO: 35434 - RNA, 23 nt, Artificial Sequence
  Chemically synthesized
ggucauguacuucuguccccagc

SEQ ID NO: 35435 - RNA, 23 nt, Artificial Sequence
  Chemically synthesized
gucauguacuucuguccccagcg

SEQ ID NO: 35436 - RNA, 23 nt, Artificial Sequence
  Chemically synthesized
ucauguacuucuguccccagcgc

SEQ ID NO: 35437 - RNA, 23 nt, Artificial Sequence
  Chemically synthesized
uacuccagcaggcacacaaacac

SEQ ID NO: 35438 - RNA, 23 nt, Artificial Sequence
  Chemically synthesized
auuccugguaaagggcccgaaca

SEQ ID NO: 35439 - RNA, 23 nt, Artificial Sequence
  Chemically synthesized
aauggaguaggcaccaaaguacc

SEQ ID NO: 35440 - RNA, 23 nt, Artificial Sequence
  Chemically synthesized
auggaguaggcaccaaaguacca

SEQ ID NO: 35441 - RNA, 23 nt, Artificial Sequence
  Chemically synthesized
ggcgacgagaaagaaauaagauu

SEQ ID NO: 35442 - RNA, 23 nt, Artificial Sequence
  Chemically synthesized
aggcgacgagaaagaaauaagau

SEQ ID NO: 35443 - RNA, 23 nt, Artificial Sequence
  Chemically synthesized
gaggcgacgagaaagaaauaaga

SEQ ID NO: 35444 - RNA, 23 nt, Artificial Sequence
  Chemically synthesized
agaggcgacgagaaagaaauaag

SEQ ID NO: 35445 - RNA, 23 nt, Artificial Sequence
  Chemically synthesized
aagaggcgacgagaaagaaauaa

SEQ ID NO: 35446 - RNA, 23 nt, Artificial Sequence
  Chemically synthesized
ugaagaagaugaaaggaaaaaga

SEQ ID NO: 35447 - RNA, 23 nt, Artificial Sequence
  Chemically synthesized
cugaagaagaugaaaggaaaaag

SEQ ID NO: 35448 - RNA, 23 nt, Artificial Sequence
  Chemically synthesized
ccugaagaagaugaaaggaaaaa

SEQ ID NO: 35449 - RNA, 23 nt, Artificial Sequence
  Chemically synthesized
cccugaagaagaugaaaggaaaa

SEQ ID NO: 35450 - RNA, 23 nt, Artificial Sequence
  Chemically synthesized
ccccugaagaagaugaaaggaaa

SEQ ID NO: 35451 - RNA, 23 nt, Artificial Sequence
  Chemically synthesized
ccucauuuuauacccaaaacccu

SEQ ID NO: 35452 - RNA, 23 nt, Artificial Sequence
  Chemically synthesized
uccucauuuuauacccaaaaccc

SEQ ID NO: 35453 - RNA, 23 nt, Artificial Sequence
  Chemically synthesized
auccucauuuuauacccaaaacc

SEQ ID NO: 35454 - RNA, 23 nt, Artificial Sequence
  Chemically synthesized
aauccucauuuuauacccaaaac

SEQ ID NO: 35455 - RNA, 23 nt, Artificial Sequence
  Chemically synthesized
gaauccucauuuuauacccaaaa

SEQ ID NO: 35456 - RNA, 23 nt, Artificial Sequence
  Chemically synthesized
cgacgagaaagaaauaagauugc

SEQ ID NO: 35457 - RNA, 23 nt, Artificial Sequence
  Chemically synthesized
gcgacgagaaagaaauaagauug

SEQ ID NO: 35458 - RNA, 23 nt, Artificial Sequence
  Chemically synthesized
cgagaaagaaauaagauugcagc

SEQ ID NO: 35459 - RNA, 23 nt, Artificial Sequence
  Chemically synthesized
acgagaaagaaauaagauugcag

SEQ ID NO: 35460 - RNA, 23 nt, Artificial Sequence
  Chemically synthesized
gacgagaaagaaauaagauugca

SEQ ID NO: 35461 - RNA, 23 nt, Artificial Sequence
  Chemically synthesized
gaagaagaugaaaggaaaaagag

SEQ ID NO: 35462 - RNA, 23 nt, Artificial Sequence
  Chemically synthesized
gccccugaagaagaugaaaggaa

SEQ ID NO: 35463 - RNA, 23 nt, Artificial Sequence
  Chemically synthesized
ugaauccucauuuuauacccaaa

SEQ ID NO: 35464 - RNA, 23 nt, Artificial Sequence
  Chemically synthesized
gaagaugaaaggaaaaagaggcg

SEQ ID NO: 35465 - RNA, 23 nt, Artificial Sequence
  Chemically synthesized
agaagaugaaaggaaaaagaggc

SEQ ID NO: 35466 - RNA, 23 nt, Artificial Sequence
  Chemically synthesized
aagaagaugaaaggaaaaagagg

SEQ ID NO: 35467 - RNA, 23 nt, Artificial Sequence
  Chemically synthesized
ccaaaacccugaagccauuggag

SEQ ID NO: 35468 - RNA, 23 nt, Artificial Sequence
  Chemically synthesized
cccaaaacccugaagccauugga

SEQ ID NO: 35469 - RNA, 23 nt, Artificial Sequence
  Chemically synthesized
acccaaaacccugaagccauugg

SEQ ID NO: 35470 - RNA, 23 nt, Artificial Sequence
  Chemically synthesized
uacccaaaacccugaagccauug

SEQ ID NO: 35471 - RNA, 23 nt, Artificial Sequence
  Chemically synthesized
auacccaaaacccugaagccauu

SEQ ID NO: 35472 - RNA, 23 nt, Artificial Sequence
  Chemically synthesized
cucauugaauccucauuuuauac

SEQ ID NO: 35473 - RNA, 23 nt, Artificial Sequence
  Chemically synthesized
ccucauugaauccucauuuuaua

SEQ ID NO: 35474 - RNA, 23 nt, Artificial Sequence
  Chemically synthesized
uccucauugaauccucauuuuau

SEQ ID NO: 35475 - RNA, 23 nt, Artificial Sequence
  Chemically synthesized
guccucauugaauccucauuuua

SEQ ID NO: 35476 - RNA, 23 nt, Artificial Sequence
  Chemically synthesized
aguccucauugaauccucauuuu

SEQ ID NO: 35477 - RNA, 23 nt, Artificial Sequence
  Chemically synthesized
gaguccucauugaauccucauuu

SEQ ID NO: 35478 - RNA, 23 nt, Artificial Sequence
  Chemically synthesized
gcauuguuuuugucauguagcug

SEQ ID NO: 35479 - RNA, 23 nt, Artificial Sequence
  Chemically synthesized
agcauuguuuuugucauguagcu

SEQ ID NO: 35480 - RNA, 23 nt, Artificial Sequence
  Chemically synthesized
uagcauuguuuuugucauguagc

SEQ ID NO: 35481 - RNA, 23 nt, Artificial Sequence
  Chemically synthesized
auagcauuguuuuugucauguag

SEQ ID NO: 35482 - RNA, 23 nt, Artificial Sequence
  Chemically synthesized
aauagcauuguuuuugucaugua

SEQ ID NO: 35483 - RNA, 23 nt, Artificial Sequence
  Chemically synthesized
uugaauccucauuuuauacccaa

SEQ ID NO: 35484 - RNA, 23 nt, Artificial Sequence
  Chemically synthesized
ggaaagugugaaugcugaacuga

SEQ ID NO: 35485 - RNA, 23 nt, Artificial Sequence
  Chemically synthesized
uggaaagugugaaugcugaacug

SEQ ID NO: 35486 - RNA, 23 nt, Artificial Sequence
  Chemically synthesized
cuggaaagugugaaugcugaacu

SEQ ID NO: 35487 - RNA, 23 nt, Artificial Sequence
  Chemically synthesized
gcuggaaagugugaaugcugaac

SEQ ID NO: 35488 - RNA, 23 nt, Artificial Sequence
  Chemically synthesized
agcuggaaagugugaaugcugaa

SEQ ID NO: 35489 - RNA, 23 nt, Artificial Sequence
  Chemically synthesized
gaaacaagaagaaggagaagacg

SEQ ID NO: 35490 - RNA, 23 nt, Artificial Sequence
  Chemically synthesized
cgaaacaagaagaaggagaagac

SEQ ID NO: 35491 - RNA, 23 nt, Artificial Sequence
  Chemically synthesized
ccgaaacaagaagaaggagaaga

SEQ ID NO: 35492 - RNA, 23 nt, Artificial Sequence
  Chemically synthesized
gccgaaacaagaagaaggagaag

SEQ ID NO: 35493 - RNA, 23 nt, Artificial Sequence
  Chemically synthesized
ugccgaaacaagaagaaggagaa

SEQ ID NO: 35494 - RNA, 23 nt, Artificial Sequence
  Chemically synthesized
gugccgaaacaagaagaaggaga

SEQ ID NO: 35495 - RNA, 23 nt, Artificial Sequence
  Chemically synthesized
agugccgaaacaagaagaaggag

SEQ ID NO: 35496 - RNA, 23 nt, Artificial Sequence
  Chemically synthesized
aagugccgaaacaagaagaagga

SEQ ID NO: 35497 - RNA, 23 nt, Artificial Sequence
  Chemically synthesized
aaagaggcgacgagaaagaaaua

SEQ ID NO: 35498 - RNA, 23 nt, Artificial Sequence
  Chemically synthesized
aaaagaggcgacgagaaagaaau

SEQ ID NO: 35499 - RNA, 23 nt, Artificial Sequence
  Chemically synthesized
ggaugucaauagcauuguuuuug

SEQ ID NO: 35500 - RNA, 23 nt, Artificial Sequence
  Chemically synthesized
uggaugucaauagcauuguuuuu

SEQ ID NO: 35501 - RNA, 23 nt, Artificial Sequence
  Chemically synthesized
uuggaugucaauagcauuguuuu

SEQ ID NO: 35502 - RNA, 23 nt, Artificial Sequence
  Chemically synthesized
auuggaugucaauagcauuguuu

SEQ ID NO: 35503 - RNA, 23 nt, Artificial Sequence
  Chemically synthesized
uauuggaugucaauagcauuguu

SEQ ID NO: 35504 - RNA, 23 nt, Artificial Sequence
  Chemically synthesized
gcaagaggaggacagaauucucc

SEQ ID NO: 35505 - RNA, 23 nt, Artificial Sequence
  Chemically synthesized
agcaagaggaggacagaauucuc

SEQ ID NO: 35506 - RNA, 23 nt, Artificial Sequence
  Chemically synthesized
cagcaagaggaggacagaauucu

SEQ ID NO: 35507 - RNA, 23 nt, Artificial Sequence
  Chemically synthesized
ucagcaagaggaggacagaauuc

SEQ ID NO: 35508 - RNA, 23 nt, Artificial Sequence
  Chemically synthesized
gucagcaagaggaggacagaauu

SEQ ID NO: 35509 - RNA, 23 nt, Artificial Sequence
  Chemically synthesized
gaaauugugugugcaagaaaacu

SEQ ID NO: 35510 - RNA, 23 nt, Artificial Sequence
  Chemically synthesized
agaaauugugugugcaagaaaac

SEQ ID NO: 35511 - RNA, 23 nt, Artificial Sequence
  Chemically synthesized
cagaaauugugugugcaagaaaa

SEQ ID NO: 35512 - RNA, 23 nt, Artificial Sequence
  Chemically synthesized
ccagaaauugugugugcaagaaa

SEQ ID NO: 35513 - RNA, 23 nt, Artificial Sequence
  Chemically synthesized
uccagaaauugugugugcaagaa

SEQ ID NO: 35514 - RNA, 23 nt, Artificial Sequence
  Chemically synthesized
guccagaaauugugugugcaaga

SEQ ID NO: 35515 - RNA, 23 nt, Artificial Sequence
  Chemically synthesized
uguccagaaauugugugugcaag

SEQ ID NO: 35516 - RNA, 23 nt, Artificial Sequence
  Chemically synthesized
auguccagaaauugugugugcaa

SEQ ID NO: 35517 - RNA, 23 nt, Artificial Sequence
  Chemically synthesized
ggcuaccauugucacucguaggg

SEQ ID NO: 35518 - RNA, 23 nt, Artificial Sequence
  Chemically synthesized
uggcuaccauugucacucguagg

SEQ ID NO: 35519 - RNA, 23 nt, Artificial Sequence
  Chemically synthesized
guggcuaccauugucacucguag

SEQ ID NO: 35520 - RNA, 23 nt, Artificial Sequence
  Chemically synthesized
cguggcuaccauugucacucgua

SEQ ID NO: 35521 - RNA, 23 nt, Artificial Sequence
  Chemically synthesized
ccguggcuaccauugucacucgu

SEQ ID NO: 35522 - RNA, 23 nt, Artificial Sequence
  Chemically synthesized
ucaucuggauucuacaaaaaacc

SEQ ID NO: 35523 - RNA, 23 nt, Artificial Sequence
  Chemically synthesized
uucaucuggauucuacaaaaaac

SEQ ID NO: 35524 - RNA, 23 nt, Artificial Sequence
  Chemically synthesized
uuucaucuggauucuacaaaaaa

SEQ ID NO: 35525 - RNA, 23 nt, Artificial Sequence
  Chemically synthesized
cuuucaucuggauucuacaaaaa

SEQ ID NO: 35526 - RNA, 23 nt, Artificial Sequence
  Chemically synthesized
ccuuucaucuggauucuacaaaa

SEQ ID NO: 35527 - RNA, 23 nt, Artificial Sequence
  Chemically synthesized
cacuggccauucuuauguuccag

SEQ ID NO: 35528 - RNA, 23 nt, Artificial Sequence
  Chemically synthesized
acacuggccauucuuauguucca

SEQ ID NO: 35529 - RNA, 23 nt, Artificial Sequence
  Chemically synthesized
cacacuggccauucuuauguucc

SEQ ID NO: 35530 - RNA, 23 nt, Artificial Sequence
  Chemically synthesized
acacacuggccauucuuauguuc

SEQ ID NO: 35531 - RNA, 23 nt, Artificial Sequence
  Chemically synthesized
aacacacuggccauucuuauguu

SEQ ID NO: 35532 - RNA, 23 nt, Artificial Sequence
  Chemically synthesized
uauacccaaaacccugaagccau

SEQ ID NO: 35533 - RNA, 23 nt, Artificial Sequence
  Chemically synthesized
cucagaguguuuaauuguacuca

SEQ ID NO: 35534 - RNA, 23 nt, Artificial Sequence
  Chemically synthesized
ucucagaguguuuaauuguacuc

SEQ ID NO: 35535 - RNA, 23 nt, Artificial Sequence
  Chemically synthesized
uucucagaguguuuaauuguacu

SEQ ID NO: 35536 - RNA, 23 nt, Artificial Sequence
  Chemically synthesized
auucucagaguguuuaauuguac

SEQ ID NO: 35537 - RNA, 23 nt, Artificial Sequence
  Chemically synthesized
aauucucagaguguuuaauugua

SEQ ID NO: 35538 - RNA, 23 nt, Artificial Sequence
  Chemically synthesized
gccaaagaauauuccauuuuccu

SEQ ID NO: 35539 - RNA, 23 nt, Artificial Sequence
  Chemically synthesized
agccaaagaauauuccauuuucc

SEQ ID NO: 35540 - RNA, 23 nt, Artificial Sequence
  Chemically synthesized
gagccaaagaauauuccauuuuc

SEQ ID NO: 35541 - RNA, 23 nt, Artificial Sequence
  Chemically synthesized
agagccaaagaauauuccauuuu

SEQ ID NO: 35542 - RNA, 23 nt, Artificial Sequence
  Chemically synthesized
aagagccaaagaauauuccauuu

SEQ ID NO: 35543 - RNA, 23 nt, Artificial Sequence
  Chemically synthesized
ggaguccucauugaauccucauu

SEQ ID NO: 35544 - RNA, 23 nt, Artificial Sequence
  Chemically synthesized
gaaaaagaggcgacgagaaagaa

SEQ ID NO: 35545 - RNA, 23 nt, Artificial Sequence
  Chemically synthesized
ggaaaaagaggcgacgagaaaga

SEQ ID NO: 35546 - RNA, 23 nt, Artificial Sequence
  Chemically synthesized
aggaaaaagaggcgacgagaaag

SEQ ID NO: 35547 - RNA, 23 nt, Artificial Sequence
  Chemically synthesized
aaggaaaaagaggcgacgagaaa

SEQ ID NO: 35548 - RNA, 23 nt, Artificial Sequence
  Chemically synthesized
aaaggaaaaagaggcgacgagaa

SEQ ID NO: 35549 - RNA, 23 nt, Artificial Sequence
  Chemically synthesized
gaaaggaaaaagaggcgacgaga

SEQ ID NO: 35550 - RNA, 23 nt, Artificial Sequence
  Chemically synthesized
ugaaaggaaaaagaggcgacgag

SEQ ID NO: 35551 - RNA, 23 nt, Artificial Sequence
  Chemically synthesized
acagaauucucccagcguuaaca

SEQ ID NO: 35552 - RNA, 23 nt, Artificial Sequence
  Chemically synthesized
gacagaauucucccagcguuaac

SEQ ID NO: 35553 - RNA, 23 nt, Artificial Sequence
  Chemically synthesized
ggacagaauucucccagcguuaa

SEQ ID NO: 35554 - RNA, 23 nt, Artificial Sequence
  Chemically synthesized
aggacagaauucucccagcguua

SEQ ID NO: 35555 - RNA, 23 nt, Artificial Sequence
  Chemically synthesized
gaggacagaauucucccagcguu

SEQ ID NO: 35556 - RNA, 23 nt, Artificial Sequence
  Chemically synthesized
ugucagcaagaggaggacagaau

SEQ ID NO: 35557 - RNA, 23 nt, Artificial Sequence
  Chemically synthesized
caagaaaacuaggcaauguacuc

SEQ ID NO: 35558 - RNA, 23 nt, Artificial Sequence
  Chemically synthesized
gcaagaaaacuaggcaauguacu

SEQ ID NO: 35559 - RNA, 23 nt, Artificial Sequence
  Chemically synthesized
ugcaagaaaacuaggcaauguac

SEQ ID NO: 35560 - RNA, 23 nt, Artificial Sequence
  Chemically synthesized
gugcaagaaaacuaggcaaugua

SEQ ID NO: 35561 - RNA, 23 nt, Artificial Sequence
  Chemically synthesized
ugugcaagaaaacuaggcaaugu

SEQ ID NO: 35562 - RNA, 23 nt, Artificial Sequence
  Chemically synthesized
ggagugagaacagcauuuaguga

SEQ ID NO: 35563 - RNA, 23 nt, Artificial Sequence
  Chemically synthesized
uggagugagaacagcauuuagug

SEQ ID NO: 35564 - RNA, 23 nt, Artificial Sequence
  Chemically synthesized
guggagugagaacagcauuuagu

SEQ ID NO: 35565 - RNA, 23 nt, Artificial Sequence
  Chemically synthesized
uguggagugagaacagcauuuag

SEQ ID NO: 35566 - RNA, 23 nt, Artificial Sequence
  Chemically synthesized
auguggagugagaacagcauuua

SEQ ID NO: 35567 - RNA, 23 nt, Artificial Sequence
  Chemically synthesized
ggccauucuuauguuccagaugg

SEQ ID NO: 35568 - RNA, 23 nt, Artificial Sequence
  Chemically synthesized
uggccauucuuauguuccagaug

SEQ ID NO: 35569 - RNA, 23 nt, Artificial Sequence
  Chemically synthesized
cuggccauucuuauguuccagau

SEQ ID NO: 35570 - RNA, 23 nt, Artificial Sequence
  Chemically synthesized
acuggccauucuuauguuccaga

SEQ ID NO: 35571 - RNA, 23 nt, Artificial Sequence
  Chemically synthesized
caacagauaaaagaaggaacauu

SEQ ID NO: 35572 - RNA, 23 nt, Artificial Sequence
  Chemically synthesized
ccaacagauaaaagaaggaacau

SEQ ID NO: 35573 - RNA, 23 nt, Artificial Sequence
  Chemically synthesized
uccaacagauaaaagaaggaaca

SEQ ID NO: 35574 - RNA, 23 nt, Artificial Sequence
  Chemically synthesized
auccaacagauaaaagaaggaac

SEQ ID NO: 35575 - RNA, 23 nt, Artificial Sequence
  Chemically synthesized
uauccaacagauaaaagaaggaa

SEQ ID NO: 35576 - RNA, 23 nt, Artificial Sequence
  Chemically synthesized
uuauccaacagauaaaagaagga

SEQ ID NO: 35577 - RNA, 23 nt, Artificial Sequence
  Chemically synthesized
gugugaaugcugaacugaaggcu

SEQ ID NO: 35578 - RNA, 23 nt, Artificial Sequence
  Chemically synthesized
agugugaaugcugaacugaaggc

SEQ ID NO: 35579 - RNA, 23 nt, Artificial Sequence
  Chemically synthesized
aagugugaaugcugaacugaagg

SEQ ID NO: 35580 - RNA, 23 nt, Artificial Sequence
  Chemically synthesized
aaagugugaaugcugaacugaag

SEQ ID NO: 35581 - RNA, 23 nt, Artificial Sequence
  Chemically synthesized
gaaagugugaaugcugaacugaa

SEQ ID NO: 35582 - RNA, 23 nt, Artificial Sequence
  Chemically synthesized
gaagcuggaaagugugaaugcug

SEQ ID NO: 35583 - RNA, 23 nt, Artificial Sequence
  Chemically synthesized
agaagcuggaaagugugaaugcu

SEQ ID NO: 35584 - RNA, 23 nt, Artificial Sequence
  Chemically synthesized
gagaagcuggaaagugugaaugc

SEQ ID NO: 35585 - RNA, 23 nt, Artificial Sequence
  Chemically synthesized
ggagaagcuggaaagugugaaug

SEQ ID NO: 35586 - RNA, 23 nt, Artificial Sequence
  Chemically synthesized
cggagaagcuggaaagugugaau

SEQ ID NO: 35587 - RNA, 23 nt, Artificial Sequence
  Chemically synthesized
aaagugccgaaacaagaagaagg

SEQ ID NO: 35588 - RNA, 23 nt, Artificial Sequence
  Chemically synthesized
caaagugccgaaacaagaagaag

SEQ ID NO: 35589 - RNA, 23 nt, Artificial Sequence
  Chemically synthesized
gcaaagugccgaaacaagaagaa

SEQ ID NO: 35590 - RNA, 23 nt, Artificial Sequence
  Chemically synthesized
gaaagaaauaagauugcagcugc

SEQ ID NO: 35591 - RNA, 23 nt, Artificial Sequence
  Chemically synthesized
agaaagaaauaagauugcagcug

SEQ ID NO: 35592 - RNA, 23 nt, Artificial Sequence
  Chemically synthesized
gagaaagaaauaagauugcagcu

SEQ ID NO: 35593 - RNA, 23 nt, Artificial Sequence
  Chemically synthesized
aaaaagaggcgacgagaaagaaa

SEQ ID NO: 35594 - RNA, 23 nt, Artificial Sequence
  Chemically synthesized
augaaaggaaaaagaggcgacga

SEQ ID NO: 35595 - RNA, 23 nt, Artificial Sequence
  Chemically synthesized
gaugaaaggaaaaagaggcgacg

SEQ ID NO: 35596 - RNA, 23 nt, Artificial Sequence
  Chemically synthesized
agaugaaaggaaaaagaggcgac

SEQ ID NO: 35597 - RNA, 23 nt, Artificial Sequence
  Chemically synthesized
ucagaguguuuaauuguacucaa

SEQ ID NO: 35598 - RNA, 23 nt, Artificial Sequence
  Chemically synthesized
aagaaaacuaggcaauguacucu

SEQ ID NO: 35599 - RNA, 23 nt, Artificial Sequence
  Chemically synthesized
gcuaccauugucacucguagggg

SEQ ID NO: 35600 - RNA, 23 nt, Artificial Sequence
  Chemically synthesized
uaacacacuggccauucuuaugu

SEQ ID NO: 35601 - RNA, 23 nt, Artificial Sequence
  Chemically synthesized
uuauacccaaaacccugaagcca

SEQ ID NO: 35602 - RNA, 23 nt, Artificial Sequence
  Chemically synthesized
uuuauacccaaaacccugaagcc

SEQ ID NO: 35603 - RNA, 23 nt, Artificial Sequence
  Chemically synthesized
uuuuauacccaaaacccugaagc

SEQ ID NO: 35604 - RNA, 23 nt, Artificial Sequence
  Chemically synthesized
auuuuauacccaaaacccugaag

SEQ ID NO: 35605 - RNA, 23 nt, Artificial Sequence
  Chemically synthesized
cauuuuauacccaaaacccugaa

SEQ ID NO: 35606 - RNA, 23 nt, Artificial Sequence
  Chemically synthesized
acagauaaaagaaggaacauugc

SEQ ID NO: 35607 - RNA, 23 nt, Artificial Sequence
  Chemically synthesized
aacagauaaaagaaggaacauug

SEQ ID NO: 35608 - RNA, 23 nt, Artificial Sequence
  Chemically synthesized
ugauauacaugcucaaccuucau

SEQ ID NO: 35609 - RNA, 23 nt, Artificial Sequence
  Chemically synthesized
uugauauacaugcucaaccuuca

SEQ ID NO: 35610 - RNA, 23 nt, Artificial Sequence
  Chemically synthesized
uuugauauacaugcucaaccuuc

SEQ ID NO: 35611 - RNA, 23 nt, Artificial Sequence
  Chemically synthesized
auuugauauacaugcucaaccuu

SEQ ID NO: 35612 - RNA, 23 nt, Artificial Sequence
  Chemically synthesized
cauuugauauacaugcucaaccu

SEQ ID NO: 35613 - RNA, 23 nt, Artificial Sequence
  Chemically synthesized
cgagaagcagcauuugauauaca

SEQ ID NO: 35614 - RNA, 23 nt, Artificial Sequence
  Chemically synthesized
acgagaagcagcauuugauauac

SEQ ID NO: 35615 - RNA, 23 nt, Artificial Sequence
  Chemically synthesized
aacgagaagcagcauuugauaua

SEQ ID NO: 35616 - RNA, 23 nt, Artificial Sequence
  Chemically synthesized
gaacgagaagcagcauuugauau

SEQ ID NO: 35617 - RNA, 23 nt, Artificial Sequence
  Chemically synthesized
agaacgagaagcagcauuugaua

SEQ ID NO: 35618 - RNA, 23 nt, Artificial Sequence
  Chemically synthesized
aagcuggaaagugugaaugcuga

SEQ ID NO: 35619 - RNA, 23 nt, Artificial Sequence
  Chemically synthesized
acaagaagaaggagaagacggag

SEQ ID NO: 35620 - RNA, 23 nt, Artificial Sequence
  Chemically synthesized
aacaagaagaaggagaagacgga

SEQ ID NO: 35621 - RNA, 23 nt, Artificial Sequence
  Chemically synthesized
aaacaagaagaaggagaagacgg

SEQ ID NO: 35622 - RNA, 23 nt, Artificial Sequence
  Chemically synthesized
gaaauucucagaguguuuaauug

SEQ ID NO: 35623 - RNA, 23 nt, Artificial Sequence
  Chemically synthesized
ugaaauucucagaguguuuaauu

SEQ ID NO: 35624 - RNA, 23 nt, Artificial Sequence
  Chemically synthesized
gugaaauucucagaguguuuaau

SEQ ID NO: 35625 - RNA, 23 nt, Artificial Sequence
  Chemically synthesized
ugugaaauucucagaguguuuaa

SEQ ID NO: 35626 - RNA, 23 nt, Artificial Sequence
  Chemically synthesized
cugugaaauucucagaguguuua

SEQ ID NO: 35627 - RNA, 23 nt, Artificial Sequence
  Chemically synthesized
gcuggcuacugucuauuaaaauu

SEQ ID NO: 35628 - RNA, 23 nt, Artificial Sequence
  Chemically synthesized
cgcuggcuacugucuauuaaaau

SEQ ID NO: 35629 - RNA, 23 nt, Artificial Sequence
  Chemically synthesized
gacgcuggcuacugucuauuaaa

SEQ ID NO: 35630 - RNA, 23 nt, Artificial Sequence
  Chemically synthesized
ggacgcuggcuacugucuauuaa

SEQ ID NO: 35631 - RNA, 23 nt, Artificial Sequence
  Chemically synthesized
guagcuguuuuaagaaaucuggc

SEQ ID NO: 35632 - RNA, 23 nt, Artificial Sequence
  Chemically synthesized
uguagcuguuuuaagaaaucugg

SEQ ID NO: 35633 - RNA, 23 nt, Artificial Sequence
  Chemically synthesized
auguagcuguuuuaagaaaucug

SEQ ID NO: 35634 - RNA, 23 nt, Artificial Sequence
  Chemically synthesized
cauguagcuguuuuaagaaaucu

SEQ ID NO: 35635 - RNA, 23 nt, Artificial Sequence
  Chemically synthesized
ucauguagcuguuuuaagaaauc

SEQ ID NO: 35636 - RNA, 23 nt, Artificial Sequence
  Chemically synthesized
guggagagauguuuggaaaccac

SEQ ID NO: 35637 - RNA, 23 nt, Artificial Sequence
  Chemically synthesized
aguggagagauguuuggaaacca

SEQ ID NO: 35638 - RNA, 23 nt, Artificial Sequence
  Chemically synthesized
caguggagagauguuuggaaacc

SEQ ID NO: 35639 - RNA, 23 nt, Artificial Sequence
  Chemically synthesized
ucaguggagagauguuuggaaac

SEQ ID NO: 35640 - RNA, 23 nt, Artificial Sequence
  Chemically synthesized
gucaguggagagauguuuggaaa

SEQ ID NO: 35641 - RNA, 23 nt, Artificial Sequence
  Chemically synthesized
ccauuuuccuuuccuugugguug

SEQ ID NO: 35642 - RNA, 23 nt, Artificial Sequence
  Chemically synthesized
uccauuuuccuuuccuugugguu

SEQ ID NO: 35643 - RNA, 23 nt, Artificial Sequence
  Chemically synthesized
uuccauuuuccuuuccuuguggu

SEQ ID NO: 35644 - RNA, 23 nt, Artificial Sequence
  Chemically synthesized
auuccauuuuccuuuccuugugg

SEQ ID NO: 35645 - RNA, 23 nt, Artificial Sequence
  Chemically synthesized
uauuccauuuuccuuuccuugug

SEQ ID NO: 35646 - RNA, 23 nt, Artificial Sequence
  Chemically synthesized
ugcaaacucaguuccaaagucac

SEQ ID NO: 35647 - RNA, 23 nt, Artificial Sequence
  Chemically synthesized
uugcaaacucaguuccaaaguca

SEQ ID NO: 35648 - RNA, 23 nt, Artificial Sequence
  Chemically synthesized
guugcaaacucaguuccaaaguc

SEQ ID NO: 35649 - RNA, 23 nt, Artificial Sequence
  Chemically synthesized
uguugcaaacucaguuccaaagu

SEQ ID NO: 35650 - RNA, 23 nt, Artificial Sequence
  Chemically synthesized
cuguugcaaacucaguuccaaag

SEQ ID NO: 35651 - RNA, 23 nt, Artificial Sequence
  Chemically synthesized
gugugcaagaaaacuaggcaaug

SEQ ID NO: 35652 - RNA, 23 nt, Artificial Sequence
  Chemically synthesized
agcauuuagugaaguugugcaac

SEQ ID NO: 35653 - RNA, 23 nt, Artificial Sequence
  Chemically synthesized
cagcauuuagugaaguugugcaa

SEQ ID NO: 35654 - RNA, 23 nt, Artificial Sequence
  Chemically synthesized
acagcauuuagugaaguugugca

SEQ ID NO: 35655 - RNA, 23 nt, Artificial Sequence
  Chemically synthesized
aacagcauuuagugaaguugugc

SEQ ID NO: 35656 - RNA, 23 nt, Artificial Sequence
  Chemically synthesized
gaacagcauuuagugaaguugug

SEQ ID NO: 35657 - RNA, 23 nt, Artificial Sequence
  Chemically synthesized
caucuggauucuacaaaaaacca

SEQ ID NO: 35658 - RNA, 23 nt, Artificial Sequence
  Chemically synthesized
gccuuucaucuggauucuacaaa

SEQ ID NO: 35659 - RNA, 23 nt, Artificial Sequence
  Chemically synthesized
cgccuuucaucuggauucuacaa

SEQ ID NO: 35660 - RNA, 23 nt, Artificial Sequence
  Chemically synthesized
ccgccuuucaucuggauucuaca

SEQ ID NO: 35661 - RNA, 23 nt, Artificial Sequence
  Chemically synthesized
cccgccuuucaucuggauucuac

SEQ ID NO: 35662 - RNA, 23 nt, Artificial Sequence
  Chemically synthesized
gcccgccuuucaucuggauucua

SEQ ID NO: 35663 - RNA, 23 nt, Artificial Sequence
  Chemically synthesized
ugcccgccuuucaucuggauucu

SEQ ID NO: 35664 - RNA, 23 nt, Artificial Sequence
  Chemically synthesized
ccuuaacacacuggccauucuua

SEQ ID NO: 35665 - RNA, 23 nt, Artificial Sequence
  Chemically synthesized
gccuuaacacacuggccauucuu

SEQ ID NO: 35666 - RNA, 23 nt, Artificial Sequence
  Chemically synthesized
ggccuuaacacacuggccauucu

SEQ ID NO: 35667 - RNA, 23 nt, Artificial Sequence
  Chemically synthesized
aggccuuaacacacuggccauuc

SEQ ID NO: 35668 - RNA, 23 nt, Artificial Sequence
  Chemically synthesized
uaggccuuaacacacuggccauu

SEQ ID NO: 35669 - RNA, 23 nt, Artificial Sequence
  Chemically synthesized
ggaacauugcagagcuaagcagu

SEQ ID NO: 35670 - RNA, 23 nt, Artificial Sequence
  Chemically synthesized
aggaacauugcagagcuaagcag

SEQ ID NO: 35671 - RNA, 23 nt, Artificial Sequence
  Chemically synthesized
aaggaacauugcagagcuaagca

SEQ ID NO: 35672 - RNA, 23 nt, Artificial Sequence
  Chemically synthesized
gaaggaacauugcagagcuaagc

SEQ ID NO: 35673 - RNA, 23 nt, Artificial Sequence
  Chemically synthesized
agaaggaacauugcagagcuaag

SEQ ID NO: 35674 - RNA, 23 nt, Artificial Sequence
  Chemically synthesized
aagaaggaacauugcagagcuaa

SEQ ID NO: 35675 - RNA, 23 nt, Artificial Sequence
  Chemically synthesized
aaagaaggaacauugcagagcua

SEQ ID NO: 35676 - RNA, 23 nt, Artificial Sequence
  Chemically synthesized
aaaagaaggaacauugcagagcu

SEQ ID NO: 35677 - RNA, 23 nt, Artificial Sequence
  Chemically synthesized
aagaacgagaagcagcauuugau

SEQ ID NO: 35678 - RNA, 23 nt, Artificial Sequence
  Chemically synthesized
ugcaaagugccgaaacaagaaga

SEQ ID NO: 35679 - RNA, 23 nt, Artificial Sequence
  Chemically synthesized
cugcaaagugccgaaacaagaag

SEQ ID NO: 35680 - RNA, 23 nt, Artificial Sequence
  Chemically synthesized
gcugcaaagugccgaaacaagaa

SEQ ID NO: 35681 - RNA, 23 nt, Artificial Sequence
  Chemically synthesized
agcugcaaagugccgaaacaaga

SEQ ID NO: 35682 - RNA, 23 nt, Artificial Sequence
  Chemically synthesized
agaaauaagauugcagcugcaaa

SEQ ID NO: 35683 - RNA, 23 nt, Artificial Sequence
  Chemically synthesized
aagaaauaagauugcagcugcaa

SEQ ID NO: 35684 - RNA, 23 nt, Artificial Sequence
  Chemically synthesized
aaagaaauaagauugcagcugca

SEQ ID NO: 35685 - RNA, 23 nt, Artificial Sequence
  Chemically synthesized
caucacaaaagccgagguagccc

SEQ ID NO: 35686 - RNA, 23 nt, Artificial Sequence
  Chemically synthesized
ccaucacaaaagccgagguagcc

SEQ ID NO: 35687 - RNA, 23 nt, Artificial Sequence
  Chemically synthesized
uccaucacaaaagccgagguagc

SEQ ID NO: 35688 - RNA, 23 nt, Artificial Sequence
  Chemically synthesized
guccaucacaaaagccgagguag

SEQ ID NO: 35689 - RNA, 23 nt, Artificial Sequence
  Chemically synthesized
uguccaucacaaaagccgaggua

SEQ ID NO: 35690 - RNA, 23 nt, Artificial Sequence
  Chemically synthesized
cagaguguuuaauuguacucaau

SEQ ID NO: 35691 - RNA, 23 nt, Artificial Sequence
  Chemically synthesized
ggcuacugucuauuaaaauucug

SEQ ID NO: 35692 - RNA, 23 nt, Artificial Sequence
  Chemically synthesized
uggcuacugucuauuaaaauucu

SEQ ID NO: 35693 - RNA, 23 nt, Artificial Sequence
  Chemically synthesized
cuggcuacugucuauuaaaauuc

SEQ ID NO: 35694 - RNA, 23 nt, Artificial Sequence
  Chemically synthesized
aggacgcuggcuacugucuauua

SEQ ID NO: 35695 - RNA, 23 nt, Artificial Sequence
  Chemically synthesized
ucaaggaagagcugagguuugcc

SEQ ID NO: 35696 - RNA, 23 nt, Artificial Sequence
  Chemically synthesized
gucaaggaagagcugagguuugc

SEQ ID NO: 35697 - RNA, 23 nt, Artificial Sequence
  Chemically synthesized
ugucaaggaagagcugagguuug

SEQ ID NO: 35698 - RNA, 23 nt, Artificial Sequence
  Chemically synthesized
uugucaaggaagagcugagguuu

SEQ ID NO: 35699 - RNA, 23 nt, Artificial Sequence
  Chemically synthesized
uuugucaaggaagagcugagguu

SEQ ID NO: 35700 - RNA, 23 nt, Artificial Sequence
  Chemically synthesized
ggaagagccaaagaauauuccau

SEQ ID NO: 35701 - RNA, 23 nt, Artificial Sequence
  Chemically synthesized
uggaagagccaaagaauauucca

SEQ ID NO: 35702 - RNA, 23 nt, Artificial Sequence
  Chemically synthesized
cuggaagagccaaagaauauucc

SEQ ID NO: 35703 - RNA, 23 nt, Artificial Sequence
  Chemically synthesized
gcuggaagagccaaagaauauuc

SEQ ID NO: 35704 - RNA, 23 nt, Artificial Sequence
  Chemically synthesized
ggcuggaagagccaaagaauauu

SEQ ID NO: 35705 - RNA, 23 nt, Artificial Sequence
  Chemically synthesized
ucuguugcaaacucaguuccaaa

SEQ ID NO: 35706 - RNA, 23 nt, Artificial Sequence
  Chemically synthesized
cucuguugcaaacucaguuccaa

SEQ ID NO: 35707 - RNA, 23 nt, Artificial Sequence
  Chemically synthesized
acgugcaguaucucaagauauuc

SEQ ID NO: 35708 - RNA, 23 nt, Artificial Sequence
  Chemically synthesized
cacgugcaguaucucaagauauu

SEQ ID NO: 35709 - RNA, 23 nt, Artificial Sequence
  Chemically synthesized
ccacgugcaguaucucaagauau

SEQ ID NO: 35710 - RNA, 23 nt, Artificial Sequence
  Chemically synthesized
accacgugcaguaucucaagaua

SEQ ID NO: 35711 - RNA, 23 nt, Artificial Sequence
  Chemically synthesized
caccacgugcaguaucucaagau

SEQ ID NO: 35712 - RNA, 23 nt, Artificial Sequence
  Chemically synthesized
ugugugugcaagaaaacuaggca

SEQ ID NO: 35713 - RNA, 23 nt, Artificial Sequence
  Chemically synthesized
uugugugugcaagaaaacuaggc

SEQ ID NO: 35714 - RNA, 23 nt, Artificial Sequence
  Chemically synthesized
auugugugugcaagaaaacuagg

SEQ ID NO: 35715 - RNA, 23 nt, Artificial Sequence
  Chemically synthesized
aauugugugugcaagaaaacuag

SEQ ID NO: 35716 - RNA, 23 nt, Artificial Sequence
  Chemically synthesized
aaauugugugugcaagaaaacua

SEQ ID NO: 35717 - RNA, 23 nt, Artificial Sequence
  Chemically synthesized
cacugguguuugaggauuuugcu

SEQ ID NO: 35718 - RNA, 23 nt, Artificial Sequence
  Chemically synthesized
ucacugguguuugaggauuuugc

SEQ ID NO: 35719 - RNA, 23 nt, Artificial Sequence
  Chemically synthesized
gucacugguguuugaggauuuug

SEQ ID NO: 35720 - RNA, 23 nt, Artificial Sequence
  Chemically synthesized
ggucacugguguuugaggauuuu

SEQ ID NO: 35721 - RNA, 23 nt, Artificial Sequence
  Chemically synthesized
gggucacugguguuugaggauuu

SEQ ID NO: 35722 - RNA, 23 nt, Artificial Sequence
  Chemically synthesized
cugcccgccuuucaucuggauuc

SEQ ID NO: 35723 - RNA, 23 nt, Artificial Sequence
  Chemically synthesized
gucuuccuguguaccucuagaau

SEQ ID NO: 35724 - RNA, 23 nt, Artificial Sequence
  Chemically synthesized
ugucuuccuguguaccucuagaa

SEQ ID NO: 35725 - RNA, 23 nt, Artificial Sequence
  Chemically synthesized
cugucuuccuguguaccucuaga

SEQ ID NO: 35726 - RNA, 23 nt, Artificial Sequence
  Chemically synthesized
gcugucuuccuguguaccucuag

SEQ ID NO: 35727 - RNA, 23 nt, Artificial Sequence
  Chemically synthesized
agcugucuuccuguguaccucua

SEQ ID NO: 35728 - RNA, 23 nt, Artificial Sequence
  Chemically synthesized
cagauaaaagaaggaacauugca

SEQ ID NO: 35729 - RNA, 23 nt, Artificial Sequence
  Chemically synthesized
agaagcagcauuugauauacaug

SEQ ID NO: 35730 - RNA, 23 nt, Artificial Sequence
  Chemically synthesized
gagaagcagcauuugauauacau

SEQ ID NO: 35731 - RNA, 23 nt, Artificial Sequence
  Chemically synthesized
caagaacgagaagcagcauuuga

SEQ ID NO: 35732 - RNA, 23 nt, Artificial Sequence
  Chemically synthesized
ucaagaacgagaagcagcauuug

SEQ ID NO: 35733 - RNA, 23 nt, Artificial Sequence
  Chemically synthesized
cucaagaacgagaagcagcauuu

SEQ ID NO: 35734 - RNA, 23 nt, Artificial Sequence
  Chemically synthesized
ucugugaaauucucagaguguuu

SEQ ID NO: 35735 - RNA, 23 nt, Artificial Sequence
  Chemically synthesized
uucugugaaauucucagaguguu

SEQ ID NO: 35736 - RNA, 23 nt, Artificial Sequence
  Chemically synthesized
ggagagauguuuggaaaccacag

SEQ ID NO: 35737 - RNA, 23 nt, Artificial Sequence
  Chemically synthesized
uggagagauguuuggaaaccaca

SEQ ID NO: 35738 - RNA, 23 nt, Artificial Sequence
  Chemically synthesized
gaagagccaaagaauauuccauu

SEQ ID NO: 35739 - RNA, 23 nt, Artificial Sequence
  Chemically synthesized
ccaaagucacaggaagaaagcag

SEQ ID NO: 35740 - RNA, 23 nt, Artificial Sequence
  Chemically synthesized
uccaaagucacaggaagaaagca

SEQ ID NO: 35741 - RNA, 23 nt, Artificial Sequence
  Chemically synthesized
uuccaaagucacaggaagaaagc

SEQ ID NO: 35742 - RNA, 23 nt, Artificial Sequence
  Chemically synthesized
guuccaaagucacaggaagaaag

SEQ ID NO: 35743 - RNA, 23 nt, Artificial Sequence
  Chemically synthesized
aguuccaaagucacaggaagaaa

SEQ ID NO: 35744 - RNA, 23 nt, Artificial Sequence
  Chemically synthesized
guccucuguugcaaacucaguuc

SEQ ID NO: 35745 - RNA, 23 nt, Artificial Sequence
  Chemically synthesized
gguccucuguugcaaacucaguu

SEQ ID NO: 35746 - RNA, 23 nt, Artificial Sequence
  Chemically synthesized
agguccucuguugcaaacucagu

SEQ ID NO: 35747 - RNA, 23 nt, Artificial Sequence
  Chemically synthesized
cagguccucuguugcaaacucag

SEQ ID NO: 35748 - RNA, 23 nt, Artificial Sequence
  Chemically synthesized
gcagguccucuguugcaaacuca

SEQ ID NO: 35749 - RNA, 23 nt, Artificial Sequence
  Chemically synthesized
caaaauccaugggcaguaugaug

SEQ ID NO: 35750 - RNA, 23 nt, Artificial Sequence
  Chemically synthesized
acaaaauccaugggcaguaugau

SEQ ID NO: 35751 - RNA, 23 nt, Artificial Sequence
  Chemically synthesized
cacaaaauccaugggcaguauga

SEQ ID NO: 35752 - RNA, 23 nt, Artificial Sequence
  Chemically synthesized
acacaaaauccaugggcaguaug

SEQ ID NO: 35753 - RNA, 23 nt, Artificial Sequence
  Chemically synthesized
aacacaaaauccaugggcaguau

SEQ ID NO: 35754 - RNA, 23 nt, Artificial Sequence
  Chemically synthesized
uaacacaaaauccaugggcagua

SEQ ID NO: 35755 - RNA, 23 nt, Artificial Sequence
  Chemically synthesized
gugugugcaagaaaacuaggcaa

SEQ ID NO: 35756 - RNA, 23 nt, Artificial Sequence
  Chemically synthesized
ugggucacugguguuugaggauu

SEQ ID NO: 35757 - RNA, 23 nt, Artificial Sequence
  Chemically synthesized
cguuaggauucaggcagcagugu

SEQ ID NO: 35758 - RNA, 23 nt, Artificial Sequence
  Chemically synthesized
ccguuaggauucaggcagcagug

SEQ ID NO: 35759 - RNA, 23 nt, Artificial Sequence
  Chemically synthesized
accguuaggauucaggcagcagu

SEQ ID NO: 35760 - RNA, 23 nt, Artificial Sequence
  Chemically synthesized
caccguuaggauucaggcagcag

SEQ ID NO: 35761 - RNA, 23 nt, Artificial Sequence
  Chemically synthesized
ccaccguuaggauucaggcagca

SEQ ID NO: 35762 - RNA, 23 nt, Artificial Sequence
  Chemically synthesized
uuaacacacuggccauucuuaug

SEQ ID NO: 35763 - RNA, 23 nt, Artificial Sequence
  Chemically synthesized
cuuaacacacuggccauucuuau

SEQ ID NO: 35764 - RNA, 23 nt, Artificial Sequence
  Chemically synthesized
guguaccucuagaaucccagcag

SEQ ID NO: 35765 - RNA, 23 nt, Artificial Sequence
  Chemically synthesized
uguguaccucuagaaucccagca

SEQ ID NO: 35766 - RNA, 23 nt, Artificial Sequence
  Chemically synthesized
cuguguaccucuagaaucccagc

SEQ ID NO: 35767 - RNA, 23 nt, Artificial Sequence
  Chemically synthesized
ccuguguaccucuagaaucccag

SEQ ID NO: 35768 - RNA, 23 nt, Artificial Sequence
  Chemically synthesized
ccauuggagagcugucuuccugu

SEQ ID NO: 35769 - RNA, 23 nt, Artificial Sequence
  Chemically synthesized
gccauuggagagcugucuuccug

SEQ ID NO: 35770 - RNA, 23 nt, Artificial Sequence
  Chemically synthesized
agccauuggagagcugucuuccu

SEQ ID NO: 35771 - RNA, 23 nt, Artificial Sequence
  Chemically synthesized
aagccauuggagagcugucuucc

SEQ ID NO: 35772 - RNA, 23 nt, Artificial Sequence
  Chemically synthesized
gaagccauuggagagcugucuuc

SEQ ID NO: 35773 - RNA, 23 nt, Artificial Sequence
  Chemically synthesized
ugaagccauuggagagcugucuu

SEQ ID NO: 35774 - RNA, 23 nt, Artificial Sequence
  Chemically synthesized
gggaguccucauugaauccucau

SEQ ID NO: 35775 - RNA, 23 nt, Artificial Sequence
  Chemically synthesized
ucggagaagcuggaaagugugaa

SEQ ID NO: 35776 - RNA, 23 nt, Artificial Sequence
  Chemically synthesized
gucggagaagcuggaaaguguga

SEQ ID NO: 35777 - RNA, 23 nt, Artificial Sequence
  Chemically synthesized
agucggagaagcuggaaagugug

SEQ ID NO: 35778 - RNA, 23 nt, Artificial Sequence
  Chemically synthesized
gagucggagaagcuggaaagugu

SEQ ID NO: 35779 - RNA, 23 nt, Artificial Sequence
  Chemically synthesized
ccauccagaacaagcaccucugc

SEQ ID NO: 35780 - RNA, 23 nt, Artificial Sequence
  Chemically synthesized
gccauccagaacaagcaccucug

SEQ ID NO: 35781 - RNA, 23 nt, Artificial Sequence
  Chemically synthesized
ugccauccagaacaagcaccucu

SEQ ID NO: 35782 - RNA, 23 nt, Artificial Sequence
  Chemically synthesized
uugccauccagaacaagcaccuc

SEQ ID NO: 35783 - RNA, 23 nt, Artificial Sequence
  Chemically synthesized
uuugccauccagaacaagcaccu

SEQ ID NO: 35784 - RNA, 23 nt, Artificial Sequence
  Chemically synthesized
gaugucaauagcauuguuuuugu

SEQ ID NO: 35785 - RNA, 23 nt, Artificial Sequence
  Chemically synthesized
agucaguggagagauguuuggaa

SEQ ID NO: 35786 - RNA, 23 nt, Artificial Sequence
  Chemically synthesized
cagucaguggagagauguuugga

SEQ ID NO: 35787 - RNA, 23 nt, Artificial Sequence
  Chemically synthesized
acagucaguggagagauguuugg

SEQ ID NO: 35788 - RNA, 23 nt, Artificial Sequence
  Chemically synthesized
cacagucaguggagagauguuug

SEQ ID NO: 35789 - RNA, 23 nt, Artificial Sequence
  Chemically synthesized
ccacagucaguggagagauguuu

SEQ ID NO: 35790 - RNA, 23 nt, Artificial Sequence
  Chemically synthesized
accacagucaguggagagauguu

SEQ ID NO: 35791 - RNA, 23 nt, Artificial Sequence
  Chemically synthesized
ggucaggaguugugucuaggcug

SEQ ID NO: 35792 - RNA, 23 nt, Artificial Sequence
  Chemically synthesized
aggucaggaguugugucuaggcu

SEQ ID NO: 35793 - RNA, 23 nt, Artificial Sequence
  Chemically synthesized
uaggucaggaguugugucuaggc

SEQ ID NO: 35794 - RNA, 23 nt, Artificial Sequence
  Chemically synthesized
uuaggucaggaguugugucuagg

SEQ ID NO: 35795 - RNA, 23 nt, Artificial Sequence
  Chemically synthesized
cuuaggucaggaguugugucuag

SEQ ID NO: 35796 - RNA, 23 nt, Artificial Sequence
  Chemically synthesized
agaaagcagaaaguucaacuucc

SEQ ID NO: 35797 - RNA, 23 nt, Artificial Sequence
  Chemically synthesized
aagaaagcagaaaguucaacuuc

SEQ ID NO: 35798 - RNA, 23 nt, Artificial Sequence
  Chemically synthesized
gaagaaagcagaaaguucaacuu

SEQ ID NO: 35799 - RNA, 23 nt, Artificial Sequence
  Chemically synthesized
ggaagaaagcagaaaguucaacu

SEQ ID NO: 35800 - RNA, 23 nt, Artificial Sequence
  Chemically synthesized
aggaagaaagcagaaaguucaac

SEQ ID NO: 35801 - RNA, 23 nt, Artificial Sequence
  Chemically synthesized
caggaagaaagcagaaaguucaa

SEQ ID NO: 35802 - RNA, 23 nt, Artificial Sequence
  Chemically synthesized
acaggaagaaagcagaaaguuca

SEQ ID NO: 35803 - RNA, 23 nt, Artificial Sequence
  Chemically synthesized
cacaggaagaaagcagaaaguuc

SEQ ID NO: 35804 - RNA, 23 nt, Artificial Sequence
  Chemically synthesized
ucacaggaagaaagcagaaaguu

SEQ ID NO: 35805 - RNA, 23 nt, Artificial Sequence
  Chemically synthesized
gucacaggaagaaagcagaaagu

SEQ ID NO: 35806 - RNA, 23 nt, Artificial Sequence
  Chemically synthesized
agaauucucccagcguuaacaca

SEQ ID NO: 35807 - RNA, 23 nt, Artificial Sequence
  Chemically synthesized
cagaauucucccagcguuaacac

SEQ ID NO: 35808 - RNA, 23 nt, Artificial Sequence
  Chemically synthesized
ggauuuugcuaaccugacgcccu

SEQ ID NO: 35809 - RNA, 23 nt, Artificial Sequence
  Chemically synthesized
aggauuuugcuaaccugacgccc

SEQ ID NO: 35810 - RNA, 23 nt, Artificial Sequence
  Chemically synthesized
gaggauuuugcuaaccugacgcc

SEQ ID NO: 35811 - RNA, 23 nt, Artificial Sequence
  Chemically synthesized
ugaggauuuugcuaaccugacgc

SEQ ID NO: 35812 - RNA, 23 nt, Artificial Sequence
  Chemically synthesized
uugaggauuuugcuaaccugacg

SEQ ID NO: 35813 - RNA, 23 nt, Artificial Sequence
  Chemically synthesized
agaucugguuucuaagaguuuug

SEQ ID NO: 35814 - RNA, 23 nt, Artificial Sequence
  Chemically synthesized
cagaucugguuucuaagaguuuu

SEQ ID NO: 35815 - RNA, 23 nt, Artificial Sequence
  Chemically synthesized
ucagaucugguuucuaagaguuu

SEQ ID NO: 35816 - RNA, 23 nt, Artificial Sequence
  Chemically synthesized
cucagaucugguuucuaagaguu

SEQ ID NO: 35817 - RNA, 23 nt, Artificial Sequence
  Chemically synthesized
ucucagaucugguuucuaagagu

SEQ ID NO: 35818 - RNA, 23 nt, Artificial Sequence
  Chemically synthesized
uauguccagaaauugugugugca

SEQ ID NO: 35819 - RNA, 23 nt, Artificial Sequence
  Chemically synthesized
acugguguuugaggauuuugcua

SEQ ID NO: 35820 - RNA, 23 nt, Artificial Sequence
  Chemically synthesized
agaacagcauuuagugaaguugu

SEQ ID NO: 35821 - RNA, 23 nt, Artificial Sequence
  Chemically synthesized
gagaacagcauuuagugaaguug

SEQ ID NO: 35822 - RNA, 23 nt, Artificial Sequence
  Chemically synthesized
ugagaacagcauuuagugaaguu

SEQ ID NO: 35823 - RNA, 23 nt, Artificial Sequence
  Chemically synthesized
gugagaacagcauuuagugaagu

SEQ ID NO: 35824 - RNA, 23 nt, Artificial Sequence
  Chemically synthesized
agugagaacagcauuuagugaag

SEQ ID NO: 35825 - RNA, 23 nt, Artificial Sequence
  Chemically synthesized
gagugagaacagcauuuagugaa

SEQ ID NO: 35826 - RNA, 23 nt, Artificial Sequence
  Chemically synthesized
ggauuuaggccuuaacacacugg

SEQ ID NO: 35827 - RNA, 23 nt, Artificial Sequence
  Chemically synthesized
aggauuuaggccuuaacacacug

SEQ ID NO: 35828 - RNA, 23 nt, Artificial Sequence
  Chemically synthesized
caggauuuaggccuuaacacacu

SEQ ID NO: 35829 - RNA, 23 nt, Artificial Sequence
  Chemically synthesized
ccaggauuuaggccuuaacacac

SEQ ID NO: 35830 - RNA, 23 nt, Artificial Sequence
  Chemically synthesized
uccaggauuuaggccuuaacaca

SEQ ID NO: 35831 - RNA, 23 nt, Artificial Sequence
  Chemically synthesized
ccagggcaagugcaucuuugccu

SEQ ID NO: 35832 - RNA, 23 nt, Artificial Sequence
  Chemically synthesized
accagggcaagugcaucuuugcc

SEQ ID NO: 35833 - RNA, 23 nt, Artificial Sequence
  Chemically synthesized
gaccagggcaagugcaucuuugc

SEQ ID NO: 35834 - RNA, 23 nt, Artificial Sequence
  Chemically synthesized
ggaccagggcaagugcaucuuug

SEQ ID NO: 35835 - RNA, 23 nt, Artificial Sequence
  Chemically synthesized
uggaccagggcaagugcaucuuu

SEQ ID NO: 35836 - RNA, 23 nt, Artificial Sequence
  Chemically synthesized
agagcugucuuccuguguaccuc

SEQ ID NO: 35837 - RNA, 23 nt, Artificial Sequence
  Chemically synthesized
gagagcugucuuccuguguaccu

SEQ ID NO: 35838 - RNA, 23 nt, Artificial Sequence
  Chemically synthesized
ggagagcugucuuccuguguacc

SEQ ID NO: 35839 - RNA, 23 nt, Artificial Sequence
  Chemically synthesized
uggagagcugucuuccuguguac

SEQ ID NO: 35840 - RNA, 23 nt, Artificial Sequence
  Chemically synthesized
uuggagagcugucuuccugugua

SEQ ID NO: 35841 - RNA, 23 nt, Artificial Sequence
  Chemically synthesized
gagcuaagcagucgugguauggg

SEQ ID NO: 35842 - RNA, 23 nt, Artificial Sequence
  Chemically synthesized
agagcuaagcagucgugguaugg

SEQ ID NO: 35843 - RNA, 23 nt, Artificial Sequence
  Chemically synthesized
cagagcuaagcagucgugguaug

SEQ ID NO: 35844 - RNA, 23 nt, Artificial Sequence
  Chemically synthesized
gcagagcuaagcagucgugguau

SEQ ID NO: 35845 - RNA, 23 nt, Artificial Sequence
  Chemically synthesized
ugcagagcuaagcagucguggua

SEQ ID NO: 35846 - RNA, 23 nt, Artificial Sequence
  Chemically synthesized
gaaaccucuuuauccaacagaua

SEQ ID NO: 35847 - RNA, 23 nt, Artificial Sequence
  Chemically synthesized
agaaaccucuuuauccaacagau

SEQ ID NO: 35848 - RNA, 23 nt, Artificial Sequence
  Chemically synthesized
gagaaaccucuuuauccaacaga

SEQ ID NO: 35849 - RNA, 23 nt, Artificial Sequence
  Chemically synthesized
agagaaaccucuuuauccaacag

SEQ ID NO: 35850 - RNA, 23 nt, Artificial Sequence
  Chemically synthesized
gagagaaaccucuuuauccaaca

SEQ ID NO: 35851 - RNA, 23 nt, Artificial Sequence
  Chemically synthesized
uccagaagaugagagaaaccucu

SEQ ID NO: 35852 - RNA, 23 nt, Artificial Sequence
  Chemically synthesized
cuccagaagaugagagaaaccuc

SEQ ID NO: 35853 - RNA, 23 nt, Artificial Sequence
  Chemically synthesized
acuccagaagaugagagaaaccu

SEQ ID NO: 35854 - RNA, 23 nt, Artificial Sequence
  Chemically synthesized
gacuccagaagaugagagaaacc

SEQ ID NO: 35855 - RNA, 23 nt, Artificial Sequence
  Chemically synthesized
ggacuccagaagaugagagaaac

SEQ ID NO: 35856 - RNA, 23 nt, Artificial Sequence
  Chemically synthesized
agaaggagaagacggagugccug

SEQ ID NO: 35857 - RNA, 23 nt, Artificial Sequence
  Chemically synthesized
aagaaggagaagacggagugccu

SEQ ID NO: 35858 - RNA, 23 nt, Artificial Sequence
  Chemically synthesized
gaagaaggagaagacggagugcc

SEQ ID NO: 35859 - RNA, 23 nt, Artificial Sequence
  Chemically synthesized
agaagaaggagaagacggagugc

SEQ ID NO: 35860 - RNA, 23 nt, Artificial Sequence
  Chemically synthesized
aagaagaaggagaagacggagug

SEQ ID NO: 35861 - RNA, 23 nt, Artificial Sequence
  Chemically synthesized
caagaagaaggagaagacggagu

SEQ ID NO: 35862 - RNA, 23 nt, Artificial Sequence
  Chemically synthesized
cugauguuucugugaaauucuca

SEQ ID NO: 35863 - RNA, 23 nt, Artificial Sequence
  Chemically synthesized
ucugauguuucugugaaauucuc

SEQ ID NO: 35864 - RNA, 23 nt, Artificial Sequence
  Chemically synthesized
uucugauguuucugugaaauucu

SEQ ID NO: 35865 - RNA, 23 nt, Artificial Sequence
  Chemically synthesized
auucugauguuucugugaaauuc

SEQ ID NO: 35866 - RNA, 23 nt, Artificial Sequence
  Chemically synthesized
aauucugauguuucugugaaauu

SEQ ID NO: 35867 - RNA, 23 nt, Artificial Sequence
  Chemically synthesized
aaauucugauguuucugugaaau

SEQ ID NO: 35868 - RNA, 23 nt, Artificial Sequence
  Chemically synthesized
aaaauucugauguuucugugaaa

SEQ ID NO: 35869 - RNA, 23 nt, Artificial Sequence
  Chemically synthesized
aaggacgcuggcuacugucuauu

SEQ ID NO: 35870 - RNA, 23 nt, Artificial Sequence
  Chemically synthesized
agcuguuuuaagaaaucuggccc

SEQ ID NO: 35871 - RNA, 23 nt, Artificial Sequence
  Chemically synthesized
uagcuguuuuaagaaaucuggcc

SEQ ID NO: 35872 - RNA, 23 nt, Artificial Sequence
  Chemically synthesized
caauagcauuguuuuugucaugu

SEQ ID NO: 35873 - RNA, 23 nt, Artificial Sequence
  Chemically synthesized
ucaauagcauuguuuuugucaug

SEQ ID NO: 35874 - RNA, 23 nt, Artificial Sequence
  Chemically synthesized
gucaauagcauuguuuuugucau

SEQ ID NO: 35875 - RNA, 23 nt, Artificial Sequence
  Chemically synthesized
ugucaauagcauuguuuuuguca

SEQ ID NO: 35876 - RNA, 23 nt, Artificial Sequence
  Chemically synthesized
augucaauagcauuguuuuuguc

SEQ ID NO: 35877 - RNA, 23 nt, Artificial Sequence
  Chemically synthesized
gagagauguuuggaaaccacagu

SEQ ID NO: 35878 - RNA, 23 nt, Artificial Sequence
  Chemically synthesized
caggaguugugucuaggcuggaa

SEQ ID NO: 35879 - RNA, 23 nt, Artificial Sequence
  Chemically synthesized
ucaggaguugugucuaggcugga

SEQ ID NO: 35880 - RNA, 23 nt, Artificial Sequence
  Chemically synthesized
gucaggaguugugucuaggcugg

SEQ ID NO: 35881 - RNA, 23 nt, Artificial Sequence
  Chemically synthesized
ucaccacgugcaguaucucaaga

SEQ ID NO: 35882 - RNA, 23 nt, Artificial Sequence
  Chemically synthesized
gucaccacgugcaguaucucaag

SEQ ID NO: 35883 - RNA, 23 nt, Artificial Sequence
  Chemically synthesized
ugucaccacgugcaguaucucaa

SEQ ID NO: 35884 - RNA, 23 nt, Artificial Sequence
  Chemically synthesized
uucucagaucugguuucuaagag

SEQ ID NO: 35885 - RNA, 23 nt, Artificial Sequence
  Chemically synthesized
aacuaggcaauguacucuuccga

SEQ ID NO: 35886 - RNA, 23 nt, Artificial Sequence
  Chemically synthesized
aaacuaggcaauguacucuuccg

SEQ ID NO: 35887 - RNA, 23 nt, Artificial Sequence
  Chemically synthesized
aaaacuaggcaauguacucuucc

SEQ ID NO: 35888 - RNA, 23 nt, Artificial Sequence
  Chemically synthesized
gaaaacuaggcaauguacucuuc

SEQ ID NO: 35889 - RNA, 23 nt, Artificial Sequence
  Chemically synthesized
agaaaacuaggcaauguacucuu

SEQ ID NO: 35890 - RNA, 23 nt, Artificial Sequence
  Chemically synthesized
uuauguccagaaauugugugugc

SEQ ID NO: 35891 - RNA, 23 nt, Artificial Sequence
  Chemically synthesized
gauguggagugagaacagcauuu

SEQ ID NO: 35892 - RNA, 23 nt, Artificial Sequence
  Chemically synthesized
cuacaaaaaaccaggaugcccac

SEQ ID NO: 35893 - RNA, 23 nt, Artificial Sequence
  Chemically synthesized
ucuacaaaaaaccaggaugccca

SEQ ID NO: 35894 - RNA, 23 nt, Artificial Sequence
  Chemically synthesized
uucuacaaaaaaccaggaugccc

SEQ ID NO: 35895 - RNA, 23 nt, Artificial Sequence
  Chemically synthesized
auucuacaaaaaaccaggaugcc

SEQ ID NO: 35896 - RNA, 23 nt, Artificial Sequence
  Chemically synthesized
gauucuacaaaaaaccaggaugc

SEQ ID NO: 35897 - RNA, 23 nt, Artificial Sequence
  Chemically synthesized
ggauucuacaaaaaaccaggaug

SEQ ID NO: 35898 - RNA, 23 nt, Artificial Sequence
  Chemically synthesized
uggauucuacaaaaaaccaggau

SEQ ID NO: 35899 - RNA, 23 nt, Artificial Sequence
  Chemically synthesized
ucuggauucuacaaaaaaccagg

SEQ ID NO: 35900 - RNA, 23 nt, Artificial Sequence
  Chemically synthesized
aucuggauucuacaaaaaaccag

SEQ ID NO: 35901 - RNA, 23 nt, Artificial Sequence
  Chemically synthesized
cagaagaugagagaaaccucuuu

SEQ ID NO: 35902 - RNA, 23 nt, Artificial Sequence
  Chemically synthesized
ccagaagaugagagaaaccucuu

SEQ ID NO: 35903 - RNA, 23 nt, Artificial Sequence
  Chemically synthesized
gcucaagaacgagaagcagcauu

SEQ ID NO: 35904 - RNA, 23 nt, Artificial Sequence
  Chemically synthesized
agcucaagaacgagaagcagcau

SEQ ID NO: 35905 - RNA, 23 nt, Artificial Sequence
  Chemically synthesized
gagcucaagaacgagaagcagca

SEQ ID NO: 35906 - RNA, 23 nt, Artificial Sequence
  Chemically synthesized
agagucggagaagcuggaaagug

SEQ ID NO: 35907 - RNA, 23 nt, Artificial Sequence
  Chemically synthesized
aagagucggagaagcuggaaagu

SEQ ID NO: 35908 - RNA, 23 nt, Artificial Sequence
  Chemically synthesized
aaagagucggagaagcuggaaag

SEQ ID NO: 35909 - RNA, 23 nt, Artificial Sequence
  Chemically synthesized
gaaagagucggagaagcuggaaa

SEQ ID NO: 35910 - RNA, 23 nt, Artificial Sequence
  Chemically synthesized
ucacucacacuggccacaaggac

SEQ ID NO: 35911 - RNA, 23 nt, Artificial Sequence
  Chemically synthesized
gucacucacacuggccacaagga

SEQ ID NO: 35912 - RNA, 23 nt, Artificial Sequence
  Chemically synthesized
agucacucacacuggccacaagg

SEQ ID NO: 35913 - RNA, 23 nt, Artificial Sequence
  Chemically synthesized
aagucacucacacuggccacaag

SEQ ID NO: 35914 - RNA, 23 nt, Artificial Sequence
  Chemically synthesized
gaagucacucacacuggccacaa

SEQ ID NO: 35915 - RNA, 23 nt, Artificial Sequence
  Chemically synthesized
gucauguagcuguuuuaagaaau

SEQ ID NO: 35916 - RNA, 23 nt, Artificial Sequence
  Chemically synthesized
ugucauguagcuguuuuaagaaa

SEQ ID NO: 35917 - RNA, 23 nt, Artificial Sequence
  Chemically synthesized
uugucauguagcuguuuuaagaa

SEQ ID NO: 35918 - RNA, 23 nt, Artificial Sequence
  Chemically synthesized
uuugucauguagcuguuuuaaga

SEQ ID NO: 35919 - RNA, 23 nt, Artificial Sequence
  Chemically synthesized
uuauuggaugucaauagcauugu

SEQ ID NO: 35920 - RNA, 23 nt, Artificial Sequence
  Chemically synthesized
cccaggcuuuagcauuauuggau

SEQ ID NO: 35921 - RNA, 23 nt, Artificial Sequence
  Chemically synthesized
acccaggcuuuagcauuauugga

SEQ ID NO: 35922 - RNA, 23 nt, Artificial Sequence
  Chemically synthesized
uacccaggcuuuagcauuauugg

SEQ ID NO: 35923 - RNA, 23 nt, Artificial Sequence
  Chemically synthesized
guacccaggcuuuagcauuauug

SEQ ID NO: 35924 - RNA, 23 nt, Artificial Sequence
  Chemically synthesized
gguacccaggcuuuagcauuauu

SEQ ID NO: 35925 - RNA, 23 nt, Artificial Sequence
  Chemically synthesized
caaggaagagcugagguuugcca

SEQ ID NO: 35926 - RNA, 23 nt, Artificial Sequence
  Chemically synthesized
uccuuuccuugugguugaaaacc

SEQ ID NO: 35927 - RNA, 23 nt, Artificial Sequence
  Chemically synthesized
uuccuuuccuugugguugaaaac

SEQ ID NO: 35928 - RNA, 23 nt, Artificial Sequence
  Chemically synthesized
uuuccuuuccuugugguugaaaa

SEQ ID NO: 35929 - RNA, 23 nt, Artificial Sequence
  Chemically synthesized
uuuuccuuuccuugugguugaaa

SEQ ID NO: 35930 - RNA, 23 nt, Artificial Sequence
  Chemically synthesized
auuuuccuuuccuugugguugaa

SEQ ID NO: 35931 - RNA, 23 nt, Artificial Sequence
  Chemically synthesized
aguugugucuaggcuggaagagc

SEQ ID NO: 35932 - RNA, 23 nt, Artificial Sequence
  Chemically synthesized
gaguugugucuaggcuggaagag

SEQ ID NO: 35933 - RNA, 23 nt, Artificial Sequence
  Chemically synthesized
ggaguugugucuaggcuggaaga

SEQ ID NO: 35934 - RNA, 23 nt, Artificial Sequence
  Chemically synthesized
aggaguugugucuaggcuggaag

SEQ ID NO: 35935 - RNA, 23 nt, Artificial Sequence
  Chemically synthesized
ccacucaaugucuuaggucagga

SEQ ID NO: 35936 - RNA, 23 nt, Artificial Sequence
  Chemically synthesized
uccacucaaugucuuaggucagg

SEQ ID NO: 35937 - RNA, 23 nt, Artificial Sequence
  Chemically synthesized
cuccacucaaugucuuaggucag

SEQ ID NO: 35938 - RNA, 23 nt, Artificial Sequence
  Chemically synthesized
ucuccacucaaugucuuagguca

SEQ ID NO: 35939 - RNA, 23 nt, Artificial Sequence
  Chemically synthesized
cucuccacucaaugucuuagguc

SEQ ID NO: 35940 - RNA, 23 nt, Artificial Sequence
  Chemically synthesized
agucacaggaagaaagcagaaag

SEQ ID NO: 35941 - RNA, 23 nt, Artificial Sequence
  Chemically synthesized
cucaaugucuuaggucaggaguu

SEQ ID NO: 35942 - RNA, 23 nt, Artificial Sequence
  Chemically synthesized
ccagaagagcuugucagcaagag

SEQ ID NO: 35943 - RNA, 23 nt, Artificial Sequence
  Chemically synthesized
gaauauuccauuuuccuuuccuu

SEQ ID NO: 35944 - RNA, 23 nt, Artificial Sequence
  Chemically synthesized
ucauugaauccucauuuuauacc

SEQ ID NO: 35945 - RNA, 23 nt, Artificial Sequence
  Chemically synthesized
gcuuuagcauuauuggaugucaa

SEQ ID NO: 35946 - RNA, 23 nt, Artificial Sequence
  Chemically synthesized
agaauauuccauuuuccuuuccu

SEQ ID NO: 35947 - RNA, 23 nt, Artificial Sequence
  Chemically synthesized
ggguugugcuuucuagcaaauau

SEQ ID NO: 35948 - RNA, 23 nt, Artificial Sequence
  Chemically synthesized
guguuuaauuguacucaauggua

SEQ ID NO: 35949 - RNA, 23 nt, Artificial Sequence
  Chemically synthesized
cacucaaugucuuaggucaggag

SEQ ID NO: 35950 - RNA, 23 nt, Artificial Sequence
  Chemically synthesized
cugaugugacuuuuauaugcuuu

SEQ ID NO: 35951 - RNA, 23 nt, Artificial Sequence
  Chemically synthesized
agaagagcuugucagcaagagga

SEQ ID NO: 35952 - RNA, 23 nt, Artificial Sequence
  Chemically synthesized
uccuguguaccucuagaauccca

SEQ ID NO: 35953 - RNA, 23 nt, Artificial Sequence
  Chemically synthesized
uguuuuugucauguagcuguuuu

SEQ ID NO: 35954 - RNA, 23 nt, Artificial Sequence
  Chemically synthesized
acugaugugacuuuuauaugcuu

SEQ ID NO: 35955 - RNA, 23 nt, Artificial Sequence
  Chemically synthesized
gggauguggagugagaacagcau

SEQ ID NO: 35956 - RNA, 23 nt, Artificial Sequence
  Chemically synthesized
agaaugggaggacuccagaagau

SEQ ID NO: 35957 - RNA, 23 nt, Artificial Sequence
  Chemically synthesized
guguuugcagcugugagaaguca

SEQ ID NO: 35958 - RNA, 23 nt, Artificial Sequence
  Chemically synthesized
aggguuaggacucuccacucaau

SEQ ID NO: 35959 - RNA, 23 nt, Artificial Sequence
  Chemically synthesized
gugacuuuuauaugcuuuuucuc

SEQ ID NO: 35960 - RNA, 23 nt, Artificial Sequence
  Chemically synthesized
gauauacaugcucaaccuucauc

SEQ ID NO: 35961 - RNA, 23 nt, Artificial Sequence
  Chemically synthesized
gcuacugucuauuaaaauucuga

SEQ ID NO: 35962 - RNA, 23 nt, Artificial Sequence
  Chemically synthesized
gcuguuuuaagaaaucuggccca

SEQ ID NO: 35963 - RNA, 23 nt, Artificial Sequence
  Chemically synthesized
uuguuuuugucauguagcuguuu

SEQ ID NO: 35964 - RNA, 23 nt, Artificial Sequence
  Chemically synthesized
ugcuuuuucucagaucugguuuc

SEQ ID NO: 35965 - RNA, 23 nt, Artificial Sequence
  Chemically synthesized
guguuugaggauuuugcuaaccu

SEQ ID NO: 35966 - RNA, 23 nt, Artificial Sequence
  Chemically synthesized
cugguguuugaggauuuugcuaa

SEQ ID NO: 35967 - RNA, 23 nt, Artificial Sequence
  Chemically synthesized
gguuaggacucuccacucaaugu

SEQ ID NO: 35968 - RNA, 23 nt, Artificial Sequence
  Chemically synthesized
aaagucacaggaagaaagcagaa

SEQ ID NO: 35969 - RNA, 23 nt, Artificial Sequence
  Chemically synthesized
uuauaugcuuuuucucagaucug

SEQ ID NO: 35970 - RNA, 23 nt, Artificial Sequence
  Chemically synthesized
ggauguggagugagaacagcauu

SEQ ID NO: 35971 - RNA, 23 nt, Artificial Sequence
  Chemically synthesized
gaagaugagagaaaccucuuuau

SEQ ID NO: 35972 - RNA, 23 nt, Artificial Sequence
  Chemically synthesized
ggguguuugcagcugugagaagu

SEQ ID NO: 35973 - RNA, 23 nt, Artificial Sequence
  Chemically synthesized
guuuuugucauguagcuguuuua

SEQ ID NO: 35974 - RNA, 23 nt, Artificial Sequence
  Chemically synthesized
ggguuaggacucuccacucaaug

SEQ ID NO: 35975 - RNA, 23 nt, Artificial Sequence
  Chemically synthesized
cguuaacacaaaauccaugggca

SEQ ID NO: 35976 - RNA, 23 nt, Artificial Sequence
  Chemically synthesized
gccagaagagcuugucagcaaga

SEQ ID NO: 35977 - RNA, 23 nt, Artificial Sequence
  Chemically synthesized
gguguuugaggauuuugcuaacc

SEQ ID NO: 35978 - RNA, 23 nt, Artificial Sequence
  Chemically synthesized
guauuccuaaccugucagaauaa

SEQ ID NO: 35979 - RNA, 23 nt, Artificial Sequence
  Chemically synthesized
gcauuauuggaugucaauagcau

SEQ ID NO: 35980 - RNA, 23 nt, Artificial Sequence
  Chemically synthesized
uucucccagcguuaacacaaaau

SEQ ID NO: 35981 - RNA, 23 nt, Artificial Sequence
  Chemically synthesized
auaugcuguuauguccagaaauu

SEQ ID NO: 35982 - RNA, 23 nt, Artificial Sequence
  Chemically synthesized
ccuaaccugucagaauaauaaau

SEQ ID NO: 35983 - RNA, 23 nt, Artificial Sequence
  Chemically synthesized
cugggucacugguguuugaggau

SEQ ID NO: 35984 - RNA, 23 nt, Artificial Sequence
  Chemically synthesized
cuuucuagcaaauaugcuguuau

SEQ ID NO: 35985 - RNA, 23 nt, Artificial Sequence
  Chemically synthesized
caggguugugcuuucuagcaaau

SEQ ID NO: 35986 - RNA, 23 nt, Artificial Sequence
  Chemically synthesized
aggguugugcuuucuagcaaaua

SEQ ID NO: 35987 - RNA, 23 nt, Artificial Sequence
  Chemically synthesized
ccaggguugugcuuucuagcaaa

SEQ ID NO: 35988 - RNA, 23 nt, Artificial Sequence
  Chemically synthesized
gaaaaccacagucaguggagaga

SEQ ID NO: 35989 - RNA, 23 nt, Artificial Sequence
  Chemically synthesized
gcaaacucaguuccaaagucaca

SEQ ID NO: 35990 - RNA, 23 nt, Artificial Sequence
  Chemically synthesized
ucccagcguuaacacaaaaucca

SEQ ID NO: 35991 - RNA, 23 nt, Artificial Sequence
  Chemically synthesized
cucuuuauccaacagauaaaaga

SEQ ID NO: 35992 - RNA, 23 nt, Artificial Sequence
  Chemically synthesized
cuaguauuccuaaccugucagaa

SEQ ID NO: 35993 - RNA, 23 nt, Artificial Sequence
  Chemically synthesized
caacacugaugugacuuuuauau

SEQ ID NO: 35994 - RNA, 23 nt, Artificial Sequence
  Chemically synthesized
gcaauguacucuuccgauguuug

SEQ ID NO: 35995 - RNA, 23 nt, Artificial Sequence
  Chemically synthesized
uccuaaccugucagaauaauaaa

SEQ ID NO: 35996 - RNA, 23 nt, Artificial Sequence
  Chemically synthesized
uuccuaaccugucagaauaauaa

SEQ ID NO: 35997 - RNA, 23 nt, Artificial Sequence
  Chemically synthesized
guacucaaugguaucauuacaau

SEQ ID NO: 35998 - RNA, 23 nt, Artificial Sequence
  Chemically synthesized
ccaaagaauauuccauuuuccuu

SEQ ID NO: 35999 - RNA, 23 nt, Artificial Sequence
  Chemically synthesized
ccuaguauuccuaaccugucaga

SEQ ID NO: 36000 - RNA, 23 nt, Artificial Sequence
  Chemically synthesized
agauauucagguggccagaagag

SEQ ID NO: 36001 - RNA, 23 nt, Artificial Sequence
  Chemically synthesized
gcuuucuagcaaauaugcuguua

SEQ ID NO: 36002 - RNA, 23 nt, Artificial Sequence
  Chemically synthesized
ugcuuucuagcaaauaugcuguu

SEQ ID NO: 36003 - RNA, 23 nt, Artificial Sequence
  Chemically synthesized
gcaagugcaucuuugccucaacu

SEQ ID NO: 36004 - RNA, 23 nt, Artificial Sequence
  Chemically synthesized
ccucuuuauccaacagauaaaag

SEQ ID NO: 36005 - RNA, 23 nt, Artificial Sequence
  Chemically synthesized
cucagaaugggaggacuccagaa

SEQ ID NO: 36006 - RNA, 23 nt, Artificial Sequence
  Chemically synthesized
cguguauuguccgggcucagaau

SEQ ID NO: 36007 - RNA, 23 nt, Artificial Sequence
  Chemically synthesized
uaguauuccuaaccugucagaau

SEQ ID NO: 36008 - RNA, 23 nt, Artificial Sequence
  Chemically synthesized
uggccagaagagcuugucagcaa

SEQ ID NO: 36009 - RNA, 23 nt, Artificial Sequence
  Chemically synthesized
caauguacucuuccgauguuugu

SEQ ID NO: 36010 - RNA, 23 nt, Artificial Sequence
  Chemically synthesized
ggcaauguacucuuccgauguuu

SEQ ID NO: 36011 - RNA, 23 nt, Artificial Sequence
  Chemically synthesized
caaauaugcuguuauguccagaa

SEQ ID NO: 36012 - RNA, 23 nt, Artificial Sequence
  Chemically synthesized
aacggccaggguugugcuuucua

SEQ ID NO: 36013 - RNA, 23 nt, Artificial Sequence
  Chemically synthesized
caaaaugaugcuucaacacccag

SEQ ID NO: 36014 - RNA, 23 nt, Artificial Sequence
  Chemically synthesized
gcagaaaguucaacuuccaaagg

SEQ ID NO: 36015 - RNA, 23 nt, Artificial Sequence
  Chemically synthesized
ugugugcaagaaaacuaggcaau

SEQ ID NO: 36016 - RNA, 23 nt, Artificial Sequence
  Chemically synthesized
ucaccguggcuaccauugucacu

SEQ ID NO: 36017 - RNA, 23 nt, Artificial Sequence
  Chemically synthesized
aaaccucuuuauccaacagauaa

SEQ ID NO: 36018 - RNA, 23 nt, Artificial Sequence
  Chemically synthesized
cagcauuugauauacaugcucaa

SEQ ID NO: 36019 - RNA, 23 nt, Artificial Sequence
  Chemically synthesized
agaagacggagugccugcagaaa

SEQ ID NO: 36020 - RNA, 23 nt, Artificial Sequence
  Chemically synthesized
ugguacccaggcuuuagcauuau

SEQ ID NO: 36021 - RNA, 23 nt, Artificial Sequence
  Chemically synthesized
aagcagaaaguucaacuuccaaa

SEQ ID NO: 36022 - RNA, 23 nt, Artificial Sequence
  Chemically synthesized
aaagcagaaaguucaacuuccaa

SEQ ID NO: 36023 - RNA, 23 nt, Artificial Sequence
  Chemically synthesized
caguuccaaagucacaggaagaa

SEQ ID NO: 36024 - RNA, 23 nt, Artificial Sequence
  Chemically synthesized
ccucuguugcaaacucaguucca

SEQ ID NO: 36025 - RNA, 23 nt, Artificial Sequence
  Chemically synthesized
gcaguaucucaagauauucaggu

SEQ ID NO: 36026 - RNA, 23 nt, Artificial Sequence
  Chemically synthesized
acaacacugaugugacuuuuaua

SEQ ID NO: 36027 - RNA, 23 nt, Artificial Sequence
  Chemically synthesized
acacaacacugaugugacuuuua

SEQ ID NO: 36028 - RNA, 23 nt, Artificial Sequence
  Chemically synthesized
gccaggguugugcuuucuagcaa

SEQ ID NO: 36029 - RNA, 23 nt, Artificial Sequence
  Chemically synthesized
ggauucaggcagcagugucugua

SEQ ID NO: 36030 - RNA, 23 nt, Artificial Sequence
  Chemically synthesized
accucuuuauccaacagauaaaa

SEQ ID NO: 36031 - RNA, 23 nt, Artificial Sequence
  Chemically synthesized
gagcugagguuugccauccagaa

SEQ ID NO: 36032 - RNA, 23 nt, Artificial Sequence
  Chemically synthesized
aggcuuuagcauuauuggauguc

SEQ ID NO: 36033 - RNA, 23 nt, Artificial Sequence
  Chemically synthesized
caggcuuuagcauuauuggaugu

SEQ ID NO: 36034 - RNA, 23 nt, Artificial Sequence
  Chemically synthesized
uaggcuggaagagccaaagaaua

SEQ ID NO: 36035 - RNA, 23 nt, Artificial Sequence
  Chemically synthesized
gaauucucccagcguuaacacaa

SEQ ID NO: 36036 - RNA, 23 nt, Artificial Sequence
  Chemically synthesized
ucaagauauucagguggccagaa

SEQ ID NO: 36037 - RNA, 23 nt, Artificial Sequence
  Chemically synthesized
cacaacacugaugugacuuuuau

SEQ ID NO: 36038 - RNA, 23 nt, Artificial Sequence
  Chemically synthesized
cgauguuugugucacacaacacu

SEQ ID NO: 36039 - RNA, 23 nt, Artificial Sequence
  Chemically synthesized
guacucuuccgauguuuguguca

SEQ ID NO: 36040 - RNA, 23 nt, Artificial Sequence
  Chemically synthesized
aaauaugcuguuauguccagaaa

SEQ ID NO: 36041 - RNA, 23 nt, Artificial Sequence
  Chemically synthesized
auccuaguauuccuaaccuguca

SEQ ID NO: 36042 - RNA, 23 nt, Artificial Sequence
  Chemically synthesized
uauccuaguauuccuaaccuguc

SEQ ID NO: 36043 - RNA, 23 nt, Artificial Sequence
  Chemically synthesized
uuauccuaguauuccuaaccugu

SEQ ID NO: 36044 - RNA, 23 nt, Artificial Sequence
  Chemically synthesized
uuuauccuaguauuccuaaccug

SEQ ID NO: 36045 - RNA, 23 nt, Artificial Sequence
  Chemically synthesized
auuuauccuaguauuccuaaccu

SEQ ID NO: 36046 - RNA, 23 nt, Artificial Sequence
  Chemically synthesized
aaucuuauuucuuucucgucgcc

SEQ ID NO: 36047 - RNA, 23 nt, Artificial Sequence
  Chemically synthesized
aucuuauuucuuucucgucgccu

SEQ ID NO: 36048 - RNA, 23 nt, Artificial Sequence
  Chemically synthesized
ucuuauuucuuucucgucgccuc

SEQ ID NO: 36049 - RNA, 23 nt, Artificial Sequence
  Chemically synthesized
cuuauuucuuucucgucgccucu

SEQ ID NO: 36050 - RNA, 23 nt, Artificial Sequence
  Chemically synthesized
uuauuucuuucucgucgccucuu

SEQ ID NO: 36051 - RNA, 23 nt, Artificial Sequence
  Chemically synthesized
ucuuuuuccuuucaucuucuuca

SEQ ID NO: 36052 - RNA, 23 nt, Artificial Sequence
  Chemically synthesized
cuuuuuccuuucaucuucuucag

SEQ ID NO: 36053 - RNA, 23 nt, Artificial Sequence
  Chemically synthesized
uuuuuccuuucaucuucuucagg

SEQ ID NO: 36054 - RNA, 23 nt, Artificial Sequence
  Chemically synthesized
uuuuccuuucaucuucuucaggg

SEQ ID NO: 36055 - RNA, 23 nt, Artificial Sequence
  Chemically synthesized
uuuccuuucaucuucuucagggg

SEQ ID NO: 36056 - RNA, 23 nt, Artificial Sequence
  Chemically synthesized
aggguuuuggguauaaaaugagg

SEQ ID NO: 36057 - RNA, 23 nt, Artificial Sequence
  Chemically synthesized
ggguuuuggguauaaaaugagga

SEQ ID NO: 36058 - RNA, 23 nt, Artificial Sequence
  Chemically synthesized
gguuuuggguauaaaaugaggau

SEQ ID NO: 36059 - RNA, 23 nt, Artificial Sequence
  Chemically synthesized
guuuuggguauaaaaugaggauu

SEQ ID NO: 36060 - RNA, 23 nt, Artificial Sequence
  Chemically synthesized
uuuuggguauaaaaugaggauuc

SEQ ID NO: 36061 - RNA, 23 nt, Artificial Sequence
  Chemically synthesized
gcaaucuuauuucuuucucgucg

SEQ ID NO: 36062 - RNA, 23 nt, Artificial Sequence
  Chemically synthesized
caaucuuauuucuuucucgucgc

SEQ ID NO: 36063 - RNA, 23 nt, Artificial Sequence
  Chemically synthesized
gcugcaaucuuauuucuuucucg

SEQ ID NO: 36064 - RNA, 23 nt, Artificial Sequence
  Chemically synthesized
cugcaaucuuauuucuuucucgu

SEQ ID NO: 36065 - RNA, 23 nt, Artificial Sequence
  Chemically synthesized
ugcaaucuuauuucuuucucguc

SEQ ID NO: 36066 - RNA, 23 nt, Artificial Sequence
  Chemically synthesized
cucuuuuuccuuucaucuucuuc

SEQ ID NO: 36067 - RNA, 23 nt, Artificial Sequence
  Chemically synthesized
uuccuuucaucuucuucaggggc

SEQ ID NO: 36068 - RNA, 23 nt, Artificial Sequence
  Chemically synthesized
uuuggguauaaaaugaggauuca

SEQ ID NO: 36069 - RNA, 23 nt, Artificial Sequence
  Chemically synthesized
cgccucuuuuuccuuucaucuuc

SEQ ID NO: 36070 - RNA, 23 nt, Artificial Sequence
  Chemically synthesized
gccucuuuuuccuuucaucuucu

SEQ ID NO: 36071 - RNA, 23 nt, Artificial Sequence
  Chemically synthesized
ccucuuuuuccuuucaucuucuu

SEQ ID NO: 36072 - RNA, 23 nt, Artificial Sequence
  Chemically synthesized
cuccaauggcuucaggguuuugg

SEQ ID NO: 36073 - RNA, 23 nt, Artificial Sequence
  Chemically synthesized
uccaauggcuucaggguuuuggg

SEQ ID NO: 36074 - RNA, 23 nt, Artificial Sequence
  Chemically synthesized
ccaauggcuucaggguuuugggu

SEQ ID NO: 36075 - RNA, 23 nt, Artificial Sequence
  Chemically synthesized
caauggcuucaggguuuugggua

SEQ ID NO: 36076 - RNA, 23 nt, Artificial Sequence
  Chemically synthesized
aauggcuucaggguuuuggguau

SEQ ID NO: 36077 - RNA, 23 nt, Artificial Sequence
  Chemically synthesized
guauaaaaugaggauucaaugag

SEQ ID NO: 36078 - RNA, 23 nt, Artificial Sequence
  Chemically synthesized
uauaaaaugaggauucaaugagg

SEQ ID NO: 36079 - RNA, 23 nt, Artificial Sequence
  Chemically synthesized
auaaaaugaggauucaaugagga

SEQ ID NO: 36080 - RNA, 23 nt, Artificial Sequence
  Chemically synthesized
uaaaaugaggauucaaugaggac

SEQ ID NO: 36081 - RNA, 23 nt, Artificial Sequence
  Chemically synthesized
aaaaugaggauucaaugaggacu

SEQ ID NO: 36082 - RNA, 23 nt, Artificial Sequence
  Chemically synthesized
aaaugaggauucaaugaggacuc

SEQ ID NO: 36083 - RNA, 23 nt, Artificial Sequence
  Chemically synthesized
cagcuacaugacaaaaacaaugc

SEQ ID NO: 36084 - RNA, 23 nt, Artificial Sequence
  Chemically synthesized
agcuacaugacaaaaacaaugcu

SEQ ID NO: 36085 - RNA, 23 nt, Artificial Sequence
  Chemically synthesized
gcuacaugacaaaaacaaugcua

SEQ ID NO: 36086 - RNA, 23 nt, Artificial Sequence
  Chemically synthesized
cuacaugacaaaaacaaugcuau

SEQ ID NO: 36087 - RNA, 23 nt, Artificial Sequence
  Chemically synthesized
uacaugacaaaaacaaugcuauu

SEQ ID NO: 36088 - RNA, 23 nt, Artificial Sequence
  Chemically synthesized
uuggguauaaaaugaggauucaa

SEQ ID NO: 36089 - RNA, 23 nt, Artificial Sequence
  Chemically synthesized
ucaguucagcauucacacuuucc

SEQ ID NO: 36090 - RNA, 23 nt, Artificial Sequence
  Chemically synthesized
caguucagcauucacacuuucca

SEQ ID NO: 36091 - RNA, 23 nt, Artificial Sequence
  Chemically synthesized
aguucagcauucacacuuuccag

SEQ ID NO: 36092 - RNA, 23 nt, Artificial Sequence
  Chemically synthesized
guucagcauucacacuuuccagc

SEQ ID NO: 36093 - RNA, 23 nt, Artificial Sequence
  Chemically synthesized
uucagcauucacacuuuccagcu

SEQ ID NO: 36094 - RNA, 23 nt, Artificial Sequence
  Chemically synthesized
cgucuucuccuucuucuuguuuc

SEQ ID NO: 36095 - RNA, 23 nt, Artificial Sequence
  Chemically synthesized
gucuucuccuucuucuuguuucg

SEQ ID NO: 36096 - RNA, 23 nt, Artificial Sequence
  Chemically synthesized
ucuucuccuucuucuuguuucgg

SEQ ID NO: 36097 - RNA, 23 nt, Artificial Sequence
  Chemically synthesized
cuucuccuucuucuuguuucggc

SEQ ID NO: 36098 - RNA, 23 nt, Artificial Sequence
  Chemically synthesized
uucuccuucuucuuguuucggca

SEQ ID NO: 36099 - RNA, 23 nt, Artificial Sequence
  Chemically synthesized
ucuccuucuucuuguuucggcac

SEQ ID NO: 36100 - RNA, 23 nt, Artificial Sequence
  Chemically synthesized
cuccuucuucuuguuucggcacu

SEQ ID NO: 36101 - RNA, 23 nt, Artificial Sequence
  Chemically synthesized
uccuucuucuuguuucggcacuu

SEQ ID NO: 36102 - RNA, 23 nt, Artificial Sequence
  Chemically synthesized
uauuucuuucucgucgccucuuu

SEQ ID NO: 36103 - RNA, 23 nt, Artificial Sequence
  Chemically synthesized
auuucuuucucgucgccucuuuu

SEQ ID NO: 36104 - RNA, 23 nt, Artificial Sequence
  Chemically synthesized
caaaaacaaugcuauugacaucc

SEQ ID NO: 36105 - RNA, 23 nt, Artificial Sequence
  Chemically synthesized
aaaaacaaugcuauugacaucca

SEQ ID NO: 36106 - RNA, 23 nt, Artificial Sequence
  Chemically synthesized
aaaacaaugcuauugacauccaa

SEQ ID NO: 36107 - RNA, 23 nt, Artificial Sequence
  Chemically synthesized
aaacaaugcuauugacauccaau

SEQ ID NO: 36108 - RNA, 23 nt, Artificial Sequence
  Chemically synthesized
aacaaugcuauugacauccaaua

SEQ ID NO: 36109 - RNA, 23 nt, Artificial Sequence
  Chemically synthesized
ggagaauucuguccuccucuugc

SEQ ID NO: 36110 - RNA, 23 nt, Artificial Sequence
  Chemically synthesized
gagaauucuguccuccucuugcu

SEQ ID NO: 36111 - RNA, 23 nt, Artificial Sequence
  Chemically synthesized
agaauucuguccuccucuugcug

SEQ ID NO: 36112 - RNA, 23 nt, Artificial Sequence
  Chemically synthesized
gaauucuguccuccucuugcuga

SEQ ID NO: 36113 - RNA, 23 nt, Artificial Sequence
  Chemically synthesized
aauucuguccuccucuugcugac

SEQ ID NO: 36114 - RNA, 23 nt, Artificial Sequence
  Chemically synthesized
aguuuucuugcacacacaauuuc

SEQ ID NO: 36115 - RNA, 23 nt, Artificial Sequence
  Chemically synthesized
guuuucuugcacacacaauuucu

SEQ ID NO: 36116 - RNA, 23 nt, Artificial Sequence
  Chemically synthesized
uuuucuugcacacacaauuucug

SEQ ID NO: 36117 - RNA, 23 nt, Artificial Sequence
  Chemically synthesized
uuucuugcacacacaauuucugg

SEQ ID NO: 36118 - RNA, 23 nt, Artificial Sequence
  Chemically synthesized
uucuugcacacacaauuucugga

SEQ ID NO: 36119 - RNA, 23 nt, Artificial Sequence
  Chemically synthesized
ucuugcacacacaauuucuggac

SEQ ID NO: 36120 - RNA, 23 nt, Artificial Sequence
  Chemically synthesized
cuugcacacacaauuucuggaca

SEQ ID NO: 36121 - RNA, 23 nt, Artificial Sequence
  Chemically synthesized
uugcacacacaauuucuggacau

SEQ ID NO: 36122 - RNA, 23 nt, Artificial Sequence
  Chemically synthesized
cccuacgagugacaaugguagcc

SEQ ID NO: 36123 - RNA, 23 nt, Artificial Sequence
  Chemically synthesized
ccuacgagugacaaugguagcca

SEQ ID NO: 36124 - RNA, 23 nt, Artificial Sequence
  Chemically synthesized
cuacgagugacaaugguagccac

SEQ ID NO: 36125 - RNA, 23 nt, Artificial Sequence
  Chemically synthesized
uacgagugacaaugguagccacg

SEQ ID NO: 36126 - RNA, 23 nt, Artificial Sequence
  Chemically synthesized
acgagugacaaugguagccacgg

SEQ ID NO: 36127 - RNA, 23 nt, Artificial Sequence
  Chemically synthesized
gguuuuuuguagaauccagauga

SEQ ID NO: 36128 - RNA, 23 nt, Artificial Sequence
  Chemically synthesized
guuuuuuguagaauccagaugaa

SEQ ID NO: 36129 - RNA, 23 nt, Artificial Sequence
  Chemically synthesized
uuuuuuguagaauccagaugaaa

SEQ ID NO: 36130 - RNA, 23 nt, Artificial Sequence
  Chemically synthesized
uuuuuguagaauccagaugaaag

SEQ ID NO: 36131 - RNA, 23 nt, Artificial Sequence
  Chemically synthesized
uuuuguagaauccagaugaaagg

SEQ ID NO: 36132 - RNA, 23 nt, Artificial Sequence
  Chemically synthesized
cuggaacauaagaauggccagug

SEQ ID NO: 36133 - RNA, 23 nt, Artificial Sequence
  Chemically synthesized
uggaacauaagaauggccagugu

SEQ ID NO: 36134 - RNA, 23 nt, Artificial Sequence
  Chemically synthesized
ggaacauaagaauggccagugug

SEQ ID NO: 36135 - RNA, 23 nt, Artificial Sequence
  Chemically synthesized
gaacauaagaauggccagugugu

SEQ ID NO: 36136 - RNA, 23 nt, Artificial Sequence
  Chemically synthesized
aacauaagaauggccaguguguu

SEQ ID NO: 36137 - RNA, 23 nt, Artificial Sequence
  Chemically synthesized
auggcuucaggguuuuggguaua

SEQ ID NO: 36138 - RNA, 23 nt, Artificial Sequence
  Chemically synthesized
ugaguacaauuaaacacucugag

SEQ ID NO: 36139 - RNA, 23 nt, Artificial Sequence
  Chemically synthesized
gaguacaauuaaacacucugaga

SEQ ID NO: 36140 - RNA, 23 nt, Artificial Sequence
  Chemically synthesized
aguacaauuaaacacucugagaa

SEQ ID NO: 36141 - RNA, 23 nt, Artificial Sequence
  Chemically synthesized
guacaauuaaacacucugagaau

SEQ ID NO: 36142 - RNA, 23 nt, Artificial Sequence
  Chemically synthesized
uacaauuaaacacucugagaauu

SEQ ID NO: 36143 - RNA, 23 nt, Artificial Sequence
  Chemically synthesized
aggaaaauggaauauucuuuggc

SEQ ID NO: 36144 - RNA, 23 nt, Artificial Sequence
  Chemically synthesized
ggaaaauggaauauucuuuggcu

SEQ ID NO: 36145 - RNA, 23 nt, Artificial Sequence
  Chemically synthesized
gaaaauggaauauucuuuggcuc

SEQ ID NO: 36146 - RNA, 23 nt, Artificial Sequence
  Chemically synthesized
aaaauggaauauucuuuggcucu

SEQ ID NO: 36147 - RNA, 23 nt, Artificial Sequence
  Chemically synthesized
aaauggaauauucuuuggcucuu

SEQ ID NO: 36148 - RNA, 23 nt, Artificial Sequence
  Chemically synthesized
aaugaggauucaaugaggacucc

SEQ ID NO: 36149 - RNA, 23 nt, Artificial Sequence
  Chemically synthesized
uucuuucucgucgccucuuuuuc

SEQ ID NO: 36150 - RNA, 23 nt, Artificial Sequence
  Chemically synthesized
ucuuucucgucgccucuuuuucc

SEQ ID NO: 36151 - RNA, 23 nt, Artificial Sequence
  Chemically synthesized
cuuucucgucgccucuuuuuccu

SEQ ID NO: 36152 - RNA, 23 nt, Artificial Sequence
  Chemically synthesized
uuucucgucgccucuuuuuccuu

SEQ ID NO: 36153 - RNA, 23 nt, Artificial Sequence
  Chemically synthesized
uucucgucgccucuuuuuccuuu

SEQ ID NO: 36154 - RNA, 23 nt, Artificial Sequence
  Chemically synthesized
ucucgucgccucuuuuuccuuuc

SEQ ID NO: 36155 - RNA, 23 nt, Artificial Sequence
  Chemically synthesized
cucgucgccucuuuuuccuuuca

SEQ ID NO: 36156 - RNA, 23 nt, Artificial Sequence
  Chemically synthesized
uguuaacgcugggagaauucugu

SEQ ID NO: 36157 - RNA, 23 nt, Artificial Sequence
  Chemically synthesized
guuaacgcugggagaauucuguc

SEQ ID NO: 36158 - RNA, 23 nt, Artificial Sequence
  Chemically synthesized
uuaacgcugggagaauucugucc

SEQ ID NO: 36159 - RNA, 23 nt, Artificial Sequence
  Chemically synthesized
uaacgcugggagaauucuguccu

SEQ ID NO: 36160 - RNA, 23 nt, Artificial Sequence
  Chemically synthesized
aacgcugggagaauucuguccuc

SEQ ID NO: 36161 - RNA, 23 nt, Artificial Sequence
  Chemically synthesized
auucuguccuccucuugcugaca

SEQ ID NO: 36162 - RNA, 23 nt, Artificial Sequence
  Chemically synthesized
gaguacauugccuaguuuucuug

SEQ ID NO: 36163 - RNA, 23 nt, Artificial Sequence
  Chemically synthesized
aguacauugccuaguuuucuugc

SEQ ID NO: 36164 - RNA, 23 nt, Artificial Sequence
  Chemically synthesized
guacauugccuaguuuucuugca

SEQ ID NO: 36165 - RNA, 23 nt, Artificial Sequence
  Chemically synthesized
uacauugccuaguuuucuugcac

SEQ ID NO: 36166 - RNA, 23 nt, Artificial Sequence
  Chemically synthesized
acauugccuaguuuucuugcaca

SEQ ID NO: 36167 - RNA, 23 nt, Artificial Sequence
  Chemically synthesized
ucacuaaaugcuguucucacucc

SEQ ID NO: 36168 - RNA, 23 nt, Artificial Sequence
  Chemically synthesized
cacuaaaugcuguucucacucca

SEQ ID NO: 36169 - RNA, 23 nt, Artificial Sequence
  Chemically synthesized
acuaaaugcuguucucacuccac

SEQ ID NO: 36170 - RNA, 23 nt, Artificial Sequence
  Chemically synthesized
cuaaaugcuguucucacuccaca

SEQ ID NO: 36171 - RNA, 23 nt, Artificial Sequence
  Chemically synthesized
uaaaugcuguucucacuccacau

SEQ ID NO: 36172 - RNA, 23 nt, Artificial Sequence
  Chemically synthesized
ccaucuggaacauaagaauggcc

SEQ ID NO: 36173 - RNA, 23 nt, Artificial Sequence
  Chemically synthesized
caucuggaacauaagaauggcca

SEQ ID NO: 36174 - RNA, 23 nt, Artificial Sequence
  Chemically synthesized
aucuggaacauaagaauggccag

SEQ ID NO: 36175 - RNA, 23 nt, Artificial Sequence
  Chemically synthesized
ucuggaacauaagaauggccagu

SEQ ID NO: 36176 - RNA, 23 nt, Artificial Sequence
  Chemically synthesized
aauguuccuucuuuuaucuguug

SEQ ID NO: 36177 - RNA, 23 nt, Artificial Sequence
  Chemically synthesized
auguuccuucuuuuaucuguugg

SEQ ID NO: 36178 - RNA, 23 nt, Artificial Sequence
  Chemically synthesized
uguuccuucuuuuaucuguugga

SEQ ID NO: 36179 - RNA, 23 nt, Artificial Sequence
  Chemically synthesized
guuccuucuuuuaucuguuggau

SEQ ID NO: 36180 - RNA, 23 nt, Artificial Sequence
  Chemically synthesized
uuccuucuuuuaucuguuggaua

SEQ ID NO: 36181 - RNA, 23 nt, Artificial Sequence
  Chemically synthesized
uccuucuuuuaucuguuggauaa

SEQ ID NO: 36182 - RNA, 23 nt, Artificial Sequence
  Chemically synthesized
agccuucaguucagcauucacac

SEQ ID NO: 36183 - RNA, 23 nt, Artificial Sequence
  Chemically synthesized
gccuucaguucagcauucacacu

SEQ ID NO: 36184 - RNA, 23 nt, Artificial Sequence
  Chemically synthesized
ccuucaguucagcauucacacuu

SEQ ID NO: 36185 - RNA, 23 nt, Artificial Sequence
  Chemically synthesized
cuucaguucagcauucacacuuu

SEQ ID NO: 36186 - RNA, 23 nt, Artificial Sequence
  Chemically synthesized
uucaguucagcauucacacuuuc

SEQ ID NO: 36187 - RNA, 23 nt, Artificial Sequence
  Chemically synthesized
cagcauucacacuuuccagcuuc

SEQ ID NO: 36188 - RNA, 23 nt, Artificial Sequence
  Chemically synthesized
agcauucacacuuuccagcuucu

SEQ ID NO: 36189 - RNA, 23 nt, Artificial Sequence
  Chemically synthesized
gcauucacacuuuccagcuucuc

SEQ ID NO: 36190 - RNA, 23 nt, Artificial Sequence
  Chemically synthesized
cauucacacuuuccagcuucucc

SEQ ID NO: 36191 - RNA, 23 nt, Artificial Sequence
  Chemically synthesized
auucacacuuuccagcuucuccg

SEQ ID NO: 36192 - RNA, 23 nt, Artificial Sequence
  Chemically synthesized
ccuucuucuuguuucggcacuuu

SEQ ID NO: 36193 - RNA, 23 nt, Artificial Sequence
  Chemically synthesized
cuucuucuuguuucggcacuuug

SEQ ID NO: 36194 - RNA, 23 nt, Artificial Sequence
  Chemically synthesized
uucuucuuguuucggcacuuugc

SEQ ID NO: 36195 - RNA, 23 nt, Artificial Sequence
  Chemically synthesized
gcagcugcaaucuuauuucuuuc

SEQ ID NO: 36196 - RNA, 23 nt, Artificial Sequence
  Chemically synthesized
cagcugcaaucuuauuucuuucu

SEQ ID NO: 36197 - RNA, 23 nt, Artificial Sequence
  Chemically synthesized
agcugcaaucuuauuucuuucuc

SEQ ID NO: 36198 - RNA, 23 nt, Artificial Sequence
  Chemically synthesized
uuucuuucucgucgccucuuuuu

SEQ ID NO: 36199 - RNA, 23 nt, Artificial Sequence
  Chemically synthesized
ucgucgccucuuuuuccuuucau

SEQ ID NO: 36200 - RNA, 23 nt, Artificial Sequence
  Chemically synthesized
cgucgccucuuuuuccuuucauc

SEQ ID NO: 36201 - RNA, 23 nt, Artificial Sequence
  Chemically synthesized
gucgccucuuuuuccuuucaucu

SEQ ID NO: 36202 - RNA, 23 nt, Artificial Sequence
  Chemically synthesized
uugaguacaauuaaacacucuga

SEQ ID NO: 36203 - RNA, 23 nt, Artificial Sequence
  Chemically synthesized
agaguacauugccuaguuuucuu

SEQ ID NO: 36204 - RNA, 23 nt, Artificial Sequence
  Chemically synthesized
ccccuacgagugacaaugguagc

SEQ ID NO: 36205 - RNA, 23 nt, Artificial Sequence
  Chemically synthesized
acauaagaauggccaguguguua

SEQ ID NO: 36206 - RNA, 23 nt, Artificial Sequence
  Chemically synthesized
uggcuucaggguuuuggguauaa

SEQ ID NO: 36207 - RNA, 23 nt, Artificial Sequence
  Chemically synthesized
ggcuucaggguuuuggguauaaa

SEQ ID NO: 36208 - RNA, 23 nt, Artificial Sequence
  Chemically synthesized
gcuucaggguuuuggguauaaaa

SEQ ID NO: 36209 - RNA, 23 nt, Artificial Sequence
  Chemically synthesized
cuucaggguuuuggguauaaaau

SEQ ID NO: 36210 - RNA, 23 nt, Artificial Sequence
  Chemically synthesized
uucaggguuuuggguauaaaaug

SEQ ID NO: 36211 - RNA, 23 nt, Artificial Sequence
  Chemically synthesized
gcaauguuccuucuuuuaucugu

SEQ ID NO: 36212 - RNA, 23 nt, Artificial Sequence
  Chemically synthesized
caauguuccuucuuuuaucuguu

SEQ ID NO: 36213 - RNA, 23 nt, Artificial Sequence
  Chemically synthesized
augaagguugagcauguauauca

SEQ ID NO: 36214 - RNA, 23 nt, Artificial Sequence
  Chemically synthesized
ugaagguugagcauguauaucaa

SEQ ID NO: 36215 - RNA, 23 nt, Artificial Sequence
  Chemically synthesized
gaagguugagcauguauaucaaa

SEQ ID NO: 36216 - RNA, 23 nt, Artificial Sequence
  Chemically synthesized
aagguugagcauguauaucaaau

SEQ ID NO: 36217 - RNA, 23 nt, Artificial Sequence
  Chemically synthesized
agguugagcauguauaucaaaug

SEQ ID NO: 36218 - RNA, 23 nt, Artificial Sequence
  Chemically synthesized
uguauaucaaaugcugcuucucg

SEQ ID NO: 36219 - RNA, 23 nt, Artificial Sequence
  Chemically synthesized
guauaucaaaugcugcuucucgu

SEQ ID NO: 36220 - RNA, 23 nt, Artificial Sequence
  Chemically synthesized
uauaucaaaugcugcuucucguu

SEQ ID NO: 36221 - RNA, 23 nt, Artificial Sequence
  Chemically synthesized
auaucaaaugcugcuucucguuc

SEQ ID NO: 36222 - RNA, 23 nt, Artificial Sequence
  Chemically synthesized
uaucaaaugcugcuucucguucu

SEQ ID NO: 36223 - RNA, 23 nt, Artificial Sequence
  Chemically synthesized
ucagcauucacacuuuccagcuu

SEQ ID NO: 36224 - RNA, 23 nt, Artificial Sequence
  Chemically synthesized
cuccgucuucuccuucuucuugu

SEQ ID NO: 36225 - RNA, 23 nt, Artificial Sequence
  Chemically synthesized
uccgucuucuccuucuucuuguu

SEQ ID NO: 36226 - RNA, 23 nt, Artificial Sequence
  Chemically synthesized
ccgucuucuccuucuucuuguuu

SEQ ID NO: 36227 - RNA, 23 nt, Artificial Sequence
  Chemically synthesized
caauuaaacacucugagaauuuc

SEQ ID NO: 36228 - RNA, 23 nt, Artificial Sequence
  Chemically synthesized
aauuaaacacucugagaauuuca

SEQ ID NO: 36229 - RNA, 23 nt, Artificial Sequence
  Chemically synthesized
auuaaacacucugagaauuucac

SEQ ID NO: 36230 - RNA, 23 nt, Artificial Sequence
  Chemically synthesized
uuaaacacucugagaauuucaca

SEQ ID NO: 36231 - RNA, 23 nt, Artificial Sequence
  Chemically synthesized
uaaacacucugagaauuucacag

SEQ ID NO: 36232 - RNA, 23 nt, Artificial Sequence
  Chemically synthesized
aauuuuaauagacaguagccagc

SEQ ID NO: 36233 - RNA, 23 nt, Artificial Sequence
  Chemically synthesized
auuuuaauagacaguagccagcg

SEQ ID NO: 36234 - RNA, 23 nt, Artificial Sequence
  Chemically synthesized
uuuaauagacaguagccagcguc

SEQ ID NO: 36235 - RNA, 23 nt, Artificial Sequence
  Chemically synthesized
uuaauagacaguagccagcgucc

SEQ ID NO: 36236 - RNA, 23 nt, Artificial Sequence
  Chemically synthesized
gccagauuucuuaaaacagcuac

SEQ ID NO: 36237 - RNA, 23 nt, Artificial Sequence
  Chemically synthesized
ccagauuucuuaaaacagcuaca

SEQ ID NO: 36238 - RNA, 23 nt, Artificial Sequence
  Chemically synthesized
cagauuucuuaaaacagcuacau

SEQ ID NO: 36239 - RNA, 23 nt, Artificial Sequence
  Chemically synthesized
agauuucuuaaaacagcuacaug

SEQ ID NO: 36240 - RNA, 23 nt, Artificial Sequence
  Chemically synthesized
gauuucuuaaaacagcuacauga

SEQ ID NO: 36241 - RNA, 23 nt, Artificial Sequence
  Chemically synthesized
gugguuuccaaacaucucuccac

SEQ ID NO: 36242 - RNA, 23 nt, Artificial Sequence
  Chemically synthesized
ugguuuccaaacaucucuccacu

SEQ ID NO: 36243 - RNA, 23 nt, Artificial Sequence
  Chemically synthesized
gguuuccaaacaucucuccacug

SEQ ID NO: 36244 - RNA, 23 nt, Artificial Sequence
  Chemically synthesized
guuuccaaacaucucuccacuga

SEQ ID NO: 36245 - RNA, 23 nt, Artificial Sequence
  Chemically synthesized
uuuccaaacaucucuccacugac

SEQ ID NO: 36246 - RNA, 23 nt, Artificial Sequence
  Chemically synthesized
caaccacaaggaaaggaaaaugg

SEQ ID NO: 36247 - RNA, 23 nt, Artificial Sequence
  Chemically synthesized
aaccacaaggaaaggaaaaugga

SEQ ID NO: 36248 - RNA, 23 nt, Artificial Sequence
  Chemically synthesized
accacaaggaaaggaaaauggaa

SEQ ID NO: 36249 - RNA, 23 nt, Artificial Sequence
  Chemically synthesized
ccacaaggaaaggaaaauggaau

SEQ ID NO: 36250 - RNA, 23 nt, Artificial Sequence
  Chemically synthesized
cacaaggaaaggaaaauggaaua

SEQ ID NO: 36251 - RNA, 23 nt, Artificial Sequence
  Chemically synthesized
gugacuuuggaacugaguuugca

SEQ ID NO: 36252 - RNA, 23 nt, Artificial Sequence
  Chemically synthesized
ugacuuuggaacugaguuugcaa

SEQ ID NO: 36253 - RNA, 23 nt, Artificial Sequence
  Chemically synthesized
gacuuuggaacugaguuugcaac

SEQ ID NO: 36254 - RNA, 23 nt, Artificial Sequence
  Chemically synthesized
acuuuggaacugaguuugcaaca

SEQ ID NO: 36255 - RNA, 23 nt, Artificial Sequence
  Chemically synthesized
cuuuggaacugaguuugcaacag

SEQ ID NO: 36256 - RNA, 23 nt, Artificial Sequence
  Chemically synthesized
cauugccuaguuuucuugcacac

SEQ ID NO: 36257 - RNA, 23 nt, Artificial Sequence
  Chemically synthesized
guugcacaacuucacuaaaugcu

SEQ ID NO: 36258 - RNA, 23 nt, Artificial Sequence
  Chemically synthesized
uugcacaacuucacuaaaugcug

SEQ ID NO: 36259 - RNA, 23 nt, Artificial Sequence
  Chemically synthesized
ugcacaacuucacuaaaugcugu

SEQ ID NO: 36260 - RNA, 23 nt, Artificial Sequence
  Chemically synthesized
gcacaacuucacuaaaugcuguu

SEQ ID NO: 36261 - RNA, 23 nt, Artificial Sequence
  Chemically synthesized
cacaacuucacuaaaugcuguuc

SEQ ID NO: 36262 - RNA, 23 nt, Artificial Sequence
  Chemically synthesized
ugguuuuuuguagaauccagaug

SEQ ID NO: 36263 - RNA, 23 nt, Artificial Sequence
  Chemically synthesized
uuuguagaauccagaugaaaggc

SEQ ID NO: 36264 - RNA, 23 nt, Artificial Sequence
  Chemically synthesized
uuguagaauccagaugaaaggcg

SEQ ID NO: 36265 - RNA, 23 nt, Artificial Sequence
  Chemically synthesized
uguagaauccagaugaaaggcgg

SEQ ID NO: 36266 - RNA, 23 nt, Artificial Sequence
  Chemically synthesized
guagaauccagaugaaaggcggg

SEQ ID NO: 36267 - RNA, 23 nt, Artificial Sequence
  Chemically synthesized
uagaauccagaugaaaggcgggc

SEQ ID NO: 36268 - RNA, 23 nt, Artificial Sequence
  Chemically synthesized
agaauccagaugaaaggcgggca

SEQ ID NO: 36269 - RNA, 23 nt, Artificial Sequence
  Chemically synthesized
uaagaauggccaguguguuaagg

SEQ ID NO: 36270 - RNA, 23 nt, Artificial Sequence
  Chemically synthesized
aagaauggccaguguguuaaggc

SEQ ID NO: 36271 - RNA, 23 nt, Artificial Sequence
  Chemically synthesized
agaauggccaguguguuaaggcc

SEQ ID NO: 36272 - RNA, 23 nt, Artificial Sequence
  Chemically synthesized
gaauggccaguguguuaaggccu

SEQ ID NO: 36273 - RNA, 23 nt, Artificial Sequence
  Chemically synthesized
aauggccaguguguuaaggccua

SEQ ID NO: 36274 - RNA, 23 nt, Artificial Sequence
  Chemically synthesized
acugcuuagcucugcaauguucc

SEQ ID NO: 36275 - RNA, 23 nt, Artificial Sequence
  Chemically synthesized
cugcuuagcucugcaauguuccu

SEQ ID NO: 36276 - RNA, 23 nt, Artificial Sequence
  Chemically synthesized
ugcuuagcucugcaauguuccuu

SEQ ID NO: 36277 - RNA, 23 nt, Artificial Sequence
  Chemically synthesized
gcuuagcucugcaauguuccuuc

SEQ ID NO: 36278 - RNA, 23 nt, Artificial Sequence
  Chemically synthesized
cuuagcucugcaauguuccuucu

SEQ ID NO: 36279 - RNA, 23 nt, Artificial Sequence
  Chemically synthesized
uuagcucugcaauguuccuucuu

SEQ ID NO: 36280 - RNA, 23 nt, Artificial Sequence
  Chemically synthesized
uagcucugcaauguuccuucuuu

SEQ ID NO: 36281 - RNA, 23 nt, Artificial Sequence
  Chemically synthesized
agcucugcaauguuccuucuuuu

SEQ ID NO: 36282 - RNA, 23 nt, Artificial Sequence
  Chemically synthesized
aucaaaugcugcuucucguucuu

SEQ ID NO: 36283 - RNA, 23 nt, Artificial Sequence
  Chemically synthesized
ucuucuuguuucggcacuuugca

SEQ ID NO: 36284 - RNA, 23 nt, Artificial Sequence
  Chemically synthesized
cuucuuguuucggcacuuugcag

SEQ ID NO: 36285 - RNA, 23 nt, Artificial Sequence
  Chemically synthesized
uucuuguuucggcacuuugcagc

SEQ ID NO: 36286 - RNA, 23 nt, Artificial Sequence
  Chemically synthesized
ucuuguuucggcacuuugcagcu

SEQ ID NO: 36287 - RNA, 23 nt, Artificial Sequence
  Chemically synthesized
uuugcagcugcaaucuuauuucu

SEQ ID NO: 36288 - RNA, 23 nt, Artificial Sequence
  Chemically synthesized
uugcagcugcaaucuuauuucuu

SEQ ID NO: 36289 - RNA, 23 nt, Artificial Sequence
  Chemically synthesized
ugcagcugcaaucuuauuucuuu

SEQ ID NO: 36290 - RNA, 23 nt, Artificial Sequence
  Chemically synthesized
gggcuaccucggcuuuugugaug

SEQ ID NO: 36291 - RNA, 23 nt, Artificial Sequence
  Chemically synthesized
ggcuaccucggcuuuugugaugg

SEQ ID NO: 36292 - RNA, 23 nt, Artificial Sequence
  Chemically synthesized
gcuaccucggcuuuugugaugga

SEQ ID NO: 36293 - RNA, 23 nt, Artificial Sequence
  Chemically synthesized
cuaccucggcuuuugugauggac

SEQ ID NO: 36294 - RNA, 23 nt, Artificial Sequence
  Chemically synthesized
uaccucggcuuuugugauggaca

SEQ ID NO: 36295 - RNA, 23 nt, Artificial Sequence
  Chemically synthesized
auugaguacaauuaaacacucug

SEQ ID NO: 36296 - RNA, 23 nt, Artificial Sequence
  Chemically synthesized
cagaauuuuaauagacaguagcc

SEQ ID NO: 36297 - RNA, 23 nt, Artificial Sequence
  Chemically synthesized
agaauuuuaauagacaguagcca

SEQ ID NO: 36298 - RNA, 23 nt, Artificial Sequence
  Chemically synthesized
gaauuuuaauagacaguagccag

SEQ ID NO: 36299 - RNA, 23 nt, Artificial Sequence
  Chemically synthesized
uaauagacaguagccagcguccu

SEQ ID NO: 36300 - RNA, 23 nt, Artificial Sequence
  Chemically synthesized
ggcaaaccucagcucuuccuuga

SEQ ID NO: 36301 - RNA, 23 nt, Artificial Sequence
  Chemically synthesized
gcaaaccucagcucuuccuugac

SEQ ID NO: 36302 - RNA, 23 nt, Artificial Sequence
  Chemically synthesized
caaaccucagcucuuccuugaca

SEQ ID NO: 36303 - RNA, 23 nt, Artificial Sequence
  Chemically synthesized
aaaccucagcucuuccuugacaa

SEQ ID NO: 36304 - RNA, 23 nt, Artificial Sequence
  Chemically synthesized
aaccucagcucuuccuugacaaa

SEQ ID NO: 36305 - RNA, 23 nt, Artificial Sequence
  Chemically synthesized
auggaauauucuuuggcucuucc

SEQ ID NO: 36306 - RNA, 23 nt, Artificial Sequence
  Chemically synthesized
uggaauauucuuuggcucuucca

SEQ ID NO: 36307 - RNA, 23 nt, Artificial Sequence
  Chemically synthesized
ggaauauucuuuggcucuuccag

SEQ ID NO: 36308 - RNA, 23 nt, Artificial Sequence
  Chemically synthesized
gaauauucuuuggcucuuccagc

SEQ ID NO: 36309 - RNA, 23 nt, Artificial Sequence
  Chemically synthesized
aauauucuuuggcucuuccagcc

SEQ ID NO: 36310 - RNA, 23 nt, Artificial Sequence
  Chemically synthesized
uuuggaacugaguuugcaacaga

SEQ ID NO: 36311 - RNA, 23 nt, Artificial Sequence
  Chemically synthesized
uuggaacugaguuugcaacagag

SEQ ID NO: 36312 - RNA, 23 nt, Artificial Sequence
  Chemically synthesized
gaauaucuugagauacugcacgu

SEQ ID NO: 36313 - RNA, 23 nt, Artificial Sequence
  Chemically synthesized
aauaucuugagauacugcacgug

SEQ ID NO: 36314 - RNA, 23 nt, Artificial Sequence
  Chemically synthesized
auaucuugagauacugcacgugg

SEQ ID NO: 36315 - RNA, 23 nt, Artificial Sequence
  Chemically synthesized
uaucuugagauacugcacguggu

SEQ ID NO: 36316 - RNA, 23 nt, Artificial Sequence
  Chemically synthesized
aucuugagauacugcacguggug

SEQ ID NO: 36317 - RNA, 23 nt, Artificial Sequence
  Chemically synthesized
ugccuaguuuucuugcacacaca

SEQ ID NO: 36318 - RNA, 23 nt, Artificial Sequence
  Chemically synthesized
gccuaguuuucuugcacacacaa

SEQ ID NO: 36319 - RNA, 23 nt, Artificial Sequence
  Chemically synthesized
ccuaguuuucuugcacacacaau

SEQ ID NO: 36320 - RNA, 23 nt, Artificial Sequence
  Chemically synthesized
cuaguuuucuugcacacacaauu

SEQ ID NO: 36321 - RNA, 23 nt, Artificial Sequence
  Chemically synthesized
uaguuuucuugcacacacaauuu

SEQ ID NO: 36322 - RNA, 23 nt, Artificial Sequence
  Chemically synthesized
agcaaaauccucaaacaccagug

SEQ ID NO: 36323 - RNA, 23 nt, Artificial Sequence
  Chemically synthesized
gcaaaauccucaaacaccaguga

SEQ ID NO: 36324 - RNA, 23 nt, Artificial Sequence
  Chemically synthesized
caaaauccucaaacaccagugac

SEQ ID NO: 36325 - RNA, 23 nt, Artificial Sequence
  Chemically synthesized
aaaauccucaaacaccagugacc

SEQ ID NO: 36326 - RNA, 23 nt, Artificial Sequence
  Chemically synthesized
aaauccucaaacaccagugaccc

SEQ ID NO: 36327 - RNA, 23 nt, Artificial Sequence
  Chemically synthesized
gaauccagaugaaaggcgggcag

SEQ ID NO: 36328 - RNA, 23 nt, Artificial Sequence
  Chemically synthesized
auucuagagguacacaggaagac

SEQ ID NO: 36329 - RNA, 23 nt, Artificial Sequence
  Chemically synthesized
uucuagagguacacaggaagaca

SEQ ID NO: 36330 - RNA, 23 nt, Artificial Sequence
  Chemically synthesized
ucuagagguacacaggaagacag

SEQ ID NO: 36331 - RNA, 23 nt, Artificial Sequence
  Chemically synthesized
cuagagguacacaggaagacagc

SEQ ID NO: 36332 - RNA, 23 nt, Artificial Sequence
  Chemically synthesized
uagagguacacaggaagacagcu

SEQ ID NO: 36333 - RNA, 23 nt, Artificial Sequence
  Chemically synthesized
ugcaauguuccuucuuuuaucug

SEQ ID NO: 36334 - RNA, 23 nt, Artificial Sequence
  Chemically synthesized
cauguauaucaaaugcugcuucu

SEQ ID NO: 36335 - RNA, 23 nt, Artificial Sequence
  Chemically synthesized
auguauaucaaaugcugcuucuc

SEQ ID NO: 36336 - RNA, 23 nt, Artificial Sequence
  Chemically synthesized
ucaaaugcugcuucucguucuug

SEQ ID NO: 36337 - RNA, 23 nt, Artificial Sequence
  Chemically synthesized
caaaugcugcuucucguucuuga

SEQ ID NO: 36338 - RNA, 23 nt, Artificial Sequence
  Chemically synthesized
aaaugcugcuucucguucuugag

SEQ ID NO: 36339 - RNA, 23 nt, Artificial Sequence
  Chemically synthesized
aaacacucugagaauuucacaga

SEQ ID NO: 36340 - RNA, 23 nt, Artificial Sequence
  Chemically synthesized
aacacucugagaauuucacagaa

SEQ ID NO: 36341 - RNA, 23 nt, Artificial Sequence
  Chemically synthesized
cugugguuuccaaacaucucucc

SEQ ID NO: 36342 - RNA, 23 nt, Artificial Sequence
  Chemically synthesized
ugugguuuccaaacaucucucca

SEQ ID NO: 36343 - RNA, 23 nt, Artificial Sequence
  Chemically synthesized
aauggaauauucuuuggcucuuc

SEQ ID NO: 36344 - RNA, 23 nt, Artificial Sequence
  Chemically synthesized
cugcuuucuuccugugacuuugg

SEQ ID NO: 36345 - RNA, 23 nt, Artificial Sequence
  Chemically synthesized
ugcuuucuuccugugacuuugga

SEQ ID NO: 36346 - RNA, 23 nt, Artificial Sequence
  Chemically synthesized
gcuuucuuccugugacuuuggaa

SEQ ID NO: 36347 - RNA, 23 nt, Artificial Sequence
  Chemically synthesized
cuuucuuccugugacuuuggaac

SEQ ID NO: 36348 - RNA, 23 nt, Artificial Sequence
  Chemically synthesized
uuucuuccugugacuuuggaacu

SEQ ID NO: 36349 - RNA, 23 nt, Artificial Sequence
  Chemically synthesized
gaacugaguuugcaacagaggac

SEQ ID NO: 36350 - RNA, 23 nt, Artificial Sequence
  Chemically synthesized
aacugaguuugcaacagaggacc

SEQ ID NO: 36351 - RNA, 23 nt, Artificial Sequence
  Chemically synthesized
acugaguuugcaacagaggaccu

SEQ ID NO: 36352 - RNA, 23 nt, Artificial Sequence
  Chemically synthesized
cugaguuugcaacagaggaccug

SEQ ID NO: 36353 - RNA, 23 nt, Artificial Sequence
  Chemically synthesized
ugaguuugcaacagaggaccugc

SEQ ID NO: 36354 - RNA, 23 nt, Artificial Sequence
  Chemically synthesized
caucauacugcccauggauuuug

SEQ ID NO: 36355 - RNA, 23 nt, Artificial Sequence
  Chemically synthesized
aucauacugcccauggauuuugu

SEQ ID NO: 36356 - RNA, 23 nt, Artificial Sequence
  Chemically synthesized
ucauacugcccauggauuuugug

SEQ ID NO: 36357 - RNA, 23 nt, Artificial Sequence
  Chemically synthesized
cauacugcccauggauuuugugu

SEQ ID NO: 36358 - RNA, 23 nt, Artificial Sequence
  Chemically synthesized
auacugcccauggauuuuguguu

SEQ ID NO: 36359 - RNA, 23 nt, Artificial Sequence
  Chemically synthesized
uacugcccauggauuuuguguua

SEQ ID NO: 36360 - RNA, 23 nt, Artificial Sequence
  Chemically synthesized
uugccuaguuuucuugcacacac

SEQ ID NO: 36361 - RNA, 23 nt, Artificial Sequence
  Chemically synthesized
aauccucaaacaccagugaccca

SEQ ID NO: 36362 - RNA, 23 nt, Artificial Sequence
  Chemically synthesized
acacugcugccugaauccuaacg

SEQ ID NO: 36363 - RNA, 23 nt, Artificial Sequence
  Chemically synthesized
cacugcugccugaauccuaacgg

SEQ ID NO: 36364 - RNA, 23 nt, Artificial Sequence
  Chemically synthesized
acugcugccugaauccuaacggu

SEQ ID NO: 36365 - RNA, 23 nt, Artificial Sequence
  Chemically synthesized
cugcugccugaauccuaacggug

SEQ ID NO: 36366 - RNA, 23 nt, Artificial Sequence
  Chemically synthesized
ugcugccugaauccuaacggugg

SEQ ID NO: 36367 - RNA, 23 nt, Artificial Sequence
  Chemically synthesized
cauaagaauggccaguguguuaa

SEQ ID NO: 36368 - RNA, 23 nt, Artificial Sequence
  Chemically synthesized
auaagaauggccaguguguuaag

SEQ ID NO: 36369 - RNA, 23 nt, Artificial Sequence
  Chemically synthesized
cugcugggauucuagagguacac

SEQ ID NO: 36370 - RNA, 23 nt, Artificial Sequence
  Chemically synthesized
ugcugggauucuagagguacaca

SEQ ID NO: 36371 - RNA, 23 nt, Artificial Sequence
  Chemically synthesized
gcugggauucuagagguacacag

SEQ ID NO: 36372 - RNA, 23 nt, Artificial Sequence
  Chemically synthesized
cugggauucuagagguacacagg

SEQ ID NO: 36373 - RNA, 23 nt, Artificial Sequence
  Chemically synthesized
acaggaagacagcucuccaaugg

SEQ ID NO: 36374 - RNA, 23 nt, Artificial Sequence
  Chemically synthesized
caggaagacagcucuccaauggc

SEQ ID NO: 36375 - RNA, 23 nt, Artificial Sequence
  Chemically synthesized
aggaagacagcucuccaauggcu

SEQ ID NO: 36376 - RNA, 23 nt, Artificial Sequence
  Chemically synthesized
ggaagacagcucuccaauggcuu

SEQ ID NO: 36377 - RNA, 23 nt, Artificial Sequence
  Chemically synthesized
gaagacagcucuccaauggcuuc

SEQ ID NO: 36378 - RNA, 23 nt, Artificial Sequence
  Chemically synthesized
aagacagcucuccaauggcuuca

SEQ ID NO: 36379 - RNA, 23 nt, Artificial Sequence
  Chemically synthesized
augaggauucaaugaggacuccc

SEQ ID NO: 36380 - RNA, 23 nt, Artificial Sequence
  Chemically synthesized
uucacacuuuccagcuucuccga

SEQ ID NO: 36381 - RNA, 23 nt, Artificial Sequence
  Chemically synthesized
ucacacuuuccagcuucuccgac

SEQ ID NO: 36382 - RNA, 23 nt, Artificial Sequence
  Chemically synthesized
cacacuuuccagcuucuccgacu

SEQ ID NO: 36383 - RNA, 23 nt, Artificial Sequence
  Chemically synthesized
acacuuuccagcuucuccgacuc

SEQ ID NO: 36384 - RNA, 23 nt, Artificial Sequence
  Chemically synthesized
gcagaggugcuuguucuggaugg

SEQ ID NO: 36385 - RNA, 23 nt, Artificial Sequence
  Chemically synthesized
cagaggugcuuguucuggauggc

SEQ ID NO: 36386 - RNA, 23 nt, Artificial Sequence
  Chemically synthesized
agaggugcuuguucuggauggca

SEQ ID NO: 36387 - RNA, 23 nt, Artificial Sequence
  Chemically synthesized
gaggugcuuguucuggauggcaa

SEQ ID NO: 36388 - RNA, 23 nt, Artificial Sequence
  Chemically synthesized
aggugcuuguucuggauggcaaa

SEQ ID NO: 36389 - RNA, 23 nt, Artificial Sequence
  Chemically synthesized
acaaaaacaaugcuauugacauc

SEQ ID NO: 36390 - RNA, 23 nt, Artificial Sequence
  Chemically synthesized
uuccaaacaucucuccacugacu

SEQ ID NO: 36391 - RNA, 23 nt, Artificial Sequence
  Chemically synthesized
uccaaacaucucuccacugacug

SEQ ID NO: 36392 - RNA, 23 nt, Artificial Sequence
  Chemically synthesized
ccaaacaucucuccacugacugu

SEQ ID NO: 36393 - RNA, 23 nt, Artificial Sequence
  Chemically synthesized
caaacaucucuccacugacugug

SEQ ID NO: 36394 - RNA, 23 nt, Artificial Sequence
  Chemically synthesized
aaacaucucuccacugacugugg

SEQ ID NO: 36395 - RNA, 23 nt, Artificial Sequence
  Chemically synthesized
aacaucucuccacugacuguggu

SEQ ID NO: 36396 - RNA, 23 nt, Artificial Sequence
  Chemically synthesized
cagccuagacacaacuccugacc

SEQ ID NO: 36397 - RNA, 23 nt, Artificial Sequence
  Chemically synthesized
agccuagacacaacuccugaccu

SEQ ID NO: 36398 - RNA, 23 nt, Artificial Sequence
  Chemically synthesized
gccuagacacaacuccugaccua

SEQ ID NO: 36399 - RNA, 23 nt, Artificial Sequence
  Chemically synthesized
ccuagacacaacuccugaccuaa

SEQ ID NO: 36400 - RNA, 23 nt, Artificial Sequence
  Chemically synthesized
cuagacacaacuccugaccuaag

SEQ ID NO: 36401 - RNA, 23 nt, Artificial Sequence
  Chemically synthesized
ggaaguugaacuuucugcuuucu

SEQ ID NO: 36402 - RNA, 23 nt, Artificial Sequence
  Chemically synthesized
gaaguugaacuuucugcuuucuu

SEQ ID NO: 36403 - RNA, 23 nt, Artificial Sequence
  Chemically synthesized
aaguugaacuuucugcuuucuuc

SEQ ID NO: 36404 - RNA, 23 nt, Artificial Sequence
  Chemically synthesized
aguugaacuuucugcuuucuucc

SEQ ID NO: 36405 - RNA, 23 nt, Artificial Sequence
  Chemically synthesized
guugaacuuucugcuuucuuccu

SEQ ID NO: 36406 - RNA, 23 nt, Artificial Sequence
  Chemically synthesized
uugaacuuucugcuuucuuccug

SEQ ID NO: 36407 - RNA, 23 nt, Artificial Sequence
  Chemically synthesized
ugaacuuucugcuuucuuccugu

SEQ ID NO: 36408 - RNA, 23 nt, Artificial Sequence
  Chemically synthesized
gaacuuucugcuuucuuccugug

SEQ ID NO: 36409 - RNA, 23 nt, Artificial Sequence
  Chemically synthesized
aacuuucugcuuucuuccuguga

SEQ ID NO: 36410 - RNA, 23 nt, Artificial Sequence
  Chemically synthesized
acuuucugcuuucuuccugugac

SEQ ID NO: 36411 - RNA, 23 nt, Artificial Sequence
  Chemically synthesized
uguguuaacgcugggagaauucu

SEQ ID NO: 36412 - RNA, 23 nt, Artificial Sequence
  Chemically synthesized
guguuaacgcugggagaauucug

SEQ ID NO: 36413 - RNA, 23 nt, Artificial Sequence
  Chemically synthesized
agggcgucagguuagcaaaaucc

SEQ ID NO: 36414 - RNA, 23 nt, Artificial Sequence
  Chemically synthesized
gggcgucagguuagcaaaauccu

SEQ ID NO: 36415 - RNA, 23 nt, Artificial Sequence
  Chemically synthesized
ggcgucagguuagcaaaauccuc

SEQ ID NO: 36416 - RNA, 23 nt, Artificial Sequence
  Chemically synthesized
gcgucagguuagcaaaauccuca

SEQ ID NO: 36417 - RNA, 23 nt, Artificial Sequence
  Chemically synthesized
cgucagguuagcaaaauccucaa

SEQ ID NO: 36418 - RNA, 23 nt, Artificial Sequence
  Chemically synthesized
caaaacucuuagaaaccagaucu

SEQ ID NO: 36419 - RNA, 23 nt, Artificial Sequence
  Chemically synthesized
aaaacucuuagaaaccagaucug

SEQ ID NO: 36420 - RNA, 23 nt, Artificial Sequence
  Chemically synthesized
aaacucuuagaaaccagaucuga

SEQ ID NO: 36421 - RNA, 23 nt, Artificial Sequence
  Chemically synthesized
aacucuuagaaaccagaucugag

SEQ ID NO: 36422 - RNA, 23 nt, Artificial Sequence
  Chemically synthesized
acucuuagaaaccagaucugaga

SEQ ID NO: 36423 - RNA, 23 nt, Artificial Sequence
  Chemically synthesized
ugcacacacaauuucuggacaua

SEQ ID NO: 36424 - RNA, 23 nt, Artificial Sequence
  Chemically synthesized
uagcaaaauccucaaacaccagu

SEQ ID NO: 36425 - RNA, 23 nt, Artificial Sequence
  Chemically synthesized
acaacuucacuaaaugcuguucu

SEQ ID NO: 36426 - RNA, 23 nt, Artificial Sequence
  Chemically synthesized
caacuucacuaaaugcuguucuc

SEQ ID NO: 36427 - RNA, 23 nt, Artificial Sequence
  Chemically synthesized
aacuucacuaaaugcuguucuca

SEQ ID NO: 36428 - RNA, 23 nt, Artificial Sequence
  Chemically synthesized
acuucacuaaaugcuguucucac

SEQ ID NO: 36429 - RNA, 23 nt, Artificial Sequence
  Chemically synthesized
cuucacuaaaugcuguucucacu

SEQ ID NO: 36430 - RNA, 23 nt, Artificial Sequence
  Chemically synthesized
uucacuaaaugcuguucucacuc

SEQ ID NO: 36431 - RNA, 23 nt, Artificial Sequence
  Chemically synthesized
ccaguguguuaaggccuaaaucc

SEQ ID NO: 36432 - RNA, 23 nt, Artificial Sequence
  Chemically synthesized
caguguguuaaggccuaaauccu

SEQ ID NO: 36433 - RNA, 23 nt, Artificial Sequence
  Chemically synthesized
aguguguuaaggccuaaauccug

SEQ ID NO: 36434 - RNA, 23 nt, Artificial Sequence
  Chemically synthesized
guguguuaaggccuaaauccugg

SEQ ID NO: 36435 - RNA, 23 nt, Artificial Sequence
  Chemically synthesized
uguguuaaggccuaaauccugga

SEQ ID NO: 36436 - RNA, 23 nt, Artificial Sequence
  Chemically synthesized
aggcaaagaugcacuugcccugg

SEQ ID NO: 36437 - RNA, 23 nt, Artificial Sequence
  Chemically synthesized
ggcaaagaugcacuugcccuggu

SEQ ID NO: 36438 - RNA, 23 nt, Artificial Sequence
  Chemically synthesized
gcaaagaugcacuugcccugguc

SEQ ID NO: 36439 - RNA, 23 nt, Artificial Sequence
  Chemically synthesized
caaagaugcacuugcccuggucc

SEQ ID NO: 36440 - RNA, 23 nt, Artificial Sequence
  Chemically synthesized
aaagaugcacuugcccuggucca

SEQ ID NO: 36441 - RNA, 23 nt, Artificial Sequence
  Chemically synthesized
gagguacacaggaagacagcucu

SEQ ID NO: 36442 - RNA, 23 nt, Artificial Sequence
  Chemically synthesized
agguacacaggaagacagcucuc

SEQ ID NO: 36443 - RNA, 23 nt, Artificial Sequence
  Chemically synthesized
gguacacaggaagacagcucucc

SEQ ID NO: 36444 - RNA, 23 nt, Artificial Sequence
  Chemically synthesized
guacacaggaagacagcucucca

SEQ ID NO: 36445 - RNA, 23 nt, Artificial Sequence
  Chemically synthesized
uacacaggaagacagcucuccaa

SEQ ID NO: 36446 - RNA, 23 nt, Artificial Sequence
  Chemically synthesized
cccauaccacgacugcuuagcuc

SEQ ID NO: 36447 - RNA, 23 nt, Artificial Sequence
  Chemically synthesized
ccauaccacgacugcuuagcucu

SEQ ID NO: 36448 - RNA, 23 nt, Artificial Sequence
  Chemically synthesized
cauaccacgacugcuuagcucug

SEQ ID NO: 36449 - RNA, 23 nt, Artificial Sequence
  Chemically synthesized
auaccacgacugcuuagcucugc

SEQ ID NO: 36450 - RNA, 23 nt, Artificial Sequence
  Chemically synthesized
uaccacgacugcuuagcucugca

SEQ ID NO: 36451 - RNA, 23 nt, Artificial Sequence
  Chemically synthesized
uaucuguuggauaaagagguuuc

SEQ ID NO: 36452 - RNA, 23 nt, Artificial Sequence
  Chemically synthesized
aucuguuggauaaagagguuucu

SEQ ID NO: 36453 - RNA, 23 nt, Artificial Sequence
  Chemically synthesized
ucuguuggauaaagagguuucuc

SEQ ID NO: 36454 - RNA, 23 nt, Artificial Sequence
  Chemically synthesized
cuguuggauaaagagguuucucu

SEQ ID NO: 36455 - RNA, 23 nt, Artificial Sequence
  Chemically synthesized
uguuggauaaagagguuucucuc

SEQ ID NO: 36456 - RNA, 23 nt, Artificial Sequence
  Chemically synthesized
agagguuucucucaucuucugga

SEQ ID NO: 36457 - RNA, 23 nt, Artificial Sequence
  Chemically synthesized
gagguuucucucaucuucuggag

SEQ ID NO: 36458 - RNA, 23 nt, Artificial Sequence
  Chemically synthesized
agguuucucucaucuucuggagu

SEQ ID NO: 36459 - RNA, 23 nt, Artificial Sequence
  Chemically synthesized
gguuucucucaucuucuggaguc

SEQ ID NO: 36460 - RNA, 23 nt, Artificial Sequence
  Chemically synthesized
guuucucucaucuucuggagucc

SEQ ID NO: 36461 - RNA, 23 nt, Artificial Sequence
  Chemically synthesized
caggcacuccgucuucuccuucu

SEQ ID NO: 36462 - RNA, 23 nt, Artificial Sequence
  Chemically synthesized
aggcacuccgucuucuccuucuu

SEQ ID NO: 36463 - RNA, 23 nt, Artificial Sequence
  Chemically synthesized
ggcacuccgucuucuccuucuuc

SEQ ID NO: 36464 - RNA, 23 nt, Artificial Sequence
  Chemically synthesized
gcacuccgucuucuccuucuucu

SEQ ID NO: 36465 - RNA, 23 nt, Artificial Sequence
  Chemically synthesized
cacuccgucuucuccuucuucuu

SEQ ID NO: 36466 - RNA, 23 nt, Artificial Sequence
  Chemically synthesized
acuccgucuucuccuucuucuug

SEQ ID NO: 36467 - RNA, 23 nt, Artificial Sequence
  Chemically synthesized
ugagaauuucacagaaacaucag

SEQ ID NO: 36468 - RNA, 23 nt, Artificial Sequence
  Chemically synthesized
gagaauuucacagaaacaucaga

SEQ ID NO: 36469 - RNA, 23 nt, Artificial Sequence
  Chemically synthesized
agaauuucacagaaacaucagaa

SEQ ID NO: 36470 - RNA, 23 nt, Artificial Sequence
  Chemically synthesized
gaauuucacagaaacaucagaau

SEQ ID NO: 36471 - RNA, 23 nt, Artificial Sequence
  Chemically synthesized
aauuucacagaaacaucagaauu

SEQ ID NO: 36472 - RNA, 23 nt, Artificial Sequence
  Chemically synthesized
auuucacagaaacaucagaauuu

SEQ ID NO: 36473 - RNA, 23 nt, Artificial Sequence
  Chemically synthesized
uuucacagaaacaucagaauuuu

SEQ ID NO: 36474 - RNA, 23 nt, Artificial Sequence
  Chemically synthesized
aauagacaguagccagcguccuu

SEQ ID NO: 36475 - RNA, 23 nt, Artificial Sequence
  Chemically synthesized
gggccagauuucuuaaaacagcu

SEQ ID NO: 36476 - RNA, 23 nt, Artificial Sequence
  Chemically synthesized
ggccagauuucuuaaaacagcua

SEQ ID NO: 36477 - RNA, 23 nt, Artificial Sequence
  Chemically synthesized
acaugacaaaaacaaugcuauug

SEQ ID NO: 36478 - RNA, 23 nt, Artificial Sequence
  Chemically synthesized
caugacaaaaacaaugcuauuga

SEQ ID NO: 36479 - RNA, 23 nt, Artificial Sequence
  Chemically synthesized
augacaaaaacaaugcuauugac

SEQ ID NO: 36480 - RNA, 23 nt, Artificial Sequence
  Chemically synthesized
ugacaaaaacaaugcuauugaca

SEQ ID NO: 36481 - RNA, 23 nt, Artificial Sequence
  Chemically synthesized
gacaaaaacaaugcuauugacau

SEQ ID NO: 36482 - RNA, 23 nt, Artificial Sequence
  Chemically synthesized
acugugguuuccaaacaucucuc

SEQ ID NO: 36483 - RNA, 23 nt, Artificial Sequence
  Chemically synthesized
uuccagccuagacacaacuccug

SEQ ID NO: 36484 - RNA, 23 nt, Artificial Sequence
  Chemically synthesized
uccagccuagacacaacuccuga

SEQ ID NO: 36485 - RNA, 23 nt, Artificial Sequence
  Chemically synthesized
ccagccuagacacaacuccugac

SEQ ID NO: 36486 - RNA, 23 nt, Artificial Sequence
  Chemically synthesized
ucuugagauacugcacgugguga

SEQ ID NO: 36487 - RNA, 23 nt, Artificial Sequence
  Chemically synthesized
cuugagauacugcacguggugac

SEQ ID NO: 36488 - RNA, 23 nt, Artificial Sequence
  Chemically synthesized
uugagauacugcacguggugaca

SEQ ID NO: 36489 - RNA, 23 nt, Artificial Sequence
  Chemically synthesized
cucuuagaaaccagaucugagaa

SEQ ID NO: 36490 - RNA, 23 nt, Artificial Sequence
  Chemically synthesized
ucggaagaguacauugccuaguu

SEQ ID NO: 36491 - RNA, 23 nt, Artificial Sequence
  Chemically synthesized
cggaagaguacauugccuaguuu

SEQ ID NO: 36492 - RNA, 23 nt, Artificial Sequence
  Chemically synthesized
ggaagaguacauugccuaguuuu

SEQ ID NO: 36493 - RNA, 23 nt, Artificial Sequence
  Chemically synthesized
gaagaguacauugccuaguuuuc

SEQ ID NO: 36494 - RNA, 23 nt, Artificial Sequence
  Chemically synthesized
aagaguacauugccuaguuuucu

SEQ ID NO: 36495 - RNA, 23 nt, Artificial Sequence
  Chemically synthesized
gcacacacaauuucuggacauaa

SEQ ID NO: 36496 - RNA, 23 nt, Artificial Sequence
  Chemically synthesized
aaaugcuguucucacuccacauc

SEQ ID NO: 36497 - RNA, 23 nt, Artificial Sequence
  Chemically synthesized
gugggcauccugguuuuuuguag

SEQ ID NO: 36498 - RNA, 23 nt, Artificial Sequence
  Chemically synthesized
ugggcauccugguuuuuuguaga

SEQ ID NO: 36499 - RNA, 23 nt, Artificial Sequence
  Chemically synthesized
gggcauccugguuuuuuguagaa

SEQ ID NO: 36500 - RNA, 23 nt, Artificial Sequence
  Chemically synthesized
ggcauccugguuuuuuguagaau

SEQ ID NO: 36501 - RNA, 23 nt, Artificial Sequence
  Chemically synthesized
gcauccugguuuuuuguagaauc

SEQ ID NO: 36502 - RNA, 23 nt, Artificial Sequence
  Chemically synthesized
cauccugguuuuuuguagaaucc

SEQ ID NO: 36503 - RNA, 23 nt, Artificial Sequence
  Chemically synthesized
auccugguuuuuuguagaaucca

SEQ ID NO: 36504 - RNA, 23 nt, Artificial Sequence
  Chemically synthesized
ccugguuuuuuguagaauccaga

SEQ ID NO: 36505 - RNA, 23 nt, Artificial Sequence
  Chemically synthesized
cugguuuuuuguagaauccagau

SEQ ID NO: 36506 - RNA, 23 nt, Artificial Sequence
  Chemically synthesized
aaagagguuucucucaucuucug

SEQ ID NO: 36507 - RNA, 23 nt, Artificial Sequence
  Chemically synthesized
aagagguuucucucaucuucugg

SEQ ID NO: 36508 - RNA, 23 nt, Artificial Sequence
  Chemically synthesized
aaugcugcuucucguucuugagc

SEQ ID NO: 36509 - RNA, 23 nt, Artificial Sequence
  Chemically synthesized
augcugcuucucguucuugagcu

SEQ ID NO: 36510 - RNA, 23 nt, Artificial Sequence
  Chemically synthesized
ugcugcuucucguucuugagcuc

SEQ ID NO: 36511 - RNA, 23 nt, Artificial Sequence
  Chemically synthesized
cacuuuccagcuucuccgacucu

SEQ ID NO: 36512 - RNA, 23 nt, Artificial Sequence
  Chemically synthesized
acuuuccagcuucuccgacucuu

SEQ ID NO: 36513 - RNA, 23 nt, Artificial Sequence
  Chemically synthesized
cuuuccagcuucuccgacucuuu

SEQ ID NO: 36514 - RNA, 23 nt, Artificial Sequence
  Chemically synthesized
uuuccagcuucuccgacucuuuc

SEQ ID NO: 36515 - RNA, 23 nt, Artificial Sequence
  Chemically synthesized
guccuuguggccagugugaguga

SEQ ID NO: 36516 - RNA, 23 nt, Artificial Sequence
  Chemically synthesized
uccuuguggccagugugagugac

SEQ ID NO: 36517 - RNA, 23 nt, Artificial Sequence
  Chemically synthesized
ccuuguggccagugugagugacu

SEQ ID NO: 36518 - RNA, 23 nt, Artificial Sequence
  Chemically synthesized
cuuguggccagugugagugacuu

SEQ ID NO: 36519 - RNA, 23 nt, Artificial Sequence
  Chemically synthesized
uuguggccagugugagugacuuc

SEQ ID NO: 36520 - RNA, 23 nt, Artificial Sequence
  Chemically synthesized
auuucuuaaaacagcuacaugac

SEQ ID NO: 36521 - RNA, 23 nt, Artificial Sequence
  Chemically synthesized
uuucuuaaaacagcuacaugaca

SEQ ID NO: 36522 - RNA, 23 nt, Artificial Sequence
  Chemically synthesized
uucuuaaaacagcuacaugacaa

SEQ ID NO: 36523 - RNA, 23 nt, Artificial Sequence
  Chemically synthesized
ucuuaaaacagcuacaugacaaa

SEQ ID NO: 36524 - RNA, 23 nt, Artificial Sequence
  Chemically synthesized
acaaugcuauugacauccaauaa

SEQ ID NO: 36525 - RNA, 23 nt, Artificial Sequence
  Chemically synthesized
auccaauaaugcuaaagccuggg

SEQ ID NO: 36526 - RNA, 23 nt, Artificial Sequence
  Chemically synthesized
uccaauaaugcuaaagccugggu

SEQ ID NO: 36527 - RNA, 23 nt, Artificial Sequence
  Chemically synthesized
ccaauaaugcuaaagccugggua

SEQ ID NO: 36528 - RNA, 23 nt, Artificial Sequence
  Chemically synthesized
caauaaugcuaaagccuggguac

SEQ ID NO: 36529 - RNA, 23 nt, Artificial Sequence
  Chemically synthesized
aauaaugcuaaagccuggguacc

SEQ ID NO: 36530 - RNA, 23 nt, Artificial Sequence
  Chemically synthesized
uggcaaaccucagcucuuccuug

SEQ ID NO: 36531 - RNA, 23 nt, Artificial Sequence
  Chemically synthesized
gguuuucaaccacaaggaaagga

SEQ ID NO: 36532 - RNA, 23 nt, Artificial Sequence
  Chemically synthesized
guuuucaaccacaaggaaaggaa

SEQ ID NO: 36533 - RNA, 23 nt, Artificial Sequence
  Chemically synthesized
uuuucaaccacaaggaaaggaaa

SEQ ID NO: 36534 - RNA, 23 nt, Artificial Sequence
  Chemically synthesized
uuucaaccacaaggaaaggaaaa

SEQ ID NO: 36535 - RNA, 23 nt, Artificial Sequence
  Chemically synthesized
uucaaccacaaggaaaggaaaau

SEQ ID NO: 36536 - RNA, 23 nt, Artificial Sequence
  Chemically synthesized
gcucuuccagccuagacacaacu

SEQ ID NO: 36537 - RNA, 23 nt, Artificial Sequence
  Chemically synthesized
cucuuccagccuagacacaacuc

SEQ ID NO: 36538 - RNA, 23 nt, Artificial Sequence
  Chemically synthesized
ucuuccagccuagacacaacucc

SEQ ID NO: 36539 - RNA, 23 nt, Artificial Sequence
  Chemically synthesized
cuuccagccuagacacaacuccu

SEQ ID NO: 36540 - RNA, 23 nt, Artificial Sequence
  Chemically synthesized
uccugaccuaagacauugagugg

SEQ ID NO: 36541 - RNA, 23 nt, Artificial Sequence
  Chemically synthesized
ccugaccuaagacauugagugga

SEQ ID NO: 36542 - RNA, 23 nt, Artificial Sequence
  Chemically synthesized
cugaccuaagacauugaguggag

SEQ ID NO: 36543 - RNA, 23 nt, Artificial Sequence
  Chemically synthesized
ugaccuaagacauugaguggaga

SEQ ID NO: 36544 - RNA, 23 nt, Artificial Sequence
  Chemically synthesized
gaccuaagacauugaguggagag

SEQ ID NO: 36545 - RNA, 23 nt, Artificial Sequence
  Chemically synthesized
cuuucugcuuucuuccugugacu

SEQ ID NO: 36546 - RNA, 23 nt, Artificial Sequence
  Chemically synthesized
aacuccugaccuaagacauugag

SEQ ID NO: 36547 - RNA, 23 nt, Artificial Sequence
  Chemically synthesized
cucuugcugacaagcucuucugg

SEQ ID NO: 36548 - RNA, 23 nt, Artificial Sequence
  Chemically synthesized
aaggaaaggaaaauggaauauuc

SEQ ID NO: 36549 - RNA, 23 nt, Artificial Sequence
  Chemically synthesized
gguauaaaaugaggauucaauga

SEQ ID NO: 36550 - RNA, 23 nt, Artificial Sequence
  Chemically synthesized
uugacauccaauaaugcuaaagc

SEQ ID NO: 36551 - RNA, 23 nt, Artificial Sequence
  Chemically synthesized
aggaaaggaaaauggaauauucu

SEQ ID NO: 36552 - RNA, 23 nt, Artificial Sequence
  Chemically synthesized
auauuugcuagaaagcacaaccc

SEQ ID NO: 36553 - RNA, 23 nt, Artificial Sequence
  Chemically synthesized
uaccauugaguacaauuaaacac

SEQ ID NO: 36554 - RNA, 23 nt, Artificial Sequence
  Chemically synthesized
cuccugaccuaagacauugagug

SEQ ID NO: 36555 - RNA, 23 nt, Artificial Sequence
  Chemically synthesized
aaagcauauaaaagucacaucag

SEQ ID NO: 36556 - RNA, 23 nt, Artificial Sequence
  Chemically synthesized
uccucuugcugacaagcucuucu

SEQ ID NO: 36557 - RNA, 23 nt, Artificial Sequence
  Chemically synthesized
ugggauucuagagguacacagga

SEQ ID NO: 36558 - RNA, 23 nt, Artificial Sequence
  Chemically synthesized
aaaacagcuacaugacaaaaaca

SEQ ID NO: 36559 - RNA, 23 nt, Artificial Sequence
  Chemically synthesized
aagcauauaaaagucacaucagu

SEQ ID NO: 36560 - RNA, 23 nt, Artificial Sequence
  Chemically synthesized
augcuguucucacuccacauccc

SEQ ID NO: 36561 - RNA, 23 nt, Artificial Sequence
  Chemically synthesized
aucuucuggaguccucccauucu

SEQ ID NO: 36562 - RNA, 23 nt, Artificial Sequence
  Chemically synthesized
ugacuucucacagcugcaaacac

SEQ ID NO: 36563 - RNA, 23 nt, Artificial Sequence
  Chemically synthesized
auugaguggagaguccuaacccu

SEQ ID NO: 36564 - RNA, 23 nt, Artificial Sequence
  Chemically synthesized
gagaaaaagcauauaaaagucac

SEQ ID NO: 36565 - RNA, 23 nt, Artificial Sequence
  Chemically synthesized
gaugaagguugagcauguauauc

SEQ ID NO: 36566 - RNA, 23 nt, Artificial Sequence
  Chemically synthesized
ucagaauuuuaauagacaguagc

SEQ ID NO: 36567 - RNA, 23 nt, Artificial Sequence
  Chemically synthesized
ugggccagauuucuuaaaacagc

SEQ ID NO: 36568 - RNA, 23 nt, Artificial Sequence
  Chemically synthesized
aaacagcuacaugacaaaaacaa

SEQ ID NO: 36569 - RNA, 23 nt, Artificial Sequence
  Chemically synthesized
gaaaccagaucugagaaaaagca

SEQ ID NO: 36570 - RNA, 23 nt, Artificial Sequence
  Chemically synthesized
agguuagcaaaauccucaaacac

SEQ ID NO: 36571 - RNA, 23 nt, Artificial Sequence
  Chemically synthesized
uuagcaaaauccucaaacaccag

SEQ ID NO: 36572 - RNA, 23 nt, Artificial Sequence
  Chemically synthesized
acauugaguggagaguccuaacc

SEQ ID NO: 36573 - RNA, 23 nt, Artificial Sequence
  Chemically synthesized
uucugcuuucuuccugugacuuu

SEQ ID NO: 36574 - RNA, 23 nt, Artificial Sequence
  Chemically synthesized
cagaucugagaaaaagcauauaa

SEQ ID NO: 36575 - RNA, 23 nt, Artificial Sequence
  Chemically synthesized
aaugcuguucucacuccacaucc

SEQ ID NO: 36576 - RNA, 23 nt, Artificial Sequence
  Chemically synthesized
auaaagagguuucucucaucuuc

SEQ ID NO: 36577 - RNA, 23 nt, Artificial Sequence
  Chemically synthesized
acuucucacagcugcaaacaccc

SEQ ID NO: 36578 - RNA, 23 nt, Artificial Sequence
  Chemically synthesized
uaaaacagcuacaugacaaaaac

SEQ ID NO: 36579 - RNA, 23 nt, Artificial Sequence
  Chemically synthesized
cauugaguggagaguccuaaccc

SEQ ID NO: 36580 - RNA, 23 nt, Artificial Sequence
  Chemically synthesized
ugcccauggauuuuguguuaacg

SEQ ID NO: 36581 - RNA, 23 nt, Artificial Sequence
  Chemically synthesized
ucuugcugacaagcucuucuggc

SEQ ID NO: 36582 - RNA, 23 nt, Artificial Sequence
  Chemically synthesized
gguuagcaaaauccucaaacacc

SEQ ID NO: 36583 - RNA, 23 nt, Artificial Sequence
  Chemically synthesized
uuauucugacagguuaggaauac

SEQ ID NO: 36584 - RNA, 23 nt, Artificial Sequence
  Chemically synthesized
augcuauugacauccaauaaugc

SEQ ID NO: 36585 - RNA, 23 nt, Artificial Sequence
  Chemically synthesized
auuuuguguuaacgcugggagaa

SEQ ID NO: 36586 - RNA, 23 nt, Artificial Sequence
  Chemically synthesized
aauuucuggacauaacagcauau

SEQ ID NO: 36587 - RNA, 23 nt, Artificial Sequence
  Chemically synthesized
auuuauuauucugacagguuagg

SEQ ID NO: 36588 - RNA, 23 nt, Artificial Sequence
  Chemically synthesized
auccucaaacaccagugacccag

SEQ ID NO: 36589 - RNA, 23 nt, Artificial Sequence
  Chemically synthesized
auaacagcauauuugcuagaaag

SEQ ID NO: 36590 - RNA, 23 nt, Artificial Sequence
  Chemically synthesized
auuugcuagaaagcacaacccug

SEQ ID NO: 36591 - RNA, 23 nt, Artificial Sequence
  Chemically synthesized
uauuugcuagaaagcacaacccu

SEQ ID NO: 36592 - RNA, 23 nt, Artificial Sequence
  Chemically synthesized
uuugcuagaaagcacaacccugg

SEQ ID NO: 36593 - RNA, 23 nt, Artificial Sequence
  Chemically synthesized
ucucuccacugacugugguuuuc

SEQ ID NO: 36594 - RNA, 23 nt, Artificial Sequence
  Chemically synthesized
ugugacuuuggaacugaguuugc

SEQ ID NO: 36595 - RNA, 23 nt, Artificial Sequence
  Chemically synthesized
uggauuuuguguuaacgcuggga

SEQ ID NO: 36596 - RNA, 23 nt, Artificial Sequence
  Chemically synthesized
ucuuuuaucuguuggauaaagag

SEQ ID NO: 36597 - RNA, 23 nt, Artificial Sequence
  Chemically synthesized
uucugacagguuaggaauacuag

SEQ ID NO: 36598 - RNA, 23 nt, Artificial Sequence
  Chemically synthesized
auauaaaagucacaucaguguug

SEQ ID NO: 36599 - RNA, 23 nt, Artificial Sequence
  Chemically synthesized
caaacaucggaagaguacauugc

SEQ ID NO: 36600 - RNA, 23 nt, Artificial Sequence
  Chemically synthesized
uuuauuauucugacagguuagga

SEQ ID NO: 36601 - RNA, 23 nt, Artificial Sequence
  Chemically synthesized
uuauuauucugacagguuaggaa

SEQ ID NO: 36602 - RNA, 23 nt, Artificial Sequence
  Chemically synthesized
auuguaaugauaccauugaguac

SEQ ID NO: 36603 - RNA, 23 nt, Artificial Sequence
  Chemically synthesized
aaggaaaauggaauauucuuugg

SEQ ID NO: 36604 - RNA, 23 nt, Artificial Sequence
  Chemically synthesized
ucugacagguuaggaauacuagg

SEQ ID NO: 36605 - RNA, 23 nt, Artificial Sequence
  Chemically synthesized
cucuucuggccaccugaauaucu

SEQ ID NO: 36606 - RNA, 23 nt, Artificial Sequence
  Chemically synthesized
uaacagcauauuugcuagaaagc

SEQ ID NO: 36607 - RNA, 23 nt, Artificial Sequence
  Chemically synthesized
aacagcauauuugcuagaaagca

SEQ ID NO: 36608 - RNA, 23 nt, Artificial Sequence
  Chemically synthesized
aguugaggcaaagaugcacuugc

SEQ ID NO: 36609 - RNA, 23 nt, Artificial Sequence
  Chemically synthesized
cuuuuaucuguuggauaaagagg

SEQ ID NO: 36610 - RNA, 23 nt, Artificial Sequence
  Chemically synthesized
uucuggaguccucccauucugag

SEQ ID NO: 36611 - RNA, 23 nt, Artificial Sequence
  Chemically synthesized
auucugagcccggacaauacacg

SEQ ID NO: 36612 - RNA, 23 nt, Artificial Sequence
  Chemically synthesized
auucugacagguuaggaauacua

SEQ ID NO: 36613 - RNA, 23 nt, Artificial Sequence
  Chemically synthesized
uugcugacaagcucuucuggcca

SEQ ID NO: 36614 - RNA, 23 nt, Artificial Sequence
  Chemically synthesized
acaaacaucggaagaguacauug

SEQ ID NO: 36615 - RNA, 23 nt, Artificial Sequence
  Chemically synthesized
aaacaucggaagaguacauugcc

SEQ ID NO: 36616 - RNA, 23 nt, Artificial Sequence
  Chemically synthesized
uucuggacauaacagcauauuug

SEQ ID NO: 36617 - RNA, 23 nt, Artificial Sequence
  Chemically synthesized
uagaaagcacaacccuggccguu

SEQ ID NO: 36618 - RNA, 23 nt, Artificial Sequence
  Chemically synthesized
cuggguguugaagcaucauuuug

SEQ ID NO: 36619 - RNA, 23 nt, Artificial Sequence
  Chemically synthesized
ccuuuggaaguugaacuuucugc

SEQ ID NO: 36620 - RNA, 23 nt, Artificial Sequence
  Chemically synthesized
auugccuaguuuucuugcacaca

SEQ ID NO: 36621 - RNA, 23 nt, Artificial Sequence
  Chemically synthesized
agugacaaugguagccacgguga

SEQ ID NO: 36622 - RNA, 23 nt, Artificial Sequence
  Chemically synthesized
uuaucuguuggauaaagagguuu

SEQ ID NO: 36623 - RNA, 23 nt, Artificial Sequence
  Chemically synthesized
uugagcauguauaucaaaugcug

SEQ ID NO: 36624 - RNA, 23 nt, Artificial Sequence
  Chemically synthesized
uuucugcaggcacuccgucuucu

SEQ ID NO: 36625 - RNA, 23 nt, Artificial Sequence
  Chemically synthesized
auaaugcuaaagccuggguacca

SEQ ID NO: 36626 - RNA, 23 nt, Artificial Sequence
  Chemically synthesized
uuuggaaguugaacuuucugcuu

SEQ ID NO: 36627 - RNA, 23 nt, Artificial Sequence
  Chemically synthesized
uuggaaguugaacuuucugcuuu

SEQ ID NO: 36628 - RNA, 23 nt, Artificial Sequence
  Chemically synthesized
uucuuccugugacuuuggaacug

SEQ ID NO: 36629 - RNA, 23 nt, Artificial Sequence
  Chemically synthesized
uggaacugaguuugcaacagagg

SEQ ID NO: 36630 - RNA, 23 nt, Artificial Sequence
  Chemically synthesized
accugaauaucuugagauacugc

SEQ ID NO: 36631 - RNA, 23 nt, Artificial Sequence
  Chemically synthesized
uauaaaagucacaucaguguugu

SEQ ID NO: 36632 - RNA, 23 nt, Artificial Sequence
  Chemically synthesized
uaaaagucacaucaguguugugu

SEQ ID NO: 36633 - RNA, 23 nt, Artificial Sequence
  Chemically synthesized
uugcuagaaagcacaacccuggc

SEQ ID NO: 36634 - RNA, 23 nt, Artificial Sequence
  Chemically synthesized
uacagacacugcugccugaaucc

SEQ ID NO: 36635 - RNA, 23 nt, Artificial Sequence
  Chemically synthesized
uuuuaucuguuggauaaagaggu

SEQ ID NO: 36636 - RNA, 23 nt, Artificial Sequence
  Chemically synthesized
uucuggauggcaaaccucagcuc

SEQ ID NO: 36637 - RNA, 23 nt, Artificial Sequence
  Chemically synthesized
gacauccaauaaugcuaaagccu

SEQ ID NO: 36638 - RNA, 23 nt, Artificial Sequence
  Chemically synthesized
acauccaauaaugcuaaagccug

SEQ ID NO: 36639 - RNA, 23 nt, Artificial Sequence
  Chemically synthesized
uauucuuuggcucuuccagccua

SEQ ID NO: 36640 - RNA, 23 nt, Artificial Sequence
  Chemically synthesized
uuguguuaacgcugggagaauuc

SEQ ID NO: 36641 - RNA, 23 nt, Artificial Sequence
  Chemically synthesized
uucuggccaccugaauaucuuga

SEQ ID NO: 36642 - RNA, 23 nt, Artificial Sequence
  Chemically synthesized
auaaaagucacaucaguguugug

SEQ ID NO: 36643 - RNA, 23 nt, Artificial Sequence
  Chemically synthesized
aguguugugugacacaaacaucg

SEQ ID NO: 36644 - RNA, 23 nt, Artificial Sequence
  Chemically synthesized
ugacacaaacaucggaagaguac

SEQ ID NO: 36645 - RNA, 23 nt, Artificial Sequence
  Chemically synthesized
uuucuggacauaacagcauauuu

SEQ ID NO: 36646 - RNA, 23 nt, Artificial Sequence
  Chemically synthesized
ugacagguuaggaauacuaggau

SEQ ID NO: 36647 - RNA, 23 nt, Artificial Sequence
  Chemically synthesized
gacagguuaggaauacuaggaua

SEQ ID NO: 36648 - RNA, 23 nt, Artificial Sequence
  Chemically synthesized
acagguuaggaauacuaggauaa

SEQ ID NO: 36649 - RNA, 23 nt, Artificial Sequence
  Chemically synthesized
cagguuaggaauacuaggauaaa

SEQ ID NO: 36650 - RNA, 23 nt, Artificial Sequence
  Chemically synthesized
agguuaggaauacuaggauaaau

SEQ ID NO: 36651 - RNA, 23 nt, Artificial Sequence
  Chemically synthesized
ucauaucucucccuucuuuaccu

SEQ ID NO: 36652 - RNA, 23 nt, Artificial Sequence
  Chemically synthesized
uucauaucucucccuucuuuacc

SEQ ID NO: 36653 - RNA, 23 nt, Artificial Sequence
  Chemically synthesized
cuucauaucucucccuucuuuac

SEQ ID NO: 36654 - RNA, 23 nt, Artificial Sequence
  Chemically synthesized
gcuucauaucucucccuucuuua

SEQ ID NO: 36655 - RNA, 23 nt, Artificial Sequence
  Chemically synthesized
ugcuucauaucucucccuucuuu

SEQ ID NO: 36656 - RNA, 23 nt, Artificial Sequence
  Chemically synthesized
ccauguguuuugcuuuuauccac

SEQ ID NO: 36657 - RNA, 23 nt, Artificial Sequence
  Chemically synthesized
uccauguguuuugcuuuuaucca

SEQ ID NO: 36658 - RNA, 23 nt, Artificial Sequence
  Chemically synthesized
uuccauguguuuugcuuuuaucc

SEQ ID NO: 36659 - RNA, 23 nt, Artificial Sequence
  Chemically synthesized
uuuccauguguuuugcuuuuauc

SEQ ID NO: 36660 - RNA, 23 nt, Artificial Sequence
  Chemically synthesized
uuuuccauguguuuugcuuuuau

SEQ ID NO: 36661 - RNA, 23 nt, Artificial Sequence
  Chemically synthesized
cugcuucauaucucucccuucuu

SEQ ID NO: 36662 - RNA, 23 nt, Artificial Sequence
  Chemically synthesized
ccugcuucauaucucucccuucu

SEQ ID NO: 36663 - RNA, 23 nt, Artificial Sequence
  Chemically synthesized
cccugcuucauaucucucccuuc

SEQ ID NO: 36664 - RNA, 23 nt, Artificial Sequence
  Chemically synthesized
ucccugcuucauaucucucccuu

SEQ ID NO: 36665 - RNA, 23 nt, Artificial Sequence
  Chemically synthesized
gcacuucauaucuagauuucuag

SEQ ID NO: 36666 - RNA, 23 nt, Artificial Sequence
  Chemically synthesized
ugcacuucauaucuagauuucua

SEQ ID NO: 36667 - RNA, 23 nt, Artificial Sequence
  Chemically synthesized
cugcacuucauaucuagauuucu

SEQ ID NO: 36668 - RNA, 23 nt, Artificial Sequence
  Chemically synthesized
ccugcacuucauaucuagauuuc

SEQ ID NO: 36669 - RNA, 23 nt, Artificial Sequence
  Chemically synthesized
accugcacuucauaucuagauuu

SEQ ID NO: 36670 - RNA, 23 nt, Artificial Sequence
  Chemically synthesized
gccuugcauuuguaccuuauuga

SEQ ID NO: 36671 - RNA, 23 nt, Artificial Sequence
  Chemically synthesized
ugccuugcauuuguaccuuauug

SEQ ID NO: 36672 - RNA, 23 nt, Artificial Sequence
  Chemically synthesized
uugccuugcauuuguaccuuauu

SEQ ID NO: 36673 - RNA, 23 nt, Artificial Sequence
  Chemically synthesized
auugccuugcauuuguaccuuau

SEQ ID NO: 36674 - RNA, 23 nt, Artificial Sequence
  Chemically synthesized
cauugccuugcauuuguaccuua

SEQ ID NO: 36675 - RNA, 23 nt, Artificial Sequence
  Chemically synthesized
cccuucuuuaccuucauuucauc

SEQ ID NO: 36676 - RNA, 23 nt, Artificial Sequence
  Chemically synthesized
ucccuucuuuaccuucauuucau

SEQ ID NO: 36677 - RNA, 23 nt, Artificial Sequence
  Chemically synthesized
cucccuucuuuaccuucauuuca

SEQ ID NO: 36678 - RNA, 23 nt, Artificial Sequence
  Chemically synthesized
ucucccuucuuuaccuucauuuc

SEQ ID NO: 36679 - RNA, 23 nt, Artificial Sequence
  Chemically synthesized
cucucccuucuuuaccuucauuu

SEQ ID NO: 36680 - RNA, 23 nt, Artificial Sequence
  Chemically synthesized
gccuugcacuccugaauuuuauc

SEQ ID NO: 36681 - RNA, 23 nt, Artificial Sequence
  Chemically synthesized
agccuugcacuccugaauuuuau

SEQ ID NO: 36682 - RNA, 23 nt, Artificial Sequence
  Chemically synthesized
aagccuugcacuccugaauuuua

SEQ ID NO: 36683 - RNA, 23 nt, Artificial Sequence
  Chemically synthesized
gaagccuugcacuccugaauuuu

SEQ ID NO: 36684 - RNA, 23 nt, Artificial Sequence
  Chemically synthesized
ugaagccuugcacuccugaauuu

SEQ ID NO: 36685 - RNA, 23 nt, Artificial Sequence
  Chemically synthesized
guauuaaacucuccuuugauauu

SEQ ID NO: 36686 - RNA, 23 nt, Artificial Sequence
  Chemically synthesized
aguauuaaacucuccuuugauau

SEQ ID NO: 36687 - RNA, 23 nt, Artificial Sequence
  Chemically synthesized
caguauuaaacucuccuuugaua

SEQ ID NO: 36688 - RNA, 23 nt, Artificial Sequence
  Chemically synthesized
ucaguauuaaacucuccuuugau

SEQ ID NO: 36689 - RNA, 23 nt, Artificial Sequence
  Chemically synthesized
uucaguauuaaacucuccuuuga

SEQ ID NO: 36690 - RNA, 23 nt, Artificial Sequence
  Chemically synthesized
ccuugcauuuguaccuuauugau

SEQ ID NO: 36691 - RNA, 23 nt, Artificial Sequence
  Chemically synthesized
ccaucuccuaucuuuuauuucau

SEQ ID NO: 36692 - RNA, 23 nt, Artificial Sequence
  Chemically synthesized
accaucuccuaucuuuuauuuca

SEQ ID NO: 36693 - RNA, 23 nt, Artificial Sequence
  Chemically synthesized
gaccaucuccuaucuuuuauuuc

SEQ ID NO: 36694 - RNA, 23 nt, Artificial Sequence
  Chemically synthesized
agaccaucuccuaucuuuuauuu

SEQ ID NO: 36695 - RNA, 23 nt, Artificial Sequence
  Chemically synthesized
gagaccaucuccuaucuuuuauu

SEQ ID NO: 36696 - RNA, 23 nt, Artificial Sequence
  Chemically synthesized
gccuacagaacaaaccaaaaaug

SEQ ID NO: 36697 - RNA, 23 nt, Artificial Sequence
  Chemically synthesized
agccuacagaacaaaccaaaaau

SEQ ID NO: 36698 - RNA, 23 nt, Artificial Sequence
  Chemically synthesized
aagccuacagaacaaaccaaaaa

SEQ ID NO: 36699 - RNA, 23 nt, Artificial Sequence
  Chemically synthesized
caagccuacagaacaaaccaaaa

SEQ ID NO: 36700 - RNA, 23 nt, Artificial Sequence
  Chemically synthesized
ccaagccuacagaacaaaccaaa

SEQ ID NO: 36701 - RNA, 23 nt, Artificial Sequence
  Chemically synthesized
ucucucccuucuuuaccuucauu

SEQ ID NO: 36702 - RNA, 23 nt, Artificial Sequence
  Chemically synthesized
cucccugcuucauaucucucccu

SEQ ID NO: 36703 - RNA, 23 nt, Artificial Sequence
  Chemically synthesized
ccaucucucucccuuacuauucc

SEQ ID NO: 36704 - RNA, 23 nt, Artificial Sequence
  Chemically synthesized
uccaucucucucccuuacuauuc

SEQ ID NO: 36705 - RNA, 23 nt, Artificial Sequence
  Chemically synthesized
guccaucucucucccuuacuauu

SEQ ID NO: 36706 - RNA, 23 nt, Artificial Sequence
  Chemically synthesized
cguccaucucucucccuuacuau

SEQ ID NO: 36707 - RNA, 23 nt, Artificial Sequence
  Chemically synthesized
acguccaucucucucccuuacua

SEQ ID NO: 36708 - RNA, 23 nt, Artificial Sequence
  Chemically synthesized
gcaaaaugcuaggccuguaguag

SEQ ID NO: 36709 - RNA, 23 nt, Artificial Sequence
  Chemically synthesized
agcaaaaugcuaggccuguagua

SEQ ID NO: 36710 - RNA, 23 nt, Artificial Sequence
  Chemically synthesized
uagcaaaaugcuaggccuguagu

SEQ ID NO: 36711 - RNA, 23 nt, Artificial Sequence
  Chemically synthesized
cuagcaaaaugcuaggccuguag

SEQ ID NO: 36712 - RNA, 23 nt, Artificial Sequence
  Chemically synthesized
ccuagcaaaaugcuaggccugua

SEQ ID NO: 36713 - RNA, 23 nt, Artificial Sequence
  Chemically synthesized
gcagaaaccuuguuuguuuuauu

SEQ ID NO: 36714 - RNA, 23 nt, Artificial Sequence
  Chemically synthesized
ggcagaaaccuuguuuguuuuau

SEQ ID NO: 36715 - RNA, 23 nt, Artificial Sequence
  Chemically synthesized
gggcagaaaccuuguuuguuuua

SEQ ID NO: 36716 - RNA, 23 nt, Artificial Sequence
  Chemically synthesized
agggcagaaaccuuguuuguuuu

SEQ ID NO: 36717 - RNA, 23 nt, Artificial Sequence
  Chemically synthesized
gagggcagaaaccuuguuuguuu

SEQ ID NO: 36718 - RNA, 23 nt, Artificial Sequence
  Chemically synthesized
ccucauuaaauggugauuucuug

SEQ ID NO: 36719 - RNA, 23 nt, Artificial Sequence
  Chemically synthesized
accucauuaaauggugauuucuu

SEQ ID NO: 36720 - RNA, 23 nt, Artificial Sequence
  Chemically synthesized
aaccucauuaaauggugauuucu

SEQ ID NO: 36721 - RNA, 23 nt, Artificial Sequence
  Chemically synthesized
gaaccucauuaaauggugauuuc

SEQ ID NO: 36722 - RNA, 23 nt, Artificial Sequence
  Chemically synthesized
ugaaccucauuaaauggugauuu

SEQ ID NO: 36723 - RNA, 23 nt, Artificial Sequence
  Chemically synthesized
ucucccugcuucauaucucuccc

SEQ ID NO: 36724 - RNA, 23 nt, Artificial Sequence
  Chemically synthesized
aucucccugcuucauaucucucc

SEQ ID NO: 36725 - RNA, 23 nt, Artificial Sequence
  Chemically synthesized
uaucucccugcuucauaucucuc

SEQ ID NO: 36726 - RNA, 23 nt, Artificial Sequence
  Chemically synthesized
uuaucucccugcuucauaucucu

SEQ ID NO: 36727 - RNA, 23 nt, Artificial Sequence
  Chemically synthesized
gcauuuguaccuuauugaucuuu

SEQ ID NO: 36728 - RNA, 23 nt, Artificial Sequence
  Chemically synthesized
ugcauuuguaccuuauugaucuu

SEQ ID NO: 36729 - RNA, 23 nt, Artificial Sequence
  Chemically synthesized
uugcauuuguaccuuauugaucu

SEQ ID NO: 36730 - RNA, 23 nt, Artificial Sequence
  Chemically synthesized
cuugcauuuguaccuuauugauc

SEQ ID NO: 36731 - RNA, 23 nt, Artificial Sequence
  Chemically synthesized
cgacauaguauggaaguauuuga

SEQ ID NO: 36732 - RNA, 23 nt, Artificial Sequence
  Chemically synthesized
ucgacauaguauggaaguauuug

SEQ ID NO: 36733 - RNA, 23 nt, Artificial Sequence
  Chemically synthesized
gucgacauaguauggaaguauuu

SEQ ID NO: 36734 - RNA, 23 nt, Artificial Sequence
  Chemically synthesized
ggucgacauaguauggaaguauu

SEQ ID NO: 36735 - RNA, 23 nt, Artificial Sequence
  Chemically synthesized
gggucgacauaguauggaaguau

SEQ ID NO: 36736 - RNA, 23 nt, Artificial Sequence
  Chemically synthesized
gggccuucauuaaauguuuguug

SEQ ID NO: 36737 - RNA, 23 nt, Artificial Sequence
  Chemically synthesized
ugggccuucauuaaauguuuguu

SEQ ID NO: 36738 - RNA, 23 nt, Artificial Sequence
  Chemically synthesized
gugggccuucauuaaauguuugu

SEQ ID NO: 36739 - RNA, 23 nt, Artificial Sequence
  Chemically synthesized
agugggccuucauuaaauguuug

SEQ ID NO: 36740 - RNA, 23 nt, Artificial Sequence
  Chemically synthesized
uagugggccuucauuaaauguuu

SEQ ID NO: 36741 - RNA, 23 nt, Artificial Sequence
  Chemically synthesized
gcuacuuuuacuuguucauuucu

SEQ ID NO: 36742 - RNA, 23 nt, Artificial Sequence
  Chemically synthesized
ugcuacuuuuacuuguucauuuc

SEQ ID NO: 36743 - RNA, 23 nt, Artificial Sequence
  Chemically synthesized
augcuacuuuuacuuguucauuu

SEQ ID NO: 36744 - RNA, 23 nt, Artificial Sequence
  Chemically synthesized
uaugcuacuuuuacuuguucauu

SEQ ID NO: 36745 - RNA, 23 nt, Artificial Sequence
  Chemically synthesized
auaugcuacuuuuacuuguucau

SEQ ID NO: 36746 - RNA, 23 nt, Artificial Sequence
  Chemically synthesized
cccuugaaccucauuaaauggug

SEQ ID NO: 36747 - RNA, 23 nt, Artificial Sequence
  Chemically synthesized
ccccuugaaccucauuaaauggu

SEQ ID NO: 36748 - RNA, 23 nt, Artificial Sequence
  Chemically synthesized
uccccuugaaccucauuaaaugg

SEQ ID NO: 36749 - RNA, 23 nt, Artificial Sequence
  Chemically synthesized
uuccccuugaaccucauuaaaug

SEQ ID NO: 36750 - RNA, 23 nt, Artificial Sequence
  Chemically synthesized
cuuccccuugaaccucauuaaau

SEQ ID NO: 36751 - RNA, 23 nt, Artificial Sequence
  Chemically synthesized
uccucaacuugcugccuaagagg

SEQ ID NO: 36752 - RNA, 23 nt, Artificial Sequence
  Chemically synthesized
cuccucaacuugcugccuaagag

SEQ ID NO: 36753 - RNA, 23 nt, Artificial Sequence
  Chemically synthesized
acuccucaacuugcugccuaaga

SEQ ID NO: 36754 - RNA, 23 nt, Artificial Sequence
  Chemically synthesized
aacuccucaacuugcugccuaag

SEQ ID NO: 36755 - RNA, 23 nt, Artificial Sequence
  Chemically synthesized
gaacuccucaacuugcugccuaa

SEQ ID NO: 36756 - RNA, 23 nt, Artificial Sequence
  Chemically synthesized
ggaucauguaaaugcucaaagau

SEQ ID NO: 36757 - RNA, 23 nt, Artificial Sequence
  Chemically synthesized
aggaucauguaaaugcucaaaga

SEQ ID NO: 36758 - RNA, 23 nt, Artificial Sequence
  Chemically synthesized
caggaucauguaaaugcucaaag

SEQ ID NO: 36759 - RNA, 23 nt, Artificial Sequence
  Chemically synthesized
acaggaucauguaaaugcucaaa

SEQ ID NO: 36760 - RNA, 23 nt, Artificial Sequence
  Chemically synthesized
uacaggaucauguaaaugcucaa

SEQ ID NO: 36761 - RNA, 23 nt, Artificial Sequence
  Chemically synthesized
caaucaaccugcacuucauaucu

SEQ ID NO: 36762 - RNA, 23 nt, Artificial Sequence
  Chemically synthesized
ucaaucaaccugcacuucauauc

SEQ ID NO: 36763 - RNA, 23 nt, Artificial Sequence
  Chemically synthesized
uucaaucaaccugcacuucauau

SEQ ID NO: 36764 - RNA, 23 nt, Artificial Sequence
  Chemically synthesized
auucaaucaaccugcacuucaua

SEQ ID NO: 36765 - RNA, 23 nt, Artificial Sequence
  Chemically synthesized
cauucaaucaaccugcacuucau

SEQ ID NO: 36766 - RNA, 23 nt, Artificial Sequence
  Chemically synthesized
cgaauuguuagaacaucuucugg

SEQ ID NO: 36767 - RNA, 23 nt, Artificial Sequence
  Chemically synthesized
gcgaauuguuagaacaucuucug

SEQ ID NO: 36768 - RNA, 23 nt, Artificial Sequence
  Chemically synthesized
agcgaauuguuagaacaucuucu

SEQ ID NO: 36769 - RNA, 23 nt, Artificial Sequence
  Chemically synthesized
gagcgaauuguuagaacaucuuc

SEQ ID NO: 36770 - RNA, 23 nt, Artificial Sequence
  Chemically synthesized
ugagcgaauuguuagaacaucuu

SEQ ID NO: 36771 - RNA, 23 nt, Artificial Sequence
  Chemically synthesized
gagauaacuuccuucacaucucc

SEQ ID NO: 36772 - RNA, 23 nt, Artificial Sequence
  Chemically synthesized
ugagauaacuuccuucacaucuc

SEQ ID NO: 36773 - RNA, 23 nt, Artificial Sequence
  Chemically synthesized
gugagauaacuuccuucacaucu

SEQ ID NO: 36774 - RNA, 23 nt, Artificial Sequence
  Chemically synthesized
ugugagauaacuuccuucacauc

SEQ ID NO: 36775 - RNA, 23 nt, Artificial Sequence
  Chemically synthesized
gugugagauaacuuccuucacau

SEQ ID NO: 36776 - RNA, 23 nt, Artificial Sequence
  Chemically synthesized
ugugugagauaacuuccuucaca

SEQ ID NO: 36777 - RNA, 23 nt, Artificial Sequence
  Chemically synthesized
uuuuuccauguguuuugcuuuua

SEQ ID NO: 36778 - RNA, 23 nt, Artificial Sequence
  Chemically synthesized
cucauuaaauggugauuucuugc

SEQ ID NO: 36779 - RNA, 23 nt, Artificial Sequence
  Chemically synthesized
cccuucugcuuucuauuaccccu

SEQ ID NO: 36780 - RNA, 23 nt, Artificial Sequence
  Chemically synthesized
acccuucugcuuucuauuacccc

SEQ ID NO: 36781 - RNA, 23 nt, Artificial Sequence
  Chemically synthesized
aacccuucugcuuucuauuaccc

SEQ ID NO: 36782 - RNA, 23 nt, Artificial Sequence
  Chemically synthesized
gaacccuucugcuuucuauuacc

SEQ ID NO: 36783 - RNA, 23 nt, Artificial Sequence
  Chemically synthesized
agaacccuucugcuuucuauuac

SEQ ID NO: 36784 - RNA, 23 nt, Artificial Sequence
  Chemically synthesized
ggaacuccucaacuugcugccua

SEQ ID NO: 36785 - RNA, 23 nt, Artificial Sequence
  Chemically synthesized
aaaccuuuaucccugcuuaucug

SEQ ID NO: 36786 - RNA, 23 nt, Artificial Sequence
  Chemically synthesized
gaaaccuuuaucccugcuuaucu

SEQ ID NO: 36787 - RNA, 23 nt, Artificial Sequence
  Chemically synthesized
agaaaccuuuaucccugcuuauc

SEQ ID NO: 36788 - RNA, 23 nt, Artificial Sequence
  Chemically synthesized
uagaaaccuuuaucccugcuuau

SEQ ID NO: 36789 - RNA, 23 nt, Artificial Sequence
  Chemically synthesized
cuagaaaccuuuaucccugcuua

SEQ ID NO: 36790 - RNA, 23 nt, Artificial Sequence
  Chemically synthesized
gcuuuuauuucagugccauacau

SEQ ID NO: 36791 - RNA, 23 nt, Artificial Sequence
  Chemically synthesized
ggcuuuuauuucagugccauaca

SEQ ID NO: 36792 - RNA, 23 nt, Artificial Sequence
  Chemically synthesized
uggcuuuuauuucagugccauac

SEQ ID NO: 36793 - RNA, 23 nt, Artificial Sequence
  Chemically synthesized
guggcuuuuauuucagugccaua

SEQ ID NO: 36794 - RNA, 23 nt, Artificial Sequence
  Chemically synthesized
uguggcuuuuauuucagugccau

SEQ ID NO: 36795 - RNA, 23 nt, Artificial Sequence
  Chemically synthesized
aucucucccuucuuuaccuucau

SEQ ID NO: 36796 - RNA, 23 nt, Artificial Sequence
  Chemically synthesized
uaucucucccuucuuuaccuuca

SEQ ID NO: 36797 - RNA, 23 nt, Artificial Sequence
  Chemically synthesized
auaucucucccuucuuuaccuuc

SEQ ID NO: 36798 - RNA, 23 nt, Artificial Sequence
  Chemically synthesized
cauaucucucccuucuuuaccuu

SEQ ID NO: 36799 - RNA, 23 nt, Artificial Sequence
  Chemically synthesized
cuuaucucccugcuucauaucuc

SEQ ID NO: 36800 - RNA, 23 nt, Artificial Sequence
  Chemically synthesized
gcuuaucucccugcuucauaucu

SEQ ID NO: 36801 - RNA, 23 nt, Artificial Sequence
  Chemically synthesized
agcuuaucucccugcuucauauc

SEQ ID NO: 36802 - RNA, 23 nt, Artificial Sequence
  Chemically synthesized
uagcuuaucucccugcuucauau

SEQ ID NO: 36803 - RNA, 23 nt, Artificial Sequence
  Chemically synthesized
ccauggaagucucaaagaucuuu

SEQ ID NO: 36804 - RNA, 23 nt, Artificial Sequence
  Chemically synthesized
cccauggaagucucaaagaucuu

SEQ ID NO: 36805 - RNA, 23 nt, Artificial Sequence
  Chemically synthesized
gcccauggaagucucaaagaucu

SEQ ID NO: 36806 - RNA, 23 nt, Artificial Sequence
  Chemically synthesized
ugcccauggaagucucaaagauc

SEQ ID NO: 36807 - RNA, 23 nt, Artificial Sequence
  Chemically synthesized
uugcccauggaagucucaaagau

SEQ ID NO: 36808 - RNA, 23 nt, Artificial Sequence
  Chemically synthesized
acauugccuugcauuuguaccuu

SEQ ID NO: 36809 - RNA, 23 nt, Artificial Sequence
  Chemically synthesized
ccgcccuuuuuguccuagaguga

SEQ ID NO: 36810 - RNA, 23 nt, Artificial Sequence
  Chemically synthesized
uccgcccuuuuuguccuagagug

SEQ ID NO: 36811 - RNA, 23 nt, Artificial Sequence
  Chemically synthesized
cuccgcccuuuuuguccuagagu

SEQ ID NO: 36812 - RNA, 23 nt, Artificial Sequence
  Chemically synthesized
ccuccgcccuuuuuguccuagag

SEQ ID NO: 36813 - RNA, 23 nt, Artificial Sequence
  Chemically synthesized
uccuccgcccuuuuuguccuaga

SEQ ID NO: 36814 - RNA, 23 nt, Artificial Sequence
  Chemically synthesized
gcaaggagaugucugaauacugc

SEQ ID NO: 36815 - RNA, 23 nt, Artificial Sequence
  Chemically synthesized
ugcaaggagaugucugaauacug

SEQ ID NO: 36816 - RNA, 23 nt, Artificial Sequence
  Chemically synthesized
gugcaaggagaugucugaauacu

SEQ ID NO: 36817 - RNA, 23 nt, Artificial Sequence
  Chemically synthesized
ggugcaaggagaugucugaauac

SEQ ID NO: 36818 - RNA, 23 nt, Artificial Sequence
  Chemically synthesized
cggugcaaggagaugucugaaua

SEQ ID NO: 36819 - RNA, 23 nt, Artificial Sequence
  Chemically synthesized
uugcacuccugaauuuuaucaaa

SEQ ID NO: 36820 - RNA, 23 nt, Artificial Sequence
  Chemically synthesized
cuugcacuccugaauuuuaucaa

SEQ ID NO: 36821 - RNA, 23 nt, Artificial Sequence
  Chemically synthesized
ccuugcacuccugaauuuuauca

SEQ ID NO: 36822 - RNA, 23 nt, Artificial Sequence
  Chemically synthesized
ugggucgacauaguauggaagua

SEQ ID NO: 36823 - RNA, 23 nt, Artificial Sequence
  Chemically synthesized
uugggucgacauaguauggaagu

SEQ ID NO: 36824 - RNA, 23 nt, Artificial Sequence
  Chemically synthesized
uuugggucgacauaguauggaag

SEQ ID NO: 36825 - RNA, 23 nt, Artificial Sequence
  Chemically synthesized
cuuugggucgacauaguauggaa

SEQ ID NO: 36826 - RNA, 23 nt, Artificial Sequence
  Chemically synthesized
gcauuuuuagcuccuugaagaca

SEQ ID NO: 36827 - RNA, 23 nt, Artificial Sequence
  Chemically synthesized
ggcauuuuuagcuccuugaagac

SEQ ID NO: 36828 - RNA, 23 nt, Artificial Sequence
  Chemically synthesized
uggcauuuuuagcuccuugaaga

SEQ ID NO: 36829 - RNA, 23 nt, Artificial Sequence
  Chemically synthesized
cuggcauuuuuagcuccuugaag

SEQ ID NO: 36830 - RNA, 23 nt, Artificial Sequence
  Chemically synthesized
acuggcauuuuuagcuccuugaa

SEQ ID NO: 36831 - RNA, 23 nt, Artificial Sequence
  Chemically synthesized
guacuuuguuuuuccauguguuu

SEQ ID NO: 36832 - RNA, 23 nt, Artificial Sequence
  Chemically synthesized
uguacuuuguuuuuccauguguu

SEQ ID NO: 36833 - RNA, 23 nt, Artificial Sequence
  Chemically synthesized
uuguacuuuguuuuuccaugugu

SEQ ID NO: 36834 - RNA, 23 nt, Artificial Sequence
  Chemically synthesized
uuuguacuuuguuuuuccaugug

SEQ ID NO: 36835 - RNA, 23 nt, Artificial Sequence
  Chemically synthesized
auuuguacuuuguuuuuccaugu

SEQ ID NO: 36836 - RNA, 23 nt, Artificial Sequence
  Chemically synthesized
ugacaauauacacggauuauuau

SEQ ID NO: 36837 - RNA, 23 nt, Artificial Sequence
  Chemically synthesized
uugacaauauacacggauuauua

SEQ ID NO: 36838 - RNA, 23 nt, Artificial Sequence
  Chemically synthesized
uuugacaauauacacggauuauu

SEQ ID NO: 36839 - RNA, 23 nt, Artificial Sequence
  Chemically synthesized
uuuugacaauauacacggauuau

SEQ ID NO: 36840 - RNA, 23 nt, Artificial Sequence
  Chemically synthesized
cuuuugacaauauacacggauua

SEQ ID NO: 36841 - RNA, 23 nt, Artificial Sequence
  Chemically synthesized
gccuucauuaaauguuuguugaa

SEQ ID NO: 36842 - RNA, 23 nt, Artificial Sequence
  Chemically synthesized
ggccuucauuaaauguuuguuga

SEQ ID NO: 36843 - RNA, 23 nt, Artificial Sequence
  Chemically synthesized
ccucucagcuucuaauuuugugc

SEQ ID NO: 36844 - RNA, 23 nt, Artificial Sequence
  Chemically synthesized
uccucucagcuucuaauuuugug

SEQ ID NO: 36845 - RNA, 23 nt, Artificial Sequence
  Chemically synthesized
cuccucucagcuucuaauuuugu

SEQ ID NO: 36846 - RNA, 23 nt, Artificial Sequence
  Chemically synthesized
ucuccucucagcuucuaauuuug

SEQ ID NO: 36847 - RNA, 23 nt, Artificial Sequence
  Chemically synthesized
gucuccucucagcuucuaauuuu

SEQ ID NO: 36848 - RNA, 23 nt, Artificial Sequence
  Chemically synthesized
ccuuugauauuauguggcuuuua

SEQ ID NO: 36849 - RNA, 23 nt, Artificial Sequence
  Chemically synthesized
uccuuugauauuauguggcuuuu

SEQ ID NO: 36850 - RNA, 23 nt, Artificial Sequence
  Chemically synthesized
cuccuuugauauuauguggcuuu

SEQ ID NO: 36851 - RNA, 23 nt, Artificial Sequence
  Chemically synthesized
ucuccuuugauauuauguggcuu

SEQ ID NO: 36852 - RNA, 23 nt, Artificial Sequence
  Chemically synthesized
cucuccuuugauauuauguggcu

SEQ ID NO: 36853 - RNA, 23 nt, Artificial Sequence
  Chemically synthesized
acucuccuuugauauuauguggc

SEQ ID NO: 36854 - RNA, 23 nt, Artificial Sequence
  Chemically synthesized
aacucuccuuugauauuaugugg

SEQ ID NO: 36855 - RNA, 23 nt, Artificial Sequence
  Chemically synthesized
aaacucuccuuugauauuaugug

SEQ ID NO: 36856 - RNA, 23 nt, Artificial Sequence
  Chemically synthesized
uaaacucuccuuugauauuaugu

SEQ ID NO: 36857 - RNA, 23 nt, Artificial Sequence
  Chemically synthesized
uuaaacucuccuuugauauuaug

SEQ ID NO: 36858 - RNA, 23 nt, Artificial Sequence
  Chemically synthesized
aaccugcacuucauaucuagauu

SEQ ID NO: 36859 - RNA, 23 nt, Artificial Sequence
  Chemically synthesized
cccacuuucauucaaucaaccug

SEQ ID NO: 36860 - RNA, 23 nt, Artificial Sequence
  Chemically synthesized
ucccacuuucauucaaucaaccu

SEQ ID NO: 36861 - RNA, 23 nt, Artificial Sequence
  Chemically synthesized
uucccacuuucauucaaucaacc

SEQ ID NO: 36862 - RNA, 23 nt, Artificial Sequence
  Chemically synthesized
auucccacuuucauucaaucaac

SEQ ID NO: 36863 - RNA, 23 nt, Artificial Sequence
  Chemically synthesized
uauucccacuuucauucaaucaa

SEQ ID NO: 36864 - RNA, 23 nt, Artificial Sequence
  Chemically synthesized
agagaccaucuccuaucuuuuau

SEQ ID NO: 36865 - RNA, 23 nt, Artificial Sequence
  Chemically synthesized
cuuuguuuuuccauguguuuugc

SEQ ID NO: 36866 - RNA, 23 nt, Artificial Sequence
  Chemically synthesized
acuuuguuuuuccauguguuuug

SEQ ID NO: 36867 - RNA, 23 nt, Artificial Sequence
  Chemically synthesized
uacuuuguuuuuccauguguuuu

SEQ ID NO: 36868 - RNA, 23 nt, Artificial Sequence
  Chemically synthesized
ccuuguuuguuuuauucaccauc

SEQ ID NO: 36869 - RNA, 23 nt, Artificial Sequence
  Chemically synthesized
accuuguuuguuuuauucaccau

SEQ ID NO: 36870 - RNA, 23 nt, Artificial Sequence
  Chemically synthesized
aaccuuguuuguuuuauucacca

SEQ ID NO: 36871 - RNA, 23 nt, Artificial Sequence
  Chemically synthesized
aaaccuuguuuguuuuauucacc

SEQ ID NO: 36872 - RNA, 23 nt, Artificial Sequence
  Chemically synthesized
gaaaccuuguuuguuuuauucac

SEQ ID NO: 36873 - RNA, 23 nt, Artificial Sequence
  Chemically synthesized
ucaacuugcugccuaagaggggu

SEQ ID NO: 36874 - RNA, 23 nt, Artificial Sequence
  Chemically synthesized
cucaacuugcugccuaagagggg

SEQ ID NO: 36875 - RNA, 23 nt, Artificial Sequence
  Chemically synthesized
ccucaacuugcugccuaagaggg

SEQ ID NO: 36876 - RNA, 23 nt, Artificial Sequence
  Chemically synthesized
ucaaccuagaaaccuuuaucccu

SEQ ID NO: 36877 - RNA, 23 nt, Artificial Sequence
  Chemically synthesized
uucaaccuagaaaccuuuauccc

SEQ ID NO: 36878 - RNA, 23 nt, Artificial Sequence
  Chemically synthesized
uuucaaccuagaaaccuuuaucc

SEQ ID NO: 36879 - RNA, 23 nt, Artificial Sequence
  Chemically synthesized
uuuucaaccuagaaaccuuuauc

SEQ ID NO: 36880 - RNA, 23 nt, Artificial Sequence
  Chemically synthesized
guuuucaaccuagaaaccuuuau

SEQ ID NO: 36881 - RNA, 23 nt, Artificial Sequence
  Chemically synthesized
ucauguaaaugcucaaagaugua

SEQ ID NO: 36882 - RNA, 23 nt, Artificial Sequence
  Chemically synthesized
aucauguaaaugcucaaagaugu

SEQ ID NO: 36883 - RNA, 23 nt, Artificial Sequence
  Chemically synthesized
gaucauguaaaugcucaaagaug

SEQ ID NO: 36884 - RNA, 23 nt, Artificial Sequence
  Chemically synthesized
cuagcuuaucucccugcuucaua

SEQ ID NO: 36885 - RNA, 23 nt, Artificial Sequence
  Chemically synthesized
ccuagcuuaucucccugcuucau

SEQ ID NO: 36886 - RNA, 23 nt, Artificial Sequence
  Chemically synthesized
cacuucauaucuagauuucuaga

SEQ ID NO: 36887 - RNA, 23 nt, Artificial Sequence
  Chemically synthesized
caaccugcacuucauaucuagau

SEQ ID NO: 36888 - RNA, 23 nt, Artificial Sequence
  Chemically synthesized
ccacuuucauucaaucaaccugc

SEQ ID NO: 36889 - RNA, 23 nt, Artificial Sequence
  Chemically synthesized
cccuuacuauucccacuuucauu

SEQ ID NO: 36890 - RNA, 23 nt, Artificial Sequence
  Chemically synthesized
ucccuuacuauucccacuuucau

SEQ ID NO: 36891 - RNA, 23 nt, Artificial Sequence
  Chemically synthesized
cucccuuacuauucccacuuuca

SEQ ID NO: 36892 - RNA, 23 nt, Artificial Sequence
  Chemically synthesized
ucucccuuacuauucccacuuuc

SEQ ID NO: 36893 - RNA, 23 nt, Artificial Sequence
  Chemically synthesized
cucucccuuacuauucccacuuu

SEQ ID NO: 36894 - RNA, 23 nt, Artificial Sequence
  Chemically synthesized
aacguccaucucucucccuuacu

SEQ ID NO: 36895 - RNA, 23 nt, Artificial Sequence
  Chemically synthesized
aaacguccaucucucucccuuac

SEQ ID NO: 36896 - RNA, 23 nt, Artificial Sequence
  Chemically synthesized
gaaacguccaucucucucccuua

SEQ ID NO: 36897 - RNA, 23 nt, Artificial Sequence
  Chemically synthesized
agaaacguccaucucucucccuu

SEQ ID NO: 36898 - RNA, 23 nt, Artificial Sequence
  Chemically synthesized
gaagaagcaaacaugacuagaga

SEQ ID NO: 36899 - RNA, 23 nt, Artificial Sequence
  Chemically synthesized
ugaagaagcaaacaugacuagag

SEQ ID NO: 36900 - RNA, 23 nt, Artificial Sequence
  Chemically synthesized
cugaagaagcaaacaugacuaga

SEQ ID NO: 36901 - RNA, 23 nt, Artificial Sequence
  Chemically synthesized
ucugaagaagcaaacaugacuag

SEQ ID NO: 36902 - RNA, 23 nt, Artificial Sequence
  Chemically synthesized
cucugaagaagcaaacaugacua

SEQ ID NO: 36903 - RNA, 23 nt, Artificial Sequence
  Chemically synthesized
ugacaagugaaguuguaaacaca

SEQ ID NO: 36904 - RNA, 23 nt, Artificial Sequence
  Chemically synthesized
cugacaagugaaguuguaaacac

SEQ ID NO: 36905 - RNA, 23 nt, Artificial Sequence
  Chemically synthesized
ccugacaagugaaguuguaaaca

SEQ ID NO: 36906 - RNA, 23 nt, Artificial Sequence
  Chemically synthesized
gccugacaagugaaguuguaaac

SEQ ID NO: 36907 - RNA, 23 nt, Artificial Sequence
  Chemically synthesized
agccugacaagugaaguuguaaa

SEQ ID NO: 36908 - RNA, 23 nt, Artificial Sequence
  Chemically synthesized
gcccaucaucucugccuuugagu

SEQ ID NO: 36909 - RNA, 23 nt, Artificial Sequence
  Chemically synthesized
ugcccaucaucucugccuuugag

SEQ ID NO: 36910 - RNA, 23 nt, Artificial Sequence
  Chemically synthesized
gugcccaucaucucugccuuuga

SEQ ID NO: 36911 - RNA, 23 nt, Artificial Sequence
  Chemically synthesized
ugugcccaucaucucugccuuug

SEQ ID NO: 36912 - RNA, 23 nt, Artificial Sequence
  Chemically synthesized
cugugcccaucaucucugccuuu

SEQ ID NO: 36913 - RNA, 23 nt, Artificial Sequence
  Chemically synthesized
ggagagugaugccgguaaagaaa

SEQ ID NO: 36914 - RNA, 23 nt, Artificial Sequence
  Chemically synthesized
aggagagugaugccgguaaagaa

SEQ ID NO: 36915 - RNA, 23 nt, Artificial Sequence
  Chemically synthesized
gaggagagugaugccgguaaaga

SEQ ID NO: 36916 - RNA, 23 nt, Artificial Sequence
  Chemically synthesized
cgaggagagugaugccgguaaag

SEQ ID NO: 36917 - RNA, 23 nt, Artificial Sequence
  Chemically synthesized
gcgaggagagugaugccgguaaa

SEQ ID NO: 36918 - RNA, 23 nt, Artificial Sequence
  Chemically synthesized
ccuacagaacaaaccaaaaaugu

SEQ ID NO: 36919 - RNA, 23 nt, Artificial Sequence
  Chemically synthesized
caagagaaacugcagaauuuugc

SEQ ID NO: 36920 - RNA, 23 nt, Artificial Sequence
  Chemically synthesized
gcaagagaaacugcagaauuuug

SEQ ID NO: 36921 - RNA, 23 nt, Artificial Sequence
  Chemically synthesized
ugcaagagaaacugcagaauuuu

SEQ ID NO: 36922 - RNA, 23 nt, Artificial Sequence
  Chemically synthesized
augcaagagaaacugcagaauuu

SEQ ID NO: 36923 - RNA, 23 nt, Artificial Sequence
  Chemically synthesized
aaugcaagagaaacugcagaauu

SEQ ID NO: 36924 - RNA, 23 nt, Artificial Sequence
  Chemically synthesized
cacaggaaaugcaagagaaacug

SEQ ID NO: 36925 - RNA, 23 nt, Artificial Sequence
  Chemically synthesized
gcacaggaaaugcaagagaaacu

SEQ ID NO: 36926 - RNA, 23 nt, Artificial Sequence
  Chemically synthesized
ugcacaggaaaugcaagagaaac

SEQ ID NO: 36927 - RNA, 23 nt, Artificial Sequence
  Chemically synthesized
cugcacaggaaaugcaagagaaa

SEQ ID NO: 36928 - RNA, 23 nt, Artificial Sequence
  Chemically synthesized
acugcacaggaaaugcaagagaa

SEQ ID NO: 36929 - RNA, 23 nt, Artificial Sequence
  Chemically synthesized
guuuuuccauguguuuugcuuuu

SEQ ID NO: 36930 - RNA, 23 nt, Artificial Sequence
  Chemically synthesized
uauaugcuacuuuuacuuguuca

SEQ ID NO: 36931 - RNA, 23 nt, Artificial Sequence
  Chemically synthesized
ugguguccuucuuccucaagucu

SEQ ID NO: 36932 - RNA, 23 nt, Artificial Sequence
  Chemically synthesized
gugguguccuucuuccucaaguc

SEQ ID NO: 36933 - RNA, 23 nt, Artificial Sequence
  Chemically synthesized
ggugguguccuucuuccucaagu

SEQ ID NO: 36934 - RNA, 23 nt, Artificial Sequence
  Chemically synthesized
aggugguguccuucuuccucaag

SEQ ID NO: 36935 - RNA, 23 nt, Artificial Sequence
  Chemically synthesized
caggugguguccuucuuccucaa

SEQ ID NO: 36936 - RNA, 23 nt, Artificial Sequence
  Chemically synthesized
uagaacccuucugcuuucuauua

SEQ ID NO: 36937 - RNA, 23 nt, Artificial Sequence
  Chemically synthesized
uuagaacccuucugcuuucuauu

SEQ ID NO: 36938 - RNA, 23 nt, Artificial Sequence
  Chemically synthesized
cuuagaacccuucugcuuucuau

SEQ ID NO: 36939 - RNA, 23 nt, Artificial Sequence
  Chemically synthesized
uuauuucagugccauacauguua

SEQ ID NO: 36940 - RNA, 23 nt, Artificial Sequence
  Chemically synthesized
uuuauuucagugccauacauguu

SEQ ID NO: 36941 - RNA, 23 nt, Artificial Sequence
  Chemically synthesized
uuuuauuucagugccauacaugu

SEQ ID NO: 36942 - RNA, 23 nt, Artificial Sequence
  Chemically synthesized
cuuuuauuucagugccauacaug

SEQ ID NO: 36943 - RNA, 23 nt, Artificial Sequence
  Chemically synthesized
ucccuagacucuguaaccaccuc

SEQ ID NO: 36944 - RNA, 23 nt, Artificial Sequence
  Chemically synthesized
uucccuagacucuguaaccaccu

SEQ ID NO: 36945 - RNA, 23 nt, Artificial Sequence
  Chemically synthesized
uuucccuagacucuguaaccacc

SEQ ID NO: 36946 - RNA, 23 nt, Artificial Sequence
  Chemically synthesized
guuucccuagacucuguaaccac

SEQ ID NO: 36947 - RNA, 23 nt, Artificial Sequence
  Chemically synthesized
uguuucccuagacucuguaacca

SEQ ID NO: 36948 - RNA, 23 nt, Artificial Sequence
  Chemically synthesized
ggaagucucaaagaucuuucguu

SEQ ID NO: 36949 - RNA, 23 nt, Artificial Sequence
  Chemically synthesized
uggaagucucaaagaucuuucgu

SEQ ID NO: 36950 - RNA, 23 nt, Artificial Sequence
  Chemically synthesized
auggaagucucaaagaucuuucg

SEQ ID NO: 36951 - RNA, 23 nt, Artificial Sequence
  Chemically synthesized
cauggaagucucaaagaucuuuc

SEQ ID NO: 36952 - RNA, 23 nt, Artificial Sequence
  Chemically synthesized
auccuccgcccuuuuuguccuag

SEQ ID NO: 36953 - RNA, 23 nt, Artificial Sequence
  Chemically synthesized
uauccuccgcccuuuuuguccua

SEQ ID NO: 36954 - RNA, 23 nt, Artificial Sequence
  Chemically synthesized
ggagagggcauauaaauucccca

SEQ ID NO: 36955 - RNA, 23 nt, Artificial Sequence
  Chemically synthesized
gggagagggcauauaaauucccc

SEQ ID NO: 36956 - RNA, 23 nt, Artificial Sequence
  Chemically synthesized
ggggagagggcauauaaauuccc

SEQ ID NO: 36957 - RNA, 23 nt, Artificial Sequence
  Chemically synthesized
uggggagagggcauauaaauucc

SEQ ID NO: 36958 - RNA, 23 nt, Artificial Sequence
  Chemically synthesized
auggggagagggcauauaaauuc

SEQ ID NO: 36959 - RNA, 23 nt, Artificial Sequence
  Chemically synthesized
gagccugacaagugaaguuguaa

SEQ ID NO: 36960 - RNA, 23 nt, Artificial Sequence
  Chemically synthesized
agagccugacaagugaaguugua

SEQ ID NO: 36961 - RNA, 23 nt, Artificial Sequence
  Chemically synthesized
cccaucaucucugccuuugagug

SEQ ID NO: 36962 - RNA, 23 nt, Artificial Sequence
  Chemically synthesized
agacaugauaugcggcuaugccu

SEQ ID NO: 36963 - RNA, 23 nt, Artificial Sequence
  Chemically synthesized
cagacaugauaugcggcuaugcc

SEQ ID NO: 36964 - RNA, 23 nt, Artificial Sequence
  Chemically synthesized
ucagacaugauaugcggcuaugc

SEQ ID NO: 36965 - RNA, 23 nt, Artificial Sequence
  Chemically synthesized
cucagacaugauaugcggcuaug

SEQ ID NO: 36966 - RNA, 23 nt, Artificial Sequence
  Chemically synthesized
gcucagacaugauaugcggcuau

SEQ ID NO: 36967 - RNA, 23 nt, Artificial Sequence
  Chemically synthesized
gcaggauauugggaguguguggc

SEQ ID NO: 36968 - RNA, 23 nt, Artificial Sequence
  Chemically synthesized
cgcaggauauugggagugugugg

SEQ ID NO: 36969 - RNA, 23 nt, Artificial Sequence
  Chemically synthesized
acgcaggauauugggagugugug

SEQ ID NO: 36970 - RNA, 23 nt, Artificial Sequence
  Chemically synthesized
gacgcaggauauugggagugugu

SEQ ID NO: 36971 - RNA, 23 nt, Artificial Sequence
  Chemically synthesized
ggacgcaggauauugggagugug

SEQ ID NO: 36972 - RNA, 23 nt, Artificial Sequence
  Chemically synthesized
agagaaacugcagaauuuugcac

SEQ ID NO: 36973 - RNA, 23 nt, Artificial Sequence
  Chemically synthesized
aagagaaacugcagaauuuugca

SEQ ID NO: 36974 - RNA, 23 nt, Artificial Sequence
  Chemically synthesized
gggacgcaggauauugggagugu

SEQ ID NO: 36975 - RNA, 23 nt, Artificial Sequence
  Chemically synthesized
gcauauagguugcagucucggcc

SEQ ID NO: 36976 - RNA, 23 nt, Artificial Sequence
  Chemically synthesized
ggcauauagguugcagucucggc

SEQ ID NO: 36977 - RNA, 23 nt, Artificial Sequence
  Chemically synthesized
uggcauauagguugcagucucgg

SEQ ID NO: 36978 - RNA, 23 nt, Artificial Sequence
  Chemically synthesized
cuggcauauagguugcagucucg

SEQ ID NO: 36979 - RNA, 23 nt, Artificial Sequence
  Chemically synthesized
gcuggcauauagguugcagucuc

SEQ ID NO: 36980 - RNA, 23 nt, Artificial Sequence
  Chemically synthesized
gugaagccuugcacuccugaauu

SEQ ID NO: 36981 - RNA, 23 nt, Artificial Sequence
  Chemically synthesized
ccaggauuuuguauugccaucgg

SEQ ID NO: 36982 - RNA, 23 nt, Artificial Sequence
  Chemically synthesized
gccaggauuuuguauugccaucg

SEQ ID NO: 36983 - RNA, 23 nt, Artificial Sequence
  Chemically synthesized
ugccaggauuuuguauugccauc

SEQ ID NO: 36984 - RNA, 23 nt, Artificial Sequence
  Chemically synthesized
cugccaggauuuuguauugccau

SEQ ID NO: 36985 - RNA, 23 nt, Artificial Sequence
  Chemically synthesized
acugccaggauuuuguauugcca

SEQ ID NO: 36986 - RNA, 23 nt, Artificial Sequence
  Chemically synthesized
gacauaguauggaaguauuugag

SEQ ID NO: 36987 - RNA, 23 nt, Artificial Sequence
  Chemically synthesized
gcuuuuauccacuggcauuuuua

SEQ ID NO: 36988 - RNA, 23 nt, Artificial Sequence
  Chemically synthesized
ugcuuuuauccacuggcauuuuu

SEQ ID NO: 36989 - RNA, 23 nt, Artificial Sequence
  Chemically synthesized
uugcuuuuauccacuggcauuuu

SEQ ID NO: 36990 - RNA, 23 nt, Artificial Sequence
  Chemically synthesized
uuugcuuuuauccacuggcauuu

SEQ ID NO: 36991 - RNA, 23 nt, Artificial Sequence
  Chemically synthesized
uuuugcuuuuauccacuggcauu

SEQ ID NO: 36992 - RNA, 23 nt, Artificial Sequence
  Chemically synthesized
cuacaauccuaccuuuugauaaa

SEQ ID NO: 36993 - RNA, 23 nt, Artificial Sequence
  Chemically synthesized
gcuacaauccuaccuuuugauaa

SEQ ID NO: 36994 - RNA, 23 nt, Artificial Sequence
  Chemically synthesized
agcuacaauccuaccuuuugaua

SEQ ID NO: 36995 - RNA, 23 nt, Artificial Sequence
  Chemically synthesized
uagcuacaauccuaccuuuugau

SEQ ID NO: 36996 - RNA, 23 nt, Artificial Sequence
  Chemically synthesized
uuagcuacaauccuaccuuuuga

SEQ ID NO: 36997 - RNA, 23 nt, Artificial Sequence
  Chemically synthesized
cagaaaccuuguuuguuuuauuc

SEQ ID NO: 36998 - RNA, 23 nt, Artificial Sequence
  Chemically synthesized
ccuugaaccucauuaaaugguga

SEQ ID NO: 36999 - RNA, 23 nt, Artificial Sequence
  Chemically synthesized
caaccuagaaaccuuuaucccug

SEQ ID NO: 37000 - RNA, 23 nt, Artificial Sequence
  Chemically synthesized
cuuugauauuauguggcuuuuau

SEQ ID NO: 37001 - RNA, 23 nt, Artificial Sequence
  Chemically synthesized
uccugagaaacguccaucucucu

SEQ ID NO: 37002 - RNA, 23 nt, Artificial Sequence
  Chemically synthesized
uuccugagaaacguccaucucuc

SEQ ID NO: 37003 - RNA, 23 nt, Artificial Sequence
  Chemically synthesized
cuuccugagaaacguccaucucu

SEQ ID NO: 37004 - RNA, 23 nt, Artificial Sequence
  Chemically synthesized
ccuuccugagaaacguccaucuc

SEQ ID NO: 37005 - RNA, 23 nt, Artificial Sequence
  Chemically synthesized
uccuuccugagaaacguccaucu

SEQ ID NO: 37006 - RNA, 23 nt, Artificial Sequence
  Chemically synthesized
cccuagacucuguaaccaccucu

SEQ ID NO: 37007 - RNA, 23 nt, Artificial Sequence
  Chemically synthesized
ggacacucuuggcucguuugggc

SEQ ID NO: 37008 - RNA, 23 nt, Artificial Sequence
  Chemically synthesized
aggacacucuuggcucguuuggg

SEQ ID NO: 37009 - RNA, 23 nt, Artificial Sequence
  Chemically synthesized
aaggacacucuuggcucguuugg

SEQ ID NO: 37010 - RNA, 23 nt, Artificial Sequence
  Chemically synthesized
gaaggacacucuuggcucguuug

SEQ ID NO: 37011 - RNA, 23 nt, Artificial Sequence
  Chemically synthesized
ggaaggacacucuuggcucguuu

SEQ ID NO: 37012 - RNA, 23 nt, Artificial Sequence
  Chemically synthesized
gaagcaaacaugacuagagacgc

SEQ ID NO: 37013 - RNA, 23 nt, Artificial Sequence
  Chemically synthesized
agaagcaaacaugacuagagacg

SEQ ID NO: 37014 - RNA, 23 nt, Artificial Sequence
  Chemically synthesized
aagaagcaaacaugacuagagac

SEQ ID NO: 37015 - RNA, 23 nt, Artificial Sequence
  Chemically synthesized
ggacaucaucaccuuggaaauga

SEQ ID NO: 37016 - RNA, 23 nt, Artificial Sequence
  Chemically synthesized
aggacaucaucaccuuggaaaug

SEQ ID NO: 37017 - RNA, 23 nt, Artificial Sequence
  Chemically synthesized
aaggacaucaucaccuuggaaau

SEQ ID NO: 37018 - RNA, 23 nt, Artificial Sequence
  Chemically synthesized
gaaggacaucaucaccuuggaaa

SEQ ID NO: 37019 - RNA, 23 nt, Artificial Sequence
  Chemically synthesized
agaaggacaucaucaccuuggaa

SEQ ID NO: 37020 - RNA, 23 nt, Artificial Sequence
  Chemically synthesized
gagagaccaucuccuaucuuuua

SEQ ID NO: 37021 - RNA, 23 nt, Artificial Sequence
  Chemically synthesized
ccauauuuguguucaguuccagc

SEQ ID NO: 37022 - RNA, 23 nt, Artificial Sequence
  Chemically synthesized
cccauauuuguguucaguuccag

SEQ ID NO: 37023 - RNA, 23 nt, Artificial Sequence
  Chemically synthesized
ccccauauuuguguucaguucca

SEQ ID NO: 37024 - RNA, 23 nt, Artificial Sequence
  Chemically synthesized
uccccauauuuguguucaguucc

SEQ ID NO: 37025 - RNA, 23 nt, Artificial Sequence
  Chemically synthesized
uuccccauauuuguguucaguuc

SEQ ID NO: 37026 - RNA, 23 nt, Artificial Sequence
  Chemically synthesized
ccaucaucucugccuuugagugu

SEQ ID NO: 37027 - RNA, 23 nt, Artificial Sequence
  Chemically synthesized
uugagcgaauuguuagaacaucu

SEQ ID NO: 37028 - RNA, 23 nt, Artificial Sequence
  Chemically synthesized
cagaauuccaccggugcaaggag

SEQ ID NO: 37029 - RNA, 23 nt, Artificial Sequence
  Chemically synthesized
acagaauuccaccggugcaagga

SEQ ID NO: 37030 - RNA, 23 nt, Artificial Sequence
  Chemically synthesized
cacagaauuccaccggugcaagg

SEQ ID NO: 37031 - RNA, 23 nt, Artificial Sequence
  Chemically synthesized
gcacagaauuccaccggugcaag

SEQ ID NO: 37032 - RNA, 23 nt, Artificial Sequence
  Chemically synthesized
ggcacagaauuccaccggugcaa

SEQ ID NO: 37033 - RNA, 23 nt, Artificial Sequence
  Chemically synthesized
acaugcugguuaaggugaacgca

SEQ ID NO: 37034 - RNA, 23 nt, Artificial Sequence
  Chemically synthesized
gacaugcugguuaaggugaacgc

SEQ ID NO: 37035 - RNA, 23 nt, Artificial Sequence
  Chemically synthesized
cgacaugcugguuaaggugaacg

SEQ ID NO: 37036 - RNA, 23 nt, Artificial Sequence
  Chemically synthesized
ccgacaugcugguuaaggugaac

SEQ ID NO: 37037 - RNA, 23 nt, Artificial Sequence
  Chemically synthesized
gccgacaugcugguuaaggugaa

SEQ ID NO: 37038 - RNA, 23 nt, Artificial Sequence
  Chemically synthesized
ggccgacaugcugguuaagguga

SEQ ID NO: 37039 - RNA, 23 nt, Artificial Sequence
  Chemically synthesized
uggccgacaugcugguuaaggug

SEQ ID NO: 37040 - RNA, 23 nt, Artificial Sequence
  Chemically synthesized
guggccgacaugcugguuaaggu

SEQ ID NO: 37041 - RNA, 23 nt, Artificial Sequence
  Chemically synthesized
ccguggagaugagacugaucgug

SEQ ID NO: 37042 - RNA, 23 nt, Artificial Sequence
  Chemically synthesized
gccguggagaugagacugaucgu

SEQ ID NO: 37043 - RNA, 23 nt, Artificial Sequence
  Chemically synthesized
ugccguggagaugagacugaucg

SEQ ID NO: 37044 - RNA, 23 nt, Artificial Sequence
  Chemically synthesized
cugccguggagaugagacugauc

SEQ ID NO: 37045 - RNA, 23 nt, Artificial Sequence
  Chemically synthesized
ccugccguggagaugagacugau

SEQ ID NO: 37046 - RNA, 23 nt, Artificial Sequence
  Chemically synthesized
ccauguucuaugugaccagacug

SEQ ID NO: 37047 - RNA, 23 nt, Artificial Sequence
  Chemically synthesized
uccauguucuaugugaccagacu

SEQ ID NO: 37048 - RNA, 23 nt, Artificial Sequence
  Chemically synthesized
guccauguucuaugugaccagac

SEQ ID NO: 37049 - RNA, 23 nt, Artificial Sequence
  Chemically synthesized
cguccauguucuaugugaccaga

SEQ ID NO: 37050 - RNA, 23 nt, Artificial Sequence
  Chemically synthesized
acguccauguucuaugugaccag

SEQ ID NO: 37051 - RNA, 23 nt, Artificial Sequence
  Chemically synthesized
ggaaguauuugagagagagaacc

SEQ ID NO: 37052 - RNA, 23 nt, Artificial Sequence
  Chemically synthesized
uggaaguauuugagagagagaac

SEQ ID NO: 37053 - RNA, 23 nt, Artificial Sequence
  Chemically synthesized
auggaaguauuugagagagagaa

SEQ ID NO: 37054 - RNA, 23 nt, Artificial Sequence
  Chemically synthesized
uauggaaguauuugagagagaga

SEQ ID NO: 37055 - RNA, 23 nt, Artificial Sequence
  Chemically synthesized
guauggaaguauuugagagagag

SEQ ID NO: 37056 - RNA, 23 nt, Artificial Sequence
  Chemically synthesized
caaaaugcuaggccuguaguagu

SEQ ID NO: 37057 - RNA, 23 nt, Artificial Sequence
  Chemically synthesized
cuuuuauccacuggcauuuuuag

SEQ ID NO: 37058 - RNA, 23 nt, Artificial Sequence
  Chemically synthesized
guuuugcuuuuauccacuggcau

SEQ ID NO: 37059 - RNA, 23 nt, Artificial Sequence
  Chemically synthesized
guguuuugcuuuuauccacuggc

SEQ ID NO: 37060 - RNA, 23 nt, Artificial Sequence
  Chemically synthesized
uguguuuugcuuuuauccacugg

SEQ ID NO: 37061 - RNA, 23 nt, Artificial Sequence
  Chemically synthesized
auguguuuugcuuuuauccacug

SEQ ID NO: 37062 - RNA, 23 nt, Artificial Sequence
  Chemically synthesized
cauguguuuugcuuuuauccacu

SEQ ID NO: 37063 - RNA, 23 nt, Artificial Sequence
  Chemically synthesized
gacaauauacacggauuauuauu

SEQ ID NO: 37064 - RNA, 23 nt, Artificial Sequence
  Chemically synthesized
auauaugcuacuuuuacuuguuc

SEQ ID NO: 37065 - RNA, 23 nt, Artificial Sequence
  Chemically synthesized
ccucaagucuugacaauucccgg

SEQ ID NO: 37066 - RNA, 23 nt, Artificial Sequence
  Chemically synthesized
uccucaagucuugacaauucccg

SEQ ID NO: 37067 - RNA, 23 nt, Artificial Sequence
  Chemically synthesized
uuccucaagucuugacaauuccc

SEQ ID NO: 37068 - RNA, 23 nt, Artificial Sequence
  Chemically synthesized
cuuccucaagucuugacaauucc

SEQ ID NO: 37069 - RNA, 23 nt, Artificial Sequence
  Chemically synthesized
ucuuccucaagucuugacaauuc

SEQ ID NO: 37070 - RNA, 23 nt, Artificial Sequence
  Chemically synthesized
ggugauuucuugcuaagcuccag

SEQ ID NO: 37071 - RNA, 23 nt, Artificial Sequence
  Chemically synthesized
uggugauuucuugcuaagcucca

SEQ ID NO: 37072 - RNA, 23 nt, Artificial Sequence
  Chemically synthesized
auggugauuucuugcuaagcucc

SEQ ID NO: 37073 - RNA, 23 nt, Artificial Sequence
  Chemically synthesized
aauggugauuucuugcuaagcuc

SEQ ID NO: 37074 - RNA, 23 nt, Artificial Sequence
  Chemically synthesized
aaauggugauuucuugcuaagcu

SEQ ID NO: 37075 - RNA, 23 nt, Artificial Sequence
  Chemically synthesized
caacuucccuguucuuuaagacu

SEQ ID NO: 37076 - RNA, 23 nt, Artificial Sequence
  Chemically synthesized
ccaacuucccuguucuuuaagac

SEQ ID NO: 37077 - RNA, 23 nt, Artificial Sequence
  Chemically synthesized
cccaacuucccuguucuuuaaga

SEQ ID NO: 37078 - RNA, 23 nt, Artificial Sequence
  Chemically synthesized
ucccaacuucccuguucuuuaag

SEQ ID NO: 37079 - RNA, 23 nt, Artificial Sequence
  Chemically synthesized
uucccaacuucccuguucuuuaa

SEQ ID NO: 37080 - RNA, 23 nt, Artificial Sequence
  Chemically synthesized
ccuuuaucccugcuuaucugaaa

SEQ ID NO: 37081 - RNA, 23 nt, Artificial Sequence
  Chemically synthesized
accuuuaucccugcuuaucugaa

SEQ ID NO: 37082 - RNA, 23 nt, Artificial Sequence
  Chemically synthesized
aaccuuuaucccugcuuaucuga

SEQ ID NO: 37083 - RNA, 23 nt, Artificial Sequence
  Chemically synthesized
ucagugccauacauguuauuguu

SEQ ID NO: 37084 - RNA, 23 nt, Artificial Sequence
  Chemically synthesized
uucagugccauacauguuauugu

SEQ ID NO: 37085 - RNA, 23 nt, Artificial Sequence
  Chemically synthesized
uuucagugccauacauguuauug

SEQ ID NO: 37086 - RNA, 23 nt, Artificial Sequence
  Chemically synthesized
auuucagugccauacauguuauu

SEQ ID NO: 37087 - RNA, 23 nt, Artificial Sequence
  Chemically synthesized
uauuucagugccauacauguuau

SEQ ID NO: 37088 - RNA, 23 nt, Artificial Sequence
  Chemically synthesized
ucaaccugcacuucauaucuaga

SEQ ID NO: 37089 - RNA, 23 nt, Artificial Sequence
  Chemically synthesized
aucaaccugcacuucauaucuag

SEQ ID NO: 37090 - RNA, 23 nt, Artificial Sequence
  Chemically synthesized
aaucaaccugcacuucauaucua

SEQ ID NO: 37091 - RNA, 23 nt, Artificial Sequence
  Chemically synthesized
ccaccucucugucuuuuuccuuc

SEQ ID NO: 37092 - RNA, 23 nt, Artificial Sequence
  Chemically synthesized
accaccucucugucuuuuuccuu

SEQ ID NO: 37093 - RNA, 23 nt, Artificial Sequence
  Chemically synthesized
aaccaccucucugucuuuuuccu

SEQ ID NO: 37094 - RNA, 23 nt, Artificial Sequence
  Chemically synthesized
guaaccaccucucugucuuuuuc

SEQ ID NO: 37095 - RNA, 23 nt, Artificial Sequence
  Chemically synthesized
ugagcuuuguuacugaaaugagc

SEQ ID NO: 37096 - RNA, 23 nt, Artificial Sequence
  Chemically synthesized
cugagcuuuguuacugaaaugag

SEQ ID NO: 37097 - RNA, 23 nt, Artificial Sequence
  Chemically synthesized
ucugagcuuuguuacugaaauga

SEQ ID NO: 37098 - RNA, 23 nt, Artificial Sequence
  Chemically synthesized
cucugagcuuuguuacugaaaug

SEQ ID NO: 37099 - RNA, 23 nt, Artificial Sequence
  Chemically synthesized
ucucugagcuuuguuacugaaau

SEQ ID NO: 37100 - RNA, 23 nt, Artificial Sequence
  Chemically synthesized
ccuuauugaucuuugcccaugga

SEQ ID NO: 37101 - RNA, 23 nt, Artificial Sequence
  Chemically synthesized
accuuauugaucuuugcccaugg

SEQ ID NO: 37102 - RNA, 23 nt, Artificial Sequence
  Chemically synthesized
uaccuuauugaucuuugcccaug

SEQ ID NO: 37103 - RNA, 23 nt, Artificial Sequence
  Chemically synthesized
guaccuuauugaucuuugcccau

SEQ ID NO: 37104 - RNA, 23 nt, Artificial Sequence
  Chemically synthesized
uguaccuuauugaucuuugccca

SEQ ID NO: 37105 - RNA, 23 nt, Artificial Sequence
  Chemically synthesized
gacaucaucaccuuggaaaugag

SEQ ID NO: 37106 - RNA, 23 nt, Artificial Sequence
  Chemically synthesized
acauuaguuaagaugucugagag

SEQ ID NO: 37107 - RNA, 23 nt, Artificial Sequence
  Chemically synthesized
uacauuaguuaagaugucugaga

SEQ ID NO: 37108 - RNA, 23 nt, Artificial Sequence
  Chemically synthesized
uuacauuaguuaagaugucugag

SEQ ID NO: 37109 - RNA, 23 nt, Artificial Sequence
  Chemically synthesized
uauuacauuaguuaagaugucug

SEQ ID NO: 37110 - RNA, 23 nt, Artificial Sequence
  Chemically synthesized
auuccccauauuuguguucaguu

SEQ ID NO: 37111 - RNA, 23 nt, Artificial Sequence
  Chemically synthesized
uauggggagagggcauauaaauu

SEQ ID NO: 37112 - RNA, 23 nt, Artificial Sequence
  Chemically synthesized
aagagccugacaagugaaguugu

SEQ ID NO: 37113 - RNA, 23 nt, Artificial Sequence
  Chemically synthesized
gaagagccugacaagugaaguug

SEQ ID NO: 37114 - RNA, 23 nt, Artificial Sequence
  Chemically synthesized
ugaagagccugacaagugaaguu

SEQ ID NO: 37115 - RNA, 23 nt, Artificial Sequence
  Chemically synthesized
ccuuuucugugaagcccuuugcc

SEQ ID NO: 37116 - RNA, 23 nt, Artificial Sequence
  Chemically synthesized
uccuuuucugugaagcccuuugc

SEQ ID NO: 37117 - RNA, 23 nt, Artificial Sequence
  Chemically synthesized
cuccuuuucugugaagcccuuug

SEQ ID NO: 37118 - RNA, 23 nt, Artificial Sequence
  Chemically synthesized
gcuccuuuucugugaagcccuuu

SEQ ID NO: 37119 - RNA, 23 nt, Artificial Sequence
  Chemically synthesized
agcuccuuuucugugaagcccuu

SEQ ID NO: 37120 - RNA, 23 nt, Artificial Sequence
  Chemically synthesized
ggagaugucugaauacugcagca

SEQ ID NO: 37121 - RNA, 23 nt, Artificial Sequence
  Chemically synthesized
aggagaugucugaauacugcagc

SEQ ID NO: 37122 - RNA, 23 nt, Artificial Sequence
  Chemically synthesized
aaggagaugucugaauacugcag

SEQ ID NO: 37123 - RNA, 23 nt, Artificial Sequence
  Chemically synthesized
caaggagaugucugaauacugca

SEQ ID NO: 37124 - RNA, 23 nt, Artificial Sequence
  Chemically synthesized
cgcgcucagacaugauaugcggc

SEQ ID NO: 37125 - RNA, 23 nt, Artificial Sequence
  Chemically synthesized
acgcgcucagacaugauaugcgg

SEQ ID NO: 37126 - RNA, 23 nt, Artificial Sequence
  Chemically synthesized
cacgcgcucagacaugauaugcg

SEQ ID NO: 37127 - RNA, 23 nt, Artificial Sequence
  Chemically synthesized
ccacgcgcucagacaugauaugc

SEQ ID NO: 37128 - RNA, 23 nt, Artificial Sequence
  Chemically synthesized
cccacgcgcucagacaugauaug

SEQ ID NO: 37129 - RNA, 23 nt, Artificial Sequence
  Chemically synthesized
ccagacugcacaggaaaugcaag

SEQ ID NO: 37130 - RNA, 23 nt, Artificial Sequence
  Chemically synthesized
accagacugcacaggaaaugcaa

SEQ ID NO: 37131 - RNA, 23 nt, Artificial Sequence
  Chemically synthesized
gaccagacugcacaggaaaugca

SEQ ID NO: 37132 - RNA, 23 nt, Artificial Sequence
  Chemically synthesized
ugaccagacugcacaggaaaugc

SEQ ID NO: 37133 - RNA, 23 nt, Artificial Sequence
  Chemically synthesized
gugaccagacugcacaggaaaug

SEQ ID NO: 37134 - RNA, 23 nt, Artificial Sequence
  Chemically synthesized
ugugaccagacugcacaggaaau

SEQ ID NO: 37135 - RNA, 23 nt, Artificial Sequence
  Chemically synthesized
augugaccagacugcacaggaaa

SEQ ID NO: 37136 - RNA, 23 nt, Artificial Sequence
  Chemically synthesized
uaugugaccagacugcacaggaa

SEQ ID NO: 37137 - RNA, 23 nt, Artificial Sequence
  Chemically synthesized
ucaucaucaggaaacucuaaaaa

SEQ ID NO: 37138 - RNA, 23 nt, Artificial Sequence
  Chemically synthesized
cucaucaucaggaaacucuaaaa

SEQ ID NO: 37139 - RNA, 23 nt, Artificial Sequence
  Chemically synthesized
ccucaucaucaggaaacucuaaa

SEQ ID NO: 37140 - RNA, 23 nt, Artificial Sequence
  Chemically synthesized
uccucaucaucaggaaacucuaa

SEQ ID NO: 37141 - RNA, 23 nt, Artificial Sequence
  Chemically synthesized
auccucaucaucaggaaacucua

SEQ ID NO: 37142 - RNA, 23 nt, Artificial Sequence
  Chemically synthesized
cacugccaggauuuuguauugcc

SEQ ID NO: 37143 - RNA, 23 nt, Artificial Sequence
  Chemically synthesized
ccacugccaggauuuuguauugc

SEQ ID NO: 37144 - RNA, 23 nt, Artificial Sequence
  Chemically synthesized
cccacugccaggauuuuguauug

SEQ ID NO: 37145 - RNA, 23 nt, Artificial Sequence
  Chemically synthesized
ucccacugccaggauuuuguauu

SEQ ID NO: 37146 - RNA, 23 nt, Artificial Sequence
  Chemically synthesized
cucccacugccaggauuuuguau

SEQ ID NO: 37147 - RNA, 23 nt, Artificial Sequence
  Chemically synthesized
acucccacugccaggauuuugua

SEQ ID NO: 37148 - RNA, 23 nt, Artificial Sequence
  Chemically synthesized
cuaggccuguaguagucaaggug

SEQ ID NO: 37149 - RNA, 23 nt, Artificial Sequence
  Chemically synthesized
gcuaggccuguaguagucaaggu

SEQ ID NO: 37150 - RNA, 23 nt, Artificial Sequence
  Chemically synthesized
ugcuaggccuguaguagucaagg

SEQ ID NO: 37151 - RNA, 23 nt, Artificial Sequence
  Chemically synthesized
augcuaggccuguaguagucaag

SEQ ID NO: 37152 - RNA, 23 nt, Artificial Sequence
  Chemically synthesized
aaugcuaggccuguaguagucaa

SEQ ID NO: 37153 - RNA, 23 nt, Artificial Sequence
  Chemically synthesized
uguuuuuccauguguuuugcuuu

SEQ ID NO: 37154 - RNA, 23 nt, Artificial Sequence
  Chemically synthesized
uuguuuuuccauguguuuugcuu

SEQ ID NO: 37155 - RNA, 23 nt, Artificial Sequence
  Chemically synthesized
uuuguuuuuccauguguuuugcu

SEQ ID NO: 37156 - RNA, 23 nt, Artificial Sequence
  Chemically synthesized
cuuagcuacaauccuaccuuuug

SEQ ID NO: 37157 - RNA, 23 nt, Artificial Sequence
  Chemically synthesized
ccuuagcuacaauccuaccuuuu

SEQ ID NO: 37158 - RNA, 23 nt, Artificial Sequence
  Chemically synthesized
accuuagcuacaauccuaccuuu

SEQ ID NO: 37159 - RNA, 23 nt, Artificial Sequence
  Chemically synthesized
aaccuuagcuacaauccuaccuu

SEQ ID NO: 37160 - RNA, 23 nt, Artificial Sequence
  Chemically synthesized
auagugggccuucauuaaauguu

SEQ ID NO: 37161 - RNA, 23 nt, Artificial Sequence
  Chemically synthesized
ucaggugguguccuucuuccuca

SEQ ID NO: 37162 - RNA, 23 nt, Artificial Sequence
  Chemically synthesized
uaaauggugauuucuugcuaagc

SEQ ID NO: 37163 - RNA, 23 nt, Artificial Sequence
  Chemically synthesized
uuaaauggugauuucuugcuaag

SEQ ID NO: 37164 - RNA, 23 nt, Artificial Sequence
  Chemically synthesized
auuaaauggugauuucuugcuaa

SEQ ID NO: 37165 - RNA, 23 nt, Artificial Sequence
  Chemically synthesized
cauuaaauggugauuucuugcua

SEQ ID NO: 37166 - RNA, 23 nt, Artificial Sequence
  Chemically synthesized
cuucccaacuucccuguucuuua

SEQ ID NO: 37167 - RNA, 23 nt, Artificial Sequence
  Chemically synthesized
ugcucaaagauguaauguaguuc

SEQ ID NO: 37168 - RNA, 23 nt, Artificial Sequence
  Chemically synthesized
augcucaaagauguaauguaguu

SEQ ID NO: 37169 - RNA, 23 nt, Artificial Sequence
  Chemically synthesized
aaugcucaaagauguaauguagu

SEQ ID NO: 37170 - RNA, 23 nt, Artificial Sequence
  Chemically synthesized
aaaugcucaaagauguaauguag

SEQ ID NO: 37171 - RNA, 23 nt, Artificial Sequence
  Chemically synthesized
uaaaugcucaaagauguaaugua

SEQ ID NO: 37172 - RNA, 23 nt, Artificial Sequence
  Chemically synthesized
ugucuagaauccugcuuuacagg

SEQ ID NO: 37173 - RNA, 23 nt, Artificial Sequence
  Chemically synthesized
cugucuagaauccugcuuuacag

SEQ ID NO: 37174 - RNA, 23 nt, Artificial Sequence
  Chemically synthesized
ucugucuagaauccugcuuuaca

SEQ ID NO: 37175 - RNA, 23 nt, Artificial Sequence
  Chemically synthesized
aucugucuagaauccugcuuuac

SEQ ID NO: 37176 - RNA, 23 nt, Artificial Sequence
  Chemically synthesized
aaucugucuagaauccugcuuua

SEQ ID NO: 37177 - RNA, 23 nt, Artificial Sequence
  Chemically synthesized
aaaucugucuagaauccugcuuu

SEQ ID NO: 37178 - RNA, 23 nt, Artificial Sequence
  Chemically synthesized
ccuucuuuaccuucauuucaucc

SEQ ID NO: 37179 - RNA, 23 nt, Artificial Sequence
  Chemically synthesized
agacucuguaaccaccucucugu

SEQ ID NO: 37180 - RNA, 23 nt, Artificial Sequence
  Chemically synthesized
uagacucuguaaccaccucucug

SEQ ID NO: 37181 - RNA, 23 nt, Artificial Sequence
  Chemically synthesized
cuagacucuguaaccaccucucu

SEQ ID NO: 37182 - RNA, 23 nt, Artificial Sequence
  Chemically synthesized
ccuagacucuguaaccaccucuc

SEQ ID NO: 37183 - RNA, 23 nt, Artificial Sequence
  Chemically synthesized
caggaagaaugguguguuucccu

SEQ ID NO: 37184 - RNA, 23 nt, Artificial Sequence
  Chemically synthesized
ccaggaagaaugguguguuuccc

SEQ ID NO: 37185 - RNA, 23 nt, Artificial Sequence
  Chemically synthesized
gccaggaagaaugguguguuucc

SEQ ID NO: 37186 - RNA, 23 nt, Artificial Sequence
  Chemically synthesized
ggccaggaagaaugguguguuuc

SEQ ID NO: 37187 - RNA, 23 nt, Artificial Sequence
  Chemically synthesized
aggccaggaagaaugguguguuu

SEQ ID NO: 37188 - RNA, 23 nt, Artificial Sequence
  Chemically synthesized
uuguaccuuauugaucuuugccc

SEQ ID NO: 37189 - RNA, 23 nt, Artificial Sequence
  Chemically synthesized
uuuguaccuuauugaucuuugcc

SEQ ID NO: 37190 - RNA, 23 nt, Artificial Sequence
  Chemically synthesized
auuuguaccuuauugaucuuugc

SEQ ID NO: 37191 - RNA, 23 nt, Artificial Sequence
  Chemically synthesized
guguucaguuccagcuuuuguag

SEQ ID NO: 37192 - RNA, 23 nt, Artificial Sequence
  Chemically synthesized
uguguucaguuccagcuuuugua

SEQ ID NO: 37193 - RNA, 23 nt, Artificial Sequence
  Chemically synthesized
uuguguucaguuccagcuuuugu

SEQ ID NO: 37194 - RNA, 23 nt, Artificial Sequence
  Chemically synthesized
uuuguguucaguuccagcuuuug

SEQ ID NO: 37195 - RNA, 23 nt, Artificial Sequence
  Chemically synthesized
auuuguguucaguuccagcuuuu

SEQ ID NO: 37196 - RNA, 23 nt, Artificial Sequence
  Chemically synthesized
caggaauguuucagcugcaguug

SEQ ID NO: 37197 - RNA, 23 nt, Artificial Sequence
  Chemically synthesized
ccaggaauguuucagcugcaguu

SEQ ID NO: 37198 - RNA, 23 nt, Artificial Sequence
  Chemically synthesized
gccaggaauguuucagcugcagu

SEQ ID NO: 37199 - RNA, 23 nt, Artificial Sequence
  Chemically synthesized
ugccaggaauguuucagcugcag

SEQ ID NO: 37200 - RNA, 23 nt, Artificial Sequence
  Chemically synthesized
uugccaggaauguuucagcugca

SEQ ID NO: 37201 - RNA, 23 nt, Artificial Sequence
  Chemically synthesized
auugccaggaauguuucagcugc

SEQ ID NO: 37202 - RNA, 23 nt, Artificial Sequence
  Chemically synthesized
ucagggaugugggaaucucccag

SEQ ID NO: 37203 - RNA, 23 nt, Artificial Sequence
  Chemically synthesized
cucagggaugugggaaucuccca

SEQ ID NO: 37204 - RNA, 23 nt, Artificial Sequence
  Chemically synthesized
ccucagggaugugggaaucuccc

SEQ ID NO: 37205 - RNA, 23 nt, Artificial Sequence
  Chemically synthesized
cccucagggaugugggaaucucc

SEQ ID NO: 37206 - RNA, 23 nt, Artificial Sequence
  Chemically synthesized
ccccucagggaugugggaaucuc

SEQ ID NO: 37207 - RNA, 23 nt, Artificial Sequence
  Chemically synthesized
ggaggugugauagagccuuugau

SEQ ID NO: 37208 - RNA, 23 nt, Artificial Sequence
  Chemically synthesized
aggaggugugauagagccuuuga

SEQ ID NO: 37209 - RNA, 23 nt, Artificial Sequence
  Chemically synthesized
caggaggugugauagagccuuug

SEQ ID NO: 37210 - RNA, 23 nt, Artificial Sequence
  Chemically synthesized
acaggaggugugauagagccuuu

SEQ ID NO: 37211 - RNA, 23 nt, Artificial Sequence
  Chemically synthesized
cacaggaggugugauagagccuu

SEQ ID NO: 37212 - RNA, 23 nt, Artificial Sequence
  Chemically synthesized
ccggugcaaggagaugucugaau

SEQ ID NO: 37213 - RNA, 23 nt, Artificial Sequence
  Chemically synthesized
ggaucgggaagguuaugcuccug

SEQ ID NO: 37214 - RNA, 23 nt, Artificial Sequence
  Chemically synthesized
aggaucgggaagguuaugcuccu

SEQ ID NO: 37215 - RNA, 23 nt, Artificial Sequence
  Chemically synthesized
aaggaucgggaagguuaugcucc

SEQ ID NO: 37216 - RNA, 23 nt, Artificial Sequence
  Chemically synthesized
caaggaucgggaagguuaugcuc

SEQ ID NO: 37217 - RNA, 23 nt, Artificial Sequence
  Chemically synthesized
ucaaggaucgggaagguuaugcu

SEQ ID NO: 37218 - RNA, 23 nt, Artificial Sequence
  Chemically synthesized
gaacgcacuuaucaaggaucggg

SEQ ID NO: 37219 - RNA, 23 nt, Artificial Sequence
  Chemically synthesized
ugaacgcacuuaucaaggaucgg

SEQ ID NO: 37220 - RNA, 23 nt, Artificial Sequence
  Chemically synthesized
gugaacgcacuuaucaaggaucg

SEQ ID NO: 37221 - RNA, 23 nt, Artificial Sequence
  Chemically synthesized
ggugaacgcacuuaucaaggauc

SEQ ID NO: 37222 - RNA, 23 nt, Artificial Sequence
  Chemically synthesized
aggugaacgcacuuaucaaggau

SEQ ID NO: 37223 - RNA, 23 nt, Artificial Sequence
  Chemically synthesized
ugagcgggcuugugauaugcacg

SEQ ID NO: 37224 - RNA, 23 nt, Artificial Sequence
  Chemically synthesized
cugagcgggcuugugauaugcac

SEQ ID NO: 37225 - RNA, 23 nt, Artificial Sequence
  Chemically synthesized
ucugagcgggcuugugauaugca

SEQ ID NO: 37226 - RNA, 23 nt, Artificial Sequence
  Chemically synthesized
uucugagcgggcuugugauaugc

SEQ ID NO: 37227 - RNA, 23 nt, Artificial Sequence
  Chemically synthesized
uuucugagcgggcuugugauaug

SEQ ID NO: 37228 - RNA, 23 nt, Artificial Sequence
  Chemically synthesized
ugccgguaaagaaaaguugccga

SEQ ID NO: 37229 - RNA, 23 nt, Artificial Sequence
  Chemically synthesized
augccgguaaagaaaaguugccg

SEQ ID NO: 37230 - RNA, 23 nt, Artificial Sequence
  Chemically synthesized
gaugccgguaaagaaaaguugcc

SEQ ID NO: 37231 - RNA, 23 nt, Artificial Sequence
  Chemically synthesized
ugaugccgguaaagaaaaguugc

SEQ ID NO: 37232 - RNA, 23 nt, Artificial Sequence
  Chemically synthesized
gugaugccgguaaagaaaaguug

SEQ ID NO: 37233 - RNA, 23 nt, Artificial Sequence
  Chemically synthesized
agugaugccgguaaagaaaaguu

SEQ ID NO: 37234 - RNA, 23 nt, Artificial Sequence
  Chemically synthesized
gagugaugccgguaaagaaaagu

SEQ ID NO: 37235 - RNA, 23 nt, Artificial Sequence
  Chemically synthesized
agagugaugccgguaaagaaaag

SEQ ID NO: 37236 - RNA, 23 nt, Artificial Sequence
  Chemically synthesized
accaaaaauguucuucauccagg

SEQ ID NO: 37237 - RNA, 23 nt, Artificial Sequence
  Chemically synthesized
aaccaaaaauguucuucauccag

SEQ ID NO: 37238 - RNA, 23 nt, Artificial Sequence
  Chemically synthesized
aaaccaaaaauguucuucaucca

SEQ ID NO: 37239 - RNA, 23 nt, Artificial Sequence
  Chemically synthesized
caaaccaaaaauguucuucaucc

SEQ ID NO: 37240 - RNA, 23 nt, Artificial Sequence
  Chemically synthesized
acaaaccaaaaauguucuucauc

SEQ ID NO: 37241 - RNA, 23 nt, Artificial Sequence
  Chemically synthesized
caggaaacucuaaaaaagaaccg

SEQ ID NO: 37242 - RNA, 23 nt, Artificial Sequence
  Chemically synthesized
ucaggaaacucuaaaaaagaacc

SEQ ID NO: 37243 - RNA, 23 nt, Artificial Sequence
  Chemically synthesized
aucaggaaacucuaaaaaagaac

SEQ ID NO: 37244 - RNA, 23 nt, Artificial Sequence
  Chemically synthesized
caucaggaaacucuaaaaaagaa

SEQ ID NO: 37245 - RNA, 23 nt, Artificial Sequence
  Chemically synthesized
ucaucaggaaacucuaaaaaaga

SEQ ID NO: 37246 - RNA, 23 nt, Artificial Sequence
  Chemically synthesized
cauccucaucaucaggaaacucu

SEQ ID NO: 37247 - RNA, 23 nt, Artificial Sequence
  Chemically synthesized
ccauggucccuagcaaaaugcua

SEQ ID NO: 37248 - RNA, 23 nt, Artificial Sequence
  Chemically synthesized
cccauggucccuagcaaaaugcu

SEQ ID NO: 37249 - RNA, 23 nt, Artificial Sequence
  Chemically synthesized
ucccauggucccuagcaaaaugc

SEQ ID NO: 37250 - RNA, 23 nt, Artificial Sequence
  Chemically synthesized
cucccauggucccuagcaaaaug

SEQ ID NO: 37251 - RNA, 23 nt, Artificial Sequence
  Chemically synthesized
ucucccauggucccuagcaaaau

SEQ ID NO: 37252 - RNA, 23 nt, Artificial Sequence
  Chemically synthesized
cacggauuauuauuuguacuuug

SEQ ID NO: 37253 - RNA, 23 nt, Artificial Sequence
  Chemically synthesized
acacggauuauuauuuguacuuu

SEQ ID NO: 37254 - RNA, 23 nt, Artificial Sequence
  Chemically synthesized
uacacggauuauuauuuguacuu

SEQ ID NO: 37255 - RNA, 23 nt, Artificial Sequence
  Chemically synthesized
auacacggauuauuauuuguacu

SEQ ID NO: 37256 - RNA, 23 nt, Artificial Sequence
  Chemically synthesized
uauacacggauuauuauuuguac

SEQ ID NO: 37257 - RNA, 23 nt, Artificial Sequence
  Chemically synthesized
uacaauccuaccuuuugauaaaa

SEQ ID NO: 37258 - RNA, 23 nt, Artificial Sequence
  Chemically synthesized
ccaucauguaccaagugcuuggc

SEQ ID NO: 37259 - RNA, 23 nt, Artificial Sequence
  Chemically synthesized
accaucauguaccaagugcuugg

SEQ ID NO: 37260 - RNA, 23 nt, Artificial Sequence
  Chemically synthesized
caccaucauguaccaagugcuug

SEQ ID NO: 37261 - RNA, 23 nt, Artificial Sequence
  Chemically synthesized
ucaccaucauguaccaagugcuu

SEQ ID NO: 37262 - RNA, 23 nt, Artificial Sequence
  Chemically synthesized
uucaccaucauguaccaagugcu

SEQ ID NO: 37263 - RNA, 23 nt, Artificial Sequence
  Chemically synthesized
ccuucuuccucaagucuugacaa

SEQ ID NO: 37264 - RNA, 23 nt, Artificial Sequence
  Chemically synthesized
uccuucuuccucaagucuugaca

SEQ ID NO: 37265 - RNA, 23 nt, Artificial Sequence
  Chemically synthesized
guccuucuuccucaagucuugac

SEQ ID NO: 37266 - RNA, 23 nt, Artificial Sequence
  Chemically synthesized
uguccuucuuccucaagucuuga

SEQ ID NO: 37267 - RNA, 23 nt, Artificial Sequence
  Chemically synthesized
guguccuucuuccucaagucuug

SEQ ID NO: 37268 - RNA, 23 nt, Artificial Sequence
  Chemically synthesized
cuucuaauuuugugcucuuuccu

SEQ ID NO: 37269 - RNA, 23 nt, Artificial Sequence
  Chemically synthesized
gcuucuaauuuugugcucuuucc

SEQ ID NO: 37270 - RNA, 23 nt, Artificial Sequence
  Chemically synthesized
agcuucuaauuuugugcucuuuc

SEQ ID NO: 37271 - RNA, 23 nt, Artificial Sequence
  Chemically synthesized
cagcuucuaauuuugugcucuuu

SEQ ID NO: 37272 - RNA, 23 nt, Artificial Sequence
  Chemically synthesized
ucagcuucuaauuuugugcucuu

SEQ ID NO: 37273 - RNA, 23 nt, Artificial Sequence
  Chemically synthesized
gugauuucuugcuaagcuccagc

SEQ ID NO: 37274 - RNA, 23 nt, Artificial Sequence
  Chemically synthesized
ugguuuaugagaacugguucuug

SEQ ID NO: 37275 - RNA, 23 nt, Artificial Sequence
  Chemically synthesized
uugguuuaugagaacugguucuu

SEQ ID NO: 37276 - RNA, 23 nt, Artificial Sequence
  Chemically synthesized
cuugguuuaugagaacugguucu

SEQ ID NO: 37277 - RNA, 23 nt, Artificial Sequence
  Chemically synthesized
ccuugguuuaugagaacugguuc

SEQ ID NO: 37278 - RNA, 23 nt, Artificial Sequence
  Chemically synthesized
accuugguuuaugagaacugguu

SEQ ID NO: 37279 - RNA, 23 nt, Artificial Sequence
  Chemically synthesized
gccauacauguuauuguuuucaa

SEQ ID NO: 37280 - RNA, 23 nt, Artificial Sequence
  Chemically synthesized
ugccauacauguuauuguuuuca

SEQ ID NO: 37281 - RNA, 23 nt, Artificial Sequence
  Chemically synthesized
gugccauacauguuauuguuuuc

SEQ ID NO: 37282 - RNA, 23 nt, Artificial Sequence
  Chemically synthesized
agugccauacauguuauuguuuu

SEQ ID NO: 37283 - RNA, 23 nt, Artificial Sequence
  Chemically synthesized
cagugccauacauguuauuguuu

SEQ ID NO: 37284 - RNA, 23 nt, Artificial Sequence
  Chemically synthesized
guaaaugcucaaagauguaaugu

SEQ ID NO: 37285 - RNA, 23 nt, Artificial Sequence
  Chemically synthesized
uguaaaugcucaaagauguaaug

SEQ ID NO: 37286 - RNA, 23 nt, Artificial Sequence
  Chemically synthesized
auguaaaugcucaaagauguaau

SEQ ID NO: 37287 - RNA, 23 nt, Artificial Sequence
  Chemically synthesized
cauguaaaugcucaaagauguaa

SEQ ID NO: 37288 - RNA, 23 nt, Artificial Sequence
  Chemically synthesized
uuacaggaucauguaaaugcuca

SEQ ID NO: 37289 - RNA, 23 nt, Artificial Sequence
  Chemically synthesized
uuuacaggaucauguaaaugcuc

SEQ ID NO: 37290 - RNA, 23 nt, Artificial Sequence
  Chemically synthesized
cuuuacaggaucauguaaaugcu

SEQ ID NO: 37291 - RNA, 23 nt, Artificial Sequence
  Chemically synthesized
uuccuuccugagaaacguccauc

SEQ ID NO: 37292 - RNA, 23 nt, Artificial Sequence
  Chemically synthesized
uuuccuuccugagaaacguccau

SEQ ID NO: 37293 - RNA, 23 nt, Artificial Sequence
  Chemically synthesized
cauuuguaccuuauugaucuuug

SEQ ID NO: 37294 - RNA, 23 nt, Artificial Sequence
  Chemically synthesized
gcaaacaugacuagagacgcacc

SEQ ID NO: 37295 - RNA, 23 nt, Artificial Sequence
  Chemically synthesized
agcaaacaugacuagagacgcac

SEQ ID NO: 37296 - RNA, 23 nt, Artificial Sequence
  Chemically synthesized
aagcaaacaugacuagagacgca

SEQ ID NO: 37297 - RNA, 23 nt, Artificial Sequence
  Chemically synthesized
gcucugaagaagcaaacaugacu

SEQ ID NO: 37298 - RNA, 23 nt, Artificial Sequence
  Chemically synthesized
acaucaucaccuuggaaaugagg

SEQ ID NO: 37299 - RNA, 23 nt, Artificial Sequence
  Chemically synthesized
gacauuaucuuuuggcucugaag

SEQ ID NO: 37300 - RNA, 23 nt, Artificial Sequence
  Chemically synthesized
agacauuaucuuuuggcucugaa

SEQ ID NO: 37301 - RNA, 23 nt, Artificial Sequence
  Chemically synthesized
uagacauuaucuuuuggcucuga

SEQ ID NO: 37302 - RNA, 23 nt, Artificial Sequence
  Chemically synthesized
guagacauuaucuuuuggcucug

SEQ ID NO: 37303 - RNA, 23 nt, Artificial Sequence
  Chemically synthesized
uguagacauuaucuuuuggcucu

SEQ ID NO: 37304 - RNA, 23 nt, Artificial Sequence
  Chemically synthesized
uuaguuaagaugucugagagacc

SEQ ID NO: 37305 - RNA, 23 nt, Artificial Sequence
  Chemically synthesized
auuaguuaagaugucugagagac

SEQ ID NO: 37306 - RNA, 23 nt, Artificial Sequence
  Chemically synthesized
cauuaguuaagaugucugagaga

SEQ ID NO: 37307 - RNA, 23 nt, Artificial Sequence
  Chemically synthesized
cuuuuguagauggcacuuuagug

SEQ ID NO: 37308 - RNA, 23 nt, Artificial Sequence
  Chemically synthesized
gcuuuuguagauggcacuuuagu

SEQ ID NO: 37309 - RNA, 23 nt, Artificial Sequence
  Chemically synthesized
agcuuuuguagauggcacuuuag

SEQ ID NO: 37310 - RNA, 23 nt, Artificial Sequence
  Chemically synthesized
cagcuuuuguagauggcacuuua

SEQ ID NO: 37311 - RNA, 23 nt, Artificial Sequence
  Chemically synthesized
ccagcuuuuguagauggcacuuu

SEQ ID NO: 37312 - RNA, 23 nt, Artificial Sequence
  Chemically synthesized
gaaguuguaaacacagugugguu

SEQ ID NO: 37313 - RNA, 23 nt, Artificial Sequence
  Chemically synthesized
ugaaguuguaaacacaguguggu

SEQ ID NO: 37314 - RNA, 23 nt, Artificial Sequence
  Chemically synthesized
gugaaguuguaaacacagugugg

SEQ ID NO: 37315 - RNA, 23 nt, Artificial Sequence
  Chemically synthesized
agugaaguuguaaacacagugug

SEQ ID NO: 37316 - RNA, 23 nt, Artificial Sequence
  Chemically synthesized
aagugaaguuguaaacacagugu

SEQ ID NO: 37317 - RNA, 23 nt, Artificial Sequence
  Chemically synthesized
caagugaaguuguaaacacagug

SEQ ID NO: 37318 - RNA, 23 nt, Artificial Sequence
  Chemically synthesized
acaagugaaguuguaaacacagu

SEQ ID NO: 37319 - RNA, 23 nt, Artificial Sequence
  Chemically synthesized
aucaaggaucgggaagguuaugc

SEQ ID NO: 37320 - RNA, 23 nt, Artificial Sequence
  Chemically synthesized
uaucaaggaucgggaagguuaug

SEQ ID NO: 37321 - RNA, 23 nt, Artificial Sequence
  Chemically synthesized
uuaucaaggaucgggaagguuau

SEQ ID NO: 37322 - RNA, 23 nt, Artificial Sequence
  Chemically synthesized
gacaugauaugcggcuaugccug

SEQ ID NO: 37323 - RNA, 23 nt, Artificial Sequence
  Chemically synthesized
cgcucagacaugauaugcggcua

SEQ ID NO: 37324 - RNA, 23 nt, Artificial Sequence
  Chemically synthesized
cuacagaacaaaccaaaaauguu

SEQ ID NO: 37325 - RNA, 23 nt, Artificial Sequence
  Chemically synthesized
guggaccacaguacucuagucac

SEQ ID NO: 37326 - RNA, 23 nt, Artificial Sequence
  Chemically synthesized
uguggaccacaguacucuaguca

SEQ ID NO: 37327 - RNA, 23 nt, Artificial Sequence
  Chemically synthesized
auguggaccacaguacucuaguc

SEQ ID NO: 37328 - RNA, 23 nt, Artificial Sequence
  Chemically synthesized
gauguggaccacaguacucuagu

SEQ ID NO: 37329 - RNA, 23 nt, Artificial Sequence
  Chemically synthesized
ggauguggaccacaguacucuag

SEQ ID NO: 37330 - RNA, 23 nt, Artificial Sequence
  Chemically synthesized
aguauggaaguauuugagagaga

SEQ ID NO: 37331 - RNA, 23 nt, Artificial Sequence
  Chemically synthesized
gcaugcauccucaucaucaggaa

SEQ ID NO: 37332 - RNA, 23 nt, Artificial Sequence
  Chemically synthesized
ggcaugcauccucaucaucagga

SEQ ID NO: 37333 - RNA, 23 nt, Artificial Sequence
  Chemically synthesized
uggcaugcauccucaucaucagg

SEQ ID NO: 37334 - RNA, 23 nt, Artificial Sequence
  Chemically synthesized
guggcaugcauccucaucaucag

SEQ ID NO: 37335 - RNA, 23 nt, Artificial Sequence
  Chemically synthesized
uguggcaugcauccucaucauca

SEQ ID NO: 37336 - RNA, 23 nt, Artificial Sequence
  Chemically synthesized
agacauaucaugugugagauaac

SEQ ID NO: 37337 - RNA, 23 nt, Artificial Sequence
  Chemically synthesized
aagacauaucaugugugagauaa

SEQ ID NO: 37338 - RNA, 23 nt, Artificial Sequence
  Chemically synthesized
gaagacauaucaugugugagaua

SEQ ID NO: 37339 - RNA, 23 nt, Artificial Sequence
  Chemically synthesized
ugaagacauaucaugugugagau

SEQ ID NO: 37340 - RNA, 23 nt, Artificial Sequence
  Chemically synthesized
uugaagacauaucaugugugaga

SEQ ID NO: 37341 - RNA, 23 nt, Artificial Sequence
  Chemically synthesized
cuugaagacauaucaugugugag

SEQ ID NO: 37342 - RNA, 23 nt, Artificial Sequence
  Chemically synthesized
ccuugaagacauaucauguguga

SEQ ID NO: 37343 - RNA, 23 nt, Artificial Sequence
  Chemically synthesized
ccuuuugacaauauacacggauu

SEQ ID NO: 37344 - RNA, 23 nt, Artificial Sequence
  Chemically synthesized
auucaccaucauguaccaagugc

SEQ ID NO: 37345 - RNA, 23 nt, Artificial Sequence
  Chemically synthesized
uauucaccaucauguaccaagug

SEQ ID NO: 37346 - RNA, 23 nt, Artificial Sequence
  Chemically synthesized
uuauucaccaucauguaccaagu

SEQ ID NO: 37347 - RNA, 23 nt, Artificial Sequence
  Chemically synthesized
cuguaaaugagggcagaaaccuu

SEQ ID NO: 37348 - RNA, 23 nt, Artificial Sequence
  Chemically synthesized
gcuguaaaugagggcagaaaccu

SEQ ID NO: 37349 - RNA, 23 nt, Artificial Sequence
  Chemically synthesized
ggcuguaaaugagggcagaaacc

SEQ ID NO: 37350 - RNA, 23 nt, Artificial Sequence
  Chemically synthesized
aggcuguaaaugagggcagaaac

SEQ ID NO: 37351 - RNA, 23 nt, Artificial Sequence
  Chemically synthesized
caggcuguaaaugagggcagaaa

SEQ ID NO: 37352 - RNA, 23 nt, Artificial Sequence
  Chemically synthesized
ccaggcuguaaaugagggcagaa

SEQ ID NO: 37353 - RNA, 23 nt, Artificial Sequence
  Chemically synthesized
accaggcuguaaaugagggcaga

SEQ ID NO: 37354 - RNA, 23 nt, Artificial Sequence
  Chemically synthesized
cuaccaggcuguaaaugagggca

SEQ ID NO: 37355 - RNA, 23 nt, Artificial Sequence
  Chemically synthesized
ccuaccaggcuguaaaugagggc

SEQ ID NO: 37356 - RNA, 23 nt, Artificial Sequence
  Chemically synthesized
cccuaccaggcuguaaaugaggg

SEQ ID NO: 37357 - RNA, 23 nt, Artificial Sequence
  Chemically synthesized
ccccuaccaggcuguaaaugagg

SEQ ID NO: 37358 - RNA, 23 nt, Artificial Sequence
  Chemically synthesized
uccccuaccaggcuguaaaugag

SEQ ID NO: 37359 - RNA, 23 nt, Artificial Sequence
  Chemically synthesized
gucaccacaucuugucuuuuccc

SEQ ID NO: 37360 - RNA, 23 nt, Artificial Sequence
  Chemically synthesized
ugucaccacaucuugucuuuucc

SEQ ID NO: 37361 - RNA, 23 nt, Artificial Sequence
  Chemically synthesized
cugucaccacaucuugucuuuuc

SEQ ID NO: 37362 - RNA, 23 nt, Artificial Sequence
  Chemically synthesized
ucugucaccacaucuugucuuuu

SEQ ID NO: 37363 - RNA, 23 nt, Artificial Sequence
  Chemically synthesized
gucugucaccacaucuugucuuu

SEQ ID NO: 37364 - RNA, 23 nt, Artificial Sequence
  Chemically synthesized
cucucagcuucuaauuuugugcu

SEQ ID NO: 37365 - RNA, 23 nt, Artificial Sequence
  Chemically synthesized
guaaacucuucaccuugguuuau

SEQ ID NO: 37366 - RNA, 23 nt, Artificial Sequence
  Chemically synthesized
uguaaacucuucaccuugguuua

SEQ ID NO: 37367 - RNA, 23 nt, Artificial Sequence
  Chemically synthesized
auguaaacucuucaccuugguuu

SEQ ID NO: 37368 - RNA, 23 nt, Artificial Sequence
  Chemically synthesized
aauguaaacucuucaccuugguu

SEQ ID NO: 37369 - RNA, 23 nt, Artificial Sequence
  Chemically synthesized
aaauguaaacucuucaccuuggu

SEQ ID NO: 37370 - RNA, 23 nt, Artificial Sequence
  Chemically synthesized
ccuucugcuuucuauuaccccuc

SEQ ID NO: 37371 - RNA, 23 nt, Artificial Sequence
  Chemically synthesized
gcuuagaacccuucugcuuucua

SEQ ID NO: 37372 - RNA, 23 nt, Artificial Sequence
  Chemically synthesized
ugcuuagaacccuucugcuuucu

SEQ ID NO: 37373 - RNA, 23 nt, Artificial Sequence
  Chemically synthesized
cugcuuagaacccuucugcuuuc

SEQ ID NO: 37374 - RNA, 23 nt, Artificial Sequence
  Chemically synthesized
ccugcuuagaacccuucugcuuu

SEQ ID NO: 37375 - RNA, 23 nt, Artificial Sequence
  Chemically synthesized
cccugcuuagaacccuucugcuu

SEQ ID NO: 37376 - RNA, 23 nt, Artificial Sequence
  Chemically synthesized
acuucccaacuucccuguucuuu

SEQ ID NO: 37377 - RNA, 23 nt, Artificial Sequence
  Chemically synthesized
uggaacuccucaacuugcugccu

SEQ ID NO: 37378 - RNA, 23 nt, Artificial Sequence
  Chemically synthesized
guggaacuccucaacuugcugcc

SEQ ID NO: 37379 - RNA, 23 nt, Artificial Sequence
  Chemically synthesized
uguggaacuccucaacuugcugc

SEQ ID NO: 37380 - RNA, 23 nt, Artificial Sequence
  Chemically synthesized
auguggaacuccucaacuugcug

SEQ ID NO: 37381 - RNA, 23 nt, Artificial Sequence
  Chemically synthesized
gcucaaagauguaauguaguucu

SEQ ID NO: 37382 - RNA, 23 nt, Artificial Sequence
  Chemically synthesized
ccaaaucugucuagaauccugcu

SEQ ID NO: 37383 - RNA, 23 nt, Artificial Sequence
  Chemically synthesized
accaaaucugucuagaauccugc

SEQ ID NO: 37384 - RNA, 23 nt, Artificial Sequence
  Chemically synthesized
caccaaaucugucuagaauccug

SEQ ID NO: 37385 - RNA, 23 nt, Artificial Sequence
  Chemically synthesized
ccaccaaaucugucuagaauccu

SEQ ID NO: 37386 - RNA, 23 nt, Artificial Sequence
  Chemically synthesized
gccaccaaaucugucuagaaucc

SEQ ID NO: 37387 - RNA, 23 nt, Artificial Sequence
  Chemically synthesized
ucucucccuuacuauucccacuu

SEQ ID NO: 37388 - RNA, 23 nt, Artificial Sequence
  Chemically synthesized
gacucuguaaccaccucucuguc

SEQ ID NO: 37389 - RNA, 23 nt, Artificial Sequence
  Chemically synthesized
guuucucugagcuuuguuacuga

SEQ ID NO: 37390 - RNA, 23 nt, Artificial Sequence
  Chemically synthesized
uguuucucugagcuuuguuacug

SEQ ID NO: 37391 - RNA, 23 nt, Artificial Sequence
  Chemically synthesized
uuguuucucugagcuuuguuacu

SEQ ID NO: 37392 - RNA, 23 nt, Artificial Sequence
  Chemically synthesized
guuguuucucugagcuuuguuac

SEQ ID NO: 37393 - RNA, 23 nt, Artificial Sequence
  Chemically synthesized
gguuguuucucugagcuuuguua

SEQ ID NO: 37394 - RNA, 23 nt, Artificial Sequence
  Chemically synthesized
gaagucucaaagaucuuucguug

SEQ ID NO: 37395 - RNA, 23 nt, Artificial Sequence
  Chemically synthesized
ggcucugaagaagcaaacaugac

SEQ ID NO: 37396 - RNA, 23 nt, Artificial Sequence
  Chemically synthesized
uggcucugaagaagcaaacauga

SEQ ID NO: 37397 - RNA, 23 nt, Artificial Sequence
  Chemically synthesized
uuggcucugaagaagcaaacaug

SEQ ID NO: 37398 - RNA, 23 nt, Artificial Sequence
  Chemically synthesized
acauuaucuuuuggcucugaaga

SEQ ID NO: 37399 - RNA, 23 nt, Artificial Sequence
  Chemically synthesized
guaaacacagugugguuaugggg

SEQ ID NO: 37400 - RNA, 23 nt, Artificial Sequence
  Chemically synthesized
uguaaacacagugugguuauggg

SEQ ID NO: 37401 - RNA, 23 nt, Artificial Sequence
  Chemically synthesized
uuguaaacacagugugguuaugg

SEQ ID NO: 37402 - RNA, 23 nt, Artificial Sequence
  Chemically synthesized
guuguaaacacagugugguuaug

SEQ ID NO: 37403 - RNA, 23 nt, Artificial Sequence
  Chemically synthesized
aguuguaaacacagugugguuau

SEQ ID NO: 37404 - RNA, 23 nt, Artificial Sequence
  Chemically synthesized
aggaauguuucagcugcaguuga

SEQ ID NO: 37405 - RNA, 23 nt, Artificial Sequence
  Chemically synthesized
ucuucaggaugcacgguuucugu

SEQ ID NO: 37406 - RNA, 23 nt, Artificial Sequence
  Chemically synthesized
aucuucaggaugcacgguuucug

SEQ ID NO: 37407 - RNA, 23 nt, Artificial Sequence
  Chemically synthesized
gaucuucaggaugcacgguuucu

SEQ ID NO: 37408 - RNA, 23 nt, Artificial Sequence
  Chemically synthesized
ugaucuucaggaugcacgguuuc

SEQ ID NO: 37409 - RNA, 23 nt, Artificial Sequence
  Chemically synthesized
uugaucuucaggaugcacgguuu

SEQ ID NO: 37410 - RNA, 23 nt, Artificial Sequence
  Chemically synthesized
gugugauagagccuuugaucuuc

SEQ ID NO: 37411 - RNA, 23 nt, Artificial Sequence
  Chemically synthesized
ggugugauagagccuuugaucuu

SEQ ID NO: 37412 - RNA, 23 nt, Artificial Sequence
  Chemically synthesized
aggugugauagagccuuugaucu

SEQ ID NO: 37413 - RNA, 23 nt, Artificial Sequence
  Chemically synthesized
gaggugugauagagccuuugauc

SEQ ID NO: 37414 - RNA, 23 nt, Artificial Sequence
  Chemically synthesized
agaugucugaauacugcagcacu

SEQ ID NO: 37415 - RNA, 23 nt, Artificial Sequence
  Chemically synthesized
gagaugucugaauacugcagcac

SEQ ID NO: 37416 - RNA, 23 nt, Artificial Sequence
  Chemically synthesized
cuguuguugagcgaauuguuaga

SEQ ID NO: 37417 - RNA, 23 nt, Artificial Sequence
  Chemically synthesized
gcuguuguugagcgaauuguuag

SEQ ID NO: 37418 - RNA, 23 nt, Artificial Sequence
  Chemically synthesized
agcuguuguugagcgaauuguua

SEQ ID NO: 37419 - RNA, 23 nt, Artificial Sequence
  Chemically synthesized
cagcuguuguugagcgaauuguu

SEQ ID NO: 37420 - RNA, 23 nt, Artificial Sequence
  Chemically synthesized
acagcuguuguugagcgaauugu

SEQ ID NO: 37421 - RNA, 23 nt, Artificial Sequence
  Chemically synthesized
aagaaaaguugccgaagaugaga

SEQ ID NO: 37422 - RNA, 23 nt, Artificial Sequence
  Chemically synthesized
aaagaaaaguugccgaagaugag

SEQ ID NO: 37423 - RNA, 23 nt, Artificial Sequence
  Chemically synthesized
uaaagaaaaguugccgaagauga

SEQ ID NO: 37424 - RNA, 23 nt, Artificial Sequence
  Chemically synthesized
guaaagaaaaguugccgaagaug

SEQ ID NO: 37425 - RNA, 23 nt, Artificial Sequence
  Chemically synthesized
gguaaagaaaaguugccgaagau

SEQ ID NO: 37426 - RNA, 23 nt, Artificial Sequence
  Chemically synthesized
gagagugaugccgguaaagaaaa

SEQ ID NO: 37427 - RNA, 23 nt, Artificial Sequence
  Chemically synthesized
ggagaugagacugaucguggggu

SEQ ID NO: 37428 - RNA, 23 nt, Artificial Sequence
  Chemically synthesized
uggagaugagacugaucgugggg

SEQ ID NO: 37429 - RNA, 23 nt, Artificial Sequence
  Chemically synthesized
guggagaugagacugaucguggg

SEQ ID NO: 37430 - RNA, 23 nt, Artificial Sequence
  Chemically synthesized
cguggagaugagacugaucgugg

SEQ ID NO: 37431 - RNA, 23 nt, Artificial Sequence
  Chemically synthesized
ugacguccauguucuaugugacc

SEQ ID NO: 37432 - RNA, 23 nt, Artificial Sequence
  Chemically synthesized
augacguccauguucuaugugac

SEQ ID NO: 37433 - RNA, 23 nt, Artificial Sequence
  Chemically synthesized
uaugacguccauguucuauguga

SEQ ID NO: 37434 - RNA, 23 nt, Artificial Sequence
  Chemically synthesized
cuaugacguccauguucuaugug

SEQ ID NO: 37435 - RNA, 23 nt, Artificial Sequence
  Chemically synthesized
gcuaugacguccauguucuaugu

SEQ ID NO: 37436 - RNA, 23 nt, Artificial Sequence
  Chemically synthesized
ccagcuggcauauagguugcagu

SEQ ID NO: 37437 - RNA, 23 nt, Artificial Sequence
  Chemically synthesized
uccagcuggcauauagguugcag

SEQ ID NO: 37438 - RNA, 23 nt, Artificial Sequence
  Chemically synthesized
uuccagcuggcauauagguugca

SEQ ID NO: 37439 - RNA, 23 nt, Artificial Sequence
  Chemically synthesized
cuuccagcuggcauauagguugc

SEQ ID NO: 37440 - RNA, 23 nt, Artificial Sequence
  Chemically synthesized
acuuccagcuggcauauagguug

SEQ ID NO: 37441 - RNA, 23 nt, Artificial Sequence
  Chemically synthesized
ggauuuuguauugccaucgggug

SEQ ID NO: 37442 - RNA, 23 nt, Artificial Sequence
  Chemically synthesized
aggauuuuguauugccaucgggu

SEQ ID NO: 37443 - RNA, 23 nt, Artificial Sequence
  Chemically synthesized
caggauuuuguauugccaucggg

SEQ ID NO: 37444 - RNA, 23 nt, Artificial Sequence
  Chemically synthesized
ccuuugggucgacauaguaugga

SEQ ID NO: 37445 - RNA, 23 nt, Artificial Sequence
  Chemically synthesized
gccuuugggucgacauaguaugg

SEQ ID NO: 37446 - RNA, 23 nt, Artificial Sequence
  Chemically synthesized
ugccuuugggucgacauaguaug

SEQ ID NO: 37447 - RNA, 23 nt, Artificial Sequence
  Chemically synthesized
cugccuuugggucgacauaguau

SEQ ID NO: 37448 - RNA, 23 nt, Artificial Sequence
  Chemically synthesized
ccugccuuugggucgacauagua

SEQ ID NO: 37449 - RNA, 23 nt, Artificial Sequence
  Chemically synthesized
cuguaguagucaaggugcucaau

SEQ ID NO: 37450 - RNA, 23 nt, Artificial Sequence
  Chemically synthesized
ccuguaguagucaaggugcucaa

SEQ ID NO: 37451 - RNA, 23 nt, Artificial Sequence
  Chemically synthesized
gccuguaguagucaaggugcuca

SEQ ID NO: 37452 - RNA, 23 nt, Artificial Sequence
  Chemically synthesized
ggccuguaguagucaaggugcuc

SEQ ID NO: 37453 - RNA, 23 nt, Artificial Sequence
  Chemically synthesized
aggccuguaguagucaaggugcu

SEQ ID NO: 37454 - RNA, 23 nt, Artificial Sequence
  Chemically synthesized
aaaugcuaggccuguaguaguca

SEQ ID NO: 37455 - RNA, 23 nt, Artificial Sequence
  Chemically synthesized
aaaaugcuaggccuguaguaguc

SEQ ID NO: 37456 - RNA, 23 nt, Artificial Sequence
  Chemically synthesized
ucaugugugagauaacuuccuuc

SEQ ID NO: 37457 - RNA, 23 nt, Artificial Sequence
  Chemically synthesized
aucaugugugagauaacuuccuu

SEQ ID NO: 37458 - RNA, 23 nt, Artificial Sequence
  Chemically synthesized
uaucaugugugagauaacuuccu

SEQ ID NO: 37459 - RNA, 23 nt, Artificial Sequence
  Chemically synthesized
auaucaugugugagauaacuucc

SEQ ID NO: 37460 - RNA, 23 nt, Artificial Sequence
  Chemically synthesized
cauaucaugugugagauaacuuc

SEQ ID NO: 37461 - RNA, 23 nt, Artificial Sequence
  Chemically synthesized
guguggcaugcauccucaucauc

SEQ ID NO: 37462 - RNA, 23 nt, Artificial Sequence
  Chemically synthesized
gcacauagugggccuucauuaaa

SEQ ID NO: 37463 - RNA, 23 nt, Artificial Sequence
  Chemically synthesized
ggcacauagugggccuucauuaa

SEQ ID NO: 37464 - RNA, 23 nt, Artificial Sequence
  Chemically synthesized
uggcacauagugggccuucauua

SEQ ID NO: 37465 - RNA, 23 nt, Artificial Sequence
  Chemically synthesized
uuggcacauagugggccuucauu

SEQ ID NO: 37466 - RNA, 23 nt, Artificial Sequence
  Chemically synthesized
cuuggcacauagugggccuucau

SEQ ID NO: 37467 - RNA, 23 nt, Artificial Sequence
  Chemically synthesized
caccacaucuugucuuuuccccu

SEQ ID NO: 37468 - RNA, 23 nt, Artificial Sequence
  Chemically synthesized
ucaccacaucuugucuuuucccc

SEQ ID NO: 37469 - RNA, 23 nt, Artificial Sequence
  Chemically synthesized
cucagcuucuaauuuugugcucu

SEQ ID NO: 37470 - RNA, 23 nt, Artificial Sequence
  Chemically synthesized
caccuugguuuaugagaacuggu

SEQ ID NO: 37471 - RNA, 23 nt, Artificial Sequence
  Chemically synthesized
ucaccuugguuuaugagaacugg

SEQ ID NO: 37472 - RNA, 23 nt, Artificial Sequence
  Chemically synthesized
uucaccuugguuuaugagaacug

SEQ ID NO: 37473 - RNA, 23 nt, Artificial Sequence
  Chemically synthesized
cucuucaccuugguuuaugagaa

SEQ ID NO: 37474 - RNA, 23 nt, Artificial Sequence
  Chemically synthesized
acucuucaccuugguuuaugaga

SEQ ID NO: 37475 - RNA, 23 nt, Artificial Sequence
  Chemically synthesized
aacucuucaccuugguuuaugag

SEQ ID NO: 37476 - RNA, 23 nt, Artificial Sequence
  Chemically synthesized
aaacucuucaccuugguuuauga

SEQ ID NO: 37477 - RNA, 23 nt, Artificial Sequence
  Chemically synthesized
uaaacucuucaccuugguuuaug

SEQ ID NO: 37478 - RNA, 23 nt, Artificial Sequence
  Chemically synthesized
ccccugcuuagaacccuucugcu

SEQ ID NO: 37479 - RNA, 23 nt, Artificial Sequence
  Chemically synthesized
cccccugcuuagaacccuucugc

SEQ ID NO: 37480 - RNA, 23 nt, Artificial Sequence
  Chemically synthesized
ccccccugcuuagaacccuucug

SEQ ID NO: 37481 - RNA, 23 nt, Artificial Sequence
  Chemically synthesized
guaauguaguucuuuguuccugc

SEQ ID NO: 37482 - RNA, 23 nt, Artificial Sequence
  Chemically synthesized
uguaauguaguucuuuguuccug

SEQ ID NO: 37483 - RNA, 23 nt, Artificial Sequence
  Chemically synthesized
auguaauguaguucuuuguuccu

SEQ ID NO: 37484 - RNA, 23 nt, Artificial Sequence
  Chemically synthesized
gauguaauguaguucuuuguucc

SEQ ID NO: 37485 - RNA, 23 nt, Artificial Sequence
  Chemically synthesized
agauguaauguaguucuuuguuc

SEQ ID NO: 37486 - RNA, 23 nt, Artificial Sequence
  Chemically synthesized
cugccaccaaaucugucuagaau

SEQ ID NO: 37487 - RNA, 23 nt, Artificial Sequence
  Chemically synthesized
gcugccaccaaaucugucuagaa

SEQ ID NO: 37488 - RNA, 23 nt, Artificial Sequence
  Chemically synthesized
ugcugccaccaaaucugucuaga

SEQ ID NO: 37489 - RNA, 23 nt, Artificial Sequence
  Chemically synthesized
cugcugccaccaaaucugucuag

SEQ ID NO: 37490 - RNA, 23 nt, Artificial Sequence
  Chemically synthesized
gcugcugccaccaaaucugucua

SEQ ID NO: 37491 - RNA, 23 nt, Artificial Sequence
  Chemically synthesized
uguaaccaccucucugucuuuuu

SEQ ID NO: 37492 - RNA, 23 nt, Artificial Sequence
  Chemically synthesized
cuguaaccaccucucugucuuuu

SEQ ID NO: 37493 - RNA, 23 nt, Artificial Sequence
  Chemically synthesized
ucuguaaccaccucucugucuuu

SEQ ID NO: 37494 - RNA, 23 nt, Artificial Sequence
  Chemically synthesized
cucuguaaccaccucucugucuu

SEQ ID NO: 37495 - RNA, 23 nt, Artificial Sequence
  Chemically synthesized
gagcuuuguuacugaaaugagcc

SEQ ID NO: 37496 - RNA, 23 nt, Artificial Sequence
  Chemically synthesized
uucucugagcuuuguuacugaaa

SEQ ID NO: 37497 - RNA, 23 nt, Artificial Sequence
  Chemically synthesized
uuucucugagcuuuguuacugaa

SEQ ID NO: 37498 - RNA, 23 nt, Artificial Sequence
  Chemically synthesized
cguugguuguuucucugagcuuu

SEQ ID NO: 37499 - RNA, 23 nt, Artificial Sequence
  Chemically synthesized
ucguugguuguuucucugagcuu

SEQ ID NO: 37500 - RNA, 23 nt, Artificial Sequence
  Chemically synthesized
uucguugguuguuucucugagcu

SEQ ID NO: 37501 - RNA, 23 nt, Artificial Sequence
  Chemically synthesized
uuucguugguuguuucucugagc

SEQ ID NO: 37502 - RNA, 23 nt, Artificial Sequence
  Chemically synthesized
cuuucguugguuguuucucugag

SEQ ID NO: 37503 - RNA, 23 nt, Artificial Sequence
  Chemically synthesized
uggaaggacacucuuggcucguu

SEQ ID NO: 37504 - RNA, 23 nt, Artificial Sequence
  Chemically synthesized
ugacuagagacgcaccuugcugc

SEQ ID NO: 37505 - RNA, 23 nt, Artificial Sequence
  Chemically synthesized
augacuagagacgcaccuugcug

SEQ ID NO: 37506 - RNA, 23 nt, Artificial Sequence
  Chemically synthesized
caugacuagagacgcaccuugcu

SEQ ID NO: 37507 - RNA, 23 nt, Artificial Sequence
  Chemically synthesized
acaugacuagagacgcaccuugc

SEQ ID NO: 37508 - RNA, 23 nt, Artificial Sequence
  Chemically synthesized
aacaugacuagagacgcaccuug

SEQ ID NO: 37509 - RNA, 23 nt, Artificial Sequence
  Chemically synthesized
guccuagagugagaguuuggaag

SEQ ID NO: 37510 - RNA, 23 nt, Artificial Sequence
  Chemically synthesized
uguccuagagugagaguuuggaa

SEQ ID NO: 37511 - RNA, 23 nt, Artificial Sequence
  Chemically synthesized
uuguccuagagugagaguuugga

SEQ ID NO: 37512 - RNA, 23 nt, Artificial Sequence
  Chemically synthesized
uuuguccuagagugagaguuugg

SEQ ID NO: 37513 - RNA, 23 nt, Artificial Sequence
  Chemically synthesized
uuuuguccuagagugagaguuug

SEQ ID NO: 37514 - RNA, 23 nt, Artificial Sequence
  Chemically synthesized
ucauauccuccgcccuuuuuguc

SEQ ID NO: 37515 - RNA, 23 nt, Artificial Sequence
  Chemically synthesized
uucauauccuccgcccuuuuugu

SEQ ID NO: 37516 - RNA, 23 nt, Artificial Sequence
  Chemically synthesized
auucauauccuccgcccuuuuug

SEQ ID NO: 37517 - RNA, 23 nt, Artificial Sequence
  Chemically synthesized
cauucauauccuccgcccuuuuu

SEQ ID NO: 37518 - RNA, 23 nt, Artificial Sequence
  Chemically synthesized
ucauucauauccuccgcccuuuu

SEQ ID NO: 37519 - RNA, 23 nt, Artificial Sequence
  Chemically synthesized
uccagcuuuuguagauggcacuu

SEQ ID NO: 37520 - RNA, 23 nt, Artificial Sequence
  Chemically synthesized
uuccagcuuuuguagauggcacu

SEQ ID NO: 37521 - RNA, 23 nt, Artificial Sequence
  Chemically synthesized
guuccagcuuuuguagauggcac

SEQ ID NO: 37522 - RNA, 23 nt, Artificial Sequence
  Chemically synthesized
uauugccaggaauguuucagcug

SEQ ID NO: 37523 - RNA, 23 nt, Artificial Sequence
  Chemically synthesized
guugagcgaauuguuagaacauc

SEQ ID NO: 37524 - RNA, 23 nt, Artificial Sequence
  Chemically synthesized
cuuaucaaggaucgggaagguua

SEQ ID NO: 37525 - RNA, 23 nt, Artificial Sequence
  Chemically synthesized
gcacuuaucaaggaucgggaagg

SEQ ID NO: 37526 - RNA, 23 nt, Artificial Sequence
  Chemically synthesized
cgcacuuaucaaggaucgggaag

SEQ ID NO: 37527 - RNA, 23 nt, Artificial Sequence
  Chemically synthesized
acgcacuuaucaaggaucgggaa

SEQ ID NO: 37528 - RNA, 23 nt, Artificial Sequence
  Chemically synthesized
aacgcacuuaucaaggaucggga

SEQ ID NO: 37529 - RNA, 23 nt, Artificial Sequence
  Chemically synthesized
aacagcuguuguugagcgaauug

SEQ ID NO: 37530 - RNA, 23 nt, Artificial Sequence
  Chemically synthesized
gcccacgcgcucagacaugauau

SEQ ID NO: 37531 - RNA, 23 nt, Artificial Sequence
  Chemically synthesized
agguuuuucagcucuuugacaac

SEQ ID NO: 37532 - RNA, 23 nt, Artificial Sequence
  Chemically synthesized
gagguuuuucagcucuuugacaa

SEQ ID NO: 37533 - RNA, 23 nt, Artificial Sequence
  Chemically synthesized
agagguuuuucagcucuuugaca

SEQ ID NO: 37534 - RNA, 23 nt, Artificial Sequence
  Chemically synthesized
aagagguuuuucagcucuuugac

SEQ ID NO: 37535 - RNA, 23 nt, Artificial Sequence
  Chemically synthesized
caagagguuuuucagcucuuuga

SEQ ID NO: 37536 - RNA, 23 nt, Artificial Sequence
  Chemically synthesized
ccagcuccaagagguuuuucagc

SEQ ID NO: 37537 - RNA, 23 nt, Artificial Sequence
  Chemically synthesized
uccagcuccaagagguuuuucag

SEQ ID NO: 37538 - RNA, 23 nt, Artificial Sequence
  Chemically synthesized
cuccagcuccaagagguuuuuca

SEQ ID NO: 37539 - RNA, 23 nt, Artificial Sequence
  Chemically synthesized
gcuccagcuccaagagguuuuuc

SEQ ID NO: 37540 - RNA, 23 nt, Artificial Sequence
  Chemically synthesized
ugcuccagcuccaagagguuuuu

SEQ ID NO: 37541 - RNA, 23 nt, Artificial Sequence
  Chemically synthesized
gacguccauguucuaugugacca

SEQ ID NO: 37542 - RNA, 23 nt, Artificial Sequence
  Chemically synthesized
uggagagaaagaacuggaauuuc

SEQ ID NO: 37543 - RNA, 23 nt, Artificial Sequence
  Chemically synthesized
cuggagagaaagaacuggaauuu

SEQ ID NO: 37544 - RNA, 23 nt, Artificial Sequence
  Chemically synthesized
acuggagagaaagaacuggaauu

SEQ ID NO: 37545 - RNA, 23 nt, Artificial Sequence
  Chemically synthesized
cacuggagagaaagaacuggaau

SEQ ID NO: 37546 - RNA, 23 nt, Artificial Sequence
  Chemically synthesized
ucacuggagagaaagaacuggaa

SEQ ID NO: 37547 - RNA, 23 nt, Artificial Sequence
  Chemically synthesized
ggggacgcaggauauugggagug

SEQ ID NO: 37548 - RNA, 23 nt, Artificial Sequence
  Chemically synthesized
auauuuguuugggugguuuguga

SEQ ID NO: 37549 - RNA, 23 nt, Artificial Sequence
  Chemically synthesized
aauauuuguuugggugguuugug

SEQ ID NO: 37550 - RNA, 23 nt, Artificial Sequence
  Chemically synthesized
aaauauuuguuugggugguuugu

SEQ ID NO: 37551 - RNA, 23 nt, Artificial Sequence
  Chemically synthesized
uaaauauuuguuugggugguuug

SEQ ID NO: 37552 - RNA, 23 nt, Artificial Sequence
  Chemically synthesized
auaaauauuuguuugggugguuu

SEQ ID NO: 37553 - RNA, 23 nt, Artificial Sequence
  Chemically synthesized
guagucaaggugcucaauaaaua

SEQ ID NO: 37554 - RNA, 23 nt, Artificial Sequence
  Chemically synthesized
aguagucaaggugcucaauaaau

SEQ ID NO: 37555 - RNA, 23 nt, Artificial Sequence
  Chemically synthesized
uaguagucaaggugcucaauaaa

SEQ ID NO: 37556 - RNA, 23 nt, Artificial Sequence
  Chemically synthesized
guaguagucaaggugcucaauaa

SEQ ID NO: 37557 - RNA, 23 nt, Artificial Sequence
  Chemically synthesized
uguaguagucaaggugcucaaua

SEQ ID NO: 37558 - RNA, 23 nt, Artificial Sequence
  Chemically synthesized
aggggacgcaggauauugggagu

SEQ ID NO: 37559 - RNA, 23 nt, Artificial Sequence
  Chemically synthesized
uccuugaagacauaucaugugug

SEQ ID NO: 37560 - RNA, 23 nt, Artificial Sequence
  Chemically synthesized
gcuccuugaagacauaucaugug

SEQ ID NO: 37561 - RNA, 23 nt, Artificial Sequence
  Chemically synthesized
agcuccuugaagacauaucaugu

SEQ ID NO: 37562 - RNA, 23 nt, Artificial Sequence
  Chemically synthesized
uagcuccuugaagacauaucaug

SEQ ID NO: 37563 - RNA, 23 nt, Artificial Sequence
  Chemically synthesized
uuagcuccuugaagacauaucau

SEQ ID NO: 37564 - RNA, 23 nt, Artificial Sequence
  Chemically synthesized
uuuagcuccuugaagacauauca

SEQ ID NO: 37565 - RNA, 23 nt, Artificial Sequence
  Chemically synthesized
caaccuuagcuacaauccuaccu

SEQ ID NO: 37566 - RNA, 23 nt, Artificial Sequence
  Chemically synthesized
ccaaccuuagcuacaauccuacc

SEQ ID NO: 37567 - RNA, 23 nt, Artificial Sequence
  Chemically synthesized
gccaaccuuagcuacaauccuac

SEQ ID NO: 37568 - RNA, 23 nt, Artificial Sequence
  Chemically synthesized
agccaaccuuagcuacaauccua

SEQ ID NO: 37569 - RNA, 23 nt, Artificial Sequence
  Chemically synthesized
ccugagcagucuacuucuguguc

SEQ ID NO: 37570 - RNA, 23 nt, Artificial Sequence
  Chemically synthesized
cccugagcagucuacuucugugu

SEQ ID NO: 37571 - RNA, 23 nt, Artificial Sequence
  Chemically synthesized
ucccugagcagucuacuucugug

SEQ ID NO: 37572 - RNA, 23 nt, Artificial Sequence
  Chemically synthesized
gucccugagcagucuacuucugu

SEQ ID NO: 37573 - RNA, 23 nt, Artificial Sequence
  Chemically synthesized
agucccugagcagucuacuucug

SEQ ID NO: 37574 - RNA, 23 nt, Artificial Sequence
  Chemically synthesized
cuucaccuugguuuaugagaacu

SEQ ID NO: 37575 - RNA, 23 nt, Artificial Sequence
  Chemically synthesized
ucuucaccuugguuuaugagaac

SEQ ID NO: 37576 - RNA, 23 nt, Artificial Sequence
  Chemically synthesized
accccccugcuuagaacccuucu

SEQ ID NO: 37577 - RNA, 23 nt, Artificial Sequence
  Chemically synthesized
cugcuuucucuuucaguauuaaa

SEQ ID NO: 37578 - RNA, 23 nt, Artificial Sequence
  Chemically synthesized
ccugcuuucucuuucaguauuaa

SEQ ID NO: 37579 - RNA, 23 nt, Artificial Sequence
  Chemically synthesized
uccugcuuucucuuucaguauua

SEQ ID NO: 37580 - RNA, 23 nt, Artificial Sequence
  Chemically synthesized
uuccugcuuucucuuucaguauu

SEQ ID NO: 37581 - RNA, 23 nt, Artificial Sequence
  Chemically synthesized
guuccugcuuucucuuucaguau

SEQ ID NO: 37582 - RNA, 23 nt, Artificial Sequence
  Chemically synthesized
aguucuuuguuccugcuuucucu

SEQ ID NO: 37583 - RNA, 23 nt, Artificial Sequence
  Chemically synthesized
uaguucuuuguuccugcuuucuc

SEQ ID NO: 37584 - RNA, 23 nt, Artificial Sequence
  Chemically synthesized
guaguucuuuguuccugcuuucu

SEQ ID NO: 37585 - RNA, 23 nt, Artificial Sequence
  Chemically synthesized
uguaguucuuuguuccugcuuuc

SEQ ID NO: 37586 - RNA, 23 nt, Artificial Sequence
  Chemically synthesized
auguaguucuuuguuccugcuuu

SEQ ID NO: 37587 - RNA, 23 nt, Artificial Sequence
  Chemically synthesized
aauguaguucuuuguuccugcuu

SEQ ID NO: 37588 - RNA, 23 nt, Artificial Sequence
  Chemically synthesized
uaauguaguucuuuguuccugcu

SEQ ID NO: 37589 - RNA, 23 nt, Artificial Sequence
  Chemically synthesized
ccuuacuauucccacuuucauuc

SEQ ID NO: 37590 - RNA, 23 nt, Artificial Sequence
  Chemically synthesized
ccucucugucuuuuuccuuccug

SEQ ID NO: 37591 - RNA, 23 nt, Artificial Sequence
  Chemically synthesized
accucucugucuuuuuccuuccu

SEQ ID NO: 37592 - RNA, 23 nt, Artificial Sequence
  Chemically synthesized
caccucucugucuuuuuccuucc

SEQ ID NO: 37593 - RNA, 23 nt, Artificial Sequence
  Chemically synthesized
caaagaucuuucguugguuguuu

SEQ ID NO: 37594 - RNA, 23 nt, Artificial Sequence
  Chemically synthesized
ucaaagaucuuucguugguuguu

SEQ ID NO: 37595 - RNA, 23 nt, Artificial Sequence
  Chemically synthesized
cucaaagaucuuucguugguugu

SEQ ID NO: 37596 - RNA, 23 nt, Artificial Sequence
  Chemically synthesized
ucucaaagaucuuucguugguug

SEQ ID NO: 37597 - RNA, 23 nt, Artificial Sequence
  Chemically synthesized
gucucaaagaucuuucguugguu

SEQ ID NO: 37598 - RNA, 23 nt, Artificial Sequence
  Chemically synthesized
gaagguguccaaauuuaauguag

SEQ ID NO: 37599 - RNA, 23 nt, Artificial Sequence
  Chemically synthesized
ggaagguguccaaauuuaaugua

SEQ ID NO: 37600 - RNA, 23 nt, Artificial Sequence
  Chemically synthesized
uggaagguguccaaauuuaaugu

SEQ ID NO: 37601 - RNA, 23 nt, Artificial Sequence
  Chemically synthesized
uuggaagguguccaaauuuaaug

SEQ ID NO: 37602 - RNA, 23 nt, Artificial Sequence
  Chemically synthesized
uuuggaagguguccaaauuuaau

SEQ ID NO: 37603 - RNA, 23 nt, Artificial Sequence
  Chemically synthesized
uucuggagaaggacaucaucacc

SEQ ID NO: 37604 - RNA, 23 nt, Artificial Sequence
  Chemically synthesized
cuucuggagaaggacaucaucac

SEQ ID NO: 37605 - RNA, 23 nt, Artificial Sequence
  Chemically synthesized
ucuucuggagaaggacaucauca

SEQ ID NO: 37606 - RNA, 23 nt, Artificial Sequence
  Chemically synthesized
aucuucuggagaaggacaucauc

SEQ ID NO: 37607 - RNA, 23 nt, Artificial Sequence
  Chemically synthesized
caucuucuggagaaggacaucau

SEQ ID NO: 37608 - RNA, 23 nt, Artificial Sequence
  Chemically synthesized
uauuuguguucaguuccagcuuu

SEQ ID NO: 37609 - RNA, 23 nt, Artificial Sequence
  Chemically synthesized
aaguuguaaacacagugugguua

SEQ ID NO: 37610 - RNA, 23 nt, Artificial Sequence
  Chemically synthesized
uugaagagccugacaagugaagu

SEQ ID NO: 37611 - RNA, 23 nt, Artificial Sequence
  Chemically synthesized
guugaagagccugacaagugaag

SEQ ID NO: 37612 - RNA, 23 nt, Artificial Sequence
  Chemically synthesized
aguugaagagccugacaagugaa

SEQ ID NO: 37613 - RNA, 23 nt, Artificial Sequence
  Chemically synthesized
caguugaagagccugacaaguga

SEQ ID NO: 37614 - RNA, 23 nt, Artificial Sequence
  Chemically synthesized
ugauagagccuuugaucuucagg

SEQ ID NO: 37615 - RNA, 23 nt, Artificial Sequence
  Chemically synthesized
gugauagagccuuugaucuucag

SEQ ID NO: 37616 - RNA, 23 nt, Artificial Sequence
  Chemically synthesized
ugugauagagccuuugaucuuca

SEQ ID NO: 37617 - RNA, 23 nt, Artificial Sequence
  Chemically synthesized
uguugagcgaauuguuagaacau

SEQ ID NO: 37618 - RNA, 23 nt, Artificial Sequence
  Chemically synthesized
cacuuaucaaggaucgggaaggu

SEQ ID NO: 37619 - RNA, 23 nt, Artificial Sequence
  Chemically synthesized
aaggugaacgcacuuaucaagga

SEQ ID NO: 37620 - RNA, 23 nt, Artificial Sequence
  Chemically synthesized
cugguacaucgaggcucuugcuc

SEQ ID NO: 37621 - RNA, 23 nt, Artificial Sequence
  Chemically synthesized
ccugguacaucgaggcucuugcu

SEQ ID NO: 37622 - RNA, 23 nt, Artificial Sequence
  Chemically synthesized
uccugguacaucgaggcucuugc

SEQ ID NO: 37623 - RNA, 23 nt, Artificial Sequence
  Chemically synthesized
uuccugguacaucgaggcucuug

SEQ ID NO: 37624 - RNA, 23 nt, Artificial Sequence
  Chemically synthesized
guuccugguacaucgaggcucuu

SEQ ID NO: 37625 - RNA, 23 nt, Artificial Sequence
  Chemically synthesized
cgguaaagaaaaguugccgaaga

SEQ ID NO: 37626 - RNA, 23 nt, Artificial Sequence
  Chemically synthesized
ugcgaggagagugaugccgguaa

SEQ ID NO: 37627 - RNA, 23 nt, Artificial Sequence
  Chemically synthesized
cccaagccuacagaacaaaccaa

SEQ ID NO: 37628 - RNA, 23 nt, Artificial Sequence
  Chemically synthesized
gcccaagccuacagaacaaacca

SEQ ID NO: 37629 - RNA, 23 nt, Artificial Sequence
  Chemically synthesized
ugcccaagccuacagaacaaacc

SEQ ID NO: 37630 - RNA, 23 nt, Artificial Sequence
  Chemically synthesized
cugcccaagccuacagaacaaac

SEQ ID NO: 37631 - RNA, 23 nt, Artificial Sequence
  Chemically synthesized
acugcccaagccuacagaacaaa

SEQ ID NO: 37632 - RNA, 23 nt, Artificial Sequence
  Chemically synthesized
ggcuaugacguccauguucuaug

SEQ ID NO: 37633 - RNA, 23 nt, Artificial Sequence
  Chemically synthesized
gggcuaugacguccauguucuau

SEQ ID NO: 37634 - RNA, 23 nt, Artificial Sequence
  Chemically synthesized
ugggcuaugacguccauguucua

SEQ ID NO: 37635 - RNA, 23 nt, Artificial Sequence
  Chemically synthesized
uugggcuaugacguccauguucu

SEQ ID NO: 37636 - RNA, 23 nt, Artificial Sequence
  Chemically synthesized
agaaagaacuggaauuucgcucu

SEQ ID NO: 37637 - RNA, 23 nt, Artificial Sequence
  Chemically synthesized
gagaaagaacuggaauuucgcuc

SEQ ID NO: 37638 - RNA, 23 nt, Artificial Sequence
  Chemically synthesized
agagaaagaacuggaauuucgcu

SEQ ID NO: 37639 - RNA, 23 nt, Artificial Sequence
  Chemically synthesized
gagagaaagaacuggaauuucgc

SEQ ID NO: 37640 - RNA, 23 nt, Artificial Sequence
  Chemically synthesized
ggagagaaagaacuggaauuucg

SEQ ID NO: 37641 - RNA, 23 nt, Artificial Sequence
  Chemically synthesized
uucacuggagagaaagaacugga

SEQ ID NO: 37642 - RNA, 23 nt, Artificial Sequence
  Chemically synthesized
cuucacuggagagaaagaacugg

SEQ ID NO: 37643 - RNA, 23 nt, Artificial Sequence
  Chemically synthesized
acuucacuggagagaaagaacug

SEQ ID NO: 37644 - RNA, 23 nt, Artificial Sequence
  Chemically synthesized
cacuucacuggagagaaagaacu

SEQ ID NO: 37645 - RNA, 23 nt, Artificial Sequence
  Chemically synthesized
gccaaauaaaugcucauauuuau

SEQ ID NO: 37646 - RNA, 23 nt, Artificial Sequence
  Chemically synthesized
ugccaaauaaaugcucauauuua

SEQ ID NO: 37647 - RNA, 23 nt, Artificial Sequence
  Chemically synthesized
gugccaaauaaaugcucauauuu

SEQ ID NO: 37648 - RNA, 23 nt, Artificial Sequence
  Chemically synthesized
ggugccaaauaaaugcucauauu

SEQ ID NO: 37649 - RNA, 23 nt, Artificial Sequence
  Chemically synthesized
gggugccaaauaaaugcucauau

SEQ ID NO: 37650 - RNA, 23 nt, Artificial Sequence
  Chemically synthesized
aaguauuugagagagagaaccuu

SEQ ID NO: 37651 - RNA, 23 nt, Artificial Sequence
  Chemically synthesized
gaaguauuugagagagagaaccu

SEQ ID NO: 37652 - RNA, 23 nt, Artificial Sequence
  Chemically synthesized
uagucaaggugcucaauaaauau

SEQ ID NO: 37653 - RNA, 23 nt, Artificial Sequence
  Chemically synthesized
cagucccugagcagucuacuucu

SEQ ID NO: 37654 - RNA, 23 nt, Artificial Sequence
  Chemically synthesized
ucagucccugagcagucuacuuc

SEQ ID NO: 37655 - RNA, 23 nt, Artificial Sequence
  Chemically synthesized
uucagucccugagcagucuacuu

SEQ ID NO: 37656 - RNA, 23 nt, Artificial Sequence
  Chemically synthesized
cuaauuuugugcucuuuccugcc

SEQ ID NO: 37657 - RNA, 23 nt, Artificial Sequence
  Chemically synthesized
ucuaauuuugugcucuuuccugc

SEQ ID NO: 37658 - RNA, 23 nt, Artificial Sequence
  Chemically synthesized
uucuaauuuugugcucuuuccug

SEQ ID NO: 37659 - RNA, 23 nt, Artificial Sequence
  Chemically synthesized
ucucagcuucuaauuuugugcuc

SEQ ID NO: 37660 - RNA, 23 nt, Artificial Sequence
  Chemically synthesized
ggucuccucucagcuucuaauuu

SEQ ID NO: 37661 - RNA, 23 nt, Artificial Sequence
  Chemically synthesized
uggucuccucucagcuucuaauu

SEQ ID NO: 37662 - RNA, 23 nt, Artificial Sequence
  Chemically synthesized
guggucuccucucagcuucuaau

SEQ ID NO: 37663 - RNA, 23 nt, Artificial Sequence
  Chemically synthesized
aguggucuccucucagcuucuaa

SEQ ID NO: 37664 - RNA, 23 nt, Artificial Sequence
  Chemically synthesized
gaguggucuccucucagcuucua

SEQ ID NO: 37665 - RNA, 23 nt, Artificial Sequence
  Chemically synthesized
aucugaaacuucccaacuucccu

SEQ ID NO: 37666 - RNA, 23 nt, Artificial Sequence
  Chemically synthesized
uaucugaaacuucccaacuuccc

SEQ ID NO: 37667 - RNA, 23 nt, Artificial Sequence
  Chemically synthesized
uuaucugaaacuucccaacuucc

SEQ ID NO: 37668 - RNA, 23 nt, Artificial Sequence
  Chemically synthesized
cuuaucugaaacuucccaacuuc

SEQ ID NO: 37669 - RNA, 23 nt, Artificial Sequence
  Chemically synthesized
gcuuaucugaaacuucccaacuu

SEQ ID NO: 37670 - RNA, 23 nt, Artificial Sequence
  Chemically synthesized
ugcuuaucugaaacuucccaacu

SEQ ID NO: 37671 - RNA, 23 nt, Artificial Sequence
  Chemically synthesized
cugcuuaucugaaacuucccaac

SEQ ID NO: 37672 - RNA, 23 nt, Artificial Sequence
  Chemically synthesized
ccugcuuaucugaaacuucccaa

SEQ ID NO: 37673 - RNA, 23 nt, Artificial Sequence
  Chemically synthesized
cccugcuuaucugaaacuuccca

SEQ ID NO: 37674 - RNA, 23 nt, Artificial Sequence
  Chemically synthesized
uuucaguauuaaacucuccuuug

SEQ ID NO: 37675 - RNA, 23 nt, Artificial Sequence
  Chemically synthesized
cuuucaguauuaaacucuccuuu

SEQ ID NO: 37676 - RNA, 23 nt, Artificial Sequence
  Chemically synthesized
ucuuucaguauuaaacucuccuu

SEQ ID NO: 37677 - RNA, 23 nt, Artificial Sequence
  Chemically synthesized
caaagauguaauguaguucuuug

SEQ ID NO: 37678 - RNA, 23 nt, Artificial Sequence
  Chemically synthesized
ucaaagauguaauguaguucuuu

SEQ ID NO: 37679 - RNA, 23 nt, Artificial Sequence
  Chemically synthesized
cucaaagauguaauguaguucuu

SEQ ID NO: 37680 - RNA, 23 nt, Artificial Sequence
  Chemically synthesized
caaaucugucuagaauccugcuu

SEQ ID NO: 37681 - RNA, 23 nt, Artificial Sequence
  Chemically synthesized
agcuuuguuacugaaaugagccu

SEQ ID NO: 37682 - RNA, 23 nt, Artificial Sequence
  Chemically synthesized
cauuaucuuuuggcucugaagaa

SEQ ID NO: 37683 - RNA, 23 nt, Artificial Sequence
  Chemically synthesized
uucaguuccagcuuuuguagaug

SEQ ID NO: 37684 - RNA, 23 nt, Artificial Sequence
  Chemically synthesized
guucaguuccagcuuuuguagau

SEQ ID NO: 37685 - RNA, 23 nt, Artificial Sequence
  Chemically synthesized
uguucaguuccagcuuuuguaga

SEQ ID NO: 37686 - RNA, 23 nt, Artificial Sequence
  Chemically synthesized
ggaugcacgguuucuguucugcc

SEQ ID NO: 37687 - RNA, 23 nt, Artificial Sequence
  Chemically synthesized
aggaugcacgguuucuguucugc

SEQ ID NO: 37688 - RNA, 23 nt, Artificial Sequence
  Chemically synthesized
caggaugcacgguuucuguucug

SEQ ID NO: 37689 - RNA, 23 nt, Artificial Sequence
  Chemically synthesized
ucaggaugcacgguuucuguucu

SEQ ID NO: 37690 - RNA, 23 nt, Artificial Sequence
  Chemically synthesized
uucaggaugcacgguuucuguuc

SEQ ID NO: 37691 - RNA, 23 nt, Artificial Sequence
  Chemically synthesized
uuguugagcgaauuguuagaaca

SEQ ID NO: 37692 - RNA, 23 nt, Artificial Sequence
  Chemically synthesized
guguuuucugagcgggcuuguga

SEQ ID NO: 37693 - RNA, 23 nt, Artificial Sequence
  Chemically synthesized
aguguuuucugagcgggcuugug

SEQ ID NO: 37694 - RNA, 23 nt, Artificial Sequence
  Chemically synthesized
aaguguuuucugagcgggcuugu

SEQ ID NO: 37695 - RNA, 23 nt, Artificial Sequence
  Chemically synthesized
caaguguuuucugagcgggcuug

SEQ ID NO: 37696 - RNA, 23 nt, Artificial Sequence
  Chemically synthesized
ucaaguguuuucugagcgggcuu

SEQ ID NO: 37697 - RNA, 23 nt, Artificial Sequence
  Chemically synthesized
cuaugguguggaugggaaacugc

SEQ ID NO: 37698 - RNA, 23 nt, Artificial Sequence
  Chemically synthesized
ucuaugguguggaugggaaacug

SEQ ID NO: 37699 - RNA, 23 nt, Artificial Sequence
  Chemically synthesized
aucuaugguguggaugggaaacu

SEQ ID NO: 37700 - RNA, 23 nt, Artificial Sequence
  Chemically synthesized
caucuaugguguggaugggaaac

SEQ ID NO: 37701 - RNA, 23 nt, Artificial Sequence
  Chemically synthesized
ccaucuaugguguggaugggaaa

SEQ ID NO: 37702 - RNA, 23 nt, Artificial Sequence
  Chemically synthesized
uuugggcuaugacguccauguuc

SEQ ID NO: 37703 - RNA, 23 nt, Artificial Sequence
  Chemically synthesized
uaguauggaaguauuugagagag

SEQ ID NO: 37704 - RNA, 23 nt, Artificial Sequence
  Chemically synthesized
auaguauggaaguauuugagaga

SEQ ID NO: 37705 - RNA, 23 nt, Artificial Sequence
  Chemically synthesized
cauaguauggaaguauuugagag

SEQ ID NO: 37706 - RNA, 23 nt, Artificial Sequence
  Chemically synthesized
ugaauaaaagagggaagaaggca

SEQ ID NO: 37707 - RNA, 23 nt, Artificial Sequence
  Chemically synthesized
uugaauaaaagagggaagaaggc

SEQ ID NO: 37708 - RNA, 23 nt, Artificial Sequence
  Chemically synthesized
guugaauaaaagagggaagaagg

SEQ ID NO: 37709 - RNA, 23 nt, Artificial Sequence
  Chemically synthesized
uguugaauaaaagagggaagaag

SEQ ID NO: 37710 - RNA, 23 nt, Artificial Sequence
  Chemically synthesized
uuguugaauaaaagagggaagaa

SEQ ID NO: 37711 - RNA, 23 nt, Artificial Sequence
  Chemically synthesized
uuuguugaauaaaagagggaaga

SEQ ID NO: 37712 - RNA, 23 nt, Artificial Sequence
  Chemically synthesized
guuuguugaauaaaagagggaag

SEQ ID NO: 37713 - RNA, 23 nt, Artificial Sequence
  Chemically synthesized
uguuuguugaauaaaagagggaa

SEQ ID NO: 37714 - RNA, 23 nt, Artificial Sequence
  Chemically synthesized
cauagugggccuucauuaaaugu

SEQ ID NO: 37715 - RNA, 23 nt, Artificial Sequence
  Chemically synthesized
acauagugggccuucauuaaaug

SEQ ID NO: 37716 - RNA, 23 nt, Artificial Sequence
  Chemically synthesized
cacauagugggccuucauuaaau

SEQ ID NO: 37717 - RNA, 23 nt, Artificial Sequence
  Chemically synthesized
uaccaggcuguaaaugagggcag

SEQ ID NO: 37718 - RNA, 23 nt, Artificial Sequence
  Chemically synthesized
cugucuuuuuccuuccugagaaa

SEQ ID NO: 37719 - RNA, 23 nt, Artificial Sequence
  Chemically synthesized
ucugucuuuuuccuuccugagaa

SEQ ID NO: 37720 - RNA, 23 nt, Artificial Sequence
  Chemically synthesized
cucugucuuuuuccuuccugaga

SEQ ID NO: 37721 - RNA, 23 nt, Artificial Sequence
  Chemically synthesized
ucucugucuuuuuccuuccugag

SEQ ID NO: 37722 - RNA, 23 nt, Artificial Sequence
  Chemically synthesized
cucucugucuuuuuccuuccuga

SEQ ID NO: 37723 - RNA, 23 nt, Artificial Sequence
  Chemically synthesized
caucagagaaggccaggaagaau

SEQ ID NO: 37724 - RNA, 23 nt, Artificial Sequence
  Chemically synthesized
gcaucagagaaggccaggaagaa

SEQ ID NO: 37725 - RNA, 23 nt, Artificial Sequence
  Chemically synthesized
agcaucagagaaggccaggaaga

SEQ ID NO: 37726 - RNA, 23 nt, Artificial Sequence
  Chemically synthesized
gagcaucagagaaggccaggaag

SEQ ID NO: 37727 - RNA, 23 nt, Artificial Sequence
  Chemically synthesized
ggagcaucagagaaggccaggaa

SEQ ID NO: 37728 - RNA, 23 nt, Artificial Sequence
  Chemically synthesized
agucucaaagaucuuucguuggu

SEQ ID NO: 37729 - RNA, 23 nt, Artificial Sequence
  Chemically synthesized
cuagagugagaguuuggaaggug

SEQ ID NO: 37730 - RNA, 23 nt, Artificial Sequence
  Chemically synthesized
ccuagagugagaguuuggaaggu

SEQ ID NO: 37731 - RNA, 23 nt, Artificial Sequence
  Chemically synthesized
uccuagagugagaguuuggaagg

SEQ ID NO: 37732 - RNA, 23 nt, Artificial Sequence
  Chemically synthesized
uucauucauauccuccgcccuuu

SEQ ID NO: 37733 - RNA, 23 nt, Artificial Sequence
  Chemically synthesized
accggugcaaggagaugucugaa

SEQ ID NO: 37734 - RNA, 23 nt, Artificial Sequence
  Chemically synthesized
caccggugcaaggagaugucuga

SEQ ID NO: 37735 - RNA, 23 nt, Artificial Sequence
  Chemically synthesized
guuguugagcgaauuguuagaac

SEQ ID NO: 37736 - RNA, 23 nt, Artificial Sequence
  Chemically synthesized
uguuguugagcgaauuguuagaa

SEQ ID NO: 37737 - RNA, 23 nt, Artificial Sequence
  Chemically synthesized
acagaacaaaccaaaaauguucu

SEQ ID NO: 37738 - RNA, 23 nt, Artificial Sequence
  Chemically synthesized
uacagaacaaaccaaaaauguuc

SEQ ID NO: 37739 - RNA, 23 nt, Artificial Sequence
  Chemically synthesized
ugguguggaugggaaacugcucc

SEQ ID NO: 37740 - RNA, 23 nt, Artificial Sequence
  Chemically synthesized
augguguggaugggaaacugcuc

SEQ ID NO: 37741 - RNA, 23 nt, Artificial Sequence
  Chemically synthesized
uaugguguggaugggaaacugcu

SEQ ID NO: 37742 - RNA, 23 nt, Artificial Sequence
  Chemically synthesized
gccaucuaugguguggaugggaa

SEQ ID NO: 37743 - RNA, 23 nt, Artificial Sequence
  Chemically synthesized
ggaaaugcaagagaaacugcaga

SEQ ID NO: 37744 - RNA, 23 nt, Artificial Sequence
  Chemically synthesized
aggaaaugcaagagaaacugcag

SEQ ID NO: 37745 - RNA, 23 nt, Artificial Sequence
  Chemically synthesized
caggaaaugcaagagaaacugca

SEQ ID NO: 37746 - RNA, 23 nt, Artificial Sequence
  Chemically synthesized
acaggaaaugcaagagaaacugc

SEQ ID NO: 37747 - RNA, 23 nt, Artificial Sequence
  Chemically synthesized
ugcacuucacuggagagaaagaa

SEQ ID NO: 37748 - RNA, 23 nt, Artificial Sequence
  Chemically synthesized
gugcacuucacuggagagaaaga

SEQ ID NO: 37749 - RNA, 23 nt, Artificial Sequence
  Chemically synthesized
ugugcacuucacuggagagaaag

SEQ ID NO: 37750 - RNA, 23 nt, Artificial Sequence
  Chemically synthesized
augugcacuucacuggagagaaa

SEQ ID NO: 37751 - RNA, 23 nt, Artificial Sequence
  Chemically synthesized
aaugugcacuucacuggagagaa

SEQ ID NO: 37752 - RNA, 23 nt, Artificial Sequence
  Chemically synthesized
aucaucaggaaacucuaaaaaag

SEQ ID NO: 37753 - RNA, 23 nt, Artificial Sequence
  Chemically synthesized
caucaucaggaaacucuaaaaaa

SEQ ID NO: 37754 - RNA, 23 nt, Artificial Sequence
  Chemically synthesized
acaucucccauggucccuagcaa

SEQ ID NO: 37755 - RNA, 23 nt, Artificial Sequence
  Chemically synthesized
cacaucucccauggucccuagca

SEQ ID NO: 37756 - RNA, 23 nt, Artificial Sequence
  Chemically synthesized
ucacaucucccauggucccuagc

SEQ ID NO: 37757 - RNA, 23 nt, Artificial Sequence
  Chemically synthesized
uucacaucucccauggucccuag

SEQ ID NO: 37758 - RNA, 23 nt, Artificial Sequence
  Chemically synthesized
cuucacaucucccauggucccua

SEQ ID NO: 37759 - RNA, 23 nt, Artificial Sequence
  Chemically synthesized
gaauaaaagagggaagaaggcaa

SEQ ID NO: 37760 - RNA, 23 nt, Artificial Sequence
  Chemically synthesized
caggauuugguuguuuaaauaua

SEQ ID NO: 37761 - RNA, 23 nt, Artificial Sequence
  Chemically synthesized
ccaggauuugguuguuuaaauau

SEQ ID NO: 37762 - RNA, 23 nt, Artificial Sequence
  Chemically synthesized
gccaggauuugguuguuuaaaua

SEQ ID NO: 37763 - RNA, 23 nt, Artificial Sequence
  Chemically synthesized
ggccaggauuugguuguuuaaau

SEQ ID NO: 37764 - RNA, 23 nt, Artificial Sequence
  Chemically synthesized
uggccaggauuugguuguuuaaa

SEQ ID NO: 37765 - RNA, 23 nt, Artificial Sequence
  Chemically synthesized
gcuuucucuuucaguauuaaacu

SEQ ID NO: 37766 - RNA, 23 nt, Artificial Sequence
  Chemically synthesized
ugcuuucucuuucaguauuaaac

SEQ ID NO: 37767 - RNA, 23 nt, Artificial Sequence
  Chemically synthesized
guucuuuguuccugcuuucucuu

SEQ ID NO: 37768 - RNA, 23 nt, Artificial Sequence
  Chemically synthesized
aagauguaauguaguucuuuguu

SEQ ID NO: 37769 - RNA, 23 nt, Artificial Sequence
  Chemically synthesized
aaagauguaauguaguucuuugu

SEQ ID NO: 37770 - RNA, 23 nt, Artificial Sequence
  Chemically synthesized
ggcugcugccaccaaaucugucu

SEQ ID NO: 37771 - RNA, 23 nt, Artificial Sequence
  Chemically synthesized
cucucucccuuacuauucccacu

SEQ ID NO: 37772 - RNA, 23 nt, Artificial Sequence
  Chemically synthesized
gguguccaaauuuaauguagaca

SEQ ID NO: 37773 - RNA, 23 nt, Artificial Sequence
  Chemically synthesized
agguguccaaauuuaauguagac

SEQ ID NO: 37774 - RNA, 23 nt, Artificial Sequence
  Chemically synthesized
aagguguccaaauuuaauguaga

SEQ ID NO: 37775 - RNA, 23 nt, Artificial Sequence
  Chemically synthesized
gccuugguuggaccuauugccag

SEQ ID NO: 37776 - RNA, 23 nt, Artificial Sequence
  Chemically synthesized
agccuugguuggaccuauugcca

SEQ ID NO: 37777 - RNA, 23 nt, Artificial Sequence
  Chemically synthesized
cagccuugguuggaccuauugcc

SEQ ID NO: 37778 - RNA, 23 nt, Artificial Sequence
  Chemically synthesized
ccagccuugguuggaccuauugc

SEQ ID NO: 37779 - RNA, 23 nt, Artificial Sequence
  Chemically synthesized
gccagccuugguuggaccuauug

SEQ ID NO: 37780 - RNA, 23 nt, Artificial Sequence
  Chemically synthesized
acacuuccagcuggcauauaggu

SEQ ID NO: 37781 - RNA, 23 nt, Artificial Sequence
  Chemically synthesized
cacacuuccagcuggcauauagg

SEQ ID NO: 37782 - RNA, 23 nt, Artificial Sequence
  Chemically synthesized
acacacuuccagcuggcauauag

SEQ ID NO: 37783 - RNA, 23 nt, Artificial Sequence
  Chemically synthesized
aacacacuuccagcuggcauaua

SEQ ID NO: 37784 - RNA, 23 nt, Artificial Sequence
  Chemically synthesized
aaacacacuuccagcuggcauau

SEQ ID NO: 37785 - RNA, 23 nt, Artificial Sequence
  Chemically synthesized
cuccugaauuuuaucaaacacac

SEQ ID NO: 37786 - RNA, 23 nt, Artificial Sequence
  Chemically synthesized
acuccugaauuuuaucaaacaca

SEQ ID NO: 37787 - RNA, 23 nt, Artificial Sequence
  Chemically synthesized
cacuccugaauuuuaucaaacac

SEQ ID NO: 37788 - RNA, 23 nt, Artificial Sequence
  Chemically synthesized
gcacuccugaauuuuaucaaaca

SEQ ID NO: 37789 - RNA, 23 nt, Artificial Sequence
  Chemically synthesized
ugcacuccugaauuuuaucaaac

SEQ ID NO: 37790 - RNA, 23 nt, Artificial Sequence
  Chemically synthesized
ccaaagugggcaguuucagccag

SEQ ID NO: 37791 - RNA, 23 nt, Artificial Sequence
  Chemically synthesized
gccaaagugggcaguuucagcca

SEQ ID NO: 37792 - RNA, 23 nt, Artificial Sequence
  Chemically synthesized
ggccaaagugggcaguuucagcc

SEQ ID NO: 37793 - RNA, 23 nt, Artificial Sequence
  Chemically synthesized
aggccaaagugggcaguuucagc

SEQ ID NO: 37794 - RNA, 23 nt, Artificial Sequence
  Chemically synthesized
caggccaaagugggcaguuucag

SEQ ID NO: 37795 - RNA, 23 nt, Artificial Sequence
  Chemically synthesized
gcuuuguuacugaaaugagccuc

SEQ ID NO: 37796 - RNA, 23 nt, Artificial Sequence
  Chemically synthesized
uuugcccauggaagucucaaaga

SEQ ID NO: 37797 - RNA, 23 nt, Artificial Sequence
  Chemically synthesized
cuuugcccauggaagucucaaag

SEQ ID NO: 37798 - RNA, 23 nt, Artificial Sequence
  Chemically synthesized
ccaguggaaggacacucuuggcu

SEQ ID NO: 37799 - RNA, 23 nt, Artificial Sequence
  Chemically synthesized
cccaguggaaggacacucuuggc

SEQ ID NO: 37800 - RNA, 23 nt, Artificial Sequence
  Chemically synthesized
acccaguggaaggacacucuugg

SEQ ID NO: 37801 - RNA, 23 nt, Artificial Sequence
  Chemically synthesized
cacccaguggaaggacacucuug

SEQ ID NO: 37802 - RNA, 23 nt, Artificial Sequence
  Chemically synthesized
ccacccaguggaaggacacucuu

SEQ ID NO: 37803 - RNA, 23 nt, Artificial Sequence
  Chemically synthesized
gugagaguuuggaagguguccaa

SEQ ID NO: 37804 - RNA, 23 nt, Artificial Sequence
  Chemically synthesized
agugagaguuuggaaggugucca

SEQ ID NO: 37805 - RNA, 23 nt, Artificial Sequence
  Chemically synthesized
gagugagaguuuggaaggugucc

SEQ ID NO: 37806 - RNA, 23 nt, Artificial Sequence
  Chemically synthesized
agagugagaguuuggaagguguc

SEQ ID NO: 37807 - RNA, 23 nt, Artificial Sequence
  Chemically synthesized
uagagugagaguuuggaaggugu

SEQ ID NO: 37808 - RNA, 23 nt, Artificial Sequence
  Chemically synthesized
auauuuguguucaguuccagcuu

SEQ ID NO: 37809 - RNA, 23 nt, Artificial Sequence
  Chemically synthesized
cauauuuguguucaguuccagcu

SEQ ID NO: 37810 - RNA, 23 nt, Artificial Sequence
  Chemically synthesized
gaauguuucagcugcaguugaag

SEQ ID NO: 37811 - RNA, 23 nt, Artificial Sequence
  Chemically synthesized
ggaauguuucagcugcaguugaa

SEQ ID NO: 37812 - RNA, 23 nt, Artificial Sequence
  Chemically synthesized
cacuuccagcuggcauauagguu

SEQ ID NO: 37813 - RNA, 23 nt, Artificial Sequence
  Chemically synthesized
ccacaucuugucuuuuccccuca

SEQ ID NO: 37814 - RNA, 23 nt, Artificial Sequence
  Chemically synthesized
accacaucuugucuuuuccccuc

SEQ ID NO: 37815 - RNA, 23 nt, Artificial Sequence
  Chemically synthesized
ucuuugcccauggaagucucaaa

SEQ ID NO: 37816 - RNA, 23 nt, Artificial Sequence
  Chemically synthesized
aacauugccuugcauuuguaccu

SEQ ID NO: 37817 - RNA, 23 nt, Artificial Sequence
  Chemically synthesized
caacauugccuugcauuuguacc

SEQ ID NO: 37818 - RNA, 23 nt, Artificial Sequence
  Chemically synthesized
ccaacauugccuugcauuuguac

SEQ ID NO: 37819 - RNA, 23 nt, Artificial Sequence
  Chemically synthesized
gccaacauugccuugcauuugua

SEQ ID NO: 37820 - RNA, 23 nt, Artificial Sequence
  Chemically synthesized
cgccaucuaugguguggauggga

SEQ ID NO: 37821 - RNA, 23 nt, Artificial Sequence
  Chemically synthesized
gcgccaucuaugguguggauggg

SEQ ID NO: 37822 - RNA, 23 nt, Artificial Sequence
  Chemically synthesized
ggcgccaucuaugguguggaugg

SEQ ID NO: 37823 - RNA, 23 nt, Artificial Sequence
  Chemically synthesized
gggcgccaucuaugguguggaug

SEQ ID NO: 37824 - RNA, 23 nt, Artificial Sequence
  Chemically synthesized
agggcgccaucuaugguguggau

SEQ ID NO: 37825 - RNA, 23 nt, Artificial Sequence
  Chemically synthesized
ccauucuuucuuccuccagucug

SEQ ID NO: 37826 - RNA, 23 nt, Artificial Sequence
  Chemically synthesized
uccauucuuucuuccuccagucu

SEQ ID NO: 37827 - RNA, 23 nt, Artificial Sequence
  Chemically synthesized
uuccauucuuucuuccuccaguc

SEQ ID NO: 37828 - RNA, 23 nt, Artificial Sequence
  Chemically synthesized
cuuccauucuuucuuccuccagu

SEQ ID NO: 37829 - RNA, 23 nt, Artificial Sequence
  Chemically synthesized
acuuccauucuuucuuccuccag

SEQ ID NO: 37830 - RNA, 23 nt, Artificial Sequence
  Chemically synthesized
aacuuccauucuuucuuccucca

SEQ ID NO: 37831 - RNA, 23 nt, Artificial Sequence
  Chemically synthesized
ucccugcuuaucugaaacuuccc

SEQ ID NO: 37832 - RNA, 23 nt, Artificial Sequence
  Chemically synthesized
aucccugcuuaucugaaacuucc

SEQ ID NO: 37833 - RNA, 23 nt, Artificial Sequence
  Chemically synthesized
uaucccugcuuaucugaaacuuc

SEQ ID NO: 37834 - RNA, 23 nt, Artificial Sequence
  Chemically synthesized
uuaucccugcuuaucugaaacuu

SEQ ID NO: 37835 - RNA, 23 nt, Artificial Sequence
  Chemically synthesized
guguuucccuagacucuguaacc

SEQ ID NO: 37836 - RNA, 23 nt, Artificial Sequence
  Chemically synthesized
uguguuucccuagacucuguaac

SEQ ID NO: 37837 - RNA, 23 nt, Artificial Sequence
  Chemically synthesized
guguguuucccuagacucuguaa

SEQ ID NO: 37838 - RNA, 23 nt, Artificial Sequence
  Chemically synthesized
gguguguuucccuagacucugua

SEQ ID NO: 37839 - RNA, 23 nt, Artificial Sequence
  Chemically synthesized
ugguguguuucccuagacucugu

SEQ ID NO: 37840 - RNA, 23 nt, Artificial Sequence
  Chemically synthesized
gacaagugaaguuguaaacacag

SEQ ID NO: 37841 - RNA, 23 nt, Artificial Sequence
  Chemically synthesized
aaaugcaagagaaacugcagaau

SEQ ID NO: 37842 - RNA, 23 nt, Artificial Sequence
  Chemically synthesized
uaggccuguaguagucaaggugc

SEQ ID NO: 37843 - RNA, 23 nt, Artificial Sequence
  Chemically synthesized
ccuagaaaccuuuaucccugcuu

SEQ ID NO: 37844 - RNA, 23 nt, Artificial Sequence
  Chemically synthesized
auguggcuuuuauuucagugcca

SEQ ID NO: 37845 - RNA, 23 nt, Artificial Sequence
  Chemically synthesized
accuucauuucauccuguuggcu

SEQ ID NO: 37846 - RNA, 23 nt, Artificial Sequence
  Chemically synthesized
uaccuucauuucauccuguuggc

SEQ ID NO: 37847 - RNA, 23 nt, Artificial Sequence
  Chemically synthesized
uuaccuucauuucauccuguugg

SEQ ID NO: 37848 - RNA, 23 nt, Artificial Sequence
  Chemically synthesized
uuuaccuucauuucauccuguug

SEQ ID NO: 37849 - RNA, 23 nt, Artificial Sequence
  Chemically synthesized
cuuuaccuucauuucauccuguu

SEQ ID NO: 37850 - RNA, 23 nt, Artificial Sequence
  Chemically synthesized
ugguuguuucucugagcuuuguu

SEQ ID NO: 37851 - RNA, 23 nt, Artificial Sequence
  Chemically synthesized
uugguuguuucucugagcuuugu

SEQ ID NO: 37852 - RNA, 23 nt, Artificial Sequence
  Chemically synthesized
guugguuguuucucugagcuuug

SEQ ID NO: 37853 - RNA, 23 nt, Artificial Sequence
  Chemically synthesized
guguccaaauuuaauguagacau

SEQ ID NO: 37854 - RNA, 23 nt, Artificial Sequence
  Chemically synthesized
ccagcuccuuuucugugaagccc

SEQ ID NO: 37855 - RNA, 23 nt, Artificial Sequence
  Chemically synthesized
gccagcuccuuuucugugaagcc

SEQ ID NO: 37856 - RNA, 23 nt, Artificial Sequence
  Chemically synthesized
ggccagcuccuuuucugugaagc

SEQ ID NO: 37857 - RNA, 23 nt, Artificial Sequence
  Chemically synthesized
aggccagcuccuuuucugugaag

SEQ ID NO: 37858 - RNA, 23 nt, Artificial Sequence
  Chemically synthesized
caggccagcuccuuuucugugaa

SEQ ID NO: 37859 - RNA, 23 nt, Artificial Sequence
  Chemically synthesized
ccaggccagcuccuuuucuguga

SEQ ID NO: 37860 - RNA, 23 nt, Artificial Sequence
  Chemically synthesized
ggaaucucccagacuuguuuccu

SEQ ID NO: 37861 - RNA, 23 nt, Artificial Sequence
  Chemically synthesized
gggaaucucccagacuuguuucc

SEQ ID NO: 37862 - RNA, 23 nt, Artificial Sequence
  Chemically synthesized
ugggaaucucccagacuuguuuc

SEQ ID NO: 37863 - RNA, 23 nt, Artificial Sequence
  Chemically synthesized
gugggaaucucccagacuuguuu

SEQ ID NO: 37864 - RNA, 23 nt, Artificial Sequence
  Chemically synthesized
ugugggaaucucccagacuuguu

SEQ ID NO: 37865 - RNA, 23 nt, Artificial Sequence
  Chemically synthesized
cguggccgacaugcugguuaagg

SEQ ID NO: 37866 - RNA, 23 nt, Artificial Sequence
  Chemically synthesized
acguggccgacaugcugguuaag

SEQ ID NO: 37867 - RNA, 23 nt, Artificial Sequence
  Chemically synthesized
cacguggccgacaugcugguuaa

SEQ ID NO: 37868 - RNA, 23 nt, Artificial Sequence
  Chemically synthesized
aaacagcuguuguugagcgaauu

SEQ ID NO: 37869 - RNA, 23 nt, Artificial Sequence
  Chemically synthesized
caaacagcuguuguugagcgaau

SEQ ID NO: 37870 - RNA, 23 nt, Artificial Sequence
  Chemically synthesized
gaauuuugcacaguuaccugcac

SEQ ID NO: 37871 - RNA, 23 nt, Artificial Sequence
  Chemically synthesized
agaauuuugcacaguuaccugca

SEQ ID NO: 37872 - RNA, 23 nt, Artificial Sequence
  Chemically synthesized
cagaauuuugcacaguuaccugc

SEQ ID NO: 37873 - RNA, 23 nt, Artificial Sequence
  Chemically synthesized
gcagaauuuugcacaguuaccug

SEQ ID NO: 37874 - RNA, 23 nt, Artificial Sequence
  Chemically synthesized
ugcagaauuuugcacaguuaccu

SEQ ID NO: 37875 - RNA, 23 nt, Artificial Sequence
  Chemically synthesized
cugcagaauuuugcacaguuacc

SEQ ID NO: 37876 - RNA, 23 nt, Artificial Sequence
  Chemically synthesized
acugcagaauuuugcacaguuac

SEQ ID NO: 37877 - RNA, 23 nt, Artificial Sequence
  Chemically synthesized
aacugcagaauuuugcacaguua

SEQ ID NO: 37878 - RNA, 23 nt, Artificial Sequence
  Chemically synthesized
ucacccucuucaagcuuuugggc

SEQ ID NO: 37879 - RNA, 23 nt, Artificial Sequence
  Chemically synthesized
gucacccucuucaagcuuuuggg

SEQ ID NO: 37880 - RNA, 23 nt, Artificial Sequence
  Chemically synthesized
agucacccucuucaagcuuuugg

SEQ ID NO: 37881 - RNA, 23 nt, Artificial Sequence
  Chemically synthesized
uagucacccucuucaagcuuuug

SEQ ID NO: 37882 - RNA, 23 nt, Artificial Sequence
  Chemically synthesized
cuagucacccucuucaagcuuuu

SEQ ID NO: 37883 - RNA, 23 nt, Artificial Sequence
  Chemically synthesized
ggugcucaauaaauauuuguuug

SEQ ID NO: 37884 - RNA, 23 nt, Artificial Sequence
  Chemically synthesized
aggugcucaauaaauauuuguuu

SEQ ID NO: 37885 - RNA, 23 nt, Artificial Sequence
  Chemically synthesized
aaggugcucaauaaauauuuguu

SEQ ID NO: 37886 - RNA, 23 nt, Artificial Sequence
  Chemically synthesized
caaggugcucaauaaauauuugu

SEQ ID NO: 37887 - RNA, 23 nt, Artificial Sequence
  Chemically synthesized
ucaaggugcucaauaaauauuug

SEQ ID NO: 37888 - RNA, 23 nt, Artificial Sequence
  Chemically synthesized
cucaggugguguccuucuuccuc

SEQ ID NO: 37889 - RNA, 23 nt, Artificial Sequence
  Chemically synthesized
acucaggugguguccuucuuccu

SEQ ID NO: 37890 - RNA, 23 nt, Artificial Sequence
  Chemically synthesized
gacucaggugguguccuucuucc

SEQ ID NO: 37891 - RNA, 23 nt, Artificial Sequence
  Chemically synthesized
ugacucaggugguguccuucuuc

SEQ ID NO: 37892 - RNA, 23 nt, Artificial Sequence
  Chemically synthesized
uugacucaggugguguccuucuu

SEQ ID NO: 37893 - RNA, 23 nt, Artificial Sequence
  Chemically synthesized
ugccaccaaaucugucuagaauc

SEQ ID NO: 37894 - RNA, 23 nt, Artificial Sequence
  Chemically synthesized
agccaacauugccuugcauuugu

SEQ ID NO: 37895 - RNA, 23 nt, Artificial Sequence
  Chemically synthesized
cagccaacauugccuugcauuug

SEQ ID NO: 37896 - RNA, 23 nt, Artificial Sequence
  Chemically synthesized
ucagccaacauugccuugcauuu

SEQ ID NO: 37897 - RNA, 23 nt, Artificial Sequence
  Chemically synthesized
agauggcacuuuagugauugcuu

SEQ ID NO: 37898 - RNA, 23 nt, Artificial Sequence
  Chemically synthesized
uagauggcacuuuagugauugcu

SEQ ID NO: 37899 - RNA, 23 nt, Artificial Sequence
  Chemically synthesized
guagauggcacuuuagugauugc

SEQ ID NO: 37900 - RNA, 23 nt, Artificial Sequence
  Chemically synthesized
uguagauggcacuuuagugauug

SEQ ID NO: 37901 - RNA, 23 nt, Artificial Sequence
  Chemically synthesized
uuguagauggcacuuuagugauu

SEQ ID NO: 37902 - RNA, 23 nt, Artificial Sequence
  Chemically synthesized
agccuuugaucuucaggaugcac

SEQ ID NO: 37903 - RNA, 23 nt, Artificial Sequence
  Chemically synthesized
gagccuuugaucuucaggaugca

SEQ ID NO: 37904 - RNA, 23 nt, Artificial Sequence
  Chemically synthesized
agagccuuugaucuucaggaugc

SEQ ID NO: 37905 - RNA, 23 nt, Artificial Sequence
  Chemically synthesized
uagagccuuugaucuucaggaug

SEQ ID NO: 37906 - RNA, 23 nt, Artificial Sequence
  Chemically synthesized
auagagccuuugaucuucaggau

SEQ ID NO: 37907 - RNA, 23 nt, Artificial Sequence
  Chemically synthesized
gggcuugugauaugcacguggcc

SEQ ID NO: 37908 - RNA, 23 nt, Artificial Sequence
  Chemically synthesized
cgggcuugugauaugcacguggc

SEQ ID NO: 37909 - RNA, 23 nt, Artificial Sequence
  Chemically synthesized
gcgggcuugugauaugcacgugg

SEQ ID NO: 37910 - RNA, 23 nt, Artificial Sequence
  Chemically synthesized
agcgggcuugugauaugcacgug

SEQ ID NO: 37911 - RNA, 23 nt, Artificial Sequence
  Chemically synthesized
gagcgggcuugugauaugcacgu

SEQ ID NO: 37912 - RNA, 23 nt, Artificial Sequence
  Chemically synthesized
ccgguaaagaaaaguugccgaag

SEQ ID NO: 37913 - RNA, 23 nt, Artificial Sequence
  Chemically synthesized
gccgguaaagaaaaguugccgaa

SEQ ID NO: 37914 - RNA, 23 nt, Artificial Sequence
  Chemically synthesized
ggaaacucuaaaaaagaaccgag

SEQ ID NO: 37915 - RNA, 23 nt, Artificial Sequence
  Chemically synthesized
aggaaacucuaaaaaagaaccga

SEQ ID NO: 37916 - RNA, 23 nt, Artificial Sequence
  Chemically synthesized
gcauccucaucaucaggaaacuc

SEQ ID NO: 37917 - RNA, 23 nt, Artificial Sequence
  Chemically synthesized
ugcauccucaucaucaggaaacu

SEQ ID NO: 37918 - RNA, 23 nt, Artificial Sequence
  Chemically synthesized
augcauccucaucaucaggaaac

SEQ ID NO: 37919 - RNA, 23 nt, Artificial Sequence
  Chemically synthesized
caugcauccucaucaucaggaaa

SEQ ID NO: 37920 - RNA, 23 nt, Artificial Sequence
  Chemically synthesized
gucaaggugcucaauaaauauuu

SEQ ID NO: 37921 - RNA, 23 nt, Artificial Sequence
  Chemically synthesized
agucaaggugcucaauaaauauu

SEQ ID NO: 37922 - RNA, 23 nt, Artificial Sequence
  Chemically synthesized
augugugagauaacuuccuucac

SEQ ID NO: 37923 - RNA, 23 nt, Artificial Sequence
  Chemically synthesized
caugugugagauaacuuccuuca

SEQ ID NO: 37924 - RNA, 23 nt, Artificial Sequence
  Chemically synthesized
agaaugguguguuucccuagacu

SEQ ID NO: 37925 - RNA, 23 nt, Artificial Sequence
  Chemically synthesized
aagaaugguguguuucccuagac

SEQ ID NO: 37926 - RNA, 23 nt, Artificial Sequence
  Chemically synthesized
gaagaaugguguguuucccuaga

SEQ ID NO: 37927 - RNA, 23 nt, Artificial Sequence
  Chemically synthesized
ggaagaaugguguguuucccuag

SEQ ID NO: 37928 - RNA, 23 nt, Artificial Sequence
  Chemically synthesized
aggaagaaugguguguuucccua

SEQ ID NO: 37929 - RNA, 23 nt, Artificial Sequence
  Chemically synthesized
cgcccuuuuuguccuagagugag

SEQ ID NO: 37930 - RNA, 23 nt, Artificial Sequence
  Chemically synthesized
uggagaaggacaucaucaccuug

SEQ ID NO: 37931 - RNA, 23 nt, Artificial Sequence
  Chemically synthesized
cuggagaaggacaucaucaccuu

SEQ ID NO: 37932 - RNA, 23 nt, Artificial Sequence
  Chemically synthesized
ucuggagaaggacaucaucaccu

SEQ ID NO: 37933 - RNA, 23 nt, Artificial Sequence
  Chemically synthesized
ggcacuuuagugauugcuuuuau

SEQ ID NO: 37934 - RNA, 23 nt, Artificial Sequence
  Chemically synthesized
uggcacuuuagugauugcuuuua

SEQ ID NO: 37935 - RNA, 23 nt, Artificial Sequence
  Chemically synthesized
auggcacuuuagugauugcuuuu

SEQ ID NO: 37936 - RNA, 23 nt, Artificial Sequence
  Chemically synthesized
gauggcacuuuagugauugcuuu

SEQ ID NO: 37937 - RNA, 23 nt, Artificial Sequence
  Chemically synthesized
agccagccuugguuggaccuauu

SEQ ID NO: 37938 - RNA, 23 nt, Artificial Sequence
  Chemically synthesized
ggcuugugauaugcacguggccg

SEQ ID NO: 37939 - RNA, 23 nt, Artificial Sequence
  Chemically synthesized
guacucuagucacccucuucaag

SEQ ID NO: 37940 - RNA, 23 nt, Artificial Sequence
  Chemically synthesized
aguacucuagucacccucuucaa

SEQ ID NO: 37941 - RNA, 23 nt, Artificial Sequence
  Chemically synthesized
caguacucuagucacccucuuca

SEQ ID NO: 37942 - RNA, 23 nt, Artificial Sequence
  Chemically synthesized
acaguacucuagucacccucuuc

SEQ ID NO: 37943 - RNA, 23 nt, Artificial Sequence
  Chemically synthesized
cacaguacucuagucacccucuu

SEQ ID NO: 37944 - RNA, 23 nt, Artificial Sequence
  Chemically synthesized
ugagggcagaaaccuuguuuguu

SEQ ID NO: 37945 - RNA, 23 nt, Artificial Sequence
  Chemically synthesized
augagggcagaaaccuuguuugu

SEQ ID NO: 37946 - RNA, 23 nt, Artificial Sequence
  Chemically synthesized
aaugagggcagaaaccuuguuug

SEQ ID NO: 37947 - RNA, 23 nt, Artificial Sequence
  Chemically synthesized
aaaugagggcagaaaccuuguuu

SEQ ID NO: 37948 - RNA, 23 nt, Artificial Sequence
  Chemically synthesized
ccaagcuuuugaugccuucugug

SEQ ID NO: 37949 - RNA, 23 nt, Artificial Sequence
  Chemically synthesized
cccaagcuuuugaugccuucugu

SEQ ID NO: 37950 - RNA, 23 nt, Artificial Sequence
  Chemically synthesized
ccccaagcuuuugaugccuucug

SEQ ID NO: 37951 - RNA, 23 nt, Artificial Sequence
  Chemically synthesized
uccccaagcuuuugaugccuucu

SEQ ID NO: 37952 - RNA, 23 nt, Artificial Sequence
  Chemically synthesized
guccccaagcuuuugaugccuuc

SEQ ID NO: 37953 - RNA, 23 nt, Artificial Sequence
  Chemically synthesized
aacuucccaacuucccuguucuu

SEQ ID NO: 37954 - RNA, 23 nt, Artificial Sequence
  Chemically synthesized
uccuagcuuaucucccugcuuca

SEQ ID NO: 37955 - RNA, 23 nt, Artificial Sequence
  Chemically synthesized
uuccuagcuuaucucccugcuuc

SEQ ID NO: 37956 - RNA, 23 nt, Artificial Sequence
  Chemically synthesized
cuuccuagcuuaucucccugcuu

SEQ ID NO: 37957 - RNA, 23 nt, Artificial Sequence
  Chemically synthesized
gcaguuucagccagaauguggaa

SEQ ID NO: 37958 - RNA, 23 nt, Artificial Sequence
  Chemically synthesized
ggcaguuucagccagaaugugga

SEQ ID NO: 37959 - RNA, 23 nt, Artificial Sequence
  Chemically synthesized
gggcaguuucagccagaaugugg

SEQ ID NO: 37960 - RNA, 23 nt, Artificial Sequence
  Chemically synthesized
ugggcaguuucagccagaaugug

SEQ ID NO: 37961 - RNA, 23 nt, Artificial Sequence
  Chemically synthesized
gugggcaguuucagccagaaugu

SEQ ID NO: 37962 - RNA, 23 nt, Artificial Sequence
  Chemically synthesized
ugagaaacguccaucucucuccc

SEQ ID NO: 37963 - RNA, 23 nt, Artificial Sequence
  Chemically synthesized
cugagaaacguccaucucucucc

SEQ ID NO: 37964 - RNA, 23 nt, Artificial Sequence
  Chemically synthesized
ccugagaaacguccaucucucuc

SEQ ID NO: 37965 - RNA, 23 nt, Artificial Sequence
  Chemically synthesized
gucagccaacauugccuugcauu

SEQ ID NO: 37966 - RNA, 23 nt, Artificial Sequence
  Chemically synthesized
cccuuuuuguccuagagugagag

SEQ ID NO: 37967 - RNA, 23 nt, Artificial Sequence
  Chemically synthesized
gcccuuuuuguccuagagugaga

SEQ ID NO: 37968 - RNA, 23 nt, Artificial Sequence
  Chemically synthesized
gcacuuuagugauugcuuuuauu

SEQ ID NO: 37969 - RNA, 23 nt, Artificial Sequence
  Chemically synthesized
uggaccuauugccaggaauguuu

SEQ ID NO: 37970 - RNA, 23 nt, Artificial Sequence
  Chemically synthesized
uuggaccuauugccaggaauguu

SEQ ID NO: 37971 - RNA, 23 nt, Artificial Sequence
  Chemically synthesized
guuggaccuauugccaggaaugu

SEQ ID NO: 37972 - RNA, 23 nt, Artificial Sequence
  Chemically synthesized
gguuggaccuauugccaggaaug

SEQ ID NO: 37973 - RNA, 23 nt, Artificial Sequence
  Chemically synthesized
ugguuggaccuauugccaggaau

SEQ ID NO: 37974 - RNA, 23 nt, Artificial Sequence
  Chemically synthesized
ggcucuugcucaaguguuuucug

SEQ ID NO: 37975 - RNA, 23 nt, Artificial Sequence
  Chemically synthesized
aggcucuugcucaaguguuuucu

SEQ ID NO: 37976 - RNA, 23 nt, Artificial Sequence
  Chemically synthesized
gaggcucuugcucaaguguuuuc

SEQ ID NO: 37977 - RNA, 23 nt, Artificial Sequence
  Chemically synthesized
cgaggcucuugcucaaguguuuu

SEQ ID NO: 37978 - RNA, 23 nt, Artificial Sequence
  Chemically synthesized
ucgaggcucuugcucaaguguuu

SEQ ID NO: 37979 - RNA, 23 nt, Artificial Sequence
  Chemically synthesized
ggaacaccaaacgagguuccugg

SEQ ID NO: 37980 - RNA, 23 nt, Artificial Sequence
  Chemically synthesized
cggaacaccaaacgagguuccug

SEQ ID NO: 37981 - RNA, 23 nt, Artificial Sequence
  Chemically synthesized
gcggaacaccaaacgagguuccu

SEQ ID NO: 37982 - RNA, 23 nt, Artificial Sequence
  Chemically synthesized
ugcggaacaccaaacgagguucc

SEQ ID NO: 37983 - RNA, 23 nt, Artificial Sequence
  Chemically synthesized
augcggaacaccaaacgagguuc

SEQ ID NO: 37984 - RNA, 23 nt, Artificial Sequence
  Chemically synthesized
caugcggaacaccaaacgagguu

SEQ ID NO: 37985 - RNA, 23 nt, Artificial Sequence
  Chemically synthesized
cccucauuuaaaauguaaacucu

SEQ ID NO: 37986 - RNA, 23 nt, Artificial Sequence
  Chemically synthesized
ucauuaaauggugauuucuugcu

SEQ ID NO: 37987 - RNA, 23 nt, Artificial Sequence
  Chemically synthesized
cuuauugaucuuugcccauggaa

SEQ ID NO: 37988 - RNA, 23 nt, Artificial Sequence
  Chemically synthesized
ccuuuuuguccuagagugagagu

SEQ ID NO: 37989 - RNA, 23 nt, Artificial Sequence
  Chemically synthesized
ucauucaaucaaccugcacuuca

SEQ ID NO: 37990 - RNA, 23 nt, Artificial Sequence
  Chemically synthesized
aggauauugggaguguguggcau

SEQ ID NO: 37991 - RNA, 23 nt, Artificial Sequence
  Chemically synthesized
cuuguuuguuuuauucaccauca

SEQ ID NO: 37992 - RNA, 23 nt, Artificial Sequence
  Chemically synthesized
cuuuuuguccuagagugagaguu

SEQ ID NO: 37993 - RNA, 23 nt, Artificial Sequence
  Chemically synthesized
ggauauugggaguguguggcaug

SEQ ID NO: 37994 - RNA, 23 nt, Artificial Sequence
  Chemically synthesized
uguuuguuuuauucaccaucaug

SEQ ID NO: 37995 - RNA, 23 nt, Artificial Sequence
  Chemically synthesized
cuucuuuaccuucauuucauccu

SEQ ID NO: 37996 - RNA, 23 nt, Artificial Sequence
  Chemically synthesized
cuauucccacuuucauucaauca

SEQ ID NO: 37997 - RNA, 23 nt, Artificial Sequence
  Chemically synthesized
caaacaugacuagagacgcaccu

SEQ ID NO: 37998 - RNA, 23 nt, Artificial Sequence
  Chemically synthesized
gacuuguuuccugugcccaucau

SEQ ID NO: 37999 - RNA, 23 nt, Artificial Sequence
  Chemically synthesized
ggaugugggaaucucccagacuu

SEQ ID NO: 38000 - RNA, 23 nt, Artificial Sequence
  Chemically synthesized
acuuaucaaggaucgggaagguu

SEQ ID NO: 38001 - RNA, 23 nt, Artificial Sequence
  Chemically synthesized
gaauuuuaucaaacacacuucca

SEQ ID NO: 38002 - RNA, 23 nt, Artificial Sequence
  Chemically synthesized
acauaguauggaaguauuugaga

SEQ ID NO: 38003 - RNA, 23 nt, Artificial Sequence
  Chemically synthesized
caauaaauauuuguuuggguggu

SEQ ID NO: 38004 - RNA, 23 nt, Artificial Sequence
  Chemically synthesized
guuuguuuuauucaccaucaugu

SEQ ID NO: 38005 - RNA, 23 nt, Artificial Sequence
  Chemically synthesized
cucuuucaguauuaaacucuccu

SEQ ID NO: 38006 - RNA, 23 nt, Artificial Sequence
  Chemically synthesized
cgggugccaaauaaaugcucaua

SEQ ID NO: 38007 - RNA, 23 nt, Artificial Sequence
  Chemically synthesized
cacuuucauucaaucaaccugca

SEQ ID NO: 38008 - RNA, 23 nt, Artificial Sequence
  Chemically synthesized
uuacuauucccacuuucauucaa

SEQ ID NO: 38009 - RNA, 23 nt, Artificial Sequence
  Chemically synthesized
cucauugcauuuauugcaguuua

SEQ ID NO: 38010 - RNA, 23 nt, Artificial Sequence
  Chemically synthesized
aagaucuuucguugguuguuucu

SEQ ID NO: 38011 - RNA, 23 nt, Artificial Sequence
  Chemically synthesized
ucaauaaauauuuguuugggugg

SEQ ID NO: 38012 - RNA, 23 nt, Artificial Sequence
  Chemically synthesized
uaaaugagggcagaaaccuuguu

SEQ ID NO: 38013 - RNA, 23 nt, Artificial Sequence
  Chemically synthesized
ccuggccaggauuugguuguuua

SEQ ID NO: 38014 - RNA, 23 nt, Artificial Sequence
  Chemically synthesized
aagugggcaguuucagccagaau

SEQ ID NO: 38015 - RNA, 23 nt, Artificial Sequence
  Chemically synthesized
uuguuagaacaucuucuggagaa

SEQ ID NO: 38016 - RNA, 23 nt, Artificial Sequence
  Chemically synthesized
ccagaauguggaacuccucaacu

SEQ ID NO: 38017 - RNA, 23 nt, Artificial Sequence
  Chemically synthesized
gcucaauaaauauuuguuugggu

SEQ ID NO: 38018 - RNA, 23 nt, Artificial Sequence
  Chemically synthesized
cccucauugcauuuauugcaguu

SEQ ID NO: 38019 - RNA, 23 nt, Artificial Sequence
  Chemically synthesized
gguguccuucuuccucaagucuu

SEQ ID NO: 38020 - RNA, 23 nt, Artificial Sequence
  Chemically synthesized
guugaccaacaagauggaaagaa

SEQ ID NO: 38021 - RNA, 23 nt, Artificial Sequence
  Chemically synthesized
gguugaccaacaagauggaaaga

SEQ ID NO: 38022 - RNA, 23 nt, Artificial Sequence
  Chemically synthesized
cucaauaaauauuuguuugggug

SEQ ID NO: 38023 - RNA, 23 nt, Artificial Sequence
  Chemically synthesized
cauguuauuguuuucaaccuaga

SEQ ID NO: 38024 - RNA, 23 nt, Artificial Sequence
  Chemically synthesized
gguuaugcuccuggcacagaauu

SEQ ID NO: 38025 - RNA, 23 nt, Artificial Sequence
  Chemically synthesized
ccacaguacucuagucacccucu

SEQ ID NO: 38026 - RNA, 23 nt, Artificial Sequence
  Chemically synthesized
ucaaacacacuuccagcuggcau

SEQ ID NO: 38027 - RNA, 23 nt, Artificial Sequence
  Chemically synthesized
ccucauugcauuuauugcaguuu

SEQ ID NO: 38028 - RNA, 23 nt, Artificial Sequence
  Chemically synthesized
accuagaaaccuuuaucccugcu

SEQ ID NO: 38029 - RNA, 23 nt, Artificial Sequence
  Chemically synthesized
gaaugguguguuucccuagacuc

SEQ ID NO: 38030 - RNA, 23 nt, Artificial Sequence
  Chemically synthesized
cugagagaccaucuccuaucuuu

SEQ ID NO: 38031 - RNA, 23 nt, Artificial Sequence
  Chemically synthesized
gugcucaauaaauauuuguuugg

SEQ ID NO: 38032 - RNA, 23 nt, Artificial Sequence
  Chemically synthesized
cuugaaccucauuaaauggugau

SEQ ID NO: 38033 - RNA, 23 nt, Artificial Sequence
  Chemically synthesized
ugcuuuacaggaucauguaaaug

SEQ ID NO: 38034 - RNA, 23 nt, Artificial Sequence
  Chemically synthesized
agaauccugcuuuacaggaucau

SEQ ID NO: 38035 - RNA, 23 nt, Artificial Sequence
  Chemically synthesized
ccagacuuguuuccugugcccau

SEQ ID NO: 38036 - RNA, 23 nt, Artificial Sequence
  Chemically synthesized
gugcuagccaaacagcuguuguu

SEQ ID NO: 38037 - RNA, 23 nt, Artificial Sequence
  Chemically synthesized
gaaacuucccaacuucccuguuc

SEQ ID NO: 38038 - RNA, 23 nt, Artificial Sequence
  Chemically synthesized
gcugguuaaggugaacgcacuua

SEQ ID NO: 38039 - RNA, 23 nt, Artificial Sequence
  Chemically synthesized
gggauguggaccacaguacucua

SEQ ID NO: 38040 - RNA, 23 nt, Artificial Sequence
  Chemically synthesized
ccugaauuuuaucaaacacacuu

SEQ ID NO: 38041 - RNA, 23 nt, Artificial Sequence
  Chemically synthesized
acauaucaugugugagauaacuu

SEQ ID NO: 38042 - RNA, 23 nt, Artificial Sequence
  Chemically synthesized
aguuuggaagguguccaaauuua

SEQ ID NO: 38043 - RNA, 23 nt, Artificial Sequence
  Chemically synthesized
ucugagagaccaucuccuaucuu

SEQ ID NO: 38044 - RNA, 23 nt, Artificial Sequence
  Chemically synthesized
gaauuccaccggugcaaggagau

SEQ ID NO: 38045 - RNA, 23 nt, Artificial Sequence
  Chemically synthesized
accaaacgagguuccugguacau

SEQ ID NO: 38046 - RNA, 23 nt, Artificial Sequence
  Chemically synthesized
agauggaaagaaccacgcaggau

SEQ ID NO: 38047 - RNA, 23 nt, Artificial Sequence
  Chemically synthesized
ccaagagguuuuucagcucuuug

SEQ ID NO: 38048 - RNA, 23 nt, Artificial Sequence
  Chemically synthesized
gacauaucaugugugagauaacu

SEQ ID NO: 38049 - RNA, 23 nt, Artificial Sequence
  Chemically synthesized
cuaccuuuugauaaaauguuccu

SEQ ID NO: 38050 - RNA, 23 nt, Artificial Sequence
  Chemically synthesized
uugaaccucauuaaauggugauu

SEQ ID NO: 38051 - RNA, 23 nt, Artificial Sequence
  Chemically synthesized
cagaauguggaacuccucaacuu

SEQ ID NO: 38052 - RNA, 23 nt, Artificial Sequence
  Chemically synthesized
gccagaauguggaacuccucaac

SEQ ID NO: 38053 - RNA, 23 nt, Artificial Sequence
  Chemically synthesized
gagaaacguccaucucucucccu

SEQ ID NO: 38054 - RNA, 23 nt, Artificial Sequence
  Chemically synthesized
gaguuuggaagguguccaaauuu

SEQ ID NO: 38055 - RNA, 23 nt, Artificial Sequence
  Chemically synthesized
agaguuuggaagguguccaaauu

SEQ ID NO: 38056 - RNA, 23 nt, Artificial Sequence
  Chemically synthesized
agguuaugcuccuggcacagaau

SEQ ID NO: 38057 - RNA, 23 nt, Artificial Sequence
  Chemically synthesized
gguuaaggugaacgcacuuauca

SEQ ID NO: 38058 - RNA, 23 nt, Artificial Sequence
  Chemically synthesized
ccaaacgagguuccugguacauc

SEQ ID NO: 38059 - RNA, 23 nt, Artificial Sequence
  Chemically synthesized
ggugcuagccaaacagcuguugu

SEQ ID NO: 38060 - RNA, 23 nt, Artificial Sequence
  Chemically synthesized
gaaacugcagaauuuugcacagu

SEQ ID NO: 38061 - RNA, 23 nt, Artificial Sequence
  Chemically synthesized
agaaacugcagaauuuugcacag

SEQ ID NO: 38062 - RNA, 23 nt, Artificial Sequence
  Chemically synthesized
caaacacacuuccagcuggcaua

SEQ ID NO: 38063 - RNA, 23 nt, Artificial Sequence
  Chemically synthesized
uccuuuugacaauauacacggau

SEQ ID NO: 38064 - RNA, 23 nt, Artificial Sequence
  Chemically synthesized
uccugcuuuacaggaucauguaa

SEQ ID NO: 38065 - RNA, 23 nt, Artificial Sequence
  Chemically synthesized
gcuuccuagcuuaucucccugcu

SEQ ID NO: 38066 - RNA, 23 nt, Artificial Sequence
  Chemically synthesized
agaucuuucguugguuguuucuc

SEQ ID NO: 38067 - RNA, 23 nt, Artificial Sequence
  Chemically synthesized
gaccuauugccaggaauguuuca

SEQ ID NO: 38068 - RNA, 23 nt, Artificial Sequence
  Chemically synthesized
ggaccuauugccaggaauguuuc

SEQ ID NO: 38069 - RNA, 23 nt, Artificial Sequence
  Chemically synthesized
cugugaagcccuuugccuguaga

SEQ ID NO: 38070 - RNA, 23 nt, Artificial Sequence
  Chemically synthesized
gaagguuaugcuccuggcacaga

SEQ ID NO: 38071 - RNA, 23 nt, Artificial Sequence
  Chemically synthesized
gcucuugcucaaguguuuucuga

SEQ ID NO: 38072 - RNA, 23 nt, Artificial Sequence
  Chemically synthesized
guggugcuagccaaacagcuguu

SEQ ID NO: 38073 - RNA, 23 nt, Artificial Sequence
  Chemically synthesized
gcuccaagagguuuuucagcucu

SEQ ID NO: 38074 - RNA, 23 nt, Artificial Sequence
  Chemically synthesized
gaaacucuaaaaaagaaccgagu

SEQ ID NO: 38075 - RNA, 23 nt, Artificial Sequence
  Chemically synthesized
cccuagcaaaaugcuaggccugu

SEQ ID NO: 38076 - RNA, 23 nt, Artificial Sequence
  Chemically synthesized
ucccuagcaaaaugcuaggccug

SEQ ID NO: 38077 - RNA, 23 nt, Artificial Sequence
  Chemically synthesized
uguuuucaaccuagaaaccuuua

SEQ ID NO: 38078 - RNA, 23 nt, Artificial Sequence
  Chemically synthesized
cagccagaauguggaacuccuca

SEQ ID NO: 38079 - RNA, 23 nt, Artificial Sequence
  Chemically synthesized
cugcuuuacaggaucauguaaau

SEQ ID NO: 38080 - RNA, 23 nt, Artificial Sequence
  Chemically synthesized
ccugcuuuacaggaucauguaaa

SEQ ID NO: 38081 - RNA, 23 nt, Artificial Sequence
  Chemically synthesized
gaauuguuagaacaucuucugga

SEQ ID NO: 38082 - RNA, 23 nt, Artificial Sequence
  Chemically synthesized
uugguuggaccuauugccaggaa

SEQ ID NO: 38083 - RNA, 23 nt, Artificial Sequence
  Chemically synthesized
cuucaggaugcacgguuucuguu

SEQ ID NO: 38084 - RNA, 23 nt, Artificial Sequence
  Chemically synthesized
ugguuaaggugaacgcacuuauc

SEQ ID NO: 38085 - RNA, 23 nt, Artificial Sequence
  Chemically synthesized
gaccaacaagauggaaagaacca

SEQ ID NO: 38086 - RNA, 23 nt, Artificial Sequence
  Chemically synthesized
gaacaaaccaaaaauguucuuca

SEQ ID NO: 38087 - RNA, 23 nt, Artificial Sequence
  Chemically synthesized
gacugcacaggaaaugcaagaga

SEQ ID NO: 38088 - RNA, 23 nt, Artificial Sequence
  Chemically synthesized
gcacuucacuggagagaaagaac

SEQ ID NO: 38089 - RNA, 23 nt, Artificial Sequence
  Chemically synthesized
gguguugagcaaugugcacuuca

SEQ ID NO: 38090 - RNA, 23 nt, Artificial Sequence
  Chemically synthesized
uccugaauuuuaucaaacacacu

SEQ ID NO: 38091 - RNA, 23 nt, Artificial Sequence
  Chemically synthesized
aguccugccuuugggucgacaua

SEQ ID NO: 38092 - RNA, 23 nt, Artificial Sequence
  Chemically synthesized
caauccuaccuuuugauaaaaug

SEQ ID NO: 38093 - RNA, 23 nt, Artificial Sequence
  Chemically synthesized
cuucuuccucaagucuugacaau

SEQ ID NO: 38094 - RNA, 23 nt, Artificial Sequence
  Chemically synthesized
cuggccaggauuugguuguuuaa

SEQ ID NO: 38095 - RNA, 23 nt, Artificial Sequence
  Chemically synthesized
gaacaucuucuggagaaggacau

SEQ ID NO: 38096 - RNA, 23 nt, Artificial Sequence
  Chemically synthesized
ugagagaccaucuccuaucuuuu

SEQ ID NO: 38097 - RNA, 23 nt, Artificial Sequence
  Chemically synthesized
gcuuuugggcuaugacguccaug

SEQ ID NO: 38098 - RNA, 23 nt, Artificial Sequence
  Chemically synthesized
agcuuuugggcuaugacguccau

SEQ ID NO: 38099 - RNA, 23 nt, Artificial Sequence
  Chemically synthesized
ucuagucacccucuucaagcuuu

SEQ ID NO: 38100 - RNA, 23 nt, Artificial Sequence
  Chemically synthesized
cucuagucacccucuucaagcuu

SEQ ID NO: 38101 - RNA, 23 nt, Artificial Sequence
  Chemically synthesized
ucgggugccaaauaaaugcucau

SEQ ID NO: 38102 - RNA, 23 nt, Artificial Sequence
  Chemically synthesized
guauugccaucgggugccaaaua

SEQ ID NO: 38103 - RNA, 23 nt, Artificial Sequence
  Chemically synthesized
ggaagaaggcaagccaaccuuag

SEQ ID NO: 38104 - RNA, 23 nt, Artificial Sequence
  Chemically synthesized
cuguucucacauaacagaguagu

SEQ ID NO: 38105 - RNA, 23 nt, Artificial Sequence
  Chemically synthesized
acauguuauuguuuucaaccuag

SEQ ID NO: 38106 - RNA, 23 nt, Artificial Sequence
  Chemically synthesized
aaagugggcaguuucagccagaa

SEQ ID NO: 38107 - RNA, 23 nt, Artificial Sequence
  Chemically synthesized
ucuagaaaagcuuccuagcuuau

SEQ ID NO: 38108 - RNA, 23 nt, Artificial Sequence
  Chemically synthesized
gagaguuuggaagguguccaaau

SEQ ID NO: 38109 - RNA, 23 nt, Artificial Sequence
  Chemically synthesized
ccaaacagcuguuguugagcgaa

SEQ ID NO: 38110 - RNA, 23 nt, Artificial Sequence
  Chemically synthesized
agaacaaaccaaaaauguucuuc

SEQ ID NO: 38111 - RNA, 23 nt, Artificial Sequence
  Chemically synthesized
cuccaagagguuuuucagcucuu

SEQ ID NO: 38112 - RNA, 23 nt, Artificial Sequence
  Chemically synthesized
cucuaaaaaagaaccgaguggug

SEQ ID NO: 38113 - RNA, 23 nt, Artificial Sequence
  Chemically synthesized
cucuucaagcuuuugggcuauga

SEQ ID NO: 38114 - RNA, 23 nt, Artificial Sequence
  Chemically synthesized
ccucuucaagcuuuugggcuaug

SEQ ID NO: 38115 - RNA, 23 nt, Artificial Sequence
  Chemically synthesized
cagcuggcauauagguugcaguc

SEQ ID NO: 38116 - RNA, 23 nt, Artificial Sequence
  Chemically synthesized
uucugugucugucaccacaucuu

SEQ ID NO: 38117 - RNA, 23 nt, Artificial Sequence
  Chemically synthesized
cucuugacucaggugguguccuu

SEQ ID NO: 38118 - RNA, 23 nt, Artificial Sequence
  Chemically synthesized
guucucacauaacagaguaguuu

SEQ ID NO: 38119 - RNA, 23 nt, Artificial Sequence
  Chemically synthesized
uguucucacauaacagaguaguu

SEQ ID NO: 38120 - RNA, 23 nt, Artificial Sequence
  Chemically synthesized
gcuuuacaggaucauguaaaugc

SEQ ID NO: 38121 - RNA, 23 nt, Artificial Sequence
  Chemically synthesized
cuagaaaagcuuccuagcuuauc

SEQ ID NO: 38122 - RNA, 23 nt, Artificial Sequence
  Chemically synthesized
ugagaguuuggaagguguccaaa

SEQ ID NO: 38123 - RNA, 23 nt, Artificial Sequence
  Chemically synthesized
gccuuugaucuucaggaugcacg

SEQ ID NO: 38124 - RNA, 23 nt, Artificial Sequence
  Chemically synthesized
ucagcucuuugacaacgccaacu

SEQ ID NO: 38125 - RNA, 23 nt, Artificial Sequence
  Chemically synthesized
uccaagagguuuuucagcucuuu

SEQ ID NO: 38126 - RNA, 23 nt, Artificial Sequence
  Chemically synthesized
aaacugcagaauuuugcacaguu

SEQ ID NO: 38127 - RNA, 23 nt, Artificial Sequence
  Chemically synthesized
cccucuucaagcuuuugggcuau

SEQ ID NO: 38128 - RNA, 23 nt, Artificial Sequence
  Chemically synthesized
gaccacaguacucuagucacccu

SEQ ID NO: 38129 - RNA, 23 nt, Artificial Sequence
  Chemically synthesized
agaacuggaauuucgcucuggag

SEQ ID NO: 38130 - RNA, 23 nt, Artificial Sequence
  Chemically synthesized
caaugugcacuucacuggagaga

SEQ ID NO: 38131 - RNA, 23 nt, Artificial Sequence
  Chemically synthesized
gcaaugugcacuucacuggagag

SEQ ID NO: 38132 - RNA, 23 nt, Artificial Sequence
  Chemically synthesized
gagcaaugugcacuucacuggag

SEQ ID NO: 38133 - RNA, 23 nt, Artificial Sequence
  Chemically synthesized
ugguguugagcaaugugcacuuc

SEQ ID NO: 38134 - RNA, 23 nt, Artificial Sequence
  Chemically synthesized
ugagagagagaaccuuuccacuc

SEQ ID NO: 38135 - RNA, 23 nt, Artificial Sequence
  Chemically synthesized
gggaagaaggcaagccaaccuua

SEQ ID NO: 38136 - RNA, 23 nt, Artificial Sequence
  Chemically synthesized
ugucugucaccacaucuugucuu

SEQ ID NO: 38137 - RNA, 23 nt, Artificial Sequence
  Chemically synthesized
caagcuuuugaugccuucuguga

SEQ ID NO: 38138 - RNA, 23 nt, Artificial Sequence
  Chemically synthesized
ccauacauguuauuguuuucaac

SEQ ID NO: 38139 - RNA, 23 nt, Artificial Sequence
  Chemically synthesized
agccagaauguggaacuccucaa

SEQ ID NO: 38140 - RNA, 23 nt, Artificial Sequence
  Chemically synthesized
agauuucuagaaaagcuuccuag

SEQ ID NO: 38141 - RNA, 23 nt, Artificial Sequence
  Chemically synthesized
gaguguguggcaugcauccucau

SEQ ID NO: 38142 - RNA, 23 nt, Artificial Sequence
  Chemically synthesized
agaugucugagagaccaucuccu

SEQ ID NO: 38143 - RNA, 23 nt, Artificial Sequence
  Chemically synthesized
aacaccaaacgagguuccuggua

SEQ ID NO: 38144 - RNA, 23 nt, Artificial Sequence
  Chemically synthesized
caaaaauguucuucauccaggcc

SEQ ID NO: 38145 - RNA, 23 nt, Artificial Sequence
  Chemically synthesized
gaaagaacuggaauuucgcucug

SEQ ID NO: 38146 - RNA, 23 nt, Artificial Sequence
  Chemically synthesized
cugguguugagcaaugugcacuu

SEQ ID NO: 38147 - RNA, 23 nt, Artificial Sequence
  Chemically synthesized
uguuugggugguuugugagccuu

SEQ ID NO: 38148 - RNA, 23 nt, Artificial Sequence
  Chemically synthesized
cuacuuuuacuuguucauuucug

SEQ ID NO: 38149 - RNA, 23 nt, Artificial Sequence
  Chemically synthesized
uagauuucuagaaaagcuuccua

SEQ ID NO: 38150 - RNA, 23 nt, Artificial Sequence
  Chemically synthesized
ucaccuuggaaaugagggagcuc

SEQ ID NO: 38151 - RNA, 23 nt, Artificial Sequence
  Chemically synthesized
ucuuucguugguuguuucucuga

SEQ ID NO: 38152 - RNA, 23 nt, Artificial Sequence
  Chemically synthesized
ucuuuuggcucugaagaagcaaa

SEQ ID NO: 38153 - RNA, 23 nt, Artificial Sequence
  Chemically synthesized
uggaccacaggaggugugauaga

SEQ ID NO: 38154 - RNA, 23 nt, Artificial Sequence
  Chemically synthesized
ggguugaccaacaagauggaaag

SEQ ID NO: 38155 - RNA, 23 nt, Artificial Sequence
  Chemically synthesized
agaaccgaguggugcuagccaaa

SEQ ID NO: 38156 - RNA, 23 nt, Artificial Sequence
  Chemically synthesized
gccuagcacugguguugagcaau

SEQ ID NO: 38157 - RNA, 23 nt, Artificial Sequence
  Chemically synthesized
agaaggcaagccaaccuuagcua

SEQ ID NO: 38158 - RNA, 23 nt, Artificial Sequence
  Chemically synthesized
gaauccugcuuuacaggaucaug

SEQ ID NO: 38159 - RNA, 23 nt, Artificial Sequence
  Chemically synthesized
gucuagaauccugcuuuacagga

SEQ ID NO: 38160 - RNA, 23 nt, Artificial Sequence
  Chemically synthesized
caccuuggaaaugagggagcuca

SEQ ID NO: 38161 - RNA, 23 nt, Artificial Sequence
  Chemically synthesized
ucaguuccagcuuuuguagaugg

SEQ ID NO: 38162 - RNA, 23 nt, Artificial Sequence
  Chemically synthesized
cugguuaaggugaacgcacuuau

SEQ ID NO: 38163 - RNA, 23 nt, Artificial Sequence
  Chemically synthesized
ugcugguuaaggugaacgcacuu

SEQ ID NO: 38164 - RNA, 23 nt, Artificial Sequence
  Chemically synthesized
ccuagcacugguguugagcaaug

SEQ ID NO: 38165 - RNA, 23 nt, Artificial Sequence
  Chemically synthesized
ugaauuuuaucaaacacacuucc

SEQ ID NO: 38166 - RNA, 23 nt, Artificial Sequence
  Chemically synthesized
ccaucgggugccaaauaaaugcu

SEQ ID NO: 38167 - RNA, 23 nt, Artificial Sequence
  Chemically synthesized
uuguauugccaucgggugccaaa

SEQ ID NO: 38168 - RNA, 23 nt, Artificial Sequence
  Chemically synthesized
guauuugagagagagaaccuuuc

SEQ ID NO: 38169 - RNA, 23 nt, Artificial Sequence
  Chemically synthesized
aaguccugccuuugggucgacau

SEQ ID NO: 38170 - RNA, 23 nt, Artificial Sequence
  Chemically synthesized
uccacuggcauuuuuagcuccuu

SEQ ID NO: 38171 - RNA, 23 nt, Artificial Sequence
  Chemically synthesized
cauguaccaagugcuuggcacau

SEQ ID NO: 38172 - RNA, 23 nt, Artificial Sequence
  Chemically synthesized
acuuuuacuuguucauuucuguc

SEQ ID NO: 38173 - RNA, 23 nt, Artificial Sequence
  Chemically synthesized
cuacuucugugucugucaccaca

SEQ ID NO: 38174 - RNA, 23 nt, Artificial Sequence
  Chemically synthesized
accuggccaggauuugguuguuu

SEQ ID NO: 38175 - RNA, 23 nt, Artificial Sequence
  Chemically synthesized
ccuuggaaaugagggagcucauc

SEQ ID NO: 38176 - RNA, 23 nt, Artificial Sequence
  Chemically synthesized
accuuggaaaugagggagcucau

SEQ ID NO: 38177 - RNA, 23 nt, Artificial Sequence
  Chemically synthesized
aucgaggcucuugcucaaguguu

SEQ ID NO: 38178 - RNA, 23 nt, Artificial Sequence
  Chemically synthesized
cagaacaaaccaaaaauguucuu

SEQ ID NO: 38179 - RNA, 23 nt, Artificial Sequence
  Chemically synthesized
guguugagcaaugugcacuucac

SEQ ID NO: 38180 - RNA, 23 nt, Artificial Sequence
  Chemically synthesized
uccacucccacugccaggauuuu

SEQ ID NO: 38181 - RNA, 23 nt, Artificial Sequence
  Chemically synthesized
gcaagccaaccuuagcuacaauc

SEQ ID NO: 38182 - RNA, 23 nt, Artificial Sequence
  Chemically synthesized
cuuuuacuuguucauuucugucu

SEQ ID NO: 38183 - RNA, 23 nt, Artificial Sequence
  Chemically synthesized
ucucacauaacagaguaguuuug

SEQ ID NO: 38184 - RNA, 23 nt, Artificial Sequence
  Chemically synthesized
cuauugccaggaauguuucagcu

SEQ ID NO: 38185 - RNA, 23 nt, Artificial Sequence
  Chemically synthesized
gcuagccaaacagcuguuguuga

SEQ ID NO: 38186 - RNA, 23 nt, Artificial Sequence
  Chemically synthesized
aucucccauggucccuagcaaaa

SEQ ID NO: 38187 - RNA, 23 nt, Artificial Sequence
  Chemically synthesized
ucauuucauccuguuggcugcug

SEQ ID NO: 38188 - RNA, 23 nt, Artificial Sequence
  Chemically synthesized
ggagaaggacaucaucaccuugg

SEQ ID NO: 38189 - RNA, 23 nt, Artificial Sequence
  Chemically synthesized
agacuuguuuccugugcccauca

SEQ ID NO: 38190 - RNA, 23 nt, Artificial Sequence
  Chemically synthesized
gcacugguguugagcaaugugca

SEQ ID NO: 38191 - RNA, 23 nt, Artificial Sequence
  Chemically synthesized
uugccaucgggugccaaauaaau

SEQ ID NO: 38192 - RNA, 23 nt, Artificial Sequence
  Chemically synthesized
ccacuggcauuuuuagcuccuug

SEQ ID NO: 38193 - RNA, 23 nt, Artificial Sequence
  Chemically synthesized
gaaggcaagccaaccuuagcuac

SEQ ID NO: 38194 - RNA, 23 nt, Artificial Sequence
  Chemically synthesized
cugugucugucaccacaucuugu

SEQ ID NO: 38195 - RNA, 23 nt, Artificial Sequence
  Chemically synthesized
cugagcagucuacuucugugucu

SEQ ID NO: 38196 - RNA, 23 nt, Artificial Sequence
  Chemically synthesized
gucuuuuuccuuccugagaaacg

SEQ ID NO: 38197 - RNA, 23 nt, Artificial Sequence
  Chemically synthesized
acaucuucuggagaaggacauca

SEQ ID NO: 38198 - RNA, 23 nt, Artificial Sequence
  Chemically synthesized
agggaagaaggcaagccaaccuu

SEQ ID NO: 38199 - RNA, 23 nt, Artificial Sequence
  Chemically synthesized
ccagucuguucucacauaacaga

SEQ ID NO: 38200 - RNA, 23 nt, Artificial Sequence
  Chemically synthesized
uccuccagucuguucucacauaa

SEQ ID NO: 38201 - RNA, 23 nt, Artificial Sequence
  Chemically synthesized
uuccuccagucuguucucacaua

SEQ ID NO: 38202 - RNA, 23 nt, Artificial Sequence
  Chemically synthesized
gcugcaguugaagagccugacaa

SEQ ID NO: 38203 - RNA, 23 nt, Artificial Sequence
  Chemically synthesized
ucagcugcaguugaagagccuga

SEQ ID NO: 38204 - RNA, 23 nt, Artificial Sequence
  Chemically synthesized
agaacaucuucuggagaaggaca

SEQ ID NO: 38205 - RNA, 23 nt, Artificial Sequence
  Chemically synthesized
gcaguugaagagccugacaagug

SEQ ID NO: 38206 - RNA, 23 nt, Artificial Sequence
  Chemically synthesized
agagagaaccuuuccacucccac

SEQ ID NO: 38207 - RNA, 23 nt, Artificial Sequence
  Chemically synthesized
agauaacuuccuucacaucuccc

SEQ ID NO: 38208 - RNA, 23 nt, Artificial Sequence
  Chemically synthesized
guaccaagugcuuggcacauagu

SEQ ID NO: 38209 - RNA, 23 nt, Artificial Sequence
  Chemically synthesized
ccuccagucuguucucacauaac

SEQ ID NO: 38210 - RNA, 23 nt, Artificial Sequence
  Chemically synthesized
uuagaacaucuucuggagaagga

SEQ ID NO: 38211 - RNA, 23 nt, Artificial Sequence
  Chemically synthesized
gagagaaccuuuccacucccacu

SEQ ID NO: 38212 - RNA, 23 nt, Artificial Sequence
  Chemically synthesized
gagagagaaccuuuccacuccca

SEQ ID NO: 38213 - RNA, 23 nt, Artificial Sequence
  Chemically synthesized
agcagucuacuucugugucuguc

SEQ ID NO: 38214 - RNA, 23 nt, Artificial Sequence
  Chemically synthesized
gugcucuuuccugcccuuuuccu

SEQ ID NO: 38215 - RNA, 23 nt, Artificial Sequence
  Chemically synthesized
acugcuccagcuccaagagguuu

SEQ ID NO: 38216 - RNA, 23 nt, Artificial Sequence
  Chemically synthesized
cacuggcauuuuuagcuccuuga

SEQ ID NO: 38217 - RNA, 23 nt, Artificial Sequence
  Chemically synthesized
ggcaagccaaccuuagcuacaau

SEQ ID NO: 38218 - RNA, 23 nt, Artificial Sequence
  Chemically synthesized
gcagucuacuucugugucuguca

SEQ ID NO: 38219 - RNA, 23 nt, Artificial Sequence
  Chemically synthesized
cuccagucuguucucacauaaca

SEQ ID NO: 38220 - RNA, 23 nt, Artificial Sequence
  Chemically synthesized
ugaaacuucccaacuucccuguu

SEQ ID NO: 38221 - RNA, 23 nt, Artificial Sequence
  Chemically synthesized
uguuccugcuuucucuuucagua

SEQ ID NO: 38222 - RNA, 23 nt, Artificial Sequence
  Chemically synthesized
ugucuuuuuccuuccugagaaac

SEQ ID NO: 38223 - RNA, 23 nt, Artificial Sequence
  Chemically synthesized
ugucagccaacauugccuugcau

SEQ ID NO: 38224 - RNA, 23 nt, Artificial Sequence
  Chemically synthesized
ugcaguugaagagccugacaagu

SEQ ID NO: 38225 - RNA, 23 nt, Artificial Sequence
  Chemically synthesized
gccaaacagcuguuguugagcga

SEQ ID NO: 38226 - RNA, 23 nt, Artificial Sequence
  Chemically synthesized
cugcuccagcuccaagagguuuu

SEQ ID NO: 38227 - RNA, 23 nt, Artificial Sequence
  Chemically synthesized
cagucuacuucugugucugucac

SEQ ID NO: 38228 - RNA, 23 nt, Artificial Sequence
  Chemically synthesized
gguacaucgaggcucuugcucaa

SEQ ID NO: 38229 - RNA, 23 nt, Artificial Sequence
  Chemically synthesized
gucuacuucugugucugucacca

SEQ ID NO: 38230 - RNA, 23 nt, Artificial Sequence
  Chemically synthesized
gagcagucuacuucugugucugu

SEQ ID NO: 38231 - RNA, 23 nt, Artificial Sequence
  Chemically synthesized
gucuguucucacauaacagagua

SEQ ID NO: 38232 - RNA, 23 nt, Artificial Sequence
  Chemically synthesized
agcugcaguugaagagccugaca

SEQ ID NO: 38233 - RNA, 23 nt, Artificial Sequence
  Chemically synthesized
ccuucauuucauccuguuggcug

SEQ ID NO: 38234 - RNA, 23 nt, Artificial Sequence
  Chemically synthesized
gccagaauguggaacuccucaac

SEQ ID NO: 38235 - RNA, 23 nt, Artificial Sequence
  Chemically synthesized
agccagaauguggaacuccucaa

SEQ ID NO: 38236 - RNA, 23 nt, Artificial Sequence
  Chemically synthesized
cagccagaauguggaacuccuca

SEQ ID NO: 38237 - RNA, 23 nt, Artificial Sequence
  Chemically synthesized
ucagccagaauguggaacuccuc

SEQ ID NO: 38238 - RNA, 23 nt, Artificial Sequence
  Chemically synthesized
uucagccagaauguggaacuccu

SEQ ID NO: 38239 - RNA, 23 nt, Artificial Sequence
  Chemically synthesized
agguaaagaagggagagauauga

SEQ ID NO: 38240 - RNA, 23 nt, Artificial Sequence
  Chemically synthesized
gguaaagaagggagagauaugaa

SEQ ID NO: 38241 - RNA, 23 nt, Artificial Sequence
  Chemically synthesized
guaaagaagggagagauaugaag

SEQ ID NO: 38242 - RNA, 23 nt, Artificial Sequence
  Chemically synthesized
uaaagaagggagagauaugaagc

SEQ ID NO: 38243 - RNA, 23 nt, Artificial Sequence
  Chemically synthesized
aaagaagggagagauaugaagca

SEQ ID NO: 38244 - RNA, 23 nt, Artificial Sequence
  Chemically synthesized
guggauaaaagcaaaacacaugg

SEQ ID NO: 38245 - RNA, 23 nt, Artificial Sequence
  Chemically synthesized
uggauaaaagcaaaacacaugga

SEQ ID NO: 38246 - RNA, 23 nt, Artificial Sequence
  Chemically synthesized
ggauaaaagcaaaacacauggaa

SEQ ID NO: 38247 - RNA, 23 nt, Artificial Sequence
  Chemically synthesized
gauaaaagcaaaacacauggaaa

SEQ ID NO: 38248 - RNA, 23 nt, Artificial Sequence
  Chemically synthesized
auaaaagcaaaacacauggaaaa

SEQ ID NO: 38249 - RNA, 23 nt, Artificial Sequence
  Chemically synthesized
aagaagggagagauaugaagcag

SEQ ID NO: 38250 - RNA, 23 nt, Artificial Sequence
  Chemically synthesized
agaagggagagauaugaagcagg

SEQ ID NO: 38251 - RNA, 23 nt, Artificial Sequence
  Chemically synthesized
gaagggagagauaugaagcaggg

SEQ ID NO: 38252 - RNA, 23 nt, Artificial Sequence
  Chemically synthesized
aagggagagauaugaagcaggga

SEQ ID NO: 38253 - RNA, 23 nt, Artificial Sequence
  Chemically synthesized
cuagaaaucuagauaugaagugc

SEQ ID NO: 38254 - RNA, 23 nt, Artificial Sequence
  Chemically synthesized
uagaaaucuagauaugaagugca

SEQ ID NO: 38255 - RNA, 23 nt, Artificial Sequence
  Chemically synthesized
agaaaucuagauaugaagugcag

SEQ ID NO: 38256 - RNA, 23 nt, Artificial Sequence
  Chemically synthesized
gaaaucuagauaugaagugcagg

SEQ ID NO: 38257 - RNA, 23 nt, Artificial Sequence
  Chemically synthesized
aaaucuagauaugaagugcaggu

SEQ ID NO: 38258 - RNA, 23 nt, Artificial Sequence
  Chemically synthesized
ucaauaagguacaaaugcaaggc

SEQ ID NO: 38259 - RNA, 23 nt, Artificial Sequence
  Chemically synthesized
caauaagguacaaaugcaaggca

SEQ ID NO: 38260 - RNA, 23 nt, Artificial Sequence
  Chemically synthesized
aauaagguacaaaugcaaggcaa

SEQ ID NO: 38261 - RNA, 23 nt, Artificial Sequence
  Chemically synthesized
auaagguacaaaugcaaggcaau

SEQ ID NO: 38262 - RNA, 23 nt, Artificial Sequence
  Chemically synthesized
uaagguacaaaugcaaggcaaug

SEQ ID NO: 38263 - RNA, 23 nt, Artificial Sequence
  Chemically synthesized
gaugaaaugaagguaaagaaggg

SEQ ID NO: 38264 - RNA, 23 nt, Artificial Sequence
  Chemically synthesized
augaaaugaagguaaagaaggga

SEQ ID NO: 38265 - RNA, 23 nt, Artificial Sequence
  Chemically synthesized
ugaaaugaagguaaagaagggag

SEQ ID NO: 38266 - RNA, 23 nt, Artificial Sequence
  Chemically synthesized
gaaaugaagguaaagaagggaga

SEQ ID NO: 38267 - RNA, 23 nt, Artificial Sequence
  Chemically synthesized
aaaugaagguaaagaagggagag

SEQ ID NO: 38268 - RNA, 23 nt, Artificial Sequence
  Chemically synthesized
gauaaaauucaggagugcaaggc

SEQ ID NO: 38269 - RNA, 23 nt, Artificial Sequence
  Chemically synthesized
auaaaauucaggagugcaaggcu

SEQ ID NO: 38270 - RNA, 23 nt, Artificial Sequence
  Chemically synthesized
uaaaauucaggagugcaaggcuu

SEQ ID NO: 38271 - RNA, 23 nt, Artificial Sequence
  Chemically synthesized
aaaauucaggagugcaaggcuuc

SEQ ID NO: 38272 - RNA, 23 nt, Artificial Sequence
  Chemically synthesized
aaauucaggagugcaaggcuuca

SEQ ID NO: 38273 - RNA, 23 nt, Artificial Sequence
  Chemically synthesized
aauaucaaaggagaguuuaauac

SEQ ID NO: 38274 - RNA, 23 nt, Artificial Sequence
  Chemically synthesized
auaucaaaggagaguuuaauacu

SEQ ID NO: 38275 - RNA, 23 nt, Artificial Sequence
  Chemically synthesized
uaucaaaggagaguuuaauacug

SEQ ID NO: 38276 - RNA, 23 nt, Artificial Sequence
  Chemically synthesized
aucaaaggagaguuuaauacuga

SEQ ID NO: 38277 - RNA, 23 nt, Artificial Sequence
  Chemically synthesized
ucaaaggagaguuuaauacugaa

SEQ ID NO: 38278 - RNA, 23 nt, Artificial Sequence
  Chemically synthesized
aucaauaagguacaaaugcaagg

SEQ ID NO: 38279 - RNA, 23 nt, Artificial Sequence
  Chemically synthesized
augaaauaaaagauaggagaugg

SEQ ID NO: 38280 - RNA, 23 nt, Artificial Sequence
  Chemically synthesized
ugaaauaaaagauaggagauggu

SEQ ID NO: 38281 - RNA, 23 nt, Artificial Sequence
  Chemically synthesized
gaaauaaaagauaggagaugguc

SEQ ID NO: 38282 - RNA, 23 nt, Artificial Sequence
  Chemically synthesized
aaauaaaagauaggagauggucu

SEQ ID NO: 38283 - RNA, 23 nt, Artificial Sequence
  Chemically synthesized
aauaaaagauaggagauggucuc

SEQ ID NO: 38284 - RNA, 23 nt, Artificial Sequence
  Chemically synthesized
cauuuuugguuuguucuguaggc

SEQ ID NO: 38285 - RNA, 23 nt, Artificial Sequence
  Chemically synthesized
auuuuugguuuguucuguaggcu

SEQ ID NO: 38286 - RNA, 23 nt, Artificial Sequence
  Chemically synthesized
uuuuugguuuguucuguaggcuu

SEQ ID NO: 38287 - RNA, 23 nt, Artificial Sequence
  Chemically synthesized
uuuugguuuguucuguaggcuug

SEQ ID NO: 38288 - RNA, 23 nt, Artificial Sequence
  Chemically synthesized
uuugguuuguucuguaggcuugg

SEQ ID NO: 38289 - RNA, 23 nt, Artificial Sequence
  Chemically synthesized
aaugaagguaaagaagggagaga

SEQ ID NO: 38290 - RNA, 23 nt, Artificial Sequence
  Chemically synthesized
agggagagauaugaagcagggag

SEQ ID NO: 38291 - RNA, 23 nt, Artificial Sequence
  Chemically synthesized
ggaauaguaagggagagagaugg

SEQ ID NO: 38292 - RNA, 23 nt, Artificial Sequence
  Chemically synthesized
gaauaguaagggagagagaugga

SEQ ID NO: 38293 - RNA, 23 nt, Artificial Sequence
  Chemically synthesized
aauaguaagggagagagauggac

SEQ ID NO: 38294 - RNA, 23 nt, Artificial Sequence
  Chemically synthesized
auaguaagggagagagauggacg

SEQ ID NO: 38295 - RNA, 23 nt, Artificial Sequence
  Chemically synthesized
uaguaagggagagagauggacgu

SEQ ID NO: 38296 - RNA, 23 nt, Artificial Sequence
  Chemically synthesized
cuacuacaggccuagcauuuugc

SEQ ID NO: 38297 - RNA, 23 nt, Artificial Sequence
  Chemically synthesized
uacuacaggccuagcauuuugcu

SEQ ID NO: 38298 - RNA, 23 nt, Artificial Sequence
  Chemically synthesized
acuacaggccuagcauuuugcua

SEQ ID NO: 38299 - RNA, 23 nt, Artificial Sequence
  Chemically synthesized
cuacaggccuagcauuuugcuag

SEQ ID NO: 38300 - RNA, 23 nt, Artificial Sequence
  Chemically synthesized
uacaggccuagcauuuugcuagg

SEQ ID NO: 38301 - RNA, 23 nt, Artificial Sequence
  Chemically synthesized
aauaaaacaaacaagguuucugc

SEQ ID NO: 38302 - RNA, 23 nt, Artificial Sequence
  Chemically synthesized
auaaaacaaacaagguuucugcc

SEQ ID NO: 38303 - RNA, 23 nt, Artificial Sequence
  Chemically synthesized
uaaaacaaacaagguuucugccc

SEQ ID NO: 38304 - RNA, 23 nt, Artificial Sequence
  Chemically synthesized
aaaacaaacaagguuucugcccu

SEQ ID NO: 38305 - RNA, 23 nt, Artificial Sequence
  Chemically synthesized
aaacaaacaagguuucugcccuc

SEQ ID NO: 38306 - RNA, 23 nt, Artificial Sequence
  Chemically synthesized
caagaaaucaccauuuaaugagg

SEQ ID NO: 38307 - RNA, 23 nt, Artificial Sequence
  Chemically synthesized
aagaaaucaccauuuaaugaggu

SEQ ID NO: 38308 - RNA, 23 nt, Artificial Sequence
  Chemically synthesized
agaaaucaccauuuaaugagguu

SEQ ID NO: 38309 - RNA, 23 nt, Artificial Sequence
  Chemically synthesized
gaaaucaccauuuaaugagguuc

SEQ ID NO: 38310 - RNA, 23 nt, Artificial Sequence
  Chemically synthesized
aaaucaccauuuaaugagguuca

SEQ ID NO: 38311 - RNA, 23 nt, Artificial Sequence
  Chemically synthesized
gggagagauaugaagcagggaga

SEQ ID NO: 38312 - RNA, 23 nt, Artificial Sequence
  Chemically synthesized
ggagagauaugaagcagggagau

SEQ ID NO: 38313 - RNA, 23 nt, Artificial Sequence
  Chemically synthesized
gagagauaugaagcagggagaua

SEQ ID NO: 38314 - RNA, 23 nt, Artificial Sequence
  Chemically synthesized
agagauaugaagcagggagauaa

SEQ ID NO: 38315 - RNA, 23 nt, Artificial Sequence
  Chemically synthesized
aaagaucaauaagguacaaaugc

SEQ ID NO: 38316 - RNA, 23 nt, Artificial Sequence
  Chemically synthesized
aagaucaauaagguacaaaugca

SEQ ID NO: 38317 - RNA, 23 nt, Artificial Sequence
  Chemically synthesized
agaucaauaagguacaaaugcaa

SEQ ID NO: 38318 - RNA, 23 nt, Artificial Sequence
  Chemically synthesized
gaucaauaagguacaaaugcaag

SEQ ID NO: 38319 - RNA, 23 nt, Artificial Sequence
  Chemically synthesized
ucaaauacuuccauacuaugucg

SEQ ID NO: 38320 - RNA, 23 nt, Artificial Sequence
  Chemically synthesized
caaauacuuccauacuaugucga

SEQ ID NO: 38321 - RNA, 23 nt, Artificial Sequence
  Chemically synthesized
aaauacuuccauacuaugucgac

SEQ ID NO: 38322 - RNA, 23 nt, Artificial Sequence
  Chemically synthesized
aauacuuccauacuaugucgacc

SEQ ID NO: 38323 - RNA, 23 nt, Artificial Sequence
  Chemically synthesized
auacuuccauacuaugucgaccc

SEQ ID NO: 38324 - RNA, 23 nt, Artificial Sequence
  Chemically synthesized
caacaaacauuuaaugaaggccc

SEQ ID NO: 38325 - RNA, 23 nt, Artificial Sequence
  Chemically synthesized
aacaaacauuuaaugaaggccca

SEQ ID NO: 38326 - RNA, 23 nt, Artificial Sequence
  Chemically synthesized
acaaacauuuaaugaaggcccac

SEQ ID NO: 38327 - RNA, 23 nt, Artificial Sequence
  Chemically synthesized
caaacauuuaaugaaggcccacu

SEQ ID NO: 38328 - RNA, 23 nt, Artificial Sequence
  Chemically synthesized
aaacauuuaaugaaggcccacua

SEQ ID NO: 38329 - RNA, 23 nt, Artificial Sequence
  Chemically synthesized
agaaaugaacaaguaaaaguagc

SEQ ID NO: 38330 - RNA, 23 nt, Artificial Sequence
  Chemically synthesized
gaaaugaacaaguaaaaguagca

SEQ ID NO: 38331 - RNA, 23 nt, Artificial Sequence
  Chemically synthesized
aaaugaacaaguaaaaguagcau

SEQ ID NO: 38332 - RNA, 23 nt, Artificial Sequence
  Chemically synthesized
aaugaacaaguaaaaguagcaua

SEQ ID NO: 38333 - RNA, 23 nt, Artificial Sequence
  Chemically synthesized
augaacaaguaaaaguagcauau

SEQ ID NO: 38334 - RNA, 23 nt, Artificial Sequence
  Chemically synthesized
caccauuuaaugagguucaaggg

SEQ ID NO: 38335 - RNA, 23 nt, Artificial Sequence
  Chemically synthesized
accauuuaaugagguucaagggg

SEQ ID NO: 38336 - RNA, 23 nt, Artificial Sequence
  Chemically synthesized
ccauuuaaugagguucaagggga

SEQ ID NO: 38337 - RNA, 23 nt, Artificial Sequence
  Chemically synthesized
cauuuaaugagguucaaggggaa

SEQ ID NO: 38338 - RNA, 23 nt, Artificial Sequence
  Chemically synthesized
auuuaaugagguucaaggggaag

SEQ ID NO: 38339 - RNA, 23 nt, Artificial Sequence
  Chemically synthesized
ccucuuaggcagcaaguugagga

SEQ ID NO: 38340 - RNA, 23 nt, Artificial Sequence
  Chemically synthesized
cucuuaggcagcaaguugaggag

SEQ ID NO: 38341 - RNA, 23 nt, Artificial Sequence
  Chemically synthesized
ucuuaggcagcaaguugaggagu

SEQ ID NO: 38342 - RNA, 23 nt, Artificial Sequence
  Chemically synthesized
cuuaggcagcaaguugaggaguu

SEQ ID NO: 38343 - RNA, 23 nt, Artificial Sequence
  Chemically synthesized
uuaggcagcaaguugaggaguuc

SEQ ID NO: 38344 - RNA, 23 nt, Artificial Sequence
  Chemically synthesized
aucuuugagcauuuacaugaucc

SEQ ID NO: 38345 - RNA, 23 nt, Artificial Sequence
  Chemically synthesized
ucuuugagcauuuacaugauccu

SEQ ID NO: 38346 - RNA, 23 nt, Artificial Sequence
  Chemically synthesized
cuuugagcauuuacaugauccug

SEQ ID NO: 38347 - RNA, 23 nt, Artificial Sequence
  Chemically synthesized
uuugagcauuuacaugauccugu

SEQ ID NO: 38348 - RNA, 23 nt, Artificial Sequence
  Chemically synthesized
uugagcauuuacaugauccugua

SEQ ID NO: 38349 - RNA, 23 nt, Artificial Sequence
  Chemically synthesized
agauaugaagugcagguugauug

SEQ ID NO: 38350 - RNA, 23 nt, Artificial Sequence
  Chemically synthesized
gauaugaagugcagguugauuga

SEQ ID NO: 38351 - RNA, 23 nt, Artificial Sequence
  Chemically synthesized
auaugaagugcagguugauugaa

SEQ ID NO: 38352 - RNA, 23 nt, Artificial Sequence
  Chemically synthesized
uaugaagugcagguugauugaau

SEQ ID NO: 38353 - RNA, 23 nt, Artificial Sequence
  Chemically synthesized
augaagugcagguugauugaaug

SEQ ID NO: 38354 - RNA, 23 nt, Artificial Sequence
  Chemically synthesized
ccagaagauguucuaacaauucg

SEQ ID NO: 38355 - RNA, 23 nt, Artificial Sequence
  Chemically synthesized
cagaagauguucuaacaauucgc

SEQ ID NO: 38356 - RNA, 23 nt, Artificial Sequence
  Chemically synthesized
agaagauguucuaacaauucgcu

SEQ ID NO: 38357 - RNA, 23 nt, Artificial Sequence
  Chemically synthesized
gaagauguucuaacaauucgcuc

SEQ ID NO: 38358 - RNA, 23 nt, Artificial Sequence
  Chemically synthesized
aagauguucuaacaauucgcuca

SEQ ID NO: 38359 - RNA, 23 nt, Artificial Sequence
  Chemically synthesized
ggagaugugaaggaaguuaucuc

SEQ ID NO: 38360 - RNA, 23 nt, Artificial Sequence
  Chemically synthesized
gagaugugaaggaaguuaucuca

SEQ ID NO: 38361 - RNA, 23 nt, Artificial Sequence
  Chemically synthesized
agaugugaaggaaguuaucucac

SEQ ID NO: 38362 - RNA, 23 nt, Artificial Sequence
  Chemically synthesized
gaugugaaggaaguuaucucaca

SEQ ID NO: 38363 - RNA, 23 nt, Artificial Sequence
  Chemically synthesized
augugaaggaaguuaucucacac

SEQ ID NO: 38364 - RNA, 23 nt, Artificial Sequence
  Chemically synthesized
ugugaaggaaguuaucucacaca

SEQ ID NO: 38365 - RNA, 23 nt, Artificial Sequence
  Chemically synthesized
uaaaagcaaaacacauggaaaaa

SEQ ID NO: 38366 - RNA, 23 nt, Artificial Sequence
  Chemically synthesized
gcaagaaaucaccauuuaaugag

SEQ ID NO: 38367 - RNA, 23 nt, Artificial Sequence
  Chemically synthesized
agggguaauagaaagcagaaggg

SEQ ID NO: 38368 - RNA, 23 nt, Artificial Sequence
  Chemically synthesized
gggguaauagaaagcagaagggu

SEQ ID NO: 38369 - RNA, 23 nt, Artificial Sequence
  Chemically synthesized
ggguaauagaaagcagaaggguu

SEQ ID NO: 38370 - RNA, 23 nt, Artificial Sequence
  Chemically synthesized
gguaauagaaagcagaaggguuc

SEQ ID NO: 38371 - RNA, 23 nt, Artificial Sequence
  Chemically synthesized
guaauagaaagcagaaggguucu

SEQ ID NO: 38372 - RNA, 23 nt, Artificial Sequence
  Chemically synthesized
uaggcagcaaguugaggaguucc

SEQ ID NO: 38373 - RNA, 23 nt, Artificial Sequence
  Chemically synthesized
cagauaagcagggauaaagguuu

SEQ ID NO: 38374 - RNA, 23 nt, Artificial Sequence
  Chemically synthesized
agauaagcagggauaaagguuuc

SEQ ID NO: 38375 - RNA, 23 nt, Artificial Sequence
  Chemically synthesized
gauaagcagggauaaagguuucu

SEQ ID NO: 38376 - RNA, 23 nt, Artificial Sequence
  Chemically synthesized
auaagcagggauaaagguuucua

SEQ ID NO: 38377 - RNA, 23 nt, Artificial Sequence
  Chemically synthesized
uaagcagggauaaagguuucuag

SEQ ID NO: 38378 - RNA, 23 nt, Artificial Sequence
  Chemically synthesized
auguauggcacugaaauaaaagc

SEQ ID NO: 38379 - RNA, 23 nt, Artificial Sequence
  Chemically synthesized
uguauggcacugaaauaaaagcc

SEQ ID NO: 38380 - RNA, 23 nt, Artificial Sequence
  Chemically synthesized
guauggcacugaaauaaaagcca

SEQ ID NO: 38381 - RNA, 23 nt, Artificial Sequence
  Chemically synthesized
uauggcacugaaauaaaagccac

SEQ ID NO: 38382 - RNA, 23 nt, Artificial Sequence
  Chemically synthesized
auggcacugaaauaaaagccaca

SEQ ID NO: 38383 - RNA, 23 nt, Artificial Sequence
  Chemically synthesized
augaagguaaagaagggagagau

SEQ ID NO: 38384 - RNA, 23 nt, Artificial Sequence
  Chemically synthesized
ugaagguaaagaagggagagaua

SEQ ID NO: 38385 - RNA, 23 nt, Artificial Sequence
  Chemically synthesized
gaagguaaagaagggagagauau

SEQ ID NO: 38386 - RNA, 23 nt, Artificial Sequence
  Chemically synthesized
aagguaaagaagggagagauaug

SEQ ID NO: 38387 - RNA, 23 nt, Artificial Sequence
  Chemically synthesized
gagauaugaagcagggagauaag

SEQ ID NO: 38388 - RNA, 23 nt, Artificial Sequence
  Chemically synthesized
agauaugaagcagggagauaagc

SEQ ID NO: 38389 - RNA, 23 nt, Artificial Sequence
  Chemically synthesized
gauaugaagcagggagauaagcu

SEQ ID NO: 38390 - RNA, 23 nt, Artificial Sequence
  Chemically synthesized
auaugaagcagggagauaagcua

SEQ ID NO: 38391 - RNA, 23 nt, Artificial Sequence
  Chemically synthesized
aaagaucuuugagacuuccaugg

SEQ ID NO: 38392 - RNA, 23 nt, Artificial Sequence
  Chemically synthesized
aagaucuuugagacuuccauggg

SEQ ID NO: 38393 - RNA, 23 nt, Artificial Sequence
  Chemically synthesized
agaucuuugagacuuccaugggc

SEQ ID NO: 38394 - RNA, 23 nt, Artificial Sequence
  Chemically synthesized
gaucuuugagacuuccaugggca

SEQ ID NO: 38395 - RNA, 23 nt, Artificial Sequence
  Chemically synthesized
aucuuugagacuuccaugggcaa

SEQ ID NO: 38396 - RNA, 23 nt, Artificial Sequence
  Chemically synthesized
aagguacaaaugcaaggcaaugu

SEQ ID NO: 38397 - RNA, 23 nt, Artificial Sequence
  Chemically synthesized
ucacucuaggacaaaaagggcgg

SEQ ID NO: 38398 - RNA, 23 nt, Artificial Sequence
  Chemically synthesized
cacucuaggacaaaaagggcgga

SEQ ID NO: 38399 - RNA, 23 nt, Artificial Sequence
  Chemically synthesized
acucuaggacaaaaagggcggag

SEQ ID NO: 38400 - RNA, 23 nt, Artificial Sequence
  Chemically synthesized
cucuaggacaaaaagggcggagg

SEQ ID NO: 38401 - RNA, 23 nt, Artificial Sequence
  Chemically synthesized
ucuaggacaaaaagggcggagga

SEQ ID NO: 38402 - RNA, 23 nt, Artificial Sequence
  Chemically synthesized
gcaguauucagacaucuccuugc

SEQ ID NO: 38403 - RNA, 23 nt, Artificial Sequence
  Chemically synthesized
caguauucagacaucuccuugca

SEQ ID NO: 38404 - RNA, 23 nt, Artificial Sequence
  Chemically synthesized
aguauucagacaucuccuugcac

SEQ ID NO: 38405 - RNA, 23 nt, Artificial Sequence
  Chemically synthesized
guauucagacaucuccuugcacc

SEQ ID NO: 38406 - RNA, 23 nt, Artificial Sequence
  Chemically synthesized
uauucagacaucuccuugcaccg

SEQ ID NO: 38407 - RNA, 23 nt, Artificial Sequence
  Chemically synthesized
uuugauaaaauucaggagugcaa

SEQ ID NO: 38408 - RNA, 23 nt, Artificial Sequence
  Chemically synthesized
uugauaaaauucaggagugcaag

SEQ ID NO: 38409 - RNA, 23 nt, Artificial Sequence
  Chemically synthesized
ugauaaaauucaggagugcaagg

SEQ ID NO: 38410 - RNA, 23 nt, Artificial Sequence
  Chemically synthesized
uacuuccauacuaugucgaccca

SEQ ID NO: 38411 - RNA, 23 nt, Artificial Sequence
  Chemically synthesized
acuuccauacuaugucgacccaa

SEQ ID NO: 38412 - RNA, 23 nt, Artificial Sequence
  Chemically synthesized
cuuccauacuaugucgacccaaa

SEQ ID NO: 38413 - RNA, 23 nt, Artificial Sequence
  Chemically synthesized
uuccauacuaugucgacccaaag

SEQ ID NO: 38414 - RNA, 23 nt, Artificial Sequence
  Chemically synthesized
ugucuucaaggagcuaaaaaugc

SEQ ID NO: 38415 - RNA, 23 nt, Artificial Sequence
  Chemically synthesized
gucuucaaggagcuaaaaaugcc

SEQ ID NO: 38416 - RNA, 23 nt, Artificial Sequence
  Chemically synthesized
ucuucaaggagcuaaaaaugcca

SEQ ID NO: 38417 - RNA, 23 nt, Artificial Sequence
  Chemically synthesized
cuucaaggagcuaaaaaugccag

SEQ ID NO: 38418 - RNA, 23 nt, Artificial Sequence
  Chemically synthesized
uucaaggagcuaaaaaugccagu

SEQ ID NO: 38419 - RNA, 23 nt, Artificial Sequence
  Chemically synthesized
aaacacauggaaaaacaaaguac

SEQ ID NO: 38420 - RNA, 23 nt, Artificial Sequence
  Chemically synthesized
aacacauggaaaaacaaaguaca

SEQ ID NO: 38421 - RNA, 23 nt, Artificial Sequence
  Chemically synthesized
acacauggaaaaacaaaguacaa

SEQ ID NO: 38422 - RNA, 23 nt, Artificial Sequence
  Chemically synthesized
cacauggaaaaacaaaguacaaa

SEQ ID NO: 38423 - RNA, 23 nt, Artificial Sequence
  Chemically synthesized
acauggaaaaacaaaguacaaau

SEQ ID NO: 38424 - RNA, 23 nt, Artificial Sequence
  Chemically synthesized
auaauaauccguguauauuguca

SEQ ID NO: 38425 - RNA, 23 nt, Artificial Sequence
  Chemically synthesized
uaauaauccguguauauugucaa

SEQ ID NO: 38426 - RNA, 23 nt, Artificial Sequence
  Chemically synthesized
aauaauccguguauauugucaaa

SEQ ID NO: 38427 - RNA, 23 nt, Artificial Sequence
  Chemically synthesized
auaauccguguauauugucaaaa

SEQ ID NO: 38428 - RNA, 23 nt, Artificial Sequence
  Chemically synthesized
uaauccguguauauugucaaaag

SEQ ID NO: 38429 - RNA, 23 nt, Artificial Sequence
  Chemically synthesized
uucaacaaacauuuaaugaaggc

SEQ ID NO: 38430 - RNA, 23 nt, Artificial Sequence
  Chemically synthesized
ucaacaaacauuuaaugaaggcc

SEQ ID NO: 38431 - RNA, 23 nt, Artificial Sequence
  Chemically synthesized
gcacaaaauuagaagcugagagg

SEQ ID NO: 38432 - RNA, 23 nt, Artificial Sequence
  Chemically synthesized
cacaaaauuagaagcugagagga

SEQ ID NO: 38433 - RNA, 23 nt, Artificial Sequence
  Chemically synthesized
acaaaauuagaagcugagaggag

SEQ ID NO: 38434 - RNA, 23 nt, Artificial Sequence
  Chemically synthesized
caaaauuagaagcugagaggaga

SEQ ID NO: 38435 - RNA, 23 nt, Artificial Sequence
  Chemically synthesized
aaaauuagaagcugagaggagac

SEQ ID NO: 38436 - RNA, 23 nt, Artificial Sequence
  Chemically synthesized
uaaaagccacauaauaucaaagg

SEQ ID NO: 38437 - RNA, 23 nt, Artificial Sequence
  Chemically synthesized
aaaagccacauaauaucaaagga

SEQ ID NO: 38438 - RNA, 23 nt, Artificial Sequence
  Chemically synthesized
aaagccacauaauaucaaaggag

SEQ ID NO: 38439 - RNA, 23 nt, Artificial Sequence
  Chemically synthesized
aagccacauaauaucaaaggaga

SEQ ID NO: 38440 - RNA, 23 nt, Artificial Sequence
  Chemically synthesized
agccacauaauaucaaaggagag

SEQ ID NO: 38441 - RNA, 23 nt, Artificial Sequence
  Chemically synthesized
gccacauaauaucaaaggagagu

SEQ ID NO: 38442 - RNA, 23 nt, Artificial Sequence
  Chemically synthesized
ccacauaauaucaaaggagaguu

SEQ ID NO: 38443 - RNA, 23 nt, Artificial Sequence
  Chemically synthesized
cacauaauaucaaaggagaguuu

SEQ ID NO: 38444 - RNA, 23 nt, Artificial Sequence
  Chemically synthesized
acauaauaucaaaggagaguuua

SEQ ID NO: 38445 - RNA, 23 nt, Artificial Sequence
  Chemically synthesized
cauaauaucaaaggagaguuuaa

SEQ ID NO: 38446 - RNA, 23 nt, Artificial Sequence
  Chemically synthesized
aaucuagauaugaagugcagguu

SEQ ID NO: 38447 - RNA, 23 nt, Artificial Sequence
  Chemically synthesized
cagguugauugaaugaaaguggg

SEQ ID NO: 38448 - RNA, 23 nt, Artificial Sequence
  Chemically synthesized
agguugauugaaugaaaguggga

SEQ ID NO: 38449 - RNA, 23 nt, Artificial Sequence
  Chemically synthesized
gguugauugaaugaaagugggaa

SEQ ID NO: 38450 - RNA, 23 nt, Artificial Sequence
  Chemically synthesized
guugauugaaugaaagugggaau

SEQ ID NO: 38451 - RNA, 23 nt, Artificial Sequence
  Chemically synthesized
uugauugaaugaaagugggaaua

SEQ ID NO: 38452 - RNA, 23 nt, Artificial Sequence
  Chemically synthesized
auaaaagauaggagauggucucu

SEQ ID NO: 38453 - RNA, 23 nt, Artificial Sequence
  Chemically synthesized
gcaaaacacauggaaaaacaaag

SEQ ID NO: 38454 - RNA, 23 nt, Artificial Sequence
  Chemically synthesized
caaaacacauggaaaaacaaagu

SEQ ID NO: 38455 - RNA, 23 nt, Artificial Sequence
  Chemically synthesized
aaaacacauggaaaaacaaagua

SEQ ID NO: 38456 - RNA, 23 nt, Artificial Sequence
  Chemically synthesized
gauggugaauaaaacaaacaagg

SEQ ID NO: 38457 - RNA, 23 nt, Artificial Sequence
  Chemically synthesized
auggugaauaaaacaaacaaggu

SEQ ID NO: 38458 - RNA, 23 nt, Artificial Sequence
  Chemically synthesized
uggugaauaaaacaaacaagguu

SEQ ID NO: 38459 - RNA, 23 nt, Artificial Sequence
  Chemically synthesized
ggugaauaaaacaaacaagguuu

SEQ ID NO: 38460 - RNA, 23 nt, Artificial Sequence
  Chemically synthesized
gugaauaaaacaaacaagguuuc

SEQ ID NO: 38461 - RNA, 23 nt, Artificial Sequence
  Chemically synthesized
accccucuuaggcagcaaguuga

SEQ ID NO: 38462 - RNA, 23 nt, Artificial Sequence
  Chemically synthesized
ccccucuuaggcagcaaguugag

SEQ ID NO: 38463 - RNA, 23 nt, Artificial Sequence
  Chemically synthesized
cccucuuaggcagcaaguugagg

SEQ ID NO: 38464 - RNA, 23 nt, Artificial Sequence
  Chemically synthesized
agggauaaagguuucuagguuga

SEQ ID NO: 38465 - RNA, 23 nt, Artificial Sequence
  Chemically synthesized
gggauaaagguuucuagguugaa

SEQ ID NO: 38466 - RNA, 23 nt, Artificial Sequence
  Chemically synthesized
ggauaaagguuucuagguugaaa

SEQ ID NO: 38467 - RNA, 23 nt, Artificial Sequence
  Chemically synthesized
gauaaagguuucuagguugaaaa

SEQ ID NO: 38468 - RNA, 23 nt, Artificial Sequence
  Chemically synthesized
auaaagguuucuagguugaaaac

SEQ ID NO: 38469 - RNA, 23 nt, Artificial Sequence
  Chemically synthesized
uacaucuuugagcauuuacauga

SEQ ID NO: 38470 - RNA, 23 nt, Artificial Sequence
  Chemically synthesized
acaucuuugagcauuuacaugau

SEQ ID NO: 38471 - RNA, 23 nt, Artificial Sequence
  Chemically synthesized
caucuuugagcauuuacaugauc

SEQ ID NO: 38472 - RNA, 23 nt, Artificial Sequence
  Chemically synthesized
uaugaagcagggagauaagcuag

SEQ ID NO: 38473 - RNA, 23 nt, Artificial Sequence
  Chemically synthesized
augaagcagggagauaagcuagg

SEQ ID NO: 38474 - RNA, 23 nt, Artificial Sequence
  Chemically synthesized
ucuagaaaucuagauaugaagug

SEQ ID NO: 38475 - RNA, 23 nt, Artificial Sequence
  Chemically synthesized
aucuagauaugaagugcagguug

SEQ ID NO: 38476 - RNA, 23 nt, Artificial Sequence
  Chemically synthesized
gcagguugauugaaugaaagugg

SEQ ID NO: 38477 - RNA, 23 nt, Artificial Sequence
  Chemically synthesized
aaugaaagugggaauaguaaggg

SEQ ID NO: 38478 - RNA, 23 nt, Artificial Sequence
  Chemically synthesized
augaaagugggaauaguaaggga

SEQ ID NO: 38479 - RNA, 23 nt, Artificial Sequence
  Chemically synthesized
ugaaagugggaauaguaagggag

SEQ ID NO: 38480 - RNA, 23 nt, Artificial Sequence
  Chemically synthesized
gaaagugggaauaguaagggaga

SEQ ID NO: 38481 - RNA, 23 nt, Artificial Sequence
  Chemically synthesized
aaagugggaauaguaagggagag

SEQ ID NO: 38482 - RNA, 23 nt, Artificial Sequence
  Chemically synthesized
aguaagggagagagauggacguu

SEQ ID NO: 38483 - RNA, 23 nt, Artificial Sequence
  Chemically synthesized
guaagggagagagauggacguuu

SEQ ID NO: 38484 - RNA, 23 nt, Artificial Sequence
  Chemically synthesized
uaagggagagagauggacguuuc

SEQ ID NO: 38485 - RNA, 23 nt, Artificial Sequence
  Chemically synthesized
aagggagagagauggacguuucu

SEQ ID NO: 38486 - RNA, 23 nt, Artificial Sequence
  Chemically synthesized
ucucuagucauguuugcuucuuc

SEQ ID NO: 38487 - RNA, 23 nt, Artificial Sequence
  Chemically synthesized
cucuagucauguuugcuucuuca

SEQ ID NO: 38488 - RNA, 23 nt, Artificial Sequence
  Chemically synthesized
ucuagucauguuugcuucuucag

SEQ ID NO: 38489 - RNA, 23 nt, Artificial Sequence
  Chemically synthesized
cuagucauguuugcuucuucaga

SEQ ID NO: 38490 - RNA, 23 nt, Artificial Sequence
  Chemically synthesized
uagucauguuugcuucuucagag

SEQ ID NO: 38491 - RNA, 23 nt, Artificial Sequence
  Chemically synthesized
uguguuuacaacuucacuuguca

SEQ ID NO: 38492 - RNA, 23 nt, Artificial Sequence
  Chemically synthesized
guguuuacaacuucacuugucag

SEQ ID NO: 38493 - RNA, 23 nt, Artificial Sequence
  Chemically synthesized
uguuuacaacuucacuugucagg

SEQ ID NO: 38494 - RNA, 23 nt, Artificial Sequence
  Chemically synthesized
guuuacaacuucacuugucaggc

SEQ ID NO: 38495 - RNA, 23 nt, Artificial Sequence
  Chemically synthesized
uuuacaacuucacuugucaggcu

SEQ ID NO: 38496 - RNA, 23 nt, Artificial Sequence
  Chemically synthesized
acucaaaggcagagaugaugggc

SEQ ID NO: 38497 - RNA, 23 nt, Artificial Sequence
  Chemically synthesized
cucaaaggcagagaugaugggca

SEQ ID NO: 38498 - RNA, 23 nt, Artificial Sequence
  Chemically synthesized
ucaaaggcagagaugaugggcac

SEQ ID NO: 38499 - RNA, 23 nt, Artificial Sequence
  Chemically synthesized
caaaggcagagaugaugggcaca

SEQ ID NO: 38500 - RNA, 23 nt, Artificial Sequence
  Chemically synthesized
aaaggcagagaugaugggcacag

SEQ ID NO: 38501 - RNA, 23 nt, Artificial Sequence
  Chemically synthesized
uuucuuuaccggcaucacucucc

SEQ ID NO: 38502 - RNA, 23 nt, Artificial Sequence
  Chemically synthesized
uucuuuaccggcaucacucuccu

SEQ ID NO: 38503 - RNA, 23 nt, Artificial Sequence
  Chemically synthesized
ucuuuaccggcaucacucuccuc

SEQ ID NO: 38504 - RNA, 23 nt, Artificial Sequence
  Chemically synthesized
cuuuaccggcaucacucuccucg

SEQ ID NO: 38505 - RNA, 23 nt, Artificial Sequence
  Chemically synthesized
uuuaccggcaucacucuccucgc

SEQ ID NO: 38506 - RNA, 23 nt, Artificial Sequence
  Chemically synthesized
acauuuuugguuuguucuguagg

SEQ ID NO: 38507 - RNA, 23 nt, Artificial Sequence
  Chemically synthesized
gcaaaauucugcaguuucucuug

SEQ ID NO: 38508 - RNA, 23 nt, Artificial Sequence
  Chemically synthesized
caaaauucugcaguuucucuugc

SEQ ID NO: 38509 - RNA, 23 nt, Artificial Sequence
  Chemically synthesized
aaaauucugcaguuucucuugca

SEQ ID NO: 38510 - RNA, 23 nt, Artificial Sequence
  Chemically synthesized
aaauucugcaguuucucuugcau

SEQ ID NO: 38511 - RNA, 23 nt, Artificial Sequence
  Chemically synthesized
aauucugcaguuucucuugcauu

SEQ ID NO: 38512 - RNA, 23 nt, Artificial Sequence
  Chemically synthesized
caguuucucuugcauuuccugug

SEQ ID NO: 38513 - RNA, 23 nt, Artificial Sequence
  Chemically synthesized
aguuucucuugcauuuccugugc

SEQ ID NO: 38514 - RNA, 23 nt, Artificial Sequence
  Chemically synthesized
guuucucuugcauuuccugugca

SEQ ID NO: 38515 - RNA, 23 nt, Artificial Sequence
  Chemically synthesized
uuucucuugcauuuccugugcag

SEQ ID NO: 38516 - RNA, 23 nt, Artificial Sequence
  Chemically synthesized
uucucuugcauuuccugugcagu

SEQ ID NO: 38517 - RNA, 23 nt, Artificial Sequence
  Chemically synthesized
aaaagcaaaacacauggaaaaac

SEQ ID NO: 38518 - RNA, 23 nt, Artificial Sequence
  Chemically synthesized
ugaacaaguaaaaguagcauaua

SEQ ID NO: 38519 - RNA, 23 nt, Artificial Sequence
  Chemically synthesized
agacuugaggaagaaggacacca

SEQ ID NO: 38520 - RNA, 23 nt, Artificial Sequence
  Chemically synthesized
gacuugaggaagaaggacaccac

SEQ ID NO: 38521 - RNA, 23 nt, Artificial Sequence
  Chemically synthesized
acuugaggaagaaggacaccacc

SEQ ID NO: 38522 - RNA, 23 nt, Artificial Sequence
  Chemically synthesized
cuugaggaagaaggacaccaccu

SEQ ID NO: 38523 - RNA, 23 nt, Artificial Sequence
  Chemically synthesized
uugaggaagaaggacaccaccug

SEQ ID NO: 38524 - RNA, 23 nt, Artificial Sequence
  Chemically synthesized
uaauagaaagcagaaggguucua

SEQ ID NO: 38525 - RNA, 23 nt, Artificial Sequence
  Chemically synthesized
aauagaaagcagaaggguucuaa

SEQ ID NO: 38526 - RNA, 23 nt, Artificial Sequence
  Chemically synthesized
auagaaagcagaaggguucuaag

SEQ ID NO: 38527 - RNA, 23 nt, Artificial Sequence
  Chemically synthesized
uaacauguauggcacugaaauaa

SEQ ID NO: 38528 - RNA, 23 nt, Artificial Sequence
  Chemically synthesized
aacauguauggcacugaaauaaa

SEQ ID NO: 38529 - RNA, 23 nt, Artificial Sequence
  Chemically synthesized
acauguauggcacugaaauaaaa

SEQ ID NO: 38530 - RNA, 23 nt, Artificial Sequence
  Chemically synthesized
cauguauggcacugaaauaaaag

SEQ ID NO: 38531 - RNA, 23 nt, Artificial Sequence
  Chemically synthesized
gaggugguuacagagucuaggga

SEQ ID NO: 38532 - RNA, 23 nt, Artificial Sequence
  Chemically synthesized
aggugguuacagagucuagggaa

SEQ ID NO: 38533 - RNA, 23 nt, Artificial Sequence
  Chemically synthesized
ggugguuacagagucuagggaaa

SEQ ID NO: 38534 - RNA, 23 nt, Artificial Sequence
  Chemically synthesized
gugguuacagagucuagggaaac

SEQ ID NO: 38535 - RNA, 23 nt, Artificial Sequence
  Chemically synthesized
ugguuacagagucuagggaaaca

SEQ ID NO: 38536 - RNA, 23 nt, Artificial Sequence
  Chemically synthesized
aacgaaagaucuuugagacuucc

SEQ ID NO: 38537 - RNA, 23 nt, Artificial Sequence
  Chemically synthesized
acgaaagaucuuugagacuucca

SEQ ID NO: 38538 - RNA, 23 nt, Artificial Sequence
  Chemically synthesized
cgaaagaucuuugagacuuccau

SEQ ID NO: 38539 - RNA, 23 nt, Artificial Sequence
  Chemically synthesized
gaaagaucuuugagacuuccaug

SEQ ID NO: 38540 - RNA, 23 nt, Artificial Sequence
  Chemically synthesized
cuaggacaaaaagggcggaggau

SEQ ID NO: 38541 - RNA, 23 nt, Artificial Sequence
  Chemically synthesized
uaggacaaaaagggcggaggaua

SEQ ID NO: 38542 - RNA, 23 nt, Artificial Sequence
  Chemically synthesized
uggggaauuuauaugcccucucc

SEQ ID NO: 38543 - RNA, 23 nt, Artificial Sequence
  Chemically synthesized
ggggaauuuauaugcccucuccc

SEQ ID NO: 38544 - RNA, 23 nt, Artificial Sequence
  Chemically synthesized
gggaauuuauaugcccucucccc

SEQ ID NO: 38545 - RNA, 23 nt, Artificial Sequence
  Chemically synthesized
ggaauuuauaugcccucucccca

SEQ ID NO: 38546 - RNA, 23 nt, Artificial Sequence
  Chemically synthesized
gaauuuauaugcccucuccccau

SEQ ID NO: 38547 - RNA, 23 nt, Artificial Sequence
  Chemically synthesized
uuacaacuucacuugucaggcuc

SEQ ID NO: 38548 - RNA, 23 nt, Artificial Sequence
  Chemically synthesized
uacaacuucacuugucaggcucu

SEQ ID NO: 38549 - RNA, 23 nt, Artificial Sequence
  Chemically synthesized
cacucaaaggcagagaugauggg

SEQ ID NO: 38550 - RNA, 23 nt, Artificial Sequence
  Chemically synthesized
aggcauagccgcauaucaugucu

SEQ ID NO: 38551 - RNA, 23 nt, Artificial Sequence
  Chemically synthesized
ggcauagccgcauaucaugucug

SEQ ID NO: 38552 - RNA, 23 nt, Artificial Sequence
  Chemically synthesized
gcauagccgcauaucaugucuga

SEQ ID NO: 38553 - RNA, 23 nt, Artificial Sequence
  Chemically synthesized
cauagccgcauaucaugucugag

SEQ ID NO: 38554 - RNA, 23 nt, Artificial Sequence
  Chemically synthesized
auagccgcauaucaugucugagc

SEQ ID NO: 38555 - RNA, 23 nt, Artificial Sequence
  Chemically synthesized
gccacacacucccaauauccugc

SEQ ID NO: 38556 - RNA, 23 nt, Artificial Sequence
  Chemically synthesized
ccacacacucccaauauccugcg

SEQ ID NO: 38557 - RNA, 23 nt, Artificial Sequence
  Chemically synthesized
cacacacucccaauauccugcgu

SEQ ID NO: 38558 - RNA, 23 nt, Artificial Sequence
  Chemically synthesized
acacacucccaauauccugcguc

SEQ ID NO: 38559 - RNA, 23 nt, Artificial Sequence
  Chemically synthesized
cacacucccaauauccugcgucc

SEQ ID NO: 38560 - RNA, 23 nt, Artificial Sequence
  Chemically synthesized
gugcaaaauucugcaguuucucu

SEQ ID NO: 38561 - RNA, 23 nt, Artificial Sequence
  Chemically synthesized
ugcaaaauucugcaguuucucuu

SEQ ID NO: 38562 - RNA, 23 nt, Artificial Sequence
  Chemically synthesized
acacucccaauauccugcguccc

SEQ ID NO: 38563 - RNA, 23 nt, Artificial Sequence
  Chemically synthesized
ggccgagacugcaaccuauaugc

SEQ ID NO: 38564 - RNA, 23 nt, Artificial Sequence
  Chemically synthesized
gccgagacugcaaccuauaugcc

SEQ ID NO: 38565 - RNA, 23 nt, Artificial Sequence
  Chemically synthesized
ccgagacugcaaccuauaugcca

SEQ ID NO: 38566 - RNA, 23 nt, Artificial Sequence
  Chemically synthesized
cgagacugcaaccuauaugccag

SEQ ID NO: 38567 - RNA, 23 nt, Artificial Sequence
  Chemically synthesized
gagacugcaaccuauaugccagc

SEQ ID NO: 38568 - RNA, 23 nt, Artificial Sequence
  Chemically synthesized
aauucaggagugcaaggcuucac

SEQ ID NO: 38569 - RNA, 23 nt, Artificial Sequence
  Chemically synthesized
ccgauggcaauacaaaauccugg

SEQ ID NO: 38570 - RNA, 23 nt, Artificial Sequence
  Chemically synthesized
cgauggcaauacaaaauccuggc

SEQ ID NO: 38571 - RNA, 23 nt, Artificial Sequence
  Chemically synthesized
gauggcaauacaaaauccuggca

SEQ ID NO: 38572 - RNA, 23 nt, Artificial Sequence
  Chemically synthesized
auggcaauacaaaauccuggcag

SEQ ID NO: 38573 - RNA, 23 nt, Artificial Sequence
  Chemically synthesized
uggcaauacaaaauccuggcagu

SEQ ID NO: 38574 - RNA, 23 nt, Artificial Sequence
  Chemically synthesized
cucaaauacuuccauacuauguc

SEQ ID NO: 38575 - RNA, 23 nt, Artificial Sequence
  Chemically synthesized
uaaaaaugccaguggauaaaagc

SEQ ID NO: 38576 - RNA, 23 nt, Artificial Sequence
  Chemically synthesized
aaaaaugccaguggauaaaagca

SEQ ID NO: 38577 - RNA, 23 nt, Artificial Sequence
  Chemically synthesized
aaaaugccaguggauaaaagcaa

SEQ ID NO: 38578 - RNA, 23 nt, Artificial Sequence
  Chemically synthesized
aaaugccaguggauaaaagcaaa

SEQ ID NO: 38579 - RNA, 23 nt, Artificial Sequence
  Chemically synthesized
aaugccaguggauaaaagcaaaa

SEQ ID NO: 38580 - RNA, 23 nt, Artificial Sequence
  Chemically synthesized
uuuaucaaaagguaggauuguag

SEQ ID NO: 38581 - RNA, 23 nt, Artificial Sequence
  Chemically synthesized
uuaucaaaagguaggauuguagc

SEQ ID NO: 38582 - RNA, 23 nt, Artificial Sequence
  Chemically synthesized
uaucaaaagguaggauuguagcu

SEQ ID NO: 38583 - RNA, 23 nt, Artificial Sequence
  Chemically synthesized
aucaaaagguaggauuguagcua

SEQ ID NO: 38584 - RNA, 23 nt, Artificial Sequence
  Chemically synthesized
ucaaaagguaggauuguagcuaa

SEQ ID NO: 38585 - RNA, 23 nt, Artificial Sequence
  Chemically synthesized
gaauaaaacaaacaagguuucug

SEQ ID NO: 38586 - RNA, 23 nt, Artificial Sequence
  Chemically synthesized
ucaccauuuaaugagguucaagg

SEQ ID NO: 38587 - RNA, 23 nt, Artificial Sequence
  Chemically synthesized
cagggauaaagguuucuagguug

SEQ ID NO: 38588 - RNA, 23 nt, Artificial Sequence
  Chemically synthesized
auaaaagccacauaauaucaaag

SEQ ID NO: 38589 - RNA, 23 nt, Artificial Sequence
  Chemically synthesized
agagagauggacguuucucagga

SEQ ID NO: 38590 - RNA, 23 nt, Artificial Sequence
  Chemically synthesized
gagagauggacguuucucaggaa

SEQ ID NO: 38591 - RNA, 23 nt, Artificial Sequence
  Chemically synthesized
agagauggacguuucucaggaag

SEQ ID NO: 38592 - RNA, 23 nt, Artificial Sequence
  Chemically synthesized
gagauggacguuucucaggaagg

SEQ ID NO: 38593 - RNA, 23 nt, Artificial Sequence
  Chemically synthesized
agauggacguuucucaggaagga

SEQ ID NO: 38594 - RNA, 23 nt, Artificial Sequence
  Chemically synthesized
agaggugguuacagagucuaggg

SEQ ID NO: 38595 - RNA, 23 nt, Artificial Sequence
  Chemically synthesized
gcccaaacgagccaagagugucc

SEQ ID NO: 38596 - RNA, 23 nt, Artificial Sequence
  Chemically synthesized
cccaaacgagccaagaguguccu

SEQ ID NO: 38597 - RNA, 23 nt, Artificial Sequence
  Chemically synthesized
ccaaacgagccaagaguguccuu

SEQ ID NO: 38598 - RNA, 23 nt, Artificial Sequence
  Chemically synthesized
caaacgagccaagaguguccuuc

SEQ ID NO: 38599 - RNA, 23 nt, Artificial Sequence
  Chemically synthesized
aaacgagccaagaguguccuucc

SEQ ID NO: 38600 - RNA, 23 nt, Artificial Sequence
  Chemically synthesized
gcgucucuagucauguuugcuuc

SEQ ID NO: 38601 - RNA, 23 nt, Artificial Sequence
  Chemically synthesized
cgucucuagucauguuugcuucu

SEQ ID NO: 38602 - RNA, 23 nt, Artificial Sequence
  Chemically synthesized
gucucuagucauguuugcuucuu

SEQ ID NO: 38603 - RNA, 23 nt, Artificial Sequence
  Chemically synthesized
ucauuuccaaggugaugaugucc

SEQ ID NO: 38604 - RNA, 23 nt, Artificial Sequence
  Chemically synthesized
cauuuccaaggugaugauguccu

SEQ ID NO: 38605 - RNA, 23 nt, Artificial Sequence
  Chemically synthesized
auuuccaaggugaugauguccuu

SEQ ID NO: 38606 - RNA, 23 nt, Artificial Sequence
  Chemically synthesized
uuuccaaggugaugauguccuuc

SEQ ID NO: 38607 - RNA, 23 nt, Artificial Sequence
  Chemically synthesized
uuccaaggugaugauguccuucu

SEQ ID NO: 38608 - RNA, 23 nt, Artificial Sequence
  Chemically synthesized
uaaaagauaggagauggucucuc

SEQ ID NO: 38609 - RNA, 23 nt, Artificial Sequence
  Chemically synthesized
gcuggaacugaacacaaauaugg

SEQ ID NO: 38610 - RNA, 23 nt, Artificial Sequence
  Chemically synthesized
cuggaacugaacacaaauauggg

SEQ ID NO: 38611 - RNA, 23 nt, Artificial Sequence
  Chemically synthesized
uggaacugaacacaaauaugggg

SEQ ID NO: 38612 - RNA, 23 nt, Artificial Sequence
  Chemically synthesized
ggaacugaacacaaauaugggga

SEQ ID NO: 38613 - RNA, 23 nt, Artificial Sequence
  Chemically synthesized
gaacugaacacaaauauggggaa

SEQ ID NO: 38614 - RNA, 23 nt, Artificial Sequence
  Chemically synthesized
acacucaaaggcagagaugaugg

SEQ ID NO: 38615 - RNA, 23 nt, Artificial Sequence
  Chemically synthesized
agauguucuaacaauucgcucaa

SEQ ID NO: 38616 - RNA, 23 nt, Artificial Sequence
  Chemically synthesized
cuccuugcaccgguggaauucug

SEQ ID NO: 38617 - RNA, 23 nt, Artificial Sequence
  Chemically synthesized
uccuugcaccgguggaauucugu

SEQ ID NO: 38618 - RNA, 23 nt, Artificial Sequence
  Chemically synthesized
ccuugcaccgguggaauucugug

SEQ ID NO: 38619 - RNA, 23 nt, Artificial Sequence
  Chemically synthesized
cuugcaccgguggaauucugugc

SEQ ID NO: 38620 - RNA, 23 nt, Artificial Sequence
  Chemically synthesized
uugcaccgguggaauucugugcc

SEQ ID NO: 38621 - RNA, 23 nt, Artificial Sequence
  Chemically synthesized
ugcguucaccuuaaccagcaugu

SEQ ID NO: 38622 - RNA, 23 nt, Artificial Sequence
  Chemically synthesized
gcguucaccuuaaccagcauguc

SEQ ID NO: 38623 - RNA, 23 nt, Artificial Sequence
  Chemically synthesized
cguucaccuuaaccagcaugucg

SEQ ID NO: 38624 - RNA, 23 nt, Artificial Sequence
  Chemically synthesized
guucaccuuaaccagcaugucgg

SEQ ID NO: 38625 - RNA, 23 nt, Artificial Sequence
  Chemically synthesized
uucaccuuaaccagcaugucggc

SEQ ID NO: 38626 - RNA, 23 nt, Artificial Sequence
  Chemically synthesized
ucaccuuaaccagcaugucggcc

SEQ ID NO: 38627 - RNA, 23 nt, Artificial Sequence
  Chemically synthesized
caccuuaaccagcaugucggcca

SEQ ID NO: 38628 - RNA, 23 nt, Artificial Sequence
  Chemically synthesized
accuuaaccagcaugucggccac

SEQ ID NO: 38629 - RNA, 23 nt, Artificial Sequence
  Chemically synthesized
cacgaucagucucaucuccacgg

SEQ ID NO: 38630 - RNA, 23 nt, Artificial Sequence
  Chemically synthesized
acgaucagucucaucuccacggc

SEQ ID NO: 38631 - RNA, 23 nt, Artificial Sequence
  Chemically synthesized
cgaucagucucaucuccacggca

SEQ ID NO: 38632 - RNA, 23 nt, Artificial Sequence
  Chemically synthesized
gaucagucucaucuccacggcag

SEQ ID NO: 38633 - RNA, 23 nt, Artificial Sequence
  Chemically synthesized
aucagucucaucuccacggcagg

SEQ ID NO: 38634 - RNA, 23 nt, Artificial Sequence
  Chemically synthesized
cagucuggucacauagaacaugg

SEQ ID NO: 38635 - RNA, 23 nt, Artificial Sequence
  Chemically synthesized
agucuggucacauagaacaugga

SEQ ID NO: 38636 - RNA, 23 nt, Artificial Sequence
  Chemically synthesized
gucuggucacauagaacauggac

SEQ ID NO: 38637 - RNA, 23 nt, Artificial Sequence
  Chemically synthesized
ucuggucacauagaacauggacg

SEQ ID NO: 38638 - RNA, 23 nt, Artificial Sequence
  Chemically synthesized
cuggucacauagaacauggacgu

SEQ ID NO: 38639 - RNA, 23 nt, Artificial Sequence
  Chemically synthesized
gguucucucucucaaauacuucc

SEQ ID NO: 38640 - RNA, 23 nt, Artificial Sequence
  Chemically synthesized
guucucucucucaaauacuucca

SEQ ID NO: 38641 - RNA, 23 nt, Artificial Sequence
  Chemically synthesized
uucucucucucaaauacuuccau

SEQ ID NO: 38642 - RNA, 23 nt, Artificial Sequence
  Chemically synthesized
ucucucucucaaauacuuccaua

SEQ ID NO: 38643 - RNA, 23 nt, Artificial Sequence
  Chemically synthesized
cucucucucaaauacuuccauac

SEQ ID NO: 38644 - RNA, 23 nt, Artificial Sequence
  Chemically synthesized
acuacuacaggccuagcauuuug

SEQ ID NO: 38645 - RNA, 23 nt, Artificial Sequence
  Chemically synthesized
cuaaaaaugccaguggauaaaag

SEQ ID NO: 38646 - RNA, 23 nt, Artificial Sequence
  Chemically synthesized
augccaguggauaaaagcaaaac

SEQ ID NO: 38647 - RNA, 23 nt, Artificial Sequence
  Chemically synthesized
gccaguggauaaaagcaaaacac

SEQ ID NO: 38648 - RNA, 23 nt, Artificial Sequence
  Chemically synthesized
ccaguggauaaaagcaaaacaca

SEQ ID NO: 38649 - RNA, 23 nt, Artificial Sequence
  Chemically synthesized
caguggauaaaagcaaaacacau

SEQ ID NO: 38650 - RNA, 23 nt, Artificial Sequence
  Chemically synthesized
aguggauaaaagcaaaacacaug

SEQ ID NO: 38651 - RNA, 23 nt, Artificial Sequence
  Chemically synthesized
aauaauaauccguguauauuguc

SEQ ID NO: 38652 - RNA, 23 nt, Artificial Sequence
  Chemically synthesized
gaacaaguaaaaguagcauauau

SEQ ID NO: 38653 - RNA, 23 nt, Artificial Sequence
  Chemically synthesized
ccgggaauugucaagacuugagg

SEQ ID NO: 38654 - RNA, 23 nt, Artificial Sequence
  Chemically synthesized
cgggaauugucaagacuugagga

SEQ ID NO: 38655 - RNA, 23 nt, Artificial Sequence
  Chemically synthesized
gggaauugucaagacuugaggaa

SEQ ID NO: 38656 - RNA, 23 nt, Artificial Sequence
  Chemically synthesized
ggaauugucaagacuugaggaag

SEQ ID NO: 38657 - RNA, 23 nt, Artificial Sequence
  Chemically synthesized
gaauugucaagacuugaggaaga

SEQ ID NO: 38658 - RNA, 23 nt, Artificial Sequence
  Chemically synthesized
cuggagcuuagcaagaaaucacc

SEQ ID NO: 38659 - RNA, 23 nt, Artificial Sequence
  Chemically synthesized
uggagcuuagcaagaaaucacca

SEQ ID NO: 38660 - RNA, 23 nt, Artificial Sequence
  Chemically synthesized
ggagcuuagcaagaaaucaccau

SEQ ID NO: 38661 - RNA, 23 nt, Artificial Sequence
  Chemically synthesized
gagcuuagcaagaaaucaccauu

SEQ ID NO: 38662 - RNA, 23 nt, Artificial Sequence
  Chemically synthesized
agcuuagcaagaaaucaccauuu

SEQ ID NO: 38663 - RNA, 23 nt, Artificial Sequence
  Chemically synthesized
agucuuaaagaacagggaaguug

SEQ ID NO: 38664 - RNA, 23 nt, Artificial Sequence
  Chemically synthesized
gucuuaaagaacagggaaguugg

SEQ ID NO: 38665 - RNA, 23 nt, Artificial Sequence
  Chemically synthesized
ucuuaaagaacagggaaguuggg

SEQ ID NO: 38666 - RNA, 23 nt, Artificial Sequence
  Chemically synthesized
cuuaaagaacagggaaguuggga

SEQ ID NO: 38667 - RNA, 23 nt, Artificial Sequence
  Chemically synthesized
uuaaagaacagggaaguugggaa

SEQ ID NO: 38668 - RNA, 23 nt, Artificial Sequence
  Chemically synthesized
uuucagauaagcagggauaaagg

SEQ ID NO: 38669 - RNA, 23 nt, Artificial Sequence
  Chemically synthesized
uucagauaagcagggauaaaggu

SEQ ID NO: 38670 - RNA, 23 nt, Artificial Sequence
  Chemically synthesized
ucagauaagcagggauaaagguu

SEQ ID NO: 38671 - RNA, 23 nt, Artificial Sequence
  Chemically synthesized
aacaauaacauguauggcacuga

SEQ ID NO: 38672 - RNA, 23 nt, Artificial Sequence
  Chemically synthesized
acaauaacauguauggcacugaa

SEQ ID NO: 38673 - RNA, 23 nt, Artificial Sequence
  Chemically synthesized
caauaacauguauggcacugaaa

SEQ ID NO: 38674 - RNA, 23 nt, Artificial Sequence
  Chemically synthesized
aauaacauguauggcacugaaau

SEQ ID NO: 38675 - RNA, 23 nt, Artificial Sequence
  Chemically synthesized
auaacauguauggcacugaaaua

SEQ ID NO: 38676 - RNA, 23 nt, Artificial Sequence
  Chemically synthesized
ucuagauaugaagugcagguuga

SEQ ID NO: 38677 - RNA, 23 nt, Artificial Sequence
  Chemically synthesized
cuagauaugaagugcagguugau

SEQ ID NO: 38678 - RNA, 23 nt, Artificial Sequence
  Chemically synthesized
uagauaugaagugcagguugauu

SEQ ID NO: 38679 - RNA, 23 nt, Artificial Sequence
  Chemically synthesized
gaaggaaaaagacagagaggugg

SEQ ID NO: 38680 - RNA, 23 nt, Artificial Sequence
  Chemically synthesized
aaggaaaaagacagagagguggu

SEQ ID NO: 38681 - RNA, 23 nt, Artificial Sequence
  Chemically synthesized
aggaaaaagacagagaggugguu

SEQ ID NO: 38682 - RNA, 23 nt, Artificial Sequence
  Chemically synthesized
gaaaaagacagagaggugguuac

SEQ ID NO: 38683 - RNA, 23 nt, Artificial Sequence
  Chemically synthesized
gcucauuucaguaacaaagcuca

SEQ ID NO: 38684 - RNA, 23 nt, Artificial Sequence
  Chemically synthesized
cucauuucaguaacaaagcucag

SEQ ID NO: 38685 - RNA, 23 nt, Artificial Sequence
  Chemically synthesized
ucauuucaguaacaaagcucaga

SEQ ID NO: 38686 - RNA, 23 nt, Artificial Sequence
  Chemically synthesized
cauuucaguaacaaagcucagag

SEQ ID NO: 38687 - RNA, 23 nt, Artificial Sequence
  Chemically synthesized
auuucaguaacaaagcucagaga

SEQ ID NO: 38688 - RNA, 23 nt, Artificial Sequence
  Chemically synthesized
uccaugggcaaagaucaauaagg

SEQ ID NO: 38689 - RNA, 23 nt, Artificial Sequence
  Chemically synthesized
ccaugggcaaagaucaauaaggu

SEQ ID NO: 38690 - RNA, 23 nt, Artificial Sequence
  Chemically synthesized
caugggcaaagaucaauaaggua

SEQ ID NO: 38691 - RNA, 23 nt, Artificial Sequence
  Chemically synthesized
augggcaaagaucaauaagguac

SEQ ID NO: 38692 - RNA, 23 nt, Artificial Sequence
  Chemically synthesized
ugggcaaagaucaauaagguaca

SEQ ID NO: 38693 - RNA, 23 nt, Artificial Sequence
  Chemically synthesized
cucauuuccaaggugaugauguc

SEQ ID NO: 38694 - RNA, 23 nt, Artificial Sequence
  Chemically synthesized
cucucagacaucuuaacuaaugu

SEQ ID NO: 38695 - RNA, 23 nt, Artificial Sequence
  Chemically synthesized
ucucagacaucuuaacuaaugua

SEQ ID NO: 38696 - RNA, 23 nt, Artificial Sequence
  Chemically synthesized
cucagacaucuuaacuaauguaa

SEQ ID NO: 38697 - RNA, 23 nt, Artificial Sequence
  Chemically synthesized
cagacaucuuaacuaauguaaua

SEQ ID NO: 38698 - RNA, 23 nt, Artificial Sequence
  Chemically synthesized
aacugaacacaaauauggggaau

SEQ ID NO: 38699 - RNA, 23 nt, Artificial Sequence
  Chemically synthesized
aauuuauaugcccucuccccaua

SEQ ID NO: 38700 - RNA, 23 nt, Artificial Sequence
  Chemically synthesized
acaacuucacuugucaggcucuu

SEQ ID NO: 38701 - RNA, 23 nt, Artificial Sequence
  Chemically synthesized
caacuucacuugucaggcucuuc

SEQ ID NO: 38702 - RNA, 23 nt, Artificial Sequence
  Chemically synthesized
aacuucacuugucaggcucuuca

SEQ ID NO: 38703 - RNA, 23 nt, Artificial Sequence
  Chemically synthesized
ggcaaagggcuucacagaaaagg

SEQ ID NO: 38704 - RNA, 23 nt, Artificial Sequence
  Chemically synthesized
gcaaagggcuucacagaaaagga

SEQ ID NO: 38705 - RNA, 23 nt, Artificial Sequence
  Chemically synthesized
caaagggcuucacagaaaaggag

SEQ ID NO: 38706 - RNA, 23 nt, Artificial Sequence
  Chemically synthesized
aaagggcuucacagaaaaggagc

SEQ ID NO: 38707 - RNA, 23 nt, Artificial Sequence
  Chemically synthesized
aagggcuucacagaaaaggagcu

SEQ ID NO: 38708 - RNA, 23 nt, Artificial Sequence
  Chemically synthesized
ugcugcaguauucagacaucucc

SEQ ID NO: 38709 - RNA, 23 nt, Artificial Sequence
  Chemically synthesized
gcugcaguauucagacaucuccu

SEQ ID NO: 38710 - RNA, 23 nt, Artificial Sequence
  Chemically synthesized
cugcaguauucagacaucuccuu

SEQ ID NO: 38711 - RNA, 23 nt, Artificial Sequence
  Chemically synthesized
ugcaguauucagacaucuccuug

SEQ ID NO: 38712 - RNA, 23 nt, Artificial Sequence
  Chemically synthesized
gccgcauaucaugucugagcgcg

SEQ ID NO: 38713 - RNA, 23 nt, Artificial Sequence
  Chemically synthesized
ccgcauaucaugucugagcgcgu

SEQ ID NO: 38714 - RNA, 23 nt, Artificial Sequence
  Chemically synthesized
cgcauaucaugucugagcgcgug

SEQ ID NO: 38715 - RNA, 23 nt, Artificial Sequence
  Chemically synthesized
gcauaucaugucugagcgcgugg

SEQ ID NO: 38716 - RNA, 23 nt, Artificial Sequence
  Chemically synthesized
cauaucaugucugagcgcguggg

SEQ ID NO: 38717 - RNA, 23 nt, Artificial Sequence
  Chemically synthesized
cuugcauuuccugugcagucugg

SEQ ID NO: 38718 - RNA, 23 nt, Artificial Sequence
  Chemically synthesized
uugcauuuccugugcagucuggu

SEQ ID NO: 38719 - RNA, 23 nt, Artificial Sequence
  Chemically synthesized
ugcauuuccugugcagucugguc

SEQ ID NO: 38720 - RNA, 23 nt, Artificial Sequence
  Chemically synthesized
gcauuuccugugcagucugguca

SEQ ID NO: 38721 - RNA, 23 nt, Artificial Sequence
  Chemically synthesized
cauuuccugugcagucuggucac

SEQ ID NO: 38722 - RNA, 23 nt, Artificial Sequence
  Chemically synthesized
auuuccugugcagucuggucaca

SEQ ID NO: 38723 - RNA, 23 nt, Artificial Sequence
  Chemically synthesized
uuuccugugcagucuggucacau

SEQ ID NO: 38724 - RNA, 23 nt, Artificial Sequence
  Chemically synthesized
uuccugugcagucuggucacaua

SEQ ID NO: 38725 - RNA, 23 nt, Artificial Sequence
  Chemically synthesized
uuuuuagaguuuccugaugauga

SEQ ID NO: 38726 - RNA, 23 nt, Artificial Sequence
  Chemically synthesized
uuuuagaguuuccugaugaugag

SEQ ID NO: 38727 - RNA, 23 nt, Artificial Sequence
  Chemically synthesized
uuuagaguuuccugaugaugagg

SEQ ID NO: 38728 - RNA, 23 nt, Artificial Sequence
  Chemically synthesized
uuagaguuuccugaugaugagga

SEQ ID NO: 38729 - RNA, 23 nt, Artificial Sequence
  Chemically synthesized
uagaguuuccugaugaugaggau

SEQ ID NO: 38730 - RNA, 23 nt, Artificial Sequence
  Chemically synthesized
ggcaauacaaaauccuggcagug

SEQ ID NO: 38731 - RNA, 23 nt, Artificial Sequence
  Chemically synthesized
gcaauacaaaauccuggcagugg

SEQ ID NO: 38732 - RNA, 23 nt, Artificial Sequence
  Chemically synthesized
caauacaaaauccuggcaguggg

SEQ ID NO: 38733 - RNA, 23 nt, Artificial Sequence
  Chemically synthesized
aauacaaaauccuggcaguggga

SEQ ID NO: 38734 - RNA, 23 nt, Artificial Sequence
  Chemically synthesized
auacaaaauccuggcagugggag

SEQ ID NO: 38735 - RNA, 23 nt, Artificial Sequence
  Chemically synthesized
uacaaaauccuggcagugggagu

SEQ ID NO: 38736 - RNA, 23 nt, Artificial Sequence
  Chemically synthesized
caccuugacuacuacaggccuag

SEQ ID NO: 38737 - RNA, 23 nt, Artificial Sequence
  Chemically synthesized
accuugacuacuacaggccuagc

SEQ ID NO: 38738 - RNA, 23 nt, Artificial Sequence
  Chemically synthesized
ccuugacuacuacaggccuagca

SEQ ID NO: 38739 - RNA, 23 nt, Artificial Sequence
  Chemically synthesized
cuugacuacuacaggccuagcau

SEQ ID NO: 38740 - RNA, 23 nt, Artificial Sequence
  Chemically synthesized
uugacuacuacaggccuagcauu

SEQ ID NO: 38741 - RNA, 23 nt, Artificial Sequence
  Chemically synthesized
aaagcaaaacacauggaaaaaca

SEQ ID NO: 38742 - RNA, 23 nt, Artificial Sequence
  Chemically synthesized
aagcaaaacacauggaaaaacaa

SEQ ID NO: 38743 - RNA, 23 nt, Artificial Sequence
  Chemically synthesized
agcaaaacacauggaaaaacaaa

SEQ ID NO: 38744 - RNA, 23 nt, Artificial Sequence
  Chemically synthesized
caaaagguaggauuguagcuaag

SEQ ID NO: 38745 - RNA, 23 nt, Artificial Sequence
  Chemically synthesized
aaaagguaggauuguagcuaagg

SEQ ID NO: 38746 - RNA, 23 nt, Artificial Sequence
  Chemically synthesized
aaagguaggauuguagcuaaggu

SEQ ID NO: 38747 - RNA, 23 nt, Artificial Sequence
  Chemically synthesized
aagguaggauuguagcuaagguu

SEQ ID NO: 38748 - RNA, 23 nt, Artificial Sequence
  Chemically synthesized
aacauuuaaugaaggcccacuau

SEQ ID NO: 38749 - RNA, 23 nt, Artificial Sequence
  Chemically synthesized
ugaggaagaaggacaccaccuga

SEQ ID NO: 38750 - RNA, 23 nt, Artificial Sequence
  Chemically synthesized
gcuuagcaagaaaucaccauuua

SEQ ID NO: 38751 - RNA, 23 nt, Artificial Sequence
  Chemically synthesized
cuuagcaagaaaucaccauuuaa

SEQ ID NO: 38752 - RNA, 23 nt, Artificial Sequence
  Chemically synthesized
uuagcaagaaaucaccauuuaau

SEQ ID NO: 38753 - RNA, 23 nt, Artificial Sequence
  Chemically synthesized
uagcaagaaaucaccauuuaaug

SEQ ID NO: 38754 - RNA, 23 nt, Artificial Sequence
  Chemically synthesized
uaaagaacagggaaguugggaag

SEQ ID NO: 38755 - RNA, 23 nt, Artificial Sequence
  Chemically synthesized
gaacuacauuacaucuuugagca

SEQ ID NO: 38756 - RNA, 23 nt, Artificial Sequence
  Chemically synthesized
aacuacauuacaucuuugagcau

SEQ ID NO: 38757 - RNA, 23 nt, Artificial Sequence
  Chemically synthesized
acuacauuacaucuuugagcauu

SEQ ID NO: 38758 - RNA, 23 nt, Artificial Sequence
  Chemically synthesized
cuacauuacaucuuugagcauuu

SEQ ID NO: 38759 - RNA, 23 nt, Artificial Sequence
  Chemically synthesized
uacauuacaucuuugagcauuua

SEQ ID NO: 38760 - RNA, 23 nt, Artificial Sequence
  Chemically synthesized
ccuguaaagcaggauucuagaca

SEQ ID NO: 38761 - RNA, 23 nt, Artificial Sequence
  Chemically synthesized
cuguaaagcaggauucuagacag

SEQ ID NO: 38762 - RNA, 23 nt, Artificial Sequence
  Chemically synthesized
uguaaagcaggauucuagacaga

SEQ ID NO: 38763 - RNA, 23 nt, Artificial Sequence
  Chemically synthesized
guaaagcaggauucuagacagau

SEQ ID NO: 38764 - RNA, 23 nt, Artificial Sequence
  Chemically synthesized
uaaagcaggauucuagacagauu

SEQ ID NO: 38765 - RNA, 23 nt, Artificial Sequence
  Chemically synthesized
aaagcaggauucuagacagauuu

SEQ ID NO: 38766 - RNA, 23 nt, Artificial Sequence
  Chemically synthesized
ggaugaaaugaagguaaagaagg

SEQ ID NO: 38767 - RNA, 23 nt, Artificial Sequence
  Chemically synthesized
acagagaggugguuacagagucu

SEQ ID NO: 38768 - RNA, 23 nt, Artificial Sequence
  Chemically synthesized
cagagaggugguuacagagucua

SEQ ID NO: 38769 - RNA, 23 nt, Artificial Sequence
  Chemically synthesized
agagaggugguuacagagucuag

SEQ ID NO: 38770 - RNA, 23 nt, Artificial Sequence
  Chemically synthesized
gagaggugguuacagagucuagg

SEQ ID NO: 38771 - RNA, 23 nt, Artificial Sequence
  Chemically synthesized
agggaaacacaccauucuuccug

SEQ ID NO: 38772 - RNA, 23 nt, Artificial Sequence
  Chemically synthesized
gggaaacacaccauucuuccugg

SEQ ID NO: 38773 - RNA, 23 nt, Artificial Sequence
  Chemically synthesized
ggaaacacaccauucuuccuggc

SEQ ID NO: 38774 - RNA, 23 nt, Artificial Sequence
  Chemically synthesized
gaaacacaccauucuuccuggcc

SEQ ID NO: 38775 - RNA, 23 nt, Artificial Sequence
  Chemically synthesized
aaacacaccauucuuccuggccu

SEQ ID NO: 38776 - RNA, 23 nt, Artificial Sequence
  Chemically synthesized
gggcaaagaucaauaagguacaa

SEQ ID NO: 38777 - RNA, 23 nt, Artificial Sequence
  Chemically synthesized
ggcaaagaucaauaagguacaaa

SEQ ID NO: 38778 - RNA, 23 nt, Artificial Sequence
  Chemically synthesized
gcaaagaucaauaagguacaaau

SEQ ID NO: 38779 - RNA, 23 nt, Artificial Sequence
  Chemically synthesized
cuacaaaagcuggaacugaacac

SEQ ID NO: 38780 - RNA, 23 nt, Artificial Sequence
  Chemically synthesized
uacaaaagcuggaacugaacaca

SEQ ID NO: 38781 - RNA, 23 nt, Artificial Sequence
  Chemically synthesized
acaaaagcuggaacugaacacaa

SEQ ID NO: 38782 - RNA, 23 nt, Artificial Sequence
  Chemically synthesized
caaaagcuggaacugaacacaaa

SEQ ID NO: 38783 - RNA, 23 nt, Artificial Sequence
  Chemically synthesized
aaaagcuggaacugaacacaaau

SEQ ID NO: 38784 - RNA, 23 nt, Artificial Sequence
  Chemically synthesized
caacugcagcugaaacauuccug

SEQ ID NO: 38785 - RNA, 23 nt, Artificial Sequence
  Chemically synthesized
aacugcagcugaaacauuccugg

SEQ ID NO: 38786 - RNA, 23 nt, Artificial Sequence
  Chemically synthesized
acugcagcugaaacauuccuggc

SEQ ID NO: 38787 - RNA, 23 nt, Artificial Sequence
  Chemically synthesized
cugcagcugaaacauuccuggca

SEQ ID NO: 38788 - RNA, 23 nt, Artificial Sequence
  Chemically synthesized
ugcagcugaaacauuccuggcaa

SEQ ID NO: 38789 - RNA, 23 nt, Artificial Sequence
  Chemically synthesized
gcagcugaaacauuccuggcaau

SEQ ID NO: 38790 - RNA, 23 nt, Artificial Sequence
  Chemically synthesized
cugggagauucccacaucccuga

SEQ ID NO: 38791 - RNA, 23 nt, Artificial Sequence
  Chemically synthesized
ugggagauucccacaucccugag

SEQ ID NO: 38792 - RNA, 23 nt, Artificial Sequence
  Chemically synthesized
gggagauucccacaucccugagg

SEQ ID NO: 38793 - RNA, 23 nt, Artificial Sequence
  Chemically synthesized
ggagauucccacaucccugaggg

SEQ ID NO: 38794 - RNA, 23 nt, Artificial Sequence
  Chemically synthesized
gagauucccacaucccugagggg

SEQ ID NO: 38795 - RNA, 23 nt, Artificial Sequence
  Chemically synthesized
aucaaaggcucuaucacaccucc

SEQ ID NO: 38796 - RNA, 23 nt, Artificial Sequence
  Chemically synthesized
ucaaaggcucuaucacaccuccu

SEQ ID NO: 38797 - RNA, 23 nt, Artificial Sequence
  Chemically synthesized
caaaggcucuaucacaccuccug

SEQ ID NO: 38798 - RNA, 23 nt, Artificial Sequence
  Chemically synthesized
aaaggcucuaucacaccuccugu

SEQ ID NO: 38799 - RNA, 23 nt, Artificial Sequence
  Chemically synthesized
aaggcucuaucacaccuccugug

SEQ ID NO: 38800 - RNA, 23 nt, Artificial Sequence
  Chemically synthesized
auucagacaucuccuugcaccgg

SEQ ID NO: 38801 - RNA, 23 nt, Artificial Sequence
  Chemically synthesized
caggagcauaaccuucccgaucc

SEQ ID NO: 38802 - RNA, 23 nt, Artificial Sequence
  Chemically synthesized
aggagcauaaccuucccgauccu

SEQ ID NO: 38803 - RNA, 23 nt, Artificial Sequence
  Chemically synthesized
ggagcauaaccuucccgauccuu

SEQ ID NO: 38804 - RNA, 23 nt, Artificial Sequence
  Chemically synthesized
gagcauaaccuucccgauccuug

SEQ ID NO: 38805 - RNA, 23 nt, Artificial Sequence
  Chemically synthesized
agcauaaccuucccgauccuuga

SEQ ID NO: 38806 - RNA, 23 nt, Artificial Sequence
  Chemically synthesized
cccgauccuugauaagugcguuc

SEQ ID NO: 38807 - RNA, 23 nt, Artificial Sequence
  Chemically synthesized
ccgauccuugauaagugcguuca

SEQ ID NO: 38808 - RNA, 23 nt, Artificial Sequence
  Chemically synthesized
cgauccuugauaagugcguucac

SEQ ID NO: 38809 - RNA, 23 nt, Artificial Sequence
  Chemically synthesized
gauccuugauaagugcguucacc

SEQ ID NO: 38810 - RNA, 23 nt, Artificial Sequence
  Chemically synthesized
auccuugauaagugcguucaccu

SEQ ID NO: 38811 - RNA, 23 nt, Artificial Sequence
  Chemically synthesized
cgugcauaucacaagcccgcuca

SEQ ID NO: 38812 - RNA, 23 nt, Artificial Sequence
  Chemically synthesized
gugcauaucacaagcccgcucag

SEQ ID NO: 38813 - RNA, 23 nt, Artificial Sequence
  Chemically synthesized
ugcauaucacaagcccgcucaga

SEQ ID NO: 38814 - RNA, 23 nt, Artificial Sequence
  Chemically synthesized
gcauaucacaagcccgcucagaa

SEQ ID NO: 38815 - RNA, 23 nt, Artificial Sequence
  Chemically synthesized
cauaucacaagcccgcucagaaa

SEQ ID NO: 38816 - RNA, 23 nt, Artificial Sequence
  Chemically synthesized
ucggcaacuuuucuuuaccggca

SEQ ID NO: 38817 - RNA, 23 nt, Artificial Sequence
  Chemically synthesized
cggcaacuuuucuuuaccggcau

SEQ ID NO: 38818 - RNA, 23 nt, Artificial Sequence
  Chemically synthesized
ggcaacuuuucuuuaccggcauc

SEQ ID NO: 38819 - RNA, 23 nt, Artificial Sequence
  Chemically synthesized
gcaacuuuucuuuaccggcauca

SEQ ID NO: 38820 - RNA, 23 nt, Artificial Sequence
  Chemically synthesized
caacuuuucuuuaccggcaucac

SEQ ID NO: 38821 - RNA, 23 nt, Artificial Sequence
  Chemically synthesized
aacuuuucuuuaccggcaucacu

SEQ ID NO: 38822 - RNA, 23 nt, Artificial Sequence
  Chemically synthesized
acuuuucuuuaccggcaucacuc

SEQ ID NO: 38823 - RNA, 23 nt, Artificial Sequence
  Chemically synthesized
cuuuucuuuaccggcaucacucu

SEQ ID NO: 38824 - RNA, 23 nt, Artificial Sequence
  Chemically synthesized
ccuggaugaagaacauuuuuggu

SEQ ID NO: 38825 - RNA, 23 nt, Artificial Sequence
  Chemically synthesized
cuggaugaagaacauuuuugguu

SEQ ID NO: 38826 - RNA, 23 nt, Artificial Sequence
  Chemically synthesized
uggaugaagaacauuuuugguuu

SEQ ID NO: 38827 - RNA, 23 nt, Artificial Sequence
  Chemically synthesized
ggaugaagaacauuuuugguuug

SEQ ID NO: 38828 - RNA, 23 nt, Artificial Sequence
  Chemically synthesized
gaugaagaacauuuuugguuugu

SEQ ID NO: 38829 - RNA, 23 nt, Artificial Sequence
  Chemically synthesized
cgguucuuuuuuagaguuuccug

SEQ ID NO: 38830 - RNA, 23 nt, Artificial Sequence
  Chemically synthesized
gguucuuuuuuagaguuuccuga

SEQ ID NO: 38831 - RNA, 23 nt, Artificial Sequence
  Chemically synthesized
guucuuuuuuagaguuuccugau

SEQ ID NO: 38832 - RNA, 23 nt, Artificial Sequence
  Chemically synthesized
uucuuuuuuagaguuuccugaug

SEQ ID NO: 38833 - RNA, 23 nt, Artificial Sequence
  Chemically synthesized
ucuuuuuuagaguuuccugauga

SEQ ID NO: 38834 - RNA, 23 nt, Artificial Sequence
  Chemically synthesized
agaguuuccugaugaugaggaug

SEQ ID NO: 38835 - RNA, 23 nt, Artificial Sequence
  Chemically synthesized
uagcauuuugcuagggaccaugg

SEQ ID NO: 38836 - RNA, 23 nt, Artificial Sequence
  Chemically synthesized
agcauuuugcuagggaccauggg

SEQ ID NO: 38837 - RNA, 23 nt, Artificial Sequence
  Chemically synthesized
gcauuuugcuagggaccauggga

SEQ ID NO: 38838 - RNA, 23 nt, Artificial Sequence
  Chemically synthesized
cauuuugcuagggaccaugggag

SEQ ID NO: 38839 - RNA, 23 nt, Artificial Sequence
  Chemically synthesized
auuuugcuagggaccaugggaga

SEQ ID NO: 38840 - RNA, 23 nt, Artificial Sequence
  Chemically synthesized
caaaguacaaauaauaauccgug

SEQ ID NO: 38841 - RNA, 23 nt, Artificial Sequence
  Chemically synthesized
aaaguacaaauaauaauccgugu

SEQ ID NO: 38842 - RNA, 23 nt, Artificial Sequence
  Chemically synthesized
aaguacaaauaauaauccgugua

SEQ ID NO: 38843 - RNA, 23 nt, Artificial Sequence
  Chemically synthesized
aguacaaauaauaauccguguau

SEQ ID NO: 38844 - RNA, 23 nt, Artificial Sequence
  Chemically synthesized
guacaaauaauaauccguguaua

SEQ ID NO: 38845 - RNA, 23 nt, Artificial Sequence
  Chemically synthesized
uuuuaucaaaagguaggauugua

SEQ ID NO: 38846 - RNA, 23 nt, Artificial Sequence
  Chemically synthesized
gccaagcacuugguacaugaugg

SEQ ID NO: 38847 - RNA, 23 nt, Artificial Sequence
  Chemically synthesized
ccaagcacuugguacaugauggu

SEQ ID NO: 38848 - RNA, 23 nt, Artificial Sequence
  Chemically synthesized
caagcacuugguacaugauggug

SEQ ID NO: 38849 - RNA, 23 nt, Artificial Sequence
  Chemically synthesized
aagcacuugguacaugaugguga

SEQ ID NO: 38850 - RNA, 23 nt, Artificial Sequence
  Chemically synthesized
agcacuugguacaugauggugaa

SEQ ID NO: 38851 - RNA, 23 nt, Artificial Sequence
  Chemically synthesized
uugucaagacuugaggaagaagg

SEQ ID NO: 38852 - RNA, 23 nt, Artificial Sequence
  Chemically synthesized
ugucaagacuugaggaagaagga

SEQ ID NO: 38853 - RNA, 23 nt, Artificial Sequence
  Chemically synthesized
gucaagacuugaggaagaaggac

SEQ ID NO: 38854 - RNA, 23 nt, Artificial Sequence
  Chemically synthesized
ucaagacuugaggaagaaggaca

SEQ ID NO: 38855 - RNA, 23 nt, Artificial Sequence
  Chemically synthesized
caagacuugaggaagaaggacac

SEQ ID NO: 38856 - RNA, 23 nt, Artificial Sequence
  Chemically synthesized
aggaaagagcacaaaauuagaag

SEQ ID NO: 38857 - RNA, 23 nt, Artificial Sequence
  Chemically synthesized
ggaaagagcacaaaauuagaagc

SEQ ID NO: 38858 - RNA, 23 nt, Artificial Sequence
  Chemically synthesized
gaaagagcacaaaauuagaagcu

SEQ ID NO: 38859 - RNA, 23 nt, Artificial Sequence
  Chemically synthesized
aaagagcacaaaauuagaagcug

SEQ ID NO: 38860 - RNA, 23 nt, Artificial Sequence
  Chemically synthesized
aagagcacaaaauuagaagcuga

SEQ ID NO: 38861 - RNA, 23 nt, Artificial Sequence
  Chemically synthesized
gcuggagcuuagcaagaaaucac

SEQ ID NO: 38862 - RNA, 23 nt, Artificial Sequence
  Chemically synthesized
caagaaccaguucucauaaacca

SEQ ID NO: 38863 - RNA, 23 nt, Artificial Sequence
  Chemically synthesized
aagaaccaguucucauaaaccaa

SEQ ID NO: 38864 - RNA, 23 nt, Artificial Sequence
  Chemically synthesized
agaaccaguucucauaaaccaag

SEQ ID NO: 38865 - RNA, 23 nt, Artificial Sequence
  Chemically synthesized
gaaccaguucucauaaaccaagg

SEQ ID NO: 38866 - RNA, 23 nt, Artificial Sequence
  Chemically synthesized
aaccaguucucauaaaccaaggu

SEQ ID NO: 38867 - RNA, 23 nt, Artificial Sequence
  Chemically synthesized
uugaaaacaauaacauguauggc

SEQ ID NO: 38868 - RNA, 23 nt, Artificial Sequence
  Chemically synthesized
ugaaaacaauaacauguauggca

SEQ ID NO: 38869 - RNA, 23 nt, Artificial Sequence
  Chemically synthesized
gaaaacaauaacauguauggcac

SEQ ID NO: 38870 - RNA, 23 nt, Artificial Sequence
  Chemically synthesized
aaaacaauaacauguauggcacu

SEQ ID NO: 38871 - RNA, 23 nt, Artificial Sequence
  Chemically synthesized
aaacaauaacauguauggcacug

SEQ ID NO: 38872 - RNA, 23 nt, Artificial Sequence
  Chemically synthesized
acauuacaucuuugagcauuuac

SEQ ID NO: 38873 - RNA, 23 nt, Artificial Sequence
  Chemically synthesized
cauuacaucuuugagcauuuaca

SEQ ID NO: 38874 - RNA, 23 nt, Artificial Sequence
  Chemically synthesized
auuacaucuuugagcauuuacau

SEQ ID NO: 38875 - RNA, 23 nt, Artificial Sequence
  Chemically synthesized
uuacaucuuugagcauuuacaug

SEQ ID NO: 38876 - RNA, 23 nt, Artificial Sequence
  Chemically synthesized
ugagcauuuacaugauccuguaa

SEQ ID NO: 38877 - RNA, 23 nt, Artificial Sequence
  Chemically synthesized
gagcauuuacaugauccuguaaa

SEQ ID NO: 38878 - RNA, 23 nt, Artificial Sequence
  Chemically synthesized
agcauuuacaugauccuguaaag

SEQ ID NO: 38879 - RNA, 23 nt, Artificial Sequence
  Chemically synthesized
gauggacguuucucaggaaggaa

SEQ ID NO: 38880 - RNA, 23 nt, Artificial Sequence
  Chemically synthesized
auggacguuucucaggaaggaaa

SEQ ID NO: 38881 - RNA, 23 nt, Artificial Sequence
  Chemically synthesized
caaagaucaauaagguacaaaug

SEQ ID NO: 38882 - RNA, 23 nt, Artificial Sequence
  Chemically synthesized
ggugcgucucuagucauguuugc

SEQ ID NO: 38883 - RNA, 23 nt, Artificial Sequence
  Chemically synthesized
gugcgucucuagucauguuugcu

SEQ ID NO: 38884 - RNA, 23 nt, Artificial Sequence
  Chemically synthesized
ugcgucucuagucauguuugcuu

SEQ ID NO: 38885 - RNA, 23 nt, Artificial Sequence
  Chemically synthesized
agucauguuugcuucuucagagc

SEQ ID NO: 38886 - RNA, 23 nt, Artificial Sequence
  Chemically synthesized
ccucauuuccaaggugaugaugu

SEQ ID NO: 38887 - RNA, 23 nt, Artificial Sequence
  Chemically synthesized
cuucagagccaaaagauaauguc

SEQ ID NO: 38888 - RNA, 23 nt, Artificial Sequence
  Chemically synthesized
uucagagccaaaagauaaugucu

SEQ ID NO: 38889 - RNA, 23 nt, Artificial Sequence
  Chemically synthesized
ucagagccaaaagauaaugucua

SEQ ID NO: 38890 - RNA, 23 nt, Artificial Sequence
  Chemically synthesized
cagagccaaaagauaaugucuac

SEQ ID NO: 38891 - RNA, 23 nt, Artificial Sequence
  Chemically synthesized
agagccaaaagauaaugucuaca

SEQ ID NO: 38892 - RNA, 23 nt, Artificial Sequence
  Chemically synthesized
ggucucucagacaucuuaacuaa

SEQ ID NO: 38893 - RNA, 23 nt, Artificial Sequence
  Chemically synthesized
gucucucagacaucuuaacuaau

SEQ ID NO: 38894 - RNA, 23 nt, Artificial Sequence
  Chemically synthesized
ucucucagacaucuuaacuaaug

SEQ ID NO: 38895 - RNA, 23 nt, Artificial Sequence
  Chemically synthesized
cacuaaagugccaucuacaaaag

SEQ ID NO: 38896 - RNA, 23 nt, Artificial Sequence
  Chemically synthesized
acuaaagugccaucuacaaaagc

SEQ ID NO: 38897 - RNA, 23 nt, Artificial Sequence
  Chemically synthesized
cuaaagugccaucuacaaaagcu

SEQ ID NO: 38898 - RNA, 23 nt, Artificial Sequence
  Chemically synthesized
uaaagugccaucuacaaaagcug

SEQ ID NO: 38899 - RNA, 23 nt, Artificial Sequence
  Chemically synthesized
aaagugccaucuacaaaagcugg

SEQ ID NO: 38900 - RNA, 23 nt, Artificial Sequence
  Chemically synthesized
aaccacacuguguuuacaacuuc

SEQ ID NO: 38901 - RNA, 23 nt, Artificial Sequence
  Chemically synthesized
accacacuguguuuacaacuuca

SEQ ID NO: 38902 - RNA, 23 nt, Artificial Sequence
  Chemically synthesized
ccacacuguguuuacaacuucac

SEQ ID NO: 38903 - RNA, 23 nt, Artificial Sequence
  Chemically synthesized
cacacuguguuuacaacuucacu

SEQ ID NO: 38904 - RNA, 23 nt, Artificial Sequence
  Chemically synthesized
acacuguguuuacaacuucacuu

SEQ ID NO: 38905 - RNA, 23 nt, Artificial Sequence
  Chemically synthesized
cacuguguuuacaacuucacuug

SEQ ID NO: 38906 - RNA, 23 nt, Artificial Sequence
  Chemically synthesized
acuguguuuacaacuucacuugu

SEQ ID NO: 38907 - RNA, 23 nt, Artificial Sequence
  Chemically synthesized
gcauaaccuucccgauccuugau

SEQ ID NO: 38908 - RNA, 23 nt, Artificial Sequence
  Chemically synthesized
cauaaccuucccgauccuugaua

SEQ ID NO: 38909 - RNA, 23 nt, Artificial Sequence
  Chemically synthesized
auaaccuucccgauccuugauaa

SEQ ID NO: 38910 - RNA, 23 nt, Artificial Sequence
  Chemically synthesized
caggcauagccgcauaucauguc

SEQ ID NO: 38911 - RNA, 23 nt, Artificial Sequence
  Chemically synthesized
uagccgcauaucaugucugagcg

SEQ ID NO: 38912 - RNA, 23 nt, Artificial Sequence
  Chemically synthesized
aacauuuuugguuuguucuguag

SEQ ID NO: 38913 - RNA, 23 nt, Artificial Sequence
  Chemically synthesized
gugacuagaguacugugguccac

SEQ ID NO: 38914 - RNA, 23 nt, Artificial Sequence
  Chemically synthesized
ugacuagaguacugugguccaca

SEQ ID NO: 38915 - RNA, 23 nt, Artificial Sequence
  Chemically synthesized
gacuagaguacugugguccacau

SEQ ID NO: 38916 - RNA, 23 nt, Artificial Sequence
  Chemically synthesized
acuagaguacugugguccacauc

SEQ ID NO: 38917 - RNA, 23 nt, Artificial Sequence
  Chemically synthesized
cuagaguacugugguccacaucc

SEQ ID NO: 38918 - RNA, 23 nt, Artificial Sequence
  Chemically synthesized
ucucucucaaauacuuccauacu

SEQ ID NO: 38919 - RNA, 23 nt, Artificial Sequence
  Chemically synthesized
uuccugaugaugaggaugcaugc

SEQ ID NO: 38920 - RNA, 23 nt, Artificial Sequence
  Chemically synthesized
uccugaugaugaggaugcaugcc

SEQ ID NO: 38921 - RNA, 23 nt, Artificial Sequence
  Chemically synthesized
ccugaugaugaggaugcaugcca

SEQ ID NO: 38922 - RNA, 23 nt, Artificial Sequence
  Chemically synthesized
cugaugaugaggaugcaugccac

SEQ ID NO: 38923 - RNA, 23 nt, Artificial Sequence
  Chemically synthesized
ugaugaugaggaugcaugccaca

SEQ ID NO: 38924 - RNA, 23 nt, Artificial Sequence
  Chemically synthesized
guuaucucacacaugauaugucu

SEQ ID NO: 38925 - RNA, 23 nt, Artificial Sequence
  Chemically synthesized
uuaucucacacaugauaugucuu

SEQ ID NO: 38926 - RNA, 23 nt, Artificial Sequence
  Chemically synthesized
uaucucacacaugauaugucuuc

SEQ ID NO: 38927 - RNA, 23 nt, Artificial Sequence
  Chemically synthesized
aucucacacaugauaugucuuca

SEQ ID NO: 38928 - RNA, 23 nt, Artificial Sequence
  Chemically synthesized
ucucacacaugauaugucuucaa

SEQ ID NO: 38929 - RNA, 23 nt, Artificial Sequence
  Chemically synthesized
cucacacaugauaugucuucaag

SEQ ID NO: 38930 - RNA, 23 nt, Artificial Sequence
  Chemically synthesized
ucacacaugauaugucuucaagg

SEQ ID NO: 38931 - RNA, 23 nt, Artificial Sequence
  Chemically synthesized
aauccguguauauugucaaaagg

SEQ ID NO: 38932 - RNA, 23 nt, Artificial Sequence
  Chemically synthesized
gcacuugguacaugauggugaau

SEQ ID NO: 38933 - RNA, 23 nt, Artificial Sequence
  Chemically synthesized
cacuugguacaugauggugaaua

SEQ ID NO: 38934 - RNA, 23 nt, Artificial Sequence
  Chemically synthesized
acuugguacaugauggugaauaa

SEQ ID NO: 38935 - RNA, 23 nt, Artificial Sequence
  Chemically synthesized
aagguuucugcccucauuuacag

SEQ ID NO: 38936 - RNA, 23 nt, Artificial Sequence
  Chemically synthesized
agguuucugcccucauuuacagc

SEQ ID NO: 38937 - RNA, 23 nt, Artificial Sequence
  Chemically synthesized
gguuucugcccucauuuacagcc

SEQ ID NO: 38938 - RNA, 23 nt, Artificial Sequence
  Chemically synthesized
guuucugcccucauuuacagccu

SEQ ID NO: 38939 - RNA, 23 nt, Artificial Sequence
  Chemically synthesized
uuucugcccucauuuacagccug

SEQ ID NO: 38940 - RNA, 23 nt, Artificial Sequence
  Chemically synthesized
uucugcccucauuuacagccugg

SEQ ID NO: 38941 - RNA, 23 nt, Artificial Sequence
  Chemically synthesized
ucugcccucauuuacagccuggu

SEQ ID NO: 38942 - RNA, 23 nt, Artificial Sequence
  Chemically synthesized
ugcccucauuuacagccugguag

SEQ ID NO: 38943 - RNA, 23 nt, Artificial Sequence
  Chemically synthesized
gcccucauuuacagccugguagg

SEQ ID NO: 38944 - RNA, 23 nt, Artificial Sequence
  Chemically synthesized
cccucauuuacagccugguaggg

SEQ ID NO: 38945 - RNA, 23 nt, Artificial Sequence
  Chemically synthesized
ccucauuuacagccugguagggg

SEQ ID NO: 38946 - RNA, 23 nt, Artificial Sequence
  Chemically synthesized
cucauuuacagccugguagggga

SEQ ID NO: 38947 - RNA, 23 nt, Artificial Sequence
  Chemically synthesized
gggaaaagacaagauguggugac

SEQ ID NO: 38948 - RNA, 23 nt, Artificial Sequence
  Chemically synthesized
ggaaaagacaagauguggugaca

SEQ ID NO: 38949 - RNA, 23 nt, Artificial Sequence
  Chemically synthesized
gaaaagacaagauguggugacag

SEQ ID NO: 38950 - RNA, 23 nt, Artificial Sequence
  Chemically synthesized
aaaagacaagauguggugacaga

SEQ ID NO: 38951 - RNA, 23 nt, Artificial Sequence
  Chemically synthesized
aaagacaagauguggugacagac

SEQ ID NO: 38952 - RNA, 23 nt, Artificial Sequence
  Chemically synthesized
agcacaaaauuagaagcugagag

SEQ ID NO: 38953 - RNA, 23 nt, Artificial Sequence
  Chemically synthesized
auaaaccaaggugaagaguuuac

SEQ ID NO: 38954 - RNA, 23 nt, Artificial Sequence
  Chemically synthesized
uaaaccaaggugaagaguuuaca

SEQ ID NO: 38955 - RNA, 23 nt, Artificial Sequence
  Chemically synthesized
aaaccaaggugaagaguuuacau

SEQ ID NO: 38956 - RNA, 23 nt, Artificial Sequence
  Chemically synthesized
aaccaaggugaagaguuuacauu

SEQ ID NO: 38957 - RNA, 23 nt, Artificial Sequence
  Chemically synthesized
accaaggugaagaguuuacauuu

SEQ ID NO: 38958 - RNA, 23 nt, Artificial Sequence
  Chemically synthesized
gagggguaauagaaagcagaagg

SEQ ID NO: 38959 - RNA, 23 nt, Artificial Sequence
  Chemically synthesized
uagaaagcagaaggguucuaagc

SEQ ID NO: 38960 - RNA, 23 nt, Artificial Sequence
  Chemically synthesized
agaaagcagaaggguucuaagca

SEQ ID NO: 38961 - RNA, 23 nt, Artificial Sequence
  Chemically synthesized
gaaagcagaaggguucuaagcag

SEQ ID NO: 38962 - RNA, 23 nt, Artificial Sequence
  Chemically synthesized
aaagcagaaggguucuaagcagg

SEQ ID NO: 38963 - RNA, 23 nt, Artificial Sequence
  Chemically synthesized
aagcagaaggguucuaagcaggg

SEQ ID NO: 38964 - RNA, 23 nt, Artificial Sequence
  Chemically synthesized
aaagaacagggaaguugggaagu

SEQ ID NO: 38965 - RNA, 23 nt, Artificial Sequence
  Chemically synthesized
aggcagcaaguugaggaguucca

SEQ ID NO: 38966 - RNA, 23 nt, Artificial Sequence
  Chemically synthesized
ggcagcaaguugaggaguuccac

SEQ ID NO: 38967 - RNA, 23 nt, Artificial Sequence
  Chemically synthesized
gcagcaaguugaggaguuccaca

SEQ ID NO: 38968 - RNA, 23 nt, Artificial Sequence
  Chemically synthesized
cagcaaguugaggaguuccacau

SEQ ID NO: 38969 - RNA, 23 nt, Artificial Sequence
  Chemically synthesized
agaacuacauuacaucuuugagc

SEQ ID NO: 38970 - RNA, 23 nt, Artificial Sequence
  Chemically synthesized
agcaggauucuagacagauuugg

SEQ ID NO: 38971 - RNA, 23 nt, Artificial Sequence
  Chemically synthesized
gcaggauucuagacagauuuggu

SEQ ID NO: 38972 - RNA, 23 nt, Artificial Sequence
  Chemically synthesized
caggauucuagacagauuuggug

SEQ ID NO: 38973 - RNA, 23 nt, Artificial Sequence
  Chemically synthesized
aggauucuagacagauuuggugg

SEQ ID NO: 38974 - RNA, 23 nt, Artificial Sequence
  Chemically synthesized
ggauucuagacagauuugguggc

SEQ ID NO: 38975 - RNA, 23 nt, Artificial Sequence
  Chemically synthesized
aagugggaauaguaagggagaga

SEQ ID NO: 38976 - RNA, 23 nt, Artificial Sequence
  Chemically synthesized
gacagagaggugguuacagaguc

SEQ ID NO: 38977 - RNA, 23 nt, Artificial Sequence
  Chemically synthesized
ucaguaacaaagcucagagaaac

SEQ ID NO: 38978 - RNA, 23 nt, Artificial Sequence
  Chemically synthesized
caguaacaaagcucagagaaaca

SEQ ID NO: 38979 - RNA, 23 nt, Artificial Sequence
  Chemically synthesized
aguaacaaagcucagagaaacaa

SEQ ID NO: 38980 - RNA, 23 nt, Artificial Sequence
  Chemically synthesized
guaacaaagcucagagaaacaac

SEQ ID NO: 38981 - RNA, 23 nt, Artificial Sequence
  Chemically synthesized
uaacaaagcucagagaaacaacc

SEQ ID NO: 38982 - RNA, 23 nt, Artificial Sequence
  Chemically synthesized
caacgaaagaucuuugagacuuc

SEQ ID NO: 38983 - RNA, 23 nt, Artificial Sequence
  Chemically synthesized
gucauguuugcuucuucagagcc

SEQ ID NO: 38984 - RNA, 23 nt, Artificial Sequence
  Chemically synthesized
ucauguuugcuucuucagagcca

SEQ ID NO: 38985 - RNA, 23 nt, Artificial Sequence
  Chemically synthesized
cauguuugcuucuucagagccaa

SEQ ID NO: 38986 - RNA, 23 nt, Artificial Sequence
  Chemically synthesized
ucuucagagccaaaagauaaugu

SEQ ID NO: 38987 - RNA, 23 nt, Artificial Sequence
  Chemically synthesized
ccccauaaccacacuguguuuac

SEQ ID NO: 38988 - RNA, 23 nt, Artificial Sequence
  Chemically synthesized
cccauaaccacacuguguuuaca

SEQ ID NO: 38989 - RNA, 23 nt, Artificial Sequence
  Chemically synthesized
ccauaaccacacuguguuuacaa

SEQ ID NO: 38990 - RNA, 23 nt, Artificial Sequence
  Chemically synthesized
cauaaccacacuguguuuacaac

SEQ ID NO: 38991 - RNA, 23 nt, Artificial Sequence
  Chemically synthesized
auaaccacacuguguuuacaacu

SEQ ID NO: 38992 - RNA, 23 nt, Artificial Sequence
  Chemically synthesized
ucaacugcagcugaaacauuccu

SEQ ID NO: 38993 - RNA, 23 nt, Artificial Sequence
  Chemically synthesized
acagaaaccgugcauccugaaga

SEQ ID NO: 38994 - RNA, 23 nt, Artificial Sequence
  Chemically synthesized
cagaaaccgugcauccugaagau

SEQ ID NO: 38995 - RNA, 23 nt, Artificial Sequence
  Chemically synthesized
agaaaccgugcauccugaagauc

SEQ ID NO: 38996 - RNA, 23 nt, Artificial Sequence
  Chemically synthesized
gaaaccgugcauccugaagauca

SEQ ID NO: 38997 - RNA, 23 nt, Artificial Sequence
  Chemically synthesized
aaaccgugcauccugaagaucaa

SEQ ID NO: 38998 - RNA, 23 nt, Artificial Sequence
  Chemically synthesized
gaagaucaaaggcucuaucacac

SEQ ID NO: 38999 - RNA, 23 nt, Artificial Sequence
  Chemically synthesized
aagaucaaaggcucuaucacacc

SEQ ID NO: 39000 - RNA, 23 nt, Artificial Sequence
  Chemically synthesized
agaucaaaggcucuaucacaccu

SEQ ID NO: 39001 - RNA, 23 nt, Artificial Sequence
  Chemically synthesized
gaucaaaggcucuaucacaccuc

SEQ ID NO: 39002 - RNA, 23 nt, Artificial Sequence
  Chemically synthesized
agugcugcaguauucagacaucu

SEQ ID NO: 39003 - RNA, 23 nt, Artificial Sequence
  Chemically synthesized
gugcugcaguauucagacaucuc

SEQ ID NO: 39004 - RNA, 23 nt, Artificial Sequence
  Chemically synthesized
ucuaacaauucgcucaacaacag

SEQ ID NO: 39005 - RNA, 23 nt, Artificial Sequence
  Chemically synthesized
cuaacaauucgcucaacaacagc

SEQ ID NO: 39006 - RNA, 23 nt, Artificial Sequence
  Chemically synthesized
uaacaauucgcucaacaacagcu

SEQ ID NO: 39007 - RNA, 23 nt, Artificial Sequence
  Chemically synthesized
aacaauucgcucaacaacagcug

SEQ ID NO: 39008 - RNA, 23 nt, Artificial Sequence
  Chemically synthesized
acaauucgcucaacaacagcugu

SEQ ID NO: 39009 - RNA, 23 nt, Artificial Sequence
  Chemically synthesized
ucucaucuucggcaacuuuucuu

SEQ ID NO: 39010 - RNA, 23 nt, Artificial Sequence
  Chemically synthesized
cucaucuucggcaacuuuucuuu

SEQ ID NO: 39011 - RNA, 23 nt, Artificial Sequence
  Chemically synthesized
ucaucuucggcaacuuuucuuua

SEQ ID NO: 39012 - RNA, 23 nt, Artificial Sequence
  Chemically synthesized
caucuucggcaacuuuucuuuac

SEQ ID NO: 39013 - RNA, 23 nt, Artificial Sequence
  Chemically synthesized
aucuucggcaacuuuucuuuacc

SEQ ID NO: 39014 - RNA, 23 nt, Artificial Sequence
  Chemically synthesized
uuuucuuuaccggcaucacucuc

SEQ ID NO: 39015 - RNA, 23 nt, Artificial Sequence
  Chemically synthesized
accccacgaucagucucaucucc

SEQ ID NO: 39016 - RNA, 23 nt, Artificial Sequence
  Chemically synthesized
ccccacgaucagucucaucucca

SEQ ID NO: 39017 - RNA, 23 nt, Artificial Sequence
  Chemically synthesized
cccacgaucagucucaucuccac

SEQ ID NO: 39018 - RNA, 23 nt, Artificial Sequence
  Chemically synthesized
ccacgaucagucucaucuccacg

SEQ ID NO: 39019 - RNA, 23 nt, Artificial Sequence
  Chemically synthesized
ggucacauagaacauggacguca

SEQ ID NO: 39020 - RNA, 23 nt, Artificial Sequence
  Chemically synthesized
gucacauagaacauggacgucau

SEQ ID NO: 39021 - RNA, 23 nt, Artificial Sequence
  Chemically synthesized
ucacauagaacauggacgucaua

SEQ ID NO: 39022 - RNA, 23 nt, Artificial Sequence
  Chemically synthesized
cacauagaacauggacgucauag

SEQ ID NO: 39023 - RNA, 23 nt, Artificial Sequence
  Chemically synthesized
acauagaacauggacgucauagc

SEQ ID NO: 39024 - RNA, 23 nt, Artificial Sequence
  Chemically synthesized
acugcaaccuauaugccagcugg

SEQ ID NO: 39025 - RNA, 23 nt, Artificial Sequence
  Chemically synthesized
cugcaaccuauaugccagcugga

SEQ ID NO: 39026 - RNA, 23 nt, Artificial Sequence
  Chemically synthesized
ugcaaccuauaugccagcuggaa

SEQ ID NO: 39027 - RNA, 23 nt, Artificial Sequence
  Chemically synthesized
gcaaccuauaugccagcuggaag

SEQ ID NO: 39028 - RNA, 23 nt, Artificial Sequence
  Chemically synthesized
caaccuauaugccagcuggaagu

SEQ ID NO: 39029 - RNA, 23 nt, Artificial Sequence
  Chemically synthesized
cacccgauggcaauacaaaaucc

SEQ ID NO: 39030 - RNA, 23 nt, Artificial Sequence
  Chemically synthesized
acccgauggcaauacaaaauccu

SEQ ID NO: 39031 - RNA, 23 nt, Artificial Sequence
  Chemically synthesized
cccgauggcaauacaaaauccug

SEQ ID NO: 39032 - RNA, 23 nt, Artificial Sequence
  Chemically synthesized
uccauacuaugucgacccaaagg

SEQ ID NO: 39033 - RNA, 23 nt, Artificial Sequence
  Chemically synthesized
ccauacuaugucgacccaaaggc

SEQ ID NO: 39034 - RNA, 23 nt, Artificial Sequence
  Chemically synthesized
cauacuaugucgacccaaaggca

SEQ ID NO: 39035 - RNA, 23 nt, Artificial Sequence
  Chemically synthesized
auacuaugucgacccaaaggcag

SEQ ID NO: 39036 - RNA, 23 nt, Artificial Sequence
  Chemically synthesized
uacuaugucgacccaaaggcagg

SEQ ID NO: 39037 - RNA, 23 nt, Artificial Sequence
  Chemically synthesized
auugagcaccuugacuacuacag

SEQ ID NO: 39038 - RNA, 23 nt, Artificial Sequence
  Chemically synthesized
uugagcaccuugacuacuacagg

SEQ ID NO: 39039 - RNA, 23 nt, Artificial Sequence
  Chemically synthesized
ugagcaccuugacuacuacaggc

SEQ ID NO: 39040 - RNA, 23 nt, Artificial Sequence
  Chemically synthesized
gagcaccuugacuacuacaggcc

SEQ ID NO: 39041 - RNA, 23 nt, Artificial Sequence
  Chemically synthesized
agcaccuugacuacuacaggccu

SEQ ID NO: 39042 - RNA, 23 nt, Artificial Sequence
  Chemically synthesized
ugacuacuacaggccuagcauuu

SEQ ID NO: 39043 - RNA, 23 nt, Artificial Sequence
  Chemically synthesized
gacuacuacaggccuagcauuuu

SEQ ID NO: 39044 - RNA, 23 nt, Artificial Sequence
  Chemically synthesized
gaaggaaguuaucucacacauga

SEQ ID NO: 39045 - RNA, 23 nt, Artificial Sequence
  Chemically synthesized
aaggaaguuaucucacacaugau

SEQ ID NO: 39046 - RNA, 23 nt, Artificial Sequence
  Chemically synthesized
aggaaguuaucucacacaugaua

SEQ ID NO: 39047 - RNA, 23 nt, Artificial Sequence
  Chemically synthesized
ggaaguuaucucacacaugauau

SEQ ID NO: 39048 - RNA, 23 nt, Artificial Sequence
  Chemically synthesized
gaaguuaucucacacaugauaug

SEQ ID NO: 39049 - RNA, 23 nt, Artificial Sequence
  Chemically synthesized
gaugaugaggaugcaugccacac

SEQ ID NO: 39050 - RNA, 23 nt, Artificial Sequence
  Chemically synthesized
uuuaaugaaggcccacuaugugc

SEQ ID NO: 39051 - RNA, 23 nt, Artificial Sequence
  Chemically synthesized
uuaaugaaggcccacuaugugcc

SEQ ID NO: 39052 - RNA, 23 nt, Artificial Sequence
  Chemically synthesized
uaaugaaggcccacuaugugcca

SEQ ID NO: 39053 - RNA, 23 nt, Artificial Sequence
  Chemically synthesized
aaugaaggcccacuaugugccaa

SEQ ID NO: 39054 - RNA, 23 nt, Artificial Sequence
  Chemically synthesized
augaaggcccacuaugugccaag

SEQ ID NO: 39055 - RNA, 23 nt, Artificial Sequence
  Chemically synthesized
aggggaaaagacaagauguggug

SEQ ID NO: 39056 - RNA, 23 nt, Artificial Sequence
  Chemically synthesized
ggggaaaagacaagaugugguga

SEQ ID NO: 39057 - RNA, 23 nt, Artificial Sequence
  Chemically synthesized
agagcacaaaauuagaagcugag

SEQ ID NO: 39058 - RNA, 23 nt, Artificial Sequence
  Chemically synthesized
accaguucucauaaaccaaggug

SEQ ID NO: 39059 - RNA, 23 nt, Artificial Sequence
  Chemically synthesized
ccaguucucauaaaccaagguga

SEQ ID NO: 39060 - RNA, 23 nt, Artificial Sequence
  Chemically synthesized
caguucucauaaaccaaggugaa

SEQ ID NO: 39061 - RNA, 23 nt, Artificial Sequence
  Chemically synthesized
uucucauaaaccaaggugaagag

SEQ ID NO: 39062 - RNA, 23 nt, Artificial Sequence
  Chemically synthesized
ucucauaaaccaaggugaagagu

SEQ ID NO: 39063 - RNA, 23 nt, Artificial Sequence
  Chemically synthesized
cucauaaaccaaggugaagaguu

SEQ ID NO: 39064 - RNA, 23 nt, Artificial Sequence
  Chemically synthesized
ucauaaaccaaggugaagaguuu

SEQ ID NO: 39065 - RNA, 23 nt, Artificial Sequence
  Chemically synthesized
cauaaaccaaggugaagaguuua

SEQ ID NO: 39066 - RNA, 23 nt, Artificial Sequence
  Chemically synthesized
agcagaaggguucuaagcagggg

SEQ ID NO: 39067 - RNA, 23 nt, Artificial Sequence
  Chemically synthesized
gcagaaggguucuaagcaggggg

SEQ ID NO: 39068 - RNA, 23 nt, Artificial Sequence
  Chemically synthesized
cagaaggguucuaagcagggggg

SEQ ID NO: 39069 - RNA, 23 nt, Artificial Sequence
  Chemically synthesized
gcaggaacaaagaacuacauuac

SEQ ID NO: 39070 - RNA, 23 nt, Artificial Sequence
  Chemically synthesized
caggaacaaagaacuacauuaca

SEQ ID NO: 39071 - RNA, 23 nt, Artificial Sequence
  Chemically synthesized
aggaacaaagaacuacauuacau

SEQ ID NO: 39072 - RNA, 23 nt, Artificial Sequence
  Chemically synthesized
ggaacaaagaacuacauuacauc

SEQ ID NO: 39073 - RNA, 23 nt, Artificial Sequence
  Chemically synthesized
gaacaaagaacuacauuacaucu

SEQ ID NO: 39074 - RNA, 23 nt, Artificial Sequence
  Chemically synthesized
auucuagacagauuugguggcag

SEQ ID NO: 39075 - RNA, 23 nt, Artificial Sequence
  Chemically synthesized
uucuagacagauuugguggcagc

SEQ ID NO: 39076 - RNA, 23 nt, Artificial Sequence
  Chemically synthesized
ucuagacagauuugguggcagca

SEQ ID NO: 39077 - RNA, 23 nt, Artificial Sequence
  Chemically synthesized
cuagacagauuugguggcagcag

SEQ ID NO: 39078 - RNA, 23 nt, Artificial Sequence
  Chemically synthesized
uagacagauuugguggcagcagc

SEQ ID NO: 39079 - RNA, 23 nt, Artificial Sequence
  Chemically synthesized
aaaaagacagagaggugguuaca

SEQ ID NO: 39080 - RNA, 23 nt, Artificial Sequence
  Chemically synthesized
aaaagacagagaggugguuacag

SEQ ID NO: 39081 - RNA, 23 nt, Artificial Sequence
  Chemically synthesized
aaagacagagaggugguuacaga

SEQ ID NO: 39082 - RNA, 23 nt, Artificial Sequence
  Chemically synthesized
aagacagagaggugguuacagag

SEQ ID NO: 39083 - RNA, 23 nt, Artificial Sequence
  Chemically synthesized
ggcucauuucaguaacaaagcuc

SEQ ID NO: 39084 - RNA, 23 nt, Artificial Sequence
  Chemically synthesized
uuucaguaacaaagcucagagaa

SEQ ID NO: 39085 - RNA, 23 nt, Artificial Sequence
  Chemically synthesized
uucaguaacaaagcucagagaaa

SEQ ID NO: 39086 - RNA, 23 nt, Artificial Sequence
  Chemically synthesized
aaagcucagagaaacaaccaacg

SEQ ID NO: 39087 - RNA, 23 nt, Artificial Sequence
  Chemically synthesized
aagcucagagaaacaaccaacga

SEQ ID NO: 39088 - RNA, 23 nt, Artificial Sequence
  Chemically synthesized
agcucagagaaacaaccaacgaa

SEQ ID NO: 39089 - RNA, 23 nt, Artificial Sequence
  Chemically synthesized
gcucagagaaacaaccaacgaaa

SEQ ID NO: 39090 - RNA, 23 nt, Artificial Sequence
  Chemically synthesized
cucagagaaacaaccaacgaaag

SEQ ID NO: 39091 - RNA, 23 nt, Artificial Sequence
  Chemically synthesized
aacgagccaagaguguccuucca

SEQ ID NO: 39092 - RNA, 23 nt, Artificial Sequence
  Chemically synthesized
gcagcaaggugcgucucuaguca

SEQ ID NO: 39093 - RNA, 23 nt, Artificial Sequence
  Chemically synthesized
cagcaaggugcgucucuagucau

SEQ ID NO: 39094 - RNA, 23 nt, Artificial Sequence
  Chemically synthesized
agcaaggugcgucucuagucaug

SEQ ID NO: 39095 - RNA, 23 nt, Artificial Sequence
  Chemically synthesized
gcaaggugcgucucuagucaugu

SEQ ID NO: 39096 - RNA, 23 nt, Artificial Sequence
  Chemically synthesized
caaggugcgucucuagucauguu

SEQ ID NO: 39097 - RNA, 23 nt, Artificial Sequence
  Chemically synthesized
cuuccaaacucucacucuaggac

SEQ ID NO: 39098 - RNA, 23 nt, Artificial Sequence
  Chemically synthesized
uuccaaacucucacucuaggaca

SEQ ID NO: 39099 - RNA, 23 nt, Artificial Sequence
  Chemically synthesized
uccaaacucucacucuaggacaa

SEQ ID NO: 39100 - RNA, 23 nt, Artificial Sequence
  Chemically synthesized
ccaaacucucacucuaggacaaa

SEQ ID NO: 39101 - RNA, 23 nt, Artificial Sequence
  Chemically synthesized
caaacucucacucuaggacaaaa

SEQ ID NO: 39102 - RNA, 23 nt, Artificial Sequence
  Chemically synthesized
gacaaaaagggcggaggauauga

SEQ ID NO: 39103 - RNA, 23 nt, Artificial Sequence
  Chemically synthesized
acaaaaagggcggaggauaugaa

SEQ ID NO: 39104 - RNA, 23 nt, Artificial Sequence
  Chemically synthesized
caaaaagggcggaggauaugaau

SEQ ID NO: 39105 - RNA, 23 nt, Artificial Sequence
  Chemically synthesized
aaaaagggcggaggauaugaaug

SEQ ID NO: 39106 - RNA, 23 nt, Artificial Sequence
  Chemically synthesized
aaaagggcggaggauaugaauga

SEQ ID NO: 39107 - RNA, 23 nt, Artificial Sequence
  Chemically synthesized
aagugccaucuacaaaagcugga

SEQ ID NO: 39108 - RNA, 23 nt, Artificial Sequence
  Chemically synthesized
agugccaucuacaaaagcuggaa

SEQ ID NO: 39109 - RNA, 23 nt, Artificial Sequence
  Chemically synthesized
gugccaucuacaaaagcuggaac

SEQ ID NO: 39110 - RNA, 23 nt, Artificial Sequence
  Chemically synthesized
cagcugaaacauuccuggcaaua

SEQ ID NO: 39111 - RNA, 23 nt, Artificial Sequence
  Chemically synthesized
gauguucuaacaauucgcucaac

SEQ ID NO: 39112 - RNA, 23 nt, Artificial Sequence
  Chemically synthesized
uaaccuucccgauccuugauaag

SEQ ID NO: 39113 - RNA, 23 nt, Artificial Sequence
  Chemically synthesized
ccuucccgauccuugauaagugc

SEQ ID NO: 39114 - RNA, 23 nt, Artificial Sequence
  Chemically synthesized
cuucccgauccuugauaagugcg

SEQ ID NO: 39115 - RNA, 23 nt, Artificial Sequence
  Chemically synthesized
uucccgauccuugauaagugcgu

SEQ ID NO: 39116 - RNA, 23 nt, Artificial Sequence
  Chemically synthesized
ucccgauccuugauaagugcguu

SEQ ID NO: 39117 - RNA, 23 nt, Artificial Sequence
  Chemically synthesized
caauucgcucaacaacagcuguu

SEQ ID NO: 39118 - RNA, 23 nt, Artificial Sequence
  Chemically synthesized
auaucaugucugagcgcgugggc

SEQ ID NO: 39119 - RNA, 23 nt, Artificial Sequence
  Chemically synthesized
guugucaaagagcugaaaaaccu

SEQ ID NO: 39120 - RNA, 23 nt, Artificial Sequence
  Chemically synthesized
uugucaaagagcugaaaaaccuc

SEQ ID NO: 39121 - RNA, 23 nt, Artificial Sequence
  Chemically synthesized
ugucaaagagcugaaaaaccucu

SEQ ID NO: 39122 - RNA, 23 nt, Artificial Sequence
  Chemically synthesized
gucaaagagcugaaaaaccucuu

SEQ ID NO: 39123 - RNA, 23 nt, Artificial Sequence
  Chemically synthesized
ucaaagagcugaaaaaccucuug

SEQ ID NO: 39124 - RNA, 23 nt, Artificial Sequence
  Chemically synthesized
gcugaaaaaccucuuggagcugg

SEQ ID NO: 39125 - RNA, 23 nt, Artificial Sequence
  Chemically synthesized
cugaaaaaccucuuggagcugga

SEQ ID NO: 39126 - RNA, 23 nt, Artificial Sequence
  Chemically synthesized
ugaaaaaccucuuggagcuggag

SEQ ID NO: 39127 - RNA, 23 nt, Artificial Sequence
  Chemically synthesized
gaaaaaccucuuggagcuggagc

SEQ ID NO: 39128 - RNA, 23 nt, Artificial Sequence
  Chemically synthesized
aaaaaccucuuggagcuggagca

SEQ ID NO: 39129 - RNA, 23 nt, Artificial Sequence
  Chemically synthesized
uggucacauagaacauggacguc

SEQ ID NO: 39130 - RNA, 23 nt, Artificial Sequence
  Chemically synthesized
gaaauuccaguucuuucucucca

SEQ ID NO: 39131 - RNA, 23 nt, Artificial Sequence
  Chemically synthesized
aaauuccaguucuuucucuccag

SEQ ID NO: 39132 - RNA, 23 nt, Artificial Sequence
  Chemically synthesized
aauuccaguucuuucucuccagu

SEQ ID NO: 39133 - RNA, 23 nt, Artificial Sequence
  Chemically synthesized
auuccaguucuuucucuccagug

SEQ ID NO: 39134 - RNA, 23 nt, Artificial Sequence
  Chemically synthesized
uuccaguucuuucucuccaguga

SEQ ID NO: 39135 - RNA, 23 nt, Artificial Sequence
  Chemically synthesized
cacucccaauauccugcgucccc

SEQ ID NO: 39136 - RNA, 23 nt, Artificial Sequence
  Chemically synthesized
ucacaaaccacccaaacaaauau

SEQ ID NO: 39137 - RNA, 23 nt, Artificial Sequence
  Chemically synthesized
cacaaaccacccaaacaaauauu

SEQ ID NO: 39138 - RNA, 23 nt, Artificial Sequence
  Chemically synthesized
acaaaccacccaaacaaauauuu

SEQ ID NO: 39139 - RNA, 23 nt, Artificial Sequence
  Chemically synthesized
caaaccacccaaacaaauauuua

SEQ ID NO: 39140 - RNA, 23 nt, Artificial Sequence
  Chemically synthesized
aaaccacccaaacaaauauuuau

SEQ ID NO: 39141 - RNA, 23 nt, Artificial Sequence
  Chemically synthesized
uauuuauugagcaccuugacuac

SEQ ID NO: 39142 - RNA, 23 nt, Artificial Sequence
  Chemically synthesized
auuuauugagcaccuugacuacu

SEQ ID NO: 39143 - RNA, 23 nt, Artificial Sequence
  Chemically synthesized
uuuauugagcaccuugacuacua

SEQ ID NO: 39144 - RNA, 23 nt, Artificial Sequence
  Chemically synthesized
uuauugagcaccuugacuacuac

SEQ ID NO: 39145 - RNA, 23 nt, Artificial Sequence
  Chemically synthesized
uauugagcaccuugacuacuaca

SEQ ID NO: 39146 - RNA, 23 nt, Artificial Sequence
  Chemically synthesized
acucccaauauccugcguccccu

SEQ ID NO: 39147 - RNA, 23 nt, Artificial Sequence
  Chemically synthesized
cacacaugauaugucuucaagga

SEQ ID NO: 39148 - RNA, 23 nt, Artificial Sequence
  Chemically synthesized
cacaugauaugucuucaaggagc

SEQ ID NO: 39149 - RNA, 23 nt, Artificial Sequence
  Chemically synthesized
acaugauaugucuucaaggagcu

SEQ ID NO: 39150 - RNA, 23 nt, Artificial Sequence
  Chemically synthesized
caugauaugucuucaaggagcua

SEQ ID NO: 39151 - RNA, 23 nt, Artificial Sequence
  Chemically synthesized
augauaugucuucaaggagcuaa

SEQ ID NO: 39152 - RNA, 23 nt, Artificial Sequence
  Chemically synthesized
ugauaugucuucaaggagcuaaa

SEQ ID NO: 39153 - RNA, 23 nt, Artificial Sequence
  Chemically synthesized
agguaggauuguagcuaagguug

SEQ ID NO: 39154 - RNA, 23 nt, Artificial Sequence
  Chemically synthesized
gguaggauuguagcuaagguugg

SEQ ID NO: 39155 - RNA, 23 nt, Artificial Sequence
  Chemically synthesized
guaggauuguagcuaagguuggc

SEQ ID NO: 39156 - RNA, 23 nt, Artificial Sequence
  Chemically synthesized
uaggauuguagcuaagguuggcu

SEQ ID NO: 39157 - RNA, 23 nt, Artificial Sequence
  Chemically synthesized
gacacagaaguagacugcucagg

SEQ ID NO: 39158 - RNA, 23 nt, Artificial Sequence
  Chemically synthesized
acacagaaguagacugcucaggg

SEQ ID NO: 39159 - RNA, 23 nt, Artificial Sequence
  Chemically synthesized
cacagaaguagacugcucaggga

SEQ ID NO: 39160 - RNA, 23 nt, Artificial Sequence
  Chemically synthesized
acagaaguagacugcucagggac

SEQ ID NO: 39161 - RNA, 23 nt, Artificial Sequence
  Chemically synthesized
cagaaguagacugcucagggacu

SEQ ID NO: 39162 - RNA, 23 nt, Artificial Sequence
  Chemically synthesized
aguucucauaaaccaaggugaag

SEQ ID NO: 39163 - RNA, 23 nt, Artificial Sequence
  Chemically synthesized
guucucauaaaccaaggugaaga

SEQ ID NO: 39164 - RNA, 23 nt, Artificial Sequence
  Chemically synthesized
agaaggguucuaagcaggggggu

SEQ ID NO: 39165 - RNA, 23 nt, Artificial Sequence
  Chemically synthesized
uuuaauacugaaagagaaagcag

SEQ ID NO: 39166 - RNA, 23 nt, Artificial Sequence
  Chemically synthesized
uuaauacugaaagagaaagcagg

SEQ ID NO: 39167 - RNA, 23 nt, Artificial Sequence
  Chemically synthesized
uaauacugaaagagaaagcagga

SEQ ID NO: 39168 - RNA, 23 nt, Artificial Sequence
  Chemically synthesized
aauacugaaagagaaagcaggaa

SEQ ID NO: 39169 - RNA, 23 nt, Artificial Sequence
  Chemically synthesized
auacugaaagagaaagcaggaac

SEQ ID NO: 39170 - RNA, 23 nt, Artificial Sequence
  Chemically synthesized
agagaaagcaggaacaaagaacu

SEQ ID NO: 39171 - RNA, 23 nt, Artificial Sequence
  Chemically synthesized
gagaaagcaggaacaaagaacua

SEQ ID NO: 39172 - RNA, 23 nt, Artificial Sequence
  Chemically synthesized
agaaagcaggaacaaagaacuac

SEQ ID NO: 39173 - RNA, 23 nt, Artificial Sequence
  Chemically synthesized
gaaagcaggaacaaagaacuaca

SEQ ID NO: 39174 - RNA, 23 nt, Artificial Sequence
  Chemically synthesized
aaagcaggaacaaagaacuacau

SEQ ID NO: 39175 - RNA, 23 nt, Artificial Sequence
  Chemically synthesized
aagcaggaacaaagaacuacauu

SEQ ID NO: 39176 - RNA, 23 nt, Artificial Sequence
  Chemically synthesized
agcaggaacaaagaacuacauua

SEQ ID NO: 39177 - RNA, 23 nt, Artificial Sequence
  Chemically synthesized
gaaugaaagugggaauaguaagg

SEQ ID NO: 39178 - RNA, 23 nt, Artificial Sequence
  Chemically synthesized
caggaaggaaaaagacagagagg

SEQ ID NO: 39179 - RNA, 23 nt, Artificial Sequence
  Chemically synthesized
aggaaggaaaaagacagagaggu

SEQ ID NO: 39180 - RNA, 23 nt, Artificial Sequence
  Chemically synthesized
ggaaggaaaaagacagagaggug

SEQ ID NO: 39181 - RNA, 23 nt, Artificial Sequence
  Chemically synthesized
aaacaaccaacgaaagaucuuug

SEQ ID NO: 39182 - RNA, 23 nt, Artificial Sequence
  Chemically synthesized
aacaaccaacgaaagaucuuuga

SEQ ID NO: 39183 - RNA, 23 nt, Artificial Sequence
  Chemically synthesized
acaaccaacgaaagaucuuugag

SEQ ID NO: 39184 - RNA, 23 nt, Artificial Sequence
  Chemically synthesized
caaccaacgaaagaucuuugaga

SEQ ID NO: 39185 - RNA, 23 nt, Artificial Sequence
  Chemically synthesized
aaccaacgaaagaucuuugagac

SEQ ID NO: 39186 - RNA, 23 nt, Artificial Sequence
  Chemically synthesized
cuacauuaaauuuggacaccuuc

SEQ ID NO: 39187 - RNA, 23 nt, Artificial Sequence
  Chemically synthesized
uacauuaaauuuggacaccuucc

SEQ ID NO: 39188 - RNA, 23 nt, Artificial Sequence
  Chemically synthesized
acauuaaauuuggacaccuucca

SEQ ID NO: 39189 - RNA, 23 nt, Artificial Sequence
  Chemically synthesized
cauuaaauuuggacaccuuccaa

SEQ ID NO: 39190 - RNA, 23 nt, Artificial Sequence
  Chemically synthesized
auuaaauuuggacaccuuccaaa

SEQ ID NO: 39191 - RNA, 23 nt, Artificial Sequence
  Chemically synthesized
ggugaugauguccuucuccagaa

SEQ ID NO: 39192 - RNA, 23 nt, Artificial Sequence
  Chemically synthesized
gugaugauguccuucuccagaag

SEQ ID NO: 39193 - RNA, 23 nt, Artificial Sequence
  Chemically synthesized
ugaugauguccuucuccagaaga

SEQ ID NO: 39194 - RNA, 23 nt, Artificial Sequence
  Chemically synthesized
gaugauguccuucuccagaagau

SEQ ID NO: 39195 - RNA, 23 nt, Artificial Sequence
  Chemically synthesized
augauguccuucuccagaagaug

SEQ ID NO: 39196 - RNA, 23 nt, Artificial Sequence
  Chemically synthesized
aaagcuggaacugaacacaaaua

SEQ ID NO: 39197 - RNA, 23 nt, Artificial Sequence
  Chemically synthesized
uaaccacacuguguuuacaacuu

SEQ ID NO: 39198 - RNA, 23 nt, Artificial Sequence
  Chemically synthesized
acuucacuugucaggcucuucaa

SEQ ID NO: 39199 - RNA, 23 nt, Artificial Sequence
  Chemically synthesized
cuucacuugucaggcucuucaac

SEQ ID NO: 39200 - RNA, 23 nt, Artificial Sequence
  Chemically synthesized
uucacuugucaggcucuucaacu

SEQ ID NO: 39201 - RNA, 23 nt, Artificial Sequence
  Chemically synthesized
ucacuugucaggcucuucaacug

SEQ ID NO: 39202 - RNA, 23 nt, Artificial Sequence
  Chemically synthesized
ccugaagaucaaaggcucuauca

SEQ ID NO: 39203 - RNA, 23 nt, Artificial Sequence
  Chemically synthesized
cugaagaucaaaggcucuaucac

SEQ ID NO: 39204 - RNA, 23 nt, Artificial Sequence
  Chemically synthesized
ugaagaucaaaggcucuaucaca

SEQ ID NO: 39205 - RNA, 23 nt, Artificial Sequence
  Chemically synthesized
auguucuaacaauucgcucaaca

SEQ ID NO: 39206 - RNA, 23 nt, Artificial Sequence
  Chemically synthesized
accuucccgauccuugauaagug

SEQ ID NO: 39207 - RNA, 23 nt, Artificial Sequence
  Chemically synthesized
uccuugauaagugcguucaccuu

SEQ ID NO: 39208 - RNA, 23 nt, Artificial Sequence
  Chemically synthesized
gagcaagagccucgauguaccag

SEQ ID NO: 39209 - RNA, 23 nt, Artificial Sequence
  Chemically synthesized
agcaagagccucgauguaccagg

SEQ ID NO: 39210 - RNA, 23 nt, Artificial Sequence
  Chemically synthesized
gcaagagccucgauguaccagga

SEQ ID NO: 39211 - RNA, 23 nt, Artificial Sequence
  Chemically synthesized
caagagccucgauguaccaggaa

SEQ ID NO: 39212 - RNA, 23 nt, Artificial Sequence
  Chemically synthesized
aagagccucgauguaccaggaac

SEQ ID NO: 39213 - RNA, 23 nt, Artificial Sequence
  Chemically synthesized
ucuucggcaacuuuucuuuaccg

SEQ ID NO: 39214 - RNA, 23 nt, Artificial Sequence
  Chemically synthesized
uuaccggcaucacucuccucgca

SEQ ID NO: 39215 - RNA, 23 nt, Artificial Sequence
  Chemically synthesized
uugguuuguucuguaggcuuggg

SEQ ID NO: 39216 - RNA, 23 nt, Artificial Sequence
  Chemically synthesized
ugguuuguucuguaggcuugggc

SEQ ID NO: 39217 - RNA, 23 nt, Artificial Sequence
  Chemically synthesized
gguuuguucuguaggcuugggca

SEQ ID NO: 39218 - RNA, 23 nt, Artificial Sequence
  Chemically synthesized
guuuguucuguaggcuugggcag

SEQ ID NO: 39219 - RNA, 23 nt, Artificial Sequence
  Chemically synthesized
uuuguucuguaggcuugggcagu

SEQ ID NO: 39220 - RNA, 23 nt, Artificial Sequence
  Chemically synthesized
cauagaacauggacgucauagcc

SEQ ID NO: 39221 - RNA, 23 nt, Artificial Sequence
  Chemically synthesized
auagaacauggacgucauagccc

SEQ ID NO: 39222 - RNA, 23 nt, Artificial Sequence
  Chemically synthesized
uagaacauggacgucauagccca

SEQ ID NO: 39223 - RNA, 23 nt, Artificial Sequence
  Chemically synthesized
agaacauggacgucauagcccaa

SEQ ID NO: 39224 - RNA, 23 nt, Artificial Sequence
  Chemically synthesized
agagcgaaauuccaguucuuucu

SEQ ID NO: 39225 - RNA, 23 nt, Artificial Sequence
  Chemically synthesized
gagcgaaauuccaguucuuucuc

SEQ ID NO: 39226 - RNA, 23 nt, Artificial Sequence
  Chemically synthesized
agcgaaauuccaguucuuucucu

SEQ ID NO: 39227 - RNA, 23 nt, Artificial Sequence
  Chemically synthesized
gcgaaauuccaguucuuucucuc

SEQ ID NO: 39228 - RNA, 23 nt, Artificial Sequence
  Chemically synthesized
cgaaauuccaguucuuucucucc

SEQ ID NO: 39229 - RNA, 23 nt, Artificial Sequence
  Chemically synthesized
uccaguucuuucucuccagugaa

SEQ ID NO: 39230 - RNA, 23 nt, Artificial Sequence
  Chemically synthesized
ccaguucuuucucuccagugaag

SEQ ID NO: 39231 - RNA, 23 nt, Artificial Sequence
  Chemically synthesized
caguucuuucucuccagugaagu

SEQ ID NO: 39232 - RNA, 23 nt, Artificial Sequence
  Chemically synthesized
aguucuuucucuccagugaagug

SEQ ID NO: 39233 - RNA, 23 nt, Artificial Sequence
  Chemically synthesized
auaaauaugagcauuuauuuggc

SEQ ID NO: 39234 - RNA, 23 nt, Artificial Sequence
  Chemically synthesized
uaaauaugagcauuuauuuggca

SEQ ID NO: 39235 - RNA, 23 nt, Artificial Sequence
  Chemically synthesized
aaauaugagcauuuauuuggcac

SEQ ID NO: 39236 - RNA, 23 nt, Artificial Sequence
  Chemically synthesized
aauaugagcauuuauuuggcacc

SEQ ID NO: 39237 - RNA, 23 nt, Artificial Sequence
  Chemically synthesized
auaugagcauuuauuuggcaccc

SEQ ID NO: 39238 - RNA, 23 nt, Artificial Sequence
  Chemically synthesized
aagguucucucucucaaauacuu

SEQ ID NO: 39239 - RNA, 23 nt, Artificial Sequence
  Chemically synthesized
agguucucucucucaaauacuuc

SEQ ID NO: 39240 - RNA, 23 nt, Artificial Sequence
  Chemically synthesized
auauuuauugagcaccuugacua

SEQ ID NO: 39241 - RNA, 23 nt, Artificial Sequence
  Chemically synthesized
agaaguagacugcucagggacug

SEQ ID NO: 39242 - RNA, 23 nt, Artificial Sequence
  Chemically synthesized
gaaguagacugcucagggacuga

SEQ ID NO: 39243 - RNA, 23 nt, Artificial Sequence
  Chemically synthesized
aaguagacugcucagggacugaa

SEQ ID NO: 39244 - RNA, 23 nt, Artificial Sequence
  Chemically synthesized
ggcaggaaagagcacaaaauuag

SEQ ID NO: 39245 - RNA, 23 nt, Artificial Sequence
  Chemically synthesized
gcaggaaagagcacaaaauuaga

SEQ ID NO: 39246 - RNA, 23 nt, Artificial Sequence
  Chemically synthesized
caggaaagagcacaaaauuagaa

SEQ ID NO: 39247 - RNA, 23 nt, Artificial Sequence
  Chemically synthesized
gagcacaaaauuagaagcugaga

SEQ ID NO: 39248 - RNA, 23 nt, Artificial Sequence
  Chemically synthesized
aaauuagaagcugagaggagacc

SEQ ID NO: 39249 - RNA, 23 nt, Artificial Sequence
  Chemically synthesized
aauuagaagcugagaggagacca

SEQ ID NO: 39250 - RNA, 23 nt, Artificial Sequence
  Chemically synthesized
auuagaagcugagaggagaccac

SEQ ID NO: 39251 - RNA, 23 nt, Artificial Sequence
  Chemically synthesized
uuagaagcugagaggagaccacu

SEQ ID NO: 39252 - RNA, 23 nt, Artificial Sequence
  Chemically synthesized
uagaagcugagaggagaccacuc

SEQ ID NO: 39253 - RNA, 23 nt, Artificial Sequence
  Chemically synthesized
agggaaguugggaaguuucagau

SEQ ID NO: 39254 - RNA, 23 nt, Artificial Sequence
  Chemically synthesized
gggaaguugggaaguuucagaua

SEQ ID NO: 39255 - RNA, 23 nt, Artificial Sequence
  Chemically synthesized
ggaaguugggaaguuucagauaa

SEQ ID NO: 39256 - RNA, 23 nt, Artificial Sequence
  Chemically synthesized
gaaguugggaaguuucagauaag

SEQ ID NO: 39257 - RNA, 23 nt, Artificial Sequence
  Chemically synthesized
aaguugggaaguuucagauaagc

SEQ ID NO: 39258 - RNA, 23 nt, Artificial Sequence
  Chemically synthesized
aguugggaaguuucagauaagca

SEQ ID NO: 39259 - RNA, 23 nt, Artificial Sequence
  Chemically synthesized
guugggaaguuucagauaagcag

SEQ ID NO: 39260 - RNA, 23 nt, Artificial Sequence
  Chemically synthesized
uugggaaguuucagauaagcagg

SEQ ID NO: 39261 - RNA, 23 nt, Artificial Sequence
  Chemically synthesized
ugggaaguuucagauaagcaggg

SEQ ID NO: 39262 - RNA, 23 nt, Artificial Sequence
  Chemically synthesized
caaaggagaguuuaauacugaaa

SEQ ID NO: 39263 - RNA, 23 nt, Artificial Sequence
  Chemically synthesized
aaaggagaguuuaauacugaaag

SEQ ID NO: 39264 - RNA, 23 nt, Artificial Sequence
  Chemically synthesized
aaggagaguuuaauacugaaaga

SEQ ID NO: 39265 - RNA, 23 nt, Artificial Sequence
  Chemically synthesized
caaagaacuacauuacaucuuug

SEQ ID NO: 39266 - RNA, 23 nt, Artificial Sequence
  Chemically synthesized
aaagaacuacauuacaucuuuga

SEQ ID NO: 39267 - RNA, 23 nt, Artificial Sequence
  Chemically synthesized
aagaacuacauuacaucuuugag

SEQ ID NO: 39268 - RNA, 23 nt, Artificial Sequence
  Chemically synthesized
aagcaggauucuagacagauuug

SEQ ID NO: 39269 - RNA, 23 nt, Artificial Sequence
  Chemically synthesized
aggcucauuucaguaacaaagcu

SEQ ID NO: 39270 - RNA, 23 nt, Artificial Sequence
  Chemically synthesized
uucuucagagccaaaagauaaug

SEQ ID NO: 39271 - RNA, 23 nt, Artificial Sequence
  Chemically synthesized
caucuacaaaagcuggaacugaa

SEQ ID NO: 39272 - RNA, 23 nt, Artificial Sequence
  Chemically synthesized
aucuacaaaagcuggaacugaac

SEQ ID NO: 39273 - RNA, 23 nt, Artificial Sequence
  Chemically synthesized
ucuacaaaagcuggaacugaaca

SEQ ID NO: 39274 - RNA, 23 nt, Artificial Sequence
  Chemically synthesized
ggcagaacagaaaccgugcaucc

SEQ ID NO: 39275 - RNA, 23 nt, Artificial Sequence
  Chemically synthesized
gcagaacagaaaccgugcauccu

SEQ ID NO: 39276 - RNA, 23 nt, Artificial Sequence
  Chemically synthesized
cagaacagaaaccgugcauccug

SEQ ID NO: 39277 - RNA, 23 nt, Artificial Sequence
  Chemically synthesized
agaacagaaaccgugcauccuga

SEQ ID NO: 39278 - RNA, 23 nt, Artificial Sequence
  Chemically synthesized
gaacagaaaccgugcauccugaa

SEQ ID NO: 39279 - RNA, 23 nt, Artificial Sequence
  Chemically synthesized
uguucuaacaauucgcucaacaa

SEQ ID NO: 39280 - RNA, 23 nt, Artificial Sequence
  Chemically synthesized
ucacaagcccgcucagaaaacac

SEQ ID NO: 39281 - RNA, 23 nt, Artificial Sequence
  Chemically synthesized
cacaagcccgcucagaaaacacu

SEQ ID NO: 39282 - RNA, 23 nt, Artificial Sequence
  Chemically synthesized
acaagcccgcucagaaaacacuu

SEQ ID NO: 39283 - RNA, 23 nt, Artificial Sequence
  Chemically synthesized
caagcccgcucagaaaacacuug

SEQ ID NO: 39284 - RNA, 23 nt, Artificial Sequence
  Chemically synthesized
aagcccgcucagaaaacacuuga

SEQ ID NO: 39285 - RNA, 23 nt, Artificial Sequence
  Chemically synthesized
gcaguuucccauccacaccauag

SEQ ID NO: 39286 - RNA, 23 nt, Artificial Sequence
  Chemically synthesized
caguuucccauccacaccauaga

SEQ ID NO: 39287 - RNA, 23 nt, Artificial Sequence
  Chemically synthesized
aguuucccauccacaccauagau

SEQ ID NO: 39288 - RNA, 23 nt, Artificial Sequence
  Chemically synthesized
guuucccauccacaccauagaug

SEQ ID NO: 39289 - RNA, 23 nt, Artificial Sequence
  Chemically synthesized
uuucccauccacaccauagaugg

SEQ ID NO: 39290 - RNA, 23 nt, Artificial Sequence
  Chemically synthesized
gaacauggacgucauagcccaaa

SEQ ID NO: 39291 - RNA, 23 nt, Artificial Sequence
  Chemically synthesized
cucucucaaauacuuccauacua

SEQ ID NO: 39292 - RNA, 23 nt, Artificial Sequence
  Chemically synthesized
ucucucaaauacuuccauacuau

SEQ ID NO: 39293 - RNA, 23 nt, Artificial Sequence
  Chemically synthesized
cucucaaauacuuccauacuaug

SEQ ID NO: 39294 - RNA, 23 nt, Artificial Sequence
  Chemically synthesized
ugccuucuucccucuuuuauuca

SEQ ID NO: 39295 - RNA, 23 nt, Artificial Sequence
  Chemically synthesized
gccuucuucccucuuuuauucaa

SEQ ID NO: 39296 - RNA, 23 nt, Artificial Sequence
  Chemically synthesized
ccuucuucccucuuuuauucaac

SEQ ID NO: 39297 - RNA, 23 nt, Artificial Sequence
  Chemically synthesized
cuucuucccucuuuuauucaaca

SEQ ID NO: 39298 - RNA, 23 nt, Artificial Sequence
  Chemically synthesized
uucuucccucuuuuauucaacaa

SEQ ID NO: 39299 - RNA, 23 nt, Artificial Sequence
  Chemically synthesized
ucuucccucuuuuauucaacaaa

SEQ ID NO: 39300 - RNA, 23 nt, Artificial Sequence
  Chemically synthesized
cuucccucuuuuauucaacaaac

SEQ ID NO: 39301 - RNA, 23 nt, Artificial Sequence
  Chemically synthesized
uucccucuuuuauucaacaaaca

SEQ ID NO: 39302 - RNA, 23 nt, Artificial Sequence
  Chemically synthesized
acauuuaaugaaggcccacuaug

SEQ ID NO: 39303 - RNA, 23 nt, Artificial Sequence
  Chemically synthesized
cauuuaaugaaggcccacuaugu

SEQ ID NO: 39304 - RNA, 23 nt, Artificial Sequence
  Chemically synthesized
auuuaaugaaggcccacuaugug

SEQ ID NO: 39305 - RNA, 23 nt, Artificial Sequence
  Chemically synthesized
cugcccucauuuacagccuggua

SEQ ID NO: 39306 - RNA, 23 nt, Artificial Sequence
  Chemically synthesized
uuucucaggaaggaaaaagacag

SEQ ID NO: 39307 - RNA, 23 nt, Artificial Sequence
  Chemically synthesized
uucucaggaaggaaaaagacaga

SEQ ID NO: 39308 - RNA, 23 nt, Artificial Sequence
  Chemically synthesized
ucucaggaaggaaaaagacagag

SEQ ID NO: 39309 - RNA, 23 nt, Artificial Sequence
  Chemically synthesized
cucaggaaggaaaaagacagaga

SEQ ID NO: 39310 - RNA, 23 nt, Artificial Sequence
  Chemically synthesized
ucaggaaggaaaaagacagagag

SEQ ID NO: 39311 - RNA, 23 nt, Artificial Sequence
  Chemically synthesized
auucuuccuggccuucucugaug

SEQ ID NO: 39312 - RNA, 23 nt, Artificial Sequence
  Chemically synthesized
uucuuccuggccuucucugaugc

SEQ ID NO: 39313 - RNA, 23 nt, Artificial Sequence
  Chemically synthesized
ucuuccuggccuucucugaugcu

SEQ ID NO: 39314 - RNA, 23 nt, Artificial Sequence
  Chemically synthesized
cuuccuggccuucucugaugcuc

SEQ ID NO: 39315 - RNA, 23 nt, Artificial Sequence
  Chemically synthesized
uuccuggccuucucugaugcucc

SEQ ID NO: 39316 - RNA, 23 nt, Artificial Sequence
  Chemically synthesized
accaacgaaagaucuuugagacu

SEQ ID NO: 39317 - RNA, 23 nt, Artificial Sequence
  Chemically synthesized
caccuuccaaacucucacucuag

SEQ ID NO: 39318 - RNA, 23 nt, Artificial Sequence
  Chemically synthesized
accuuccaaacucucacucuagg

SEQ ID NO: 39319 - RNA, 23 nt, Artificial Sequence
  Chemically synthesized
ccuuccaaacucucacucuagga

SEQ ID NO: 39320 - RNA, 23 nt, Artificial Sequence
  Chemically synthesized
aaagggcggaggauaugaaugaa

SEQ ID NO: 39321 - RNA, 23 nt, Artificial Sequence
  Chemically synthesized
uucagacaucuccuugcaccggu

SEQ ID NO: 39322 - RNA, 23 nt, Artificial Sequence
  Chemically synthesized
ucagacaucuccuugcaccggug

SEQ ID NO: 39323 - RNA, 23 nt, Artificial Sequence
  Chemically synthesized
guucuaacaauucgcucaacaac

SEQ ID NO: 39324 - RNA, 23 nt, Artificial Sequence
  Chemically synthesized
uucuaacaauucgcucaacaaca

SEQ ID NO: 39325 - RNA, 23 nt, Artificial Sequence
  Chemically synthesized
agaacauuuuugguuuguucugu

SEQ ID NO: 39326 - RNA, 23 nt, Artificial Sequence
  Chemically synthesized
gaacauuuuugguuuguucugua

SEQ ID NO: 39327 - RNA, 23 nt, Artificial Sequence
  Chemically synthesized
ggagcaguuucccauccacacca

SEQ ID NO: 39328 - RNA, 23 nt, Artificial Sequence
  Chemically synthesized
gagcaguuucccauccacaccau

SEQ ID NO: 39329 - RNA, 23 nt, Artificial Sequence
  Chemically synthesized
agcaguuucccauccacaccaua

SEQ ID NO: 39330 - RNA, 23 nt, Artificial Sequence
  Chemically synthesized
uucccauccacaccauagauggc

SEQ ID NO: 39331 - RNA, 23 nt, Artificial Sequence
  Chemically synthesized
ucugcaguuucucuugcauuucc

SEQ ID NO: 39332 - RNA, 23 nt, Artificial Sequence
  Chemically synthesized
cugcaguuucucuugcauuuccu

SEQ ID NO: 39333 - RNA, 23 nt, Artificial Sequence
  Chemically synthesized
ugcaguuucucuugcauuuccug

SEQ ID NO: 39334 - RNA, 23 nt, Artificial Sequence
  Chemically synthesized
gcaguuucucuugcauuuccugu

SEQ ID NO: 39335 - RNA, 23 nt, Artificial Sequence
  Chemically synthesized
uucuuucucuccagugaagugca

SEQ ID NO: 39336 - RNA, 23 nt, Artificial Sequence
  Chemically synthesized
ucuuucucuccagugaagugcac

SEQ ID NO: 39337 - RNA, 23 nt, Artificial Sequence
  Chemically synthesized
cuuucucuccagugaagugcaca

SEQ ID NO: 39338 - RNA, 23 nt, Artificial Sequence
  Chemically synthesized
uuucucuccagugaagugcacau

SEQ ID NO: 39339 - RNA, 23 nt, Artificial Sequence
  Chemically synthesized
uucucuccagugaagugcacauu

SEQ ID NO: 39340 - RNA, 23 nt, Artificial Sequence
  Chemically synthesized
cuuuuuuagaguuuccugaugau

SEQ ID NO: 39341 - RNA, 23 nt, Artificial Sequence
  Chemically synthesized
uuuuuuagaguuuccugaugaug

SEQ ID NO: 39342 - RNA, 23 nt, Artificial Sequence
  Chemically synthesized
uugcuagggaccaugggagaugu

SEQ ID NO: 39343 - RNA, 23 nt, Artificial Sequence
  Chemically synthesized
ugcuagggaccaugggagaugug

SEQ ID NO: 39344 - RNA, 23 nt, Artificial Sequence
  Chemically synthesized
gcuagggaccaugggagauguga

SEQ ID NO: 39345 - RNA, 23 nt, Artificial Sequence
  Chemically synthesized
cuagggaccaugggagaugugaa

SEQ ID NO: 39346 - RNA, 23 nt, Artificial Sequence
  Chemically synthesized
uagggaccaugggagaugugaag

SEQ ID NO: 39347 - RNA, 23 nt, Artificial Sequence
  Chemically synthesized
uugccuucuucccucuuuuauuc

SEQ ID NO: 39348 - RNA, 23 nt, Artificial Sequence
  Chemically synthesized
uauauuuaaacaaccaaauccug

SEQ ID NO: 39349 - RNA, 23 nt, Artificial Sequence
  Chemically synthesized
auauuuaaacaaccaaauccugg

SEQ ID NO: 39350 - RNA, 23 nt, Artificial Sequence
  Chemically synthesized
uauuuaaacaaccaaauccuggc

SEQ ID NO: 39351 - RNA, 23 nt, Artificial Sequence
  Chemically synthesized
auuuaaacaaccaaauccuggcc

SEQ ID NO: 39352 - RNA, 23 nt, Artificial Sequence
  Chemically synthesized
uuuaaacaaccaaauccuggcca

SEQ ID NO: 39353 - RNA, 23 nt, Artificial Sequence
  Chemically synthesized
aguuuaauacugaaagagaaagc

SEQ ID NO: 39354 - RNA, 23 nt, Artificial Sequence
  Chemically synthesized
guuuaauacugaaagagaaagca

SEQ ID NO: 39355 - RNA, 23 nt, Artificial Sequence
  Chemically synthesized
aagagaaagcaggaacaaagaac

SEQ ID NO: 39356 - RNA, 23 nt, Artificial Sequence
  Chemically synthesized
aacaaagaacuacauuacaucuu

SEQ ID NO: 39357 - RNA, 23 nt, Artificial Sequence
  Chemically synthesized
acaaagaacuacauuacaucuuu

SEQ ID NO: 39358 - RNA, 23 nt, Artificial Sequence
  Chemically synthesized
agacagauuugguggcagcagcc

SEQ ID NO: 39359 - RNA, 23 nt, Artificial Sequence
  Chemically synthesized
agugggaauaguaagggagagag

SEQ ID NO: 39360 - RNA, 23 nt, Artificial Sequence
  Chemically synthesized
ugucuacauuaaauuuggacacc

SEQ ID NO: 39361 - RNA, 23 nt, Artificial Sequence
  Chemically synthesized
gucuacauuaaauuuggacaccu

SEQ ID NO: 39362 - RNA, 23 nt, Artificial Sequence
  Chemically synthesized
ucuacauuaaauuuggacaccuu

SEQ ID NO: 39363 - RNA, 23 nt, Artificial Sequence
  Chemically synthesized
cuggcaauagguccaaccaaggc

SEQ ID NO: 39364 - RNA, 23 nt, Artificial Sequence
  Chemically synthesized
uggcaauagguccaaccaaggcu

SEQ ID NO: 39365 - RNA, 23 nt, Artificial Sequence
  Chemically synthesized
ggcaauagguccaaccaaggcug

SEQ ID NO: 39366 - RNA, 23 nt, Artificial Sequence
  Chemically synthesized
gcaauagguccaaccaaggcugg

SEQ ID NO: 39367 - RNA, 23 nt, Artificial Sequence
  Chemically synthesized
caauagguccaaccaaggcuggc

SEQ ID NO: 39368 - RNA, 23 nt, Artificial Sequence
  Chemically synthesized
accuauaugccagcuggaagugu

SEQ ID NO: 39369 - RNA, 23 nt, Artificial Sequence
  Chemically synthesized
ccuauaugccagcuggaagugug

SEQ ID NO: 39370 - RNA, 23 nt, Artificial Sequence
  Chemically synthesized
cuauaugccagcuggaagugugu

SEQ ID NO: 39371 - RNA, 23 nt, Artificial Sequence
  Chemically synthesized
uauaugccagcuggaaguguguu

SEQ ID NO: 39372 - RNA, 23 nt, Artificial Sequence
  Chemically synthesized
auaugccagcuggaaguguguuu

SEQ ID NO: 39373 - RNA, 23 nt, Artificial Sequence
  Chemically synthesized
guguguuugauaaaauucaggag

SEQ ID NO: 39374 - RNA, 23 nt, Artificial Sequence
  Chemically synthesized
uguguuugauaaaauucaggagu

SEQ ID NO: 39375 - RNA, 23 nt, Artificial Sequence
  Chemically synthesized
guguuugauaaaauucaggagug

SEQ ID NO: 39376 - RNA, 23 nt, Artificial Sequence
  Chemically synthesized
uguuugauaaaauucaggagugc

SEQ ID NO: 39377 - RNA, 23 nt, Artificial Sequence
  Chemically synthesized
guuugauaaaauucaggagugca

SEQ ID NO: 39378 - RNA, 23 nt, Artificial Sequence
  Chemically synthesized
cuggcugaaacugcccacuuugg

SEQ ID NO: 39379 - RNA, 23 nt, Artificial Sequence
  Chemically synthesized
uggcugaaacugcccacuuuggc

SEQ ID NO: 39380 - RNA, 23 nt, Artificial Sequence
  Chemically synthesized
ggcugaaacugcccacuuuggcc

SEQ ID NO: 39381 - RNA, 23 nt, Artificial Sequence
  Chemically synthesized
gcugaaacugcccacuuuggccu

SEQ ID NO: 39382 - RNA, 23 nt, Artificial Sequence
  Chemically synthesized
cugaaacugcccacuuuggccug

SEQ ID NO: 39383 - RNA, 23 nt, Artificial Sequence
  Chemically synthesized
gaggcucauuucaguaacaaagc

SEQ ID NO: 39384 - RNA, 23 nt, Artificial Sequence
  Chemically synthesized
ucuuugagacuuccaugggcaaa

SEQ ID NO: 39385 - RNA, 23 nt, Artificial Sequence
  Chemically synthesized
cuuugagacuuccaugggcaaag

SEQ ID NO: 39386 - RNA, 23 nt, Artificial Sequence
  Chemically synthesized
agccaagaguguccuuccacugg

SEQ ID NO: 39387 - RNA, 23 nt, Artificial Sequence
  Chemically synthesized
gccaagaguguccuuccacuggg

SEQ ID NO: 39388 - RNA, 23 nt, Artificial Sequence
  Chemically synthesized
ccaagaguguccuuccacugggu

SEQ ID NO: 39389 - RNA, 23 nt, Artificial Sequence
  Chemically synthesized
caagaguguccuuccacugggug

SEQ ID NO: 39390 - RNA, 23 nt, Artificial Sequence
  Chemically synthesized
aagaguguccuuccacugggugg

SEQ ID NO: 39391 - RNA, 23 nt, Artificial Sequence
  Chemically synthesized
uuggacaccuuccaaacucucac

SEQ ID NO: 39392 - RNA, 23 nt, Artificial Sequence
  Chemically synthesized
uggacaccuuccaaacucucacu

SEQ ID NO: 39393 - RNA, 23 nt, Artificial Sequence
  Chemically synthesized
ggacaccuuccaaacucucacuc

SEQ ID NO: 39394 - RNA, 23 nt, Artificial Sequence
  Chemically synthesized
gacaccuuccaaacucucacucu

SEQ ID NO: 39395 - RNA, 23 nt, Artificial Sequence
  Chemically synthesized
acaccuuccaaacucucacucua

SEQ ID NO: 39396 - RNA, 23 nt, Artificial Sequence
  Chemically synthesized
aagcuggaacugaacacaaauau

SEQ ID NO: 39397 - RNA, 23 nt, Artificial Sequence
  Chemically synthesized
agcuggaacugaacacaaauaug

SEQ ID NO: 39398 - RNA, 23 nt, Artificial Sequence
  Chemically synthesized
cuucaacugcagcugaaacauuc

SEQ ID NO: 39399 - RNA, 23 nt, Artificial Sequence
  Chemically synthesized
uucaacugcagcugaaacauucc

SEQ ID NO: 39400 - RNA, 23 nt, Artificial Sequence
  Chemically synthesized
aaccuauaugccagcuggaagug

SEQ ID NO: 39401 - RNA, 23 nt, Artificial Sequence
  Chemically synthesized
ugaggggaaaagacaagaugugg

SEQ ID NO: 39402 - RNA, 23 nt, Artificial Sequence
  Chemically synthesized
gaggggaaaagacaagauguggu

SEQ ID NO: 39403 - RNA, 23 nt, Artificial Sequence
  Chemically synthesized
uuugagacuuccaugggcaaaga

SEQ ID NO: 39404 - RNA, 23 nt, Artificial Sequence
  Chemically synthesized
agguacaaaugcaaggcaauguu

SEQ ID NO: 39405 - RNA, 23 nt, Artificial Sequence
  Chemically synthesized
gguacaaaugcaaggcaauguug

SEQ ID NO: 39406 - RNA, 23 nt, Artificial Sequence
  Chemically synthesized
guacaaaugcaaggcaauguugg

SEQ ID NO: 39407 - RNA, 23 nt, Artificial Sequence
  Chemically synthesized
uacaaaugcaaggcaauguuggc

SEQ ID NO: 39408 - RNA, 23 nt, Artificial Sequence
  Chemically synthesized
ucccauccacaccauagauggcg

SEQ ID NO: 39409 - RNA, 23 nt, Artificial Sequence
  Chemically synthesized
cccauccacaccauagauggcgc

SEQ ID NO: 39410 - RNA, 23 nt, Artificial Sequence
  Chemically synthesized
ccauccacaccauagauggcgcc

SEQ ID NO: 39411 - RNA, 23 nt, Artificial Sequence
  Chemically synthesized
cauccacaccauagauggcgccc

SEQ ID NO: 39412 - RNA, 23 nt, Artificial Sequence
  Chemically synthesized
auccacaccauagauggcgcccu

SEQ ID NO: 39413 - RNA, 23 nt, Artificial Sequence
  Chemically synthesized
cagacuggaggaagaaagaaugg

SEQ ID NO: 39414 - RNA, 23 nt, Artificial Sequence
  Chemically synthesized
agacuggaggaagaaagaaugga

SEQ ID NO: 39415 - RNA, 23 nt, Artificial Sequence
  Chemically synthesized
gacuggaggaagaaagaauggaa

SEQ ID NO: 39416 - RNA, 23 nt, Artificial Sequence
  Chemically synthesized
acuggaggaagaaagaauggaag

SEQ ID NO: 39417 - RNA, 23 nt, Artificial Sequence
  Chemically synthesized
cuggaggaagaaagaauggaagu

SEQ ID NO: 39418 - RNA, 23 nt, Artificial Sequence
  Chemically synthesized
uggaggaagaaagaauggaaguu

SEQ ID NO: 39419 - RNA, 23 nt, Artificial Sequence
  Chemically synthesized
gggaaguuucagauaagcaggga

SEQ ID NO: 39420 - RNA, 23 nt, Artificial Sequence
  Chemically synthesized
ggaaguuucagauaagcagggau

SEQ ID NO: 39421 - RNA, 23 nt, Artificial Sequence
  Chemically synthesized
gaaguuucagauaagcagggaua

SEQ ID NO: 39422 - RNA, 23 nt, Artificial Sequence
  Chemically synthesized
aaguuucagauaagcagggauaa

SEQ ID NO: 39423 - RNA, 23 nt, Artificial Sequence
  Chemically synthesized
gguuacagagucuagggaaacac

SEQ ID NO: 39424 - RNA, 23 nt, Artificial Sequence
  Chemically synthesized
guuacagagucuagggaaacaca

SEQ ID NO: 39425 - RNA, 23 nt, Artificial Sequence
  Chemically synthesized
uuacagagucuagggaaacacac

SEQ ID NO: 39426 - RNA, 23 nt, Artificial Sequence
  Chemically synthesized
uacagagucuagggaaacacacc

SEQ ID NO: 39427 - RNA, 23 nt, Artificial Sequence
  Chemically synthesized
acagagucuagggaaacacacca

SEQ ID NO: 39428 - RNA, 23 nt, Artificial Sequence
  Chemically synthesized
cuguguuuacaacuucacuuguc

SEQ ID NO: 39429 - RNA, 23 nt, Artificial Sequence
  Chemically synthesized
auucugcaguuucucuugcauuu

SEQ ID NO: 39430 - RNA, 23 nt, Artificial Sequence
  Chemically synthesized
gcaccuugacuacuacaggccua

SEQ ID NO: 39431 - RNA, 23 nt, Artificial Sequence
  Chemically synthesized
aagcagggauaaagguuucuagg

SEQ ID NO: 39432 - RNA, 23 nt, Artificial Sequence
  Chemically synthesized
uggcacugaaauaaaagccacau

SEQ ID NO: 39433 - RNA, 23 nt, Artificial Sequence
  Chemically synthesized
agccaacaggaugaaaugaaggu

SEQ ID NO: 39434 - RNA, 23 nt, Artificial Sequence
  Chemically synthesized
gccaacaggaugaaaugaaggua

SEQ ID NO: 39435 - RNA, 23 nt, Artificial Sequence
  Chemically synthesized
ccaacaggaugaaaugaagguaa

SEQ ID NO: 39436 - RNA, 23 nt, Artificial Sequence
  Chemically synthesized
caacaggaugaaaugaagguaaa

SEQ ID NO: 39437 - RNA, 23 nt, Artificial Sequence
  Chemically synthesized
aacaggaugaaaugaagguaaag

SEQ ID NO: 39438 - RNA, 23 nt, Artificial Sequence
  Chemically synthesized
aacaaagcucagagaaacaacca

SEQ ID NO: 39439 - RNA, 23 nt, Artificial Sequence
  Chemically synthesized
acaaagcucagagaaacaaccaa

SEQ ID NO: 39440 - RNA, 23 nt, Artificial Sequence
  Chemically synthesized
caaagcucagagaaacaaccaac

SEQ ID NO: 39441 - RNA, 23 nt, Artificial Sequence
  Chemically synthesized
augucuacauuaaauuuggacac

SEQ ID NO: 39442 - RNA, 23 nt, Artificial Sequence
  Chemically synthesized
gggcuucacagaaaaggagcugg

SEQ ID NO: 39443 - RNA, 23 nt, Artificial Sequence
  Chemically synthesized
ggcuucacagaaaaggagcuggc

SEQ ID NO: 39444 - RNA, 23 nt, Artificial Sequence
  Chemically synthesized
gcuucacagaaaaggagcuggcc

SEQ ID NO: 39445 - RNA, 23 nt, Artificial Sequence
  Chemically synthesized
cuucacagaaaaggagcuggccu

SEQ ID NO: 39446 - RNA, 23 nt, Artificial Sequence
  Chemically synthesized
uucacagaaaaggagcuggccug

SEQ ID NO: 39447 - RNA, 23 nt, Artificial Sequence
  Chemically synthesized
ucacagaaaaggagcuggccugg

SEQ ID NO: 39448 - RNA, 23 nt, Artificial Sequence
  Chemically synthesized
aggaaacaagucugggagauucc

SEQ ID NO: 39449 - RNA, 23 nt, Artificial Sequence
  Chemically synthesized
ggaaacaagucugggagauuccc

SEQ ID NO: 39450 - RNA, 23 nt, Artificial Sequence
  Chemically synthesized
gaaacaagucugggagauuccca

SEQ ID NO: 39451 - RNA, 23 nt, Artificial Sequence
  Chemically synthesized
aaacaagucugggagauucccac

SEQ ID NO: 39452 - RNA, 23 nt, Artificial Sequence
  Chemically synthesized
aacaagucugggagauucccaca

SEQ ID NO: 39453 - RNA, 23 nt, Artificial Sequence
  Chemically synthesized
ccuuaaccagcaugucggccacg

SEQ ID NO: 39454 - RNA, 23 nt, Artificial Sequence
  Chemically synthesized
cuuaaccagcaugucggccacgu

SEQ ID NO: 39455 - RNA, 23 nt, Artificial Sequence
  Chemically synthesized
uuaaccagcaugucggccacgug

SEQ ID NO: 39456 - RNA, 23 nt, Artificial Sequence
  Chemically synthesized
aauucgcucaacaacagcuguuu

SEQ ID NO: 39457 - RNA, 23 nt, Artificial Sequence
  Chemically synthesized
auucgcucaacaacagcuguuug

SEQ ID NO: 39458 - RNA, 23 nt, Artificial Sequence
  Chemically synthesized
gugcagguaacugugcaaaauuc

SEQ ID NO: 39459 - RNA, 23 nt, Artificial Sequence
  Chemically synthesized
ugcagguaacugugcaaaauucu

SEQ ID NO: 39460 - RNA, 23 nt, Artificial Sequence
  Chemically synthesized
gcagguaacugugcaaaauucug

SEQ ID NO: 39461 - RNA, 23 nt, Artificial Sequence
  Chemically synthesized
cagguaacugugcaaaauucugc

SEQ ID NO: 39462 - RNA, 23 nt, Artificial Sequence
  Chemically synthesized
agguaacugugcaaaauucugca

SEQ ID NO: 39463 - RNA, 23 nt, Artificial Sequence
  Chemically synthesized
gguaacugugcaaaauucugcag

SEQ ID NO: 39464 - RNA, 23 nt, Artificial Sequence
  Chemically synthesized
guaacugugcaaaauucugcagu

SEQ ID NO: 39465 - RNA, 23 nt, Artificial Sequence
  Chemically synthesized
uaacugugcaaaauucugcaguu

SEQ ID NO: 39466 - RNA, 23 nt, Artificial Sequence
  Chemically synthesized
gcccaaaagcuugaagaggguga

SEQ ID NO: 39467 - RNA, 23 nt, Artificial Sequence
  Chemically synthesized
cccaaaagcuugaagagggugac

SEQ ID NO: 39468 - RNA, 23 nt, Artificial Sequence
  Chemically synthesized
ccaaaagcuugaagagggugacu

SEQ ID NO: 39469 - RNA, 23 nt, Artificial Sequence
  Chemically synthesized
caaaagcuugaagagggugacua

SEQ ID NO: 39470 - RNA, 23 nt, Artificial Sequence
  Chemically synthesized
aaaagcuugaagagggugacuag

SEQ ID NO: 39471 - RNA, 23 nt, Artificial Sequence
  Chemically synthesized
caaacaaauauuuauugagcacc

SEQ ID NO: 39472 - RNA, 23 nt, Artificial Sequence
  Chemically synthesized
aaacaaauauuuauugagcaccu

SEQ ID NO: 39473 - RNA, 23 nt, Artificial Sequence
  Chemically synthesized
aacaaauauuuauugagcaccuu

SEQ ID NO: 39474 - RNA, 23 nt, Artificial Sequence
  Chemically synthesized
acaaauauuuauugagcaccuug

SEQ ID NO: 39475 - RNA, 23 nt, Artificial Sequence
  Chemically synthesized
caaauauuuauugagcaccuuga

SEQ ID NO: 39476 - RNA, 23 nt, Artificial Sequence
  Chemically synthesized
gaggaagaaggacaccaccugag

SEQ ID NO: 39477 - RNA, 23 nt, Artificial Sequence
  Chemically synthesized
aggaagaaggacaccaccugagu

SEQ ID NO: 39478 - RNA, 23 nt, Artificial Sequence
  Chemically synthesized
ggaagaaggacaccaccugaguc

SEQ ID NO: 39479 - RNA, 23 nt, Artificial Sequence
  Chemically synthesized
gaagaaggacaccaccugaguca

SEQ ID NO: 39480 - RNA, 23 nt, Artificial Sequence
  Chemically synthesized
aagaaggacaccaccugagucaa

SEQ ID NO: 39481 - RNA, 23 nt, Artificial Sequence
  Chemically synthesized
gauucuagacagauuugguggca

SEQ ID NO: 39482 - RNA, 23 nt, Artificial Sequence
  Chemically synthesized
acaaaugcaaggcaauguuggcu

SEQ ID NO: 39483 - RNA, 23 nt, Artificial Sequence
  Chemically synthesized
caaaugcaaggcaauguuggcug

SEQ ID NO: 39484 - RNA, 23 nt, Artificial Sequence
  Chemically synthesized
aaaugcaaggcaauguuggcuga

SEQ ID NO: 39485 - RNA, 23 nt, Artificial Sequence
  Chemically synthesized
aagcaaucacuaaagugccaucu

SEQ ID NO: 39486 - RNA, 23 nt, Artificial Sequence
  Chemically synthesized
agcaaucacuaaagugccaucua

SEQ ID NO: 39487 - RNA, 23 nt, Artificial Sequence
  Chemically synthesized
gcaaucacuaaagugccaucuac

SEQ ID NO: 39488 - RNA, 23 nt, Artificial Sequence
  Chemically synthesized
caaucacuaaagugccaucuaca

SEQ ID NO: 39489 - RNA, 23 nt, Artificial Sequence
  Chemically synthesized
aaucacuaaagugccaucuacaa

SEQ ID NO: 39490 - RNA, 23 nt, Artificial Sequence
  Chemically synthesized
gugcauccugaagaucaaaggcu

SEQ ID NO: 39491 - RNA, 23 nt, Artificial Sequence
  Chemically synthesized
ugcauccugaagaucaaaggcuc

SEQ ID NO: 39492 - RNA, 23 nt, Artificial Sequence
  Chemically synthesized
gcauccugaagaucaaaggcucu

SEQ ID NO: 39493 - RNA, 23 nt, Artificial Sequence
  Chemically synthesized
cauccugaagaucaaaggcucua

SEQ ID NO: 39494 - RNA, 23 nt, Artificial Sequence
  Chemically synthesized
auccugaagaucaaaggcucuau

SEQ ID NO: 39495 - RNA, 23 nt, Artificial Sequence
  Chemically synthesized
ggccacgugcauaucacaagccc

SEQ ID NO: 39496 - RNA, 23 nt, Artificial Sequence
  Chemically synthesized
gccacgugcauaucacaagcccg

SEQ ID NO: 39497 - RNA, 23 nt, Artificial Sequence
  Chemically synthesized
ccacgugcauaucacaagcccgc

SEQ ID NO: 39498 - RNA, 23 nt, Artificial Sequence
  Chemically synthesized
cacgugcauaucacaagcccgcu

SEQ ID NO: 39499 - RNA, 23 nt, Artificial Sequence
  Chemically synthesized
acgugcauaucacaagcccgcuc

SEQ ID NO: 39500 - RNA, 23 nt, Artificial Sequence
  Chemically synthesized
cuucggcaacuuuucuuuaccgg

SEQ ID NO: 39501 - RNA, 23 nt, Artificial Sequence
  Chemically synthesized
uucggcaacuuuucuuuaccggc

SEQ ID NO: 39502 - RNA, 23 nt, Artificial Sequence
  Chemically synthesized
cucgguucuuuuuuagaguuucc

SEQ ID NO: 39503 - RNA, 23 nt, Artificial Sequence
  Chemically synthesized
ucgguucuuuuuuagaguuuccu

SEQ ID NO: 39504 - RNA, 23 nt, Artificial Sequence
  Chemically synthesized
gaguuuccugaugaugaggaugc

SEQ ID NO: 39505 - RNA, 23 nt, Artificial Sequence
  Chemically synthesized
aguuuccugaugaugaggaugca

SEQ ID NO: 39506 - RNA, 23 nt, Artificial Sequence
  Chemically synthesized
guuuccugaugaugaggaugcau

SEQ ID NO: 39507 - RNA, 23 nt, Artificial Sequence
  Chemically synthesized
uuuccugaugaugaggaugcaug

SEQ ID NO: 39508 - RNA, 23 nt, Artificial Sequence
  Chemically synthesized
aaauauuuauugagcaccuugac

SEQ ID NO: 39509 - RNA, 23 nt, Artificial Sequence
  Chemically synthesized
aauauuuauugagcaccuugacu

SEQ ID NO: 39510 - RNA, 23 nt, Artificial Sequence
  Chemically synthesized
gugaaggaaguuaucucacacau

SEQ ID NO: 39511 - RNA, 23 nt, Artificial Sequence
  Chemically synthesized
ugaaggaaguuaucucacacaug

SEQ ID NO: 39512 - RNA, 23 nt, Artificial Sequence
  Chemically synthesized
agucuagggaaacacaccauucu

SEQ ID NO: 39513 - RNA, 23 nt, Artificial Sequence
  Chemically synthesized
gucuagggaaacacaccauucuu

SEQ ID NO: 39514 - RNA, 23 nt, Artificial Sequence
  Chemically synthesized
ucuagggaaacacaccauucuuc

SEQ ID NO: 39515 - RNA, 23 nt, Artificial Sequence
  Chemically synthesized
cuagggaaacacaccauucuucc

SEQ ID NO: 39516 - RNA, 23 nt, Artificial Sequence
  Chemically synthesized
uagggaaacacaccauucuuccu

SEQ ID NO: 39517 - RNA, 23 nt, Artificial Sequence
  Chemically synthesized
cucacucuaggacaaaaagggcg

SEQ ID NO: 39518 - RNA, 23 nt, Artificial Sequence
  Chemically synthesized
caaggugaugauguccuucucca

SEQ ID NO: 39519 - RNA, 23 nt, Artificial Sequence
  Chemically synthesized
aaggugaugauguccuucuccag

SEQ ID NO: 39520 - RNA, 23 nt, Artificial Sequence
  Chemically synthesized
aggugaugauguccuucuccaga

SEQ ID NO: 39521 - RNA, 23 nt, Artificial Sequence
  Chemically synthesized
auaaaagcaaucacuaaagugcc

SEQ ID NO: 39522 - RNA, 23 nt, Artificial Sequence
  Chemically synthesized
uaaaagcaaucacuaaagugcca

SEQ ID NO: 39523 - RNA, 23 nt, Artificial Sequence
  Chemically synthesized
aaaagcaaucacuaaagugccau

SEQ ID NO: 39524 - RNA, 23 nt, Artificial Sequence
  Chemically synthesized
aaagcaaucacuaaagugccauc

SEQ ID NO: 39525 - RNA, 23 nt, Artificial Sequence
  Chemically synthesized
aauagguccaaccaaggcuggcu

SEQ ID NO: 39526 - RNA, 23 nt, Artificial Sequence
  Chemically synthesized
cggccacgugcauaucacaagcc

SEQ ID NO: 39527 - RNA, 23 nt, Artificial Sequence
  Chemically synthesized
cuugaagagggugacuagaguac

SEQ ID NO: 39528 - RNA, 23 nt, Artificial Sequence
  Chemically synthesized
uugaagagggugacuagaguacu

SEQ ID NO: 39529 - RNA, 23 nt, Artificial Sequence
  Chemically synthesized
ugaagagggugacuagaguacug

SEQ ID NO: 39530 - RNA, 23 nt, Artificial Sequence
  Chemically synthesized
gaagagggugacuagaguacugu

SEQ ID NO: 39531 - RNA, 23 nt, Artificial Sequence
  Chemically synthesized
aagagggugacuagaguacugug

SEQ ID NO: 39532 - RNA, 23 nt, Artificial Sequence
  Chemically synthesized
aacaaacaagguuucugcccuca

SEQ ID NO: 39533 - RNA, 23 nt, Artificial Sequence
  Chemically synthesized
acaaacaagguuucugcccucau

SEQ ID NO: 39534 - RNA, 23 nt, Artificial Sequence
  Chemically synthesized
caaacaagguuucugcccucauu

SEQ ID NO: 39535 - RNA, 23 nt, Artificial Sequence
  Chemically synthesized
aaacaagguuucugcccucauuu

SEQ ID NO: 39536 - RNA, 23 nt, Artificial Sequence
  Chemically synthesized
cacagaaggcaucaaaagcuugg

SEQ ID NO: 39537 - RNA, 23 nt, Artificial Sequence
  Chemically synthesized
acagaaggcaucaaaagcuuggg

SEQ ID NO: 39538 - RNA, 23 nt, Artificial Sequence
  Chemically synthesized
cagaaggcaucaaaagcuugggg

SEQ ID NO: 39539 - RNA, 23 nt, Artificial Sequence
  Chemically synthesized
agaaggcaucaaaagcuugggga

SEQ ID NO: 39540 - RNA, 23 nt, Artificial Sequence
  Chemically synthesized
gaaggcaucaaaagcuuggggac

SEQ ID NO: 39541 - RNA, 23 nt, Artificial Sequence
  Chemically synthesized
aagaacagggaaguugggaaguu

SEQ ID NO: 39542 - RNA, 23 nt, Artificial Sequence
  Chemically synthesized
ugaagcagggagauaagcuagga

SEQ ID NO: 39543 - RNA, 23 nt, Artificial Sequence
  Chemically synthesized
gaagcagggagauaagcuaggaa

SEQ ID NO: 39544 - RNA, 23 nt, Artificial Sequence
  Chemically synthesized
aagcagggagauaagcuaggaag

SEQ ID NO: 39545 - RNA, 23 nt, Artificial Sequence
  Chemically synthesized
uuccacauucuggcugaaacugc

SEQ ID NO: 39546 - RNA, 23 nt, Artificial Sequence
  Chemically synthesized
uccacauucuggcugaaacugcc

SEQ ID NO: 39547 - RNA, 23 nt, Artificial Sequence
  Chemically synthesized
ccacauucuggcugaaacugccc

SEQ ID NO: 39548 - RNA, 23 nt, Artificial Sequence
  Chemically synthesized
cacauucuggcugaaacugccca

SEQ ID NO: 39549 - RNA, 23 nt, Artificial Sequence
  Chemically synthesized
acauucuggcugaaacugcccac

SEQ ID NO: 39550 - RNA, 23 nt, Artificial Sequence
  Chemically synthesized
gggagagagauggacguuucuca

SEQ ID NO: 39551 - RNA, 23 nt, Artificial Sequence
  Chemically synthesized
ggagagagauggacguuucucag

SEQ ID NO: 39552 - RNA, 23 nt, Artificial Sequence
  Chemically synthesized
gagagagauggacguuucucagg

SEQ ID NO: 39553 - RNA, 23 nt, Artificial Sequence
  Chemically synthesized
aaugcaaggcaauguuggcugac

SEQ ID NO: 39554 - RNA, 23 nt, Artificial Sequence
  Chemically synthesized
cucucacucuaggacaaaaaggg

SEQ ID NO: 39555 - RNA, 23 nt, Artificial Sequence
  Chemically synthesized
ucucacucuaggacaaaaagggc

SEQ ID NO: 39556 - RNA, 23 nt, Artificial Sequence
  Chemically synthesized
aauaaaagcaaucacuaaagugc

SEQ ID NO: 39557 - RNA, 23 nt, Artificial Sequence
  Chemically synthesized
aaacauuccuggcaauaggucca

SEQ ID NO: 39558 - RNA, 23 nt, Artificial Sequence
  Chemically synthesized
aacauuccuggcaauagguccaa

SEQ ID NO: 39559 - RNA, 23 nt, Artificial Sequence
  Chemically synthesized
acauuccuggcaauagguccaac

SEQ ID NO: 39560 - RNA, 23 nt, Artificial Sequence
  Chemically synthesized
cauuccuggcaauagguccaacc

SEQ ID NO: 39561 - RNA, 23 nt, Artificial Sequence
  Chemically synthesized
auuccuggcaauagguccaacca

SEQ ID NO: 39562 - RNA, 23 nt, Artificial Sequence
  Chemically synthesized
cagaaaacacuugagcaagagcc

SEQ ID NO: 39563 - RNA, 23 nt, Artificial Sequence
  Chemically synthesized
agaaaacacuugagcaagagccu

SEQ ID NO: 39564 - RNA, 23 nt, Artificial Sequence
  Chemically synthesized
gaaaacacuugagcaagagccuc

SEQ ID NO: 39565 - RNA, 23 nt, Artificial Sequence
  Chemically synthesized
aaaacacuugagcaagagccucg

SEQ ID NO: 39566 - RNA, 23 nt, Artificial Sequence
  Chemically synthesized
aaacacuugagcaagagccucga

SEQ ID NO: 39567 - RNA, 23 nt, Artificial Sequence
  Chemically synthesized
ccaggaaccucguuugguguucc

SEQ ID NO: 39568 - RNA, 23 nt, Artificial Sequence
  Chemically synthesized
caggaaccucguuugguguuccg

SEQ ID NO: 39569 - RNA, 23 nt, Artificial Sequence
  Chemically synthesized
aggaaccucguuugguguuccgc

SEQ ID NO: 39570 - RNA, 23 nt, Artificial Sequence
  Chemically synthesized
ggaaccucguuugguguuccgca

SEQ ID NO: 39571 - RNA, 23 nt, Artificial Sequence
  Chemically synthesized
gaaccucguuugguguuccgcau

SEQ ID NO: 39572 - RNA, 23 nt, Artificial Sequence
  Chemically synthesized
aaccucguuugguguuccgcaug

SEQ ID NO: 39573 - RNA, 23 nt, Artificial Sequence
  Chemically synthesized
agaguuuacauuuuaaaugaggg

SEQ ID NO: 39574 - RNA, 23 nt, Artificial Sequence
  Chemically synthesized
agcaagaaaucaccauuuaauga

SEQ ID NO: 39575 - RNA, 23 nt, Artificial Sequence
  Chemically synthesized
uuccaugggcaaagaucaauaag

SEQ ID NO: 39576 - RNA, 23 nt, Artificial Sequence
  Chemically synthesized
acucucacucuaggacaaaaagg

SEQ ID NO: 39577 - RNA, 23 nt, Artificial Sequence
  Chemically synthesized
ugaagugcagguugauugaauga

SEQ ID NO: 39578 - RNA, 23 nt, Artificial Sequence
  Chemically synthesized
augccacacacucccaauauccu

SEQ ID NO: 39579 - RNA, 23 nt, Artificial Sequence
  Chemically synthesized
ugauggugaauaaaacaaacaag

SEQ ID NO: 39580 - RNA, 23 nt, Artificial Sequence
  Chemically synthesized
aacucucacucuaggacaaaaag

SEQ ID NO: 39581 - RNA, 23 nt, Artificial Sequence
  Chemically synthesized
caugccacacacucccaauaucc

SEQ ID NO: 39582 - RNA, 23 nt, Artificial Sequence
  Chemically synthesized
caugauggugaauaaaacaaaca

SEQ ID NO: 39583 - RNA, 23 nt, Artificial Sequence
  Chemically synthesized
aggaugaaaugaagguaaagaag

SEQ ID NO: 39584 - RNA, 23 nt, Artificial Sequence
  Chemically synthesized
ugauugaaugaaagugggaauag

SEQ ID NO: 39585 - RNA, 23 nt, Artificial Sequence
  Chemically synthesized
aggugcgucucuagucauguuug

SEQ ID NO: 39586 - RNA, 23 nt, Artificial Sequence
  Chemically synthesized
augaugggcacaggaaacaaguc

SEQ ID NO: 39587 - RNA, 23 nt, Artificial Sequence
  Chemically synthesized
aagucugggagauucccacaucc

SEQ ID NO: 39588 - RNA, 23 nt, Artificial Sequence
  Chemically synthesized
aaccuucccgauccuugauaagu

SEQ ID NO: 39589 - RNA, 23 nt, Artificial Sequence
  Chemically synthesized
uggaaguguguuugauaaaauuc

SEQ ID NO: 39590 - RNA, 23 nt, Artificial Sequence
  Chemically synthesized
ucucaaauacuuccauacuaugu

SEQ ID NO: 39591 - RNA, 23 nt, Artificial Sequence
  Chemically synthesized
accacccaaacaaauauuuauug

SEQ ID NO: 39592 - RNA, 23 nt, Artificial Sequence
  Chemically synthesized
acaugauggugaauaaaacaaac

SEQ ID NO: 39593 - RNA, 23 nt, Artificial Sequence
  Chemically synthesized
aggagaguuuaauacugaaagag

SEQ ID NO: 39594 - RNA, 23 nt, Artificial Sequence
  Chemically synthesized
uaugagcauuuauuuggcacccg

SEQ ID NO: 39595 - RNA, 23 nt, Artificial Sequence
  Chemically synthesized
ugcagguugauugaaugaaagug

SEQ ID NO: 39596 - RNA, 23 nt, Artificial Sequence
  Chemically synthesized
uugaaugaaagugggaauaguaa

SEQ ID NO: 39597 - RNA, 23 nt, Artificial Sequence
  Chemically synthesized
uaaacugcaauaaaugcaaugag

SEQ ID NO: 39598 - RNA, 23 nt, Artificial Sequence
  Chemically synthesized
agaaacaaccaacgaaagaucuu

SEQ ID NO: 39599 - RNA, 23 nt, Artificial Sequence
  Chemically synthesized
ccacccaaacaaauauuuauuga

SEQ ID NO: 39600 - RNA, 23 nt, Artificial Sequence
  Chemically synthesized
aacaagguuucugcccucauuua

SEQ ID NO: 39601 - RNA, 23 nt, Artificial Sequence
  Chemically synthesized
uaaacaaccaaauccuggccagg

SEQ ID NO: 39602 - RNA, 23 nt, Artificial Sequence
  Chemically synthesized
auucuggcugaaacugcccacuu

SEQ ID NO: 39603 - RNA, 23 nt, Artificial Sequence
  Chemically synthesized
uucuccagaagauguucuaacaa

SEQ ID NO: 39604 - RNA, 23 nt, Artificial Sequence
  Chemically synthesized
aguugaggaguuccacauucugg

SEQ ID NO: 39605 - RNA, 23 nt, Artificial Sequence
  Chemically synthesized
acccaaacaaauauuuauugagc

SEQ ID NO: 39606 - RNA, 23 nt, Artificial Sequence
  Chemically synthesized
aacugcaauaaaugcaaugaggg

SEQ ID NO: 39607 - RNA, 23 nt, Artificial Sequence
  Chemically synthesized
aagacuugaggaagaaggacacc

SEQ ID NO: 39608 - RNA, 23 nt, Artificial Sequence
  Chemically synthesized
uucuuuccaucuuguuggucaac

SEQ ID NO: 39609 - RNA, 23 nt, Artificial Sequence
  Chemically synthesized
ucuuuccaucuuguuggucaacc

SEQ ID NO: 39610 - RNA, 23 nt, Artificial Sequence
  Chemically synthesized
cacccaaacaaauauuuauugag

SEQ ID NO: 39611 - RNA, 23 nt, Artificial Sequence
  Chemically synthesized
ucuagguugaaaacaauaacaug

SEQ ID NO: 39612 - RNA, 23 nt, Artificial Sequence
  Chemically synthesized
aauucugugccaggagcauaacc

SEQ ID NO: 39613 - RNA, 23 nt, Artificial Sequence
  Chemically synthesized
agagggugacuagaguacugugg

SEQ ID NO: 39614 - RNA, 23 nt, Artificial Sequence
  Chemically synthesized
augccagcuggaaguguguuuga

SEQ ID NO: 39615 - RNA, 23 nt, Artificial Sequence
  Chemically synthesized
aaacugcaauaaaugcaaugagg

SEQ ID NO: 39616 - RNA, 23 nt, Artificial Sequence
  Chemically synthesized
agcagggauaaagguuucuaggu

SEQ ID NO: 39617 - RNA, 23 nt, Artificial Sequence
  Chemically synthesized
gagucuagggaaacacaccauuc

SEQ ID NO: 39618 - RNA, 23 nt, Artificial Sequence
  Chemically synthesized
aaagauaggagauggucucucag

SEQ ID NO: 39619 - RNA, 23 nt, Artificial Sequence
  Chemically synthesized
ccaaacaaauauuuauugagcac

SEQ ID NO: 39620 - RNA, 23 nt, Artificial Sequence
  Chemically synthesized
aucaccauuuaaugagguucaag

SEQ ID NO: 39621 - RNA, 23 nt, Artificial Sequence
  Chemically synthesized
cauuuacaugauccuguaaagca

SEQ ID NO: 39622 - RNA, 23 nt, Artificial Sequence
  Chemically synthesized
augauccuguaaagcaggauucu

SEQ ID NO: 39623 - RNA, 23 nt, Artificial Sequence
  Chemically synthesized
augggcacaggaaacaagucugg

SEQ ID NO: 39624 - RNA, 23 nt, Artificial Sequence
  Chemically synthesized
aacaacagcuguuuggcuagcac

SEQ ID NO: 39625 - RNA, 23 nt, Artificial Sequence
  Chemically synthesized
gaacagggaaguugggaaguuuc

SEQ ID NO: 39626 - RNA, 23 nt, Artificial Sequence
  Chemically synthesized
uaagugcguucaccuuaaccagc

SEQ ID NO: 39627 - RNA, 23 nt, Artificial Sequence
  Chemically synthesized
uagaguacugugguccacauccc

SEQ ID NO: 39628 - RNA, 23 nt, Artificial Sequence
  Chemically synthesized
aaguguguuugauaaaauucagg

SEQ ID NO: 39629 - RNA, 23 nt, Artificial Sequence
  Chemically synthesized
aaguuaucucacacaugauaugu

SEQ ID NO: 39630 - RNA, 23 nt, Artificial Sequence
  Chemically synthesized
uaaauuuggacaccuuccaaacu

SEQ ID NO: 39631 - RNA, 23 nt, Artificial Sequence
  Chemically synthesized
aagauaggagauggucucucaga

SEQ ID NO: 39632 - RNA, 23 nt, Artificial Sequence
  Chemically synthesized
aucuccuugcaccgguggaauuc

SEQ ID NO: 39633 - RNA, 23 nt, Artificial Sequence
  Chemically synthesized
auguaccaggaaccucguuuggu

SEQ ID NO: 39634 - RNA, 23 nt, Artificial Sequence
  Chemically synthesized
auccugcgugguucuuuccaucu

SEQ ID NO: 39635 - RNA, 23 nt, Artificial Sequence
  Chemically synthesized
caaagagcugaaaaaccucuugg

SEQ ID NO: 39636 - RNA, 23 nt, Artificial Sequence
  Chemically synthesized
aguuaucucacacaugauauguc

SEQ ID NO: 39637 - RNA, 23 nt, Artificial Sequence
  Chemically synthesized
aggaacauuuuaucaaaagguag

SEQ ID NO: 39638 - RNA, 23 nt, Artificial Sequence
  Chemically synthesized
aaucaccauuuaaugagguucaa

SEQ ID NO: 39639 - RNA, 23 nt, Artificial Sequence
  Chemically synthesized
aaguugaggaguuccacauucug

SEQ ID NO: 39640 - RNA, 23 nt, Artificial Sequence
  Chemically synthesized
guugaggaguuccacauucuggc

SEQ ID NO: 39641 - RNA, 23 nt, Artificial Sequence
  Chemically synthesized
agggagagagauggacguuucuc

SEQ ID NO: 39642 - RNA, 23 nt, Artificial Sequence
  Chemically synthesized
aaauuuggacaccuuccaaacuc

SEQ ID NO: 39643 - RNA, 23 nt, Artificial Sequence
  Chemically synthesized
aauuuggacaccuuccaaacucu

SEQ ID NO: 39644 - RNA, 23 nt, Artificial Sequence
  Chemically synthesized
auucugugccaggagcauaaccu

SEQ ID NO: 39645 - RNA, 23 nt, Artificial Sequence
  Chemically synthesized
ugauaagugcguucaccuuaacc

SEQ ID NO: 39646 - RNA, 23 nt, Artificial Sequence
  Chemically synthesized
gauguaccaggaaccucguuugg

SEQ ID NO: 39647 - RNA, 23 nt, Artificial Sequence
  Chemically synthesized
acaacagcuguuuggcuagcacc

SEQ ID NO: 39648 - RNA, 23 nt, Artificial Sequence
  Chemically synthesized
acugugcaaaauucugcaguuuc

SEQ ID NO: 39649 - RNA, 23 nt, Artificial Sequence
  Chemically synthesized
cugugcaaaauucugcaguuucu

SEQ ID NO: 39650 - RNA, 23 nt, Artificial Sequence
  Chemically synthesized
uaugccagcuggaaguguguuug

SEQ ID NO: 39651 - RNA, 23 nt, Artificial Sequence
  Chemically synthesized
auccguguauauugucaaaagga

SEQ ID NO: 39652 - RNA, 23 nt, Artificial Sequence
  Chemically synthesized
uuacaugauccuguaaagcagga

SEQ ID NO: 39653 - RNA, 23 nt, Artificial Sequence
  Chemically synthesized
agcagggagauaagcuaggaagc

SEQ ID NO: 39654 - RNA, 23 nt, Artificial Sequence
  Chemically synthesized
gagaaacaaccaacgaaagaucu

SEQ ID NO: 39655 - RNA, 23 nt, Artificial Sequence
  Chemically synthesized
ugaaacauuccuggcaauagguc

SEQ ID NO: 39656 - RNA, 23 nt, Artificial Sequence
  Chemically synthesized
gaaacauuccuggcaauaggucc

SEQ ID NO: 39657 - RNA, 23 nt, Artificial Sequence
  Chemically synthesized
ucuacaggcaaagggcuucacag

SEQ ID NO: 39658 - RNA, 23 nt, Artificial Sequence
  Chemically synthesized
ucugugccaggagcauaaccuuc

SEQ ID NO: 39659 - RNA, 23 nt, Artificial Sequence
  Chemically synthesized
ucagaaaacacuugagcaagagc

SEQ ID NO: 39660 - RNA, 23 nt, Artificial Sequence
  Chemically synthesized
aacagcuguuuggcuagcaccac

SEQ ID NO: 39661 - RNA, 23 nt, Artificial Sequence
  Chemically synthesized
agagcugaaaaaccucuuggagc

SEQ ID NO: 39662 - RNA, 23 nt, Artificial Sequence
  Chemically synthesized
acucgguucuuuuuuagaguuuc

SEQ ID NO: 39663 - RNA, 23 nt, Artificial Sequence
  Chemically synthesized
acaggccuagcauuuugcuaggg

SEQ ID NO: 39664 - RNA, 23 nt, Artificial Sequence
  Chemically synthesized
caggccuagcauuuugcuaggga

SEQ ID NO: 39665 - RNA, 23 nt, Artificial Sequence
  Chemically synthesized
uaaagguuucuagguugaaaaca

SEQ ID NO: 39666 - RNA, 23 nt, Artificial Sequence
  Chemically synthesized
ugaggaguuccacauucuggcug

SEQ ID NO: 39667 - RNA, 23 nt, Artificial Sequence
  Chemically synthesized
auuuacaugauccuguaaagcag

SEQ ID NO: 39668 - RNA, 23 nt, Artificial Sequence
  Chemically synthesized
uuuacaugauccuguaaagcagg

SEQ ID NO: 39669 - RNA, 23 nt, Artificial Sequence
  Chemically synthesized
uccagaagauguucuaacaauuc

SEQ ID NO: 39670 - RNA, 23 nt, Artificial Sequence
  Chemically synthesized
uuccuggcaauagguccaaccaa

SEQ ID NO: 39671 - RNA, 23 nt, Artificial Sequence
  Chemically synthesized
aacagaaaccgugcauccugaag

SEQ ID NO: 39672 - RNA, 23 nt, Artificial Sequence
  Chemically synthesized
gauaagugcguucaccuuaacca

SEQ ID NO: 39673 - RNA, 23 nt, Artificial Sequence
  Chemically synthesized
ugguucuuuccaucuuguugguc

SEQ ID NO: 39674 - RNA, 23 nt, Artificial Sequence
  Chemically synthesized
ugaagaacauuuuugguuuguuc

SEQ ID NO: 39675 - RNA, 23 nt, Artificial Sequence
  Chemically synthesized
ucucuugcauuuccugugcaguc

SEQ ID NO: 39676 - RNA, 23 nt, Artificial Sequence
  Chemically synthesized
guucuuucucuccagugaagugc

SEQ ID NO: 39677 - RNA, 23 nt, Artificial Sequence
  Chemically synthesized
ugaagugcacauugcucaacacc

SEQ ID NO: 39678 - RNA, 23 nt, Artificial Sequence
  Chemically synthesized
aguguguuugauaaaauucagga

SEQ ID NO: 39679 - RNA, 23 nt, Artificial Sequence
  Chemically synthesized
uaugucgacccaaaggcaggacu

SEQ ID NO: 39680 - RNA, 23 nt, Artificial Sequence
  Chemically synthesized
cauuuuaucaaaagguaggauug

SEQ ID NO: 39681 - RNA, 23 nt, Artificial Sequence
  Chemically synthesized
auugucaagacuugaggaagaag

SEQ ID NO: 39682 - RNA, 23 nt, Artificial Sequence
  Chemically synthesized
uuaaacaaccaaauccuggccag

SEQ ID NO: 39683 - RNA, 23 nt, Artificial Sequence
  Chemically synthesized
auguccuucuccagaagauguuc

SEQ ID NO: 39684 - RNA, 23 nt, Artificial Sequence
  Chemically synthesized
aaaagauaggagauggucucuca

SEQ ID NO: 39685 - RNA, 23 nt, Artificial Sequence
  Chemically synthesized
cauggacgucauagcccaaaagc

SEQ ID NO: 39686 - RNA, 23 nt, Artificial Sequence
  Chemically synthesized
auggacgucauagcccaaaagcu

SEQ ID NO: 39687 - RNA, 23 nt, Artificial Sequence
  Chemically synthesized
aaagcuugaagagggugacuaga

SEQ ID NO: 39688 - RNA, 23 nt, Artificial Sequence
  Chemically synthesized
aagcuugaagagggugacuagag

SEQ ID NO: 39689 - RNA, 23 nt, Artificial Sequence
  Chemically synthesized
augagcauuuauuuggcacccga

SEQ ID NO: 39690 - RNA, 23 nt, Artificial Sequence
  Chemically synthesized
uauuuggcacccgauggcaauac

SEQ ID NO: 39691 - RNA, 23 nt, Artificial Sequence
  Chemically synthesized
cuaagguuggcuugccuucuucc

SEQ ID NO: 39692 - RNA, 23 nt, Artificial Sequence
  Chemically synthesized
acuacucuguuaugugagaacag

SEQ ID NO: 39693 - RNA, 23 nt, Artificial Sequence
  Chemically synthesized
cuagguugaaaacaauaacaugu

SEQ ID NO: 39694 - RNA, 23 nt, Artificial Sequence
  Chemically synthesized
uucuggcugaaacugcccacuuu

SEQ ID NO: 39695 - RNA, 23 nt, Artificial Sequence
  Chemically synthesized
auaagcuaggaagcuuuucuaga

SEQ ID NO: 39696 - RNA, 23 nt, Artificial Sequence
  Chemically synthesized
auuuggacaccuuccaaacucuc

SEQ ID NO: 39697 - RNA, 23 nt, Artificial Sequence
  Chemically synthesized
uucgcucaacaacagcuguuugg

SEQ ID NO: 39698 - RNA, 23 nt, Artificial Sequence
  Chemically synthesized
gaagaacauuuuugguuuguucu

SEQ ID NO: 39699 - RNA, 23 nt, Artificial Sequence
  Chemically synthesized
aagagcugaaaaaccucuuggag

SEQ ID NO: 39700 - RNA, 23 nt, Artificial Sequence
  Chemically synthesized
caccacucgguucuuuuuuagag

SEQ ID NO: 39701 - RNA, 23 nt, Artificial Sequence
  Chemically synthesized
ucauagcccaaaagcuugaagag

SEQ ID NO: 39702 - RNA, 23 nt, Artificial Sequence
  Chemically synthesized
cauagcccaaaagcuugaagagg

SEQ ID NO: 39703 - RNA, 23 nt, Artificial Sequence
  Chemically synthesized
gacugcaaccuauaugccagcug

SEQ ID NO: 39704 - RNA, 23 nt, Artificial Sequence
  Chemically synthesized
aagauguggugacagacacagaa

SEQ ID NO: 39705 - RNA, 23 nt, Artificial Sequence
  Chemically synthesized
aaggacaccaccugagucaagag

SEQ ID NO: 39706 - RNA, 23 nt, Artificial Sequence
  Chemically synthesized
aaacuacucuguuaugugagaac

SEQ ID NO: 39707 - RNA, 23 nt, Artificial Sequence
  Chemically synthesized
aacuacucuguuaugugagaaca

SEQ ID NO: 39708 - RNA, 23 nt, Artificial Sequence
  Chemically synthesized
gcauuuacaugauccuguaaagc

SEQ ID NO: 39709 - RNA, 23 nt, Artificial Sequence
  Chemically synthesized
gauaagcuaggaagcuuuucuag

SEQ ID NO: 39710 - RNA, 23 nt, Artificial Sequence
  Chemically synthesized
uuuggacaccuuccaaacucuca

SEQ ID NO: 39711 - RNA, 23 nt, Artificial Sequence
  Chemically synthesized
cgugcauccugaagaucaaaggc

SEQ ID NO: 39712 - RNA, 23 nt, Artificial Sequence
  Chemically synthesized
aguuggcguugucaaagagcuga

SEQ ID NO: 39713 - RNA, 23 nt, Artificial Sequence
  Chemically synthesized
aaagagcugaaaaaccucuugga

SEQ ID NO: 39714 - RNA, 23 nt, Artificial Sequence
  Chemically synthesized
aacugugcaaaauucugcaguuu

SEQ ID NO: 39715 - RNA, 23 nt, Artificial Sequence
  Chemically synthesized
auagcccaaaagcuugaagaggg

SEQ ID NO: 39716 - RNA, 23 nt, Artificial Sequence
  Chemically synthesized
agggugacuagaguacugugguc

SEQ ID NO: 39717 - RNA, 23 nt, Artificial Sequence
  Chemically synthesized
cuccagagcgaaauuccaguucu

SEQ ID NO: 39718 - RNA, 23 nt, Artificial Sequence
  Chemically synthesized
ucucuccagugaagugcacauug

SEQ ID NO: 39719 - RNA, 23 nt, Artificial Sequence
  Chemically synthesized
cucuccagugaagugcacauugc

SEQ ID NO: 39720 - RNA, 23 nt, Artificial Sequence
  Chemically synthesized
cuccagugaagugcacauugcuc

SEQ ID NO: 39721 - RNA, 23 nt, Artificial Sequence
  Chemically synthesized
gaagugcacauugcucaacacca

SEQ ID NO: 39722 - RNA, 23 nt, Artificial Sequence
  Chemically synthesized
gaguggaaagguucucucucuca

SEQ ID NO: 39723 - RNA, 23 nt, Artificial Sequence
  Chemically synthesized
uaagguuggcuugccuucuuccc

SEQ ID NO: 39724 - RNA, 23 nt, Artificial Sequence
  Chemically synthesized
aagacaagauguggugacagaca

SEQ ID NO: 39725 - RNA, 23 nt, Artificial Sequence
  Chemically synthesized
ucacagaaggcaucaaaagcuug

SEQ ID NO: 39726 - RNA, 23 nt, Artificial Sequence
  Chemically synthesized
guugaaaacaauaacauguaugg

SEQ ID NO: 39727 - RNA, 23 nt, Artificial Sequence
  Chemically synthesized
uugaggaguuccacauucuggcu

SEQ ID NO: 39728 - RNA, 23 nt, Artificial Sequence
  Chemically synthesized
cuaggaagcuuuucuagaaaucu

SEQ ID NO: 39729 - RNA, 23 nt, Artificial Sequence
  Chemically synthesized
augaggaugcaugccacacacuc

SEQ ID NO: 39730 - RNA, 23 nt, Artificial Sequence
  Chemically synthesized
aggagauggucucucagacaucu

SEQ ID NO: 39731 - RNA, 23 nt, Artificial Sequence
  Chemically synthesized
uaccaggaaccucguuugguguu

SEQ ID NO: 39732 - RNA, 23 nt, Artificial Sequence
  Chemically synthesized
ggccuggaugaagaacauuuuug

SEQ ID NO: 39733 - RNA, 23 nt, Artificial Sequence
  Chemically synthesized
cagagcgaaauuccaguucuuuc

SEQ ID NO: 39734 - RNA, 23 nt, Artificial Sequence
  Chemically synthesized
aagugcacauugcucaacaccag

SEQ ID NO: 39735 - RNA, 23 nt, Artificial Sequence
  Chemically synthesized
aaggcucacaaaccacccaaaca

SEQ ID NO: 39736 - RNA, 23 nt, Artificial Sequence
  Chemically synthesized
cagaaaugaacaaguaaaaguag

SEQ ID NO: 39737 - RNA, 23 nt, Artificial Sequence
  Chemically synthesized
uaggaagcuuuucuagaaaucua

SEQ ID NO: 39738 - RNA, 23 nt, Artificial Sequence
  Chemically synthesized
gagcucccucauuuccaagguga

SEQ ID NO: 39739 - RNA, 23 nt, Artificial Sequence
  Chemically synthesized
ucagagaaacaaccaacgaaaga

SEQ ID NO: 39740 - RNA, 23 nt, Artificial Sequence
  Chemically synthesized
uuugcuucuucagagccaaaaga

SEQ ID NO: 39741 - RNA, 23 nt, Artificial Sequence
  Chemically synthesized
ucuaucacaccuccuguggucca

SEQ ID NO: 39742 - RNA, 23 nt, Artificial Sequence
  Chemically synthesized
cuuuccaucuuguuggucaaccc

SEQ ID NO: 39743 - RNA, 23 nt, Artificial Sequence
  Chemically synthesized
uuuggcuagcaccacucgguucu

SEQ ID NO: 39744 - RNA, 23 nt, Artificial Sequence
  Chemically synthesized
auugcucaacaccagugcuaggc

SEQ ID NO: 39745 - RNA, 23 nt, Artificial Sequence
  Chemically synthesized
uagcuaagguuggcuugccuucu

SEQ ID NO: 39746 - RNA, 23 nt, Artificial Sequence
  Chemically synthesized
caugauccuguaaagcaggauuc

SEQ ID NO: 39747 - RNA, 23 nt, Artificial Sequence
  Chemically synthesized
uccuguaaagcaggauucuagac

SEQ ID NO: 39748 - RNA, 23 nt, Artificial Sequence
  Chemically synthesized
ugagcucccucauuuccaaggug

SEQ ID NO: 39749 - RNA, 23 nt, Artificial Sequence
  Chemically synthesized
ccaucuacaaaagcuggaacuga

SEQ ID NO: 39750 - RNA, 23 nt, Artificial Sequence
  Chemically synthesized
auaagugcguucaccuuaaccag

SEQ ID NO: 39751 - RNA, 23 nt, Artificial Sequence
  Chemically synthesized
aagugcguucaccuuaaccagca

SEQ ID NO: 39752 - RNA, 23 nt, Artificial Sequence
  Chemically synthesized
cauugcucaacaccagugcuagg

SEQ ID NO: 39753 - RNA, 23 nt, Artificial Sequence
  Chemically synthesized
ggaaguguguuugauaaaauuca

SEQ ID NO: 39754 - RNA, 23 nt, Artificial Sequence
  Chemically synthesized
agcauuuauuuggcacccgaugg

SEQ ID NO: 39755 - RNA, 23 nt, Artificial Sequence
  Chemically synthesized
uuuggcacccgauggcaauacaa

SEQ ID NO: 39756 - RNA, 23 nt, Artificial Sequence
  Chemically synthesized
gaaagguucucucucucaaauac

SEQ ID NO: 39757 - RNA, 23 nt, Artificial Sequence
  Chemically synthesized
augucgacccaaaggcaggacuu

SEQ ID NO: 39758 - RNA, 23 nt, Artificial Sequence
  Chemically synthesized
aaggagcuaaaaaugccagugga

SEQ ID NO: 39759 - RNA, 23 nt, Artificial Sequence
  Chemically synthesized
augugccaagcacuugguacaug

SEQ ID NO: 39760 - RNA, 23 nt, Artificial Sequence
  Chemically synthesized
gacagaaaugaacaaguaaaagu

SEQ ID NO: 39761 - RNA, 23 nt, Artificial Sequence
  Chemically synthesized
uguggugacagacacagaaguag

SEQ ID NO: 39762 - RNA, 23 nt, Artificial Sequence
  Chemically synthesized
aaacaaccaaauccuggccaggu

SEQ ID NO: 39763 - RNA, 23 nt, Artificial Sequence
  Chemically synthesized
gaugagcucccucauuuccaagg

SEQ ID NO: 39764 - RNA, 23 nt, Artificial Sequence
  Chemically synthesized
augagcucccucauuuccaaggu

SEQ ID NO: 39765 - RNA, 23 nt, Artificial Sequence
  Chemically synthesized
aacacuugagcaagagccucgau

SEQ ID NO: 39766 - RNA, 23 nt, Artificial Sequence
  Chemically synthesized
aagaacauuuuugguuuguucug

SEQ ID NO: 39767 - RNA, 23 nt, Artificial Sequence
  Chemically synthesized
gugaagugcacauugcucaacac

SEQ ID NO: 39768 - RNA, 23 nt, Artificial Sequence
  Chemically synthesized
aaaauccuggcagugggagugga

SEQ ID NO: 39769 - RNA, 23 nt, Artificial Sequence
  Chemically synthesized
gauuguagcuaagguuggcuugc

SEQ ID NO: 39770 - RNA, 23 nt, Artificial Sequence
  Chemically synthesized
agacagaaaugaacaaguaaaag

SEQ ID NO: 39771 - RNA, 23 nt, Artificial Sequence
  Chemically synthesized
caaaacuacucuguuaugugaga

SEQ ID NO: 39772 - RNA, 23 nt, Artificial Sequence
  Chemically synthesized
agcugaaacauuccuggcaauag

SEQ ID NO: 39773 - RNA, 23 nt, Artificial Sequence
  Chemically synthesized
ucaacaacagcuguuuggcuagc

SEQ ID NO: 39774 - RNA, 23 nt, Artificial Sequence
  Chemically synthesized
uuuugcuagggaccaugggagau

SEQ ID NO: 39775 - RNA, 23 nt, Artificial Sequence
  Chemically synthesized
cagcagccaacaggaugaaauga

SEQ ID NO: 39776 - RNA, 23 nt, Artificial Sequence
  Chemically synthesized
ccaaggugaugauguccuucucc

SEQ ID NO: 39777 - RNA, 23 nt, Artificial Sequence
  Chemically synthesized
ugaugggcacaggaaacaagucu

SEQ ID NO: 39778 - RNA, 23 nt, Artificial Sequence
  Chemically synthesized
ugcacauugcucaacaccagugc

SEQ ID NO: 39779 - RNA, 23 nt, Artificial Sequence
  Chemically synthesized
auuuauuuggcacccgauggcaa

SEQ ID NO: 39780 - RNA, 23 nt, Artificial Sequence
  Chemically synthesized
caaggagcuaaaaaugccagugg

SEQ ID NO: 39781 - RNA, 23 nt, Artificial Sequence
  Chemically synthesized
guagcuaagguuggcuugccuuc

SEQ ID NO: 39782 - RNA, 23 nt, Artificial Sequence
  Chemically synthesized
acaagauguggugacagacacag

SEQ ID NO: 39783 - RNA, 23 nt, Artificial Sequence
  Chemically synthesized
agacacagaaguagacugcucag

SEQ ID NO: 39784 - RNA, 23 nt, Artificial Sequence
  Chemically synthesized
cguuucucaggaaggaaaaagac

SEQ ID NO: 39785 - RNA, 23 nt, Artificial Sequence
  Chemically synthesized
ugauguccuucuccagaagaugu

SEQ ID NO: 39786 - RNA, 23 nt, Artificial Sequence
  Chemically synthesized
aagguuggcuugccuucuucccu

SEQ ID NO: 39787 - RNA, 23 nt, Artificial Sequence
  Chemically synthesized
ucuguuaugugagaacagacugg

SEQ ID NO: 39788 - RNA, 23 nt, Artificial Sequence
  Chemically synthesized
uuaugugagaacagacuggagga

SEQ ID NO: 39789 - RNA, 23 nt, Artificial Sequence
  Chemically synthesized
uaugugagaacagacuggaggaa

SEQ ID NO: 39790 - RNA, 23 nt, Artificial Sequence
  Chemically synthesized
uugucaggcucuucaacugcagc

SEQ ID NO: 39791 - RNA, 23 nt, Artificial Sequence
  Chemically synthesized
ucaggcucuucaacugcagcuga

SEQ ID NO: 39792 - RNA, 23 nt, Artificial Sequence
  Chemically synthesized
uguccuucuccagaagauguucu

SEQ ID NO: 39793 - RNA, 23 nt, Artificial Sequence
  Chemically synthesized
cacuugucaggcucuucaacugc

SEQ ID NO: 39794 - RNA, 23 nt, Artificial Sequence
  Chemically synthesized
gugggaguggaaagguucucucu

SEQ ID NO: 39795 - RNA, 23 nt, Artificial Sequence
  Chemically synthesized
gggagaugugaaggaaguuaucu

SEQ ID NO: 39796 - RNA, 23 nt, Artificial Sequence
  Chemically synthesized
acuaugugccaagcacuugguac

SEQ ID NO: 39797 - RNA, 23 nt, Artificial Sequence
  Chemically synthesized
guuaugugagaacagacuggagg

SEQ ID NO: 39798 - RNA, 23 nt, Artificial Sequence
  Chemically synthesized
uccuucuccagaagauguucuaa

SEQ ID NO: 39799 - RNA, 23 nt, Artificial Sequence
  Chemically synthesized
agugggaguggaaagguucucuc

SEQ ID NO: 39800 - RNA, 23 nt, Artificial Sequence
  Chemically synthesized
ugggaguggaaagguucucucuc

SEQ ID NO: 39801 - RNA, 23 nt, Artificial Sequence
  Chemically synthesized
gacagacacagaaguagacugcu

SEQ ID NO: 39802 - RNA, 23 nt, Artificial Sequence
  Chemically synthesized
aggaaaagggcaggaaagagcac

SEQ ID NO: 39803 - RNA, 23 nt, Artificial Sequence
  Chemically synthesized
aaaccucuuggagcuggagcagu

SEQ ID NO: 39804 - RNA, 23 nt, Artificial Sequence
  Chemically synthesized
ucaaggagcuaaaaaugccagug

SEQ ID NO: 39805 - RNA, 23 nt, Artificial Sequence
  Chemically synthesized
auuguagcuaagguuggcuugcc

SEQ ID NO: 39806 - RNA, 23 nt, Artificial Sequence
  Chemically synthesized
ugacagacacagaaguagacugc

SEQ ID NO: 39807 - RNA, 23 nt, Artificial Sequence
  Chemically synthesized
uguuaugugagaacagacuggag

SEQ ID NO: 39808 - RNA, 23 nt, Artificial Sequence
  Chemically synthesized
aacagggaaguugggaaguuuca

SEQ ID NO: 39809 - RNA, 23 nt, Artificial Sequence
  Chemically synthesized
uacugaaagagaaagcaggaaca

SEQ ID NO: 39810 - RNA, 23 nt, Artificial Sequence
  Chemically synthesized
guuucucaggaaggaaaaagaca

SEQ ID NO: 39811 - RNA, 23 nt, Artificial Sequence
  Chemically synthesized
augcaaggcaauguuggcugaca

SEQ ID NO: 39812 - RNA, 23 nt, Artificial Sequence
  Chemically synthesized
acuugucaggcucuucaacugca

SEQ ID NO: 39813 - RNA, 23 nt, Artificial Sequence
  Chemically synthesized
ucgcucaacaacagcuguuuggc

SEQ ID NO: 39814 - RNA, 23 nt, Artificial Sequence
  Chemically synthesized
aaaaccucuuggagcuggagcag

SEQ ID NO: 39815 - RNA, 23 nt, Artificial Sequence
  Chemically synthesized
gugacagacacagaaguagacug

SEQ ID NO: 39816 - RNA, 23 nt, Artificial Sequence
  Chemically synthesized
uugagcaagagccucgauguacc

SEQ ID NO: 39817 - RNA, 23 nt, Artificial Sequence
  Chemically synthesized
uggugacagacacagaaguagac

SEQ ID NO: 39818 - RNA, 23 nt, Artificial Sequence
  Chemically synthesized
acagacacagaaguagacugcuc

SEQ ID NO: 39819 - RNA, 23 nt, Artificial Sequence
  Chemically synthesized
uacucuguuaugugagaacagac

SEQ ID NO: 39820 - RNA, 23 nt, Artificial Sequence
  Chemically synthesized
ugucaggcucuucaacugcagcu

SEQ ID NO: 39821 - RNA, 23 nt, Artificial Sequence
  Chemically synthesized
cagccaacaggaugaaaugaagg

SEQ ID NO: 39822 - RNA, 23 nt, Artificial Sequence
  Chemically synthesized
guugaggaguuccacauucuggc

SEQ ID NO: 39823 - RNA, 23 nt, Artificial Sequence
  Chemically synthesized
uugaggaguuccacauucuggcu

SEQ ID NO: 39824 - RNA, 23 nt, Artificial Sequence
  Chemically synthesized
ugaggaguuccacauucuggcug

SEQ ID NO: 39825 - RNA, 23 nt, Artificial Sequence
  Chemically synthesized
gaggaguuccacauucuggcuga

SEQ ID NO: 39826 - RNA, 23 nt, Artificial Sequence
  Chemically synthesized
aggaguuccacauucuggcugaa

SEQ ID NO: 39827 - RNA, 23 nt, Artificial Sequence
  Chemically synthesized
ggaugaaaaucaggcucuucaca

SEQ ID NO: 39828 - RNA, 23 nt, Artificial Sequence
  Chemically synthesized
gggaugaaaaucaggcucuucac

SEQ ID NO: 39829 - RNA, 23 nt, Artificial Sequence
  Chemically synthesized
ugggaugaaaaucaggcucuuca

SEQ ID NO: 39830 - RNA, 23 nt, Artificial Sequence
  Chemically synthesized
cugggaugaaaaucaggcucuuc

SEQ ID NO: 39831 - RNA, 23 nt, Artificial Sequence
  Chemically synthesized
gcugggaugaaaaucaggcucuu

SEQ ID NO: 39832 - RNA, 23 nt, Artificial Sequence
  Chemically synthesized
ggcugggaauaaauuuuuaucug

SEQ ID NO: 39833 - RNA, 23 nt, Artificial Sequence
  Chemically synthesized
uggcugggaauaaauuuuuaucu

SEQ ID NO: 39834 - RNA, 23 nt, Artificial Sequence
  Chemically synthesized
auggcugggaauaaauuuuuauc

SEQ ID NO: 39835 - RNA, 23 nt, Artificial Sequence
  Chemically synthesized
cauggcugggaauaaauuuuuau

SEQ ID NO: 39836 - RNA, 23 nt, Artificial Sequence
  Chemically synthesized
ucauggcugggaauaaauuuuua

SEQ ID NO: 39837 - RNA, 23 nt, Artificial Sequence
  Chemically synthesized
ccauuacacacgaguuauuuugg

SEQ ID NO: 39838 - RNA, 23 nt, Artificial Sequence
  Chemically synthesized
uccauuacacacgaguuauuuug

SEQ ID NO: 39839 - RNA, 23 nt, Artificial Sequence
  Chemically synthesized
uuccauuacacacgaguuauuuu

SEQ ID NO: 39840 - RNA, 23 nt, Artificial Sequence
  Chemically synthesized
uuuccauuacacacgaguuauuu

SEQ ID NO: 39841 - RNA, 23 nt, Artificial Sequence
  Chemically synthesized
cuuuccauuacacacgaguuauu

SEQ ID NO: 39842 - RNA, 23 nt, Artificial Sequence
  Chemically synthesized
cgaggacacuucaaaagaugugc

SEQ ID NO: 39843 - RNA, 23 nt, Artificial Sequence
  Chemically synthesized
ucgaggacacuucaaaagaugug

SEQ ID NO: 39844 - RNA, 23 nt, Artificial Sequence
  Chemically synthesized
cucgaggacacuucaaaagaugu

SEQ ID NO: 39845 - RNA, 23 nt, Artificial Sequence
  Chemically synthesized
ucucgaggacacuucaaaagaug

SEQ ID NO: 39846 - RNA, 23 nt, Artificial Sequence
  Chemically synthesized
cucucgaggacacuucaaaagau

SEQ ID NO: 39847 - RNA, 23 nt, Artificial Sequence
  Chemically synthesized
ccaacuggaacaaugaguucaag

SEQ ID NO: 39848 - RNA, 23 nt, Artificial Sequence
  Chemically synthesized
cccaacuggaacaaugaguucaa

SEQ ID NO: 39849 - RNA, 23 nt, Artificial Sequence
  Chemically synthesized
gcccaacuggaacaaugaguuca

SEQ ID NO: 39850 - RNA, 23 nt, Artificial Sequence
  Chemically synthesized
ggcccaacuggaacaaugaguuc

SEQ ID NO: 39851 - RNA, 23 nt, Artificial Sequence
  Chemically synthesized
aggcccaacuggaacaaugaguu

SEQ ID NO: 39852 - RNA, 23 nt, Artificial Sequence
  Chemically synthesized
ucaauuuucuggcaaggaacccu

SEQ ID NO: 39853 - RNA, 23 nt, Artificial Sequence
  Chemically synthesized
cucaauuuucuggcaaggaaccc

SEQ ID NO: 39854 - RNA, 23 nt, Artificial Sequence
  Chemically synthesized
ccucaauuuucuggcaaggaacc

SEQ ID NO: 39855 - RNA, 23 nt, Artificial Sequence
  Chemically synthesized
gccucaauuuucuggcaaggaac

SEQ ID NO: 39856 - RNA, 23 nt, Artificial Sequence
  Chemically synthesized
ugccucaauuuucuggcaaggaa

SEQ ID NO: 39857 - RNA, 23 nt, Artificial Sequence
  Chemically synthesized
cucauggcugggaauaaauuuuu

SEQ ID NO: 39858 - RNA, 23 nt, Artificial Sequence
  Chemically synthesized
ccagagguguucauuucuauuac

SEQ ID NO: 39859 - RNA, 23 nt, Artificial Sequence
  Chemically synthesized
cccagagguguucauuucuauua

SEQ ID NO: 39860 - RNA, 23 nt, Artificial Sequence
  Chemically synthesized
ccccagagguguucauuucuauu

SEQ ID NO: 39861 - RNA, 23 nt, Artificial Sequence
  Chemically synthesized
accccagagguguucauuucuau

SEQ ID NO: 39862 - RNA, 23 nt, Artificial Sequence
  Chemically synthesized
gaccccagagguguucauuucua

SEQ ID NO: 39863 - RNA, 23 nt, Artificial Sequence
  Chemically synthesized
ggcugggaugaaaaucaggcucu

SEQ ID NO: 39864 - RNA, 23 nt, Artificial Sequence
  Chemically synthesized
uggcuuuagucuugaucaugacc

SEQ ID NO: 39865 - RNA, 23 nt, Artificial Sequence
  Chemically synthesized
cuggcuuuagucuugaucaugac

SEQ ID NO: 39866 - RNA, 23 nt, Artificial Sequence
  Chemically synthesized
ucuggcuuuagucuugaucauga

SEQ ID NO: 39867 - RNA, 23 nt, Artificial Sequence
  Chemically synthesized
cucuggcuuuagucuugaucaug

SEQ ID NO: 39868 - RNA, 23 nt, Artificial Sequence
  Chemically synthesized
ucucuggcuuuagucuugaucau

SEQ ID NO: 39869 - RNA, 23 nt, Artificial Sequence
  Chemically synthesized
ggaggcaauuagacaaaaaccuc

SEQ ID NO: 39870 - RNA, 23 nt, Artificial Sequence
  Chemically synthesized
aggaggcaauuagacaaaaaccu

SEQ ID NO: 39871 - RNA, 23 nt, Artificial Sequence
  Chemically synthesized
gaggaggcaauuagacaaaaacc

SEQ ID NO: 39872 - RNA, 23 nt, Artificial Sequence
  Chemically synthesized
ggaggaggcaauuagacaaaaac

SEQ ID NO: 39873 - RNA, 23 nt, Artificial Sequence
  Chemically synthesized
uggaggaggcaauuagacaaaaa

SEQ ID NO: 39874 - RNA, 23 nt, Artificial Sequence
  Chemically synthesized
cgaguuauuuuggguucaacacu

SEQ ID NO: 39875 - RNA, 23 nt, Artificial Sequence
  Chemically synthesized
acgaguuauuuuggguucaacac

SEQ ID NO: 39876 - RNA, 23 nt, Artificial Sequence
  Chemically synthesized
cacgaguuauuuuggguucaaca

SEQ ID NO: 39877 - RNA, 23 nt, Artificial Sequence
  Chemically synthesized
acacgaguuauuuuggguucaac

SEQ ID NO: 39878 - RNA, 23 nt, Artificial Sequence
  Chemically synthesized
cacacgaguuauuuuggguucaa

SEQ ID NO: 39879 - RNA, 23 nt, Artificial Sequence
  Chemically synthesized
gguguucauuucuauuacaacaa

SEQ ID NO: 39880 - RNA, 23 nt, Artificial Sequence
  Chemically synthesized
agguguucauuucuauuacaaca

SEQ ID NO: 39881 - RNA, 23 nt, Artificial Sequence
  Chemically synthesized
gagguguucauuucuauuacaac

SEQ ID NO: 39882 - RNA, 23 nt, Artificial Sequence
  Chemically synthesized
agagguguucauuucuauuacaa

SEQ ID NO: 39883 - RNA, 23 nt, Artificial Sequence
  Chemically synthesized
cagagguguucauuucuauuaca

SEQ ID NO: 39884 - RNA, 23 nt, Artificial Sequence
  Chemically synthesized
gcagcaguauuggcguguucuuc

SEQ ID NO: 39885 - RNA, 23 nt, Artificial Sequence
  Chemically synthesized
agcagcaguauuggcguguucuu

SEQ ID NO: 39886 - RNA, 23 nt, Artificial Sequence
  Chemically synthesized
cagcagcaguauuggcguguucu

SEQ ID NO: 39887 - RNA, 23 nt, Artificial Sequence
  Chemically synthesized
ccagcagcaguauuggcguguuc

SEQ ID NO: 39888 - RNA, 23 nt, Artificial Sequence
  Chemically synthesized
cccagcagcaguauuggcguguu

SEQ ID NO: 39889 - RNA, 23 nt, Artificial Sequence
  Chemically synthesized
aaaucaggcucuucacauagcuu

SEQ ID NO: 39890 - RNA, 23 nt, Artificial Sequence
  Chemically synthesized
aaaaucaggcucuucacauagcu

SEQ ID NO: 39891 - RNA, 23 nt, Artificial Sequence
  Chemically synthesized
gaaaaucaggcucuucacauagc

SEQ ID NO: 39892 - RNA, 23 nt, Artificial Sequence
  Chemically synthesized
ugaaaaucaggcucuucacauag

SEQ ID NO: 39893 - RNA, 23 nt, Artificial Sequence
  Chemically synthesized
augaaaaucaggcucuucacaua

SEQ ID NO: 39894 - RNA, 23 nt, Artificial Sequence
  Chemically synthesized
acaaugaguucaagcagauugcc

SEQ ID NO: 39895 - RNA, 23 nt, Artificial Sequence
  Chemically synthesized
aacaaugaguucaagcagauugc

SEQ ID NO: 39896 - RNA, 23 nt, Artificial Sequence
  Chemically synthesized
gaacaaugaguucaagcagauug

SEQ ID NO: 39897 - RNA, 23 nt, Artificial Sequence
  Chemically synthesized
ggaacaaugaguucaagcagauu

SEQ ID NO: 39898 - RNA, 23 nt, Artificial Sequence
  Chemically synthesized
uggaacaaugaguucaagcagau

SEQ ID NO: 39899 - RNA, 23 nt, Artificial Sequence
  Chemically synthesized
ugacagauguauuucacuaccca

SEQ ID NO: 39900 - RNA, 23 nt, Artificial Sequence
  Chemically synthesized
cugacagauguauuucacuaccc

SEQ ID NO: 39901 - RNA, 23 nt, Artificial Sequence
  Chemically synthesized
ccugacagauguauuucacuacc

SEQ ID NO: 39902 - RNA, 23 nt, Artificial Sequence
  Chemically synthesized
cccugacagauguauuucacuac

SEQ ID NO: 39903 - RNA, 23 nt, Artificial Sequence
  Chemically synthesized
gcccugacagauguauuucacua

SEQ ID NO: 39904 - RNA, 23 nt, Artificial Sequence
  Chemically synthesized
guaugcaugugaaagaauaauua

SEQ ID NO: 39905 - RNA, 23 nt, Artificial Sequence
  Chemically synthesized
uguaugcaugugaaagaauaauu

SEQ ID NO: 39906 - RNA, 23 nt, Artificial Sequence
  Chemically synthesized
uuguaugcaugugaaagaauaau

SEQ ID NO: 39907 - RNA, 23 nt, Artificial Sequence
  Chemically synthesized
cuuguaugcaugugaaagaauaa

SEQ ID NO: 39908 - RNA, 23 nt, Artificial Sequence
  Chemically synthesized
ucuuguaugcaugugaaagaaua

SEQ ID NO: 39909 - RNA, 23 nt, Artificial Sequence
  Chemically synthesized
gccugaauuuuaacugcaugcua

SEQ ID NO: 39910 - RNA, 23 nt, Artificial Sequence
  Chemically synthesized
ugccugaauuuuaacugcaugcu

SEQ ID NO: 39911 - RNA, 23 nt, Artificial Sequence
  Chemically synthesized
gugccugaauuuuaacugcaugc

SEQ ID NO: 39912 - RNA, 23 nt, Artificial Sequence
  Chemically synthesized
ugugccugaauuuuaacugcaug

SEQ ID NO: 39913 - RNA, 23 nt, Artificial Sequence
  Chemically synthesized
cugugccugaauuuuaacugcau

SEQ ID NO: 39914 - RNA, 23 nt, Artificial Sequence
  Chemically synthesized
cacuauaccauacuuccuuagcu

SEQ ID NO: 39915 - RNA, 23 nt, Artificial Sequence
  Chemically synthesized
acacuauaccauacuuccuuagc

SEQ ID NO: 39916 - RNA, 23 nt, Artificial Sequence
  Chemically synthesized
uacacuauaccauacuuccuuag

SEQ ID NO: 39917 - RNA, 23 nt, Artificial Sequence
  Chemically synthesized
guacacuauaccauacuuccuua

SEQ ID NO: 39918 - RNA, 23 nt, Artificial Sequence
  Chemically synthesized
aguacacuauaccauacuuccuu

SEQ ID NO: 39919 - RNA, 23 nt, Artificial Sequence
  Chemically synthesized
cgaaaauacugacgugauuacag

SEQ ID NO: 39920 - RNA, 23 nt, Artificial Sequence
  Chemically synthesized
acgaaaauacugacgugauuaca

SEQ ID NO: 39921 - RNA, 23 nt, Artificial Sequence
  Chemically synthesized
gacgaaaauacugacgugauuac

SEQ ID NO: 39922 - RNA, 23 nt, Artificial Sequence
  Chemically synthesized
ggacgaaaauacugacgugauua

SEQ ID NO: 39923 - RNA, 23 nt, Artificial Sequence
  Chemically synthesized
gggacgaaaauacugacgugauu

SEQ ID NO: 39924 - RNA, 23 nt, Artificial Sequence
  Chemically synthesized
cacuuucugaguuaucauauauu

SEQ ID NO: 39925 - RNA, 23 nt, Artificial Sequence
  Chemically synthesized
ucacuuucugaguuaucauauau

SEQ ID NO: 39926 - RNA, 23 nt, Artificial Sequence
  Chemically synthesized
cucacuuucugaguuaucauaua

SEQ ID NO: 39927 - RNA, 23 nt, Artificial Sequence
  Chemically synthesized
acucacuuucugaguuaucauau

SEQ ID NO: 39928 - RNA, 23 nt, Artificial Sequence
  Chemically synthesized
aacucacuuucugaguuaucaua

SEQ ID NO: 39929 - RNA, 23 nt, Artificial Sequence
  Chemically synthesized
gcaacaaguaucaugauggggug

SEQ ID NO: 39930 - RNA, 23 nt, Artificial Sequence
  Chemically synthesized
agcaacaaguaucaugauggggu

SEQ ID NO: 39931 - RNA, 23 nt, Artificial Sequence
  Chemically synthesized
gagcaacaaguaucaugaugggg

SEQ ID NO: 39932 - RNA, 23 nt, Artificial Sequence
  Chemically synthesized
agagcaacaaguaucaugauggg

SEQ ID NO: 39933 - RNA, 23 nt, Artificial Sequence
  Chemically synthesized
aagagcaacaaguaucaugaugg

SEQ ID NO: 39934 - RNA, 23 nt, Artificial Sequence
  Chemically synthesized
uccuggaacuucacaugaaaaag

SEQ ID NO: 39935 - RNA, 23 nt, Artificial Sequence
  Chemically synthesized
guccuggaacuucacaugaaaaa

SEQ ID NO: 39936 - RNA, 23 nt, Artificial Sequence
  Chemically synthesized
aguccuggaacuucacaugaaaa

SEQ ID NO: 39937 - RNA, 23 nt, Artificial Sequence
  Chemically synthesized
gaguccuggaacuucacaugaaa

SEQ ID NO: 39938 - RNA, 23 nt, Artificial Sequence
  Chemically synthesized
ggaguccuggaacuucacaugaa

SEQ ID NO: 39939 - RNA, 23 nt, Artificial Sequence
  Chemically synthesized
cgaagagcaacaaguaucaugau

SEQ ID NO: 39940 - RNA, 23 nt, Artificial Sequence
  Chemically synthesized
ccgaagagcaacaaguaucauga

SEQ ID NO: 39941 - RNA, 23 nt, Artificial Sequence
  Chemically synthesized
gccgaagagcaacaaguaucaug

SEQ ID NO: 39942 - RNA, 23 nt, Artificial Sequence
  Chemically synthesized
agccgaagagcaacaaguaucau

SEQ ID NO: 39943 - RNA, 23 nt, Artificial Sequence
  Chemically synthesized
cagccgaagagcaacaaguauca

SEQ ID NO: 39944 - RNA, 23 nt, Artificial Sequence
  Chemically synthesized
ucgucuucuuucucagccuggcc

SEQ ID NO: 39945 - RNA, 23 nt, Artificial Sequence
  Chemically synthesized
aucgucuucuuucucagccuggc

SEQ ID NO: 39946 - RNA, 23 nt, Artificial Sequence
  Chemically synthesized
caucgucuucuuucucagccugg

SEQ ID NO: 39947 - RNA, 23 nt, Artificial Sequence
  Chemically synthesized
ucaucgucuucuuucucagccug

SEQ ID NO: 39948 - RNA, 23 nt, Artificial Sequence
  Chemically synthesized
uucaucgucuucuuucucagccu

SEQ ID NO: 39949 - RNA, 23 nt, Artificial Sequence
  Chemically synthesized
auguuuucaucgucuucuuucuc

SEQ ID NO: 39950 - RNA, 23 nt, Artificial Sequence
  Chemically synthesized
cauguuuucaucgucuucuuucu

SEQ ID NO: 39951 - RNA, 23 nt, Artificial Sequence
  Chemically synthesized
ccauguuuucaucgucuucuuuc

SEQ ID NO: 39952 - RNA, 23 nt, Artificial Sequence
  Chemically synthesized
accauguuuucaucgucuucuuu

SEQ ID NO: 39953 - RNA, 23 nt, Artificial Sequence
  Chemically synthesized
caccauguuuucaucgucuucuu

SEQ ID NO: 39954 - RNA, 23 nt, Artificial Sequence
  Chemically synthesized
gcuuuagucuugaucaugaccuc

SEQ ID NO: 39955 - RNA, 23 nt, Artificial Sequence
  Chemically synthesized
ggcuuuagucuugaucaugaccu

SEQ ID NO: 39956 - RNA, 23 nt, Artificial Sequence
  Chemically synthesized
cucucuggcuuuagucuugauca

SEQ ID NO: 39957 - RNA, 23 nt, Artificial Sequence
  Chemically synthesized
ucucucuggcuuuagucuugauc

SEQ ID NO: 39958 - RNA, 23 nt, Artificial Sequence
  Chemically synthesized
aucucucuggcuuuagucuugau

SEQ ID NO: 39959 - RNA, 23 nt, Artificial Sequence
  Chemically synthesized
ccacugaauugcuaaggacaaua

SEQ ID NO: 39960 - RNA, 23 nt, Artificial Sequence
  Chemically synthesized
accacugaauugcuaaggacaau

SEQ ID NO: 39961 - RNA, 23 nt, Artificial Sequence
  Chemically synthesized
aaccacugaauugcuaaggacaa

SEQ ID NO: 39962 - RNA, 23 nt, Artificial Sequence
  Chemically synthesized
caaccacugaauugcuaaggaca

SEQ ID NO: 39963 - RNA, 23 nt, Artificial Sequence
  Chemically synthesized
acaaccacugaauugcuaaggac

SEQ ID NO: 39964 - RNA, 23 nt, Artificial Sequence
  Chemically synthesized
acaacaaggagagcuucuagacu

SEQ ID NO: 39965 - RNA, 23 nt, Artificial Sequence
  Chemically synthesized
uacaacaaggagagcuucuagac

SEQ ID NO: 39966 - RNA, 23 nt, Artificial Sequence
  Chemically synthesized
uuacaacaaggagagcuucuaga

SEQ ID NO: 39967 - RNA, 23 nt, Artificial Sequence
  Chemically synthesized
auuacaacaaggagagcuucuag

SEQ ID NO: 39968 - RNA, 23 nt, Artificial Sequence
  Chemically synthesized
uauuacaacaaggagagcuucua

SEQ ID NO: 39969 - RNA, 23 nt, Artificial Sequence
  Chemically synthesized
ccauauuaguacucucauggcug

SEQ ID NO: 39970 - RNA, 23 nt, Artificial Sequence
  Chemically synthesized
accauauuaguacucucauggcu

SEQ ID NO: 39971 - RNA, 23 nt, Artificial Sequence
  Chemically synthesized
caccauauuaguacucucauggc

SEQ ID NO: 39972 - RNA, 23 nt, Artificial Sequence
  Chemically synthesized
ccaccauauuaguacucucaugg

SEQ ID NO: 39973 - RNA, 23 nt, Artificial Sequence
  Chemically synthesized
uccaccauauuaguacucucaug

SEQ ID NO: 39974 - RNA, 23 nt, Artificial Sequence
  Chemically synthesized
gcucuucugaaaucuauauggua

SEQ ID NO: 39975 - RNA, 23 nt, Artificial Sequence
  Chemically synthesized
ugcucuucugaaaucuauauggu

SEQ ID NO: 39976 - RNA, 23 nt, Artificial Sequence
  Chemically synthesized
cugcucuucugaaaucuauaugg

SEQ ID NO: 39977 - RNA, 23 nt, Artificial Sequence
  Chemically synthesized
gcugcucuucugaaaucuauaug

SEQ ID NO: 39978 - RNA, 23 nt, Artificial Sequence
  Chemically synthesized
cgcugcucuucugaaaucuauau

SEQ ID NO: 39979 - RNA, 23 nt, Artificial Sequence
  Chemically synthesized
ucgcugcucuucugaaaucuaua

SEQ ID NO: 39980 - RNA, 23 nt, Artificial Sequence
  Chemically synthesized
uucgcugcucuucugaaaucuau

SEQ ID NO: 39981 - RNA, 23 nt, Artificial Sequence
  Chemically synthesized
cuucgcugcucuucugaaaucua

SEQ ID NO: 39982 - RNA, 23 nt, Artificial Sequence
  Chemically synthesized
ccuucgcugcucuucugaaaucu

SEQ ID NO: 39983 - RNA, 23 nt, Artificial Sequence
  Chemically synthesized
ccuaugaguuguucugguacaca

SEQ ID NO: 39984 - RNA, 23 nt, Artificial Sequence
  Chemically synthesized
uccuaugaguuguucugguacac

SEQ ID NO: 39985 - RNA, 23 nt, Artificial Sequence
  Chemically synthesized
cuccuaugaguuguucugguaca

SEQ ID NO: 39986 - RNA, 23 nt, Artificial Sequence
  Chemically synthesized
ccuccuaugaguuguucugguac

SEQ ID NO: 39987 - RNA, 23 nt, Artificial Sequence
  Chemically synthesized
gccuccuaugaguuguucuggua

SEQ ID NO: 39988 - RNA, 23 nt, Artificial Sequence
  Chemically synthesized
gcccuuacuaacgacccaacauc

SEQ ID NO: 39989 - RNA, 23 nt, Artificial Sequence
  Chemically synthesized
agcccuuacuaacgacccaacau

SEQ ID NO: 39990 - RNA, 23 nt, Artificial Sequence
  Chemically synthesized
aagcccuuacuaacgacccaaca

SEQ ID NO: 39991 - RNA, 23 nt, Artificial Sequence
  Chemically synthesized
gaagcccuuacuaacgacccaac

SEQ ID NO: 39992 - RNA, 23 nt, Artificial Sequence
  Chemically synthesized
ggaagcccuuacuaacgacccaa

SEQ ID NO: 39993 - RNA, 23 nt, Artificial Sequence
  Chemically synthesized
ccauacuuccuuagcuuauaaau

SEQ ID NO: 39994 - RNA, 23 nt, Artificial Sequence
  Chemically synthesized
accauacuuccuuagcuuauaaa

SEQ ID NO: 39995 - RNA, 23 nt, Artificial Sequence
  Chemically synthesized
uaccauacuuccuuagcuuauaa

SEQ ID NO: 39996 - RNA, 23 nt, Artificial Sequence
  Chemically synthesized
auaccauacuuccuuagcuuaua

SEQ ID NO: 39997 - RNA, 23 nt, Artificial Sequence
  Chemically synthesized
uauaccauacuuccuuagcuuau

SEQ ID NO: 39998 - RNA, 23 nt, Artificial Sequence
  Chemically synthesized
cggcugggaugaaaaucaggcuc

SEQ ID NO: 39999 - RNA, 23 nt, Artificial Sequence
  Chemically synthesized
ccggcugggaugaaaaucaggcu

SEQ ID NO: 40000 - RNA, 23 nt, Artificial Sequence
  Chemically synthesized
accggcugggaugaaaaucaggc

SEQ ID NO: 40001 - RNA, 23 nt, Artificial Sequence
  Chemically synthesized
uaccggcugggaugaaaaucagg

SEQ ID NO: 40002 - RNA, 23 nt, Artificial Sequence
  Chemically synthesized
uuaccggcugggaugaaaaucag

SEQ ID NO: 40003 - RNA, 23 nt, Artificial Sequence
  Chemically synthesized
caagagcuuuugagugguuugcu

SEQ ID NO: 40004 - RNA, 23 nt, Artificial Sequence
  Chemically synthesized
gcaagagcuuuugagugguuugc

SEQ ID NO: 40005 - RNA, 23 nt, Artificial Sequence
  Chemically synthesized
ugcaagagcuuuugagugguuug

SEQ ID NO: 40006 - RNA, 23 nt, Artificial Sequence
  Chemically synthesized
augcaagagcuuuugagugguuu

SEQ ID NO: 40007 - RNA, 23 nt, Artificial Sequence
  Chemically synthesized
gaugcaagagcuuuugagugguu

SEQ ID NO: 40008 - RNA, 23 nt, Artificial Sequence
  Chemically synthesized
cccuucgcugcucuucugaaauc

SEQ ID NO: 40009 - RNA, 23 nt, Artificial Sequence
  Chemically synthesized
ucccuucgcugcucuucugaaau

SEQ ID NO: 40010 - RNA, 23 nt, Artificial Sequence
  Chemically synthesized
cucccuucgcugcucuucugaaa

SEQ ID NO: 40011 - RNA, 23 nt, Artificial Sequence
  Chemically synthesized
ugcccugacagauguauuucacu

SEQ ID NO: 40012 - RNA, 23 nt, Artificial Sequence
  Chemically synthesized
cugcccugacagauguauuucac

SEQ ID NO: 40013 - RNA, 23 nt, Artificial Sequence
  Chemically synthesized
acugcccugacagauguauuuca

SEQ ID NO: 40014 - RNA, 23 nt, Artificial Sequence
  Chemically synthesized
caacaaguaucaugauggggugc

SEQ ID NO: 40015 - RNA, 23 nt, Artificial Sequence
  Chemically synthesized
gaagagcaacaaguaucaugaug

SEQ ID NO: 40016 - RNA, 23 nt, Artificial Sequence
  Chemically synthesized
acagccgaagagcaacaaguauc

SEQ ID NO: 40017 - RNA, 23 nt, Artificial Sequence
  Chemically synthesized
gacagccgaagagcaacaaguau

SEQ ID NO: 40018 - RNA, 23 nt, Artificial Sequence
  Chemically synthesized
ggucuuguaugcaugugaaagaa

SEQ ID NO: 40019 - RNA, 23 nt, Artificial Sequence
  Chemically synthesized
uggucuuguaugcaugugaaaga

SEQ ID NO: 40020 - RNA, 23 nt, Artificial Sequence
  Chemically synthesized
guggucuuguaugcaugugaaag

SEQ ID NO: 40021 - RNA, 23 nt, Artificial Sequence
  Chemically synthesized
uguggucuuguaugcaugugaaa

SEQ ID NO: 40022 - RNA, 23 nt, Artificial Sequence
  Chemically synthesized
cuguggucuuguaugcaugugaa

SEQ ID NO: 40023 - RNA, 23 nt, Artificial Sequence
  Chemically synthesized
uuucaucgucuucuuucucagcc

SEQ ID NO: 40024 - RNA, 23 nt, Artificial Sequence
  Chemically synthesized
uuuucaucgucuucuuucucagc

SEQ ID NO: 40025 - RNA, 23 nt, Artificial Sequence
  Chemically synthesized
guuuucaucgucuucuuucucag

SEQ ID NO: 40026 - RNA, 23 nt, Artificial Sequence
  Chemically synthesized
guggaggaggcaauuagacaaaa

SEQ ID NO: 40027 - RNA, 23 nt, Artificial Sequence
  Chemically synthesized
cguggaggaggcaauuagacaaa

SEQ ID NO: 40028 - RNA, 23 nt, Artificial Sequence
  Chemically synthesized
ccguggaggaggcaauuagacaa

SEQ ID NO: 40029 - RNA, 23 nt, Artificial Sequence
  Chemically synthesized
gcacugugccugaauuuuaacug

SEQ ID NO: 40030 - RNA, 23 nt, Artificial Sequence
  Chemically synthesized
cgcacugugccugaauuuuaacu

SEQ ID NO: 40031 - RNA, 23 nt, Artificial Sequence
  Chemically synthesized
ccgcacugugccugaauuuuaac

SEQ ID NO: 40032 - RNA, 23 nt, Artificial Sequence
  Chemically synthesized
uccgcacugugccugaauuuuaa

SEQ ID NO: 40033 - RNA, 23 nt, Artificial Sequence
  Chemically synthesized
auccgcacugugccugaauuuua

SEQ ID NO: 40034 - RNA, 23 nt, Artificial Sequence
  Chemically synthesized
cuauaccauacuuccuuagcuua

SEQ ID NO: 40035 - RNA, 23 nt, Artificial Sequence
  Chemically synthesized
acuauaccauacuuccuuagcuu

SEQ ID NO: 40036 - RNA, 23 nt, Artificial Sequence
  Chemically synthesized
gggaacuggugaauaauaauuaa

SEQ ID NO: 40037 - RNA, 23 nt, Artificial Sequence
  Chemically synthesized
ugggaacuggugaauaauaauua

SEQ ID NO: 40038 - RNA, 23 nt, Artificial Sequence
  Chemically synthesized
uugggaacuggugaauaauaauu

SEQ ID NO: 40039 - RNA, 23 nt, Artificial Sequence
  Chemically synthesized
guugggaacuggugaauaauaau

SEQ ID NO: 40040 - RNA, 23 nt, Artificial Sequence
  Chemically synthesized
aguugggaacuggugaauaauaa

SEQ ID NO: 40041 - RNA, 23 nt, Artificial Sequence
  Chemically synthesized
gcaguauuggcguguucuucugu

SEQ ID NO: 40042 - RNA, 23 nt, Artificial Sequence
  Chemically synthesized
agcaguauuggcguguucuucug

SEQ ID NO: 40043 - RNA, 23 nt, Artificial Sequence
  Chemically synthesized
cagcaguauuggcguguucuucu

SEQ ID NO: 40044 - RNA, 23 nt, Artificial Sequence
  Chemically synthesized
caaugaguucaagcagauugccu

SEQ ID NO: 40045 - RNA, 23 nt, Artificial Sequence
  Chemically synthesized
gacgugauuacaggcuuaaagca

SEQ ID NO: 40046 - RNA, 23 nt, Artificial Sequence
  Chemically synthesized
ugacgugauuacaggcuuaaagc

SEQ ID NO: 40047 - RNA, 23 nt, Artificial Sequence
  Chemically synthesized
cugacgugauuacaggcuuaaag

SEQ ID NO: 40048 - RNA, 23 nt, Artificial Sequence
  Chemically synthesized
acugacgugauuacaggcuuaaa

SEQ ID NO: 40049 - RNA, 23 nt, Artificial Sequence
  Chemically synthesized
uacugacgugauuacaggcuuaa

SEQ ID NO: 40050 - RNA, 23 nt, Artificial Sequence
  Chemically synthesized
auacugacgugauuacaggcuua

SEQ ID NO: 40051 - RNA, 23 nt, Artificial Sequence
  Chemically synthesized
cucuucacauagcuuuacacugg

SEQ ID NO: 40052 - RNA, 23 nt, Artificial Sequence
  Chemically synthesized
gcucuucacauagcuuuacacug

SEQ ID NO: 40053 - RNA, 23 nt, Artificial Sequence
  Chemically synthesized
ggcucuucacauagcuuuacacu

SEQ ID NO: 40054 - RNA, 23 nt, Artificial Sequence
  Chemically synthesized
aggcucuucacauagcuuuacac

SEQ ID NO: 40055 - RNA, 23 nt, Artificial Sequence
  Chemically synthesized
caggcucuucacauagcuuuaca

SEQ ID NO: 40056 - RNA, 23 nt, Artificial Sequence
  Chemically synthesized
cuuaccggcugggaugaaaauca

SEQ ID NO: 40057 - RNA, 23 nt, Artificial Sequence
  Chemically synthesized
aaacucacuuucugaguuaucau

SEQ ID NO: 40058 - RNA, 23 nt, Artificial Sequence
  Chemically synthesized
ugagcaagguguauuucuacugg

SEQ ID NO: 40059 - RNA, 23 nt, Artificial Sequence
  Chemically synthesized
cugagcaagguguauuucuacug

SEQ ID NO: 40060 - RNA, 23 nt, Artificial Sequence
  Chemically synthesized
gcugagcaagguguauuucuacu

SEQ ID NO: 40061 - RNA, 23 nt, Artificial Sequence
  Chemically synthesized
agcugagcaagguguauuucuac

SEQ ID NO: 40062 - RNA, 23 nt, Artificial Sequence
  Chemically synthesized
aagcugagcaagguguauuucua

SEQ ID NO: 40063 - RNA, 23 nt, Artificial Sequence
  Chemically synthesized
cuauaugguacaaaugcagugag

SEQ ID NO: 40064 - RNA, 23 nt, Artificial Sequence
  Chemically synthesized
ucuauaugguacaaaugcaguga

SEQ ID NO: 40065 - RNA, 23 nt, Artificial Sequence
  Chemically synthesized
aucuauaugguacaaaugcagug

SEQ ID NO: 40066 - RNA, 23 nt, Artificial Sequence
  Chemically synthesized
aaucuauaugguacaaaugcagu

SEQ ID NO: 40067 - RNA, 23 nt, Artificial Sequence
  Chemically synthesized
aaaucuauaugguacaaaugcag

SEQ ID NO: 40068 - RNA, 23 nt, Artificial Sequence
  Chemically synthesized
acucccuucgcugcucuucugaa

SEQ ID NO: 40069 - RNA, 23 nt, Artificial Sequence
  Chemically synthesized
cccaggaagacuuuuucagcgug

SEQ ID NO: 40070 - RNA, 23 nt, Artificial Sequence
  Chemically synthesized
ccccaggaagacuuuuucagcgu

SEQ ID NO: 40071 - RNA, 23 nt, Artificial Sequence
  Chemically synthesized
cccccaggaagacuuuuucagcg

SEQ ID NO: 40072 - RNA, 23 nt, Artificial Sequence
  Chemically synthesized
ccccccaggaagacuuuuucagc

SEQ ID NO: 40073 - RNA, 23 nt, Artificial Sequence
  Chemically synthesized
gccccccaggaagacuuuuucag

SEQ ID NO: 40074 - RNA, 23 nt, Artificial Sequence
  Chemically synthesized
cggcuuggaaauggauuuuaggc

SEQ ID NO: 40075 - RNA, 23 nt, Artificial Sequence
  Chemically synthesized
ucggcuuggaaauggauuuuagg

SEQ ID NO: 40076 - RNA, 23 nt, Artificial Sequence
  Chemically synthesized
cucggcuuggaaauggauuuuag

SEQ ID NO: 40077 - RNA, 23 nt, Artificial Sequence
  Chemically synthesized
ccucggcuuggaaauggauuuua

SEQ ID NO: 40078 - RNA, 23 nt, Artificial Sequence
  Chemically synthesized
cccucggcuuggaaauggauuuu

SEQ ID NO: 40079 - RNA, 23 nt, Artificial Sequence
  Chemically synthesized
ggugaucucucuggcuuuagucu

SEQ ID NO: 40080 - RNA, 23 nt, Artificial Sequence
  Chemically synthesized
uggugaucucucuggcuuuaguc

SEQ ID NO: 40081 - RNA, 23 nt, Artificial Sequence
  Chemically synthesized
cuggugaucucucuggcuuuagu

SEQ ID NO: 40082 - RNA, 23 nt, Artificial Sequence
  Chemically synthesized
ucuggugaucucucuggcuuuag

SEQ ID NO: 40083 - RNA, 23 nt, Artificial Sequence
  Chemically synthesized
gucuggugaucucucuggcuuua

SEQ ID NO: 40084 - RNA, 23 nt, Artificial Sequence
  Chemically synthesized
acaaacacaaccacugaauugcu

SEQ ID NO: 40085 - RNA, 23 nt, Artificial Sequence
  Chemically synthesized
cacaaacacaaccacugaauugc

SEQ ID NO: 40086 - RNA, 23 nt, Artificial Sequence
  Chemically synthesized
ccacaaacacaaccacugaauug

SEQ ID NO: 40087 - RNA, 23 nt, Artificial Sequence
  Chemically synthesized
cccacaaacacaaccacugaauu

SEQ ID NO: 40088 - RNA, 23 nt, Artificial Sequence
  Chemically synthesized
ccccacaaacacaaccacugaau

SEQ ID NO: 40089 - RNA, 23 nt, Artificial Sequence
  Chemically synthesized
gcauuucuucaaccuggaacgcu

SEQ ID NO: 40090 - RNA, 23 nt, Artificial Sequence
  Chemically synthesized
cgcauuucuucaaccuggaacgc

SEQ ID NO: 40091 - RNA, 23 nt, Artificial Sequence
  Chemically synthesized
gcgcauuucuucaaccuggaacg

SEQ ID NO: 40092 - RNA, 23 nt, Artificial Sequence
  Chemically synthesized
ggcgcauuucuucaaccuggaac

SEQ ID NO: 40093 - RNA, 23 nt, Artificial Sequence
  Chemically synthesized
uggcgcauuucuucaaccuggaa

SEQ ID NO: 40094 - RNA, 23 nt, Artificial Sequence
  Chemically synthesized
accucagauuucacaaacugguc

SEQ ID NO: 40095 - RNA, 23 nt, Artificial Sequence
  Chemically synthesized
aaccucagauuucacaaacuggu

SEQ ID NO: 40096 - RNA, 23 nt, Artificial Sequence
  Chemically synthesized
aaaccucagauuucacaaacugg

SEQ ID NO: 40097 - RNA, 23 nt, Artificial Sequence
  Chemically synthesized
aaaaccucagauuucacaaacug

SEQ ID NO: 40098 - RNA, 23 nt, Artificial Sequence
  Chemically synthesized
aaaaaccucagauuucacaaacu

SEQ ID NO: 40099 - RNA, 23 nt, Artificial Sequence
  Chemically synthesized
agacaaaaaccucagauuucaca

SEQ ID NO: 40100 - RNA, 23 nt, Artificial Sequence
  Chemically synthesized
uagacaaaaaccucagauuucac

SEQ ID NO: 40101 - RNA, 23 nt, Artificial Sequence
  Chemically synthesized
uuagacaaaaaccucagauuuca

SEQ ID NO: 40102 - RNA, 23 nt, Artificial Sequence
  Chemically synthesized
auuagacaaaaaccucagauuuc

SEQ ID NO: 40103 - RNA, 23 nt, Artificial Sequence
  Chemically synthesized
aauuagacaaaaaccucagauuu

SEQ ID NO: 40104 - RNA, 23 nt, Artificial Sequence
  Chemically synthesized
ucauaagaggaacaaguauuugc

SEQ ID NO: 40105 - RNA, 23 nt, Artificial Sequence
  Chemically synthesized
uucauaagaggaacaaguauuug

SEQ ID NO: 40106 - RNA, 23 nt, Artificial Sequence
  Chemically synthesized
auucauaagaggaacaaguauuu

SEQ ID NO: 40107 - RNA, 23 nt, Artificial Sequence
  Chemically synthesized
cauucauaagaggaacaaguauu

SEQ ID NO: 40108 - RNA, 23 nt, Artificial Sequence
  Chemically synthesized
ucauucauaagaggaacaaguau

SEQ ID NO: 40109 - RNA, 23 nt, Artificial Sequence
  Chemically synthesized
cugcaugcuaauucuaauaccug

SEQ ID NO: 40110 - RNA, 23 nt, Artificial Sequence
  Chemically synthesized
acugcaugcuaauucuaauaccu

SEQ ID NO: 40111 - RNA, 23 nt, Artificial Sequence
  Chemically synthesized
aacugcaugcuaauucuaauacc

SEQ ID NO: 40112 - RNA, 23 nt, Artificial Sequence
  Chemically synthesized
uaacugcaugcuaauucuaauac

SEQ ID NO: 40113 - RNA, 23 nt, Artificial Sequence
  Chemically synthesized
uuaacugcaugcuaauucuaaua

SEQ ID NO: 40114 - RNA, 23 nt, Artificial Sequence
  Chemically synthesized
cccuuacuaacgacccaacaucc

SEQ ID NO: 40115 - RNA, 23 nt, Artificial Sequence
  Chemically synthesized
acacacgaguuauuuuggguuca

SEQ ID NO: 40116 - RNA, 23 nt, Artificial Sequence
  Chemically synthesized
uacacacgaguuauuuuggguuc

SEQ ID NO: 40117 - RNA, 23 nt, Artificial Sequence
  Chemically synthesized
uuacacacgaguuauuuuggguu

SEQ ID NO: 40118 - RNA, 23 nt, Artificial Sequence
  Chemically synthesized
ucucauggcugggaauaaauuuu

SEQ ID NO: 40119 - RNA, 23 nt, Artificial Sequence
  Chemically synthesized
ccaggcauuguguuuucaaucaa

SEQ ID NO: 40120 - RNA, 23 nt, Artificial Sequence
  Chemically synthesized
uccaggcauuguguuuucaauca

SEQ ID NO: 40121 - RNA, 23 nt, Artificial Sequence
  Chemically synthesized
guccaggcauuguguuuucaauc

SEQ ID NO: 40122 - RNA, 23 nt, Artificial Sequence
  Chemically synthesized
aguccaggcauuguguuuucaau

SEQ ID NO: 40123 - RNA, 23 nt, Artificial Sequence
  Chemically synthesized
aaguccaggcauuguguuuucaa

SEQ ID NO: 40124 - RNA, 23 nt, Artificial Sequence
  Chemically synthesized
aggagagcuucuagacuuuggag

SEQ ID NO: 40125 - RNA, 23 nt, Artificial Sequence
  Chemically synthesized
aaggagagcuucuagacuuugga

SEQ ID NO: 40126 - RNA, 23 nt, Artificial Sequence
  Chemically synthesized
caaggagagcuucuagacuuugg

SEQ ID NO: 40127 - RNA, 23 nt, Artificial Sequence
  Chemically synthesized
acaaggagagcuucuagacuuug

SEQ ID NO: 40128 - RNA, 23 nt, Artificial Sequence
  Chemically synthesized
aacaaggagagcuucuagacuuu

SEQ ID NO: 40129 - RNA, 23 nt, Artificial Sequence
  Chemically synthesized
gaggacacuucaaaagaugugcc

SEQ ID NO: 40130 - RNA, 23 nt, Artificial Sequence
  Chemically synthesized
cgugauuacaggcuuaaagcaga

SEQ ID NO: 40131 - RNA, 23 nt, Artificial Sequence
  Chemically synthesized
acgugauuacaggcuuaaagcag

SEQ ID NO: 40132 - RNA, 23 nt, Artificial Sequence
  Chemically synthesized
ggaugcaagagcuuuugaguggu

SEQ ID NO: 40133 - RNA, 23 nt, Artificial Sequence
  Chemically synthesized
ggauuuugaaugagggucucucc

SEQ ID NO: 40134 - RNA, 23 nt, Artificial Sequence
  Chemically synthesized
uggauuuugaaugagggucucuc

SEQ ID NO: 40135 - RNA, 23 nt, Artificial Sequence
  Chemically synthesized
cuggauuuugaaugagggucucu

SEQ ID NO: 40136 - RNA, 23 nt, Artificial Sequence
  Chemically synthesized
gcuggauuuugaaugagggucuc

SEQ ID NO: 40137 - RNA, 23 nt, Artificial Sequence
  Chemically synthesized
ugcuggauuuugaaugagggucu

SEQ ID NO: 40138 - RNA, 23 nt, Artificial Sequence
  Chemically synthesized
gaagcugagcaagguguauuucu

SEQ ID NO: 40139 - RNA, 23 nt, Artificial Sequence
  Chemically synthesized
ugaagcugagcaagguguauuuc

SEQ ID NO: 40140 - RNA, 23 nt, Artificial Sequence
  Chemically synthesized
cugaagcugagcaagguguauuu

SEQ ID NO: 40141 - RNA, 23 nt, Artificial Sequence
  Chemically synthesized
cuggcgauuucaacaagaaguug

SEQ ID NO: 40142 - RNA, 23 nt, Artificial Sequence
  Chemically synthesized
ucuggcgauuucaacaagaaguu

SEQ ID NO: 40143 - RNA, 23 nt, Artificial Sequence
  Chemically synthesized
uucuggcgauuucaacaagaagu

SEQ ID NO: 40144 - RNA, 23 nt, Artificial Sequence
  Chemically synthesized
guucuggcgauuucaacaagaag

SEQ ID NO: 40145 - RNA, 23 nt, Artificial Sequence
  Chemically synthesized
gguucuggcgauuucaacaagaa

SEQ ID NO: 40146 - RNA, 23 nt, Artificial Sequence
  Chemically synthesized
ucggauuguucgaggccaaaccc

SEQ ID NO: 40147 - RNA, 23 nt, Artificial Sequence
  Chemically synthesized
gucggauuguucgaggccaaacc

SEQ ID NO: 40148 - RNA, 23 nt, Artificial Sequence
  Chemically synthesized
ggucggauuguucgaggccaaac

SEQ ID NO: 40149 - RNA, 23 nt, Artificial Sequence
  Chemically synthesized
gggucggauuguucgaggccaaa

SEQ ID NO: 40150 - RNA, 23 nt, Artificial Sequence
  Chemically synthesized
cgggucggauuguucgaggccaa

SEQ ID NO: 40151 - RNA, 23 nt, Artificial Sequence
  Chemically synthesized
aggugagggagaagaaauuuccu

SEQ ID NO: 40152 - RNA, 23 nt, Artificial Sequence
  Chemically synthesized
caggugagggagaagaaauuucc

SEQ ID NO: 40153 - RNA, 23 nt, Artificial Sequence
  Chemically synthesized
acaggugagggagaagaaauuuc

SEQ ID NO: 40154 - RNA, 23 nt, Artificial Sequence
  Chemically synthesized
cacaggugagggagaagaaauuu

SEQ ID NO: 40155 - RNA, 23 nt, Artificial Sequence
  Chemically synthesized
acacaggugagggagaagaaauu

SEQ ID NO: 40156 - RNA, 23 nt, Artificial Sequence
  Chemically synthesized
guggcgcauuucuucaaccugga

SEQ ID NO: 40157 - RNA, 23 nt, Artificial Sequence
  Chemically synthesized
gcaugcuaauucuaauaccuguc

SEQ ID NO: 40158 - RNA, 23 nt, Artificial Sequence
  Chemically synthesized
ugcaugcuaauucuaauaccugu

SEQ ID NO: 40159 - RNA, 23 nt, Artificial Sequence
  Chemically synthesized
cacugugccugaauuuuaacugc

SEQ ID NO: 40160 - RNA, 23 nt, Artificial Sequence
  Chemically synthesized
acguucuacugguaugaagagga

SEQ ID NO: 40161 - RNA, 23 nt, Artificial Sequence
  Chemically synthesized
cacguucuacugguaugaagagg

SEQ ID NO: 40162 - RNA, 23 nt, Artificial Sequence
  Chemically synthesized
acacguucuacugguaugaagag

SEQ ID NO: 40163 - RNA, 23 nt, Artificial Sequence
  Chemically synthesized
gacacguucuacugguaugaaga

SEQ ID NO: 40164 - RNA, 23 nt, Artificial Sequence
  Chemically synthesized
ugacacguucuacugguaugaag

SEQ ID NO: 40165 - RNA, 23 nt, Artificial Sequence
  Chemically synthesized
uugacacguucuacugguaugaa

SEQ ID NO: 40166 - RNA, 23 nt, Artificial Sequence
  Chemically synthesized
gucauauacaacagaacaaaaac

SEQ ID NO: 40167 - RNA, 23 nt, Artificial Sequence
  Chemically synthesized
ugucauauacaacagaacaaaaa

SEQ ID NO: 40168 - RNA, 23 nt, Artificial Sequence
  Chemically synthesized
augucauauacaacagaacaaaa

SEQ ID NO: 40169 - RNA, 23 nt, Artificial Sequence
  Chemically synthesized
caugucauauacaacagaacaaa

SEQ ID NO: 40170 - RNA, 23 nt, Artificial Sequence
  Chemically synthesized
acaugucauauacaacagaacaa

SEQ ID NO: 40171 - RNA, 23 nt, Artificial Sequence
  Chemically synthesized
cucucauggcugggaauaaauuu

SEQ ID NO: 40172 - RNA, 23 nt, Artificial Sequence
  Chemically synthesized
acucucauggcugggaauaaauu

SEQ ID NO: 40173 - RNA, 23 nt, Artificial Sequence
  Chemically synthesized
caggcauuguguuuucaaucaag

SEQ ID NO: 40174 - RNA, 23 nt, Artificial Sequence
  Chemically synthesized
agagcuucuagacuuuggagguc

SEQ ID NO: 40175 - RNA, 23 nt, Artificial Sequence
  Chemically synthesized
gagagcuucuagacuuuggaggu

SEQ ID NO: 40176 - RNA, 23 nt, Artificial Sequence
  Chemically synthesized
ggagagcuucuagacuuuggagg

SEQ ID NO: 40177 - RNA, 23 nt, Artificial Sequence
  Chemically synthesized
ugggacgaaaauacugacgugau

SEQ ID NO: 40178 - RNA, 23 nt, Artificial Sequence
  Chemically synthesized
cugggacgaaaauacugacguga

SEQ ID NO: 40179 - RNA, 23 nt, Artificial Sequence
  Chemically synthesized
acugggacgaaaauacugacgug

SEQ ID NO: 40180 - RNA, 23 nt, Artificial Sequence
  Chemically synthesized
cugaaaucuauaugguacaaaug

SEQ ID NO: 40181 - RNA, 23 nt, Artificial Sequence
  Chemically synthesized
ucugaaaucuauaugguacaaau

SEQ ID NO: 40182 - RNA, 23 nt, Artificial Sequence
  Chemically synthesized
uucugaaaucuauaugguacaaa

SEQ ID NO: 40183 - RNA, 23 nt, Artificial Sequence
  Chemically synthesized
cuucugaaaucuauaugguacaa

SEQ ID NO: 40184 - RNA, 23 nt, Artificial Sequence
  Chemically synthesized
ucuucugaaaucuauaugguaca

SEQ ID NO: 40185 - RNA, 23 nt, Artificial Sequence
  Chemically synthesized
auaauuagguucuggcgauuuca

SEQ ID NO: 40186 - RNA, 23 nt, Artificial Sequence
  Chemically synthesized
aauaauuagguucuggcgauuuc

SEQ ID NO: 40187 - RNA, 23 nt, Artificial Sequence
  Chemically synthesized
gaauaauuagguucuggcgauuu

SEQ ID NO: 40188 - RNA, 23 nt, Artificial Sequence
  Chemically synthesized
agaauaauuagguucuggcgauu

SEQ ID NO: 40189 - RNA, 23 nt, Artificial Sequence
  Chemically synthesized
aagaauaauuagguucuggcgau

SEQ ID NO: 40190 - RNA, 23 nt, Artificial Sequence
  Chemically synthesized
gucuuguaugcaugugaaagaau

SEQ ID NO: 40191 - RNA, 23 nt, Artificial Sequence
  Chemically synthesized
cccgugccucaauuuucuggcaa

SEQ ID NO: 40192 - RNA, 23 nt, Artificial Sequence
  Chemically synthesized
ccccgugccucaauuuucuggca

SEQ ID NO: 40193 - RNA, 23 nt, Artificial Sequence
  Chemically synthesized
gccccgugccucaauuuucuggc

SEQ ID NO: 40194 - RNA, 23 nt, Artificial Sequence
  Chemically synthesized
ugccccgugccucaauuuucugg

SEQ ID NO: 40195 - RNA, 23 nt, Artificial Sequence
  Chemically synthesized
augccccgugccucaauuuucug

SEQ ID NO: 40196 - RNA, 23 nt, Artificial Sequence
  Chemically synthesized
ugcacaacaucaccuucuguaga

SEQ ID NO: 40197 - RNA, 23 nt, Artificial Sequence
  Chemically synthesized
cugcacaacaucaccuucuguag

SEQ ID NO: 40198 - RNA, 23 nt, Artificial Sequence
  Chemically synthesized
ucugcacaacaucaccuucugua

SEQ ID NO: 40199 - RNA, 23 nt, Artificial Sequence
  Chemically synthesized
cucugcacaacaucaccuucugu

SEQ ID NO: 40200 - RNA, 23 nt, Artificial Sequence
  Chemically synthesized
ucucugcacaacaucaccuucug

SEQ ID NO: 40201 - RNA, 23 nt, Artificial Sequence
  Chemically synthesized
cucucugcacaacaucaccuucu

SEQ ID NO: 40202 - RNA, 23 nt, Artificial Sequence
  Chemically synthesized
ucucucugcacaacaucaccuuc

SEQ ID NO: 40203 - RNA, 23 nt, Artificial Sequence
  Chemically synthesized
cucucucugcacaacaucaccuu

SEQ ID NO: 40204 - RNA, 23 nt, Artificial Sequence
  Chemically synthesized
gaaauuuccugacagccgaagag

SEQ ID NO: 40205 - RNA, 23 nt, Artificial Sequence
  Chemically synthesized
agaaauuuccugacagccgaaga

SEQ ID NO: 40206 - RNA, 23 nt, Artificial Sequence
  Chemically synthesized
aagaaauuuccugacagccgaag

SEQ ID NO: 40207 - RNA, 23 nt, Artificial Sequence
  Chemically synthesized
gaagaaauuuccugacagccgaa

SEQ ID NO: 40208 - RNA, 23 nt, Artificial Sequence
  Chemically synthesized
agaagaaauuuccugacagccga

SEQ ID NO: 40209 - RNA, 23 nt, Artificial Sequence
  Chemically synthesized
gucucucucugcacaacaucacc

SEQ ID NO: 40210 - RNA, 23 nt, Artificial Sequence
  Chemically synthesized
agucucucucugcacaacaucac

SEQ ID NO: 40211 - RNA, 23 nt, Artificial Sequence
  Chemically synthesized
cagucucucucugcacaacauca

SEQ ID NO: 40212 - RNA, 23 nt, Artificial Sequence
  Chemically synthesized
acagucucucucugcacaacauc

SEQ ID NO: 40213 - RNA, 23 nt, Artificial Sequence
  Chemically synthesized
gacagucucucucugcacaacau

SEQ ID NO: 40214 - RNA, 23 nt, Artificial Sequence
  Chemically synthesized
cacacaccauguuuucaucgucu

SEQ ID NO: 40215 - RNA, 23 nt, Artificial Sequence
  Chemically synthesized
acacacaccauguuuucaucguc

SEQ ID NO: 40216 - RNA, 23 nt, Artificial Sequence
  Chemically synthesized
uacacacaccauguuuucaucgu

SEQ ID NO: 40217 - RNA, 23 nt, Artificial Sequence
  Chemically synthesized
guacacacaccauguuuucaucg

SEQ ID NO: 40218 - RNA, 23 nt, Artificial Sequence
  Chemically synthesized
gguacacacaccauguuuucauc

SEQ ID NO: 40219 - RNA, 23 nt, Artificial Sequence
  Chemically synthesized
cacaaccacugaauugcuaagga

SEQ ID NO: 40220 - RNA, 23 nt, Artificial Sequence
  Chemically synthesized
ucguggcgcauuucuucaaccug

SEQ ID NO: 40221 - RNA, 23 nt, Artificial Sequence
  Chemically synthesized
aucguggcgcauuucuucaaccu

SEQ ID NO: 40222 - RNA, 23 nt, Artificial Sequence
  Chemically synthesized
caucguggcgcauuucuucaacc

SEQ ID NO: 40223 - RNA, 23 nt, Artificial Sequence
  Chemically synthesized
acaucguggcgcauuucuucaac

SEQ ID NO: 40224 - RNA, 23 nt, Artificial Sequence
  Chemically synthesized
cacaucguggcgcauuucuucaa

SEQ ID NO: 40225 - RNA, 23 nt, Artificial Sequence
  Chemically synthesized
gaggcaauuagacaaaaaccuca

SEQ ID NO: 40226 - RNA, 23 nt, Artificial Sequence
  Chemically synthesized
cauaagaggaacaaguauuugcu

SEQ ID NO: 40227 - RNA, 23 nt, Artificial Sequence
  Chemically synthesized
cuacugguaugaagaggaggagu

SEQ ID NO: 40228 - RNA, 23 nt, Artificial Sequence
  Chemically synthesized
ucuacugguaugaagaggaggag

SEQ ID NO: 40229 - RNA, 23 nt, Artificial Sequence
  Chemically synthesized
uucuacugguaugaagaggagga

SEQ ID NO: 40230 - RNA, 23 nt, Artificial Sequence
  Chemically synthesized
guucuacugguaugaagaggagg

SEQ ID NO: 40231 - RNA, 23 nt, Artificial Sequence
  Chemically synthesized
cguucuacugguaugaagaggag

SEQ ID NO: 40232 - RNA, 23 nt, Artificial Sequence
  Chemically synthesized
auugacacguucuacugguauga

SEQ ID NO: 40233 - RNA, 23 nt, Artificial Sequence
  Chemically synthesized
cauacuuccuuagcuuauaaaua

SEQ ID NO: 40234 - RNA, 23 nt, Artificial Sequence
  Chemically synthesized
ggaacuggugaauaauaauuaac

SEQ ID NO: 40235 - RNA, 23 nt, Artificial Sequence
  Chemically synthesized
uacucucauggcugggaauaaau

SEQ ID NO: 40236 - RNA, 23 nt, Artificial Sequence
  Chemically synthesized
guacucucauggcugggaauaaa

SEQ ID NO: 40237 - RNA, 23 nt, Artificial Sequence
  Chemically synthesized
ccacuuguauucaucagcugacc

SEQ ID NO: 40238 - RNA, 23 nt, Artificial Sequence
  Chemically synthesized
gccacuuguauucaucagcugac

SEQ ID NO: 40239 - RNA, 23 nt, Artificial Sequence
  Chemically synthesized
ugccacuuguauucaucagcuga

SEQ ID NO: 40240 - RNA, 23 nt, Artificial Sequence
  Chemically synthesized
gugccacuuguauucaucagcug

SEQ ID NO: 40241 - RNA, 23 nt, Artificial Sequence
  Chemically synthesized
ugugccacuuguauucaucagcu

SEQ ID NO: 40242 - RNA, 23 nt, Artificial Sequence
  Chemically synthesized
cuccaccauauuaguacucucau

SEQ ID NO: 40243 - RNA, 23 nt, Artificial Sequence
  Chemically synthesized
aauacugacgugauuacaggcuu

SEQ ID NO: 40244 - RNA, 23 nt, Artificial Sequence
  Chemically synthesized
gcuuuacacugggacgaaaauac

SEQ ID NO: 40245 - RNA, 23 nt, Artificial Sequence
  Chemically synthesized
agcuuuacacugggacgaaaaua

SEQ ID NO: 40246 - RNA, 23 nt, Artificial Sequence
  Chemically synthesized
uagcuuuacacugggacgaaaau

SEQ ID NO: 40247 - RNA, 23 nt, Artificial Sequence
  Chemically synthesized
auagcuuuacacugggacgaaaa

SEQ ID NO: 40248 - RNA, 23 nt, Artificial Sequence
  Chemically synthesized
cauagcuuuacacugggacgaaa

SEQ ID NO: 40249 - RNA, 23 nt, Artificial Sequence
  Chemically synthesized
cgggaugcaagagcuuuugagug

SEQ ID NO: 40250 - RNA, 23 nt, Artificial Sequence
  Chemically synthesized
ccgggaugcaagagcuuuugagu

SEQ ID NO: 40251 - RNA, 23 nt, Artificial Sequence
  Chemically synthesized
gccgggaugcaagagcuuuugag

SEQ ID NO: 40252 - RNA, 23 nt, Artificial Sequence
  Chemically synthesized
ugccgggaugcaagagcuuuuga

SEQ ID NO: 40253 - RNA, 23 nt, Artificial Sequence
  Chemically synthesized
uugccgggaugcaagagcuuuug

SEQ ID NO: 40254 - RNA, 23 nt, Artificial Sequence
  Chemically synthesized
cucuucugaaaucuauaugguac

SEQ ID NO: 40255 - RNA, 23 nt, Artificial Sequence
  Chemically synthesized
gagaagaaauuuccugacagccg

SEQ ID NO: 40256 - RNA, 23 nt, Artificial Sequence
  Chemically synthesized
ggagaagaaauuuccugacagcc

SEQ ID NO: 40257 - RNA, 23 nt, Artificial Sequence
  Chemically synthesized
gggagaagaaauuuccugacagc

SEQ ID NO: 40258 - RNA, 23 nt, Artificial Sequence
  Chemically synthesized
ggccuccuaugaguuguucuggu

SEQ ID NO: 40259 - RNA, 23 nt, Artificial Sequence
  Chemically synthesized
gaucucucuggcuuuagucuuga

SEQ ID NO: 40260 - RNA, 23 nt, Artificial Sequence
  Chemically synthesized
ugaucucucuggcuuuagucuug

SEQ ID NO: 40261 - RNA, 23 nt, Artificial Sequence
  Chemically synthesized
gugaucucucuggcuuuagucuu

SEQ ID NO: 40262 - RNA, 23 nt, Artificial Sequence
  Chemically synthesized
uccccacaaacacaaccacugaa

SEQ ID NO: 40263 - RNA, 23 nt, Artificial Sequence
  Chemically synthesized
uuccccacaaacacaaccacuga

SEQ ID NO: 40264 - RNA, 23 nt, Artificial Sequence
  Chemically synthesized
cuuccccacaaacacaaccacug

SEQ ID NO: 40265 - RNA, 23 nt, Artificial Sequence
  Chemically synthesized
caaaaaccucagauuucacaaac

SEQ ID NO: 40266 - RNA, 23 nt, Artificial Sequence
  Chemically synthesized
acaaaaaccucagauuucacaaa

SEQ ID NO: 40267 - RNA, 23 nt, Artificial Sequence
  Chemically synthesized
caauuagacaaaaaccucagauu

SEQ ID NO: 40268 - RNA, 23 nt, Artificial Sequence
  Chemically synthesized
gcaauuagacaaaaaccucagau

SEQ ID NO: 40269 - RNA, 23 nt, Artificial Sequence
  Chemically synthesized
gucagucgaaaccuuauuucauu

SEQ ID NO: 40270 - RNA, 23 nt, Artificial Sequence
  Chemically synthesized
ugucagucgaaaccuuauuucau

SEQ ID NO: 40271 - RNA, 23 nt, Artificial Sequence
  Chemically synthesized
cugucagucgaaaccuuauuuca

SEQ ID NO: 40272 - RNA, 23 nt, Artificial Sequence
  Chemically synthesized
ccugucagucgaaaccuuauuuc

SEQ ID NO: 40273 - RNA, 23 nt, Artificial Sequence
  Chemically synthesized
accugucagucgaaaccuuauuu

SEQ ID NO: 40274 - RNA, 23 nt, Artificial Sequence
  Chemically synthesized
cuaauucuaauaccugucagucg

SEQ ID NO: 40275 - RNA, 23 nt, Artificial Sequence
  Chemically synthesized
gcuaauucuaauaccugucaguc

SEQ ID NO: 40276 - RNA, 23 nt, Artificial Sequence
  Chemically synthesized
ugcuaauucuaauaccugucagu

SEQ ID NO: 40277 - RNA, 23 nt, Artificial Sequence
  Chemically synthesized
augcuaauucuaauaccugucag

SEQ ID NO: 40278 - RNA, 23 nt, Artificial Sequence
  Chemically synthesized
caugcuaauucuaauaccuguca

SEQ ID NO: 40279 - RNA, 23 nt, Artificial Sequence
  Chemically synthesized
ccugaauuuuaacugcaugcuaa

SEQ ID NO: 40280 - RNA, 23 nt, Artificial Sequence
  Chemically synthesized
uauugacacguucuacugguaug

SEQ ID NO: 40281 - RNA, 23 nt, Artificial Sequence
  Chemically synthesized
uuauugacacguucuacugguau

SEQ ID NO: 40282 - RNA, 23 nt, Artificial Sequence
  Chemically synthesized
ugaccccagagguguucauuucu

SEQ ID NO: 40283 - RNA, 23 nt, Artificial Sequence
  Chemically synthesized
ucuccaccauauuaguacucuca

SEQ ID NO: 40284 - RNA, 23 nt, Artificial Sequence
  Chemically synthesized
cacugggacgaaaauacugacgu

SEQ ID NO: 40285 - RNA, 23 nt, Artificial Sequence
  Chemically synthesized
gguuugcugaucucuuacucucc

SEQ ID NO: 40286 - RNA, 23 nt, Artificial Sequence
  Chemically synthesized
ugguuugcugaucucuuacucuc

SEQ ID NO: 40287 - RNA, 23 nt, Artificial Sequence
  Chemically synthesized
gugguuugcugaucucuuacucu

SEQ ID NO: 40288 - RNA, 23 nt, Artificial Sequence
  Chemically synthesized
agugguuugcugaucucuuacuc

SEQ ID NO: 40289 - RNA, 23 nt, Artificial Sequence
  Chemically synthesized
gagugguuugcugaucucuuacu

SEQ ID NO: 40290 - RNA, 23 nt, Artificial Sequence
  Chemically synthesized
gggugcuggauuuugaaugaggg

SEQ ID NO: 40291 - RNA, 23 nt, Artificial Sequence
  Chemically synthesized
ggggugcuggauuuugaaugagg

SEQ ID NO: 40292 - RNA, 23 nt, Artificial Sequence
  Chemically synthesized
uggggugcuggauuuugaaugag

SEQ ID NO: 40293 - RNA, 23 nt, Artificial Sequence
  Chemically synthesized
auggggugcuggauuuugaauga

SEQ ID NO: 40294 - RNA, 23 nt, Artificial Sequence
  Chemically synthesized
gauggggugcuggauuuugaaug

SEQ ID NO: 40295 - RNA, 23 nt, Artificial Sequence
  Chemically synthesized
gcguggcuuuaaaauggcgccag

SEQ ID NO: 40296 - RNA, 23 nt, Artificial Sequence
  Chemically synthesized
agcguggcuuuaaaauggcgcca

SEQ ID NO: 40297 - RNA, 23 nt, Artificial Sequence
  Chemically synthesized
aagcguggcuuuaaaauggcgcc

SEQ ID NO: 40298 - RNA, 23 nt, Artificial Sequence
  Chemically synthesized
aaagcguggcuuuaaaauggcgc

SEQ ID NO: 40299 - RNA, 23 nt, Artificial Sequence
  Chemically synthesized
aaaagcguggcuuuaaaauggcg

SEQ ID NO: 40300 - RNA, 23 nt, Artificial Sequence
  Chemically synthesized
uaauuagguucuggcgauuucaa

SEQ ID NO: 40301 - RNA, 23 nt, Artificial Sequence
  Chemically synthesized
ccuguggucuuguaugcauguga

SEQ ID NO: 40302 - RNA, 23 nt, Artificial Sequence
  Chemically synthesized
cccuguggucuuguaugcaugug

SEQ ID NO: 40303 - RNA, 23 nt, Artificial Sequence
  Chemically synthesized
gcccuguggucuuguaugcaugu

SEQ ID NO: 40304 - RNA, 23 nt, Artificial Sequence
  Chemically synthesized
ggcccuguggucuuguaugcaug

SEQ ID NO: 40305 - RNA, 23 nt, Artificial Sequence
  Chemically synthesized
aggcccuguggucuuguaugcau

SEQ ID NO: 40306 - RNA, 23 nt, Artificial Sequence
  Chemically synthesized
acaucaccuucuguagagaccgc

SEQ ID NO: 40307 - RNA, 23 nt, Artificial Sequence
  Chemically synthesized
aacaucaccuucuguagagaccg

SEQ ID NO: 40308 - RNA, 23 nt, Artificial Sequence
  Chemically synthesized
caacaucaccuucuguagagacc

SEQ ID NO: 40309 - RNA, 23 nt, Artificial Sequence
  Chemically synthesized
acaacaucaccuucuguagagac

SEQ ID NO: 40310 - RNA, 23 nt, Artificial Sequence
  Chemically synthesized
cacaacaucaccuucuguagaga

SEQ ID NO: 40311 - RNA, 23 nt, Artificial Sequence
  Chemically synthesized
ggucuggugaucucucuggcuuu

SEQ ID NO: 40312 - RNA, 23 nt, Artificial Sequence
  Chemically synthesized
cggucuggugaucucucuggcuu

SEQ ID NO: 40313 - RNA, 23 nt, Artificial Sequence
  Chemically synthesized
caaacacaaccacugaauugcua

SEQ ID NO: 40314 - RNA, 23 nt, Artificial Sequence
  Chemically synthesized
agacacaggugagggagaagaaa

SEQ ID NO: 40315 - RNA, 23 nt, Artificial Sequence
  Chemically synthesized
cagacacaggugagggagaagaa

SEQ ID NO: 40316 - RNA, 23 nt, Artificial Sequence
  Chemically synthesized
ccagacacaggugagggagaaga

SEQ ID NO: 40317 - RNA, 23 nt, Artificial Sequence
  Chemically synthesized
uccagacacaggugagggagaag

SEQ ID NO: 40318 - RNA, 23 nt, Artificial Sequence
  Chemically synthesized
auccagacacaggugagggagaa

SEQ ID NO: 40319 - RNA, 23 nt, Artificial Sequence
  Chemically synthesized
cguggcgcauuucuucaaccugg

SEQ ID NO: 40320 - RNA, 23 nt, Artificial Sequence
  Chemically synthesized
ggcaauuagacaaaaaccucaga

SEQ ID NO: 40321 - RNA, 23 nt, Artificial Sequence
  Chemically synthesized
aggcaauuagacaaaaaccucag

SEQ ID NO: 40322 - RNA, 23 nt, Artificial Sequence
  Chemically synthesized
uuuaacugcaugcuaauucuaau

SEQ ID NO: 40323 - RNA, 23 nt, Artificial Sequence
  Chemically synthesized
acugugccugaauuuuaacugca

SEQ ID NO: 40324 - RNA, 23 nt, Artificial Sequence
  Chemically synthesized
caguugggaacuggugaauaaua

SEQ ID NO: 40325 - RNA, 23 nt, Artificial Sequence
  Chemically synthesized
ccaguugggaacuggugaauaau

SEQ ID NO: 40326 - RNA, 23 nt, Artificial Sequence
  Chemically synthesized
cccaguugggaacuggugaauaa

SEQ ID NO: 40327 - RNA, 23 nt, Artificial Sequence
  Chemically synthesized
caaguccaggcauuguguuuuca

SEQ ID NO: 40328 - RNA, 23 nt, Artificial Sequence
  Chemically synthesized
ucaaguccaggcauuguguuuuc

SEQ ID NO: 40329 - RNA, 23 nt, Artificial Sequence
  Chemically synthesized
caacaaggagagcuucuagacuu

SEQ ID NO: 40330 - RNA, 23 nt, Artificial Sequence
  Chemically synthesized
ccuggaaacacggaugagugagc

SEQ ID NO: 40331 - RNA, 23 nt, Artificial Sequence
  Chemically synthesized
cccuggaaacacggaugagugag

SEQ ID NO: 40332 - RNA, 23 nt, Artificial Sequence
  Chemically synthesized
ucccuggaaacacggaugaguga

SEQ ID NO: 40333 - RNA, 23 nt, Artificial Sequence
  Chemically synthesized
cucccuggaaacacggaugagug

SEQ ID NO: 40334 - RNA, 23 nt, Artificial Sequence
  Chemically synthesized
ucucccuggaaacacggaugagu

SEQ ID NO: 40335 - RNA, 23 nt, Artificial Sequence
  Chemically synthesized
ggugcuggauuuugaaugagggu

SEQ ID NO: 40336 - RNA, 23 nt, Artificial Sequence
  Chemically synthesized
aacugcccugacagauguauuuc

SEQ ID NO: 40337 - RNA, 23 nt, Artificial Sequence
  Chemically synthesized
agguucuggcgauuucaacaaga

SEQ ID NO: 40338 - RNA, 23 nt, Artificial Sequence
  Chemically synthesized
uagguucuggcgauuucaacaag

SEQ ID NO: 40339 - RNA, 23 nt, Artificial Sequence
  Chemically synthesized
uuagguucuggcgauuucaacaa

SEQ ID NO: 40340 - RNA, 23 nt, Artificial Sequence
  Chemically synthesized
acccucggcuuggaaauggauuu

SEQ ID NO: 40341 - RNA, 23 nt, Artificial Sequence
  Chemically synthesized
ggugagggagaagaaauuuccug

SEQ ID NO: 40342 - RNA, 23 nt, Artificial Sequence
  Chemically synthesized
gacacaggugagggagaagaaau

SEQ ID NO: 40343 - RNA, 23 nt, Artificial Sequence
  Chemically synthesized
ccacaucguggcgcauuucuuca

SEQ ID NO: 40344 - RNA, 23 nt, Artificial Sequence
  Chemically synthesized
uccacaucguggcgcauuucuuc

SEQ ID NO: 40345 - RNA, 23 nt, Artificial Sequence
  Chemically synthesized
auccacaucguggcgcauuucuu

SEQ ID NO: 40346 - RNA, 23 nt, Artificial Sequence
  Chemically synthesized
gacccaacauccagacacaggug

SEQ ID NO: 40347 - RNA, 23 nt, Artificial Sequence
  Chemically synthesized
cgacccaacauccagacacaggu

SEQ ID NO: 40348 - RNA, 23 nt, Artificial Sequence
  Chemically synthesized
acgacccaacauccagacacagg

SEQ ID NO: 40349 - RNA, 23 nt, Artificial Sequence
  Chemically synthesized
aacgacccaacauccagacacag

SEQ ID NO: 40350 - RNA, 23 nt, Artificial Sequence
  Chemically synthesized
uaacgacccaacauccagacaca

SEQ ID NO: 40351 - RNA, 23 nt, Artificial Sequence
  Chemically synthesized
ugaauuuuaacugcaugcuaauu

SEQ ID NO: 40352 - RNA, 23 nt, Artificial Sequence
  Chemically synthesized
cugaauuuuaacugcaugcuaau

SEQ ID NO: 40353 - RNA, 23 nt, Artificial Sequence
  Chemically synthesized
gaguuauuuuggguucaacacug

SEQ ID NO: 40354 - RNA, 23 nt, Artificial Sequence
  Chemically synthesized
auuacacacgaguuauuuugggu

SEQ ID NO: 40355 - RNA, 23 nt, Artificial Sequence
  Chemically synthesized
guguucuucuguggaccuaaagc

SEQ ID NO: 40356 - RNA, 23 nt, Artificial Sequence
  Chemically synthesized
cguguucuucuguggaccuaaag

SEQ ID NO: 40357 - RNA, 23 nt, Artificial Sequence
  Chemically synthesized
gcguguucuucuguggaccuaaa

SEQ ID NO: 40358 - RNA, 23 nt, Artificial Sequence
  Chemically synthesized
ggcguguucuucuguggaccuaa

SEQ ID NO: 40359 - RNA, 23 nt, Artificial Sequence
  Chemically synthesized
uggcguguucuucuguggaccua

SEQ ID NO: 40360 - RNA, 23 nt, Artificial Sequence
  Chemically synthesized
guauuggcguguucuucugugga

SEQ ID NO: 40361 - RNA, 23 nt, Artificial Sequence
  Chemically synthesized
aguauuggcguguucuucugugg

SEQ ID NO: 40362 - RNA, 23 nt, Artificial Sequence
  Chemically synthesized
caguauuggcguguucuucugug

SEQ ID NO: 40363 - RNA, 23 nt, Artificial Sequence
  Chemically synthesized
gaaaauacugacgugauuacagg

SEQ ID NO: 40364 - RNA, 23 nt, Artificial Sequence
  Chemically synthesized
cugaucucuuacucucccuggaa

SEQ ID NO: 40365 - RNA, 23 nt, Artificial Sequence
  Chemically synthesized
gcugaucucuuacucucccugga

SEQ ID NO: 40366 - RNA, 23 nt, Artificial Sequence
  Chemically synthesized
ugcugaucucuuacucucccugg

SEQ ID NO: 40367 - RNA, 23 nt, Artificial Sequence
  Chemically synthesized
uugcugaucucuuacucucccug

SEQ ID NO: 40368 - RNA, 23 nt, Artificial Sequence
  Chemically synthesized
uuugcugaucucuuacucucccu

SEQ ID NO: 40369 - RNA, 23 nt, Artificial Sequence
  Chemically synthesized
gcuuuugagugguuugcugaucu

SEQ ID NO: 40370 - RNA, 23 nt, Artificial Sequence
  Chemically synthesized
agcuuuugagugguuugcugauc

SEQ ID NO: 40371 - RNA, 23 nt, Artificial Sequence
  Chemically synthesized
gagcuuuugagugguuugcugau

SEQ ID NO: 40372 - RNA, 23 nt, Artificial Sequence
  Chemically synthesized
agagcuuuugagugguuugcuga

SEQ ID NO: 40373 - RNA, 23 nt, Artificial Sequence
  Chemically synthesized
aagagcuuuugagugguuugcug

SEQ ID NO: 40374 - RNA, 23 nt, Artificial Sequence
  Chemically synthesized
gggaugcaagagcuuuugagugg

SEQ ID NO: 40375 - RNA, 23 nt, Artificial Sequence
  Chemically synthesized
cuacuggauuugccgggaugcaa

SEQ ID NO: 40376 - RNA, 23 nt, Artificial Sequence
  Chemically synthesized
ucuacuggauuugccgggaugca

SEQ ID NO: 40377 - RNA, 23 nt, Artificial Sequence
  Chemically synthesized
uucuacuggauuugccgggaugc

SEQ ID NO: 40378 - RNA, 23 nt, Artificial Sequence
  Chemically synthesized
uuucuacuggauuugccgggaug

SEQ ID NO: 40379 - RNA, 23 nt, Artificial Sequence
  Chemically synthesized
auuucuacuggauuugccgggau

SEQ ID NO: 40380 - RNA, 23 nt, Artificial Sequence
  Chemically synthesized
aagaaguugucauuaccaaggug

SEQ ID NO: 40381 - RNA, 23 nt, Artificial Sequence
  Chemically synthesized
caagaaguugucauuaccaaggu

SEQ ID NO: 40382 - RNA, 23 nt, Artificial Sequence
  Chemically synthesized
acaagaaguugucauuaccaagg

SEQ ID NO: 40383 - RNA, 23 nt, Artificial Sequence
  Chemically synthesized
aacaagaaguugucauuaccaag

SEQ ID NO: 40384 - RNA, 23 nt, Artificial Sequence
  Chemically synthesized
caacaagaaguugucauuaccaa

SEQ ID NO: 40385 - RNA, 23 nt, Artificial Sequence
  Chemically synthesized
acacaaccacugaauugcuaagg

SEQ ID NO: 40386 - RNA, 23 nt, Artificial Sequence
  Chemically synthesized
aacacaaccacugaauugcuaag

SEQ ID NO: 40387 - RNA, 23 nt, Artificial Sequence
  Chemically synthesized
augaagaggaggagucuuuccau

SEQ ID NO: 40388 - RNA, 23 nt, Artificial Sequence
  Chemically synthesized
uaugaagaggaggagucuuucca

SEQ ID NO: 40389 - RNA, 23 nt, Artificial Sequence
  Chemically synthesized
guaugaagaggaggagucuuucc

SEQ ID NO: 40390 - RNA, 23 nt, Artificial Sequence
  Chemically synthesized
gguaugaagaggaggagucuuuc

SEQ ID NO: 40391 - RNA, 23 nt, Artificial Sequence
  Chemically synthesized
ugguaugaagaggaggagucuuu

SEQ ID NO: 40392 - RNA, 23 nt, Artificial Sequence
  Chemically synthesized
cugguaugaagaggaggagucuu

SEQ ID NO: 40393 - RNA, 23 nt, Artificial Sequence
  Chemically synthesized
acugguaugaagaggaggagucu

SEQ ID NO: 40394 - RNA, 23 nt, Artificial Sequence
  Chemically synthesized
uacugguaugaagaggaggaguc

SEQ ID NO: 40395 - RNA, 23 nt, Artificial Sequence
  Chemically synthesized
uuuauugacacguucuacuggua

SEQ ID NO: 40396 - RNA, 23 nt, Artificial Sequence
  Chemically synthesized
uguuuauugacacguucuacugg

SEQ ID NO: 40397 - RNA, 23 nt, Artificial Sequence
  Chemically synthesized
cuguuuauugacacguucuacug

SEQ ID NO: 40398 - RNA, 23 nt, Artificial Sequence
  Chemically synthesized
ucuguuuauugacacguucuacu

SEQ ID NO: 40399 - RNA, 23 nt, Artificial Sequence
  Chemically synthesized
aucuguuuauugacacguucuac

SEQ ID NO: 40400 - RNA, 23 nt, Artificial Sequence
  Chemically synthesized
uaucuguuuauugacacguucua

SEQ ID NO: 40401 - RNA, 23 nt, Artificial Sequence
  Chemically synthesized
gacggccuguugauaugagcucc

SEQ ID NO: 40402 - RNA, 23 nt, Artificial Sequence
  Chemically synthesized
ugacggccuguugauaugagcuc

SEQ ID NO: 40403 - RNA, 23 nt, Artificial Sequence
  Chemically synthesized
gugacggccuguugauaugagcu

SEQ ID NO: 40404 - RNA, 23 nt, Artificial Sequence
  Chemically synthesized
ugugacggccuguugauaugagc

SEQ ID NO: 40405 - RNA, 23 nt, Artificial Sequence
  Chemically synthesized
cugugacggccuguugauaugag

SEQ ID NO: 40406 - RNA, 23 nt, Artificial Sequence
  Chemically synthesized
ccugugacggccuguugauauga

SEQ ID NO: 40407 - RNA, 23 nt, Artificial Sequence
  Chemically synthesized
uccugugacggccuguugauaug

SEQ ID NO: 40408 - RNA, 23 nt, Artificial Sequence
  Chemically synthesized
caaaagaugugccacuuguauuc

SEQ ID NO: 40409 - RNA, 23 nt, Artificial Sequence
  Chemically synthesized
ucaaaagaugugccacuuguauu

SEQ ID NO: 40410 - RNA, 23 nt, Artificial Sequence
  Chemically synthesized
uucaaaagaugugccacuuguau

SEQ ID NO: 40411 - RNA, 23 nt, Artificial Sequence
  Chemically synthesized
cuucaaaagaugugccacuugua

SEQ ID NO: 40412 - RNA, 23 nt, Artificial Sequence
  Chemically synthesized
acuucaaaagaugugccacuugu

SEQ ID NO: 40413 - RNA, 23 nt, Artificial Sequence
  Chemically synthesized
cacuucaaaagaugugccacuug

SEQ ID NO: 40414 - RNA, 23 nt, Artificial Sequence
  Chemically synthesized
acacuucaaaagaugugccacuu

SEQ ID NO: 40415 - RNA, 23 nt, Artificial Sequence
  Chemically synthesized
guucuucuguggaccuaaagcuc

SEQ ID NO: 40416 - RNA, 23 nt, Artificial Sequence
  Chemically synthesized
uguucuucuguggaccuaaagcu

SEQ ID NO: 40417 - RNA, 23 nt, Artificial Sequence
  Chemically synthesized
acauagcuuuacacugggacgaa

SEQ ID NO: 40418 - RNA, 23 nt, Artificial Sequence
  Chemically synthesized
gcuuuaaaauggcgccagggcag

SEQ ID NO: 40419 - RNA, 23 nt, Artificial Sequence
  Chemically synthesized
ggcuuuaaaauggcgccagggca

SEQ ID NO: 40420 - RNA, 23 nt, Artificial Sequence
  Chemically synthesized
uggcuuuaaaauggcgccagggc

SEQ ID NO: 40421 - RNA, 23 nt, Artificial Sequence
  Chemically synthesized
guggcuuuaaaauggcgccaggg

SEQ ID NO: 40422 - RNA, 23 nt, Artificial Sequence
  Chemically synthesized
cguggcuuuaaaauggcgccagg

SEQ ID NO: 40423 - RNA, 23 nt, Artificial Sequence
  Chemically synthesized
ucaacaagaaguugucauuacca

SEQ ID NO: 40424 - RNA, 23 nt, Artificial Sequence
  Chemically synthesized
uucaacaagaaguugucauuacc

SEQ ID NO: 40425 - RNA, 23 nt, Artificial Sequence
  Chemically synthesized
cgucuucuuucucagccuggcca

SEQ ID NO: 40426 - RNA, 23 nt, Artificial Sequence
  Chemically synthesized
cuguugauaugagcucccaguug

SEQ ID NO: 40427 - RNA, 23 nt, Artificial Sequence
  Chemically synthesized
ccuguugauaugagcucccaguu

SEQ ID NO: 40428 - RNA, 23 nt, Artificial Sequence
  Chemically synthesized
gccuguugauaugagcucccagu

SEQ ID NO: 40429 - RNA, 23 nt, Artificial Sequence
  Chemically synthesized
ggccuguugauaugagcucccag

SEQ ID NO: 40430 - RNA, 23 nt, Artificial Sequence
  Chemically synthesized
cggccuguugauaugagcuccca

SEQ ID NO: 40431 - RNA, 23 nt, Artificial Sequence
  Chemically synthesized
acggccuguugauaugagcuccc

SEQ ID NO: 40432 - RNA, 23 nt, Artificial Sequence
  Chemically synthesized
gucaaguccaggcauuguguuuu

SEQ ID NO: 40433 - RNA, 23 nt, Artificial Sequence
  Chemically synthesized
ugaucucuuacucucccuggaaa

SEQ ID NO: 40434 - RNA, 23 nt, Artificial Sequence
  Chemically synthesized
acugaagcugagcaagguguauu

SEQ ID NO: 40435 - RNA, 23 nt, Artificial Sequence
  Chemically synthesized
cacugaagcugagcaagguguau

SEQ ID NO: 40436 - RNA, 23 nt, Artificial Sequence
  Chemically synthesized
gugcuggauuuugaaugaggguc

SEQ ID NO: 40437 - RNA, 23 nt, Artificial Sequence
  Chemically synthesized
aacccucggcuuggaaauggauu

SEQ ID NO: 40438 - RNA, 23 nt, Artificial Sequence
  Chemically synthesized
gaacccucggcuuggaaauggau

SEQ ID NO: 40439 - RNA, 23 nt, Artificial Sequence
  Chemically synthesized
cuucuguagagaccgcuaugcag

SEQ ID NO: 40440 - RNA, 23 nt, Artificial Sequence
  Chemically synthesized
ccuucuguagagaccgcuaugca

SEQ ID NO: 40441 - RNA, 23 nt, Artificial Sequence
  Chemically synthesized
accuucuguagagaccgcuaugc

SEQ ID NO: 40442 - RNA, 23 nt, Artificial Sequence
  Chemically synthesized
caccuucuguagagaccgcuaug

SEQ ID NO: 40443 - RNA, 23 nt, Artificial Sequence
  Chemically synthesized
ucaccuucuguagagaccgcuau

SEQ ID NO: 40444 - RNA, 23 nt, Artificial Sequence
  Chemically synthesized
aucaccuucuguagagaccgcua

SEQ ID NO: 40445 - RNA, 23 nt, Artificial Sequence
  Chemically synthesized
agacagucucucucugcacaaca

SEQ ID NO: 40446 - RNA, 23 nt, Artificial Sequence
  Chemically synthesized
aagacagucucucucugcacaac

SEQ ID NO: 40447 - RNA, 23 nt, Artificial Sequence
  Chemically synthesized
ggaggagucuuuccauuacacac

SEQ ID NO: 40448 - RNA, 23 nt, Artificial Sequence
  Chemically synthesized
aggaggagucuuuccauuacaca

SEQ ID NO: 40449 - RNA, 23 nt, Artificial Sequence
  Chemically synthesized
gaggaggagucuuuccauuacac

SEQ ID NO: 40450 - RNA, 23 nt, Artificial Sequence
  Chemically synthesized
agaggaggagucuuuccauuaca

SEQ ID NO: 40451 - RNA, 23 nt, Artificial Sequence
  Chemically synthesized
aagaggaggagucuuuccauuac

SEQ ID NO: 40452 - RNA, 23 nt, Artificial Sequence
  Chemically synthesized
uuaucuguuuauugacacguucu

SEQ ID NO: 40453 - RNA, 23 nt, Artificial Sequence
  Chemically synthesized
uuuaucuguuuauugacacguuc

SEQ ID NO: 40454 - RNA, 23 nt, Artificial Sequence
  Chemically synthesized
uuuuaucuguuuauugacacguu

SEQ ID NO: 40455 - RNA, 23 nt, Artificial Sequence
  Chemically synthesized
ggucaaguccaggcauuguguuu

SEQ ID NO: 40456 - RNA, 23 nt, Artificial Sequence
  Chemically synthesized
aggucaaguccaggcauuguguu

SEQ ID NO: 40457 - RNA, 23 nt, Artificial Sequence
  Chemically synthesized
gaggucaaguccaggcauugugu

SEQ ID NO: 40458 - RNA, 23 nt, Artificial Sequence
  Chemically synthesized
ggaggucaaguccaggcauugug

SEQ ID NO: 40459 - RNA, 23 nt, Artificial Sequence
  Chemically synthesized
cacuuguauucaucagcugaccc

SEQ ID NO: 40460 - RNA, 23 nt, Artificial Sequence
  Chemically synthesized
augugccacuuguauucaucagc

SEQ ID NO: 40461 - RNA, 23 nt, Artificial Sequence
  Chemically synthesized
gaugugccacuuguauucaucag

SEQ ID NO: 40462 - RNA, 23 nt, Artificial Sequence
  Chemically synthesized
ccacugaagcugagcaaggugua

SEQ ID NO: 40463 - RNA, 23 nt, Artificial Sequence
  Chemically synthesized
ggcuuggaaauggauuuuaggcc

SEQ ID NO: 40464 - RNA, 23 nt, Artificial Sequence
  Chemically synthesized
caaguuauugauuccaaagaacu

SEQ ID NO: 40465 - RNA, 23 nt, Artificial Sequence
  Chemically synthesized
ucaaguuauugauuccaaagaac

SEQ ID NO: 40466 - RNA, 23 nt, Artificial Sequence
  Chemically synthesized
aucaaguuauugauuccaaagaa

SEQ ID NO: 40467 - RNA, 23 nt, Artificial Sequence
  Chemically synthesized
aaucaaguuauugauuccaaaga

SEQ ID NO: 40468 - RNA, 23 nt, Artificial Sequence
  Chemically synthesized
caaucaaguuauugauuccaaag

SEQ ID NO: 40469 - RNA, 23 nt, Artificial Sequence
  Chemically synthesized
gcauuguguuuucaaucaaguua

SEQ ID NO: 40470 - RNA, 23 nt, Artificial Sequence
  Chemically synthesized
ggcauuguguuuucaaucaaguu

SEQ ID NO: 40471 - RNA, 23 nt, Artificial Sequence
  Chemically synthesized
aggcauuguguuuucaaucaagu

SEQ ID NO: 40472 - RNA, 23 nt, Artificial Sequence
  Chemically synthesized
agaugugccacuuguauucauca

SEQ ID NO: 40473 - RNA, 23 nt, Artificial Sequence
  Chemically synthesized
aagaugugccacuuguauucauc

SEQ ID NO: 40474 - RNA, 23 nt, Artificial Sequence
  Chemically synthesized
aaagaugugccacuuguauucau

SEQ ID NO: 40475 - RNA, 23 nt, Artificial Sequence
  Chemically synthesized
ucaggcucuucacauagcuuuac

SEQ ID NO: 40476 - RNA, 23 nt, Artificial Sequence
  Chemically synthesized
aucaggcucuucacauagcuuua

SEQ ID NO: 40477 - RNA, 23 nt, Artificial Sequence
  Chemically synthesized
aaucaggcucuucacauagcuuu

SEQ ID NO: 40478 - RNA, 23 nt, Artificial Sequence
  Chemically synthesized
cccacugaagcugagcaaggugu

SEQ ID NO: 40479 - RNA, 23 nt, Artificial Sequence
  Chemically synthesized
ccccacugaagcugagcaaggug

SEQ ID NO: 40480 - RNA, 23 nt, Artificial Sequence
  Chemically synthesized
accccacugaagcugagcaaggu

SEQ ID NO: 40481 - RNA, 23 nt, Artificial Sequence
  Chemically synthesized
cagggcaguacaucuuggugcag

SEQ ID NO: 40482 - RNA, 23 nt, Artificial Sequence
  Chemically synthesized
ccagggcaguacaucuuggugca

SEQ ID NO: 40483 - RNA, 23 nt, Artificial Sequence
  Chemically synthesized
gccagggcaguacaucuuggugc

SEQ ID NO: 40484 - RNA, 23 nt, Artificial Sequence
  Chemically synthesized
cgccagggcaguacaucuuggug

SEQ ID NO: 40485 - RNA, 23 nt, Artificial Sequence
  Chemically synthesized
gcgccagggcaguacaucuuggu

SEQ ID NO: 40486 - RNA, 23 nt, Artificial Sequence
  Chemically synthesized
ggauuuuaggcccuguggucuug

SEQ ID NO: 40487 - RNA, 23 nt, Artificial Sequence
  Chemically synthesized
uggauuuuaggcccuguggucuu

SEQ ID NO: 40488 - RNA, 23 nt, Artificial Sequence
  Chemically synthesized
auggauuuuaggcccuguggucu

SEQ ID NO: 40489 - RNA, 23 nt, Artificial Sequence
  Chemically synthesized
aauggauuuuaggcccugugguc

SEQ ID NO: 40490 - RNA, 23 nt, Artificial Sequence
  Chemically synthesized
aaauggauuuuaggcccuguggu

SEQ ID NO: 40491 - RNA, 23 nt, Artificial Sequence
  Chemically synthesized
gcacaacaucaccuucuguagag

SEQ ID NO: 40492 - RNA, 23 nt, Artificial Sequence
  Chemically synthesized
ugagugguuugcugaucucuuac

SEQ ID NO: 40493 - RNA, 23 nt, Artificial Sequence
  Chemically synthesized
uugagugguuugcugaucucuua

SEQ ID NO: 40494 - RNA, 23 nt, Artificial Sequence
  Chemically synthesized
uuugccgggaugcaagagcuuuu

SEQ ID NO: 40495 - RNA, 23 nt, Artificial Sequence
  Chemically synthesized
gaaaaagcguggcuuuaaaaugg

SEQ ID NO: 40496 - RNA, 23 nt, Artificial Sequence
  Chemically synthesized
ugaaaaagcguggcuuuaaaaug

SEQ ID NO: 40497 - RNA, 23 nt, Artificial Sequence
  Chemically synthesized
augaaaaagcguggcuuuaaaau

SEQ ID NO: 40498 - RNA, 23 nt, Artificial Sequence
  Chemically synthesized
caugaaaaagcguggcuuuaaaa

SEQ ID NO: 40499 - RNA, 23 nt, Artificial Sequence
  Chemically synthesized
acaugaaaaagcguggcuuuaaa

SEQ ID NO: 40500 - RNA, 23 nt, Artificial Sequence
  Chemically synthesized
uggaacuucacaugaaaaagcgu

SEQ ID NO: 40501 - RNA, 23 nt, Artificial Sequence
  Chemically synthesized
cuggaacuucacaugaaaaagcg

SEQ ID NO: 40502 - RNA, 23 nt, Artificial Sequence
  Chemically synthesized
ccuggaacuucacaugaaaaagc

SEQ ID NO: 40503 - RNA, 23 nt, Artificial Sequence
  Chemically synthesized
uaggcccuguggucuuguaugca

SEQ ID NO: 40504 - RNA, 23 nt, Artificial Sequence
  Chemically synthesized
ucuuuccauuacacacgaguuau

SEQ ID NO: 40505 - RNA, 23 nt, Artificial Sequence
  Chemically synthesized
gucuuuccauuacacacgaguua

SEQ ID NO: 40506 - RNA, 23 nt, Artificial Sequence
  Chemically synthesized
gaggagucuuuccauuacacacg

SEQ ID NO: 40507 - RNA, 23 nt, Artificial Sequence
  Chemically synthesized
aaaagaugugccacuuguauuca

SEQ ID NO: 40508 - RNA, 23 nt, Artificial Sequence
  Chemically synthesized
gaggcccaacuggaacaaugagu

SEQ ID NO: 40509 - RNA, 23 nt, Artificial Sequence
  Chemically synthesized
ggaggcccaacuggaacaaugag

SEQ ID NO: 40510 - RNA, 23 nt, Artificial Sequence
  Chemically synthesized
gggaggcccaacuggaacaauga

SEQ ID NO: 40511 - RNA, 23 nt, Artificial Sequence
  Chemically synthesized
acaggcuuaaagcagaagaccuu

SEQ ID NO: 40512 - RNA, 23 nt, Artificial Sequence
  Chemically synthesized
uacaggcuuaaagcagaagaccu

SEQ ID NO: 40513 - RNA, 23 nt, Artificial Sequence
  Chemically synthesized
uuacaggcuuaaagcagaagacc

SEQ ID NO: 40514 - RNA, 23 nt, Artificial Sequence
  Chemically synthesized
auuacaggcuuaaagcagaagac

SEQ ID NO: 40515 - RNA, 23 nt, Artificial Sequence
  Chemically synthesized
gauuacaggcuuaaagcagaaga

SEQ ID NO: 40516 - RNA, 23 nt, Artificial Sequence
  Chemically synthesized
gcgauuucaacaagaaguuguca

SEQ ID NO: 40517 - RNA, 23 nt, Artificial Sequence
  Chemically synthesized
ggcgauuucaacaagaaguuguc

SEQ ID NO: 40518 - RNA, 23 nt, Artificial Sequence
  Chemically synthesized
uggcgauuucaacaagaaguugu

SEQ ID NO: 40519 - RNA, 23 nt, Artificial Sequence
  Chemically synthesized
ugguacacacaccauguuuucau

SEQ ID NO: 40520 - RNA, 23 nt, Artificial Sequence
  Chemically synthesized
cugguacacacaccauguuuuca

SEQ ID NO: 40521 - RNA, 23 nt, Artificial Sequence
  Chemically synthesized
ucugguacacacaccauguuuuc

SEQ ID NO: 40522 - RNA, 23 nt, Artificial Sequence
  Chemically synthesized
uucugguacacacaccauguuuu

SEQ ID NO: 40523 - RNA, 23 nt, Artificial Sequence
  Chemically synthesized
acuggaacaaugaguucaagcag

SEQ ID NO: 40524 - RNA, 23 nt, Artificial Sequence
  Chemically synthesized
aacuggaacaaugaguucaagca

SEQ ID NO: 40525 - RNA, 23 nt, Artificial Sequence
  Chemically synthesized
caacuggaacaaugaguucaagc

SEQ ID NO: 40526 - RNA, 23 nt, Artificial Sequence
  Chemically synthesized
caggcuuaaagcagaagaccuuc

SEQ ID NO: 40527 - RNA, 23 nt, Artificial Sequence
  Chemically synthesized
gagggucucuccaccauauuagu

SEQ ID NO: 40528 - RNA, 23 nt, Artificial Sequence
  Chemically synthesized
ugagggucucuccaccauauuag

SEQ ID NO: 40529 - RNA, 23 nt, Artificial Sequence
  Chemically synthesized
augagggucucuccaccauauua

SEQ ID NO: 40530 - RNA, 23 nt, Artificial Sequence
  Chemically synthesized
aaugagggucucuccaccauauu

SEQ ID NO: 40531 - RNA, 23 nt, Artificial Sequence
  Chemically synthesized
gaaugagggucucuccaccauau

SEQ ID NO: 40532 - RNA, 23 nt, Artificial Sequence
  Chemically synthesized
ugacagccgaagagcaacaagua

SEQ ID NO: 40533 - RNA, 23 nt, Artificial Sequence
  Chemically synthesized
cugacagccgaagagcaacaagu

SEQ ID NO: 40534 - RNA, 23 nt, Artificial Sequence
  Chemically synthesized
ccugacagccgaagagcaacaag

SEQ ID NO: 40535 - RNA, 23 nt, Artificial Sequence
  Chemically synthesized
uccugacagccgaagagcaacaa

SEQ ID NO: 40536 - RNA, 23 nt, Artificial Sequence
  Chemically synthesized
cuaugggauagcuguuaaugcaa

SEQ ID NO: 40537 - RNA, 23 nt, Artificial Sequence
  Chemically synthesized
ccuaugggauagcuguuaaugca

SEQ ID NO: 40538 - RNA, 23 nt, Artificial Sequence
  Chemically synthesized
gccuaugggauagcuguuaaugc

SEQ ID NO: 40539 - RNA, 23 nt, Artificial Sequence
  Chemically synthesized
cgccuaugggauagcuguuaaug

SEQ ID NO: 40540 - RNA, 23 nt, Artificial Sequence
  Chemically synthesized
ucgccuaugggauagcuguuaau

SEQ ID NO: 40541 - RNA, 23 nt, Artificial Sequence
  Chemically synthesized
gucgccuaugggauagcuguuaa

SEQ ID NO: 40542 - RNA, 23 nt, Artificial Sequence
  Chemically synthesized
gucgaaaccuuauuucauucaua

SEQ ID NO: 40543 - RNA, 23 nt, Artificial Sequence
  Chemically synthesized
agucgaaaccuuauuucauucau

SEQ ID NO: 40544 - RNA, 23 nt, Artificial Sequence
  Chemically synthesized
cagucgaaaccuuauuucauuca

SEQ ID NO: 40545 - RNA, 23 nt, Artificial Sequence
  Chemically synthesized
ucagucgaaaccuuauuucauuc

SEQ ID NO: 40546 - RNA, 23 nt, Artificial Sequence
  Chemically synthesized
gaacaguacacuauaccauacuu

SEQ ID NO: 40547 - RNA, 23 nt, Artificial Sequence
  Chemically synthesized
ugaacaguacacuauaccauacu

SEQ ID NO: 40548 - RNA, 23 nt, Artificial Sequence
  Chemically synthesized
gugaacaguacacuauaccauac

SEQ ID NO: 40549 - RNA, 23 nt, Artificial Sequence
  Chemically synthesized
ugugaacaguacacuauaccaua

SEQ ID NO: 40550 - RNA, 23 nt, Artificial Sequence
  Chemically synthesized
uugugaacaguacacuauaccau

SEQ ID NO: 40551 - RNA, 23 nt, Artificial Sequence
  Chemically synthesized
guguauuucuacuggauuugccg

SEQ ID NO: 40552 - RNA, 23 nt, Artificial Sequence
  Chemically synthesized
gguguauuucuacuggauuugcc

SEQ ID NO: 40553 - RNA, 23 nt, Artificial Sequence
  Chemically synthesized
agguguauuucuacuggauuugc

SEQ ID NO: 40554 - RNA, 23 nt, Artificial Sequence
  Chemically synthesized
aagguguauuucuacuggauuug

SEQ ID NO: 40555 - RNA, 23 nt, Artificial Sequence
  Chemically synthesized
caagguguauuucuacuggauuu

SEQ ID NO: 40556 - RNA, 23 nt, Artificial Sequence
  Chemically synthesized
gcaagguguauuucuacuggauu

SEQ ID NO: 40557 - RNA, 23 nt, Artificial Sequence
  Chemically synthesized
agcaagguguauuucuacuggau

SEQ ID NO: 40558 - RNA, 23 nt, Artificial Sequence
  Chemically synthesized
gagcaagguguauuucuacugga

SEQ ID NO: 40559 - RNA, 23 nt, Artificial Sequence
  Chemically synthesized
ggaagacuuuuucagcgugcaca

SEQ ID NO: 40560 - RNA, 23 nt, Artificial Sequence
  Chemically synthesized
aggaagacuuuuucagcgugcac

SEQ ID NO: 40561 - RNA, 23 nt, Artificial Sequence
  Chemically synthesized
caggaagacuuuuucagcgugca

SEQ ID NO: 40562 - RNA, 23 nt, Artificial Sequence
  Chemically synthesized
ccaggaagacuuuuucagcgugc

SEQ ID NO: 40563 - RNA, 23 nt, Artificial Sequence
  Chemically synthesized
gugccucaauuuucuggcaagga

SEQ ID NO: 40564 - RNA, 23 nt, Artificial Sequence
  Chemically synthesized
cgugccucaauuuucuggcaagg

SEQ ID NO: 40565 - RNA, 23 nt, Artificial Sequence
  Chemically synthesized
ccgugccucaauuuucuggcaag

SEQ ID NO: 40566 - RNA, 23 nt, Artificial Sequence
  Chemically synthesized
aggccuccuaugaguuguucugg

SEQ ID NO: 40567 - RNA, 23 nt, Artificial Sequence
  Chemically synthesized
caggccuccuaugaguuguucug

SEQ ID NO: 40568 - RNA, 23 nt, Artificial Sequence
  Chemically synthesized
acaggccuccuaugaguuguucu

SEQ ID NO: 40569 - RNA, 23 nt, Artificial Sequence
  Chemically synthesized
gacaggccuccuaugaguuguuc

SEQ ID NO: 40570 - RNA, 23 nt, Artificial Sequence
  Chemically synthesized
agacaggccuccuaugaguuguu

SEQ ID NO: 40571 - RNA, 23 nt, Artificial Sequence
  Chemically synthesized
gaauugcuaaggacaauagcagg

SEQ ID NO: 40572 - RNA, 23 nt, Artificial Sequence
  Chemically synthesized
ugaauugcuaaggacaauagcag

SEQ ID NO: 40573 - RNA, 23 nt, Artificial Sequence
  Chemically synthesized
cugaauugcuaaggacaauagca

SEQ ID NO: 40574 - RNA, 23 nt, Artificial Sequence
  Chemically synthesized
acugaauugcuaaggacaauagc

SEQ ID NO: 40575 - RNA, 23 nt, Artificial Sequence
  Chemically synthesized
cacugaauugcuaaggacaauag

SEQ ID NO: 40576 - RNA, 23 nt, Artificial Sequence
  Chemically synthesized
gaagaggaggagucuuuccauua

SEQ ID NO: 40577 - RNA, 23 nt, Artificial Sequence
  Chemically synthesized
ugaagaggaggagucuuuccauu

SEQ ID NO: 40578 - RNA, 23 nt, Artificial Sequence
  Chemically synthesized
ugauuacaggcuuaaagcagaag

SEQ ID NO: 40579 - RNA, 23 nt, Artificial Sequence
  Chemically synthesized
gugauuacaggcuuaaagcagaa

SEQ ID NO: 40580 - RNA, 23 nt, Artificial Sequence
  Chemically synthesized
caaaugcagugaggcacagaccc

SEQ ID NO: 40581 - RNA, 23 nt, Artificial Sequence
  Chemically synthesized
acaaaugcagugaggcacagacc

SEQ ID NO: 40582 - RNA, 23 nt, Artificial Sequence
  Chemically synthesized
uacaaaugcagugaggcacagac

SEQ ID NO: 40583 - RNA, 23 nt, Artificial Sequence
  Chemically synthesized
guacaaaugcagugaggcacaga

SEQ ID NO: 40584 - RNA, 23 nt, Artificial Sequence
  Chemically synthesized
gguacaaaugcagugaggcacag

SEQ ID NO: 40585 - RNA, 23 nt, Artificial Sequence
  Chemically synthesized
ggaacuucacaugaaaaagcgug

SEQ ID NO: 40586 - RNA, 23 nt, Artificial Sequence
  Chemically synthesized
gcuuggaaauggauuuuaggccc

SEQ ID NO: 40587 - RNA, 23 nt, Artificial Sequence
  Chemically synthesized
uucauucauaagaggaacaagua

SEQ ID NO: 40588 - RNA, 23 nt, Artificial Sequence
  Chemically synthesized
uuucauucauaagaggaacaagu

SEQ ID NO: 40589 - RNA, 23 nt, Artificial Sequence
  Chemically synthesized
auuucauucauaagaggaacaag

SEQ ID NO: 40590 - RNA, 23 nt, Artificial Sequence
  Chemically synthesized
uauuucauucauaagaggaacaa

SEQ ID NO: 40591 - RNA, 23 nt, Artificial Sequence
  Chemically synthesized
cauccgcacugugccugaauuuu

SEQ ID NO: 40592 - RNA, 23 nt, Artificial Sequence
  Chemically synthesized
gcauccgcacugugccugaauuu

SEQ ID NO: 40593 - RNA, 23 nt, Artificial Sequence
  Chemically synthesized
ggagucuuuccauuacacacgag

SEQ ID NO: 40594 - RNA, 23 nt, Artificial Sequence
  Chemically synthesized
aggagucuuuccauuacacacga

SEQ ID NO: 40595 - RNA, 23 nt, Artificial Sequence
  Chemically synthesized
caguacacuauaccauacuuccu

SEQ ID NO: 40596 - RNA, 23 nt, Artificial Sequence
  Chemically synthesized
acaguacacuauaccauacuucc

SEQ ID NO: 40597 - RNA, 23 nt, Artificial Sequence
  Chemically synthesized
aacaguacacuauaccauacuuc

SEQ ID NO: 40598 - RNA, 23 nt, Artificial Sequence
  Chemically synthesized
uggaggucaaguccaggcauugu

SEQ ID NO: 40599 - RNA, 23 nt, Artificial Sequence
  Chemically synthesized
uuggaggucaaguccaggcauug

SEQ ID NO: 40600 - RNA, 23 nt, Artificial Sequence
  Chemically synthesized
uuuggaggucaaguccaggcauu

SEQ ID NO: 40601 - RNA, 23 nt, Artificial Sequence
  Chemically synthesized
ucuagacuuuggaggucaagucc

SEQ ID NO: 40602 - RNA, 23 nt, Artificial Sequence
  Chemically synthesized
uucuagacuuuggaggucaaguc

SEQ ID NO: 40603 - RNA, 23 nt, Artificial Sequence
  Chemically synthesized
cuucuagacuuuggaggucaagu

SEQ ID NO: 40604 - RNA, 23 nt, Artificial Sequence
  Chemically synthesized
gcuucuagacuuuggaggucaag

SEQ ID NO: 40605 - RNA, 23 nt, Artificial Sequence
  Chemically synthesized
agcuucuagacuuuggaggucaa

SEQ ID NO: 40606 - RNA, 23 nt, Artificial Sequence
  Chemically synthesized
caagcagauugccuacaaucacc

SEQ ID NO: 40607 - RNA, 23 nt, Artificial Sequence
  Chemically synthesized
ucaagcagauugccuacaaucac

SEQ ID NO: 40608 - RNA, 23 nt, Artificial Sequence
  Chemically synthesized
uucaagcagauugccuacaauca

SEQ ID NO: 40609 - RNA, 23 nt, Artificial Sequence
  Chemically synthesized
guucaagcagauugccuacaauc

SEQ ID NO: 40610 - RNA, 23 nt, Artificial Sequence
  Chemically synthesized
aguucaagcagauugccuacaau

SEQ ID NO: 40611 - RNA, 23 nt, Artificial Sequence
  Chemically synthesized
gaguucaagcagauugccuacaa

SEQ ID NO: 40612 - RNA, 23 nt, Artificial Sequence
  Chemically synthesized
ugggaggcccaacuggaacaaug

SEQ ID NO: 40613 - RNA, 23 nt, Artificial Sequence
  Chemically synthesized
augggaggcccaacuggaacaau

SEQ ID NO: 40614 - RNA, 23 nt, Artificial Sequence
  Chemically synthesized
agggucucuccaccauauuagua

SEQ ID NO: 40615 - RNA, 23 nt, Artificial Sequence
  Chemically synthesized
agauguauuucacuacccagugu

SEQ ID NO: 40616 - RNA, 23 nt, Artificial Sequence
  Chemically synthesized
cagauguauuucacuacccagug

SEQ ID NO: 40617 - RNA, 23 nt, Artificial Sequence
  Chemically synthesized
acagauguauuucacuacccagu

SEQ ID NO: 40618 - RNA, 23 nt, Artificial Sequence
  Chemically synthesized
gacagauguauuucacuacccag

SEQ ID NO: 40619 - RNA, 23 nt, Artificial Sequence
  Chemically synthesized
cacaugaaaaagcguggcuuuaa

SEQ ID NO: 40620 - RNA, 23 nt, Artificial Sequence
  Chemically synthesized
uuccugacagccgaagagcaaca

SEQ ID NO: 40621 - RNA, 23 nt, Artificial Sequence
  Chemically synthesized
acaccauguuuucaucgucuucu

SEQ ID NO: 40622 - RNA, 23 nt, Artificial Sequence
  Chemically synthesized
cacaccauguuuucaucgucuuc

SEQ ID NO: 40623 - RNA, 23 nt, Artificial Sequence
  Chemically synthesized
acacaccauguuuucaucgucuu

SEQ ID NO: 40624 - RNA, 23 nt, Artificial Sequence
  Chemically synthesized
guucugguacacacaccauguuu

SEQ ID NO: 40625 - RNA, 23 nt, Artificial Sequence
  Chemically synthesized
uguucugguacacacaccauguu

SEQ ID NO: 40626 - RNA, 23 nt, Artificial Sequence
  Chemically synthesized
gugagggagaagaaauuuccuga

SEQ ID NO: 40627 - RNA, 23 nt, Artificial Sequence
  Chemically synthesized
cacuuuccaagcugggcaacacc

SEQ ID NO: 40628 - RNA, 23 nt, Artificial Sequence
  Chemically synthesized
gcacuuuccaagcugggcaacac

SEQ ID NO: 40629 - RNA, 23 nt, Artificial Sequence
  Chemically synthesized
cgcacuuuccaagcugggcaaca

SEQ ID NO: 40630 - RNA, 23 nt, Artificial Sequence
  Chemically synthesized
ccgcacuuuccaagcugggcaac

SEQ ID NO: 40631 - RNA, 23 nt, Artificial Sequence
  Chemically synthesized
gccgcacuuuccaagcugggcaa

SEQ ID NO: 40632 - RNA, 23 nt, Artificial Sequence
  Chemically synthesized
agcauccgcacugugccugaauu

SEQ ID NO: 40633 - RNA, 23 nt, Artificial Sequence
  Chemically synthesized
agucuuuccauuacacacgaguu

SEQ ID NO: 40634 - RNA, 23 nt, Artificial Sequence
  Chemically synthesized
gagucuuuccauuacacacgagu

SEQ ID NO: 40635 - RNA, 23 nt, Artificial Sequence
  Chemically synthesized
ggacacuucaaaagaugugccac

SEQ ID NO: 40636 - RNA, 23 nt, Artificial Sequence
  Chemically synthesized
aggacacuucaaaagaugugcca

SEQ ID NO: 40637 - RNA, 23 nt, Artificial Sequence
  Chemically synthesized
ucucucgaggacacuucaaaaga

SEQ ID NO: 40638 - RNA, 23 nt, Artificial Sequence
  Chemically synthesized
cucucucgaggacacuucaaaag

SEQ ID NO: 40639 - RNA, 23 nt, Artificial Sequence
  Chemically synthesized
gcucucucgaggacacuucaaaa

SEQ ID NO: 40640 - RNA, 23 nt, Artificial Sequence
  Chemically synthesized
agcucucucgaggacacuucaaa

SEQ ID NO: 40641 - RNA, 23 nt, Artificial Sequence
  Chemically synthesized
gcagauugccuacaaucacccca

SEQ ID NO: 40642 - RNA, 23 nt, Artificial Sequence
  Chemically synthesized
agcagauugccuacaaucacccc

SEQ ID NO: 40643 - RNA, 23 nt, Artificial Sequence
  Chemically synthesized
aagcagauugccuacaaucaccc

SEQ ID NO: 40644 - RNA, 23 nt, Artificial Sequence
  Chemically synthesized
cucuccaccauauuaguacucuc

SEQ ID NO: 40645 - RNA, 23 nt, Artificial Sequence
  Chemically synthesized
ucucuccaccauauuaguacucu

SEQ ID NO: 40646 - RNA, 23 nt, Artificial Sequence
  Chemically synthesized
cuggaacaaugaguucaagcaga

SEQ ID NO: 40647 - RNA, 23 nt, Artificial Sequence
  Chemically synthesized
gucucuccaccauauuaguacuc

SEQ ID NO: 40648 - RNA, 23 nt, Artificial Sequence
  Chemically synthesized
ccaaacccaagacagucucucuc

SEQ ID NO: 40649 - RNA, 23 nt, Artificial Sequence
  Chemically synthesized
gccaaacccaagacagucucucu

SEQ ID NO: 40650 - RNA, 23 nt, Artificial Sequence
  Chemically synthesized
ggccaaacccaagacagucucuc

SEQ ID NO: 40651 - RNA, 23 nt, Artificial Sequence
  Chemically synthesized
aggccaaacccaagacagucucu

SEQ ID NO: 40652 - RNA, 23 nt, Artificial Sequence
  Chemically synthesized
gaggccaaacccaagacagucuc

SEQ ID NO: 40653 - RNA, 23 nt, Artificial Sequence
  Chemically synthesized
ggaacaaguauuugcugcagagg

SEQ ID NO: 40654 - RNA, 23 nt, Artificial Sequence
  Chemically synthesized
aggaacaaguauuugcugcagag

SEQ ID NO: 40655 - RNA, 23 nt, Artificial Sequence
  Chemically synthesized
gaggaacaaguauuugcugcaga

SEQ ID NO: 40656 - RNA, 23 nt, Artificial Sequence
  Chemically synthesized
agaggaacaaguauuugcugcag

SEQ ID NO: 40657 - RNA, 23 nt, Artificial Sequence
  Chemically synthesized
aagaggaacaaguauuugcugca

SEQ ID NO: 40658 - RNA, 23 nt, Artificial Sequence
  Chemically synthesized
ucccaguugggaacuggugaaua

SEQ ID NO: 40659 - RNA, 23 nt, Artificial Sequence
  Chemically synthesized
cucccaguugggaacuggugaau

SEQ ID NO: 40660 - RNA, 23 nt, Artificial Sequence
  Chemically synthesized
gcucccaguugggaacuggugaa

SEQ ID NO: 40661 - RNA, 23 nt, Artificial Sequence
  Chemically synthesized
caccaggaauuccugugacggcc

SEQ ID NO: 40662 - RNA, 23 nt, Artificial Sequence
  Chemically synthesized
ccaccaggaauuccugugacggc

SEQ ID NO: 40663 - RNA, 23 nt, Artificial Sequence
  Chemically synthesized
uccaccaggaauuccugugacgg

SEQ ID NO: 40664 - RNA, 23 nt, Artificial Sequence
  Chemically synthesized
acuccaccaggaauuccugugac

SEQ ID NO: 40665 - RNA, 23 nt, Artificial Sequence
  Chemically synthesized
gggucucuccaccauauuaguac

SEQ ID NO: 40666 - RNA, 23 nt, Artificial Sequence
  Chemically synthesized
cuagggaagcccuuacuaacgac

SEQ ID NO: 40667 - RNA, 23 nt, Artificial Sequence
  Chemically synthesized
acuagggaagcccuuacuaacga

SEQ ID NO: 40668 - RNA, 23 nt, Artificial Sequence
  Chemically synthesized
uacuagggaagcccuuacuaacg

SEQ ID NO: 40669 - RNA, 23 nt, Artificial Sequence
  Chemically synthesized
uuacuagggaagcccuuacuaac

SEQ ID NO: 40670 - RNA, 23 nt, Artificial Sequence
  Chemically synthesized
uuuacuagggaagcccuuacuaa

SEQ ID NO: 40671 - RNA, 23 nt, Artificial Sequence
  Chemically synthesized
uggaguccuggaacuucacauga

SEQ ID NO: 40672 - RNA, 23 nt, Artificial Sequence
  Chemically synthesized
cuggaguccuggaacuucacaug

SEQ ID NO: 40673 - RNA, 23 nt, Artificial Sequence
  Chemically synthesized
ucuggaguccuggaacuucacau

SEQ ID NO: 40674 - RNA, 23 nt, Artificial Sequence
  Chemically synthesized
cucuggaguccuggaacuucaca

SEQ ID NO: 40675 - RNA, 23 nt, Artificial Sequence
  Chemically synthesized
agagaccgcuaugcagaauggca

SEQ ID NO: 40676 - RNA, 23 nt, Artificial Sequence
  Chemically synthesized
uagagaccgcuaugcagaauggc

SEQ ID NO: 40677 - RNA, 23 nt, Artificial Sequence
  Chemically synthesized
guagagaccgcuaugcagaaugg

SEQ ID NO: 40678 - RNA, 23 nt, Artificial Sequence
  Chemically synthesized
uguagagaccgcuaugcagaaug

SEQ ID NO: 40679 - RNA, 23 nt, Artificial Sequence
  Chemically synthesized
cuguagagaccgcuaugcagaau

SEQ ID NO: 40680 - RNA, 23 nt, Artificial Sequence
  Chemically synthesized
acccaagacagucucucucugca

SEQ ID NO: 40681 - RNA, 23 nt, Artificial Sequence
  Chemically synthesized
aacccaagacagucucucucugc

SEQ ID NO: 40682 - RNA, 23 nt, Artificial Sequence
  Chemically synthesized
aaacccaagacagucucucucug

SEQ ID NO: 40683 - RNA, 23 nt, Artificial Sequence
  Chemically synthesized
caaacccaagacagucucucucu

SEQ ID NO: 40684 - RNA, 23 nt, Artificial Sequence
  Chemically synthesized
cgaggccaaacccaagacagucu

SEQ ID NO: 40685 - RNA, 23 nt, Artificial Sequence
  Chemically synthesized
uaccugucagucgaaaccuuauu

SEQ ID NO: 40686 - RNA, 23 nt, Artificial Sequence
  Chemically synthesized
auaccugucagucgaaaccuuau

SEQ ID NO: 40687 - RNA, 23 nt, Artificial Sequence
  Chemically synthesized
aauaccugucagucgaaaccuua

SEQ ID NO: 40688 - RNA, 23 nt, Artificial Sequence
  Chemically synthesized
uaauaccugucagucgaaaccuu

SEQ ID NO: 40689 - RNA, 23 nt, Artificial Sequence
  Chemically synthesized
aacuccaccaggaauuccuguga

SEQ ID NO: 40690 - RNA, 23 nt, Artificial Sequence
  Chemically synthesized
uaaagcagaagaccuucuauggg

SEQ ID NO: 40691 - RNA, 23 nt, Artificial Sequence
  Chemically synthesized
uuaaagcagaagaccuucuaugg

SEQ ID NO: 40692 - RNA, 23 nt, Artificial Sequence
  Chemically synthesized
cuuaaagcagaagaccuucuaug

SEQ ID NO: 40693 - RNA, 23 nt, Artificial Sequence
  Chemically synthesized
gcuuaaagcagaagaccuucuau

SEQ ID NO: 40694 - RNA, 23 nt, Artificial Sequence
  Chemically synthesized
ggcuuaaagcagaagaccuucua

SEQ ID NO: 40695 - RNA, 23 nt, Artificial Sequence
  Chemically synthesized
cacauagcuuuacacugggacga

SEQ ID NO: 40696 - RNA, 23 nt, Artificial Sequence
  Chemically synthesized
ucacauagcuuuacacugggacg

SEQ ID NO: 40697 - RNA, 23 nt, Artificial Sequence
  Chemically synthesized
uucacauagcuuuacacugggac

SEQ ID NO: 40698 - RNA, 23 nt, Artificial Sequence
  Chemically synthesized
cuucacauagcuuuacacuggga

SEQ ID NO: 40699 - RNA, 23 nt, Artificial Sequence
  Chemically synthesized
ucuucacauagcuuuacacuggg

SEQ ID NO: 40700 - RNA, 23 nt, Artificial Sequence
  Chemically synthesized
gggaaaacucacuuucugaguua

SEQ ID NO: 40701 - RNA, 23 nt, Artificial Sequence
  Chemically synthesized
ggggaaaacucacuuucugaguu

SEQ ID NO: 40702 - RNA, 23 nt, Artificial Sequence
  Chemically synthesized
aggggaaaacucacuuucugagu

SEQ ID NO: 40703 - RNA, 23 nt, Artificial Sequence
  Chemically synthesized
caggggaaaacucacuuucugag

SEQ ID NO: 40704 - RNA, 23 nt, Artificial Sequence
  Chemically synthesized
gcaggggaaaacucacuuucuga

SEQ ID NO: 40705 - RNA, 23 nt, Artificial Sequence
  Chemically synthesized
guauuucacuacccagugugugu

SEQ ID NO: 40706 - RNA, 23 nt, Artificial Sequence
  Chemically synthesized
uguauuucacuacccagugugug

SEQ ID NO: 40707 - RNA, 23 nt, Artificial Sequence
  Chemically synthesized
auguauuucacuacccagugugu

SEQ ID NO: 40708 - RNA, 23 nt, Artificial Sequence
  Chemically synthesized
gauguauuucacuacccagugug

SEQ ID NO: 40709 - RNA, 23 nt, Artificial Sequence
  Chemically synthesized
ggaacccucggcuuggaaaugga

SEQ ID NO: 40710 - RNA, 23 nt, Artificial Sequence
  Chemically synthesized
aggaacccucggcuuggaaaugg

SEQ ID NO: 40711 - RNA, 23 nt, Artificial Sequence
  Chemically synthesized
aaggaacccucggcuuggaaaug

SEQ ID NO: 40712 - RNA, 23 nt, Artificial Sequence
  Chemically synthesized
caaggaacccucggcuuggaaau

SEQ ID NO: 40713 - RNA, 23 nt, Artificial Sequence
  Chemically synthesized
gaguuguucugguacacacacca

SEQ ID NO: 40714 - RNA, 23 nt, Artificial Sequence
  Chemically synthesized
ugaguuguucugguacacacacc

SEQ ID NO: 40715 - RNA, 23 nt, Artificial Sequence
  Chemically synthesized
augaguuguucugguacacacac

SEQ ID NO: 40716 - RNA, 23 nt, Artificial Sequence
  Chemically synthesized
uaugaguuguucugguacacaca

SEQ ID NO: 40717 - RNA, 23 nt, Artificial Sequence
  Chemically synthesized
cuaugaguuguucugguacacac

SEQ ID NO: 40718 - RNA, 23 nt, Artificial Sequence
  Chemically synthesized
caacugaguucaucagacaggcc

SEQ ID NO: 40719 - RNA, 23 nt, Artificial Sequence
  Chemically synthesized
ucaacugaguucaucagacaggc

SEQ ID NO: 40720 - RNA, 23 nt, Artificial Sequence
  Chemically synthesized
gucaacugaguucaucagacagg

SEQ ID NO: 40721 - RNA, 23 nt, Artificial Sequence
  Chemically synthesized
cgucaacugaguucaucagacag

SEQ ID NO: 40722 - RNA, 23 nt, Artificial Sequence
  Chemically synthesized
ucgucaacugaguucaucagaca

SEQ ID NO: 40723 - RNA, 23 nt, Artificial Sequence
  Chemically synthesized
ugaccucgucaacugaguucauc

SEQ ID NO: 40724 - RNA, 23 nt, Artificial Sequence
  Chemically synthesized
augaccucgucaacugaguucau

SEQ ID NO: 40725 - RNA, 23 nt, Artificial Sequence
  Chemically synthesized
caugaccucgucaacugaguuca

SEQ ID NO: 40726 - RNA, 23 nt, Artificial Sequence
  Chemically synthesized
ucaugaccucgucaacugaguuc

SEQ ID NO: 40727 - RNA, 23 nt, Artificial Sequence
  Chemically synthesized
aucaugaccucgucaacugaguu

SEQ ID NO: 40728 - RNA, 23 nt, Artificial Sequence
  Chemically synthesized
cauccacaucguggcgcauuucu

SEQ ID NO: 40729 - RNA, 23 nt, Artificial Sequence
  Chemically synthesized
ccauccacaucguggcgcauuuc

SEQ ID NO: 40730 - RNA, 23 nt, Artificial Sequence
  Chemically synthesized
accauccacaucguggcgcauuu

SEQ ID NO: 40731 - RNA, 23 nt, Artificial Sequence
  Chemically synthesized
gggauagcuguuaaugcaaccau

SEQ ID NO: 40732 - RNA, 23 nt, Artificial Sequence
  Chemically synthesized
ugggauagcuguuaaugcaacca

SEQ ID NO: 40733 - RNA, 23 nt, Artificial Sequence
  Chemically synthesized
augggauagcuguuaaugcaacc

SEQ ID NO: 40734 - RNA, 23 nt, Artificial Sequence
  Chemically synthesized
uaugggauagcuguuaaugcaac

SEQ ID NO: 40735 - RNA, 23 nt, Artificial Sequence
  Chemically synthesized
ccucagauuucacaaacuggucg

SEQ ID NO: 40736 - RNA, 23 nt, Artificial Sequence
  Chemically synthesized
uaacuauugugaacaguacacua

SEQ ID NO: 40737 - RNA, 23 nt, Artificial Sequence
  Chemically synthesized
uuaacuauugugaacaguacacu

SEQ ID NO: 40738 - RNA, 23 nt, Artificial Sequence
  Chemically synthesized
auuaacuauugugaacaguacac

SEQ ID NO: 40739 - RNA, 23 nt, Artificial Sequence
  Chemically synthesized
aauuaacuauugugaacaguaca

SEQ ID NO: 40740 - RNA, 23 nt, Artificial Sequence
  Chemically synthesized
uaauuaacuauugugaacaguac

SEQ ID NO: 40741 - RNA, 23 nt, Artificial Sequence
  Chemically synthesized
aggcuuaaagcagaagaccuucu

SEQ ID NO: 40742 - RNA, 23 nt, Artificial Sequence
  Chemically synthesized
cucuuacucucccuggaaacacg

SEQ ID NO: 40743 - RNA, 23 nt, Artificial Sequence
  Chemically synthesized
ucucuuacucucccuggaaacac

SEQ ID NO: 40744 - RNA, 23 nt, Artificial Sequence
  Chemically synthesized
aucucuuacucucccuggaaaca

SEQ ID NO: 40745 - RNA, 23 nt, Artificial Sequence
  Chemically synthesized
gaucucuuacucucccuggaaac

SEQ ID NO: 40746 - RNA, 23 nt, Artificial Sequence
  Chemically synthesized
gaacugcccugacagauguauuu

SEQ ID NO: 40747 - RNA, 23 nt, Artificial Sequence
  Chemically synthesized
ggaacugcccugacagauguauu

SEQ ID NO: 40748 - RNA, 23 nt, Artificial Sequence
  Chemically synthesized
uggaacugcccugacagauguau

SEQ ID NO: 40749 - RNA, 23 nt, Artificial Sequence
  Chemically synthesized
uuggaacugcccugacagaugua

SEQ ID NO: 40750 - RNA, 23 nt, Artificial Sequence
  Chemically synthesized
uuuggaacugcccugacagaugu

SEQ ID NO: 40751 - RNA, 23 nt, Artificial Sequence
  Chemically synthesized
gaagacuuuuucagcgugcacau

SEQ ID NO: 40752 - RNA, 23 nt, Artificial Sequence
  Chemically synthesized
gccauaucuucgcuggaguggca

SEQ ID NO: 40753 - RNA, 23 nt, Artificial Sequence
  Chemically synthesized
agccauaucuucgcuggaguggc

SEQ ID NO: 40754 - RNA, 23 nt, Artificial Sequence
  Chemically synthesized
cagccauaucuucgcuggagugg

SEQ ID NO: 40755 - RNA, 23 nt, Artificial Sequence
  Chemically synthesized
ccagccauaucuucgcuggagug

SEQ ID NO: 40756 - RNA, 23 nt, Artificial Sequence
  Chemically synthesized
cccagccauaucuucgcuggagu

SEQ ID NO: 40757 - RNA, 23 nt, Artificial Sequence
  Chemically synthesized
ccaagacagucucucucugcaca

SEQ ID NO: 40758 - RNA, 23 nt, Artificial Sequence
  Chemically synthesized
cccaagacagucucucucugcac

SEQ ID NO: 40759 - RNA, 23 nt, Artificial Sequence
  Chemically synthesized
cggauuguucgaggccaaaccca

SEQ ID NO: 40760 - RNA, 23 nt, Artificial Sequence
  Chemically synthesized
agggagaagaaauuuccugacag

SEQ ID NO: 40761 - RNA, 23 nt, Artificial Sequence
  Chemically synthesized
gagggagaagaaauuuccugaca

SEQ ID NO: 40762 - RNA, 23 nt, Artificial Sequence
  Chemically synthesized
ugagggagaagaaauuuccugac

SEQ ID NO: 40763 - RNA, 23 nt, Artificial Sequence
  Chemically synthesized
gaccucgucaacugaguucauca

SEQ ID NO: 40764 - RNA, 23 nt, Artificial Sequence
  Chemically synthesized
uugaucaugaccucgucaacuga

SEQ ID NO: 40765 - RNA, 23 nt, Artificial Sequence
  Chemically synthesized
cuugaucaugaccucgucaacug

SEQ ID NO: 40766 - RNA, 23 nt, Artificial Sequence
  Chemically synthesized
ucuugaucaugaccucgucaacu

SEQ ID NO: 40767 - RNA, 23 nt, Artificial Sequence
  Chemically synthesized
gucuugaucaugaccucgucaac

SEQ ID NO: 40768 - RNA, 23 nt, Artificial Sequence
  Chemically synthesized
agucuugaucaugaccucgucaa

SEQ ID NO: 40769 - RNA, 23 nt, Artificial Sequence
  Chemically synthesized
uagucuugaucaugaccucguca

SEQ ID NO: 40770 - RNA, 23 nt, Artificial Sequence
  Chemically synthesized
uuagucuugaucaugaccucguc

SEQ ID NO: 40771 - RNA, 23 nt, Artificial Sequence
  Chemically synthesized
uuuagucuugaucaugaccucgu

SEQ ID NO: 40772 - RNA, 23 nt, Artificial Sequence
  Chemically synthesized
cuaacgagagcuaccucaacccu

SEQ ID NO: 40773 - RNA, 23 nt, Artificial Sequence
  Chemically synthesized
ccuaacgagagcuaccucaaccc

SEQ ID NO: 40774 - RNA, 23 nt, Artificial Sequence
  Chemically synthesized
cccuaacgagagcuaccucaacc

SEQ ID NO: 40775 - RNA, 23 nt, Artificial Sequence
  Chemically synthesized
ccccuaacgagagcuaccucaac

SEQ ID NO: 40776 - RNA, 23 nt, Artificial Sequence
  Chemically synthesized
accccuaacgagagcuaccucaa

SEQ ID NO: 40777 - RNA, 23 nt, Artificial Sequence
  Chemically synthesized
gacaaaaaccucagauuucacaa

SEQ ID NO: 40778 - RNA, 23 nt, Artificial Sequence
  Chemically synthesized
cuaauaccugucagucgaaaccu

SEQ ID NO: 40779 - RNA, 23 nt, Artificial Sequence
  Chemically synthesized
ucuaauaccugucagucgaaacc

SEQ ID NO: 40780 - RNA, 23 nt, Artificial Sequence
  Chemically synthesized
uucuaauaccugucagucgaaac

SEQ ID NO: 40781 - RNA, 23 nt, Artificial Sequence
  Chemically synthesized
auucuaauaccugucagucgaaa

SEQ ID NO: 40782 - RNA, 23 nt, Artificial Sequence
  Chemically synthesized
aauucuaauaccugucagucgaa

SEQ ID NO: 40783 - RNA, 23 nt, Artificial Sequence
  Chemically synthesized
gggaagcccuuacuaacgaccca

SEQ ID NO: 40784 - RNA, 23 nt, Artificial Sequence
  Chemically synthesized
agggaagcccuuacuaacgaccc

SEQ ID NO: 40785 - RNA, 23 nt, Artificial Sequence
  Chemically synthesized
uagggaagcccuuacuaacgacc

SEQ ID NO: 40786 - RNA, 23 nt, Artificial Sequence
  Chemically synthesized
aacaugucauauacaacagaaca

SEQ ID NO: 40787 - RNA, 23 nt, Artificial Sequence
  Chemically synthesized
uaacaugucauauacaacagaac

SEQ ID NO: 40788 - RNA, 23 nt, Artificial Sequence
  Chemically synthesized
auaacaugucauauacaacagaa

SEQ ID NO: 40789 - RNA, 23 nt, Artificial Sequence
  Chemically synthesized
cuaaagcucucucgaggacacuu

SEQ ID NO: 40790 - RNA, 23 nt, Artificial Sequence
  Chemically synthesized
ccuaaagcucucucgaggacacu

SEQ ID NO: 40791 - RNA, 23 nt, Artificial Sequence
  Chemically synthesized
accuaaagcucucucgaggacac

SEQ ID NO: 40792 - RNA, 23 nt, Artificial Sequence
  Chemically synthesized
gaccuaaagcucucucgaggaca

SEQ ID NO: 40793 - RNA, 23 nt, Artificial Sequence
  Chemically synthesized
ggaccuaaagcucucucgaggac

SEQ ID NO: 40794 - RNA, 23 nt, Artificial Sequence
  Chemically synthesized
cagaagaccuucuaugggaggcc

SEQ ID NO: 40795 - RNA, 23 nt, Artificial Sequence
  Chemically synthesized
gcagaagaccuucuaugggaggc

SEQ ID NO: 40796 - RNA, 23 nt, Artificial Sequence
  Chemically synthesized
agcagaagaccuucuaugggagg

SEQ ID NO: 40797 - RNA, 23 nt, Artificial Sequence
  Chemically synthesized
aagcagaagaccuucuaugggag

SEQ ID NO: 40798 - RNA, 23 nt, Artificial Sequence
  Chemically synthesized
aaagcagaagaccuucuauggga

SEQ ID NO: 40799 - RNA, 23 nt, Artificial Sequence
  Chemically synthesized
ggucucuccaccauauuaguacu

SEQ ID NO: 40800 - RNA, 23 nt, Artificial Sequence
  Chemically synthesized
aaaacucacuuucugaguuauca

SEQ ID NO: 40801 - RNA, 23 nt, Artificial Sequence
  Chemically synthesized
gaaaacucacuuucugaguuauc

SEQ ID NO: 40802 - RNA, 23 nt, Artificial Sequence
  Chemically synthesized
ggaaaacucacuuucugaguuau

SEQ ID NO: 40803 - RNA, 23 nt, Artificial Sequence
  Chemically synthesized
ucacaugaaaaagcguggcuuua

SEQ ID NO: 40804 - RNA, 23 nt, Artificial Sequence
  Chemically synthesized
uucacaugaaaaagcguggcuuu

SEQ ID NO: 40805 - RNA, 23 nt, Artificial Sequence
  Chemically synthesized
cuucacaugaaaaagcguggcuu

SEQ ID NO: 40806 - RNA, 23 nt, Artificial Sequence
  Chemically synthesized
cucgucaacugaguucaucagac

SEQ ID NO: 40807 - RNA, 23 nt, Artificial Sequence
  Chemically synthesized
ucagauuucacaaacuggucgcc

SEQ ID NO: 40808 - RNA, 23 nt, Artificial Sequence
  Chemically synthesized
cucagauuucacaaacuggucgc

SEQ ID NO: 40809 - RNA, 23 nt, Artificial Sequence
  Chemically synthesized
aauaacaugucauauacaacaga

SEQ ID NO: 40810 - RNA, 23 nt, Artificial Sequence
  Chemically synthesized
auugugaacaguacacuauacca

SEQ ID NO: 40811 - RNA, 23 nt, Artificial Sequence
  Chemically synthesized
uauugugaacaguacacuauacc

SEQ ID NO: 40812 - RNA, 23 nt, Artificial Sequence
  Chemically synthesized
cuauugugaacaguacacuauac

SEQ ID NO: 40813 - RNA, 23 nt, Artificial Sequence
  Chemically synthesized
aguacucucauggcugggaauaa

SEQ ID NO: 40814 - RNA, 23 nt, Artificial Sequence
  Chemically synthesized
uaguacucucauggcugggaaua

SEQ ID NO: 40815 - RNA, 23 nt, Artificial Sequence
  Chemically synthesized
uuaguacucucauggcugggaau

SEQ ID NO: 40816 - RNA, 23 nt, Artificial Sequence
  Chemically synthesized
auuaguacucucauggcugggaa

SEQ ID NO: 40817 - RNA, 23 nt, Artificial Sequence
  Chemically synthesized
agaagaccuucuaugggaggccc

SEQ ID NO: 40818 - RNA, 23 nt, Artificial Sequence
  Chemically synthesized
ugaaugagggucucuccaccaua

SEQ ID NO: 40819 - RNA, 23 nt, Artificial Sequence
  Chemically synthesized
uuugagugguuugcugaucucuu

SEQ ID NO: 40820 - RNA, 23 nt, Artificial Sequence
  Chemically synthesized
uuuugagugguuugcugaucucu

SEQ ID NO: 40821 - RNA, 23 nt, Artificial Sequence
  Chemically synthesized
cuuuugagugguuugcugaucuc

SEQ ID NO: 40822 - RNA, 23 nt, Artificial Sequence
  Chemically synthesized
gaacuucacaugaaaaagcgugg

SEQ ID NO: 40823 - RNA, 23 nt, Artificial Sequence
  Chemically synthesized
ucauuaccaaggugguaagccac

SEQ ID NO: 40824 - RNA, 23 nt, Artificial Sequence
  Chemically synthesized
gucauuaccaaggugguaagcca

SEQ ID NO: 40825 - RNA, 23 nt, Artificial Sequence
  Chemically synthesized
ugucauuaccaaggugguaagcc

SEQ ID NO: 40826 - RNA, 23 nt, Artificial Sequence
  Chemically synthesized
uugucauuaccaaggugguaagc

SEQ ID NO: 40827 - RNA, 23 nt, Artificial Sequence
  Chemically synthesized
guugucauuaccaaggugguaag

SEQ ID NO: 40828 - RNA, 23 nt, Artificial Sequence
  Chemically synthesized
aguugucauuaccaaggugguaa

SEQ ID NO: 40829 - RNA, 23 nt, Artificial Sequence
  Chemically synthesized
gagaccgcuaugcagaauggcag

SEQ ID NO: 40830 - RNA, 23 nt, Artificial Sequence
  Chemically synthesized
ggauuguucgaggccaaacccaa

SEQ ID NO: 40831 - RNA, 23 nt, Artificial Sequence
  Chemically synthesized
ccucgucaacugaguucaucaga

SEQ ID NO: 40832 - RNA, 23 nt, Artificial Sequence
  Chemically synthesized
accucgucaacugaguucaucag

SEQ ID NO: 40833 - RNA, 23 nt, Artificial Sequence
  Chemically synthesized
ggauagcuguuaaugcaaccauc

SEQ ID NO: 40834 - RNA, 23 nt, Artificial Sequence
  Chemically synthesized
gaauuuuaacugcaugcuaauuc

SEQ ID NO: 40835 - RNA, 23 nt, Artificial Sequence
  Chemically synthesized
ccaaagaacuccaccaggaauuc

SEQ ID NO: 40836 - RNA, 23 nt, Artificial Sequence
  Chemically synthesized
uccaaagaacuccaccaggaauu

SEQ ID NO: 40837 - RNA, 23 nt, Artificial Sequence
  Chemically synthesized
uuccaaagaacuccaccaggaau

SEQ ID NO: 40838 - RNA, 23 nt, Artificial Sequence
  Chemically synthesized
auuccaaagaacuccaccaggaa

SEQ ID NO: 40839 - RNA, 23 nt, Artificial Sequence
  Chemically synthesized
gauuccaaagaacuccaccagga

SEQ ID NO: 40840 - RNA, 23 nt, Artificial Sequence
  Chemically synthesized
agacuuuggaggucaaguccagg

SEQ ID NO: 40841 - RNA, 23 nt, Artificial Sequence
  Chemically synthesized
uagacuuuggaggucaaguccag

SEQ ID NO: 40842 - RNA, 23 nt, Artificial Sequence
  Chemically synthesized
cuagacuuuggaggucaagucca

SEQ ID NO: 40843 - RNA, 23 nt, Artificial Sequence
  Chemically synthesized
gacacuucaaaagaugugccacu

SEQ ID NO: 40844 - RNA, 23 nt, Artificial Sequence
  Chemically synthesized
gcccagccauaucuucgcuggag

SEQ ID NO: 40845 - RNA, 23 nt, Artificial Sequence
  Chemically synthesized
caguacaucuuggugcagugccc

SEQ ID NO: 40846 - RNA, 23 nt, Artificial Sequence
  Chemically synthesized
gcaguacaucuuggugcagugcc

SEQ ID NO: 40847 - RNA, 23 nt, Artificial Sequence
  Chemically synthesized
ggcaguacaucuuggugcagugc

SEQ ID NO: 40848 - RNA, 23 nt, Artificial Sequence
  Chemically synthesized
gggcaguacaucuuggugcagug

SEQ ID NO: 40849 - RNA, 23 nt, Artificial Sequence
  Chemically synthesized
agggcaguacaucuuggugcagu

SEQ ID NO: 40850 - RNA, 23 nt, Artificial Sequence
  Chemically synthesized
acuucacaugaaaaagcguggcu

SEQ ID NO: 40851 - RNA, 23 nt, Artificial Sequence
  Chemically synthesized
ccucuggaguccuggaacuucac

SEQ ID NO: 40852 - RNA, 23 nt, Artificial Sequence
  Chemically synthesized
cccucuggaguccuggaacuuca

SEQ ID NO: 40853 - RNA, 23 nt, Artificial Sequence
  Chemically synthesized
cuaugcagaauggcagacagugg

SEQ ID NO: 40854 - RNA, 23 nt, Artificial Sequence
  Chemically synthesized
gcuaugcagaauggcagacagug

SEQ ID NO: 40855 - RNA, 23 nt, Artificial Sequence
  Chemically synthesized
cgcuaugcagaauggcagacagu

SEQ ID NO: 40856 - RNA, 23 nt, Artificial Sequence
  Chemically synthesized
ccgcuaugcagaauggcagacag

SEQ ID NO: 40857 - RNA, 23 nt, Artificial Sequence
  Chemically synthesized
accgcuaugcagaauggcagaca

SEQ ID NO: 40858 - RNA, 23 nt, Artificial Sequence
  Chemically synthesized
gaccgcuaugcagaauggcagac

SEQ ID NO: 40859 - RNA, 23 nt, Artificial Sequence
  Chemically synthesized
agaccgcuaugcagaauggcaga

SEQ ID NO: 40860 - RNA, 23 nt, Artificial Sequence
  Chemically synthesized
ucuucaaccuggaacgcuaccac

SEQ ID NO: 40861 - RNA, 23 nt, Artificial Sequence
  Chemically synthesized
uucuucaaccuggaacgcuacca

SEQ ID NO: 40862 - RNA, 23 nt, Artificial Sequence
  Chemically synthesized
uuucuucaaccuggaacgcuacc

SEQ ID NO: 40863 - RNA, 23 nt, Artificial Sequence
  Chemically synthesized
auuucuucaaccuggaacgcuac

SEQ ID NO: 40864 - RNA, 23 nt, Artificial Sequence
  Chemically synthesized
cauuucuucaaccuggaacgcua

SEQ ID NO: 40865 - RNA, 23 nt, Artificial Sequence
  Chemically synthesized
agcuguuaaugcaaccauccaca

SEQ ID NO: 40866 - RNA, 23 nt, Artificial Sequence
  Chemically synthesized
uagcuguuaaugcaaccauccac

SEQ ID NO: 40867 - RNA, 23 nt, Artificial Sequence
  Chemically synthesized
auagcuguuaaugcaaccaucca

SEQ ID NO: 40868 - RNA, 23 nt, Artificial Sequence
  Chemically synthesized
gauagcuguuaaugcaaccaucc

SEQ ID NO: 40869 - RNA, 23 nt, Artificial Sequence
  Chemically synthesized
ucacaaacuggucgccuauggga

SEQ ID NO: 40870 - RNA, 23 nt, Artificial Sequence
  Chemically synthesized
uucacaaacuggucgccuauggg

SEQ ID NO: 40871 - RNA, 23 nt, Artificial Sequence
  Chemically synthesized
uuucacaaacuggucgccuaugg

SEQ ID NO: 40872 - RNA, 23 nt, Artificial Sequence
  Chemically synthesized
auuucacaaacuggucgccuaug

SEQ ID NO: 40873 - RNA, 23 nt, Artificial Sequence
  Chemically synthesized
gauuucacaaacuggucgccuau

SEQ ID NO: 40874 - RNA, 23 nt, Artificial Sequence
  Chemically synthesized
acuauugugaacaguacacuaua

SEQ ID NO: 40875 - RNA, 23 nt, Artificial Sequence
  Chemically synthesized
aacuauugugaacaguacacuau

SEQ ID NO: 40876 - RNA, 23 nt, Artificial Sequence
  Chemically synthesized
guggaccuaaagcucucucgagg

SEQ ID NO: 40877 - RNA, 23 nt, Artificial Sequence
  Chemically synthesized
uguggaccuaaagcucucucgag

SEQ ID NO: 40878 - RNA, 23 nt, Artificial Sequence
  Chemically synthesized
cuguggaccuaaagcucucucga

SEQ ID NO: 40879 - RNA, 23 nt, Artificial Sequence
  Chemically synthesized
ucuguggaccuaaagcucucucg

SEQ ID NO: 40880 - RNA, 23 nt, Artificial Sequence
  Chemically synthesized
uucuguggaccuaaagcucucuc

SEQ ID NO: 40881 - RNA, 23 nt, Artificial Sequence
  Chemically synthesized
cucucccuggaaacacggaugag

SEQ ID NO: 40882 - RNA, 23 nt, Artificial Sequence
  Chemically synthesized
acucucccuggaaacacggauga

SEQ ID NO: 40883 - RNA, 23 nt, Artificial Sequence
  Chemically synthesized
gacuuuuucagcgugcacauccg

SEQ ID NO: 40884 - RNA, 23 nt, Artificial Sequence
  Chemically synthesized
agacuuuuucagcgugcacaucc

SEQ ID NO: 40885 - RNA, 23 nt, Artificial Sequence
  Chemically synthesized
aagacuuuuucagcgugcacauc

SEQ ID NO: 40886 - RNA, 23 nt, Artificial Sequence
  Chemically synthesized
ccauaucuucgcuggaguggcac

SEQ ID NO: 40887 - RNA, 23 nt, Artificial Sequence
  Chemically synthesized
aaacacaaccacugaauugcuaa

SEQ ID NO: 40888 - RNA, 23 nt, Artificial Sequence
  Chemically synthesized
ggucgccuaugggauagcuguua

SEQ ID NO: 40889 - RNA, 23 nt, Artificial Sequence
  Chemically synthesized
uggucgccuaugggauagcuguu

SEQ ID NO: 40890 - RNA, 23 nt, Artificial Sequence
  Chemically synthesized
agauuucacaaacuggucgccua

SEQ ID NO: 40891 - RNA, 23 nt, Artificial Sequence
  Chemically synthesized
accguggaggaggcaauuagaca

SEQ ID NO: 40892 - RNA, 23 nt, Artificial Sequence
  Chemically synthesized
gaccguggaggaggcaauuagac

SEQ ID NO: 40893 - RNA, 23 nt, Artificial Sequence
  Chemically synthesized
ggaccguggaggaggcaauuaga

SEQ ID NO: 40894 - RNA, 23 nt, Artificial Sequence
  Chemically synthesized
aggaccguggaggaggcaauuag

SEQ ID NO: 40895 - RNA, 23 nt, Artificial Sequence
  Chemically synthesized
gaggaccguggaggaggcaauua

SEQ ID NO: 40896 - RNA, 23 nt, Artificial Sequence
  Chemically synthesized
acaaguauuugcugcagaggacc

SEQ ID NO: 40897 - RNA, 23 nt, Artificial Sequence
  Chemically synthesized
aacaaguauuugcugcagaggac

SEQ ID NO: 40898 - RNA, 23 nt, Artificial Sequence
  Chemically synthesized
gaacaaguauuugcugcagagga

SEQ ID NO: 40899 - RNA, 23 nt, Artificial Sequence
  Chemically synthesized
uuucaacaagaaguugucauuac

SEQ ID NO: 40900 - RNA, 23 nt, Artificial Sequence
  Chemically synthesized
cgauuucaacaagaaguugucau

SEQ ID NO: 40901 - RNA, 23 nt, Artificial Sequence
  Chemically synthesized
ggaaauggauuuuaggcccugug

SEQ ID NO: 40902 - RNA, 23 nt, Artificial Sequence
  Chemically synthesized
uggaaauggauuuuaggcccugu

SEQ ID NO: 40903 - RNA, 23 nt, Artificial Sequence
  Chemically synthesized
uuggaaauggauuuuaggcccug

SEQ ID NO: 40904 - RNA, 23 nt, Artificial Sequence
  Chemically synthesized
cuuggaaauggauuuuaggcccu

SEQ ID NO: 40905 - RNA, 23 nt, Artificial Sequence
  Chemically synthesized
ucaucagacaggccuccuaugag

SEQ ID NO: 40906 - RNA, 23 nt, Artificial Sequence
  Chemically synthesized
uucaucagacaggccuccuauga

SEQ ID NO: 40907 - RNA, 23 nt, Artificial Sequence
  Chemically synthesized
guucaucagacaggccuccuaug

SEQ ID NO: 40908 - RNA, 23 nt, Artificial Sequence
  Chemically synthesized
aguucaucagacaggccuccuau

SEQ ID NO: 40909 - RNA, 23 nt, Artificial Sequence
  Chemically synthesized
gaguucaucagacaggccuccua

SEQ ID NO: 40910 - RNA, 23 nt, Artificial Sequence
  Chemically synthesized
agagcuaccucaacccuguccgg

SEQ ID NO: 40911 - RNA, 23 nt, Artificial Sequence
  Chemically synthesized
gagagcuaccucaacccuguccg

SEQ ID NO: 40912 - RNA, 23 nt, Artificial Sequence
  Chemically synthesized
cgagagcuaccucaacccugucc

SEQ ID NO: 40913 - RNA, 23 nt, Artificial Sequence
  Chemically synthesized
acgagagcuaccucaacccuguc

SEQ ID NO: 40914 - RNA, 23 nt, Artificial Sequence
  Chemically synthesized
aacgagagcuaccucaacccugu

SEQ ID NO: 40915 - RNA, 23 nt, Artificial Sequence
  Chemically synthesized
aagaacuccaccaggaauuccug

SEQ ID NO: 40916 - RNA, 23 nt, Artificial Sequence
  Chemically synthesized
aaagaacuccaccaggaauuccu

SEQ ID NO: 40917 - RNA, 23 nt, Artificial Sequence
  Chemically synthesized
caaagaacuccaccaggaauucc

SEQ ID NO: 40918 - RNA, 23 nt, Artificial Sequence
  Chemically synthesized
cauuguguuuucaaucaaguuau

SEQ ID NO: 40919 - RNA, 23 nt, Artificial Sequence
  Chemically synthesized
uggaccuaaagcucucucgagga

SEQ ID NO: 40920 - RNA, 23 nt, Artificial Sequence
  Chemically synthesized
gaaauggauuuuaggcccugugg

SEQ ID NO: 40921 - RNA, 23 nt, Artificial Sequence
  Chemically synthesized
caagacagucucucucugcacaa

SEQ ID NO: 40922 - RNA, 23 nt, Artificial Sequence
  Chemically synthesized
caccccuaacgagagcuaccuca

SEQ ID NO: 40923 - RNA, 23 nt, Artificial Sequence
  Chemically synthesized
cgaaaccuuauuucauucauaag

SEQ ID NO: 40924 - RNA, 23 nt, Artificial Sequence
  Chemically synthesized
ucgaaaccuuauuucauucauaa

SEQ ID NO: 40925 - RNA, 23 nt, Artificial Sequence
  Chemically synthesized
ucuggcgauuucaacaagaaguu

SEQ ID NO: 40926 - RNA, 23 nt, Artificial Sequence
  Chemically synthesized
uucuggcgauuucaacaagaagu

SEQ ID NO: 40927 - RNA, 23 nt, Artificial Sequence
  Chemically synthesized
guucuggcgauuucaacaagaag

SEQ ID NO: 40928 - RNA, 23 nt, Artificial Sequence
  Chemically synthesized
gguucuggcgauuucaacaagaa

SEQ ID NO: 40929 - RNA, 23 nt, Artificial Sequence
  Chemically synthesized
agguucuggcgauuucaacaaga

SEQ ID NO: 40930 - RNA, 23 nt, Artificial Sequence
  Chemically synthesized
gcaugugaaagaauaauuagguu

SEQ ID NO: 40931 - RNA, 23 nt, Artificial Sequence
  Chemically synthesized
ucauuucuauuacaacaaggaga

SEQ ID NO: 40932 - RNA, 23 nt, Artificial Sequence
  Chemically synthesized
guguucauuucuauuacaacaag

SEQ ID NO: 40933 - RNA, 23 nt, Artificial Sequence
  Chemically synthesized
cuauuacaacaaggagagcuucu

SEQ ID NO: 40934 - RNA, 23 nt, Artificial Sequence
  Chemically synthesized
guucauuucuauuacaacaagga

SEQ ID NO: 40935 - RNA, 23 nt, Artificial Sequence
  Chemically synthesized
gcugggaauaaauuuuuaucugu

SEQ ID NO: 40936 - RNA, 23 nt, Artificial Sequence
  Chemically synthesized
ugaaagaauaauuagguucuggc

SEQ ID NO: 40937 - RNA, 23 nt, Artificial Sequence
  Chemically synthesized
gacaaaauaauuuacuagggaag

SEQ ID NO: 40938 - RNA, 23 nt, Artificial Sequence
  Chemically synthesized
acaaaauaauuuacuagggaagc

SEQ ID NO: 40939 - RNA, 23 nt, Artificial Sequence
  Chemically synthesized
caaguauuugcugcagaggaccg

SEQ ID NO: 40940 - RNA, 23 nt, Artificial Sequence
  Chemically synthesized
gaauuccugugacggccuguuga

SEQ ID NO: 40941 - RNA, 23 nt, Artificial Sequence
  Chemically synthesized
uguuuucaucgucuucuuucuca

SEQ ID NO: 40942 - RNA, 23 nt, Artificial Sequence
  Chemically synthesized
caacagaacaaaaacauuuacug

SEQ ID NO: 40943 - RNA, 23 nt, Artificial Sequence
  Chemically synthesized
uggaaacacggaugagugagcag

SEQ ID NO: 40944 - RNA, 23 nt, Artificial Sequence
  Chemically synthesized
aaaauggcgccagggcaguacau

SEQ ID NO: 40945 - RNA, 23 nt, Artificial Sequence
  Chemically synthesized
ccuuagcuuauaaauaacauguc

SEQ ID NO: 40946 - RNA, 23 nt, Artificial Sequence
  Chemically synthesized
auauauuucuuaccggcugggau

SEQ ID NO: 40947 - RNA, 23 nt, Artificial Sequence
  Chemically synthesized
ugaguucaagcagauugccuaca

SEQ ID NO: 40948 - RNA, 23 nt, Artificial Sequence
  Chemically synthesized
gcuguuaaugcaaccauccacau

SEQ ID NO: 40949 - RNA, 23 nt, Artificial Sequence
  Chemically synthesized
ccuuauuucauucauaagaggaa

SEQ ID NO: 40950 - RNA, 23 nt, Artificial Sequence
  Chemically synthesized
aagcucucucgaggacacuucaa

SEQ ID NO: 40951 - RNA, 23 nt, Artificial Sequence
  Chemically synthesized
ugaaaucuauaugguacaaaugc

SEQ ID NO: 40952 - RNA, 23 nt, Artificial Sequence
  Chemically synthesized
ccuuuggaacugcccugacagau

SEQ ID NO: 40953 - RNA, 23 nt, Artificial Sequence
  Chemically synthesized
accuuauuucauucauaagagga

SEQ ID NO: 40954 - RNA, 23 nt, Artificial Sequence
  Chemically synthesized
ccuuacuaacgacccaacaucca

SEQ ID NO: 40955 - RNA, 23 nt, Artificial Sequence
  Chemically synthesized
ucauauauuucuuaccggcuggg

SEQ ID NO: 40956 - RNA, 23 nt, Artificial Sequence
  Chemically synthesized
gauuugccgggaugcaagagcuu

SEQ ID NO: 40957 - RNA, 23 nt, Artificial Sequence
  Chemically synthesized
aguuguucugguacacacaccau

SEQ ID NO: 40958 - RNA, 23 nt, Artificial Sequence
  Chemically synthesized
ugaucaugaccucgucaacugag

SEQ ID NO: 40959 - RNA, 23 nt, Artificial Sequence
  Chemically synthesized
cuguuaaugcaaccauccacauc

SEQ ID NO: 40960 - RNA, 23 nt, Artificial Sequence
  Chemically synthesized
aggaauuccugugacggccuguu

SEQ ID NO: 40961 - RNA, 23 nt, Artificial Sequence
  Chemically synthesized
uugaaugagggucucuccaccau

SEQ ID NO: 40962 - RNA, 23 nt, Artificial Sequence
  Chemically synthesized
gucuucuuucucagccuggccau

SEQ ID NO: 40963 - RNA, 23 nt, Artificial Sequence
  Chemically synthesized
gcuaaggacaauagcaggcguca

SEQ ID NO: 40964 - RNA, 23 nt, Artificial Sequence
  Chemically synthesized
ugcuaaggacaauagcaggcguc

SEQ ID NO: 40965 - RNA, 23 nt, Artificial Sequence
  Chemically synthesized
ugauaugagcucccaguugggaa

SEQ ID NO: 40966 - RNA, 23 nt, Artificial Sequence
  Chemically synthesized
ucagacaggccuccuaugaguug

SEQ ID NO: 40967 - RNA, 23 nt, Artificial Sequence
  Chemically synthesized
gaaguugucauuaccaagguggu

SEQ ID NO: 40968 - RNA, 23 nt, Artificial Sequence
  Chemically synthesized
acaaacuggucgccuaugggaua

SEQ ID NO: 40969 - RNA, 23 nt, Artificial Sequence
  Chemically synthesized
aaccauccacaucguggcgcauu

SEQ ID NO: 40970 - RNA, 23 nt, Artificial Sequence
  Chemically synthesized
uucuuaccggcugggaugaaaau

SEQ ID NO: 40971 - RNA, 23 nt, Artificial Sequence
  Chemically synthesized
acccaacauccagacacagguga

SEQ ID NO: 40972 - RNA, 23 nt, Artificial Sequence
  Chemically synthesized
agaacuccaccaggaauuccugu

SEQ ID NO: 40973 - RNA, 23 nt, Artificial Sequence
  Chemically synthesized
ugugaagagccugauuuucaucc

SEQ ID NO: 40974 - RNA, 23 nt, Artificial Sequence
  Chemically synthesized
gugaagagccugauuuucauccc

SEQ ID NO: 40975 - RNA, 23 nt, Artificial Sequence
  Chemically synthesized
ugaagagccugauuuucauccca

SEQ ID NO: 40976 - RNA, 23 nt, Artificial Sequence
  Chemically synthesized
gaagagccugauuuucaucccag

SEQ ID NO: 40977 - RNA, 23 nt, Artificial Sequence
  Chemically synthesized
aagagccugauuuucaucccagc

SEQ ID NO: 40978 - RNA, 23 nt, Artificial Sequence
  Chemically synthesized
cagauaaaaauuuauucccagcc

SEQ ID NO: 40979 - RNA, 23 nt, Artificial Sequence
  Chemically synthesized
agauaaaaauuuauucccagcca

SEQ ID NO: 40980 - RNA, 23 nt, Artificial Sequence
  Chemically synthesized
gauaaaaauuuauucccagccau

SEQ ID NO: 40981 - RNA, 23 nt, Artificial Sequence
  Chemically synthesized
auaaaaauuuauucccagccaug

SEQ ID NO: 40982 - RNA, 23 nt, Artificial Sequence
  Chemically synthesized
uaaaaauuuauucccagccauga

SEQ ID NO: 40983 - RNA, 23 nt, Artificial Sequence
  Chemically synthesized
ccaaaauaacucguguguaaugg

SEQ ID NO: 40984 - RNA, 23 nt, Artificial Sequence
  Chemically synthesized
caaaauaacucguguguaaugga

SEQ ID NO: 40985 - RNA, 23 nt, Artificial Sequence
  Chemically synthesized
aaaauaacucguguguaauggaa

SEQ ID NO: 40986 - RNA, 23 nt, Artificial Sequence
  Chemically synthesized
aaauaacucguguguaauggaaa

SEQ ID NO: 40987 - RNA, 23 nt, Artificial Sequence
  Chemically synthesized
aauaacucguguguaauggaaag

SEQ ID NO: 40988 - RNA, 23 nt, Artificial Sequence
  Chemically synthesized
gcacaucuuuugaaguguccucg

SEQ ID NO: 40989 - RNA, 23 nt, Artificial Sequence
  Chemically synthesized
cacaucuuuugaaguguccucga

SEQ ID NO: 40990 - RNA, 23 nt, Artificial Sequence
  Chemically synthesized
acaucuuuugaaguguccucgag

SEQ ID NO: 40991 - RNA, 23 nt, Artificial Sequence
  Chemically synthesized
caucuuuugaaguguccucgaga

SEQ ID NO: 40992 - RNA, 23 nt, Artificial Sequence
  Chemically synthesized
aucuuuugaaguguccucgagag

SEQ ID NO: 40993 - RNA, 23 nt, Artificial Sequence
  Chemically synthesized
cuugaacucauuguuccaguugg

SEQ ID NO: 40994 - RNA, 23 nt, Artificial Sequence
  Chemically synthesized
uugaacucauuguuccaguuggg

SEQ ID NO: 40995 - RNA, 23 nt, Artificial Sequence
  Chemically synthesized
ugaacucauuguuccaguugggc

SEQ ID NO: 40996 - RNA, 23 nt, Artificial Sequence
  Chemically synthesized
gaacucauuguuccaguugggcc

SEQ ID NO: 40997 - RNA, 23 nt, Artificial Sequence
  Chemically synthesized
aacucauuguuccaguugggccu

SEQ ID NO: 40998 - RNA, 23 nt, Artificial Sequence
  Chemically synthesized
aggguuccuugccagaaaauuga

SEQ ID NO: 40999 - RNA, 23 nt, Artificial Sequence
  Chemically synthesized
ggguuccuugccagaaaauugag

SEQ ID NO: 41000 - RNA, 23 nt, Artificial Sequence
  Chemically synthesized
gguuccuugccagaaaauugagg

SEQ ID NO: 41001 - RNA, 23 nt, Artificial Sequence
  Chemically synthesized
guuccuugccagaaaauugaggc

SEQ ID NO: 41002 - RNA, 23 nt, Artificial Sequence
  Chemically synthesized
uuccuugccagaaaauugaggca

SEQ ID NO: 41003 - RNA, 23 nt, Artificial Sequence
  Chemically synthesized
aaaaauuuauucccagccaugag

SEQ ID NO: 41004 - RNA, 23 nt, Artificial Sequence
  Chemically synthesized
guaauagaaaugaacaccucugg

SEQ ID NO: 41005 - RNA, 23 nt, Artificial Sequence
  Chemically synthesized
uaauagaaaugaacaccucuggg

SEQ ID NO: 41006 - RNA, 23 nt, Artificial Sequence
  Chemically synthesized
aauagaaaugaacaccucugggg

SEQ ID NO: 41007 - RNA, 23 nt, Artificial Sequence
  Chemically synthesized
auagaaaugaacaccucuggggu

SEQ ID NO: 41008 - RNA, 23 nt, Artificial Sequence
  Chemically synthesized
uagaaaugaacaccucugggguc

SEQ ID NO: 41009 - RNA, 23 nt, Artificial Sequence
  Chemically synthesized
agagccugauuuucaucccagcc

SEQ ID NO: 41010 - RNA, 23 nt, Artificial Sequence
  Chemically synthesized
ggucaugaucaagacuaaagcca

SEQ ID NO: 41011 - RNA, 23 nt, Artificial Sequence
  Chemically synthesized
gucaugaucaagacuaaagccag

SEQ ID NO: 41012 - RNA, 23 nt, Artificial Sequence
  Chemically synthesized
ucaugaucaagacuaaagccaga

SEQ ID NO: 41013 - RNA, 23 nt, Artificial Sequence
  Chemically synthesized
caugaucaagacuaaagccagag

SEQ ID NO: 41014 - RNA, 23 nt, Artificial Sequence
  Chemically synthesized
augaucaagacuaaagccagaga

SEQ ID NO: 41015 - RNA, 23 nt, Artificial Sequence
  Chemically synthesized
gagguuuuugucuaauugccucc

SEQ ID NO: 41016 - RNA, 23 nt, Artificial Sequence
  Chemically synthesized
agguuuuugucuaauugccuccu

SEQ ID NO: 41017 - RNA, 23 nt, Artificial Sequence
  Chemically synthesized
gguuuuugucuaauugccuccuc

SEQ ID NO: 41018 - RNA, 23 nt, Artificial Sequence
  Chemically synthesized
guuuuugucuaauugccuccucc

SEQ ID NO: 41019 - RNA, 23 nt, Artificial Sequence
  Chemically synthesized
uuuuugucuaauugccuccucca

SEQ ID NO: 41020 - RNA, 23 nt, Artificial Sequence
  Chemically synthesized
aguguugaacccaaaauaacucg

SEQ ID NO: 41021 - RNA, 23 nt, Artificial Sequence
  Chemically synthesized
guguugaacccaaaauaacucgu

SEQ ID NO: 41022 - RNA, 23 nt, Artificial Sequence
  Chemically synthesized
uguugaacccaaaauaacucgug

SEQ ID NO: 41023 - RNA, 23 nt, Artificial Sequence
  Chemically synthesized
guugaacccaaaauaacucgugu

SEQ ID NO: 41024 - RNA, 23 nt, Artificial Sequence
  Chemically synthesized
uugaacccaaaauaacucgugug

SEQ ID NO: 41025 - RNA, 23 nt, Artificial Sequence
  Chemically synthesized
uuguuguaauagaaaugaacacc

SEQ ID NO: 41026 - RNA, 23 nt, Artificial Sequence
  Chemically synthesized
uguuguaauagaaaugaacaccu

SEQ ID NO: 41027 - RNA, 23 nt, Artificial Sequence
  Chemically synthesized
guuguaauagaaaugaacaccuc

SEQ ID NO: 41028 - RNA, 23 nt, Artificial Sequence
  Chemically synthesized
uuguaauagaaaugaacaccucu

SEQ ID NO: 41029 - RNA, 23 nt, Artificial Sequence
  Chemically synthesized
uguaauagaaaugaacaccucug

SEQ ID NO: 41030 - RNA, 23 nt, Artificial Sequence
  Chemically synthesized
gaagaacacgccaauacugcugc

SEQ ID NO: 41031 - RNA, 23 nt, Artificial Sequence
  Chemically synthesized
aagaacacgccaauacugcugcu

SEQ ID NO: 41032 - RNA, 23 nt, Artificial Sequence
  Chemically synthesized
agaacacgccaauacugcugcug

SEQ ID NO: 41033 - RNA, 23 nt, Artificial Sequence
  Chemically synthesized
gaacacgccaauacugcugcugg

SEQ ID NO: 41034 - RNA, 23 nt, Artificial Sequence
  Chemically synthesized
aacacgccaauacugcugcuggg

SEQ ID NO: 41035 - RNA, 23 nt, Artificial Sequence
  Chemically synthesized
aagcuaugugaagagccugauuu

SEQ ID NO: 41036 - RNA, 23 nt, Artificial Sequence
  Chemically synthesized
agcuaugugaagagccugauuuu

SEQ ID NO: 41037 - RNA, 23 nt, Artificial Sequence
  Chemically synthesized
gcuaugugaagagccugauuuuc

SEQ ID NO: 41038 - RNA, 23 nt, Artificial Sequence
  Chemically synthesized
cuaugugaagagccugauuuuca

SEQ ID NO: 41039 - RNA, 23 nt, Artificial Sequence
  Chemically synthesized
uaugugaagagccugauuuucau

SEQ ID NO: 41040 - RNA, 23 nt, Artificial Sequence
  Chemically synthesized
ggcaaucugcuugaacucauugu

SEQ ID NO: 41041 - RNA, 23 nt, Artificial Sequence
  Chemically synthesized
gcaaucugcuugaacucauuguu

SEQ ID NO: 41042 - RNA, 23 nt, Artificial Sequence
  Chemically synthesized
caaucugcuugaacucauuguuc

SEQ ID NO: 41043 - RNA, 23 nt, Artificial Sequence
  Chemically synthesized
aaucugcuugaacucauuguucc

SEQ ID NO: 41044 - RNA, 23 nt, Artificial Sequence
  Chemically synthesized
aucugcuugaacucauuguucca

SEQ ID NO: 41045 - RNA, 23 nt, Artificial Sequence
  Chemically synthesized
uggguagugaaauacaucuguca

SEQ ID NO: 41046 - RNA, 23 nt, Artificial Sequence
  Chemically synthesized
ggguagugaaauacaucugucag

SEQ ID NO: 41047 - RNA, 23 nt, Artificial Sequence
  Chemically synthesized
gguagugaaauacaucugucagg

SEQ ID NO: 41048 - RNA, 23 nt, Artificial Sequence
  Chemically synthesized
guagugaaauacaucugucaggg

SEQ ID NO: 41049 - RNA, 23 nt, Artificial Sequence
  Chemically synthesized
uagugaaauacaucugucagggc

SEQ ID NO: 41050 - RNA, 23 nt, Artificial Sequence
  Chemically synthesized
uaauuauucuuucacaugcauac

SEQ ID NO: 41051 - RNA, 23 nt, Artificial Sequence
  Chemically synthesized
aauuauucuuucacaugcauaca

SEQ ID NO: 41052 - RNA, 23 nt, Artificial Sequence
  Chemically synthesized
auuauucuuucacaugcauacaa

SEQ ID NO: 41053 - RNA, 23 nt, Artificial Sequence
  Chemically synthesized
uuauucuuucacaugcauacaag

SEQ ID NO: 41054 - RNA, 23 nt, Artificial Sequence
  Chemically synthesized
uauucuuucacaugcauacaaga

SEQ ID NO: 41055 - RNA, 23 nt, Artificial Sequence
  Chemically synthesized
uagcaugcaguuaaaauucaggc

SEQ ID NO: 41056 - RNA, 23 nt, Artificial Sequence
  Chemically synthesized
agcaugcaguuaaaauucaggca

SEQ ID NO: 41057 - RNA, 23 nt, Artificial Sequence
  Chemically synthesized
gcaugcaguuaaaauucaggcac

SEQ ID NO: 41058 - RNA, 23 nt, Artificial Sequence
  Chemically synthesized
caugcaguuaaaauucaggcaca

SEQ ID NO: 41059 - RNA, 23 nt, Artificial Sequence
  Chemically synthesized
augcaguuaaaauucaggcacag

SEQ ID NO: 41060 - RNA, 23 nt, Artificial Sequence
  Chemically synthesized
agcuaaggaaguaugguauagug

SEQ ID NO: 41061 - RNA, 23 nt, Artificial Sequence
  Chemically synthesized
gcuaaggaaguaugguauagugu

SEQ ID NO: 41062 - RNA, 23 nt, Artificial Sequence
  Chemically synthesized
cuaaggaaguaugguauagugua

SEQ ID NO: 41063 - RNA, 23 nt, Artificial Sequence
  Chemically synthesized
uaaggaaguaugguauaguguac

SEQ ID NO: 41064 - RNA, 23 nt, Artificial Sequence
  Chemically synthesized
aaggaaguaugguauaguguacu

SEQ ID NO: 41065 - RNA, 23 nt, Artificial Sequence
  Chemically synthesized
cuguaaucacgucaguauuuucg

SEQ ID NO: 41066 - RNA, 23 nt, Artificial Sequence
  Chemically synthesized
uguaaucacgucaguauuuucgu

SEQ ID NO: 41067 - RNA, 23 nt, Artificial Sequence
  Chemically synthesized
guaaucacgucaguauuuucguc

SEQ ID NO: 41068 - RNA, 23 nt, Artificial Sequence
  Chemically synthesized
uaaucacgucaguauuuucgucc

SEQ ID NO: 41069 - RNA, 23 nt, Artificial Sequence
  Chemically synthesized
aaucacgucaguauuuucguccc

SEQ ID NO: 41070 - RNA, 23 nt, Artificial Sequence
  Chemically synthesized
aauauaugauaacucagaaagug

SEQ ID NO: 41071 - RNA, 23 nt, Artificial Sequence
  Chemically synthesized
auauaugauaacucagaaaguga

SEQ ID NO: 41072 - RNA, 23 nt, Artificial Sequence
  Chemically synthesized
uauaugauaacucagaaagugag

SEQ ID NO: 41073 - RNA, 23 nt, Artificial Sequence
  Chemically synthesized
auaugauaacucagaaagugagu

SEQ ID NO: 41074 - RNA, 23 nt, Artificial Sequence
  Chemically synthesized
uaugauaacucagaaagugaguu

SEQ ID NO: 41075 - RNA, 23 nt, Artificial Sequence
  Chemically synthesized
caccccaucaugauacuuguugc

SEQ ID NO: 41076 - RNA, 23 nt, Artificial Sequence
  Chemically synthesized
accccaucaugauacuuguugcu

SEQ ID NO: 41077 - RNA, 23 nt, Artificial Sequence
  Chemically synthesized
ccccaucaugauacuuguugcuc

SEQ ID NO: 41078 - RNA, 23 nt, Artificial Sequence
  Chemically synthesized
cccaucaugauacuuguugcucu

SEQ ID NO: 41079 - RNA, 23 nt, Artificial Sequence
  Chemically synthesized
ccaucaugauacuuguugcucuu

SEQ ID NO: 41080 - RNA, 23 nt, Artificial Sequence
  Chemically synthesized
cuuuuucaugugaaguuccagga

SEQ ID NO: 41081 - RNA, 23 nt, Artificial Sequence
  Chemically synthesized
uuuuucaugugaaguuccaggac

SEQ ID NO: 41082 - RNA, 23 nt, Artificial Sequence
  Chemically synthesized
uuuucaugugaaguuccaggacu

SEQ ID NO: 41083 - RNA, 23 nt, Artificial Sequence
  Chemically synthesized
uuucaugugaaguuccaggacuc

SEQ ID NO: 41084 - RNA, 23 nt, Artificial Sequence
  Chemically synthesized
uucaugugaaguuccaggacucc

SEQ ID NO: 41085 - RNA, 23 nt, Artificial Sequence
  Chemically synthesized
aucaugauacuuguugcucuucg

SEQ ID NO: 41086 - RNA, 23 nt, Artificial Sequence
  Chemically synthesized
ucaugauacuuguugcucuucgg

SEQ ID NO: 41087 - RNA, 23 nt, Artificial Sequence
  Chemically synthesized
caugauacuuguugcucuucggc

SEQ ID NO: 41088 - RNA, 23 nt, Artificial Sequence
  Chemically synthesized
augauacuuguugcucuucggcu

SEQ ID NO: 41089 - RNA, 23 nt, Artificial Sequence
  Chemically synthesized
ugauacuuguugcucuucggcug

SEQ ID NO: 41090 - RNA, 23 nt, Artificial Sequence
  Chemically synthesized
ggccaggcugagaaagaagacga

SEQ ID NO: 41091 - RNA, 23 nt, Artificial Sequence
  Chemically synthesized
gccaggcugagaaagaagacgau

SEQ ID NO: 41092 - RNA, 23 nt, Artificial Sequence
  Chemically synthesized
ccaggcugagaaagaagacgaug

SEQ ID NO: 41093 - RNA, 23 nt, Artificial Sequence
  Chemically synthesized
caggcugagaaagaagacgauga

SEQ ID NO: 41094 - RNA, 23 nt, Artificial Sequence
  Chemically synthesized
aggcugagaaagaagacgaugaa

SEQ ID NO: 41095 - RNA, 23 nt, Artificial Sequence
  Chemically synthesized
gagaaagaagacgaugaaaacau

SEQ ID NO: 41096 - RNA, 23 nt, Artificial Sequence
  Chemically synthesized
agaaagaagacgaugaaaacaug

SEQ ID NO: 41097 - RNA, 23 nt, Artificial Sequence
  Chemically synthesized
gaaagaagacgaugaaaacaugg

SEQ ID NO: 41098 - RNA, 23 nt, Artificial Sequence
  Chemically synthesized
aaagaagacgaugaaaacauggu

SEQ ID NO: 41099 - RNA, 23 nt, Artificial Sequence
  Chemically synthesized
aagaagacgaugaaaacauggug

SEQ ID NO: 41100 - RNA, 23 nt, Artificial Sequence
  Chemically synthesized
gaggucaugaucaagacuaaagc

SEQ ID NO: 41101 - RNA, 23 nt, Artificial Sequence
  Chemically synthesized
aggucaugaucaagacuaaagcc

SEQ ID NO: 41102 - RNA, 23 nt, Artificial Sequence
  Chemically synthesized
ugaucaagacuaaagccagagag

SEQ ID NO: 41103 - RNA, 23 nt, Artificial Sequence
  Chemically synthesized
gaucaagacuaaagccagagaga

SEQ ID NO: 41104 - RNA, 23 nt, Artificial Sequence
  Chemically synthesized
aucaagacuaaagccagagagau

SEQ ID NO: 41105 - RNA, 23 nt, Artificial Sequence
  Chemically synthesized
uauuguccuuagcaauucagugg

SEQ ID NO: 41106 - RNA, 23 nt, Artificial Sequence
  Chemically synthesized
auuguccuuagcaauucaguggu

SEQ ID NO: 41107 - RNA, 23 nt, Artificial Sequence
  Chemically synthesized
uuguccuuagcaauucagugguu

SEQ ID NO: 41108 - RNA, 23 nt, Artificial Sequence
  Chemically synthesized
uguccuuagcaauucagugguug

SEQ ID NO: 41109 - RNA, 23 nt, Artificial Sequence
  Chemically synthesized
guccuuagcaauucagugguugu

SEQ ID NO: 41110 - RNA, 23 nt, Artificial Sequence
  Chemically synthesized
agucuagaagcucuccuuguugu

SEQ ID NO: 41111 - RNA, 23 nt, Artificial Sequence
  Chemically synthesized
gucuagaagcucuccuuguugua

SEQ ID NO: 41112 - RNA, 23 nt, Artificial Sequence
  Chemically synthesized
ucuagaagcucuccuuguuguaa

SEQ ID NO: 41113 - RNA, 23 nt, Artificial Sequence
  Chemically synthesized
cuagaagcucuccuuguuguaau

SEQ ID NO: 41114 - RNA, 23 nt, Artificial Sequence
  Chemically synthesized
uagaagcucuccuuguuguaaua

SEQ ID NO: 41115 - RNA, 23 nt, Artificial Sequence
  Chemically synthesized
cagccaugagaguacuaauaugg

SEQ ID NO: 41116 - RNA, 23 nt, Artificial Sequence
  Chemically synthesized
agccaugagaguacuaauauggu

SEQ ID NO: 41117 - RNA, 23 nt, Artificial Sequence
  Chemically synthesized
gccaugagaguacuaauauggug

SEQ ID NO: 41118 - RNA, 23 nt, Artificial Sequence
  Chemically synthesized
ccaugagaguacuaauauggugg

SEQ ID NO: 41119 - RNA, 23 nt, Artificial Sequence
  Chemically synthesized
caugagaguacuaauauggugga

SEQ ID NO: 41120 - RNA, 23 nt, Artificial Sequence
  Chemically synthesized
uaccauauagauuucagaagagc

SEQ ID NO: 41121 - RNA, 23 nt, Artificial Sequence
  Chemically synthesized
accauauagauuucagaagagca

SEQ ID NO: 41122 - RNA, 23 nt, Artificial Sequence
  Chemically synthesized
ccauauagauuucagaagagcag

SEQ ID NO: 41123 - RNA, 23 nt, Artificial Sequence
  Chemically synthesized
cauauagauuucagaagagcagc

SEQ ID NO: 41124 - RNA, 23 nt, Artificial Sequence
  Chemically synthesized
auauagauuucagaagagcagcg

SEQ ID NO: 41125 - RNA, 23 nt, Artificial Sequence
  Chemically synthesized
uauagauuucagaagagcagcga

SEQ ID NO: 41126 - RNA, 23 nt, Artificial Sequence
  Chemically synthesized
auagauuucagaagagcagcgaa

SEQ ID NO: 41127 - RNA, 23 nt, Artificial Sequence
  Chemically synthesized
uagauuucagaagagcagcgaag

SEQ ID NO: 41128 - RNA, 23 nt, Artificial Sequence
  Chemically synthesized
agauuucagaagagcagcgaagg

SEQ ID NO: 41129 - RNA, 23 nt, Artificial Sequence
  Chemically synthesized
uguguaccagaacaacucauagg

SEQ ID NO: 41130 - RNA, 23 nt, Artificial Sequence
  Chemically synthesized
guguaccagaacaacucauagga

SEQ ID NO: 41131 - RNA, 23 nt, Artificial Sequence
  Chemically synthesized
uguaccagaacaacucauaggag

SEQ ID NO: 41132 - RNA, 23 nt, Artificial Sequence
  Chemically synthesized
guaccagaacaacucauaggagg

SEQ ID NO: 41133 - RNA, 23 nt, Artificial Sequence
  Chemically synthesized
uaccagaacaacucauaggaggc

SEQ ID NO: 41134 - RNA, 23 nt, Artificial Sequence
  Chemically synthesized
gauguugggucguuaguaagggc

SEQ ID NO: 41135 - RNA, 23 nt, Artificial Sequence
  Chemically synthesized
auguugggucguuaguaagggcu

SEQ ID NO: 41136 - RNA, 23 nt, Artificial Sequence
  Chemically synthesized
uguugggucguuaguaagggcuu

SEQ ID NO: 41137 - RNA, 23 nt, Artificial Sequence
  Chemically synthesized
guugggucguuaguaagggcuuc

SEQ ID NO: 41138 - RNA, 23 nt, Artificial Sequence
  Chemically synthesized
uugggucguuaguaagggcuucc

SEQ ID NO: 41139 - RNA, 23 nt, Artificial Sequence
  Chemically synthesized
auuuauaagcuaaggaaguaugg

SEQ ID NO: 41140 - RNA, 23 nt, Artificial Sequence
  Chemically synthesized
uuuauaagcuaaggaaguauggu

SEQ ID NO: 41141 - RNA, 23 nt, Artificial Sequence
  Chemically synthesized
uuauaagcuaaggaaguauggua

SEQ ID NO: 41142 - RNA, 23 nt, Artificial Sequence
  Chemically synthesized
uauaagcuaaggaaguaugguau

SEQ ID NO: 41143 - RNA, 23 nt, Artificial Sequence
  Chemically synthesized
auaagcuaaggaaguaugguaua

SEQ ID NO: 41144 - RNA, 23 nt, Artificial Sequence
  Chemically synthesized
gagccugauuuucaucccagccg

SEQ ID NO: 41145 - RNA, 23 nt, Artificial Sequence
  Chemically synthesized
agccugauuuucaucccagccgg

SEQ ID NO: 41146 - RNA, 23 nt, Artificial Sequence
  Chemically synthesized
gccugauuuucaucccagccggu

SEQ ID NO: 41147 - RNA, 23 nt, Artificial Sequence
  Chemically synthesized
ccugauuuucaucccagccggua

SEQ ID NO: 41148 - RNA, 23 nt, Artificial Sequence
  Chemically synthesized
cugauuuucaucccagccgguaa

SEQ ID NO: 41149 - RNA, 23 nt, Artificial Sequence
  Chemically synthesized
agcaaaccacucaaaagcucuug

SEQ ID NO: 41150 - RNA, 23 nt, Artificial Sequence
  Chemically synthesized
gcaaaccacucaaaagcucuugc

SEQ ID NO: 41151 - RNA, 23 nt, Artificial Sequence
  Chemically synthesized
caaaccacucaaaagcucuugca

SEQ ID NO: 41152 - RNA, 23 nt, Artificial Sequence
  Chemically synthesized
aaaccacucaaaagcucuugcau

SEQ ID NO: 41153 - RNA, 23 nt, Artificial Sequence
  Chemically synthesized
aaccacucaaaagcucuugcauc

SEQ ID NO: 41154 - RNA, 23 nt, Artificial Sequence
  Chemically synthesized
gauuucagaagagcagcgaaggg

SEQ ID NO: 41155 - RNA, 23 nt, Artificial Sequence
  Chemically synthesized
auuucagaagagcagcgaaggga

SEQ ID NO: 41156 - RNA, 23 nt, Artificial Sequence
  Chemically synthesized
uuucagaagagcagcgaagggag

SEQ ID NO: 41157 - RNA, 23 nt, Artificial Sequence
  Chemically synthesized
agugaaauacaucugucagggca

SEQ ID NO: 41158 - RNA, 23 nt, Artificial Sequence
  Chemically synthesized
gugaaauacaucugucagggcag

SEQ ID NO: 41159 - RNA, 23 nt, Artificial Sequence
  Chemically synthesized
ugaaauacaucugucagggcagu

SEQ ID NO: 41160 - RNA, 23 nt, Artificial Sequence
  Chemically synthesized
gcaccccaucaugauacuuguug

SEQ ID NO: 41161 - RNA, 23 nt, Artificial Sequence
  Chemically synthesized
caucaugauacuuguugcucuuc

SEQ ID NO: 41162 - RNA, 23 nt, Artificial Sequence
  Chemically synthesized
gauacuuguugcucuucggcugu

SEQ ID NO: 41163 - RNA, 23 nt, Artificial Sequence
  Chemically synthesized
auacuuguugcucuucggcuguc

SEQ ID NO: 41164 - RNA, 23 nt, Artificial Sequence
  Chemically synthesized
uucuuucacaugcauacaagacc

SEQ ID NO: 41165 - RNA, 23 nt, Artificial Sequence
  Chemically synthesized
ucuuucacaugcauacaagacca

SEQ ID NO: 41166 - RNA, 23 nt, Artificial Sequence
  Chemically synthesized
cuuucacaugcauacaagaccac

SEQ ID NO: 41167 - RNA, 23 nt, Artificial Sequence
  Chemically synthesized
uuucacaugcauacaagaccaca

SEQ ID NO: 41168 - RNA, 23 nt, Artificial Sequence
  Chemically synthesized
uucacaugcauacaagaccacag

SEQ ID NO: 41169 - RNA, 23 nt, Artificial Sequence
  Chemically synthesized
ggcugagaaagaagacgaugaaa

SEQ ID NO: 41170 - RNA, 23 nt, Artificial Sequence
  Chemically synthesized
gcugagaaagaagacgaugaaaa

SEQ ID NO: 41171 - RNA, 23 nt, Artificial Sequence
  Chemically synthesized
cugagaaagaagacgaugaaaac

SEQ ID NO: 41172 - RNA, 23 nt, Artificial Sequence
  Chemically synthesized
uuuugucuaauugccuccuccac

SEQ ID NO: 41173 - RNA, 23 nt, Artificial Sequence
  Chemically synthesized
uuugucuaauugccuccuccacg

SEQ ID NO: 41174 - RNA, 23 nt, Artificial Sequence
  Chemically synthesized
uugucuaauugccuccuccacgg

SEQ ID NO: 41175 - RNA, 23 nt, Artificial Sequence
  Chemically synthesized
caguuaaaauucaggcacagugc

SEQ ID NO: 41176 - RNA, 23 nt, Artificial Sequence
  Chemically synthesized
aguuaaaauucaggcacagugcg

SEQ ID NO: 41177 - RNA, 23 nt, Artificial Sequence
  Chemically synthesized
guuaaaauucaggcacagugcgg

SEQ ID NO: 41178 - RNA, 23 nt, Artificial Sequence
  Chemically synthesized
uuaaaauucaggcacagugcgga

SEQ ID NO: 41179 - RNA, 23 nt, Artificial Sequence
  Chemically synthesized
uaaaauucaggcacagugcggau

SEQ ID NO: 41180 - RNA, 23 nt, Artificial Sequence
  Chemically synthesized
uaagcuaaggaaguaugguauag

SEQ ID NO: 41181 - RNA, 23 nt, Artificial Sequence
  Chemically synthesized
aagcuaaggaaguaugguauagu

SEQ ID NO: 41182 - RNA, 23 nt, Artificial Sequence
  Chemically synthesized
uuaauuauuauucaccaguuccc

SEQ ID NO: 41183 - RNA, 23 nt, Artificial Sequence
  Chemically synthesized
uaauuauuauucaccaguuccca

SEQ ID NO: 41184 - RNA, 23 nt, Artificial Sequence
  Chemically synthesized
aauuauuauucaccaguucccaa

SEQ ID NO: 41185 - RNA, 23 nt, Artificial Sequence
  Chemically synthesized
auuauuauucaccaguucccaac

SEQ ID NO: 41186 - RNA, 23 nt, Artificial Sequence
  Chemically synthesized
uuauuauucaccaguucccaacu

SEQ ID NO: 41187 - RNA, 23 nt, Artificial Sequence
  Chemically synthesized
acagaagaacacgccaauacugc

SEQ ID NO: 41188 - RNA, 23 nt, Artificial Sequence
  Chemically synthesized
cagaagaacacgccaauacugcu

SEQ ID NO: 41189 - RNA, 23 nt, Artificial Sequence
  Chemically synthesized
agaagaacacgccaauacugcug

SEQ ID NO: 41190 - RNA, 23 nt, Artificial Sequence
  Chemically synthesized
aggcaaucugcuugaacucauug

SEQ ID NO: 41191 - RNA, 23 nt, Artificial Sequence
  Chemically synthesized
ugcuuuaagccuguaaucacguc

SEQ ID NO: 41192 - RNA, 23 nt, Artificial Sequence
  Chemically synthesized
gcuuuaagccuguaaucacguca

SEQ ID NO: 41193 - RNA, 23 nt, Artificial Sequence
  Chemically synthesized
cuuuaagccuguaaucacgucag

SEQ ID NO: 41194 - RNA, 23 nt, Artificial Sequence
  Chemically synthesized
uuuaagccuguaaucacgucagu

SEQ ID NO: 41195 - RNA, 23 nt, Artificial Sequence
  Chemically synthesized
uuaagccuguaaucacgucagua

SEQ ID NO: 41196 - RNA, 23 nt, Artificial Sequence
  Chemically synthesized
uaagccuguaaucacgucaguau

SEQ ID NO: 41197 - RNA, 23 nt, Artificial Sequence
  Chemically synthesized
ccaguguaaagcuaugugaagag

SEQ ID NO: 41198 - RNA, 23 nt, Artificial Sequence
  Chemically synthesized
caguguaaagcuaugugaagagc

SEQ ID NO: 41199 - RNA, 23 nt, Artificial Sequence
  Chemically synthesized
aguguaaagcuaugugaagagcc

SEQ ID NO: 41200 - RNA, 23 nt, Artificial Sequence
  Chemically synthesized
guguaaagcuaugugaagagccu

SEQ ID NO: 41201 - RNA, 23 nt, Artificial Sequence
  Chemically synthesized
uguaaagcuaugugaagagccug

SEQ ID NO: 41202 - RNA, 23 nt, Artificial Sequence
  Chemically synthesized
ugauuuucaucccagccgguaag

SEQ ID NO: 41203 - RNA, 23 nt, Artificial Sequence
  Chemically synthesized
augauaacucagaaagugaguuu

SEQ ID NO: 41204 - RNA, 23 nt, Artificial Sequence
  Chemically synthesized
ccaguagaaauacaccuugcuca

SEQ ID NO: 41205 - RNA, 23 nt, Artificial Sequence
  Chemically synthesized
caguagaaauacaccuugcucag

SEQ ID NO: 41206 - RNA, 23 nt, Artificial Sequence
  Chemically synthesized
aguagaaauacaccuugcucagc

SEQ ID NO: 41207 - RNA, 23 nt, Artificial Sequence
  Chemically synthesized
guagaaauacaccuugcucagcu

SEQ ID NO: 41208 - RNA, 23 nt, Artificial Sequence
  Chemically synthesized
uagaaauacaccuugcucagcuu

SEQ ID NO: 41209 - RNA, 23 nt, Artificial Sequence
  Chemically synthesized
cucacugcauuuguaccauauag

SEQ ID NO: 41210 - RNA, 23 nt, Artificial Sequence
  Chemically synthesized
ucacugcauuuguaccauauaga

SEQ ID NO: 41211 - RNA, 23 nt, Artificial Sequence
  Chemically synthesized
cacugcauuuguaccauauagau

SEQ ID NO: 41212 - RNA, 23 nt, Artificial Sequence
  Chemically synthesized
acugcauuuguaccauauagauu

SEQ ID NO: 41213 - RNA, 23 nt, Artificial Sequence
  Chemically synthesized
cugcauuuguaccauauagauuu

SEQ ID NO: 41214 - RNA, 23 nt, Artificial Sequence
  Chemically synthesized
uucagaagagcagcgaagggagu

SEQ ID NO: 41215 - RNA, 23 nt, Artificial Sequence
  Chemically synthesized
cacgcugaaaaagucuuccuggg

SEQ ID NO: 41216 - RNA, 23 nt, Artificial Sequence
  Chemically synthesized
acgcugaaaaagucuuccugggg

SEQ ID NO: 41217 - RNA, 23 nt, Artificial Sequence
  Chemically synthesized
cgcugaaaaagucuuccuggggg

SEQ ID NO: 41218 - RNA, 23 nt, Artificial Sequence
  Chemically synthesized
gcugaaaaagucuuccugggggg

SEQ ID NO: 41219 - RNA, 23 nt, Artificial Sequence
  Chemically synthesized
cugaaaaagucuuccuggggggc

SEQ ID NO: 41220 - RNA, 23 nt, Artificial Sequence
  Chemically synthesized
gccuaaaauccauuuccaagccg

SEQ ID NO: 41221 - RNA, 23 nt, Artificial Sequence
  Chemically synthesized
ccuaaaauccauuuccaagccga

SEQ ID NO: 41222 - RNA, 23 nt, Artificial Sequence
  Chemically synthesized
cuaaaauccauuuccaagccgag

SEQ ID NO: 41223 - RNA, 23 nt, Artificial Sequence
  Chemically synthesized
uaaaauccauuuccaagccgagg

SEQ ID NO: 41224 - RNA, 23 nt, Artificial Sequence
  Chemically synthesized
aaaauccauuuccaagccgaggg

SEQ ID NO: 41225 - RNA, 23 nt, Artificial Sequence
  Chemically synthesized
agacuaaagccagagagaucacc

SEQ ID NO: 41226 - RNA, 23 nt, Artificial Sequence
  Chemically synthesized
gacuaaagccagagagaucacca

SEQ ID NO: 41227 - RNA, 23 nt, Artificial Sequence
  Chemically synthesized
acuaaagccagagagaucaccag

SEQ ID NO: 41228 - RNA, 23 nt, Artificial Sequence
  Chemically synthesized
cuaaagccagagagaucaccaga

SEQ ID NO: 41229 - RNA, 23 nt, Artificial Sequence
  Chemically synthesized
uaaagccagagagaucaccagac

SEQ ID NO: 41230 - RNA, 23 nt, Artificial Sequence
  Chemically synthesized
agcaauucagugguuguguuugu

SEQ ID NO: 41231 - RNA, 23 nt, Artificial Sequence
  Chemically synthesized
gcaauucagugguuguguuugug

SEQ ID NO: 41232 - RNA, 23 nt, Artificial Sequence
  Chemically synthesized
caauucagugguuguguuugugg

SEQ ID NO: 41233 - RNA, 23 nt, Artificial Sequence
  Chemically synthesized
aauucagugguuguguuuguggg

SEQ ID NO: 41234 - RNA, 23 nt, Artificial Sequence
  Chemically synthesized
auucagugguuguguuugugggg

SEQ ID NO: 41235 - RNA, 23 nt, Artificial Sequence
  Chemically synthesized
agcguuccagguugaagaaaugc

SEQ ID NO: 41236 - RNA, 23 nt, Artificial Sequence
  Chemically synthesized
gcguuccagguugaagaaaugcg

SEQ ID NO: 41237 - RNA, 23 nt, Artificial Sequence
  Chemically synthesized
cguuccagguugaagaaaugcgc

SEQ ID NO: 41238 - RNA, 23 nt, Artificial Sequence
  Chemically synthesized
guuccagguugaagaaaugcgcc

SEQ ID NO: 41239 - RNA, 23 nt, Artificial Sequence
  Chemically synthesized
uuccagguugaagaaaugcgcca

SEQ ID NO: 41240 - RNA, 23 nt, Artificial Sequence
  Chemically synthesized
gaccaguuugugaaaucugaggu

SEQ ID NO: 41241 - RNA, 23 nt, Artificial Sequence
  Chemically synthesized
accaguuugugaaaucugagguu

SEQ ID NO: 41242 - RNA, 23 nt, Artificial Sequence
  Chemically synthesized
ccaguuugugaaaucugagguuu

SEQ ID NO: 41243 - RNA, 23 nt, Artificial Sequence
  Chemically synthesized
caguuugugaaaucugagguuuu

SEQ ID NO: 41244 - RNA, 23 nt, Artificial Sequence
  Chemically synthesized
aguuugugaaaucugagguuuuu

SEQ ID NO: 41245 - RNA, 23 nt, Artificial Sequence
  Chemically synthesized
ugugaaaucugagguuuuugucu

SEQ ID NO: 41246 - RNA, 23 nt, Artificial Sequence
  Chemically synthesized
gugaaaucugagguuuuugucua

SEQ ID NO: 41247 - RNA, 23 nt, Artificial Sequence
  Chemically synthesized
ugaaaucugagguuuuugucuaa

SEQ ID NO: 41248 - RNA, 23 nt, Artificial Sequence
  Chemically synthesized
gaaaucugagguuuuugucuaau

SEQ ID NO: 41249 - RNA, 23 nt, Artificial Sequence
  Chemically synthesized
aaaucugagguuuuugucuaauu

SEQ ID NO: 41250 - RNA, 23 nt, Artificial Sequence
  Chemically synthesized
gcaaauacuuguuccucuuauga

SEQ ID NO: 41251 - RNA, 23 nt, Artificial Sequence
  Chemically synthesized
caaauacuuguuccucuuaugaa

SEQ ID NO: 41252 - RNA, 23 nt, Artificial Sequence
  Chemically synthesized
aaauacuuguuccucuuaugaau

SEQ ID NO: 41253 - RNA, 23 nt, Artificial Sequence
  Chemically synthesized
aauacuuguuccucuuaugaaug

SEQ ID NO: 41254 - RNA, 23 nt, Artificial Sequence
  Chemically synthesized
auacuuguuccucuuaugaauga

SEQ ID NO: 41255 - RNA, 23 nt, Artificial Sequence
  Chemically synthesized
cagguauuagaauuagcaugcag

SEQ ID NO: 41256 - RNA, 23 nt, Artificial Sequence
  Chemically synthesized
agguauuagaauuagcaugcagu

SEQ ID NO: 41257 - RNA, 23 nt, Artificial Sequence
  Chemically synthesized
gguauuagaauuagcaugcaguu

SEQ ID NO: 41258 - RNA, 23 nt, Artificial Sequence
  Chemically synthesized
guauuagaauuagcaugcaguua

SEQ ID NO: 41259 - RNA, 23 nt, Artificial Sequence
  Chemically synthesized
uauuagaauuagcaugcaguuaa

SEQ ID NO: 41260 - RNA, 23 nt, Artificial Sequence
  Chemically synthesized
ggauguugggucguuaguaaggg

SEQ ID NO: 41261 - RNA, 23 nt, Artificial Sequence
  Chemically synthesized
ugaacccaaaauaacucgugugu

SEQ ID NO: 41262 - RNA, 23 nt, Artificial Sequence
  Chemically synthesized
gaacccaaaauaacucgugugua

SEQ ID NO: 41263 - RNA, 23 nt, Artificial Sequence
  Chemically synthesized
aacccaaaauaacucguguguaa

SEQ ID NO: 41264 - RNA, 23 nt, Artificial Sequence
  Chemically synthesized
aaaauuuauucccagccaugaga

SEQ ID NO: 41265 - RNA, 23 nt, Artificial Sequence
  Chemically synthesized
uugauugaaaacacaaugccugg

SEQ ID NO: 41266 - RNA, 23 nt, Artificial Sequence
  Chemically synthesized
ugauugaaaacacaaugccugga

SEQ ID NO: 41267 - RNA, 23 nt, Artificial Sequence
  Chemically synthesized
gauugaaaacacaaugccuggac

SEQ ID NO: 41268 - RNA, 23 nt, Artificial Sequence
  Chemically synthesized
auugaaaacacaaugccuggacu

SEQ ID NO: 41269 - RNA, 23 nt, Artificial Sequence
  Chemically synthesized
uugaaaacacaaugccuggacuu

SEQ ID NO: 41270 - RNA, 23 nt, Artificial Sequence
  Chemically synthesized
cuccaaagucuagaagcucuccu

SEQ ID NO: 41271 - RNA, 23 nt, Artificial Sequence
  Chemically synthesized
uccaaagucuagaagcucuccuu

SEQ ID NO: 41272 - RNA, 23 nt, Artificial Sequence
  Chemically synthesized
ccaaagucuagaagcucuccuug

SEQ ID NO: 41273 - RNA, 23 nt, Artificial Sequence
  Chemically synthesized
caaagucuagaagcucuccuugu

SEQ ID NO: 41274 - RNA, 23 nt, Artificial Sequence
  Chemically synthesized
aaagucuagaagcucuccuuguu

SEQ ID NO: 41275 - RNA, 23 nt, Artificial Sequence
  Chemically synthesized
ggcacaucuuuugaaguguccuc

SEQ ID NO: 41276 - RNA, 23 nt, Artificial Sequence
  Chemically synthesized
ucugcuuuaagccuguaaucacg

SEQ ID NO: 41277 - RNA, 23 nt, Artificial Sequence
  Chemically synthesized
cugcuuuaagccuguaaucacgu

SEQ ID NO: 41278 - RNA, 23 nt, Artificial Sequence
  Chemically synthesized
accacucaaaagcucuugcaucc

SEQ ID NO: 41279 - RNA, 23 nt, Artificial Sequence
  Chemically synthesized
ggagagacccucauucaaaaucc

SEQ ID NO: 41280 - RNA, 23 nt, Artificial Sequence
  Chemically synthesized
gagagacccucauucaaaaucca

SEQ ID NO: 41281 - RNA, 23 nt, Artificial Sequence
  Chemically synthesized
agagacccucauucaaaauccag

SEQ ID NO: 41282 - RNA, 23 nt, Artificial Sequence
  Chemically synthesized
gagacccucauucaaaauccagc

SEQ ID NO: 41283 - RNA, 23 nt, Artificial Sequence
  Chemically synthesized
agacccucauucaaaauccagca

SEQ ID NO: 41284 - RNA, 23 nt, Artificial Sequence
  Chemically synthesized
agaaauacaccuugcucagcuuc

SEQ ID NO: 41285 - RNA, 23 nt, Artificial Sequence
  Chemically synthesized
gaaauacaccuugcucagcuuca

SEQ ID NO: 41286 - RNA, 23 nt, Artificial Sequence
  Chemically synthesized
aaauacaccuugcucagcuucag

SEQ ID NO: 41287 - RNA, 23 nt, Artificial Sequence
  Chemically synthesized
caacuucuuguugaaaucgccag

SEQ ID NO: 41288 - RNA, 23 nt, Artificial Sequence
  Chemically synthesized
aacuucuuguugaaaucgccaga

SEQ ID NO: 41289 - RNA, 23 nt, Artificial Sequence
  Chemically synthesized
acuucuuguugaaaucgccagaa

SEQ ID NO: 41290 - RNA, 23 nt, Artificial Sequence
  Chemically synthesized
cuucuuguugaaaucgccagaac

SEQ ID NO: 41291 - RNA, 23 nt, Artificial Sequence
  Chemically synthesized
uucuuguugaaaucgccagaacc

SEQ ID NO: 41292 - RNA, 23 nt, Artificial Sequence
  Chemically synthesized
ggguuuggccucgaacaauccga

SEQ ID NO: 41293 - RNA, 23 nt, Artificial Sequence
  Chemically synthesized
gguuuggccucgaacaauccgac

SEQ ID NO: 41294 - RNA, 23 nt, Artificial Sequence
  Chemically synthesized
guuuggccucgaacaauccgacc

SEQ ID NO: 41295 - RNA, 23 nt, Artificial Sequence
  Chemically synthesized
uuuggccucgaacaauccgaccc

SEQ ID NO: 41296 - RNA, 23 nt, Artificial Sequence
  Chemically synthesized
uuggccucgaacaauccgacccg

SEQ ID NO: 41297 - RNA, 23 nt, Artificial Sequence
  Chemically synthesized
aggaaauuucuucucccucaccu

SEQ ID NO: 41298 - RNA, 23 nt, Artificial Sequence
  Chemically synthesized
ggaaauuucuucucccucaccug

SEQ ID NO: 41299 - RNA, 23 nt, Artificial Sequence
  Chemically synthesized
gaaauuucuucucccucaccugu

SEQ ID NO: 41300 - RNA, 23 nt, Artificial Sequence
  Chemically synthesized
aaauuucuucucccucaccugug

SEQ ID NO: 41301 - RNA, 23 nt, Artificial Sequence
  Chemically synthesized
aauuucuucucccucaccugugu

SEQ ID NO: 41302 - RNA, 23 nt, Artificial Sequence
  Chemically synthesized
uccagguugaagaaaugcgccac

SEQ ID NO: 41303 - RNA, 23 nt, Artificial Sequence
  Chemically synthesized
gacagguauuagaauuagcaugc

SEQ ID NO: 41304 - RNA, 23 nt, Artificial Sequence
  Chemically synthesized
acagguauuagaauuagcaugca

SEQ ID NO: 41305 - RNA, 23 nt, Artificial Sequence
  Chemically synthesized
gcaguuaaaauucaggcacagug

SEQ ID NO: 41306 - RNA, 23 nt, Artificial Sequence
  Chemically synthesized
uccucuucauaccaguagaacgu

SEQ ID NO: 41307 - RNA, 23 nt, Artificial Sequence
  Chemically synthesized
ccucuucauaccaguagaacgug

SEQ ID NO: 41308 - RNA, 23 nt, Artificial Sequence
  Chemically synthesized
cucuucauaccaguagaacgugu

SEQ ID NO: 41309 - RNA, 23 nt, Artificial Sequence
  Chemically synthesized
ucuucauaccaguagaacguguc

SEQ ID NO: 41310 - RNA, 23 nt, Artificial Sequence
  Chemically synthesized
cuucauaccaguagaacguguca

SEQ ID NO: 41311 - RNA, 23 nt, Artificial Sequence
  Chemically synthesized
uucauaccaguagaacgugucaa

SEQ ID NO: 41312 - RNA, 23 nt, Artificial Sequence
  Chemically synthesized
guuuuuguucuguuguauaugac

SEQ ID NO: 41313 - RNA, 23 nt, Artificial Sequence
  Chemically synthesized
uuuuuguucuguuguauaugaca

SEQ ID NO: 41314 - RNA, 23 nt, Artificial Sequence
  Chemically synthesized
uuuuguucuguuguauaugacau

SEQ ID NO: 41315 - RNA, 23 nt, Artificial Sequence
  Chemically synthesized
uuuguucuguuguauaugacaug

SEQ ID NO: 41316 - RNA, 23 nt, Artificial Sequence
  Chemically synthesized
uuguucuguuguauaugacaugu

SEQ ID NO: 41317 - RNA, 23 nt, Artificial Sequence
  Chemically synthesized
aaauuuauucccagccaugagag

SEQ ID NO: 41318 - RNA, 23 nt, Artificial Sequence
  Chemically synthesized
aauuuauucccagccaugagagu

SEQ ID NO: 41319 - RNA, 23 nt, Artificial Sequence
  Chemically synthesized
cuugauugaaaacacaaugccug

SEQ ID NO: 41320 - RNA, 23 nt, Artificial Sequence
  Chemically synthesized
gaccuccaaagucuagaagcucu

SEQ ID NO: 41321 - RNA, 23 nt, Artificial Sequence
  Chemically synthesized
accuccaaagucuagaagcucuc

SEQ ID NO: 41322 - RNA, 23 nt, Artificial Sequence
  Chemically synthesized
ccuccaaagucuagaagcucucc

SEQ ID NO: 41323 - RNA, 23 nt, Artificial Sequence
  Chemically synthesized
aucacgucaguauuuucguccca

SEQ ID NO: 41324 - RNA, 23 nt, Artificial Sequence
  Chemically synthesized
ucacgucaguauuuucgucccag

SEQ ID NO: 41325 - RNA, 23 nt, Artificial Sequence
  Chemically synthesized
cacgucaguauuuucgucccagu

SEQ ID NO: 41326 - RNA, 23 nt, Artificial Sequence
  Chemically synthesized
cauuuguaccauauagauuucag

SEQ ID NO: 41327 - RNA, 23 nt, Artificial Sequence
  Chemically synthesized
auuuguaccauauagauuucaga

SEQ ID NO: 41328 - RNA, 23 nt, Artificial Sequence
  Chemically synthesized
uuuguaccauauagauuucagaa

SEQ ID NO: 41329 - RNA, 23 nt, Artificial Sequence
  Chemically synthesized
uuguaccauauagauuucagaag

SEQ ID NO: 41330 - RNA, 23 nt, Artificial Sequence
  Chemically synthesized
uguaccauauagauuucagaaga

SEQ ID NO: 41331 - RNA, 23 nt, Artificial Sequence
  Chemically synthesized
ugaaaucgccagaaccuaauuau

SEQ ID NO: 41332 - RNA, 23 nt, Artificial Sequence
  Chemically synthesized
gaaaucgccagaaccuaauuauu

SEQ ID NO: 41333 - RNA, 23 nt, Artificial Sequence
  Chemically synthesized
aaaucgccagaaccuaauuauuc

SEQ ID NO: 41334 - RNA, 23 nt, Artificial Sequence
  Chemically synthesized
aaucgccagaaccuaauuauucu

SEQ ID NO: 41335 - RNA, 23 nt, Artificial Sequence
  Chemically synthesized
aucgccagaaccuaauuauucuu

SEQ ID NO: 41336 - RNA, 23 nt, Artificial Sequence
  Chemically synthesized
auucuuucacaugcauacaagac

SEQ ID NO: 41337 - RNA, 23 nt, Artificial Sequence
  Chemically synthesized
uugccagaaaauugaggcacggg

SEQ ID NO: 41338 - RNA, 23 nt, Artificial Sequence
  Chemically synthesized
ugccagaaaauugaggcacgggg

SEQ ID NO: 41339 - RNA, 23 nt, Artificial Sequence
  Chemically synthesized
gccagaaaauugaggcacggggc

SEQ ID NO: 41340 - RNA, 23 nt, Artificial Sequence
  Chemically synthesized
ccagaaaauugaggcacggggca

SEQ ID NO: 41341 - RNA, 23 nt, Artificial Sequence
  Chemically synthesized
cagaaaauugaggcacggggcau

SEQ ID NO: 41342 - RNA, 23 nt, Artificial Sequence
  Chemically synthesized
ucuacagaaggugauguugugca

SEQ ID NO: 41343 - RNA, 23 nt, Artificial Sequence
  Chemically synthesized
cuacagaaggugauguugugcag

SEQ ID NO: 41344 - RNA, 23 nt, Artificial Sequence
  Chemically synthesized
uacagaaggugauguugugcaga

SEQ ID NO: 41345 - RNA, 23 nt, Artificial Sequence
  Chemically synthesized
acagaaggugauguugugcagag

SEQ ID NO: 41346 - RNA, 23 nt, Artificial Sequence
  Chemically synthesized
cagaaggugauguugugcagaga

SEQ ID NO: 41347 - RNA, 23 nt, Artificial Sequence
  Chemically synthesized
agaaggugauguugugcagagag

SEQ ID NO: 41348 - RNA, 23 nt, Artificial Sequence
  Chemically synthesized
gaaggugauguugugcagagaga

SEQ ID NO: 41349 - RNA, 23 nt, Artificial Sequence
  Chemically synthesized
aaggugauguugugcagagagag

SEQ ID NO: 41350 - RNA, 23 nt, Artificial Sequence
  Chemically synthesized
cucuucggcugucaggaaauuuc

SEQ ID NO: 41351 - RNA, 23 nt, Artificial Sequence
  Chemically synthesized
ucuucggcugucaggaaauuucu

SEQ ID NO: 41352 - RNA, 23 nt, Artificial Sequence
  Chemically synthesized
cuucggcugucaggaaauuucuu

SEQ ID NO: 41353 - RNA, 23 nt, Artificial Sequence
  Chemically synthesized
uucggcugucaggaaauuucuuc

SEQ ID NO: 41354 - RNA, 23 nt, Artificial Sequence
  Chemically synthesized
ucggcugucaggaaauuucuucu

SEQ ID NO: 41355 - RNA, 23 nt, Artificial Sequence
  Chemically synthesized
ggugauguugugcagagagagac

SEQ ID NO: 41356 - RNA, 23 nt, Artificial Sequence
  Chemically synthesized
gugauguugugcagagagagacu

SEQ ID NO: 41357 - RNA, 23 nt, Artificial Sequence
  Chemically synthesized
ugauguugugcagagagagacug

SEQ ID NO: 41358 - RNA, 23 nt, Artificial Sequence
  Chemically synthesized
gauguugugcagagagagacugu

SEQ ID NO: 41359 - RNA, 23 nt, Artificial Sequence
  Chemically synthesized
auguugugcagagagagacuguc

SEQ ID NO: 41360 - RNA, 23 nt, Artificial Sequence
  Chemically synthesized
agacgaugaaaacauggugugug

SEQ ID NO: 41361 - RNA, 23 nt, Artificial Sequence
  Chemically synthesized
gacgaugaaaacauggugugugu

SEQ ID NO: 41362 - RNA, 23 nt, Artificial Sequence
  Chemically synthesized
acgaugaaaacauggugugugua

SEQ ID NO: 41363 - RNA, 23 nt, Artificial Sequence
  Chemically synthesized
cgaugaaaacaugguguguguac

SEQ ID NO: 41364 - RNA, 23 nt, Artificial Sequence
  Chemically synthesized
gaugaaaacaugguguguguacc

SEQ ID NO: 41365 - RNA, 23 nt, Artificial Sequence
  Chemically synthesized
uccuuagcaauucagugguugug

SEQ ID NO: 41366 - RNA, 23 nt, Artificial Sequence
  Chemically synthesized
cagguugaagaaaugcgccacga

SEQ ID NO: 41367 - RNA, 23 nt, Artificial Sequence
  Chemically synthesized
agguugaagaaaugcgccacgau

SEQ ID NO: 41368 - RNA, 23 nt, Artificial Sequence
  Chemically synthesized
gguugaagaaaugcgccacgaug

SEQ ID NO: 41369 - RNA, 23 nt, Artificial Sequence
  Chemically synthesized
guugaagaaaugcgccacgaugu

SEQ ID NO: 41370 - RNA, 23 nt, Artificial Sequence
  Chemically synthesized
uugaagaaaugcgccacgaugug

SEQ ID NO: 41371 - RNA, 23 nt, Artificial Sequence
  Chemically synthesized
ugagguuuuugucuaauugccuc

SEQ ID NO: 41372 - RNA, 23 nt, Artificial Sequence
  Chemically synthesized
agcaaauacuuguuccucuuaug

SEQ ID NO: 41373 - RNA, 23 nt, Artificial Sequence
  Chemically synthesized
acuccuccucuucauaccaguag

SEQ ID NO: 41374 - RNA, 23 nt, Artificial Sequence
  Chemically synthesized
cuccuccucuucauaccaguaga

SEQ ID NO: 41375 - RNA, 23 nt, Artificial Sequence
  Chemically synthesized
uccuccucuucauaccaguagaa

SEQ ID NO: 41376 - RNA, 23 nt, Artificial Sequence
  Chemically synthesized
ccuccucuucauaccaguagaac

SEQ ID NO: 41377 - RNA, 23 nt, Artificial Sequence
  Chemically synthesized
cuccucuucauaccaguagaacg

SEQ ID NO: 41378 - RNA, 23 nt, Artificial Sequence
  Chemically synthesized
ucauaccaguagaacgugucaau

SEQ ID NO: 41379 - RNA, 23 nt, Artificial Sequence
  Chemically synthesized
uauuuauaagcuaaggaaguaug

SEQ ID NO: 41380 - RNA, 23 nt, Artificial Sequence
  Chemically synthesized
guuaauuauuauucaccaguucc

SEQ ID NO: 41381 - RNA, 23 nt, Artificial Sequence
  Chemically synthesized
auuuauucccagccaugagagua

SEQ ID NO: 41382 - RNA, 23 nt, Artificial Sequence
  Chemically synthesized
uuuauucccagccaugagaguac

SEQ ID NO: 41383 - RNA, 23 nt, Artificial Sequence
  Chemically synthesized
ggucagcugaugaauacaagugg

SEQ ID NO: 41384 - RNA, 23 nt, Artificial Sequence
  Chemically synthesized
gucagcugaugaauacaaguggc

SEQ ID NO: 41385 - RNA, 23 nt, Artificial Sequence
  Chemically synthesized
ucagcugaugaauacaaguggca

SEQ ID NO: 41386 - RNA, 23 nt, Artificial Sequence
  Chemically synthesized
cagcugaugaauacaaguggcac

SEQ ID NO: 41387 - RNA, 23 nt, Artificial Sequence
  Chemically synthesized
agcugaugaauacaaguggcaca

SEQ ID NO: 41388 - RNA, 23 nt, Artificial Sequence
  Chemically synthesized
augagaguacuaauaugguggag

SEQ ID NO: 41389 - RNA, 23 nt, Artificial Sequence
  Chemically synthesized
aagccuguaaucacgucaguauu

SEQ ID NO: 41390 - RNA, 23 nt, Artificial Sequence
  Chemically synthesized
guauuuucgucccaguguaaagc

SEQ ID NO: 41391 - RNA, 23 nt, Artificial Sequence
  Chemically synthesized
uauuuucgucccaguguaaagcu

SEQ ID NO: 41392 - RNA, 23 nt, Artificial Sequence
  Chemically synthesized
auuuucgucccaguguaaagcua

SEQ ID NO: 41393 - RNA, 23 nt, Artificial Sequence
  Chemically synthesized
uuuucgucccaguguaaagcuau

SEQ ID NO: 41394 - RNA, 23 nt, Artificial Sequence
  Chemically synthesized
uuucgucccaguguaaagcuaug

SEQ ID NO: 41395 - RNA, 23 nt, Artificial Sequence
  Chemically synthesized
cacucaaaagcucuugcaucccg

SEQ ID NO: 41396 - RNA, 23 nt, Artificial Sequence
  Chemically synthesized
acucaaaagcucuugcaucccgg

SEQ ID NO: 41397 - RNA, 23 nt, Artificial Sequence
  Chemically synthesized
cucaaaagcucuugcaucccggc

SEQ ID NO: 41398 - RNA, 23 nt, Artificial Sequence
  Chemically synthesized
ucaaaagcucuugcaucccggca

SEQ ID NO: 41399 - RNA, 23 nt, Artificial Sequence
  Chemically synthesized
caaaagcucuugcaucccggcaa

SEQ ID NO: 41400 - RNA, 23 nt, Artificial Sequence
  Chemically synthesized
guaccauauagauuucagaagag

SEQ ID NO: 41401 - RNA, 23 nt, Artificial Sequence
  Chemically synthesized
cggcugucaggaaauuucuucuc

SEQ ID NO: 41402 - RNA, 23 nt, Artificial Sequence
  Chemically synthesized
ggcugucaggaaauuucuucucc

SEQ ID NO: 41403 - RNA, 23 nt, Artificial Sequence
  Chemically synthesized
gcugucaggaaauuucuucuccc

SEQ ID NO: 41404 - RNA, 23 nt, Artificial Sequence
  Chemically synthesized
accagaacaacucauaggaggcc

SEQ ID NO: 41405 - RNA, 23 nt, Artificial Sequence
  Chemically synthesized
ucaagacuaaagccagagagauc

SEQ ID NO: 41406 - RNA, 23 nt, Artificial Sequence
  Chemically synthesized
caagacuaaagccagagagauca

SEQ ID NO: 41407 - RNA, 23 nt, Artificial Sequence
  Chemically synthesized
aagacuaaagccagagagaucac

SEQ ID NO: 41408 - RNA, 23 nt, Artificial Sequence
  Chemically synthesized
uucagugguuguguuugugggga

SEQ ID NO: 41409 - RNA, 23 nt, Artificial Sequence
  Chemically synthesized
ucagugguuguguuuguggggaa

SEQ ID NO: 41410 - RNA, 23 nt, Artificial Sequence
  Chemically synthesized
cagugguuguguuuguggggaag

SEQ ID NO: 41411 - RNA, 23 nt, Artificial Sequence
  Chemically synthesized
guuugugaaaucugagguuuuug

SEQ ID NO: 41412 - RNA, 23 nt, Artificial Sequence
  Chemically synthesized
uuugugaaaucugagguuuuugu

SEQ ID NO: 41413 - RNA, 23 nt, Artificial Sequence
  Chemically synthesized
aaucugagguuuuugucuaauug

SEQ ID NO: 41414 - RNA, 23 nt, Artificial Sequence
  Chemically synthesized
aucugagguuuuugucuaauugc

SEQ ID NO: 41415 - RNA, 23 nt, Artificial Sequence
  Chemically synthesized
aaugaaauaagguuucgacugac

SEQ ID NO: 41416 - RNA, 23 nt, Artificial Sequence
  Chemically synthesized
augaaauaagguuucgacugaca

SEQ ID NO: 41417 - RNA, 23 nt, Artificial Sequence
  Chemically synthesized
ugaaauaagguuucgacugacag

SEQ ID NO: 41418 - RNA, 23 nt, Artificial Sequence
  Chemically synthesized
gaaauaagguuucgacugacagg

SEQ ID NO: 41419 - RNA, 23 nt, Artificial Sequence
  Chemically synthesized
aaauaagguuucgacugacaggu

SEQ ID NO: 41420 - RNA, 23 nt, Artificial Sequence
  Chemically synthesized
cgacugacagguauuagaauuag

SEQ ID NO: 41421 - RNA, 23 nt, Artificial Sequence
  Chemically synthesized
gacugacagguauuagaauuagc

SEQ ID NO: 41422 - RNA, 23 nt, Artificial Sequence
  Chemically synthesized
acugacagguauuagaauuagca

SEQ ID NO: 41423 - RNA, 23 nt, Artificial Sequence
  Chemically synthesized
cugacagguauuagaauuagcau

SEQ ID NO: 41424 - RNA, 23 nt, Artificial Sequence
  Chemically synthesized
ugacagguauuagaauuagcaug

SEQ ID NO: 41425 - RNA, 23 nt, Artificial Sequence
  Chemically synthesized
uuagcaugcaguuaaaauucagg

SEQ ID NO: 41426 - RNA, 23 nt, Artificial Sequence
  Chemically synthesized
cauaccaguagaacgugucaaua

SEQ ID NO: 41427 - RNA, 23 nt, Artificial Sequence
  Chemically synthesized
auaccaguagaacgugucaauaa

SEQ ID NO: 41428 - RNA, 23 nt, Artificial Sequence
  Chemically synthesized
agaaaugaacaccucugggguca

SEQ ID NO: 41429 - RNA, 23 nt, Artificial Sequence
  Chemically synthesized
ugagaguacuaauaugguggaga

SEQ ID NO: 41430 - RNA, 23 nt, Artificial Sequence
  Chemically synthesized
acgucaguauuuucgucccagug

SEQ ID NO: 41431 - RNA, 23 nt, Artificial Sequence
  Chemically synthesized
ggagaguaagagaucagcaaacc

SEQ ID NO: 41432 - RNA, 23 nt, Artificial Sequence
  Chemically synthesized
gagaguaagagaucagcaaacca

SEQ ID NO: 41433 - RNA, 23 nt, Artificial Sequence
  Chemically synthesized
agaguaagagaucagcaaaccac

SEQ ID NO: 41434 - RNA, 23 nt, Artificial Sequence
  Chemically synthesized
gaguaagagaucagcaaaccacu

SEQ ID NO: 41435 - RNA, 23 nt, Artificial Sequence
  Chemically synthesized
aguaagagaucagcaaaccacuc

SEQ ID NO: 41436 - RNA, 23 nt, Artificial Sequence
  Chemically synthesized
cccucauucaaaauccagcaccc

SEQ ID NO: 41437 - RNA, 23 nt, Artificial Sequence
  Chemically synthesized
ccucauucaaaauccagcacccc

SEQ ID NO: 41438 - RNA, 23 nt, Artificial Sequence
  Chemically synthesized
cucauucaaaauccagcacccca

SEQ ID NO: 41439 - RNA, 23 nt, Artificial Sequence
  Chemically synthesized
ucauucaaaauccagcaccccau

SEQ ID NO: 41440 - RNA, 23 nt, Artificial Sequence
  Chemically synthesized
cauucaaaauccagcaccccauc

SEQ ID NO: 41441 - RNA, 23 nt, Artificial Sequence
  Chemically synthesized
cuggcgccauuuuaaagccacgc

SEQ ID NO: 41442 - RNA, 23 nt, Artificial Sequence
  Chemically synthesized
uggcgccauuuuaaagccacgcu

SEQ ID NO: 41443 - RNA, 23 nt, Artificial Sequence
  Chemically synthesized
ggcgccauuuuaaagccacgcuu

SEQ ID NO: 41444 - RNA, 23 nt, Artificial Sequence
  Chemically synthesized
gcgccauuuuaaagccacgcuuu

SEQ ID NO: 41445 - RNA, 23 nt, Artificial Sequence
  Chemically synthesized
cgccauuuuaaagccacgcuuuu

SEQ ID NO: 41446 - RNA, 23 nt, Artificial Sequence
  Chemically synthesized
uugaaaucgccagaaccuaauua

SEQ ID NO: 41447 - RNA, 23 nt, Artificial Sequence
  Chemically synthesized
ucacaugcauacaagaccacagg

SEQ ID NO: 41448 - RNA, 23 nt, Artificial Sequence
  Chemically synthesized
cacaugcauacaagaccacaggg

SEQ ID NO: 41449 - RNA, 23 nt, Artificial Sequence
  Chemically synthesized
acaugcauacaagaccacagggc

SEQ ID NO: 41450 - RNA, 23 nt, Artificial Sequence
  Chemically synthesized
caugcauacaagaccacagggcc

SEQ ID NO: 41451 - RNA, 23 nt, Artificial Sequence
  Chemically synthesized
augcauacaagaccacagggccu

SEQ ID NO: 41452 - RNA, 23 nt, Artificial Sequence
  Chemically synthesized
gcggucucuacagaaggugaugu

SEQ ID NO: 41453 - RNA, 23 nt, Artificial Sequence
  Chemically synthesized
cggucucuacagaaggugauguu

SEQ ID NO: 41454 - RNA, 23 nt, Artificial Sequence
  Chemically synthesized
ggucucuacagaaggugauguug

SEQ ID NO: 41455 - RNA, 23 nt, Artificial Sequence
  Chemically synthesized
gucucuacagaaggugauguugu

SEQ ID NO: 41456 - RNA, 23 nt, Artificial Sequence
  Chemically synthesized
ucucuacagaaggugauguugug

SEQ ID NO: 41457 - RNA, 23 nt, Artificial Sequence
  Chemically synthesized
aaagccagagagaucaccagacc

SEQ ID NO: 41458 - RNA, 23 nt, Artificial Sequence
  Chemically synthesized
aagccagagagaucaccagaccg

SEQ ID NO: 41459 - RNA, 23 nt, Artificial Sequence
  Chemically synthesized
uagcaauucagugguuguguuug

SEQ ID NO: 41460 - RNA, 23 nt, Artificial Sequence
  Chemically synthesized
uuucuucucccucaccugugucu

SEQ ID NO: 41461 - RNA, 23 nt, Artificial Sequence
  Chemically synthesized
uucuucucccucaccugugucug

SEQ ID NO: 41462 - RNA, 23 nt, Artificial Sequence
  Chemically synthesized
ucuucucccucaccugugucugg

SEQ ID NO: 41463 - RNA, 23 nt, Artificial Sequence
  Chemically synthesized
cuucucccucaccugugucugga

SEQ ID NO: 41464 - RNA, 23 nt, Artificial Sequence
  Chemically synthesized
uucucccucaccugugucuggau

SEQ ID NO: 41465 - RNA, 23 nt, Artificial Sequence
  Chemically synthesized
ccagguugaagaaaugcgccacg

SEQ ID NO: 41466 - RNA, 23 nt, Artificial Sequence
  Chemically synthesized
ucugagguuuuugucuaauugcc

SEQ ID NO: 41467 - RNA, 23 nt, Artificial Sequence
  Chemically synthesized
cugagguuuuugucuaauugccu

SEQ ID NO: 41468 - RNA, 23 nt, Artificial Sequence
  Chemically synthesized
auuagaauuagcaugcaguuaaa

SEQ ID NO: 41469 - RNA, 23 nt, Artificial Sequence
  Chemically synthesized
ugcaguuaaaauucaggcacagu

SEQ ID NO: 41470 - RNA, 23 nt, Artificial Sequence
  Chemically synthesized
uauuauucaccaguucccaacug

SEQ ID NO: 41471 - RNA, 23 nt, Artificial Sequence
  Chemically synthesized
auuauucaccaguucccaacugg

SEQ ID NO: 41472 - RNA, 23 nt, Artificial Sequence
  Chemically synthesized
uuauucaccaguucccaacuggg

SEQ ID NO: 41473 - RNA, 23 nt, Artificial Sequence
  Chemically synthesized
ugaaaacacaaugccuggacuug

SEQ ID NO: 41474 - RNA, 23 nt, Artificial Sequence
  Chemically synthesized
gaaaacacaaugccuggacuuga

SEQ ID NO: 41475 - RNA, 23 nt, Artificial Sequence
  Chemically synthesized
aagucuagaagcucuccuuguug

SEQ ID NO: 41476 - RNA, 23 nt, Artificial Sequence
  Chemically synthesized
gcucacucauccguguuuccagg

SEQ ID NO: 41477 - RNA, 23 nt, Artificial Sequence
  Chemically synthesized
cucacucauccguguuuccaggg

SEQ ID NO: 41478 - RNA, 23 nt, Artificial Sequence
  Chemically synthesized
ucacucauccguguuuccaggga

SEQ ID NO: 41479 - RNA, 23 nt, Artificial Sequence
  Chemically synthesized
cacucauccguguuuccagggag

SEQ ID NO: 41480 - RNA, 23 nt, Artificial Sequence
  Chemically synthesized
acucauccguguuuccagggaga

SEQ ID NO: 41481 - RNA, 23 nt, Artificial Sequence
  Chemically synthesized
acccucauucaaaauccagcacc

SEQ ID NO: 41482 - RNA, 23 nt, Artificial Sequence
  Chemically synthesized
gaaauacaucugucagggcaguu

SEQ ID NO: 41483 - RNA, 23 nt, Artificial Sequence
  Chemically synthesized
ucuuguugaaaucgccagaaccu

SEQ ID NO: 41484 - RNA, 23 nt, Artificial Sequence
  Chemically synthesized
cuuguugaaaucgccagaaccua

SEQ ID NO: 41485 - RNA, 23 nt, Artificial Sequence
  Chemically synthesized
uuguugaaaucgccagaaccuaa

SEQ ID NO: 41486 - RNA, 23 nt, Artificial Sequence
  Chemically synthesized
aaauccauuuccaagccgagggu

SEQ ID NO: 41487 - RNA, 23 nt, Artificial Sequence
  Chemically synthesized
caggaaauuucuucucccucacc

SEQ ID NO: 41488 - RNA, 23 nt, Artificial Sequence
  Chemically synthesized
auuucuucucccucaccuguguc

SEQ ID NO: 41489 - RNA, 23 nt, Artificial Sequence
  Chemically synthesized
ugaagaaaugcgccacgaugugg

SEQ ID NO: 41490 - RNA, 23 nt, Artificial Sequence
  Chemically synthesized
gaagaaaugcgccacgaugugga

SEQ ID NO: 41491 - RNA, 23 nt, Artificial Sequence
  Chemically synthesized
aagaaaugcgccacgauguggau

SEQ ID NO: 41492 - RNA, 23 nt, Artificial Sequence
  Chemically synthesized
caccugugucuggauguuggguc

SEQ ID NO: 41493 - RNA, 23 nt, Artificial Sequence
  Chemically synthesized
accugugucuggauguugggucg

SEQ ID NO: 41494 - RNA, 23 nt, Artificial Sequence
  Chemically synthesized
ccugugucuggauguugggucgu

SEQ ID NO: 41495 - RNA, 23 nt, Artificial Sequence
  Chemically synthesized
cugugucuggauguugggucguu

SEQ ID NO: 41496 - RNA, 23 nt, Artificial Sequence
  Chemically synthesized
ugugucuggauguugggucguua

SEQ ID NO: 41497 - RNA, 23 nt, Artificial Sequence
  Chemically synthesized
aauuagcaugcaguuaaaauuca

SEQ ID NO: 41498 - RNA, 23 nt, Artificial Sequence
  Chemically synthesized
auuagcaugcaguuaaaauucag

SEQ ID NO: 41499 - RNA, 23 nt, Artificial Sequence
  Chemically synthesized
caguguugaacccaaaauaacuc

SEQ ID NO: 41500 - RNA, 23 nt, Artificial Sequence
  Chemically synthesized
acccaaaauaacucguguguaau

SEQ ID NO: 41501 - RNA, 23 nt, Artificial Sequence
  Chemically synthesized
gcuuuagguccacagaagaacac

SEQ ID NO: 41502 - RNA, 23 nt, Artificial Sequence
  Chemically synthesized
cuuuagguccacagaagaacacg

SEQ ID NO: 41503 - RNA, 23 nt, Artificial Sequence
  Chemically synthesized
uuuagguccacagaagaacacgc

SEQ ID NO: 41504 - RNA, 23 nt, Artificial Sequence
  Chemically synthesized
uuagguccacagaagaacacgcc

SEQ ID NO: 41505 - RNA, 23 nt, Artificial Sequence
  Chemically synthesized
uagguccacagaagaacacgcca

SEQ ID NO: 41506 - RNA, 23 nt, Artificial Sequence
  Chemically synthesized
uccacagaagaacacgccaauac

SEQ ID NO: 41507 - RNA, 23 nt, Artificial Sequence
  Chemically synthesized
ccacagaagaacacgccaauacu

SEQ ID NO: 41508 - RNA, 23 nt, Artificial Sequence
  Chemically synthesized
cacagaagaacacgccaauacug

SEQ ID NO: 41509 - RNA, 23 nt, Artificial Sequence
  Chemically synthesized
ccuguaaucacgucaguauuuuc

SEQ ID NO: 41510 - RNA, 23 nt, Artificial Sequence
  Chemically synthesized
uuccagggagaguaagagaucag

SEQ ID NO: 41511 - RNA, 23 nt, Artificial Sequence
  Chemically synthesized
uccagggagaguaagagaucagc

SEQ ID NO: 41512 - RNA, 23 nt, Artificial Sequence
  Chemically synthesized
ccagggagaguaagagaucagca

SEQ ID NO: 41513 - RNA, 23 nt, Artificial Sequence
  Chemically synthesized
cagggagaguaagagaucagcaa

SEQ ID NO: 41514 - RNA, 23 nt, Artificial Sequence
  Chemically synthesized
agggagaguaagagaucagcaaa

SEQ ID NO: 41515 - RNA, 23 nt, Artificial Sequence
  Chemically synthesized
agaucagcaaaccacucaaaagc

SEQ ID NO: 41516 - RNA, 23 nt, Artificial Sequence
  Chemically synthesized
gaucagcaaaccacucaaaagcu

SEQ ID NO: 41517 - RNA, 23 nt, Artificial Sequence
  Chemically synthesized
aucagcaaaccacucaaaagcuc

SEQ ID NO: 41518 - RNA, 23 nt, Artificial Sequence
  Chemically synthesized
ucagcaaaccacucaaaagcucu

SEQ ID NO: 41519 - RNA, 23 nt, Artificial Sequence
  Chemically synthesized
cagcaaaccacucaaaagcucuu

SEQ ID NO: 41520 - RNA, 23 nt, Artificial Sequence
  Chemically synthesized
ccacucaaaagcucuugcauccc

SEQ ID NO: 41521 - RNA, 23 nt, Artificial Sequence
  Chemically synthesized
uugcaucccggcaaauccaguag

SEQ ID NO: 41522 - RNA, 23 nt, Artificial Sequence
  Chemically synthesized
ugcaucccggcaaauccaguaga

SEQ ID NO: 41523 - RNA, 23 nt, Artificial Sequence
  Chemically synthesized
gcaucccggcaaauccaguagaa

SEQ ID NO: 41524 - RNA, 23 nt, Artificial Sequence
  Chemically synthesized
caucccggcaaauccaguagaaa

SEQ ID NO: 41525 - RNA, 23 nt, Artificial Sequence
  Chemically synthesized
aucccggcaaauccaguagaaau

SEQ ID NO: 41526 - RNA, 23 nt, Artificial Sequence
  Chemically synthesized
caccuugguaaugacaacuucuu

SEQ ID NO: 41527 - RNA, 23 nt, Artificial Sequence
  Chemically synthesized
accuugguaaugacaacuucuug

SEQ ID NO: 41528 - RNA, 23 nt, Artificial Sequence
  Chemically synthesized
ccuugguaaugacaacuucuugu

SEQ ID NO: 41529 - RNA, 23 nt, Artificial Sequence
  Chemically synthesized
cuugguaaugacaacuucuuguu

SEQ ID NO: 41530 - RNA, 23 nt, Artificial Sequence
  Chemically synthesized
uugguaaugacaacuucuuguug

SEQ ID NO: 41531 - RNA, 23 nt, Artificial Sequence
  Chemically synthesized
ccuuagcaauucagugguugugu

SEQ ID NO: 41532 - RNA, 23 nt, Artificial Sequence
  Chemically synthesized
cuuagcaauucagugguuguguu

SEQ ID NO: 41533 - RNA, 23 nt, Artificial Sequence
  Chemically synthesized
auggaaagacuccuccucuucau

SEQ ID NO: 41534 - RNA, 23 nt, Artificial Sequence
  Chemically synthesized
uggaaagacuccuccucuucaua

SEQ ID NO: 41535 - RNA, 23 nt, Artificial Sequence
  Chemically synthesized
ggaaagacuccuccucuucauac

SEQ ID NO: 41536 - RNA, 23 nt, Artificial Sequence
  Chemically synthesized
gaaagacuccuccucuucauacc

SEQ ID NO: 41537 - RNA, 23 nt, Artificial Sequence
  Chemically synthesized
aaagacuccuccucuucauacca

SEQ ID NO: 41538 - RNA, 23 nt, Artificial Sequence
  Chemically synthesized
aagacuccuccucuucauaccag

SEQ ID NO: 41539 - RNA, 23 nt, Artificial Sequence
  Chemically synthesized
agacuccuccucuucauaccagu

SEQ ID NO: 41540 - RNA, 23 nt, Artificial Sequence
  Chemically synthesized
gacuccuccucuucauaccagua

SEQ ID NO: 41541 - RNA, 23 nt, Artificial Sequence
  Chemically synthesized
uaccaguagaacgugucaauaaa

SEQ ID NO: 41542 - RNA, 23 nt, Artificial Sequence
  Chemically synthesized
ccaguagaacgugucaauaaaca

SEQ ID NO: 41543 - RNA, 23 nt, Artificial Sequence
  Chemically synthesized
caguagaacgugucaauaaacag

SEQ ID NO: 41544 - RNA, 23 nt, Artificial Sequence
  Chemically synthesized
aguagaacgugucaauaaacaga

SEQ ID NO: 41545 - RNA, 23 nt, Artificial Sequence
  Chemically synthesized
guagaacgugucaauaaacagau

SEQ ID NO: 41546 - RNA, 23 nt, Artificial Sequence
  Chemically synthesized
uagaacgugucaauaaacagaua

SEQ ID NO: 41547 - RNA, 23 nt, Artificial Sequence
  Chemically synthesized
ggagcucauaucaacaggccguc

SEQ ID NO: 41548 - RNA, 23 nt, Artificial Sequence
  Chemically synthesized
gagcucauaucaacaggccguca

SEQ ID NO: 41549 - RNA, 23 nt, Artificial Sequence
  Chemically synthesized
agcucauaucaacaggccgucac

SEQ ID NO: 41550 - RNA, 23 nt, Artificial Sequence
  Chemically synthesized
gcucauaucaacaggccgucaca

SEQ ID NO: 41551 - RNA, 23 nt, Artificial Sequence
  Chemically synthesized
cucauaucaacaggccgucacag

SEQ ID NO: 41552 - RNA, 23 nt, Artificial Sequence
  Chemically synthesized
ucauaucaacaggccgucacagg

SEQ ID NO: 41553 - RNA, 23 nt, Artificial Sequence
  Chemically synthesized
cauaucaacaggccgucacagga

SEQ ID NO: 41554 - RNA, 23 nt, Artificial Sequence
  Chemically synthesized
gaauacaaguggcacaucuuuug

SEQ ID NO: 41555 - RNA, 23 nt, Artificial Sequence
  Chemically synthesized
aauacaaguggcacaucuuuuga

SEQ ID NO: 41556 - RNA, 23 nt, Artificial Sequence
  Chemically synthesized
auacaaguggcacaucuuuugaa

SEQ ID NO: 41557 - RNA, 23 nt, Artificial Sequence
  Chemically synthesized
uacaaguggcacaucuuuugaag

SEQ ID NO: 41558 - RNA, 23 nt, Artificial Sequence
  Chemically synthesized
acaaguggcacaucuuuugaagu

SEQ ID NO: 41559 - RNA, 23 nt, Artificial Sequence
  Chemically synthesized
caaguggcacaucuuuugaagug

SEQ ID NO: 41560 - RNA, 23 nt, Artificial Sequence
  Chemically synthesized
aaguggcacaucuuuugaagugu

SEQ ID NO: 41561 - RNA, 23 nt, Artificial Sequence
  Chemically synthesized
gagcuuuagguccacagaagaac

SEQ ID NO: 41562 - RNA, 23 nt, Artificial Sequence
  Chemically synthesized
agcuuuagguccacagaagaaca

SEQ ID NO: 41563 - RNA, 23 nt, Artificial Sequence
  Chemically synthesized
uucgucccaguguaaagcuaugu

SEQ ID NO: 41564 - RNA, 23 nt, Artificial Sequence
  Chemically synthesized
cugcccuggcgccauuuuaaagc

SEQ ID NO: 41565 - RNA, 23 nt, Artificial Sequence
  Chemically synthesized
ugcccuggcgccauuuuaaagcc

SEQ ID NO: 41566 - RNA, 23 nt, Artificial Sequence
  Chemically synthesized
gcccuggcgccauuuuaaagcca

SEQ ID NO: 41567 - RNA, 23 nt, Artificial Sequence
  Chemically synthesized
cccuggcgccauuuuaaagccac

SEQ ID NO: 41568 - RNA, 23 nt, Artificial Sequence
  Chemically synthesized
ccuggcgccauuuuaaagccacg

SEQ ID NO: 41569 - RNA, 23 nt, Artificial Sequence
  Chemically synthesized
ugguaaugacaacuucuuguuga

SEQ ID NO: 41570 - RNA, 23 nt, Artificial Sequence
  Chemically synthesized
gguaaugacaacuucuuguugaa

SEQ ID NO: 41571 - RNA, 23 nt, Artificial Sequence
  Chemically synthesized
uggccaggcugagaaagaagacg

SEQ ID NO: 41572 - RNA, 23 nt, Artificial Sequence
  Chemically synthesized
caacugggagcucauaucaacag

SEQ ID NO: 41573 - RNA, 23 nt, Artificial Sequence
  Chemically synthesized
aacugggagcucauaucaacagg

SEQ ID NO: 41574 - RNA, 23 nt, Artificial Sequence
  Chemically synthesized
acugggagcucauaucaacaggc

SEQ ID NO: 41575 - RNA, 23 nt, Artificial Sequence
  Chemically synthesized
cugggagcucauaucaacaggcc

SEQ ID NO: 41576 - RNA, 23 nt, Artificial Sequence
  Chemically synthesized
ugggagcucauaucaacaggccg

SEQ ID NO: 41577 - RNA, 23 nt, Artificial Sequence
  Chemically synthesized
gggagcucauaucaacaggccgu

SEQ ID NO: 41578 - RNA, 23 nt, Artificial Sequence
  Chemically synthesized
aaaacacaaugccuggacuugac

SEQ ID NO: 41579 - RNA, 23 nt, Artificial Sequence
  Chemically synthesized
uuuccagggagaguaagagauca

SEQ ID NO: 41580 - RNA, 23 nt, Artificial Sequence
  Chemically synthesized
aauacaccuugcucagcuucagu

SEQ ID NO: 41581 - RNA, 23 nt, Artificial Sequence
  Chemically synthesized
auacaccuugcucagcuucagug

SEQ ID NO: 41582 - RNA, 23 nt, Artificial Sequence
  Chemically synthesized
gacccucauucaaaauccagcac

SEQ ID NO: 41583 - RNA, 23 nt, Artificial Sequence
  Chemically synthesized
aauccauuuccaagccgaggguu

SEQ ID NO: 41584 - RNA, 23 nt, Artificial Sequence
  Chemically synthesized
auccauuuccaagccgaggguuc

SEQ ID NO: 41585 - RNA, 23 nt, Artificial Sequence
  Chemically synthesized
cugcauagcggucucuacagaag

SEQ ID NO: 41586 - RNA, 23 nt, Artificial Sequence
  Chemically synthesized
ugcauagcggucucuacagaagg

SEQ ID NO: 41587 - RNA, 23 nt, Artificial Sequence
  Chemically synthesized
gcauagcggucucuacagaaggu

SEQ ID NO: 41588 - RNA, 23 nt, Artificial Sequence
  Chemically synthesized
cauagcggucucuacagaaggug

SEQ ID NO: 41589 - RNA, 23 nt, Artificial Sequence
  Chemically synthesized
auagcggucucuacagaagguga

SEQ ID NO: 41590 - RNA, 23 nt, Artificial Sequence
  Chemically synthesized
uagcggucucuacagaaggugau

SEQ ID NO: 41591 - RNA, 23 nt, Artificial Sequence
  Chemically synthesized
uguugugcagagagagacugucu

SEQ ID NO: 41592 - RNA, 23 nt, Artificial Sequence
  Chemically synthesized
guugugcagagagagacugucuu

SEQ ID NO: 41593 - RNA, 23 nt, Artificial Sequence
  Chemically synthesized
guguguaauggaaagacuccucc

SEQ ID NO: 41594 - RNA, 23 nt, Artificial Sequence
  Chemically synthesized
uguguaauggaaagacuccuccu

SEQ ID NO: 41595 - RNA, 23 nt, Artificial Sequence
  Chemically synthesized
guguaauggaaagacuccuccuc

SEQ ID NO: 41596 - RNA, 23 nt, Artificial Sequence
  Chemically synthesized
uguaauggaaagacuccuccucu

SEQ ID NO: 41597 - RNA, 23 nt, Artificial Sequence
  Chemically synthesized
guaauggaaagacuccuccucuu

SEQ ID NO: 41598 - RNA, 23 nt, Artificial Sequence
  Chemically synthesized
agaacgugucaauaaacagauaa

SEQ ID NO: 41599 - RNA, 23 nt, Artificial Sequence
  Chemically synthesized
gaacgugucaauaaacagauaaa

SEQ ID NO: 41600 - RNA, 23 nt, Artificial Sequence
  Chemically synthesized
aacgugucaauaaacagauaaaa

SEQ ID NO: 41601 - RNA, 23 nt, Artificial Sequence
  Chemically synthesized
aaacacaaugccuggacuugacc

SEQ ID NO: 41602 - RNA, 23 nt, Artificial Sequence
  Chemically synthesized
aacacaaugccuggacuugaccu

SEQ ID NO: 41603 - RNA, 23 nt, Artificial Sequence
  Chemically synthesized
acacaaugccuggacuugaccuc

SEQ ID NO: 41604 - RNA, 23 nt, Artificial Sequence
  Chemically synthesized
cacaaugccuggacuugaccucc

SEQ ID NO: 41605 - RNA, 23 nt, Artificial Sequence
  Chemically synthesized
gggucagcugaugaauacaagug

SEQ ID NO: 41606 - RNA, 23 nt, Artificial Sequence
  Chemically synthesized
gcugaugaauacaaguggcacau

SEQ ID NO: 41607 - RNA, 23 nt, Artificial Sequence
  Chemically synthesized
cugaugaauacaaguggcacauc

SEQ ID NO: 41608 - RNA, 23 nt, Artificial Sequence
  Chemically synthesized
uacaccuugcucagcuucagugg

SEQ ID NO: 41609 - RNA, 23 nt, Artificial Sequence
  Chemically synthesized
ggccuaaaauccauuuccaagcc

SEQ ID NO: 41610 - RNA, 23 nt, Artificial Sequence
  Chemically synthesized
aguucuuuggaaucaauaacuug

SEQ ID NO: 41611 - RNA, 23 nt, Artificial Sequence
  Chemically synthesized
guucuuuggaaucaauaacuuga

SEQ ID NO: 41612 - RNA, 23 nt, Artificial Sequence
  Chemically synthesized
uucuuuggaaucaauaacuugau

SEQ ID NO: 41613 - RNA, 23 nt, Artificial Sequence
  Chemically synthesized
ucuuuggaaucaauaacuugauu

SEQ ID NO: 41614 - RNA, 23 nt, Artificial Sequence
  Chemically synthesized
cuuuggaaucaauaacuugauug

SEQ ID NO: 41615 - RNA, 23 nt, Artificial Sequence
  Chemically synthesized
uaacuugauugaaaacacaaugc

SEQ ID NO: 41616 - RNA, 23 nt, Artificial Sequence
  Chemically synthesized
aacuugauugaaaacacaaugcc

SEQ ID NO: 41617 - RNA, 23 nt, Artificial Sequence
  Chemically synthesized
acuugauugaaaacacaaugccu

SEQ ID NO: 41618 - RNA, 23 nt, Artificial Sequence
  Chemically synthesized
ugaugaauacaaguggcacaucu

SEQ ID NO: 41619 - RNA, 23 nt, Artificial Sequence
  Chemically synthesized
gaugaauacaaguggcacaucuu

SEQ ID NO: 41620 - RNA, 23 nt, Artificial Sequence
  Chemically synthesized
augaauacaaguggcacaucuuu

SEQ ID NO: 41621 - RNA, 23 nt, Artificial Sequence
  Chemically synthesized
guaaagcuaugugaagagccuga

SEQ ID NO: 41622 - RNA, 23 nt, Artificial Sequence
  Chemically synthesized
uaaagcuaugugaagagccugau

SEQ ID NO: 41623 - RNA, 23 nt, Artificial Sequence
  Chemically synthesized
aaagcuaugugaagagccugauu

SEQ ID NO: 41624 - RNA, 23 nt, Artificial Sequence
  Chemically synthesized
acaccuugcucagcuucaguggg

SEQ ID NO: 41625 - RNA, 23 nt, Artificial Sequence
  Chemically synthesized
caccuugcucagcuucagugggg

SEQ ID NO: 41626 - RNA, 23 nt, Artificial Sequence
  Chemically synthesized
accuugcucagcuucaguggggu

SEQ ID NO: 41627 - RNA, 23 nt, Artificial Sequence
  Chemically synthesized
cugcaccaagauguacugcccug

SEQ ID NO: 41628 - RNA, 23 nt, Artificial Sequence
  Chemically synthesized
ugcaccaagauguacugcccugg

SEQ ID NO: 41629 - RNA, 23 nt, Artificial Sequence
  Chemically synthesized
gcaccaagauguacugcccuggc

SEQ ID NO: 41630 - RNA, 23 nt, Artificial Sequence
  Chemically synthesized
caccaagauguacugcccuggcg

SEQ ID NO: 41631 - RNA, 23 nt, Artificial Sequence
  Chemically synthesized
accaagauguacugcccuggcgc

SEQ ID NO: 41632 - RNA, 23 nt, Artificial Sequence
  Chemically synthesized
caagaccacagggccuaaaaucc

SEQ ID NO: 41633 - RNA, 23 nt, Artificial Sequence
  Chemically synthesized
aagaccacagggccuaaaaucca

SEQ ID NO: 41634 - RNA, 23 nt, Artificial Sequence
  Chemically synthesized
agaccacagggccuaaaauccau

SEQ ID NO: 41635 - RNA, 23 nt, Artificial Sequence
  Chemically synthesized
gaccacagggccuaaaauccauu

SEQ ID NO: 41636 - RNA, 23 nt, Artificial Sequence
  Chemically synthesized
accacagggccuaaaauccauuu

SEQ ID NO: 41637 - RNA, 23 nt, Artificial Sequence
  Chemically synthesized
cucuacagaaggugauguugugc

SEQ ID NO: 41638 - RNA, 23 nt, Artificial Sequence
  Chemically synthesized
guaagagaucagcaaaccacuca

SEQ ID NO: 41639 - RNA, 23 nt, Artificial Sequence
  Chemically synthesized
uaagagaucagcaaaccacucaa

SEQ ID NO: 41640 - RNA, 23 nt, Artificial Sequence
  Chemically synthesized
aaaagcucuugcaucccggcaaa

SEQ ID NO: 41641 - RNA, 23 nt, Artificial Sequence
  Chemically synthesized
ccauuuuaaagccacgcuuuuuc

SEQ ID NO: 41642 - RNA, 23 nt, Artificial Sequence
  Chemically synthesized
cauuuuaaagccacgcuuuuuca

SEQ ID NO: 41643 - RNA, 23 nt, Artificial Sequence
  Chemically synthesized
auuuuaaagccacgcuuuuucau

SEQ ID NO: 41644 - RNA, 23 nt, Artificial Sequence
  Chemically synthesized
uuuuaaagccacgcuuuuucaug

SEQ ID NO: 41645 - RNA, 23 nt, Artificial Sequence
  Chemically synthesized
uuuaaagccacgcuuuuucaugu

SEQ ID NO: 41646 - RNA, 23 nt, Artificial Sequence
  Chemically synthesized
acgcuuuuucaugugaaguucca

SEQ ID NO: 41647 - RNA, 23 nt, Artificial Sequence
  Chemically synthesized
cgcuuuuucaugugaaguuccag

SEQ ID NO: 41648 - RNA, 23 nt, Artificial Sequence
  Chemically synthesized
gcuuuuucaugugaaguuccagg

SEQ ID NO: 41649 - RNA, 23 nt, Artificial Sequence
  Chemically synthesized
ugcauacaagaccacagggccua

SEQ ID NO: 41650 - RNA, 23 nt, Artificial Sequence
  Chemically synthesized
auaacucguguguaauggaaaga

SEQ ID NO: 41651 - RNA, 23 nt, Artificial Sequence
  Chemically synthesized
uaacucguguguaauggaaagac

SEQ ID NO: 41652 - RNA, 23 nt, Artificial Sequence
  Chemically synthesized
cguguguaauggaaagacuccuc

SEQ ID NO: 41653 - RNA, 23 nt, Artificial Sequence
  Chemically synthesized
ugaauacaaguggcacaucuuuu

SEQ ID NO: 41654 - RNA, 23 nt, Artificial Sequence
  Chemically synthesized
acucauuguuccaguugggccuc

SEQ ID NO: 41655 - RNA, 23 nt, Artificial Sequence
  Chemically synthesized
cucauuguuccaguugggccucc

SEQ ID NO: 41656 - RNA, 23 nt, Artificial Sequence
  Chemically synthesized
ucauuguuccaguugggccuccc

SEQ ID NO: 41657 - RNA, 23 nt, Artificial Sequence
  Chemically synthesized
aaggucuucugcuuuaagccugu

SEQ ID NO: 41658 - RNA, 23 nt, Artificial Sequence
  Chemically synthesized
aggucuucugcuuuaagccugua

SEQ ID NO: 41659 - RNA, 23 nt, Artificial Sequence
  Chemically synthesized
ggucuucugcuuuaagccuguaa

SEQ ID NO: 41660 - RNA, 23 nt, Artificial Sequence
  Chemically synthesized
gucuucugcuuuaagccuguaau

SEQ ID NO: 41661 - RNA, 23 nt, Artificial Sequence
  Chemically synthesized
ucuucugcuuuaagccuguaauc

SEQ ID NO: 41662 - RNA, 23 nt, Artificial Sequence
  Chemically synthesized
ugacaacuucuuguugaaaucgc

SEQ ID NO: 41663 - RNA, 23 nt, Artificial Sequence
  Chemically synthesized
gacaacuucuuguugaaaucgcc

SEQ ID NO: 41664 - RNA, 23 nt, Artificial Sequence
  Chemically synthesized
acaacuucuuguugaaaucgcca

SEQ ID NO: 41665 - RNA, 23 nt, Artificial Sequence
  Chemically synthesized
augaaaacaugguguguguacca

SEQ ID NO: 41666 - RNA, 23 nt, Artificial Sequence
  Chemically synthesized
ugaaaacaugguguguguaccag

SEQ ID NO: 41667 - RNA, 23 nt, Artificial Sequence
  Chemically synthesized
gaaaacaugguguguguaccaga

SEQ ID NO: 41668 - RNA, 23 nt, Artificial Sequence
  Chemically synthesized
aaaacaugguguguguaccagaa

SEQ ID NO: 41669 - RNA, 23 nt, Artificial Sequence
  Chemically synthesized
cugcuugaacucauuguuccagu

SEQ ID NO: 41670 - RNA, 23 nt, Artificial Sequence
  Chemically synthesized
ugcuugaacucauuguuccaguu

SEQ ID NO: 41671 - RNA, 23 nt, Artificial Sequence
  Chemically synthesized
gcuugaacucauuguuccaguug

SEQ ID NO: 41672 - RNA, 23 nt, Artificial Sequence
  Chemically synthesized
gaaggucuucugcuuuaagccug

SEQ ID NO: 41673 - RNA, 23 nt, Artificial Sequence
  Chemically synthesized
acuaauaugguggagagacccuc

SEQ ID NO: 41674 - RNA, 23 nt, Artificial Sequence
  Chemically synthesized
cuaauaugguggagagacccuca

SEQ ID NO: 41675 - RNA, 23 nt, Artificial Sequence
  Chemically synthesized
uaauaugguggagagacccucau

SEQ ID NO: 41676 - RNA, 23 nt, Artificial Sequence
  Chemically synthesized
aauaugguggagagacccucauu

SEQ ID NO: 41677 - RNA, 23 nt, Artificial Sequence
  Chemically synthesized
auaugguggagagacccucauuc

SEQ ID NO: 41678 - RNA, 23 nt, Artificial Sequence
  Chemically synthesized
uacuuguugcucuucggcuguca

SEQ ID NO: 41679 - RNA, 23 nt, Artificial Sequence
  Chemically synthesized
acuuguugcucuucggcugucag

SEQ ID NO: 41680 - RNA, 23 nt, Artificial Sequence
  Chemically synthesized
cuuguugcucuucggcugucagg

SEQ ID NO: 41681 - RNA, 23 nt, Artificial Sequence
  Chemically synthesized
uuguugcucuucggcugucagga

SEQ ID NO: 41682 - RNA, 23 nt, Artificial Sequence
  Chemically synthesized
uugcauuaacagcuaucccauag

SEQ ID NO: 41683 - RNA, 23 nt, Artificial Sequence
  Chemically synthesized
ugcauuaacagcuaucccauagg

SEQ ID NO: 41684 - RNA, 23 nt, Artificial Sequence
  Chemically synthesized
gcauuaacagcuaucccauaggc

SEQ ID NO: 41685 - RNA, 23 nt, Artificial Sequence
  Chemically synthesized
cauuaacagcuaucccauaggcg

SEQ ID NO: 41686 - RNA, 23 nt, Artificial Sequence
  Chemically synthesized
auuaacagcuaucccauaggcga

SEQ ID NO: 41687 - RNA, 23 nt, Artificial Sequence
  Chemically synthesized
uuaacagcuaucccauaggcgac

SEQ ID NO: 41688 - RNA, 23 nt, Artificial Sequence
  Chemically synthesized
uaugaaugaaauaagguuucgac

SEQ ID NO: 41689 - RNA, 23 nt, Artificial Sequence
  Chemically synthesized
augaaugaaauaagguuucgacu

SEQ ID NO: 41690 - RNA, 23 nt, Artificial Sequence
  Chemically synthesized
ugaaugaaauaagguuucgacug

SEQ ID NO: 41691 - RNA, 23 nt, Artificial Sequence
  Chemically synthesized
gaaugaaauaagguuucgacuga

SEQ ID NO: 41692 - RNA, 23 nt, Artificial Sequence
  Chemically synthesized
aaguaugguauaguguacuguuc

SEQ ID NO: 41693 - RNA, 23 nt, Artificial Sequence
  Chemically synthesized
aguaugguauaguguacuguuca

SEQ ID NO: 41694 - RNA, 23 nt, Artificial Sequence
  Chemically synthesized
guaugguauaguguacuguucac

SEQ ID NO: 41695 - RNA, 23 nt, Artificial Sequence
  Chemically synthesized
uaugguauaguguacuguucaca

SEQ ID NO: 41696 - RNA, 23 nt, Artificial Sequence
  Chemically synthesized
augguauaguguacuguucacaa

SEQ ID NO: 41697 - RNA, 23 nt, Artificial Sequence
  Chemically synthesized
cggcaaauccaguagaaauacac

SEQ ID NO: 41698 - RNA, 23 nt, Artificial Sequence
  Chemically synthesized
ggcaaauccaguagaaauacacc

SEQ ID NO: 41699 - RNA, 23 nt, Artificial Sequence
  Chemically synthesized
gcaaauccaguagaaauacaccu

SEQ ID NO: 41700 - RNA, 23 nt, Artificial Sequence
  Chemically synthesized
caaauccaguagaaauacaccuu

SEQ ID NO: 41701 - RNA, 23 nt, Artificial Sequence
  Chemically synthesized
aaauccaguagaaauacaccuug

SEQ ID NO: 41702 - RNA, 23 nt, Artificial Sequence
  Chemically synthesized
aauccaguagaaauacaccuugc

SEQ ID NO: 41703 - RNA, 23 nt, Artificial Sequence
  Chemically synthesized
auccaguagaaauacaccuugcu

SEQ ID NO: 41704 - RNA, 23 nt, Artificial Sequence
  Chemically synthesized
uccaguagaaauacaccuugcuc

SEQ ID NO: 41705 - RNA, 23 nt, Artificial Sequence
  Chemically synthesized
ugugcacgcugaaaaagucuucc

SEQ ID NO: 41706 - RNA, 23 nt, Artificial Sequence
  Chemically synthesized
gugcacgcugaaaaagucuuccu

SEQ ID NO: 41707 - RNA, 23 nt, Artificial Sequence
  Chemically synthesized
ugcacgcugaaaaagucuuccug

SEQ ID NO: 41708 - RNA, 23 nt, Artificial Sequence
  Chemically synthesized
gcacgcugaaaaagucuuccugg

SEQ ID NO: 41709 - RNA, 23 nt, Artificial Sequence
  Chemically synthesized
uccuugccagaaaauugaggcac

SEQ ID NO: 41710 - RNA, 23 nt, Artificial Sequence
  Chemically synthesized
ccuugccagaaaauugaggcacg

SEQ ID NO: 41711 - RNA, 23 nt, Artificial Sequence
  Chemically synthesized
cuugccagaaaauugaggcacgg

SEQ ID NO: 41712 - RNA, 23 nt, Artificial Sequence
  Chemically synthesized
ccagaacaacucauaggaggccu

SEQ ID NO: 41713 - RNA, 23 nt, Artificial Sequence
  Chemically synthesized
cagaacaacucauaggaggccug

SEQ ID NO: 41714 - RNA, 23 nt, Artificial Sequence
  Chemically synthesized
agaacaacucauaggaggccugu

SEQ ID NO: 41715 - RNA, 23 nt, Artificial Sequence
  Chemically synthesized
gaacaacucauaggaggccuguc

SEQ ID NO: 41716 - RNA, 23 nt, Artificial Sequence
  Chemically synthesized
aacaacucauaggaggccugucu

SEQ ID NO: 41717 - RNA, 23 nt, Artificial Sequence
  Chemically synthesized
ccugcuauuguccuuagcaauuc

SEQ ID NO: 41718 - RNA, 23 nt, Artificial Sequence
  Chemically synthesized
cugcuauuguccuuagcaauuca

SEQ ID NO: 41719 - RNA, 23 nt, Artificial Sequence
  Chemically synthesized
ugcuauuguccuuagcaauucag

SEQ ID NO: 41720 - RNA, 23 nt, Artificial Sequence
  Chemically synthesized
gcuauuguccuuagcaauucagu

SEQ ID NO: 41721 - RNA, 23 nt, Artificial Sequence
  Chemically synthesized
cuauuguccuuagcaauucagug

SEQ ID NO: 41722 - RNA, 23 nt, Artificial Sequence
  Chemically synthesized
uaauggaaagacuccuccucuuc

SEQ ID NO: 41723 - RNA, 23 nt, Artificial Sequence
  Chemically synthesized
aauggaaagacuccuccucuuca

SEQ ID NO: 41724 - RNA, 23 nt, Artificial Sequence
  Chemically synthesized
cuucugcuuuaagccuguaauca

SEQ ID NO: 41725 - RNA, 23 nt, Artificial Sequence
  Chemically synthesized
uucugcuuuaagccuguaaucac

SEQ ID NO: 41726 - RNA, 23 nt, Artificial Sequence
  Chemically synthesized
gggucugugccucacugcauuug

SEQ ID NO: 41727 - RNA, 23 nt, Artificial Sequence
  Chemically synthesized
ggucugugccucacugcauuugu

SEQ ID NO: 41728 - RNA, 23 nt, Artificial Sequence
  Chemically synthesized
gucugugccucacugcauuugua

SEQ ID NO: 41729 - RNA, 23 nt, Artificial Sequence
  Chemically synthesized
ucugugccucacugcauuuguac

SEQ ID NO: 41730 - RNA, 23 nt, Artificial Sequence
  Chemically synthesized
cugugccucacugcauuuguacc

SEQ ID NO: 41731 - RNA, 23 nt, Artificial Sequence
  Chemically synthesized
cacgcuuuuucaugugaaguucc

SEQ ID NO: 41732 - RNA, 23 nt, Artificial Sequence
  Chemically synthesized
gggccuaaaauccauuuccaagc

SEQ ID NO: 41733 - RNA, 23 nt, Artificial Sequence
  Chemically synthesized
uacuuguuccucuuaugaaugaa

SEQ ID NO: 41734 - RNA, 23 nt, Artificial Sequence
  Chemically synthesized
acuuguuccucuuaugaaugaaa

SEQ ID NO: 41735 - RNA, 23 nt, Artificial Sequence
  Chemically synthesized
cuuguuccucuuaugaaugaaau

SEQ ID NO: 41736 - RNA, 23 nt, Artificial Sequence
  Chemically synthesized
uuguuccucuuaugaaugaaaua

SEQ ID NO: 41737 - RNA, 23 nt, Artificial Sequence
  Chemically synthesized
aaaauucaggcacagugcggaug

SEQ ID NO: 41738 - RNA, 23 nt, Artificial Sequence
  Chemically synthesized
aaauucaggcacagugcggaugc

SEQ ID NO: 41739 - RNA, 23 nt, Artificial Sequence
  Chemically synthesized
cucguguguaauggaaagacucc

SEQ ID NO: 41740 - RNA, 23 nt, Artificial Sequence
  Chemically synthesized
ucguguguaauggaaagacuccu

SEQ ID NO: 41741 - RNA, 23 nt, Artificial Sequence
  Chemically synthesized
aggaaguaugguauaguguacug

SEQ ID NO: 41742 - RNA, 23 nt, Artificial Sequence
  Chemically synthesized
ggaaguaugguauaguguacugu

SEQ ID NO: 41743 - RNA, 23 nt, Artificial Sequence
  Chemically synthesized
gaaguaugguauaguguacuguu

SEQ ID NO: 41744 - RNA, 23 nt, Artificial Sequence
  Chemically synthesized
acaaugccuggacuugaccucca

SEQ ID NO: 41745 - RNA, 23 nt, Artificial Sequence
  Chemically synthesized
caaugccuggacuugaccuccaa

SEQ ID NO: 41746 - RNA, 23 nt, Artificial Sequence
  Chemically synthesized
aaugccuggacuugaccuccaaa

SEQ ID NO: 41747 - RNA, 23 nt, Artificial Sequence
  Chemically synthesized
ggacuugaccuccaaagucuaga

SEQ ID NO: 41748 - RNA, 23 nt, Artificial Sequence
  Chemically synthesized
gacuugaccuccaaagucuagaa

SEQ ID NO: 41749 - RNA, 23 nt, Artificial Sequence
  Chemically synthesized
acuugaccuccaaagucuagaag

SEQ ID NO: 41750 - RNA, 23 nt, Artificial Sequence
  Chemically synthesized
cuugaccuccaaagucuagaagc

SEQ ID NO: 41751 - RNA, 23 nt, Artificial Sequence
  Chemically synthesized
uugaccuccaaagucuagaagcu

SEQ ID NO: 41752 - RNA, 23 nt, Artificial Sequence
  Chemically synthesized
ggugauuguaggcaaucugcuug

SEQ ID NO: 41753 - RNA, 23 nt, Artificial Sequence
  Chemically synthesized
gugauuguaggcaaucugcuuga

SEQ ID NO: 41754 - RNA, 23 nt, Artificial Sequence
  Chemically synthesized
ugauuguaggcaaucugcuugaa

SEQ ID NO: 41755 - RNA, 23 nt, Artificial Sequence
  Chemically synthesized
gauuguaggcaaucugcuugaac

SEQ ID NO: 41756 - RNA, 23 nt, Artificial Sequence
  Chemically synthesized
auuguaggcaaucugcuugaacu

SEQ ID NO: 41757 - RNA, 23 nt, Artificial Sequence
  Chemically synthesized
uuguaggcaaucugcuugaacuc

SEQ ID NO: 41758 - RNA, 23 nt, Artificial Sequence
  Chemically synthesized
cauuguuccaguugggccuccca

SEQ ID NO: 41759 - RNA, 23 nt, Artificial Sequence
  Chemically synthesized
auuguuccaguugggccucccau

SEQ ID NO: 41760 - RNA, 23 nt, Artificial Sequence
  Chemically synthesized
uacuaauaugguggagagacccu

SEQ ID NO: 41761 - RNA, 23 nt, Artificial Sequence
  Chemically synthesized
acacuggguagugaaauacaucu

SEQ ID NO: 41762 - RNA, 23 nt, Artificial Sequence
  Chemically synthesized
cacuggguagugaaauacaucug

SEQ ID NO: 41763 - RNA, 23 nt, Artificial Sequence
  Chemically synthesized
acuggguagugaaauacaucugu

SEQ ID NO: 41764 - RNA, 23 nt, Artificial Sequence
  Chemically synthesized
cuggguagugaaauacaucuguc

SEQ ID NO: 41765 - RNA, 23 nt, Artificial Sequence
  Chemically synthesized
uuaaagccacgcuuuuucaugug

SEQ ID NO: 41766 - RNA, 23 nt, Artificial Sequence
  Chemically synthesized
uguugcucuucggcugucaggaa

SEQ ID NO: 41767 - RNA, 23 nt, Artificial Sequence
  Chemically synthesized
agaagacgaugaaaacauggugu

SEQ ID NO: 41768 - RNA, 23 nt, Artificial Sequence
  Chemically synthesized
gaagacgaugaaaacauggugug

SEQ ID NO: 41769 - RNA, 23 nt, Artificial Sequence
  Chemically synthesized
aagacgaugaaaacauggugugu

SEQ ID NO: 41770 - RNA, 23 nt, Artificial Sequence
  Chemically synthesized
aaacaugguguguguaccagaac

SEQ ID NO: 41771 - RNA, 23 nt, Artificial Sequence
  Chemically synthesized
aacaugguguguguaccagaaca

SEQ ID NO: 41772 - RNA, 23 nt, Artificial Sequence
  Chemically synthesized
ucaggaaauuucuucucccucac

SEQ ID NO: 41773 - RNA, 23 nt, Artificial Sequence
  Chemically synthesized
gguguugcccagcuuggaaagug

SEQ ID NO: 41774 - RNA, 23 nt, Artificial Sequence
  Chemically synthesized
guguugcccagcuuggaaagugc

SEQ ID NO: 41775 - RNA, 23 nt, Artificial Sequence
  Chemically synthesized
uguugcccagcuuggaaagugcg

SEQ ID NO: 41776 - RNA, 23 nt, Artificial Sequence
  Chemically synthesized
guugcccagcuuggaaagugcgg

SEQ ID NO: 41777 - RNA, 23 nt, Artificial Sequence
  Chemically synthesized
uugcccagcuuggaaagugcggc

SEQ ID NO: 41778 - RNA, 23 nt, Artificial Sequence
  Chemically synthesized
aauucaggcacagugcggaugcu

SEQ ID NO: 41779 - RNA, 23 nt, Artificial Sequence
  Chemically synthesized
aacucguguguaauggaaagacu

SEQ ID NO: 41780 - RNA, 23 nt, Artificial Sequence
  Chemically synthesized
acucguguguaauggaaagacuc

SEQ ID NO: 41781 - RNA, 23 nt, Artificial Sequence
  Chemically synthesized
guggcacaucuuuugaagugucc

SEQ ID NO: 41782 - RNA, 23 nt, Artificial Sequence
  Chemically synthesized
uggcacaucuuuugaaguguccu

SEQ ID NO: 41783 - RNA, 23 nt, Artificial Sequence
  Chemically synthesized
ucuuuugaaguguccucgagaga

SEQ ID NO: 41784 - RNA, 23 nt, Artificial Sequence
  Chemically synthesized
cuuuugaaguguccucgagagag

SEQ ID NO: 41785 - RNA, 23 nt, Artificial Sequence
  Chemically synthesized
uuuugaaguguccucgagagagc

SEQ ID NO: 41786 - RNA, 23 nt, Artificial Sequence
  Chemically synthesized
uuugaaguguccucgagagagcu

SEQ ID NO: 41787 - RNA, 23 nt, Artificial Sequence
  Chemically synthesized
uggggugauuguaggcaaucugc

SEQ ID NO: 41788 - RNA, 23 nt, Artificial Sequence
  Chemically synthesized
ggggugauuguaggcaaucugcu

SEQ ID NO: 41789 - RNA, 23 nt, Artificial Sequence
  Chemically synthesized
gggugauuguaggcaaucugcuu

SEQ ID NO: 41790 - RNA, 23 nt, Artificial Sequence
  Chemically synthesized
gagaguacuaauaugguggagag

SEQ ID NO: 41791 - RNA, 23 nt, Artificial Sequence
  Chemically synthesized
agaguacuaauaugguggagaga

SEQ ID NO: 41792 - RNA, 23 nt, Artificial Sequence
  Chemically synthesized
ucugcuugaacucauuguuccag

SEQ ID NO: 41793 - RNA, 23 nt, Artificial Sequence
  Chemically synthesized
gaguacuaauaugguggagagac

SEQ ID NO: 41794 - RNA, 23 nt, Artificial Sequence
  Chemically synthesized
gagagagacugucuuggguuugg

SEQ ID NO: 41795 - RNA, 23 nt, Artificial Sequence
  Chemically synthesized
agagagacugucuuggguuuggc

SEQ ID NO: 41796 - RNA, 23 nt, Artificial Sequence
  Chemically synthesized
gagagacugucuuggguuuggcc

SEQ ID NO: 41797 - RNA, 23 nt, Artificial Sequence
  Chemically synthesized
agagacugucuuggguuuggccu

SEQ ID NO: 41798 - RNA, 23 nt, Artificial Sequence
  Chemically synthesized
gagacugucuuggguuuggccuc

SEQ ID NO: 41799 - RNA, 23 nt, Artificial Sequence
  Chemically synthesized
ccucugcagcaaauacuuguucc

SEQ ID NO: 41800 - RNA, 23 nt, Artificial Sequence
  Chemically synthesized
cucugcagcaaauacuuguuccu

SEQ ID NO: 41801 - RNA, 23 nt, Artificial Sequence
  Chemically synthesized
ucugcagcaaauacuuguuccuc

SEQ ID NO: 41802 - RNA, 23 nt, Artificial Sequence
  Chemically synthesized
cugcagcaaauacuuguuccucu

SEQ ID NO: 41803 - RNA, 23 nt, Artificial Sequence
  Chemically synthesized
ugcagcaaauacuuguuccucuu

SEQ ID NO: 41804 - RNA, 23 nt, Artificial Sequence
  Chemically synthesized
uauucaccaguucccaacuggga

SEQ ID NO: 41805 - RNA, 23 nt, Artificial Sequence
  Chemically synthesized
auucaccaguucccaacugggag

SEQ ID NO: 41806 - RNA, 23 nt, Artificial Sequence
  Chemically synthesized
uucaccaguucccaacugggagc

SEQ ID NO: 41807 - RNA, 23 nt, Artificial Sequence
  Chemically synthesized
ggccgucacaggaauuccuggug

SEQ ID NO: 41808 - RNA, 23 nt, Artificial Sequence
  Chemically synthesized
gccgucacaggaauuccuggugg

SEQ ID NO: 41809 - RNA, 23 nt, Artificial Sequence
  Chemically synthesized
ccgucacaggaauuccuggugga

SEQ ID NO: 41810 - RNA, 23 nt, Artificial Sequence
  Chemically synthesized
gucacaggaauuccugguggagu

SEQ ID NO: 41811 - RNA, 23 nt, Artificial Sequence
  Chemically synthesized
guacuaauaugguggagagaccc

SEQ ID NO: 41812 - RNA, 23 nt, Artificial Sequence
  Chemically synthesized
gucguuaguaagggcuucccuag

SEQ ID NO: 41813 - RNA, 23 nt, Artificial Sequence
  Chemically synthesized
ucguuaguaagggcuucccuagu

SEQ ID NO: 41814 - RNA, 23 nt, Artificial Sequence
  Chemically synthesized
cguuaguaagggcuucccuagua

SEQ ID NO: 41815 - RNA, 23 nt, Artificial Sequence
  Chemically synthesized
guuaguaagggcuucccuaguaa

SEQ ID NO: 41816 - RNA, 23 nt, Artificial Sequence
  Chemically synthesized
uuaguaagggcuucccuaguaaa

SEQ ID NO: 41817 - RNA, 23 nt, Artificial Sequence
  Chemically synthesized
ucaugugaaguuccaggacucca

SEQ ID NO: 41818 - RNA, 23 nt, Artificial Sequence
  Chemically synthesized
caugugaaguuccaggacuccag

SEQ ID NO: 41819 - RNA, 23 nt, Artificial Sequence
  Chemically synthesized
augugaaguuccaggacuccaga

SEQ ID NO: 41820 - RNA, 23 nt, Artificial Sequence
  Chemically synthesized
ugugaaguuccaggacuccagag

SEQ ID NO: 41821 - RNA, 23 nt, Artificial Sequence
  Chemically synthesized
ugccauucugcauagcggucucu

SEQ ID NO: 41822 - RNA, 23 nt, Artificial Sequence
  Chemically synthesized
gccauucugcauagcggucucua

SEQ ID NO: 41823 - RNA, 23 nt, Artificial Sequence
  Chemically synthesized
ccauucugcauagcggucucuac

SEQ ID NO: 41824 - RNA, 23 nt, Artificial Sequence
  Chemically synthesized
cauucugcauagcggucucuaca

SEQ ID NO: 41825 - RNA, 23 nt, Artificial Sequence
  Chemically synthesized
auucugcauagcggucucuacag

SEQ ID NO: 41826 - RNA, 23 nt, Artificial Sequence
  Chemically synthesized
ugcagagagagacugucuugggu

SEQ ID NO: 41827 - RNA, 23 nt, Artificial Sequence
  Chemically synthesized
gcagagagagacugucuuggguu

SEQ ID NO: 41828 - RNA, 23 nt, Artificial Sequence
  Chemically synthesized
cagagagagacugucuuggguuu

SEQ ID NO: 41829 - RNA, 23 nt, Artificial Sequence
  Chemically synthesized
agagagagacugucuuggguuug

SEQ ID NO: 41830 - RNA, 23 nt, Artificial Sequence
  Chemically synthesized
agacugucuuggguuuggccucg

SEQ ID NO: 41831 - RNA, 23 nt, Artificial Sequence
  Chemically synthesized
aauaagguuucgacugacaggua

SEQ ID NO: 41832 - RNA, 23 nt, Artificial Sequence
  Chemically synthesized
auaagguuucgacugacagguau

SEQ ID NO: 41833 - RNA, 23 nt, Artificial Sequence
  Chemically synthesized
uaagguuucgacugacagguauu

SEQ ID NO: 41834 - RNA, 23 nt, Artificial Sequence
  Chemically synthesized
aagguuucgacugacagguauua

SEQ ID NO: 41835 - RNA, 23 nt, Artificial Sequence
  Chemically synthesized
ucacaggaauuccugguggaguu

SEQ ID NO: 41836 - RNA, 23 nt, Artificial Sequence
  Chemically synthesized
cccauagaaggucuucugcuuua

SEQ ID NO: 41837 - RNA, 23 nt, Artificial Sequence
  Chemically synthesized
ccauagaaggucuucugcuuuaa

SEQ ID NO: 41838 - RNA, 23 nt, Artificial Sequence
  Chemically synthesized
cauagaaggucuucugcuuuaag

SEQ ID NO: 41839 - RNA, 23 nt, Artificial Sequence
  Chemically synthesized
auagaaggucuucugcuuuaagc

SEQ ID NO: 41840 - RNA, 23 nt, Artificial Sequence
  Chemically synthesized
uagaaggucuucugcuuuaagcc

SEQ ID NO: 41841 - RNA, 23 nt, Artificial Sequence
  Chemically synthesized
ucgucccaguguaaagcuaugug

SEQ ID NO: 41842 - RNA, 23 nt, Artificial Sequence
  Chemically synthesized
cgucccaguguaaagcuauguga

SEQ ID NO: 41843 - RNA, 23 nt, Artificial Sequence
  Chemically synthesized
gucccaguguaaagcuaugugaa

SEQ ID NO: 41844 - RNA, 23 nt, Artificial Sequence
  Chemically synthesized
ucccaguguaaagcuaugugaag

SEQ ID NO: 41845 - RNA, 23 nt, Artificial Sequence
  Chemically synthesized
cccaguguaaagcuaugugaaga

SEQ ID NO: 41846 - RNA, 23 nt, Artificial Sequence
  Chemically synthesized
uaacucagaaagugaguuuuccc

SEQ ID NO: 41847 - RNA, 23 nt, Artificial Sequence
  Chemically synthesized
aacucagaaagugaguuuucccc

SEQ ID NO: 41848 - RNA, 23 nt, Artificial Sequence
  Chemically synthesized
acucagaaagugaguuuuccccu

SEQ ID NO: 41849 - RNA, 23 nt, Artificial Sequence
  Chemically synthesized
cucagaaagugaguuuuccccug

SEQ ID NO: 41850 - RNA, 23 nt, Artificial Sequence
  Chemically synthesized
ucagaaagugaguuuuccccugc

SEQ ID NO: 41851 - RNA, 23 nt, Artificial Sequence
  Chemically synthesized
acacacacuggguagugaaauac

SEQ ID NO: 41852 - RNA, 23 nt, Artificial Sequence
  Chemically synthesized
cacacacuggguagugaaauaca

SEQ ID NO: 41853 - RNA, 23 nt, Artificial Sequence
  Chemically synthesized
acacacuggguagugaaauacau

SEQ ID NO: 41854 - RNA, 23 nt, Artificial Sequence
  Chemically synthesized
cacacuggguagugaaauacauc

SEQ ID NO: 41855 - RNA, 23 nt, Artificial Sequence
  Chemically synthesized
uccauuuccaagccgaggguucc

SEQ ID NO: 41856 - RNA, 23 nt, Artificial Sequence
  Chemically synthesized
ccauuuccaagccgaggguuccu

SEQ ID NO: 41857 - RNA, 23 nt, Artificial Sequence
  Chemically synthesized
cauuuccaagccgaggguuccuu

SEQ ID NO: 41858 - RNA, 23 nt, Artificial Sequence
  Chemically synthesized
auuuccaagccgaggguuccuug

SEQ ID NO: 41859 - RNA, 23 nt, Artificial Sequence
  Chemically synthesized
ugguguguguaccagaacaacuc

SEQ ID NO: 41860 - RNA, 23 nt, Artificial Sequence
  Chemically synthesized
gguguguguaccagaacaacuca

SEQ ID NO: 41861 - RNA, 23 nt, Artificial Sequence
  Chemically synthesized
guguguguaccagaacaacucau

SEQ ID NO: 41862 - RNA, 23 nt, Artificial Sequence
  Chemically synthesized
uguguguaccagaacaacucaua

SEQ ID NO: 41863 - RNA, 23 nt, Artificial Sequence
  Chemically synthesized
guguguaccagaacaacucauag

SEQ ID NO: 41864 - RNA, 23 nt, Artificial Sequence
  Chemically synthesized
ggccugucugaugaacucaguug

SEQ ID NO: 41865 - RNA, 23 nt, Artificial Sequence
  Chemically synthesized
gccugucugaugaacucaguuga

SEQ ID NO: 41866 - RNA, 23 nt, Artificial Sequence
  Chemically synthesized
ccugucugaugaacucaguugac

SEQ ID NO: 41867 - RNA, 23 nt, Artificial Sequence
  Chemically synthesized
cugucugaugaacucaguugacg

SEQ ID NO: 41868 - RNA, 23 nt, Artificial Sequence
  Chemically synthesized
ugucugaugaacucaguugacga

SEQ ID NO: 41869 - RNA, 23 nt, Artificial Sequence
  Chemically synthesized
gaugaacucaguugacgagguca

SEQ ID NO: 41870 - RNA, 23 nt, Artificial Sequence
  Chemically synthesized
augaacucaguugacgaggucau

SEQ ID NO: 41871 - RNA, 23 nt, Artificial Sequence
  Chemically synthesized
ugaacucaguugacgaggucaug

SEQ ID NO: 41872 - RNA, 23 nt, Artificial Sequence
  Chemically synthesized
gaacucaguugacgaggucauga

SEQ ID NO: 41873 - RNA, 23 nt, Artificial Sequence
  Chemically synthesized
aacucaguugacgaggucaugau

SEQ ID NO: 41874 - RNA, 23 nt, Artificial Sequence
  Chemically synthesized
agaaaugcgccacgauguggaug

SEQ ID NO: 41875 - RNA, 23 nt, Artificial Sequence
  Chemically synthesized
gaaaugcgccacgauguggaugg

SEQ ID NO: 41876 - RNA, 23 nt, Artificial Sequence
  Chemically synthesized
aaaugcgccacgauguggauggu

SEQ ID NO: 41877 - RNA, 23 nt, Artificial Sequence
  Chemically synthesized
augguugcauuaacagcuauccc

SEQ ID NO: 41878 - RNA, 23 nt, Artificial Sequence
  Chemically synthesized
ugguugcauuaacagcuauccca

SEQ ID NO: 41879 - RNA, 23 nt, Artificial Sequence
  Chemically synthesized
gguugcauuaacagcuaucccau

SEQ ID NO: 41880 - RNA, 23 nt, Artificial Sequence
  Chemically synthesized
guugcauuaacagcuaucccaua

SEQ ID NO: 41881 - RNA, 23 nt, Artificial Sequence
  Chemically synthesized
cgaccaguuugugaaaucugagg

SEQ ID NO: 41882 - RNA, 23 nt, Artificial Sequence
  Chemically synthesized
uaguguacuguucacaauaguua

SEQ ID NO: 41883 - RNA, 23 nt, Artificial Sequence
  Chemically synthesized
aguguacuguucacaauaguuaa

SEQ ID NO: 41884 - RNA, 23 nt, Artificial Sequence
  Chemically synthesized
guguacuguucacaauaguuaau

SEQ ID NO: 41885 - RNA, 23 nt, Artificial Sequence
  Chemically synthesized
uguacuguucacaauaguuaauu

SEQ ID NO: 41886 - RNA, 23 nt, Artificial Sequence
  Chemically synthesized
guacuguucacaauaguuaauua

SEQ ID NO: 41887 - RNA, 23 nt, Artificial Sequence
  Chemically synthesized
agaaggucuucugcuuuaagccu

SEQ ID NO: 41888 - RNA, 23 nt, Artificial Sequence
  Chemically synthesized
cguguuuccagggagaguaagag

SEQ ID NO: 41889 - RNA, 23 nt, Artificial Sequence
  Chemically synthesized
guguuuccagggagaguaagaga

SEQ ID NO: 41890 - RNA, 23 nt, Artificial Sequence
  Chemically synthesized
uguuuccagggagaguaagagau

SEQ ID NO: 41891 - RNA, 23 nt, Artificial Sequence
  Chemically synthesized
guuuccagggagaguaagagauc

SEQ ID NO: 41892 - RNA, 23 nt, Artificial Sequence
  Chemically synthesized
aaauacaucugucagggcaguuc

SEQ ID NO: 41893 - RNA, 23 nt, Artificial Sequence
  Chemically synthesized
aauacaucugucagggcaguucc

SEQ ID NO: 41894 - RNA, 23 nt, Artificial Sequence
  Chemically synthesized
auacaucugucagggcaguucca

SEQ ID NO: 41895 - RNA, 23 nt, Artificial Sequence
  Chemically synthesized
uacaucugucagggcaguuccaa

SEQ ID NO: 41896 - RNA, 23 nt, Artificial Sequence
  Chemically synthesized
acaucugucagggcaguuccaaa

SEQ ID NO: 41897 - RNA, 23 nt, Artificial Sequence
  Chemically synthesized
augugcacgcugaaaaagucuuc

SEQ ID NO: 41898 - RNA, 23 nt, Artificial Sequence
  Chemically synthesized
ugccacuccagcgaagauauggc

SEQ ID NO: 41899 - RNA, 23 nt, Artificial Sequence
  Chemically synthesized
gccacuccagcgaagauauggcu

SEQ ID NO: 41900 - RNA, 23 nt, Artificial Sequence
  Chemically synthesized
ccacuccagcgaagauauggcug

SEQ ID NO: 41901 - RNA, 23 nt, Artificial Sequence
  Chemically synthesized
cacuccagcgaagauauggcugg

SEQ ID NO: 41902 - RNA, 23 nt, Artificial Sequence
  Chemically synthesized
acuccagcgaagauauggcuggg

SEQ ID NO: 41903 - RNA, 23 nt, Artificial Sequence
  Chemically synthesized
ugugcagagagagacugucuugg

SEQ ID NO: 41904 - RNA, 23 nt, Artificial Sequence
  Chemically synthesized
gugcagagagagacugucuuggg

SEQ ID NO: 41905 - RNA, 23 nt, Artificial Sequence
  Chemically synthesized
uggguuuggccucgaacaauccg

SEQ ID NO: 41906 - RNA, 23 nt, Artificial Sequence
  Chemically synthesized
cugucaggaaauuucuucucccu

SEQ ID NO: 41907 - RNA, 23 nt, Artificial Sequence
  Chemically synthesized
ugucaggaaauuucuucucccuc

SEQ ID NO: 41908 - RNA, 23 nt, Artificial Sequence
  Chemically synthesized
gucaggaaauuucuucucccuca

SEQ ID NO: 41909 - RNA, 23 nt, Artificial Sequence
  Chemically synthesized
ugaugaacucaguugacgagguc

SEQ ID NO: 41910 - RNA, 23 nt, Artificial Sequence
  Chemically synthesized
ucaguugacgaggucaugaucaa

SEQ ID NO: 41911 - RNA, 23 nt, Artificial Sequence
  Chemically synthesized
caguugacgaggucaugaucaag

SEQ ID NO: 41912 - RNA, 23 nt, Artificial Sequence
  Chemically synthesized
aguugacgaggucaugaucaaga

SEQ ID NO: 41913 - RNA, 23 nt, Artificial Sequence
  Chemically synthesized
guugacgaggucaugaucaagac

SEQ ID NO: 41914 - RNA, 23 nt, Artificial Sequence
  Chemically synthesized
uugacgaggucaugaucaagacu

SEQ ID NO: 41915 - RNA, 23 nt, Artificial Sequence
  Chemically synthesized
ugacgaggucaugaucaagacua

SEQ ID NO: 41916 - RNA, 23 nt, Artificial Sequence
  Chemically synthesized
gacgaggucaugaucaagacuaa

SEQ ID NO: 41917 - RNA, 23 nt, Artificial Sequence
  Chemically synthesized
acgaggucaugaucaagacuaaa

SEQ ID NO: 41918 - RNA, 23 nt, Artificial Sequence
  Chemically synthesized
aggguugagguagcucucguuag

SEQ ID NO: 41919 - RNA, 23 nt, Artificial Sequence
  Chemically synthesized
ggguugagguagcucucguuagg

SEQ ID NO: 41920 - RNA, 23 nt, Artificial Sequence
  Chemically synthesized
gguugagguagcucucguuaggg

SEQ ID NO: 41921 - RNA, 23 nt, Artificial Sequence
  Chemically synthesized
guugagguagcucucguuagggg

SEQ ID NO: 41922 - RNA, 23 nt, Artificial Sequence
  Chemically synthesized
uugagguagcucucguuaggggu

SEQ ID NO: 41923 - RNA, 23 nt, Artificial Sequence
  Chemically synthesized
uugugaaaucugagguuuuuguc

SEQ ID NO: 41924 - RNA, 23 nt, Artificial Sequence
  Chemically synthesized
agguuucgacugacagguauuag

SEQ ID NO: 41925 - RNA, 23 nt, Artificial Sequence
  Chemically synthesized
gguuucgacugacagguauuaga

SEQ ID NO: 41926 - RNA, 23 nt, Artificial Sequence
  Chemically synthesized
guuucgacugacagguauuagaa

SEQ ID NO: 41927 - RNA, 23 nt, Artificial Sequence
  Chemically synthesized
uuucgacugacagguauuagaau

SEQ ID NO: 41928 - RNA, 23 nt, Artificial Sequence
  Chemically synthesized
uucgacugacagguauuagaauu

SEQ ID NO: 41929 - RNA, 23 nt, Artificial Sequence
  Chemically synthesized
ugggucguuaguaagggcuuccc

SEQ ID NO: 41930 - RNA, 23 nt, Artificial Sequence
  Chemically synthesized
gggucguuaguaagggcuucccu

SEQ ID NO: 41931 - RNA, 23 nt, Artificial Sequence
  Chemically synthesized
ggucguuaguaagggcuucccua

SEQ ID NO: 41932 - RNA, 23 nt, Artificial Sequence
  Chemically synthesized
uguucuguuguauaugacauguu

SEQ ID NO: 41933 - RNA, 23 nt, Artificial Sequence
  Chemically synthesized
guucuguuguauaugacauguua

SEQ ID NO: 41934 - RNA, 23 nt, Artificial Sequence
  Chemically synthesized
uucuguuguauaugacauguuau

SEQ ID NO: 41935 - RNA, 23 nt, Artificial Sequence
  Chemically synthesized
aaguguccucgagagagcuuuag

SEQ ID NO: 41936 - RNA, 23 nt, Artificial Sequence
  Chemically synthesized
aguguccucgagagagcuuuagg

SEQ ID NO: 41937 - RNA, 23 nt, Artificial Sequence
  Chemically synthesized
guguccucgagagagcuuuaggu

SEQ ID NO: 41938 - RNA, 23 nt, Artificial Sequence
  Chemically synthesized
uguccucgagagagcuuuagguc

SEQ ID NO: 41939 - RNA, 23 nt, Artificial Sequence
  Chemically synthesized
guccucgagagagcuuuaggucc

SEQ ID NO: 41940 - RNA, 23 nt, Artificial Sequence
  Chemically synthesized
ggccucccauagaaggucuucug

SEQ ID NO: 41941 - RNA, 23 nt, Artificial Sequence
  Chemically synthesized
gccucccauagaaggucuucugc

SEQ ID NO: 41942 - RNA, 23 nt, Artificial Sequence
  Chemically synthesized
ccucccauagaaggucuucugcu

SEQ ID NO: 41943 - RNA, 23 nt, Artificial Sequence
  Chemically synthesized
cucccauagaaggucuucugcuu

SEQ ID NO: 41944 - RNA, 23 nt, Artificial Sequence
  Chemically synthesized
ucccauagaaggucuucugcuuu

SEQ ID NO: 41945 - RNA, 23 nt, Artificial Sequence
  Chemically synthesized
aguacuaauaugguggagagacc

SEQ ID NO: 41946 - RNA, 23 nt, Artificial Sequence
  Chemically synthesized
ugauaacucagaaagugaguuuu

SEQ ID NO: 41947 - RNA, 23 nt, Artificial Sequence
  Chemically synthesized
gauaacucagaaagugaguuuuc

SEQ ID NO: 41948 - RNA, 23 nt, Artificial Sequence
  Chemically synthesized
auaacucagaaagugaguuuucc

SEQ ID NO: 41949 - RNA, 23 nt, Artificial Sequence
  Chemically synthesized
uaaagccacgcuuuuucauguga

SEQ ID NO: 41950 - RNA, 23 nt, Artificial Sequence
  Chemically synthesized
aaagccacgcuuuuucaugugaa

SEQ ID NO: 41951 - RNA, 23 nt, Artificial Sequence
  Chemically synthesized
aagccacgcuuuuucaugugaag

SEQ ID NO: 41952 - RNA, 23 nt, Artificial Sequence
  Chemically synthesized
gucugaugaacucaguugacgag

SEQ ID NO: 41953 - RNA, 23 nt, Artificial Sequence
  Chemically synthesized
ggcgaccaguuugugaaaucuga

SEQ ID NO: 41954 - RNA, 23 nt, Artificial Sequence
  Chemically synthesized
gcgaccaguuugugaaaucugag

SEQ ID NO: 41955 - RNA, 23 nt, Artificial Sequence
  Chemically synthesized
ucuguuguauaugacauguuauu

SEQ ID NO: 41956 - RNA, 23 nt, Artificial Sequence
  Chemically synthesized
ugguauaguguacuguucacaau

SEQ ID NO: 41957 - RNA, 23 nt, Artificial Sequence
  Chemically synthesized
gguauaguguacuguucacaaua

SEQ ID NO: 41958 - RNA, 23 nt, Artificial Sequence
  Chemically synthesized
guauaguguacuguucacaauag

SEQ ID NO: 41959 - RNA, 23 nt, Artificial Sequence
  Chemically synthesized
uuauucccagccaugagaguacu

SEQ ID NO: 41960 - RNA, 23 nt, Artificial Sequence
  Chemically synthesized
uauucccagccaugagaguacua

SEQ ID NO: 41961 - RNA, 23 nt, Artificial Sequence
  Chemically synthesized
auucccagccaugagaguacuaa

SEQ ID NO: 41962 - RNA, 23 nt, Artificial Sequence
  Chemically synthesized
uucccagccaugagaguacuaau

SEQ ID NO: 41963 - RNA, 23 nt, Artificial Sequence
  Chemically synthesized
gggccucccauagaaggucuucu

SEQ ID NO: 41964 - RNA, 23 nt, Artificial Sequence
  Chemically synthesized
uaugguggagagacccucauuca

SEQ ID NO: 41965 - RNA, 23 nt, Artificial Sequence
  Chemically synthesized
aagagaucagcaaaccacucaaa

SEQ ID NO: 41966 - RNA, 23 nt, Artificial Sequence
  Chemically synthesized
agagaucagcaaaccacucaaaa

SEQ ID NO: 41967 - RNA, 23 nt, Artificial Sequence
  Chemically synthesized
gagaucagcaaaccacucaaaag

SEQ ID NO: 41968 - RNA, 23 nt, Artificial Sequence
  Chemically synthesized
ccacgcuuuuucaugugaaguuc

SEQ ID NO: 41969 - RNA, 23 nt, Artificial Sequence
  Chemically synthesized
guggcuuaccaccuugguaauga

SEQ ID NO: 41970 - RNA, 23 nt, Artificial Sequence
  Chemically synthesized
uggcuuaccaccuugguaaugac

SEQ ID NO: 41971 - RNA, 23 nt, Artificial Sequence
  Chemically synthesized
ggcuuaccaccuugguaaugaca

SEQ ID NO: 41972 - RNA, 23 nt, Artificial Sequence
  Chemically synthesized
gcuuaccaccuugguaaugacaa

SEQ ID NO: 41973 - RNA, 23 nt, Artificial Sequence
  Chemically synthesized
cuuaccaccuugguaaugacaac

SEQ ID NO: 41974 - RNA, 23 nt, Artificial Sequence
  Chemically synthesized
uuaccaccuugguaaugacaacu

SEQ ID NO: 41975 - RNA, 23 nt, Artificial Sequence
  Chemically synthesized
cugccauucugcauagcggucuc

SEQ ID NO: 41976 - RNA, 23 nt, Artificial Sequence
  Chemically synthesized
uuggguuuggccucgaacaaucc

SEQ ID NO: 41977 - RNA, 23 nt, Artificial Sequence
  Chemically synthesized
ucugaugaacucaguugacgagg

SEQ ID NO: 41978 - RNA, 23 nt, Artificial Sequence
  Chemically synthesized
cugaugaacucaguugacgaggu

SEQ ID NO: 41979 - RNA, 23 nt, Artificial Sequence
  Chemically synthesized
gaugguugcauuaacagcuaucc

SEQ ID NO: 41980 - RNA, 23 nt, Artificial Sequence
  Chemically synthesized
gaauuagcaugcaguuaaaauuc

SEQ ID NO: 41981 - RNA, 23 nt, Artificial Sequence
  Chemically synthesized
gaauuccugguggaguucuuugg

SEQ ID NO: 41982 - RNA, 23 nt, Artificial Sequence
  Chemically synthesized
aauuccugguggaguucuuugga

SEQ ID NO: 41983 - RNA, 23 nt, Artificial Sequence
  Chemically synthesized
auuccugguggaguucuuuggaa

SEQ ID NO: 41984 - RNA, 23 nt, Artificial Sequence
  Chemically synthesized
uuccugguggaguucuuuggaau

SEQ ID NO: 41985 - RNA, 23 nt, Artificial Sequence
  Chemically synthesized
uccugguggaguucuuuggaauc

SEQ ID NO: 41986 - RNA, 23 nt, Artificial Sequence
  Chemically synthesized
ccuggacuugaccuccaaagucu

SEQ ID NO: 41987 - RNA, 23 nt, Artificial Sequence
  Chemically synthesized
cuggacuugaccuccaaagucua

SEQ ID NO: 41988 - RNA, 23 nt, Artificial Sequence
  Chemically synthesized
uggacuugaccuccaaagucuag

SEQ ID NO: 41989 - RNA, 23 nt, Artificial Sequence
  Chemically synthesized
aguggcacaucuuuugaaguguc

SEQ ID NO: 41990 - RNA, 23 nt, Artificial Sequence
  Chemically synthesized
cuccagcgaagauauggcugggc

SEQ ID NO: 41991 - RNA, 23 nt, Artificial Sequence
  Chemically synthesized
gggcacugcaccaagauguacug

SEQ ID NO: 41992 - RNA, 23 nt, Artificial Sequence
  Chemically synthesized
ggcacugcaccaagauguacugc

SEQ ID NO: 41993 - RNA, 23 nt, Artificial Sequence
  Chemically synthesized
gcacugcaccaagauguacugcc

SEQ ID NO: 41994 - RNA, 23 nt, Artificial Sequence
  Chemically synthesized
cacugcaccaagauguacugccc

SEQ ID NO: 41995 - RNA, 23 nt, Artificial Sequence
  Chemically synthesized
acugcaccaagauguacugcccu

SEQ ID NO: 41996 - RNA, 23 nt, Artificial Sequence
  Chemically synthesized
agccacgcuuuuucaugugaagu

SEQ ID NO: 41997 - RNA, 23 nt, Artificial Sequence
  Chemically synthesized
gugaaguuccaggacuccagagg

SEQ ID NO: 41998 - RNA, 23 nt, Artificial Sequence
  Chemically synthesized
ugaaguuccaggacuccagaggg

SEQ ID NO: 41999 - RNA, 23 nt, Artificial Sequence
  Chemically synthesized
ccacugucugccauucugcauag

SEQ ID NO: 42000 - RNA, 23 nt, Artificial Sequence
  Chemically synthesized
cacugucugccauucugcauagc

SEQ ID NO: 42001 - RNA, 23 nt, Artificial Sequence
  Chemically synthesized
acugucugccauucugcauagcg

SEQ ID NO: 42002 - RNA, 23 nt, Artificial Sequence
  Chemically synthesized
cugucugccauucugcauagcgg

SEQ ID NO: 42003 - RNA, 23 nt, Artificial Sequence
  Chemically synthesized
ugucugccauucugcauagcggu

SEQ ID NO: 42004 - RNA, 23 nt, Artificial Sequence
  Chemically synthesized
gucugccauucugcauagcgguc

SEQ ID NO: 42005 - RNA, 23 nt, Artificial Sequence
  Chemically synthesized
ucugccauucugcauagcggucu

SEQ ID NO: 42006 - RNA, 23 nt, Artificial Sequence
  Chemically synthesized
gugguagcguuccagguugaaga

SEQ ID NO: 42007 - RNA, 23 nt, Artificial Sequence
  Chemically synthesized
ugguagcguuccagguugaagaa

SEQ ID NO: 42008 - RNA, 23 nt, Artificial Sequence
  Chemically synthesized
gguagcguuccagguugaagaaa

SEQ ID NO: 42009 - RNA, 23 nt, Artificial Sequence
  Chemically synthesized
guagcguuccagguugaagaaau

SEQ ID NO: 42010 - RNA, 23 nt, Artificial Sequence
  Chemically synthesized
uagcguuccagguugaagaaaug

SEQ ID NO: 42011 - RNA, 23 nt, Artificial Sequence
  Chemically synthesized
uguggaugguugcauuaacagcu

SEQ ID NO: 42012 - RNA, 23 nt, Artificial Sequence
  Chemically synthesized
guggaugguugcauuaacagcua

SEQ ID NO: 42013 - RNA, 23 nt, Artificial Sequence
  Chemically synthesized
uggaugguugcauuaacagcuau

SEQ ID NO: 42014 - RNA, 23 nt, Artificial Sequence
  Chemically synthesized
ggaugguugcauuaacagcuauc

SEQ ID NO: 42015 - RNA, 23 nt, Artificial Sequence
  Chemically synthesized
ucccauaggcgaccaguuuguga

SEQ ID NO: 42016 - RNA, 23 nt, Artificial Sequence
  Chemically synthesized
cccauaggcgaccaguuugugaa

SEQ ID NO: 42017 - RNA, 23 nt, Artificial Sequence
  Chemically synthesized
ccauaggcgaccaguuugugaaa

SEQ ID NO: 42018 - RNA, 23 nt, Artificial Sequence
  Chemically synthesized
cauaggcgaccaguuugugaaau

SEQ ID NO: 42019 - RNA, 23 nt, Artificial Sequence
  Chemically synthesized
auaggcgaccaguuugugaaauc

SEQ ID NO: 42020 - RNA, 23 nt, Artificial Sequence
  Chemically synthesized
uauaguguacuguucacaauagu

SEQ ID NO: 42021 - RNA, 23 nt, Artificial Sequence
  Chemically synthesized
auaguguacuguucacaauaguu

SEQ ID NO: 42022 - RNA, 23 nt, Artificial Sequence
  Chemically synthesized
ccucgagagagcuuuagguccac

SEQ ID NO: 42023 - RNA, 23 nt, Artificial Sequence
  Chemically synthesized
cucgagagagcuuuagguccaca

SEQ ID NO: 42024 - RNA, 23 nt, Artificial Sequence
  Chemically synthesized
ucgagagagcuuuagguccacag

SEQ ID NO: 42025 - RNA, 23 nt, Artificial Sequence
  Chemically synthesized
cgagagagcuuuagguccacaga

SEQ ID NO: 42026 - RNA, 23 nt, Artificial Sequence
  Chemically synthesized
gagagagcuuuagguccacagaa

SEQ ID NO: 42027 - RNA, 23 nt, Artificial Sequence
  Chemically synthesized
cucauccguguuuccagggagag

SEQ ID NO: 42028 - RNA, 23 nt, Artificial Sequence
  Chemically synthesized
ucauccguguuuccagggagagu

SEQ ID NO: 42029 - RNA, 23 nt, Artificial Sequence
  Chemically synthesized
cggaugugcacgcugaaaaaguc

SEQ ID NO: 42030 - RNA, 23 nt, Artificial Sequence
  Chemically synthesized
ggaugugcacgcugaaaaagucu

SEQ ID NO: 42031 - RNA, 23 nt, Artificial Sequence
  Chemically synthesized
gaugugcacgcugaaaaagucuu

SEQ ID NO: 42032 - RNA, 23 nt, Artificial Sequence
  Chemically synthesized
gugccacuccagcgaagauaugg

SEQ ID NO: 42033 - RNA, 23 nt, Artificial Sequence
  Chemically synthesized
uuagcaauucagugguuguguuu

SEQ ID NO: 42034 - RNA, 23 nt, Artificial Sequence
  Chemically synthesized
uaacagcuaucccauaggcgacc

SEQ ID NO: 42035 - RNA, 23 nt, Artificial Sequence
  Chemically synthesized
aacagcuaucccauaggcgacca

SEQ ID NO: 42036 - RNA, 23 nt, Artificial Sequence
  Chemically synthesized
uaggcgaccaguuugugaaaucu

SEQ ID NO: 42037 - RNA, 23 nt, Artificial Sequence
  Chemically synthesized
ugucuaauugccuccuccacggu

SEQ ID NO: 42038 - RNA, 23 nt, Artificial Sequence
  Chemically synthesized
gucuaauugccuccuccacgguc

SEQ ID NO: 42039 - RNA, 23 nt, Artificial Sequence
  Chemically synthesized
ucuaauugccuccuccacggucc

SEQ ID NO: 42040 - RNA, 23 nt, Artificial Sequence
  Chemically synthesized
cuaauugccuccuccacgguccu

SEQ ID NO: 42041 - RNA, 23 nt, Artificial Sequence
  Chemically synthesized
uaauugccuccuccacgguccuc

SEQ ID NO: 42042 - RNA, 23 nt, Artificial Sequence
  Chemically synthesized
gguccucugcagcaaauacuugu

SEQ ID NO: 42043 - RNA, 23 nt, Artificial Sequence
  Chemically synthesized
guccucugcagcaaauacuuguu

SEQ ID NO: 42044 - RNA, 23 nt, Artificial Sequence
  Chemically synthesized
uccucugcagcaaauacuuguuc

SEQ ID NO: 42045 - RNA, 23 nt, Artificial Sequence
  Chemically synthesized
guaaugacaacuucuuguugaaa

SEQ ID NO: 42046 - RNA, 23 nt, Artificial Sequence
  Chemically synthesized
augacaacuucuuguugaaaucg

SEQ ID NO: 42047 - RNA, 23 nt, Artificial Sequence
  Chemically synthesized
cacagggccuaaaauccauuucc

SEQ ID NO: 42048 - RNA, 23 nt, Artificial Sequence
  Chemically synthesized
acagggccuaaaauccauuucca

SEQ ID NO: 42049 - RNA, 23 nt, Artificial Sequence
  Chemically synthesized
cagggccuaaaauccauuuccaa

SEQ ID NO: 42050 - RNA, 23 nt, Artificial Sequence
  Chemically synthesized
agggccuaaaauccauuuccaag

SEQ ID NO: 42051 - RNA, 23 nt, Artificial Sequence
  Chemically synthesized
cucauaggaggccugucugauga

SEQ ID NO: 42052 - RNA, 23 nt, Artificial Sequence
  Chemically synthesized
ucauaggaggccugucugaugaa

SEQ ID NO: 42053 - RNA, 23 nt, Artificial Sequence
  Chemically synthesized
cauaggaggccugucugaugaac

SEQ ID NO: 42054 - RNA, 23 nt, Artificial Sequence
  Chemically synthesized
auaggaggccugucugaugaacu

SEQ ID NO: 42055 - RNA, 23 nt, Artificial Sequence
  Chemically synthesized
uaggaggccugucugaugaacuc

SEQ ID NO: 42056 - RNA, 23 nt, Artificial Sequence
  Chemically synthesized
ccggacaggguugagguagcucu

SEQ ID NO: 42057 - RNA, 23 nt, Artificial Sequence
  Chemically synthesized
cggacaggguugagguagcucuc

SEQ ID NO: 42058 - RNA, 23 nt, Artificial Sequence
  Chemically synthesized
ggacaggguugagguagcucucg

SEQ ID NO: 42059 - RNA, 23 nt, Artificial Sequence
  Chemically synthesized
gacaggguugagguagcucucgu

SEQ ID NO: 42060 - RNA, 23 nt, Artificial Sequence
  Chemically synthesized
acaggguugagguagcucucguu

SEQ ID NO: 42061 - RNA, 23 nt, Artificial Sequence
  Chemically synthesized
caggaauuccugguggaguucuu

SEQ ID NO: 42062 - RNA, 23 nt, Artificial Sequence
  Chemically synthesized
aggaauuccugguggaguucuuu

SEQ ID NO: 42063 - RNA, 23 nt, Artificial Sequence
  Chemically synthesized
ggaauuccugguggaguucuuug

SEQ ID NO: 42064 - RNA, 23 nt, Artificial Sequence
  Chemically synthesized
auaacuugauugaaaacacaaug

SEQ ID NO: 42065 - RNA, 23 nt, Artificial Sequence
  Chemically synthesized
uccucgagagagcuuuaggucca

SEQ ID NO: 42066 - RNA, 23 nt, Artificial Sequence
  Chemically synthesized
ccacagggccuaaaauccauuuc

SEQ ID NO: 42067 - RNA, 23 nt, Artificial Sequence
  Chemically synthesized
uugugcagagagagacugucuug

SEQ ID NO: 42068 - RNA, 23 nt, Artificial Sequence
  Chemically synthesized
ugagguagcucucguuaggggug

SEQ ID NO: 42069 - RNA, 23 nt, Artificial Sequence
  Chemically synthesized
cuuaugaaugaaauaagguuucg

SEQ ID NO: 42070 - RNA, 23 nt, Artificial Sequence
  Chemically synthesized
uuaugaaugaaauaagguuucga

SEQ ID NO: 42071 - RNA, 23 nt, Artificial Sequence
  Chemically synthesized
aacuucuuguugaaaucgccaga

SEQ ID NO: 42072 - RNA, 23 nt, Artificial Sequence
  Chemically synthesized
acuucuuguugaaaucgccagaa

SEQ ID NO: 42073 - RNA, 23 nt, Artificial Sequence
  Chemically synthesized
cuucuuguugaaaucgccagaac

SEQ ID NO: 42074 - RNA, 23 nt, Artificial Sequence
  Chemically synthesized
uucuuguugaaaucgccagaacc

SEQ ID NO: 42075 - RNA, 23 nt, Artificial Sequence
  Chemically synthesized
ucuuguugaaaucgccagaaccu

SEQ ID NO: 42076 - RNA, 23 nt, Artificial Sequence
  Chemically synthesized
aaccuaauuauucuuucacaugc

SEQ ID NO: 42077 - RNA, 23 nt, Artificial Sequence
  Chemically synthesized
ucuccuuguuguaauagaaauga

SEQ ID NO: 42078 - RNA, 23 nt, Artificial Sequence
  Chemically synthesized
cuuguuguaauagaaaugaacac

SEQ ID NO: 42079 - RNA, 23 nt, Artificial Sequence
  Chemically synthesized
agaagcucuccuuguuguaauag

SEQ ID NO: 42080 - RNA, 23 nt, Artificial Sequence
  Chemically synthesized
uccuuguuguaauagaaaugaac

SEQ ID NO: 42081 - RNA, 23 nt, Artificial Sequence
  Chemically synthesized
acagauaaaaauuuauucccagc

SEQ ID NO: 42082 - RNA, 23 nt, Artificial Sequence
  Chemically synthesized
gccagaaccuaauuauucuuuca

SEQ ID NO: 42083 - RNA, 23 nt, Artificial Sequence
  Chemically synthesized
cuucccuaguaaauuauuuuguc

SEQ ID NO: 42084 - RNA, 23 nt, Artificial Sequence
  Chemically synthesized
gcuucccuaguaaauuauuuugu

SEQ ID NO: 42085 - RNA, 23 nt, Artificial Sequence
  Chemically synthesized
cgguccucugcagcaaauacuug

SEQ ID NO: 42086 - RNA, 23 nt, Artificial Sequence
  Chemically synthesized
ucaacaggccgucacaggaauuc

SEQ ID NO: 42087 - RNA, 23 nt, Artificial Sequence
  Chemically synthesized
ugagaaagaagacgaugaaaaca

SEQ ID NO: 42088 - RNA, 23 nt, Artificial Sequence
  Chemically synthesized
caguaaauguuuuuguucuguug

SEQ ID NO: 42089 - RNA, 23 nt, Artificial Sequence
  Chemically synthesized
cugcucacucauccguguuucca

SEQ ID NO: 42090 - RNA, 23 nt, Artificial Sequence
  Chemically synthesized
auguacugcccuggcgccauuuu

SEQ ID NO: 42091 - RNA, 23 nt, Artificial Sequence
  Chemically synthesized
gacauguuauuuauaagcuaagg

SEQ ID NO: 42092 - RNA, 23 nt, Artificial Sequence
  Chemically synthesized
aucccagccgguaagaaauauau

SEQ ID NO: 42093 - RNA, 23 nt, Artificial Sequence
  Chemically synthesized
uguaggcaaucugcuugaacuca

SEQ ID NO: 42094 - RNA, 23 nt, Artificial Sequence
  Chemically synthesized
auguggaugguugcauuaacagc

SEQ ID NO: 42095 - RNA, 23 nt, Artificial Sequence
  Chemically synthesized
uuccucuuaugaaugaaauaagg

SEQ ID NO: 42096 - RNA, 23 nt, Artificial Sequence
  Chemically synthesized
uugaaguguccucgagagagcuu

SEQ ID NO: 42097 - RNA, 23 nt, Artificial Sequence
  Chemically synthesized
gcauuuguaccauauagauuuca

SEQ ID NO: 42098 - RNA, 23 nt, Artificial Sequence
  Chemically synthesized
aucugucagggcaguuccaaagg

SEQ ID NO: 42099 - RNA, 23 nt, Artificial Sequence
  Chemically synthesized
uccucuuaugaaugaaauaaggu

SEQ ID NO: 42100 - RNA, 23 nt, Artificial Sequence
  Chemically synthesized
uggauguugggucguuaguaagg

SEQ ID NO: 42101 - RNA, 23 nt, Artificial Sequence
  Chemically synthesized
cccagccgguaagaaauauauga

SEQ ID NO: 42102 - RNA, 23 nt, Artificial Sequence
  Chemically synthesized
aagcucuugcaucccggcaaauc

SEQ ID NO: 42103 - RNA, 23 nt, Artificial Sequence
  Chemically synthesized
augguguguguaccagaacaacu

SEQ ID NO: 42104 - RNA, 23 nt, Artificial Sequence
  Chemically synthesized
cucaguugacgaggucaugauca

SEQ ID NO: 42105 - RNA, 23 nt, Artificial Sequence
  Chemically synthesized
gauguggaugguugcauuaacag

SEQ ID NO: 42106 - RNA, 23 nt, Artificial Sequence
  Chemically synthesized
aacaggccgucacaggaauuccu

SEQ ID NO: 42107 - RNA, 23 nt, Artificial Sequence
  Chemically synthesized
augguggagagacccucauucaa

SEQ ID NO: 42108 - RNA, 23 nt, Artificial Sequence
  Chemically synthesized
auggccaggcugagaaagaagac

SEQ ID NO: 42109 - RNA, 23 nt, Artificial Sequence
  Chemically synthesized
ugacgccugcuauuguccuuagc

SEQ ID NO: 42110 - RNA, 23 nt, Artificial Sequence
  Chemically synthesized
gacgccugcuauuguccuuagca

SEQ ID NO: 42111 - RNA, 23 nt, Artificial Sequence
  Chemically synthesized
uucccaacugggagcucauauca

SEQ ID NO: 42112 - RNA, 23 nt, Artificial Sequence
  Chemically synthesized
caacucauaggaggccugucuga

SEQ ID NO: 42113 - RNA, 23 nt, Artificial Sequence
  Chemically synthesized
accaccuugguaaugacaacuuc

SEQ ID NO: 42114 - RNA, 23 nt, Artificial Sequence
  Chemically synthesized
uaucccauaggcgaccaguuugu

SEQ ID NO: 42115 - RNA, 23 nt, Artificial Sequence
  Chemically synthesized
aaugcgccacgauguggaugguu

SEQ ID NO: 42116 - RNA, 23 nt, Artificial Sequence
  Chemically synthesized
auuuucaucccagccgguaagaa

SEQ ID NO: 42117 - RNA, 23 nt, Artificial Sequence
  Chemically synthesized
ucaccugugucuggauguugggu

SEQ ID NO: 42118 - RNA, 23 nt, Artificial Sequence
  Chemically synthesized
acaggaauuccugguggaguucu

SEQ ID NO: 42119 - RNA, 23 nt, Artificial Sequence
  Chemically synthesized
cgaucguagaaacacagaauggg

SEQ ID NO: 42120 - RNA, 23 nt, Artificial Sequence
  Chemically synthesized
gcgaucguagaaacacagaaugg

SEQ ID NO: 42121 - RNA, 23 nt, Artificial Sequence
  Chemically synthesized
agcgaucguagaaacacagaaug

SEQ ID NO: 42122 - RNA, 23 nt, Artificial Sequence
  Chemically synthesized
gagcgaucguagaaacacagaau

SEQ ID NO: 42123 - RNA, 23 nt, Artificial Sequence
  Chemically synthesized
ggagcgaucguagaaacacagaa

SEQ ID NO: 42124 - RNA, 23 nt, Artificial Sequence
  Chemically synthesized
agaaggaaguggagaguaaagac

SEQ ID NO: 42125 - RNA, 23 nt, Artificial Sequence
  Chemically synthesized
gagaaggaaguggagaguaaaga

SEQ ID NO: 42126 - RNA, 23 nt, Artificial Sequence
  Chemically synthesized
cgagaaggaaguggagaguaaag

SEQ ID NO: 42127 - RNA, 23 nt, Artificial Sequence
  Chemically synthesized
ucgagaaggaaguggagaguaaa

SEQ ID NO: 42128 - RNA, 23 nt, Artificial Sequence
  Chemically synthesized
uucgagaaggaaguggagaguaa

SEQ ID NO: 42129 - RNA, 23 nt, Artificial Sequence
  Chemically synthesized
gaucguagaaacacagaauggga

SEQ ID NO: 42130 - RNA, 23 nt, Artificial Sequence
  Chemically synthesized
cuucgagaaggaaguggagagua

SEQ ID NO: 42131 - RNA, 23 nt, Artificial Sequence
  Chemically synthesized
acuucgagaaggaaguggagagu

SEQ ID NO: 42132 - RNA, 23 nt, Artificial Sequence
  Chemically synthesized
gcaacagguuggugaaaacccug

SEQ ID NO: 42133 - RNA, 23 nt, Artificial Sequence
  Chemically synthesized
agcaacagguuggugaaaacccu

SEQ ID NO: 42134 - RNA, 23 nt, Artificial Sequence
  Chemically synthesized
gagcaacagguuggugaaaaccc

SEQ ID NO: 42135 - RNA, 23 nt, Artificial Sequence
  Chemically synthesized
cgagcaacagguuggugaaaacc

SEQ ID NO: 42136 - RNA, 23 nt, Artificial Sequence
  Chemically synthesized
gcgagcaacagguuggugaaaac

SEQ ID NO: 42137 - RNA, 23 nt, Artificial Sequence
  Chemically synthesized
uggagcgaucguagaaacacaga

SEQ ID NO: 42138 - RNA, 23 nt, Artificial Sequence
  Chemically synthesized
ggaaguggagaguaaagacagcg

SEQ ID NO: 42139 - RNA, 23 nt, Artificial Sequence
  Chemically synthesized
aggaaguggagaguaaagacagc

SEQ ID NO: 42140 - RNA, 23 nt, Artificial Sequence
  Chemically synthesized
aaggaaguggagaguaaagacag

SEQ ID NO: 42141 - RNA, 23 nt, Artificial Sequence
  Chemically synthesized
gaaggaaguggagaguaaagaca

SEQ ID NO: 42142 - RNA, 23 nt, Artificial Sequence
  Chemically synthesized
agcgagcaacagguuggugaaaa

SEQ ID NO: 42143 - RNA, 23 nt, Artificial Sequence
  Chemically synthesized
aggcggaacuuguaggaacgcgg

SEQ ID NO: 42144 - RNA, 23 nt, Artificial Sequence
  Chemically synthesized
caggcggaacuuguaggaacgcg

SEQ ID NO: 42145 - RNA, 23 nt, Artificial Sequence
  Chemically synthesized
gcaggcggaacuuguaggaacgc

SEQ ID NO: 42146 - RNA, 23 nt, Artificial Sequence
  Chemically synthesized
ggcaggcggaacuuguaggaacg

SEQ ID NO: 42147 - RNA, 23 nt, Artificial Sequence
  Chemically synthesized
cggcaggcggaacuuguaggaac

SEQ ID NO: 42148 - RNA, 23 nt, Artificial Sequence
  Chemically synthesized
ccuggagcgaucguagaaacaca

SEQ ID NO: 42149 - RNA, 23 nt, Artificial Sequence
  Chemically synthesized
gccuggagcgaucguagaaacac

SEQ ID NO: 42150 - RNA, 23 nt, Artificial Sequence
  Chemically synthesized
cgccuggagcgaucguagaaaca

SEQ ID NO: 42151 - RNA, 23 nt, Artificial Sequence
  Chemically synthesized
gcgccuggagcgaucguagaaac

SEQ ID NO: 42152 - RNA, 23 nt, Artificial Sequence
  Chemically synthesized
agcgccuggagcgaucguagaaa

SEQ ID NO: 42153 - RNA, 23 nt, Artificial Sequence
  Chemically synthesized
gaaguggagaguaaagacagcgc

SEQ ID NO: 42154 - RNA, 23 nt, Artificial Sequence
  Chemically synthesized
gagcgagcaacagguuggugaaa

SEQ ID NO: 42155 - RNA, 23 nt, Artificial Sequence
  Chemically synthesized
ggagcgagcaacagguuggugaa

SEQ ID NO: 42156 - RNA, 23 nt, Artificial Sequence
  Chemically synthesized
cccuguguccuuggagaaagcug

SEQ ID NO: 42157 - RNA, 23 nt, Artificial Sequence
  Chemically synthesized
acccuguguccuuggagaaagcu

SEQ ID NO: 42158 - RNA, 23 nt, Artificial Sequence
  Chemically synthesized
aacccuguguccuuggagaaagc

SEQ ID NO: 42159 - RNA, 23 nt, Artificial Sequence
  Chemically synthesized
aaacccuguguccuuggagaaag

SEQ ID NO: 42160 - RNA, 23 nt, Artificial Sequence
  Chemically synthesized
aaaacccuguguccuuggagaaa

SEQ ID NO: 42161 - RNA, 23 nt, Artificial Sequence
  Chemically synthesized
cuggagcgaucguagaaacacag

SEQ ID NO: 42162 - RNA, 23 nt, Artificial Sequence
  Chemically synthesized
gaaagcugguucccguuuuccag

SEQ ID NO: 42163 - RNA, 23 nt, Artificial Sequence
  Chemically synthesized
agaaagcugguucccguuuucca

SEQ ID NO: 42164 - RNA, 23 nt, Artificial Sequence
  Chemically synthesized
gagaaagcugguucccguuuucc

SEQ ID NO: 42165 - RNA, 23 nt, Artificial Sequence
  Chemically synthesized
ggagaaagcugguucccguuuuc

SEQ ID NO: 42166 - RNA, 23 nt, Artificial Sequence
  Chemically synthesized
uggagaaagcugguucccguuuu

SEQ ID NO: 42167 - RNA, 23 nt, Artificial Sequence
  Chemically synthesized
ccaaugcuauuuacauacagcuc

SEQ ID NO: 42168 - RNA, 23 nt, Artificial Sequence
  Chemically synthesized
cccaaugcuauuuacauacagcu

SEQ ID NO: 42169 - RNA, 23 nt, Artificial Sequence
  Chemically synthesized
ccccaaugcuauuuacauacagc

SEQ ID NO: 42170 - RNA, 23 nt, Artificial Sequence
  Chemically synthesized
accccaaugcuauuuacauacag

SEQ ID NO: 42171 - RNA, 23 nt, Artificial Sequence
  Chemically synthesized
caccccaaugcuauuuacauaca

SEQ ID NO: 42172 - RNA, 23 nt, Artificial Sequence
  Chemically synthesized
ccuguguccuuggagaaagcugg

SEQ ID NO: 42173 - RNA, 23 nt, Artificial Sequence
  Chemically synthesized
uccuuggagaaagcugguucccg

SEQ ID NO: 42174 - RNA, 23 nt, Artificial Sequence
  Chemically synthesized
guccuuggagaaagcugguuccc

SEQ ID NO: 42175 - RNA, 23 nt, Artificial Sequence
  Chemically synthesized
uguccuuggagaaagcugguucc

SEQ ID NO: 42176 - RNA, 23 nt, Artificial Sequence
  Chemically synthesized
guguccuuggagaaagcugguuc

SEQ ID NO: 42177 - RNA, 23 nt, Artificial Sequence
  Chemically synthesized
uguguccuuggagaaagcugguu

SEQ ID NO: 42178 - RNA, 23 nt, Artificial Sequence
  Chemically synthesized
acaccccaaugcuauuuacauac

SEQ ID NO: 42179 - RNA, 23 nt, Artificial Sequence
  Chemically synthesized
ccuuggagaaagcugguucccgu

SEQ ID NO: 42180 - RNA, 23 nt, Artificial Sequence
  Chemically synthesized
caaugcuauuuacauacagcucu

SEQ ID NO: 42181 - RNA, 23 nt, Artificial Sequence
  Chemically synthesized
ggaaauccagcugcagaaacaga

SEQ ID NO: 42182 - RNA, 23 nt, Artificial Sequence
  Chemically synthesized
uggaaauccagcugcagaaacag

SEQ ID NO: 42183 - RNA, 23 nt, Artificial Sequence
  Chemically synthesized
uuggaaauccagcugcagaaaca

SEQ ID NO: 42184 - RNA, 23 nt, Artificial Sequence
  Chemically synthesized
uuuggaaauccagcugcagaaac

SEQ ID NO: 42185 - RNA, 23 nt, Artificial Sequence
  Chemically synthesized
cuuuggaaauccagcugcagaaa

SEQ ID NO: 42186 - RNA, 23 nt, Artificial Sequence
  Chemically synthesized
cccuuuggaaauccagcugcaga

SEQ ID NO: 42187 - RNA, 23 nt, Artificial Sequence
  Chemically synthesized
gcccuuuggaaauccagcugcag

SEQ ID NO: 42188 - RNA, 23 nt, Artificial Sequence
  Chemically synthesized
agcccuuuggaaauccagcugca

SEQ ID NO: 42189 - RNA, 23 nt, Artificial Sequence
  Chemically synthesized
aagcccuuuggaaauccagcugc

SEQ ID NO: 42190 - RNA, 23 nt, Artificial Sequence
  Chemically synthesized
gaagcccuuuggaaauccagcug

SEQ ID NO: 42191 - RNA, 23 nt, Artificial Sequence
  Chemically synthesized
ggaagcccuuuggaaauccagcu

SEQ ID NO: 42192 - RNA, 23 nt, Artificial Sequence
  Chemically synthesized
gggaagcccuuuggaaauccagc

SEQ ID NO: 42193 - RNA, 23 nt, Artificial Sequence
  Chemically synthesized
ggggaagcccuuuggaaauccag

SEQ ID NO: 42194 - RNA, 23 nt, Artificial Sequence
  Chemically synthesized
uggggaagcccuuuggaaaucca

SEQ ID NO: 42195 - RNA, 23 nt, Artificial Sequence
  Chemically synthesized
cuggggaagcccuuuggaaaucc

SEQ ID NO: 42196 - RNA, 23 nt, Artificial Sequence
  Chemically synthesized
acuggggaagcccuuuggaaauc

SEQ ID NO: 42197 - RNA, 23 nt, Artificial Sequence
  Chemically synthesized
ccuuuggaaauccagcugcagaa

SEQ ID NO: 42198 - RNA, 23 nt, Artificial Sequence
  Chemically synthesized
gguuggugaaaacccuguguccu

SEQ ID NO: 42199 - RNA, 23 nt, Artificial Sequence
  Chemically synthesized
agguuggugaaaacccugugucc

SEQ ID NO: 42200 - RNA, 23 nt, Artificial Sequence
  Chemically synthesized
cagguuggugaaaacccuguguc

SEQ ID NO: 42201 - RNA, 23 nt, Artificial Sequence
  Chemically synthesized
acagguuggugaaaacccugugu

SEQ ID NO: 42202 - RNA, 23 nt, Artificial Sequence
  Chemically synthesized
aacagguuggugaaaacccugug

SEQ ID NO: 42203 - RNA, 23 nt, Artificial Sequence
  Chemically synthesized
agaguaaagacagcgccuggagc

SEQ ID NO: 42204 - RNA, 23 nt, Artificial Sequence
  Chemically synthesized
gagaguaaagacagcgccuggag

SEQ ID NO: 42205 - RNA, 23 nt, Artificial Sequence
  Chemically synthesized
ggagaguaaagacagcgccugga

SEQ ID NO: 42206 - RNA, 23 nt, Artificial Sequence
  Chemically synthesized
uggagaguaaagacagcgccugg

SEQ ID NO: 42207 - RNA, 23 nt, Artificial Sequence
  Chemically synthesized
guggagaguaaagacagcgccug

SEQ ID NO: 42208 - RNA, 23 nt, Artificial Sequence
  Chemically synthesized
ugaaaacccuguguccuuggaga

SEQ ID NO: 42209 - RNA, 23 nt, Artificial Sequence
  Chemically synthesized
gugaaaacccuguguccuuggag

SEQ ID NO: 42210 - RNA, 23 nt, Artificial Sequence
  Chemically synthesized
uggugaaaacccuguguccuugg

SEQ ID NO: 42211 - RNA, 23 nt, Artificial Sequence
  Chemically synthesized
uuggugaaaacccuguguccuug

SEQ ID NO: 42212 - RNA, 23 nt, Artificial Sequence
  Chemically synthesized
ggcacuucgagaaggaaguggag

SEQ ID NO: 42213 - RNA, 23 nt, Artificial Sequence
  Chemically synthesized
uggcacuucgagaaggaagugga

SEQ ID NO: 42214 - RNA, 23 nt, Artificial Sequence
  Chemically synthesized
uuggcacuucgagaaggaagugg

SEQ ID NO: 42215 - RNA, 23 nt, Artificial Sequence
  Chemically synthesized
guuggcacuucgagaaggaagug

SEQ ID NO: 42216 - RNA, 23 nt, Artificial Sequence
  Chemically synthesized
gguuggcacuucgagaaggaagu

SEQ ID NO: 42217 - RNA, 23 nt, Artificial Sequence
  Chemically synthesized
caacagguuggugaaaacccugu

SEQ ID NO: 42218 - RNA, 23 nt, Artificial Sequence
  Chemically synthesized
guuggugaaaacccuguguccuu

SEQ ID NO: 42219 - RNA, 23 nt, Artificial Sequence
  Chemically synthesized
ccagcugcagaaacagacacccc

SEQ ID NO: 42220 - RNA, 23 nt, Artificial Sequence
  Chemically synthesized
uccagcugcagaaacagacaccc

SEQ ID NO: 42221 - RNA, 23 nt, Artificial Sequence
  Chemically synthesized
auccagcugcagaaacagacacc

SEQ ID NO: 42222 - RNA, 23 nt, Artificial Sequence
  Chemically synthesized
aauccagcugcagaaacagacac

SEQ ID NO: 42223 - RNA, 23 nt, Artificial Sequence
  Chemically synthesized
aaauccagcugcagaaacagaca

SEQ ID NO: 42224 - RNA, 23 nt, Artificial Sequence
  Chemically synthesized
gcacuucgagaaggaaguggaga

SEQ ID NO: 42225 - RNA, 23 nt, Artificial Sequence
  Chemically synthesized
gaaaacccuguguccuuggagaa

SEQ ID NO: 42226 - RNA, 23 nt, Artificial Sequence
  Chemically synthesized
ugguucccguuuuccagaggggg

SEQ ID NO: 42227 - RNA, 23 nt, Artificial Sequence
  Chemically synthesized
cugguucccguuuuccagagggg

SEQ ID NO: 42228 - RNA, 23 nt, Artificial Sequence
  Chemically synthesized
gcugguucccguuuuccagaggg

SEQ ID NO: 42229 - RNA, 23 nt, Artificial Sequence
  Chemically synthesized
agcugguucccguuuuccagagg

SEQ ID NO: 42230 - RNA, 23 nt, Artificial Sequence
  Chemically synthesized
aagcugguucccguuuuccagag

SEQ ID NO: 42231 - RNA, 23 nt, Artificial Sequence
  Chemically synthesized
uuggagaaagcugguucccguuu

SEQ ID NO: 42232 - RNA, 23 nt, Artificial Sequence
  Chemically synthesized
augcuauuuacauacagcucuau

SEQ ID NO: 42233 - RNA, 23 nt, Artificial Sequence
  Chemically synthesized
aaugcuauuuacauacagcucua

SEQ ID NO: 42234 - RNA, 23 nt, Artificial Sequence
  Chemically synthesized
caaugcuauuuacauacagcucu

SEQ ID NO: 42235 - RNA, 23 nt, Artificial Sequence
  Chemically synthesized
ccaaugcuauuuacauacagcuc

SEQ ID NO: 42236 - RNA, 23 nt, Artificial Sequence
  Chemically synthesized
cccaaugcuauuuacauacagcu

SEQ ID NO: 42237 - RNA, 23 nt, Artificial Sequence
  Chemically synthesized
cguagaaacacagaaugggacug

SEQ ID NO: 42238 - RNA, 23 nt, Artificial Sequence
  Chemically synthesized
cccauucuguguuucuacgaucg

SEQ ID NO: 42239 - RNA, 23 nt, Artificial Sequence
  Chemically synthesized
ccauucuguguuucuacgaucgc

SEQ ID NO: 42240 - RNA, 23 nt, Artificial Sequence
  Chemically synthesized
cauucuguguuucuacgaucgcu

SEQ ID NO: 42241 - RNA, 23 nt, Artificial Sequence
  Chemically synthesized
auucuguguuucuacgaucgcuc

SEQ ID NO: 42242 - RNA, 23 nt, Artificial Sequence
  Chemically synthesized
uucuguguuucuacgaucgcucc

SEQ ID NO: 42243 - RNA, 23 nt, Artificial Sequence
  Chemically synthesized
gucuuuacucuccacuuccuucu

SEQ ID NO: 42244 - RNA, 23 nt, Artificial Sequence
  Chemically synthesized
ucuuuacucuccacuuccuucuc

SEQ ID NO: 42245 - RNA, 23 nt, Artificial Sequence
  Chemically synthesized
cuuuacucuccacuuccuucucg

SEQ ID NO: 42246 - RNA, 23 nt, Artificial Sequence
  Chemically synthesized
uuuacucuccacuuccuucucga

SEQ ID NO: 42247 - RNA, 23 nt, Artificial Sequence
  Chemically synthesized
uuacucuccacuuccuucucgaa

SEQ ID NO: 42248 - RNA, 23 nt, Artificial Sequence
  Chemically synthesized
ucccauucuguguuucuacgauc

SEQ ID NO: 42249 - RNA, 23 nt, Artificial Sequence
  Chemically synthesized
uacucuccacuuccuucucgaag

SEQ ID NO: 42250 - RNA, 23 nt, Artificial Sequence
  Chemically synthesized
acucuccacuuccuucucgaagu

SEQ ID NO: 42251 - RNA, 23 nt, Artificial Sequence
  Chemically synthesized
caggguuuucaccaaccuguugc

SEQ ID NO: 42252 - RNA, 23 nt, Artificial Sequence
  Chemically synthesized
aggguuuucaccaaccuguugcu

SEQ ID NO: 42253 - RNA, 23 nt, Artificial Sequence
  Chemically synthesized
ggguuuucaccaaccuguugcuc

SEQ ID NO: 42254 - RNA, 23 nt, Artificial Sequence
  Chemically synthesized
gguuuucaccaaccuguugcucg

SEQ ID NO: 42255 - RNA, 23 nt, Artificial Sequence
  Chemically synthesized
guuuucaccaaccuguugcucgc

SEQ ID NO: 42256 - RNA, 23 nt, Artificial Sequence
  Chemically synthesized
ucuguguuucuacgaucgcucca

SEQ ID NO: 42257 - RNA, 23 nt, Artificial Sequence
  Chemically synthesized
cgcugucuuuacucuccacuucc

SEQ ID NO: 42258 - RNA, 23 nt, Artificial Sequence
  Chemically synthesized
gcugucuuuacucuccacuuccu

SEQ ID NO: 42259 - RNA, 23 nt, Artificial Sequence
  Chemically synthesized
cugucuuuacucuccacuuccuu

SEQ ID NO: 42260 - RNA, 23 nt, Artificial Sequence
  Chemically synthesized
ugucuuuacucuccacuuccuuc

SEQ ID NO: 42261 - RNA, 23 nt, Artificial Sequence
  Chemically synthesized
uuuucaccaaccuguugcucgcu

SEQ ID NO: 42262 - RNA, 23 nt, Artificial Sequence
  Chemically synthesized
ccgcguuccuacaaguuccgccu

SEQ ID NO: 42263 - RNA, 23 nt, Artificial Sequence
  Chemically synthesized
cgcguuccuacaaguuccgccug

SEQ ID NO: 42264 - RNA, 23 nt, Artificial Sequence
  Chemically synthesized
gcguuccuacaaguuccgccugc

SEQ ID NO: 42265 - RNA, 23 nt, Artificial Sequence
  Chemically synthesized
cguuccuacaaguuccgccugcc

SEQ ID NO: 42266 - RNA, 23 nt, Artificial Sequence
  Chemically synthesized
guuccuacaaguuccgccugccg

SEQ ID NO: 42267 - RNA, 23 nt, Artificial Sequence
  Chemically synthesized
uguguuucuacgaucgcuccagg

SEQ ID NO: 42268 - RNA, 23 nt, Artificial Sequence
  Chemically synthesized
guguuucuacgaucgcuccaggc

SEQ ID NO: 42269 - RNA, 23 nt, Artificial Sequence
  Chemically synthesized
uguuucuacgaucgcuccaggcg

SEQ ID NO: 42270 - RNA, 23 nt, Artificial Sequence
  Chemically synthesized
guuucuacgaucgcuccaggcgc

SEQ ID NO: 42271 - RNA, 23 nt, Artificial Sequence
  Chemically synthesized
uuucuacgaucgcuccaggcgcu

SEQ ID NO: 42272 - RNA, 23 nt, Artificial Sequence
  Chemically synthesized
gcgcugucuuuacucuccacuuc

SEQ ID NO: 42273 - RNA, 23 nt, Artificial Sequence
  Chemically synthesized
uuucaccaaccuguugcucgcuc

SEQ ID NO: 42274 - RNA, 23 nt, Artificial Sequence
  Chemically synthesized
uucaccaaccuguugcucgcucc

SEQ ID NO: 42275 - RNA, 23 nt, Artificial Sequence
  Chemically synthesized
cagcuuucuccaaggacacaggg

SEQ ID NO: 42276 - RNA, 23 nt, Artificial Sequence
  Chemically synthesized
agcuuucuccaaggacacagggu

SEQ ID NO: 42277 - RNA, 23 nt, Artificial Sequence
  Chemically synthesized
gcuuucuccaaggacacaggguu

SEQ ID NO: 42278 - RNA, 23 nt, Artificial Sequence
  Chemically synthesized
cuuucuccaaggacacaggguuu

SEQ ID NO: 42279 - RNA, 23 nt, Artificial Sequence
  Chemically synthesized
uuucuccaaggacacaggguuuu

SEQ ID NO: 42280 - RNA, 23 nt, Artificial Sequence
  Chemically synthesized
cuguguuucuacgaucgcuccag

SEQ ID NO: 42281 - RNA, 23 nt, Artificial Sequence
  Chemically synthesized
cuggaaaacgggaaccagcuuuc

SEQ ID NO: 42282 - RNA, 23 nt, Artificial Sequence
  Chemically synthesized
uggaaaacgggaaccagcuuucu

SEQ ID NO: 42283 - RNA, 23 nt, Artificial Sequence
  Chemically synthesized
ggaaaacgggaaccagcuuucuc

SEQ ID NO: 42284 - RNA, 23 nt, Artificial Sequence
  Chemically synthesized
gaaaacgggaaccagcuuucucc

SEQ ID NO: 42285 - RNA, 23 nt, Artificial Sequence
  Chemically synthesized
aaaacgggaaccagcuuucucca

SEQ ID NO: 42286 - RNA, 23 nt, Artificial Sequence
  Chemically synthesized
gagcuguauguaaauagcauugg

SEQ ID NO: 42287 - RNA, 23 nt, Artificial Sequence
  Chemically synthesized
agcuguauguaaauagcauuggg

SEQ ID NO: 42288 - RNA, 23 nt, Artificial Sequence
  Chemically synthesized
gcuguauguaaauagcauugggg

SEQ ID NO: 42289 - RNA, 23 nt, Artificial Sequence
  Chemically synthesized
cuguauguaaauagcauuggggu

SEQ ID NO: 42290 - RNA, 23 nt, Artificial Sequence
  Chemically synthesized
uguauguaaauagcauuggggug

SEQ ID NO: 42291 - RNA, 23 nt, Artificial Sequence
  Chemically synthesized
ccagcuuucuccaaggacacagg

SEQ ID NO: 42292 - RNA, 23 nt, Artificial Sequence
  Chemically synthesized
cgggaaccagcuuucuccaagga

SEQ ID NO: 42293 - RNA, 23 nt, Artificial Sequence
  Chemically synthesized
gggaaccagcuuucuccaaggac

SEQ ID NO: 42294 - RNA, 23 nt, Artificial Sequence
  Chemically synthesized
ggaaccagcuuucuccaaggaca

SEQ ID NO: 42295 - RNA, 23 nt, Artificial Sequence
  Chemically synthesized
gaaccagcuuucuccaaggacac

SEQ ID NO: 42296 - RNA, 23 nt, Artificial Sequence
  Chemically synthesized
aaccagcuuucuccaaggacaca

SEQ ID NO: 42297 - RNA, 23 nt, Artificial Sequence
  Chemically synthesized
guauguaaauagcauuggggugu

SEQ ID NO: 42298 - RNA, 23 nt, Artificial Sequence
  Chemically synthesized
acgggaaccagcuuucuccaagg

SEQ ID NO: 42299 - RNA, 23 nt, Artificial Sequence
  Chemically synthesized
agagcuguauguaaauagcauug

SEQ ID NO: 42300 - RNA, 23 nt, Artificial Sequence
  Chemically synthesized
ucuguuucugcagcuggauuucc

SEQ ID NO: 42301 - RNA, 23 nt, Artificial Sequence
  Chemically synthesized
cuguuucugcagcuggauuucca

SEQ ID NO: 42302 - RNA, 23 nt, Artificial Sequence
  Chemically synthesized
uguuucugcagcuggauuuccaa

SEQ ID NO: 42303 - RNA, 23 nt, Artificial Sequence
  Chemically synthesized
guuucugcagcuggauuuccaaa

SEQ ID NO: 42304 - RNA, 23 nt, Artificial Sequence
  Chemically synthesized
uuucugcagcuggauuuccaaag

SEQ ID NO: 42305 - RNA, 23 nt, Artificial Sequence
  Chemically synthesized
ucugcagcuggauuuccaaaggg

SEQ ID NO: 42306 - RNA, 23 nt, Artificial Sequence
  Chemically synthesized
cugcagcuggauuuccaaagggc

SEQ ID NO: 42307 - RNA, 23 nt, Artificial Sequence
  Chemically synthesized
ugcagcuggauuuccaaagggcu

SEQ ID NO: 42308 - RNA, 23 nt, Artificial Sequence
  Chemically synthesized
gcagcuggauuuccaaagggcuu

SEQ ID NO: 42309 - RNA, 23 nt, Artificial Sequence
  Chemically synthesized
cagcuggauuuccaaagggcuuc

SEQ ID NO: 42310 - RNA, 23 nt, Artificial Sequence
  Chemically synthesized
agcuggauuuccaaagggcuucc

SEQ ID NO: 42311 - RNA, 23 nt, Artificial Sequence
  Chemically synthesized
gcuggauuuccaaagggcuuccc

SEQ ID NO: 42312 - RNA, 23 nt, Artificial Sequence
  Chemically synthesized
cuggauuuccaaagggcuucccc

SEQ ID NO: 42313 - RNA, 23 nt, Artificial Sequence
  Chemically synthesized
uggauuuccaaagggcuucccca

SEQ ID NO: 42314 - RNA, 23 nt, Artificial Sequence
  Chemically synthesized
ggauuuccaaagggcuuccccag

SEQ ID NO: 42315 - RNA, 23 nt, Artificial Sequence
  Chemically synthesized
gauuuccaaagggcuuccccagu

SEQ ID NO: 42316 - RNA, 23 nt, Artificial Sequence
  Chemically synthesized
uucugcagcuggauuuccaaagg

SEQ ID NO: 42317 - RNA, 23 nt, Artificial Sequence
  Chemically synthesized
aggacacaggguuuucaccaacc

SEQ ID NO: 42318 - RNA, 23 nt, Artificial Sequence
  Chemically synthesized
ggacacaggguuuucaccaaccu

SEQ ID NO: 42319 - RNA, 23 nt, Artificial Sequence
  Chemically synthesized
gacacaggguuuucaccaaccug

SEQ ID NO: 42320 - RNA, 23 nt, Artificial Sequence
  Chemically synthesized
acacaggguuuucaccaaccugu

SEQ ID NO: 42321 - RNA, 23 nt, Artificial Sequence
  Chemically synthesized
cacaggguuuucaccaaccuguu

SEQ ID NO: 42322 - RNA, 23 nt, Artificial Sequence
  Chemically synthesized
gcuccaggcgcugucuuuacucu

SEQ ID NO: 42323 - RNA, 23 nt, Artificial Sequence
  Chemically synthesized
cuccaggcgcugucuuuacucuc

SEQ ID NO: 42324 - RNA, 23 nt, Artificial Sequence
  Chemically synthesized
uccaggcgcugucuuuacucucc

SEQ ID NO: 42325 - RNA, 23 nt, Artificial Sequence
  Chemically synthesized
ccaggcgcugucuuuacucucca

SEQ ID NO: 42326 - RNA, 23 nt, Artificial Sequence
  Chemically synthesized
caggcgcugucuuuacucuccac

SEQ ID NO: 42327 - RNA, 23 nt, Artificial Sequence
  Chemically synthesized
ucuccaaggacacaggguuuuca

SEQ ID NO: 42328 - RNA, 23 nt, Artificial Sequence
  Chemically synthesized
cuccaaggacacaggguuuucac

SEQ ID NO: 42329 - RNA, 23 nt, Artificial Sequence
  Chemically synthesized
ccaaggacacaggguuuucacca

SEQ ID NO: 42330 - RNA, 23 nt, Artificial Sequence
  Chemically synthesized
caaggacacaggguuuucaccaa

SEQ ID NO: 42331 - RNA, 23 nt, Artificial Sequence
  Chemically synthesized
cuccacuuccuucucgaagugcc

SEQ ID NO: 42332 - RNA, 23 nt, Artificial Sequence
  Chemically synthesized
uccacuuccuucucgaagugcca

SEQ ID NO: 42333 - RNA, 23 nt, Artificial Sequence
  Chemically synthesized
ccacuuccuucucgaagugccaa

SEQ ID NO: 42334 - RNA, 23 nt, Artificial Sequence
  Chemically synthesized
cacuuccuucucgaagugccaac

SEQ ID NO: 42335 - RNA, 23 nt, Artificial Sequence
  Chemically synthesized
acuuccuucucgaagugccaacc

SEQ ID NO: 42336 - RNA, 23 nt, Artificial Sequence
  Chemically synthesized
acaggguuuucaccaaccuguug

SEQ ID NO: 42337 - RNA, 23 nt, Artificial Sequence
  Chemically synthesized
aaggacacaggguuuucaccaac

SEQ ID NO: 42338 - RNA, 23 nt, Artificial Sequence
  Chemically synthesized
ggggugucuguuucugcagcugg

SEQ ID NO: 42339 - RNA, 23 nt, Artificial Sequence
  Chemically synthesized
gggugucuguuucugcagcugga

SEQ ID NO: 42340 - RNA, 23 nt, Artificial Sequence
  Chemically synthesized
ggugucuguuucugcagcuggau

SEQ ID NO: 42341 - RNA, 23 nt, Artificial Sequence
  Chemically synthesized
gugucuguuucugcagcuggauu

SEQ ID NO: 42342 - RNA, 23 nt, Artificial Sequence
  Chemically synthesized
ugucuguuucugcagcuggauuu

SEQ ID NO: 42343 - RNA, 23 nt, Artificial Sequence
  Chemically synthesized
ucuccacuuccuucucgaagugc

SEQ ID NO: 42344 - RNA, 23 nt, Artificial Sequence
  Chemically synthesized
uucuccaaggacacaggguuuuc

SEQ ID NO: 42345 - RNA, 23 nt, Artificial Sequence
  Chemically synthesized
cccccucuggaaaacgggaacca

SEQ ID NO: 42346 - RNA, 23 nt, Artificial Sequence
  Chemically synthesized
ccccucuggaaaacgggaaccag

SEQ ID NO: 42347 - RNA, 23 nt, Artificial Sequence
  Chemically synthesized
cccucuggaaaacgggaaccagc

SEQ ID NO: 42348 - RNA, 23 nt, Artificial Sequence
  Chemically synthesized
ccucuggaaaacgggaaccagcu

SEQ ID NO: 42349 - RNA, 23 nt, Artificial Sequence
  Chemically synthesized
cucuggaaaacgggaaccagcuu

SEQ ID NO: 42350 - RNA, 23 nt, Artificial Sequence
  Chemically synthesized
aaacgggaaccagcuuucuccaa

SEQ ID NO: 42351 - RNA, 23 nt, Artificial Sequence
  Chemically synthesized
auagagcuguauguaaauagcau

SEQ ID NO: 42352 - RNA, 23 nt, Artificial Sequence
  Chemically synthesized
uagagcuguauguaaauagcauu

SEQ ID NO: 42353 - RNA, 23 nt, Artificial Sequence
  Chemically synthesized
agagcuguauguaaauagcauug

SEQ ID NO: 42354 - RNA, 23 nt, Artificial Sequence
  Chemically synthesized
gagcuguauguaaauagcauugg

SEQ ID NO: 42355 - RNA, 23 nt, Artificial Sequence
  Chemically synthesized
agcuguauguaaauagcauuggg

SEQ ID NO: 42356 - RNA, 23 nt, Artificial Sequence
  Chemically synthesized
cagucccauucuguguuucuacg

SEQ ID NO: 42357 - RNA, 23 nt, Artificial Sequence
  Chemically synthesized
ggaguacauuacuuuucuugaag

SEQ ID NO: 42358 - RNA, 23 nt, Artificial Sequence
  Chemically synthesized
aggaguacauuacuuuucuugaa

SEQ ID NO: 42359 - RNA, 23 nt, Artificial Sequence
  Chemically synthesized
caggaguacauuacuuuucuuga

SEQ ID NO: 42360 - RNA, 23 nt, Artificial Sequence
  Chemically synthesized
ccaggaguacauuacuuuucuug

SEQ ID NO: 42361 - RNA, 23 nt, Artificial Sequence
  Chemically synthesized
accaggaguacauuacuuuucuu

SEQ ID NO: 42362 - RNA, 23 nt, Artificial Sequence
  Chemically synthesized
agacaaagcuuuuguugauuucc

SEQ ID NO: 42363 - RNA, 23 nt, Artificial Sequence
  Chemically synthesized
gagacaaagcuuuuguugauuuc

SEQ ID NO: 42364 - RNA, 23 nt, Artificial Sequence
  Chemically synthesized
ggagacaaagcuuuuguugauuu

SEQ ID NO: 42365 - RNA, 23 nt, Artificial Sequence
  Chemically synthesized
cggagacaaagcuuuuguugauu

SEQ ID NO: 42366 - RNA, 23 nt, Artificial Sequence
  Chemically synthesized
acggagacaaagcuuuuguugau

SEQ ID NO: 42367 - RNA, 23 nt, Artificial Sequence
  Chemically synthesized
ccuuauaugaccaccuaauggau

SEQ ID NO: 42368 - RNA, 23 nt, Artificial Sequence
  Chemically synthesized
gccuuauaugaccaccuaaugga

SEQ ID NO: 42369 - RNA, 23 nt, Artificial Sequence
  Chemically synthesized
ggccuuauaugaccaccuaaugg

SEQ ID NO: 42370 - RNA, 23 nt, Artificial Sequence
  Chemically synthesized
gggccuuauaugaccaccuaaug

SEQ ID NO: 42371 - RNA, 23 nt, Artificial Sequence
  Chemically synthesized
ugggccuuauaugaccaccuaau

SEQ ID NO: 42372 - RNA, 23 nt, Artificial Sequence
  Chemically synthesized
gacggagacaaagcuuuuguuga

SEQ ID NO: 42373 - RNA, 23 nt, Artificial Sequence
  Chemically synthesized
cgacggagacaaagcuuuuguug

SEQ ID NO: 42374 - RNA, 23 nt, Artificial Sequence
  Chemically synthesized
ccgacggagacaaagcuuuuguu

SEQ ID NO: 42375 - RNA, 23 nt, Artificial Sequence
  Chemically synthesized
ugggacagaagcgaaauuagugc

SEQ ID NO: 42376 - RNA, 23 nt, Artificial Sequence
  Chemically synthesized
augggacagaagcgaaauuagug

SEQ ID NO: 42377 - RNA, 23 nt, Artificial Sequence
  Chemically synthesized
aaugggacagaagcgaaauuagu

SEQ ID NO: 42378 - RNA, 23 nt, Artificial Sequence
  Chemically synthesized
gaaugggacagaagcgaaauuag

SEQ ID NO: 42379 - RNA, 23 nt, Artificial Sequence
  Chemically synthesized
ugaaugggacagaagcgaaauua

SEQ ID NO: 42380 - RNA, 23 nt, Artificial Sequence
  Chemically synthesized
cugaaugggacagaagcgaaauu

SEQ ID NO: 42381 - RNA, 23 nt, Artificial Sequence
  Chemically synthesized
acugaaugggacagaagcgaaau

SEQ ID NO: 42382 - RNA, 23 nt, Artificial Sequence
  Chemically synthesized
aacugaaugggacagaagcgaaa

SEQ ID NO: 42383 - RNA, 23 nt, Artificial Sequence
  Chemically synthesized
ggacaacacuuuugcagaugagc

SEQ ID NO: 42384 - RNA, 23 nt, Artificial Sequence
  Chemically synthesized
uggacaacacuuuugcagaugag

SEQ ID NO: 42385 - RNA, 23 nt, Artificial Sequence
  Chemically synthesized
guggacaacacuuuugcagauga

SEQ ID NO: 42386 - RNA, 23 nt, Artificial Sequence
  Chemically synthesized
gguggacaacacuuuugcagaug

SEQ ID NO: 42387 - RNA, 23 nt, Artificial Sequence
  Chemically synthesized
ggguggacaacacuuuugcagau

SEQ ID NO: 42388 - RNA, 23 nt, Artificial Sequence
  Chemically synthesized
ggauacuaauuauacacucaaca

SEQ ID NO: 42389 - RNA, 23 nt, Artificial Sequence
  Chemically synthesized
aggauacuaauuauacacucaac

SEQ ID NO: 42390 - RNA, 23 nt, Artificial Sequence
  Chemically synthesized
aaggauacuaauuauacacucaa

SEQ ID NO: 42391 - RNA, 23 nt, Artificial Sequence
  Chemically synthesized
gaaggauacuaauuauacacuca

SEQ ID NO: 42392 - RNA, 23 nt, Artificial Sequence
  Chemically synthesized
ggaaggauacuaauuauacacuc

SEQ ID NO: 42393 - RNA, 23 nt, Artificial Sequence
  Chemically synthesized
ggaggaaagaaaaauucagaagc

SEQ ID NO: 42394 - RNA, 23 nt, Artificial Sequence
  Chemically synthesized
aggaggaaagaaaaauucagaag

SEQ ID NO: 42395 - RNA, 23 nt, Artificial Sequence
  Chemically synthesized
aaggaggaaagaaaaauucagaa

SEQ ID NO: 42396 - RNA, 23 nt, Artificial Sequence
  Chemically synthesized
uaaggaggaaagaaaaauucaga

SEQ ID NO: 42397 - RNA, 23 nt, Artificial Sequence
  Chemically synthesized
uuaaggaggaaagaaaaauucag

SEQ ID NO: 42398 - RNA, 23 nt, Artificial Sequence
  Chemically synthesized
cgagucugaauggaaggauacua

SEQ ID NO: 42399 - RNA, 23 nt, Artificial Sequence
  Chemically synthesized
gcgagucugaauggaaggauacu

SEQ ID NO: 42400 - RNA, 23 nt, Artificial Sequence
  Chemically synthesized
ggcgagucugaauggaaggauac

SEQ ID NO: 42401 - RNA, 23 nt, Artificial Sequence
  Chemically synthesized
uggcgagucugaauggaaggaua

SEQ ID NO: 42402 - RNA, 23 nt, Artificial Sequence
  Chemically synthesized
cuggcgagucugaauggaaggau

SEQ ID NO: 42403 - RNA, 23 nt, Artificial Sequence
  Chemically synthesized
gacaaagcuuuuguugauuuccu

SEQ ID NO: 42404 - RNA, 23 nt, Artificial Sequence
  Chemically synthesized
gggaaaaaaucacggucacuuuc

SEQ ID NO: 42405 - RNA, 23 nt, Artificial Sequence
  Chemically synthesized
ggggaaaaaaucacggucacuuu

SEQ ID NO: 42406 - RNA, 23 nt, Artificial Sequence
  Chemically synthesized
cggggaaaaaaucacggucacuu

SEQ ID NO: 42407 - RNA, 23 nt, Artificial Sequence
  Chemically synthesized
ccggggaaaaaaucacggucacu

SEQ ID NO: 42408 - RNA, 23 nt, Artificial Sequence
  Chemically synthesized
gccggggaaaaaaucacggucac

SEQ ID NO: 42409 - RNA, 23 nt, Artificial Sequence
  Chemically synthesized
caccaggaguacauuacuuuucu

SEQ ID NO: 42410 - RNA, 23 nt, Artificial Sequence
  Chemically synthesized
gcaccaggaguacauuacuuuuc

SEQ ID NO: 42411 - RNA, 23 nt, Artificial Sequence
  Chemically synthesized
agcaccaggaguacauuacuuuu

SEQ ID NO: 42412 - RNA, 23 nt, Artificial Sequence
  Chemically synthesized
gagcaccaggaguacauuacuuu

SEQ ID NO: 42413 - RNA, 23 nt, Artificial Sequence
  Chemically synthesized
ggagcaccaggaguacauuacuu

SEQ ID NO: 42414 - RNA, 23 nt, Artificial Sequence
  Chemically synthesized
cugaauggaaggauacuaauuau

SEQ ID NO: 42415 - RNA, 23 nt, Artificial Sequence
  Chemically synthesized
ucugaauggaaggauacuaauua

SEQ ID NO: 42416 - RNA, 23 nt, Artificial Sequence
  Chemically synthesized
gucugaauggaaggauacuaauu

SEQ ID NO: 42417 - RNA, 23 nt, Artificial Sequence
  Chemically synthesized
agucugaauggaaggauacuaau

SEQ ID NO: 42418 - RNA, 23 nt, Artificial Sequence
  Chemically synthesized
gagucugaauggaaggauacuaa

SEQ ID NO: 42419 - RNA, 23 nt, Artificial Sequence
  Chemically synthesized
accgacggagacaaagcuuuugu

SEQ ID NO: 42420 - RNA, 23 nt, Artificial Sequence
  Chemically synthesized
caccgacggagacaaagcuuuug

SEQ ID NO: 42421 - RNA, 23 nt, Artificial Sequence
  Chemically synthesized
acaccgacggagacaaagcuuuu

SEQ ID NO: 42422 - RNA, 23 nt, Artificial Sequence
  Chemically synthesized
cacaccgacggagacaaagcuuu

SEQ ID NO: 42423 - RNA, 23 nt, Artificial Sequence
  Chemically synthesized
cgaaauuagugcggaaaguugcc

SEQ ID NO: 42424 - RNA, 23 nt, Artificial Sequence
  Chemically synthesized
gcgaaauuagugcggaaaguugc

SEQ ID NO: 42425 - RNA, 23 nt, Artificial Sequence
  Chemically synthesized
agcgaaauuagugcggaaaguug

SEQ ID NO: 42426 - RNA, 23 nt, Artificial Sequence
  Chemically synthesized
aagcgaaauuagugcggaaaguu

SEQ ID NO: 42427 - RNA, 23 nt, Artificial Sequence
  Chemically synthesized
gaagcgaaauuagugcggaaagu

SEQ ID NO: 42428 - RNA, 23 nt, Artificial Sequence
  Chemically synthesized
ucaagaguuuugucaagagccag

SEQ ID NO: 42429 - RNA, 23 nt, Artificial Sequence
  Chemically synthesized
cucaagaguuuugucaagagcca

SEQ ID NO: 42430 - RNA, 23 nt, Artificial Sequence
  Chemically synthesized
ccucaagaguuuugucaagagcc

SEQ ID NO: 42431 - RNA, 23 nt, Artificial Sequence
  Chemically synthesized
accucaagaguuuugucaagagc

SEQ ID NO: 42432 - RNA, 23 nt, Artificial Sequence
  Chemically synthesized
gaccucaagaguuuugucaagag

SEQ ID NO: 42433 - RNA, 23 nt, Artificial Sequence
  Chemically synthesized
ugacaucaacucccaauuucgug

SEQ ID NO: 42434 - RNA, 23 nt, Artificial Sequence
  Chemically synthesized
cugacaucaacucccaauuucgu

SEQ ID NO: 42435 - RNA, 23 nt, Artificial Sequence
  Chemically synthesized
acugacaucaacucccaauuucg

SEQ ID NO: 42436 - RNA, 23 nt, Artificial Sequence
  Chemically synthesized
aacugacaucaacucccaauuuc

SEQ ID NO: 42437 - RNA, 23 nt, Artificial Sequence
  Chemically synthesized
gaacugacaucaacucccaauuu

SEQ ID NO: 42438 - RNA, 23 nt, Artificial Sequence
  Chemically synthesized
ugaacugacaucaacucccaauu

SEQ ID NO: 42439 - RNA, 23 nt, Artificial Sequence
  Chemically synthesized
cggucacuuucaacauuaacaac

SEQ ID NO: 42440 - RNA, 23 nt, Artificial Sequence
  Chemically synthesized
acggucacuuucaacauuaacaa

SEQ ID NO: 42441 - RNA, 23 nt, Artificial Sequence
  Chemically synthesized
cacggucacuuucaacauuaaca

SEQ ID NO: 42442 - RNA, 23 nt, Artificial Sequence
  Chemically synthesized
ucacggucacuuucaacauuaac

SEQ ID NO: 42443 - RNA, 23 nt, Artificial Sequence
  Chemically synthesized
aucacggucacuuucaacauuaa

SEQ ID NO: 42444 - RNA, 23 nt, Artificial Sequence
  Chemically synthesized
agaagcgaaauuagugcggaaag

SEQ ID NO: 42445 - RNA, 23 nt, Artificial Sequence
  Chemically synthesized
cagaagcgaaauuagugcggaaa

SEQ ID NO: 42446 - RNA, 23 nt, Artificial Sequence
  Chemically synthesized
ggacagaagcgaaauuagugcgg

SEQ ID NO: 42447 - RNA, 23 nt, Artificial Sequence
  Chemically synthesized
gggacagaagcgaaauuagugcg

SEQ ID NO: 42448 - RNA, 23 nt, Artificial Sequence
  Chemically synthesized
gcuuuggccagugaacaaauccu

SEQ ID NO: 42449 - RNA, 23 nt, Artificial Sequence
  Chemically synthesized
ggcuuuggccagugaacaaaucc

SEQ ID NO: 42450 - RNA, 23 nt, Artificial Sequence
  Chemically synthesized
aggcuuuggccagugaacaaauc

SEQ ID NO: 42451 - RNA, 23 nt, Artificial Sequence
  Chemically synthesized
caggcuuuggccagugaacaaau

SEQ ID NO: 42452 - RNA, 23 nt, Artificial Sequence
  Chemically synthesized
gcaggcuuuggccagugaacaaa

SEQ ID NO: 42453 - RNA, 23 nt, Artificial Sequence
  Chemically synthesized
uccugagugaugaaauuaaggag

SEQ ID NO: 42454 - RNA, 23 nt, Artificial Sequence
  Chemically synthesized
uuccugagugaugaaauuaagga

SEQ ID NO: 42455 - RNA, 23 nt, Artificial Sequence
  Chemically synthesized
uuuccugagugaugaaauuaagg

SEQ ID NO: 42456 - RNA, 23 nt, Artificial Sequence
  Chemically synthesized
auuuccugagugaugaaauuaag

SEQ ID NO: 42457 - RNA, 23 nt, Artificial Sequence
  Chemically synthesized
gauuuccugagugaugaaauuaa

SEQ ID NO: 42458 - RNA, 23 nt, Artificial Sequence
  Chemically synthesized
agaguuuugucaagagccaguag

SEQ ID NO: 42459 - RNA, 23 nt, Artificial Sequence
  Chemically synthesized
aagaguuuugucaagagccagua

SEQ ID NO: 42460 - RNA, 23 nt, Artificial Sequence
  Chemically synthesized
caagaguuuugucaagagccagu

SEQ ID NO: 42461 - RNA, 23 nt, Artificial Sequence
  Chemically synthesized
agaccucaagaguuuugucaaga

SEQ ID NO: 42462 - RNA, 23 nt, Artificial Sequence
  Chemically synthesized
aagaccucaagaguuuugucaag

SEQ ID NO: 42463 - RNA, 23 nt, Artificial Sequence
  Chemically synthesized
gaagaccucaagaguuuugucaa

SEQ ID NO: 42464 - RNA, 23 nt, Artificial Sequence
  Chemically synthesized
ugaagaccucaagaguuuuguca

SEQ ID NO: 42465 - RNA, 23 nt, Artificial Sequence
  Chemically synthesized
uggaaggauacuaauuauacacu

SEQ ID NO: 42466 - RNA, 23 nt, Artificial Sequence
  Chemically synthesized
auggaaggauacuaauuauacac

SEQ ID NO: 42467 - RNA, 23 nt, Artificial Sequence
  Chemically synthesized
aauggaaggauacuaauuauaca

SEQ ID NO: 42468 - RNA, 23 nt, Artificial Sequence
  Chemically synthesized
gaauggaaggauacuaauuauac

SEQ ID NO: 42469 - RNA, 23 nt, Artificial Sequence
  Chemically synthesized
ugaauggaaggauacuaauuaua

SEQ ID NO: 42470 - RNA, 23 nt, Artificial Sequence
  Chemically synthesized
agaaugaugauggcaagaaggcc

SEQ ID NO: 42471 - RNA, 23 nt, Artificial Sequence
  Chemically synthesized
aagaaugaugauggcaagaaggc

SEQ ID NO: 42472 - RNA, 23 nt, Artificial Sequence
  Chemically synthesized
aaagaaugaugauggcaagaagg

SEQ ID NO: 42473 - RNA, 23 nt, Artificial Sequence
  Chemically synthesized
uaaagaaugaugauggcaagaag

SEQ ID NO: 42474 - RNA, 23 nt, Artificial Sequence
  Chemically synthesized
auaaagaaugaugauggcaagaa

SEQ ID NO: 42475 - RNA, 23 nt, Artificial Sequence
  Chemically synthesized
ucgugguugaaguuauaaagaau

SEQ ID NO: 42476 - RNA, 23 nt, Artificial Sequence
  Chemically synthesized
uucgugguugaaguuauaaagaa

SEQ ID NO: 42477 - RNA, 23 nt, Artificial Sequence
  Chemically synthesized
uuucgugguugaaguuauaaaga

SEQ ID NO: 42478 - RNA, 23 nt, Artificial Sequence
  Chemically synthesized
auuucgugguugaaguuauaaag

SEQ ID NO: 42479 - RNA, 23 nt, Artificial Sequence
  Chemically synthesized
aauuucgugguugaaguuauaaa

SEQ ID NO: 42480 - RNA, 23 nt, Artificial Sequence
  Chemically synthesized
gcauaaaacccucccuaagaugu

SEQ ID NO: 42481 - RNA, 23 nt, Artificial Sequence
  Chemically synthesized
agcauaaaacccucccuaagaug

SEQ ID NO: 42482 - RNA, 23 nt, Artificial Sequence
  Chemically synthesized
aagcauaaaacccucccuaagau

SEQ ID NO: 42483 - RNA, 23 nt, Artificial Sequence
  Chemically synthesized
gaagcauaaaacccucccuaaga

SEQ ID NO: 42484 - RNA, 23 nt, Artificial Sequence
  Chemically synthesized
agaagcauaaaacccucccuaag

SEQ ID NO: 42485 - RNA, 23 nt, Artificial Sequence
  Chemically synthesized
ugaugaaauuaaggaggaaagaa

SEQ ID NO: 42486 - RNA, 23 nt, Artificial Sequence
  Chemically synthesized
gugaugaaauuaaggaggaaaga

SEQ ID NO: 42487 - RNA, 23 nt, Artificial Sequence
  Chemically synthesized
agugaugaaauuaaggaggaaag

SEQ ID NO: 42488 - RNA, 23 nt, Artificial Sequence
  Chemically synthesized
gagugaugaaauuaaggaggaaa

SEQ ID NO: 42489 - RNA, 23 nt, Artificial Sequence
  Chemically synthesized
ugagugaugaaauuaaggaggaa

SEQ ID NO: 42490 - RNA, 23 nt, Artificial Sequence
  Chemically synthesized
ccugagugaugaaauuaaggagg

SEQ ID NO: 42491 - RNA, 23 nt, Artificial Sequence
  Chemically synthesized
uugaagaccucaagaguuuuguc

SEQ ID NO: 42492 - RNA, 23 nt, Artificial Sequence
  Chemically synthesized
cuugaagaccucaagaguuuugu

SEQ ID NO: 42493 - RNA, 23 nt, Artificial Sequence
  Chemically synthesized
ucuugaagaccucaagaguuuug

SEQ ID NO: 42494 - RNA, 23 nt, Artificial Sequence
  Chemically synthesized
cuaauuauacacucaacacagau

SEQ ID NO: 42495 - RNA, 23 nt, Artificial Sequence
  Chemically synthesized
acuaauuauacacucaacacaga

SEQ ID NO: 42496 - RNA, 23 nt, Artificial Sequence
  Chemically synthesized
uacuaauuauacacucaacacag

SEQ ID NO: 42497 - RNA, 23 nt, Artificial Sequence
  Chemically synthesized
auacuaauuauacacucaacaca

SEQ ID NO: 42498 - RNA, 23 nt, Artificial Sequence
  Chemically synthesized
gauacuaauuauacacucaacac

SEQ ID NO: 42499 - RNA, 23 nt, Artificial Sequence
  Chemically synthesized
caaagcuuuuguugauuuccuga

SEQ ID NO: 42500 - RNA, 23 nt, Artificial Sequence
  Chemically synthesized
acaaagcuuuuguugauuuccug

SEQ ID NO: 42501 - RNA, 23 nt, Artificial Sequence
  Chemically synthesized
cgugguugaaguuauaaagaaug

SEQ ID NO: 42502 - RNA, 23 nt, Artificial Sequence
  Chemically synthesized
gacaucaacucccaauuucgugg

SEQ ID NO: 42503 - RNA, 23 nt, Artificial Sequence
  Chemically synthesized
gcagaagguugaagaacaggagc

SEQ ID NO: 42504 - RNA, 23 nt, Artificial Sequence
  Chemically synthesized
ggcagaagguugaagaacaggag

SEQ ID NO: 42505 - RNA, 23 nt, Artificial Sequence
  Chemically synthesized
gggcagaagguugaagaacagga

SEQ ID NO: 42506 - RNA, 23 nt, Artificial Sequence
  Chemically synthesized
agggcagaagguugaagaacagg

SEQ ID NO: 42507 - RNA, 23 nt, Artificial Sequence
  Chemically synthesized
aagggcagaagguugaagaacag

SEQ ID NO: 42508 - RNA, 23 nt, Artificial Sequence
  Chemically synthesized
ucaacauuaacaacagcauccca

SEQ ID NO: 42509 - RNA, 23 nt, Artificial Sequence
  Chemically synthesized
uucaacauuaacaacagcauccc

SEQ ID NO: 42510 - RNA, 23 nt, Artificial Sequence
  Chemically synthesized
uuucaacauuaacaacagcaucc

SEQ ID NO: 42511 - RNA, 23 nt, Artificial Sequence
  Chemically synthesized
cuuucaacauuaacaacagcauc

SEQ ID NO: 42512 - RNA, 23 nt, Artificial Sequence
  Chemically synthesized
acuuucaacauuaacaacagcau

SEQ ID NO: 42513 - RNA, 23 nt, Artificial Sequence
  Chemically synthesized
gaaaaaaucacggucacuuucaa

SEQ ID NO: 42514 - RNA, 23 nt, Artificial Sequence
  Chemically synthesized
ggaaaaaaucacggucacuuuca

SEQ ID NO: 42515 - RNA, 23 nt, Artificial Sequence
  Chemically synthesized
cagaagcauaaaacccucccuaa

SEQ ID NO: 42516 - RNA, 23 nt, Artificial Sequence
  Chemically synthesized
gaggaaagaaaaauucagaagca

SEQ ID NO: 42517 - RNA, 23 nt, Artificial Sequence
  Chemically synthesized
gaaauuaaggaggaaagaaaaau

SEQ ID NO: 42518 - RNA, 23 nt, Artificial Sequence
  Chemically synthesized
ugaaauuaaggaggaaagaaaaa

SEQ ID NO: 42519 - RNA, 23 nt, Artificial Sequence
  Chemically synthesized
augaaauuaaggaggaaagaaaa

SEQ ID NO: 42520 - RNA, 23 nt, Artificial Sequence
  Chemically synthesized
gaugaaauuaaggaggaaagaaa

SEQ ID NO: 42521 - RNA, 23 nt, Artificial Sequence
  Chemically synthesized
cugagugaugaaauuaaggagga

SEQ ID NO: 42522 - RNA, 23 nt, Artificial Sequence
  Chemically synthesized
uuacuuuucuugaagaccucaag

SEQ ID NO: 42523 - RNA, 23 nt, Artificial Sequence
  Chemically synthesized
auuacuuuucuugaagaccucaa

SEQ ID NO: 42524 - RNA, 23 nt, Artificial Sequence
  Chemically synthesized
cauuacuuuucuugaagaccuca

SEQ ID NO: 42525 - RNA, 23 nt, Artificial Sequence
  Chemically synthesized
acauuacuuuucuugaagaccuc

SEQ ID NO: 42526 - RNA, 23 nt, Artificial Sequence
  Chemically synthesized
uacauuacuuuucuugaagaccu

SEQ ID NO: 42527 - RNA, 23 nt, Artificial Sequence
  Chemically synthesized
guacauuacuuuucuugaagacc

SEQ ID NO: 42528 - RNA, 23 nt, Artificial Sequence
  Chemically synthesized
aguacauuacuuuucuugaagac

SEQ ID NO: 42529 - RNA, 23 nt, Artificial Sequence
  Chemically synthesized
ugauuuccugagugaugaaauua

SEQ ID NO: 42530 - RNA, 23 nt, Artificial Sequence
  Chemically synthesized
uugauuuccugagugaugaaauu

SEQ ID NO: 42531 - RNA, 23 nt, Artificial Sequence
  Chemically synthesized
guugauuuccugagugaugaaau

SEQ ID NO: 42532 - RNA, 23 nt, Artificial Sequence
  Chemically synthesized
uguugauuuccugagugaugaaa

SEQ ID NO: 42533 - RNA, 23 nt, Artificial Sequence
  Chemically synthesized
uuguugauuuccugagugaugaa

SEQ ID NO: 42534 - RNA, 23 nt, Artificial Sequence
  Chemically synthesized
ggguuguccuuugcaucugcacg

SEQ ID NO: 42535 - RNA, 23 nt, Artificial Sequence
  Chemically synthesized
uggguuguccuuugcaucugcac

SEQ ID NO: 42536 - RNA, 23 nt, Artificial Sequence
  Chemically synthesized
cuggguuguccuuugcaucugca

SEQ ID NO: 42537 - RNA, 23 nt, Artificial Sequence
  Chemically synthesized
ccuggguuguccuuugcaucugc

SEQ ID NO: 42538 - RNA, 23 nt, Artificial Sequence
  Chemically synthesized
gccuggguuguccuuugcaucug

SEQ ID NO: 42539 - RNA, 23 nt, Artificial Sequence
  Chemically synthesized
cuaucagggaaguuagcuuucag

SEQ ID NO: 42540 - RNA, 23 nt, Artificial Sequence
  Chemically synthesized
ucuaucagggaaguuagcuuuca

SEQ ID NO: 42541 - RNA, 23 nt, Artificial Sequence
  Chemically synthesized
cucuaucagggaaguuagcuuuc

SEQ ID NO: 42542 - RNA, 23 nt, Artificial Sequence
  Chemically synthesized
ucucuaucagggaaguuagcuuu

SEQ ID NO: 42543 - RNA, 23 nt, Artificial Sequence
  Chemically synthesized
uucucuaucagggaaguuagcuu

SEQ ID NO: 42544 - RNA, 23 nt, Artificial Sequence
  Chemically synthesized
caagggcagaagguugaagaaca

SEQ ID NO: 42545 - RNA, 23 nt, Artificial Sequence
  Chemically synthesized
aaucacggucacuuucaacauua

SEQ ID NO: 42546 - RNA, 23 nt, Artificial Sequence
  Chemically synthesized
acagaagcgaaauuagugcggaa

SEQ ID NO: 42547 - RNA, 23 nt, Artificial Sequence
  Chemically synthesized
gacagaagcgaaauuagugcgga

SEQ ID NO: 42548 - RNA, 23 nt, Artificial Sequence
  Chemically synthesized
guuuugucaagagccaguagagc

SEQ ID NO: 42549 - RNA, 23 nt, Artificial Sequence
  Chemically synthesized
aguuuugucaagagccaguagag

SEQ ID NO: 42550 - RNA, 23 nt, Artificial Sequence
  Chemically synthesized
gaguuuugucaagagccaguaga

SEQ ID NO: 42551 - RNA, 23 nt, Artificial Sequence
  Chemically synthesized
gaguacauuacuuuucuugaaga

SEQ ID NO: 42552 - RNA, 23 nt, Artificial Sequence
  Chemically synthesized
acuggcgagucugaauggaagga

SEQ ID NO: 42553 - RNA, 23 nt, Artificial Sequence
  Chemically synthesized
ucagggaaguuagcuuucagucc

SEQ ID NO: 42554 - RNA, 23 nt, Artificial Sequence
  Chemically synthesized
aucagggaaguuagcuuucaguc

SEQ ID NO: 42555 - RNA, 23 nt, Artificial Sequence
  Chemically synthesized
uaucagggaaguuagcuuucagu

SEQ ID NO: 42556 - RNA, 23 nt, Artificial Sequence
  Chemically synthesized
ggcugagagugacaucuucucua

SEQ ID NO: 42557 - RNA, 23 nt, Artificial Sequence
  Chemically synthesized
aggcugagagugacaucuucucu

SEQ ID NO: 42558 - RNA, 23 nt, Artificial Sequence
  Chemically synthesized
gaggcugagagugacaucuucuc

SEQ ID NO: 42559 - RNA, 23 nt, Artificial Sequence
  Chemically synthesized
cgaggcugagagugacaucuucu

SEQ ID NO: 42560 - RNA, 23 nt, Artificial Sequence
  Chemically synthesized
acgaggcugagagugacaucuuc

SEQ ID NO: 42561 - RNA, 23 nt, Artificial Sequence
  Chemically synthesized
gaaugaugauggcaagaaggccc

SEQ ID NO: 42562 - RNA, 23 nt, Artificial Sequence
  Chemically synthesized
uauaaagaaugaugauggcaaga

SEQ ID NO: 42563 - RNA, 23 nt, Artificial Sequence
  Chemically synthesized
uuauaaagaaugaugauggcaag

SEQ ID NO: 42564 - RNA, 23 nt, Artificial Sequence
  Chemically synthesized
guuauaaagaaugaugauggcaa

SEQ ID NO: 42565 - RNA, 23 nt, Artificial Sequence
  Chemically synthesized
gugguugaaguuauaaagaauga

SEQ ID NO: 42566 - RNA, 23 nt, Artificial Sequence
  Chemically synthesized
caauuucgugguugaaguuauaa

SEQ ID NO: 42567 - RNA, 23 nt, Artificial Sequence
  Chemically synthesized
ccaauuucgugguugaaguuaua

SEQ ID NO: 42568 - RNA, 23 nt, Artificial Sequence
  Chemically synthesized
cccaauuucgugguugaaguuau

SEQ ID NO: 42569 - RNA, 23 nt, Artificial Sequence
  Chemically synthesized
ucccaauuucgugguugaaguua

SEQ ID NO: 42570 - RNA, 23 nt, Artificial Sequence
  Chemically synthesized
cucccaauuucgugguugaaguu

SEQ ID NO: 42571 - RNA, 23 nt, Artificial Sequence
  Chemically synthesized
aaaucacggucacuuucaacauu

SEQ ID NO: 42572 - RNA, 23 nt, Artificial Sequence
  Chemically synthesized
gugcuuugaaaugauuaucaucc

SEQ ID NO: 42573 - RNA, 23 nt, Artificial Sequence
  Chemically synthesized
ugugcuuugaaaugauuaucauc

SEQ ID NO: 42574 - RNA, 23 nt, Artificial Sequence
  Chemically synthesized
augugcuuugaaaugauuaucau

SEQ ID NO: 42575 - RNA, 23 nt, Artificial Sequence
  Chemically synthesized
caugugcuuugaaaugauuauca

SEQ ID NO: 42576 - RNA, 23 nt, Artificial Sequence
  Chemically synthesized
acaugugcuuugaaaugauuauc

SEQ ID NO: 42577 - RNA, 23 nt, Artificial Sequence
  Chemically synthesized
cuagacaugugcuuugaaaugau

SEQ ID NO: 42578 - RNA, 23 nt, Artificial Sequence
  Chemically synthesized
gcuagacaugugcuuugaaauga

SEQ ID NO: 42579 - RNA, 23 nt, Artificial Sequence
  Chemically synthesized
agcuagacaugugcuuugaaaug

SEQ ID NO: 42580 - RNA, 23 nt, Artificial Sequence
  Chemically synthesized
aagcuagacaugugcuuugaaau

SEQ ID NO: 42581 - RNA, 23 nt, Artificial Sequence
  Chemically synthesized
gaagcuagacaugugcuuugaaa

SEQ ID NO: 42582 - RNA, 23 nt, Artificial Sequence
  Chemically synthesized
uucuugaagaccucaagaguuuu

SEQ ID NO: 42583 - RNA, 23 nt, Artificial Sequence
  Chemically synthesized
uuucuugaagaccucaagaguuu

SEQ ID NO: 42584 - RNA, 23 nt, Artificial Sequence
  Chemically synthesized
acaacacuuuugcagaugagcug

SEQ ID NO: 42585 - RNA, 23 nt, Artificial Sequence
  Chemically synthesized
gacaacacuuuugcagaugagcu

SEQ ID NO: 42586 - RNA, 23 nt, Artificial Sequence
  Chemically synthesized
caucuucucuaucagggaaguua

SEQ ID NO: 42587 - RNA, 23 nt, Artificial Sequence
  Chemically synthesized
acaucuucucuaucagggaaguu

SEQ ID NO: 42588 - RNA, 23 nt, Artificial Sequence
  Chemically synthesized
gacaucuucucuaucagggaagu

SEQ ID NO: 42589 - RNA, 23 nt, Artificial Sequence
  Chemically synthesized
ugacaucuucucuaucagggaag

SEQ ID NO: 42590 - RNA, 23 nt, Artificial Sequence
  Chemically synthesized
gugacaucuucucuaucagggaa

SEQ ID NO: 42591 - RNA, 23 nt, Artificial Sequence
  Chemically synthesized
gaaauuagugcggaaaguugccg

SEQ ID NO: 42592 - RNA, 23 nt, Artificial Sequence
  Chemically synthesized
caacacuuuugcagaugagcugg

SEQ ID NO: 42593 - RNA, 23 nt, Artificial Sequence
  Chemically synthesized
acacucaacacagauuccuugga

SEQ ID NO: 42594 - RNA, 23 nt, Artificial Sequence
  Chemically synthesized
uacacucaacacagauuccuugg

SEQ ID NO: 42595 - RNA, 23 nt, Artificial Sequence
  Chemically synthesized
auacacucaacacagauuccuug

SEQ ID NO: 42596 - RNA, 23 nt, Artificial Sequence
  Chemically synthesized
uauacacucaacacagauuccuu

SEQ ID NO: 42597 - RNA, 23 nt, Artificial Sequence
  Chemically synthesized
uuauacacucaacacagauuccu

SEQ ID NO: 42598 - RNA, 23 nt, Artificial Sequence
  Chemically synthesized
cacuggcgagucugaauggaagg

SEQ ID NO: 42599 - RNA, 23 nt, Artificial Sequence
  Chemically synthesized
ccacuggcgagucugaauggaag

SEQ ID NO: 42600 - RNA, 23 nt, Artificial Sequence
  Chemically synthesized
uccacuggcgagucugaauggaa

SEQ ID NO: 42601 - RNA, 23 nt, Artificial Sequence
  Chemically synthesized
cagggaaguuagcuuucagucca

SEQ ID NO: 42602 - RNA, 23 nt, Artificial Sequence
  Chemically synthesized
agcuuuuguugauuuccugagug

SEQ ID NO: 42603 - RNA, 23 nt, Artificial Sequence
  Chemically synthesized
aagcuuuuguugauuuccugagu

SEQ ID NO: 42604 - RNA, 23 nt, Artificial Sequence
  Chemically synthesized
aaagcuuuuguugauuuccugag

SEQ ID NO: 42605 - RNA, 23 nt, Artificial Sequence
  Chemically synthesized
cuucucuaucagggaaguuagcu

SEQ ID NO: 42606 - RNA, 23 nt, Artificial Sequence
  Chemically synthesized
ucuucucuaucagggaaguuagc

SEQ ID NO: 42607 - RNA, 23 nt, Artificial Sequence
  Chemically synthesized
aucuucucuaucagggaaguuag

SEQ ID NO: 42608 - RNA, 23 nt, Artificial Sequence
  Chemically synthesized
gacgaggcugagagugacaucuu

SEQ ID NO: 42609 - RNA, 23 nt, Artificial Sequence
  Chemically synthesized
agacgaggcugagagugacaucu

SEQ ID NO: 42610 - RNA, 23 nt, Artificial Sequence
  Chemically synthesized
aagacgaggcugagagugacauc

SEQ ID NO: 42611 - RNA, 23 nt, Artificial Sequence
  Chemically synthesized
gaagacgaggcugagagugacau

SEQ ID NO: 42612 - RNA, 23 nt, Artificial Sequence
  Chemically synthesized
gaagguugaagaacaggagccug

SEQ ID NO: 42613 - RNA, 23 nt, Artificial Sequence
  Chemically synthesized
agaagguugaagaacaggagccu

SEQ ID NO: 42614 - RNA, 23 nt, Artificial Sequence
  Chemically synthesized
cagaagguugaagaacaggagcc

SEQ ID NO: 42615 - RNA, 23 nt, Artificial Sequence
  Chemically synthesized
aaaaucacggucacuuucaacau

SEQ ID NO: 42616 - RNA, 23 nt, Artificial Sequence
  Chemically synthesized
aaaaaucacggucacuuucaaca

SEQ ID NO: 42617 - RNA, 23 nt, Artificial Sequence
  Chemically synthesized
aaaaaaucacggucacuuucaac

SEQ ID NO: 42618 - RNA, 23 nt, Artificial Sequence
  Chemically synthesized
ggaacugaaugggacagaagcga

SEQ ID NO: 42619 - RNA, 23 nt, Artificial Sequence
  Chemically synthesized
uggaacugaaugggacagaagcg

SEQ ID NO: 42620 - RNA, 23 nt, Artificial Sequence
  Chemically synthesized
cuggaacugaaugggacagaagc

SEQ ID NO: 42621 - RNA, 23 nt, Artificial Sequence
  Chemically synthesized
gcuggaacugaaugggacagaag

SEQ ID NO: 42622 - RNA, 23 nt, Artificial Sequence
  Chemically synthesized
agcuggaacugaaugggacagaa

SEQ ID NO: 42623 - RNA, 23 nt, Artificial Sequence
  Chemically synthesized
guugggagcuggaacugaauggg

SEQ ID NO: 42624 - RNA, 23 nt, Artificial Sequence
  Chemically synthesized
gguugggagcuggaacugaaugg

SEQ ID NO: 42625 - RNA, 23 nt, Artificial Sequence
  Chemically synthesized
agguugggagcuggaacugaaug

SEQ ID NO: 42626 - RNA, 23 nt, Artificial Sequence
  Chemically synthesized
gagguugggagcuggaacugaau

SEQ ID NO: 42627 - RNA, 23 nt, Artificial Sequence
  Chemically synthesized
ggagguugggagcuggaacugaa

SEQ ID NO: 42628 - RNA, 23 nt, Artificial Sequence
  Chemically synthesized
cuacucugaagcuagacaugugc

SEQ ID NO: 42629 - RNA, 23 nt, Artificial Sequence
  Chemically synthesized
ccuacucugaagcuagacaugug

SEQ ID NO: 42630 - RNA, 23 nt, Artificial Sequence
  Chemically synthesized
uccuacucugaagcuagacaugu

SEQ ID NO: 42631 - RNA, 23 nt, Artificial Sequence
  Chemically synthesized
auccuacucugaagcuagacaug

SEQ ID NO: 42632 - RNA, 23 nt, Artificial Sequence
  Chemically synthesized
aauccuacucugaagcuagacau

SEQ ID NO: 42633 - RNA, 23 nt, Artificial Sequence
  Chemically synthesized
gaaguuagcuuucaguccacugg

SEQ ID NO: 42634 - RNA, 23 nt, Artificial Sequence
  Chemically synthesized
ggaaguuagcuuucaguccacug

SEQ ID NO: 42635 - RNA, 23 nt, Artificial Sequence
  Chemically synthesized
gggaaguuagcuuucaguccacu

SEQ ID NO: 42636 - RNA, 23 nt, Artificial Sequence
  Chemically synthesized
agggaaguuagcuuucaguccac

SEQ ID NO: 42637 - RNA, 23 nt, Artificial Sequence
  Chemically synthesized
ugagguuggacaagaagacgagg

SEQ ID NO: 42638 - RNA, 23 nt, Artificial Sequence
  Chemically synthesized
augagguuggacaagaagacgag

SEQ ID NO: 42639 - RNA, 23 nt, Artificial Sequence
  Chemically synthesized
gaugagguuggacaagaagacga

SEQ ID NO: 42640 - RNA, 23 nt, Artificial Sequence
  Chemically synthesized
ggaugagguuggacaagaagacg

SEQ ID NO: 42641 - RNA, 23 nt, Artificial Sequence
  Chemically synthesized
aggaugagguuggacaagaagac

SEQ ID NO: 42642 - RNA, 23 nt, Artificial Sequence
  Chemically synthesized
caacauuugauggugaggaggaa

SEQ ID NO: 42643 - RNA, 23 nt, Artificial Sequence
  Chemically synthesized
ccaacauuugauggugaggagga

SEQ ID NO: 42644 - RNA, 23 nt, Artificial Sequence
  Chemically synthesized
accaacauuugauggugaggagg

SEQ ID NO: 42645 - RNA, 23 nt, Artificial Sequence
  Chemically synthesized
caccaacauuugauggugaggag

SEQ ID NO: 42646 - RNA, 23 nt, Artificial Sequence
  Chemically synthesized
ccaccaacauuugauggugagga

SEQ ID NO: 42647 - RNA, 23 nt, Artificial Sequence
  Chemically synthesized
auaguuucauggcaggcuuuggc

SEQ ID NO: 42648 - RNA, 23 nt, Artificial Sequence
  Chemically synthesized
cauaguuucauggcaggcuuugg

SEQ ID NO: 42649 - RNA, 23 nt, Artificial Sequence
  Chemically synthesized
ccauaguuucauggcaggcuuug

SEQ ID NO: 42650 - RNA, 23 nt, Artificial Sequence
  Chemically synthesized
gccauaguuucauggcaggcuuu

SEQ ID NO: 42651 - RNA, 23 nt, Artificial Sequence
  Chemically synthesized
agccauaguuucauggcaggcuu

SEQ ID NO: 42652 - RNA, 23 nt, Artificial Sequence
  Chemically synthesized
gccaguagagcagacagaugcug

SEQ ID NO: 42653 - RNA, 23 nt, Artificial Sequence
  Chemically synthesized
agccaguagagcagacagaugcu

SEQ ID NO: 42654 - RNA, 23 nt, Artificial Sequence
  Chemically synthesized
gagccaguagagcagacagaugc

SEQ ID NO: 42655 - RNA, 23 nt, Artificial Sequence
  Chemically synthesized
agagccaguagagcagacagaug

SEQ ID NO: 42656 - RNA, 23 nt, Artificial Sequence
  Chemically synthesized
aagagccaguagagcagacagau

SEQ ID NO: 42657 - RNA, 23 nt, Artificial Sequence
  Chemically synthesized
ccuaauggauuuccuugccgacc

SEQ ID NO: 42658 - RNA, 23 nt, Artificial Sequence
  Chemically synthesized
accuaauggauuuccuugccgac

SEQ ID NO: 42659 - RNA, 23 nt, Artificial Sequence
  Chemically synthesized
caccuaauggauuuccuugccga

SEQ ID NO: 42660 - RNA, 23 nt, Artificial Sequence
  Chemically synthesized
ccaccuaauggauuuccuugccg

SEQ ID NO: 42661 - RNA, 23 nt, Artificial Sequence
  Chemically synthesized
accaccuaauggauuuccuugcc

SEQ ID NO: 42662 - RNA, 23 nt, Artificial Sequence
  Chemically synthesized
ucaacacagauuccuuggacugg

SEQ ID NO: 42663 - RNA, 23 nt, Artificial Sequence
  Chemically synthesized
cucaacacagauuccuuggacug

SEQ ID NO: 42664 - RNA, 23 nt, Artificial Sequence
  Chemically synthesized
acucaacacagauuccuuggacu

SEQ ID NO: 42665 - RNA, 23 nt, Artificial Sequence
  Chemically synthesized
cacucaacacagauuccuuggac

SEQ ID NO: 42666 - RNA, 23 nt, Artificial Sequence
  Chemically synthesized
gacaagaagacgaggcugagagu

SEQ ID NO: 42667 - RNA, 23 nt, Artificial Sequence
  Chemically synthesized
ggacaagaagacgaggcugagag

SEQ ID NO: 42668 - RNA, 23 nt, Artificial Sequence
  Chemically synthesized
uggacaagaagacgaggcugaga

SEQ ID NO: 42669 - RNA, 23 nt, Artificial Sequence
  Chemically synthesized
uuggacaagaagacgaggcugag

SEQ ID NO: 42670 - RNA, 23 nt, Artificial Sequence
  Chemically synthesized
guuggacaagaagacgaggcuga

SEQ ID NO: 42671 - RNA, 23 nt, Artificial Sequence
  Chemically synthesized
gguuggacaagaagacgaggcug

SEQ ID NO: 42672 - RNA, 23 nt, Artificial Sequence
  Chemically synthesized
agguuggacaagaagacgaggcu

SEQ ID NO: 42673 - RNA, 23 nt, Artificial Sequence
  Chemically synthesized
gagguuggacaagaagacgaggc

SEQ ID NO: 42674 - RNA, 23 nt, Artificial Sequence
  Chemically synthesized
guguuggacugucauuauccaga

SEQ ID NO: 42675 - RNA, 23 nt, Artificial Sequence
  Chemically synthesized
uguguuggacugucauuauccag

SEQ ID NO: 42676 - RNA, 23 nt, Artificial Sequence
  Chemically synthesized
uuguguuggacugucauuaucca

SEQ ID NO: 42677 - RNA, 23 nt, Artificial Sequence
  Chemically synthesized
cuuguguuggacugucauuaucc

SEQ ID NO: 42678 - RNA, 23 nt, Artificial Sequence
  Chemically synthesized
ccuuguguuggacugucauuauc

SEQ ID NO: 42679 - RNA, 23 nt, Artificial Sequence
  Chemically synthesized
gguugaagaacaggagccugaac

SEQ ID NO: 42680 - RNA, 23 nt, Artificial Sequence
  Chemically synthesized
agguugaagaacaggagccugaa

SEQ ID NO: 42681 - RNA, 23 nt, Artificial Sequence
  Chemically synthesized
aagguugaagaacaggagccuga

SEQ ID NO: 42682 - RNA, 23 nt, Artificial Sequence
  Chemically synthesized
gcaagggcagaagguugaagaac

SEQ ID NO: 42683 - RNA, 23 nt, Artificial Sequence
  Chemically synthesized
ggaaagaaaaauucagaagcaua

SEQ ID NO: 42684 - RNA, 23 nt, Artificial Sequence
  Chemically synthesized
aggaaagaaaaauucagaagcau

SEQ ID NO: 42685 - RNA, 23 nt, Artificial Sequence
  Chemically synthesized
gacaugugcuuugaaaugauuau

SEQ ID NO: 42686 - RNA, 23 nt, Artificial Sequence
  Chemically synthesized
agacaugugcuuugaaaugauua

SEQ ID NO: 42687 - RNA, 23 nt, Artificial Sequence
  Chemically synthesized
uagacaugugcuuugaaaugauu

SEQ ID NO: 42688 - RNA, 23 nt, Artificial Sequence
  Chemically synthesized
ugaagcuagacaugugcuuugaa

SEQ ID NO: 42689 - RNA, 23 nt, Artificial Sequence
  Chemically synthesized
ccaguagagcagacagaugcuga

SEQ ID NO: 42690 - RNA, 23 nt, Artificial Sequence
  Chemically synthesized
gggguggacaacacuuuugcaga

SEQ ID NO: 42691 - RNA, 23 nt, Artificial Sequence
  Chemically synthesized
agggguggacaacacuuuugcag

SEQ ID NO: 42692 - RNA, 23 nt, Artificial Sequence
  Chemically synthesized
agaggaugagguuggacaagaag

SEQ ID NO: 42693 - RNA, 23 nt, Artificial Sequence
  Chemically synthesized
cagaggaugagguuggacaagaa

SEQ ID NO: 42694 - RNA, 23 nt, Artificial Sequence
  Chemically synthesized
ccagaggaugagguuggacaaga

SEQ ID NO: 42695 - RNA, 23 nt, Artificial Sequence
  Chemically synthesized
uccagaggaugagguuggacaag

SEQ ID NO: 42696 - RNA, 23 nt, Artificial Sequence
  Chemically synthesized
auccagaggaugagguuggacaa

SEQ ID NO: 42697 - RNA, 23 nt, Artificial Sequence
  Chemically synthesized
cccuuguguuggacugucauuau

SEQ ID NO: 42698 - RNA, 23 nt, Artificial Sequence
  Chemically synthesized
gcccuuguguuggacugucauua

SEQ ID NO: 42699 - RNA, 23 nt, Artificial Sequence
  Chemically synthesized
ggcccuuguguuggacugucauu

SEQ ID NO: 42700 - RNA, 23 nt, Artificial Sequence
  Chemically synthesized
aggcccuuguguuggacugucau

SEQ ID NO: 42701 - RNA, 23 nt, Artificial Sequence
  Chemically synthesized
cacuuucaacauuaacaacagca

SEQ ID NO: 42702 - RNA, 23 nt, Artificial Sequence
  Chemically synthesized
ucacuuucaacauuaacaacagc

SEQ ID NO: 42703 - RNA, 23 nt, Artificial Sequence
  Chemically synthesized
gucacuuucaacauuaacaacag

SEQ ID NO: 42704 - RNA, 23 nt, Artificial Sequence
  Chemically synthesized
caucccaccaacauuugauggug

SEQ ID NO: 42705 - RNA, 23 nt, Artificial Sequence
  Chemically synthesized
gcaucccaccaacauuugauggu

SEQ ID NO: 42706 - RNA, 23 nt, Artificial Sequence
  Chemically synthesized
agcaucccaccaacauuugaugg

SEQ ID NO: 42707 - RNA, 23 nt, Artificial Sequence
  Chemically synthesized
cagcaucccaccaacauuugaug

SEQ ID NO: 42708 - RNA, 23 nt, Artificial Sequence
  Chemically synthesized
acagcaucccaccaacauuugau

SEQ ID NO: 42709 - RNA, 23 nt, Artificial Sequence
  Chemically synthesized
aacagcaucccaccaacauuuga

SEQ ID NO: 42710 - RNA, 23 nt, Artificial Sequence
  Chemically synthesized
aaauccuacucugaagcuagaca

SEQ ID NO: 42711 - RNA, 23 nt, Artificial Sequence
  Chemically synthesized
caaauccuacucugaagcuagac

SEQ ID NO: 42712 - RNA, 23 nt, Artificial Sequence
  Chemically synthesized
acaaauccuacucugaagcuaga

SEQ ID NO: 42713 - RNA, 23 nt, Artificial Sequence
  Chemically synthesized
aacaaauccuacucugaagcuag

SEQ ID NO: 42714 - RNA, 23 nt, Artificial Sequence
  Chemically synthesized
gaacaaauccuacucugaagcua

SEQ ID NO: 42715 - RNA, 23 nt, Artificial Sequence
  Chemically synthesized
gaggaugagguuggacaagaaga

SEQ ID NO: 42716 - RNA, 23 nt, Artificial Sequence
  Chemically synthesized
cucugaagcuagacaugugcuuu

SEQ ID NO: 42717 - RNA, 23 nt, Artificial Sequence
  Chemically synthesized
acucugaagcuagacaugugcuu

SEQ ID NO: 42718 - RNA, 23 nt, Artificial Sequence
  Chemically synthesized
uacucugaagcuagacaugugcu

SEQ ID NO: 42719 - RNA, 23 nt, Artificial Sequence
  Chemically synthesized
gaccaccuaauggauuuccuugc

SEQ ID NO: 42720 - RNA, 23 nt, Artificial Sequence
  Chemically synthesized
ugaccaccuaauggauuuccuug

SEQ ID NO: 42721 - RNA, 23 nt, Artificial Sequence
  Chemically synthesized
augaccaccuaauggauuuccuu

SEQ ID NO: 42722 - RNA, 23 nt, Artificial Sequence
  Chemically synthesized
cugggccuuauaugaccaccuaa

SEQ ID NO: 42723 - RNA, 23 nt, Artificial Sequence
  Chemically synthesized
acugggccuuauaugaccaccua

SEQ ID NO: 42724 - RNA, 23 nt, Artificial Sequence
  Chemically synthesized
ggccagugaacaaauccuacucu

SEQ ID NO: 42725 - RNA, 23 nt, Artificial Sequence
  Chemically synthesized
uggccagugaacaaauccuacuc

SEQ ID NO: 42726 - RNA, 23 nt, Artificial Sequence
  Chemically synthesized
uuggccagugaacaaauccuacu

SEQ ID NO: 42727 - RNA, 23 nt, Artificial Sequence
  Chemically synthesized
uuuggccagugaacaaauccuac

SEQ ID NO: 42728 - RNA, 23 nt, Artificial Sequence
  Chemically synthesized
cuuuggccagugaacaaauccua

SEQ ID NO: 42729 - RNA, 23 nt, Artificial Sequence
  Chemically synthesized
uaugaccaccuaauggauuuccu

SEQ ID NO: 42730 - RNA, 23 nt, Artificial Sequence
  Chemically synthesized
auaugaccaccuaauggauuucc

SEQ ID NO: 42731 - RNA, 23 nt, Artificial Sequence
  Chemically synthesized
uauaugaccaccuaauggauuuc

SEQ ID NO: 42732 - RNA, 23 nt, Artificial Sequence
  Chemically synthesized
uuauaugaccaccuaauggauuu

SEQ ID NO: 42733 - RNA, 23 nt, Artificial Sequence
  Chemically synthesized
gaaagaaaaauucagaagcauaa

SEQ ID NO: 42734 - RNA, 23 nt, Artificial Sequence
  Chemically synthesized
uggagcaccaggaguacauuacu

SEQ ID NO: 42735 - RNA, 23 nt, Artificial Sequence
  Chemically synthesized
cuggagcaccaggaguacauuac

SEQ ID NO: 42736 - RNA, 23 nt, Artificial Sequence
  Chemically synthesized
ccuggagcaccaggaguacauua

SEQ ID NO: 42737 - RNA, 23 nt, Artificial Sequence
  Chemically synthesized
cccuggagcaccaggaguacauu

SEQ ID NO: 42738 - RNA, 23 nt, Artificial Sequence
  Chemically synthesized
ggacugucauuauccagaggaug

SEQ ID NO: 42739 - RNA, 23 nt, Artificial Sequence
  Chemically synthesized
uggacugucauuauccagaggau

SEQ ID NO: 42740 - RNA, 23 nt, Artificial Sequence
  Chemically synthesized
uuggacugucauuauccagagga

SEQ ID NO: 42741 - RNA, 23 nt, Artificial Sequence
  Chemically synthesized
guuggacugucauuauccagagg

SEQ ID NO: 42742 - RNA, 23 nt, Artificial Sequence
  Chemically synthesized
uguuggacugucauuauccagag

SEQ ID NO: 42743 - RNA, 23 nt, Artificial Sequence
  Chemically synthesized
acucccaauuucgugguugaagu

SEQ ID NO: 42744 - RNA, 23 nt, Artificial Sequence
  Chemically synthesized
aacucccaauuucgugguugaag

SEQ ID NO: 42745 - RNA, 23 nt, Artificial Sequence
  Chemically synthesized
caacucccaauuucgugguugaa

SEQ ID NO: 42746 - RNA, 23 nt, Artificial Sequence
  Chemically synthesized
ucaacucccaauuucgugguuga

SEQ ID NO: 42747 - RNA, 23 nt, Artificial Sequence
  Chemically synthesized
gagccugaacugacaucaacucc

SEQ ID NO: 42748 - RNA, 23 nt, Artificial Sequence
  Chemically synthesized
ggagccugaacugacaucaacuc

SEQ ID NO: 42749 - RNA, 23 nt, Artificial Sequence
  Chemically synthesized
aggagccugaacugacaucaacu

SEQ ID NO: 42750 - RNA, 23 nt, Artificial Sequence
  Chemically synthesized
caggagccugaacugacaucaac

SEQ ID NO: 42751 - RNA, 23 nt, Artificial Sequence
  Chemically synthesized
acaggagccugaacugacaucaa

SEQ ID NO: 42752 - RNA, 23 nt, Artificial Sequence
  Chemically synthesized
ccagugaacaaauccuacucuga

SEQ ID NO: 42753 - RNA, 23 nt, Artificial Sequence
  Chemically synthesized
gccagugaacaaauccuacucug

SEQ ID NO: 42754 - RNA, 23 nt, Artificial Sequence
  Chemically synthesized
gacagaugcugaaagccauaguu

SEQ ID NO: 42755 - RNA, 23 nt, Artificial Sequence
  Chemically synthesized
agacagaugcugaaagccauagu

SEQ ID NO: 42756 - RNA, 23 nt, Artificial Sequence
  Chemically synthesized
cagacagaugcugaaagccauag

SEQ ID NO: 42757 - RNA, 23 nt, Artificial Sequence
  Chemically synthesized
gcagacagaugcugaaagccaua

SEQ ID NO: 42758 - RNA, 23 nt, Artificial Sequence
  Chemically synthesized
agcagacagaugcugaaagccau

SEQ ID NO: 42759 - RNA, 23 nt, Artificial Sequence
  Chemically synthesized
gacugggccuuauaugaccaccu

SEQ ID NO: 42760 - RNA, 23 nt, Artificial Sequence
  Chemically synthesized
ggucacuuucaacauuaacaaca

SEQ ID NO: 42761 - RNA, 23 nt, Artificial Sequence
  Chemically synthesized
gcccuggagcaccaggaguacau

SEQ ID NO: 42762 - RNA, 23 nt, Artificial Sequence
  Chemically synthesized
agagugacaucuucucuaucagg

SEQ ID NO: 42763 - RNA, 23 nt, Artificial Sequence
  Chemically synthesized
gagagugacaucuucucuaucag

SEQ ID NO: 42764 - RNA, 23 nt, Artificial Sequence
  Chemically synthesized
ugagagugacaucuucucuauca

SEQ ID NO: 42765 - RNA, 23 nt, Artificial Sequence
  Chemically synthesized
cugagagugacaucuucucuauc

SEQ ID NO: 42766 - RNA, 23 nt, Artificial Sequence
  Chemically synthesized
gcugagagugacaucuucucuau

SEQ ID NO: 42767 - RNA, 23 nt, Artificial Sequence
  Chemically synthesized
cgcaagggcagaagguugaagaa

SEQ ID NO: 42768 - RNA, 23 nt, Artificial Sequence
  Chemically synthesized
ucgcaagggcagaagguugaaga

SEQ ID NO: 42769 - RNA, 23 nt, Artificial Sequence
  Chemically synthesized
cucgcaagggcagaagguugaag

SEQ ID NO: 42770 - RNA, 23 nt, Artificial Sequence
  Chemically synthesized
ccucgcaagggcagaagguugaa

SEQ ID NO: 42771 - RNA, 23 nt, Artificial Sequence
  Chemically synthesized
ggccuggguuguccuuugcaucu

SEQ ID NO: 42772 - RNA, 23 nt, Artificial Sequence
  Chemically synthesized
aggccuggguuguccuuugcauc

SEQ ID NO: 42773 - RNA, 23 nt, Artificial Sequence
  Chemically synthesized
uaggccuggguuguccuuugcau

SEQ ID NO: 42774 - RNA, 23 nt, Artificial Sequence
  Chemically synthesized
ugaacaaauccuacucugaagcu

SEQ ID NO: 42775 - RNA, 23 nt, Artificial Sequence
  Chemically synthesized
gugaacaaauccuacucugaagc

SEQ ID NO: 42776 - RNA, 23 nt, Artificial Sequence
  Chemically synthesized
agugaacaaauccuacucugaag

SEQ ID NO: 42777 - RNA, 23 nt, Artificial Sequence
  Chemically synthesized
cagugaacaaauccuacucugaa

SEQ ID NO: 42778 - RNA, 23 nt, Artificial Sequence
  Chemically synthesized
ggcaggcuuuggccagugaacaa

SEQ ID NO: 42779 - RNA, 23 nt, Artificial Sequence
  Chemically synthesized
gaugcugaaagccauaguuucau

SEQ ID NO: 42780 - RNA, 23 nt, Artificial Sequence
  Chemically synthesized
agaugcugaaagccauaguuuca

SEQ ID NO: 42781 - RNA, 23 nt, Artificial Sequence
  Chemically synthesized
cagaugcugaaagccauaguuuc

SEQ ID NO: 42782 - RNA, 23 nt, Artificial Sequence
  Chemically synthesized
acagaugcugaaagccauaguuu

SEQ ID NO: 42783 - RNA, 23 nt, Artificial Sequence
  Chemically synthesized
aucaacucccaauuucgugguug

SEQ ID NO: 42784 - RNA, 23 nt, Artificial Sequence
  Chemically synthesized
caucaacucccaauuucgugguu

SEQ ID NO: 42785 - RNA, 23 nt, Artificial Sequence
  Chemically synthesized
gccugaacugacaucaacuccca

SEQ ID NO: 42786 - RNA, 23 nt, Artificial Sequence
  Chemically synthesized
agccugaacugacaucaacuccc

SEQ ID NO: 42787 - RNA, 23 nt, Artificial Sequence
  Chemically synthesized
aacaggagccugaacugacauca

SEQ ID NO: 42788 - RNA, 23 nt, Artificial Sequence
  Chemically synthesized
agagcagacagaugcugaaagcc

SEQ ID NO: 42789 - RNA, 23 nt, Artificial Sequence
  Chemically synthesized
uagagcagacagaugcugaaagc

SEQ ID NO: 42790 - RNA, 23 nt, Artificial Sequence
  Chemically synthesized
guagagcagacagaugcugaaag

SEQ ID NO: 42791 - RNA, 23 nt, Artificial Sequence
  Chemically synthesized
aguagagcagacagaugcugaaa

SEQ ID NO: 42792 - RNA, 23 nt, Artificial Sequence
  Chemically synthesized
caguagagcagacagaugcugaa

SEQ ID NO: 42793 - RNA, 23 nt, Artificial Sequence
  Chemically synthesized
uccuuggacugggccuuauauga

SEQ ID NO: 42794 - RNA, 23 nt, Artificial Sequence
  Chemically synthesized
uuccuuggacugggccuuauaug

SEQ ID NO: 42795 - RNA, 23 nt, Artificial Sequence
  Chemically synthesized
auuccuuggacugggccuuauau

SEQ ID NO: 42796 - RNA, 23 nt, Artificial Sequence
  Chemically synthesized
gauuccuuggacugggccuuaua

SEQ ID NO: 42797 - RNA, 23 nt, Artificial Sequence
  Chemically synthesized
agauuccuuggacugggccuuau

SEQ ID NO: 42798 - RNA, 23 nt, Artificial Sequence
  Chemically synthesized
ugaagaacaggagccugaacuga

SEQ ID NO: 42799 - RNA, 23 nt, Artificial Sequence
  Chemically synthesized
uugaagaacaggagccugaacug

SEQ ID NO: 42800 - RNA, 23 nt, Artificial Sequence
  Chemically synthesized
guugaagaacaggagccugaacu

SEQ ID NO: 42801 - RNA, 23 nt, Artificial Sequence
  Chemically synthesized
gagcuggaacugaaugggacaga

SEQ ID NO: 42802 - RNA, 23 nt, Artificial Sequence
  Chemically synthesized
ccuaagaugucuggagguuggga

SEQ ID NO: 42803 - RNA, 23 nt, Artificial Sequence
  Chemically synthesized
cccuaagaugucuggagguuggg

SEQ ID NO: 42804 - RNA, 23 nt, Artificial Sequence
  Chemically synthesized
ucccuaagaugucuggagguugg

SEQ ID NO: 42805 - RNA, 23 nt, Artificial Sequence
  Chemically synthesized
cucccuaagaugucuggagguug

SEQ ID NO: 42806 - RNA, 23 nt, Artificial Sequence
  Chemically synthesized
ccucccuaagaugucuggagguu

SEQ ID NO: 42807 - RNA, 23 nt, Artificial Sequence
  Chemically synthesized
ccuuggacugggccuuauaugac

SEQ ID NO: 42808 - RNA, 23 nt, Artificial Sequence
  Chemically synthesized
agugacaucuucucuaucaggga

SEQ ID NO: 42809 - RNA, 23 nt, Artificial Sequence
  Chemically synthesized
gagugacaucuucucuaucaggg

SEQ ID NO: 42810 - RNA, 23 nt, Artificial Sequence
  Chemically synthesized
gaacaggagccugaacugacauc

SEQ ID NO: 42811 - RNA, 23 nt, Artificial Sequence
  Chemically synthesized
agaacaggagccugaacugacau

SEQ ID NO: 42812 - RNA, 23 nt, Artificial Sequence
  Chemically synthesized
aagaacaggagccugaacugaca

SEQ ID NO: 42813 - RNA, 23 nt, Artificial Sequence
  Chemically synthesized
guccuuugcaucugcacguguuc

SEQ ID NO: 42814 - RNA, 23 nt, Artificial Sequence
  Chemically synthesized
uuguccuuugcaucugcacgugu

SEQ ID NO: 42815 - RNA, 23 nt, Artificial Sequence
  Chemically synthesized
guuguccuuugcaucugcacgug

SEQ ID NO: 42816 - RNA, 23 nt, Artificial Sequence
  Chemically synthesized
gguuguccuuugcaucugcacgu

SEQ ID NO: 42817 - RNA, 23 nt, Artificial Sequence
  Chemically synthesized
auaaaacccucccuaagaugucu

SEQ ID NO: 42818 - RNA, 23 nt, Artificial Sequence
  Chemically synthesized
cauaaaacccucccuaagauguc

SEQ ID NO: 42819 - RNA, 23 nt, Artificial Sequence
  Chemically synthesized
gagggguggacaacacuuuugca

SEQ ID NO: 42820 - RNA, 23 nt, Artificial Sequence
  Chemically synthesized
cgagggguggacaacacuuuugc

SEQ ID NO: 42821 - RNA, 23 nt, Artificial Sequence
  Chemically synthesized
cugaacugacaucaacucccaau

SEQ ID NO: 42822 - RNA, 23 nt, Artificial Sequence
  Chemically synthesized
ccugaacugacaucaacucccaa

SEQ ID NO: 42823 - RNA, 23 nt, Artificial Sequence
  Chemically synthesized
ucagaagcauaaaacccucccua

SEQ ID NO: 42824 - RNA, 23 nt, Artificial Sequence
  Chemically synthesized
uucagaagcauaaaacccucccu

SEQ ID NO: 42825 - RNA, 23 nt, Artificial Sequence
  Chemically synthesized
cugaaagccauaguuucauggca

SEQ ID NO: 42826 - RNA, 23 nt, Artificial Sequence
  Chemically synthesized
gcugaaagccauaguuucauggc

SEQ ID NO: 42827 - RNA, 23 nt, Artificial Sequence
  Chemically synthesized
ugcugaaagccauaguuucaugg

SEQ ID NO: 42828 - RNA, 23 nt, Artificial Sequence
  Chemically synthesized
augcugaaagccauaguuucaug

SEQ ID NO: 42829 - RNA, 23 nt, Artificial Sequence
  Chemically synthesized
gagcagacagaugcugaaagcca

SEQ ID NO: 42830 - RNA, 23 nt, Artificial Sequence
  Chemically synthesized
ucauuauccagaggaugagguug

SEQ ID NO: 42831 - RNA, 23 nt, Artificial Sequence
  Chemically synthesized
gucauuauccagaggaugagguu

SEQ ID NO: 42832 - RNA, 23 nt, Artificial Sequence
  Chemically synthesized
ugucauuauccagaggaugaggu

SEQ ID NO: 42833 - RNA, 23 nt, Artificial Sequence
  Chemically synthesized
cugucauuauccagaggaugagg

SEQ ID NO: 42834 - RNA, 23 nt, Artificial Sequence
  Chemically synthesized
acugucauuauccagaggaugag

SEQ ID NO: 42835 - RNA, 23 nt, Artificial Sequence
  Chemically synthesized
gacugucauuauccagaggauga

SEQ ID NO: 42836 - RNA, 23 nt, Artificial Sequence
  Chemically synthesized
aaggcccuuguguuggacuguca

SEQ ID NO: 42837 - RNA, 23 nt, Artificial Sequence
  Chemically synthesized
cccaccaacauuugauggugagg

SEQ ID NO: 42838 - RNA, 23 nt, Artificial Sequence
  Chemically synthesized
ucccaccaacauuugauggugag

SEQ ID NO: 42839 - RNA, 23 nt, Artificial Sequence
  Chemically synthesized
aucccaccaacauuugaugguga

SEQ ID NO: 42840 - RNA, 23 nt, Artificial Sequence
  Chemically synthesized
cccucccuaagaugucuggaggu

SEQ ID NO: 42841 - RNA, 23 nt, Artificial Sequence
  Chemically synthesized
auucagaagcauaaaacccuccc

SEQ ID NO: 42842 - RNA, 23 nt, Artificial Sequence
  Chemically synthesized
aauucagaagcauaaaacccucc

SEQ ID NO: 42843 - RNA, 23 nt, Artificial Sequence
  Chemically synthesized
aaauucagaagcauaaaacccuc

SEQ ID NO: 42844 - RNA, 23 nt, Artificial Sequence
  Chemically synthesized
cuuuucuugaagaccucaagagu

SEQ ID NO: 42845 - RNA, 23 nt, Artificial Sequence
  Chemically synthesized
acuuuucuugaagaccucaagag

SEQ ID NO: 42846 - RNA, 23 nt, Artificial Sequence
  Chemically synthesized
uacuuuucuugaagaccucaaga

SEQ ID NO: 42847 - RNA, 23 nt, Artificial Sequence
  Chemically synthesized
ggacugggccuuauaugaccacc

SEQ ID NO: 42848 - RNA, 23 nt, Artificial Sequence
  Chemically synthesized
uggacugggccuuauaugaccac

SEQ ID NO: 42849 - RNA, 23 nt, Artificial Sequence
  Chemically synthesized
uuggacugggccuuauaugacca

SEQ ID NO: 42850 - RNA, 23 nt, Artificial Sequence
  Chemically synthesized
cuuggacugggccuuauaugacc

SEQ ID NO: 42851 - RNA, 23 nt, Artificial Sequence
  Chemically synthesized
gcaagaaggcccuuguguuggac

SEQ ID NO: 42852 - RNA, 23 nt, Artificial Sequence
  Chemically synthesized
ggcaagaaggcccuuguguugga

SEQ ID NO: 42853 - RNA, 23 nt, Artificial Sequence
  Chemically synthesized
uggcaagaaggcccuuguguugg

SEQ ID NO: 42854 - RNA, 23 nt, Artificial Sequence
  Chemically synthesized
auggcaagaaggcccuuguguug

SEQ ID NO: 42855 - RNA, 23 nt, Artificial Sequence
  Chemically synthesized
gauggcaagaaggcccuuguguu

SEQ ID NO: 42856 - RNA, 23 nt, Artificial Sequence
  Chemically synthesized
acaucaacucccaauuucguggu

SEQ ID NO: 42857 - RNA, 23 nt, Artificial Sequence
  Chemically synthesized
gaaaaauucagaagcauaaaacc

SEQ ID NO: 42858 - RNA, 23 nt, Artificial Sequence
  Chemically synthesized
gcuuuuguugauuuccugaguga

SEQ ID NO: 42859 - RNA, 23 nt, Artificial Sequence
  Chemically synthesized
gguugaaguuauaaagaaugaug

SEQ ID NO: 42860 - RNA, 23 nt, Artificial Sequence
  Chemically synthesized
cuuuuguugauuuccugagugau

SEQ ID NO: 42861 - RNA, 23 nt, Artificial Sequence
  Chemically synthesized
caacauuaacaacagcaucccac

SEQ ID NO: 42862 - RNA, 23 nt, Artificial Sequence
  Chemically synthesized
acaagaagacgaggcugagagug

SEQ ID NO: 42863 - RNA, 23 nt, Artificial Sequence
  Chemically synthesized
caagagccaguagagcagacaga

SEQ ID NO: 42864 - RNA, 23 nt, Artificial Sequence
  Chemically synthesized
ucaagagccaguagagcagacag

SEQ ID NO: 42865 - RNA, 23 nt, Artificial Sequence
  Chemically synthesized
gaacugaaugggacagaagcgaa

SEQ ID NO: 42866 - RNA, 23 nt, Artificial Sequence
  Chemically synthesized
cuuauaugaccaccuaauggauu

SEQ ID NO: 42867 - RNA, 23 nt, Artificial Sequence
  Chemically synthesized
aucugcacguguucgcagucguu

SEQ ID NO: 42868 - RNA, 23 nt, Artificial Sequence
  Chemically synthesized
uaacaacagcaucccaccaacau

SEQ ID NO: 42869 - RNA, 23 nt, Artificial Sequence
  Chemically synthesized
ugauggcaagaaggcccuugugu

SEQ ID NO: 42870 - RNA, 23 nt, Artificial Sequence
  Chemically synthesized
acaacagcaucccaccaacauuu

SEQ ID NO: 42871 - RNA, 23 nt, Artificial Sequence
  Chemically synthesized
gcuuugaaaugauuaucauccua

SEQ ID NO: 42872 - RNA, 23 nt, Artificial Sequence
  Chemically synthesized
ucugcacguguucgcagucguuu

SEQ ID NO: 42873 - RNA, 23 nt, Artificial Sequence
  Chemically synthesized
acauuugauggugaggaggaacc

SEQ ID NO: 42874 - RNA, 23 nt, Artificial Sequence
  Chemically synthesized
ucaguccacuggcgagucugaau

SEQ ID NO: 42875 - RNA, 23 nt, Artificial Sequence
  Chemically synthesized
caagaaggcccuuguguuggacu

SEQ ID NO: 42876 - RNA, 23 nt, Artificial Sequence
  Chemically synthesized
acauaaaauugguuuaucuccuc

SEQ ID NO: 42877 - RNA, 23 nt, Artificial Sequence
  Chemically synthesized
acauuaacaacagcaucccacca

SEQ ID NO: 42878 - RNA, 23 nt, Artificial Sequence
  Chemically synthesized
agacauaaaauugguuuaucucc

SEQ ID NO: 42879 - RNA, 23 nt, Artificial Sequence
  Chemically synthesized
cuucaagaaaaguaauguacucc

SEQ ID NO: 42880 - RNA, 23 nt, Artificial Sequence
  Chemically synthesized
uucaagaaaaguaauguacuccu

SEQ ID NO: 42881 - RNA, 23 nt, Artificial Sequence
  Chemically synthesized
ucaagaaaaguaauguacuccug

SEQ ID NO: 42882 - RNA, 23 nt, Artificial Sequence
  Chemically synthesized
caagaaaaguaauguacuccugg

SEQ ID NO: 42883 - RNA, 23 nt, Artificial Sequence
  Chemically synthesized
aagaaaaguaauguacuccuggu

SEQ ID NO: 42884 - RNA, 23 nt, Artificial Sequence
  Chemically synthesized
ggaaaucaacaaaagcuuugucu

SEQ ID NO: 42885 - RNA, 23 nt, Artificial Sequence
  Chemically synthesized
gaaaucaacaaaagcuuugucuc

SEQ ID NO: 42886 - RNA, 23 nt, Artificial Sequence
  Chemically synthesized
aaaucaacaaaagcuuugucucc

SEQ ID NO: 42887 - RNA, 23 nt, Artificial Sequence
  Chemically synthesized
aaucaacaaaagcuuugucuccg

SEQ ID NO: 42888 - RNA, 23 nt, Artificial Sequence
  Chemically synthesized
aucaacaaaagcuuugucuccgu

SEQ ID NO: 42889 - RNA, 23 nt, Artificial Sequence
  Chemically synthesized
auccauuagguggucauauaagg

SEQ ID NO: 42890 - RNA, 23 nt, Artificial Sequence
  Chemically synthesized
uccauuagguggucauauaaggc

SEQ ID NO: 42891 - RNA, 23 nt, Artificial Sequence
  Chemically synthesized
ccauuagguggucauauaaggcc

SEQ ID NO: 42892 - RNA, 23 nt, Artificial Sequence
  Chemically synthesized
cauuagguggucauauaaggccc

SEQ ID NO: 42893 - RNA, 23 nt, Artificial Sequence
  Chemically synthesized
auuagguggucauauaaggccca

SEQ ID NO: 42894 - RNA, 23 nt, Artificial Sequence
  Chemically synthesized
ucaacaaaagcuuugucuccguc

SEQ ID NO: 42895 - RNA, 23 nt, Artificial Sequence
  Chemically synthesized
caacaaaagcuuugucuccgucg

SEQ ID NO: 42896 - RNA, 23 nt, Artificial Sequence
  Chemically synthesized
aacaaaagcuuugucuccgucgg

SEQ ID NO: 42897 - RNA, 23 nt, Artificial Sequence
  Chemically synthesized
gcacuaauuucgcuucuguccca

SEQ ID NO: 42898 - RNA, 23 nt, Artificial Sequence
  Chemically synthesized
cacuaauuucgcuucugucccau

SEQ ID NO: 42899 - RNA, 23 nt, Artificial Sequence
  Chemically synthesized
acuaauuucgcuucugucccauu

SEQ ID NO: 42900 - RNA, 23 nt, Artificial Sequence
  Chemically synthesized
cuaauuucgcuucugucccauuc

SEQ ID NO: 42901 - RNA, 23 nt, Artificial Sequence
  Chemically synthesized
uaauuucgcuucugucccauuca

SEQ ID NO: 42902 - RNA, 23 nt, Artificial Sequence
  Chemically synthesized
aauuucgcuucugucccauucag

SEQ ID NO: 42903 - RNA, 23 nt, Artificial Sequence
  Chemically synthesized
auuucgcuucugucccauucagu

SEQ ID NO: 42904 - RNA, 23 nt, Artificial Sequence
  Chemically synthesized
uuucgcuucugucccauucaguu

SEQ ID NO: 42905 - RNA, 23 nt, Artificial Sequence
  Chemically synthesized
gcucaucugcaaaaguguugucc

SEQ ID NO: 42906 - RNA, 23 nt, Artificial Sequence
  Chemically synthesized
cucaucugcaaaaguguugucca

SEQ ID NO: 42907 - RNA, 23 nt, Artificial Sequence
  Chemically synthesized
ucaucugcaaaaguguuguccac

SEQ ID NO: 42908 - RNA, 23 nt, Artificial Sequence
  Chemically synthesized
caucugcaaaaguguuguccacc

SEQ ID NO: 42909 - RNA, 23 nt, Artificial Sequence
  Chemically synthesized
aucugcaaaaguguuguccaccc

SEQ ID NO: 42910 - RNA, 23 nt, Artificial Sequence
  Chemically synthesized
uguugaguguauaauuaguaucc

SEQ ID NO: 42911 - RNA, 23 nt, Artificial Sequence
  Chemically synthesized
guugaguguauaauuaguauccu

SEQ ID NO: 42912 - RNA, 23 nt, Artificial Sequence
  Chemically synthesized
uugaguguauaauuaguauccuu

SEQ ID NO: 42913 - RNA, 23 nt, Artificial Sequence
  Chemically synthesized
ugaguguauaauuaguauccuuc

SEQ ID NO: 42914 - RNA, 23 nt, Artificial Sequence
  Chemically synthesized
gaguguauaauuaguauccuucc

SEQ ID NO: 42915 - RNA, 23 nt, Artificial Sequence
  Chemically synthesized
gcuucugaauuuuucuuuccucc

SEQ ID NO: 42916 - RNA, 23 nt, Artificial Sequence
  Chemically synthesized
cuucugaauuuuucuuuccuccu

SEQ ID NO: 42917 - RNA, 23 nt, Artificial Sequence
  Chemically synthesized
uucugaauuuuucuuuccuccuu

SEQ ID NO: 42918 - RNA, 23 nt, Artificial Sequence
  Chemically synthesized
ucugaauuuuucuuuccuccuua

SEQ ID NO: 42919 - RNA, 23 nt, Artificial Sequence
  Chemically synthesized
cugaauuuuucuuuccuccuuaa

SEQ ID NO: 42920 - RNA, 23 nt, Artificial Sequence
  Chemically synthesized
uaguauccuuccauucagacucg

SEQ ID NO: 42921 - RNA, 23 nt, Artificial Sequence
  Chemically synthesized
aguauccuuccauucagacucgc

SEQ ID NO: 42922 - RNA, 23 nt, Artificial Sequence
  Chemically synthesized
guauccuuccauucagacucgcc

SEQ ID NO: 42923 - RNA, 23 nt, Artificial Sequence
  Chemically synthesized
uauccuuccauucagacucgcca

SEQ ID NO: 42924 - RNA, 23 nt, Artificial Sequence
  Chemically synthesized
auccuuccauucagacucgccag

SEQ ID NO: 42925 - RNA, 23 nt, Artificial Sequence
  Chemically synthesized
aggaaaucaacaaaagcuuuguc

SEQ ID NO: 42926 - RNA, 23 nt, Artificial Sequence
  Chemically synthesized
gaaagugaccgugauuuuuuccc

SEQ ID NO: 42927 - RNA, 23 nt, Artificial Sequence
  Chemically synthesized
aaagugaccgugauuuuuucccc

SEQ ID NO: 42928 - RNA, 23 nt, Artificial Sequence
  Chemically synthesized
aagugaccgugauuuuuuccccg

SEQ ID NO: 42929 - RNA, 23 nt, Artificial Sequence
  Chemically synthesized
agugaccgugauuuuuuccccgg

SEQ ID NO: 42930 - RNA, 23 nt, Artificial Sequence
  Chemically synthesized
gugaccgugauuuuuuccccggc

SEQ ID NO: 42931 - RNA, 23 nt, Artificial Sequence
  Chemically synthesized
agaaaaguaauguacuccuggug

SEQ ID NO: 42932 - RNA, 23 nt, Artificial Sequence
  Chemically synthesized
gaaaaguaauguacuccuggugc

SEQ ID NO: 42933 - RNA, 23 nt, Artificial Sequence
  Chemically synthesized
aaaaguaauguacuccuggugcu

SEQ ID NO: 42934 - RNA, 23 nt, Artificial Sequence
  Chemically synthesized
aaaguaauguacuccuggugcuc

SEQ ID NO: 42935 - RNA, 23 nt, Artificial Sequence
  Chemically synthesized
aaguaauguacuccuggugcucc

SEQ ID NO: 42936 - RNA, 23 nt, Artificial Sequence
  Chemically synthesized
auaauuaguauccuuccauucag

SEQ ID NO: 42937 - RNA, 23 nt, Artificial Sequence
  Chemically synthesized
uaauuaguauccuuccauucaga

SEQ ID NO: 42938 - RNA, 23 nt, Artificial Sequence
  Chemically synthesized
aauuaguauccuuccauucagac

SEQ ID NO: 42939 - RNA, 23 nt, Artificial Sequence
  Chemically synthesized
auuaguauccuuccauucagacu

SEQ ID NO: 42940 - RNA, 23 nt, Artificial Sequence
  Chemically synthesized
uuaguauccuuccauucagacuc

SEQ ID NO: 42941 - RNA, 23 nt, Artificial Sequence
  Chemically synthesized
acaaaagcuuugucuccgucggu

SEQ ID NO: 42942 - RNA, 23 nt, Artificial Sequence
  Chemically synthesized
caaaagcuuugucuccgucggug

SEQ ID NO: 42943 - RNA, 23 nt, Artificial Sequence
  Chemically synthesized
aaaagcuuugucuccgucggugu

SEQ ID NO: 42944 - RNA, 23 nt, Artificial Sequence
  Chemically synthesized
aaagcuuugucuccgucggugug

SEQ ID NO: 42945 - RNA, 23 nt, Artificial Sequence
  Chemically synthesized
ggcaacuuuccgcacuaauuucg

SEQ ID NO: 42946 - RNA, 23 nt, Artificial Sequence
  Chemically synthesized
gcaacuuuccgcacuaauuucgc

SEQ ID NO: 42947 - RNA, 23 nt, Artificial Sequence
  Chemically synthesized
caacuuuccgcacuaauuucgcu

SEQ ID NO: 42948 - RNA, 23 nt, Artificial Sequence
  Chemically synthesized
aacuuuccgcacuaauuucgcuu

SEQ ID NO: 42949 - RNA, 23 nt, Artificial Sequence
  Chemically synthesized
acuuuccgcacuaauuucgcuuc

SEQ ID NO: 42950 - RNA, 23 nt, Artificial Sequence
  Chemically synthesized
cuggcucuugacaaaacucuuga

SEQ ID NO: 42951 - RNA, 23 nt, Artificial Sequence
  Chemically synthesized
uggcucuugacaaaacucuugag

SEQ ID NO: 42952 - RNA, 23 nt, Artificial Sequence
  Chemically synthesized
ggcucuugacaaaacucuugagg

SEQ ID NO: 42953 - RNA, 23 nt, Artificial Sequence
  Chemically synthesized
gcucuugacaaaacucuugaggu

SEQ ID NO: 42954 - RNA, 23 nt, Artificial Sequence
  Chemically synthesized
cucuugacaaaacucuugagguc

SEQ ID NO: 42955 - RNA, 23 nt, Artificial Sequence
  Chemically synthesized
cacgaaauugggaguugauguca

SEQ ID NO: 42956 - RNA, 23 nt, Artificial Sequence
  Chemically synthesized
acgaaauugggaguugaugucag

SEQ ID NO: 42957 - RNA, 23 nt, Artificial Sequence
  Chemically synthesized
cgaaauugggaguugaugucagu

SEQ ID NO: 42958 - RNA, 23 nt, Artificial Sequence
  Chemically synthesized
gaaauugggaguugaugucaguu

SEQ ID NO: 42959 - RNA, 23 nt, Artificial Sequence
  Chemically synthesized
aaauugggaguugaugucaguuc

SEQ ID NO: 42960 - RNA, 23 nt, Artificial Sequence
  Chemically synthesized
aauugggaguugaugucaguuca

SEQ ID NO: 42961 - RNA, 23 nt, Artificial Sequence
  Chemically synthesized
guuguuaauguugaaagugaccg

SEQ ID NO: 42962 - RNA, 23 nt, Artificial Sequence
  Chemically synthesized
uuguuaauguugaaagugaccgu

SEQ ID NO: 42963 - RNA, 23 nt, Artificial Sequence
  Chemically synthesized
uguuaauguugaaagugaccgug

SEQ ID NO: 42964 - RNA, 23 nt, Artificial Sequence
  Chemically synthesized
guuaauguugaaagugaccguga

SEQ ID NO: 42965 - RNA, 23 nt, Artificial Sequence
  Chemically synthesized
uuaauguugaaagugaccgugau

SEQ ID NO: 42966 - RNA, 23 nt, Artificial Sequence
  Chemically synthesized
cuuuccgcacuaauuucgcuucu

SEQ ID NO: 42967 - RNA, 23 nt, Artificial Sequence
  Chemically synthesized
uuuccgcacuaauuucgcuucug

SEQ ID NO: 42968 - RNA, 23 nt, Artificial Sequence
  Chemically synthesized
ccgcacuaauuucgcuucugucc

SEQ ID NO: 42969 - RNA, 23 nt, Artificial Sequence
  Chemically synthesized
cgcacuaauuucgcuucuguccc

SEQ ID NO: 42970 - RNA, 23 nt, Artificial Sequence
  Chemically synthesized
aggauuuguucacuggccaaagc

SEQ ID NO: 42971 - RNA, 23 nt, Artificial Sequence
  Chemically synthesized
ggauuuguucacuggccaaagcc

SEQ ID NO: 42972 - RNA, 23 nt, Artificial Sequence
  Chemically synthesized
gauuuguucacuggccaaagccu

SEQ ID NO: 42973 - RNA, 23 nt, Artificial Sequence
  Chemically synthesized
auuuguucacuggccaaagccug

SEQ ID NO: 42974 - RNA, 23 nt, Artificial Sequence
  Chemically synthesized
uuuguucacuggccaaagccugc

SEQ ID NO: 42975 - RNA, 23 nt, Artificial Sequence
  Chemically synthesized
cuccuuaauuucaucacucagga

SEQ ID NO: 42976 - RNA, 23 nt, Artificial Sequence
  Chemically synthesized
uccuuaauuucaucacucaggaa

SEQ ID NO: 42977 - RNA, 23 nt, Artificial Sequence
  Chemically synthesized
ccuuaauuucaucacucaggaaa

SEQ ID NO: 42978 - RNA, 23 nt, Artificial Sequence
  Chemically synthesized
cuuaauuucaucacucaggaaau

SEQ ID NO: 42979 - RNA, 23 nt, Artificial Sequence
  Chemically synthesized
uuaauuucaucacucaggaaauc

SEQ ID NO: 42980 - RNA, 23 nt, Artificial Sequence
  Chemically synthesized
cuacuggcucuugacaaaacucu

SEQ ID NO: 42981 - RNA, 23 nt, Artificial Sequence
  Chemically synthesized
uacuggcucuugacaaaacucuu

SEQ ID NO: 42982 - RNA, 23 nt, Artificial Sequence
  Chemically synthesized
acuggcucuugacaaaacucuug

SEQ ID NO: 42983 - RNA, 23 nt, Artificial Sequence
  Chemically synthesized
ucuugacaaaacucuugaggucu

SEQ ID NO: 42984 - RNA, 23 nt, Artificial Sequence
  Chemically synthesized
cuugacaaaacucuugaggucuu

SEQ ID NO: 42985 - RNA, 23 nt, Artificial Sequence
  Chemically synthesized
uugacaaaacucuugaggucuuc

SEQ ID NO: 42986 - RNA, 23 nt, Artificial Sequence
  Chemically synthesized
ugacaaaacucuugaggucuuca

SEQ ID NO: 42987 - RNA, 23 nt, Artificial Sequence
  Chemically synthesized
aguguauaauuaguauccuucca

SEQ ID NO: 42988 - RNA, 23 nt, Artificial Sequence
  Chemically synthesized
guguauaauuaguauccuuccau

SEQ ID NO: 42989 - RNA, 23 nt, Artificial Sequence
  Chemically synthesized
uguauaauuaguauccuuccauu

SEQ ID NO: 42990 - RNA, 23 nt, Artificial Sequence
  Chemically synthesized
guauaauuaguauccuuccauuc

SEQ ID NO: 42991 - RNA, 23 nt, Artificial Sequence
  Chemically synthesized
uauaauuaguauccuuccauuca

SEQ ID NO: 42992 - RNA, 23 nt, Artificial Sequence
  Chemically synthesized
ggccuucuugccaucaucauucu

SEQ ID NO: 42993 - RNA, 23 nt, Artificial Sequence
  Chemically synthesized
gccuucuugccaucaucauucuu

SEQ ID NO: 42994 - RNA, 23 nt, Artificial Sequence
  Chemically synthesized
ccuucuugccaucaucauucuuu

SEQ ID NO: 42995 - RNA, 23 nt, Artificial Sequence
  Chemically synthesized
cuucuugccaucaucauucuuua

SEQ ID NO: 42996 - RNA, 23 nt, Artificial Sequence
  Chemically synthesized
uucuugccaucaucauucuuuau

SEQ ID NO: 42997 - RNA, 23 nt, Artificial Sequence
  Chemically synthesized
auucuuuauaacuucaaccacga

SEQ ID NO: 42998 - RNA, 23 nt, Artificial Sequence
  Chemically synthesized
uucuuuauaacuucaaccacgaa

SEQ ID NO: 42999 - RNA, 23 nt, Artificial Sequence
  Chemically synthesized
ucuuuauaacuucaaccacgaaa

SEQ ID NO: 43000 - RNA, 23 nt, Artificial Sequence
  Chemically synthesized
cuuuauaacuucaaccacgaaau

SEQ ID NO: 43001 - RNA, 23 nt, Artificial Sequence
  Chemically synthesized
uuuauaacuucaaccacgaaauu

SEQ ID NO: 43002 - RNA, 23 nt, Artificial Sequence
  Chemically synthesized
acaucuuagggaggguuuuaugc

SEQ ID NO: 43003 - RNA, 23 nt, Artificial Sequence
  Chemically synthesized
caucuuagggaggguuuuaugcu

SEQ ID NO: 43004 - RNA, 23 nt, Artificial Sequence
  Chemically synthesized
aucuuagggaggguuuuaugcuu

SEQ ID NO: 43005 - RNA, 23 nt, Artificial Sequence
  Chemically synthesized
ucuuagggaggguuuuaugcuuc

SEQ ID NO: 43006 - RNA, 23 nt, Artificial Sequence
  Chemically synthesized
cuuagggaggguuuuaugcuucu

SEQ ID NO: 43007 - RNA, 23 nt, Artificial Sequence
  Chemically synthesized
uucuuuccuccuuaauuucauca

SEQ ID NO: 43008 - RNA, 23 nt, Artificial Sequence
  Chemically synthesized
ucuuuccuccuuaauuucaucac

SEQ ID NO: 43009 - RNA, 23 nt, Artificial Sequence
  Chemically synthesized
cuuuccuccuuaauuucaucacu

SEQ ID NO: 43010 - RNA, 23 nt, Artificial Sequence
  Chemically synthesized
uuuccuccuuaauuucaucacuc

SEQ ID NO: 43011 - RNA, 23 nt, Artificial Sequence
  Chemically synthesized
uuccuccuuaauuucaucacuca

SEQ ID NO: 43012 - RNA, 23 nt, Artificial Sequence
  Chemically synthesized
ccuccuuaauuucaucacucagg

SEQ ID NO: 43013 - RNA, 23 nt, Artificial Sequence
  Chemically synthesized
gacaaaacucuugaggucuucaa

SEQ ID NO: 43014 - RNA, 23 nt, Artificial Sequence
  Chemically synthesized
acaaaacucuugaggucuucaag

SEQ ID NO: 43015 - RNA, 23 nt, Artificial Sequence
  Chemically synthesized
caaaacucuugaggucuucaaga

SEQ ID NO: 43016 - RNA, 23 nt, Artificial Sequence
  Chemically synthesized
aucuguguugaguguauaauuag

SEQ ID NO: 43017 - RNA, 23 nt, Artificial Sequence
  Chemically synthesized
ucuguguugaguguauaauuagu

SEQ ID NO: 43018 - RNA, 23 nt, Artificial Sequence
  Chemically synthesized
cuguguugaguguauaauuagua

SEQ ID NO: 43019 - RNA, 23 nt, Artificial Sequence
  Chemically synthesized
uguguugaguguauaauuaguau

SEQ ID NO: 43020 - RNA, 23 nt, Artificial Sequence
  Chemically synthesized
guguugaguguauaauuaguauc

SEQ ID NO: 43021 - RNA, 23 nt, Artificial Sequence
  Chemically synthesized
ucaggaaaucaacaaaagcuuug

SEQ ID NO: 43022 - RNA, 23 nt, Artificial Sequence
  Chemically synthesized
caggaaaucaacaaaagcuuugu

SEQ ID NO: 43023 - RNA, 23 nt, Artificial Sequence
  Chemically synthesized
cauucuuuauaacuucaaccacg

SEQ ID NO: 43024 - RNA, 23 nt, Artificial Sequence
  Chemically synthesized
ccacgaaauugggaguugauguc

SEQ ID NO: 43025 - RNA, 23 nt, Artificial Sequence
  Chemically synthesized
gcuccuguucuucaaccuucugc

SEQ ID NO: 43026 - RNA, 23 nt, Artificial Sequence
  Chemically synthesized
cuccuguucuucaaccuucugcc

SEQ ID NO: 43027 - RNA, 23 nt, Artificial Sequence
  Chemically synthesized
uccuguucuucaaccuucugccc

SEQ ID NO: 43028 - RNA, 23 nt, Artificial Sequence
  Chemically synthesized
ccuguucuucaaccuucugcccu

SEQ ID NO: 43029 - RNA, 23 nt, Artificial Sequence
  Chemically synthesized
cuguucuucaaccuucugcccuu

SEQ ID NO: 43030 - RNA, 23 nt, Artificial Sequence
  Chemically synthesized
ugggaugcuguuguuaauguuga

SEQ ID NO: 43031 - RNA, 23 nt, Artificial Sequence
  Chemically synthesized
gggaugcuguuguuaauguugaa

SEQ ID NO: 43032 - RNA, 23 nt, Artificial Sequence
  Chemically synthesized
ggaugcuguuguuaauguugaaa

SEQ ID NO: 43033 - RNA, 23 nt, Artificial Sequence
  Chemically synthesized
gaugcuguuguuaauguugaaag

SEQ ID NO: 43034 - RNA, 23 nt, Artificial Sequence
  Chemically synthesized
augcuguuguuaauguugaaagu

SEQ ID NO: 43035 - RNA, 23 nt, Artificial Sequence
  Chemically synthesized
uugaaagugaccgugauuuuuuc

SEQ ID NO: 43036 - RNA, 23 nt, Artificial Sequence
  Chemically synthesized
ugaaagugaccgugauuuuuucc

SEQ ID NO: 43037 - RNA, 23 nt, Artificial Sequence
  Chemically synthesized
uuagggaggguuuuaugcuucug

SEQ ID NO: 43038 - RNA, 23 nt, Artificial Sequence
  Chemically synthesized
ugcuucugaauuuuucuuuccuc

SEQ ID NO: 43039 - RNA, 23 nt, Artificial Sequence
  Chemically synthesized
auuuuucuuuccuccuuaauuuc

SEQ ID NO: 43040 - RNA, 23 nt, Artificial Sequence
  Chemically synthesized
uuuuucuuuccuccuuaauuuca

SEQ ID NO: 43041 - RNA, 23 nt, Artificial Sequence
  Chemically synthesized
uuuucuuuccuccuuaauuucau

SEQ ID NO: 43042 - RNA, 23 nt, Artificial Sequence
  Chemically synthesized
uuucuuuccuccuuaauuucauc

SEQ ID NO: 43043 - RNA, 23 nt, Artificial Sequence
  Chemically synthesized
uccuccuuaauuucaucacucag

SEQ ID NO: 43044 - RNA, 23 nt, Artificial Sequence
  Chemically synthesized
cuugaggucuucaagaaaaguaa

SEQ ID NO: 43045 - RNA, 23 nt, Artificial Sequence
  Chemically synthesized
uugaggucuucaagaaaaguaau

SEQ ID NO: 43046 - RNA, 23 nt, Artificial Sequence
  Chemically synthesized
ugaggucuucaagaaaaguaaug

SEQ ID NO: 43047 - RNA, 23 nt, Artificial Sequence
  Chemically synthesized
gaggucuucaagaaaaguaaugu

SEQ ID NO: 43048 - RNA, 23 nt, Artificial Sequence
  Chemically synthesized
aggucuucaagaaaaguaaugua

SEQ ID NO: 43049 - RNA, 23 nt, Artificial Sequence
  Chemically synthesized
ggucuucaagaaaaguaauguac

SEQ ID NO: 43050 - RNA, 23 nt, Artificial Sequence
  Chemically synthesized
gucuucaagaaaaguaauguacu

SEQ ID NO: 43051 - RNA, 23 nt, Artificial Sequence
  Chemically synthesized
uaauuucaucacucaggaaauca

SEQ ID NO: 43052 - RNA, 23 nt, Artificial Sequence
  Chemically synthesized
aauuucaucacucaggaaaucaa

SEQ ID NO: 43053 - RNA, 23 nt, Artificial Sequence
  Chemically synthesized
auuucaucacucaggaaaucaac

SEQ ID NO: 43054 - RNA, 23 nt, Artificial Sequence
  Chemically synthesized
uuucaucacucaggaaaucaaca

SEQ ID NO: 43055 - RNA, 23 nt, Artificial Sequence
  Chemically synthesized
uucaucacucaggaaaucaacaa

SEQ ID NO: 43056 - RNA, 23 nt, Artificial Sequence
  Chemically synthesized
cgugcagaugcaaaggacaaccc

SEQ ID NO: 43057 - RNA, 23 nt, Artificial Sequence
  Chemically synthesized
gugcagaugcaaaggacaaccca

SEQ ID NO: 43058 - RNA, 23 nt, Artificial Sequence
  Chemically synthesized
ugcagaugcaaaggacaacccag

SEQ ID NO: 43059 - RNA, 23 nt, Artificial Sequence
  Chemically synthesized
gcagaugcaaaggacaacccagg

SEQ ID NO: 43060 - RNA, 23 nt, Artificial Sequence
  Chemically synthesized
cagaugcaaaggacaacccaggc

SEQ ID NO: 43061 - RNA, 23 nt, Artificial Sequence
  Chemically synthesized
cugaaagcuaacuucccugauag

SEQ ID NO: 43062 - RNA, 23 nt, Artificial Sequence
  Chemically synthesized
ugaaagcuaacuucccugauaga

SEQ ID NO: 43063 - RNA, 23 nt, Artificial Sequence
  Chemically synthesized
gaaagcuaacuucccugauagag

SEQ ID NO: 43064 - RNA, 23 nt, Artificial Sequence
  Chemically synthesized
aaagcuaacuucccugauagaga

SEQ ID NO: 43065 - RNA, 23 nt, Artificial Sequence
  Chemically synthesized
aagcuaacuucccugauagagaa

SEQ ID NO: 43066 - RNA, 23 nt, Artificial Sequence
  Chemically synthesized
uguucuucaaccuucugcccuug

SEQ ID NO: 43067 - RNA, 23 nt, Artificial Sequence
  Chemically synthesized
uaauguugaaagugaccgugauu

SEQ ID NO: 43068 - RNA, 23 nt, Artificial Sequence
  Chemically synthesized
uuccgcacuaauuucgcuucugu

SEQ ID NO: 43069 - RNA, 23 nt, Artificial Sequence
  Chemically synthesized
uccgcacuaauuucgcuucuguc

SEQ ID NO: 43070 - RNA, 23 nt, Artificial Sequence
  Chemically synthesized
gcucuacuggcucuugacaaaac

SEQ ID NO: 43071 - RNA, 23 nt, Artificial Sequence
  Chemically synthesized
cucuacuggcucuugacaaaacu

SEQ ID NO: 43072 - RNA, 23 nt, Artificial Sequence
  Chemically synthesized
ucuacuggcucuugacaaaacuc

SEQ ID NO: 43073 - RNA, 23 nt, Artificial Sequence
  Chemically synthesized
ucuucaagaaaaguaauguacuc

SEQ ID NO: 43074 - RNA, 23 nt, Artificial Sequence
  Chemically synthesized
uccuuccauucagacucgccagu

SEQ ID NO: 43075 - RNA, 23 nt, Artificial Sequence
  Chemically synthesized
ggacugaaagcuaacuucccuga

SEQ ID NO: 43076 - RNA, 23 nt, Artificial Sequence
  Chemically synthesized
gacugaaagcuaacuucccugau

SEQ ID NO: 43077 - RNA, 23 nt, Artificial Sequence
  Chemically synthesized
acugaaagcuaacuucccugaua

SEQ ID NO: 43078 - RNA, 23 nt, Artificial Sequence
  Chemically synthesized
uagagaagaugucacucucagcc

SEQ ID NO: 43079 - RNA, 23 nt, Artificial Sequence
  Chemically synthesized
agagaagaugucacucucagccu

SEQ ID NO: 43080 - RNA, 23 nt, Artificial Sequence
  Chemically synthesized
gagaagaugucacucucagccuc

SEQ ID NO: 43081 - RNA, 23 nt, Artificial Sequence
  Chemically synthesized
agaagaugucacucucagccucg

SEQ ID NO: 43082 - RNA, 23 nt, Artificial Sequence
  Chemically synthesized
gaagaugucacucucagccucgu

SEQ ID NO: 43083 - RNA, 23 nt, Artificial Sequence
  Chemically synthesized
gggccuucuugccaucaucauuc

SEQ ID NO: 43084 - RNA, 23 nt, Artificial Sequence
  Chemically synthesized
ucuugccaucaucauucuuuaua

SEQ ID NO: 43085 - RNA, 23 nt, Artificial Sequence
  Chemically synthesized
cuugccaucaucauucuuuauaa

SEQ ID NO: 43086 - RNA, 23 nt, Artificial Sequence
  Chemically synthesized
uugccaucaucauucuuuauaac

SEQ ID NO: 43087 - RNA, 23 nt, Artificial Sequence
  Chemically synthesized
ucauucuuuauaacuucaaccac

SEQ ID NO: 43088 - RNA, 23 nt, Artificial Sequence
  Chemically synthesized
uuauaacuucaaccacgaaauug

SEQ ID NO: 43089 - RNA, 23 nt, Artificial Sequence
  Chemically synthesized
uauaacuucaaccacgaaauugg

SEQ ID NO: 43090 - RNA, 23 nt, Artificial Sequence
  Chemically synthesized
auaacuucaaccacgaaauuggg

SEQ ID NO: 43091 - RNA, 23 nt, Artificial Sequence
  Chemically synthesized
uaacuucaaccacgaaauuggga

SEQ ID NO: 43092 - RNA, 23 nt, Artificial Sequence
  Chemically synthesized
aacuucaaccacgaaauugggag

SEQ ID NO: 43093 - RNA, 23 nt, Artificial Sequence
  Chemically synthesized
aauguugaaagugaccgugauuu

SEQ ID NO: 43094 - RNA, 23 nt, Artificial Sequence
  Chemically synthesized
ggaugauaaucauuucaaagcac

SEQ ID NO: 43095 - RNA, 23 nt, Artificial Sequence
  Chemically synthesized
gaugauaaucauuucaaagcaca

SEQ ID NO: 43096 - RNA, 23 nt, Artificial Sequence
  Chemically synthesized
augauaaucauuucaaagcacau

SEQ ID NO: 43097 - RNA, 23 nt, Artificial Sequence
  Chemically synthesized
ugauaaucauuucaaagcacaug

SEQ ID NO: 43098 - RNA, 23 nt, Artificial Sequence
  Chemically synthesized
gauaaucauuucaaagcacaugu

SEQ ID NO: 43099 - RNA, 23 nt, Artificial Sequence
  Chemically synthesized
aucauuucaaagcacaugucuag

SEQ ID NO: 43100 - RNA, 23 nt, Artificial Sequence
  Chemically synthesized
ucauuucaaagcacaugucuagc

SEQ ID NO: 43101 - RNA, 23 nt, Artificial Sequence
  Chemically synthesized
cauuucaaagcacaugucuagcu

SEQ ID NO: 43102 - RNA, 23 nt, Artificial Sequence
  Chemically synthesized
auuucaaagcacaugucuagcuu

SEQ ID NO: 43103 - RNA, 23 nt, Artificial Sequence
  Chemically synthesized
uuucaaagcacaugucuagcuuc

SEQ ID NO: 43104 - RNA, 23 nt, Artificial Sequence
  Chemically synthesized
aaaacucuugaggucuucaagaa

SEQ ID NO: 43105 - RNA, 23 nt, Artificial Sequence
  Chemically synthesized
aaacucuugaggucuucaagaaa

SEQ ID NO: 43106 - RNA, 23 nt, Artificial Sequence
  Chemically synthesized
cagcucaucugcaaaaguguugu

SEQ ID NO: 43107 - RNA, 23 nt, Artificial Sequence
  Chemically synthesized
agcucaucugcaaaaguguuguc

SEQ ID NO: 43108 - RNA, 23 nt, Artificial Sequence
  Chemically synthesized
uaacuucccugauagagaagaug

SEQ ID NO: 43109 - RNA, 23 nt, Artificial Sequence
  Chemically synthesized
aacuucccugauagagaagaugu

SEQ ID NO: 43110 - RNA, 23 nt, Artificial Sequence
  Chemically synthesized
acuucccugauagagaagauguc

SEQ ID NO: 43111 - RNA, 23 nt, Artificial Sequence
  Chemically synthesized
cuucccugauagagaagauguca

SEQ ID NO: 43112 - RNA, 23 nt, Artificial Sequence
  Chemically synthesized
uucccugauagagaagaugucac

SEQ ID NO: 43113 - RNA, 23 nt, Artificial Sequence
  Chemically synthesized
cggcaacuuuccgcacuaauuuc

SEQ ID NO: 43114 - RNA, 23 nt, Artificial Sequence
  Chemically synthesized
ccagcucaucugcaaaaguguug

SEQ ID NO: 43115 - RNA, 23 nt, Artificial Sequence
  Chemically synthesized
uccaaggaaucuguguugagugu

SEQ ID NO: 43116 - RNA, 23 nt, Artificial Sequence
  Chemically synthesized
ccaaggaaucuguguugagugua

SEQ ID NO: 43117 - RNA, 23 nt, Artificial Sequence
  Chemically synthesized
caaggaaucuguguugaguguau

SEQ ID NO: 43118 - RNA, 23 nt, Artificial Sequence
  Chemically synthesized
aaggaaucuguguugaguguaua

SEQ ID NO: 43119 - RNA, 23 nt, Artificial Sequence
  Chemically synthesized
aggaaucuguguugaguguauaa

SEQ ID NO: 43120 - RNA, 23 nt, Artificial Sequence
  Chemically synthesized
ccuuccauucagacucgccagug

SEQ ID NO: 43121 - RNA, 23 nt, Artificial Sequence
  Chemically synthesized
cuuccauucagacucgccagugg

SEQ ID NO: 43122 - RNA, 23 nt, Artificial Sequence
  Chemically synthesized
uuccauucagacucgccagugga

SEQ ID NO: 43123 - RNA, 23 nt, Artificial Sequence
  Chemically synthesized
uggacugaaagcuaacuucccug

SEQ ID NO: 43124 - RNA, 23 nt, Artificial Sequence
  Chemically synthesized
cacucaggaaaucaacaaaagcu

SEQ ID NO: 43125 - RNA, 23 nt, Artificial Sequence
  Chemically synthesized
acucaggaaaucaacaaaagcuu

SEQ ID NO: 43126 - RNA, 23 nt, Artificial Sequence
  Chemically synthesized
cucaggaaaucaacaaaagcuuu

SEQ ID NO: 43127 - RNA, 23 nt, Artificial Sequence
  Chemically synthesized
agcuaacuucccugauagagaag

SEQ ID NO: 43128 - RNA, 23 nt, Artificial Sequence
  Chemically synthesized
gcuaacuucccugauagagaaga

SEQ ID NO: 43129 - RNA, 23 nt, Artificial Sequence
  Chemically synthesized
cuaacuucccugauagagaagau

SEQ ID NO: 43130 - RNA, 23 nt, Artificial Sequence
  Chemically synthesized
aagaugucacucucagccucguc

SEQ ID NO: 43131 - RNA, 23 nt, Artificial Sequence
  Chemically synthesized
agaugucacucucagccucgucu

SEQ ID NO: 43132 - RNA, 23 nt, Artificial Sequence
  Chemically synthesized
gaugucacucucagccucgucuu

SEQ ID NO: 43133 - RNA, 23 nt, Artificial Sequence
  Chemically synthesized
augucacucucagccucgucuuc

SEQ ID NO: 43134 - RNA, 23 nt, Artificial Sequence
  Chemically synthesized
caggcuccuguucuucaaccuuc

SEQ ID NO: 43135 - RNA, 23 nt, Artificial Sequence
  Chemically synthesized
aggcuccuguucuucaaccuucu

SEQ ID NO: 43136 - RNA, 23 nt, Artificial Sequence
  Chemically synthesized
ggcuccuguucuucaaccuucug

SEQ ID NO: 43137 - RNA, 23 nt, Artificial Sequence
  Chemically synthesized
auguugaaagugaccgugauuuu

SEQ ID NO: 43138 - RNA, 23 nt, Artificial Sequence
  Chemically synthesized
uguugaaagugaccgugauuuuu

SEQ ID NO: 43139 - RNA, 23 nt, Artificial Sequence
  Chemically synthesized
guugaaagugaccgugauuuuuu

SEQ ID NO: 43140 - RNA, 23 nt, Artificial Sequence
  Chemically synthesized
ucgcuucugucccauucaguucc

SEQ ID NO: 43141 - RNA, 23 nt, Artificial Sequence
  Chemically synthesized
cgcuucugucccauucaguucca

SEQ ID NO: 43142 - RNA, 23 nt, Artificial Sequence
  Chemically synthesized
gcuucugucccauucaguuccag

SEQ ID NO: 43143 - RNA, 23 nt, Artificial Sequence
  Chemically synthesized
cuucugucccauucaguuccagc

SEQ ID NO: 43144 - RNA, 23 nt, Artificial Sequence
  Chemically synthesized
uucugucccauucaguuccagcu

SEQ ID NO: 43145 - RNA, 23 nt, Artificial Sequence
  Chemically synthesized
cccauucaguuccagcucccaac

SEQ ID NO: 43146 - RNA, 23 nt, Artificial Sequence
  Chemically synthesized
ccauucaguuccagcucccaacc

SEQ ID NO: 43147 - RNA, 23 nt, Artificial Sequence
  Chemically synthesized
cauucaguuccagcucccaaccu

SEQ ID NO: 43148 - RNA, 23 nt, Artificial Sequence
  Chemically synthesized
auucaguuccagcucccaaccuc

SEQ ID NO: 43149 - RNA, 23 nt, Artificial Sequence
  Chemically synthesized
uucaguuccagcucccaaccucc

SEQ ID NO: 43150 - RNA, 23 nt, Artificial Sequence
  Chemically synthesized
gcacaugucuagcuucagaguag

SEQ ID NO: 43151 - RNA, 23 nt, Artificial Sequence
  Chemically synthesized
cacaugucuagcuucagaguagg

SEQ ID NO: 43152 - RNA, 23 nt, Artificial Sequence
  Chemically synthesized
acaugucuagcuucagaguagga

SEQ ID NO: 43153 - RNA, 23 nt, Artificial Sequence
  Chemically synthesized
caugucuagcuucagaguaggau

SEQ ID NO: 43154 - RNA, 23 nt, Artificial Sequence
  Chemically synthesized
augucuagcuucagaguaggauu

SEQ ID NO: 43155 - RNA, 23 nt, Artificial Sequence
  Chemically synthesized
ccaguggacugaaagcuaacuuc

SEQ ID NO: 43156 - RNA, 23 nt, Artificial Sequence
  Chemically synthesized
caguggacugaaagcuaacuucc

SEQ ID NO: 43157 - RNA, 23 nt, Artificial Sequence
  Chemically synthesized
aguggacugaaagcuaacuuccc

SEQ ID NO: 43158 - RNA, 23 nt, Artificial Sequence
  Chemically synthesized
guggacugaaagcuaacuucccu

SEQ ID NO: 43159 - RNA, 23 nt, Artificial Sequence
  Chemically synthesized
ccucgucuucuuguccaaccuca

SEQ ID NO: 43160 - RNA, 23 nt, Artificial Sequence
  Chemically synthesized
cucgucuucuuguccaaccucau

SEQ ID NO: 43161 - RNA, 23 nt, Artificial Sequence
  Chemically synthesized
ucgucuucuuguccaaccucauc

SEQ ID NO: 43162 - RNA, 23 nt, Artificial Sequence
  Chemically synthesized
cgucuucuuguccaaccucaucc

SEQ ID NO: 43163 - RNA, 23 nt, Artificial Sequence
  Chemically synthesized
gucuucuuguccaaccucauccu

SEQ ID NO: 43164 - RNA, 23 nt, Artificial Sequence
  Chemically synthesized
uuccuccucaccaucaaauguug

SEQ ID NO: 43165 - RNA, 23 nt, Artificial Sequence
  Chemically synthesized
uccuccucaccaucaaauguugg

SEQ ID NO: 43166 - RNA, 23 nt, Artificial Sequence
  Chemically synthesized
ccuccucaccaucaaauguuggu

SEQ ID NO: 43167 - RNA, 23 nt, Artificial Sequence
  Chemically synthesized
cuccucaccaucaaauguuggug

SEQ ID NO: 43168 - RNA, 23 nt, Artificial Sequence
  Chemically synthesized
uccucaccaucaaauguuggugg

SEQ ID NO: 43169 - RNA, 23 nt, Artificial Sequence
  Chemically synthesized
gccaaagccugccaugaaacuau

SEQ ID NO: 43170 - RNA, 23 nt, Artificial Sequence
  Chemically synthesized
ccaaagccugccaugaaacuaug

SEQ ID NO: 43171 - RNA, 23 nt, Artificial Sequence
  Chemically synthesized
caaagccugccaugaaacuaugg

SEQ ID NO: 43172 - RNA, 23 nt, Artificial Sequence
  Chemically synthesized
aaagccugccaugaaacuauggc

SEQ ID NO: 43173 - RNA, 23 nt, Artificial Sequence
  Chemically synthesized
aagccugccaugaaacuauggcu

SEQ ID NO: 43174 - RNA, 23 nt, Artificial Sequence
  Chemically synthesized
cagcaucugucugcucuacuggc

SEQ ID NO: 43175 - RNA, 23 nt, Artificial Sequence
  Chemically synthesized
agcaucugucugcucuacuggcu

SEQ ID NO: 43176 - RNA, 23 nt, Artificial Sequence
  Chemically synthesized
gcaucugucugcucuacuggcuc

SEQ ID NO: 43177 - RNA, 23 nt, Artificial Sequence
  Chemically synthesized
caucugucugcucuacuggcucu

SEQ ID NO: 43178 - RNA, 23 nt, Artificial Sequence
  Chemically synthesized
aucugucugcucuacuggcucuu

SEQ ID NO: 43179 - RNA, 23 nt, Artificial Sequence
  Chemically synthesized
ggucggcaaggaaauccauuagg

SEQ ID NO: 43180 - RNA, 23 nt, Artificial Sequence
  Chemically synthesized
gucggcaaggaaauccauuaggu

SEQ ID NO: 43181 - RNA, 23 nt, Artificial Sequence
  Chemically synthesized
ucggcaaggaaauccauuaggug

SEQ ID NO: 43182 - RNA, 23 nt, Artificial Sequence
  Chemically synthesized
cggcaaggaaauccauuaggugg

SEQ ID NO: 43183 - RNA, 23 nt, Artificial Sequence
  Chemically synthesized
ggcaaggaaauccauuagguggu

SEQ ID NO: 43184 - RNA, 23 nt, Artificial Sequence
  Chemically synthesized
ccaguccaaggaaucuguguuga

SEQ ID NO: 43185 - RNA, 23 nt, Artificial Sequence
  Chemically synthesized
caguccaaggaaucuguguugag

SEQ ID NO: 43186 - RNA, 23 nt, Artificial Sequence
  Chemically synthesized
aguccaaggaaucuguguugagu

SEQ ID NO: 43187 - RNA, 23 nt, Artificial Sequence
  Chemically synthesized
guccaaggaaucuguguugagug

SEQ ID NO: 43188 - RNA, 23 nt, Artificial Sequence
  Chemically synthesized
acucucagccucgucuucuuguc

SEQ ID NO: 43189 - RNA, 23 nt, Artificial Sequence
  Chemically synthesized
cucucagccucgucuucuugucc

SEQ ID NO: 43190 - RNA, 23 nt, Artificial Sequence
  Chemically synthesized
ucucagccucgucuucuugucca

SEQ ID NO: 43191 - RNA, 23 nt, Artificial Sequence
  Chemically synthesized
cucagccucgucuucuuguccaa

SEQ ID NO: 43192 - RNA, 23 nt, Artificial Sequence
  Chemically synthesized
ucagccucgucuucuuguccaac

SEQ ID NO: 43193 - RNA, 23 nt, Artificial Sequence
  Chemically synthesized
cagccucgucuucuuguccaacc

SEQ ID NO: 43194 - RNA, 23 nt, Artificial Sequence
  Chemically synthesized
agccucgucuucuuguccaaccu

SEQ ID NO: 43195 - RNA, 23 nt, Artificial Sequence
  Chemically synthesized
gccucgucuucuuguccaaccuc

SEQ ID NO: 43196 - RNA, 23 nt, Artificial Sequence
  Chemically synthesized
ucuggauaaugacaguccaacac

SEQ ID NO: 43197 - RNA, 23 nt, Artificial Sequence
  Chemically synthesized
cuggauaaugacaguccaacaca

SEQ ID NO: 43198 - RNA, 23 nt, Artificial Sequence
  Chemically synthesized
uggauaaugacaguccaacacaa

SEQ ID NO: 43199 - RNA, 23 nt, Artificial Sequence
  Chemically synthesized
ggauaaugacaguccaacacaag

SEQ ID NO: 43200 - RNA, 23 nt, Artificial Sequence
  Chemically synthesized
gauaaugacaguccaacacaagg

SEQ ID NO: 43201 - RNA, 23 nt, Artificial Sequence
  Chemically synthesized
guucaggcuccuguucuucaacc

SEQ ID NO: 43202 - RNA, 23 nt, Artificial Sequence
  Chemically synthesized
uucaggcuccuguucuucaaccu

SEQ ID NO: 43203 - RNA, 23 nt, Artificial Sequence
  Chemically synthesized
ucaggcuccuguucuucaaccuu

SEQ ID NO: 43204 - RNA, 23 nt, Artificial Sequence
  Chemically synthesized
guucuucaaccuucugcccuugc

SEQ ID NO: 43205 - RNA, 23 nt, Artificial Sequence
  Chemically synthesized
uaugcuucugaauuuuucuuucc

SEQ ID NO: 43206 - RNA, 23 nt, Artificial Sequence
  Chemically synthesized
augcuucugaauuuuucuuuccu

SEQ ID NO: 43207 - RNA, 23 nt, Artificial Sequence
  Chemically synthesized
auaaucauuucaaagcacauguc

SEQ ID NO: 43208 - RNA, 23 nt, Artificial Sequence
  Chemically synthesized
uaaucauuucaaagcacaugucu

SEQ ID NO: 43209 - RNA, 23 nt, Artificial Sequence
  Chemically synthesized
aaucauuucaaagcacaugucua

SEQ ID NO: 43210 - RNA, 23 nt, Artificial Sequence
  Chemically synthesized
uucaaagcacaugucuagcuuca

SEQ ID NO: 43211 - RNA, 23 nt, Artificial Sequence
  Chemically synthesized
ucagcaucugucugcucuacugg

SEQ ID NO: 43212 - RNA, 23 nt, Artificial Sequence
  Chemically synthesized
ucugcaaaaguguuguccacccc

SEQ ID NO: 43213 - RNA, 23 nt, Artificial Sequence
  Chemically synthesized
cugcaaaaguguuguccaccccu

SEQ ID NO: 43214 - RNA, 23 nt, Artificial Sequence
  Chemically synthesized
cuucuuguccaaccucauccucu

SEQ ID NO: 43215 - RNA, 23 nt, Artificial Sequence
  Chemically synthesized
uucuuguccaaccucauccucug

SEQ ID NO: 43216 - RNA, 23 nt, Artificial Sequence
  Chemically synthesized
ucuuguccaaccucauccucugg

SEQ ID NO: 43217 - RNA, 23 nt, Artificial Sequence
  Chemically synthesized
cuuguccaaccucauccucugga

SEQ ID NO: 43218 - RNA, 23 nt, Artificial Sequence
  Chemically synthesized
uuguccaaccucauccucuggau

SEQ ID NO: 43219 - RNA, 23 nt, Artificial Sequence
  Chemically synthesized
auaaugacaguccaacacaaggg

SEQ ID NO: 43220 - RNA, 23 nt, Artificial Sequence
  Chemically synthesized
uaaugacaguccaacacaagggc

SEQ ID NO: 43221 - RNA, 23 nt, Artificial Sequence
  Chemically synthesized
aaugacaguccaacacaagggcc

SEQ ID NO: 43222 - RNA, 23 nt, Artificial Sequence
  Chemically synthesized
augacaguccaacacaagggccu

SEQ ID NO: 43223 - RNA, 23 nt, Artificial Sequence
  Chemically synthesized
ugcuguuguuaauguugaaagug

SEQ ID NO: 43224 - RNA, 23 nt, Artificial Sequence
  Chemically synthesized
gcuguuguuaauguugaaaguga

SEQ ID NO: 43225 - RNA, 23 nt, Artificial Sequence
  Chemically synthesized
cuguuguuaauguugaaagugac

SEQ ID NO: 43226 - RNA, 23 nt, Artificial Sequence
  Chemically synthesized
caccaucaaauguuggugggaug

SEQ ID NO: 43227 - RNA, 23 nt, Artificial Sequence
  Chemically synthesized
accaucaaauguuggugggaugc

SEQ ID NO: 43228 - RNA, 23 nt, Artificial Sequence
  Chemically synthesized
ccaucaaauguuggugggaugcu

SEQ ID NO: 43229 - RNA, 23 nt, Artificial Sequence
  Chemically synthesized
caucaaauguuggugggaugcug

SEQ ID NO: 43230 - RNA, 23 nt, Artificial Sequence
  Chemically synthesized
aucaaauguuggugggaugcugu

SEQ ID NO: 43231 - RNA, 23 nt, Artificial Sequence
  Chemically synthesized
ucaaauguuggugggaugcuguu

SEQ ID NO: 43232 - RNA, 23 nt, Artificial Sequence
  Chemically synthesized
ugucuagcuucagaguaggauuu

SEQ ID NO: 43233 - RNA, 23 nt, Artificial Sequence
  Chemically synthesized
gucuagcuucagaguaggauuug

SEQ ID NO: 43234 - RNA, 23 nt, Artificial Sequence
  Chemically synthesized
ucuagcuucagaguaggauuugu

SEQ ID NO: 43235 - RNA, 23 nt, Artificial Sequence
  Chemically synthesized
cuagcuucagaguaggauuuguu

SEQ ID NO: 43236 - RNA, 23 nt, Artificial Sequence
  Chemically synthesized
uagcuucagaguaggauuuguuc

SEQ ID NO: 43237 - RNA, 23 nt, Artificial Sequence
  Chemically synthesized
ucuucuuguccaaccucauccuc

SEQ ID NO: 43238 - RNA, 23 nt, Artificial Sequence
  Chemically synthesized
aaagcacaugucuagcuucagag

SEQ ID NO: 43239 - RNA, 23 nt, Artificial Sequence
  Chemically synthesized
aagcacaugucuagcuucagagu

SEQ ID NO: 43240 - RNA, 23 nt, Artificial Sequence
  Chemically synthesized
agcacaugucuagcuucagagua

SEQ ID NO: 43241 - RNA, 23 nt, Artificial Sequence
  Chemically synthesized
gcaaggaaauccauuaggugguc

SEQ ID NO: 43242 - RNA, 23 nt, Artificial Sequence
  Chemically synthesized
caaggaaauccauuaggugguca

SEQ ID NO: 43243 - RNA, 23 nt, Artificial Sequence
  Chemically synthesized
aaggaaauccauuagguggucau

SEQ ID NO: 43244 - RNA, 23 nt, Artificial Sequence
  Chemically synthesized
uuagguggucauauaaggcccag

SEQ ID NO: 43245 - RNA, 23 nt, Artificial Sequence
  Chemically synthesized
uagguggucauauaaggcccagu

SEQ ID NO: 43246 - RNA, 23 nt, Artificial Sequence
  Chemically synthesized
agaguaggauuuguucacuggcc

SEQ ID NO: 43247 - RNA, 23 nt, Artificial Sequence
  Chemically synthesized
gaguaggauuuguucacuggcca

SEQ ID NO: 43248 - RNA, 23 nt, Artificial Sequence
  Chemically synthesized
aguaggauuuguucacuggccaa

SEQ ID NO: 43249 - RNA, 23 nt, Artificial Sequence
  Chemically synthesized
guaggauuuguucacuggccaaa

SEQ ID NO: 43250 - RNA, 23 nt, Artificial Sequence
  Chemically synthesized
uaggauuuguucacuggccaaag

SEQ ID NO: 43251 - RNA, 23 nt, Artificial Sequence
  Chemically synthesized
aggaaauccauuagguggucaua

SEQ ID NO: 43252 - RNA, 23 nt, Artificial Sequence
  Chemically synthesized
ggaaauccauuagguggucauau

SEQ ID NO: 43253 - RNA, 23 nt, Artificial Sequence
  Chemically synthesized
gaaauccauuagguggucauaua

SEQ ID NO: 43254 - RNA, 23 nt, Artificial Sequence
  Chemically synthesized
aaauccauuagguggucauauaa

SEQ ID NO: 43255 - RNA, 23 nt, Artificial Sequence
  Chemically synthesized
uuaugcuucugaauuuuucuuuc

SEQ ID NO: 43256 - RNA, 23 nt, Artificial Sequence
  Chemically synthesized
aguaauguacuccuggugcucca

SEQ ID NO: 43257 - RNA, 23 nt, Artificial Sequence
  Chemically synthesized
guaauguacuccuggugcuccag

SEQ ID NO: 43258 - RNA, 23 nt, Artificial Sequence
  Chemically synthesized
uaauguacuccuggugcuccagg

SEQ ID NO: 43259 - RNA, 23 nt, Artificial Sequence
  Chemically synthesized
aauguacuccuggugcuccaggg

SEQ ID NO: 43260 - RNA, 23 nt, Artificial Sequence
  Chemically synthesized
cauccucuggauaaugacagucc

SEQ ID NO: 43261 - RNA, 23 nt, Artificial Sequence
  Chemically synthesized
auccucuggauaaugacagucca

SEQ ID NO: 43262 - RNA, 23 nt, Artificial Sequence
  Chemically synthesized
uccucuggauaaugacaguccaa

SEQ ID NO: 43263 - RNA, 23 nt, Artificial Sequence
  Chemically synthesized
ccucuggauaaugacaguccaac

SEQ ID NO: 43264 - RNA, 23 nt, Artificial Sequence
  Chemically synthesized
cucuggauaaugacaguccaaca

SEQ ID NO: 43265 - RNA, 23 nt, Artificial Sequence
  Chemically synthesized
acuucaaccacgaaauugggagu

SEQ ID NO: 43266 - RNA, 23 nt, Artificial Sequence
  Chemically synthesized
cuucaaccacgaaauugggaguu

SEQ ID NO: 43267 - RNA, 23 nt, Artificial Sequence
  Chemically synthesized
uucaaccacgaaauugggaguug

SEQ ID NO: 43268 - RNA, 23 nt, Artificial Sequence
  Chemically synthesized
ucaaccacgaaauugggaguuga

SEQ ID NO: 43269 - RNA, 23 nt, Artificial Sequence
  Chemically synthesized
ggaguugaugucaguucaggcuc

SEQ ID NO: 43270 - RNA, 23 nt, Artificial Sequence
  Chemically synthesized
gaguugaugucaguucaggcucc

SEQ ID NO: 43271 - RNA, 23 nt, Artificial Sequence
  Chemically synthesized
aguugaugucaguucaggcuccu

SEQ ID NO: 43272 - RNA, 23 nt, Artificial Sequence
  Chemically synthesized
guugaugucaguucaggcuccug

SEQ ID NO: 43273 - RNA, 23 nt, Artificial Sequence
  Chemically synthesized
uugaugucaguucaggcuccugu

SEQ ID NO: 43274 - RNA, 23 nt, Artificial Sequence
  Chemically synthesized
ucagaguaggauuuguucacugg

SEQ ID NO: 43275 - RNA, 23 nt, Artificial Sequence
  Chemically synthesized
cagaguaggauuuguucacuggc

SEQ ID NO: 43276 - RNA, 23 nt, Artificial Sequence
  Chemically synthesized
aacuauggcuuucagcaucuguc

SEQ ID NO: 43277 - RNA, 23 nt, Artificial Sequence
  Chemically synthesized
acuauggcuuucagcaucugucu

SEQ ID NO: 43278 - RNA, 23 nt, Artificial Sequence
  Chemically synthesized
cuauggcuuucagcaucugucug

SEQ ID NO: 43279 - RNA, 23 nt, Artificial Sequence
  Chemically synthesized
uauggcuuucagcaucugucugc

SEQ ID NO: 43280 - RNA, 23 nt, Artificial Sequence
  Chemically synthesized
auggcuuucagcaucugucugcu

SEQ ID NO: 43281 - RNA, 23 nt, Artificial Sequence
  Chemically synthesized
agguggucauauaaggcccaguc

SEQ ID NO: 43282 - RNA, 23 nt, Artificial Sequence
  Chemically synthesized
uguuguuaauguugaaagugacc

SEQ ID NO: 43283 - RNA, 23 nt, Artificial Sequence
  Chemically synthesized
auguacuccuggugcuccagggc

SEQ ID NO: 43284 - RNA, 23 nt, Artificial Sequence
  Chemically synthesized
ccugauagagaagaugucacucu

SEQ ID NO: 43285 - RNA, 23 nt, Artificial Sequence
  Chemically synthesized
cugauagagaagaugucacucuc

SEQ ID NO: 43286 - RNA, 23 nt, Artificial Sequence
  Chemically synthesized
ugauagagaagaugucacucuca

SEQ ID NO: 43287 - RNA, 23 nt, Artificial Sequence
  Chemically synthesized
gauagagaagaugucacucucag

SEQ ID NO: 43288 - RNA, 23 nt, Artificial Sequence
  Chemically synthesized
auagagaagaugucacucucagc

SEQ ID NO: 43289 - RNA, 23 nt, Artificial Sequence
  Chemically synthesized
uucuucaaccuucugcccuugcg

SEQ ID NO: 43290 - RNA, 23 nt, Artificial Sequence
  Chemically synthesized
ucuucaaccuucugcccuugcga

SEQ ID NO: 43291 - RNA, 23 nt, Artificial Sequence
  Chemically synthesized
cuucaaccuucugcccuugcgag

SEQ ID NO: 43292 - RNA, 23 nt, Artificial Sequence
  Chemically synthesized
uucaaccuucugcccuugcgagg

SEQ ID NO: 43293 - RNA, 23 nt, Artificial Sequence
  Chemically synthesized
agaugcaaaggacaacccaggcc

SEQ ID NO: 43294 - RNA, 23 nt, Artificial Sequence
  Chemically synthesized
gaugcaaaggacaacccaggccu

SEQ ID NO: 43295 - RNA, 23 nt, Artificial Sequence
  Chemically synthesized
augcaaaggacaacccaggccua

SEQ ID NO: 43296 - RNA, 23 nt, Artificial Sequence
  Chemically synthesized
agcuucagaguaggauuuguuca

SEQ ID NO: 43297 - RNA, 23 nt, Artificial Sequence
  Chemically synthesized
gcuucagaguaggauuuguucac

SEQ ID NO: 43298 - RNA, 23 nt, Artificial Sequence
  Chemically synthesized
cuucagaguaggauuuguucacu

SEQ ID NO: 43299 - RNA, 23 nt, Artificial Sequence
  Chemically synthesized
uucagaguaggauuuguucacug

SEQ ID NO: 43300 - RNA, 23 nt, Artificial Sequence
  Chemically synthesized
uuguucacuggccaaagccugcc

SEQ ID NO: 43301 - RNA, 23 nt, Artificial Sequence
  Chemically synthesized
augaaacuauggcuuucagcauc

SEQ ID NO: 43302 - RNA, 23 nt, Artificial Sequence
  Chemically synthesized
ugaaacuauggcuuucagcaucu

SEQ ID NO: 43303 - RNA, 23 nt, Artificial Sequence
  Chemically synthesized
gaaacuauggcuuucagcaucug

SEQ ID NO: 43304 - RNA, 23 nt, Artificial Sequence
  Chemically synthesized
aaacuauggcuuucagcaucugu

SEQ ID NO: 43305 - RNA, 23 nt, Artificial Sequence
  Chemically synthesized
caaccacgaaauugggaguugau

SEQ ID NO: 43306 - RNA, 23 nt, Artificial Sequence
  Chemically synthesized
aaccacgaaauugggaguugaug

SEQ ID NO: 43307 - RNA, 23 nt, Artificial Sequence
  Chemically synthesized
ugggaguugaugucaguucaggc

SEQ ID NO: 43308 - RNA, 23 nt, Artificial Sequence
  Chemically synthesized
gggaguugaugucaguucaggcu

SEQ ID NO: 43309 - RNA, 23 nt, Artificial Sequence
  Chemically synthesized
ugaugucaguucaggcuccuguu

SEQ ID NO: 43310 - RNA, 23 nt, Artificial Sequence
  Chemically synthesized
ggcuuucagcaucugucugcucu

SEQ ID NO: 43311 - RNA, 23 nt, Artificial Sequence
  Chemically synthesized
gcuuucagcaucugucugcucua

SEQ ID NO: 43312 - RNA, 23 nt, Artificial Sequence
  Chemically synthesized
cuuucagcaucugucugcucuac

SEQ ID NO: 43313 - RNA, 23 nt, Artificial Sequence
  Chemically synthesized
uuucagcaucugucugcucuacu

SEQ ID NO: 43314 - RNA, 23 nt, Artificial Sequence
  Chemically synthesized
uucagcaucugucugcucuacug

SEQ ID NO: 43315 - RNA, 23 nt, Artificial Sequence
  Chemically synthesized
ucauauaaggcccaguccaagga

SEQ ID NO: 43316 - RNA, 23 nt, Artificial Sequence
  Chemically synthesized
cauauaaggcccaguccaaggaa

SEQ ID NO: 43317 - RNA, 23 nt, Artificial Sequence
  Chemically synthesized
auauaaggcccaguccaaggaau

SEQ ID NO: 43318 - RNA, 23 nt, Artificial Sequence
  Chemically synthesized
uauaaggcccaguccaaggaauc

SEQ ID NO: 43319 - RNA, 23 nt, Artificial Sequence
  Chemically synthesized
auaaggcccaguccaaggaaucu

SEQ ID NO: 43320 - RNA, 23 nt, Artificial Sequence
  Chemically synthesized
ucaguucaggcuccuguucuuca

SEQ ID NO: 43321 - RNA, 23 nt, Artificial Sequence
  Chemically synthesized
caguucaggcuccuguucuucaa

SEQ ID NO: 43322 - RNA, 23 nt, Artificial Sequence
  Chemically synthesized
aguucaggcuccuguucuucaac

SEQ ID NO: 43323 - RNA, 23 nt, Artificial Sequence
  Chemically synthesized
ucugucccauucaguuccagcuc

SEQ ID NO: 43324 - RNA, 23 nt, Artificial Sequence
  Chemically synthesized
ucccaaccuccagacaucuuagg

SEQ ID NO: 43325 - RNA, 23 nt, Artificial Sequence
  Chemically synthesized
cccaaccuccagacaucuuaggg

SEQ ID NO: 43326 - RNA, 23 nt, Artificial Sequence
  Chemically synthesized
ccaaccuccagacaucuuaggga

SEQ ID NO: 43327 - RNA, 23 nt, Artificial Sequence
  Chemically synthesized
caaccuccagacaucuuagggag

SEQ ID NO: 43328 - RNA, 23 nt, Artificial Sequence
  Chemically synthesized
aaccuccagacaucuuagggagg

SEQ ID NO: 43329 - RNA, 23 nt, Artificial Sequence
  Chemically synthesized
gucauauaaggcccaguccaagg

SEQ ID NO: 43330 - RNA, 23 nt, Artificial Sequence
  Chemically synthesized
ucccugauagagaagaugucacu

SEQ ID NO: 43331 - RNA, 23 nt, Artificial Sequence
  Chemically synthesized
cccugauagagaagaugucacuc

SEQ ID NO: 43332 - RNA, 23 nt, Artificial Sequence
  Chemically synthesized
gaugucaguucaggcuccuguuc

SEQ ID NO: 43333 - RNA, 23 nt, Artificial Sequence
  Chemically synthesized
augucaguucaggcuccuguucu

SEQ ID NO: 43334 - RNA, 23 nt, Artificial Sequence
  Chemically synthesized
ugucaguucaggcuccuguucuu

SEQ ID NO: 43335 - RNA, 23 nt, Artificial Sequence
  Chemically synthesized
gaacacgugcagaugcaaaggac

SEQ ID NO: 43336 - RNA, 23 nt, Artificial Sequence
  Chemically synthesized
acacgugcagaugcaaaggacaa

SEQ ID NO: 43337 - RNA, 23 nt, Artificial Sequence
  Chemically synthesized
cacgugcagaugcaaaggacaac

SEQ ID NO: 43338 - RNA, 23 nt, Artificial Sequence
  Chemically synthesized
acgugcagaugcaaaggacaacc

SEQ ID NO: 43339 - RNA, 23 nt, Artificial Sequence
  Chemically synthesized
agacaucuuagggaggguuuuau

SEQ ID NO: 43340 - RNA, 23 nt, Artificial Sequence
  Chemically synthesized
gacaucuuagggaggguuuuaug

SEQ ID NO: 43341 - RNA, 23 nt, Artificial Sequence
  Chemically synthesized
ugcaaaaguguuguccaccccuc

SEQ ID NO: 43342 - RNA, 23 nt, Artificial Sequence
  Chemically synthesized
gcaaaaguguuguccaccccucg

SEQ ID NO: 43343 - RNA, 23 nt, Artificial Sequence
  Chemically synthesized
auugggaguugaugucaguucag

SEQ ID NO: 43344 - RNA, 23 nt, Artificial Sequence
  Chemically synthesized
uugggaguugaugucaguucagg

SEQ ID NO: 43345 - RNA, 23 nt, Artificial Sequence
  Chemically synthesized
uagggaggguuuuaugcuucuga

SEQ ID NO: 43346 - RNA, 23 nt, Artificial Sequence
  Chemically synthesized
agggaggguuuuaugcuucugaa

SEQ ID NO: 43347 - RNA, 23 nt, Artificial Sequence
  Chemically synthesized
ugccaugaaacuauggcuuucag

SEQ ID NO: 43348 - RNA, 23 nt, Artificial Sequence
  Chemically synthesized
gccaugaaacuauggcuuucagc

SEQ ID NO: 43349 - RNA, 23 nt, Artificial Sequence
  Chemically synthesized
ccaugaaacuauggcuuucagca

SEQ ID NO: 43350 - RNA, 23 nt, Artificial Sequence
  Chemically synthesized
caugaaacuauggcuuucagcau

SEQ ID NO: 43351 - RNA, 23 nt, Artificial Sequence
  Chemically synthesized
uggcuuucagcaucugucugcuc

SEQ ID NO: 43352 - RNA, 23 nt, Artificial Sequence
  Chemically synthesized
caaccucauccucuggauaauga

SEQ ID NO: 43353 - RNA, 23 nt, Artificial Sequence
  Chemically synthesized
aaccucauccucuggauaaugac

SEQ ID NO: 43354 - RNA, 23 nt, Artificial Sequence
  Chemically synthesized
accucauccucuggauaaugaca

SEQ ID NO: 43355 - RNA, 23 nt, Artificial Sequence
  Chemically synthesized
ccucauccucuggauaaugacag

SEQ ID NO: 43356 - RNA, 23 nt, Artificial Sequence
  Chemically synthesized
cucauccucuggauaaugacagu

SEQ ID NO: 43357 - RNA, 23 nt, Artificial Sequence
  Chemically synthesized
ucauccucuggauaaugacaguc

SEQ ID NO: 43358 - RNA, 23 nt, Artificial Sequence
  Chemically synthesized
ugacaguccaacacaagggccuu

SEQ ID NO: 43359 - RNA, 23 nt, Artificial Sequence
  Chemically synthesized
ccucaccaucaaauguugguggg

SEQ ID NO: 43360 - RNA, 23 nt, Artificial Sequence
  Chemically synthesized
cucaccaucaaauguugguggga

SEQ ID NO: 43361 - RNA, 23 nt, Artificial Sequence
  Chemically synthesized
ucaccaucaaauguuggugggau

SEQ ID NO: 43362 - RNA, 23 nt, Artificial Sequence
  Chemically synthesized
accuccagacaucuuagggaggg

SEQ ID NO: 43363 - RNA, 23 nt, Artificial Sequence
  Chemically synthesized
gggaggguuuuaugcuucugaau

SEQ ID NO: 43364 - RNA, 23 nt, Artificial Sequence
  Chemically synthesized
ggaggguuuuaugcuucugaauu

SEQ ID NO: 43365 - RNA, 23 nt, Artificial Sequence
  Chemically synthesized
gaggguuuuaugcuucugaauuu

SEQ ID NO: 43366 - RNA, 23 nt, Artificial Sequence
  Chemically synthesized
acucuugaggucuucaagaaaag

SEQ ID NO: 43367 - RNA, 23 nt, Artificial Sequence
  Chemically synthesized
cucuugaggucuucaagaaaagu

SEQ ID NO: 43368 - RNA, 23 nt, Artificial Sequence
  Chemically synthesized
ucuugaggucuucaagaaaagua

SEQ ID NO: 43369 - RNA, 23 nt, Artificial Sequence
  Chemically synthesized
gguggucauauaaggcccagucc

SEQ ID NO: 43370 - RNA, 23 nt, Artificial Sequence
  Chemically synthesized
guggucauauaaggcccagucca

SEQ ID NO: 43371 - RNA, 23 nt, Artificial Sequence
  Chemically synthesized
uggucauauaaggcccaguccaa

SEQ ID NO: 43372 - RNA, 23 nt, Artificial Sequence
  Chemically synthesized
ggucauauaaggcccaguccaag

SEQ ID NO: 43373 - RNA, 23 nt, Artificial Sequence
  Chemically synthesized
guccaacacaagggccuucuugc

SEQ ID NO: 43374 - RNA, 23 nt, Artificial Sequence
  Chemically synthesized
uccaacacaagggccuucuugcc

SEQ ID NO: 43375 - RNA, 23 nt, Artificial Sequence
  Chemically synthesized
ccaacacaagggccuucuugcca

SEQ ID NO: 43376 - RNA, 23 nt, Artificial Sequence
  Chemically synthesized
caacacaagggccuucuugccau

SEQ ID NO: 43377 - RNA, 23 nt, Artificial Sequence
  Chemically synthesized
aacacaagggccuucuugccauc

SEQ ID NO: 43378 - RNA, 23 nt, Artificial Sequence
  Chemically synthesized
accacgaaauugggaguugaugu

SEQ ID NO: 43379 - RNA, 23 nt, Artificial Sequence
  Chemically synthesized
gguuuuaugcuucugaauuuuuc

SEQ ID NO: 43380 - RNA, 23 nt, Artificial Sequence
  Chemically synthesized
ucacucaggaaaucaacaaaagc

SEQ ID NO: 43381 - RNA, 23 nt, Artificial Sequence
  Chemically synthesized
caucauucuuuauaacuucaacc

SEQ ID NO: 43382 - RNA, 23 nt, Artificial Sequence
  Chemically synthesized
aucacucaggaaaucaacaaaag

SEQ ID NO: 43383 - RNA, 23 nt, Artificial Sequence
  Chemically synthesized
gugggaugcuguuguuaauguug

SEQ ID NO: 43384 - RNA, 23 nt, Artificial Sequence
  Chemically synthesized
cacucucagccucgucuucuugu

SEQ ID NO: 43385 - RNA, 23 nt, Artificial Sequence
  Chemically synthesized
ucugucugcucuacuggcucuug

SEQ ID NO: 43386 - RNA, 23 nt, Artificial Sequence
  Chemically synthesized
cugucugcucuacuggcucuuga

SEQ ID NO: 43387 - RNA, 23 nt, Artificial Sequence
  Chemically synthesized
uucgcuucugucccauucaguuc

SEQ ID NO: 43388 - RNA, 23 nt, Artificial Sequence
  Chemically synthesized
aauccauuagguggucauauaag

SEQ ID NO: 43389 - RNA, 23 nt, Artificial Sequence
  Chemically synthesized
aacgacugcgaacacgugcagau

SEQ ID NO: 43390 - RNA, 23 nt, Artificial Sequence
  Chemically synthesized
auguuggugggaugcuguuguua

SEQ ID NO: 43391 - RNA, 23 nt, Artificial Sequence
  Chemically synthesized
acacaagggccuucuugccauca

SEQ ID NO: 43392 - RNA, 23 nt, Artificial Sequence
  Chemically synthesized
aaauguuggugggaugcuguugu

SEQ ID NO: 43393 - RNA, 23 nt, Artificial Sequence
  Chemically synthesized
uaggaugauaaucauuucaaagc

SEQ ID NO: 43394 - RNA, 23 nt, Artificial Sequence
  Chemically synthesized
aaacgacugcgaacacgugcaga

SEQ ID NO: 43395 - RNA, 23 nt, Artificial Sequence
  Chemically synthesized
gguuccuccucaccaucaaaugu

SEQ ID NO: 43396 - RNA, 23 nt, Artificial Sequence
  Chemically synthesized
auucagacucgccaguggacuga

SEQ ID NO: 43397 - RNA, 23 nt, Artificial Sequence
  Chemically synthesized
aguccaacacaagggccuucuug

SEQ ID NO: 43398 - RNA, 23 nt, Artificial Sequence
  Chemically synthesized
gaggagauaaaccaauuuuaugu

SEQ ID NO: 43399 - RNA, 23 nt, Artificial Sequence
  Chemically synthesized
uggugggaugcuguuguuaaugu

SEQ ID NO: 43400 - RNA, 23 nt, Artificial Sequence
  Chemically synthesized
ggagauaaaccaauuuuaugucu

SEQ ID NO: 43401 - RNA, 23 nt, Artificial Sequence
  Chemically synthesized
ggaauuaagucuccgauuauuag

SEQ ID NO: 43402 - RNA, 23 nt, Artificial Sequence
  Chemically synthesized
aggaauuaagucuccgauuauua

SEQ ID NO: 43403 - RNA, 23 nt, Artificial Sequence
  Chemically synthesized
aaggaauuaagucuccgauuauu

SEQ ID NO: 43404 - RNA, 23 nt, Artificial Sequence
  Chemically synthesized
uaaggaauuaagucuccgauuau

SEQ ID NO: 43405 - RNA, 23 nt, Artificial Sequence
  Chemically synthesized
auaaggaauuaagucuccgauua

SEQ ID NO: 43406 - RNA, 23 nt, Artificial Sequence
  Chemically synthesized
cugcauuggugaauuuaauccuc

SEQ ID NO: 43407 - RNA, 23 nt, Artificial Sequence
  Chemically synthesized
ucugcauuggugaauuuaauccu

SEQ ID NO: 43408 - RNA, 23 nt, Artificial Sequence
  Chemically synthesized
cucugcauuggugaauuuaaucc

SEQ ID NO: 43409 - RNA, 23 nt, Artificial Sequence
  Chemically synthesized
acucugcauuggugaauuuaauc

SEQ ID NO: 43410 - RNA, 23 nt, Artificial Sequence
  Chemically synthesized
cacucugcauuggugaauuuaau

SEQ ID NO: 43411 - RNA, 23 nt, Artificial Sequence
  Chemically synthesized
caacuuuugugugcuuuuaaaau

SEQ ID NO: 43412 - RNA, 23 nt, Artificial Sequence
  Chemically synthesized
ucaacuuuugugugcuuuuaaaa

SEQ ID NO: 43413 - RNA, 23 nt, Artificial Sequence
  Chemically synthesized
uucaacuuuugugugcuuuuaaa

SEQ ID NO: 43414 - RNA, 23 nt, Artificial Sequence
  Chemically synthesized
guucaacuuuugugugcuuuuaa

SEQ ID NO: 43415 - RNA, 23 nt, Artificial Sequence
  Chemically synthesized
uguucaacuuuugugugcuuuua

SEQ ID NO: 43416 - RNA, 23 nt, Artificial Sequence
  Chemically synthesized
ggaaaaaauacugcuggacgcac

SEQ ID NO: 43417 - RNA, 23 nt, Artificial Sequence
  Chemically synthesized
uggaaaaaauacugcuggacgca

SEQ ID NO: 43418 - RNA, 23 nt, Artificial Sequence
  Chemically synthesized
auggaaaaaauacugcuggacgc

SEQ ID NO: 43419 - RNA, 23 nt, Artificial Sequence
  Chemically synthesized
cauggaaaaaauacugcuggacg

SEQ ID NO: 43420 - RNA, 23 nt, Artificial Sequence
  Chemically synthesized
acauggaaaaaauacugcuggac

SEQ ID NO: 43421 - RNA, 23 nt, Artificial Sequence
  Chemically synthesized
agguugucuacuaaagaaagauu

SEQ ID NO: 43422 - RNA, 23 nt, Artificial Sequence
  Chemically synthesized
cagguugucuacuaaagaaagau

SEQ ID NO: 43423 - RNA, 23 nt, Artificial Sequence
  Chemically synthesized
gcagguugucuacuaaagaaaga

SEQ ID NO: 43424 - RNA, 23 nt, Artificial Sequence
  Chemically synthesized
ugcagguugucuacuaaagaaag

SEQ ID NO: 43425 - RNA, 23 nt, Artificial Sequence
  Chemically synthesized
augcagguugucuacuaaagaaa

SEQ ID NO: 43426 - RNA, 23 nt, Artificial Sequence
  Chemically synthesized
gaugcagguugucuacuaaagaa

SEQ ID NO: 43427 - RNA, 23 nt, Artificial Sequence
  Chemically synthesized
gccuuauauaucacacuauugua

SEQ ID NO: 43428 - RNA, 23 nt, Artificial Sequence
  Chemically synthesized
ggccuuauauaucacacuauugu

SEQ ID NO: 43429 - RNA, 23 nt, Artificial Sequence
  Chemically synthesized
uggccuuauauaucacacuauug

SEQ ID NO: 43430 - RNA, 23 nt, Artificial Sequence
  Chemically synthesized
guggccuuauauaucacacuauu

SEQ ID NO: 43431 - RNA, 23 nt, Artificial Sequence
  Chemically synthesized
uguggccuuauauaucacacuau

SEQ ID NO: 43432 - RNA, 23 nt, Artificial Sequence
  Chemically synthesized
ugaauuuaauccucuccuuugug

SEQ ID NO: 43433 - RNA, 23 nt, Artificial Sequence
  Chemically synthesized
gugaauuuaauccucuccuuugu

SEQ ID NO: 43434 - RNA, 23 nt, Artificial Sequence
  Chemically synthesized
ggugaauuuaauccucuccuuug

SEQ ID NO: 43435 - RNA, 23 nt, Artificial Sequence
  Chemically synthesized
uggugaauuuaauccucuccuuu

SEQ ID NO: 43436 - RNA, 23 nt, Artificial Sequence
  Chemically synthesized
uuggugaauuuaauccucuccuu

SEQ ID NO: 43437 - RNA, 23 nt, Artificial Sequence
  Chemically synthesized
uuguggccuuauauaucacacua

SEQ ID NO: 43438 - RNA, 23 nt, Artificial Sequence
  Chemically synthesized
gagaaaaacagcucacagucuga

SEQ ID NO: 43439 - RNA, 23 nt, Artificial Sequence
  Chemically synthesized
agagaaaaacagcucacagucug

SEQ ID NO: 43440 - RNA, 23 nt, Artificial Sequence
  Chemically synthesized
gagagaaaaacagcucacagucu

SEQ ID NO: 43441 - RNA, 23 nt, Artificial Sequence
  Chemically synthesized
ggagagaaaaacagcucacaguc

SEQ ID NO: 43442 - RNA, 23 nt, Artificial Sequence
  Chemically synthesized
uggagagaaaaacagcucacagu

SEQ ID NO: 43443 - RNA, 23 nt, Artificial Sequence
  Chemically synthesized
gacauggaaaaaauacugcugga

SEQ ID NO: 43444 - RNA, 23 nt, Artificial Sequence
  Chemically synthesized
gccucgguuucuauuuauaaugg

SEQ ID NO: 43445 - RNA, 23 nt, Artificial Sequence
  Chemically synthesized
agccucgguuucuauuuauaaug

SEQ ID NO: 43446 - RNA, 23 nt, Artificial Sequence
  Chemically synthesized
cagccucgguuucuauuuauaau

SEQ ID NO: 43447 - RNA, 23 nt, Artificial Sequence
  Chemically synthesized
ccagccucgguuucuauuuauaa

SEQ ID NO: 43448 - RNA, 23 nt, Artificial Sequence
  Chemically synthesized
uccagccucgguuucuauuuaua

SEQ ID NO: 43449 - RNA, 23 nt, Artificial Sequence
  Chemically synthesized
ggaaagaaguugaaagcaucuug

SEQ ID NO: 43450 - RNA, 23 nt, Artificial Sequence
  Chemically synthesized
aggaaagaaguugaaagcaucuu

SEQ ID NO: 43451 - RNA, 23 nt, Artificial Sequence
  Chemically synthesized
aaggaaagaaguugaaagcaucu

SEQ ID NO: 43452 - RNA, 23 nt, Artificial Sequence
  Chemically synthesized
gaaggaaagaaguugaaagcauc

SEQ ID NO: 43453 - RNA, 23 nt, Artificial Sequence
  Chemically synthesized
agaaggaaagaaguugaaagcau

SEQ ID NO: 43454 - RNA, 23 nt, Artificial Sequence
  Chemically synthesized
ccaagauagagcuacaaacucag

SEQ ID NO: 43455 - RNA, 23 nt, Artificial Sequence
  Chemically synthesized
accaagauagagcuacaaacuca

SEQ ID NO: 43456 - RNA, 23 nt, Artificial Sequence
  Chemically synthesized
aaccaagauagagcuacaaacuc

SEQ ID NO: 43457 - RNA, 23 nt, Artificial Sequence
  Chemically synthesized
aaaccaagauagagcuacaaacu

SEQ ID NO: 43458 - RNA, 23 nt, Artificial Sequence
  Chemically synthesized
gaaaccaagauagagcuacaaac

SEQ ID NO: 43459 - RNA, 23 nt, Artificial Sequence
  Chemically synthesized
ggguuuguccaaaauaaauauug

SEQ ID NO: 43460 - RNA, 23 nt, Artificial Sequence
  Chemically synthesized
gggguuuguccaaaauaaauauu

SEQ ID NO: 43461 - RNA, 23 nt, Artificial Sequence
  Chemically synthesized
agggguuuguccaaaauaaauau

SEQ ID NO: 43462 - RNA, 23 nt, Artificial Sequence
  Chemically synthesized
aagggguuuguccaaaauaaaua

SEQ ID NO: 43463 - RNA, 23 nt, Artificial Sequence
  Chemically synthesized
uaagggguuuguccaaaauaaau

SEQ ID NO: 43464 - RNA, 23 nt, Artificial Sequence
  Chemically synthesized
ggagacauggaaaaaauacugcu

SEQ ID NO: 43465 - RNA, 23 nt, Artificial Sequence
  Chemically synthesized
uggagacauggaaaaaauacugc

SEQ ID NO: 43466 - RNA, 23 nt, Artificial Sequence
  Chemically synthesized
auggagacauggaaaaaauacug

SEQ ID NO: 43467 - RNA, 23 nt, Artificial Sequence
  Chemically synthesized
aauggagacauggaaaaaauacu

SEQ ID NO: 43468 - RNA, 23 nt, Artificial Sequence
  Chemically synthesized
uaauggagacauggaaaaaauac

SEQ ID NO: 43469 - RNA, 23 nt, Artificial Sequence
  Chemically synthesized
guguucaacuuuugugugcuuuu

SEQ ID NO: 43470 - RNA, 23 nt, Artificial Sequence
  Chemically synthesized
gcauuggugaauuuaauccucuc

SEQ ID NO: 43471 - RNA, 23 nt, Artificial Sequence
  Chemically synthesized
ugcauuggugaauuuaauccucu

SEQ ID NO: 43472 - RNA, 23 nt, Artificial Sequence
  Chemically synthesized
ucacucugcauuggugaauuuaa

SEQ ID NO: 43473 - RNA, 23 nt, Artificial Sequence
  Chemically synthesized
aucacucugcauuggugaauuua

SEQ ID NO: 43474 - RNA, 23 nt, Artificial Sequence
  Chemically synthesized
uaucacucugcauuggugaauuu

SEQ ID NO: 43475 - RNA, 23 nt, Artificial Sequence
  Chemically synthesized
uuaucacucugcauuggugaauu

SEQ ID NO: 43476 - RNA, 23 nt, Artificial Sequence
  Chemically synthesized
gaauuaagucuccgauuauuagg

SEQ ID NO: 43477 - RNA, 23 nt, Artificial Sequence
  Chemically synthesized
gcguuccuaauuuaguaaaauaa

SEQ ID NO: 43478 - RNA, 23 nt, Artificial Sequence
  Chemically synthesized
ugcguuccuaauuuaguaaaaua

SEQ ID NO: 43479 - RNA, 23 nt, Artificial Sequence
  Chemically synthesized
cugcguuccuaauuuaguaaaau

SEQ ID NO: 43480 - RNA, 23 nt, Artificial Sequence
  Chemically synthesized
gcugcguuccuaauuuaguaaaa

SEQ ID NO: 43481 - RNA, 23 nt, Artificial Sequence
  Chemically synthesized
ugcugcguuccuaauuuaguaaa

SEQ ID NO: 43482 - RNA, 23 nt, Artificial Sequence
  Chemically synthesized
agacauggaaaaaauacugcugg

SEQ ID NO: 43483 - RNA, 23 nt, Artificial Sequence
  Chemically synthesized
gagacauggaaaaaauacugcug

SEQ ID NO: 43484 - RNA, 23 nt, Artificial Sequence
  Chemically synthesized
cuaagcaaaucugugucuacuuu

SEQ ID NO: 43485 - RNA, 23 nt, Artificial Sequence
  Chemically synthesized
ucuaagcaaaucugugucuacuu

SEQ ID NO: 43486 - RNA, 23 nt, Artificial Sequence
  Chemically synthesized
uucuaagcaaaucugugucuacu

SEQ ID NO: 43487 - RNA, 23 nt, Artificial Sequence
  Chemically synthesized
auucuaagcaaaucugugucuac

SEQ ID NO: 43488 - RNA, 23 nt, Artificial Sequence
  Chemically synthesized
uauucuaagcaaaucugugucua

SEQ ID NO: 43489 - RNA, 23 nt, Artificial Sequence
  Chemically synthesized
ugugugcuuuuaaaaucagcuuu

SEQ ID NO: 43490 - RNA, 23 nt, Artificial Sequence
  Chemically synthesized
uugugugcuuuuaaaaucagcuu

SEQ ID NO: 43491 - RNA, 23 nt, Artificial Sequence
  Chemically synthesized
uuugugugcuuuuaaaaucagcu

SEQ ID NO: 43492 - RNA, 23 nt, Artificial Sequence
  Chemically synthesized
uuuugugugcuuuuaaaaucagc

SEQ ID NO: 43493 - RNA, 23 nt, Artificial Sequence
  Chemically synthesized
cuuuugugugcuuuuaaaaucag

SEQ ID NO: 43494 - RNA, 23 nt, Artificial Sequence
  Chemically synthesized
ccgauuauuaggugaucacccug

SEQ ID NO: 43495 - RNA, 23 nt, Artificial Sequence
  Chemically synthesized
uccgauuauuaggugaucacccu

SEQ ID NO: 43496 - RNA, 23 nt, Artificial Sequence
  Chemically synthesized
cuccgauuauuaggugaucaccc

SEQ ID NO: 43497 - RNA, 23 nt, Artificial Sequence
  Chemically synthesized
ucuccgauuauuaggugaucacc

SEQ ID NO: 43498 - RNA, 23 nt, Artificial Sequence
  Chemically synthesized
gucuccgauuauuaggugaucac

SEQ ID NO: 43499 - RNA, 23 nt, Artificial Sequence
  Chemically synthesized
guugucuacuaaagaaagauuau

SEQ ID NO: 43500 - RNA, 23 nt, Artificial Sequence
  Chemically synthesized
gguugucuacuaaagaaagauua

SEQ ID NO: 43501 - RNA, 23 nt, Artificial Sequence
  Chemically synthesized
ccuuaauucagcugaaguacuuu

SEQ ID NO: 43502 - RNA, 23 nt, Artificial Sequence
  Chemically synthesized
accuuaauucagcugaaguacuu

SEQ ID NO: 43503 - RNA, 23 nt, Artificial Sequence
  Chemically synthesized
aaccuuaauucagcugaaguacu

SEQ ID NO: 43504 - RNA, 23 nt, Artificial Sequence
  Chemically synthesized
caaccuuaauucagcugaaguac

SEQ ID NO: 43505 - RNA, 23 nt, Artificial Sequence
  Chemically synthesized
gcaaccuuaauucagcugaagua

SEQ ID NO: 43506 - RNA, 23 nt, Artificial Sequence
  Chemically synthesized
auaauggagacauggaaaaaaua

SEQ ID NO: 43507 - RNA, 23 nt, Artificial Sequence
  Chemically synthesized
uauaauggagacauggaaaaaau

SEQ ID NO: 43508 - RNA, 23 nt, Artificial Sequence
  Chemically synthesized
uguguucaacuuuugugugcuuu

SEQ ID NO: 43509 - RNA, 23 nt, Artificial Sequence
  Chemically synthesized
uuguguucaacuuuugugugcuu

SEQ ID NO: 43510 - RNA, 23 nt, Artificial Sequence
  Chemically synthesized
uccuuuguguucaacuuuugugu

SEQ ID NO: 43511 - RNA, 23 nt, Artificial Sequence
  Chemically synthesized
cuccuuuguguucaacuuuugug

SEQ ID NO: 43512 - RNA, 23 nt, Artificial Sequence
  Chemically synthesized
ucuccuuuguguucaacuuuugu

SEQ ID NO: 43513 - RNA, 23 nt, Artificial Sequence
  Chemically synthesized
cucuccuuuguguucaacuuuug

SEQ ID NO: 43514 - RNA, 23 nt, Artificial Sequence
  Chemically synthesized
ccucuccuuuguguucaacuuuu

SEQ ID NO: 43515 - RNA, 23 nt, Artificial Sequence
  Chemically synthesized
uccucuccuuuguguucaacuuu

SEQ ID NO: 43516 - RNA, 23 nt, Artificial Sequence
  Chemically synthesized
auccucuccuuuguguucaacuu

SEQ ID NO: 43517 - RNA, 23 nt, Artificial Sequence
  Chemically synthesized
aauccucuccuuuguguucaacu

SEQ ID NO: 43518 - RNA, 23 nt, Artificial Sequence
  Chemically synthesized
uaauccucuccuuuguguucaac

SEQ ID NO: 43519 - RNA, 23 nt, Artificial Sequence
  Chemically synthesized
uuaauccucuccuuuguguucaa

SEQ ID NO: 43520 - RNA, 23 nt, Artificial Sequence
  Chemically synthesized
gaauuuaauccucuccuuugugu

SEQ ID NO: 43521 - RNA, 23 nt, Artificial Sequence
  Chemically synthesized
caaacucagcuguacaguucgua

SEQ ID NO: 43522 - RNA, 23 nt, Artificial Sequence
  Chemically synthesized
acaaacucagcuguacaguucgu

SEQ ID NO: 43523 - RNA, 23 nt, Artificial Sequence
  Chemically synthesized
uacaaacucagcuguacaguucg

SEQ ID NO: 43524 - RNA, 23 nt, Artificial Sequence
  Chemically synthesized
cuacaaacucagcuguacaguuc

SEQ ID NO: 43525 - RNA, 23 nt, Artificial Sequence
  Chemically synthesized
gcuacaaacucagcuguacaguu

SEQ ID NO: 43526 - RNA, 23 nt, Artificial Sequence
  Chemically synthesized
cugugaaaauuugguaguaaauu

SEQ ID NO: 43527 - RNA, 23 nt, Artificial Sequence
  Chemically synthesized
acugugaaaauuugguaguaaau

SEQ ID NO: 43528 - RNA, 23 nt, Artificial Sequence
  Chemically synthesized
uacugugaaaauuugguaguaaa

SEQ ID NO: 43529 - RNA, 23 nt, Artificial Sequence
  Chemically synthesized
cuacugugaaaauuugguaguaa

SEQ ID NO: 43530 - RNA, 23 nt, Artificial Sequence
  Chemically synthesized
ucuacugugaaaauuugguagua

SEQ ID NO: 43531 - RNA, 23 nt, Artificial Sequence
  Chemically synthesized
ucacugaagagcuguuagauccu

SEQ ID NO: 43532 - RNA, 23 nt, Artificial Sequence
  Chemically synthesized
cucacugaagagcuguuagaucc

SEQ ID NO: 43533 - RNA, 23 nt, Artificial Sequence
  Chemically synthesized
gcucacugaagagcuguuagauc

SEQ ID NO: 43534 - RNA, 23 nt, Artificial Sequence
  Chemically synthesized
agcucacugaagagcuguuagau

SEQ ID NO: 43535 - RNA, 23 nt, Artificial Sequence
  Chemically synthesized
uagcucacugaagagcuguuaga

SEQ ID NO: 43536 - RNA, 23 nt, Artificial Sequence
  Chemically synthesized
caacauagcucacugaagagcug

SEQ ID NO: 43537 - RNA, 23 nt, Artificial Sequence
  Chemically synthesized
gcaacauagcucacugaagagcu

SEQ ID NO: 43538 - RNA, 23 nt, Artificial Sequence
  Chemically synthesized
ugcaacauagcucacugaagagc

SEQ ID NO: 43539 - RNA, 23 nt, Artificial Sequence
  Chemically synthesized
uugcaacauagcucacugaagag

SEQ ID NO: 43540 - RNA, 23 nt, Artificial Sequence
  Chemically synthesized
cuugcaacauagcucacugaaga

SEQ ID NO: 43541 - RNA, 23 nt, Artificial Sequence
  Chemically synthesized
accuccaccagcaccuuuugaug

SEQ ID NO: 43542 - RNA, 23 nt, Artificial Sequence
  Chemically synthesized
aaccuccaccagcaccuuuugau

SEQ ID NO: 43543 - RNA, 23 nt, Artificial Sequence
  Chemically synthesized
caaccuccaccagcaccuuuuga

SEQ ID NO: 43544 - RNA, 23 nt, Artificial Sequence
  Chemically synthesized
acaaccuccaccagcaccuuuug

SEQ ID NO: 43545 - RNA, 23 nt, Artificial Sequence
  Chemically synthesized
gacaaccuccaccagcaccuuuu

SEQ ID NO: 43546 - RNA, 23 nt, Artificial Sequence
  Chemically synthesized
uuccagccucgguuucuauuuau

SEQ ID NO: 43547 - RNA, 23 nt, Artificial Sequence
  Chemically synthesized
caagucggccggaaaauauuccc

SEQ ID NO: 43548 - RNA, 23 nt, Artificial Sequence
  Chemically synthesized
ucaagucggccggaaaauauucc

SEQ ID NO: 43549 - RNA, 23 nt, Artificial Sequence
  Chemically synthesized
gucaagucggccggaaaauauuc

SEQ ID NO: 43550 - RNA, 23 nt, Artificial Sequence
  Chemically synthesized
ggucaagucggccggaaaauauu

SEQ ID NO: 43551 - RNA, 23 nt, Artificial Sequence
  Chemically synthesized
uggucaagucggccggaaaauau

SEQ ID NO: 43552 - RNA, 23 nt, Artificial Sequence
  Chemically synthesized
ucagauuggauaugggauugguc

SEQ ID NO: 43553 - RNA, 23 nt, Artificial Sequence
  Chemically synthesized
cucagauuggauaugggauuggu

SEQ ID NO: 43554 - RNA, 23 nt, Artificial Sequence
  Chemically synthesized
acucagauuggauaugggauugg

SEQ ID NO: 43555 - RNA, 23 nt, Artificial Sequence
  Chemically synthesized
aacucagauuggauaugggauug

SEQ ID NO: 43556 - RNA, 23 nt, Artificial Sequence
  Chemically synthesized
aaacucagauuggauaugggauu

SEQ ID NO: 43557 - RNA, 23 nt, Artificial Sequence
  Chemically synthesized
gaaaaacucagauuggauauggg

SEQ ID NO: 43558 - RNA, 23 nt, Artificial Sequence
  Chemically synthesized
agaaaaacucagauuggauaugg

SEQ ID NO: 43559 - RNA, 23 nt, Artificial Sequence
  Chemically synthesized
aagaaaaacucagauuggauaug

SEQ ID NO: 43560 - RNA, 23 nt, Artificial Sequence
  Chemically synthesized
gaagaaaaacucagauuggauau

SEQ ID NO: 43561 - RNA, 23 nt, Artificial Sequence
  Chemically synthesized
ugaagaaaaacucagauuggaua

SEQ ID NO: 43562 - RNA, 23 nt, Artificial Sequence
  Chemically synthesized
gaaagcaucuugaagaaaaacuc

SEQ ID NO: 43563 - RNA, 23 nt, Artificial Sequence
  Chemically synthesized
ugaaagcaucuugaagaaaaacu

SEQ ID NO: 43564 - RNA, 23 nt, Artificial Sequence
  Chemically synthesized
uugaaagcaucuugaagaaaaac

SEQ ID NO: 43565 - RNA, 23 nt, Artificial Sequence
  Chemically synthesized
guugaaagcaucuugaagaaaaa

SEQ ID NO: 43566 - RNA, 23 nt, Artificial Sequence
  Chemically synthesized
aguugaaagcaucuugaagaaaa

SEQ ID NO: 43567 - RNA, 23 nt, Artificial Sequence
  Chemically synthesized
auuggugaauuuaauccucuccu

SEQ ID NO: 43568 - RNA, 23 nt, Artificial Sequence
  Chemically synthesized
cguacacuaaacucuucuugcuu

SEQ ID NO: 43569 - RNA, 23 nt, Artificial Sequence
  Chemically synthesized
ucguacacuaaacucuucuugcu

SEQ ID NO: 43570 - RNA, 23 nt, Artificial Sequence
  Chemically synthesized
uucguacacuaaacucuucuugc

SEQ ID NO: 43571 - RNA, 23 nt, Artificial Sequence
  Chemically synthesized
guucguacacuaaacucuucuug

SEQ ID NO: 43572 - RNA, 23 nt, Artificial Sequence
  Chemically synthesized
aguucguacacuaaacucuucuu

SEQ ID NO: 43573 - RNA, 23 nt, Artificial Sequence
  Chemically synthesized
agaaaccaagauagagcuacaaa

SEQ ID NO: 43574 - RNA, 23 nt, Artificial Sequence
  Chemically synthesized
cacacuauuguagaaaguauuau

SEQ ID NO: 43575 - RNA, 23 nt, Artificial Sequence
  Chemically synthesized
ucacacuauuguagaaaguauua

SEQ ID NO: 43576 - RNA, 23 nt, Artificial Sequence
  Chemically synthesized
aucacacuauuguagaaaguauu

SEQ ID NO: 43577 - RNA, 23 nt, Artificial Sequence
  Chemically synthesized
uaucacacuauuguagaaaguau

SEQ ID NO: 43578 - RNA, 23 nt, Artificial Sequence
  Chemically synthesized
auaucacacuauuguagaaagua

SEQ ID NO: 43579 - RNA, 23 nt, Artificial Sequence
  Chemically synthesized
gucuacugugaaaauuugguagu

SEQ ID NO: 43580 - RNA, 23 nt, Artificial Sequence
  Chemically synthesized
ugucuacugugaaaauuugguag

SEQ ID NO: 43581 - RNA, 23 nt, Artificial Sequence
  Chemically synthesized
augucuacugugaaaauuuggua

SEQ ID NO: 43582 - RNA, 23 nt, Artificial Sequence
  Chemically synthesized
cgucacuuguguuuauuuguucu

SEQ ID NO: 43583 - RNA, 23 nt, Artificial Sequence
  Chemically synthesized
acgucacuuguguuuauuuguuc

SEQ ID NO: 43584 - RNA, 23 nt, Artificial Sequence
  Chemically synthesized
cacgucacuuguguuuauuuguu

SEQ ID NO: 43585 - RNA, 23 nt, Artificial Sequence
  Chemically synthesized
ccacgucacuuguguuuauuugu

SEQ ID NO: 43586 - RNA, 23 nt, Artificial Sequence
  Chemically synthesized
gccacgucacuuguguuuauuug

SEQ ID NO: 43587 - RNA, 23 nt, Artificial Sequence
  Chemically synthesized
guggauuacuucugagcuugcaa

SEQ ID NO: 43588 - RNA, 23 nt, Artificial Sequence
  Chemically synthesized
aguggauuacuucugagcuugca

SEQ ID NO: 43589 - RNA, 23 nt, Artificial Sequence
  Chemically synthesized
uaguggauuacuucugagcuugc

SEQ ID NO: 43590 - RNA, 23 nt, Artificial Sequence
  Chemically synthesized
uuaguggauuacuucugagcuug

SEQ ID NO: 43591 - RNA, 23 nt, Artificial Sequence
  Chemically synthesized
guuaguggauuacuucugagcuu

SEQ ID NO: 43592 - RNA, 23 nt, Artificial Sequence
  Chemically synthesized
uuauaauggagacauggaaaaaa

SEQ ID NO: 43593 - RNA, 23 nt, Artificial Sequence
  Chemically synthesized
uuuauaauggagacauggaaaaa

SEQ ID NO: 43594 - RNA, 23 nt, Artificial Sequence
  Chemically synthesized
auuuauaauggagacauggaaaa

SEQ ID NO: 43595 - RNA, 23 nt, Artificial Sequence
  Chemically synthesized
uauuuauaauggagacauggaaa

SEQ ID NO: 43596 - RNA, 23 nt, Artificial Sequence
  Chemically synthesized
cuauuuauaauggagacauggaa

SEQ ID NO: 43597 - RNA, 23 nt, Artificial Sequence
  Chemically synthesized
ggauaugggauuggucaagucgg

SEQ ID NO: 43598 - RNA, 23 nt, Artificial Sequence
  Chemically synthesized
uggauaugggauuggucaagucg

SEQ ID NO: 43599 - RNA, 23 nt, Artificial Sequence
  Chemically synthesized
uuggauaugggauuggucaaguc

SEQ ID NO: 43600 - RNA, 23 nt, Artificial Sequence
  Chemically synthesized
auuggauaugggauuggucaagu

SEQ ID NO: 43601 - RNA, 23 nt, Artificial Sequence
  Chemically synthesized
gauuggauaugggauuggucaag

SEQ ID NO: 43602 - RNA, 23 nt, Artificial Sequence
  Chemically synthesized
ccuggguagaacugcacuucagc

SEQ ID NO: 43603 - RNA, 23 nt, Artificial Sequence
  Chemically synthesized
uccuggguagaacugcacuucag

SEQ ID NO: 43604 - RNA, 23 nt, Artificial Sequence
  Chemically synthesized
cuccuggguagaacugcacuuca

SEQ ID NO: 43605 - RNA, 23 nt, Artificial Sequence
  Chemically synthesized
gcuccuggguagaacugcacuuc

SEQ ID NO: 43606 - RNA, 23 nt, Artificial Sequence
  Chemically synthesized
ggcuccuggguagaacugcacuu

SEQ ID NO: 43607 - RNA, 23 nt, Artificial Sequence
  Chemically synthesized
cucagcuguacaguucguacacu

SEQ ID NO: 43608 - RNA, 23 nt, Artificial Sequence
  Chemically synthesized
acucagcuguacaguucguacac

SEQ ID NO: 43609 - RNA, 23 nt, Artificial Sequence
  Chemically synthesized
aacucagcuguacaguucguaca

SEQ ID NO: 43610 - RNA, 23 nt, Artificial Sequence
  Chemically synthesized
aaacucagcuguacaguucguac

SEQ ID NO: 43611 - RNA, 23 nt, Artificial Sequence
  Chemically synthesized
ucauaaucaacagaaaccaagau

SEQ ID NO: 43612 - RNA, 23 nt, Artificial Sequence
  Chemically synthesized
uucauaaucaacagaaaccaaga

SEQ ID NO: 43613 - RNA, 23 nt, Artificial Sequence
  Chemically synthesized
guucauaaucaacagaaaccaag

SEQ ID NO: 43614 - RNA, 23 nt, Artificial Sequence
  Chemically synthesized
uguucauaaucaacagaaaccaa

SEQ ID NO: 43615 - RNA, 23 nt, Artificial Sequence
  Chemically synthesized
uuguucauaaucaacagaaacca

SEQ ID NO: 43616 - RNA, 23 nt, Artificial Sequence
  Chemically synthesized
cacuuguguuuauuuguucugua

SEQ ID NO: 43617 - RNA, 23 nt, Artificial Sequence
  Chemically synthesized
ucacuuguguuuauuuguucugu

SEQ ID NO: 43618 - RNA, 23 nt, Artificial Sequence
  Chemically synthesized
gucacuuguguuuauuuguucug

SEQ ID NO: 43619 - RNA, 23 nt, Artificial Sequence
  Chemically synthesized
ggccacgucacuuguguuuauuu

SEQ ID NO: 43620 - RNA, 23 nt, Artificial Sequence
  Chemically synthesized
guucguuaguggauuacuucuga

SEQ ID NO: 43621 - RNA, 23 nt, Artificial Sequence
  Chemically synthesized
gguucguuaguggauuacuucug

SEQ ID NO: 43622 - RNA, 23 nt, Artificial Sequence
  Chemically synthesized
ugguucguuaguggauuacuucu

SEQ ID NO: 43623 - RNA, 23 nt, Artificial Sequence
  Chemically synthesized
uugguucguuaguggauuacuuc

SEQ ID NO: 43624 - RNA, 23 nt, Artificial Sequence
  Chemically synthesized
cuugguucguuaguggauuacuu

SEQ ID NO: 43625 - RNA, 23 nt, Artificial Sequence
  Chemically synthesized
acuugguucguuaguggauuacu

SEQ ID NO: 43626 - RNA, 23 nt, Artificial Sequence
  Chemically synthesized
gacuugguucguuaguggauuac

SEQ ID NO: 43627 - RNA, 23 nt, Artificial Sequence
  Chemically synthesized
ugacuugguucguuaguggauua

SEQ ID NO: 43628 - RNA, 23 nt, Artificial Sequence
  Chemically synthesized
ccucgguuucuauuuauaaugga

SEQ ID NO: 43629 - RNA, 23 nt, Artificial Sequence
  Chemically synthesized
guuccagccucgguuucuauuua

SEQ ID NO: 43630 - RNA, 23 nt, Artificial Sequence
  Chemically synthesized
uccucuuuaaacacccgaagcgc

SEQ ID NO: 43631 - RNA, 23 nt, Artificial Sequence
  Chemically synthesized
uuccucuuuaaacacccgaagcg

SEQ ID NO: 43632 - RNA, 23 nt, Artificial Sequence
  Chemically synthesized
guuccucuuuaaacacccgaagc

SEQ ID NO: 43633 - RNA, 23 nt, Artificial Sequence
  Chemically synthesized
aguuccucuuuaaacacccgaag

SEQ ID NO: 43634 - RNA, 23 nt, Artificial Sequence
  Chemically synthesized
gaguuccucuuuaaacacccgaa

SEQ ID NO: 43635 - RNA, 23 nt, Artificial Sequence
  Chemically synthesized
uuggucaagucggccggaaaaua

SEQ ID NO: 43636 - RNA, 23 nt, Artificial Sequence
  Chemically synthesized
ggaagaugauauugaaagaagga

SEQ ID NO: 43637 - RNA, 23 nt, Artificial Sequence
  Chemically synthesized
aggaagaugauauugaaagaagg

SEQ ID NO: 43638 - RNA, 23 nt, Artificial Sequence
  Chemically synthesized
gaggaagaugauauugaaagaag

SEQ ID NO: 43639 - RNA, 23 nt, Artificial Sequence
  Chemically synthesized
ugaggaagaugauauugaaagaa

SEQ ID NO: 43640 - RNA, 23 nt, Artificial Sequence
  Chemically synthesized
cugaggaagaugauauugaaaga

SEQ ID NO: 43641 - RNA, 23 nt, Artificial Sequence
  Chemically synthesized
cugaaacagauacccauagcauu

SEQ ID NO: 43642 - RNA, 23 nt, Artificial Sequence
  Chemically synthesized
ucugaaacagauacccauagcau

SEQ ID NO: 43643 - RNA, 23 nt, Artificial Sequence
  Chemically synthesized
uucugaaacagauacccauagca

SEQ ID NO: 43644 - RNA, 23 nt, Artificial Sequence
  Chemically synthesized
cuucugaaacagauacccauagc

SEQ ID NO: 43645 - RNA, 23 nt, Artificial Sequence
  Chemically synthesized
gcuucugaaacagauacccauag

SEQ ID NO: 43646 - RNA, 23 nt, Artificial Sequence
  Chemically synthesized
ccuuuguguucaacuuuugugug

SEQ ID NO: 43647 - RNA, 23 nt, Artificial Sequence
  Chemically synthesized
acacuaaacucuucuugcuuuug

SEQ ID NO: 43648 - RNA, 23 nt, Artificial Sequence
  Chemically synthesized
uacacuaaacucuucuugcuuuu

SEQ ID NO: 43649 - RNA, 23 nt, Artificial Sequence
  Chemically synthesized
guacacuaaacucuucuugcuuu

SEQ ID NO: 43650 - RNA, 23 nt, Artificial Sequence
  Chemically synthesized
caagauagagcuacaaacucagc

SEQ ID NO: 43651 - RNA, 23 nt, Artificial Sequence
  Chemically synthesized
cagaaaccaagauagagcuacaa

SEQ ID NO: 43652 - RNA, 23 nt, Artificial Sequence
  Chemically synthesized
gcaugucagacugauuaaugucu

SEQ ID NO: 43653 - RNA, 23 nt, Artificial Sequence
  Chemically synthesized
agcaugucagacugauuaauguc

SEQ ID NO: 43654 - RNA, 23 nt, Artificial Sequence
  Chemically synthesized
aagcaugucagacugauuaaugu

SEQ ID NO: 43655 - RNA, 23 nt, Artificial Sequence
  Chemically synthesized
uaagcaugucagacugauuaaug

SEQ ID NO: 43656 - RNA, 23 nt, Artificial Sequence
  Chemically synthesized
auaagcaugucagacugauuaau

SEQ ID NO: 43657 - RNA, 23 nt, Artificial Sequence
  Chemically synthesized
acaccuaugggaucaauaagcau

SEQ ID NO: 43658 - RNA, 23 nt, Artificial Sequence
  Chemically synthesized
uacaccuaugggaucaauaagca

SEQ ID NO: 43659 - RNA, 23 nt, Artificial Sequence
  Chemically synthesized
uuacaccuaugggaucaauaagc

SEQ ID NO: 43660 - RNA, 23 nt, Artificial Sequence
  Chemically synthesized
auuacaccuaugggaucaauaag

SEQ ID NO: 43661 - RNA, 23 nt, Artificial Sequence
  Chemically synthesized
aauuacaccuaugggaucaauaa

SEQ ID NO: 43662 - RNA, 23 nt, Artificial Sequence
  Chemically synthesized
uaauuacaccuaugggaucaaua

SEQ ID NO: 43663 - RNA, 23 nt, Artificial Sequence
  Chemically synthesized
auaauuacaccuaugggaucaau

SEQ ID NO: 43664 - RNA, 23 nt, Artificial Sequence
  Chemically synthesized
augcugcguuccuaauuuaguaa

SEQ ID NO: 43665 - RNA, 23 nt, Artificial Sequence
  Chemically synthesized
aaugcugcguuccuaauuuagua

SEQ ID NO: 43666 - RNA, 23 nt, Artificial Sequence
  Chemically synthesized
cacugaagagcuguuagauccug

SEQ ID NO: 43667 - RNA, 23 nt, Artificial Sequence
  Chemically synthesized
cugacuugguucguuaguggauu

SEQ ID NO: 43668 - RNA, 23 nt, Artificial Sequence
  Chemically synthesized
gagucugacuugguucguuagug

SEQ ID NO: 43669 - RNA, 23 nt, Artificial Sequence
  Chemically synthesized
ggagucugacuugguucguuagu

SEQ ID NO: 43670 - RNA, 23 nt, Artificial Sequence
  Chemically synthesized
uggagucugacuugguucguuag

SEQ ID NO: 43671 - RNA, 23 nt, Artificial Sequence
  Chemically synthesized
cuggagucugacuugguucguua

SEQ ID NO: 43672 - RNA, 23 nt, Artificial Sequence
  Chemically synthesized
acuggagucugacuugguucguu

SEQ ID NO: 43673 - RNA, 23 nt, Artificial Sequence
  Chemically synthesized
auuggucaagucggccggaaaau

SEQ ID NO: 43674 - RNA, 23 nt, Artificial Sequence
  Chemically synthesized
ucugaggaagaugauauugaaag

SEQ ID NO: 43675 - RNA, 23 nt, Artificial Sequence
  Chemically synthesized
gucugaggaagaugauauugaaa

SEQ ID NO: 43676 - RNA, 23 nt, Artificial Sequence
  Chemically synthesized
agucugaggaagaugauauugaa

SEQ ID NO: 43677 - RNA, 23 nt, Artificial Sequence
  Chemically synthesized
cagucugaggaagaugauauuga

SEQ ID NO: 43678 - RNA, 23 nt, Artificial Sequence
  Chemically synthesized
acagucugaggaagaugauauug

SEQ ID NO: 43679 - RNA, 23 nt, Artificial Sequence
  Chemically synthesized
cacagucugaggaagaugauauu

SEQ ID NO: 43680 - RNA, 23 nt, Artificial Sequence
  Chemically synthesized
ucacagucugaggaagaugauau

SEQ ID NO: 43681 - RNA, 23 nt, Artificial Sequence
  Chemically synthesized
cucacagucugaggaagaugaua

SEQ ID NO: 43682 - RNA, 23 nt, Artificial Sequence
  Chemically synthesized
gcucacagucugaggaagaugau

SEQ ID NO: 43683 - RNA, 23 nt, Artificial Sequence
  Chemically synthesized
gaaacagauacccauagcauugg

SEQ ID NO: 43684 - RNA, 23 nt, Artificial Sequence
  Chemically synthesized
ugaaacagauacccauagcauug

SEQ ID NO: 43685 - RNA, 23 nt, Artificial Sequence
  Chemically synthesized
auuguggccuuauauaucacacu

SEQ ID NO: 43686 - RNA, 23 nt, Artificial Sequence
  Chemically synthesized
ugauuaaugucuacugugaaaau

SEQ ID NO: 43687 - RNA, 23 nt, Artificial Sequence
  Chemically synthesized
cugauuaaugucuacugugaaaa

SEQ ID NO: 43688 - RNA, 23 nt, Artificial Sequence
  Chemically synthesized
acugauuaaugucuacugugaaa

SEQ ID NO: 43689 - RNA, 23 nt, Artificial Sequence
  Chemically synthesized
gacugauuaaugucuacugugaa

SEQ ID NO: 43690 - RNA, 23 nt, Artificial Sequence
  Chemically synthesized
agacugauuaaugucuacuguga

SEQ ID NO: 43691 - RNA, 23 nt, Artificial Sequence
  Chemically synthesized
guaaaugcugcguuccuaauuua

SEQ ID NO: 43692 - RNA, 23 nt, Artificial Sequence
  Chemically synthesized
uguaaaugcugcguuccuaauuu

SEQ ID NO: 43693 - RNA, 23 nt, Artificial Sequence
  Chemically synthesized
cuguaaaugcugcguuccuaauu

SEQ ID NO: 43694 - RNA, 23 nt, Artificial Sequence
  Chemically synthesized
ucuguaaaugcugcguuccuaau

SEQ ID NO: 43695 - RNA, 23 nt, Artificial Sequence
  Chemically synthesized
uucuguaaaugcugcguuccuaa

SEQ ID NO: 43696 - RNA, 23 nt, Artificial Sequence
  Chemically synthesized
guucuguaaaugcugcguuccua

SEQ ID NO: 43697 - RNA, 23 nt, Artificial Sequence
  Chemically synthesized
cguuaguggauuacuucugagcu

SEQ ID NO: 43698 - RNA, 23 nt, Artificial Sequence
  Chemically synthesized
ucguuaguggauuacuucugagc

SEQ ID NO: 43699 - RNA, 23 nt, Artificial Sequence
  Chemically synthesized
uucguuaguggauuacuucugag

SEQ ID NO: 43700 - RNA, 23 nt, Artificial Sequence
  Chemically synthesized
uugaagaaaaacucagauuggau

SEQ ID NO: 43701 - RNA, 23 nt, Artificial Sequence
  Chemically synthesized
cuugaagaaaaacucagauugga

SEQ ID NO: 43702 - RNA, 23 nt, Artificial Sequence
  Chemically synthesized
ucuugaagaaaaacucagauugg

SEQ ID NO: 43703 - RNA, 23 nt, Artificial Sequence
  Chemically synthesized
aucuugaagaaaaacucagauug

SEQ ID NO: 43704 - RNA, 23 nt, Artificial Sequence
  Chemically synthesized
gcaucuugaagaaaaacucagau

SEQ ID NO: 43705 - RNA, 23 nt, Artificial Sequence
  Chemically synthesized
agcaucuugaagaaaaacucaga

SEQ ID NO: 43706 - RNA, 23 nt, Artificial Sequence
  Chemically synthesized
aagcaucuugaagaaaaacucag

SEQ ID NO: 43707 - RNA, 23 nt, Artificial Sequence
  Chemically synthesized
aaagcaucuugaagaaaaacuca

SEQ ID NO: 43708 - RNA, 23 nt, Artificial Sequence
  Chemically synthesized
aaguugaaagcaucuugaagaaa

SEQ ID NO: 43709 - RNA, 23 nt, Artificial Sequence
  Chemically synthesized
gaaguugaaagcaucuugaagaa

SEQ ID NO: 43710 - RNA, 23 nt, Artificial Sequence
  Chemically synthesized
agaaguugaaagcaucuugaaga

SEQ ID NO: 43711 - RNA, 23 nt, Artificial Sequence
  Chemically synthesized
aagaaguugaaagcaucuugaag

SEQ ID NO: 43712 - RNA, 23 nt, Artificial Sequence
  Chemically synthesized
aaagaaguugaaagcaucuugaa

SEQ ID NO: 43713 - RNA, 23 nt, Artificial Sequence
  Chemically synthesized
gaaagaaguugaaagcaucuuga

SEQ ID NO: 43714 - RNA, 23 nt, Artificial Sequence
  Chemically synthesized
aagaaggaaagaaguugaaagca

SEQ ID NO: 43715 - RNA, 23 nt, Artificial Sequence
  Chemically synthesized
aaagaaggaaagaaguugaaagc

SEQ ID NO: 43716 - RNA, 23 nt, Artificial Sequence
  Chemically synthesized
gaaagaaggaaagaaguugaaag

SEQ ID NO: 43717 - RNA, 23 nt, Artificial Sequence
  Chemically synthesized
ugaaagaaggaaagaaguugaaa

SEQ ID NO: 43718 - RNA, 23 nt, Artificial Sequence
  Chemically synthesized
uugaaagaaggaaagaaguugaa

SEQ ID NO: 43719 - RNA, 23 nt, Artificial Sequence
  Chemically synthesized
agcucacagucugaggaagauga

SEQ ID NO: 43720 - RNA, 23 nt, Artificial Sequence
  Chemically synthesized
gcuuuugcauuauaaggaauuaa

SEQ ID NO: 43721 - RNA, 23 nt, Artificial Sequence
  Chemically synthesized
ugcuuuugcauuauaaggaauua

SEQ ID NO: 43722 - RNA, 23 nt, Artificial Sequence
  Chemically synthesized
uugcuuuugcauuauaaggaauu

SEQ ID NO: 43723 - RNA, 23 nt, Artificial Sequence
  Chemically synthesized
cuugcuuuugcauuauaaggaau

SEQ ID NO: 43724 - RNA, 23 nt, Artificial Sequence
  Chemically synthesized
ucuugcuuuugcauuauaaggaa

SEQ ID NO: 43725 - RNA, 23 nt, Artificial Sequence
  Chemically synthesized
cacuaaacucuucuugcuuuugc

SEQ ID NO: 43726 - RNA, 23 nt, Artificial Sequence
  Chemically synthesized
caguucguacacuaaacucuucu

SEQ ID NO: 43727 - RNA, 23 nt, Artificial Sequence
  Chemically synthesized
aucaacagaaaccaagauagagc

SEQ ID NO: 43728 - RNA, 23 nt, Artificial Sequence
  Chemically synthesized
aaucaacagaaaccaagauagag

SEQ ID NO: 43729 - RNA, 23 nt, Artificial Sequence
  Chemically synthesized
uaaucaacagaaaccaagauaga

SEQ ID NO: 43730 - RNA, 23 nt, Artificial Sequence
  Chemically synthesized
auaaucaacagaaaccaagauag

SEQ ID NO: 43731 - RNA, 23 nt, Artificial Sequence
  Chemically synthesized
cauaaucaacagaaaccaagaua

SEQ ID NO: 43732 - RNA, 23 nt, Artificial Sequence
  Chemically synthesized
gggaucaauaagcaugucagacu

SEQ ID NO: 43733 - RNA, 23 nt, Artificial Sequence
  Chemically synthesized
ugggaucaauaagcaugucagac

SEQ ID NO: 43734 - RNA, 23 nt, Artificial Sequence
  Chemically synthesized
augggaucaauaagcaugucaga

SEQ ID NO: 43735 - RNA, 23 nt, Artificial Sequence
  Chemically synthesized
uaugggaucaauaagcaugucag

SEQ ID NO: 43736 - RNA, 23 nt, Artificial Sequence
  Chemically synthesized
cuaugggaucaauaagcauguca

SEQ ID NO: 43737 - RNA, 23 nt, Artificial Sequence
  Chemically synthesized
aaaugcugcguuccuaauuuagu

SEQ ID NO: 43738 - RNA, 23 nt, Artificial Sequence
  Chemically synthesized
uaaaugcugcguuccuaauuuag

SEQ ID NO: 43739 - RNA, 23 nt, Artificial Sequence
  Chemically synthesized
uguucuguaaaugcugcguuccu

SEQ ID NO: 43740 - RNA, 23 nt, Artificial Sequence
  Chemically synthesized
uuguucuguaaaugcugcguucc

SEQ ID NO: 43741 - RNA, 23 nt, Artificial Sequence
  Chemically synthesized
uuuguucuguaaaugcugcguuc

SEQ ID NO: 43742 - RNA, 23 nt, Artificial Sequence
  Chemically synthesized
auuuguucuguaaaugcugcguu

SEQ ID NO: 43743 - RNA, 23 nt, Artificial Sequence
  Chemically synthesized
aacuggagucugacuugguucgu

SEQ ID NO: 43744 - RNA, 23 nt, Artificial Sequence
  Chemically synthesized
ggaucuauauuggaaggcgucug

SEQ ID NO: 43745 - RNA, 23 nt, Artificial Sequence
  Chemically synthesized
gggaucuauauuggaaggcgucu

SEQ ID NO: 43746 - RNA, 23 nt, Artificial Sequence
  Chemically synthesized
ggggaucuauauuggaaggcguc

SEQ ID NO: 43747 - RNA, 23 nt, Artificial Sequence
  Chemically synthesized
uggggaucuauauuggaaggcgu

SEQ ID NO: 43748 - RNA, 23 nt, Artificial Sequence
  Chemically synthesized
uuggggaucuauauuggaaggcg

SEQ ID NO: 43749 - RNA, 23 nt, Artificial Sequence
  Chemically synthesized
auuggggaucuauauuggaaggc

SEQ ID NO: 43750 - RNA, 23 nt, Artificial Sequence
  Chemically synthesized
cuggguagaacugcacuucagca

SEQ ID NO: 43751 - RNA, 23 nt, Artificial Sequence
  Chemically synthesized
cagauuggauaugggauugguca

SEQ ID NO: 43752 - RNA, 23 nt, Artificial Sequence
  Chemically synthesized
acuucagcaauaaugggaacggg

SEQ ID NO: 43753 - RNA, 23 nt, Artificial Sequence
  Chemically synthesized
cacuucagcaauaaugggaacgg

SEQ ID NO: 43754 - RNA, 23 nt, Artificial Sequence
  Chemically synthesized
gcacuucagcaauaaugggaacg

SEQ ID NO: 43755 - RNA, 23 nt, Artificial Sequence
  Chemically synthesized
ugcacuucagcaauaaugggaac

SEQ ID NO: 43756 - RNA, 23 nt, Artificial Sequence
  Chemically synthesized
cugcacuucagcaauaaugggaa

SEQ ID NO: 43757 - RNA, 23 nt, Artificial Sequence
  Chemically synthesized
caccacaagauaccaacagggcu

SEQ ID NO: 43758 - RNA, 23 nt, Artificial Sequence
  Chemically synthesized
acaccacaagauaccaacagggc

SEQ ID NO: 43759 - RNA, 23 nt, Artificial Sequence
  Chemically synthesized
gacaccacaagauaccaacaggg

SEQ ID NO: 43760 - RNA, 23 nt, Artificial Sequence
  Chemically synthesized
agacaccacaagauaccaacagg

SEQ ID NO: 43761 - RNA, 23 nt, Artificial Sequence
  Chemically synthesized
cagacaccacaagauaccaacag

SEQ ID NO: 43762 - RNA, 23 nt, Artificial Sequence
  Chemically synthesized
acagaaaccaagauagagcuaca

SEQ ID NO: 43763 - RNA, 23 nt, Artificial Sequence
  Chemically synthesized
aacagaaaccaagauagagcuac

SEQ ID NO: 43764 - RNA, 23 nt, Artificial Sequence
  Chemically synthesized
caacagaaaccaagauagagcua

SEQ ID NO: 43765 - RNA, 23 nt, Artificial Sequence
  Chemically synthesized
ggaugcagguugucuacuaaaga

SEQ ID NO: 43766 - RNA, 23 nt, Artificial Sequence
  Chemically synthesized
uggaugcagguugucuacuaaag

SEQ ID NO: 43767 - RNA, 23 nt, Artificial Sequence
  Chemically synthesized
auggaugcagguugucuacuaaa

SEQ ID NO: 43768 - RNA, 23 nt, Artificial Sequence
  Chemically synthesized
aauggaugcagguugucuacuaa

SEQ ID NO: 43769 - RNA, 23 nt, Artificial Sequence
  Chemically synthesized
aaauggaugcagguugucuacua

SEQ ID NO: 43770 - RNA, 23 nt, Artificial Sequence
  Chemically synthesized
gucaugauguguguuguauuuua

SEQ ID NO: 43771 - RNA, 23 nt, Artificial Sequence
  Chemically synthesized
agucaugauguguguuguauuuu

SEQ ID NO: 43772 - RNA, 23 nt, Artificial Sequence
  Chemically synthesized
uagucaugauguguguuguauuu

SEQ ID NO: 43773 - RNA, 23 nt, Artificial Sequence
  Chemically synthesized
cuagucaugauguguguuguauu

SEQ ID NO: 43774 - RNA, 23 nt, Artificial Sequence
  Chemically synthesized
acuagucaugauguguguuguau

SEQ ID NO: 43775 - RNA, 23 nt, Artificial Sequence
  Chemically synthesized
ggaucaauaagcaugucagacug

SEQ ID NO: 43776 - RNA, 23 nt, Artificial Sequence
  Chemically synthesized
cuucugagcuugcaacauagcuc

SEQ ID NO: 43777 - RNA, 23 nt, Artificial Sequence
  Chemically synthesized
acuucugagcuugcaacauagcu

SEQ ID NO: 43778 - RNA, 23 nt, Artificial Sequence
  Chemically synthesized
uacuucugagcuugcaacauagc

SEQ ID NO: 43779 - RNA, 23 nt, Artificial Sequence
  Chemically synthesized
uuacuucugagcuugcaacauag

SEQ ID NO: 43780 - RNA, 23 nt, Artificial Sequence
  Chemically synthesized
auuacuucugagcuugcaacaua

SEQ ID NO: 43781 - RNA, 23 nt, Artificial Sequence
  Chemically synthesized
agucugacuugguucguuagugg

SEQ ID NO: 43782 - RNA, 23 nt, Artificial Sequence
  Chemically synthesized
gaacuggagucugacuugguucg

SEQ ID NO: 43783 - RNA, 23 nt, Artificial Sequence
  Chemically synthesized
agaacuggagucugacuugguuc

SEQ ID NO: 43784 - RNA, 23 nt, Artificial Sequence
  Chemically synthesized
aagaacuggagucugacuugguu

SEQ ID NO: 43785 - RNA, 23 nt, Artificial Sequence
  Chemically synthesized
cgagcgucaugaagaaagggggc

SEQ ID NO: 43786 - RNA, 23 nt, Artificial Sequence
  Chemically synthesized
acgagcgucaugaagaaaggggg

SEQ ID NO: 43787 - RNA, 23 nt, Artificial Sequence
  Chemically synthesized
cacgagcgucaugaagaaagggg

SEQ ID NO: 43788 - RNA, 23 nt, Artificial Sequence
  Chemically synthesized
acacgagcgucaugaagaaaggg

SEQ ID NO: 43789 - RNA, 23 nt, Artificial Sequence
  Chemically synthesized
aacacgagcgucaugaagaaagg

SEQ ID NO: 43790 - RNA, 23 nt, Artificial Sequence
  Chemically synthesized
auugaaagaaggaaagaaguuga

SEQ ID NO: 43791 - RNA, 23 nt, Artificial Sequence
  Chemically synthesized
uauugaaagaaggaaagaaguug

SEQ ID NO: 43792 - RNA, 23 nt, Artificial Sequence
  Chemically synthesized
auauugaaagaaggaaagaaguu

SEQ ID NO: 43793 - RNA, 23 nt, Artificial Sequence
  Chemically synthesized
gugcuuuuaaaaucagcuuuauu

SEQ ID NO: 43794 - RNA, 23 nt, Artificial Sequence
  Chemically synthesized
ugugcuuuuaaaaucagcuuuau

SEQ ID NO: 43795 - RNA, 23 nt, Artificial Sequence
  Chemically synthesized
gugugcuuuuaaaaucagcuuua

SEQ ID NO: 43796 - RNA, 23 nt, Artificial Sequence
  Chemically synthesized
cucuuuaucacucugcauuggug

SEQ ID NO: 43797 - RNA, 23 nt, Artificial Sequence
  Chemically synthesized
ccucuuuaucacucugcauuggu

SEQ ID NO: 43798 - RNA, 23 nt, Artificial Sequence
  Chemically synthesized
uccucuuuaucacucugcauugg

SEQ ID NO: 43799 - RNA, 23 nt, Artificial Sequence
  Chemically synthesized
uuccucuuuaucacucugcauug

SEQ ID NO: 43800 - RNA, 23 nt, Artificial Sequence
  Chemically synthesized
uuuccucuuuaucacucugcauu

SEQ ID NO: 43801 - RNA, 23 nt, Artificial Sequence
  Chemically synthesized
uauuguggccuuauauaucacac

SEQ ID NO: 43802 - RNA, 23 nt, Artificial Sequence
  Chemically synthesized
caugauguguguuguauuuuaaa

SEQ ID NO: 43803 - RNA, 23 nt, Artificial Sequence
  Chemically synthesized
ucaugauguguguuguauuuuaa

SEQ ID NO: 43804 - RNA, 23 nt, Artificial Sequence
  Chemically synthesized
uacuagucaugauguguguugua

SEQ ID NO: 43805 - RNA, 23 nt, Artificial Sequence
  Chemically synthesized
auacuagucaugauguguguugu

SEQ ID NO: 43806 - RNA, 23 nt, Artificial Sequence
  Chemically synthesized
uauacuagucaugauguguguug

SEQ ID NO: 43807 - RNA, 23 nt, Artificial Sequence
  Chemically synthesized
cagacugauuaaugucuacugug

SEQ ID NO: 43808 - RNA, 23 nt, Artificial Sequence
  Chemically synthesized
ucagacugauuaaugucuacugu

SEQ ID NO: 43809 - RNA, 23 nt, Artificial Sequence
  Chemically synthesized
ccuaugggaucaauaagcauguc

SEQ ID NO: 43810 - RNA, 23 nt, Artificial Sequence
  Chemically synthesized
accuaugggaucaauaagcaugu

SEQ ID NO: 43811 - RNA, 23 nt, Artificial Sequence
  Chemically synthesized
caccuaugggaucaauaagcaug

SEQ ID NO: 43812 - RNA, 23 nt, Artificial Sequence
  Chemically synthesized
cuuguguuuauuuguucuguaaa

SEQ ID NO: 43813 - RNA, 23 nt, Artificial Sequence
  Chemically synthesized
acuuguguuuauuuguucuguaa

SEQ ID NO: 43814 - RNA, 23 nt, Artificial Sequence
  Chemically synthesized
ggauuacuucugagcuugcaaca

SEQ ID NO: 43815 - RNA, 23 nt, Artificial Sequence
  Chemically synthesized
uggauuacuucugagcuugcaac

SEQ ID NO: 43816 - RNA, 23 nt, Artificial Sequence
  Chemically synthesized
ucugacuugguucguuaguggau

SEQ ID NO: 43817 - RNA, 23 nt, Artificial Sequence
  Chemically synthesized
gucugacuugguucguuagugga

SEQ ID NO: 43818 - RNA, 23 nt, Artificial Sequence
  Chemically synthesized
agauuggauaugggauuggucaa

SEQ ID NO: 43819 - RNA, 23 nt, Artificial Sequence
  Chemically synthesized
ucagcuuuauucuaagcaaaucu

SEQ ID NO: 43820 - RNA, 23 nt, Artificial Sequence
  Chemically synthesized
aucagcuuuauucuaagcaaauc

SEQ ID NO: 43821 - RNA, 23 nt, Artificial Sequence
  Chemically synthesized
aaucagcuuuauucuaagcaaau

SEQ ID NO: 43822 - RNA, 23 nt, Artificial Sequence
  Chemically synthesized
aaaucagcuuuauucuaagcaaa

SEQ ID NO: 43823 - RNA, 23 nt, Artificial Sequence
  Chemically synthesized
aaaaucagcuuuauucuaagcaa

SEQ ID NO: 43824 - RNA, 23 nt, Artificial Sequence
  Chemically synthesized
cuacucaguaucuuuuccucuuu

SEQ ID NO: 43825 - RNA, 23 nt, Artificial Sequence
  Chemically synthesized
ccuacucaguaucuuuuccucuu

SEQ ID NO: 43826 - RNA, 23 nt, Artificial Sequence
  Chemically synthesized
accuacucaguaucuuuuccucu

SEQ ID NO: 43827 - RNA, 23 nt, Artificial Sequence
  Chemically synthesized
caccuacucaguaucuuuuccuc

SEQ ID NO: 43828 - RNA, 23 nt, Artificial Sequence
  Chemically synthesized
gcaccuacucaguaucuuuuccu

SEQ ID NO: 43829 - RNA, 23 nt, Artificial Sequence
  Chemically synthesized
ucaacagaaaccaagauagagcu

SEQ ID NO: 43830 - RNA, 23 nt, Artificial Sequence
  Chemically synthesized
cuauauuggaaggcgucugacaa

SEQ ID NO: 43831 - RNA, 23 nt, Artificial Sequence
  Chemically synthesized
ucuauauuggaaggcgucugaca

SEQ ID NO: 43832 - RNA, 23 nt, Artificial Sequence
  Chemically synthesized
aucuauauuggaaggcgucugac

SEQ ID NO: 43833 - RNA, 23 nt, Artificial Sequence
  Chemically synthesized
gaucuauauuggaaggcgucuga

SEQ ID NO: 43834 - RNA, 23 nt, Artificial Sequence
  Chemically synthesized
ucucucauuugcuggccaucgga

SEQ ID NO: 43835 - RNA, 23 nt, Artificial Sequence
  Chemically synthesized
cucucucauuugcuggccaucgg

SEQ ID NO: 43836 - RNA, 23 nt, Artificial Sequence
  Chemically synthesized
gcucucucauuugcuggccaucg

SEQ ID NO: 43837 - RNA, 23 nt, Artificial Sequence
  Chemically synthesized
ugcucucucauuugcuggccauc

SEQ ID NO: 43838 - RNA, 23 nt, Artificial Sequence
  Chemically synthesized
cugcucucucauuugcuggccau

SEQ ID NO: 43839 - RNA, 23 nt, Artificial Sequence
  Chemically synthesized
gaacacgagcgucaugaagaaag

SEQ ID NO: 43840 - RNA, 23 nt, Artificial Sequence
  Chemically synthesized
uuggagagaaaaacagcucacag

SEQ ID NO: 43841 - RNA, 23 nt, Artificial Sequence
  Chemically synthesized
auuggagagaaaaacagcucaca

SEQ ID NO: 43842 - RNA, 23 nt, Artificial Sequence
  Chemically synthesized
cauuggagagaaaaacagcucac

SEQ ID NO: 43843 - RNA, 23 nt, Artificial Sequence
  Chemically synthesized
gcauuggagagaaaaacagcuca

SEQ ID NO: 43844 - RNA, 23 nt, Artificial Sequence
  Chemically synthesized
agcauuggagagaaaaacagcuc

SEQ ID NO: 43845 - RNA, 23 nt, Artificial Sequence
  Chemically synthesized
uagcauuggagagaaaaacagcu

SEQ ID NO: 43846 - RNA, 23 nt, Artificial Sequence
  Chemically synthesized
auagcauuggagagaaaaacagc

SEQ ID NO: 43847 - RNA, 23 nt, Artificial Sequence
  Chemically synthesized
cauagcauuggagagaaaaacag

SEQ ID NO: 43848 - RNA, 23 nt, Artificial Sequence
  Chemically synthesized
cagcuuuauucuaagcaaaucug

SEQ ID NO: 43849 - RNA, 23 nt, Artificial Sequence
  Chemically synthesized
guaucuuuuccucuuuaucacuc

SEQ ID NO: 43850 - RNA, 23 nt, Artificial Sequence
  Chemically synthesized
aguaucuuuuccucuuuaucacu

SEQ ID NO: 43851 - RNA, 23 nt, Artificial Sequence
  Chemically synthesized
caguaucuuuuccucuuuaucac

SEQ ID NO: 43852 - RNA, 23 nt, Artificial Sequence
  Chemically synthesized
ucaguaucuuuuccucuuuauca

SEQ ID NO: 43853 - RNA, 23 nt, Artificial Sequence
  Chemically synthesized
cucaguaucuuuuccucuuuauc

SEQ ID NO: 43854 - RNA, 23 nt, Artificial Sequence
  Chemically synthesized
aaugucuacugugaaaauuuggu

SEQ ID NO: 43855 - RNA, 23 nt, Artificial Sequence
  Chemically synthesized
uaaugucuacugugaaaauuugg

SEQ ID NO: 43856 - RNA, 23 nt, Artificial Sequence
  Chemically synthesized
uuaaugucuacugugaaaauuug

SEQ ID NO: 43857 - RNA, 23 nt, Artificial Sequence
  Chemically synthesized
aauaagcaugucagacugauuaa

SEQ ID NO: 43858 - RNA, 23 nt, Artificial Sequence
  Chemically synthesized
ucaauaagcaugucagacugauu

SEQ ID NO: 43859 - RNA, 23 nt, Artificial Sequence
  Chemically synthesized
aucaauaagcaugucagacugau

SEQ ID NO: 43860 - RNA, 23 nt, Artificial Sequence
  Chemically synthesized
gaucaauaagcaugucagacuga

SEQ ID NO: 43861 - RNA, 23 nt, Artificial Sequence
  Chemically synthesized
gcugcucucucauuugcuggcca

SEQ ID NO: 43862 - RNA, 23 nt, Artificial Sequence
  Chemically synthesized
gcaaaucugugucuacuuuaaaa

SEQ ID NO: 43863 - RNA, 23 nt, Artificial Sequence
  Chemically synthesized
agcaaaucugugucuacuuuaaa

SEQ ID NO: 43864 - RNA, 23 nt, Artificial Sequence
  Chemically synthesized
aagcaaaucugugucuacuuuaa

SEQ ID NO: 43865 - RNA, 23 nt, Artificial Sequence
  Chemically synthesized
uaagcaaaucugugucuacuuua

SEQ ID NO: 43866 - RNA, 23 nt, Artificial Sequence
  Chemically synthesized
uuuuccucuuuaucacucugcau

SEQ ID NO: 43867 - RNA, 23 nt, Artificial Sequence
  Chemically synthesized
caauaagcaugucagacugauua

SEQ ID NO: 43868 - RNA, 23 nt, Artificial Sequence
  Chemically synthesized
agaugauauugaaagaaggaaag

SEQ ID NO: 43869 - RNA, 23 nt, Artificial Sequence
  Chemically synthesized
aagaugauauugaaagaaggaaa

SEQ ID NO: 43870 - RNA, 23 nt, Artificial Sequence
  Chemically synthesized
gaagaugauauugaaagaaggaa

SEQ ID NO: 43871 - RNA, 23 nt, Artificial Sequence
  Chemically synthesized
acucaguaucuuuuccucuuuau

SEQ ID NO: 43872 - RNA, 23 nt, Artificial Sequence
  Chemically synthesized
uacucaguaucuuuuccucuuua

SEQ ID NO: 43873 - RNA, 23 nt, Artificial Sequence
  Chemically synthesized
cauauucucugcagaauuucuga

SEQ ID NO: 43874 - RNA, 23 nt, Artificial Sequence
  Chemically synthesized
gcauauucucugcagaauuucug

SEQ ID NO: 43875 - RNA, 23 nt, Artificial Sequence
  Chemically synthesized
ggcauauucucugcagaauuucu

SEQ ID NO: 43876 - RNA, 23 nt, Artificial Sequence
  Chemically synthesized
gggcauauucucugcagaauuuc

SEQ ID NO: 43877 - RNA, 23 nt, Artificial Sequence
  Chemically synthesized
ggggcauauucucugcagaauuu

SEQ ID NO: 43878 - RNA, 23 nt, Artificial Sequence
  Chemically synthesized
gggggcauauucucugcagaauu

SEQ ID NO: 43879 - RNA, 23 nt, Artificial Sequence
  Chemically synthesized
agggggcauauucucugcagaau

SEQ ID NO: 43880 - RNA, 23 nt, Artificial Sequence
  Chemically synthesized
aagggggcauauucucugcagaa

SEQ ID NO: 43881 - RNA, 23 nt, Artificial Sequence
  Chemically synthesized
cuuuuccucuuuaucacucugca

SEQ ID NO: 43882 - RNA, 23 nt, Artificial Sequence
  Chemically synthesized
cgguuucuauuuauaauggagac

SEQ ID NO: 43883 - RNA, 23 nt, Artificial Sequence
  Chemically synthesized
ucgguuucuauuuauaauggaga

SEQ ID NO: 43884 - RNA, 23 nt, Artificial Sequence
  Chemically synthesized
cucgguuucuauuuauaauggag

SEQ ID NO: 43885 - RNA, 23 nt, Artificial Sequence
  Chemically synthesized
ugcagaauuucugaaaguuuucc

SEQ ID NO: 43886 - RNA, 23 nt, Artificial Sequence
  Chemically synthesized
cugcagaauuucugaaaguuuuc

SEQ ID NO: 43887 - RNA, 23 nt, Artificial Sequence
  Chemically synthesized
ucugcagaauuucugaaaguuuu

SEQ ID NO: 43888 - RNA, 23 nt, Artificial Sequence
  Chemically synthesized
cucugcagaauuucugaaaguuu

SEQ ID NO: 43889 - RNA, 23 nt, Artificial Sequence
  Chemically synthesized
ucucugcagaauuucugaaaguu

SEQ ID NO: 43890 - RNA, 23 nt, Artificial Sequence
  Chemically synthesized
ccaaggaguuccucuuuaaacac

SEQ ID NO: 43891 - RNA, 23 nt, Artificial Sequence
  Chemically synthesized
cccaaggaguuccucuuuaaaca

SEQ ID NO: 43892 - RNA, 23 nt, Artificial Sequence
  Chemically synthesized
ccccaaggaguuccucuuuaaac

SEQ ID NO: 43893 - RNA, 23 nt, Artificial Sequence
  Chemically synthesized
cccccaaggaguuccucuuuaaa

SEQ ID NO: 43894 - RNA, 23 nt, Artificial Sequence
  Chemically synthesized
ccccccaaggaguuccucuuuaa

SEQ ID NO: 43895 - RNA, 23 nt, Artificial Sequence
  Chemically synthesized
uccccccaaggaguuccucuuua

SEQ ID NO: 43896 - RNA, 23 nt, Artificial Sequence
  Chemically synthesized
uauaaggaauuaagucuccgauu

SEQ ID NO: 43897 - RNA, 23 nt, Artificial Sequence
  Chemically synthesized
uuauaaggaauuaagucuccgau

SEQ ID NO: 43898 - RNA, 23 nt, Artificial Sequence
  Chemically synthesized
uucucugcagaauuucugaaagu

SEQ ID NO: 43899 - RNA, 23 nt, Artificial Sequence
  Chemically synthesized
cagcucacagucugaggaagaug

SEQ ID NO: 43900 - RNA, 23 nt, Artificial Sequence
  Chemically synthesized
acagcucacagucugaggaagau

SEQ ID NO: 43901 - RNA, 23 nt, Artificial Sequence
  Chemically synthesized
aacagcucacagucugaggaaga

SEQ ID NO: 43902 - RNA, 23 nt, Artificial Sequence
  Chemically synthesized
aaacagcucacagucugaggaag

SEQ ID NO: 43903 - RNA, 23 nt, Artificial Sequence
  Chemically synthesized
aaaacagcucacagucugaggaa

SEQ ID NO: 43904 - RNA, 23 nt, Artificial Sequence
  Chemically synthesized
aaaaacagcucacagucugagga

SEQ ID NO: 43905 - RNA, 23 nt, Artificial Sequence
  Chemically synthesized
ccauagcauuggagagaaaaaca

SEQ ID NO: 43906 - RNA, 23 nt, Artificial Sequence
  Chemically synthesized
cccauagcauuggagagaaaaac

SEQ ID NO: 43907 - RNA, 23 nt, Artificial Sequence
  Chemically synthesized
acccauagcauuggagagaaaaa

SEQ ID NO: 43908 - RNA, 23 nt, Artificial Sequence
  Chemically synthesized
uacccauagcauuggagagaaaa

SEQ ID NO: 43909 - RNA, 23 nt, Artificial Sequence
  Chemically synthesized
auacccauagcauuggagagaaa

SEQ ID NO: 43910 - RNA, 23 nt, Artificial Sequence
  Chemically synthesized
cuaaacucuucuugcuuuugcau

SEQ ID NO: 43911 - RNA, 23 nt, Artificial Sequence
  Chemically synthesized
acuaaacucuucuugcuuuugca

SEQ ID NO: 43912 - RNA, 23 nt, Artificial Sequence
  Chemically synthesized
agacacuaaaaucauguugaucu

SEQ ID NO: 43913 - RNA, 23 nt, Artificial Sequence
  Chemically synthesized
uagacacuaaaaucauguugauc

SEQ ID NO: 43914 - RNA, 23 nt, Artificial Sequence
  Chemically synthesized
auagacacuaaaaucauguugau

SEQ ID NO: 43915 - RNA, 23 nt, Artificial Sequence
  Chemically synthesized
aauagacacuaaaaucauguuga

SEQ ID NO: 43916 - RNA, 23 nt, Artificial Sequence
  Chemically synthesized
gaauagacacuaaaaucauguug

SEQ ID NO: 43917 - RNA, 23 nt, Artificial Sequence
  Chemically synthesized
uggccacgucacuuguguuuauu

SEQ ID NO: 43918 - RNA, 23 nt, Artificial Sequence
  Chemically synthesized
guggccacgucacuuguguuuau

SEQ ID NO: 43919 - RNA, 23 nt, Artificial Sequence
  Chemically synthesized
gguggccacgucacuuguguuua

SEQ ID NO: 43920 - RNA, 23 nt, Artificial Sequence
  Chemically synthesized
ggguggccacgucacuuguguuu

SEQ ID NO: 43921 - RNA, 23 nt, Artificial Sequence
  Chemically synthesized
accuuuugaugaagaacuggagu

SEQ ID NO: 43922 - RNA, 23 nt, Artificial Sequence
  Chemically synthesized
caccuuuugaugaagaacuggag

SEQ ID NO: 43923 - RNA, 23 nt, Artificial Sequence
  Chemically synthesized
gcaccuuuugaugaagaacugga

SEQ ID NO: 43924 - RNA, 23 nt, Artificial Sequence
  Chemically synthesized
agcaccuuuugaugaagaacugg

SEQ ID NO: 43925 - RNA, 23 nt, Artificial Sequence
  Chemically synthesized
cagcaccuuuugaugaagaacug

SEQ ID NO: 43926 - RNA, 23 nt, Artificial Sequence
  Chemically synthesized
gcagaauuucugaaaguuuuccu

SEQ ID NO: 43927 - RNA, 23 nt, Artificial Sequence
  Chemically synthesized
agucuccgauuauuaggugauca

SEQ ID NO: 43928 - RNA, 23 nt, Artificial Sequence
  Chemically synthesized
aagucuccgauuauuaggugauc

SEQ ID NO: 43929 - RNA, 23 nt, Artificial Sequence
  Chemically synthesized
cuucuugcuuuugcauuauaagg

SEQ ID NO: 43930 - RNA, 23 nt, Artificial Sequence
  Chemically synthesized
ucuucuugcuuuugcauuauaag

SEQ ID NO: 43931 - RNA, 23 nt, Artificial Sequence
  Chemically synthesized
cucuucuugcuuuugcauuauaa

SEQ ID NO: 43932 - RNA, 23 nt, Artificial Sequence
  Chemically synthesized
acucuucuugcuuuugcauuaua

SEQ ID NO: 43933 - RNA, 23 nt, Artificial Sequence
  Chemically synthesized
aacucuucuugcuuuugcauuau

SEQ ID NO: 43934 - RNA, 23 nt, Artificial Sequence
  Chemically synthesized
caaaauaaauauuguggccuuau

SEQ ID NO: 43935 - RNA, 23 nt, Artificial Sequence
  Chemically synthesized
ccaaaauaaauauuguggccuua

SEQ ID NO: 43936 - RNA, 23 nt, Artificial Sequence
  Chemically synthesized
uccaaaauaaauauuguggccuu

SEQ ID NO: 43937 - RNA, 23 nt, Artificial Sequence
  Chemically synthesized
guccaaaauaaauauuguggccu

SEQ ID NO: 43938 - RNA, 23 nt, Artificial Sequence
  Chemically synthesized
uguccaaaauaaauauuguggcc

SEQ ID NO: 43939 - RNA, 23 nt, Artificial Sequence
  Chemically synthesized
gaagagcuguuagauccuggggu

SEQ ID NO: 43940 - RNA, 23 nt, Artificial Sequence
  Chemically synthesized
ugaagagcuguuagauccugggg

SEQ ID NO: 43941 - RNA, 23 nt, Artificial Sequence
  Chemically synthesized
cugaagagcuguuagauccuggg

SEQ ID NO: 43942 - RNA, 23 nt, Artificial Sequence
  Chemically synthesized
acugaagagcuguuagauccugg

SEQ ID NO: 43943 - RNA, 23 nt, Artificial Sequence
  Chemically synthesized
caagauaccaacagggcuucuga

SEQ ID NO: 43944 - RNA, 23 nt, Artificial Sequence
  Chemically synthesized
acaagauaccaacagggcuucug

SEQ ID NO: 43945 - RNA, 23 nt, Artificial Sequence
  Chemically synthesized
cacaagauaccaacagggcuucu

SEQ ID NO: 43946 - RNA, 23 nt, Artificial Sequence
  Chemically synthesized
ccacaagauaccaacagggcuuc

SEQ ID NO: 43947 - RNA, 23 nt, Artificial Sequence
  Chemically synthesized
accacaagauaccaacagggcuu

SEQ ID NO: 43948 - RNA, 23 nt, Artificial Sequence
  Chemically synthesized
ggcaccuacucaguaucuuuucc

SEQ ID NO: 43949 - RNA, 23 nt, Artificial Sequence
  Chemically synthesized
aggcaccuacucaguaucuuuuc

SEQ ID NO: 43950 - RNA, 23 nt, Artificial Sequence
  Chemically synthesized
aaggcaccuacucaguaucuuuu

SEQ ID NO: 43951 - RNA, 23 nt, Artificial Sequence
  Chemically synthesized
gaaggcaccuacucaguaucuuu

SEQ ID NO: 43952 - RNA, 23 nt, Artificial Sequence
  Chemically synthesized
ugaaggcaccuacucaguaucuu

SEQ ID NO: 43953 - RNA, 23 nt, Artificial Sequence
  Chemically synthesized
caagagcucucacugugacagcc

SEQ ID NO: 43954 - RNA, 23 nt, Artificial Sequence
  Chemically synthesized
ccaagagcucucacugugacagc

SEQ ID NO: 43955 - RNA, 23 nt, Artificial Sequence
  Chemically synthesized
uccaagagcucucacugugacag

SEQ ID NO: 43956 - RNA, 23 nt, Artificial Sequence
  Chemically synthesized
cuccaagagcucucacugugaca

SEQ ID NO: 43957 - RNA, 23 nt, Artificial Sequence
  Chemically synthesized
gcuccaagagcucucacugugac

SEQ ID NO: 43958 - RNA, 23 nt, Artificial Sequence
  Chemically synthesized
agcuccaagagcucucacuguga

SEQ ID NO: 43959 - RNA, 23 nt, Artificial Sequence
  Chemically synthesized
aaacucuucuugcuuuugcauua

SEQ ID NO: 43960 - RNA, 23 nt, Artificial Sequence
  Chemically synthesized
guacaguucguacacuaaacucu

SEQ ID NO: 43961 - RNA, 23 nt, Artificial Sequence
  Chemically synthesized
uguacaguucguacacuaaacuc

SEQ ID NO: 43962 - RNA, 23 nt, Artificial Sequence
  Chemically synthesized
cuguacaguucguacacuaaacu

SEQ ID NO: 43963 - RNA, 23 nt, Artificial Sequence
  Chemically synthesized
gcuguacaguucguacacuaaac

SEQ ID NO: 43964 - RNA, 23 nt, Artificial Sequence
  Chemically synthesized
agcuguacaguucguacacuaaa

SEQ ID NO: 43965 - RNA, 23 nt, Artificial Sequence
  Chemically synthesized
ucagcugaaguacuuuauauuuc

SEQ ID NO: 43966 - RNA, 23 nt, Artificial Sequence
  Chemically synthesized
uucagcugaaguacuuuauauuu

SEQ ID NO: 43967 - RNA, 23 nt, Artificial Sequence
  Chemically synthesized
auucagcugaaguacuuuauauu

SEQ ID NO: 43968 - RNA, 23 nt, Artificial Sequence
  Chemically synthesized
aauucagcugaaguacuuuauau

SEQ ID NO: 43969 - RNA, 23 nt, Artificial Sequence
  Chemically synthesized
uaauucagcugaaguacuuuaua

SEQ ID NO: 43970 - RNA, 23 nt, Artificial Sequence
  Chemically synthesized
ugaugaagaacuggagucugacu

SEQ ID NO: 43971 - RNA, 23 nt, Artificial Sequence
  Chemically synthesized
uugaugaagaacuggagucugac

SEQ ID NO: 43972 - RNA, 23 nt, Artificial Sequence
  Chemically synthesized
uuugaugaagaacuggagucuga

SEQ ID NO: 43973 - RNA, 23 nt, Artificial Sequence
  Chemically synthesized
uuuugaugaagaacuggagucug

SEQ ID NO: 43974 - RNA, 23 nt, Artificial Sequence
  Chemically synthesized
cuuuugaugaagaacuggagucu

SEQ ID NO: 43975 - RNA, 23 nt, Artificial Sequence
  Chemically synthesized
ccagcaccuuuugaugaagaacu

SEQ ID NO: 43976 - RNA, 23 nt, Artificial Sequence
  Chemically synthesized
accagcaccuuuugaugaagaac

SEQ ID NO: 43977 - RNA, 23 nt, Artificial Sequence
  Chemically synthesized
caccagcaccuuuugaugaagaa

SEQ ID NO: 43978 - RNA, 23 nt, Artificial Sequence
  Chemically synthesized
ccaccagcaccuuuugaugaaga

SEQ ID NO: 43979 - RNA, 23 nt, Artificial Sequence
  Chemically synthesized
uccaccagcaccuuuugaugaag

SEQ ID NO: 43980 - RNA, 23 nt, Artificial Sequence
  Chemically synthesized
cuccaccagcaccuuuugaugaa

SEQ ID NO: 43981 - RNA, 23 nt, Artificial Sequence
  Chemically synthesized
cugaaaguuuuccuuccaucucu

SEQ ID NO: 43982 - RNA, 23 nt, Artificial Sequence
  Chemically synthesized
ucugaaaguuuuccuuccaucuc

SEQ ID NO: 43983 - RNA, 23 nt, Artificial Sequence
  Chemically synthesized
uucugaaaguuuuccuuccaucu

SEQ ID NO: 43984 - RNA, 23 nt, Artificial Sequence
  Chemically synthesized
uuucugaaaguuuuccuuccauc

SEQ ID NO: 43985 - RNA, 23 nt, Artificial Sequence
  Chemically synthesized
auuucugaaaguuuuccuuccau

SEQ ID NO: 43986 - RNA, 23 nt, Artificial Sequence
  Chemically synthesized
auucucugcagaauuucugaaag

SEQ ID NO: 43987 - RNA, 23 nt, Artificial Sequence
  Chemically synthesized
uauucucugcagaauuucugaaa

SEQ ID NO: 43988 - RNA, 23 nt, Artificial Sequence
  Chemically synthesized
auauucucugcagaauuucugaa

SEQ ID NO: 43989 - RNA, 23 nt, Artificial Sequence
  Chemically synthesized
gauacccauagcauuggagagaa

SEQ ID NO: 43990 - RNA, 23 nt, Artificial Sequence
  Chemically synthesized
caacagggcuucugaaacagaua

SEQ ID NO: 43991 - RNA, 23 nt, Artificial Sequence
  Chemically synthesized
ccaacagggcuucugaaacagau

SEQ ID NO: 43992 - RNA, 23 nt, Artificial Sequence
  Chemically synthesized
accaacagggcuucugaaacaga

SEQ ID NO: 43993 - RNA, 23 nt, Artificial Sequence
  Chemically synthesized
uaccaacagggcuucugaaacag

SEQ ID NO: 43994 - RNA, 23 nt, Artificial Sequence
  Chemically synthesized
auaccaacagggcuucugaaaca

SEQ ID NO: 43995 - RNA, 23 nt, Artificial Sequence
  Chemically synthesized
gcuuuauucuaagcaaaucugug

SEQ ID NO: 43996 - RNA, 23 nt, Artificial Sequence
  Chemically synthesized
agcuuuauucuaagcaaaucugu

SEQ ID NO: 43997 - RNA, 23 nt, Artificial Sequence
  Chemically synthesized
cccuggaugaucaguuuucugcu

SEQ ID NO: 43998 - RNA, 23 nt, Artificial Sequence
  Chemically synthesized
acccuggaugaucaguuuucugc

SEQ ID NO: 43999 - RNA, 23 nt, Artificial Sequence
  Chemically synthesized
cacccuggaugaucaguuuucug

SEQ ID NO: 44000 - RNA, 23 nt, Artificial Sequence
  Chemically synthesized
ucacccuggaugaucaguuuucu

SEQ ID NO: 44001 - RNA, 23 nt, Artificial Sequence
  Chemically synthesized
aucacccuggaugaucaguuuuc

SEQ ID NO: 44002 - RNA, 23 nt, Artificial Sequence
  Chemically synthesized
gaucacccuggaugaucaguuuu

SEQ ID NO: 44003 - RNA, 23 nt, Artificial Sequence
  Chemically synthesized
ugaucacccuggaugaucaguuu

SEQ ID NO: 44004 - RNA, 23 nt, Artificial Sequence
  Chemically synthesized
gugaucacccuggaugaucaguu

SEQ ID NO: 44005 - RNA, 23 nt, Artificial Sequence
  Chemically synthesized
ugcaaccuuaauucagcugaagu

SEQ ID NO: 44006 - RNA, 23 nt, Artificial Sequence
  Chemically synthesized
cugcaaccuuaauucagcugaag

SEQ ID NO: 44007 - RNA, 23 nt, Artificial Sequence
  Chemically synthesized
ucugcaaccuuaauucagcugaa

SEQ ID NO: 44008 - RNA, 23 nt, Artificial Sequence
  Chemically synthesized
cucugcugcucucucauuugcug

SEQ ID NO: 44009 - RNA, 23 nt, Artificial Sequence
  Chemically synthesized
ucucugcugcucucucauuugcu

SEQ ID NO: 44010 - RNA, 23 nt, Artificial Sequence
  Chemically synthesized
aucucugcugcucucucauuugc

SEQ ID NO: 44011 - RNA, 23 nt, Artificial Sequence
  Chemically synthesized
caucucugcugcucucucauuug

SEQ ID NO: 44012 - RNA, 23 nt, Artificial Sequence
  Chemically synthesized
ccaucucugcugcucucucauuu

SEQ ID NO: 44013 - RNA, 23 nt, Artificial Sequence
  Chemically synthesized
ggaacacgagcgucaugaagaaa

SEQ ID NO: 44014 - RNA, 23 nt, Artificial Sequence
  Chemically synthesized
aggaacacgagcgucaugaagaa

SEQ ID NO: 44015 - RNA, 23 nt, Artificial Sequence
  Chemically synthesized
gaggaacacgagcgucaugaaga

SEQ ID NO: 44016 - RNA, 23 nt, Artificial Sequence
  Chemically synthesized
ugaggaacacgagcgucaugaag

SEQ ID NO: 44017 - RNA, 23 nt, Artificial Sequence
  Chemically synthesized
augaggaacacgagcgucaugaa

SEQ ID NO: 44018 - RNA, 23 nt, Artificial Sequence
  Chemically synthesized
gaacugcacuucagcaauaaugg

SEQ ID NO: 44019 - RNA, 23 nt, Artificial Sequence
  Chemically synthesized
agaacugcacuucagcaauaaug

SEQ ID NO: 44020 - RNA, 23 nt, Artificial Sequence
  Chemically synthesized
uagaacugcacuucagcaauaau

SEQ ID NO: 44021 - RNA, 23 nt, Artificial Sequence
  Chemically synthesized
guagaacugcacuucagcaauaa

SEQ ID NO: 44022 - RNA, 23 nt, Artificial Sequence
  Chemically synthesized
gguagaacugcacuucagcaaua

SEQ ID NO: 44023 - RNA, 23 nt, Artificial Sequence
  Chemically synthesized
gauaccaacagggcuucugaaac

SEQ ID NO: 44024 - RNA, 23 nt, Artificial Sequence
  Chemically synthesized
agauaccaacagggcuucugaaa

SEQ ID NO: 44025 - RNA, 23 nt, Artificial Sequence
  Chemically synthesized
uuuaucacucugcauuggugaau

SEQ ID NO: 44026 - RNA, 23 nt, Artificial Sequence
  Chemically synthesized
uaaacucuucuugcuuuugcauu

SEQ ID NO: 44027 - RNA, 23 nt, Artificial Sequence
  Chemically synthesized
guagcuccaagagcucucacugu

SEQ ID NO: 44028 - RNA, 23 nt, Artificial Sequence
  Chemically synthesized
aguagcuccaagagcucucacug

SEQ ID NO: 44029 - RNA, 23 nt, Artificial Sequence
  Chemically synthesized
gaguagcuccaagagcucucacu

SEQ ID NO: 44030 - RNA, 23 nt, Artificial Sequence
  Chemically synthesized
ggaguagcuccaagagcucucac

SEQ ID NO: 44031 - RNA, 23 nt, Artificial Sequence
  Chemically synthesized
cggaguagcuccaagagcucuca

SEQ ID NO: 44032 - RNA, 23 nt, Artificial Sequence
  Chemically synthesized
cagcuguacaguucguacacuaa

SEQ ID NO: 44033 - RNA, 23 nt, Artificial Sequence
  Chemically synthesized
ucagcuguacaguucguacacua

SEQ ID NO: 44034 - RNA, 23 nt, Artificial Sequence
  Chemically synthesized
uauaucacacuauuguagaaagu

SEQ ID NO: 44035 - RNA, 23 nt, Artificial Sequence
  Chemically synthesized
cagcugaaguacuuuauauuuca

SEQ ID NO: 44036 - RNA, 23 nt, Artificial Sequence
  Chemically synthesized
ggaugaucaguuuucugcugaag

SEQ ID NO: 44037 - RNA, 23 nt, Artificial Sequence
  Chemically synthesized
uggaugaucaguuuucugcugaa

SEQ ID NO: 44038 - RNA, 23 nt, Artificial Sequence
  Chemically synthesized
cuggaugaucaguuuucugcuga

SEQ ID NO: 44039 - RNA, 23 nt, Artificial Sequence
  Chemically synthesized
ccuggaugaucaguuuucugcug

SEQ ID NO: 44040 - RNA, 23 nt, Artificial Sequence
  Chemically synthesized
uagcuccaagagcucucacugug

SEQ ID NO: 44041 - RNA, 23 nt, Artificial Sequence
  Chemically synthesized
acaguucguacacuaaacucuuc

SEQ ID NO: 44042 - RNA, 23 nt, Artificial Sequence
  Chemically synthesized
uacaguucguacacuaaacucuu

SEQ ID NO: 44043 - RNA, 23 nt, Artificial Sequence
  Chemically synthesized
agagcuacaaacucagcuguaca

SEQ ID NO: 44044 - RNA, 23 nt, Artificial Sequence
  Chemically synthesized
uagagcuacaaacucagcuguac

SEQ ID NO: 44045 - RNA, 23 nt, Artificial Sequence
  Chemically synthesized
auagagcuacaaacucagcugua

SEQ ID NO: 44046 - RNA, 23 nt, Artificial Sequence
  Chemically synthesized
gauagagcuacaaacucagcugu

SEQ ID NO: 44047 - RNA, 23 nt, Artificial Sequence
  Chemically synthesized
agauagagcuacaaacucagcug

SEQ ID NO: 44048 - RNA, 23 nt, Artificial Sequence
  Chemically synthesized
aagauagagcuacaaacucagcu

SEQ ID NO: 44049 - RNA, 23 nt, Artificial Sequence
  Chemically synthesized
uuaauucagcugaaguacuuuau

SEQ ID NO: 44050 - RNA, 23 nt, Artificial Sequence
  Chemically synthesized
aucugcaaccuuaauucagcuga

SEQ ID NO: 44051 - RNA, 23 nt, Artificial Sequence
  Chemically synthesized
gacacuaaaaucauguugaucua

SEQ ID NO: 44052 - RNA, 23 nt, Artificial Sequence
  Chemically synthesized
auagcucacugaagagcuguuag

SEQ ID NO: 44053 - RNA, 23 nt, Artificial Sequence
  Chemically synthesized
cauagcucacugaagagcuguua

SEQ ID NO: 44054 - RNA, 23 nt, Artificial Sequence
  Chemically synthesized
gcuugcaacauagcucacugaag

SEQ ID NO: 44055 - RNA, 23 nt, Artificial Sequence
  Chemically synthesized
agcuugcaacauagcucacugaa

SEQ ID NO: 44056 - RNA, 23 nt, Artificial Sequence
  Chemically synthesized
gagcuugcaacauagcucacuga

SEQ ID NO: 44057 - RNA, 23 nt, Artificial Sequence
  Chemically synthesized
ugagcuugcaacauagcucacug

SEQ ID NO: 44058 - RNA, 23 nt, Artificial Sequence
  Chemically synthesized
cugagcuugcaacauagcucacu

SEQ ID NO: 44059 - RNA, 23 nt, Artificial Sequence
  Chemically synthesized
caucuugaagaaaaacucagauu

SEQ ID NO: 44060 - RNA, 23 nt, Artificial Sequence
  Chemically synthesized
ugaucaguuuucugcugaaggca

SEQ ID NO: 44061 - RNA, 23 nt, Artificial Sequence
  Chemically synthesized
augaucaguuuucugcugaaggc

SEQ ID NO: 44062 - RNA, 23 nt, Artificial Sequence
  Chemically synthesized
gaugaucaguuuucugcugaagg

SEQ ID NO: 44063 - RNA, 23 nt, Artificial Sequence
  Chemically synthesized
agcuacaaacucagcuguacagu

SEQ ID NO: 44064 - RNA, 23 nt, Artificial Sequence
  Chemically synthesized
gagcuacaaacucagcuguacag

SEQ ID NO: 44065 - RNA, 23 nt, Artificial Sequence
  Chemically synthesized
ggguagaacugcacuucagcaau

SEQ ID NO: 44066 - RNA, 23 nt, Artificial Sequence
  Chemically synthesized
uggguagaacugcacuucagcaa

SEQ ID NO: 44067 - RNA, 23 nt, Artificial Sequence
  Chemically synthesized
ugaaaguuuuccuuccaucucug

SEQ ID NO: 44068 - RNA, 23 nt, Artificial Sequence
  Chemically synthesized
caugaggaacacgagcgucauga

SEQ ID NO: 44069 - RNA, 23 nt, Artificial Sequence
  Chemically synthesized
gcaugaggaacacgagcgucaug

SEQ ID NO: 44070 - RNA, 23 nt, Artificial Sequence
  Chemically synthesized
agcaugaggaacacgagcgucau

SEQ ID NO: 44071 - RNA, 23 nt, Artificial Sequence
  Chemically synthesized
ggaguuccucuuuaaacacccga

SEQ ID NO: 44072 - RNA, 23 nt, Artificial Sequence
  Chemically synthesized
aggaguuccucuuuaaacacccg

SEQ ID NO: 44073 - RNA, 23 nt, Artificial Sequence
  Chemically synthesized
aaggaguuccucuuuaaacaccc

SEQ ID NO: 44074 - RNA, 23 nt, Artificial Sequence
  Chemically synthesized
caaggaguuccucuuuaaacacc

SEQ ID NO: 44075 - RNA, 23 nt, Artificial Sequence
  Chemically synthesized
cauuggugaauuuaauccucucc

SEQ ID NO: 44076 - RNA, 23 nt, Artificial Sequence
  Chemically synthesized
uaagucuccgauuauuaggugau

SEQ ID NO: 44077 - RNA, 23 nt, Artificial Sequence
  Chemically synthesized
ccuccaccagcaccuuuugauga

SEQ ID NO: 44078 - RNA, 23 nt, Artificial Sequence
  Chemically synthesized
acccucagcaugaggaacacgag

SEQ ID NO: 44079 - RNA, 23 nt, Artificial Sequence
  Chemically synthesized
cacccucagcaugaggaacacga

SEQ ID NO: 44080 - RNA, 23 nt, Artificial Sequence
  Chemically synthesized
ccacccucagcaugaggaacacg

SEQ ID NO: 44081 - RNA, 23 nt, Artificial Sequence
  Chemically synthesized
gccacccucagcaugaggaacac

SEQ ID NO: 44082 - RNA, 23 nt, Artificial Sequence
  Chemically synthesized
ggccacccucagcaugaggaaca

SEQ ID NO: 44083 - RNA, 23 nt, Artificial Sequence
  Chemically synthesized
gucagacugauuaaugucuacug

SEQ ID NO: 44084 - RNA, 23 nt, Artificial Sequence
  Chemically synthesized
ugucagacugauuaaugucuacu

SEQ ID NO: 44085 - RNA, 23 nt, Artificial Sequence
  Chemically synthesized
augucagacugauuaaugucuac

SEQ ID NO: 44086 - RNA, 23 nt, Artificial Sequence
  Chemically synthesized
caugucagacugauuaaugucua

SEQ ID NO: 44087 - RNA, 23 nt, Artificial Sequence
  Chemically synthesized
aauuucugaaaguuuuccuucca

SEQ ID NO: 44088 - RNA, 23 nt, Artificial Sequence
  Chemically synthesized
cguuccagccucgguuucuauuu

SEQ ID NO: 44089 - RNA, 23 nt, Artificial Sequence
  Chemically synthesized
ccucuuuaaacacccgaagcgca

SEQ ID NO: 44090 - RNA, 23 nt, Artificial Sequence
  Chemically synthesized
ggugaucacccuggaugaucagu

SEQ ID NO: 44091 - RNA, 23 nt, Artificial Sequence
  Chemically synthesized
aggugaucacccuggaugaucag

SEQ ID NO: 44092 - RNA, 23 nt, Artificial Sequence
  Chemically synthesized
uaggugaucacccuggaugauca

SEQ ID NO: 44093 - RNA, 23 nt, Artificial Sequence
  Chemically synthesized
uuaagucuccgauuauuagguga

SEQ ID NO: 44094 - RNA, 23 nt, Artificial Sequence
  Chemically synthesized
cuuaauucagcugaaguacuuua

SEQ ID NO: 44095 - RNA, 23 nt, Artificial Sequence
  Chemically synthesized
ugcugcucucucauuugcuggcc

SEQ ID NO: 44096 - RNA, 23 nt, Artificial Sequence
  Chemically synthesized
cugcugcucucucauuugcuggc

SEQ ID NO: 44097 - RNA, 23 nt, Artificial Sequence
  Chemically synthesized
ucugcugcucucucauuugcugg

SEQ ID NO: 44098 - RNA, 23 nt, Artificial Sequence
  Chemically synthesized
agauacccauagcauuggagaga

SEQ ID NO: 44099 - RNA, 23 nt, Artificial Sequence
  Chemically synthesized
cagauacccauagcauuggagag

SEQ ID NO: 44100 - RNA, 23 nt, Artificial Sequence
  Chemically synthesized
acagauacccauagcauuggaga

SEQ ID NO: 44101 - RNA, 23 nt, Artificial Sequence
  Chemically synthesized
aacagauacccauagcauuggag

SEQ ID NO: 44102 - RNA, 23 nt, Artificial Sequence
  Chemically synthesized
aaacagauacccauagcauugga

SEQ ID NO: 44103 - RNA, 23 nt, Artificial Sequence
  Chemically synthesized
aacugcacuucagcaauaauggg

SEQ ID NO: 44104 - RNA, 23 nt, Artificial Sequence
  Chemically synthesized
gcagacaccacaagauaccaaca

SEQ ID NO: 44105 - RNA, 23 nt, Artificial Sequence
  Chemically synthesized
cgcagacaccacaagauaccaac

SEQ ID NO: 44106 - RNA, 23 nt, Artificial Sequence
  Chemically synthesized
ucgcagacaccacaagauaccaa

SEQ ID NO: 44107 - RNA, 23 nt, Artificial Sequence
  Chemically synthesized
cucgcagacaccacaagauacca

SEQ ID NO: 44108 - RNA, 23 nt, Artificial Sequence
  Chemically synthesized
gcucgcagacaccacaagauacc

SEQ ID NO: 44109 - RNA, 23 nt, Artificial Sequence
  Chemically synthesized
cugaaggcaccuacucaguaucu

SEQ ID NO: 44110 - RNA, 23 nt, Artificial Sequence
  Chemically synthesized
gcugaaggcaccuacucaguauc

SEQ ID NO: 44111 - RNA, 23 nt, Artificial Sequence
  Chemically synthesized
ugcugaaggcaccuacucaguau

SEQ ID NO: 44112 - RNA, 23 nt, Artificial Sequence
  Chemically synthesized
uuaggugaucacccuggaugauc

SEQ ID NO: 44113 - RNA, 23 nt, Artificial Sequence
  Chemically synthesized
auuaggugaucacccuggaugau

SEQ ID NO: 44114 - RNA, 23 nt, Artificial Sequence
  Chemically synthesized
uaucugcaaccuuaauucagcug

SEQ ID NO: 44115 - RNA, 23 nt, Artificial Sequence
  Chemically synthesized
uuaucugcaaccuuaauucagcu

SEQ ID NO: 44116 - RNA, 23 nt, Artificial Sequence
  Chemically synthesized
gcguuccagccucgguuucuauu

SEQ ID NO: 44117 - RNA, 23 nt, Artificial Sequence
  Chemically synthesized
agcguuccagccucgguuucuau

SEQ ID NO: 44118 - RNA, 23 nt, Artificial Sequence
  Chemically synthesized
cagcguuccagccucgguuucua

SEQ ID NO: 44119 - RNA, 23 nt, Artificial Sequence
  Chemically synthesized
acugcacuucagcaauaauggga

SEQ ID NO: 44120 - RNA, 23 nt, Artificial Sequence
  Chemically synthesized
cgcucgcagacaccacaagauac

SEQ ID NO: 44121 - RNA, 23 nt, Artificial Sequence
  Chemically synthesized
ucgcucgcagacaccacaagaua

SEQ ID NO: 44122 - RNA, 23 nt, Artificial Sequence
  Chemically synthesized
cucgcucgcagacaccacaagau

SEQ ID NO: 44123 - RNA, 23 nt, Artificial Sequence
  Chemically synthesized
ucaguuuucugcugaaggcaccu

SEQ ID NO: 44124 - RNA, 23 nt, Artificial Sequence
  Chemically synthesized
aucaguuuucugcugaaggcacc

SEQ ID NO: 44125 - RNA, 23 nt, Artificial Sequence
  Chemically synthesized
gaucaguuuucugcugaaggcac

SEQ ID NO: 44126 - RNA, 23 nt, Artificial Sequence
  Chemically synthesized
ucugagcuugcaacauagcucac

SEQ ID NO: 44127 - RNA, 23 nt, Artificial Sequence
  Chemically synthesized
uucugagcuugcaacauagcuca

SEQ ID NO: 44128 - RNA, 23 nt, Artificial Sequence
  Chemically synthesized
agggcuucugaaacagauaccca

SEQ ID NO: 44129 - RNA, 23 nt, Artificial Sequence
  Chemically synthesized
cagggcuucugaaacagauaccc

SEQ ID NO: 44130 - RNA, 23 nt, Artificial Sequence
  Chemically synthesized
acagggcuucugaaacagauacc

SEQ ID NO: 44131 - RNA, 23 nt, Artificial Sequence
  Chemically synthesized
aacagggcuucugaaacagauac

SEQ ID NO: 44132 - RNA, 23 nt, Artificial Sequence
  Chemically synthesized
cugcugaaggcaccuacucagua

SEQ ID NO: 44133 - RNA, 23 nt, Artificial Sequence
  Chemically synthesized
gggcuucugaaacagauacccau

SEQ ID NO: 44134 - RNA, 23 nt, Artificial Sequence
  Chemically synthesized
uucuugcuuuugcauuauaagga

SEQ ID NO: 44135 - RNA, 23 nt, Artificial Sequence
  Chemically synthesized
uuguccaaaauaaauauuguggc

SEQ ID NO: 44136 - RNA, 23 nt, Artificial Sequence
  Chemically synthesized
acauagcucacugaagagcuguu

SEQ ID NO: 44137 - RNA, 23 nt, Artificial Sequence
  Chemically synthesized
ggcuucugaaacagauacccaua

SEQ ID NO: 44138 - RNA, 23 nt, Artificial Sequence
  Chemically synthesized
gacauggaaaaaauacugcugga

SEQ ID NO: 44139 - RNA, 23 nt, Artificial Sequence
  Chemically synthesized
agacauggaaaaaauacugcugg

SEQ ID NO: 44140 - RNA, 23 nt, Artificial Sequence
  Chemically synthesized
gagacauggaaaaaauacugcug

SEQ ID NO: 44141 - RNA, 23 nt, Artificial Sequence
  Chemically synthesized
ggagacauggaaaaaauacugcu

SEQ ID NO: 44142 - RNA, 23 nt, Artificial Sequence
  Chemically synthesized
uggagacauggaaaaaauacugc

SEQ ID NO: 44143 - RNA, 23 nt, Artificial Sequence
  Chemically synthesized
ucuauuuauaauggagacaugga

SEQ ID NO: 44144 - RNA, 23 nt, Artificial Sequence
  Chemically synthesized
aaaacucagauuggauaugggau

SEQ ID NO: 44145 - RNA, 23 nt, Artificial Sequence
  Chemically synthesized
cucucauuugcuggccaucggau

SEQ ID NO: 44146 - RNA, 23 nt, Artificial Sequence
  Chemically synthesized
auauacuagucaugauguguguu

SEQ ID NO: 44147 - RNA, 23 nt, Artificial Sequence
  Chemically synthesized
gaugauauugaaagaaggaaaga

SEQ ID NO: 44148 - RNA, 23 nt, Artificial Sequence
  Chemically synthesized
gcauuauaaggaauuaagucucc

SEQ ID NO: 44149 - RNA, 23 nt, Artificial Sequence
  Chemically synthesized
guguuuauuuguucuguaaaugc

SEQ ID NO: 44150 - RNA, 23 nt, Artificial Sequence
  Chemically synthesized
gguuucuauuuauaauggagaca

SEQ ID NO: 44151 - RNA, 23 nt, Artificial Sequence
  Chemically synthesized
uccaucucugcugcucucucauu

SEQ ID NO: 44152 - RNA, 23 nt, Artificial Sequence
  Chemically synthesized
ccuuuugaugaagaacuggaguc

SEQ ID NO: 44153 - RNA, 23 nt, Artificial Sequence
  Chemically synthesized
agaaaaacagcucacagucugag

SEQ ID NO: 44154 - RNA, 23 nt, Artificial Sequence
  Chemically synthesized
cgauuauuaggugaucacccugg

SEQ ID NO: 44155 - RNA, 23 nt, Artificial Sequence
  Chemically synthesized
caguuuucugcugaaggcaccua

SEQ ID NO: 44156 - RNA, 23 nt, Artificial Sequence
  Chemically synthesized
ugacaaccuccaccagcaccuuu

SEQ ID NO: 44157 - RNA, 23 nt, Artificial Sequence
  Chemically synthesized
cagaauuucugaaaguuuuccuu

SEQ ID NO: 44158 - RNA, 23 nt, Artificial Sequence
  Chemically synthesized
gauuggucaagucggccggaaaa

SEQ ID NO: 44159 - RNA, 23 nt, Artificial Sequence
  Chemically synthesized
cuuuaucacucugcauuggugaa

SEQ ID NO: 44160 - RNA, 23 nt, Artificial Sequence
  Chemically synthesized
guugaucuauaauuacaccuaug

SEQ ID NO: 44161 - RNA, 23 nt, Artificial Sequence
  Chemically synthesized
agaauuucugaaaguuuuccuuc

SEQ ID NO: 44162 - RNA, 23 nt, Artificial Sequence
  Chemically synthesized
gcuaauuguucauaaucaacaga

SEQ ID NO: 44163 - RNA, 23 nt, Artificial Sequence
  Chemically synthesized
ccuuauauaucacacuauuguag

SEQ ID NO: 44164 - RNA, 23 nt, Artificial Sequence
  Chemically synthesized
gauuacuucugagcuugcaacau

SEQ ID NO: 44165 - RNA, 23 nt, Artificial Sequence
  Chemically synthesized
gaaaguuuuccuuccaucucugc

SEQ ID NO: 44166 - RNA, 23 nt, Artificial Sequence
  Chemically synthesized
aagauaccaacagggcuucugaa

SEQ ID NO: 44167 - RNA, 23 nt, Artificial Sequence
  Chemically synthesized
ugaucuauaauuacaccuauggg

SEQ ID NO: 44168 - RNA, 23 nt, Artificial Sequence
  Chemically synthesized
acagcaugagucuggacggagua

SEQ ID NO: 44169 - RNA, 23 nt, Artificial Sequence
  Chemically synthesized
gaaaaauucagaagcauaaaacc

SEQ ID NO: 44170 - RNA, 23 nt, Artificial Sequence
  Chemically synthesized
gcuuuuguugauuuccugaguga

SEQ ID NO: 44171 - RNA, 23 nt, Artificial Sequence
  Chemically synthesized
gguugaaguuauaaagaaugaug

SEQ ID NO: 44172 - RNA, 23 nt, Artificial Sequence
  Chemically synthesized
cuuuuguugauuuccugagugau

SEQ ID NO: 44173 - RNA, 23 nt, Artificial Sequence
  Chemically synthesized
caacauuaacaacagcaucccac

SEQ ID NO: 44174 - RNA, 23 nt, Artificial Sequence
  Chemically synthesized
acaagaagacgaggcugagagug

SEQ ID NO: 44175 - RNA, 23 nt, Artificial Sequence
  Chemically synthesized
caagagccaguagagcagacaga

SEQ ID NO: 44176 - RNA, 23 nt, Artificial Sequence
  Chemically synthesized
ucaagagccaguagagcagacag

SEQ ID NO: 44177 - RNA, 23 nt, Artificial Sequence
  Chemically synthesized
gaacugaaugggacagaagcgaa

SEQ ID NO: 44178 - RNA, 23 nt, Artificial Sequence
  Chemically synthesized
cuuauaugaccaccuaauggauu

SEQ ID NO: 44179 - RNA, 23 nt, Artificial Sequence
  Chemically synthesized
aucugcacguguucgcagucguu

SEQ ID NO: 44180 - RNA, 23 nt, Artificial Sequence
  Chemically synthesized
uaacaacagcaucccaccaacau

SEQ ID NO: 44181 - RNA, 23 nt, Artificial Sequence
  Chemically synthesized
ugauggcaagaaggcccuugugu

SEQ ID NO: 44182 - RNA, 23 nt, Artificial Sequence
  Chemically synthesized
acaacagcaucccaccaacauuu

SEQ ID NO: 44183 - RNA, 23 nt, Artificial Sequence
  Chemically synthesized
gcuuugaaaugauuaucauccua

SEQ ID NO: 44184 - RNA, 23 nt, Artificial Sequence
  Chemically synthesized
ucugcacguguucgcagucguuu

SEQ ID NO: 44185 - RNA, 23 nt, Artificial Sequence
  Chemically synthesized
acauuugauggugaggaggaacc

SEQ ID NO: 44186 - RNA, 23 nt, Artificial Sequence
  Chemically synthesized
ucaguccacuggcgagucugaau

SEQ ID NO: 44187 - RNA, 23 nt, Artificial Sequence
  Chemically synthesized
caagaaggcccuuguguuggacu

SEQ ID NO: 44188 - RNA, 23 nt, Artificial Sequence
  Chemically synthesized
acauaaaauugguuuaucuccuc

SEQ ID NO: 44189 - RNA, 23 nt, Artificial Sequence
  Chemically synthesized
acauuaacaacagcaucccacca

SEQ ID NO: 44190 - RNA, 23 nt, Artificial Sequence
  Chemically synthesized
agacauaaaauugguuuaucucc

SEQ ID NO: 44191 - RNA, 23 nt, Artificial Sequence
  Chemically synthesized
gaaaaauucagaagcauaaaacc

SEQ ID NO: 44192 - RNA, 23 nt, Artificial Sequence
  Chemically synthesized
gcuuuuguugauuuccugaguga

SEQ ID NO: 44193 - RNA, 23 nt, Artificial Sequence
  Chemically synthesized
gguugaaguuauaaagaaugaug

SEQ ID NO: 44194 - RNA, 23 nt, Artificial Sequence
  Chemically synthesized
cuuuuguugauuuccugagugau

SEQ ID NO: 44195 - RNA, 23 nt, Artificial Sequence
  Chemically synthesized
cuaauaaucggagacuuaauucc

SEQ ID NO: 44196 - RNA, 23 nt, Artificial Sequence
  Chemically synthesized
uaauaaucggagacuuaauuccu

SEQ ID NO: 44197 - RNA, 23 nt, Artificial Sequence
  Chemically synthesized
aauaaucggagacuuaauuccuu

SEQ ID NO: 44198 - RNA, 23 nt, Artificial Sequence
  Chemically synthesized
auaaucggagacuuaauuccuua

SEQ ID NO: 44199 - RNA, 23 nt, Artificial Sequence
  Chemically synthesized
uaaucggagacuuaauuccuuau

SEQ ID NO: 44200 - RNA, 23 nt, Artificial Sequence
  Chemically synthesized
gaggauuaaauucaccaaugcag

SEQ ID NO: 44201 - RNA, 23 nt, Artificial Sequence
  Chemically synthesized
aggauuaaauucaccaaugcaga

SEQ ID NO: 44202 - RNA, 23 nt, Artificial Sequence
  Chemically synthesized
ggauuaaauucaccaaugcagag

SEQ ID NO: 44203 - RNA, 23 nt, Artificial Sequence
  Chemically synthesized
gauuaaauucaccaaugcagagu

SEQ ID NO: 44204 - RNA, 23 nt, Artificial Sequence
  Chemically synthesized
auuaaauucaccaaugcagagug

SEQ ID NO: 44205 - RNA, 23 nt, Artificial Sequence
  Chemically synthesized
auuuuaaaagcacacaaaaguug

SEQ ID NO: 44206 - RNA, 23 nt, Artificial Sequence
  Chemically synthesized
uuuuaaaagcacacaaaaguuga

SEQ ID NO: 44207 - RNA, 23 nt, Artificial Sequence
  Chemically synthesized
uuuaaaagcacacaaaaguugaa

SEQ ID NO: 44208 - RNA, 23 nt, Artificial Sequence
  Chemically synthesized
uuaaaagcacacaaaaguugaac

SEQ ID NO: 44209 - RNA, 23 nt, Artificial Sequence
  Chemically synthesized
uaaaagcacacaaaaguugaaca

SEQ ID NO: 44210 - RNA, 23 nt, Artificial Sequence
  Chemically synthesized
gugcguccagcaguauuuuuucc

SEQ ID NO: 44211 - RNA, 23 nt, Artificial Sequence
  Chemically synthesized
ugcguccagcaguauuuuuucca

SEQ ID NO: 44212 - RNA, 23 nt, Artificial Sequence
  Chemically synthesized
gcguccagcaguauuuuuuccau

SEQ ID NO: 44213 - RNA, 23 nt, Artificial Sequence
  Chemically synthesized
cguccagcaguauuuuuuccaug

SEQ ID NO: 44214 - RNA, 23 nt, Artificial Sequence
  Chemically synthesized
guccagcaguauuuuuuccaugu

SEQ ID NO: 44215 - RNA, 23 nt, Artificial Sequence
  Chemically synthesized
aaucuuucuuuaguagacaaccu

SEQ ID NO: 44216 - RNA, 23 nt, Artificial Sequence
  Chemically synthesized
aucuuucuuuaguagacaaccug

SEQ ID NO: 44217 - RNA, 23 nt, Artificial Sequence
  Chemically synthesized
ucuuucuuuaguagacaaccugc

SEQ ID NO: 44218 - RNA, 23 nt, Artificial Sequence
  Chemically synthesized
cuuucuuuaguagacaaccugca

SEQ ID NO: 44219 - RNA, 23 nt, Artificial Sequence
  Chemically synthesized
uuucuuuaguagacaaccugcau

SEQ ID NO: 44220 - RNA, 23 nt, Artificial Sequence
  Chemically synthesized
uucuuuaguagacaaccugcauc

SEQ ID NO: 44221 - RNA, 23 nt, Artificial Sequence
  Chemically synthesized
uacaauagugugauauauaaggc

SEQ ID NO: 44222 - RNA, 23 nt, Artificial Sequence
  Chemically synthesized
acaauagugugauauauaaggcc

SEQ ID NO: 44223 - RNA, 23 nt, Artificial Sequence
  Chemically synthesized
caauagugugauauauaaggcca

SEQ ID NO: 44224 - RNA, 23 nt, Artificial Sequence
  Chemically synthesized
aauagugugauauauaaggccac

SEQ ID NO: 44225 - RNA, 23 nt, Artificial Sequence
  Chemically synthesized
auagugugauauauaaggccaca

SEQ ID NO: 44226 - RNA, 23 nt, Artificial Sequence
  Chemically synthesized
cacaaaggagaggauuaaauuca

SEQ ID NO: 44227 - RNA, 23 nt, Artificial Sequence
  Chemically synthesized
acaaaggagaggauuaaauucac

SEQ ID NO: 44228 - RNA, 23 nt, Artificial Sequence
  Chemically synthesized
caaaggagaggauuaaauucacc

SEQ ID NO: 44229 - RNA, 23 nt, Artificial Sequence
  Chemically synthesized
aaaggagaggauuaaauucacca

SEQ ID NO: 44230 - RNA, 23 nt, Artificial Sequence
  Chemically synthesized
aaggagaggauuaaauucaccaa

SEQ ID NO: 44231 - RNA, 23 nt, Artificial Sequence
  Chemically synthesized
uagugugauauauaaggccacaa

SEQ ID NO: 44232 - RNA, 23 nt, Artificial Sequence
  Chemically synthesized
ucagacugugagcuguuuuucuc

SEQ ID NO: 44233 - RNA, 23 nt, Artificial Sequence
  Chemically synthesized
cagacugugagcuguuuuucucu

SEQ ID NO: 44234 - RNA, 23 nt, Artificial Sequence
  Chemically synthesized
agacugugagcuguuuuucucuc

SEQ ID NO: 44235 - RNA, 23 nt, Artificial Sequence
  Chemically synthesized
gacugugagcuguuuuucucucc

SEQ ID NO: 44236 - RNA, 23 nt, Artificial Sequence
  Chemically synthesized
acugugagcuguuuuucucucca

SEQ ID NO: 44237 - RNA, 23 nt, Artificial Sequence
  Chemically synthesized
uccagcaguauuuuuuccauguc

SEQ ID NO: 44238 - RNA, 23 nt, Artificial Sequence
  Chemically synthesized
ccauuauaaauagaaaccgaggc

SEQ ID NO: 44239 - RNA, 23 nt, Artificial Sequence
  Chemically synthesized
cauuauaaauagaaaccgaggcu

SEQ ID NO: 44240 - RNA, 23 nt, Artificial Sequence
  Chemically synthesized
auuauaaauagaaaccgaggcug

SEQ ID NO: 44241 - RNA, 23 nt, Artificial Sequence
  Chemically synthesized
uuauaaauagaaaccgaggcugg

SEQ ID NO: 44242 - RNA, 23 nt, Artificial Sequence
  Chemically synthesized
uauaaauagaaaccgaggcugga

SEQ ID NO: 44243 - RNA, 23 nt, Artificial Sequence
  Chemically synthesized
caagaugcuuucaacuucuuucc

SEQ ID NO: 44244 - RNA, 23 nt, Artificial Sequence
  Chemically synthesized
aagaugcuuucaacuucuuuccu

SEQ ID NO: 44245 - RNA, 23 nt, Artificial Sequence
  Chemically synthesized
agaugcuuucaacuucuuuccuu

SEQ ID NO: 44246 - RNA, 23 nt, Artificial Sequence
  Chemically synthesized
gaugcuuucaacuucuuuccuuc

SEQ ID NO: 44247 - RNA, 23 nt, Artificial Sequence
  Chemically synthesized
augcuuucaacuucuuuccuucu

SEQ ID NO: 44248 - RNA, 23 nt, Artificial Sequence
  Chemically synthesized
cugaguuuguagcucuaucuugg

SEQ ID NO: 44249 - RNA, 23 nt, Artificial Sequence
  Chemically synthesized
ugaguuuguagcucuaucuuggu

SEQ ID NO: 44250 - RNA, 23 nt, Artificial Sequence
  Chemically synthesized
gaguuuguagcucuaucuugguu

SEQ ID NO: 44251 - RNA, 23 nt, Artificial Sequence
  Chemically synthesized
aguuuguagcucuaucuugguuu

SEQ ID NO: 44252 - RNA, 23 nt, Artificial Sequence
  Chemically synthesized
guuuguagcucuaucuugguuuc

SEQ ID NO: 44253 - RNA, 23 nt, Artificial Sequence
  Chemically synthesized
caauauuuauuuuggacaaaccc

SEQ ID NO: 44254 - RNA, 23 nt, Artificial Sequence
  Chemically synthesized
aauauuuauuuuggacaaacccc

SEQ ID NO: 44255 - RNA, 23 nt, Artificial Sequence
  Chemically synthesized
auauuuauuuuggacaaaccccu

SEQ ID NO: 44256 - RNA, 23 nt, Artificial Sequence
  Chemically synthesized
uauuuauuuuggacaaaccccuu

SEQ ID NO: 44257 - RNA, 23 nt, Artificial Sequence
  Chemically synthesized
auuuauuuuggacaaaccccuua

SEQ ID NO: 44258 - RNA, 23 nt, Artificial Sequence
  Chemically synthesized
agcaguauuuuuuccaugucucc

SEQ ID NO: 44259 - RNA, 23 nt, Artificial Sequence
  Chemically synthesized
gcaguauuuuuuccaugucucca

SEQ ID NO: 44260 - RNA, 23 nt, Artificial Sequence
  Chemically synthesized
caguauuuuuuccaugucuccau

SEQ ID NO: 44261 - RNA, 23 nt, Artificial Sequence
  Chemically synthesized
aguauuuuuuccaugucuccauu

SEQ ID NO: 44262 - RNA, 23 nt, Artificial Sequence
  Chemically synthesized
guauuuuuuccaugucuccauua

SEQ ID NO: 44263 - RNA, 23 nt, Artificial Sequence
  Chemically synthesized
aaaagcacacaaaaguugaacac

SEQ ID NO: 44264 - RNA, 23 nt, Artificial Sequence
  Chemically synthesized
gagaggauuaaauucaccaaugc

SEQ ID NO: 44265 - RNA, 23 nt, Artificial Sequence
  Chemically synthesized
agaggauuaaauucaccaaugca

SEQ ID NO: 44266 - RNA, 23 nt, Artificial Sequence
  Chemically synthesized
uuaaauucaccaaugcagaguga

SEQ ID NO: 44267 - RNA, 23 nt, Artificial Sequence
  Chemically synthesized
uaaauucaccaaugcagagugau

SEQ ID NO: 44268 - RNA, 23 nt, Artificial Sequence
  Chemically synthesized
aaauucaccaaugcagagugaua

SEQ ID NO: 44269 - RNA, 23 nt, Artificial Sequence
  Chemically synthesized
aauucaccaaugcagagugauaa

SEQ ID NO: 44270 - RNA, 23 nt, Artificial Sequence
  Chemically synthesized
ccuaauaaucggagacuuaauuc

SEQ ID NO: 44271 - RNA, 23 nt, Artificial Sequence
  Chemically synthesized
uuauuuuacuaaauuaggaacgc

SEQ ID NO: 44272 - RNA, 23 nt, Artificial Sequence
  Chemically synthesized
uauuuuacuaaauuaggaacgca

SEQ ID NO: 44273 - RNA, 23 nt, Artificial Sequence
  Chemically synthesized
auuuuacuaaauuaggaacgcag

SEQ ID NO: 44274 - RNA, 23 nt, Artificial Sequence
  Chemically synthesized
uuuuacuaaauuaggaacgcagc

SEQ ID NO: 44275 - RNA, 23 nt, Artificial Sequence
  Chemically synthesized
uuuacuaaauuaggaacgcagca

SEQ ID NO: 44276 - RNA, 23 nt, Artificial Sequence
  Chemically synthesized
ccagcaguauuuuuuccaugucu

SEQ ID NO: 44277 - RNA, 23 nt, Artificial Sequence
  Chemically synthesized
cagcaguauuuuuuccaugucuc

SEQ ID NO: 44278 - RNA, 23 nt, Artificial Sequence
  Chemically synthesized
aaaguagacacagauuugcuuag

SEQ ID NO: 44279 - RNA, 23 nt, Artificial Sequence
  Chemically synthesized
aaguagacacagauuugcuuaga

SEQ ID NO: 44280 - RNA, 23 nt, Artificial Sequence
  Chemically synthesized
aguagacacagauuugcuuagaa

SEQ ID NO: 44281 - RNA, 23 nt, Artificial Sequence
  Chemically synthesized
guagacacagauuugcuuagaau

SEQ ID NO: 44282 - RNA, 23 nt, Artificial Sequence
  Chemically synthesized
uagacacagauuugcuuagaaua

SEQ ID NO: 44283 - RNA, 23 nt, Artificial Sequence
  Chemically synthesized
aaagcugauuuuaaaagcacaca

SEQ ID NO: 44284 - RNA, 23 nt, Artificial Sequence
  Chemically synthesized
aagcugauuuuaaaagcacacaa

SEQ ID NO: 44285 - RNA, 23 nt, Artificial Sequence
  Chemically synthesized
agcugauuuuaaaagcacacaaa

SEQ ID NO: 44286 - RNA, 23 nt, Artificial Sequence
  Chemically synthesized
gcugauuuuaaaagcacacaaaa

SEQ ID NO: 44287 - RNA, 23 nt, Artificial Sequence
  Chemically synthesized
cugauuuuaaaagcacacaaaag

SEQ ID NO: 44288 - RNA, 23 nt, Artificial Sequence
  Chemically synthesized
cagggugaucaccuaauaaucgg

SEQ ID NO: 44289 - RNA, 23 nt, Artificial Sequence
  Chemically synthesized
agggugaucaccuaauaaucgga

SEQ ID NO: 44290 - RNA, 23 nt, Artificial Sequence
  Chemically synthesized
gggugaucaccuaauaaucggag

SEQ ID NO: 44291 - RNA, 23 nt, Artificial Sequence
  Chemically synthesized
ggugaucaccuaauaaucggaga

SEQ ID NO: 44292 - RNA, 23 nt, Artificial Sequence
  Chemically synthesized
gugaucaccuaauaaucggagac

SEQ ID NO: 44293 - RNA, 23 nt, Artificial Sequence
  Chemically synthesized
auaaucuuucuuuaguagacaac

SEQ ID NO: 44294 - RNA, 23 nt, Artificial Sequence
  Chemically synthesized
uaaucuuucuuuaguagacaacc

SEQ ID NO: 44295 - RNA, 23 nt, Artificial Sequence
  Chemically synthesized
aaaguacuucagcugaauuaagg

SEQ ID NO: 44296 - RNA, 23 nt, Artificial Sequence
  Chemically synthesized
aaguacuucagcugaauuaaggu

SEQ ID NO: 44297 - RNA, 23 nt, Artificial Sequence
  Chemically synthesized
aguacuucagcugaauuaagguu

SEQ ID NO: 44298 - RNA, 23 nt, Artificial Sequence
  Chemically synthesized
guacuucagcugaauuaagguug

SEQ ID NO: 44299 - RNA, 23 nt, Artificial Sequence
  Chemically synthesized
uacuucagcugaauuaagguugc

SEQ ID NO: 44300 - RNA, 23 nt, Artificial Sequence
  Chemically synthesized
uauuuuuuccaugucuccauuau

SEQ ID NO: 44301 - RNA, 23 nt, Artificial Sequence
  Chemically synthesized
auuuuuuccaugucuccauuaua

SEQ ID NO: 44302 - RNA, 23 nt, Artificial Sequence
  Chemically synthesized
aaagcacacaaaaguugaacaca

SEQ ID NO: 44303 - RNA, 23 nt, Artificial Sequence
  Chemically synthesized
aagcacacaaaaguugaacacaa

SEQ ID NO: 44304 - RNA, 23 nt, Artificial Sequence
  Chemically synthesized
acacaaaaguugaacacaaagga

SEQ ID NO: 44305 - RNA, 23 nt, Artificial Sequence
  Chemically synthesized
cacaaaaguugaacacaaaggag

SEQ ID NO: 44306 - RNA, 23 nt, Artificial Sequence
  Chemically synthesized
acaaaaguugaacacaaaggaga

SEQ ID NO: 44307 - RNA, 23 nt, Artificial Sequence
  Chemically synthesized
caaaaguugaacacaaaggagag

SEQ ID NO: 44308 - RNA, 23 nt, Artificial Sequence
  Chemically synthesized
aaaaguugaacacaaaggagagg

SEQ ID NO: 44309 - RNA, 23 nt, Artificial Sequence
  Chemically synthesized
aaaguugaacacaaaggagagga

SEQ ID NO: 44310 - RNA, 23 nt, Artificial Sequence
  Chemically synthesized
aaguugaacacaaaggagaggau

SEQ ID NO: 44311 - RNA, 23 nt, Artificial Sequence
  Chemically synthesized
aguugaacacaaaggagaggauu

SEQ ID NO: 44312 - RNA, 23 nt, Artificial Sequence
  Chemically synthesized
guugaacacaaaggagaggauua

SEQ ID NO: 44313 - RNA, 23 nt, Artificial Sequence
  Chemically synthesized
uugaacacaaaggagaggauuaa

SEQ ID NO: 44314 - RNA, 23 nt, Artificial Sequence
  Chemically synthesized
acacaaaggagaggauuaaauuc

SEQ ID NO: 44315 - RNA, 23 nt, Artificial Sequence
  Chemically synthesized
uacgaacuguacagcugaguuug

SEQ ID NO: 44316 - RNA, 23 nt, Artificial Sequence
  Chemically synthesized
acgaacuguacagcugaguuugu

SEQ ID NO: 44317 - RNA, 23 nt, Artificial Sequence
  Chemically synthesized
cgaacuguacagcugaguuugua

SEQ ID NO: 44318 - RNA, 23 nt, Artificial Sequence
  Chemically synthesized
gaacuguacagcugaguuuguag

SEQ ID NO: 44319 - RNA, 23 nt, Artificial Sequence
  Chemically synthesized
aacuguacagcugaguuuguagc

SEQ ID NO: 44320 - RNA, 23 nt, Artificial Sequence
  Chemically synthesized
aauuuacuaccaaauuuucacag

SEQ ID NO: 44321 - RNA, 23 nt, Artificial Sequence
  Chemically synthesized
auuuacuaccaaauuuucacagu

SEQ ID NO: 44322 - RNA, 23 nt, Artificial Sequence
  Chemically synthesized
uuuacuaccaaauuuucacagua

SEQ ID NO: 44323 - RNA, 23 nt, Artificial Sequence
  Chemically synthesized
uuacuaccaaauuuucacaguag

SEQ ID NO: 44324 - RNA, 23 nt, Artificial Sequence
  Chemically synthesized
uacuaccaaauuuucacaguaga

SEQ ID NO: 44325 - RNA, 23 nt, Artificial Sequence
  Chemically synthesized
aggaucuaacagcucuucaguga

SEQ ID NO: 44326 - RNA, 23 nt, Artificial Sequence
  Chemically synthesized
ggaucuaacagcucuucagugag

SEQ ID NO: 44327 - RNA, 23 nt, Artificial Sequence
  Chemically synthesized
gaucuaacagcucuucagugagc

SEQ ID NO: 44328 - RNA, 23 nt, Artificial Sequence
  Chemically synthesized
aucuaacagcucuucagugagcu

SEQ ID NO: 44329 - RNA, 23 nt, Artificial Sequence
  Chemically synthesized
ucuaacagcucuucagugagcua

SEQ ID NO: 44330 - RNA, 23 nt, Artificial Sequence
  Chemically synthesized
cagcucuucagugagcuauguug

SEQ ID NO: 44331 - RNA, 23 nt, Artificial Sequence
  Chemically synthesized
agcucuucagugagcuauguugc

SEQ ID NO: 44332 - RNA, 23 nt, Artificial Sequence
  Chemically synthesized
gcucuucagugagcuauguugca

SEQ ID NO: 44333 - RNA, 23 nt, Artificial Sequence
  Chemically synthesized
cucuucagugagcuauguugcaa

SEQ ID NO: 44334 - RNA, 23 nt, Artificial Sequence
  Chemically synthesized
ucuucagugagcuauguugcaag

SEQ ID NO: 44335 - RNA, 23 nt, Artificial Sequence
  Chemically synthesized
caucaaaaggugcugguggaggu

SEQ ID NO: 44336 - RNA, 23 nt, Artificial Sequence
  Chemically synthesized
aucaaaaggugcugguggagguu

SEQ ID NO: 44337 - RNA, 23 nt, Artificial Sequence
  Chemically synthesized
ucaaaaggugcugguggagguug

SEQ ID NO: 44338 - RNA, 23 nt, Artificial Sequence
  Chemically synthesized
caaaaggugcugguggagguugu

SEQ ID NO: 44339 - RNA, 23 nt, Artificial Sequence
  Chemically synthesized
aaaaggugcugguggagguuguc

SEQ ID NO: 44340 - RNA, 23 nt, Artificial Sequence
  Chemically synthesized
auaaauagaaaccgaggcuggaa

SEQ ID NO: 44341 - RNA, 23 nt, Artificial Sequence
  Chemically synthesized
gggaauauuuuccggccgacuug

SEQ ID NO: 44342 - RNA, 23 nt, Artificial Sequence
  Chemically synthesized
ggaauauuuuccggccgacuuga

SEQ ID NO: 44343 - RNA, 23 nt, Artificial Sequence
  Chemically synthesized
gaauauuuuccggccgacuugac

SEQ ID NO: 44344 - RNA, 23 nt, Artificial Sequence
  Chemically synthesized
aauauuuuccggccgacuugacc

SEQ ID NO: 44345 - RNA, 23 nt, Artificial Sequence
  Chemically synthesized
auauuuuccggccgacuugacca

SEQ ID NO: 44346 - RNA, 23 nt, Artificial Sequence
  Chemically synthesized
gaccaaucccauauccaaucuga

SEQ ID NO: 44347 - RNA, 23 nt, Artificial Sequence
  Chemically synthesized
accaaucccauauccaaucugag

SEQ ID NO: 44348 - RNA, 23 nt, Artificial Sequence
  Chemically synthesized
ccaaucccauauccaaucugagu

SEQ ID NO: 44349 - RNA, 23 nt, Artificial Sequence
  Chemically synthesized
caaucccauauccaaucugaguu

SEQ ID NO: 44350 - RNA, 23 nt, Artificial Sequence
  Chemically synthesized
aaucccauauccaaucugaguuu

SEQ ID NO: 44351 - RNA, 23 nt, Artificial Sequence
  Chemically synthesized
cccauauccaaucugaguuuuuc

SEQ ID NO: 44352 - RNA, 23 nt, Artificial Sequence
  Chemically synthesized
ccauauccaaucugaguuuuucu

SEQ ID NO: 44353 - RNA, 23 nt, Artificial Sequence
  Chemically synthesized
cauauccaaucugaguuuuucuu

SEQ ID NO: 44354 - RNA, 23 nt, Artificial Sequence
  Chemically synthesized
auauccaaucugaguuuuucuuc

SEQ ID NO: 44355 - RNA, 23 nt, Artificial Sequence
  Chemically synthesized
uauccaaucugaguuuuucuuca

SEQ ID NO: 44356 - RNA, 23 nt, Artificial Sequence
  Chemically synthesized
gaguuuuucuucaagaugcuuuc

SEQ ID NO: 44357 - RNA, 23 nt, Artificial Sequence
  Chemically synthesized
aguuuuucuucaagaugcuuuca

SEQ ID NO: 44358 - RNA, 23 nt, Artificial Sequence
  Chemically synthesized
guuuuucuucaagaugcuuucaa

SEQ ID NO: 44359 - RNA, 23 nt, Artificial Sequence
  Chemically synthesized
uuuuucuucaagaugcuuucaac

SEQ ID NO: 44360 - RNA, 23 nt, Artificial Sequence
  Chemically synthesized
uuuucuucaagaugcuuucaacu

SEQ ID NO: 44361 - RNA, 23 nt, Artificial Sequence
  Chemically synthesized
aggagaggauuaaauucaccaau

SEQ ID NO: 44362 - RNA, 23 nt, Artificial Sequence
  Chemically synthesized
aagcaagaagaguuuaguguacg

SEQ ID NO: 44363 - RNA, 23 nt, Artificial Sequence
  Chemically synthesized
agcaagaagaguuuaguguacga

SEQ ID NO: 44364 - RNA, 23 nt, Artificial Sequence
  Chemically synthesized
gcaagaagaguuuaguguacgaa

SEQ ID NO: 44365 - RNA, 23 nt, Artificial Sequence
  Chemically synthesized
caagaagaguuuaguguacgaac

SEQ ID NO: 44366 - RNA, 23 nt, Artificial Sequence
  Chemically synthesized
aagaagaguuuaguguacgaacu

SEQ ID NO: 44367 - RNA, 23 nt, Artificial Sequence
  Chemically synthesized
uuuguagcucuaucuugguuucu

SEQ ID NO: 44368 - RNA, 23 nt, Artificial Sequence
  Chemically synthesized
auaauacuuucuacaauagugug

SEQ ID NO: 44369 - RNA, 23 nt, Artificial Sequence
  Chemically synthesized
uaauacuuucuacaauaguguga

SEQ ID NO: 44370 - RNA, 23 nt, Artificial Sequence
  Chemically synthesized
aauacuuucuacaauagugugau

SEQ ID NO: 44371 - RNA, 23 nt, Artificial Sequence
  Chemically synthesized
auacuuucuacaauagugugaua

SEQ ID NO: 44372 - RNA, 23 nt, Artificial Sequence
  Chemically synthesized
uacuuucuacaauagugugauau

SEQ ID NO: 44373 - RNA, 23 nt, Artificial Sequence
  Chemically synthesized
acuaccaaauuuucacaguagac

SEQ ID NO: 44374 - RNA, 23 nt, Artificial Sequence
  Chemically synthesized
cuaccaaauuuucacaguagaca

SEQ ID NO: 44375 - RNA, 23 nt, Artificial Sequence
  Chemically synthesized
uaccaaauuuucacaguagacau

SEQ ID NO: 44376 - RNA, 23 nt, Artificial Sequence
  Chemically synthesized
agaacaaauaaacacaagugacg

SEQ ID NO: 44377 - RNA, 23 nt, Artificial Sequence
  Chemically synthesized
gaacaaauaaacacaagugacgu

SEQ ID NO: 44378 - RNA, 23 nt, Artificial Sequence
  Chemically synthesized
aacaaauaaacacaagugacgug

SEQ ID NO: 44379 - RNA, 23 nt, Artificial Sequence
  Chemically synthesized
acaaauaaacacaagugacgugg

SEQ ID NO: 44380 - RNA, 23 nt, Artificial Sequence
  Chemically synthesized
caaauaaacacaagugacguggc

SEQ ID NO: 44381 - RNA, 23 nt, Artificial Sequence
  Chemically synthesized
uugcaagcucagaaguaauccac

SEQ ID NO: 44382 - RNA, 23 nt, Artificial Sequence
  Chemically synthesized
ugcaagcucagaaguaauccacu

SEQ ID NO: 44383 - RNA, 23 nt, Artificial Sequence
  Chemically synthesized
gcaagcucagaaguaauccacua

SEQ ID NO: 44384 - RNA, 23 nt, Artificial Sequence
  Chemically synthesized
caagcucagaaguaauccacuaa

SEQ ID NO: 44385 - RNA, 23 nt, Artificial Sequence
  Chemically synthesized
aagcucagaaguaauccacuaac

SEQ ID NO: 44386 - RNA, 23 nt, Artificial Sequence
  Chemically synthesized
uuuuuuccaugucuccauuauaa

SEQ ID NO: 44387 - RNA, 23 nt, Artificial Sequence
  Chemically synthesized
uuuuuccaugucuccauuauaaa

SEQ ID NO: 44388 - RNA, 23 nt, Artificial Sequence
  Chemically synthesized
uuuuccaugucuccauuauaaau

SEQ ID NO: 44389 - RNA, 23 nt, Artificial Sequence
  Chemically synthesized
uuuccaugucuccauuauaaaua

SEQ ID NO: 44390 - RNA, 23 nt, Artificial Sequence
  Chemically synthesized
uuccaugucuccauuauaaauag

SEQ ID NO: 44391 - RNA, 23 nt, Artificial Sequence
  Chemically synthesized
ccgacuugaccaaucccauaucc

SEQ ID NO: 44392 - RNA, 23 nt, Artificial Sequence
  Chemically synthesized
cgacuugaccaaucccauaucca

SEQ ID NO: 44393 - RNA, 23 nt, Artificial Sequence
  Chemically synthesized
gacuugaccaaucccauauccaa

SEQ ID NO: 44394 - RNA, 23 nt, Artificial Sequence
  Chemically synthesized
acuugaccaaucccauauccaau

SEQ ID NO: 44395 - RNA, 23 nt, Artificial Sequence
  Chemically synthesized
cuugaccaaucccauauccaauc

SEQ ID NO: 44396 - RNA, 23 nt, Artificial Sequence
  Chemically synthesized
gcugaagugcaguucuacccagg

SEQ ID NO: 44397 - RNA, 23 nt, Artificial Sequence
  Chemically synthesized
cugaagugcaguucuacccagga

SEQ ID NO: 44398 - RNA, 23 nt, Artificial Sequence
  Chemically synthesized
ugaagugcaguucuacccaggag

SEQ ID NO: 44399 - RNA, 23 nt, Artificial Sequence
  Chemically synthesized
gaagugcaguucuacccaggagc

SEQ ID NO: 44400 - RNA, 23 nt, Artificial Sequence
  Chemically synthesized
aagugcaguucuacccaggagcc

SEQ ID NO: 44401 - RNA, 23 nt, Artificial Sequence
  Chemically synthesized
aguguacgaacuguacagcugag

SEQ ID NO: 44402 - RNA, 23 nt, Artificial Sequence
  Chemically synthesized
guguacgaacuguacagcugagu

SEQ ID NO: 44403 - RNA, 23 nt, Artificial Sequence
  Chemically synthesized
uguacgaacuguacagcugaguu

SEQ ID NO: 44404 - RNA, 23 nt, Artificial Sequence
  Chemically synthesized
guacgaacuguacagcugaguuu

SEQ ID NO: 44405 - RNA, 23 nt, Artificial Sequence
  Chemically synthesized
aucuugguuucuguugauuauga

SEQ ID NO: 44406 - RNA, 23 nt, Artificial Sequence
  Chemically synthesized
ucuugguuucuguugauuaugaa

SEQ ID NO: 44407 - RNA, 23 nt, Artificial Sequence
  Chemically synthesized
cuugguuucuguugauuaugaac

SEQ ID NO: 44408 - RNA, 23 nt, Artificial Sequence
  Chemically synthesized
uugguuucuguugauuaugaaca

SEQ ID NO: 44409 - RNA, 23 nt, Artificial Sequence
  Chemically synthesized
ugguuucuguugauuaugaacaa

SEQ ID NO: 44410 - RNA, 23 nt, Artificial Sequence
  Chemically synthesized
uacagaacaaauaaacacaagug

SEQ ID NO: 44411 - RNA, 23 nt, Artificial Sequence
  Chemically synthesized
acagaacaaauaaacacaaguga

SEQ ID NO: 44412 - RNA, 23 nt, Artificial Sequence
  Chemically synthesized
cagaacaaauaaacacaagugac

SEQ ID NO: 44413 - RNA, 23 nt, Artificial Sequence
  Chemically synthesized
aaauaaacacaagugacguggcc

SEQ ID NO: 44414 - RNA, 23 nt, Artificial Sequence
  Chemically synthesized
ucagaaguaauccacuaacgaac

SEQ ID NO: 44415 - RNA, 23 nt, Artificial Sequence
  Chemically synthesized
cagaaguaauccacuaacgaacc

SEQ ID NO: 44416 - RNA, 23 nt, Artificial Sequence
  Chemically synthesized
agaaguaauccacuaacgaacca

SEQ ID NO: 44417 - RNA, 23 nt, Artificial Sequence
  Chemically synthesized
gaaguaauccacuaacgaaccaa

SEQ ID NO: 44418 - RNA, 23 nt, Artificial Sequence
  Chemically synthesized
aaguaauccacuaacgaaccaag

SEQ ID NO: 44419 - RNA, 23 nt, Artificial Sequence
  Chemically synthesized
aguaauccacuaacgaaccaagu

SEQ ID NO: 44420 - RNA, 23 nt, Artificial Sequence
  Chemically synthesized
guaauccacuaacgaaccaaguc

SEQ ID NO: 44421 - RNA, 23 nt, Artificial Sequence
  Chemically synthesized
uaauccacuaacgaaccaaguca

SEQ ID NO: 44422 - RNA, 23 nt, Artificial Sequence
  Chemically synthesized
uccauuauaaauagaaaccgagg

SEQ ID NO: 44423 - RNA, 23 nt, Artificial Sequence
  Chemically synthesized
uaaauagaaaccgaggcuggaac

SEQ ID NO: 44424 - RNA, 23 nt, Artificial Sequence
  Chemically synthesized
gcgcuucggguguuuaaagagga

SEQ ID NO: 44425 - RNA, 23 nt, Artificial Sequence
  Chemically synthesized
cgcuucggguguuuaaagaggaa

SEQ ID NO: 44426 - RNA, 23 nt, Artificial Sequence
  Chemically synthesized
gcuucggguguuuaaagaggaac

SEQ ID NO: 44427 - RNA, 23 nt, Artificial Sequence
  Chemically synthesized
cuucggguguuuaaagaggaacu

SEQ ID NO: 44428 - RNA, 23 nt, Artificial Sequence
  Chemically synthesized
uucggguguuuaaagaggaacuc

SEQ ID NO: 44429 - RNA, 23 nt, Artificial Sequence
  Chemically synthesized
uauuuuccggccgacuugaccaa

SEQ ID NO: 44430 - RNA, 23 nt, Artificial Sequence
  Chemically synthesized
uccuucuuucaauaucaucuucc

SEQ ID NO: 44431 - RNA, 23 nt, Artificial Sequence
  Chemically synthesized
ccuucuuucaauaucaucuuccu

SEQ ID NO: 44432 - RNA, 23 nt, Artificial Sequence
  Chemically synthesized
cuucuuucaauaucaucuuccuc

SEQ ID NO: 44433 - RNA, 23 nt, Artificial Sequence
  Chemically synthesized
uucuuucaauaucaucuuccuca

SEQ ID NO: 44434 - RNA, 23 nt, Artificial Sequence
  Chemically synthesized
ucuuucaauaucaucuuccucag

SEQ ID NO: 44435 - RNA, 23 nt, Artificial Sequence
  Chemically synthesized
aaugcuauggguaucuguuucag

SEQ ID NO: 44436 - RNA, 23 nt, Artificial Sequence
  Chemically synthesized
augcuauggguaucuguuucaga

SEQ ID NO: 44437 - RNA, 23 nt, Artificial Sequence
  Chemically synthesized
ugcuauggguaucuguuucagaa

SEQ ID NO: 44438 - RNA, 23 nt, Artificial Sequence
  Chemically synthesized
gcuauggguaucuguuucagaag

SEQ ID NO: 44439 - RNA, 23 nt, Artificial Sequence
  Chemically synthesized
cuauggguaucuguuucagaagc

SEQ ID NO: 44440 - RNA, 23 nt, Artificial Sequence
  Chemically synthesized
cacacaaaaguugaacacaaagg

SEQ ID NO: 44441 - RNA, 23 nt, Artificial Sequence
  Chemically synthesized
caaaagcaagaagaguuuagugu

SEQ ID NO: 44442 - RNA, 23 nt, Artificial Sequence
  Chemically synthesized
aaaagcaagaagaguuuagugua

SEQ ID NO: 44443 - RNA, 23 nt, Artificial Sequence
  Chemically synthesized
aaagcaagaagaguuuaguguac

SEQ ID NO: 44444 - RNA, 23 nt, Artificial Sequence
  Chemically synthesized
gcugaguuuguagcucuaucuug

SEQ ID NO: 44445 - RNA, 23 nt, Artificial Sequence
  Chemically synthesized
uuguagcucuaucuugguuucug

SEQ ID NO: 44446 - RNA, 23 nt, Artificial Sequence
  Chemically synthesized
agacauuaaucagucugacaugc

SEQ ID NO: 44447 - RNA, 23 nt, Artificial Sequence
  Chemically synthesized
gacauuaaucagucugacaugcu

SEQ ID NO: 44448 - RNA, 23 nt, Artificial Sequence
  Chemically synthesized
acauuaaucagucugacaugcuu

SEQ ID NO: 44449 - RNA, 23 nt, Artificial Sequence
  Chemically synthesized
cauuaaucagucugacaugcuua

SEQ ID NO: 44450 - RNA, 23 nt, Artificial Sequence
  Chemically synthesized
auuaaucagucugacaugcuuau

SEQ ID NO: 44451 - RNA, 23 nt, Artificial Sequence
  Chemically synthesized
augcuuauugaucccauaggugu

SEQ ID NO: 44452 - RNA, 23 nt, Artificial Sequence
  Chemically synthesized
ugcuuauugaucccauaggugua

SEQ ID NO: 44453 - RNA, 23 nt, Artificial Sequence
  Chemically synthesized
gcuuauugaucccauagguguaa

SEQ ID NO: 44454 - RNA, 23 nt, Artificial Sequence
  Chemically synthesized
cuuauugaucccauagguguaau

SEQ ID NO: 44455 - RNA, 23 nt, Artificial Sequence
  Chemically synthesized
uuauugaucccauagguguaauu

SEQ ID NO: 44456 - RNA, 23 nt, Artificial Sequence
  Chemically synthesized
uauugaucccauagguguaauua

SEQ ID NO: 44457 - RNA, 23 nt, Artificial Sequence
  Chemically synthesized
auugaucccauagguguaauuau

SEQ ID NO: 44458 - RNA, 23 nt, Artificial Sequence
  Chemically synthesized
uuacuaaauuaggaacgcagcau

SEQ ID NO: 44459 - RNA, 23 nt, Artificial Sequence
  Chemically synthesized
uacuaaauuaggaacgcagcauu

SEQ ID NO: 44460 - RNA, 23 nt, Artificial Sequence
  Chemically synthesized
caggaucuaacagcucuucagug

SEQ ID NO: 44461 - RNA, 23 nt, Artificial Sequence
  Chemically synthesized
aauccacuaacgaaccaagucag

SEQ ID NO: 44462 - RNA, 23 nt, Artificial Sequence
  Chemically synthesized
cacuaacgaaccaagucagacuc

SEQ ID NO: 44463 - RNA, 23 nt, Artificial Sequence
  Chemically synthesized
acuaacgaaccaagucagacucc

SEQ ID NO: 44464 - RNA, 23 nt, Artificial Sequence
  Chemically synthesized
cuaacgaaccaagucagacucca

SEQ ID NO: 44465 - RNA, 23 nt, Artificial Sequence
  Chemically synthesized
uaacgaaccaagucagacuccag

SEQ ID NO: 44466 - RNA, 23 nt, Artificial Sequence
  Chemically synthesized
aacgaaccaagucagacuccagu

SEQ ID NO: 44467 - RNA, 23 nt, Artificial Sequence
  Chemically synthesized
auuuuccggccgacuugaccaau

SEQ ID NO: 44468 - RNA, 23 nt, Artificial Sequence
  Chemically synthesized
cuuucaauaucaucuuccucaga

SEQ ID NO: 44469 - RNA, 23 nt, Artificial Sequence
  Chemically synthesized
uuucaauaucaucuuccucagac

SEQ ID NO: 44470 - RNA, 23 nt, Artificial Sequence
  Chemically synthesized
uucaauaucaucuuccucagacu

SEQ ID NO: 44471 - RNA, 23 nt, Artificial Sequence
  Chemically synthesized
ucaauaucaucuuccucagacug

SEQ ID NO: 44472 - RNA, 23 nt, Artificial Sequence
  Chemically synthesized
caauaucaucuuccucagacugu

SEQ ID NO: 44473 - RNA, 23 nt, Artificial Sequence
  Chemically synthesized
aauaucaucuuccucagacugug

SEQ ID NO: 44474 - RNA, 23 nt, Artificial Sequence
  Chemically synthesized
auaucaucuuccucagacuguga

SEQ ID NO: 44475 - RNA, 23 nt, Artificial Sequence
  Chemically synthesized
uaucaucuuccucagacugugag

SEQ ID NO: 44476 - RNA, 23 nt, Artificial Sequence
  Chemically synthesized
aucaucuuccucagacugugagc

SEQ ID NO: 44477 - RNA, 23 nt, Artificial Sequence
  Chemically synthesized
ccaaugcuauggguaucuguuuc

SEQ ID NO: 44478 - RNA, 23 nt, Artificial Sequence
  Chemically synthesized
caaugcuauggguaucuguuuca

SEQ ID NO: 44479 - RNA, 23 nt, Artificial Sequence
  Chemically synthesized
agugugauauauaaggccacaau

SEQ ID NO: 44480 - RNA, 23 nt, Artificial Sequence
  Chemically synthesized
auuuucacaguagacauuaauca

SEQ ID NO: 44481 - RNA, 23 nt, Artificial Sequence
  Chemically synthesized
uuuucacaguagacauuaaucag

SEQ ID NO: 44482 - RNA, 23 nt, Artificial Sequence
  Chemically synthesized
uuucacaguagacauuaaucagu

SEQ ID NO: 44483 - RNA, 23 nt, Artificial Sequence
  Chemically synthesized
uucacaguagacauuaaucaguc

SEQ ID NO: 44484 - RNA, 23 nt, Artificial Sequence
  Chemically synthesized
ucacaguagacauuaaucagucu

SEQ ID NO: 44485 - RNA, 23 nt, Artificial Sequence
  Chemically synthesized
uaaauuaggaacgcagcauuuac

SEQ ID NO: 44486 - RNA, 23 nt, Artificial Sequence
  Chemically synthesized
aaauuaggaacgcagcauuuaca

SEQ ID NO: 44487 - RNA, 23 nt, Artificial Sequence
  Chemically synthesized
aauuaggaacgcagcauuuacag

SEQ ID NO: 44488 - RNA, 23 nt, Artificial Sequence
  Chemically synthesized
auuaggaacgcagcauuuacaga

SEQ ID NO: 44489 - RNA, 23 nt, Artificial Sequence
  Chemically synthesized
uuaggaacgcagcauuuacagaa

SEQ ID NO: 44490 - RNA, 23 nt, Artificial Sequence
  Chemically synthesized
uaggaacgcagcauuuacagaac

SEQ ID NO: 44491 - RNA, 23 nt, Artificial Sequence
  Chemically synthesized
agcucagaaguaauccacuaacg

SEQ ID NO: 44492 - RNA, 23 nt, Artificial Sequence
  Chemically synthesized
gcucagaaguaauccacuaacga

SEQ ID NO: 44493 - RNA, 23 nt, Artificial Sequence
  Chemically synthesized
cucagaaguaauccacuaacgaa

SEQ ID NO: 44494 - RNA, 23 nt, Artificial Sequence
  Chemically synthesized
auccaaucugaguuuuucuucaa

SEQ ID NO: 44495 - RNA, 23 nt, Artificial Sequence
  Chemically synthesized
uccaaucugaguuuuucuucaag

SEQ ID NO: 44496 - RNA, 23 nt, Artificial Sequence
  Chemically synthesized
ccaaucugaguuuuucuucaaga

SEQ ID NO: 44497 - RNA, 23 nt, Artificial Sequence
  Chemically synthesized
caaucugaguuuuucuucaagau

SEQ ID NO: 44498 - RNA, 23 nt, Artificial Sequence
  Chemically synthesized
aucugaguuuuucuucaagaugc

SEQ ID NO: 44499 - RNA, 23 nt, Artificial Sequence
  Chemically synthesized
ucugaguuuuucuucaagaugcu

SEQ ID NO: 44500 - RNA, 23 nt, Artificial Sequence
  Chemically synthesized
cugaguuuuucuucaagaugcuu

SEQ ID NO: 44501 - RNA, 23 nt, Artificial Sequence
  Chemically synthesized
ugaguuuuucuucaagaugcuuu

SEQ ID NO: 44502 - RNA, 23 nt, Artificial Sequence
  Chemically synthesized
uuucuucaagaugcuuucaacuu

SEQ ID NO: 44503 - RNA, 23 nt, Artificial Sequence
  Chemically synthesized
uucuucaagaugcuuucaacuuc

SEQ ID NO: 44504 - RNA, 23 nt, Artificial Sequence
  Chemically synthesized
ucuucaagaugcuuucaacuucu

SEQ ID NO: 44505 - RNA, 23 nt, Artificial Sequence
  Chemically synthesized
cuucaagaugcuuucaacuucuu

SEQ ID NO: 44506 - RNA, 23 nt, Artificial Sequence
  Chemically synthesized
uucaagaugcuuucaacuucuuu

SEQ ID NO: 44507 - RNA, 23 nt, Artificial Sequence
  Chemically synthesized
ucaagaugcuuucaacuucuuuc

SEQ ID NO: 44508 - RNA, 23 nt, Artificial Sequence
  Chemically synthesized
ugcuuucaacuucuuuccuucuu

SEQ ID NO: 44509 - RNA, 23 nt, Artificial Sequence
  Chemically synthesized
gcuuucaacuucuuuccuucuuu

SEQ ID NO: 44510 - RNA, 23 nt, Artificial Sequence
  Chemically synthesized
cuuucaacuucuuuccuucuuuc

SEQ ID NO: 44511 - RNA, 23 nt, Artificial Sequence
  Chemically synthesized
uuucaacuucuuuccuucuuuca

SEQ ID NO: 44512 - RNA, 23 nt, Artificial Sequence
  Chemically synthesized
uucaacuucuuuccuucuuucaa

SEQ ID NO: 44513 - RNA, 23 nt, Artificial Sequence
  Chemically synthesized
ucaucuuccucagacugugagcu

SEQ ID NO: 44514 - RNA, 23 nt, Artificial Sequence
  Chemically synthesized
uuaauuccuuauaaugcaaaagc

SEQ ID NO: 44515 - RNA, 23 nt, Artificial Sequence
  Chemically synthesized
uaauuccuuauaaugcaaaagca

SEQ ID NO: 44516 - RNA, 23 nt, Artificial Sequence
  Chemically synthesized
aauuccuuauaaugcaaaagcaa

SEQ ID NO: 44517 - RNA, 23 nt, Artificial Sequence
  Chemically synthesized
auuccuuauaaugcaaaagcaag

SEQ ID NO: 44518 - RNA, 23 nt, Artificial Sequence
  Chemically synthesized
uuccuuauaaugcaaaagcaaga

SEQ ID NO: 44519 - RNA, 23 nt, Artificial Sequence
  Chemically synthesized
gcaaaagcaagaagaguuuagug

SEQ ID NO: 44520 - RNA, 23 nt, Artificial Sequence
  Chemically synthesized
agaagaguuuaguguacgaacug

SEQ ID NO: 44521 - RNA, 23 nt, Artificial Sequence
  Chemically synthesized
gcucuaucuugguuucuguugau

SEQ ID NO: 44522 - RNA, 23 nt, Artificial Sequence
  Chemically synthesized
cucuaucuugguuucuguugauu

SEQ ID NO: 44523 - RNA, 23 nt, Artificial Sequence
  Chemically synthesized
ucuaucuugguuucuguugauua

SEQ ID NO: 44524 - RNA, 23 nt, Artificial Sequence
  Chemically synthesized
cuaucuugguuucuguugauuau

SEQ ID NO: 44525 - RNA, 23 nt, Artificial Sequence
  Chemically synthesized
uaucuugguuucuguugauuaug

SEQ ID NO: 44526 - RNA, 23 nt, Artificial Sequence
  Chemically synthesized
agucugacaugcuuauugauccc

SEQ ID NO: 44527 - RNA, 23 nt, Artificial Sequence
  Chemically synthesized
gucugacaugcuuauugauccca

SEQ ID NO: 44528 - RNA, 23 nt, Artificial Sequence
  Chemically synthesized
ucugacaugcuuauugaucccau

SEQ ID NO: 44529 - RNA, 23 nt, Artificial Sequence
  Chemically synthesized
cugacaugcuuauugaucccaua

SEQ ID NO: 44530 - RNA, 23 nt, Artificial Sequence
  Chemically synthesized
ugacaugcuuauugaucccauag

SEQ ID NO: 44531 - RNA, 23 nt, Artificial Sequence
  Chemically synthesized
acuaaauuaggaacgcagcauuu

SEQ ID NO: 44532 - RNA, 23 nt, Artificial Sequence
  Chemically synthesized
cuaaauuaggaacgcagcauuua

SEQ ID NO: 44533 - RNA, 23 nt, Artificial Sequence
  Chemically synthesized
aggaacgcagcauuuacagaaca

SEQ ID NO: 44534 - RNA, 23 nt, Artificial Sequence
  Chemically synthesized
ggaacgcagcauuuacagaacaa

SEQ ID NO: 44535 - RNA, 23 nt, Artificial Sequence
  Chemically synthesized
gaacgcagcauuuacagaacaaa

SEQ ID NO: 44536 - RNA, 23 nt, Artificial Sequence
  Chemically synthesized
aacgcagcauuuacagaacaaau

SEQ ID NO: 44537 - RNA, 23 nt, Artificial Sequence
  Chemically synthesized
acgaaccaagucagacuccaguu

SEQ ID NO: 44538 - RNA, 23 nt, Artificial Sequence
  Chemically synthesized
cagacgccuuccaauauagaucc

SEQ ID NO: 44539 - RNA, 23 nt, Artificial Sequence
  Chemically synthesized
agacgccuuccaauauagauccc

SEQ ID NO: 44540 - RNA, 23 nt, Artificial Sequence
  Chemically synthesized
gacgccuuccaauauagaucccc

SEQ ID NO: 44541 - RNA, 23 nt, Artificial Sequence
  Chemically synthesized
acgccuuccaauauagaucccca

SEQ ID NO: 44542 - RNA, 23 nt, Artificial Sequence
  Chemically synthesized
cgccuuccaauauagauccccaa

SEQ ID NO: 44543 - RNA, 23 nt, Artificial Sequence
  Chemically synthesized
gccuuccaauauagauccccaau

SEQ ID NO: 44544 - RNA, 23 nt, Artificial Sequence
  Chemically synthesized
ugcugaagugcaguucuacccag

SEQ ID NO: 44545 - RNA, 23 nt, Artificial Sequence
  Chemically synthesized
ugaccaaucccauauccaaucug

SEQ ID NO: 44546 - RNA, 23 nt, Artificial Sequence
  Chemically synthesized
cccguucccauuauugcugaagu

SEQ ID NO: 44547 - RNA, 23 nt, Artificial Sequence
  Chemically synthesized
ccguucccauuauugcugaagug

SEQ ID NO: 44548 - RNA, 23 nt, Artificial Sequence
  Chemically synthesized
cguucccauuauugcugaagugc

SEQ ID NO: 44549 - RNA, 23 nt, Artificial Sequence
  Chemically synthesized
guucccauuauugcugaagugca

SEQ ID NO: 44550 - RNA, 23 nt, Artificial Sequence
  Chemically synthesized
uucccauuauugcugaagugcag

SEQ ID NO: 44551 - RNA, 23 nt, Artificial Sequence
  Chemically synthesized
agcccuguugguaucuuguggug

SEQ ID NO: 44552 - RNA, 23 nt, Artificial Sequence
  Chemically synthesized
gcccuguugguaucuuguggugu

SEQ ID NO: 44553 - RNA, 23 nt, Artificial Sequence
  Chemically synthesized
cccuguugguaucuugugguguc

SEQ ID NO: 44554 - RNA, 23 nt, Artificial Sequence
  Chemically synthesized
ccuguugguaucuuguggugucu

SEQ ID NO: 44555 - RNA, 23 nt, Artificial Sequence
  Chemically synthesized
cuguugguaucuuguggugucug

SEQ ID NO: 44556 - RNA, 23 nt, Artificial Sequence
  Chemically synthesized
uguagcucuaucuugguuucugu

SEQ ID NO: 44557 - RNA, 23 nt, Artificial Sequence
  Chemically synthesized
guagcucuaucuugguuucuguu

SEQ ID NO: 44558 - RNA, 23 nt, Artificial Sequence
  Chemically synthesized
uagcucuaucuugguuucuguug

SEQ ID NO: 44559 - RNA, 23 nt, Artificial Sequence
  Chemically synthesized
ucuuuaguagacaaccugcaucc

SEQ ID NO: 44560 - RNA, 23 nt, Artificial Sequence
  Chemically synthesized
cuuuaguagacaaccugcaucca

SEQ ID NO: 44561 - RNA, 23 nt, Artificial Sequence
  Chemically synthesized
uuuaguagacaaccugcauccau

SEQ ID NO: 44562 - RNA, 23 nt, Artificial Sequence
  Chemically synthesized
uuaguagacaaccugcauccauu

SEQ ID NO: 44563 - RNA, 23 nt, Artificial Sequence
  Chemically synthesized
uaguagacaaccugcauccauuu

SEQ ID NO: 44564 - RNA, 23 nt, Artificial Sequence
  Chemically synthesized
uaaaauacaacacacaucaugac

SEQ ID NO: 44565 - RNA, 23 nt, Artificial Sequence
  Chemically synthesized
aaaauacaacacacaucaugacu

SEQ ID NO: 44566 - RNA, 23 nt, Artificial Sequence
  Chemically synthesized
aaauacaacacacaucaugacua

SEQ ID NO: 44567 - RNA, 23 nt, Artificial Sequence
  Chemically synthesized
aauacaacacacaucaugacuag

SEQ ID NO: 44568 - RNA, 23 nt, Artificial Sequence
  Chemically synthesized
auacaacacacaucaugacuagu

SEQ ID NO: 44569 - RNA, 23 nt, Artificial Sequence
  Chemically synthesized
cagucugacaugcuuauugaucc

SEQ ID NO: 44570 - RNA, 23 nt, Artificial Sequence
  Chemically synthesized
gagcuauguugcaagcucagaag

SEQ ID NO: 44571 - RNA, 23 nt, Artificial Sequence
  Chemically synthesized
agcuauguugcaagcucagaagu

SEQ ID NO: 44572 - RNA, 23 nt, Artificial Sequence
  Chemically synthesized
gcuauguugcaagcucagaagua

SEQ ID NO: 44573 - RNA, 23 nt, Artificial Sequence
  Chemically synthesized
cuauguugcaagcucagaaguaa

SEQ ID NO: 44574 - RNA, 23 nt, Artificial Sequence
  Chemically synthesized
uauguugcaagcucagaaguaau

SEQ ID NO: 44575 - RNA, 23 nt, Artificial Sequence
  Chemically synthesized
ccacuaacgaaccaagucagacu

SEQ ID NO: 44576 - RNA, 23 nt, Artificial Sequence
  Chemically synthesized
cgaaccaagucagacuccaguuc

SEQ ID NO: 44577 - RNA, 23 nt, Artificial Sequence
  Chemically synthesized
gaaccaagucagacuccaguucu

SEQ ID NO: 44578 - RNA, 23 nt, Artificial Sequence
  Chemically synthesized
aaccaagucagacuccaguucuu

SEQ ID NO: 44579 - RNA, 23 nt, Artificial Sequence
  Chemically synthesized
gcccccuuucuucaugacgcucg

SEQ ID NO: 44580 - RNA, 23 nt, Artificial Sequence
  Chemically synthesized
cccccuuucuucaugacgcucgu

SEQ ID NO: 44581 - RNA, 23 nt, Artificial Sequence
  Chemically synthesized
ccccuuucuucaugacgcucgug

SEQ ID NO: 44582 - RNA, 23 nt, Artificial Sequence
  Chemically synthesized
cccuuucuucaugacgcucgugu

SEQ ID NO: 44583 - RNA, 23 nt, Artificial Sequence
  Chemically synthesized
ccuuucuucaugacgcucguguu

SEQ ID NO: 44584 - RNA, 23 nt, Artificial Sequence
  Chemically synthesized
ucaacuucuuuccuucuuucaau

SEQ ID NO: 44585 - RNA, 23 nt, Artificial Sequence
  Chemically synthesized
caacuucuuuccuucuuucaaua

SEQ ID NO: 44586 - RNA, 23 nt, Artificial Sequence
  Chemically synthesized
aacuucuuuccuucuuucaauau

SEQ ID NO: 44587 - RNA, 23 nt, Artificial Sequence
  Chemically synthesized
aauaaagcugauuuuaaaagcac

SEQ ID NO: 44588 - RNA, 23 nt, Artificial Sequence
  Chemically synthesized
auaaagcugauuuuaaaagcaca

SEQ ID NO: 44589 - RNA, 23 nt, Artificial Sequence
  Chemically synthesized
uaaagcugauuuuaaaagcacac

SEQ ID NO: 44590 - RNA, 23 nt, Artificial Sequence
  Chemically synthesized
caccaaugcagagugauaaagag

SEQ ID NO: 44591 - RNA, 23 nt, Artificial Sequence
  Chemically synthesized
accaaugcagagugauaaagagg

SEQ ID NO: 44592 - RNA, 23 nt, Artificial Sequence
  Chemically synthesized
ccaaugcagagugauaaagagga

SEQ ID NO: 44593 - RNA, 23 nt, Artificial Sequence
  Chemically synthesized
caaugcagagugauaaagaggaa

SEQ ID NO: 44594 - RNA, 23 nt, Artificial Sequence
  Chemically synthesized
aaugcagagugauaaagaggaaa

SEQ ID NO: 44595 - RNA, 23 nt, Artificial Sequence
  Chemically synthesized
gugugauauauaaggccacaaua

SEQ ID NO: 44596 - RNA, 23 nt, Artificial Sequence
  Chemically synthesized
uuuaaaauacaacacacaucaug

SEQ ID NO: 44597 - RNA, 23 nt, Artificial Sequence
  Chemically synthesized
uuaaaauacaacacacaucauga

SEQ ID NO: 44598 - RNA, 23 nt, Artificial Sequence
  Chemically synthesized
uacaacacacaucaugacuagua

SEQ ID NO: 44599 - RNA, 23 nt, Artificial Sequence
  Chemically synthesized
acaacacacaucaugacuaguau

SEQ ID NO: 44600 - RNA, 23 nt, Artificial Sequence
  Chemically synthesized
caacacacaucaugacuaguaua

SEQ ID NO: 44601 - RNA, 23 nt, Artificial Sequence
  Chemically synthesized
cacaguagacauuaaucagucug

SEQ ID NO: 44602 - RNA, 23 nt, Artificial Sequence
  Chemically synthesized
acaguagacauuaaucagucuga

SEQ ID NO: 44603 - RNA, 23 nt, Artificial Sequence
  Chemically synthesized
gacaugcuuauugaucccauagg

SEQ ID NO: 44604 - RNA, 23 nt, Artificial Sequence
  Chemically synthesized
acaugcuuauugaucccauaggu

SEQ ID NO: 44605 - RNA, 23 nt, Artificial Sequence
  Chemically synthesized
caugcuuauugaucccauaggug

SEQ ID NO: 44606 - RNA, 23 nt, Artificial Sequence
  Chemically synthesized
uuuacagaacaaauaaacacaag

SEQ ID NO: 44607 - RNA, 23 nt, Artificial Sequence
  Chemically synthesized
uuacagaacaaauaaacacaagu

SEQ ID NO: 44608 - RNA, 23 nt, Artificial Sequence
  Chemically synthesized
uguugcaagcucagaaguaaucc

SEQ ID NO: 44609 - RNA, 23 nt, Artificial Sequence
  Chemically synthesized
guugcaagcucagaaguaaucca

SEQ ID NO: 44610 - RNA, 23 nt, Artificial Sequence
  Chemically synthesized
auccacuaacgaaccaagucaga

SEQ ID NO: 44611 - RNA, 23 nt, Artificial Sequence
  Chemically synthesized
uccacuaacgaaccaagucagac

SEQ ID NO: 44612 - RNA, 23 nt, Artificial Sequence
  Chemically synthesized
uugaccaaucccauauccaaucu

SEQ ID NO: 44613 - RNA, 23 nt, Artificial Sequence
  Chemically synthesized
agauuugcuuagaauaaagcuga

SEQ ID NO: 44614 - RNA, 23 nt, Artificial Sequence
  Chemically synthesized
gauuugcuuagaauaaagcugau

SEQ ID NO: 44615 - RNA, 23 nt, Artificial Sequence
  Chemically synthesized
auuugcuuagaauaaagcugauu

SEQ ID NO: 44616 - RNA, 23 nt, Artificial Sequence
  Chemically synthesized
uuugcuuagaauaaagcugauuu

SEQ ID NO: 44617 - RNA, 23 nt, Artificial Sequence
  Chemically synthesized
uugcuuagaauaaagcugauuuu

SEQ ID NO: 44618 - RNA, 23 nt, Artificial Sequence
  Chemically synthesized
aaagaggaaaagauacugaguag

SEQ ID NO: 44619 - RNA, 23 nt, Artificial Sequence
  Chemically synthesized
aagaggaaaagauacugaguagg

SEQ ID NO: 44620 - RNA, 23 nt, Artificial Sequence
  Chemically synthesized
agaggaaaagauacugaguaggu

SEQ ID NO: 44621 - RNA, 23 nt, Artificial Sequence
  Chemically synthesized
gaggaaaagauacugaguaggug

SEQ ID NO: 44622 - RNA, 23 nt, Artificial Sequence
  Chemically synthesized
aggaaaagauacugaguaggugc

SEQ ID NO: 44623 - RNA, 23 nt, Artificial Sequence
  Chemically synthesized
agcucuaucuugguuucuguuga

SEQ ID NO: 44624 - RNA, 23 nt, Artificial Sequence
  Chemically synthesized
uugucagacgccuuccaauauag

SEQ ID NO: 44625 - RNA, 23 nt, Artificial Sequence
  Chemically synthesized
ugucagacgccuuccaauauaga

SEQ ID NO: 44626 - RNA, 23 nt, Artificial Sequence
  Chemically synthesized
gucagacgccuuccaauauagau

SEQ ID NO: 44627 - RNA, 23 nt, Artificial Sequence
  Chemically synthesized
ucagacgccuuccaauauagauc

SEQ ID NO: 44628 - RNA, 23 nt, Artificial Sequence
  Chemically synthesized
uccgauggccagcaaaugagaga

SEQ ID NO: 44629 - RNA, 23 nt, Artificial Sequence
  Chemically synthesized
ccgauggccagcaaaugagagag

SEQ ID NO: 44630 - RNA, 23 nt, Artificial Sequence
  Chemically synthesized
cgauggccagcaaaugagagagc

SEQ ID NO: 44631 - RNA, 23 nt, Artificial Sequence
  Chemically synthesized
gauggccagcaaaugagagagca

SEQ ID NO: 44632 - RNA, 23 nt, Artificial Sequence
  Chemically synthesized
auggccagcaaaugagagagcag

SEQ ID NO: 44633 - RNA, 23 nt, Artificial Sequence
  Chemically synthesized
cuuucuucaugacgcucguguuc

SEQ ID NO: 44634 - RNA, 23 nt, Artificial Sequence
  Chemically synthesized
cugugagcuguuuuucucuccaa

SEQ ID NO: 44635 - RNA, 23 nt, Artificial Sequence
  Chemically synthesized
ugugagcuguuuuucucuccaau

SEQ ID NO: 44636 - RNA, 23 nt, Artificial Sequence
  Chemically synthesized
gugagcuguuuuucucuccaaug

SEQ ID NO: 44637 - RNA, 23 nt, Artificial Sequence
  Chemically synthesized
ugagcuguuuuucucuccaaugc

SEQ ID NO: 44638 - RNA, 23 nt, Artificial Sequence
  Chemically synthesized
gagcuguuuuucucuccaaugcu

SEQ ID NO: 44639 - RNA, 23 nt, Artificial Sequence
  Chemically synthesized
agcuguuuuucucuccaaugcua

SEQ ID NO: 44640 - RNA, 23 nt, Artificial Sequence
  Chemically synthesized
gcuguuuuucucuccaaugcuau

SEQ ID NO: 44641 - RNA, 23 nt, Artificial Sequence
  Chemically synthesized
cuguuuuucucuccaaugcuaug

SEQ ID NO: 44642 - RNA, 23 nt, Artificial Sequence
  Chemically synthesized
cagauuugcuuagaauaaagcug

SEQ ID NO: 44643 - RNA, 23 nt, Artificial Sequence
  Chemically synthesized
gagugauaaagaggaaaagauac

SEQ ID NO: 44644 - RNA, 23 nt, Artificial Sequence
  Chemically synthesized
agugauaaagaggaaaagauacu

SEQ ID NO: 44645 - RNA, 23 nt, Artificial Sequence
  Chemically synthesized
gugauaaagaggaaaagauacug

SEQ ID NO: 44646 - RNA, 23 nt, Artificial Sequence
  Chemically synthesized
ugauaaagaggaaaagauacuga

SEQ ID NO: 44647 - RNA, 23 nt, Artificial Sequence
  Chemically synthesized
gauaaagaggaaaagauacugag

SEQ ID NO: 44648 - RNA, 23 nt, Artificial Sequence
  Chemically synthesized
accaaauuuucacaguagacauu

SEQ ID NO: 44649 - RNA, 23 nt, Artificial Sequence
  Chemically synthesized
ccaaauuuucacaguagacauua

SEQ ID NO: 44650 - RNA, 23 nt, Artificial Sequence
  Chemically synthesized
caaauuuucacaguagacauuaa

SEQ ID NO: 44651 - RNA, 23 nt, Artificial Sequence
  Chemically synthesized
uuaaucagucugacaugcuuauu

SEQ ID NO: 44652 - RNA, 23 nt, Artificial Sequence
  Chemically synthesized
aaucagucugacaugcuuauuga

SEQ ID NO: 44653 - RNA, 23 nt, Artificial Sequence
  Chemically synthesized
aucagucugacaugcuuauugau

SEQ ID NO: 44654 - RNA, 23 nt, Artificial Sequence
  Chemically synthesized
ucagucugacaugcuuauugauc

SEQ ID NO: 44655 - RNA, 23 nt, Artificial Sequence
  Chemically synthesized
uggccagcaaaugagagagcagc

SEQ ID NO: 44656 - RNA, 23 nt, Artificial Sequence
  Chemically synthesized
uuuuaaaguagacacagauuugc

SEQ ID NO: 44657 - RNA, 23 nt, Artificial Sequence
  Chemically synthesized
uuuaaaguagacacagauuugcu

SEQ ID NO: 44658 - RNA, 23 nt, Artificial Sequence
  Chemically synthesized
uuaaaguagacacagauuugcuu

SEQ ID NO: 44659 - RNA, 23 nt, Artificial Sequence
  Chemically synthesized
uaaaguagacacagauuugcuua

SEQ ID NO: 44660 - RNA, 23 nt, Artificial Sequence
  Chemically synthesized
augcagagugauaaagaggaaaa

SEQ ID NO: 44661 - RNA, 23 nt, Artificial Sequence
  Chemically synthesized
uaaucagucugacaugcuuauug

SEQ ID NO: 44662 - RNA, 23 nt, Artificial Sequence
  Chemically synthesized
cuuuccuucuuucaauaucaucu

SEQ ID NO: 44663 - RNA, 23 nt, Artificial Sequence
  Chemically synthesized
uuuccuucuuucaauaucaucuu

SEQ ID NO: 44664 - RNA, 23 nt, Artificial Sequence
  Chemically synthesized
uuccuucuuucaauaucaucuuc

SEQ ID NO: 44665 - RNA, 23 nt, Artificial Sequence
  Chemically synthesized
auaaagaggaaaagauacugagu

SEQ ID NO: 44666 - RNA, 23 nt, Artificial Sequence
  Chemically synthesized
uaaagaggaaaagauacugagua

SEQ ID NO: 44667 - RNA, 23 nt, Artificial Sequence
  Chemically synthesized
ucagaaauucugcagagaauaug

SEQ ID NO: 44668 - RNA, 23 nt, Artificial Sequence
  Chemically synthesized
cagaaauucugcagagaauaugc

SEQ ID NO: 44669 - RNA, 23 nt, Artificial Sequence
  Chemically synthesized
agaaauucugcagagaauaugcc

SEQ ID NO: 44670 - RNA, 23 nt, Artificial Sequence
  Chemically synthesized
gaaauucugcagagaauaugccc

SEQ ID NO: 44671 - RNA, 23 nt, Artificial Sequence
  Chemically synthesized
aaauucugcagagaauaugcccc

SEQ ID NO: 44672 - RNA, 23 nt, Artificial Sequence
  Chemically synthesized
aauucugcagagaauaugccccc

SEQ ID NO: 44673 - RNA, 23 nt, Artificial Sequence
  Chemically synthesized
auucugcagagaauaugcccccu

SEQ ID NO: 44674 - RNA, 23 nt, Artificial Sequence
  Chemically synthesized
uucugcagagaauaugcccccuu

SEQ ID NO: 44675 - RNA, 23 nt, Artificial Sequence
  Chemically synthesized
ugcagagugauaaagaggaaaag

SEQ ID NO: 44676 - RNA, 23 nt, Artificial Sequence
  Chemically synthesized
gucuccauuauaaauagaaaccg

SEQ ID NO: 44677 - RNA, 23 nt, Artificial Sequence
  Chemically synthesized
ucuccauuauaaauagaaaccga

SEQ ID NO: 44678 - RNA, 23 nt, Artificial Sequence
  Chemically synthesized
cuccauuauaaauagaaaccgag

SEQ ID NO: 44679 - RNA, 23 nt, Artificial Sequence
  Chemically synthesized
ggaaaacuuucagaaauucugca

SEQ ID NO: 44680 - RNA, 23 nt, Artificial Sequence
  Chemically synthesized
gaaaacuuucagaaauucugcag

SEQ ID NO: 44681 - RNA, 23 nt, Artificial Sequence
  Chemically synthesized
aaaacuuucagaaauucugcaga

SEQ ID NO: 44682 - RNA, 23 nt, Artificial Sequence
  Chemically synthesized
aaacuuucagaaauucugcagag

SEQ ID NO: 44683 - RNA, 23 nt, Artificial Sequence
  Chemically synthesized
aacuuucagaaauucugcagaga

SEQ ID NO: 44684 - RNA, 23 nt, Artificial Sequence
  Chemically synthesized
guguuuaaagaggaacuccuugg

SEQ ID NO: 44685 - RNA, 23 nt, Artificial Sequence
  Chemically synthesized
uguuuaaagaggaacuccuuggg

SEQ ID NO: 44686 - RNA, 23 nt, Artificial Sequence
  Chemically synthesized
guuuaaagaggaacuccuugggg

SEQ ID NO: 44687 - RNA, 23 nt, Artificial Sequence
  Chemically synthesized
uuuaaagaggaacuccuuggggg

SEQ ID NO: 44688 - RNA, 23 nt, Artificial Sequence
  Chemically synthesized
uuaaagaggaacuccuugggggg

SEQ ID NO: 44689 - RNA, 23 nt, Artificial Sequence
  Chemically synthesized
uaaagaggaacuccuugggggga

SEQ ID NO: 44690 - RNA, 23 nt, Artificial Sequence
  Chemically synthesized
aaucggagacuuaauuccuuaua

SEQ ID NO: 44691 - RNA, 23 nt, Artificial Sequence
  Chemically synthesized
aucggagacuuaauuccuuauaa

SEQ ID NO: 44692 - RNA, 23 nt, Artificial Sequence
  Chemically synthesized
acuuucagaaauucugcagagaa

SEQ ID NO: 44693 - RNA, 23 nt, Artificial Sequence
  Chemically synthesized
caucuuccucagacugugagcug

SEQ ID NO: 44694 - RNA, 23 nt, Artificial Sequence
  Chemically synthesized
aucuuccucagacugugagcugu

SEQ ID NO: 44695 - RNA, 23 nt, Artificial Sequence
  Chemically synthesized
ucuuccucagacugugagcuguu

SEQ ID NO: 44696 - RNA, 23 nt, Artificial Sequence
  Chemically synthesized
cuuccucagacugugagcuguuu

SEQ ID NO: 44697 - RNA, 23 nt, Artificial Sequence
  Chemically synthesized
uuccucagacugugagcuguuuu

SEQ ID NO: 44698 - RNA, 23 nt, Artificial Sequence
  Chemically synthesized
uccucagacugugagcuguuuuu

SEQ ID NO: 44699 - RNA, 23 nt, Artificial Sequence
  Chemically synthesized
uguuuuucucuccaaugcuaugg

SEQ ID NO: 44700 - RNA, 23 nt, Artificial Sequence
  Chemically synthesized
guuuuucucuccaaugcuauggg

SEQ ID NO: 44701 - RNA, 23 nt, Artificial Sequence
  Chemically synthesized
uuuuucucuccaaugcuaugggu

SEQ ID NO: 44702 - RNA, 23 nt, Artificial Sequence
  Chemically synthesized
uuuucucuccaaugcuaugggua

SEQ ID NO: 44703 - RNA, 23 nt, Artificial Sequence
  Chemically synthesized
uuucucuccaaugcuauggguau

SEQ ID NO: 44704 - RNA, 23 nt, Artificial Sequence
  Chemically synthesized
augcaaaagcaagaagaguuuag

SEQ ID NO: 44705 - RNA, 23 nt, Artificial Sequence
  Chemically synthesized
ugcaaaagcaagaagaguuuagu

SEQ ID NO: 44706 - RNA, 23 nt, Artificial Sequence
  Chemically synthesized
agaucaacaugauuuuagugucu

SEQ ID NO: 44707 - RNA, 23 nt, Artificial Sequence
  Chemically synthesized
gaucaacaugauuuuagugucua

SEQ ID NO: 44708 - RNA, 23 nt, Artificial Sequence
  Chemically synthesized
aucaacaugauuuuagugucuau

SEQ ID NO: 44709 - RNA, 23 nt, Artificial Sequence
  Chemically synthesized
ucaacaugauuuuagugucuauu

SEQ ID NO: 44710 - RNA, 23 nt, Artificial Sequence
  Chemically synthesized
caacaugauuuuagugucuauuc

SEQ ID NO: 44711 - RNA, 23 nt, Artificial Sequence
  Chemically synthesized
aauaaacacaagugacguggcca

SEQ ID NO: 44712 - RNA, 23 nt, Artificial Sequence
  Chemically synthesized
auaaacacaagugacguggccac

SEQ ID NO: 44713 - RNA, 23 nt, Artificial Sequence
  Chemically synthesized
uaaacacaagugacguggccacc

SEQ ID NO: 44714 - RNA, 23 nt, Artificial Sequence
  Chemically synthesized
aaacacaagugacguggccaccc

SEQ ID NO: 44715 - RNA, 23 nt, Artificial Sequence
  Chemically synthesized
acuccaguucuucaucaaaaggu

SEQ ID NO: 44716 - RNA, 23 nt, Artificial Sequence
  Chemically synthesized
cuccaguucuucaucaaaaggug

SEQ ID NO: 44717 - RNA, 23 nt, Artificial Sequence
  Chemically synthesized
uccaguucuucaucaaaaggugc

SEQ ID NO: 44718 - RNA, 23 nt, Artificial Sequence
  Chemically synthesized
ccaguucuucaucaaaaggugcu

SEQ ID NO: 44719 - RNA, 23 nt, Artificial Sequence
  Chemically synthesized
caguucuucaucaaaaggugcug

SEQ ID NO: 44720 - RNA, 23 nt, Artificial Sequence
  Chemically synthesized
aggaaaacuuucagaaauucugc

SEQ ID NO: 44721 - RNA, 23 nt, Artificial Sequence
  Chemically synthesized
ugaucaccuaauaaucggagacu

SEQ ID NO: 44722 - RNA, 23 nt, Artificial Sequence
  Chemically synthesized
gaucaccuaauaaucggagacuu

SEQ ID NO: 44723 - RNA, 23 nt, Artificial Sequence
  Chemically synthesized
ccuuauaaugcaaaagcaagaag

SEQ ID NO: 44724 - RNA, 23 nt, Artificial Sequence
  Chemically synthesized
cuuauaaugcaaaagcaagaaga

SEQ ID NO: 44725 - RNA, 23 nt, Artificial Sequence
  Chemically synthesized
uuauaaugcaaaagcaagaagag

SEQ ID NO: 44726 - RNA, 23 nt, Artificial Sequence
  Chemically synthesized
uauaaugcaaaagcaagaagagu

SEQ ID NO: 44727 - RNA, 23 nt, Artificial Sequence
  Chemically synthesized
auaaugcaaaagcaagaagaguu

SEQ ID NO: 44728 - RNA, 23 nt, Artificial Sequence
  Chemically synthesized
auaaggccacaauauuuauuuug

SEQ ID NO: 44729 - RNA, 23 nt, Artificial Sequence
  Chemically synthesized
uaaggccacaauauuuauuuugg

SEQ ID NO: 44730 - RNA, 23 nt, Artificial Sequence
  Chemically synthesized
aaggccacaauauuuauuuugga

SEQ ID NO: 44731 - RNA, 23 nt, Artificial Sequence
  Chemically synthesized
aggccacaauauuuauuuuggac

SEQ ID NO: 44732 - RNA, 23 nt, Artificial Sequence
  Chemically synthesized
ggccacaauauuuauuuuggaca

SEQ ID NO: 44733 - RNA, 23 nt, Artificial Sequence
  Chemically synthesized
accccaggaucuaacagcucuuc

SEQ ID NO: 44734 - RNA, 23 nt, Artificial Sequence
  Chemically synthesized
ccccaggaucuaacagcucuuca

SEQ ID NO: 44735 - RNA, 23 nt, Artificial Sequence
  Chemically synthesized
cccaggaucuaacagcucuucag

SEQ ID NO: 44736 - RNA, 23 nt, Artificial Sequence
  Chemically synthesized
ccaggaucuaacagcucuucagu

SEQ ID NO: 44737 - RNA, 23 nt, Artificial Sequence
  Chemically synthesized
ucagaagcccuguugguaucuug

SEQ ID NO: 44738 - RNA, 23 nt, Artificial Sequence
  Chemically synthesized
cagaagcccuguugguaucuugu

SEQ ID NO: 44739 - RNA, 23 nt, Artificial Sequence
  Chemically synthesized
agaagcccuguugguaucuugug

SEQ ID NO: 44740 - RNA, 23 nt, Artificial Sequence
  Chemically synthesized
gaagcccuguugguaucuugugg

SEQ ID NO: 44741 - RNA, 23 nt, Artificial Sequence
  Chemically synthesized
aagcccuguugguaucuuguggu

SEQ ID NO: 44742 - RNA, 23 nt, Artificial Sequence
  Chemically synthesized
ggaaaagauacugaguaggugcc

SEQ ID NO: 44743 - RNA, 23 nt, Artificial Sequence
  Chemically synthesized
gaaaagauacugaguaggugccu

SEQ ID NO: 44744 - RNA, 23 nt, Artificial Sequence
  Chemically synthesized
aaaagauacugaguaggugccuu

SEQ ID NO: 44745 - RNA, 23 nt, Artificial Sequence
  Chemically synthesized
aaagauacugaguaggugccuuc

SEQ ID NO: 44746 - RNA, 23 nt, Artificial Sequence
  Chemically synthesized
aagauacugaguaggugccuuca

SEQ ID NO: 44747 - RNA, 23 nt, Artificial Sequence
  Chemically synthesized
ggcugucacagugagagcucuug

SEQ ID NO: 44748 - RNA, 23 nt, Artificial Sequence
  Chemically synthesized
gcugucacagugagagcucuugg

SEQ ID NO: 44749 - RNA, 23 nt, Artificial Sequence
  Chemically synthesized
cugucacagugagagcucuugga

SEQ ID NO: 44750 - RNA, 23 nt, Artificial Sequence
  Chemically synthesized
ugucacagugagagcucuuggag

SEQ ID NO: 44751 - RNA, 23 nt, Artificial Sequence
  Chemically synthesized
gucacagugagagcucuuggagc

SEQ ID NO: 44752 - RNA, 23 nt, Artificial Sequence
  Chemically synthesized
ucacagugagagcucuuggagcu

SEQ ID NO: 44753 - RNA, 23 nt, Artificial Sequence
  Chemically synthesized
uaaugcaaaagcaagaagaguuu

SEQ ID NO: 44754 - RNA, 23 nt, Artificial Sequence
  Chemically synthesized
agaguuuaguguacgaacuguac

SEQ ID NO: 44755 - RNA, 23 nt, Artificial Sequence
  Chemically synthesized
gaguuuaguguacgaacuguaca

SEQ ID NO: 44756 - RNA, 23 nt, Artificial Sequence
  Chemically synthesized
aguuuaguguacgaacuguacag

SEQ ID NO: 44757 - RNA, 23 nt, Artificial Sequence
  Chemically synthesized
guuuaguguacgaacuguacagc

SEQ ID NO: 44758 - RNA, 23 nt, Artificial Sequence
  Chemically synthesized
uuuaguguacgaacuguacagcu

SEQ ID NO: 44759 - RNA, 23 nt, Artificial Sequence
  Chemically synthesized
gaaauauaaaguacuucagcuga

SEQ ID NO: 44760 - RNA, 23 nt, Artificial Sequence
  Chemically synthesized
aaauauaaaguacuucagcugaa

SEQ ID NO: 44761 - RNA, 23 nt, Artificial Sequence
  Chemically synthesized
aauauaaaguacuucagcugaau

SEQ ID NO: 44762 - RNA, 23 nt, Artificial Sequence
  Chemically synthesized
auauaaaguacuucagcugaauu

SEQ ID NO: 44763 - RNA, 23 nt, Artificial Sequence
  Chemically synthesized
uauaaaguacuucagcugaauua

SEQ ID NO: 44764 - RNA, 23 nt, Artificial Sequence
  Chemically synthesized
agucagacuccaguucuucauca

SEQ ID NO: 44765 - RNA, 23 nt, Artificial Sequence
  Chemically synthesized
gucagacuccaguucuucaucaa

SEQ ID NO: 44766 - RNA, 23 nt, Artificial Sequence
  Chemically synthesized
ucagacuccaguucuucaucaaa

SEQ ID NO: 44767 - RNA, 23 nt, Artificial Sequence
  Chemically synthesized
cagacuccaguucuucaucaaaa

SEQ ID NO: 44768 - RNA, 23 nt, Artificial Sequence
  Chemically synthesized
agacuccaguucuucaucaaaag

SEQ ID NO: 44769 - RNA, 23 nt, Artificial Sequence
  Chemically synthesized
aguucuucaucaaaaggugcugg

SEQ ID NO: 44770 - RNA, 23 nt, Artificial Sequence
  Chemically synthesized
guucuucaucaaaaggugcuggu

SEQ ID NO: 44771 - RNA, 23 nt, Artificial Sequence
  Chemically synthesized
uucuucaucaaaaggugcuggug

SEQ ID NO: 44772 - RNA, 23 nt, Artificial Sequence
  Chemically synthesized
ucuucaucaaaaggugcuggugg

SEQ ID NO: 44773 - RNA, 23 nt, Artificial Sequence
  Chemically synthesized
cuucaucaaaaggugcuggugga

SEQ ID NO: 44774 - RNA, 23 nt, Artificial Sequence
  Chemically synthesized
uucaucaaaaggugcugguggag

SEQ ID NO: 44775 - RNA, 23 nt, Artificial Sequence
  Chemically synthesized
agagauggaaggaaaacuuucag

SEQ ID NO: 44776 - RNA, 23 nt, Artificial Sequence
  Chemically synthesized
gagauggaaggaaaacuuucaga

SEQ ID NO: 44777 - RNA, 23 nt, Artificial Sequence
  Chemically synthesized
agauggaaggaaaacuuucagaa

SEQ ID NO: 44778 - RNA, 23 nt, Artificial Sequence
  Chemically synthesized
gauggaaggaaaacuuucagaaa

SEQ ID NO: 44779 - RNA, 23 nt, Artificial Sequence
  Chemically synthesized
auggaaggaaaacuuucagaaau

SEQ ID NO: 44780 - RNA, 23 nt, Artificial Sequence
  Chemically synthesized
cuuucagaaauucugcagagaau

SEQ ID NO: 44781 - RNA, 23 nt, Artificial Sequence
  Chemically synthesized
uuucagaaauucugcagagaaua

SEQ ID NO: 44782 - RNA, 23 nt, Artificial Sequence
  Chemically synthesized
uucagaaauucugcagagaauau

SEQ ID NO: 44783 - RNA, 23 nt, Artificial Sequence
  Chemically synthesized
uucucuccaaugcuauggguauc

SEQ ID NO: 44784 - RNA, 23 nt, Artificial Sequence
  Chemically synthesized
uaucuguuucagaagcccuguug

SEQ ID NO: 44785 - RNA, 23 nt, Artificial Sequence
  Chemically synthesized
aucuguuucagaagcccuguugg

SEQ ID NO: 44786 - RNA, 23 nt, Artificial Sequence
  Chemically synthesized
ucuguuucagaagcccuguuggu

SEQ ID NO: 44787 - RNA, 23 nt, Artificial Sequence
  Chemically synthesized
cuguuucagaagcccuguuggua

SEQ ID NO: 44788 - RNA, 23 nt, Artificial Sequence
  Chemically synthesized
uguuucagaagcccuguugguau

SEQ ID NO: 44789 - RNA, 23 nt, Artificial Sequence
  Chemically synthesized
cacagauuugcuuagaauaaagc

SEQ ID NO: 44790 - RNA, 23 nt, Artificial Sequence
  Chemically synthesized
acagauuugcuuagaauaaagcu

SEQ ID NO: 44791 - RNA, 23 nt, Artificial Sequence
  Chemically synthesized
agcagaaaacugaucauccaggg

SEQ ID NO: 44792 - RNA, 23 nt, Artificial Sequence
  Chemically synthesized
gcagaaaacugaucauccagggu

SEQ ID NO: 44793 - RNA, 23 nt, Artificial Sequence
  Chemically synthesized
cagaaaacugaucauccagggug

SEQ ID NO: 44794 - RNA, 23 nt, Artificial Sequence
  Chemically synthesized
agaaaacugaucauccaggguga

SEQ ID NO: 44795 - RNA, 23 nt, Artificial Sequence
  Chemically synthesized
gaaaacugaucauccagggugau

SEQ ID NO: 44796 - RNA, 23 nt, Artificial Sequence
  Chemically synthesized
aaaacugaucauccagggugauc

SEQ ID NO: 44797 - RNA, 23 nt, Artificial Sequence
  Chemically synthesized
aaacugaucauccagggugauca

SEQ ID NO: 44798 - RNA, 23 nt, Artificial Sequence
  Chemically synthesized
aacugaucauccagggugaucac

SEQ ID NO: 44799 - RNA, 23 nt, Artificial Sequence
  Chemically synthesized
acuucagcugaauuaagguugca

SEQ ID NO: 44800 - RNA, 23 nt, Artificial Sequence
  Chemically synthesized
cuucagcugaauuaagguugcag

SEQ ID NO: 44801 - RNA, 23 nt, Artificial Sequence
  Chemically synthesized
uucagcugaauuaagguugcaga

SEQ ID NO: 44802 - RNA, 23 nt, Artificial Sequence
  Chemically synthesized
cagcaaaugagagagcagcagag

SEQ ID NO: 44803 - RNA, 23 nt, Artificial Sequence
  Chemically synthesized
agcaaaugagagagcagcagaga

SEQ ID NO: 44804 - RNA, 23 nt, Artificial Sequence
  Chemically synthesized
gcaaaugagagagcagcagagau

SEQ ID NO: 44805 - RNA, 23 nt, Artificial Sequence
  Chemically synthesized
caaaugagagagcagcagagaug

SEQ ID NO: 44806 - RNA, 23 nt, Artificial Sequence
  Chemically synthesized
aaaugagagagcagcagagaugg

SEQ ID NO: 44807 - RNA, 23 nt, Artificial Sequence
  Chemically synthesized
uuucuucaugacgcucguguucc

SEQ ID NO: 44808 - RNA, 23 nt, Artificial Sequence
  Chemically synthesized
uucuucaugacgcucguguuccu

SEQ ID NO: 44809 - RNA, 23 nt, Artificial Sequence
  Chemically synthesized
ucuucaugacgcucguguuccuc

SEQ ID NO: 44810 - RNA, 23 nt, Artificial Sequence
  Chemically synthesized
cuucaugacgcucguguuccuca

SEQ ID NO: 44811 - RNA, 23 nt, Artificial Sequence
  Chemically synthesized
uucaugacgcucguguuccucau

SEQ ID NO: 44812 - RNA, 23 nt, Artificial Sequence
  Chemically synthesized
ccauuauugcugaagugcaguuc

SEQ ID NO: 44813 - RNA, 23 nt, Artificial Sequence
  Chemically synthesized
cauuauugcugaagugcaguucu

SEQ ID NO: 44814 - RNA, 23 nt, Artificial Sequence
  Chemically synthesized
auuauugcugaagugcaguucua

SEQ ID NO: 44815 - RNA, 23 nt, Artificial Sequence
  Chemically synthesized
uuauugcugaagugcaguucuac

SEQ ID NO: 44816 - RNA, 23 nt, Artificial Sequence
  Chemically synthesized
uauugcugaagugcaguucuacc

SEQ ID NO: 44817 - RNA, 23 nt, Artificial Sequence
  Chemically synthesized
guuucagaagcccuguugguauc

SEQ ID NO: 44818 - RNA, 23 nt, Artificial Sequence
  Chemically synthesized
uuucagaagcccuguugguaucu

SEQ ID NO: 44819 - RNA, 23 nt, Artificial Sequence
  Chemically synthesized
auucaccaaugcagagugauaaa

SEQ ID NO: 44820 - RNA, 23 nt, Artificial Sequence
  Chemically synthesized
aaugcaaaagcaagaagaguuua

SEQ ID NO: 44821 - RNA, 23 nt, Artificial Sequence
  Chemically synthesized
acagugagagcucuuggagcuac

SEQ ID NO: 44822 - RNA, 23 nt, Artificial Sequence
  Chemically synthesized
cagugagagcucuuggagcuacu

SEQ ID NO: 44823 - RNA, 23 nt, Artificial Sequence
  Chemically synthesized
agugagagcucuuggagcuacuc

SEQ ID NO: 44824 - RNA, 23 nt, Artificial Sequence
  Chemically synthesized
gugagagcucuuggagcuacucc

SEQ ID NO: 44825 - RNA, 23 nt, Artificial Sequence
  Chemically synthesized
ugagagcucuuggagcuacuccg

SEQ ID NO: 44826 - RNA, 23 nt, Artificial Sequence
  Chemically synthesized
uuaguguacgaacuguacagcug

SEQ ID NO: 44827 - RNA, 23 nt, Artificial Sequence
  Chemically synthesized
uaguguacgaacuguacagcuga

SEQ ID NO: 44828 - RNA, 23 nt, Artificial Sequence
  Chemically synthesized
acuuucuacaauagugugauaua

SEQ ID NO: 44829 - RNA, 23 nt, Artificial Sequence
  Chemically synthesized
ugaaauauaaaguacuucagcug

SEQ ID NO: 44830 - RNA, 23 nt, Artificial Sequence
  Chemically synthesized
cuucagcagaaaacugaucaucc

SEQ ID NO: 44831 - RNA, 23 nt, Artificial Sequence
  Chemically synthesized
uucagcagaaaacugaucaucca

SEQ ID NO: 44832 - RNA, 23 nt, Artificial Sequence
  Chemically synthesized
ucagcagaaaacugaucauccag

SEQ ID NO: 44833 - RNA, 23 nt, Artificial Sequence
  Chemically synthesized
cagcagaaaacugaucauccagg

SEQ ID NO: 44834 - RNA, 23 nt, Artificial Sequence
  Chemically synthesized
cacagugagagcucuuggagcua

SEQ ID NO: 44835 - RNA, 23 nt, Artificial Sequence
  Chemically synthesized
gaagaguuuaguguacgaacugu

SEQ ID NO: 44836 - RNA, 23 nt, Artificial Sequence
  Chemically synthesized
aagaguuuaguguacgaacugua

SEQ ID NO: 44837 - RNA, 23 nt, Artificial Sequence
  Chemically synthesized
uguacagcugaguuuguagcucu

SEQ ID NO: 44838 - RNA, 23 nt, Artificial Sequence
  Chemically synthesized
guacagcugaguuuguagcucua

SEQ ID NO: 44839 - RNA, 23 nt, Artificial Sequence
  Chemically synthesized
uacagcugaguuuguagcucuau

SEQ ID NO: 44840 - RNA, 23 nt, Artificial Sequence
  Chemically synthesized
acagcugaguuuguagcucuauc

SEQ ID NO: 44841 - RNA, 23 nt, Artificial Sequence
  Chemically synthesized
cagcugaguuuguagcucuaucu

SEQ ID NO: 44842 - RNA, 23 nt, Artificial Sequence
  Chemically synthesized
agcugaguuuguagcucuaucuu

SEQ ID NO: 44843 - RNA, 23 nt, Artificial Sequence
  Chemically synthesized
auaaaguacuucagcugaauuaa

SEQ ID NO: 44844 - RNA, 23 nt, Artificial Sequence
  Chemically synthesized
ucagcugaauuaagguugcagau

SEQ ID NO: 44845 - RNA, 23 nt, Artificial Sequence
  Chemically synthesized
uagaucaacaugauuuuaguguc

SEQ ID NO: 44846 - RNA, 23 nt, Artificial Sequence
  Chemically synthesized
cuaacagcucuucagugagcuau

SEQ ID NO: 44847 - RNA, 23 nt, Artificial Sequence
  Chemically synthesized
uaacagcucuucagugagcuaug

SEQ ID NO: 44848 - RNA, 23 nt, Artificial Sequence
  Chemically synthesized
cuucagugagcuauguugcaagc

SEQ ID NO: 44849 - RNA, 23 nt, Artificial Sequence
  Chemically synthesized
uucagugagcuauguugcaagcu

SEQ ID NO: 44850 - RNA, 23 nt, Artificial Sequence
  Chemically synthesized
ucagugagcuauguugcaagcuc

SEQ ID NO: 44851 - RNA, 23 nt, Artificial Sequence
  Chemically synthesized
cagugagcuauguugcaagcuca

SEQ ID NO: 44852 - RNA, 23 nt, Artificial Sequence
  Chemically synthesized
agugagcuauguugcaagcucag

SEQ ID NO: 44853 - RNA, 23 nt, Artificial Sequence
  Chemically synthesized
aaucugaguuuuucuucaagaug

SEQ ID NO: 44854 - RNA, 23 nt, Artificial Sequence
  Chemically synthesized
ugccuucagcagaaaacugauca

SEQ ID NO: 44855 - RNA, 23 nt, Artificial Sequence
  Chemically synthesized
gccuucagcagaaaacugaucau

SEQ ID NO: 44856 - RNA, 23 nt, Artificial Sequence
  Chemically synthesized
ccuucagcagaaaacugaucauc

SEQ ID NO: 44857 - RNA, 23 nt, Artificial Sequence
  Chemically synthesized
acuguacagcugaguuuguagcu

SEQ ID NO: 44858 - RNA, 23 nt, Artificial Sequence
  Chemically synthesized
cuguacagcugaguuuguagcuc

SEQ ID NO: 44859 - RNA, 23 nt, Artificial Sequence
  Chemically synthesized
auugcugaagugcaguucuaccc

SEQ ID NO: 44860 - RNA, 23 nt, Artificial Sequence
  Chemically synthesized
uugcugaagugcaguucuaccca

SEQ ID NO: 44861 - RNA, 23 nt, Artificial Sequence
  Chemically synthesized
cagagauggaaggaaaacuuuca

SEQ ID NO: 44862 - RNA, 23 nt, Artificial Sequence
  Chemically synthesized
ucaugacgcucguguuccucaug

SEQ ID NO: 44863 - RNA, 23 nt, Artificial Sequence
  Chemically synthesized
caugacgcucguguuccucaugc

SEQ ID NO: 44864 - RNA, 23 nt, Artificial Sequence
  Chemically synthesized
augacgcucguguuccucaugcu

SEQ ID NO: 44865 - RNA, 23 nt, Artificial Sequence
  Chemically synthesized
ucggguguuuaaagaggaacucc

SEQ ID NO: 44866 - RNA, 23 nt, Artificial Sequence
  Chemically synthesized
cggguguuuaaagaggaacuccu

SEQ ID NO: 44867 - RNA, 23 nt, Artificial Sequence
  Chemically synthesized
ggguguuuaaagaggaacuccuu

SEQ ID NO: 44868 - RNA, 23 nt, Artificial Sequence
  Chemically synthesized
gguguuuaaagaggaacuccuug

SEQ ID NO: 44869 - RNA, 23 nt, Artificial Sequence
  Chemically synthesized
ggagaggauuaaauucaccaaug

SEQ ID NO: 44870 - RNA, 23 nt, Artificial Sequence
  Chemically synthesized
aucaccuaauaaucggagacuua

SEQ ID NO: 44871 - RNA, 23 nt, Artificial Sequence
  Chemically synthesized
ucaucaaaaggugcugguggagg

SEQ ID NO: 44872 - RNA, 23 nt, Artificial Sequence
  Chemically synthesized
cucguguuccucaugcugagggu

SEQ ID NO: 44873 - RNA, 23 nt, Artificial Sequence
  Chemically synthesized
ucguguuccucaugcugagggug

SEQ ID NO: 44874 - RNA, 23 nt, Artificial Sequence
  Chemically synthesized
cguguuccucaugcugagggugg

SEQ ID NO: 44875 - RNA, 23 nt, Artificial Sequence
  Chemically synthesized
guguuccucaugcugaggguggc

SEQ ID NO: 44876 - RNA, 23 nt, Artificial Sequence
  Chemically synthesized
uguuccucaugcugaggguggcc

SEQ ID NO: 44877 - RNA, 23 nt, Artificial Sequence
  Chemically synthesized
caguagacauuaaucagucugac

SEQ ID NO: 44878 - RNA, 23 nt, Artificial Sequence
  Chemically synthesized
aguagacauuaaucagucugaca

SEQ ID NO: 44879 - RNA, 23 nt, Artificial Sequence
  Chemically synthesized
guagacauuaaucagucugacau

SEQ ID NO: 44880 - RNA, 23 nt, Artificial Sequence
  Chemically synthesized
uagacauuaaucagucugacaug

SEQ ID NO: 44881 - RNA, 23 nt, Artificial Sequence
  Chemically synthesized
uggaaggaaaacuuucagaaauu

SEQ ID NO: 44882 - RNA, 23 nt, Artificial Sequence
  Chemically synthesized
aaauagaaaccgaggcuggaacg

SEQ ID NO: 44883 - RNA, 23 nt, Artificial Sequence
  Chemically synthesized
ugcgcuucggguguuuaaagagg

SEQ ID NO: 44884 - RNA, 23 nt, Artificial Sequence
  Chemically synthesized
acugaucauccagggugaucacc

SEQ ID NO: 44885 - RNA, 23 nt, Artificial Sequence
  Chemically synthesized
cugaucauccagggugaucaccu

SEQ ID NO: 44886 - RNA, 23 nt, Artificial Sequence
  Chemically synthesized
ugaucauccagggugaucaccua

SEQ ID NO: 44887 - RNA, 23 nt, Artificial Sequence
  Chemically synthesized
ucaccuaauaaucggagacuuaa

SEQ ID NO: 44888 - RNA, 23 nt, Artificial Sequence
  Chemically synthesized
uaaaguacuucagcugaauuaag

SEQ ID NO: 44889 - RNA, 23 nt, Artificial Sequence
  Chemically synthesized
ggccagcaaaugagagagcagca

SEQ ID NO: 44890 - RNA, 23 nt, Artificial Sequence
  Chemically synthesized
gccagcaaaugagagagcagcag

SEQ ID NO: 44891 - RNA, 23 nt, Artificial Sequence
  Chemically synthesized
ccagcaaaugagagagcagcaga

SEQ ID NO: 44892 - RNA, 23 nt, Artificial Sequence
  Chemically synthesized
ucucuccaaugcuauggguaucu

SEQ ID NO: 44893 - RNA, 23 nt, Artificial Sequence
  Chemically synthesized
cucuccaaugcuauggguaucug

SEQ ID NO: 44894 - RNA, 23 nt, Artificial Sequence
  Chemically synthesized
ucuccaaugcuauggguaucugu

SEQ ID NO: 44895 - RNA, 23 nt, Artificial Sequence
  Chemically synthesized
cuccaaugcuauggguaucuguu

SEQ ID NO: 44896 - RNA, 23 nt, Artificial Sequence
  Chemically synthesized
uccaaugcuauggguaucuguuu

SEQ ID NO: 44897 - RNA, 23 nt, Artificial Sequence
  Chemically synthesized
cccauuauugcugaagugcaguu

SEQ ID NO: 44898 - RNA, 23 nt, Artificial Sequence
  Chemically synthesized
uguugguaucuuguggugucugc

SEQ ID NO: 44899 - RNA, 23 nt, Artificial Sequence
  Chemically synthesized
guugguaucuuguggugucugcg

SEQ ID NO: 44900 - RNA, 23 nt, Artificial Sequence
  Chemically synthesized
uugguaucuuguggugucugcga

SEQ ID NO: 44901 - RNA, 23 nt, Artificial Sequence
  Chemically synthesized
ugguaucuuguggugucugcgag

SEQ ID NO: 44902 - RNA, 23 nt, Artificial Sequence
  Chemically synthesized
gguaucuuguggugucugcgagc

SEQ ID NO: 44903 - RNA, 23 nt, Artificial Sequence
  Chemically synthesized
agauacugaguaggugccuucag

SEQ ID NO: 44904 - RNA, 23 nt, Artificial Sequence
  Chemically synthesized
gauacugaguaggugccuucagc

SEQ ID NO: 44905 - RNA, 23 nt, Artificial Sequence
  Chemically synthesized
auacugaguaggugccuucagca

SEQ ID NO: 44906 - RNA, 23 nt, Artificial Sequence
  Chemically synthesized
gaucauccagggugaucaccuaa

SEQ ID NO: 44907 - RNA, 23 nt, Artificial Sequence
  Chemically synthesized
aucauccagggugaucaccuaau

SEQ ID NO: 44908 - RNA, 23 nt, Artificial Sequence
  Chemically synthesized
cagcugaauuaagguugcagaua

SEQ ID NO: 44909 - RNA, 23 nt, Artificial Sequence
  Chemically synthesized
agcugaauuaagguugcagauaa

SEQ ID NO: 44910 - RNA, 23 nt, Artificial Sequence
  Chemically synthesized
aauagaaaccgaggcuggaacgc

SEQ ID NO: 44911 - RNA, 23 nt, Artificial Sequence
  Chemically synthesized
auagaaaccgaggcuggaacgcu

SEQ ID NO: 44912 - RNA, 23 nt, Artificial Sequence
  Chemically synthesized
uagaaaccgaggcuggaacgcug

SEQ ID NO: 44913 - RNA, 23 nt, Artificial Sequence
  Chemically synthesized
ucccauuauugcugaagugcagu

SEQ ID NO: 44914 - RNA, 23 nt, Artificial Sequence
  Chemically synthesized
guaucuuguggugucugcgagcg

SEQ ID NO: 44915 - RNA, 23 nt, Artificial Sequence
  Chemically synthesized
uaucuuguggugucugcgagcga

SEQ ID NO: 44916 - RNA, 23 nt, Artificial Sequence
  Chemically synthesized
aucuuguggugucugcgagcgag

SEQ ID NO: 44917 - RNA, 23 nt, Artificial Sequence
  Chemically synthesized
aggugccuucagcagaaaacuga

SEQ ID NO: 44918 - RNA, 23 nt, Artificial Sequence
  Chemically synthesized
ggugccuucagcagaaaacugau

SEQ ID NO: 44919 - RNA, 23 nt, Artificial Sequence
  Chemically synthesized
gugccuucagcagaaaacugauc

SEQ ID NO: 44920 - RNA, 23 nt, Artificial Sequence
  Chemically synthesized
gugagcuauguugcaagcucaga

SEQ ID NO: 44921 - RNA, 23 nt, Artificial Sequence
  Chemically synthesized
ugagcuauguugcaagcucagaa

SEQ ID NO: 44922 - RNA, 23 nt, Artificial Sequence
  Chemically synthesized
uggguaucuguuucagaagcccu

SEQ ID NO: 44923 - RNA, 23 nt, Artificial Sequence
  Chemically synthesized
ggguaucuguuucagaagcccug

SEQ ID NO: 44924 - RNA, 23 nt, Artificial Sequence
  Chemically synthesized
gguaucuguuucagaagcccugu

SEQ ID NO: 44925 - RNA, 23 nt, Artificial Sequence
  Chemically synthesized
guaucuguuucagaagcccuguu

SEQ ID NO: 44926 - RNA, 23 nt, Artificial Sequence
  Chemically synthesized
uacugaguaggugccuucagcag

SEQ ID NO: 44927 - RNA, 23 nt, Artificial Sequence
  Chemically synthesized
auggguaucuguuucagaagccc

SEQ ID NO: 44928 - RNA, 23 nt, Artificial Sequence
  Chemically synthesized
uccuuauaaugcaaaagcaagaa

SEQ ID NO: 44929 - RNA, 23 nt, Artificial Sequence
  Chemically synthesized
gccacaauauuuauuuuggacaa

SEQ ID NO: 44930 - RNA, 23 nt, Artificial Sequence
  Chemically synthesized
aacagcucuucagugagcuaugu

SEQ ID NO: 44931 - RNA, 23 nt, Artificial Sequence
  Chemically synthesized
uauggguaucuguuucagaagcc

SEQ ID NO: 44932 - RNA, 23 nt, Artificial Sequence
  Chemically synthesized
uccagcaguauuuuuuccauguc

SEQ ID NO: 44933 - RNA, 23 nt, Artificial Sequence
  Chemically synthesized
ccagcaguauuuuuuccaugucu

SEQ ID NO: 44934 - RNA, 23 nt, Artificial Sequence
  Chemically synthesized
cagcaguauuuuuuccaugucuc

SEQ ID NO: 44935 - RNA, 23 nt, Artificial Sequence
  Chemically synthesized
agcaguauuuuuuccaugucucc

SEQ ID NO: 44936 - RNA, 23 nt, Artificial Sequence
  Chemically synthesized
gcaguauuuuuuccaugucucca

SEQ ID NO: 44937 - RNA, 23 nt, Artificial Sequence
  Chemically synthesized
uccaugucuccauuauaaauaga

SEQ ID NO: 44938 - RNA, 23 nt, Artificial Sequence
  Chemically synthesized
aucccauauccaaucugaguuuu

SEQ ID NO: 44939 - RNA, 23 nt, Artificial Sequence
  Chemically synthesized
auccgauggccagcaaaugagag

SEQ ID NO: 44940 - RNA, 23 nt, Artificial Sequence
  Chemically synthesized
aacacacaucaugacuaguauau

SEQ ID NO: 44941 - RNA, 23 nt, Artificial Sequence
  Chemically synthesized
ucuuuccuucuuucaauaucauc

SEQ ID NO: 44942 - RNA, 23 nt, Artificial Sequence
  Chemically synthesized
ggagacuuaauuccuuauaaugc

SEQ ID NO: 44943 - RNA, 23 nt, Artificial Sequence
  Chemically synthesized
gcauuuacagaacaaauaaacac

SEQ ID NO: 44944 - RNA, 23 nt, Artificial Sequence
  Chemically synthesized
ugucuccauuauaaauagaaacc

SEQ ID NO: 44945 - RNA, 23 nt, Artificial Sequence
  Chemically synthesized
aaugagagagcagcagagaugga

SEQ ID NO: 44946 - RNA, 23 nt, Artificial Sequence
  Chemically synthesized
gacuccaguucuucaucaaaagg

SEQ ID NO: 44947 - RNA, 23 nt, Artificial Sequence
  Chemically synthesized
cucagacugugagcuguuuuucu

SEQ ID NO: 44948 - RNA, 23 nt, Artificial Sequence
  Chemically synthesized
ccagggugaucaccuaauaaucg

SEQ ID NO: 44949 - RNA, 23 nt, Artificial Sequence
  Chemically synthesized
uaggugccuucagcagaaaacug

SEQ ID NO: 44950 - RNA, 23 nt, Artificial Sequence
  Chemically synthesized
aaaggugcugguggagguuguca

SEQ ID NO: 44951 - RNA, 23 nt, Artificial Sequence
  Chemically synthesized
aaggaaaacuuucagaaauucug

SEQ ID NO: 44952 - RNA, 23 nt, Artificial Sequence
  Chemically synthesized
uuuuccggccgacuugaccaauc

SEQ ID NO: 44953 - RNA, 23 nt, Artificial Sequence
  Chemically synthesized
uucaccaaugcagagugauaaag

SEQ ID NO: 44954 - RNA, 23 nt, Artificial Sequence
  Chemically synthesized
cauagguguaauuauagaucaac

SEQ ID NO: 44955 - RNA, 23 nt, Artificial Sequence
  Chemically synthesized
gaaggaaaacuuucagaaauucu

SEQ ID NO: 44956 - RNA, 23 nt, Artificial Sequence
  Chemically synthesized
ucuguugauuaugaacaauuagc

SEQ ID NO: 44957 - RNA, 23 nt, Artificial Sequence
  Chemically synthesized
cuacaauagugugauauauaagg

SEQ ID NO: 44958 - RNA, 23 nt, Artificial Sequence
  Chemically synthesized
auguugcaagcucagaaguaauc

SEQ ID NO: 44959 - RNA, 23 nt, Artificial Sequence
  Chemically synthesized
gcagagauggaaggaaaacuuuc

SEQ ID NO: 44960 - RNA, 23 nt, Artificial Sequence
  Chemically synthesized
uucagaagcccuguugguaucuu

SEQ ID NO: 44961 - RNA, 23 nt, Artificial Sequence
  Chemically synthesized
cccauagguguaauuauagauca

SEQ ID NO: 44962 - RNA, 23 nt, Artificial Sequence
  Chemically synthesized
uacuccguccagacucaugcugu

SEQ ID NO: 44963 - RNA, 23 nt, Artificial Sequence
  Chemically synthesized
gguuuuaugcuucugaauuuuuc

SEQ ID NO: 44964 - RNA, 23 nt, Artificial Sequence
  Chemically synthesized
ucacucaggaaaucaacaaaagc

SEQ ID NO: 44965 - RNA, 23 nt, Artificial Sequence
  Chemically synthesized
caucauucuuuauaacuucaacc

SEQ ID NO: 44966 - RNA, 23 nt, Artificial Sequence
  Chemically synthesized
aucacucaggaaaucaacaaaag

SEQ ID NO: 44967 - RNA, 23 nt, Artificial Sequence
  Chemically synthesized
gugggaugcuguuguuaauguug

SEQ ID NO: 44968 - RNA, 23 nt, Artificial Sequence
  Chemically synthesized
cacucucagccucgucuucuugu

SEQ ID NO: 44969 - RNA, 23 nt, Artificial Sequence
  Chemically synthesized
ucugucugcucuacuggcucuug

SEQ ID NO: 44970 - RNA, 23 nt, Artificial Sequence
  Chemically synthesized
cugucugcucuacuggcucuuga

SEQ ID NO: 44971 - RNA, 23 nt, Artificial Sequence
  Chemically synthesized
uucgcuucugucccauucaguuc

SEQ ID NO: 44972 - RNA, 23 nt, Artificial Sequence
  Chemically synthesized
aauccauuagguggucauauaag

SEQ ID NO: 44973 - RNA, 23 nt, Artificial Sequence
  Chemically synthesized
aacgacugcgaacacgugcagau

SEQ ID NO: 44974 - RNA, 23 nt, Artificial Sequence
  Chemically synthesized
auguuggugggaugcuguuguua

SEQ ID NO: 44975 - RNA, 23 nt, Artificial Sequence
  Chemically synthesized
acacaagggccuucuugccauca

SEQ ID NO: 44976 - RNA, 23 nt, Artificial Sequence
  Chemically synthesized
aaauguuggugggaugcuguugu

SEQ ID NO: 44977 - RNA, 23 nt, Artificial Sequence
  Chemically synthesized
uaggaugauaaucauuucaaagc

SEQ ID NO: 44978 - RNA, 23 nt, Artificial Sequence
  Chemically synthesized
aaacgacugcgaacacgugcaga

SEQ ID NO: 44979 - RNA, 23 nt, Artificial Sequence
  Chemically synthesized
gguuccuccucaccaucaaaugu

SEQ ID NO: 44980 - RNA, 23 nt, Artificial Sequence
  Chemically synthesized
auucagacucgccaguggacuga

SEQ ID NO: 44981 - RNA, 23 nt, Artificial Sequence
  Chemically synthesized
aguccaacacaagggccuucuug

SEQ ID NO: 44982 - RNA, 23 nt, Artificial Sequence
  Chemically synthesized
gaggagauaaaccaauuuuaugu

SEQ ID NO: 44983 - RNA, 23 nt, Artificial Sequence
  Chemically synthesized
uggugggaugcuguuguuaaugu

SEQ ID NO: 44984 - RNA, 23 nt, Artificial Sequence
  Chemically synthesized
ggagauaaaccaauuuuaugucu

SEQ ID NO: 44985 - RNA, 23 nt, Artificial Sequence
  Chemically synthesized
gguuuuaugcuucugaauuuuuc

SEQ ID NO: 44986 - RNA, 23 nt, Artificial Sequence
  Chemically synthesized
ucacucaggaaaucaacaaaagc

SEQ ID NO: 44987 - RNA, 23 nt, Artificial Sequence
  Chemically synthesized
caucauucuuuauaacuucaacc

SEQ ID NO: 44988 - RNA, 23 nt, Artificial Sequence
  Chemically synthesized
aucacucaggaaaucaacaaaag

SEQ ID NO: 44989 - RNA, 23 nt, Artificial Sequence
  Chemically synthesized
cagaacacaacaaacuuaaagcc

SEQ ID NO: 44990 - RNA, 23 nt, Artificial Sequence
  Chemically synthesized
ucagaacacaacaaacuuaaagc

SEQ ID NO: 44991 - RNA, 23 nt, Artificial Sequence
  Chemically synthesized
cucagaacacaacaaacuuaaag

SEQ ID NO: 44992 - RNA, 23 nt, Artificial Sequence
  Chemically synthesized
acucagaacacaacaaacuuaaa

SEQ ID NO: 44993 - RNA, 23 nt, Artificial Sequence
  Chemically synthesized
gacucagaacacaacaaacuuaa

SEQ ID NO: 44994 - RNA, 23 nt, Artificial Sequence
  Chemically synthesized
ugacucagaacacaacaaacuua

SEQ ID NO: 44995 - RNA, 23 nt, Artificial Sequence
  Chemically synthesized
gaacacaacaaacuuaaagccag

SEQ ID NO: 44996 - RNA, 23 nt, Artificial Sequence
  Chemically synthesized
agaacacaacaaacuuaaagcca

SEQ ID NO: 44997 - RNA, 23 nt, Artificial Sequence
  Chemically synthesized
ggagauucuacauucacaguccu

SEQ ID NO: 44998 - RNA, 23 nt, Artificial Sequence
  Chemically synthesized
uggagauucuacauucacagucc

SEQ ID NO: 44999 - RNA, 23 nt, Artificial Sequence
  Chemically synthesized
uuggagauucuacauucacaguc

SEQ ID NO: 45000 - RNA, 23 nt, Artificial Sequence
  Chemically synthesized
auuggagauucuacauucacagu

SEQ ID NO: 45001 - RNA, 23 nt, Artificial Sequence
  Chemically synthesized
gauuggagauucuacauucacag

SEQ ID NO: 45002 - RNA, 23 nt, Artificial Sequence
  Chemically synthesized
ggaauaguaugcgcagcuuauga

SEQ ID NO: 45003 - RNA, 23 nt, Artificial Sequence
  Chemically synthesized
aggaauaguaugcgcagcuuaug

SEQ ID NO: 45004 - RNA, 23 nt, Artificial Sequence
  Chemically synthesized
aaggaauaguaugcgcagcuuau

SEQ ID NO: 45005 - RNA, 23 nt, Artificial Sequence
  Chemically synthesized
caaggaauaguaugcgcagcuua

SEQ ID NO: 45006 - RNA, 23 nt, Artificial Sequence
  Chemically synthesized
ucaaggaauaguaugcgcagcuu

SEQ ID NO: 45007 - RNA, 23 nt, Artificial Sequence
  Chemically synthesized
acaacaaacuuaaagccagucag

SEQ ID NO: 45008 - RNA, 23 nt, Artificial Sequence
  Chemically synthesized
cacaacaaacuuaaagccaguca

SEQ ID NO: 45009 - RNA, 23 nt, Artificial Sequence
  Chemically synthesized
acacaacaaacuuaaagccaguc

SEQ ID NO: 45010 - RNA, 23 nt, Artificial Sequence
  Chemically synthesized
aacacaacaaacuuaaagccagu

SEQ ID NO: 45011 - RNA, 23 nt, Artificial Sequence
  Chemically synthesized
cugacucagaacacaacaaacuu

SEQ ID NO: 45012 - RNA, 23 nt, Artificial Sequence
  Chemically synthesized
gcugacucagaacacaacaaacu

SEQ ID NO: 45013 - RNA, 23 nt, Artificial Sequence
  Chemically synthesized
agcugacucagaacacaacaaac

SEQ ID NO: 45014 - RNA, 23 nt, Artificial Sequence
  Chemically synthesized
cagcugacucagaacacaacaaa

SEQ ID NO: 45015 - RNA, 23 nt, Artificial Sequence
  Chemically synthesized
ccugaauucaugaagaaacugca

SEQ ID NO: 45016 - RNA, 23 nt, Artificial Sequence
  Chemically synthesized
uccugaauucaugaagaaacugc

SEQ ID NO: 45017 - RNA, 23 nt, Artificial Sequence
  Chemically synthesized
guccugaauucaugaagaaacug

SEQ ID NO: 45018 - RNA, 23 nt, Artificial Sequence
  Chemically synthesized
uguccugaauucaugaagaaacu

SEQ ID NO: 45019 - RNA, 23 nt, Artificial Sequence
  Chemically synthesized
auguccugaauucaugaagaaac

SEQ ID NO: 45020 - RNA, 23 nt, Artificial Sequence
  Chemically synthesized
ucaaugaugugucuucaauguca

SEQ ID NO: 45021 - RNA, 23 nt, Artificial Sequence
  Chemically synthesized
gucaaugaugugucuucaauguc

SEQ ID NO: 45022 - RNA, 23 nt, Artificial Sequence
  Chemically synthesized
ugucaaugaugugucuucaaugu

SEQ ID NO: 45023 - RNA, 23 nt, Artificial Sequence
  Chemically synthesized
cugucaaugaugugucuucaaug

SEQ ID NO: 45024 - RNA, 23 nt, Artificial Sequence
  Chemically synthesized
ucugucaaugaugugucuucaau

SEQ ID NO: 45025 - RNA, 23 nt, Artificial Sequence
  Chemically synthesized
accuaaauaugcuggauauagcu

SEQ ID NO: 45026 - RNA, 23 nt, Artificial Sequence
  Chemically synthesized
gaccuaaauaugcuggauauagc

SEQ ID NO: 45027 - RNA, 23 nt, Artificial Sequence
  Chemically synthesized
agaccuaaauaugcuggauauag

SEQ ID NO: 45028 - RNA, 23 nt, Artificial Sequence
  Chemically synthesized
cagaccuaaauaugcuggauaua

SEQ ID NO: 45029 - RNA, 23 nt, Artificial Sequence
  Chemically synthesized
acagaccuaaauaugcuggauau

SEQ ID NO: 45030 - RNA, 23 nt, Artificial Sequence
  Chemically synthesized
ggagcuagaucaugaaagaaugu

SEQ ID NO: 45031 - RNA, 23 nt, Artificial Sequence
  Chemically synthesized
uggagcuagaucaugaaagaaug

SEQ ID NO: 45032 - RNA, 23 nt, Artificial Sequence
  Chemically synthesized
auggagcuagaucaugaaagaau

SEQ ID NO: 45033 - RNA, 23 nt, Artificial Sequence
  Chemically synthesized
gauggagcuagaucaugaaagaa

SEQ ID NO: 45034 - RNA, 23 nt, Artificial Sequence
  Chemically synthesized
agauggagcuagaucaugaaaga

SEQ ID NO: 45035 - RNA, 23 nt, Artificial Sequence
  Chemically synthesized
acagaaaucccuagaagaauuuc

SEQ ID NO: 45036 - RNA, 23 nt, Artificial Sequence
  Chemically synthesized
cacagaaaucccuagaagaauuu

SEQ ID NO: 45037 - RNA, 23 nt, Artificial Sequence
  Chemically synthesized
ccacagaaaucccuagaagaauu

SEQ ID NO: 45038 - RNA, 23 nt, Artificial Sequence
  Chemically synthesized
accacagaaaucccuagaagaau

SEQ ID NO: 45039 - RNA, 23 nt, Artificial Sequence
  Chemically synthesized
caccacagaaaucccuagaagaa

SEQ ID NO: 45040 - RNA, 23 nt, Artificial Sequence
  Chemically synthesized
gcaaucaagaagcuaagccgacc

SEQ ID NO: 45041 - RNA, 23 nt, Artificial Sequence
  Chemically synthesized
ugcaaucaagaagcuaagccgac

SEQ ID NO: 45042 - RNA, 23 nt, Artificial Sequence
  Chemically synthesized
uugcaaucaagaagcuaagccga

SEQ ID NO: 45043 - RNA, 23 nt, Artificial Sequence
  Chemically synthesized
guugcaaucaagaagcuaagccg

SEQ ID NO: 45044 - RNA, 23 nt, Artificial Sequence
  Chemically synthesized
uguugcaaucaagaagcuaagcc

SEQ ID NO: 45045 - RNA, 23 nt, Artificial Sequence
  Chemically synthesized
cgguuagucauugauagaacuac

SEQ ID NO: 45046 - RNA, 23 nt, Artificial Sequence
  Chemically synthesized
ucgguuagucauugauagaacua

SEQ ID NO: 45047 - RNA, 23 nt, Artificial Sequence
  Chemically synthesized
gucgguuagucauugauagaacu

SEQ ID NO: 45048 - RNA, 23 nt, Artificial Sequence
  Chemically synthesized
agucgguuagucauugauagaac

SEQ ID NO: 45049 - RNA, 23 nt, Artificial Sequence
  Chemically synthesized
gagucgguuagucauugauagaa

SEQ ID NO: 45050 - RNA, 23 nt, Artificial Sequence
  Chemically synthesized
gcaucuaaaaggaucucuguaga

SEQ ID NO: 45051 - RNA, 23 nt, Artificial Sequence
  Chemically synthesized
ugcaucuaaaaggaucucuguag

SEQ ID NO: 45052 - RNA, 23 nt, Artificial Sequence
  Chemically synthesized
augcaucuaaaaggaucucugua

SEQ ID NO: 45053 - RNA, 23 nt, Artificial Sequence
  Chemically synthesized
gaugcaucuaaaaggaucucugu

SEQ ID NO: 45054 - RNA, 23 nt, Artificial Sequence
  Chemically synthesized
agaugcaucuaaaaggaucucug

SEQ ID NO: 45055 - RNA, 23 nt, Artificial Sequence
  Chemically synthesized
ggauauagcuuugagaaacucuu

SEQ ID NO: 45056 - RNA, 23 nt, Artificial Sequence
  Chemically synthesized
uggauauagcuuugagaaacucu

SEQ ID NO: 45057 - RNA, 23 nt, Artificial Sequence
  Chemically synthesized
cuggauauagcuuugagaaacuc

SEQ ID NO: 45058 - RNA, 23 nt, Artificial Sequence
  Chemically synthesized
gcuggauauagcuuugagaaacu

SEQ ID NO: 45059 - RNA, 23 nt, Artificial Sequence
  Chemically synthesized
ugcuggauauagcuuugagaaac

SEQ ID NO: 45060 - RNA, 23 nt, Artificial Sequence
  Chemically synthesized
aacagaccuaaauaugcuggaua

SEQ ID NO: 45061 - RNA, 23 nt, Artificial Sequence
  Chemically synthesized
cauguccugaauucaugaagaaa

SEQ ID NO: 45062 - RNA, 23 nt, Artificial Sequence
  Chemically synthesized
agauuggagauucuacauucaca

SEQ ID NO: 45063 - RNA, 23 nt, Artificial Sequence
  Chemically synthesized
gagauuggagauucuacauucac

SEQ ID NO: 45064 - RNA, 23 nt, Artificial Sequence
  Chemically synthesized
agagauuggagauucuacauuca

SEQ ID NO: 45065 - RNA, 23 nt, Artificial Sequence
  Chemically synthesized
uagagauuggagauucuacauuc

SEQ ID NO: 45066 - RNA, 23 nt, Artificial Sequence
  Chemically synthesized
guagagauuggagauucuacauu

SEQ ID NO: 45067 - RNA, 23 nt, Artificial Sequence
  Chemically synthesized
gaauuauucaucgggacuuaaag

SEQ ID NO: 45068 - RNA, 23 nt, Artificial Sequence
  Chemically synthesized
ggaauuauucaucgggacuuaaa

SEQ ID NO: 45069 - RNA, 23 nt, Artificial Sequence
  Chemically synthesized
uggaauuauucaucgggacuuaa

SEQ ID NO: 45070 - RNA, 23 nt, Artificial Sequence
  Chemically synthesized
cuggaauuauucaucgggacuua

SEQ ID NO: 45071 - RNA, 23 nt, Artificial Sequence
  Chemically synthesized
gcuggaauuauucaucgggacuu

SEQ ID NO: 45072 - RNA, 23 nt, Artificial Sequence
  Chemically synthesized
gcucauggaugcaaaucuuugcc

SEQ ID NO: 45073 - RNA, 23 nt, Artificial Sequence
  Chemically synthesized
agcucauggaugcaaaucuuugc

SEQ ID NO: 45074 - RNA, 23 nt, Artificial Sequence
  Chemically synthesized
gagcucauggaugcaaaucuuug

SEQ ID NO: 45075 - RNA, 23 nt, Artificial Sequence
  Chemically synthesized
ggagcucauggaugcaaaucuuu

SEQ ID NO: 45076 - RNA, 23 nt, Artificial Sequence
  Chemically synthesized
uggagcucauggaugcaaaucuu

SEQ ID NO: 45077 - RNA, 23 nt, Artificial Sequence
  Chemically synthesized
ucacaccacagaaaucccuagaa

SEQ ID NO: 45078 - RNA, 23 nt, Artificial Sequence
  Chemically synthesized
uucacaccacagaaaucccuaga

SEQ ID NO: 45079 - RNA, 23 nt, Artificial Sequence
  Chemically synthesized
uuucacaccacagaaaucccuag

SEQ ID NO: 45080 - RNA, 23 nt, Artificial Sequence
  Chemically synthesized
uuuucacaccacagaaaucccua

SEQ ID NO: 45081 - RNA, 23 nt, Artificial Sequence
  Chemically synthesized
guuuucacaccacagaaaucccu

SEQ ID NO: 45082 - RNA, 23 nt, Artificial Sequence
  Chemically synthesized
ggagcucaaggaauaguaugcgc

SEQ ID NO: 45083 - RNA, 23 nt, Artificial Sequence
  Chemically synthesized
aggagcucaaggaauaguaugcg

SEQ ID NO: 45084 - RNA, 23 nt, Artificial Sequence
  Chemically synthesized
caggagcucaaggaauaguaugc

SEQ ID NO: 45085 - RNA, 23 nt, Artificial Sequence
  Chemically synthesized
ucaggagcucaaggaauaguaug

SEQ ID NO: 45086 - RNA, 23 nt, Artificial Sequence
  Chemically synthesized
cucaggagcucaaggaauaguau

SEQ ID NO: 45087 - RNA, 23 nt, Artificial Sequence
  Chemically synthesized
guacaucaaugucugguaugauc

SEQ ID NO: 45088 - RNA, 23 nt, Artificial Sequence
  Chemically synthesized
cguacaucaaugucugguaugau

SEQ ID NO: 45089 - RNA, 23 nt, Artificial Sequence
  Chemically synthesized
ccguacaucaaugucugguauga

SEQ ID NO: 45090 - RNA, 23 nt, Artificial Sequence
  Chemically synthesized
cccguacaucaaugucugguaug

SEQ ID NO: 45091 - RNA, 23 nt, Artificial Sequence
  Chemically synthesized
acccguacaucaaugucugguau

SEQ ID NO: 45092 - RNA, 23 nt, Artificial Sequence
  Chemically synthesized
ccagcugacucagaacacaacaa

SEQ ID NO: 45093 - RNA, 23 nt, Artificial Sequence
  Chemically synthesized
aaacagaccuaaauaugcuggau

SEQ ID NO: 45094 - RNA, 23 nt, Artificial Sequence
  Chemically synthesized
gcccaguaauauaguaguaaaau

SEQ ID NO: 45095 - RNA, 23 nt, Artificial Sequence
  Chemically synthesized
agcccaguaauauaguaguaaaa

SEQ ID NO: 45096 - RNA, 23 nt, Artificial Sequence
  Chemically synthesized
aagcccaguaauauaguaguaaa

SEQ ID NO: 45097 - RNA, 23 nt, Artificial Sequence
  Chemically synthesized
aaagcccaguaauauaguaguaa

SEQ ID NO: 45098 - RNA, 23 nt, Artificial Sequence
  Chemically synthesized
uaaagcccaguaauauaguagua

SEQ ID NO: 45099 - RNA, 23 nt, Artificial Sequence
  Chemically synthesized
agcuagaucaugaaagaaugucc

SEQ ID NO: 45100 - RNA, 23 nt, Artificial Sequence
  Chemically synthesized
gagcuagaucaugaaagaauguc

SEQ ID NO: 45101 - RNA, 23 nt, Artificial Sequence
  Chemically synthesized
gucuuauuuuugggugauuuuuc

SEQ ID NO: 45102 - RNA, 23 nt, Artificial Sequence
  Chemically synthesized
ggucuuauuuuugggugauuuuu

SEQ ID NO: 45103 - RNA, 23 nt, Artificial Sequence
  Chemically synthesized
uggucuuauuuuugggugauuuu

SEQ ID NO: 45104 - RNA, 23 nt, Artificial Sequence
  Chemically synthesized
guggucuuauuuuugggugauuu

SEQ ID NO: 45105 - RNA, 23 nt, Artificial Sequence
  Chemically synthesized
aguggucuuauuuuugggugauu

SEQ ID NO: 45106 - RNA, 23 nt, Artificial Sequence
  Chemically synthesized
caguggucuuauuuuugggugau

SEQ ID NO: 45107 - RNA, 23 nt, Artificial Sequence
  Chemically synthesized
acaauucaguggucuuauuuuug

SEQ ID NO: 45108 - RNA, 23 nt, Artificial Sequence
  Chemically synthesized
aacaauucaguggucuuauuuuu

SEQ ID NO: 45109 - RNA, 23 nt, Artificial Sequence
  Chemically synthesized
aaacaauucaguggucuuauuuu

SEQ ID NO: 45110 - RNA, 23 nt, Artificial Sequence
  Chemically synthesized
aaaacaauucaguggucuuauuu

SEQ ID NO: 45111 - RNA, 23 nt, Artificial Sequence
  Chemically synthesized
gaaaacaauucaguggucuuauu

SEQ ID NO: 45112 - RNA, 23 nt, Artificial Sequence
  Chemically synthesized
gggcugcuguagaugacuacuug

SEQ ID NO: 45113 - RNA, 23 nt, Artificial Sequence
  Chemically synthesized
cugggcugcuguagaugacuacu

SEQ ID NO: 45114 - RNA, 23 nt, Artificial Sequence
  Chemically synthesized
cucugggcugcuguagaugacua

SEQ ID NO: 45115 - RNA, 23 nt, Artificial Sequence
  Chemically synthesized
agaguggaaagaauugauauaua

SEQ ID NO: 45116 - RNA, 23 nt, Artificial Sequence
  Chemically synthesized
aagaguggaaagaauugauauau

SEQ ID NO: 45117 - RNA, 23 nt, Artificial Sequence
  Chemically synthesized
gaagaguggaaagaauugauaua

SEQ ID NO: 45118 - RNA, 23 nt, Artificial Sequence
  Chemically synthesized
agaagaguggaaagaauugauau

SEQ ID NO: 45119 - RNA, 23 nt, Artificial Sequence
  Chemically synthesized
uagaagaguggaaagaauugaua

SEQ ID NO: 45120 - RNA, 23 nt, Artificial Sequence
  Chemically synthesized
gcucaggagcucaaggaauagua

SEQ ID NO: 45121 - RNA, 23 nt, Artificial Sequence
  Chemically synthesized
gcaguuagaugaaagggaacaca

SEQ ID NO: 45122 - RNA, 23 nt, Artificial Sequence
  Chemically synthesized
agcaguuagaugaaagggaacac

SEQ ID NO: 45123 - RNA, 23 nt, Artificial Sequence
  Chemically synthesized
aagcaguuagaugaaagggaaca

SEQ ID NO: 45124 - RNA, 23 nt, Artificial Sequence
  Chemically synthesized
caagcaguuagaugaaagggaac

SEQ ID NO: 45125 - RNA, 23 nt, Artificial Sequence
  Chemically synthesized
acaagcaguuagaugaaagggaa

SEQ ID NO: 45126 - RNA, 23 nt, Artificial Sequence
  Chemically synthesized
ggcucaggagcucaaggaauagu

SEQ ID NO: 45127 - RNA, 23 nt, Artificial Sequence
  Chemically synthesized
aggcucaggagcucaaggaauag

SEQ ID NO: 45128 - RNA, 23 nt, Artificial Sequence
  Chemically synthesized
uaggcucaggagcucaaggaaua

SEQ ID NO: 45129 - RNA, 23 nt, Artificial Sequence
  Chemically synthesized
cacccguacaucaaugucuggua

SEQ ID NO: 45130 - RNA, 23 nt, Artificial Sequence
  Chemically synthesized
ccaacacccguacaucaaugucu

SEQ ID NO: 45131 - RNA, 23 nt, Artificial Sequence
  Chemically synthesized
uccaacacccguacaucaauguc

SEQ ID NO: 45132 - RNA, 23 nt, Artificial Sequence
  Chemically synthesized
cuccaacacccguacaucaaugu

SEQ ID NO: 45133 - RNA, 23 nt, Artificial Sequence
  Chemically synthesized
ucuccaacacccguacaucaaug

SEQ ID NO: 45134 - RNA, 23 nt, Artificial Sequence
  Chemically synthesized
cucuccaacacccguacaucaau

SEQ ID NO: 45135 - RNA, 23 nt, Artificial Sequence
  Chemically synthesized
caccauguccugaauucaugaag

SEQ ID NO: 45136 - RNA, 23 nt, Artificial Sequence
  Chemically synthesized
acaccauguccugaauucaugaa

SEQ ID NO: 45137 - RNA, 23 nt, Artificial Sequence
  Chemically synthesized
aacaccauguccugaauucauga

SEQ ID NO: 45138 - RNA, 23 nt, Artificial Sequence
  Chemically synthesized
gaacaccauguccugaauucaug

SEQ ID NO: 45139 - RNA, 23 nt, Artificial Sequence
  Chemically synthesized
ggaacaccauguccugaauucau

SEQ ID NO: 45140 - RNA, 23 nt, Artificial Sequence
  Chemically synthesized
agauucuacauucacaguccuga

SEQ ID NO: 45141 - RNA, 23 nt, Artificial Sequence
  Chemically synthesized
gagauucuacauucacaguccug

SEQ ID NO: 45142 - RNA, 23 nt, Artificial Sequence
  Chemically synthesized
cccaguaauauaguaguaaaauc

SEQ ID NO: 45143 - RNA, 23 nt, Artificial Sequence
  Chemically synthesized
gcaccuucauucugcuggaauua

SEQ ID NO: 45144 - RNA, 23 nt, Artificial Sequence
  Chemically synthesized
agcaccuucauucugcuggaauu

SEQ ID NO: 45145 - RNA, 23 nt, Artificial Sequence
  Chemically synthesized
aagcaccuucauucugcuggaau

SEQ ID NO: 45146 - RNA, 23 nt, Artificial Sequence
  Chemically synthesized
caagcaccuucauucugcuggaa

SEQ ID NO: 45147 - RNA, 23 nt, Artificial Sequence
  Chemically synthesized
ucaagcaccuucauucugcugga

SEQ ID NO: 45148 - RNA, 23 nt, Artificial Sequence
  Chemically synthesized
gcaagcgugacaacaauuuuuau

SEQ ID NO: 45149 - RNA, 23 nt, Artificial Sequence
  Chemically synthesized
agcaagcgugacaacaauuuuua

SEQ ID NO: 45150 - RNA, 23 nt, Artificial Sequence
  Chemically synthesized
aagcaagcgugacaacaauuuuu

SEQ ID NO: 45151 - RNA, 23 nt, Artificial Sequence
  Chemically synthesized
gaagcaagcgugacaacaauuuu

SEQ ID NO: 45152 - RNA, 23 nt, Artificial Sequence
  Chemically synthesized
agaagcaagcgugacaacaauuu

SEQ ID NO: 45153 - RNA, 23 nt, Artificial Sequence
  Chemically synthesized
agagcuaguucuuaugaaaugug

SEQ ID NO: 45154 - RNA, 23 nt, Artificial Sequence
  Chemically synthesized
gagagcuaguucuuaugaaaugu

SEQ ID NO: 45155 - RNA, 23 nt, Artificial Sequence
  Chemically synthesized
agagagcuaguucuuaugaaaug

SEQ ID NO: 45156 - RNA, 23 nt, Artificial Sequence
  Chemically synthesized
cagagagcuaguucuuaugaaau

SEQ ID NO: 45157 - RNA, 23 nt, Artificial Sequence
  Chemically synthesized
acagagagcuaguucuuaugaaa

SEQ ID NO: 45158 - RNA, 23 nt, Artificial Sequence
  Chemically synthesized
caagaagcuaagccgaccauuuc

SEQ ID NO: 45159 - RNA, 23 nt, Artificial Sequence
  Chemically synthesized
ucaagaagcuaagccgaccauuu

SEQ ID NO: 45160 - RNA, 23 nt, Artificial Sequence
  Chemically synthesized
aucaagaagcuaagccgaccauu

SEQ ID NO: 45161 - RNA, 23 nt, Artificial Sequence
  Chemically synthesized
aaucaagaagcuaagccgaccau

SEQ ID NO: 45162 - RNA, 23 nt, Artificial Sequence
  Chemically synthesized
caaucaagaagcuaagccgacca

SEQ ID NO: 45163 - RNA, 23 nt, Artificial Sequence
  Chemically synthesized
gucugucaaugaugugucuucaa

SEQ ID NO: 45164 - RNA, 23 nt, Artificial Sequence
  Chemically synthesized
ggaacacacaauagaagagugga

SEQ ID NO: 45165 - RNA, 23 nt, Artificial Sequence
  Chemically synthesized
gggaacacacaauagaagagugg

SEQ ID NO: 45166 - RNA, 23 nt, Artificial Sequence
  Chemically synthesized
agggaacacacaauagaagagug

SEQ ID NO: 45167 - RNA, 23 nt, Artificial Sequence
  Chemically synthesized
aagggaacacacaauagaagagu

SEQ ID NO: 45168 - RNA, 23 nt, Artificial Sequence
  Chemically synthesized
aaagggaacacacaauagaagag

SEQ ID NO: 45169 - RNA, 23 nt, Artificial Sequence
  Chemically synthesized
ccagucaggcaagggauuuguua

SEQ ID NO: 45170 - RNA, 23 nt, Artificial Sequence
  Chemically synthesized
gccagucaggcaagggauuuguu

SEQ ID NO: 45171 - RNA, 23 nt, Artificial Sequence
  Chemically synthesized
agccagucaggcaagggauuugu

SEQ ID NO: 45172 - RNA, 23 nt, Artificial Sequence
  Chemically synthesized
aagccagucaggcaagggauuug

SEQ ID NO: 45173 - RNA, 23 nt, Artificial Sequence
  Chemically synthesized
aaagccagucaggcaagggauuu

SEQ ID NO: 45174 - RNA, 23 nt, Artificial Sequence
  Chemically synthesized
cccagcugacucagaacacaaca

SEQ ID NO: 45175 - RNA, 23 nt, Artificial Sequence
  Chemically synthesized
ucccagcugacucagaacacaac

SEQ ID NO: 45176 - RNA, 23 nt, Artificial Sequence
  Chemically synthesized
uucccagcugacucagaacacaa

SEQ ID NO: 45177 - RNA, 23 nt, Artificial Sequence
  Chemically synthesized
uuucccagcugacucagaacaca

SEQ ID NO: 45178 - RNA, 23 nt, Artificial Sequence
  Chemically synthesized
ggaacgaguuuuaugaugacgcc

SEQ ID NO: 45179 - RNA, 23 nt, Artificial Sequence
  Chemically synthesized
aggaacgaguuuuaugaugacgc

SEQ ID NO: 45180 - RNA, 23 nt, Artificial Sequence
  Chemically synthesized
caggaacgaguuuuaugaugacg

SEQ ID NO: 45181 - RNA, 23 nt, Artificial Sequence
  Chemically synthesized
gcaggaacgaguuuuaugaugac

SEQ ID NO: 45182 - RNA, 23 nt, Artificial Sequence
  Chemically synthesized
ugcaggaacgaguuuuaugauga

SEQ ID NO: 45183 - RNA, 23 nt, Artificial Sequence
  Chemically synthesized
guaaaaucugauugcacuuugaa

SEQ ID NO: 45184 - RNA, 23 nt, Artificial Sequence
  Chemically synthesized
aguaaaaucugauugcacuuuga

SEQ ID NO: 45185 - RNA, 23 nt, Artificial Sequence
  Chemically synthesized
uaguaaaaucugauugcacuuug

SEQ ID NO: 45186 - RNA, 23 nt, Artificial Sequence
  Chemically synthesized
guaguaaaaucugauugcacuuu

SEQ ID NO: 45187 - RNA, 23 nt, Artificial Sequence
  Chemically synthesized
aguaguaaaaucugauugcacuu

SEQ ID NO: 45188 - RNA, 23 nt, Artificial Sequence
  Chemically synthesized
uaguaguaaaaucugauugcacu

SEQ ID NO: 45189 - RNA, 23 nt, Artificial Sequence
  Chemically synthesized
auaguaguaaaaucugauugcac

SEQ ID NO: 45190 - RNA, 23 nt, Artificial Sequence
  Chemically synthesized
uauaguaguaaaaucugauugca

SEQ ID NO: 45191 - RNA, 23 nt, Artificial Sequence
  Chemically synthesized
ggaaucaagcaccuucauucugc

SEQ ID NO: 45192 - RNA, 23 nt, Artificial Sequence
  Chemically synthesized
uggaaucaagcaccuucauucug

SEQ ID NO: 45193 - RNA, 23 nt, Artificial Sequence
  Chemically synthesized
guggaaucaagcaccuucauucu

SEQ ID NO: 45194 - RNA, 23 nt, Artificial Sequence
  Chemically synthesized
uguggaaucaagcaccuucauuc

SEQ ID NO: 45195 - RNA, 23 nt, Artificial Sequence
  Chemically synthesized
guguggaaucaagcaccuucauu

SEQ ID NO: 45196 - RNA, 23 nt, Artificial Sequence
  Chemically synthesized
uacagagagcuaguucuuaugaa

SEQ ID NO: 45197 - RNA, 23 nt, Artificial Sequence
  Chemically synthesized
ccauuucagaaucagacucaugc

SEQ ID NO: 45198 - RNA, 23 nt, Artificial Sequence
  Chemically synthesized
accauuucagaaucagacucaug

SEQ ID NO: 45199 - RNA, 23 nt, Artificial Sequence
  Chemically synthesized
gaccauuucagaaucagacucau

SEQ ID NO: 45200 - RNA, 23 nt, Artificial Sequence
  Chemically synthesized
cgaccauuucagaaucagacuca

SEQ ID NO: 45201 - RNA, 23 nt, Artificial Sequence
  Chemically synthesized
ccgaccauuucagaaucagacuc

SEQ ID NO: 45202 - RNA, 23 nt, Artificial Sequence
  Chemically synthesized
acaguccugaaacgauaucagaa

SEQ ID NO: 45203 - RNA, 23 nt, Artificial Sequence
  Chemically synthesized
cacaguccugaaacgauaucaga

SEQ ID NO: 45204 - RNA, 23 nt, Artificial Sequence
  Chemically synthesized
ucacaguccugaaacgauaucag

SEQ ID NO: 45205 - RNA, 23 nt, Artificial Sequence
  Chemically synthesized
uucacaguccugaaacgauauca

SEQ ID NO: 45206 - RNA, 23 nt, Artificial Sequence
  Chemically synthesized
auucacaguccugaaacgauauc

SEQ ID NO: 45207 - RNA, 23 nt, Artificial Sequence
  Chemically synthesized
ccuaaauaugcuggauauagcuu

SEQ ID NO: 45208 - RNA, 23 nt, Artificial Sequence
  Chemically synthesized
guugaaaacagaccuaaauaugc

SEQ ID NO: 45209 - RNA, 23 nt, Artificial Sequence
  Chemically synthesized
cguugaaaacagaccuaaauaug

SEQ ID NO: 45210 - RNA, 23 nt, Artificial Sequence
  Chemically synthesized
acguugaaaacagaccuaaauau

SEQ ID NO: 45211 - RNA, 23 nt, Artificial Sequence
  Chemically synthesized
uacguugaaaacagaccuaaaua

SEQ ID NO: 45212 - RNA, 23 nt, Artificial Sequence
  Chemically synthesized
uuacguugaaaacagaccuaaau

SEQ ID NO: 45213 - RNA, 23 nt, Artificial Sequence
  Chemically synthesized
ugaagaaacugcaaccaacagua

SEQ ID NO: 45214 - RNA, 23 nt, Artificial Sequence
  Chemically synthesized
augaagaaacugcaaccaacagu

SEQ ID NO: 45215 - RNA, 23 nt, Artificial Sequence
  Chemically synthesized
caugaagaaacugcaaccaacag

SEQ ID NO: 45216 - RNA, 23 nt, Artificial Sequence
  Chemically synthesized
ucaugaagaaacugcaaccaaca

SEQ ID NO: 45217 - RNA, 23 nt, Artificial Sequence
  Chemically synthesized
uucaugaagaaacugcaaccaac

SEQ ID NO: 45218 - RNA, 23 nt, Artificial Sequence
  Chemically synthesized
gcaugggcuacaaggaaaacgug

SEQ ID NO: 45219 - RNA, 23 nt, Artificial Sequence
  Chemically synthesized
ggcaugggcuacaaggaaaacgu

SEQ ID NO: 45220 - RNA, 23 nt, Artificial Sequence
  Chemically synthesized
uggcaugggcuacaaggaaaacg

SEQ ID NO: 45221 - RNA, 23 nt, Artificial Sequence
  Chemically synthesized
uuggcaugggcuacaaggaaaac

SEQ ID NO: 45222 - RNA, 23 nt, Artificial Sequence
  Chemically synthesized
cuuggcaugggcuacaaggaaaa

SEQ ID NO: 45223 - RNA, 23 nt, Artificial Sequence
  Chemically synthesized
ugcuggaauuauucaucgggacu

SEQ ID NO: 45224 - RNA, 23 nt, Artificial Sequence
  Chemically synthesized
caccuucauucugcuggaauuau

SEQ ID NO: 45225 - RNA, 23 nt, Artificial Sequence
  Chemically synthesized
gcuagaucaugaaagaauguccu

SEQ ID NO: 45226 - RNA, 23 nt, Artificial Sequence
  Chemically synthesized
gaagcuaagccgaccauuucaga

SEQ ID NO: 45227 - RNA, 23 nt, Artificial Sequence
  Chemically synthesized
agaagcuaagccgaccauuucag

SEQ ID NO: 45228 - RNA, 23 nt, Artificial Sequence
  Chemically synthesized
aagaagcuaagccgaccauuuca

SEQ ID NO: 45229 - RNA, 23 nt, Artificial Sequence
  Chemically synthesized
gguuagucauugauagaacuacu

SEQ ID NO: 45230 - RNA, 23 nt, Artificial Sequence
  Chemically synthesized
ggagucgguuagucauugauaga

SEQ ID NO: 45231 - RNA, 23 nt, Artificial Sequence
  Chemically synthesized
gggagucgguuagucauugauag

SEQ ID NO: 45232 - RNA, 23 nt, Artificial Sequence
  Chemically synthesized
ggggagucgguuagucauugaua

SEQ ID NO: 45233 - RNA, 23 nt, Artificial Sequence
  Chemically synthesized
uggggagucgguuagucauugau

SEQ ID NO: 45234 - RNA, 23 nt, Artificial Sequence
  Chemically synthesized
auggggagucgguuagucauuga

SEQ ID NO: 45235 - RNA, 23 nt, Artificial Sequence
  Chemically synthesized
cgucugucaaugaugugucuuca

SEQ ID NO: 45236 - RNA, 23 nt, Artificial Sequence
  Chemically synthesized
ucgucugucaaugaugugucuuc

SEQ ID NO: 45237 - RNA, 23 nt, Artificial Sequence
  Chemically synthesized
auagaagaguggaaagaauugau

SEQ ID NO: 45238 - RNA, 23 nt, Artificial Sequence
  Chemically synthesized
aauagaagaguggaaagaauuga

SEQ ID NO: 45239 - RNA, 23 nt, Artificial Sequence
  Chemically synthesized
caauagaagaguggaaagaauug

SEQ ID NO: 45240 - RNA, 23 nt, Artificial Sequence
  Chemically synthesized
acaauagaagaguggaaagaauu

SEQ ID NO: 45241 - RNA, 23 nt, Artificial Sequence
  Chemically synthesized
cacaauagaagaguggaaagaau

SEQ ID NO: 45242 - RNA, 23 nt, Artificial Sequence
  Chemically synthesized
ugaaagggaacacacaauagaag

SEQ ID NO: 45243 - RNA, 23 nt, Artificial Sequence
  Chemically synthesized
augaaagggaacacacaauagaa

SEQ ID NO: 45244 - RNA, 23 nt, Artificial Sequence
  Chemically synthesized
gaugaaagggaacacacaauaga

SEQ ID NO: 45245 - RNA, 23 nt, Artificial Sequence
  Chemically synthesized
agaugaaagggaacacacaauag

SEQ ID NO: 45246 - RNA, 23 nt, Artificial Sequence
  Chemically synthesized
uagaugaaagggaacacacaaua

SEQ ID NO: 45247 - RNA, 23 nt, Artificial Sequence
  Chemically synthesized
gcucuccaacacccguacaucaa

SEQ ID NO: 45248 - RNA, 23 nt, Artificial Sequence
  Chemically synthesized
agcucuccaacacccguacauca

SEQ ID NO: 45249 - RNA, 23 nt, Artificial Sequence
  Chemically synthesized
aagcucuccaacacccguacauc

SEQ ID NO: 45250 - RNA, 23 nt, Artificial Sequence
  Chemically synthesized
gaagcucuccaacacccguacau

SEQ ID NO: 45251 - RNA, 23 nt, Artificial Sequence
  Chemically synthesized
cuaaaaggaucucuguagaugaa

SEQ ID NO: 45252 - RNA, 23 nt, Artificial Sequence
  Chemically synthesized
ucuaaaaggaucucuguagauga

SEQ ID NO: 45253 - RNA, 23 nt, Artificial Sequence
  Chemically synthesized
aucuaaaaggaucucuguagaug

SEQ ID NO: 45254 - RNA, 23 nt, Artificial Sequence
  Chemically synthesized
caucuaaaaggaucucuguagau

SEQ ID NO: 45255 - RNA, 23 nt, Artificial Sequence
  Chemically synthesized
uagaugcaucuaaaaggaucucu

SEQ ID NO: 45256 - RNA, 23 nt, Artificial Sequence
  Chemically synthesized
augcuggauauagcuuugagaaa

SEQ ID NO: 45257 - RNA, 23 nt, Artificial Sequence
  Chemically synthesized
guuuuaugaugacgccuuaugua

SEQ ID NO: 45258 - RNA, 23 nt, Artificial Sequence
  Chemically synthesized
aguuuuaugaugacgccuuaugu

SEQ ID NO: 45259 - RNA, 23 nt, Artificial Sequence
  Chemically synthesized
gaguuuuaugaugacgccuuaug

SEQ ID NO: 45260 - RNA, 23 nt, Artificial Sequence
  Chemically synthesized
cgaguuuuaugaugacgccuuau

SEQ ID NO: 45261 - RNA, 23 nt, Artificial Sequence
  Chemically synthesized
acgaguuuuaugaugacgccuua

SEQ ID NO: 45262 - RNA, 23 nt, Artificial Sequence
  Chemically synthesized
aacgaguuuuaugaugacgccuu

SEQ ID NO: 45263 - RNA, 23 nt, Artificial Sequence
  Chemically synthesized
gaacgaguuuuaugaugacgccu

SEQ ID NO: 45264 - RNA, 23 nt, Artificial Sequence
  Chemically synthesized
uguagagauuggagauucuacau

SEQ ID NO: 45265 - RNA, 23 nt, Artificial Sequence
  Chemically synthesized
cugcaggaacgaguuuuaugaug

SEQ ID NO: 45266 - RNA, 23 nt, Artificial Sequence
  Chemically synthesized
acugcaggaacgaguuuuaugau

SEQ ID NO: 45267 - RNA, 23 nt, Artificial Sequence
  Chemically synthesized
gacugcaggaacgaguuuuauga

SEQ ID NO: 45268 - RNA, 23 nt, Artificial Sequence
  Chemically synthesized
guguagagauuggagauucuaca

SEQ ID NO: 45269 - RNA, 23 nt, Artificial Sequence
  Chemically synthesized
gcacuuugaagauucuugacuuc

SEQ ID NO: 45270 - RNA, 23 nt, Artificial Sequence
  Chemically synthesized
ugcacuuugaagauucuugacuu

SEQ ID NO: 45271 - RNA, 23 nt, Artificial Sequence
  Chemically synthesized
uugcacuuugaagauucuugacu

SEQ ID NO: 45272 - RNA, 23 nt, Artificial Sequence
  Chemically synthesized
auugcacuuugaagauucuugac

SEQ ID NO: 45273 - RNA, 23 nt, Artificial Sequence
  Chemically synthesized
gauugcacuuugaagauucuuga

SEQ ID NO: 45274 - RNA, 23 nt, Artificial Sequence
  Chemically synthesized
ugauugcacuuugaagauucuug

SEQ ID NO: 45275 - RNA, 23 nt, Artificial Sequence
  Chemically synthesized
cugauugcacuuugaagauucuu

SEQ ID NO: 45276 - RNA, 23 nt, Artificial Sequence
  Chemically synthesized
ucugauugcacuuugaagauucu

SEQ ID NO: 45277 - RNA, 23 nt, Artificial Sequence
  Chemically synthesized
aucugauugcacuuugaagauuc

SEQ ID NO: 45278 - RNA, 23 nt, Artificial Sequence
  Chemically synthesized
aaucugauugcacuuugaagauu

SEQ ID NO: 45279 - RNA, 23 nt, Artificial Sequence
  Chemically synthesized
agcgugacaacaauuuuuauagu

SEQ ID NO: 45280 - RNA, 23 nt, Artificial Sequence
  Chemically synthesized
aagcgugacaacaauuuuuauag

SEQ ID NO: 45281 - RNA, 23 nt, Artificial Sequence
  Chemically synthesized
caagcgugacaacaauuuuuaua

SEQ ID NO: 45282 - RNA, 23 nt, Artificial Sequence
  Chemically synthesized
cuaguucuuaugaaauguguuaa

SEQ ID NO: 45283 - RNA, 23 nt, Artificial Sequence
  Chemically synthesized
gcuaguucuuaugaaauguguua

SEQ ID NO: 45284 - RNA, 23 nt, Artificial Sequence
  Chemically synthesized
agcuaguucuuaugaaauguguu

SEQ ID NO: 45285 - RNA, 23 nt, Artificial Sequence
  Chemically synthesized
gagcuaguucuuaugaaaugugu

SEQ ID NO: 45286 - RNA, 23 nt, Artificial Sequence
  Chemically synthesized
ugaaagaaauguugcaaucaaga

SEQ ID NO: 45287 - RNA, 23 nt, Artificial Sequence
  Chemically synthesized
uugaaagaaauguugcaaucaag

SEQ ID NO: 45288 - RNA, 23 nt, Artificial Sequence
  Chemically synthesized
cuugaaagaaauguugcaaucaa

SEQ ID NO: 45289 - RNA, 23 nt, Artificial Sequence
  Chemically synthesized
ucuugaaagaaauguugcaauca

SEQ ID NO: 45290 - RNA, 23 nt, Artificial Sequence
  Chemically synthesized
uucuugaaagaaauguugcaauc

SEQ ID NO: 45291 - RNA, 23 nt, Artificial Sequence
  Chemically synthesized
gucauugauagaacuacuuugaa

SEQ ID NO: 45292 - RNA, 23 nt, Artificial Sequence
  Chemically synthesized
agucauugauagaacuacuuuga

SEQ ID NO: 45293 - RNA, 23 nt, Artificial Sequence
  Chemically synthesized
uagucauugauagaacuacuuug

SEQ ID NO: 45294 - RNA, 23 nt, Artificial Sequence
  Chemically synthesized
uuagucauugauagaacuacuuu

SEQ ID NO: 45295 - RNA, 23 nt, Artificial Sequence
  Chemically synthesized
guuagucauugauagaacuacuu

SEQ ID NO: 45296 - RNA, 23 nt, Artificial Sequence
  Chemically synthesized
gaauaguaugcgcagcuuaugau

SEQ ID NO: 45297 - RNA, 23 nt, Artificial Sequence
  Chemically synthesized
ugaugugucuucaaugucaacag

SEQ ID NO: 45298 - RNA, 23 nt, Artificial Sequence
  Chemically synthesized
augaugugucuucaaugucaaca

SEQ ID NO: 45299 - RNA, 23 nt, Artificial Sequence
  Chemically synthesized
aaugaugugucuucaaugucaac

SEQ ID NO: 45300 - RNA, 23 nt, Artificial Sequence
  Chemically synthesized
caaugaugugucuucaaugucaa

SEQ ID NO: 45301 - RNA, 23 nt, Artificial Sequence
  Chemically synthesized
cucaaggaauaguaugcgcagcu

SEQ ID NO: 45302 - RNA, 23 nt, Artificial Sequence
  Chemically synthesized
gcucaaggaauaguaugcgcagc

SEQ ID NO: 45303 - RNA, 23 nt, Artificial Sequence
  Chemically synthesized
agcucaaggaauaguaugcgcag

SEQ ID NO: 45304 - RNA, 23 nt, Artificial Sequence
  Chemically synthesized
gagcucaaggaauaguaugcgca

SEQ ID NO: 45305 - RNA, 23 nt, Artificial Sequence
  Chemically synthesized
gcagcagugaucaauggcucuca

SEQ ID NO: 45306 - RNA, 23 nt, Artificial Sequence
  Chemically synthesized
ugcagcagugaucaauggcucuc

SEQ ID NO: 45307 - RNA, 23 nt, Artificial Sequence
  Chemically synthesized
gugcagcagugaucaauggcucu

SEQ ID NO: 45308 - RNA, 23 nt, Artificial Sequence
  Chemically synthesized
ggugcagcagugaucaauggcuc

SEQ ID NO: 45309 - RNA, 23 nt, Artificial Sequence
  Chemically synthesized
aggugcagcagugaucaauggcu

SEQ ID NO: 45310 - RNA, 23 nt, Artificial Sequence
  Chemically synthesized
gaguggaaagaauugauauauaa

SEQ ID NO: 45311 - RNA, 23 nt, Artificial Sequence
  Chemically synthesized
acacaauagaagaguggaaagaa

SEQ ID NO: 45312 - RNA, 23 nt, Artificial Sequence
  Chemically synthesized
cacacaauagaagaguggaaaga

SEQ ID NO: 45313 - RNA, 23 nt, Artificial Sequence
  Chemically synthesized
gaacacacaauagaagaguggaa

SEQ ID NO: 45314 - RNA, 23 nt, Artificial Sequence
  Chemically synthesized
gcugguaauagaugcaucuaaaa

SEQ ID NO: 45315 - RNA, 23 nt, Artificial Sequence
  Chemically synthesized
ugcugguaauagaugcaucuaaa

SEQ ID NO: 45316 - RNA, 23 nt, Artificial Sequence
  Chemically synthesized
augcugguaauagaugcaucuaa

SEQ ID NO: 45317 - RNA, 23 nt, Artificial Sequence
  Chemically synthesized
aaugcugguaauagaugcaucua

SEQ ID NO: 45318 - RNA, 23 nt, Artificial Sequence
  Chemically synthesized
aaaugcugguaauagaugcaucu

SEQ ID NO: 45319 - RNA, 23 nt, Artificial Sequence
  Chemically synthesized
cauucacaguccugaaacgauau

SEQ ID NO: 45320 - RNA, 23 nt, Artificial Sequence
  Chemically synthesized
cuuacguugaaaacagaccuaaa

SEQ ID NO: 45321 - RNA, 23 nt, Artificial Sequence
  Chemically synthesized
ccuuggcaugggcuacaaggaaa

SEQ ID NO: 45322 - RNA, 23 nt, Artificial Sequence
  Chemically synthesized
aaaucugauugcacuuugaagau

SEQ ID NO: 45323 - RNA, 23 nt, Artificial Sequence
  Chemically synthesized
aaaaucugauugcacuuugaaga

SEQ ID NO: 45324 - RNA, 23 nt, Artificial Sequence
  Chemically synthesized
uaaaaucugauugcacuuugaag

SEQ ID NO: 45325 - RNA, 23 nt, Artificial Sequence
  Chemically synthesized
cugcuggaauuauucaucgggac

SEQ ID NO: 45326 - RNA, 23 nt, Artificial Sequence
  Chemically synthesized
ucugcuggaauuauucaucggga

SEQ ID NO: 45327 - RNA, 23 nt, Artificial Sequence
  Chemically synthesized
guccuaccuucucuaucagaugc

SEQ ID NO: 45328 - RNA, 23 nt, Artificial Sequence
  Chemically synthesized
uguccuaccuucucuaucagaug

SEQ ID NO: 45329 - RNA, 23 nt, Artificial Sequence
  Chemically synthesized
auguccuaccuucucuaucagau

SEQ ID NO: 45330 - RNA, 23 nt, Artificial Sequence
  Chemically synthesized
aauguccuaccuucucuaucaga

SEQ ID NO: 45331 - RNA, 23 nt, Artificial Sequence
  Chemically synthesized
gaauguccuaccuucucuaucag

SEQ ID NO: 45332 - RNA, 23 nt, Artificial Sequence
  Chemically synthesized
gcgugacaacaauuuuuauagug

SEQ ID NO: 45333 - RNA, 23 nt, Artificial Sequence
  Chemically synthesized
ucaugaaagaauguccuaccuuc

SEQ ID NO: 45334 - RNA, 23 nt, Artificial Sequence
  Chemically synthesized
aucaugaaagaauguccuaccuu

SEQ ID NO: 45335 - RNA, 23 nt, Artificial Sequence
  Chemically synthesized
gaucaugaaagaauguccuaccu

SEQ ID NO: 45336 - RNA, 23 nt, Artificial Sequence
  Chemically synthesized
agaucaugaaagaauguccuacc

SEQ ID NO: 45337 - RNA, 23 nt, Artificial Sequence
  Chemically synthesized
uagaucaugaaagaauguccuac

SEQ ID NO: 45338 - RNA, 23 nt, Artificial Sequence
  Chemically synthesized
cuagaucaugaaagaauguccua

SEQ ID NO: 45339 - RNA, 23 nt, Artificial Sequence
  Chemically synthesized
cagaagcaagcgugacaacaauu

SEQ ID NO: 45340 - RNA, 23 nt, Artificial Sequence
  Chemically synthesized
gcagaagcaagcgugacaacaau

SEQ ID NO: 45341 - RNA, 23 nt, Artificial Sequence
  Chemically synthesized
agcagaagcaagcgugacaacaa

SEQ ID NO: 45342 - RNA, 23 nt, Artificial Sequence
  Chemically synthesized
cuagaagaauuucaagauguuua

SEQ ID NO: 45343 - RNA, 23 nt, Artificial Sequence
  Chemically synthesized
ccuagaagaauuucaagauguuu

SEQ ID NO: 45344 - RNA, 23 nt, Artificial Sequence
  Chemically synthesized
cccuagaagaauuucaagauguu

SEQ ID NO: 45345 - RNA, 23 nt, Artificial Sequence
  Chemically synthesized
ucccuagaagaauuucaagaugu

SEQ ID NO: 45346 - RNA, 23 nt, Artificial Sequence
  Chemically synthesized
aucccuagaagaauuucaagaug

SEQ ID NO: 45347 - RNA, 23 nt, Artificial Sequence
  Chemically synthesized
ucaguggucuuauuuuuggguga

SEQ ID NO: 45348 - RNA, 23 nt, Artificial Sequence
  Chemically synthesized
caauucaguggucuuauuuuugg

SEQ ID NO: 45349 - RNA, 23 nt, Artificial Sequence
  Chemically synthesized
gucuucaaugucaacagauccga

SEQ ID NO: 45350 - RNA, 23 nt, Artificial Sequence
  Chemically synthesized
ugucuucaaugucaacagauccg

SEQ ID NO: 45351 - RNA, 23 nt, Artificial Sequence
  Chemically synthesized
gugucuucaaugucaacagaucc

SEQ ID NO: 45352 - RNA, 23 nt, Artificial Sequence
  Chemically synthesized
ugugucuucaaugucaacagauc

SEQ ID NO: 45353 - RNA, 23 nt, Artificial Sequence
  Chemically synthesized
augugucuucaaugucaacagau

SEQ ID NO: 45354 - RNA, 23 nt, Artificial Sequence
  Chemically synthesized
gaugugucuucaaugucaacaga

SEQ ID NO: 45355 - RNA, 23 nt, Artificial Sequence
  Chemically synthesized
gucgucugucaaugaugugucuu

SEQ ID NO: 45356 - RNA, 23 nt, Artificial Sequence
  Chemically synthesized
cgucgucugucaaugaugugucu

SEQ ID NO: 45357 - RNA, 23 nt, Artificial Sequence
  Chemically synthesized
ucgucgucugucaaugauguguc

SEQ ID NO: 45358 - RNA, 23 nt, Artificial Sequence
  Chemically synthesized
acacccguacaucaaugucuggu

SEQ ID NO: 45359 - RNA, 23 nt, Artificial Sequence
  Chemically synthesized
aacacccguacaucaaugucugg

SEQ ID NO: 45360 - RNA, 23 nt, Artificial Sequence
  Chemically synthesized
caacacccguacaucaaugucug

SEQ ID NO: 45361 - RNA, 23 nt, Artificial Sequence
  Chemically synthesized
auagaugcaucuaaaaggaucuc

SEQ ID NO: 45362 - RNA, 23 nt, Artificial Sequence
  Chemically synthesized
aauagaugcaucuaaaaggaucu

SEQ ID NO: 45363 - RNA, 23 nt, Artificial Sequence
  Chemically synthesized
uaauagaugcaucuaaaaggauc

SEQ ID NO: 45364 - RNA, 23 nt, Artificial Sequence
  Chemically synthesized
caguccugaaacgauaucagaau

SEQ ID NO: 45365 - RNA, 23 nt, Artificial Sequence
  Chemically synthesized
uaugcuggauauagcuuugagaa

SEQ ID NO: 45366 - RNA, 23 nt, Artificial Sequence
  Chemically synthesized
aaaacagaccuaaauaugcugga

SEQ ID NO: 45367 - RNA, 23 nt, Artificial Sequence
  Chemically synthesized
aguguagagauuggagauucuac

SEQ ID NO: 45368 - RNA, 23 nt, Artificial Sequence
  Chemically synthesized
uaguguagagauuggagauucua

SEQ ID NO: 45369 - RNA, 23 nt, Artificial Sequence
  Chemically synthesized
auaguguagagauuggagauucu

SEQ ID NO: 45370 - RNA, 23 nt, Artificial Sequence
  Chemically synthesized
uauaguguagagauuggagauuc

SEQ ID NO: 45371 - RNA, 23 nt, Artificial Sequence
  Chemically synthesized
uuauaguguagagauuggagauu

SEQ ID NO: 45372 - RNA, 23 nt, Artificial Sequence
  Chemically synthesized
accuucauucugcuggaauuauu

SEQ ID NO: 45373 - RNA, 23 nt, Artificial Sequence
  Chemically synthesized
cagauggagcuagaucaugaaag

SEQ ID NO: 45374 - RNA, 23 nt, Artificial Sequence
  Chemically synthesized
acauagucauggagcucauggau

SEQ ID NO: 45375 - RNA, 23 nt, Artificial Sequence
  Chemically synthesized
uacauagucauggagcucaugga

SEQ ID NO: 45376 - RNA, 23 nt, Artificial Sequence
  Chemically synthesized
uuacauagucauggagcucaugg

SEQ ID NO: 45377 - RNA, 23 nt, Artificial Sequence
  Chemically synthesized
uuuacauagucauggagcucaug

SEQ ID NO: 45378 - RNA, 23 nt, Artificial Sequence
  Chemically synthesized
guuuacauagucauggagcucau

SEQ ID NO: 45379 - RNA, 23 nt, Artificial Sequence
  Chemically synthesized
uuggccuuuugaauguuuucaca

SEQ ID NO: 45380 - RNA, 23 nt, Artificial Sequence
  Chemically synthesized
auuggccuuuugaauguuuucac

SEQ ID NO: 45381 - RNA, 23 nt, Artificial Sequence
  Chemically synthesized
aauuggccuuuugaauguuuuca

SEQ ID NO: 45382 - RNA, 23 nt, Artificial Sequence
  Chemically synthesized
uaauuggccuuuugaauguuuuc

SEQ ID NO: 45383 - RNA, 23 nt, Artificial Sequence
  Chemically synthesized
auaauuggccuuuugaauguuuu

SEQ ID NO: 45384 - RNA, 23 nt, Artificial Sequence
  Chemically synthesized
gccgaccauuucagaaucagacu

SEQ ID NO: 45385 - RNA, 23 nt, Artificial Sequence
  Chemically synthesized
agccgaccauuucagaaucagac

SEQ ID NO: 45386 - RNA, 23 nt, Artificial Sequence
  Chemically synthesized
ugaugccauucuugaaagaaaug

SEQ ID NO: 45387 - RNA, 23 nt, Artificial Sequence
  Chemically synthesized
augaugccauucuugaaagaaau

SEQ ID NO: 45388 - RNA, 23 nt, Artificial Sequence
  Chemically synthesized
uaugaugccauucuugaaagaaa

SEQ ID NO: 45389 - RNA, 23 nt, Artificial Sequence
  Chemically synthesized
uuaugaugccauucuugaaagaa

SEQ ID NO: 45390 - RNA, 23 nt, Artificial Sequence
  Chemically synthesized
cuuaugaugccauucuugaaaga

SEQ ID NO: 45391 - RNA, 23 nt, Artificial Sequence
  Chemically synthesized
uucaguggucuuauuuuugggug

SEQ ID NO: 45392 - RNA, 23 nt, Artificial Sequence
  Chemically synthesized
ugaaaacaauucaguggucuuau

SEQ ID NO: 45393 - RNA, 23 nt, Artificial Sequence
  Chemically synthesized
uugaaaacaauucaguggucuua

SEQ ID NO: 45394 - RNA, 23 nt, Artificial Sequence
  Chemically synthesized
uuugaaaacaauucaguggucuu

SEQ ID NO: 45395 - RNA, 23 nt, Artificial Sequence
  Chemically synthesized
cuuugaaaacaauucaguggucu

SEQ ID NO: 45396 - RNA, 23 nt, Artificial Sequence
  Chemically synthesized
aucgucgucugucaaugaugugu

SEQ ID NO: 45397 - RNA, 23 nt, Artificial Sequence
  Chemically synthesized
caucgucgucugucaaugaugug

SEQ ID NO: 45398 - RNA, 23 nt, Artificial Sequence
  Chemically synthesized
ucaucgucgucugucaaugaugu

SEQ ID NO: 45399 - RNA, 23 nt, Artificial Sequence
  Chemically synthesized
ucaucaucgucgucugucaauga

SEQ ID NO: 45400 - RNA, 23 nt, Artificial Sequence
  Chemically synthesized
aucaucaucgucgucugucaaug

SEQ ID NO: 45401 - RNA, 23 nt, Artificial Sequence
  Chemically synthesized
caucaucaucgucgucugucaau

SEQ ID NO: 45402 - RNA, 23 nt, Artificial Sequence
  Chemically synthesized
ccaucaucaucgucgucugucaa

SEQ ID NO: 45403 - RNA, 23 nt, Artificial Sequence
  Chemically synthesized
uccaucaucaucgucgucuguca

SEQ ID NO: 45404 - RNA, 23 nt, Artificial Sequence
  Chemically synthesized
cagcauccaucaucaucgucguc

SEQ ID NO: 45405 - RNA, 23 nt, Artificial Sequence
  Chemically synthesized
ucagcauccaucaucaucgucgu

SEQ ID NO: 45406 - RNA, 23 nt, Artificial Sequence
  Chemically synthesized
cucagcauccaucaucaucgucg

SEQ ID NO: 45407 - RNA, 23 nt, Artificial Sequence
  Chemically synthesized
ucucagcauccaucaucaucguc

SEQ ID NO: 45408 - RNA, 23 nt, Artificial Sequence
  Chemically synthesized
cucucagcauccaucaucaucgu

SEQ ID NO: 45409 - RNA, 23 nt, Artificial Sequence
  Chemically synthesized
gcagugaucaauggcucucagca

SEQ ID NO: 45410 - RNA, 23 nt, Artificial Sequence
  Chemically synthesized
agcagugaucaauggcucucagc

SEQ ID NO: 45411 - RNA, 23 nt, Artificial Sequence
  Chemically synthesized
cagcagugaucaauggcucucag

SEQ ID NO: 45412 - RNA, 23 nt, Artificial Sequence
  Chemically synthesized
gaaagggaacacacaauagaaga

SEQ ID NO: 45413 - RNA, 23 nt, Artificial Sequence
  Chemically synthesized
caaaaugcugguaauagaugcau

SEQ ID NO: 45414 - RNA, 23 nt, Artificial Sequence
  Chemically synthesized
ccaaaaugcugguaauagaugca

SEQ ID NO: 45415 - RNA, 23 nt, Artificial Sequence
  Chemically synthesized
uccaaaaugcugguaauagaugc

SEQ ID NO: 45416 - RNA, 23 nt, Artificial Sequence
  Chemically synthesized
auccaaaaugcugguaauagaug

SEQ ID NO: 45417 - RNA, 23 nt, Artificial Sequence
  Chemically synthesized
uauccaaaaugcugguaauagau

SEQ ID NO: 45418 - RNA, 23 nt, Artificial Sequence
  Chemically synthesized
aggcaagggauuuguuauccaaa

SEQ ID NO: 45419 - RNA, 23 nt, Artificial Sequence
  Chemically synthesized
caggcaagggauuuguuauccaa

SEQ ID NO: 45420 - RNA, 23 nt, Artificial Sequence
  Chemically synthesized
ucaggcaagggauuuguuaucca

SEQ ID NO: 45421 - RNA, 23 nt, Artificial Sequence
  Chemically synthesized
gucaggcaagggauuuguuaucc

SEQ ID NO: 45422 - RNA, 23 nt, Artificial Sequence
  Chemically synthesized
agucaggcaagggauuuguuauc

SEQ ID NO: 45423 - RNA, 23 nt, Artificial Sequence
  Chemically synthesized
cagucaggcaagggauuuguuau

SEQ ID NO: 45424 - RNA, 23 nt, Artificial Sequence
  Chemically synthesized
guaaggacuuacguugaaaacag

SEQ ID NO: 45425 - RNA, 23 nt, Artificial Sequence
  Chemically synthesized
aguaaggacuuacguugaaaaca

SEQ ID NO: 45426 - RNA, 23 nt, Artificial Sequence
  Chemically synthesized
caguaaggacuuacguugaaaac

SEQ ID NO: 45427 - RNA, 23 nt, Artificial Sequence
  Chemically synthesized
acaguaaggacuuacguugaaaa

SEQ ID NO: 45428 - RNA, 23 nt, Artificial Sequence
  Chemically synthesized
aacaguaaggacuuacguugaaa

SEQ ID NO: 45429 - RNA, 23 nt, Artificial Sequence
  Chemically synthesized
cuuugaagauucuugacuucggu

SEQ ID NO: 45430 - RNA, 23 nt, Artificial Sequence
  Chemically synthesized
acuuugaagauucuugacuucgg

SEQ ID NO: 45431 - RNA, 23 nt, Artificial Sequence
  Chemically synthesized
cacuuugaagauucuugacuucg

SEQ ID NO: 45432 - RNA, 23 nt, Artificial Sequence
  Chemically synthesized
gaaagaaauguugcaaucaagaa

SEQ ID NO: 45433 - RNA, 23 nt, Artificial Sequence
  Chemically synthesized
auucaguggucuuauuuuugggu

SEQ ID NO: 45434 - RNA, 23 nt, Artificial Sequence
  Chemically synthesized
aauucaguggucuuauuuuuggg

SEQ ID NO: 45435 - RNA, 23 nt, Artificial Sequence
  Chemically synthesized
gauggggagucgguuagucauug

SEQ ID NO: 45436 - RNA, 23 nt, Artificial Sequence
  Chemically synthesized
gcauccaucaucaucgucgucug

SEQ ID NO: 45437 - RNA, 23 nt, Artificial Sequence
  Chemically synthesized
agcauccaucaucaucgucgucu

SEQ ID NO: 45438 - RNA, 23 nt, Artificial Sequence
  Chemically synthesized
uaggugcagcagugaucaauggc

SEQ ID NO: 45439 - RNA, 23 nt, Artificial Sequence
  Chemically synthesized
uuaggugcagcagugaucaaugg

SEQ ID NO: 45440 - RNA, 23 nt, Artificial Sequence
  Chemically synthesized
uuuaggugcagcagugaucaaug

SEQ ID NO: 45441 - RNA, 23 nt, Artificial Sequence
  Chemically synthesized
cuuuaggugcagcagugaucaau

SEQ ID NO: 45442 - RNA, 23 nt, Artificial Sequence
  Chemically synthesized
gacaagcaguuagaugaaaggga

SEQ ID NO: 45443 - RNA, 23 nt, Artificial Sequence
  Chemically synthesized
ugacaagcaguuagaugaaaggg

SEQ ID NO: 45444 - RNA, 23 nt, Artificial Sequence
  Chemically synthesized
cugacaagcaguuagaugaaagg

SEQ ID NO: 45445 - RNA, 23 nt, Artificial Sequence
  Chemically synthesized
ccugacaagcaguuagaugaaag

SEQ ID NO: 45446 - RNA, 23 nt, Artificial Sequence
  Chemically synthesized
cccugacaagcaguuagaugaaa

SEQ ID NO: 45447 - RNA, 23 nt, Artificial Sequence
  Chemically synthesized
guaugauccuucugaagcagaag

SEQ ID NO: 45448 - RNA, 23 nt, Artificial Sequence
  Chemically synthesized
gguaugauccuucugaagcagaa

SEQ ID NO: 45449 - RNA, 23 nt, Artificial Sequence
  Chemically synthesized
ugguaugauccuucugaagcaga

SEQ ID NO: 45450 - RNA, 23 nt, Artificial Sequence
  Chemically synthesized
cugguaugauccuucugaagcag

SEQ ID NO: 45451 - RNA, 23 nt, Artificial Sequence
  Chemically synthesized
ucugguaugauccuucugaagca

SEQ ID NO: 45452 - RNA, 23 nt, Artificial Sequence
  Chemically synthesized
cuaaauaugcuggauauagcuuu

SEQ ID NO: 45453 - RNA, 23 nt, Artificial Sequence
  Chemically synthesized
cugaauucaugaagaaacugcaa

SEQ ID NO: 45454 - RNA, 23 nt, Artificial Sequence
  Chemically synthesized
cuuauguagugacucgcuacuac

SEQ ID NO: 45455 - RNA, 23 nt, Artificial Sequence
  Chemically synthesized
ccuuauguagugacucgcuacua

SEQ ID NO: 45456 - RNA, 23 nt, Artificial Sequence
  Chemically synthesized
gccuuauguagugacucgcuacu

SEQ ID NO: 45457 - RNA, 23 nt, Artificial Sequence
  Chemically synthesized
cgccuuauguagugacucgcuac

SEQ ID NO: 45458 - RNA, 23 nt, Artificial Sequence
  Chemically synthesized
acgccuuauguagugacucgcua

SEQ ID NO: 45459 - RNA, 23 nt, Artificial Sequence
  Chemically synthesized
ggacugcaggaacgaguuuuaug

SEQ ID NO: 45460 - RNA, 23 nt, Artificial Sequence
  Chemically synthesized
aggacugcaggaacgaguuuuau

SEQ ID NO: 45461 - RNA, 23 nt, Artificial Sequence
  Chemically synthesized
agaauguccuaccuucucuauca

SEQ ID NO: 45462 - RNA, 23 nt, Artificial Sequence
  Chemically synthesized
ucagauggagcuagaucaugaaa

SEQ ID NO: 45463 - RNA, 23 nt, Artificial Sequence
  Chemically synthesized
uucagauggagcuagaucaugaa

SEQ ID NO: 45464 - RNA, 23 nt, Artificial Sequence
  Chemically synthesized
auucagauggagcuagaucauga

SEQ ID NO: 45465 - RNA, 23 nt, Artificial Sequence
  Chemically synthesized
gcucucagcauccaucaucaucg

SEQ ID NO: 45466 - RNA, 23 nt, Artificial Sequence
  Chemically synthesized
ggcucucagcauccaucaucauc

SEQ ID NO: 45467 - RNA, 23 nt, Artificial Sequence
  Chemically synthesized
uggcucucagcauccaucaucau

SEQ ID NO: 45468 - RNA, 23 nt, Artificial Sequence
  Chemically synthesized
auggcucucagcauccaucauca

SEQ ID NO: 45469 - RNA, 23 nt, Artificial Sequence
  Chemically synthesized
aauggcucucagcauccaucauc

SEQ ID NO: 45470 - RNA, 23 nt, Artificial Sequence
  Chemically synthesized
aggaaguuauggacuuggaggag

SEQ ID NO: 45471 - RNA, 23 nt, Artificial Sequence
  Chemically synthesized
aaggaaguuauggacuuggagga

SEQ ID NO: 45472 - RNA, 23 nt, Artificial Sequence
  Chemically synthesized
uaaggaaguuauggacuuggagg

SEQ ID NO: 45473 - RNA, 23 nt, Artificial Sequence
  Chemically synthesized
auaaggaaguuauggacuuggag

SEQ ID NO: 45474 - RNA, 23 nt, Artificial Sequence
  Chemically synthesized
uauaaggaaguuauggacuugga

SEQ ID NO: 45475 - RNA, 23 nt, Artificial Sequence
  Chemically synthesized
auauaaggaaguuauggacuugg

SEQ ID NO: 45476 - RNA, 23 nt, Artificial Sequence
  Chemically synthesized
uauauaaggaaguuauggacuug

SEQ ID NO: 45477 - RNA, 23 nt, Artificial Sequence
  Chemically synthesized
auauauaaggaaguuauggacuu

SEQ ID NO: 45478 - RNA, 23 nt, Artificial Sequence
  Chemically synthesized
uuagaugaaagggaacacacaau

SEQ ID NO: 45479 - RNA, 23 nt, Artificial Sequence
  Chemically synthesized
uaaggacuuacguugaaaacaga

SEQ ID NO: 45480 - RNA, 23 nt, Artificial Sequence
  Chemically synthesized
ugggcuacaaggaaaacguggau

SEQ ID NO: 45481 - RNA, 23 nt, Artificial Sequence
  Chemically synthesized
augggcuacaaggaaaacgugga

SEQ ID NO: 45482 - RNA, 23 nt, Artificial Sequence
  Chemically synthesized
caugggcuacaaggaaaacgugg

SEQ ID NO: 45483 - RNA, 23 nt, Artificial Sequence
  Chemically synthesized
gacgccuuauguagugacucgcu

SEQ ID NO: 45484 - RNA, 23 nt, Artificial Sequence
  Chemically synthesized
ugacgccuuauguagugacucgc

SEQ ID NO: 45485 - RNA, 23 nt, Artificial Sequence
  Chemically synthesized
uuaaagcccaguaauauaguagu

SEQ ID NO: 45486 - RNA, 23 nt, Artificial Sequence
  Chemically synthesized
cuuaaagcccaguaauauaguag

SEQ ID NO: 45487 - RNA, 23 nt, Artificial Sequence
  Chemically synthesized
acuuaaagcccaguaauauagua

SEQ ID NO: 45488 - RNA, 23 nt, Artificial Sequence
  Chemically synthesized
gauucagauggagcuagaucaug

SEQ ID NO: 45489 - RNA, 23 nt, Artificial Sequence
  Chemically synthesized
agagaaccaagaauggaguuaua

SEQ ID NO: 45490 - RNA, 23 nt, Artificial Sequence
  Chemically synthesized
ggagagaaccaagaauggaguua

SEQ ID NO: 45491 - RNA, 23 nt, Artificial Sequence
  Chemically synthesized
ggaauaaaguuauugaacagcuu

SEQ ID NO: 45492 - RNA, 23 nt, Artificial Sequence
  Chemically synthesized
gagaaccaagaauggaguuauac

SEQ ID NO: 45493 - RNA, 23 nt, Artificial Sequence
  Chemically synthesized
cgugacaacaauuuuuauagugu

SEQ ID NO: 45494 - RNA, 23 nt, Artificial Sequence
  Chemically synthesized
guggaaagaauugauauauaagg

SEQ ID NO: 45495 - RNA, 23 nt, Artificial Sequence
  Chemically synthesized
ggaaguuauggacuuggaggaga

SEQ ID NO: 45496 - RNA, 23 nt, Artificial Sequence
  Chemically synthesized
gcaagggauuuguuauccaaaau

SEQ ID NO: 45497 - RNA, 23 nt, Artificial Sequence
  Chemically synthesized
ugaauucaugaagaaacugcaac

SEQ ID NO: 45498 - RNA, 23 nt, Artificial Sequence
  Chemically synthesized
uaaaguuauugaacagcuuggaa

SEQ ID NO: 45499 - RNA, 23 nt, Artificial Sequence
  Chemically synthesized
gaauaaaguuauugaacagcuug

SEQ ID NO: 45500 - RNA, 23 nt, Artificial Sequence
  Chemically synthesized
uggaauaaaguuauugaacagcu

SEQ ID NO: 45501 - RNA, 23 nt, Artificial Sequence
  Chemically synthesized
ucaguggaauaaaguuauugaac

SEQ ID NO: 45502 - RNA, 23 nt, Artificial Sequence
  Chemically synthesized
ugaucaguggaauaaaguuauug

SEQ ID NO: 45503 - RNA, 23 nt, Artificial Sequence
  Chemically synthesized
aagugauucagauggagcuagau

SEQ ID NO: 45504 - RNA, 23 nt, Artificial Sequence
  Chemically synthesized
aguuauggacuuggaggagagaa

SEQ ID NO: 45505 - RNA, 23 nt, Artificial Sequence
  Chemically synthesized
caguuagaugaaagggaacacac

SEQ ID NO: 45506 - RNA, 23 nt, Artificial Sequence
  Chemically synthesized
gcuuggaacaccauguccugaau

SEQ ID NO: 45507 - RNA, 23 nt, Artificial Sequence
  Chemically synthesized
caguggaauaaaguuauugaaca

SEQ ID NO: 45508 - RNA, 23 nt, Artificial Sequence
  Chemically synthesized
cuaagccgaccauuucagaauca

SEQ ID NO: 45509 - RNA, 23 nt, Artificial Sequence
  Chemically synthesized
guggaauaaaguuauugaacagc

SEQ ID NO: 45510 - RNA, 23 nt, Artificial Sequence
  Chemically synthesized
caaugucugguaugauccuucug

SEQ ID NO: 45511 - RNA, 23 nt, Artificial Sequence
  Chemically synthesized
ugaauguuuucacaccacagaaa

SEQ ID NO: 45512 - RNA, 23 nt, Artificial Sequence
  Chemically synthesized
uguuauccaaaaugcugguaaua

SEQ ID NO: 45513 - RNA, 23 nt, Artificial Sequence
  Chemically synthesized
ccauguccugaauucaugaagaa

SEQ ID NO: 45514 - RNA, 23 nt, Artificial Sequence
  Chemically synthesized
acaccacagaaaucccuagaaga

SEQ ID NO: 45515 - RNA, 23 nt, Artificial Sequence
  Chemically synthesized
ggaugcaaaucuuugccaaguga

SEQ ID NO: 45516 - RNA, 23 nt, Artificial Sequence
  Chemically synthesized
cuacagagagcuaguucuuauga

SEQ ID NO: 45517 - RNA, 23 nt, Artificial Sequence
  Chemically synthesized
caaacuuaaagccagucaggcaa

SEQ ID NO: 45518 - RNA, 23 nt, Artificial Sequence
  Chemically synthesized
gaagaaacugcaaccaacaguaa

SEQ ID NO: 45519 - RNA, 23 nt, Artificial Sequence
  Chemically synthesized
ccuucauucugcuggaauuauuc

SEQ ID NO: 45520 - RNA, 23 nt, Artificial Sequence
  Chemically synthesized
cacaccacagaaaucccuagaag

SEQ ID NO: 45521 - RNA, 23 nt, Artificial Sequence
  Chemically synthesized
ggcaagggauuuguuauccaaaa

SEQ ID NO: 45522 - RNA, 23 nt, Artificial Sequence
  Chemically synthesized
ccugaaacgauaucagaauuuaa

SEQ ID NO: 45523 - RNA, 23 nt, Artificial Sequence
  Chemically synthesized
cuuggaacaccauguccugaauu

SEQ ID NO: 45524 - RNA, 23 nt, Artificial Sequence
  Chemically synthesized
cgggacuuaaagcccaguaauau

SEQ ID NO: 45525 - RNA, 23 nt, Artificial Sequence
  Chemically synthesized
ucaucgggacuuaaagcccagua

SEQ ID NO: 45526 - RNA, 23 nt, Artificial Sequence
  Chemically synthesized
aggagagaaccaagaauggaguu

SEQ ID NO: 45527 - RNA, 23 nt, Artificial Sequence
  Chemically synthesized
guaauagaugcaucuaaaaggau

SEQ ID NO: 45528 - RNA, 23 nt, Artificial Sequence
  Chemically synthesized
caagggauuuguuauccaaaaug

SEQ ID NO: 45529 - RNA, 23 nt, Artificial Sequence
  Chemically synthesized
guccugaaacgauaucagaauuu

SEQ ID NO: 45530 - RNA, 23 nt, Artificial Sequence
  Chemically synthesized
uacauucacaguccugaaacgau

SEQ ID NO: 45531 - RNA, 23 nt, Artificial Sequence
  Chemically synthesized
cugguaauagaugcaucuaaaag

SEQ ID NO: 45532 - RNA, 23 nt, Artificial Sequence
  Chemically synthesized
uccugaaacgauaucagaauuua

SEQ ID NO: 45533 - RNA, 23 nt, Artificial Sequence
  Chemically synthesized
gaugcaaaucuuugccaagugau

SEQ ID NO: 45534 - RNA, 23 nt, Artificial Sequence
  Chemically synthesized
gaauguuuucacaccacagaaau

SEQ ID NO: 45535 - RNA, 23 nt, Artificial Sequence
  Chemically synthesized
ccaaagaucccugacaagcaguu

SEQ ID NO: 45536 - RNA, 23 nt, Artificial Sequence
  Chemically synthesized
agggauuuguuauccaaaaugcu

SEQ ID NO: 45537 - RNA, 23 nt, Artificial Sequence
  Chemically synthesized
agcuaagccgaccauuucagaau

SEQ ID NO: 45538 - RNA, 23 nt, Artificial Sequence
  Chemically synthesized
aagcuaagccgaccauuucagaa

SEQ ID NO: 45539 - RNA, 23 nt, Artificial Sequence
  Chemically synthesized
ccaucaugagcagaagcaagcgu

SEQ ID NO: 45540 - RNA, 23 nt, Artificial Sequence
  Chemically synthesized
ugggcugcuguagaugacuacuu

SEQ ID NO: 45541 - RNA, 23 nt, Artificial Sequence
  Chemically synthesized
ucaaugucaacagauccgacuuu

SEQ ID NO: 45542 - RNA, 23 nt, Artificial Sequence
  Chemically synthesized
auaggcucaggagcucaaggaau

SEQ ID NO: 45543 - RNA, 23 nt, Artificial Sequence
  Chemically synthesized
agcuuggaacaccauguccugaa

SEQ ID NO: 45544 - RNA, 23 nt, Artificial Sequence
  Chemically synthesized
ucgggacuuaaagcccaguaaua

SEQ ID NO: 45545 - RNA, 23 nt, Artificial Sequence
  Chemically synthesized
caucgggacuuaaagcccaguaa

SEQ ID NO: 45546 - RNA, 23 nt, Artificial Sequence
  Chemically synthesized
augcaaaucuuugccaagugauu

SEQ ID NO: 45547 - RNA, 23 nt, Artificial Sequence
  Chemically synthesized
cuguagaugacuacuugggccau

SEQ ID NO: 45548 - RNA, 23 nt, Artificial Sequence
  Chemically synthesized
cugauacagacagcagucuagaa

SEQ ID NO: 45549 - RNA, 23 nt, Artificial Sequence
  Chemically synthesized
caaccaacaguaaggacuuacgu

SEQ ID NO: 45550 - RNA, 23 nt, Artificial Sequence
  Chemically synthesized
ccaggacugcaggaacgaguuuu

SEQ ID NO: 45551 - RNA, 23 nt, Artificial Sequence
  Chemically synthesized
gggacuuaaagcccaguaauaua

SEQ ID NO: 45552 - RNA, 23 nt, Artificial Sequence
  Chemically synthesized
aucgggacuuaaagcccaguaau

SEQ ID NO: 45553 - RNA, 23 nt, Artificial Sequence
  Chemically synthesized
ugagcagaagcaagcgugacaac

SEQ ID NO: 45554 - RNA, 23 nt, Artificial Sequence
  Chemically synthesized
gcagaagcuccaccaccaaagau

SEQ ID NO: 45555 - RNA, 23 nt, Artificial Sequence
  Chemically synthesized
ucaaugucugguaugauccuucu

SEQ ID NO: 45556 - RNA, 23 nt, Artificial Sequence
  Chemically synthesized
gggauuuguuauccaaaaugcug

SEQ ID NO: 45557 - RNA, 23 nt, Artificial Sequence
  Chemically synthesized
ucagaauuuaaaaccuauaggcu

SEQ ID NO: 45558 - RNA, 23 nt, Artificial Sequence
  Chemically synthesized
gcuuugagaaacucuucccugau

SEQ ID NO: 45559 - RNA, 23 nt, Artificial Sequence
  Chemically synthesized
acauucacaguccugaaacgaua

SEQ ID NO: 45560 - RNA, 23 nt, Artificial Sequence
  Chemically synthesized
accauguccugaauucaugaaga

SEQ ID NO: 45561 - RNA, 23 nt, Artificial Sequence
  Chemically synthesized
cagaaaucccuagaagaauuuca

SEQ ID NO: 45562 - RNA, 23 nt, Artificial Sequence
  Chemically synthesized
ggcugcuguagaugacuacuugg

SEQ ID NO: 45563 - RNA, 23 nt, Artificial Sequence
  Chemically synthesized
cgacuuuggccucugauacagac

SEQ ID NO: 45564 - RNA, 23 nt, Artificial Sequence
  Chemically synthesized
ggaggagagaaccaagaauggag

SEQ ID NO: 45565 - RNA, 23 nt, Artificial Sequence
  Chemically synthesized
aggaucucuguagaugaagcucu

SEQ ID NO: 45566 - RNA, 23 nt, Artificial Sequence
  Chemically synthesized
cagaauuuaaaaccuauaggcuc

SEQ ID NO: 45567 - RNA, 23 nt, Artificial Sequence
  Chemically synthesized
caacaguaaggacuuacguugaa

SEQ ID NO: 45568 - RNA, 23 nt, Artificial Sequence
  Chemically synthesized
caggacugcaggaacgaguuuua

SEQ ID NO: 45569 - RNA, 23 nt, Artificial Sequence
  Chemically synthesized
ggacuuaaagcccaguaauauag

SEQ ID NO: 45570 - RNA, 23 nt, Artificial Sequence
  Chemically synthesized
cuucauucugcuggaauuauuca

SEQ ID NO: 45571 - RNA, 23 nt, Artificial Sequence
  Chemically synthesized
ucauggagcucauggaugcaaau

SEQ ID NO: 45572 - RNA, 23 nt, Artificial Sequence
  Chemically synthesized
gagcagaagcaagcgugacaaca

SEQ ID NO: 45573 - RNA, 23 nt, Artificial Sequence
  Chemically synthesized
ugaucaauggcucucagcaucca

SEQ ID NO: 45574 - RNA, 23 nt, Artificial Sequence
  Chemically synthesized
acacacaauagaagaguggaaag

SEQ ID NO: 45575 - RNA, 23 nt, Artificial Sequence
  Chemically synthesized
aaccuauaggcucaggagcucaa

SEQ ID NO: 45576 - RNA, 23 nt, Artificial Sequence
  Chemically synthesized
uuguuauccaaaaugcugguaau

SEQ ID NO: 45577 - RNA, 23 nt, Artificial Sequence
  Chemically synthesized
agcuuugagaaacucuucccuga

SEQ ID NO: 45578 - RNA, 23 nt, Artificial Sequence
  Chemically synthesized
cugcaaccaacaguaaggacuua

SEQ ID NO: 45579 - RNA, 23 nt, Artificial Sequence
  Chemically synthesized
uguguggaaucaagcaccuucau

SEQ ID NO: 45580 - RNA, 23 nt, Artificial Sequence
  Chemically synthesized
ucucuaucagaugcuguguggaa

SEQ ID NO: 45581 - RNA, 23 nt, Artificial Sequence
  Chemically synthesized
cuaccuucucuaucagaugcugu

SEQ ID NO: 45582 - RNA, 23 nt, Artificial Sequence
  Chemically synthesized
agucauggagcucauggaugcaa

SEQ ID NO: 45583 - RNA, 23 nt, Artificial Sequence
  Chemically synthesized
agaaaucccuagaagaauuucaa

SEQ ID NO: 45584 - RNA, 23 nt, Artificial Sequence
  Chemically synthesized
gaaauguugcaaucaagaagcua

SEQ ID NO: 45585 - RNA, 23 nt, Artificial Sequence
  Chemically synthesized
gaagcagaagcuccaccaccaaa

SEQ ID NO: 45586 - RNA, 23 nt, Artificial Sequence
  Chemically synthesized
ugaagcucuccaacacccguaca

SEQ ID NO: 45587 - RNA, 23 nt, Artificial Sequence
  Chemically synthesized
gcaaccaacaguaaggacuuacg

SEQ ID NO: 45588 - RNA, 23 nt, Artificial Sequence
  Chemically synthesized
ugaugacgccuuauguagugacu

SEQ ID NO: 45589 - RNA, 23 nt, Artificial Sequence
  Chemically synthesized
gccgaccauuucagaaucagacu

SEQ ID NO: 45590 - RNA, 23 nt, Artificial Sequence
  Chemically synthesized
agccgaccauuucagaaucagac

SEQ ID NO: 45591 - RNA, 23 nt, Artificial Sequence
  Chemically synthesized
aagccgaccauuucagaaucaga

SEQ ID NO: 45592 - RNA, 23 nt, Artificial Sequence
  Chemically synthesized
uaagccgaccauuucagaaucag

SEQ ID NO: 45593 - RNA, 23 nt, Artificial Sequence
  Chemically synthesized
cuaagccgaccauuucagaauca

SEQ ID NO: 45594 - RNA, 23 nt, Artificial Sequence
  Chemically synthesized
uggaugcaaaucuuugccaagug

SEQ ID NO: 45595 - RNA, 23 nt, Artificial Sequence
  Chemically synthesized
auggaugcaaaucuuugccaagu

SEQ ID NO: 45596 - RNA, 23 nt, Artificial Sequence
  Chemically synthesized
cauggaugcaaaucuuugccaag

SEQ ID NO: 45597 - RNA, 23 nt, Artificial Sequence
  Chemically synthesized
ucauggaugcaaaucuuugccaa

SEQ ID NO: 45598 - RNA, 23 nt, Artificial Sequence
  Chemically synthesized
cucauggaugcaaaucuuugcca

SEQ ID NO: 45599 - RNA, 23 nt, Artificial Sequence
  Chemically synthesized
ggcuuuaaguuuguuguguucug

SEQ ID NO: 45600 - RNA, 23 nt, Artificial Sequence
  Chemically synthesized
gcuuuaaguuuguuguguucuga

SEQ ID NO: 45601 - RNA, 23 nt, Artificial Sequence
  Chemically synthesized
cuuuaaguuuguuguguucugag

SEQ ID NO: 45602 - RNA, 23 nt, Artificial Sequence
  Chemically synthesized
uuuaaguuuguuguguucugagu

SEQ ID NO: 45603 - RNA, 23 nt, Artificial Sequence
  Chemically synthesized
uuaaguuuguuguguucugaguc

SEQ ID NO: 45604 - RNA, 23 nt, Artificial Sequence
  Chemically synthesized
uaaguuuguuguguucugaguca

SEQ ID NO: 45605 - RNA, 23 nt, Artificial Sequence
  Chemically synthesized
cuggcuuuaaguuuguuguguuc

SEQ ID NO: 45606 - RNA, 23 nt, Artificial Sequence
  Chemically synthesized
uggcuuuaaguuuguuguguucu

SEQ ID NO: 45607 - RNA, 23 nt, Artificial Sequence
  Chemically synthesized
aggacugugaauguagaaucucc

SEQ ID NO: 45608 - RNA, 23 nt, Artificial Sequence
  Chemically synthesized
ggacugugaauguagaaucucca

SEQ ID NO: 45609 - RNA, 23 nt, Artificial Sequence
  Chemically synthesized
gacugugaauguagaaucuccaa

SEQ ID NO: 45610 - RNA, 23 nt, Artificial Sequence
  Chemically synthesized
acugugaauguagaaucuccaau

SEQ ID NO: 45611 - RNA, 23 nt, Artificial Sequence
  Chemically synthesized
cugugaauguagaaucuccaauc

SEQ ID NO: 45612 - RNA, 23 nt, Artificial Sequence
  Chemically synthesized
ucauaagcugcgcauacuauucc

SEQ ID NO: 45613 - RNA, 23 nt, Artificial Sequence
  Chemically synthesized
cauaagcugcgcauacuauuccu

SEQ ID NO: 45614 - RNA, 23 nt, Artificial Sequence
  Chemically synthesized
auaagcugcgcauacuauuccuu

SEQ ID NO: 45615 - RNA, 23 nt, Artificial Sequence
  Chemically synthesized
uaagcugcgcauacuauuccuug

SEQ ID NO: 45616 - RNA, 23 nt, Artificial Sequence
  Chemically synthesized
aagcugcgcauacuauuccuuga

SEQ ID NO: 45617 - RNA, 23 nt, Artificial Sequence
  Chemically synthesized
cugacuggcuuuaaguuuguugu

SEQ ID NO: 45618 - RNA, 23 nt, Artificial Sequence
  Chemically synthesized
ugacuggcuuuaaguuuguugug

SEQ ID NO: 45619 - RNA, 23 nt, Artificial Sequence
  Chemically synthesized
gacuggcuuuaaguuuguugugu

SEQ ID NO: 45620 - RNA, 23 nt, Artificial Sequence
  Chemically synthesized
acuggcuuuaaguuuguuguguu

SEQ ID NO: 45621 - RNA, 23 nt, Artificial Sequence
  Chemically synthesized
aaguuuguuguguucugagucag

SEQ ID NO: 45622 - RNA, 23 nt, Artificial Sequence
  Chemically synthesized
aguuuguuguguucugagucagc

SEQ ID NO: 45623 - RNA, 23 nt, Artificial Sequence
  Chemically synthesized
guuuguuguguucugagucagcu

SEQ ID NO: 45624 - RNA, 23 nt, Artificial Sequence
  Chemically synthesized
uuuguuguguucugagucagcug

SEQ ID NO: 45625 - RNA, 23 nt, Artificial Sequence
  Chemically synthesized
ugcaguuucuucaugaauucagg

SEQ ID NO: 45626 - RNA, 23 nt, Artificial Sequence
  Chemically synthesized
gcaguuucuucaugaauucagga

SEQ ID NO: 45627 - RNA, 23 nt, Artificial Sequence
  Chemically synthesized
caguuucuucaugaauucaggac

SEQ ID NO: 45628 - RNA, 23 nt, Artificial Sequence
  Chemically synthesized
aguuucuucaugaauucaggaca

SEQ ID NO: 45629 - RNA, 23 nt, Artificial Sequence
  Chemically synthesized
guuucuucaugaauucaggacau

SEQ ID NO: 45630 - RNA, 23 nt, Artificial Sequence
  Chemically synthesized
ugacauugaagacacaucauuga

SEQ ID NO: 45631 - RNA, 23 nt, Artificial Sequence
  Chemically synthesized
gacauugaagacacaucauugac

SEQ ID NO: 45632 - RNA, 23 nt, Artificial Sequence
  Chemically synthesized
acauugaagacacaucauugaca

SEQ ID NO: 45633 - RNA, 23 nt, Artificial Sequence
  Chemically synthesized
cauugaagacacaucauugacag

SEQ ID NO: 45634 - RNA, 23 nt, Artificial Sequence
  Chemically synthesized
auugaagacacaucauugacaga

SEQ ID NO: 45635 - RNA, 23 nt, Artificial Sequence
  Chemically synthesized
agcuauauccagcauauuuaggu

SEQ ID NO: 45636 - RNA, 23 nt, Artificial Sequence
  Chemically synthesized
gcuauauccagcauauuuagguc

SEQ ID NO: 45637 - RNA, 23 nt, Artificial Sequence
  Chemically synthesized
cuauauccagcauauuuaggucu

SEQ ID NO: 45638 - RNA, 23 nt, Artificial Sequence
  Chemically synthesized
uauauccagcauauuuaggucug

SEQ ID NO: 45639 - RNA, 23 nt, Artificial Sequence
  Chemically synthesized
auauccagcauauuuaggucugu

SEQ ID NO: 45640 - RNA, 23 nt, Artificial Sequence
  Chemically synthesized
acauucuuucaugaucuagcucc

SEQ ID NO: 45641 - RNA, 23 nt, Artificial Sequence
  Chemically synthesized
cauucuuucaugaucuagcucca

SEQ ID NO: 45642 - RNA, 23 nt, Artificial Sequence
  Chemically synthesized
auucuuucaugaucuagcuccau

SEQ ID NO: 45643 - RNA, 23 nt, Artificial Sequence
  Chemically synthesized
uucuuucaugaucuagcuccauc

SEQ ID NO: 45644 - RNA, 23 nt, Artificial Sequence
  Chemically synthesized
ucuuucaugaucuagcuccaucu

SEQ ID NO: 45645 - RNA, 23 nt, Artificial Sequence
  Chemically synthesized
gaaauucuucuagggauuucugu

SEQ ID NO: 45646 - RNA, 23 nt, Artificial Sequence
  Chemically synthesized
aaauucuucuagggauuucugug

SEQ ID NO: 45647 - RNA, 23 nt, Artificial Sequence
  Chemically synthesized
aauucuucuagggauuucugugg

SEQ ID NO: 45648 - RNA, 23 nt, Artificial Sequence
  Chemically synthesized
auucuucuagggauuucuguggu

SEQ ID NO: 45649 - RNA, 23 nt, Artificial Sequence
  Chemically synthesized
uucuucuagggauuucuguggug

SEQ ID NO: 45650 - RNA, 23 nt, Artificial Sequence
  Chemically synthesized
ggucggcuuagcuucuugauugc

SEQ ID NO: 45651 - RNA, 23 nt, Artificial Sequence
  Chemically synthesized
gucggcuuagcuucuugauugca

SEQ ID NO: 45652 - RNA, 23 nt, Artificial Sequence
  Chemically synthesized
ucggcuuagcuucuugauugcaa

SEQ ID NO: 45653 - RNA, 23 nt, Artificial Sequence
  Chemically synthesized
cggcuuagcuucuugauugcaac

SEQ ID NO: 45654 - RNA, 23 nt, Artificial Sequence
  Chemically synthesized
ggcuuagcuucuugauugcaaca

SEQ ID NO: 45655 - RNA, 23 nt, Artificial Sequence
  Chemically synthesized
guaguucuaucaaugacuaaccg

SEQ ID NO: 45656 - RNA, 23 nt, Artificial Sequence
  Chemically synthesized
uaguucuaucaaugacuaaccga

SEQ ID NO: 45657 - RNA, 23 nt, Artificial Sequence
  Chemically synthesized
aguucuaucaaugacuaaccgac

SEQ ID NO: 45658 - RNA, 23 nt, Artificial Sequence
  Chemically synthesized
guucuaucaaugacuaaccgacu

SEQ ID NO: 45659 - RNA, 23 nt, Artificial Sequence
  Chemically synthesized
uucuaucaaugacuaaccgacuc

SEQ ID NO: 45660 - RNA, 23 nt, Artificial Sequence
  Chemically synthesized
ucuacagagauccuuuuagaugc

SEQ ID NO: 45661 - RNA, 23 nt, Artificial Sequence
  Chemically synthesized
cuacagagauccuuuuagaugca

SEQ ID NO: 45662 - RNA, 23 nt, Artificial Sequence
  Chemically synthesized
uacagagauccuuuuagaugcau

SEQ ID NO: 45663 - RNA, 23 nt, Artificial Sequence
  Chemically synthesized
acagagauccuuuuagaugcauc

SEQ ID NO: 45664 - RNA, 23 nt, Artificial Sequence
  Chemically synthesized
cagagauccuuuuagaugcaucu

SEQ ID NO: 45665 - RNA, 23 nt, Artificial Sequence
  Chemically synthesized
aagaguuucucaaagcuauaucc

SEQ ID NO: 45666 - RNA, 23 nt, Artificial Sequence
  Chemically synthesized
agaguuucucaaagcuauaucca

SEQ ID NO: 45667 - RNA, 23 nt, Artificial Sequence
  Chemically synthesized
gaguuucucaaagcuauauccag

SEQ ID NO: 45668 - RNA, 23 nt, Artificial Sequence
  Chemically synthesized
aguuucucaaagcuauauccagc

SEQ ID NO: 45669 - RNA, 23 nt, Artificial Sequence
  Chemically synthesized
guuucucaaagcuauauccagca

SEQ ID NO: 45670 - RNA, 23 nt, Artificial Sequence
  Chemically synthesized
uauccagcauauuuaggucuguu

SEQ ID NO: 45671 - RNA, 23 nt, Artificial Sequence
  Chemically synthesized
uuucuucaugaauucaggacaug

SEQ ID NO: 45672 - RNA, 23 nt, Artificial Sequence
  Chemically synthesized
ugugaauguagaaucuccaaucu

SEQ ID NO: 45673 - RNA, 23 nt, Artificial Sequence
  Chemically synthesized
gugaauguagaaucuccaaucuc

SEQ ID NO: 45674 - RNA, 23 nt, Artificial Sequence
  Chemically synthesized
ugaauguagaaucuccaaucucu

SEQ ID NO: 45675 - RNA, 23 nt, Artificial Sequence
  Chemically synthesized
gaauguagaaucuccaaucucua

SEQ ID NO: 45676 - RNA, 23 nt, Artificial Sequence
  Chemically synthesized
aauguagaaucuccaaucucuac

SEQ ID NO: 45677 - RNA, 23 nt, Artificial Sequence
  Chemically synthesized
cuuuaagucccgaugaauaauuc

SEQ ID NO: 45678 - RNA, 23 nt, Artificial Sequence
  Chemically synthesized
uuuaagucccgaugaauaauucc

SEQ ID NO: 45679 - RNA, 23 nt, Artificial Sequence
  Chemically synthesized
uuaagucccgaugaauaauucca

SEQ ID NO: 45680 - RNA, 23 nt, Artificial Sequence
  Chemically synthesized
uaagucccgaugaauaauuccag

SEQ ID NO: 45681 - RNA, 23 nt, Artificial Sequence
  Chemically synthesized
aagucccgaugaauaauuccagc

SEQ ID NO: 45682 - RNA, 23 nt, Artificial Sequence
  Chemically synthesized
ggcaaagauuugcauccaugagc

SEQ ID NO: 45683 - RNA, 23 nt, Artificial Sequence
  Chemically synthesized
gcaaagauuugcauccaugagcu

SEQ ID NO: 45684 - RNA, 23 nt, Artificial Sequence
  Chemically synthesized
caaagauuugcauccaugagcuc

SEQ ID NO: 45685 - RNA, 23 nt, Artificial Sequence
  Chemically synthesized
aaagauuugcauccaugagcucc

SEQ ID NO: 45686 - RNA, 23 nt, Artificial Sequence
  Chemically synthesized
aagauuugcauccaugagcucca

SEQ ID NO: 45687 - RNA, 23 nt, Artificial Sequence
  Chemically synthesized
uucuagggauuucugugguguga

SEQ ID NO: 45688 - RNA, 23 nt, Artificial Sequence
  Chemically synthesized
ucuagggauuucuguggugugaa

SEQ ID NO: 45689 - RNA, 23 nt, Artificial Sequence
  Chemically synthesized
cuagggauuucuguggugugaaa

SEQ ID NO: 45690 - RNA, 23 nt, Artificial Sequence
  Chemically synthesized
uagggauuucuguggugugaaaa

SEQ ID NO: 45691 - RNA, 23 nt, Artificial Sequence
  Chemically synthesized
agggauuucuguggugugaaaac

SEQ ID NO: 45692 - RNA, 23 nt, Artificial Sequence
  Chemically synthesized
gcgcauacuauuccuugagcucc

SEQ ID NO: 45693 - RNA, 23 nt, Artificial Sequence
  Chemically synthesized
cgcauacuauuccuugagcuccu

SEQ ID NO: 45694 - RNA, 23 nt, Artificial Sequence
  Chemically synthesized
gcauacuauuccuugagcuccug

SEQ ID NO: 45695 - RNA, 23 nt, Artificial Sequence
  Chemically synthesized
cauacuauuccuugagcuccuga

SEQ ID NO: 45696 - RNA, 23 nt, Artificial Sequence
  Chemically synthesized
auacuauuccuugagcuccugag

SEQ ID NO: 45697 - RNA, 23 nt, Artificial Sequence
  Chemically synthesized
gaucauaccagacauugauguac

SEQ ID NO: 45698 - RNA, 23 nt, Artificial Sequence
  Chemically synthesized
aucauaccagacauugauguacg

SEQ ID NO: 45699 - RNA, 23 nt, Artificial Sequence
  Chemically synthesized
ucauaccagacauugauguacgg

SEQ ID NO: 45700 - RNA, 23 nt, Artificial Sequence
  Chemically synthesized
cauaccagacauugauguacggg

SEQ ID NO: 45701 - RNA, 23 nt, Artificial Sequence
  Chemically synthesized
auaccagacauugauguacgggu

SEQ ID NO: 45702 - RNA, 23 nt, Artificial Sequence
  Chemically synthesized
uuguuguguucugagucagcugg

SEQ ID NO: 45703 - RNA, 23 nt, Artificial Sequence
  Chemically synthesized
auccagcauauuuaggucuguuu

SEQ ID NO: 45704 - RNA, 23 nt, Artificial Sequence
  Chemically synthesized
auuuuacuacuauauuacugggc

SEQ ID NO: 45705 - RNA, 23 nt, Artificial Sequence
  Chemically synthesized
uuuuacuacuauauuacugggcu

SEQ ID NO: 45706 - RNA, 23 nt, Artificial Sequence
  Chemically synthesized
uuuacuacuauauuacugggcuu

SEQ ID NO: 45707 - RNA, 23 nt, Artificial Sequence
  Chemically synthesized
uuacuacuauauuacugggcuuu

SEQ ID NO: 45708 - RNA, 23 nt, Artificial Sequence
  Chemically synthesized
uacuacuauauuacugggcuuua

SEQ ID NO: 45709 - RNA, 23 nt, Artificial Sequence
  Chemically synthesized
ggacauucuuucaugaucuagcu

SEQ ID NO: 45710 - RNA, 23 nt, Artificial Sequence
  Chemically synthesized
gacauucuuucaugaucuagcuc

SEQ ID NO: 45711 - RNA, 23 nt, Artificial Sequence
  Chemically synthesized
gaaaaaucacccaaaaauaagac

SEQ ID NO: 45712 - RNA, 23 nt, Artificial Sequence
  Chemically synthesized
aaaaaucacccaaaaauaagacc

SEQ ID NO: 45713 - RNA, 23 nt, Artificial Sequence
  Chemically synthesized
aaaaucacccaaaaauaagacca

SEQ ID NO: 45714 - RNA, 23 nt, Artificial Sequence
  Chemically synthesized
aaaucacccaaaaauaagaccac

SEQ ID NO: 45715 - RNA, 23 nt, Artificial Sequence
  Chemically synthesized
aaucacccaaaaauaagaccacu

SEQ ID NO: 45716 - RNA, 23 nt, Artificial Sequence
  Chemically synthesized
aucacccaaaaauaagaccacug

SEQ ID NO: 45717 - RNA, 23 nt, Artificial Sequence
  Chemically synthesized
caaaaauaagaccacugaauugu

SEQ ID NO: 45718 - RNA, 23 nt, Artificial Sequence
  Chemically synthesized
aaaaauaagaccacugaauuguu

SEQ ID NO: 45719 - RNA, 23 nt, Artificial Sequence
  Chemically synthesized
aaaauaagaccacugaauuguuu

SEQ ID NO: 45720 - RNA, 23 nt, Artificial Sequence
  Chemically synthesized
aaauaagaccacugaauuguuuu

SEQ ID NO: 45721 - RNA, 23 nt, Artificial Sequence
  Chemically synthesized
aauaagaccacugaauuguuuuc

SEQ ID NO: 45722 - RNA, 23 nt, Artificial Sequence
  Chemically synthesized
caaguagucaucuacagcagccc

SEQ ID NO: 45723 - RNA, 23 nt, Artificial Sequence
  Chemically synthesized
aguagucaucuacagcagcccag

SEQ ID NO: 45724 - RNA, 23 nt, Artificial Sequence
  Chemically synthesized
uagucaucuacagcagcccagag

SEQ ID NO: 45725 - RNA, 23 nt, Artificial Sequence
  Chemically synthesized
uauauaucaauucuuuccacucu

SEQ ID NO: 45726 - RNA, 23 nt, Artificial Sequence
  Chemically synthesized
auauaucaauucuuuccacucuu

SEQ ID NO: 45727 - RNA, 23 nt, Artificial Sequence
  Chemically synthesized
uauaucaauucuuuccacucuuc

SEQ ID NO: 45728 - RNA, 23 nt, Artificial Sequence
  Chemically synthesized
auaucaauucuuuccacucuucu

SEQ ID NO: 45729 - RNA, 23 nt, Artificial Sequence
  Chemically synthesized
uaucaauucuuuccacucuucua

SEQ ID NO: 45730 - RNA, 23 nt, Artificial Sequence
  Chemically synthesized
uacuauuccuugagcuccugagc

SEQ ID NO: 45731 - RNA, 23 nt, Artificial Sequence
  Chemically synthesized
uguguucccuuucaucuaacugc

SEQ ID NO: 45732 - RNA, 23 nt, Artificial Sequence
  Chemically synthesized
guguucccuuucaucuaacugcu

SEQ ID NO: 45733 - RNA, 23 nt, Artificial Sequence
  Chemically synthesized
uguucccuuucaucuaacugcuu

SEQ ID NO: 45734 - RNA, 23 nt, Artificial Sequence
  Chemically synthesized
guucccuuucaucuaacugcuug

SEQ ID NO: 45735 - RNA, 23 nt, Artificial Sequence
  Chemically synthesized
uucccuuucaucuaacugcuugu

SEQ ID NO: 45736 - RNA, 23 nt, Artificial Sequence
  Chemically synthesized
acuauuccuugagcuccugagcc

SEQ ID NO: 45737 - RNA, 23 nt, Artificial Sequence
  Chemically synthesized
cuauuccuugagcuccugagccu

SEQ ID NO: 45738 - RNA, 23 nt, Artificial Sequence
  Chemically synthesized
uauuccuugagcuccugagccua

SEQ ID NO: 45739 - RNA, 23 nt, Artificial Sequence
  Chemically synthesized
uaccagacauugauguacgggug

SEQ ID NO: 45740 - RNA, 23 nt, Artificial Sequence
  Chemically synthesized
agacauugauguacggguguugg

SEQ ID NO: 45741 - RNA, 23 nt, Artificial Sequence
  Chemically synthesized
gacauugauguacggguguugga

SEQ ID NO: 45742 - RNA, 23 nt, Artificial Sequence
  Chemically synthesized
acauugauguacggguguuggag

SEQ ID NO: 45743 - RNA, 23 nt, Artificial Sequence
  Chemically synthesized
cauugauguacggguguuggaga

SEQ ID NO: 45744 - RNA, 23 nt, Artificial Sequence
  Chemically synthesized
auugauguacggguguuggagag

SEQ ID NO: 45745 - RNA, 23 nt, Artificial Sequence
  Chemically synthesized
cuucaugaauucaggacauggug

SEQ ID NO: 45746 - RNA, 23 nt, Artificial Sequence
  Chemically synthesized
uucaugaauucaggacauggugu

SEQ ID NO: 45747 - RNA, 23 nt, Artificial Sequence
  Chemically synthesized
ucaugaauucaggacaugguguu

SEQ ID NO: 45748 - RNA, 23 nt, Artificial Sequence
  Chemically synthesized
caugaauucaggacaugguguuc

SEQ ID NO: 45749 - RNA, 23 nt, Artificial Sequence
  Chemically synthesized
augaauucaggacaugguguucc

SEQ ID NO: 45750 - RNA, 23 nt, Artificial Sequence
  Chemically synthesized
ucaggacugugaauguagaaucu

SEQ ID NO: 45751 - RNA, 23 nt, Artificial Sequence
  Chemically synthesized
caggacugugaauguagaaucuc

SEQ ID NO: 45752 - RNA, 23 nt, Artificial Sequence
  Chemically synthesized
gauuuuacuacuauauuacuggg

SEQ ID NO: 45753 - RNA, 23 nt, Artificial Sequence
  Chemically synthesized
uaauuccagcagaaugaaggugc

SEQ ID NO: 45754 - RNA, 23 nt, Artificial Sequence
  Chemically synthesized
aauuccagcagaaugaaggugcu

SEQ ID NO: 45755 - RNA, 23 nt, Artificial Sequence
  Chemically synthesized
auuccagcagaaugaaggugcuu

SEQ ID NO: 45756 - RNA, 23 nt, Artificial Sequence
  Chemically synthesized
uuccagcagaaugaaggugcuug

SEQ ID NO: 45757 - RNA, 23 nt, Artificial Sequence
  Chemically synthesized
uccagcagaaugaaggugcuuga

SEQ ID NO: 45758 - RNA, 23 nt, Artificial Sequence
  Chemically synthesized
auaaaaauuguugucacgcuugc

SEQ ID NO: 45759 - RNA, 23 nt, Artificial Sequence
  Chemically synthesized
uaaaaauuguugucacgcuugcu

SEQ ID NO: 45760 - RNA, 23 nt, Artificial Sequence
  Chemically synthesized
aaaaauuguugucacgcuugcuu

SEQ ID NO: 45761 - RNA, 23 nt, Artificial Sequence
  Chemically synthesized
aaaauuguugucacgcuugcuuc

SEQ ID NO: 45762 - RNA, 23 nt, Artificial Sequence
  Chemically synthesized
aaauuguugucacgcuugcuucu

SEQ ID NO: 45763 - RNA, 23 nt, Artificial Sequence
  Chemically synthesized
cacauuucauaagaacuagcucu

SEQ ID NO: 45764 - RNA, 23 nt, Artificial Sequence
  Chemically synthesized
acauuucauaagaacuagcucuc

SEQ ID NO: 45765 - RNA, 23 nt, Artificial Sequence
  Chemically synthesized
cauuucauaagaacuagcucucu

SEQ ID NO: 45766 - RNA, 23 nt, Artificial Sequence
  Chemically synthesized
auuucauaagaacuagcucucug

SEQ ID NO: 45767 - RNA, 23 nt, Artificial Sequence
  Chemically synthesized
uuucauaagaacuagcucucugu

SEQ ID NO: 45768 - RNA, 23 nt, Artificial Sequence
  Chemically synthesized
gaaauggucggcuuagcuucuug

SEQ ID NO: 45769 - RNA, 23 nt, Artificial Sequence
  Chemically synthesized
aaauggucggcuuagcuucuuga

SEQ ID NO: 45770 - RNA, 23 nt, Artificial Sequence
  Chemically synthesized
aauggucggcuuagcuucuugau

SEQ ID NO: 45771 - RNA, 23 nt, Artificial Sequence
  Chemically synthesized
auggucggcuuagcuucuugauu

SEQ ID NO: 45772 - RNA, 23 nt, Artificial Sequence
  Chemically synthesized
uggucggcuuagcuucuugauug

SEQ ID NO: 45773 - RNA, 23 nt, Artificial Sequence
  Chemically synthesized
uugaagacacaucauugacagac

SEQ ID NO: 45774 - RNA, 23 nt, Artificial Sequence
  Chemically synthesized
uccacucuucuauuguguguucc

SEQ ID NO: 45775 - RNA, 23 nt, Artificial Sequence
  Chemically synthesized
ccacucuucuauuguguguuccc

SEQ ID NO: 45776 - RNA, 23 nt, Artificial Sequence
  Chemically synthesized
cacucuucuauuguguguucccu

SEQ ID NO: 45777 - RNA, 23 nt, Artificial Sequence
  Chemically synthesized
acucuucuauuguguguucccuu

SEQ ID NO: 45778 - RNA, 23 nt, Artificial Sequence
  Chemically synthesized
cucuucuauuguguguucccuuu

SEQ ID NO: 45779 - RNA, 23 nt, Artificial Sequence
  Chemically synthesized
uaacaaaucccuugccugacugg

SEQ ID NO: 45780 - RNA, 23 nt, Artificial Sequence
  Chemically synthesized
aacaaaucccuugccugacuggc

SEQ ID NO: 45781 - RNA, 23 nt, Artificial Sequence
  Chemically synthesized
acaaaucccuugccugacuggcu

SEQ ID NO: 45782 - RNA, 23 nt, Artificial Sequence
  Chemically synthesized
caaaucccuugccugacuggcuu

SEQ ID NO: 45783 - RNA, 23 nt, Artificial Sequence
  Chemically synthesized
aaaucccuugccugacuggcuuu

SEQ ID NO: 45784 - RNA, 23 nt, Artificial Sequence
  Chemically synthesized
uguuguguucugagucagcuggg

SEQ ID NO: 45785 - RNA, 23 nt, Artificial Sequence
  Chemically synthesized
guuguguucugagucagcuggga

SEQ ID NO: 45786 - RNA, 23 nt, Artificial Sequence
  Chemically synthesized
uuguguucugagucagcugggaa

SEQ ID NO: 45787 - RNA, 23 nt, Artificial Sequence
  Chemically synthesized
uguguucugagucagcugggaaa

SEQ ID NO: 45788 - RNA, 23 nt, Artificial Sequence
  Chemically synthesized
ggcgucaucauaaaacucguucc

SEQ ID NO: 45789 - RNA, 23 nt, Artificial Sequence
  Chemically synthesized
gcgucaucauaaaacucguuccu

SEQ ID NO: 45790 - RNA, 23 nt, Artificial Sequence
  Chemically synthesized
cgucaucauaaaacucguuccug

SEQ ID NO: 45791 - RNA, 23 nt, Artificial Sequence
  Chemically synthesized
gucaucauaaaacucguuccugc

SEQ ID NO: 45792 - RNA, 23 nt, Artificial Sequence
  Chemically synthesized
ucaucauaaaacucguuccugca

SEQ ID NO: 45793 - RNA, 23 nt, Artificial Sequence
  Chemically synthesized
uucaaagugcaaucagauuuuac

SEQ ID NO: 45794 - RNA, 23 nt, Artificial Sequence
  Chemically synthesized
ucaaagugcaaucagauuuuacu

SEQ ID NO: 45795 - RNA, 23 nt, Artificial Sequence
  Chemically synthesized
caaagugcaaucagauuuuacua

SEQ ID NO: 45796 - RNA, 23 nt, Artificial Sequence
  Chemically synthesized
aaagugcaaucagauuuuacuac

SEQ ID NO: 45797 - RNA, 23 nt, Artificial Sequence
  Chemically synthesized
aagugcaaucagauuuuacuacu

SEQ ID NO: 45798 - RNA, 23 nt, Artificial Sequence
  Chemically synthesized
agugcaaucagauuuuacuacua

SEQ ID NO: 45799 - RNA, 23 nt, Artificial Sequence
  Chemically synthesized
gugcaaucagauuuuacuacuau

SEQ ID NO: 45800 - RNA, 23 nt, Artificial Sequence
  Chemically synthesized
ugcaaucagauuuuacuacuaua

SEQ ID NO: 45801 - RNA, 23 nt, Artificial Sequence
  Chemically synthesized
gcagaaugaaggugcuugauucc

SEQ ID NO: 45802 - RNA, 23 nt, Artificial Sequence
  Chemically synthesized
cagaaugaaggugcuugauucca

SEQ ID NO: 45803 - RNA, 23 nt, Artificial Sequence
  Chemically synthesized
agaaugaaggugcuugauuccac

SEQ ID NO: 45804 - RNA, 23 nt, Artificial Sequence
  Chemically synthesized
gaaugaaggugcuugauuccaca

SEQ ID NO: 45805 - RNA, 23 nt, Artificial Sequence
  Chemically synthesized
aaugaaggugcuugauuccacac

SEQ ID NO: 45806 - RNA, 23 nt, Artificial Sequence
  Chemically synthesized
uucauaagaacuagcucucugua

SEQ ID NO: 45807 - RNA, 23 nt, Artificial Sequence
  Chemically synthesized
gcaugagucugauucugaaaugg

SEQ ID NO: 45808 - RNA, 23 nt, Artificial Sequence
  Chemically synthesized
caugagucugauucugaaauggu

SEQ ID NO: 45809 - RNA, 23 nt, Artificial Sequence
  Chemically synthesized
augagucugauucugaaaugguc

SEQ ID NO: 45810 - RNA, 23 nt, Artificial Sequence
  Chemically synthesized
ugagucugauucugaaauggucg

SEQ ID NO: 45811 - RNA, 23 nt, Artificial Sequence
  Chemically synthesized
gagucugauucugaaauggucgg

SEQ ID NO: 45812 - RNA, 23 nt, Artificial Sequence
  Chemically synthesized
uucugauaucguuucaggacugu

SEQ ID NO: 45813 - RNA, 23 nt, Artificial Sequence
  Chemically synthesized
ucugauaucguuucaggacugug

SEQ ID NO: 45814 - RNA, 23 nt, Artificial Sequence
  Chemically synthesized
cugauaucguuucaggacuguga

SEQ ID NO: 45815 - RNA, 23 nt, Artificial Sequence
  Chemically synthesized
ugauaucguuucaggacugugaa

SEQ ID NO: 45816 - RNA, 23 nt, Artificial Sequence
  Chemically synthesized
gauaucguuucaggacugugaau

SEQ ID NO: 45817 - RNA, 23 nt, Artificial Sequence
  Chemically synthesized
aagcuauauccagcauauuuagg

SEQ ID NO: 45818 - RNA, 23 nt, Artificial Sequence
  Chemically synthesized
gcauauuuaggucuguuuucaac

SEQ ID NO: 45819 - RNA, 23 nt, Artificial Sequence
  Chemically synthesized
cauauuuaggucuguuuucaacg

SEQ ID NO: 45820 - RNA, 23 nt, Artificial Sequence
  Chemically synthesized
auauuuaggucuguuuucaacgu

SEQ ID NO: 45821 - RNA, 23 nt, Artificial Sequence
  Chemically synthesized
uauuuaggucuguuuucaacgua

SEQ ID NO: 45822 - RNA, 23 nt, Artificial Sequence
  Chemically synthesized
auuuaggucuguuuucaacguaa

SEQ ID NO: 45823 - RNA, 23 nt, Artificial Sequence
  Chemically synthesized
uacuguugguugcaguuucuuca

SEQ ID NO: 45824 - RNA, 23 nt, Artificial Sequence
  Chemically synthesized
acuguugguugcaguuucuucau

SEQ ID NO: 45825 - RNA, 23 nt, Artificial Sequence
  Chemically synthesized
cuguugguugcaguuucuucaug

SEQ ID NO: 45826 - RNA, 23 nt, Artificial Sequence
  Chemically synthesized
uguugguugcaguuucuucauga

SEQ ID NO: 45827 - RNA, 23 nt, Artificial Sequence
  Chemically synthesized
guugguugcaguuucuucaugaa

SEQ ID NO: 45828 - RNA, 23 nt, Artificial Sequence
  Chemically synthesized
cacguuuuccuuguagcccaugc

SEQ ID NO: 45829 - RNA, 23 nt, Artificial Sequence
  Chemically synthesized
acguuuuccuuguagcccaugcc

SEQ ID NO: 45830 - RNA, 23 nt, Artificial Sequence
  Chemically synthesized
cguuuuccuuguagcccaugcca

SEQ ID NO: 45831 - RNA, 23 nt, Artificial Sequence
  Chemically synthesized
guuuuccuuguagcccaugccaa

SEQ ID NO: 45832 - RNA, 23 nt, Artificial Sequence
  Chemically synthesized
uuuuccuuguagcccaugccaag

SEQ ID NO: 45833 - RNA, 23 nt, Artificial Sequence
  Chemically synthesized
agucccgaugaauaauuccagca

SEQ ID NO: 45834 - RNA, 23 nt, Artificial Sequence
  Chemically synthesized
auaauuccagcagaaugaaggug

SEQ ID NO: 45835 - RNA, 23 nt, Artificial Sequence
  Chemically synthesized
aggacauucuuucaugaucuagc

SEQ ID NO: 45836 - RNA, 23 nt, Artificial Sequence
  Chemically synthesized
ucugaaauggucggcuuagcuuc

SEQ ID NO: 45837 - RNA, 23 nt, Artificial Sequence
  Chemically synthesized
cugaaauggucggcuuagcuucu

SEQ ID NO: 45838 - RNA, 23 nt, Artificial Sequence
  Chemically synthesized
ugaaauggucggcuuagcuucuu

SEQ ID NO: 45839 - RNA, 23 nt, Artificial Sequence
  Chemically synthesized
aguaguucuaucaaugacuaacc

SEQ ID NO: 45840 - RNA, 23 nt, Artificial Sequence
  Chemically synthesized
ucuaucaaugacuaaccgacucc

SEQ ID NO: 45841 - RNA, 23 nt, Artificial Sequence
  Chemically synthesized
cuaucaaugacuaaccgacuccc

SEQ ID NO: 45842 - RNA, 23 nt, Artificial Sequence
  Chemically synthesized
uaucaaugacuaaccgacucccc

SEQ ID NO: 45843 - RNA, 23 nt, Artificial Sequence
  Chemically synthesized
aucaaugacuaaccgacucccca

SEQ ID NO: 45844 - RNA, 23 nt, Artificial Sequence
  Chemically synthesized
ucaaugacuaaccgacuccccau

SEQ ID NO: 45845 - RNA, 23 nt, Artificial Sequence
  Chemically synthesized
ugaagacacaucauugacagacg

SEQ ID NO: 45846 - RNA, 23 nt, Artificial Sequence
  Chemically synthesized
gaagacacaucauugacagacga

SEQ ID NO: 45847 - RNA, 23 nt, Artificial Sequence
  Chemically synthesized
aucaauucuuuccacucuucuau

SEQ ID NO: 45848 - RNA, 23 nt, Artificial Sequence
  Chemically synthesized
ucaauucuuuccacucuucuauu

SEQ ID NO: 45849 - RNA, 23 nt, Artificial Sequence
  Chemically synthesized
caauucuuuccacucuucuauug

SEQ ID NO: 45850 - RNA, 23 nt, Artificial Sequence
  Chemically synthesized
aauucuuuccacucuucuauugu

SEQ ID NO: 45851 - RNA, 23 nt, Artificial Sequence
  Chemically synthesized
auucuuuccacucuucuauugug

SEQ ID NO: 45852 - RNA, 23 nt, Artificial Sequence
  Chemically synthesized
cuucuauuguguguucccuuuca

SEQ ID NO: 45853 - RNA, 23 nt, Artificial Sequence
  Chemically synthesized
uucuauuguguguucccuuucau

SEQ ID NO: 45854 - RNA, 23 nt, Artificial Sequence
  Chemically synthesized
ucuauuguguguucccuuucauc

SEQ ID NO: 45855 - RNA, 23 nt, Artificial Sequence
  Chemically synthesized
cuauuguguguucccuuucaucu

SEQ ID NO: 45856 - RNA, 23 nt, Artificial Sequence
  Chemically synthesized
uauuguguguucccuuucaucua

SEQ ID NO: 45857 - RNA, 23 nt, Artificial Sequence
  Chemically synthesized
uugauguacggguguuggagagc

SEQ ID NO: 45858 - RNA, 23 nt, Artificial Sequence
  Chemically synthesized
ugauguacggguguuggagagcu

SEQ ID NO: 45859 - RNA, 23 nt, Artificial Sequence
  Chemically synthesized
gauguacggguguuggagagcuu

SEQ ID NO: 45860 - RNA, 23 nt, Artificial Sequence
  Chemically synthesized
auguacggguguuggagagcuuc

SEQ ID NO: 45861 - RNA, 23 nt, Artificial Sequence
  Chemically synthesized
uucaucuacagagauccuuuuag

SEQ ID NO: 45862 - RNA, 23 nt, Artificial Sequence
  Chemically synthesized
ucaucuacagagauccuuuuaga

SEQ ID NO: 45863 - RNA, 23 nt, Artificial Sequence
  Chemically synthesized
caucuacagagauccuuuuagau

SEQ ID NO: 45864 - RNA, 23 nt, Artificial Sequence
  Chemically synthesized
aucuacagagauccuuuuagaug

SEQ ID NO: 45865 - RNA, 23 nt, Artificial Sequence
  Chemically synthesized
agagauccuuuuagaugcaucua

SEQ ID NO: 45866 - RNA, 23 nt, Artificial Sequence
  Chemically synthesized
uuucucaaagcuauauccagcau

SEQ ID NO: 45867 - RNA, 23 nt, Artificial Sequence
  Chemically synthesized
uacauaaggcgucaucauaaaac

SEQ ID NO: 45868 - RNA, 23 nt, Artificial Sequence
  Chemically synthesized
acauaaggcgucaucauaaaacu

SEQ ID NO: 45869 - RNA, 23 nt, Artificial Sequence
  Chemically synthesized
cauaaggcgucaucauaaaacuc

SEQ ID NO: 45870 - RNA, 23 nt, Artificial Sequence
  Chemically synthesized
auaaggcgucaucauaaaacucg

SEQ ID NO: 45871 - RNA, 23 nt, Artificial Sequence
  Chemically synthesized
uaaggcgucaucauaaaacucgu

SEQ ID NO: 45872 - RNA, 23 nt, Artificial Sequence
  Chemically synthesized
aaggcgucaucauaaaacucguu

SEQ ID NO: 45873 - RNA, 23 nt, Artificial Sequence
  Chemically synthesized
aggcgucaucauaaaacucguuc

SEQ ID NO: 45874 - RNA, 23 nt, Artificial Sequence
  Chemically synthesized
auguagaaucuccaaucucuaca

SEQ ID NO: 45875 - RNA, 23 nt, Artificial Sequence
  Chemically synthesized
caucauaaaacucguuccugcag

SEQ ID NO: 45876 - RNA, 23 nt, Artificial Sequence
  Chemically synthesized
aucauaaaacucguuccugcagu

SEQ ID NO: 45877 - RNA, 23 nt, Artificial Sequence
  Chemically synthesized
ucauaaaacucguuccugcaguc

SEQ ID NO: 45878 - RNA, 23 nt, Artificial Sequence
  Chemically synthesized
uguagaaucuccaaucucuacac

SEQ ID NO: 45879 - RNA, 23 nt, Artificial Sequence
  Chemically synthesized
gaagucaagaaucuucaaagugc

SEQ ID NO: 45880 - RNA, 23 nt, Artificial Sequence
  Chemically synthesized
aagucaagaaucuucaaagugca

SEQ ID NO: 45881 - RNA, 23 nt, Artificial Sequence
  Chemically synthesized
agucaagaaucuucaaagugcaa

SEQ ID NO: 45882 - RNA, 23 nt, Artificial Sequence
  Chemically synthesized
gucaagaaucuucaaagugcaau

SEQ ID NO: 45883 - RNA, 23 nt, Artificial Sequence
  Chemically synthesized
ucaagaaucuucaaagugcaauc

SEQ ID NO: 45884 - RNA, 23 nt, Artificial Sequence
  Chemically synthesized
caagaaucuucaaagugcaauca

SEQ ID NO: 45885 - RNA, 23 nt, Artificial Sequence
  Chemically synthesized
aagaaucuucaaagugcaaucag

SEQ ID NO: 45886 - RNA, 23 nt, Artificial Sequence
  Chemically synthesized
agaaucuucaaagugcaaucaga

SEQ ID NO: 45887 - RNA, 23 nt, Artificial Sequence
  Chemically synthesized
gaaucuucaaagugcaaucagau

SEQ ID NO: 45888 - RNA, 23 nt, Artificial Sequence
  Chemically synthesized
aaucuucaaagugcaaucagauu

SEQ ID NO: 45889 - RNA, 23 nt, Artificial Sequence
  Chemically synthesized
acuauaaaaauuguugucacgcu

SEQ ID NO: 45890 - RNA, 23 nt, Artificial Sequence
  Chemically synthesized
cuauaaaaauuguugucacgcuu

SEQ ID NO: 45891 - RNA, 23 nt, Artificial Sequence
  Chemically synthesized
uauaaaaauuguugucacgcuug

SEQ ID NO: 45892 - RNA, 23 nt, Artificial Sequence
  Chemically synthesized
uuaacacauuucauaagaacuag

SEQ ID NO: 45893 - RNA, 23 nt, Artificial Sequence
  Chemically synthesized
uaacacauuucauaagaacuagc

SEQ ID NO: 45894 - RNA, 23 nt, Artificial Sequence
  Chemically synthesized
aacacauuucauaagaacuagcu

SEQ ID NO: 45895 - RNA, 23 nt, Artificial Sequence
  Chemically synthesized
acacauuucauaagaacuagcuc

SEQ ID NO: 45896 - RNA, 23 nt, Artificial Sequence
  Chemically synthesized
ucuugauugcaacauuucuuuca

SEQ ID NO: 45897 - RNA, 23 nt, Artificial Sequence
  Chemically synthesized
cuugauugcaacauuucuuucaa

SEQ ID NO: 45898 - RNA, 23 nt, Artificial Sequence
  Chemically synthesized
uugauugcaacauuucuuucaag

SEQ ID NO: 45899 - RNA, 23 nt, Artificial Sequence
  Chemically synthesized
ugauugcaacauuucuuucaaga

SEQ ID NO: 45900 - RNA, 23 nt, Artificial Sequence
  Chemically synthesized
gauugcaacauuucuuucaagaa

SEQ ID NO: 45901 - RNA, 23 nt, Artificial Sequence
  Chemically synthesized
uucaaaguaguucuaucaaugac

SEQ ID NO: 45902 - RNA, 23 nt, Artificial Sequence
  Chemically synthesized
ucaaaguaguucuaucaaugacu

SEQ ID NO: 45903 - RNA, 23 nt, Artificial Sequence
  Chemically synthesized
caaaguaguucuaucaaugacua

SEQ ID NO: 45904 - RNA, 23 nt, Artificial Sequence
  Chemically synthesized
aaaguaguucuaucaaugacuaa

SEQ ID NO: 45905 - RNA, 23 nt, Artificial Sequence
  Chemically synthesized
aaguaguucuaucaaugacuaac

SEQ ID NO: 45906 - RNA, 23 nt, Artificial Sequence
  Chemically synthesized
aucauaagcugcgcauacuauuc

SEQ ID NO: 45907 - RNA, 23 nt, Artificial Sequence
  Chemically synthesized
cuguugacauugaagacacauca

SEQ ID NO: 45908 - RNA, 23 nt, Artificial Sequence
  Chemically synthesized
uguugacauugaagacacaucau

SEQ ID NO: 45909 - RNA, 23 nt, Artificial Sequence
  Chemically synthesized
guugacauugaagacacaucauu

SEQ ID NO: 45910 - RNA, 23 nt, Artificial Sequence
  Chemically synthesized
uugacauugaagacacaucauug

SEQ ID NO: 45911 - RNA, 23 nt, Artificial Sequence
  Chemically synthesized
agcugcgcauacuauuccuugag

SEQ ID NO: 45912 - RNA, 23 nt, Artificial Sequence
  Chemically synthesized
gcugcgcauacuauuccuugagc

SEQ ID NO: 45913 - RNA, 23 nt, Artificial Sequence
  Chemically synthesized
cugcgcauacuauuccuugagcu

SEQ ID NO: 45914 - RNA, 23 nt, Artificial Sequence
  Chemically synthesized
ugcgcauacuauuccuugagcuc

SEQ ID NO: 45915 - RNA, 23 nt, Artificial Sequence
  Chemically synthesized
ugagagccauugaucacugcugc

SEQ ID NO: 45916 - RNA, 23 nt, Artificial Sequence
  Chemically synthesized
gagagccauugaucacugcugca

SEQ ID NO: 45917 - RNA, 23 nt, Artificial Sequence
  Chemically synthesized
agagccauugaucacugcugcac

SEQ ID NO: 45918 - RNA, 23 nt, Artificial Sequence
  Chemically synthesized
gagccauugaucacugcugcacc

SEQ ID NO: 45919 - RNA, 23 nt, Artificial Sequence
  Chemically synthesized
agccauugaucacugcugcaccu

SEQ ID NO: 45920 - RNA, 23 nt, Artificial Sequence
  Chemically synthesized
uuauauaucaauucuuuccacuc

SEQ ID NO: 45921 - RNA, 23 nt, Artificial Sequence
  Chemically synthesized
uucuuuccacucuucuauugugu

SEQ ID NO: 45922 - RNA, 23 nt, Artificial Sequence
  Chemically synthesized
ucuuuccacucuucuauugugug

SEQ ID NO: 45923 - RNA, 23 nt, Artificial Sequence
  Chemically synthesized
uuccacucuucuauuguguguuc

SEQ ID NO: 45924 - RNA, 23 nt, Artificial Sequence
  Chemically synthesized
uuuuagaugcaucuauuaccagc

SEQ ID NO: 45925 - RNA, 23 nt, Artificial Sequence
  Chemically synthesized
uuuagaugcaucuauuaccagca

SEQ ID NO: 45926 - RNA, 23 nt, Artificial Sequence
  Chemically synthesized
uuagaugcaucuauuaccagcau

SEQ ID NO: 45927 - RNA, 23 nt, Artificial Sequence
  Chemically synthesized
uagaugcaucuauuaccagcauu

SEQ ID NO: 45928 - RNA, 23 nt, Artificial Sequence
  Chemically synthesized
agaugcaucuauuaccagcauuu

SEQ ID NO: 45929 - RNA, 23 nt, Artificial Sequence
  Chemically synthesized
auaucguuucaggacugugaaug

SEQ ID NO: 45930 - RNA, 23 nt, Artificial Sequence
  Chemically synthesized
uuuaggucuguuuucaacguaag

SEQ ID NO: 45931 - RNA, 23 nt, Artificial Sequence
  Chemically synthesized
uuuccuuguagcccaugccaagg

SEQ ID NO: 45932 - RNA, 23 nt, Artificial Sequence
  Chemically synthesized
aucuucaaagugcaaucagauuu

SEQ ID NO: 45933 - RNA, 23 nt, Artificial Sequence
  Chemically synthesized
ucuucaaagugcaaucagauuuu

SEQ ID NO: 45934 - RNA, 23 nt, Artificial Sequence
  Chemically synthesized
cuucaaagugcaaucagauuuua

SEQ ID NO: 45935 - RNA, 23 nt, Artificial Sequence
  Chemically synthesized
gucccgaugaauaauuccagcag

SEQ ID NO: 45936 - RNA, 23 nt, Artificial Sequence
  Chemically synthesized
ucccgaugaauaauuccagcaga

SEQ ID NO: 45937 - RNA, 23 nt, Artificial Sequence
  Chemically synthesized
gcaucugauagagaagguaggac

SEQ ID NO: 45938 - RNA, 23 nt, Artificial Sequence
  Chemically synthesized
caucugauagagaagguaggaca

SEQ ID NO: 45939 - RNA, 23 nt, Artificial Sequence
  Chemically synthesized
aucugauagagaagguaggacau

SEQ ID NO: 45940 - RNA, 23 nt, Artificial Sequence
  Chemically synthesized
ucugauagagaagguaggacauu

SEQ ID NO: 45941 - RNA, 23 nt, Artificial Sequence
  Chemically synthesized
cugauagagaagguaggacauuc

SEQ ID NO: 45942 - RNA, 23 nt, Artificial Sequence
  Chemically synthesized
cacuauaaaaauuguugucacgc

SEQ ID NO: 45943 - RNA, 23 nt, Artificial Sequence
  Chemically synthesized
gaagguaggacauucuuucauga

SEQ ID NO: 45944 - RNA, 23 nt, Artificial Sequence
  Chemically synthesized
aagguaggacauucuuucaugau

SEQ ID NO: 45945 - RNA, 23 nt, Artificial Sequence
  Chemically synthesized
agguaggacauucuuucaugauc

SEQ ID NO: 45946 - RNA, 23 nt, Artificial Sequence
  Chemically synthesized
gguaggacauucuuucaugaucu

SEQ ID NO: 45947 - RNA, 23 nt, Artificial Sequence
  Chemically synthesized
guaggacauucuuucaugaucua

SEQ ID NO: 45948 - RNA, 23 nt, Artificial Sequence
  Chemically synthesized
uaggacauucuuucaugaucuag

SEQ ID NO: 45949 - RNA, 23 nt, Artificial Sequence
  Chemically synthesized
aauuguugucacgcuugcuucug

SEQ ID NO: 45950 - RNA, 23 nt, Artificial Sequence
  Chemically synthesized
auuguugucacgcuugcuucugc

SEQ ID NO: 45951 - RNA, 23 nt, Artificial Sequence
  Chemically synthesized
uuguugucacgcuugcuucugcu

SEQ ID NO: 45952 - RNA, 23 nt, Artificial Sequence
  Chemically synthesized
uaaacaucuugaaauucuucuag

SEQ ID NO: 45953 - RNA, 23 nt, Artificial Sequence
  Chemically synthesized
aaacaucuugaaauucuucuagg

SEQ ID NO: 45954 - RNA, 23 nt, Artificial Sequence
  Chemically synthesized
aacaucuugaaauucuucuaggg

SEQ ID NO: 45955 - RNA, 23 nt, Artificial Sequence
  Chemically synthesized
acaucuugaaauucuucuaggga

SEQ ID NO: 45956 - RNA, 23 nt, Artificial Sequence
  Chemically synthesized
caucuugaaauucuucuagggau

SEQ ID NO: 45957 - RNA, 23 nt, Artificial Sequence
  Chemically synthesized
ucacccaaaaauaagaccacuga

SEQ ID NO: 45958 - RNA, 23 nt, Artificial Sequence
  Chemically synthesized
ccaaaaauaagaccacugaauug

SEQ ID NO: 45959 - RNA, 23 nt, Artificial Sequence
  Chemically synthesized
ucggaucuguugacauugaagac

SEQ ID NO: 45960 - RNA, 23 nt, Artificial Sequence
  Chemically synthesized
cggaucuguugacauugaagaca

SEQ ID NO: 45961 - RNA, 23 nt, Artificial Sequence
  Chemically synthesized
ggaucuguugacauugaagacac

SEQ ID NO: 45962 - RNA, 23 nt, Artificial Sequence
  Chemically synthesized
gaucuguugacauugaagacaca

SEQ ID NO: 45963 - RNA, 23 nt, Artificial Sequence
  Chemically synthesized
aucuguugacauugaagacacau

SEQ ID NO: 45964 - RNA, 23 nt, Artificial Sequence
  Chemically synthesized
ucuguugacauugaagacacauc

SEQ ID NO: 45965 - RNA, 23 nt, Artificial Sequence
  Chemically synthesized
aagacacaucauugacagacgac

SEQ ID NO: 45966 - RNA, 23 nt, Artificial Sequence
  Chemically synthesized
agacacaucauugacagacgacg

SEQ ID NO: 45967 - RNA, 23 nt, Artificial Sequence
  Chemically synthesized
gacacaucauugacagacgacga

SEQ ID NO: 45968 - RNA, 23 nt, Artificial Sequence
  Chemically synthesized
accagacauugauguacgggugu

SEQ ID NO: 45969 - RNA, 23 nt, Artificial Sequence
  Chemically synthesized
ccagacauugauguacggguguu

SEQ ID NO: 45970 - RNA, 23 nt, Artificial Sequence
  Chemically synthesized
cagacauugauguacggguguug

SEQ ID NO: 45971 - RNA, 23 nt, Artificial Sequence
  Chemically synthesized
gagauccuuuuagaugcaucuau

SEQ ID NO: 45972 - RNA, 23 nt, Artificial Sequence
  Chemically synthesized
agauccuuuuagaugcaucuauu

SEQ ID NO: 45973 - RNA, 23 nt, Artificial Sequence
  Chemically synthesized
gauccuuuuagaugcaucuauua

SEQ ID NO: 45974 - RNA, 23 nt, Artificial Sequence
  Chemically synthesized
auucugauaucguuucaggacug

SEQ ID NO: 45975 - RNA, 23 nt, Artificial Sequence
  Chemically synthesized
uucucaaagcuauauccagcaua

SEQ ID NO: 45976 - RNA, 23 nt, Artificial Sequence
  Chemically synthesized
uccagcauauuuaggucuguuuu

SEQ ID NO: 45977 - RNA, 23 nt, Artificial Sequence
  Chemically synthesized
guagaaucuccaaucucuacacu

SEQ ID NO: 45978 - RNA, 23 nt, Artificial Sequence
  Chemically synthesized
uagaaucuccaaucucuacacua

SEQ ID NO: 45979 - RNA, 23 nt, Artificial Sequence
  Chemically synthesized
agaaucuccaaucucuacacuau

SEQ ID NO: 45980 - RNA, 23 nt, Artificial Sequence
  Chemically synthesized
gaaucuccaaucucuacacuaua

SEQ ID NO: 45981 - RNA, 23 nt, Artificial Sequence
  Chemically synthesized
aaucuccaaucucuacacuauaa

SEQ ID NO: 45982 - RNA, 23 nt, Artificial Sequence
  Chemically synthesized
aauaauuccagcagaaugaaggu

SEQ ID NO: 45983 - RNA, 23 nt, Artificial Sequence
  Chemically synthesized
cuuucaugaucuagcuccaucug

SEQ ID NO: 45984 - RNA, 23 nt, Artificial Sequence
  Chemically synthesized
auccaugagcuccaugacuaugu

SEQ ID NO: 45985 - RNA, 23 nt, Artificial Sequence
  Chemically synthesized
uccaugagcuccaugacuaugua

SEQ ID NO: 45986 - RNA, 23 nt, Artificial Sequence
  Chemically synthesized
ccaugagcuccaugacuauguaa

SEQ ID NO: 45987 - RNA, 23 nt, Artificial Sequence
  Chemically synthesized
caugagcuccaugacuauguaaa

SEQ ID NO: 45988 - RNA, 23 nt, Artificial Sequence
  Chemically synthesized
augagcuccaugacuauguaaac

SEQ ID NO: 45989 - RNA, 23 nt, Artificial Sequence
  Chemically synthesized
ugugaaaacauucaaaaggccaa

SEQ ID NO: 45990 - RNA, 23 nt, Artificial Sequence
  Chemically synthesized
gugaaaacauucaaaaggccaau

SEQ ID NO: 45991 - RNA, 23 nt, Artificial Sequence
  Chemically synthesized
ugaaaacauucaaaaggccaauu

SEQ ID NO: 45992 - RNA, 23 nt, Artificial Sequence
  Chemically synthesized
gaaaacauucaaaaggccaauua

SEQ ID NO: 45993 - RNA, 23 nt, Artificial Sequence
  Chemically synthesized
aaaacauucaaaaggccaauuau

SEQ ID NO: 45994 - RNA, 23 nt, Artificial Sequence
  Chemically synthesized
agucugauucugaaauggucggc

SEQ ID NO: 45995 - RNA, 23 nt, Artificial Sequence
  Chemically synthesized
gucugauucugaaauggucggcu

SEQ ID NO: 45996 - RNA, 23 nt, Artificial Sequence
  Chemically synthesized
cauuucuuucaagaauggcauca

SEQ ID NO: 45997 - RNA, 23 nt, Artificial Sequence
  Chemically synthesized
auuucuuucaagaauggcaucau

SEQ ID NO: 45998 - RNA, 23 nt, Artificial Sequence
  Chemically synthesized
uuucuuucaagaauggcaucaua

SEQ ID NO: 45999 - RNA, 23 nt, Artificial Sequence
  Chemically synthesized
uucuuucaagaauggcaucauaa

SEQ ID NO: 46000 - RNA, 23 nt, Artificial Sequence
  Chemically synthesized
ucuuucaagaauggcaucauaag

SEQ ID NO: 46001 - RNA, 23 nt, Artificial Sequence
  Chemically synthesized
cacccaaaaauaagaccacugaa

SEQ ID NO: 46002 - RNA, 23 nt, Artificial Sequence
  Chemically synthesized
auaagaccacugaauuguuuuca

SEQ ID NO: 46003 - RNA, 23 nt, Artificial Sequence
  Chemically synthesized
uaagaccacugaauuguuuucaa

SEQ ID NO: 46004 - RNA, 23 nt, Artificial Sequence
  Chemically synthesized
aagaccacugaauuguuuucaaa

SEQ ID NO: 46005 - RNA, 23 nt, Artificial Sequence
  Chemically synthesized
agaccacugaauuguuuucaaag

SEQ ID NO: 46006 - RNA, 23 nt, Artificial Sequence
  Chemically synthesized
acacaucauugacagacgacgau

SEQ ID NO: 46007 - RNA, 23 nt, Artificial Sequence
  Chemically synthesized
cacaucauugacagacgacgaug

SEQ ID NO: 46008 - RNA, 23 nt, Artificial Sequence
  Chemically synthesized
acaucauugacagacgacgauga

SEQ ID NO: 46009 - RNA, 23 nt, Artificial Sequence
  Chemically synthesized
ucauugacagacgacgaugauga

SEQ ID NO: 46010 - RNA, 23 nt, Artificial Sequence
  Chemically synthesized
cauugacagacgacgaugaugau

SEQ ID NO: 46011 - RNA, 23 nt, Artificial Sequence
  Chemically synthesized
auugacagacgacgaugaugaug

SEQ ID NO: 46012 - RNA, 23 nt, Artificial Sequence
  Chemically synthesized
uugacagacgacgaugaugaugg

SEQ ID NO: 46013 - RNA, 23 nt, Artificial Sequence
  Chemically synthesized
ugacagacgacgaugaugaugga

SEQ ID NO: 46014 - RNA, 23 nt, Artificial Sequence
  Chemically synthesized
gacgacgaugaugauggaugcug

SEQ ID NO: 46015 - RNA, 23 nt, Artificial Sequence
  Chemically synthesized
acgacgaugaugauggaugcuga

SEQ ID NO: 46016 - RNA, 23 nt, Artificial Sequence
  Chemically synthesized
cgacgaugaugauggaugcugag

SEQ ID NO: 46017 - RNA, 23 nt, Artificial Sequence
  Chemically synthesized
gacgaugaugauggaugcugaga

SEQ ID NO: 46018 - RNA, 23 nt, Artificial Sequence
  Chemically synthesized
acgaugaugauggaugcugagag

SEQ ID NO: 46019 - RNA, 23 nt, Artificial Sequence
  Chemically synthesized
ugcugagagccauugaucacugc

SEQ ID NO: 46020 - RNA, 23 nt, Artificial Sequence
  Chemically synthesized
gcugagagccauugaucacugcu

SEQ ID NO: 46021 - RNA, 23 nt, Artificial Sequence
  Chemically synthesized
cugagagccauugaucacugcug

SEQ ID NO: 46022 - RNA, 23 nt, Artificial Sequence
  Chemically synthesized
ucuucuauuguguguucccuuuc

SEQ ID NO: 46023 - RNA, 23 nt, Artificial Sequence
  Chemically synthesized
augcaucuauuaccagcauuuug

SEQ ID NO: 46024 - RNA, 23 nt, Artificial Sequence
  Chemically synthesized
ugcaucuauuaccagcauuuugg

SEQ ID NO: 46025 - RNA, 23 nt, Artificial Sequence
  Chemically synthesized
gcaucuauuaccagcauuuugga

SEQ ID NO: 46026 - RNA, 23 nt, Artificial Sequence
  Chemically synthesized
caucuauuaccagcauuuuggau

SEQ ID NO: 46027 - RNA, 23 nt, Artificial Sequence
  Chemically synthesized
aucuauuaccagcauuuuggaua

SEQ ID NO: 46028 - RNA, 23 nt, Artificial Sequence
  Chemically synthesized
uuuggauaacaaaucccuugccu

SEQ ID NO: 46029 - RNA, 23 nt, Artificial Sequence
  Chemically synthesized
uuggauaacaaaucccuugccug

SEQ ID NO: 46030 - RNA, 23 nt, Artificial Sequence
  Chemically synthesized
uggauaacaaaucccuugccuga

SEQ ID NO: 46031 - RNA, 23 nt, Artificial Sequence
  Chemically synthesized
ggauaacaaaucccuugccugac

SEQ ID NO: 46032 - RNA, 23 nt, Artificial Sequence
  Chemically synthesized
gauaacaaaucccuugccugacu

SEQ ID NO: 46033 - RNA, 23 nt, Artificial Sequence
  Chemically synthesized
auaacaaaucccuugccugacug

SEQ ID NO: 46034 - RNA, 23 nt, Artificial Sequence
  Chemically synthesized
cuguuuucaacguaaguccuuac

SEQ ID NO: 46035 - RNA, 23 nt, Artificial Sequence
  Chemically synthesized
uguuuucaacguaaguccuuacu

SEQ ID NO: 46036 - RNA, 23 nt, Artificial Sequence
  Chemically synthesized
guuuucaacguaaguccuuacug

SEQ ID NO: 46037 - RNA, 23 nt, Artificial Sequence
  Chemically synthesized
uuuucaacguaaguccuuacugu

SEQ ID NO: 46038 - RNA, 23 nt, Artificial Sequence
  Chemically synthesized
uuucaacguaaguccuuacuguu

SEQ ID NO: 46039 - RNA, 23 nt, Artificial Sequence
  Chemically synthesized
accgaagucaagaaucuucaaag

SEQ ID NO: 46040 - RNA, 23 nt, Artificial Sequence
  Chemically synthesized
ccgaagucaagaaucuucaaagu

SEQ ID NO: 46041 - RNA, 23 nt, Artificial Sequence
  Chemically synthesized
cgaagucaagaaucuucaaagug

SEQ ID NO: 46042 - RNA, 23 nt, Artificial Sequence
  Chemically synthesized
uucuugauugcaacauuucuuuc

SEQ ID NO: 46043 - RNA, 23 nt, Artificial Sequence
  Chemically synthesized
acccaaaaauaagaccacugaau

SEQ ID NO: 46044 - RNA, 23 nt, Artificial Sequence
  Chemically synthesized
cccaaaaauaagaccacugaauu

SEQ ID NO: 46045 - RNA, 23 nt, Artificial Sequence
  Chemically synthesized
caaugacuaaccgacuccccauc

SEQ ID NO: 46046 - RNA, 23 nt, Artificial Sequence
  Chemically synthesized
cagacgacgaugaugauggaugc

SEQ ID NO: 46047 - RNA, 23 nt, Artificial Sequence
  Chemically synthesized
agacgacgaugaugauggaugcu

SEQ ID NO: 46048 - RNA, 23 nt, Artificial Sequence
  Chemically synthesized
gccauugaucacugcugcaccua

SEQ ID NO: 46049 - RNA, 23 nt, Artificial Sequence
  Chemically synthesized
ccauugaucacugcugcaccuaa

SEQ ID NO: 46050 - RNA, 23 nt, Artificial Sequence
  Chemically synthesized
cauugaucacugcugcaccuaaa

SEQ ID NO: 46051 - RNA, 23 nt, Artificial Sequence
  Chemically synthesized
auugaucacugcugcaccuaaag

SEQ ID NO: 46052 - RNA, 23 nt, Artificial Sequence
  Chemically synthesized
ucccuuucaucuaacugcuuguc

SEQ ID NO: 46053 - RNA, 23 nt, Artificial Sequence
  Chemically synthesized
cccuuucaucuaacugcuuguca

SEQ ID NO: 46054 - RNA, 23 nt, Artificial Sequence
  Chemically synthesized
ccuuucaucuaacugcuugucag

SEQ ID NO: 46055 - RNA, 23 nt, Artificial Sequence
  Chemically synthesized
cuuucaucuaacugcuugucagg

SEQ ID NO: 46056 - RNA, 23 nt, Artificial Sequence
  Chemically synthesized
uuucaucuaacugcuugucaggg

SEQ ID NO: 46057 - RNA, 23 nt, Artificial Sequence
  Chemically synthesized
cuucugcuucagaaggaucauac

SEQ ID NO: 46058 - RNA, 23 nt, Artificial Sequence
  Chemically synthesized
uucugcuucagaaggaucauacc

SEQ ID NO: 46059 - RNA, 23 nt, Artificial Sequence
  Chemically synthesized
ucugcuucagaaggaucauacca

SEQ ID NO: 46060 - RNA, 23 nt, Artificial Sequence
  Chemically synthesized
cugcuucagaaggaucauaccag

SEQ ID NO: 46061 - RNA, 23 nt, Artificial Sequence
  Chemically synthesized
ugcuucagaaggaucauaccaga

SEQ ID NO: 46062 - RNA, 23 nt, Artificial Sequence
  Chemically synthesized
aaagcuauauccagcauauuuag

SEQ ID NO: 46063 - RNA, 23 nt, Artificial Sequence
  Chemically synthesized
uugcaguuucuucaugaauucag

SEQ ID NO: 46064 - RNA, 23 nt, Artificial Sequence
  Chemically synthesized
guaguagcgagucacuacauaag

SEQ ID NO: 46065 - RNA, 23 nt, Artificial Sequence
  Chemically synthesized
uaguagcgagucacuacauaagg

SEQ ID NO: 46066 - RNA, 23 nt, Artificial Sequence
  Chemically synthesized
aguagcgagucacuacauaaggc

SEQ ID NO: 46067 - RNA, 23 nt, Artificial Sequence
  Chemically synthesized
guagcgagucacuacauaaggcg

SEQ ID NO: 46068 - RNA, 23 nt, Artificial Sequence
  Chemically synthesized
uagcgagucacuacauaaggcgu

SEQ ID NO: 46069 - RNA, 23 nt, Artificial Sequence
  Chemically synthesized
cauaaaacucguuccugcagucc

SEQ ID NO: 46070 - RNA, 23 nt, Artificial Sequence
  Chemically synthesized
auaaaacucguuccugcaguccu

SEQ ID NO: 46071 - RNA, 23 nt, Artificial Sequence
  Chemically synthesized
ugauagagaagguaggacauucu

SEQ ID NO: 46072 - RNA, 23 nt, Artificial Sequence
  Chemically synthesized
uuucaugaucuagcuccaucuga

SEQ ID NO: 46073 - RNA, 23 nt, Artificial Sequence
  Chemically synthesized
uucaugaucuagcuccaucugaa

SEQ ID NO: 46074 - RNA, 23 nt, Artificial Sequence
  Chemically synthesized
ucaugaucuagcuccaucugaau

SEQ ID NO: 46075 - RNA, 23 nt, Artificial Sequence
  Chemically synthesized
cgaugaugauggaugcugagagc

SEQ ID NO: 46076 - RNA, 23 nt, Artificial Sequence
  Chemically synthesized
gaugaugauggaugcugagagcc

SEQ ID NO: 46077 - RNA, 23 nt, Artificial Sequence
  Chemically synthesized
augaugauggaugcugagagcca

SEQ ID NO: 46078 - RNA, 23 nt, Artificial Sequence
  Chemically synthesized
ugaugauggaugcugagagccau

SEQ ID NO: 46079 - RNA, 23 nt, Artificial Sequence
  Chemically synthesized
gaugauggaugcugagagccauu

SEQ ID NO: 46080 - RNA, 23 nt, Artificial Sequence
  Chemically synthesized
cuccuccaaguccauaacuuccu

SEQ ID NO: 46081 - RNA, 23 nt, Artificial Sequence
  Chemically synthesized
uccuccaaguccauaacuuccuu

SEQ ID NO: 46082 - RNA, 23 nt, Artificial Sequence
  Chemically synthesized
ccuccaaguccauaacuuccuua

SEQ ID NO: 46083 - RNA, 23 nt, Artificial Sequence
  Chemically synthesized
cuccaaguccauaacuuccuuau

SEQ ID NO: 46084 - RNA, 23 nt, Artificial Sequence
  Chemically synthesized
uccaaguccauaacuuccuuaua

SEQ ID NO: 46085 - RNA, 23 nt, Artificial Sequence
  Chemically synthesized
ccaaguccauaacuuccuuauau

SEQ ID NO: 46086 - RNA, 23 nt, Artificial Sequence
  Chemically synthesized
caaguccauaacuuccuuauaua

SEQ ID NO: 46087 - RNA, 23 nt, Artificial Sequence
  Chemically synthesized
aaguccauaacuuccuuauauau

SEQ ID NO: 46088 - RNA, 23 nt, Artificial Sequence
  Chemically synthesized
auuguguguucccuuucaucuaa

SEQ ID NO: 46089 - RNA, 23 nt, Artificial Sequence
  Chemically synthesized
ucuguuuucaacguaaguccuua

SEQ ID NO: 46090 - RNA, 23 nt, Artificial Sequence
  Chemically synthesized
auccacguuuuccuuguagccca

SEQ ID NO: 46091 - RNA, 23 nt, Artificial Sequence
  Chemically synthesized
uccacguuuuccuuguagcccau

SEQ ID NO: 46092 - RNA, 23 nt, Artificial Sequence
  Chemically synthesized
ccacguuuuccuuguagcccaug

SEQ ID NO: 46093 - RNA, 23 nt, Artificial Sequence
  Chemically synthesized
agcgagucacuacauaaggcguc

SEQ ID NO: 46094 - RNA, 23 nt, Artificial Sequence
  Chemically synthesized
gcgagucacuacauaaggcguca

SEQ ID NO: 46095 - RNA, 23 nt, Artificial Sequence
  Chemically synthesized
acuacuauauuacugggcuuuaa

SEQ ID NO: 46096 - RNA, 23 nt, Artificial Sequence
  Chemically synthesized
cuacuauauuacugggcuuuaag

SEQ ID NO: 46097 - RNA, 23 nt, Artificial Sequence
  Chemically synthesized
uacuauauuacugggcuuuaagu

SEQ ID NO: 46098 - RNA, 23 nt, Artificial Sequence
  Chemically synthesized
caugaucuagcuccaucugaauc

SEQ ID NO: 46099 - RNA, 23 nt, Artificial Sequence
  Chemically synthesized
uauaacuccauucuugguucucu

SEQ ID NO: 46100 - RNA, 23 nt, Artificial Sequence
  Chemically synthesized
uaacuccauucuugguucucucc

SEQ ID NO: 46101 - RNA, 23 nt, Artificial Sequence
  Chemically synthesized
aagcuguucaauaacuuuauucc

SEQ ID NO: 46102 - RNA, 23 nt, Artificial Sequence
  Chemically synthesized
guauaacuccauucuugguucuc

SEQ ID NO: 46103 - RNA, 23 nt, Artificial Sequence
  Chemically synthesized
acacuauaaaaauuguugucacg

SEQ ID NO: 46104 - RNA, 23 nt, Artificial Sequence
  Chemically synthesized
ccuuauauaucaauucuuuccac

SEQ ID NO: 46105 - RNA, 23 nt, Artificial Sequence
  Chemically synthesized
ucuccuccaaguccauaacuucc

SEQ ID NO: 46106 - RNA, 23 nt, Artificial Sequence
  Chemically synthesized
auuuuggauaacaaaucccuugc

SEQ ID NO: 46107 - RNA, 23 nt, Artificial Sequence
  Chemically synthesized
guugcaguuucuucaugaauuca

SEQ ID NO: 46108 - RNA, 23 nt, Artificial Sequence
  Chemically synthesized
uuccaagcuguucaauaacuuua

SEQ ID NO: 46109 - RNA, 23 nt, Artificial Sequence
  Chemically synthesized
caagcuguucaauaacuuuauuc

SEQ ID NO: 46110 - RNA, 23 nt, Artificial Sequence
  Chemically synthesized
agcuguucaauaacuuuauucca

SEQ ID NO: 46111 - RNA, 23 nt, Artificial Sequence
  Chemically synthesized
guucaauaacuuuauuccacuga

SEQ ID NO: 46112 - RNA, 23 nt, Artificial Sequence
  Chemically synthesized
caauaacuuuauuccacugauca

SEQ ID NO: 46113 - RNA, 23 nt, Artificial Sequence
  Chemically synthesized
aucuagcuccaucugaaucacuu

SEQ ID NO: 46114 - RNA, 23 nt, Artificial Sequence
  Chemically synthesized
uucucuccuccaaguccauaacu

SEQ ID NO: 46115 - RNA, 23 nt, Artificial Sequence
  Chemically synthesized
guguguucccuuucaucuaacug

SEQ ID NO: 46116 - RNA, 23 nt, Artificial Sequence
  Chemically synthesized
auucaggacaugguguuccaagc

SEQ ID NO: 46117 - RNA, 23 nt, Artificial Sequence
  Chemically synthesized
uguucaauaacuuuauuccacug

SEQ ID NO: 46118 - RNA, 23 nt, Artificial Sequence
  Chemically synthesized
ugauucugaaauggucggcuuag

SEQ ID NO: 46119 - RNA, 23 nt, Artificial Sequence
  Chemically synthesized
gcuguucaauaacuuuauuccac

SEQ ID NO: 46120 - RNA, 23 nt, Artificial Sequence
  Chemically synthesized
cagaaggaucauaccagacauug

SEQ ID NO: 46121 - RNA, 23 nt, Artificial Sequence
  Chemically synthesized
uuucuguggugugaaaacauuca

SEQ ID NO: 46122 - RNA, 23 nt, Artificial Sequence
  Chemically synthesized
uauuaccagcauuuuggauaaca

SEQ ID NO: 46123 - RNA, 23 nt, Artificial Sequence
  Chemically synthesized
uucuucaugaauucaggacaugg

SEQ ID NO: 46124 - RNA, 23 nt, Artificial Sequence
  Chemically synthesized
ucuucuagggauuucuguggugu

SEQ ID NO: 46125 - RNA, 23 nt, Artificial Sequence
  Chemically synthesized
ucacuuggcaaagauuugcaucc

SEQ ID NO: 46126 - RNA, 23 nt, Artificial Sequence
  Chemically synthesized
ucauaagaacuagcucucuguag

SEQ ID NO: 46127 - RNA, 23 nt, Artificial Sequence
  Chemically synthesized
uugccugacuggcuuuaaguuug

SEQ ID NO: 46128 - RNA, 23 nt, Artificial Sequence
  Chemically synthesized
uuacuguugguugcaguuucuuc

SEQ ID NO: 46129 - RNA, 23 nt, Artificial Sequence
  Chemically synthesized
gaauaauuccagcagaaugaagg

SEQ ID NO: 46130 - RNA, 23 nt, Artificial Sequence
  Chemically synthesized
cuucuagggauuucuguggugug

SEQ ID NO: 46131 - RNA, 23 nt, Artificial Sequence
  Chemically synthesized
uuuuggauaacaaaucccuugcc

SEQ ID NO: 46132 - RNA, 23 nt, Artificial Sequence
  Chemically synthesized
uuaaauucugauaucguuucagg

SEQ ID NO: 46133 - RNA, 23 nt, Artificial Sequence
  Chemically synthesized
aauucaggacaugguguuccaag

SEQ ID NO: 46134 - RNA, 23 nt, Artificial Sequence
  Chemically synthesized
auauuacugggcuuuaagucccg

SEQ ID NO: 46135 - RNA, 23 nt, Artificial Sequence
  Chemically synthesized
uacugggcuuuaagucccgauga

SEQ ID NO: 46136 - RNA, 23 nt, Artificial Sequence
  Chemically synthesized
aacuccauucuugguucucuccu

SEQ ID NO: 46137 - RNA, 23 nt, Artificial Sequence
  Chemically synthesized
auccuuuuagaugcaucuauuac

SEQ ID NO: 46138 - RNA, 23 nt, Artificial Sequence
  Chemically synthesized
cauuuuggauaacaaaucccuug

SEQ ID NO: 46139 - RNA, 23 nt, Artificial Sequence
  Chemically synthesized
aaauucugauaucguuucaggac

SEQ ID NO: 46140 - RNA, 23 nt, Artificial Sequence
  Chemically synthesized
aucguuucaggacugugaaugua

SEQ ID NO: 46141 - RNA, 23 nt, Artificial Sequence
  Chemically synthesized
cuuuuagaugcaucuauuaccag

SEQ ID NO: 46142 - RNA, 23 nt, Artificial Sequence
  Chemically synthesized
uaaauucugauaucguuucagga

SEQ ID NO: 46143 - RNA, 23 nt, Artificial Sequence
  Chemically synthesized
aucacuuggcaaagauuugcauc

SEQ ID NO: 46144 - RNA, 23 nt, Artificial Sequence
  Chemically synthesized
auuucuguggugugaaaacauuc

SEQ ID NO: 46145 - RNA, 23 nt, Artificial Sequence
  Chemically synthesized
aacugcuugucagggaucuuugg

SEQ ID NO: 46146 - RNA, 23 nt, Artificial Sequence
  Chemically synthesized
agcauuuuggauaacaaaucccu

SEQ ID NO: 46147 - RNA, 23 nt, Artificial Sequence
  Chemically synthesized
auucugaaauggucggcuuagcu

SEQ ID NO: 46148 - RNA, 23 nt, Artificial Sequence
  Chemically synthesized
uucugaaauggucggcuuagcuu

SEQ ID NO: 46149 - RNA, 23 nt, Artificial Sequence
  Chemically synthesized
acgcuugcuucugcucaugaugg

SEQ ID NO: 46150 - RNA, 23 nt, Artificial Sequence
  Chemically synthesized
aaguagucaucuacagcagccca

SEQ ID NO: 46151 - RNA, 23 nt, Artificial Sequence
  Chemically synthesized
aaagucggaucuguugacauuga

SEQ ID NO: 46152 - RNA, 23 nt, Artificial Sequence
  Chemically synthesized
auuccuugagcuccugagccuau

SEQ ID NO: 46153 - RNA, 23 nt, Artificial Sequence
  Chemically synthesized
uucaggacaugguguuccaagcu

SEQ ID NO: 46154 - RNA, 23 nt, Artificial Sequence
  Chemically synthesized
uauuacugggcuuuaagucccga

SEQ ID NO: 46155 - RNA, 23 nt, Artificial Sequence
  Chemically synthesized
uuacugggcuuuaagucccgaug

SEQ ID NO: 46156 - RNA, 23 nt, Artificial Sequence
  Chemically synthesized
aaucacuuggcaaagauuugcau

SEQ ID NO: 46157 - RNA, 23 nt, Artificial Sequence
  Chemically synthesized
auggcccaaguagucaucuacag

SEQ ID NO: 46158 - RNA, 23 nt, Artificial Sequence
  Chemically synthesized
uucuagacugcugucuguaucag

SEQ ID NO: 46159 - RNA, 23 nt, Artificial Sequence
  Chemically synthesized
acguaaguccuuacuguugguug

SEQ ID NO: 46160 - RNA, 23 nt, Artificial Sequence
  Chemically synthesized
aaaacucguuccugcaguccugg

SEQ ID NO: 46161 - RNA, 23 nt, Artificial Sequence
  Chemically synthesized
uauauuacugggcuuuaaguccc

SEQ ID NO: 46162 - RNA, 23 nt, Artificial Sequence
  Chemically synthesized
auuacugggcuuuaagucccgau

SEQ ID NO: 46163 - RNA, 23 nt, Artificial Sequence
  Chemically synthesized
guugucacgcuugcuucugcuca

SEQ ID NO: 46164 - RNA, 23 nt, Artificial Sequence
  Chemically synthesized
aucuuuggugguggagcuucugc

SEQ ID NO: 46165 - RNA, 23 nt, Artificial Sequence
  Chemically synthesized
agaaggaucauaccagacauuga

SEQ ID NO: 46166 - RNA, 23 nt, Artificial Sequence
  Chemically synthesized
cagcauuuuggauaacaaauccc

SEQ ID NO: 46167 - RNA, 23 nt, Artificial Sequence
  Chemically synthesized
agccuauagguuuuaaauucuga

SEQ ID NO: 46168 - RNA, 23 nt, Artificial Sequence
  Chemically synthesized
aucagggaagaguuucucaaagc

SEQ ID NO: 46169 - RNA, 23 nt, Artificial Sequence
  Chemically synthesized
uaucguuucaggacugugaaugu

SEQ ID NO: 46170 - RNA, 23 nt, Artificial Sequence
  Chemically synthesized
ucuucaugaauucaggacauggu

SEQ ID NO: 46171 - RNA, 23 nt, Artificial Sequence
  Chemically synthesized
ugaaauucuucuagggauuucug

SEQ ID NO: 46172 - RNA, 23 nt, Artificial Sequence
  Chemically synthesized
ccaaguagucaucuacagcagcc

SEQ ID NO: 46173 - RNA, 23 nt, Artificial Sequence
  Chemically synthesized
gucuguaucagaggccaaagucg

SEQ ID NO: 46174 - RNA, 23 nt, Artificial Sequence
  Chemically synthesized
cuccauucuugguucucuccucc

SEQ ID NO: 46175 - RNA, 23 nt, Artificial Sequence
  Chemically synthesized
agagcuucaucuacagagauccu

SEQ ID NO: 46176 - RNA, 23 nt, Artificial Sequence
  Chemically synthesized
gagccuauagguuuuaaauucug

SEQ ID NO: 46177 - RNA, 23 nt, Artificial Sequence
  Chemically synthesized
uucaacguaaguccuuacuguug

SEQ ID NO: 46178 - RNA, 23 nt, Artificial Sequence
  Chemically synthesized
uaaaacucguuccugcaguccug

SEQ ID NO: 46179 - RNA, 23 nt, Artificial Sequence
  Chemically synthesized
cuauauuacugggcuuuaagucc

SEQ ID NO: 46180 - RNA, 23 nt, Artificial Sequence
  Chemically synthesized
ugaauaauuccagcagaaugaag

SEQ ID NO: 46181 - RNA, 23 nt, Artificial Sequence
  Chemically synthesized
auuugcauccaugagcuccauga

SEQ ID NO: 46182 - RNA, 23 nt, Artificial Sequence
  Chemically synthesized
uguugucacgcuugcuucugcuc

SEQ ID NO: 46183 - RNA, 23 nt, Artificial Sequence
  Chemically synthesized
uggaugcugagagccauugauca

SEQ ID NO: 46184 - RNA, 23 nt, Artificial Sequence
  Chemically synthesized
cuuuccacucuucuauugugugu

SEQ ID NO: 46185 - RNA, 23 nt, Artificial Sequence
  Chemically synthesized
uugagcuccugagccuauagguu

SEQ ID NO: 46186 - RNA, 23 nt, Artificial Sequence
  Chemically synthesized
auuaccagcauuuuggauaacaa

SEQ ID NO: 46187 - RNA, 23 nt, Artificial Sequence
  Chemically synthesized
ucagggaagaguuucucaaagcu

SEQ ID NO: 46188 - RNA, 23 nt, Artificial Sequence
  Chemically synthesized
uaaguccuuacuguugguugcag

SEQ ID NO: 46189 - RNA, 23 nt, Artificial Sequence
  Chemically synthesized
augaaggugcuugauuccacaca

SEQ ID NO: 46190 - RNA, 23 nt, Artificial Sequence
  Chemically synthesized
uuccacacagcaucugauagaga

SEQ ID NO: 46191 - RNA, 23 nt, Artificial Sequence
  Chemically synthesized
acagcaucugauagagaagguag

SEQ ID NO: 46192 - RNA, 23 nt, Artificial Sequence
  Chemically synthesized
uugcauccaugagcuccaugacu

SEQ ID NO: 46193 - RNA, 23 nt, Artificial Sequence
  Chemically synthesized
uugaaauucuucuagggauuucu

SEQ ID NO: 46194 - RNA, 23 nt, Artificial Sequence
  Chemically synthesized
uagcuucuugauugcaacauuuc

SEQ ID NO: 46195 - RNA, 23 nt, Artificial Sequence
  Chemically synthesized
uuuggugguggagcuucugcuuc

SEQ ID NO: 46196 - RNA, 23 nt, Artificial Sequence
  Chemically synthesized
uguacggguguuggagagcuuca

SEQ ID NO: 46197 - RNA, 23 nt, Artificial Sequence
  Chemically synthesized
cguaaguccuuacuguugguugc

SEQ ID NO: 46198 - RNA, 23 nt, Artificial Sequence
  Chemically synthesized
agucacuacauaaggcgucauca

SEQ ID NO: 46199 - RNA, 23 nt, Artificial Sequence
  Chemically synthesized
agucugauucugaaauggucggc

SEQ ID NO: 46200 - RNA, 23 nt, Artificial Sequence
  Chemically synthesized
gucugauucugaaauggucggcu

SEQ ID NO: 46201 - RNA, 23 nt, Artificial Sequence
  Chemically synthesized
ucugauucugaaauggucggcuu

SEQ ID NO: 46202 - RNA, 23 nt, Artificial Sequence
  Chemically synthesized
cugauucugaaauggucggcuua

SEQ ID NO: 46203 - RNA, 23 nt, Artificial Sequence
  Chemically synthesized
ugauucugaaauggucggcuuag

SEQ ID NO: 46204 - RNA, 23 nt, Artificial Sequence
  Chemically synthesized
cacuuggcaaagauuugcaucca

SEQ ID NO: 46205 - RNA, 23 nt, Artificial Sequence
  Chemically synthesized
acuuggcaaagauuugcauccau

SEQ ID NO: 46206 - RNA, 23 nt, Artificial Sequence
  Chemically synthesized
cuuggcaaagauuugcauccaug

SEQ ID NO: 46207 - RNA, 23 nt, Artificial Sequence
  Chemically synthesized
uuggcaaagauuugcauccauga

SEQ ID NO: 46208 - RNA, 23 nt, Artificial Sequence
  Chemically synthesized
uggcaaagauuugcauccaugag

SEQ ID NO: 46209 - RNA, 23 nt, Artificial Sequence
  Chemically synthesized
ggaccuaaaaccuaguaaucuag

SEQ ID NO: 46210 - RNA, 23 nt, Artificial Sequence
  Chemically synthesized
gggaccuaaaaccuaguaaucua

SEQ ID NO: 46211 - RNA, 23 nt, Artificial Sequence
  Chemically synthesized
agggaccuaaaaccuaguaaucu

SEQ ID NO: 46212 - RNA, 23 nt, Artificial Sequence
  Chemically synthesized
cagggaccuaaaaccuaguaauc

SEQ ID NO: 46213 - RNA, 23 nt, Artificial Sequence
  Chemically synthesized
acagggaccuaaaaccuaguaau

SEQ ID NO: 46214 - RNA, 23 nt, Artificial Sequence
  Chemically synthesized
ggaauucaaugauguguaucugg

SEQ ID NO: 46215 - RNA, 23 nt, Artificial Sequence
  Chemically synthesized
aggaauucaaugauguguaucug

SEQ ID NO: 46216 - RNA, 23 nt, Artificial Sequence
  Chemically synthesized
gaggaauucaaugauguguaucu

SEQ ID NO: 46217 - RNA, 23 nt, Artificial Sequence
  Chemically synthesized
ggaggaauucaaugauguguauc

SEQ ID NO: 46218 - RNA, 23 nt, Artificial Sequence
  Chemically synthesized
uggaggaauucaaugauguguau

SEQ ID NO: 46219 - RNA, 23 nt, Artificial Sequence
  Chemically synthesized
ccuaaaaccuaguaaucuagcug

SEQ ID NO: 46220 - RNA, 23 nt, Artificial Sequence
  Chemically synthesized
accuaaaaccuaguaaucuagcu

SEQ ID NO: 46221 - RNA, 23 nt, Artificial Sequence
  Chemically synthesized
gaccuaaaaccuaguaaucuagc

SEQ ID NO: 46222 - RNA, 23 nt, Artificial Sequence
  Chemically synthesized
gggcagaucugaacaacauugug

SEQ ID NO: 46223 - RNA, 23 nt, Artificial Sequence
  Chemically synthesized
ggggcagaucugaacaacauugu

SEQ ID NO: 46224 - RNA, 23 nt, Artificial Sequence
  Chemically synthesized
gggggcagaucugaacaacauug

SEQ ID NO: 46225 - RNA, 23 nt, Artificial Sequence
  Chemically synthesized
ugggggcagaucugaacaacauu

SEQ ID NO: 46226 - RNA, 23 nt, Artificial Sequence
  Chemically synthesized
augggggcagaucugaacaacau

SEQ ID NO: 46227 - RNA, 23 nt, Artificial Sequence
  Chemically synthesized
ccauuucaguccaucauucaugc

SEQ ID NO: 46228 - RNA, 23 nt, Artificial Sequence
  Chemically synthesized
accauuucaguccaucauucaug

SEQ ID NO: 46229 - RNA, 23 nt, Artificial Sequence
  Chemically synthesized
gaccauuucaguccaucauucau

SEQ ID NO: 46230 - RNA, 23 nt, Artificial Sequence
  Chemically synthesized
agaccauuucaguccaucauuca

SEQ ID NO: 46231 - RNA, 23 nt, Artificial Sequence
  Chemically synthesized
cagaccauuucaguccaucauuc

SEQ ID NO: 46232 - RNA, 23 nt, Artificial Sequence
  Chemically synthesized
ccaucauucaugcgaaaagaacc

SEQ ID NO: 46233 - RNA, 23 nt, Artificial Sequence
  Chemically synthesized
uccaucauucaugcgaaaagaac

SEQ ID NO: 46234 - RNA, 23 nt, Artificial Sequence
  Chemically synthesized
guccaucauucaugcgaaaagaa

SEQ ID NO: 46235 - RNA, 23 nt, Artificial Sequence
  Chemically synthesized
aguccaucauucaugcgaaaaga

SEQ ID NO: 46236 - RNA, 23 nt, Artificial Sequence
  Chemically synthesized
caguccaucauucaugcgaaaag

SEQ ID NO: 46237 - RNA, 23 nt, Artificial Sequence
  Chemically synthesized
cuggaggaauucaaugaugugua

SEQ ID NO: 46238 - RNA, 23 nt, Artificial Sequence
  Chemically synthesized
agaacauuguuuccugguacaga

SEQ ID NO: 46239 - RNA, 23 nt, Artificial Sequence
  Chemically synthesized
aagaacauuguuuccugguacag

SEQ ID NO: 46240 - RNA, 23 nt, Artificial Sequence
  Chemically synthesized
gaagaacauuguuuccugguaca

SEQ ID NO: 46241 - RNA, 23 nt, Artificial Sequence
  Chemically synthesized
ggaagaacauuguuuccugguac

SEQ ID NO: 46242 - RNA, 23 nt, Artificial Sequence
  Chemically synthesized
uggaagaacauuguuuccuggua

SEQ ID NO: 46243 - RNA, 23 nt, Artificial Sequence
  Chemically synthesized
ggcacacagaugaugaaaugaca

SEQ ID NO: 46244 - RNA, 23 nt, Artificial Sequence
  Chemically synthesized
cggcacacagaugaugaaaugac

SEQ ID NO: 46245 - RNA, 23 nt, Artificial Sequence
  Chemically synthesized
ucggcacacagaugaugaaauga

SEQ ID NO: 46246 - RNA, 23 nt, Artificial Sequence
  Chemically synthesized
cucggcacacagaugaugaaaug

SEQ ID NO: 46247 - RNA, 23 nt, Artificial Sequence
  Chemically synthesized
gcucggcacacagaugaugaaau

SEQ ID NO: 46248 - RNA, 23 nt, Artificial Sequence
  Chemically synthesized
gcugaagauucuggauuuuggac

SEQ ID NO: 46249 - RNA, 23 nt, Artificial Sequence
  Chemically synthesized
agcugaagauucuggauuuugga

SEQ ID NO: 46250 - RNA, 23 nt, Artificial Sequence
  Chemically synthesized
gagcugaagauucuggauuuugg

SEQ ID NO: 46251 - RNA, 23 nt, Artificial Sequence
  Chemically synthesized
ugagcugaagauucuggauuuug

SEQ ID NO: 46252 - RNA, 23 nt, Artificial Sequence
  Chemically synthesized
gugagcugaagauucuggauuuu

SEQ ID NO: 46253 - RNA, 23 nt, Artificial Sequence
  Chemically synthesized
gcagaucugaacaacauugugaa

SEQ ID NO: 46254 - RNA, 23 nt, Artificial Sequence
  Chemically synthesized
ggcagaucugaacaacauuguga

SEQ ID NO: 46255 - RNA, 23 nt, Artificial Sequence
  Chemically synthesized
gacuggaagaacauuguuuccug

SEQ ID NO: 46256 - RNA, 23 nt, Artificial Sequence
  Chemically synthesized
ugacuggaagaacauuguuuccu

SEQ ID NO: 46257 - RNA, 23 nt, Artificial Sequence
  Chemically synthesized
uugacuggaagaacauuguuucc

SEQ ID NO: 46258 - RNA, 23 nt, Artificial Sequence
  Chemically synthesized
guugacuggaagaacauuguuuc

SEQ ID NO: 46259 - RNA, 23 nt, Artificial Sequence
  Chemically synthesized
uguugacuggaagaacauuguuu

SEQ ID NO: 46260 - RNA, 23 nt, Artificial Sequence
  Chemically synthesized
ugaacuggaugcauuacaaccag

SEQ ID NO: 46261 - RNA, 23 nt, Artificial Sequence
  Chemically synthesized
cugaacuggaugcauuacaacca

SEQ ID NO: 46262 - RNA, 23 nt, Artificial Sequence
  Chemically synthesized
gcugaacuggaugcauuacaacc

SEQ ID NO: 46263 - RNA, 23 nt, Artificial Sequence
  Chemically synthesized
ugcugaacuggaugcauuacaac

SEQ ID NO: 46264 - RNA, 23 nt, Artificial Sequence
  Chemically synthesized
augcugaacuggaugcauuacaa

SEQ ID NO: 46265 - RNA, 23 nt, Artificial Sequence
  Chemically synthesized
gcacacagaugaugaaaugacag

SEQ ID NO: 46266 - RNA, 23 nt, Artificial Sequence
  Chemically synthesized
ugugagcugaagauucuggauuu

SEQ ID NO: 46267 - RNA, 23 nt, Artificial Sequence
  Chemically synthesized
ccaaauucuccgaggucuaaagu

SEQ ID NO: 46268 - RNA, 23 nt, Artificial Sequence
  Chemically synthesized
accaaauucuccgaggucuaaag

SEQ ID NO: 46269 - RNA, 23 nt, Artificial Sequence
  Chemically synthesized
uaccaaauucuccgaggucuaaa

SEQ ID NO: 46270 - RNA, 23 nt, Artificial Sequence
  Chemically synthesized
cuaccaaauucuccgaggucuaa

SEQ ID NO: 46271 - RNA, 23 nt, Artificial Sequence
  Chemically synthesized
ucuaccaaauucuccgaggucua

SEQ ID NO: 46272 - RNA, 23 nt, Artificial Sequence
  Chemically synthesized
cugaacaacauugugaaauguca

SEQ ID NO: 46273 - RNA, 23 nt, Artificial Sequence
  Chemically synthesized
ucugaacaacauugugaaauguc

SEQ ID NO: 46274 - RNA, 23 nt, Artificial Sequence
  Chemically synthesized
aucugaacaacauugugaaaugu

SEQ ID NO: 46275 - RNA, 23 nt, Artificial Sequence
  Chemically synthesized
gaucugaacaacauugugaaaug

SEQ ID NO: 46276 - RNA, 23 nt, Artificial Sequence
  Chemically synthesized
agaucugaacaacauugugaaau

SEQ ID NO: 46277 - RNA, 23 nt, Artificial Sequence
  Chemically synthesized
caaggucucuggaggaauucaau

SEQ ID NO: 46278 - RNA, 23 nt, Artificial Sequence
  Chemically synthesized
gcaaggucucuggaggaauucaa

SEQ ID NO: 46279 - RNA, 23 nt, Artificial Sequence
  Chemically synthesized
ugcaaggucucuggaggaauuca

SEQ ID NO: 46280 - RNA, 23 nt, Artificial Sequence
  Chemically synthesized
cugcaaggucucuggaggaauuc

SEQ ID NO: 46281 - RNA, 23 nt, Artificial Sequence
  Chemically synthesized
ccugcaaggucucuggaggaauu

SEQ ID NO: 46282 - RNA, 23 nt, Artificial Sequence
  Chemically synthesized
ccagaccauuucaguccaucauu

SEQ ID NO: 46283 - RNA, 23 nt, Artificial Sequence
  Chemically synthesized
cugugagcugaagauucuggauu

SEQ ID NO: 46284 - RNA, 23 nt, Artificial Sequence
  Chemically synthesized
uccuuaucuaccaaauucuccga

SEQ ID NO: 46285 - RNA, 23 nt, Artificial Sequence
  Chemically synthesized
uuccuuaucuaccaaauucuccg

SEQ ID NO: 46286 - RNA, 23 nt, Artificial Sequence
  Chemically synthesized
guuccuuaucuaccaaauucucc

SEQ ID NO: 46287 - RNA, 23 nt, Artificial Sequence
  Chemically synthesized
aguuccuuaucuaccaaauucuc

SEQ ID NO: 46288 - RNA, 23 nt, Artificial Sequence
  Chemically synthesized
caguuccuuaucuaccaaauucu

SEQ ID NO: 46289 - RNA, 23 nt, Artificial Sequence
  Chemically synthesized
ugaacaacauugugaaaugucag

SEQ ID NO: 46290 - RNA, 23 nt, Artificial Sequence
  Chemically synthesized
gcgguuacuuaaacauaugaaac

SEQ ID NO: 46291 - RNA, 23 nt, Artificial Sequence
  Chemically synthesized
ugcgguuacuuaaacauaugaaa

SEQ ID NO: 46292 - RNA, 23 nt, Artificial Sequence
  Chemically synthesized
cugcgguuacuuaaacauaugaa

SEQ ID NO: 46293 - RNA, 23 nt, Artificial Sequence
  Chemically synthesized
acugcgguuacuuaaacauauga

SEQ ID NO: 46294 - RNA, 23 nt, Artificial Sequence
  Chemically synthesized
aacugcgguuacuuaaacauaug

SEQ ID NO: 46295 - RNA, 23 nt, Artificial Sequence
  Chemically synthesized
gcuguugacuggaagaacauugu

SEQ ID NO: 46296 - RNA, 23 nt, Artificial Sequence
  Chemically synthesized
agcuguugacuggaagaacauug

SEQ ID NO: 46297 - RNA, 23 nt, Artificial Sequence
  Chemically synthesized
gagcuguugacuggaagaacauu

SEQ ID NO: 46298 - RNA, 23 nt, Artificial Sequence
  Chemically synthesized
cgagcuguugacuggaagaacau

SEQ ID NO: 46299 - RNA, 23 nt, Artificial Sequence
  Chemically synthesized
ccgagcuguugacuggaagaaca

SEQ ID NO: 46300 - RNA, 23 nt, Artificial Sequence
  Chemically synthesized
acauucagcugacauaauucaca

SEQ ID NO: 46301 - RNA, 23 nt, Artificial Sequence
  Chemically synthesized
uacauucagcugacauaauucac

SEQ ID NO: 46302 - RNA, 23 nt, Artificial Sequence
  Chemically synthesized
auacauucagcugacauaauuca

SEQ ID NO: 46303 - RNA, 23 nt, Artificial Sequence
  Chemically synthesized
uauacauucagcugacauaauuc

SEQ ID NO: 46304 - RNA, 23 nt, Artificial Sequence
  Chemically synthesized
auauacauucagcugacauaauu

SEQ ID NO: 46305 - RNA, 23 nt, Artificial Sequence
  Chemically synthesized
cgaggucuaaaguauauacauuc

SEQ ID NO: 46306 - RNA, 23 nt, Artificial Sequence
  Chemically synthesized
ccgaggucuaaaguauauacauu

SEQ ID NO: 46307 - RNA, 23 nt, Artificial Sequence
  Chemically synthesized
uccgaggucuaaaguauauacau

SEQ ID NO: 46308 - RNA, 23 nt, Artificial Sequence
  Chemically synthesized
cuccgaggucuaaaguauauaca

SEQ ID NO: 46309 - RNA, 23 nt, Artificial Sequence
  Chemically synthesized
ucuccgaggucuaaaguauauac

SEQ ID NO: 46310 - RNA, 23 nt, Artificial Sequence
  Chemically synthesized
uucuccgaggucuaaaguauaua

SEQ ID NO: 46311 - RNA, 23 nt, Artificial Sequence
  Chemically synthesized
ucaguuccuuaucuaccaaauuc

SEQ ID NO: 46312 - RNA, 23 nt, Artificial Sequence
  Chemically synthesized
uucaguuccuuaucuaccaaauu

SEQ ID NO: 46313 - RNA, 23 nt, Artificial Sequence
  Chemically synthesized
guucaguuccuuaucuaccaaau

SEQ ID NO: 46314 - RNA, 23 nt, Artificial Sequence
  Chemically synthesized
uguucaguuccuuaucuaccaaa

SEQ ID NO: 46315 - RNA, 23 nt, Artificial Sequence
  Chemically synthesized
auguucaguuccuuaucuaccaa

SEQ ID NO: 46316 - RNA, 23 nt, Artificial Sequence
  Chemically synthesized
ggucucuggaggaauucaaugau

SEQ ID NO: 46317 - RNA, 23 nt, Artificial Sequence
  Chemically synthesized
aggucucuggaggaauucaauga

SEQ ID NO: 46318 - RNA, 23 nt, Artificial Sequence
  Chemically synthesized
aaggucucuggaggaauucaaug

SEQ ID NO: 46319 - RNA, 23 nt, Artificial Sequence
  Chemically synthesized
accugcaaggucucuggaggaau

SEQ ID NO: 46320 - RNA, 23 nt, Artificial Sequence
  Chemically synthesized
cgguuacuuaaacauaugaaaca

SEQ ID NO: 46321 - RNA, 23 nt, Artificial Sequence
  Chemically synthesized
gaacugcgguuacuuaaacauau

SEQ ID NO: 46322 - RNA, 23 nt, Artificial Sequence
  Chemically synthesized
gaacauuguuuccugguacagac

SEQ ID NO: 46323 - RNA, 23 nt, Artificial Sequence
  Chemically synthesized
cuguugacuggaagaacauuguu

SEQ ID NO: 46324 - RNA, 23 nt, Artificial Sequence
  Chemically synthesized
gccgagcuguugacuggaagaac

SEQ ID NO: 46325 - RNA, 23 nt, Artificial Sequence
  Chemically synthesized
ggccgagcuguugacuggaagaa

SEQ ID NO: 46326 - RNA, 23 nt, Artificial Sequence
  Chemically synthesized
cuccugagaucaugcugaacugg

SEQ ID NO: 46327 - RNA, 23 nt, Artificial Sequence
  Chemically synthesized
gcuccugagaucaugcugaacug

SEQ ID NO: 46328 - RNA, 23 nt, Artificial Sequence
  Chemically synthesized
ggcuccugagaucaugcugaacu

SEQ ID NO: 46329 - RNA, 23 nt, Artificial Sequence
  Chemically synthesized
gggcuccugagaucaugcugaac

SEQ ID NO: 46330 - RNA, 23 nt, Artificial Sequence
  Chemically synthesized
agggcuccugagaucaugcugaa

SEQ ID NO: 46331 - RNA, 23 nt, Artificial Sequence
  Chemically synthesized
guauauacauucagcugacauaa

SEQ ID NO: 46332 - RNA, 23 nt, Artificial Sequence
  Chemically synthesized
aguauauacauucagcugacaua

SEQ ID NO: 46333 - RNA, 23 nt, Artificial Sequence
  Chemically synthesized
aaguauauacauucagcugacau

SEQ ID NO: 46334 - RNA, 23 nt, Artificial Sequence
  Chemically synthesized
aaaguauauacauucagcugaca

SEQ ID NO: 46335 - RNA, 23 nt, Artificial Sequence
  Chemically synthesized
uaaaguauauacauucagcugac

SEQ ID NO: 46336 - RNA, 23 nt, Artificial Sequence
  Chemically synthesized
gcuuacagaugaccauguucagu

SEQ ID NO: 46337 - RNA, 23 nt, Artificial Sequence
  Chemically synthesized
agcuuacagaugaccauguucag

SEQ ID NO: 46338 - RNA, 23 nt, Artificial Sequence
  Chemically synthesized
aagcuuacagaugaccauguuca

SEQ ID NO: 46339 - RNA, 23 nt, Artificial Sequence
  Chemically synthesized
gaagcuuacagaugaccauguuc

SEQ ID NO: 46340 - RNA, 23 nt, Artificial Sequence
  Chemically synthesized
agaagcuuacagaugaccauguu

SEQ ID NO: 46341 - RNA, 23 nt, Artificial Sequence
  Chemically synthesized
cagaagcuuacagaugaccaugu

SEQ ID NO: 46342 - RNA, 23 nt, Artificial Sequence
  Chemically synthesized
ucagaagcuuacagaugaccaug

SEQ ID NO: 46343 - RNA, 23 nt, Artificial Sequence
  Chemically synthesized
gucagaagcuuacagaugaccau

SEQ ID NO: 46344 - RNA, 23 nt, Artificial Sequence
  Chemically synthesized
ugucagaagcuuacagaugacca

SEQ ID NO: 46345 - RNA, 23 nt, Artificial Sequence
  Chemically synthesized
augucagaagcuuacagaugacc

SEQ ID NO: 46346 - RNA, 23 nt, Artificial Sequence
  Chemically synthesized
aaugucagaagcuuacagaugac

SEQ ID NO: 46347 - RNA, 23 nt, Artificial Sequence
  Chemically synthesized
cagaucugaacaacauugugaaa

SEQ ID NO: 46348 - RNA, 23 nt, Artificial Sequence
  Chemically synthesized
ucuggaggaauucaaugaugugu

SEQ ID NO: 46349 - RNA, 23 nt, Artificial Sequence
  Chemically synthesized
cucuggaggaauucaaugaugug

SEQ ID NO: 46350 - RNA, 23 nt, Artificial Sequence
  Chemically synthesized
caccugcaaggucucuggaggaa

SEQ ID NO: 46351 - RNA, 23 nt, Artificial Sequence
  Chemically synthesized
gcgaaaagaaccuacagagaacu

SEQ ID NO: 46352 - RNA, 23 nt, Artificial Sequence
  Chemically synthesized
ugcgaaaagaaccuacagagaac

SEQ ID NO: 46353 - RNA, 23 nt, Artificial Sequence
  Chemically synthesized
augcgaaaagaaccuacagagaa

SEQ ID NO: 46354 - RNA, 23 nt, Artificial Sequence
  Chemically synthesized
caugcgaaaagaaccuacagaga

SEQ ID NO: 46355 - RNA, 23 nt, Artificial Sequence
  Chemically synthesized
ucaugcgaaaagaaccuacagag

SEQ ID NO: 46356 - RNA, 23 nt, Artificial Sequence
  Chemically synthesized
ucaguccaucauucaugcgaaaa

SEQ ID NO: 46357 - RNA, 23 nt, Artificial Sequence
  Chemically synthesized
gguuacguguggcagugaagaag

SEQ ID NO: 46358 - RNA, 23 nt, Artificial Sequence
  Chemically synthesized
ggguuacguguggcagugaagaa

SEQ ID NO: 46359 - RNA, 23 nt, Artificial Sequence
  Chemically synthesized
gggguuacguguggcagugaaga

SEQ ID NO: 46360 - RNA, 23 nt, Artificial Sequence
  Chemically synthesized
cgggguuacguguggcagugaag

SEQ ID NO: 46361 - RNA, 23 nt, Artificial Sequence
  Chemically synthesized
acgggguuacguguggcagugaa

SEQ ID NO: 46362 - RNA, 23 nt, Artificial Sequence
  Chemically synthesized
gcauaauggccgagcuguugacu

SEQ ID NO: 46363 - RNA, 23 nt, Artificial Sequence
  Chemically synthesized
ugcauaauggccgagcuguugac

SEQ ID NO: 46364 - RNA, 23 nt, Artificial Sequence
  Chemically synthesized
augcauaauggccgagcuguuga

SEQ ID NO: 46365 - RNA, 23 nt, Artificial Sequence
  Chemically synthesized
gaugcauaauggccgagcuguug

SEQ ID NO: 46366 - RNA, 23 nt, Artificial Sequence
  Chemically synthesized
ggaugcauaauggccgagcuguu

SEQ ID NO: 46367 - RNA, 23 nt, Artificial Sequence
  Chemically synthesized
agaucaugcugaacuggaugcau

SEQ ID NO: 46368 - RNA, 23 nt, Artificial Sequence
  Chemically synthesized
gagaucaugcugaacuggaugca

SEQ ID NO: 46369 - RNA, 23 nt, Artificial Sequence
  Chemically synthesized
ugagaucaugcugaacuggaugc

SEQ ID NO: 46370 - RNA, 23 nt, Artificial Sequence
  Chemically synthesized
cugagaucaugcugaacuggaug

SEQ ID NO: 46371 - RNA, 23 nt, Artificial Sequence
  Chemically synthesized
ccugagaucaugcugaacuggau

SEQ ID NO: 46372 - RNA, 23 nt, Artificial Sequence
  Chemically synthesized
ggcucggcacacagaugaugaaa

SEQ ID NO: 46373 - RNA, 23 nt, Artificial Sequence
  Chemically synthesized
auucuccgaggucuaaaguauau

SEQ ID NO: 46374 - RNA, 23 nt, Artificial Sequence
  Chemically synthesized
aaaugucagaagcuuacagauga

SEQ ID NO: 46375 - RNA, 23 nt, Artificial Sequence
  Chemically synthesized
ucucuggaggaauucaaugaugu

SEQ ID NO: 46376 - RNA, 23 nt, Artificial Sequence
  Chemically synthesized
gucucuggaggaauucaaugaug

SEQ ID NO: 46377 - RNA, 23 nt, Artificial Sequence
  Chemically synthesized
aggagcugaacaagacaaucugg

SEQ ID NO: 46378 - RNA, 23 nt, Artificial Sequence
  Chemically synthesized
caggagcugaacaagacaaucug

SEQ ID NO: 46379 - RNA, 23 nt, Artificial Sequence
  Chemically synthesized
gcaggagcugaacaagacaaucu

SEQ ID NO: 46380 - RNA, 23 nt, Artificial Sequence
  Chemically synthesized
ggcaggagcugaacaagacaauc

SEQ ID NO: 46381 - RNA, 23 nt, Artificial Sequence
  Chemically synthesized
cggcaggagcugaacaagacaau

SEQ ID NO: 46382 - RNA, 23 nt, Artificial Sequence
  Chemically synthesized
agaacugcgguuacuuaaacaua

SEQ ID NO: 46383 - RNA, 23 nt, Artificial Sequence
  Chemically synthesized
gagaacugcgguuacuuaaacau

SEQ ID NO: 46384 - RNA, 23 nt, Artificial Sequence
  Chemically synthesized
agagaacugcgguuacuuaaaca

SEQ ID NO: 46385 - RNA, 23 nt, Artificial Sequence
  Chemically synthesized
cagagaacugcgguuacuuaaac

SEQ ID NO: 46386 - RNA, 23 nt, Artificial Sequence
  Chemically synthesized
acagagaacugcgguuacuuaaa

SEQ ID NO: 46387 - RNA, 23 nt, Artificial Sequence
  Chemically synthesized
cgaaaagaaccuacagagaacug

SEQ ID NO: 46388 - RNA, 23 nt, Artificial Sequence
  Chemically synthesized
caugcugaacuggaugcauuaca

SEQ ID NO: 46389 - RNA, 23 nt, Artificial Sequence
  Chemically synthesized
uccugagaucaugcugaacugga

SEQ ID NO: 46390 - RNA, 23 nt, Artificial Sequence
  Chemically synthesized
acacagaugaugaaaugacaggc

SEQ ID NO: 46391 - RNA, 23 nt, Artificial Sequence
  Chemically synthesized
cacacagaugaugaaaugacagg

SEQ ID NO: 46392 - RNA, 23 nt, Artificial Sequence
  Chemically synthesized
uggcucggcacacagaugaugaa

SEQ ID NO: 46393 - RNA, 23 nt, Artificial Sequence
  Chemically synthesized
agauucuggauuuuggacuggcu

SEQ ID NO: 46394 - RNA, 23 nt, Artificial Sequence
  Chemically synthesized
aagauucuggauuuuggacuggc

SEQ ID NO: 46395 - RNA, 23 nt, Artificial Sequence
  Chemically synthesized
gaagauucuggauuuuggacugg

SEQ ID NO: 46396 - RNA, 23 nt, Artificial Sequence
  Chemically synthesized
ugaagauucuggauuuuggacug

SEQ ID NO: 46397 - RNA, 23 nt, Artificial Sequence
  Chemically synthesized
cugaagauucuggauuuuggacu

SEQ ID NO: 46398 - RNA, 23 nt, Artificial Sequence
  Chemically synthesized
acugugagcugaagauucuggau

SEQ ID NO: 46399 - RNA, 23 nt, Artificial Sequence
  Chemically synthesized
agacugugagcugaagauucugg

SEQ ID NO: 46400 - RNA, 23 nt, Artificial Sequence
  Chemically synthesized
aagacugugagcugaagauucug

SEQ ID NO: 46401 - RNA, 23 nt, Artificial Sequence
  Chemically synthesized
gaagacugugagcugaagauucu

SEQ ID NO: 46402 - RNA, 23 nt, Artificial Sequence
  Chemically synthesized
ugaagacugugagcugaagauuc

SEQ ID NO: 46403 - RNA, 23 nt, Artificial Sequence
  Chemically synthesized
augaagacugugagcugaagauu

SEQ ID NO: 46404 - RNA, 23 nt, Artificial Sequence
  Chemically synthesized
ugacauaauucacagggaccuaa

SEQ ID NO: 46405 - RNA, 23 nt, Artificial Sequence
  Chemically synthesized
cugacauaauucacagggaccua

SEQ ID NO: 46406 - RNA, 23 nt, Artificial Sequence
  Chemically synthesized
gcugacauaauucacagggaccu

SEQ ID NO: 46407 - RNA, 23 nt, Artificial Sequence
  Chemically synthesized
agcugacauaauucacagggacc

SEQ ID NO: 46408 - RNA, 23 nt, Artificial Sequence
  Chemically synthesized
cagcugacauaauucacagggac

SEQ ID NO: 46409 - RNA, 23 nt, Artificial Sequence
  Chemically synthesized
gaggucuaaaguauauacauuca

SEQ ID NO: 46410 - RNA, 23 nt, Artificial Sequence
  Chemically synthesized
ugaccauguucaguuccuuaucu

SEQ ID NO: 46411 - RNA, 23 nt, Artificial Sequence
  Chemically synthesized
augaccauguucaguuccuuauc

SEQ ID NO: 46412 - RNA, 23 nt, Artificial Sequence
  Chemically synthesized
gaugaccauguucaguuccuuau

SEQ ID NO: 46413 - RNA, 23 nt, Artificial Sequence
  Chemically synthesized
agaugaccauguucaguuccuua

SEQ ID NO: 46414 - RNA, 23 nt, Artificial Sequence
  Chemically synthesized
cagaugaccauguucaguuccuu

SEQ ID NO: 46415 - RNA, 23 nt, Artificial Sequence
  Chemically synthesized
ugugaaaugucagaagcuuacag

SEQ ID NO: 46416 - RNA, 23 nt, Artificial Sequence
  Chemically synthesized
uugugaaaugucagaagcuuaca

SEQ ID NO: 46417 - RNA, 23 nt, Artificial Sequence
  Chemically synthesized
auugugaaaugucagaagcuuac

SEQ ID NO: 46418 - RNA, 23 nt, Artificial Sequence
  Chemically synthesized
cauugugaaaugucagaagcuua

SEQ ID NO: 46419 - RNA, 23 nt, Artificial Sequence
  Chemically synthesized
acauugugaaaugucagaagcuu

SEQ ID NO: 46420 - RNA, 23 nt, Artificial Sequence
  Chemically synthesized
ccggcaggagcugaacaagacaa

SEQ ID NO: 46421 - RNA, 23 nt, Artificial Sequence
  Chemically synthesized
gaaaagaaccuacagagaacugc

SEQ ID NO: 46422 - RNA, 23 nt, Artificial Sequence
  Chemically synthesized
uggccgagcuguugacuggaaga

SEQ ID NO: 46423 - RNA, 23 nt, Artificial Sequence
  Chemically synthesized
ugcauuacaaccagacaguugau

SEQ ID NO: 46424 - RNA, 23 nt, Artificial Sequence
  Chemically synthesized
augcauuacaaccagacaguuga

SEQ ID NO: 46425 - RNA, 23 nt, Artificial Sequence
  Chemically synthesized
gaugcauuacaaccagacaguug

SEQ ID NO: 46426 - RNA, 23 nt, Artificial Sequence
  Chemically synthesized
ggaugcauuacaaccagacaguu

SEQ ID NO: 46427 - RNA, 23 nt, Artificial Sequence
  Chemically synthesized
uggaugcauuacaaccagacagu

SEQ ID NO: 46428 - RNA, 23 nt, Artificial Sequence
  Chemically synthesized
ugaaaugacaggcuacguggcca

SEQ ID NO: 46429 - RNA, 23 nt, Artificial Sequence
  Chemically synthesized
augaaaugacaggcuacguggcc

SEQ ID NO: 46430 - RNA, 23 nt, Artificial Sequence
  Chemically synthesized
gaugaaaugacaggcuacguggc

SEQ ID NO: 46431 - RNA, 23 nt, Artificial Sequence
  Chemically synthesized
ugaugaaaugacaggcuacgugg

SEQ ID NO: 46432 - RNA, 23 nt, Artificial Sequence
  Chemically synthesized
augaugaaaugacaggcuacgug

SEQ ID NO: 46433 - RNA, 23 nt, Artificial Sequence
  Chemically synthesized
gaugaugaaaugacaggcuacgu

SEQ ID NO: 46434 - RNA, 23 nt, Artificial Sequence
  Chemically synthesized
agaugaugaaaugacaggcuacg

SEQ ID NO: 46435 - RNA, 23 nt, Artificial Sequence
  Chemically synthesized
cagaugaugaaaugacaggcuac

SEQ ID NO: 46436 - RNA, 23 nt, Artificial Sequence
  Chemically synthesized
acagaugaugaaaugacaggcua

SEQ ID NO: 46437 - RNA, 23 nt, Artificial Sequence
  Chemically synthesized
cacagaugaugaaaugacaggcu

SEQ ID NO: 46438 - RNA, 23 nt, Artificial Sequence
  Chemically synthesized
aaugaagacugugagcugaagau

SEQ ID NO: 46439 - RNA, 23 nt, Artificial Sequence
  Chemically synthesized
gaaugaagacugugagcugaaga

SEQ ID NO: 46440 - RNA, 23 nt, Artificial Sequence
  Chemically synthesized
ugaaugaagacugugagcugaag

SEQ ID NO: 46441 - RNA, 23 nt, Artificial Sequence
  Chemically synthesized
acauaauucacagggaccuaaaa

SEQ ID NO: 46442 - RNA, 23 nt, Artificial Sequence
  Chemically synthesized
gacauaauucacagggaccuaaa

SEQ ID NO: 46443 - RNA, 23 nt, Artificial Sequence
  Chemically synthesized
ucagcugacauaauucacaggga

SEQ ID NO: 46444 - RNA, 23 nt, Artificial Sequence
  Chemically synthesized
caaauucuccgaggucuaaagua

SEQ ID NO: 46445 - RNA, 23 nt, Artificial Sequence
  Chemically synthesized
ugaaaugucagaagcuuacagau

SEQ ID NO: 46446 - RNA, 23 nt, Artificial Sequence
  Chemically synthesized
gugaaaugucagaagcuuacaga

SEQ ID NO: 46447 - RNA, 23 nt, Artificial Sequence
  Chemically synthesized
gccgcuggaaaaugucucaggag

SEQ ID NO: 46448 - RNA, 23 nt, Artificial Sequence
  Chemically synthesized
ugccgcuggaaaaugucucagga

SEQ ID NO: 46449 - RNA, 23 nt, Artificial Sequence
  Chemically synthesized
cugccgcuggaaaaugucucagg

SEQ ID NO: 46450 - RNA, 23 nt, Artificial Sequence
  Chemically synthesized
gcugccgcuggaaaaugucucag

SEQ ID NO: 46451 - RNA, 23 nt, Artificial Sequence
  Chemically synthesized
ggcugccgcuggaaaaugucuca

SEQ ID NO: 46452 - RNA, 23 nt, Artificial Sequence
  Chemically synthesized
gagcugaacaagacaaucuggga

SEQ ID NO: 46453 - RNA, 23 nt, Artificial Sequence
  Chemically synthesized
ggagcugaacaagacaaucuggg

SEQ ID NO: 46454 - RNA, 23 nt, Artificial Sequence
  Chemically synthesized
uacagagaacugcgguuacuuaa

SEQ ID NO: 46455 - RNA, 23 nt, Artificial Sequence
  Chemically synthesized
cuacagagaacugcgguuacuua

SEQ ID NO: 46456 - RNA, 23 nt, Artificial Sequence
  Chemically synthesized
caucauucaugcgaaaagaaccu

SEQ ID NO: 46457 - RNA, 23 nt, Artificial Sequence
  Chemically synthesized
gucagugggaugcauaauggccg

SEQ ID NO: 46458 - RNA, 23 nt, Artificial Sequence
  Chemically synthesized
ggucagugggaugcauaauggcc

SEQ ID NO: 46459 - RNA, 23 nt, Artificial Sequence
  Chemically synthesized
uggucagugggaugcauaauggc

SEQ ID NO: 46460 - RNA, 23 nt, Artificial Sequence
  Chemically synthesized
uuggucagugggaugcauaaugg

SEQ ID NO: 46461 - RNA, 23 nt, Artificial Sequence
  Chemically synthesized
uuuggucagugggaugcauaaug

SEQ ID NO: 46462 - RNA, 23 nt, Artificial Sequence
  Chemically synthesized
auuuggucagugggaugcauaau

SEQ ID NO: 46463 - RNA, 23 nt, Artificial Sequence
  Chemically synthesized
cucugugugugcugcuuuugaca

SEQ ID NO: 46464 - RNA, 23 nt, Artificial Sequence
  Chemically synthesized
gcucugugugugcugcuuuugac

SEQ ID NO: 46465 - RNA, 23 nt, Artificial Sequence
  Chemically synthesized
ggcucugugugugcugcuuuuga

SEQ ID NO: 46466 - RNA, 23 nt, Artificial Sequence
  Chemically synthesized
uggcucugugugugcugcuuuug

SEQ ID NO: 46467 - RNA, 23 nt, Artificial Sequence
  Chemically synthesized
auggcucugugugugcugcuuuu

SEQ ID NO: 46468 - RNA, 23 nt, Artificial Sequence
  Chemically synthesized
cugugaaugaagacugugagcug

SEQ ID NO: 46469 - RNA, 23 nt, Artificial Sequence
  Chemically synthesized
gcugugaaugaagacugugagcu

SEQ ID NO: 46470 - RNA, 23 nt, Artificial Sequence
  Chemically synthesized
agcugugaaugaagacugugagc

SEQ ID NO: 46471 - RNA, 23 nt, Artificial Sequence
  Chemically synthesized
uagcugugaaugaagacugugag

SEQ ID NO: 46472 - RNA, 23 nt, Artificial Sequence
  Chemically synthesized
cuagcugugaaugaagacuguga

SEQ ID NO: 46473 - RNA, 23 nt, Artificial Sequence
  Chemically synthesized
ucuagcugugaaugaagacugug

SEQ ID NO: 46474 - RNA, 23 nt, Artificial Sequence
  Chemically synthesized
aucuagcugugaaugaagacugu

SEQ ID NO: 46475 - RNA, 23 nt, Artificial Sequence
  Chemically synthesized
uaaucuagcugugaaugaagacu

SEQ ID NO: 46476 - RNA, 23 nt, Artificial Sequence
  Chemically synthesized
guaaucuagcugugaaugaagac

SEQ ID NO: 46477 - RNA, 23 nt, Artificial Sequence
  Chemically synthesized
aguaaucuagcugugaaugaaga

SEQ ID NO: 46478 - RNA, 23 nt, Artificial Sequence
  Chemically synthesized
uaguaaucuagcugugaaugaag

SEQ ID NO: 46479 - RNA, 23 nt, Artificial Sequence
  Chemically synthesized
cuaguaaucuagcugugaaugaa

SEQ ID NO: 46480 - RNA, 23 nt, Artificial Sequence
  Chemically synthesized
accauguucaguuccuuaucuac

SEQ ID NO: 46481 - RNA, 23 nt, Artificial Sequence
  Chemically synthesized
gaccauguucaguuccuuaucua

SEQ ID NO: 46482 - RNA, 23 nt, Artificial Sequence
  Chemically synthesized
acagaugaccauguucaguuccu

SEQ ID NO: 46483 - RNA, 23 nt, Artificial Sequence
  Chemically synthesized
uacagaugaccauguucaguucc

SEQ ID NO: 46484 - RNA, 23 nt, Artificial Sequence
  Chemically synthesized
uuacagaugaccauguucaguuc

SEQ ID NO: 46485 - RNA, 23 nt, Artificial Sequence
  Chemically synthesized
cuuacagaugaccauguucaguu

SEQ ID NO: 46486 - RNA, 23 nt, Artificial Sequence
  Chemically synthesized
aaaaugugauuggucuguuggac

SEQ ID NO: 46487 - RNA, 23 nt, Artificial Sequence
  Chemically synthesized
gaaaaugugauuggucuguugga

SEQ ID NO: 46488 - RNA, 23 nt, Artificial Sequence
  Chemically synthesized
ugaaaaugugauuggucuguugg

SEQ ID NO: 46489 - RNA, 23 nt, Artificial Sequence
  Chemically synthesized
augaaaaugugauuggucuguug

SEQ ID NO: 46490 - RNA, 23 nt, Artificial Sequence
  Chemically synthesized
caugaaaaugugauuggucuguu

SEQ ID NO: 46491 - RNA, 23 nt, Artificial Sequence
  Chemically synthesized
acaugaaaaugugauuggucugu

SEQ ID NO: 46492 - RNA, 23 nt, Artificial Sequence
  Chemically synthesized
aacaugaaaaugugauuggucug

SEQ ID NO: 46493 - RNA, 23 nt, Artificial Sequence
  Chemically synthesized
aaacaugaaaaugugauuggucu

SEQ ID NO: 46494 - RNA, 23 nt, Artificial Sequence
  Chemically synthesized
gaaacaugaaaaugugauugguc

SEQ ID NO: 46495 - RNA, 23 nt, Artificial Sequence
  Chemically synthesized
ugaaacaugaaaaugugauuggu

SEQ ID NO: 46496 - RNA, 23 nt, Artificial Sequence
  Chemically synthesized
uucaugcgaaaagaaccuacaga

SEQ ID NO: 46497 - RNA, 23 nt, Artificial Sequence
  Chemically synthesized
uccagaccauuucaguccaucau

SEQ ID NO: 46498 - RNA, 23 nt, Artificial Sequence
  Chemically synthesized
cuccagaccauuucaguccauca

SEQ ID NO: 46499 - RNA, 23 nt, Artificial Sequence
  Chemically synthesized
ucuccagaccauuucaguccauc

SEQ ID NO: 46500 - RNA, 23 nt, Artificial Sequence
  Chemically synthesized
cucuccagaccauuucaguccau

SEQ ID NO: 46501 - RNA, 23 nt, Artificial Sequence
  Chemically synthesized
uauuuggucagugggaugcauaa

SEQ ID NO: 46502 - RNA, 23 nt, Artificial Sequence
  Chemically synthesized
cagggcuccugagaucaugcuga

SEQ ID NO: 46503 - RNA, 23 nt, Artificial Sequence
  Chemically synthesized
gugaaugaagacugugagcugaa

SEQ ID NO: 46504 - RNA, 23 nt, Artificial Sequence
  Chemically synthesized
ugugaaugaagacugugagcuga

SEQ ID NO: 46505 - RNA, 23 nt, Artificial Sequence
  Chemically synthesized
acaagacaaucugggaggugccc

SEQ ID NO: 46506 - RNA, 23 nt, Artificial Sequence
  Chemically synthesized
aacaagacaaucugggaggugcc

SEQ ID NO: 46507 - RNA, 23 nt, Artificial Sequence
  Chemically synthesized
gaacaagacaaucugggaggugc

SEQ ID NO: 46508 - RNA, 23 nt, Artificial Sequence
  Chemically synthesized
ugaacaagacaaucugggaggug

SEQ ID NO: 46509 - RNA, 23 nt, Artificial Sequence
  Chemically synthesized
cugaacaagacaaucugggaggu

SEQ ID NO: 46510 - RNA, 23 nt, Artificial Sequence
  Chemically synthesized
agcugaacaagacaaucugggag

SEQ ID NO: 46511 - RNA, 23 nt, Artificial Sequence
  Chemically synthesized
gcucuccagaccauuucagucca

SEQ ID NO: 46512 - RNA, 23 nt, Artificial Sequence
  Chemically synthesized
agcucuccagaccauuucagucc

SEQ ID NO: 46513 - RNA, 23 nt, Artificial Sequence
  Chemically synthesized
aagcucuccagaccauuucaguc

SEQ ID NO: 46514 - RNA, 23 nt, Artificial Sequence
  Chemically synthesized
gaagcucuccagaccauuucagu

SEQ ID NO: 46515 - RNA, 23 nt, Artificial Sequence
  Chemically synthesized
agaagcucuccagaccauuucag

SEQ ID NO: 46516 - RNA, 23 nt, Artificial Sequence
  Chemically synthesized
accagacaguugauauuugguca

SEQ ID NO: 46517 - RNA, 23 nt, Artificial Sequence
  Chemically synthesized
aaccagacaguugauauuugguc

SEQ ID NO: 46518 - RNA, 23 nt, Artificial Sequence
  Chemically synthesized
caaccagacaguugauauuuggu

SEQ ID NO: 46519 - RNA, 23 nt, Artificial Sequence
  Chemically synthesized
acaaccagacaguugauauuugg

SEQ ID NO: 46520 - RNA, 23 nt, Artificial Sequence
  Chemically synthesized
uacaaccagacaguugauauuug

SEQ ID NO: 46521 - RNA, 23 nt, Artificial Sequence
  Chemically synthesized
aaucuagcugugaaugaagacug

SEQ ID NO: 46522 - RNA, 23 nt, Artificial Sequence
  Chemically synthesized
ccuaguaaucuagcugugaauga

SEQ ID NO: 46523 - RNA, 23 nt, Artificial Sequence
  Chemically synthesized
accuaguaaucuagcugugaaug

SEQ ID NO: 46524 - RNA, 23 nt, Artificial Sequence
  Chemically synthesized
aaccuaguaaucuagcugugaau

SEQ ID NO: 46525 - RNA, 23 nt, Artificial Sequence
  Chemically synthesized
aauucuccgaggucuaaaguaua

SEQ ID NO: 46526 - RNA, 23 nt, Artificial Sequence
  Chemically synthesized
aaauucuccgaggucuaaaguau

SEQ ID NO: 46527 - RNA, 23 nt, Artificial Sequence
  Chemically synthesized
ccauguucaguuccuuaucuacc

SEQ ID NO: 46528 - RNA, 23 nt, Artificial Sequence
  Chemically synthesized
gcugaacaagacaaucugggagg

SEQ ID NO: 46529 - RNA, 23 nt, Artificial Sequence
  Chemically synthesized
auucaugcgaaaagaaccuacag

SEQ ID NO: 46530 - RNA, 23 nt, Artificial Sequence
  Chemically synthesized
cauucaugcgaaaagaaccuaca

SEQ ID NO: 46531 - RNA, 23 nt, Artificial Sequence
  Chemically synthesized
ucauucaugcgaaaagaaccuac

SEQ ID NO: 46532 - RNA, 23 nt, Artificial Sequence
  Chemically synthesized
caguugauauuuggucaguggga

SEQ ID NO: 46533 - RNA, 23 nt, Artificial Sequence
  Chemically synthesized
acaguugauauuuggucaguggg

SEQ ID NO: 46534 - RNA, 23 nt, Artificial Sequence
  Chemically synthesized
gacaguugauauuuggucagugg

SEQ ID NO: 46535 - RNA, 23 nt, Artificial Sequence
  Chemically synthesized
agacaguugauauuuggucagug

SEQ ID NO: 46536 - RNA, 23 nt, Artificial Sequence
  Chemically synthesized
cagacaguugauauuuggucagu

SEQ ID NO: 46537 - RNA, 23 nt, Artificial Sequence
  Chemically synthesized
ccagacaguugauauuuggucag

SEQ ID NO: 46538 - RNA, 23 nt, Artificial Sequence
  Chemically synthesized
uauggcucugugugugcugcuuu

SEQ ID NO: 46539 - RNA, 23 nt, Artificial Sequence
  Chemically synthesized
uucagcugacauaauucacaggg

SEQ ID NO: 46540 - RNA, 23 nt, Artificial Sequence
  Chemically synthesized
auucagcugacauaauucacagg

SEQ ID NO: 46541 - RNA, 23 nt, Artificial Sequence
  Chemically synthesized
cauucagcugacauaauucacag

SEQ ID NO: 46542 - RNA, 23 nt, Artificial Sequence
  Chemically synthesized
cauguucaguuccuuaucuacca

SEQ ID NO: 46543 - RNA, 23 nt, Artificial Sequence
  Chemically synthesized
cuggaagaacauuguuuccuggu

SEQ ID NO: 46544 - RNA, 23 nt, Artificial Sequence
  Chemically synthesized
acuggaagaacauuguuuccugg

SEQ ID NO: 46545 - RNA, 23 nt, Artificial Sequence
  Chemically synthesized
cacagggaccuaaaaccuaguaa

SEQ ID NO: 46546 - RNA, 23 nt, Artificial Sequence
  Chemically synthesized
ucacagggaccuaaaaccuagua

SEQ ID NO: 46547 - RNA, 23 nt, Artificial Sequence
  Chemically synthesized
gauauuuggucagugggaugcau

SEQ ID NO: 46548 - RNA, 23 nt, Artificial Sequence
  Chemically synthesized
ugauauuuggucagugggaugca

SEQ ID NO: 46549 - RNA, 23 nt, Artificial Sequence
  Chemically synthesized
uugauauuuggucagugggaugc

SEQ ID NO: 46550 - RNA, 23 nt, Artificial Sequence
  Chemically synthesized
guugauauuuggucagugggaug

SEQ ID NO: 46551 - RNA, 23 nt, Artificial Sequence
  Chemically synthesized
aguugauauuuggucagugggau

SEQ ID NO: 46552 - RNA, 23 nt, Artificial Sequence
  Chemically synthesized
ucaaugauguguaucuggugacc

SEQ ID NO: 46553 - RNA, 23 nt, Artificial Sequence
  Chemically synthesized
uucaaugauguguaucuggugac

SEQ ID NO: 46554 - RNA, 23 nt, Artificial Sequence
  Chemically synthesized
auucaaugauguguaucugguga

SEQ ID NO: 46555 - RNA, 23 nt, Artificial Sequence
  Chemically synthesized
aauucaaugauguguaucuggug

SEQ ID NO: 46556 - RNA, 23 nt, Artificial Sequence
  Chemically synthesized
gaauucaaugauguguaucuggu

SEQ ID NO: 46557 - RNA, 23 nt, Artificial Sequence
  Chemically synthesized
uucaguccaucauucaugcgaaa

SEQ ID NO: 46558 - RNA, 23 nt, Artificial Sequence
  Chemically synthesized
ccuacagagaacugcgguuacuu

SEQ ID NO: 46559 - RNA, 23 nt, Artificial Sequence
  Chemically synthesized
accuacagagaacugcgguuacu

SEQ ID NO: 46560 - RNA, 23 nt, Artificial Sequence
  Chemically synthesized
aaccuacagagaacugcgguuac

SEQ ID NO: 46561 - RNA, 23 nt, Artificial Sequence
  Chemically synthesized
gaaccuacagagaacugcgguua

SEQ ID NO: 46562 - RNA, 23 nt, Artificial Sequence
  Chemically synthesized
uccugguacagaccauauuaacc

SEQ ID NO: 46563 - RNA, 23 nt, Artificial Sequence
  Chemically synthesized
uuccugguacagaccauauuaac

SEQ ID NO: 46564 - RNA, 23 nt, Artificial Sequence
  Chemically synthesized
uuuccugguacagaccauauuaa

SEQ ID NO: 46565 - RNA, 23 nt, Artificial Sequence
  Chemically synthesized
guuuccugguacagaccauauua

SEQ ID NO: 46566 - RNA, 23 nt, Artificial Sequence
  Chemically synthesized
uguuuccugguacagaccauauu

SEQ ID NO: 46567 - RNA, 23 nt, Artificial Sequence
  Chemically synthesized
ugcugcuuuugacacaaaaacgg

SEQ ID NO: 46568 - RNA, 23 nt, Artificial Sequence
  Chemically synthesized
gugcugcuuuugacacaaaaacg

SEQ ID NO: 46569 - RNA, 23 nt, Artificial Sequence
  Chemically synthesized
ugugcugcuuuugacacaaaaac

SEQ ID NO: 46570 - RNA, 23 nt, Artificial Sequence
  Chemically synthesized
gugugcugcuuuugacacaaaaa

SEQ ID NO: 46571 - RNA, 23 nt, Artificial Sequence
  Chemically synthesized
ugugugcugcuuuugacacaaaa

SEQ ID NO: 46572 - RNA, 23 nt, Artificial Sequence
  Chemically synthesized
accggcaggagcugaacaagaca

SEQ ID NO: 46573 - RNA, 23 nt, Artificial Sequence
  Chemically synthesized
guguggcagugaagaagcucucc

SEQ ID NO: 46574 - RNA, 23 nt, Artificial Sequence
  Chemically synthesized
cguguggcagugaagaagcucuc

SEQ ID NO: 46575 - RNA, 23 nt, Artificial Sequence
  Chemically synthesized
acguguggcagugaagaagcucu

SEQ ID NO: 46576 - RNA, 23 nt, Artificial Sequence
  Chemically synthesized
uacguguggcagugaagaagcuc

SEQ ID NO: 46577 - RNA, 23 nt, Artificial Sequence
  Chemically synthesized
uuacguguggcagugaagaagcu

SEQ ID NO: 46578 - RNA, 23 nt, Artificial Sequence
  Chemically synthesized
uuucaguccaucauucaugcgaa

SEQ ID NO: 46579 - RNA, 23 nt, Artificial Sequence
  Chemically synthesized
cuggaugcauuacaaccagacag

SEQ ID NO: 46580 - RNA, 23 nt, Artificial Sequence
  Chemically synthesized
acuggaugcauuacaaccagaca

SEQ ID NO: 46581 - RNA, 23 nt, Artificial Sequence
  Chemically synthesized
aacuggaugcauuacaaccagac

SEQ ID NO: 46582 - RNA, 23 nt, Artificial Sequence
  Chemically synthesized
aaaccuaguaaucuagcugugaa

SEQ ID NO: 46583 - RNA, 23 nt, Artificial Sequence
  Chemically synthesized
aaaaccuaguaaucuagcuguga

SEQ ID NO: 46584 - RNA, 23 nt, Artificial Sequence
  Chemically synthesized
uaaaaccuaguaaucuagcugug

SEQ ID NO: 46585 - RNA, 23 nt, Artificial Sequence
  Chemically synthesized
cuaaaaccuaguaaucuagcugu

SEQ ID NO: 46586 - RNA, 23 nt, Artificial Sequence
  Chemically synthesized
aucuaccaaauucuccgaggucu

SEQ ID NO: 46587 - RNA, 23 nt, Artificial Sequence
  Chemically synthesized
uaucuaccaaauucuccgagguc

SEQ ID NO: 46588 - RNA, 23 nt, Artificial Sequence
  Chemically synthesized
uuaucuaccaaauucuccgaggu

SEQ ID NO: 46589 - RNA, 23 nt, Artificial Sequence
  Chemically synthesized
gaacaacauugugaaaugucaga

SEQ ID NO: 46590 - RNA, 23 nt, Artificial Sequence
  Chemically synthesized
gugugugcugcuuuugacacaaa

SEQ ID NO: 46591 - RNA, 23 nt, Artificial Sequence
  Chemically synthesized
ugggaugcauaauggccgagcug

SEQ ID NO: 46592 - RNA, 23 nt, Artificial Sequence
  Chemically synthesized
gugggaugcauaauggccgagcu

SEQ ID NO: 46593 - RNA, 23 nt, Artificial Sequence
  Chemically synthesized
agugggaugcauaauggccgagc

SEQ ID NO: 46594 - RNA, 23 nt, Artificial Sequence
  Chemically synthesized
cagugggaugcauaauggccgag

SEQ ID NO: 46595 - RNA, 23 nt, Artificial Sequence
  Chemically synthesized
ucagugggaugcauaauggccga

SEQ ID NO: 46596 - RNA, 23 nt, Artificial Sequence
  Chemically synthesized
gcauuacaaccagacaguugaua

SEQ ID NO: 46597 - RNA, 23 nt, Artificial Sequence
  Chemically synthesized
uucacagggaccuaaaaccuagu

SEQ ID NO: 46598 - RNA, 23 nt, Artificial Sequence
  Chemically synthesized
auuucaguccaucauucaugcga

SEQ ID NO: 46599 - RNA, 23 nt, Artificial Sequence
  Chemically synthesized
gcuggaaaaugucucaggagagg

SEQ ID NO: 46600 - RNA, 23 nt, Artificial Sequence
  Chemically synthesized
cgcuggaaaaugucucaggagag

SEQ ID NO: 46601 - RNA, 23 nt, Artificial Sequence
  Chemically synthesized
ccgcuggaaaaugucucaggaga

SEQ ID NO: 46602 - RNA, 23 nt, Artificial Sequence
  Chemically synthesized
auucacagggaccuaaaaccuag

SEQ ID NO: 46603 - RNA, 23 nt, Artificial Sequence
  Chemically synthesized
gcguuaccagaaccugucuccag

SEQ ID NO: 46604 - RNA, 23 nt, Artificial Sequence
  Chemically synthesized
agcguuaccagaaccugucucca

SEQ ID NO: 46605 - RNA, 23 nt, Artificial Sequence
  Chemically synthesized
gagcguuaccagaaccugucucc

SEQ ID NO: 46606 - RNA, 23 nt, Artificial Sequence
  Chemically synthesized
cgagcguuaccagaaccugucuc

SEQ ID NO: 46607 - RNA, 23 nt, Artificial Sequence
  Chemically synthesized
ccgagcguuaccagaaccugucu

SEQ ID NO: 46608 - RNA, 23 nt, Artificial Sequence
  Chemically synthesized
cccgagcguuaccagaaccuguc

SEQ ID NO: 46609 - RNA, 23 nt, Artificial Sequence
  Chemically synthesized
aacauugugaaaugucagaagcu

SEQ ID NO: 46610 - RNA, 23 nt, Artificial Sequence
  Chemically synthesized
caacauugugaaaugucagaagc

SEQ ID NO: 46611 - RNA, 23 nt, Artificial Sequence
  Chemically synthesized
acaacauugugaaaugucagaag

SEQ ID NO: 46612 - RNA, 23 nt, Artificial Sequence
  Chemically synthesized
aacaacauugugaaaugucagaa

SEQ ID NO: 46613 - RNA, 23 nt, Artificial Sequence
  Chemically synthesized
gacguuuuuacaccugcaagguc

SEQ ID NO: 46614 - RNA, 23 nt, Artificial Sequence
  Chemically synthesized
ggacguuuuuacaccugcaaggu

SEQ ID NO: 46615 - RNA, 23 nt, Artificial Sequence
  Chemically synthesized
uggacguuuuuacaccugcaagg

SEQ ID NO: 46616 - RNA, 23 nt, Artificial Sequence
  Chemically synthesized
uuggacguuuuuacaccugcaag

SEQ ID NO: 46617 - RNA, 23 nt, Artificial Sequence
  Chemically synthesized
guuggacguuuuuacaccugcaa

SEQ ID NO: 46618 - RNA, 23 nt, Artificial Sequence
  Chemically synthesized
uguuggacguuuuuacaccugca

SEQ ID NO: 46619 - RNA, 23 nt, Artificial Sequence
  Chemically synthesized
uuggucuguuggacguuuuuaca

SEQ ID NO: 46620 - RNA, 23 nt, Artificial Sequence
  Chemically synthesized
auuggucuguuggacguuuuuac

SEQ ID NO: 46621 - RNA, 23 nt, Artificial Sequence
  Chemically synthesized
gauuggucuguuggacguuuuua

SEQ ID NO: 46622 - RNA, 23 nt, Artificial Sequence
  Chemically synthesized
ugauuggucuguuggacguuuuu

SEQ ID NO: 46623 - RNA, 23 nt, Artificial Sequence
  Chemically synthesized
gugauuggucuguuggacguuuu

SEQ ID NO: 46624 - RNA, 23 nt, Artificial Sequence
  Chemically synthesized
ggaaaaugucucaggagaggccc

SEQ ID NO: 46625 - RNA, 23 nt, Artificial Sequence
  Chemically synthesized
uggaaaaugucucaggagaggcc

SEQ ID NO: 46626 - RNA, 23 nt, Artificial Sequence
  Chemically synthesized
cuggaaaaugucucaggagaggc

SEQ ID NO: 46627 - RNA, 23 nt, Artificial Sequence
  Chemically synthesized
cugcuuuugacacaaaaacgggg

SEQ ID NO: 46628 - RNA, 23 nt, Artificial Sequence
  Chemically synthesized
gcugcuuuugacacaaaaacggg

SEQ ID NO: 46629 - RNA, 23 nt, Artificial Sequence
  Chemically synthesized
ucaugcugaacuggaugcauuac

SEQ ID NO: 46630 - RNA, 23 nt, Artificial Sequence
  Chemically synthesized
aucaugcugaacuggaugcauua

SEQ ID NO: 46631 - RNA, 23 nt, Artificial Sequence
  Chemically synthesized
auaauucacagggaccuaaaacc

SEQ ID NO: 46632 - RNA, 23 nt, Artificial Sequence
  Chemically synthesized
cauaauucacagggaccuaaaac

SEQ ID NO: 46633 - RNA, 23 nt, Artificial Sequence
  Chemically synthesized
cguuaccagaaccugucuccagu

SEQ ID NO: 46634 - RNA, 23 nt, Artificial Sequence
  Chemically synthesized
uggucuguuggacguuuuuacac

SEQ ID NO: 46635 - RNA, 23 nt, Artificial Sequence
  Chemically synthesized
ugugauuggucuguuggacguuu

SEQ ID NO: 46636 - RNA, 23 nt, Artificial Sequence
  Chemically synthesized
augugauuggucuguuggacguu

SEQ ID NO: 46637 - RNA, 23 nt, Artificial Sequence
  Chemically synthesized
aaugugauuggucuguuggacgu

SEQ ID NO: 46638 - RNA, 23 nt, Artificial Sequence
  Chemically synthesized
agaaccuacagagaacugcgguu

SEQ ID NO: 46639 - RNA, 23 nt, Artificial Sequence
  Chemically synthesized
aagaagcucuccagaccauuuca

SEQ ID NO: 46640 - RNA, 23 nt, Artificial Sequence
  Chemically synthesized
gaagaagcucuccagaccauuuc

SEQ ID NO: 46641 - RNA, 23 nt, Artificial Sequence
  Chemically synthesized
ugaagaagcucuccagaccauuu

SEQ ID NO: 46642 - RNA, 23 nt, Artificial Sequence
  Chemically synthesized
uuacaaccagacaguugauauuu

SEQ ID NO: 46643 - RNA, 23 nt, Artificial Sequence
  Chemically synthesized
auuacaaccagacaguugauauu

SEQ ID NO: 46644 - RNA, 23 nt, Artificial Sequence
  Chemically synthesized
gaacuggaugcauuacaaccaga

SEQ ID NO: 46645 - RNA, 23 nt, Artificial Sequence
  Chemically synthesized
gaucaugcugaacuggaugcauu

SEQ ID NO: 46646 - RNA, 23 nt, Artificial Sequence
  Chemically synthesized
gugaagaagcucuccagaccauu

SEQ ID NO: 46647 - RNA, 23 nt, Artificial Sequence
  Chemically synthesized
agugaagaagcucuccagaccau

SEQ ID NO: 46648 - RNA, 23 nt, Artificial Sequence
  Chemically synthesized
gcagugaagaagcucuccagacc

SEQ ID NO: 46649 - RNA, 23 nt, Artificial Sequence
  Chemically synthesized
ggcagugaagaagcucuccagac

SEQ ID NO: 46650 - RNA, 23 nt, Artificial Sequence
  Chemically synthesized
uggcagugaagaagcucuccaga

SEQ ID NO: 46651 - RNA, 23 nt, Artificial Sequence
  Chemically synthesized
guggcagugaagaagcucuccag

SEQ ID NO: 46652 - RNA, 23 nt, Artificial Sequence
  Chemically synthesized
uguggcagugaagaagcucucca

SEQ ID NO: 46653 - RNA, 23 nt, Artificial Sequence
  Chemically synthesized
acagggcuccugagaucaugcug

SEQ ID NO: 46654 - RNA, 23 nt, Artificial Sequence
  Chemically synthesized
uacagggcuccugagaucaugcu

SEQ ID NO: 46655 - RNA, 23 nt, Artificial Sequence
  Chemically synthesized
guacagggcuccugagaucaugc

SEQ ID NO: 46656 - RNA, 23 nt, Artificial Sequence
  Chemically synthesized
gguacagggcuccugagaucaug

SEQ ID NO: 46657 - RNA, 23 nt, Artificial Sequence
  Chemically synthesized
ugguacagggcuccugagaucau

SEQ ID NO: 46658 - RNA, 23 nt, Artificial Sequence
  Chemically synthesized
ugugugugcugcuuuugacacaa

SEQ ID NO: 46659 - RNA, 23 nt, Artificial Sequence
  Chemically synthesized
ggucuguuggacguuuuuacacc

SEQ ID NO: 46660 - RNA, 23 nt, Artificial Sequence
  Chemically synthesized
cugugugugcugcuuuugacaca

SEQ ID NO: 46661 - RNA, 23 nt, Artificial Sequence
  Chemically synthesized
cauuacaaccagacaguugauau

SEQ ID NO: 46662 - RNA, 23 nt, Artificial Sequence
  Chemically synthesized
gucuguuggacguuuuuacaccu

SEQ ID NO: 46663 - RNA, 23 nt, Artificial Sequence
  Chemically synthesized
uuguuuccugguacagaccauau

SEQ ID NO: 46664 - RNA, 23 nt, Artificial Sequence
  Chemically synthesized
auuguuuccugguacagaccaua

SEQ ID NO: 46665 - RNA, 23 nt, Artificial Sequence
  Chemically synthesized
cauuguuuccugguacagaccau

SEQ ID NO: 46666 - RNA, 23 nt, Artificial Sequence
  Chemically synthesized
cagugaagaagcucuccagacca

SEQ ID NO: 46667 - RNA, 23 nt, Artificial Sequence
  Chemically synthesized
accagaaccugucuccagugggc

SEQ ID NO: 46668 - RNA, 23 nt, Artificial Sequence
  Chemically synthesized
uaccagaaccugucuccaguggg

SEQ ID NO: 46669 - RNA, 23 nt, Artificial Sequence
  Chemically synthesized
uuaccagaaccugucuccagugg

SEQ ID NO: 46670 - RNA, 23 nt, Artificial Sequence
  Chemically synthesized
guuaccagaaccugucuccagug

SEQ ID NO: 46671 - RNA, 23 nt, Artificial Sequence
  Chemically synthesized
ccuuaucuaccaaauucuccgag

SEQ ID NO: 46672 - RNA, 23 nt, Artificial Sequence
  Chemically synthesized
gaaaugucagaagcuuacagaug

SEQ ID NO: 46673 - RNA, 23 nt, Artificial Sequence
  Chemically synthesized
gaaaaugucucaggagaggccca

SEQ ID NO: 46674 - RNA, 23 nt, Artificial Sequence
  Chemically synthesized
uguguaucuggugacccaucuca

SEQ ID NO: 46675 - RNA, 23 nt, Artificial Sequence
  Chemically synthesized
cuauggcucugugugugcugcuu

SEQ ID NO: 46676 - RNA, 23 nt, Artificial Sequence
  Chemically synthesized
gucuaaaguauauacauucagcu

SEQ ID NO: 46677 - RNA, 23 nt, Artificial Sequence
  Chemically synthesized
cuaaaguauauacauucagcuga

SEQ ID NO: 46678 - RNA, 23 nt, Artificial Sequence
  Chemically synthesized
aggucuaaaguauauacauucag

SEQ ID NO: 46679 - RNA, 23 nt, Artificial Sequence
  Chemically synthesized
ggucuaaaguauauacauucagc

SEQ ID NO: 46680 - RNA, 23 nt, Artificial Sequence
  Chemically synthesized
guguaucuggugacccaucucau

SEQ ID NO: 46681 - RNA, 23 nt, Artificial Sequence
  Chemically synthesized
ugauguguaucuggugacccauc

SEQ ID NO: 46682 - RNA, 23 nt, Artificial Sequence
  Chemically synthesized
acauuguuuccugguacagacca

SEQ ID NO: 46683 - RNA, 23 nt, Artificial Sequence
  Chemically synthesized
cuagauuacuagguuuuaggucc

SEQ ID NO: 46684 - RNA, 23 nt, Artificial Sequence
  Chemically synthesized
uagauuacuagguuuuagguccc

SEQ ID NO: 46685 - RNA, 23 nt, Artificial Sequence
  Chemically synthesized
agauuacuagguuuuaggucccu

SEQ ID NO: 46686 - RNA, 23 nt, Artificial Sequence
  Chemically synthesized
gauuacuagguuuuaggucccug

SEQ ID NO: 46687 - RNA, 23 nt, Artificial Sequence
  Chemically synthesized
auuacuagguuuuaggucccugu

SEQ ID NO: 46688 - RNA, 23 nt, Artificial Sequence
  Chemically synthesized
ccagauacacaucauugaauucc

SEQ ID NO: 46689 - RNA, 23 nt, Artificial Sequence
  Chemically synthesized
cagauacacaucauugaauuccu

SEQ ID NO: 46690 - RNA, 23 nt, Artificial Sequence
  Chemically synthesized
agauacacaucauugaauuccuc

SEQ ID NO: 46691 - RNA, 23 nt, Artificial Sequence
  Chemically synthesized
gauacacaucauugaauuccucc

SEQ ID NO: 46692 - RNA, 23 nt, Artificial Sequence
  Chemically synthesized
auacacaucauugaauuccucca

SEQ ID NO: 46693 - RNA, 23 nt, Artificial Sequence
  Chemically synthesized
cagcuagauuacuagguuuuagg

SEQ ID NO: 46694 - RNA, 23 nt, Artificial Sequence
  Chemically synthesized
agcuagauuacuagguuuuaggu

SEQ ID NO: 46695 - RNA, 23 nt, Artificial Sequence
  Chemically synthesized
gcuagauuacuagguuuuagguc

SEQ ID NO: 46696 - RNA, 23 nt, Artificial Sequence
  Chemically synthesized
cacaauguuguucagaucugccc

SEQ ID NO: 46697 - RNA, 23 nt, Artificial Sequence
  Chemically synthesized
acaauguuguucagaucugcccc

SEQ ID NO: 46698 - RNA, 23 nt, Artificial Sequence
  Chemically synthesized
caauguuguucagaucugccccc

SEQ ID NO: 46699 - RNA, 23 nt, Artificial Sequence
  Chemically synthesized
aauguuguucagaucugccccca

SEQ ID NO: 46700 - RNA, 23 nt, Artificial Sequence
  Chemically synthesized
auguuguucagaucugcccccau

SEQ ID NO: 46701 - RNA, 23 nt, Artificial Sequence
  Chemically synthesized
gcaugaaugauggacugaaaugg

SEQ ID NO: 46702 - RNA, 23 nt, Artificial Sequence
  Chemically synthesized
caugaaugauggacugaaauggu

SEQ ID NO: 46703 - RNA, 23 nt, Artificial Sequence
  Chemically synthesized
augaaugauggacugaaaugguc

SEQ ID NO: 46704 - RNA, 23 nt, Artificial Sequence
  Chemically synthesized
ugaaugauggacugaaauggucu

SEQ ID NO: 46705 - RNA, 23 nt, Artificial Sequence
  Chemically synthesized
gaaugauggacugaaauggucug

SEQ ID NO: 46706 - RNA, 23 nt, Artificial Sequence
  Chemically synthesized
gguucuuuucgcaugaaugaugg

SEQ ID NO: 46707 - RNA, 23 nt, Artificial Sequence
  Chemically synthesized
guucuuuucgcaugaaugaugga

SEQ ID NO: 46708 - RNA, 23 nt, Artificial Sequence
  Chemically synthesized
uucuuuucgcaugaaugauggac

SEQ ID NO: 46709 - RNA, 23 nt, Artificial Sequence
  Chemically synthesized
ucuuuucgcaugaaugauggacu

SEQ ID NO: 46710 - RNA, 23 nt, Artificial Sequence
  Chemically synthesized
cuuuucgcaugaaugauggacug

SEQ ID NO: 46711 - RNA, 23 nt, Artificial Sequence
  Chemically synthesized
uacacaucauugaauuccuccag

SEQ ID NO: 46712 - RNA, 23 nt, Artificial Sequence
  Chemically synthesized
ucuguaccaggaaacaauguucu

SEQ ID NO: 46713 - RNA, 23 nt, Artificial Sequence
  Chemically synthesized
cuguaccaggaaacaauguucuu

SEQ ID NO: 46714 - RNA, 23 nt, Artificial Sequence
  Chemically synthesized
uguaccaggaaacaauguucuuc

SEQ ID NO: 46715 - RNA, 23 nt, Artificial Sequence
  Chemically synthesized
guaccaggaaacaauguucuucc

SEQ ID NO: 46716 - RNA, 23 nt, Artificial Sequence
  Chemically synthesized
uaccaggaaacaauguucuucca

SEQ ID NO: 46717 - RNA, 23 nt, Artificial Sequence
  Chemically synthesized
ugucauuucaucaucugugugcc

SEQ ID NO: 46718 - RNA, 23 nt, Artificial Sequence
  Chemically synthesized
gucauuucaucaucugugugccg

SEQ ID NO: 46719 - RNA, 23 nt, Artificial Sequence
  Chemically synthesized
ucauuucaucaucugugugccga

SEQ ID NO: 46720 - RNA, 23 nt, Artificial Sequence
  Chemically synthesized
cauuucaucaucugugugccgag

SEQ ID NO: 46721 - RNA, 23 nt, Artificial Sequence
  Chemically synthesized
auuucaucaucugugugccgagc

SEQ ID NO: 46722 - RNA, 23 nt, Artificial Sequence
  Chemically synthesized
guccaaaauccagaaucuucagc

SEQ ID NO: 46723 - RNA, 23 nt, Artificial Sequence
  Chemically synthesized
uccaaaauccagaaucuucagcu

SEQ ID NO: 46724 - RNA, 23 nt, Artificial Sequence
  Chemically synthesized
ccaaaauccagaaucuucagcuc

SEQ ID NO: 46725 - RNA, 23 nt, Artificial Sequence
  Chemically synthesized
caaaauccagaaucuucagcuca

SEQ ID NO: 46726 - RNA, 23 nt, Artificial Sequence
  Chemically synthesized
aaaauccagaaucuucagcucac

SEQ ID NO: 46727 - RNA, 23 nt, Artificial Sequence
  Chemically synthesized
uucacaauguuguucagaucugc

SEQ ID NO: 46728 - RNA, 23 nt, Artificial Sequence
  Chemically synthesized
ucacaauguuguucagaucugcc

SEQ ID NO: 46729 - RNA, 23 nt, Artificial Sequence
  Chemically synthesized
caggaaacaauguucuuccaguc

SEQ ID NO: 46730 - RNA, 23 nt, Artificial Sequence
  Chemically synthesized
aggaaacaauguucuuccaguca

SEQ ID NO: 46731 - RNA, 23 nt, Artificial Sequence
  Chemically synthesized
ggaaacaauguucuuccagucaa

SEQ ID NO: 46732 - RNA, 23 nt, Artificial Sequence
  Chemically synthesized
gaaacaauguucuuccagucaac

SEQ ID NO: 46733 - RNA, 23 nt, Artificial Sequence
  Chemically synthesized
aaacaauguucuuccagucaaca

SEQ ID NO: 46734 - RNA, 23 nt, Artificial Sequence
  Chemically synthesized
cugguuguaaugcauccaguuca

SEQ ID NO: 46735 - RNA, 23 nt, Artificial Sequence
  Chemically synthesized
ugguuguaaugcauccaguucag

SEQ ID NO: 46736 - RNA, 23 nt, Artificial Sequence
  Chemically synthesized
gguuguaaugcauccaguucagc

SEQ ID NO: 46737 - RNA, 23 nt, Artificial Sequence
  Chemically synthesized
guuguaaugcauccaguucagca

SEQ ID NO: 46738 - RNA, 23 nt, Artificial Sequence
  Chemically synthesized
uuguaaugcauccaguucagcau

SEQ ID NO: 46739 - RNA, 23 nt, Artificial Sequence
  Chemically synthesized
cugucauuucaucaucugugugc

SEQ ID NO: 46740 - RNA, 23 nt, Artificial Sequence
  Chemically synthesized
aaauccagaaucuucagcucaca

SEQ ID NO: 46741 - RNA, 23 nt, Artificial Sequence
  Chemically synthesized
acuuuagaccucggagaauuugg

SEQ ID NO: 46742 - RNA, 23 nt, Artificial Sequence
  Chemically synthesized
cuuuagaccucggagaauuuggu

SEQ ID NO: 46743 - RNA, 23 nt, Artificial Sequence
  Chemically synthesized
uuuagaccucggagaauuuggua

SEQ ID NO: 46744 - RNA, 23 nt, Artificial Sequence
  Chemically synthesized
uuagaccucggagaauuugguag

SEQ ID NO: 46745 - RNA, 23 nt, Artificial Sequence
  Chemically synthesized
uagaccucggagaauuugguaga

SEQ ID NO: 46746 - RNA, 23 nt, Artificial Sequence
  Chemically synthesized
ugacauuucacaauguuguucag

SEQ ID NO: 46747 - RNA, 23 nt, Artificial Sequence
  Chemically synthesized
gacauuucacaauguuguucaga

SEQ ID NO: 46748 - RNA, 23 nt, Artificial Sequence
  Chemically synthesized
acauuucacaauguuguucagau

SEQ ID NO: 46749 - RNA, 23 nt, Artificial Sequence
  Chemically synthesized
cauuucacaauguuguucagauc

SEQ ID NO: 46750 - RNA, 23 nt, Artificial Sequence
  Chemically synthesized
auuucacaauguuguucagaucu

SEQ ID NO: 46751 - RNA, 23 nt, Artificial Sequence
  Chemically synthesized
auugaauuccuccagagaccuug

SEQ ID NO: 46752 - RNA, 23 nt, Artificial Sequence
  Chemically synthesized
uugaauuccuccagagaccuugc

SEQ ID NO: 46753 - RNA, 23 nt, Artificial Sequence
  Chemically synthesized
ugaauuccuccagagaccuugca

SEQ ID NO: 46754 - RNA, 23 nt, Artificial Sequence
  Chemically synthesized
gaauuccuccagagaccuugcag

SEQ ID NO: 46755 - RNA, 23 nt, Artificial Sequence
  Chemically synthesized
aauuccuccagagaccuugcagg

SEQ ID NO: 46756 - RNA, 23 nt, Artificial Sequence
  Chemically synthesized
aaugauggacugaaauggucugg

SEQ ID NO: 46757 - RNA, 23 nt, Artificial Sequence
  Chemically synthesized
aauccagaaucuucagcucacag

SEQ ID NO: 46758 - RNA, 23 nt, Artificial Sequence
  Chemically synthesized
ucggagaauuugguagauaagga

SEQ ID NO: 46759 - RNA, 23 nt, Artificial Sequence
  Chemically synthesized
cggagaauuugguagauaaggaa

SEQ ID NO: 46760 - RNA, 23 nt, Artificial Sequence
  Chemically synthesized
ggagaauuugguagauaaggaac

SEQ ID NO: 46761 - RNA, 23 nt, Artificial Sequence
  Chemically synthesized
gagaauuugguagauaaggaacu

SEQ ID NO: 46762 - RNA, 23 nt, Artificial Sequence
  Chemically synthesized
agaauuugguagauaaggaacug

SEQ ID NO: 46763 - RNA, 23 nt, Artificial Sequence
  Chemically synthesized
cugacauuucacaauguuguuca

SEQ ID NO: 46764 - RNA, 23 nt, Artificial Sequence
  Chemically synthesized
guuucauauguuuaaguaaccgc

SEQ ID NO: 46765 - RNA, 23 nt, Artificial Sequence
  Chemically synthesized
uuucauauguuuaaguaaccgca

SEQ ID NO: 46766 - RNA, 23 nt, Artificial Sequence
  Chemically synthesized
uucauauguuuaaguaaccgcag

SEQ ID NO: 46767 - RNA, 23 nt, Artificial Sequence
  Chemically synthesized
ucauauguuuaaguaaccgcagu

SEQ ID NO: 46768 - RNA, 23 nt, Artificial Sequence
  Chemically synthesized
cauauguuuaaguaaccgcaguu

SEQ ID NO: 46769 - RNA, 23 nt, Artificial Sequence
  Chemically synthesized
acaauguucuuccagucaacagc

SEQ ID NO: 46770 - RNA, 23 nt, Artificial Sequence
  Chemically synthesized
caauguucuuccagucaacagcu

SEQ ID NO: 46771 - RNA, 23 nt, Artificial Sequence
  Chemically synthesized
aauguucuuccagucaacagcuc

SEQ ID NO: 46772 - RNA, 23 nt, Artificial Sequence
  Chemically synthesized
auguucuuccagucaacagcucg

SEQ ID NO: 46773 - RNA, 23 nt, Artificial Sequence
  Chemically synthesized
uguucuuccagucaacagcucgg

SEQ ID NO: 46774 - RNA, 23 nt, Artificial Sequence
  Chemically synthesized
ugugaauuaugucagcugaaugu

SEQ ID NO: 46775 - RNA, 23 nt, Artificial Sequence
  Chemically synthesized
gugaauuaugucagcugaaugua

SEQ ID NO: 46776 - RNA, 23 nt, Artificial Sequence
  Chemically synthesized
ugaauuaugucagcugaauguau

SEQ ID NO: 46777 - RNA, 23 nt, Artificial Sequence
  Chemically synthesized
gaauuaugucagcugaauguaua

SEQ ID NO: 46778 - RNA, 23 nt, Artificial Sequence
  Chemically synthesized
aauuaugucagcugaauguauau

SEQ ID NO: 46779 - RNA, 23 nt, Artificial Sequence
  Chemically synthesized
gaauguauauacuuuagaccucg

SEQ ID NO: 46780 - RNA, 23 nt, Artificial Sequence
  Chemically synthesized
aauguauauacuuuagaccucgg

SEQ ID NO: 46781 - RNA, 23 nt, Artificial Sequence
  Chemically synthesized
auguauauacuuuagaccucgga

SEQ ID NO: 46782 - RNA, 23 nt, Artificial Sequence
  Chemically synthesized
uguauauacuuuagaccucggag

SEQ ID NO: 46783 - RNA, 23 nt, Artificial Sequence
  Chemically synthesized
guauauacuuuagaccucggaga

SEQ ID NO: 46784 - RNA, 23 nt, Artificial Sequence
  Chemically synthesized
uauauacuuuagaccucggagaa

SEQ ID NO: 46785 - RNA, 23 nt, Artificial Sequence
  Chemically synthesized
gaauuugguagauaaggaacuga

SEQ ID NO: 46786 - RNA, 23 nt, Artificial Sequence
  Chemically synthesized
aauuugguagauaaggaacugaa

SEQ ID NO: 46787 - RNA, 23 nt, Artificial Sequence
  Chemically synthesized
auuugguagauaaggaacugaac

SEQ ID NO: 46788 - RNA, 23 nt, Artificial Sequence
  Chemically synthesized
uuugguagauaaggaacugaaca

SEQ ID NO: 46789 - RNA, 23 nt, Artificial Sequence
  Chemically synthesized
uugguagauaaggaacugaacau

SEQ ID NO: 46790 - RNA, 23 nt, Artificial Sequence
  Chemically synthesized
aucauugaauuccuccagagacc

SEQ ID NO: 46791 - RNA, 23 nt, Artificial Sequence
  Chemically synthesized
ucauugaauuccuccagagaccu

SEQ ID NO: 46792 - RNA, 23 nt, Artificial Sequence
  Chemically synthesized
cauugaauuccuccagagaccuu

SEQ ID NO: 46793 - RNA, 23 nt, Artificial Sequence
  Chemically synthesized
auuccuccagagaccuugcaggu

SEQ ID NO: 46794 - RNA, 23 nt, Artificial Sequence
  Chemically synthesized
uguuucauauguuuaaguaaccg

SEQ ID NO: 46795 - RNA, 23 nt, Artificial Sequence
  Chemically synthesized
auauguuuaaguaaccgcaguuc

SEQ ID NO: 46796 - RNA, 23 nt, Artificial Sequence
  Chemically synthesized
gucuguaccaggaaacaauguuc

SEQ ID NO: 46797 - RNA, 23 nt, Artificial Sequence
  Chemically synthesized
aacaauguucuuccagucaacag

SEQ ID NO: 46798 - RNA, 23 nt, Artificial Sequence
  Chemically synthesized
guucuuccagucaacagcucggc

SEQ ID NO: 46799 - RNA, 23 nt, Artificial Sequence
  Chemically synthesized
uucuuccagucaacagcucggcc

SEQ ID NO: 46800 - RNA, 23 nt, Artificial Sequence
  Chemically synthesized
ccaguucagcaugaucucaggag

SEQ ID NO: 46801 - RNA, 23 nt, Artificial Sequence
  Chemically synthesized
caguucagcaugaucucaggagc

SEQ ID NO: 46802 - RNA, 23 nt, Artificial Sequence
  Chemically synthesized
aguucagcaugaucucaggagcc

SEQ ID NO: 46803 - RNA, 23 nt, Artificial Sequence
  Chemically synthesized
guucagcaugaucucaggagccc

SEQ ID NO: 46804 - RNA, 23 nt, Artificial Sequence
  Chemically synthesized
uucagcaugaucucaggagcccu

SEQ ID NO: 46805 - RNA, 23 nt, Artificial Sequence
  Chemically synthesized
uuaugucagcugaauguauauac

SEQ ID NO: 46806 - RNA, 23 nt, Artificial Sequence
  Chemically synthesized
uaugucagcugaauguauauacu

SEQ ID NO: 46807 - RNA, 23 nt, Artificial Sequence
  Chemically synthesized
augucagcugaauguauauacuu

SEQ ID NO: 46808 - RNA, 23 nt, Artificial Sequence
  Chemically synthesized
ugucagcugaauguauauacuuu

SEQ ID NO: 46809 - RNA, 23 nt, Artificial Sequence
  Chemically synthesized
gucagcugaauguauauacuuua

SEQ ID NO: 46810 - RNA, 23 nt, Artificial Sequence
  Chemically synthesized
acugaacauggucaucuguaagc

SEQ ID NO: 46811 - RNA, 23 nt, Artificial Sequence
  Chemically synthesized
cugaacauggucaucuguaagcu

SEQ ID NO: 46812 - RNA, 23 nt, Artificial Sequence
  Chemically synthesized
ugaacauggucaucuguaagcuu

SEQ ID NO: 46813 - RNA, 23 nt, Artificial Sequence
  Chemically synthesized
gaacauggucaucuguaagcuuc

SEQ ID NO: 46814 - RNA, 23 nt, Artificial Sequence
  Chemically synthesized
aacauggucaucuguaagcuucu

SEQ ID NO: 46815 - RNA, 23 nt, Artificial Sequence
  Chemically synthesized
acauggucaucuguaagcuucug

SEQ ID NO: 46816 - RNA, 23 nt, Artificial Sequence
  Chemically synthesized
cauggucaucuguaagcuucuga

SEQ ID NO: 46817 - RNA, 23 nt, Artificial Sequence
  Chemically synthesized
auggucaucuguaagcuucugac

SEQ ID NO: 46818 - RNA, 23 nt, Artificial Sequence
  Chemically synthesized
uggucaucuguaagcuucugaca

SEQ ID NO: 46819 - RNA, 23 nt, Artificial Sequence
  Chemically synthesized
ggucaucuguaagcuucugacau

SEQ ID NO: 46820 - RNA, 23 nt, Artificial Sequence
  Chemically synthesized
gucaucuguaagcuucugacauu

SEQ ID NO: 46821 - RNA, 23 nt, Artificial Sequence
  Chemically synthesized
uuucacaauguuguucagaucug

SEQ ID NO: 46822 - RNA, 23 nt, Artificial Sequence
  Chemically synthesized
acacaucauugaauuccuccaga

SEQ ID NO: 46823 - RNA, 23 nt, Artificial Sequence
  Chemically synthesized
cacaucauugaauuccuccagag

SEQ ID NO: 46824 - RNA, 23 nt, Artificial Sequence
  Chemically synthesized
uuccuccagagaccuugcaggug

SEQ ID NO: 46825 - RNA, 23 nt, Artificial Sequence
  Chemically synthesized
aguucucuguagguucuuuucgc

SEQ ID NO: 46826 - RNA, 23 nt, Artificial Sequence
  Chemically synthesized
guucucuguagguucuuuucgca

SEQ ID NO: 46827 - RNA, 23 nt, Artificial Sequence
  Chemically synthesized
uucucuguagguucuuuucgcau

SEQ ID NO: 46828 - RNA, 23 nt, Artificial Sequence
  Chemically synthesized
ucucuguagguucuuuucgcaug

SEQ ID NO: 46829 - RNA, 23 nt, Artificial Sequence
  Chemically synthesized
cucuguagguucuuuucgcauga

SEQ ID NO: 46830 - RNA, 23 nt, Artificial Sequence
  Chemically synthesized
uuuucgcaugaaugauggacuga

SEQ ID NO: 46831 - RNA, 23 nt, Artificial Sequence
  Chemically synthesized
cuucuucacugccacacguaacc

SEQ ID NO: 46832 - RNA, 23 nt, Artificial Sequence
  Chemically synthesized
uucuucacugccacacguaaccc

SEQ ID NO: 46833 - RNA, 23 nt, Artificial Sequence
  Chemically synthesized
ucuucacugccacacguaacccc

SEQ ID NO: 46834 - RNA, 23 nt, Artificial Sequence
  Chemically synthesized
cuucacugccacacguaaccccg

SEQ ID NO: 46835 - RNA, 23 nt, Artificial Sequence
  Chemically synthesized
uucacugccacacguaaccccgu

SEQ ID NO: 46836 - RNA, 23 nt, Artificial Sequence
  Chemically synthesized
agucaacagcucggccauuaugc

SEQ ID NO: 46837 - RNA, 23 nt, Artificial Sequence
  Chemically synthesized
gucaacagcucggccauuaugca

SEQ ID NO: 46838 - RNA, 23 nt, Artificial Sequence
  Chemically synthesized
ucaacagcucggccauuaugcau

SEQ ID NO: 46839 - RNA, 23 nt, Artificial Sequence
  Chemically synthesized
caacagcucggccauuaugcauc

SEQ ID NO: 46840 - RNA, 23 nt, Artificial Sequence
  Chemically synthesized
aacagcucggccauuaugcaucc

SEQ ID NO: 46841 - RNA, 23 nt, Artificial Sequence
  Chemically synthesized
augcauccaguucagcaugaucu

SEQ ID NO: 46842 - RNA, 23 nt, Artificial Sequence
  Chemically synthesized
ugcauccaguucagcaugaucuc

SEQ ID NO: 46843 - RNA, 23 nt, Artificial Sequence
  Chemically synthesized
gcauccaguucagcaugaucuca

SEQ ID NO: 46844 - RNA, 23 nt, Artificial Sequence
  Chemically synthesized
cauccaguucagcaugaucucag

SEQ ID NO: 46845 - RNA, 23 nt, Artificial Sequence
  Chemically synthesized
auccaguucagcaugaucucagg

SEQ ID NO: 46846 - RNA, 23 nt, Artificial Sequence
  Chemically synthesized
uuucaucaucugugugccgagcc

SEQ ID NO: 46847 - RNA, 23 nt, Artificial Sequence
  Chemically synthesized
auauacuuuagaccucggagaau

SEQ ID NO: 46848 - RNA, 23 nt, Artificial Sequence
  Chemically synthesized
ucaucuguaagcuucugacauuu

SEQ ID NO: 46849 - RNA, 23 nt, Artificial Sequence
  Chemically synthesized
acaucauugaauuccuccagaga

SEQ ID NO: 46850 - RNA, 23 nt, Artificial Sequence
  Chemically synthesized
caucauugaauuccuccagagac

SEQ ID NO: 46851 - RNA, 23 nt, Artificial Sequence
  Chemically synthesized
ccagauugucuuguucagcuccu

SEQ ID NO: 46852 - RNA, 23 nt, Artificial Sequence
  Chemically synthesized
cagauugucuuguucagcuccug

SEQ ID NO: 46853 - RNA, 23 nt, Artificial Sequence
  Chemically synthesized
agauugucuuguucagcuccugc

SEQ ID NO: 46854 - RNA, 23 nt, Artificial Sequence
  Chemically synthesized
gauugucuuguucagcuccugcc

SEQ ID NO: 46855 - RNA, 23 nt, Artificial Sequence
  Chemically synthesized
auugucuuguucagcuccugccg

SEQ ID NO: 46856 - RNA, 23 nt, Artificial Sequence
  Chemically synthesized
uauguuuaaguaaccgcaguucu

SEQ ID NO: 46857 - RNA, 23 nt, Artificial Sequence
  Chemically synthesized
auguuuaaguaaccgcaguucuc

SEQ ID NO: 46858 - RNA, 23 nt, Artificial Sequence
  Chemically synthesized
uguuuaaguaaccgcaguucucu

SEQ ID NO: 46859 - RNA, 23 nt, Artificial Sequence
  Chemically synthesized
guuuaaguaaccgcaguucucug

SEQ ID NO: 46860 - RNA, 23 nt, Artificial Sequence
  Chemically synthesized
uuuaaguaaccgcaguucucugu

SEQ ID NO: 46861 - RNA, 23 nt, Artificial Sequence
  Chemically synthesized
caguucucuguagguucuuuucg

SEQ ID NO: 46862 - RNA, 23 nt, Artificial Sequence
  Chemically synthesized
uguaaugcauccaguucagcaug

SEQ ID NO: 46863 - RNA, 23 nt, Artificial Sequence
  Chemically synthesized
uccaguucagcaugaucucagga

SEQ ID NO: 46864 - RNA, 23 nt, Artificial Sequence
  Chemically synthesized
gccugucauuucaucaucugugu

SEQ ID NO: 46865 - RNA, 23 nt, Artificial Sequence
  Chemically synthesized
ccugucauuucaucaucugugug

SEQ ID NO: 46866 - RNA, 23 nt, Artificial Sequence
  Chemically synthesized
uucaucaucugugugccgagcca

SEQ ID NO: 46867 - RNA, 23 nt, Artificial Sequence
  Chemically synthesized
agccaguccaaaauccagaaucu

SEQ ID NO: 46868 - RNA, 23 nt, Artificial Sequence
  Chemically synthesized
gccaguccaaaauccagaaucuu

SEQ ID NO: 46869 - RNA, 23 nt, Artificial Sequence
  Chemically synthesized
ccaguccaaaauccagaaucuuc

SEQ ID NO: 46870 - RNA, 23 nt, Artificial Sequence
  Chemically synthesized
caguccaaaauccagaaucuuca

SEQ ID NO: 46871 - RNA, 23 nt, Artificial Sequence
  Chemically synthesized
aguccaaaauccagaaucuucag

SEQ ID NO: 46872 - RNA, 23 nt, Artificial Sequence
  Chemically synthesized
auccagaaucuucagcucacagu

SEQ ID NO: 46873 - RNA, 23 nt, Artificial Sequence
  Chemically synthesized
ccagaaucuucagcucacagucu

SEQ ID NO: 46874 - RNA, 23 nt, Artificial Sequence
  Chemically synthesized
cagaaucuucagcucacagucuu

SEQ ID NO: 46875 - RNA, 23 nt, Artificial Sequence
  Chemically synthesized
agaaucuucagcucacagucuuc

SEQ ID NO: 46876 - RNA, 23 nt, Artificial Sequence
  Chemically synthesized
gaaucuucagcucacagucuuca

SEQ ID NO: 46877 - RNA, 23 nt, Artificial Sequence
  Chemically synthesized
aaucuucagcucacagucuucau

SEQ ID NO: 46878 - RNA, 23 nt, Artificial Sequence
  Chemically synthesized
uuaggucccugugaauuauguca

SEQ ID NO: 46879 - RNA, 23 nt, Artificial Sequence
  Chemically synthesized
uaggucccugugaauuaugucag

SEQ ID NO: 46880 - RNA, 23 nt, Artificial Sequence
  Chemically synthesized
aggucccugugaauuaugucagc

SEQ ID NO: 46881 - RNA, 23 nt, Artificial Sequence
  Chemically synthesized
ggucccugugaauuaugucagcu

SEQ ID NO: 46882 - RNA, 23 nt, Artificial Sequence
  Chemically synthesized
gucccugugaauuaugucagcug

SEQ ID NO: 46883 - RNA, 23 nt, Artificial Sequence
  Chemically synthesized
ugaauguauauacuuuagaccuc

SEQ ID NO: 46884 - RNA, 23 nt, Artificial Sequence
  Chemically synthesized
agauaaggaacugaacaugguca

SEQ ID NO: 46885 - RNA, 23 nt, Artificial Sequence
  Chemically synthesized
gauaaggaacugaacauggucau

SEQ ID NO: 46886 - RNA, 23 nt, Artificial Sequence
  Chemically synthesized
auaaggaacugaacauggucauc

SEQ ID NO: 46887 - RNA, 23 nt, Artificial Sequence
  Chemically synthesized
uaaggaacugaacauggucaucu

SEQ ID NO: 46888 - RNA, 23 nt, Artificial Sequence
  Chemically synthesized
aaggaacugaacauggucaucug

SEQ ID NO: 46889 - RNA, 23 nt, Artificial Sequence
  Chemically synthesized
cuguaagcuucugacauuucaca

SEQ ID NO: 46890 - RNA, 23 nt, Artificial Sequence
  Chemically synthesized
uguaagcuucugacauuucacaa

SEQ ID NO: 46891 - RNA, 23 nt, Artificial Sequence
  Chemically synthesized
guaagcuucugacauuucacaau

SEQ ID NO: 46892 - RNA, 23 nt, Artificial Sequence
  Chemically synthesized
uaagcuucugacauuucacaaug

SEQ ID NO: 46893 - RNA, 23 nt, Artificial Sequence
  Chemically synthesized
aagcuucugacauuucacaaugu

SEQ ID NO: 46894 - RNA, 23 nt, Artificial Sequence
  Chemically synthesized
uugucuuguucagcuccugccgg

SEQ ID NO: 46895 - RNA, 23 nt, Artificial Sequence
  Chemically synthesized
gcaguucucuguagguucuuuuc

SEQ ID NO: 46896 - RNA, 23 nt, Artificial Sequence
  Chemically synthesized
ucuuccagucaacagcucggcca

SEQ ID NO: 46897 - RNA, 23 nt, Artificial Sequence
  Chemically synthesized
aucaacugucugguuguaaugca

SEQ ID NO: 46898 - RNA, 23 nt, Artificial Sequence
  Chemically synthesized
ucaacugucugguuguaaugcau

SEQ ID NO: 46899 - RNA, 23 nt, Artificial Sequence
  Chemically synthesized
caacugucugguuguaaugcauc

SEQ ID NO: 46900 - RNA, 23 nt, Artificial Sequence
  Chemically synthesized
aacugucugguuguaaugcaucc

SEQ ID NO: 46901 - RNA, 23 nt, Artificial Sequence
  Chemically synthesized
acugucugguuguaaugcaucca

SEQ ID NO: 46902 - RNA, 23 nt, Artificial Sequence
  Chemically synthesized
uggccacguagccugucauuuca

SEQ ID NO: 46903 - RNA, 23 nt, Artificial Sequence
  Chemically synthesized
ggccacguagccugucauuucau

SEQ ID NO: 46904 - RNA, 23 nt, Artificial Sequence
  Chemically synthesized
gccacguagccugucauuucauc

SEQ ID NO: 46905 - RNA, 23 nt, Artificial Sequence
  Chemically synthesized
ccacguagccugucauuucauca

SEQ ID NO: 46906 - RNA, 23 nt, Artificial Sequence
  Chemically synthesized
cacguagccugucauuucaucau

SEQ ID NO: 46907 - RNA, 23 nt, Artificial Sequence
  Chemically synthesized
acguagccugucauuucaucauc

SEQ ID NO: 46908 - RNA, 23 nt, Artificial Sequence
  Chemically synthesized
cguagccugucauuucaucaucu

SEQ ID NO: 46909 - RNA, 23 nt, Artificial Sequence
  Chemically synthesized
guagccugucauuucaucaucug

SEQ ID NO: 46910 - RNA, 23 nt, Artificial Sequence
  Chemically synthesized
uagccugucauuucaucaucugu

SEQ ID NO: 46911 - RNA, 23 nt, Artificial Sequence
  Chemically synthesized
agccugucauuucaucaucugug

SEQ ID NO: 46912 - RNA, 23 nt, Artificial Sequence
  Chemically synthesized
aucuucagcucacagucuucauu

SEQ ID NO: 46913 - RNA, 23 nt, Artificial Sequence
  Chemically synthesized
ucuucagcucacagucuucauuc

SEQ ID NO: 46914 - RNA, 23 nt, Artificial Sequence
  Chemically synthesized
cuucagcucacagucuucauuca

SEQ ID NO: 46915 - RNA, 23 nt, Artificial Sequence
  Chemically synthesized
uuuuaggucccugugaauuaugu

SEQ ID NO: 46916 - RNA, 23 nt, Artificial Sequence
  Chemically synthesized
uuuaggucccugugaauuauguc

SEQ ID NO: 46917 - RNA, 23 nt, Artificial Sequence
  Chemically synthesized
ucccugugaauuaugucagcuga

SEQ ID NO: 46918 - RNA, 23 nt, Artificial Sequence
  Chemically synthesized
uacuuuagaccucggagaauuug

SEQ ID NO: 46919 - RNA, 23 nt, Artificial Sequence
  Chemically synthesized
aucuguaagcuucugacauuuca

SEQ ID NO: 46920 - RNA, 23 nt, Artificial Sequence
  Chemically synthesized
ucuguaagcuucugacauuucac

SEQ ID NO: 46921 - RNA, 23 nt, Artificial Sequence
  Chemically synthesized
cuccugagacauuuuccagcggc

SEQ ID NO: 46922 - RNA, 23 nt, Artificial Sequence
  Chemically synthesized
uccugagacauuuuccagcggca

SEQ ID NO: 46923 - RNA, 23 nt, Artificial Sequence
  Chemically synthesized
ccugagacauuuuccagcggcag

SEQ ID NO: 46924 - RNA, 23 nt, Artificial Sequence
  Chemically synthesized
cugagacauuuuccagcggcagc

SEQ ID NO: 46925 - RNA, 23 nt, Artificial Sequence
  Chemically synthesized
ugagacauuuuccagcggcagcc

SEQ ID NO: 46926 - RNA, 23 nt, Artificial Sequence
  Chemically synthesized
ucccagauugucuuguucagcuc

SEQ ID NO: 46927 - RNA, 23 nt, Artificial Sequence
  Chemically synthesized
cccagauugucuuguucagcucc

SEQ ID NO: 46928 - RNA, 23 nt, Artificial Sequence
  Chemically synthesized
uuaaguaaccgcaguucucugua

SEQ ID NO: 46929 - RNA, 23 nt, Artificial Sequence
  Chemically synthesized
uaaguaaccgcaguucucuguag

SEQ ID NO: 46930 - RNA, 23 nt, Artificial Sequence
  Chemically synthesized
agguucuuuucgcaugaaugaug

SEQ ID NO: 46931 - RNA, 23 nt, Artificial Sequence
  Chemically synthesized
cggccauuaugcaucccacugac

SEQ ID NO: 46932 - RNA, 23 nt, Artificial Sequence
  Chemically synthesized
ggccauuaugcaucccacugacc

SEQ ID NO: 46933 - RNA, 23 nt, Artificial Sequence
  Chemically synthesized
gccauuaugcaucccacugacca

SEQ ID NO: 46934 - RNA, 23 nt, Artificial Sequence
  Chemically synthesized
ccauuaugcaucccacugaccaa

SEQ ID NO: 46935 - RNA, 23 nt, Artificial Sequence
  Chemically synthesized
cauuaugcaucccacugaccaaa

SEQ ID NO: 46936 - RNA, 23 nt, Artificial Sequence
  Chemically synthesized
auuaugcaucccacugaccaaau

SEQ ID NO: 46937 - RNA, 23 nt, Artificial Sequence
  Chemically synthesized
ugucaaaagcagcacacacagag

SEQ ID NO: 46938 - RNA, 23 nt, Artificial Sequence
  Chemically synthesized
gucaaaagcagcacacacagagc

SEQ ID NO: 46939 - RNA, 23 nt, Artificial Sequence
  Chemically synthesized
ucaaaagcagcacacacagagcc

SEQ ID NO: 46940 - RNA, 23 nt, Artificial Sequence
  Chemically synthesized
caaaagcagcacacacagagcca

SEQ ID NO: 46941 - RNA, 23 nt, Artificial Sequence
  Chemically synthesized
aaaagcagcacacacagagccau

SEQ ID NO: 46942 - RNA, 23 nt, Artificial Sequence
  Chemically synthesized
cagcucacagucuucauucacag

SEQ ID NO: 46943 - RNA, 23 nt, Artificial Sequence
  Chemically synthesized
agcucacagucuucauucacagc

SEQ ID NO: 46944 - RNA, 23 nt, Artificial Sequence
  Chemically synthesized
gcucacagucuucauucacagcu

SEQ ID NO: 46945 - RNA, 23 nt, Artificial Sequence
  Chemically synthesized
cucacagucuucauucacagcua

SEQ ID NO: 46946 - RNA, 23 nt, Artificial Sequence
  Chemically synthesized
ucacagucuucauucacagcuag

SEQ ID NO: 46947 - RNA, 23 nt, Artificial Sequence
  Chemically synthesized
cacagucuucauucacagcuaga

SEQ ID NO: 46948 - RNA, 23 nt, Artificial Sequence
  Chemically synthesized
acagucuucauucacagcuagau

SEQ ID NO: 46949 - RNA, 23 nt, Artificial Sequence
  Chemically synthesized
agucuucauucacagcuagauua

SEQ ID NO: 46950 - RNA, 23 nt, Artificial Sequence
  Chemically synthesized
gucuucauucacagcuagauuac

SEQ ID NO: 46951 - RNA, 23 nt, Artificial Sequence
  Chemically synthesized
ucuucauucacagcuagauuacu

SEQ ID NO: 46952 - RNA, 23 nt, Artificial Sequence
  Chemically synthesized
cuucauucacagcuagauuacua

SEQ ID NO: 46953 - RNA, 23 nt, Artificial Sequence
  Chemically synthesized
uucauucacagcuagauuacuag

SEQ ID NO: 46954 - RNA, 23 nt, Artificial Sequence
  Chemically synthesized
guagauaaggaacugaacauggu

SEQ ID NO: 46955 - RNA, 23 nt, Artificial Sequence
  Chemically synthesized
uagauaaggaacugaacaugguc

SEQ ID NO: 46956 - RNA, 23 nt, Artificial Sequence
  Chemically synthesized
aggaacugaacauggucaucugu

SEQ ID NO: 46957 - RNA, 23 nt, Artificial Sequence
  Chemically synthesized
ggaacugaacauggucaucugua

SEQ ID NO: 46958 - RNA, 23 nt, Artificial Sequence
  Chemically synthesized
gaacugaacauggucaucuguaa

SEQ ID NO: 46959 - RNA, 23 nt, Artificial Sequence
  Chemically synthesized
aacugaacauggucaucuguaag

SEQ ID NO: 46960 - RNA, 23 nt, Artificial Sequence
  Chemically synthesized
guccaacagaccaaucacauuuu

SEQ ID NO: 46961 - RNA, 23 nt, Artificial Sequence
  Chemically synthesized
uccaacagaccaaucacauuuuc

SEQ ID NO: 46962 - RNA, 23 nt, Artificial Sequence
  Chemically synthesized
ccaacagaccaaucacauuuuca

SEQ ID NO: 46963 - RNA, 23 nt, Artificial Sequence
  Chemically synthesized
caacagaccaaucacauuuucau

SEQ ID NO: 46964 - RNA, 23 nt, Artificial Sequence
  Chemically synthesized
aacagaccaaucacauuuucaug

SEQ ID NO: 46965 - RNA, 23 nt, Artificial Sequence
  Chemically synthesized
acagaccaaucacauuuucaugu

SEQ ID NO: 46966 - RNA, 23 nt, Artificial Sequence
  Chemically synthesized
cagaccaaucacauuuucauguu

SEQ ID NO: 46967 - RNA, 23 nt, Artificial Sequence
  Chemically synthesized
agaccaaucacauuuucauguuu

SEQ ID NO: 46968 - RNA, 23 nt, Artificial Sequence
  Chemically synthesized
gaccaaucacauuuucauguuuc

SEQ ID NO: 46969 - RNA, 23 nt, Artificial Sequence
  Chemically synthesized
accaaucacauuuucauguuuca

SEQ ID NO: 46970 - RNA, 23 nt, Artificial Sequence
  Chemically synthesized
ucuguagguucuuuucgcaugaa

SEQ ID NO: 46971 - RNA, 23 nt, Artificial Sequence
  Chemically synthesized
augauggacugaaauggucugga

SEQ ID NO: 46972 - RNA, 23 nt, Artificial Sequence
  Chemically synthesized
ugauggacugaaauggucuggag

SEQ ID NO: 46973 - RNA, 23 nt, Artificial Sequence
  Chemically synthesized
gauggacugaaauggucuggaga

SEQ ID NO: 46974 - RNA, 23 nt, Artificial Sequence
  Chemically synthesized
auggacugaaauggucuggagag

SEQ ID NO: 46975 - RNA, 23 nt, Artificial Sequence
  Chemically synthesized
uuaugcaucccacugaccaaaua

SEQ ID NO: 46976 - RNA, 23 nt, Artificial Sequence
  Chemically synthesized
ucagcaugaucucaggagcccug

SEQ ID NO: 46977 - RNA, 23 nt, Artificial Sequence
  Chemically synthesized
uucagcucacagucuucauucac

SEQ ID NO: 46978 - RNA, 23 nt, Artificial Sequence
  Chemically synthesized
ucagcucacagucuucauucaca

SEQ ID NO: 46979 - RNA, 23 nt, Artificial Sequence
  Chemically synthesized
gggcaccucccagauugucuugu

SEQ ID NO: 46980 - RNA, 23 nt, Artificial Sequence
  Chemically synthesized
ggcaccucccagauugucuuguu

SEQ ID NO: 46981 - RNA, 23 nt, Artificial Sequence
  Chemically synthesized
gcaccucccagauugucuuguuc

SEQ ID NO: 46982 - RNA, 23 nt, Artificial Sequence
  Chemically synthesized
caccucccagauugucuuguuca

SEQ ID NO: 46983 - RNA, 23 nt, Artificial Sequence
  Chemically synthesized
accucccagauugucuuguucag

SEQ ID NO: 46984 - RNA, 23 nt, Artificial Sequence
  Chemically synthesized
cucccagauugucuuguucagcu

SEQ ID NO: 46985 - RNA, 23 nt, Artificial Sequence
  Chemically synthesized
uggacugaaauggucuggagagc

SEQ ID NO: 46986 - RNA, 23 nt, Artificial Sequence
  Chemically synthesized
ggacugaaauggucuggagagcu

SEQ ID NO: 46987 - RNA, 23 nt, Artificial Sequence
  Chemically synthesized
gacugaaauggucuggagagcuu

SEQ ID NO: 46988 - RNA, 23 nt, Artificial Sequence
  Chemically synthesized
acugaaauggucuggagagcuuc

SEQ ID NO: 46989 - RNA, 23 nt, Artificial Sequence
  Chemically synthesized
cugaaauggucuggagagcuucu

SEQ ID NO: 46990 - RNA, 23 nt, Artificial Sequence
  Chemically synthesized
ugaccaaauaucaacugucuggu

SEQ ID NO: 46991 - RNA, 23 nt, Artificial Sequence
  Chemically synthesized
gaccaaauaucaacugucugguu

SEQ ID NO: 46992 - RNA, 23 nt, Artificial Sequence
  Chemically synthesized
accaaauaucaacugucugguug

SEQ ID NO: 46993 - RNA, 23 nt, Artificial Sequence
  Chemically synthesized
ccaaauaucaacugucugguugu

SEQ ID NO: 46994 - RNA, 23 nt, Artificial Sequence
  Chemically synthesized
caaauaucaacugucugguugua

SEQ ID NO: 46995 - RNA, 23 nt, Artificial Sequence
  Chemically synthesized
cagucuucauucacagcuagauu

SEQ ID NO: 46996 - RNA, 23 nt, Artificial Sequence
  Chemically synthesized
ucauucacagcuagauuacuagg

SEQ ID NO: 46997 - RNA, 23 nt, Artificial Sequence
  Chemically synthesized
cauucacagcuagauuacuaggu

SEQ ID NO: 46998 - RNA, 23 nt, Artificial Sequence
  Chemically synthesized
auucacagcuagauuacuagguu

SEQ ID NO: 46999 - RNA, 23 nt, Artificial Sequence
  Chemically synthesized
uauacuuuagaccucggagaauu

SEQ ID NO: 47000 - RNA, 23 nt, Artificial Sequence
  Chemically synthesized
auacuuuagaccucggagaauuu

SEQ ID NO: 47001 - RNA, 23 nt, Artificial Sequence
  Chemically synthesized
gguagauaaggaacugaacaugg

SEQ ID NO: 47002 - RNA, 23 nt, Artificial Sequence
  Chemically synthesized
ccucccagauugucuuguucagc

SEQ ID NO: 47003 - RNA, 23 nt, Artificial Sequence
  Chemically synthesized
cuguagguucuuuucgcaugaau

SEQ ID NO: 47004 - RNA, 23 nt, Artificial Sequence
  Chemically synthesized
uguagguucuuuucgcaugaaug

SEQ ID NO: 47005 - RNA, 23 nt, Artificial Sequence
  Chemically synthesized
guagguucuuuucgcaugaauga

SEQ ID NO: 47006 - RNA, 23 nt, Artificial Sequence
  Chemically synthesized
ucccacugaccaaauaucaacug

SEQ ID NO: 47007 - RNA, 23 nt, Artificial Sequence
  Chemically synthesized
cccacugaccaaauaucaacugu

SEQ ID NO: 47008 - RNA, 23 nt, Artificial Sequence
  Chemically synthesized
ccacugaccaaauaucaacuguc

SEQ ID NO: 47009 - RNA, 23 nt, Artificial Sequence
  Chemically synthesized
cacugaccaaauaucaacugucu

SEQ ID NO: 47010 - RNA, 23 nt, Artificial Sequence
  Chemically synthesized
acugaccaaauaucaacugucug

SEQ ID NO: 47011 - RNA, 23 nt, Artificial Sequence
  Chemically synthesized
cugaccaaauaucaacugucugg

SEQ ID NO: 47012 - RNA, 23 nt, Artificial Sequence
  Chemically synthesized
aaagcagcacacacagagccaua

SEQ ID NO: 47013 - RNA, 23 nt, Artificial Sequence
  Chemically synthesized
cccugugaauuaugucagcugaa

SEQ ID NO: 47014 - RNA, 23 nt, Artificial Sequence
  Chemically synthesized
ccugugaauuaugucagcugaau

SEQ ID NO: 47015 - RNA, 23 nt, Artificial Sequence
  Chemically synthesized
cugugaauuaugucagcugaaug

SEQ ID NO: 47016 - RNA, 23 nt, Artificial Sequence
  Chemically synthesized
ugguagauaaggaacugaacaug

SEQ ID NO: 47017 - RNA, 23 nt, Artificial Sequence
  Chemically synthesized
accaggaaacaauguucuuccag

SEQ ID NO: 47018 - RNA, 23 nt, Artificial Sequence
  Chemically synthesized
ccaggaaacaauguucuuccagu

SEQ ID NO: 47019 - RNA, 23 nt, Artificial Sequence
  Chemically synthesized
uuacuagguuuuaggucccugug

SEQ ID NO: 47020 - RNA, 23 nt, Artificial Sequence
  Chemically synthesized
uacuagguuuuaggucccuguga

SEQ ID NO: 47021 - RNA, 23 nt, Artificial Sequence
  Chemically synthesized
augcaucccacugaccaaauauc

SEQ ID NO: 47022 - RNA, 23 nt, Artificial Sequence
  Chemically synthesized
ugcaucccacugaccaaauauca

SEQ ID NO: 47023 - RNA, 23 nt, Artificial Sequence
  Chemically synthesized
gcaucccacugaccaaauaucaa

SEQ ID NO: 47024 - RNA, 23 nt, Artificial Sequence
  Chemically synthesized
caucccacugaccaaauaucaac

SEQ ID NO: 47025 - RNA, 23 nt, Artificial Sequence
  Chemically synthesized
aucccacugaccaaauaucaacu

SEQ ID NO: 47026 - RNA, 23 nt, Artificial Sequence
  Chemically synthesized
ggucaccagauacacaucauuga

SEQ ID NO: 47027 - RNA, 23 nt, Artificial Sequence
  Chemically synthesized
gucaccagauacacaucauugaa

SEQ ID NO: 47028 - RNA, 23 nt, Artificial Sequence
  Chemically synthesized
ucaccagauacacaucauugaau

SEQ ID NO: 47029 - RNA, 23 nt, Artificial Sequence
  Chemically synthesized
caccagauacacaucauugaauu

SEQ ID NO: 47030 - RNA, 23 nt, Artificial Sequence
  Chemically synthesized
accagauacacaucauugaauuc

SEQ ID NO: 47031 - RNA, 23 nt, Artificial Sequence
  Chemically synthesized
uuucgcaugaaugauggacugaa

SEQ ID NO: 47032 - RNA, 23 nt, Artificial Sequence
  Chemically synthesized
aaguaaccgcaguucucuguagg

SEQ ID NO: 47033 - RNA, 23 nt, Artificial Sequence
  Chemically synthesized
aguaaccgcaguucucuguaggu

SEQ ID NO: 47034 - RNA, 23 nt, Artificial Sequence
  Chemically synthesized
guaaccgcaguucucuguagguu

SEQ ID NO: 47035 - RNA, 23 nt, Artificial Sequence
  Chemically synthesized
uaaccgcaguucucuguagguuc

SEQ ID NO: 47036 - RNA, 23 nt, Artificial Sequence
  Chemically synthesized
gguuaauauggucuguaccagga

SEQ ID NO: 47037 - RNA, 23 nt, Artificial Sequence
  Chemically synthesized
guuaauauggucuguaccaggaa

SEQ ID NO: 47038 - RNA, 23 nt, Artificial Sequence
  Chemically synthesized
uuaauauggucuguaccaggaaa

SEQ ID NO: 47039 - RNA, 23 nt, Artificial Sequence
  Chemically synthesized
uaauauggucuguaccaggaaac

SEQ ID NO: 47040 - RNA, 23 nt, Artificial Sequence
  Chemically synthesized
aauauggucuguaccaggaaaca

SEQ ID NO: 47041 - RNA, 23 nt, Artificial Sequence
  Chemically synthesized
ccguuuuugugucaaaagcagca

SEQ ID NO: 47042 - RNA, 23 nt, Artificial Sequence
  Chemically synthesized
cguuuuugugucaaaagcagcac

SEQ ID NO: 47043 - RNA, 23 nt, Artificial Sequence
  Chemically synthesized
guuuuugugucaaaagcagcaca

SEQ ID NO: 47044 - RNA, 23 nt, Artificial Sequence
  Chemically synthesized
uuuuugugucaaaagcagcacac

SEQ ID NO: 47045 - RNA, 23 nt, Artificial Sequence
  Chemically synthesized
uuuugugucaaaagcagcacaca

SEQ ID NO: 47046 - RNA, 23 nt, Artificial Sequence
  Chemically synthesized
ugucuuguucagcuccugccggu

SEQ ID NO: 47047 - RNA, 23 nt, Artificial Sequence
  Chemically synthesized
ggagagcuucuucacugccacac

SEQ ID NO: 47048 - RNA, 23 nt, Artificial Sequence
  Chemically synthesized
gagagcuucuucacugccacacg

SEQ ID NO: 47049 - RNA, 23 nt, Artificial Sequence
  Chemically synthesized
agagcuucuucacugccacacgu

SEQ ID NO: 47050 - RNA, 23 nt, Artificial Sequence
  Chemically synthesized
gagcuucuucacugccacacgua

SEQ ID NO: 47051 - RNA, 23 nt, Artificial Sequence
  Chemically synthesized
agcuucuucacugccacacguaa

SEQ ID NO: 47052 - RNA, 23 nt, Artificial Sequence
  Chemically synthesized
uucgcaugaaugauggacugaaa

SEQ ID NO: 47053 - RNA, 23 nt, Artificial Sequence
  Chemically synthesized
cugucugguuguaaugcauccag

SEQ ID NO: 47054 - RNA, 23 nt, Artificial Sequence
  Chemically synthesized
ugucugguuguaaugcauccagu

SEQ ID NO: 47055 - RNA, 23 nt, Artificial Sequence
  Chemically synthesized
gucugguuguaaugcauccaguu

SEQ ID NO: 47056 - RNA, 23 nt, Artificial Sequence
  Chemically synthesized
uucacagcuagauuacuagguuu

SEQ ID NO: 47057 - RNA, 23 nt, Artificial Sequence
  Chemically synthesized
ucacagcuagauuacuagguuuu

SEQ ID NO: 47058 - RNA, 23 nt, Artificial Sequence
  Chemically synthesized
cacagcuagauuacuagguuuua

SEQ ID NO: 47059 - RNA, 23 nt, Artificial Sequence
  Chemically synthesized
acagcuagauuacuagguuuuag

SEQ ID NO: 47060 - RNA, 23 nt, Artificial Sequence
  Chemically synthesized
agaccucggagaauuugguagau

SEQ ID NO: 47061 - RNA, 23 nt, Artificial Sequence
  Chemically synthesized
gaccucggagaauuugguagaua

SEQ ID NO: 47062 - RNA, 23 nt, Artificial Sequence
  Chemically synthesized
accucggagaauuugguagauaa

SEQ ID NO: 47063 - RNA, 23 nt, Artificial Sequence
  Chemically synthesized
ucugacauuucacaauguuguuc

SEQ ID NO: 47064 - RNA, 23 nt, Artificial Sequence
  Chemically synthesized
uuugugucaaaagcagcacacac

SEQ ID NO: 47065 - RNA, 23 nt, Artificial Sequence
  Chemically synthesized
cagcucggccauuaugcauccca

SEQ ID NO: 47066 - RNA, 23 nt, Artificial Sequence
  Chemically synthesized
agcucggccauuaugcaucccac

SEQ ID NO: 47067 - RNA, 23 nt, Artificial Sequence
  Chemically synthesized
gcucggccauuaugcaucccacu

SEQ ID NO: 47068 - RNA, 23 nt, Artificial Sequence
  Chemically synthesized
cucggccauuaugcaucccacug

SEQ ID NO: 47069 - RNA, 23 nt, Artificial Sequence
  Chemically synthesized
ucggccauuaugcaucccacuga

SEQ ID NO: 47070 - RNA, 23 nt, Artificial Sequence
  Chemically synthesized
uaucaacugucugguuguaaugc

SEQ ID NO: 47071 - RNA, 23 nt, Artificial Sequence
  Chemically synthesized
acuagguuuuaggucccugugaa

SEQ ID NO: 47072 - RNA, 23 nt, Artificial Sequence
  Chemically synthesized
ucgcaugaaugauggacugaaau

SEQ ID NO: 47073 - RNA, 23 nt, Artificial Sequence
  Chemically synthesized
ccucuccugagacauuuuccagc

SEQ ID NO: 47074 - RNA, 23 nt, Artificial Sequence
  Chemically synthesized
cucuccugagacauuuuccagcg

SEQ ID NO: 47075 - RNA, 23 nt, Artificial Sequence
  Chemically synthesized
ucuccugagacauuuuccagcgg

SEQ ID NO: 47076 - RNA, 23 nt, Artificial Sequence
  Chemically synthesized
cuagguuuuaggucccugugaau

SEQ ID NO: 47077 - RNA, 23 nt, Artificial Sequence
  Chemically synthesized
cuggagacagguucugguaacgc

SEQ ID NO: 47078 - RNA, 23 nt, Artificial Sequence
  Chemically synthesized
uggagacagguucugguaacgcu

SEQ ID NO: 47079 - RNA, 23 nt, Artificial Sequence
  Chemically synthesized
ggagacagguucugguaacgcuc

SEQ ID NO: 47080 - RNA, 23 nt, Artificial Sequence
  Chemically synthesized
gagacagguucugguaacgcucg

SEQ ID NO: 47081 - RNA, 23 nt, Artificial Sequence
  Chemically synthesized
agacagguucugguaacgcucgg

SEQ ID NO: 47082 - RNA, 23 nt, Artificial Sequence
  Chemically synthesized
gacagguucugguaacgcucggg

SEQ ID NO: 47083 - RNA, 23 nt, Artificial Sequence
  Chemically synthesized
agcuucugacauuucacaauguu

SEQ ID NO: 47084 - RNA, 23 nt, Artificial Sequence
  Chemically synthesized
gcuucugacauuucacaauguug

SEQ ID NO: 47085 - RNA, 23 nt, Artificial Sequence
  Chemically synthesized
cuucugacauuucacaauguugu

SEQ ID NO: 47086 - RNA, 23 nt, Artificial Sequence
  Chemically synthesized
uucugacauuucacaauguuguu

SEQ ID NO: 47087 - RNA, 23 nt, Artificial Sequence
  Chemically synthesized
gaccuugcagguguaaaaacguc

SEQ ID NO: 47088 - RNA, 23 nt, Artificial Sequence
  Chemically synthesized
accuugcagguguaaaaacgucc

SEQ ID NO: 47089 - RNA, 23 nt, Artificial Sequence
  Chemically synthesized
ccuugcagguguaaaaacgucca

SEQ ID NO: 47090 - RNA, 23 nt, Artificial Sequence
  Chemically synthesized
cuugcagguguaaaaacguccaa

SEQ ID NO: 47091 - RNA, 23 nt, Artificial Sequence
  Chemically synthesized
uugcagguguaaaaacguccaac

SEQ ID NO: 47092 - RNA, 23 nt, Artificial Sequence
  Chemically synthesized
ugcagguguaaaaacguccaaca

SEQ ID NO: 47093 - RNA, 23 nt, Artificial Sequence
  Chemically synthesized
uguaaaaacguccaacagaccaa

SEQ ID NO: 47094 - RNA, 23 nt, Artificial Sequence
  Chemically synthesized
guaaaaacguccaacagaccaau

SEQ ID NO: 47095 - RNA, 23 nt, Artificial Sequence
  Chemically synthesized
uaaaaacguccaacagaccaauc

SEQ ID NO: 47096 - RNA, 23 nt, Artificial Sequence
  Chemically synthesized
aaaaacguccaacagaccaauca

SEQ ID NO: 47097 - RNA, 23 nt, Artificial Sequence
  Chemically synthesized
aaaacguccaacagaccaaucac

SEQ ID NO: 47098 - RNA, 23 nt, Artificial Sequence
  Chemically synthesized
gggccucuccugagacauuuucc

SEQ ID NO: 47099 - RNA, 23 nt, Artificial Sequence
  Chemically synthesized
ggccucuccugagacauuuucca

SEQ ID NO: 47100 - RNA, 23 nt, Artificial Sequence
  Chemically synthesized
gccucuccugagacauuuuccag

SEQ ID NO: 47101 - RNA, 23 nt, Artificial Sequence
  Chemically synthesized
ccccguuuuugugucaaaagcag

SEQ ID NO: 47102 - RNA, 23 nt, Artificial Sequence
  Chemically synthesized
cccguuuuugugucaaaagcagc

SEQ ID NO: 47103 - RNA, 23 nt, Artificial Sequence
  Chemically synthesized
guaaugcauccaguucagcauga

SEQ ID NO: 47104 - RNA, 23 nt, Artificial Sequence
  Chemically synthesized
uaaugcauccaguucagcaugau

SEQ ID NO: 47105 - RNA, 23 nt, Artificial Sequence
  Chemically synthesized
gguuuuaggucccugugaauuau

SEQ ID NO: 47106 - RNA, 23 nt, Artificial Sequence
  Chemically synthesized
guuuuaggucccugugaauuaug

SEQ ID NO: 47107 - RNA, 23 nt, Artificial Sequence
  Chemically synthesized
acuggagacagguucugguaacg

SEQ ID NO: 47108 - RNA, 23 nt, Artificial Sequence
  Chemically synthesized
guguaaaaacguccaacagacca

SEQ ID NO: 47109 - RNA, 23 nt, Artificial Sequence
  Chemically synthesized
aaacguccaacagaccaaucaca

SEQ ID NO: 47110 - RNA, 23 nt, Artificial Sequence
  Chemically synthesized
aacguccaacagaccaaucacau

SEQ ID NO: 47111 - RNA, 23 nt, Artificial Sequence
  Chemically synthesized
acguccaacagaccaaucacauu

SEQ ID NO: 47112 - RNA, 23 nt, Artificial Sequence
  Chemically synthesized
aaccgcaguucucuguagguucu

SEQ ID NO: 47113 - RNA, 23 nt, Artificial Sequence
  Chemically synthesized
ugaaauggucuggagagcuucuu

SEQ ID NO: 47114 - RNA, 23 nt, Artificial Sequence
  Chemically synthesized
gaaauggucuggagagcuucuuc

SEQ ID NO: 47115 - RNA, 23 nt, Artificial Sequence
  Chemically synthesized
aaauggucuggagagcuucuuca

SEQ ID NO: 47116 - RNA, 23 nt, Artificial Sequence
  Chemically synthesized
aaauaucaacugucugguuguaa

SEQ ID NO: 47117 - RNA, 23 nt, Artificial Sequence
  Chemically synthesized
aauaucaacugucugguuguaau

SEQ ID NO: 47118 - RNA, 23 nt, Artificial Sequence
  Chemically synthesized
ucugguuguaaugcauccaguuc

SEQ ID NO: 47119 - RNA, 23 nt, Artificial Sequence
  Chemically synthesized
aaugcauccaguucagcaugauc

SEQ ID NO: 47120 - RNA, 23 nt, Artificial Sequence
  Chemically synthesized
aauggucuggagagcuucuucac

SEQ ID NO: 47121 - RNA, 23 nt, Artificial Sequence
  Chemically synthesized
auggucuggagagcuucuucacu

SEQ ID NO: 47122 - RNA, 23 nt, Artificial Sequence
  Chemically synthesized
ggucuggagagcuucuucacugc

SEQ ID NO: 47123 - RNA, 23 nt, Artificial Sequence
  Chemically synthesized
gucuggagagcuucuucacugcc

SEQ ID NO: 47124 - RNA, 23 nt, Artificial Sequence
  Chemically synthesized
ucuggagagcuucuucacugcca

SEQ ID NO: 47125 - RNA, 23 nt, Artificial Sequence
  Chemically synthesized
cuggagagcuucuucacugccac

SEQ ID NO: 47126 - RNA, 23 nt, Artificial Sequence
  Chemically synthesized
uggagagcuucuucacugccaca

SEQ ID NO: 47127 - RNA, 23 nt, Artificial Sequence
  Chemically synthesized
cagcaugaucucaggagcccugu

SEQ ID NO: 47128 - RNA, 23 nt, Artificial Sequence
  Chemically synthesized
agcaugaucucaggagcccugua

SEQ ID NO: 47129 - RNA, 23 nt, Artificial Sequence
  Chemically synthesized
gcaugaucucaggagcccuguac

SEQ ID NO: 47130 - RNA, 23 nt, Artificial Sequence
  Chemically synthesized
caugaucucaggagcccuguacc

SEQ ID NO: 47131 - RNA, 23 nt, Artificial Sequence
  Chemically synthesized
augaucucaggagcccuguacca

SEQ ID NO: 47132 - RNA, 23 nt, Artificial Sequence
  Chemically synthesized
uugugucaaaagcagcacacaca

SEQ ID NO: 47133 - RNA, 23 nt, Artificial Sequence
  Chemically synthesized
gguguaaaaacguccaacagacc

SEQ ID NO: 47134 - RNA, 23 nt, Artificial Sequence
  Chemically synthesized
ugugucaaaagcagcacacacag

SEQ ID NO: 47135 - RNA, 23 nt, Artificial Sequence
  Chemically synthesized
auaucaacugucugguuguaaug

SEQ ID NO: 47136 - RNA, 23 nt, Artificial Sequence
  Chemically synthesized
agguguaaaaacguccaacagac

SEQ ID NO: 47137 - RNA, 23 nt, Artificial Sequence
  Chemically synthesized
auauggucuguaccaggaaacaa

SEQ ID NO: 47138 - RNA, 23 nt, Artificial Sequence
  Chemically synthesized
uauggucuguaccaggaaacaau

SEQ ID NO: 47139 - RNA, 23 nt, Artificial Sequence
  Chemically synthesized
auggucuguaccaggaaacaaug

SEQ ID NO: 47140 - RNA, 23 nt, Artificial Sequence
  Chemically synthesized
uggucuggagagcuucuucacug

SEQ ID NO: 47141 - RNA, 23 nt, Artificial Sequence
  Chemically synthesized
gcccacuggagacagguucuggu

SEQ ID NO: 47142 - RNA, 23 nt, Artificial Sequence
  Chemically synthesized
cccacuggagacagguucuggua

SEQ ID NO: 47143 - RNA, 23 nt, Artificial Sequence
  Chemically synthesized
ccacuggagacagguucugguaa

SEQ ID NO: 47144 - RNA, 23 nt, Artificial Sequence
  Chemically synthesized
cacuggagacagguucugguaac

SEQ ID NO: 47145 - RNA, 23 nt, Artificial Sequence
  Chemically synthesized
cucggagaauuugguagauaagg

SEQ ID NO: 47146 - RNA, 23 nt, Artificial Sequence
  Chemically synthesized
caucuguaagcuucugacauuuc

SEQ ID NO: 47147 - RNA, 23 nt, Artificial Sequence
  Chemically synthesized
ugggccucuccugagacauuuuc

SEQ ID NO: 47148 - RNA, 23 nt, Artificial Sequence
  Chemically synthesized
ugagaugggucaccagauacaca

SEQ ID NO: 47149 - RNA, 23 nt, Artificial Sequence
  Chemically synthesized
aagcagcacacacagagccauag

SEQ ID NO: 47150 - RNA, 23 nt, Artificial Sequence
  Chemically synthesized
agcugaauguauauacuuuagac

SEQ ID NO: 47151 - RNA, 23 nt, Artificial Sequence
  Chemically synthesized
ucagcugaauguauauacuuuag

SEQ ID NO: 47152 - RNA, 23 nt, Artificial Sequence
  Chemically synthesized
cugaauguauauacuuuagaccu

SEQ ID NO: 47153 - RNA, 23 nt, Artificial Sequence
  Chemically synthesized
gcugaauguauauacuuuagacc

SEQ ID NO: 47154 - RNA, 23 nt, Artificial Sequence
  Chemically synthesized
augagaugggucaccagauacac

SEQ ID NO: 47155 - RNA, 23 nt, Artificial Sequence
  Chemically synthesized
gaugggucaccagauacacauca

SEQ ID NO: 47156 - RNA, 23 nt, Artificial Sequence
  Chemically synthesized
uggucuguaccaggaaacaaugu

SEQ ID NO: 47157 - RNA, 23 nt, Artificial Sequence
  Chemically synthesized
ccaauacugacccucuuuaccuc

SEQ ID NO: 47158 - RNA, 23 nt, Artificial Sequence
  Chemically synthesized
accaauacugacccucuuuaccu

SEQ ID NO: 47159 - RNA, 23 nt, Artificial Sequence
  Chemically synthesized
gaccaauacugacccucuuuacc

SEQ ID NO: 47160 - RNA, 23 nt, Artificial Sequence
  Chemically synthesized
ugaccaauacugacccucuuuac

SEQ ID NO: 47161 - RNA, 23 nt, Artificial Sequence
  Chemically synthesized
uugaccaauacugacccucuuua

SEQ ID NO: 47162 - RNA, 23 nt, Artificial Sequence
  Chemically synthesized
ccuucuuaaagccuuauuuuuca

SEQ ID NO: 47163 - RNA, 23 nt, Artificial Sequence
  Chemically synthesized
gccuucuuaaagccuuauuuuuc

SEQ ID NO: 47164 - RNA, 23 nt, Artificial Sequence
  Chemically synthesized
agccuucuuaaagccuuauuuuu

SEQ ID NO: 47165 - RNA, 23 nt, Artificial Sequence
  Chemically synthesized
aagccuucuuaaagccuuauuuu

SEQ ID NO: 47166 - RNA, 23 nt, Artificial Sequence
  Chemically synthesized
caagccuucuuaaagccuuauuu

SEQ ID NO: 47167 - RNA, 23 nt, Artificial Sequence
  Chemically synthesized
ggagauuggugcuguaaaauacc

SEQ ID NO: 47168 - RNA, 23 nt, Artificial Sequence
  Chemically synthesized
aggagauuggugcuguaaaauac

SEQ ID NO: 47169 - RNA, 23 nt, Artificial Sequence
  Chemically synthesized
aaggagauuggugcuguaaaaua

SEQ ID NO: 47170 - RNA, 23 nt, Artificial Sequence
  Chemically synthesized
uaaggagauuggugcuguaaaau

SEQ ID NO: 47171 - RNA, 23 nt, Artificial Sequence
  Chemically synthesized
cuaaggagauuggugcuguaaaa

SEQ ID NO: 47172 - RNA, 23 nt, Artificial Sequence
  Chemically synthesized
cccuauccuauccgcaaacagau

SEQ ID NO: 47173 - RNA, 23 nt, Artificial Sequence
  Chemically synthesized
ccccuauccuauccgcaaacaga

SEQ ID NO: 47174 - RNA, 23 nt, Artificial Sequence
  Chemically synthesized
cccccuauccuauccgcaaacag

SEQ ID NO: 47175 - RNA, 23 nt, Artificial Sequence
  Chemically synthesized
gcccccuauccuauccgcaaaca

SEQ ID NO: 47176 - RNA, 23 nt, Artificial Sequence
  Chemically synthesized
cgcccccuauccuauccgcaaac

SEQ ID NO: 47177 - RNA, 23 nt, Artificial Sequence
  Chemically synthesized
gggcauuuaauucaucuuuaaac

SEQ ID NO: 47178 - RNA, 23 nt, Artificial Sequence
  Chemically synthesized
ugggcauuuaauucaucuuuaaa

SEQ ID NO: 47179 - RNA, 23 nt, Artificial Sequence
  Chemically synthesized
uugggcauuuaauucaucuuuaa

SEQ ID NO: 47180 - RNA, 23 nt, Artificial Sequence
  Chemically synthesized
auugggcauuuaauucaucuuua

SEQ ID NO: 47181 - RNA, 23 nt, Artificial Sequence
  Chemically synthesized
aauugggcauuuaauucaucuuu

SEQ ID NO: 47182 - RNA, 23 nt, Artificial Sequence
  Chemically synthesized
gaaagugucacggguaaaaacuc

SEQ ID NO: 47183 - RNA, 23 nt, Artificial Sequence
  Chemically synthesized
ugaaagugucacggguaaaaacu

SEQ ID NO: 47184 - RNA, 23 nt, Artificial Sequence
  Chemically synthesized
augaaagugucacggguaaaaac

SEQ ID NO: 47185 - RNA, 23 nt, Artificial Sequence
  Chemically synthesized
aaugaaagugucacggguaaaaa

SEQ ID NO: 47186 - RNA, 23 nt, Artificial Sequence
  Chemically synthesized
gaaugaaagugucacggguaaaa

SEQ ID NO: 47187 - RNA, 23 nt, Artificial Sequence
  Chemically synthesized
cgaguuuucugaccagcuuuugc

SEQ ID NO: 47188 - RNA, 23 nt, Artificial Sequence
  Chemically synthesized
gcgaguuuucugaccagcuuuug

SEQ ID NO: 47189 - RNA, 23 nt, Artificial Sequence
  Chemically synthesized
agcgaguuuucugaccagcuuuu

SEQ ID NO: 47190 - RNA, 23 nt, Artificial Sequence
  Chemically synthesized
uagcgaguuuucugaccagcuuu

SEQ ID NO: 47191 - RNA, 23 nt, Artificial Sequence
  Chemically synthesized
auagcgaguuuucugaccagcuu

SEQ ID NO: 47192 - RNA, 23 nt, Artificial Sequence
  Chemically synthesized
ggaguguuuuuacauugaucuuu

SEQ ID NO: 47193 - RNA, 23 nt, Artificial Sequence
  Chemically synthesized
uggaguguuuuuacauugaucuu

SEQ ID NO: 47194 - RNA, 23 nt, Artificial Sequence
  Chemically synthesized
guggaguguuuuuacauugaucu

SEQ ID NO: 47195 - RNA, 23 nt, Artificial Sequence
  Chemically synthesized
uguggaguguuuuuacauugauc

SEQ ID NO: 47196 - RNA, 23 nt, Artificial Sequence
  Chemically synthesized
uuguggaguguuuuuacauugau

SEQ ID NO: 47197 - RNA, 23 nt, Artificial Sequence
  Chemically synthesized
gcagaauuguggaguguuuuuac

SEQ ID NO: 47198 - RNA, 23 nt, Artificial Sequence
  Chemically synthesized
ugcagaauuguggaguguuuuua

SEQ ID NO: 47199 - RNA, 23 nt, Artificial Sequence
  Chemically synthesized
uugcagaauuguggaguguuuuu

SEQ ID NO: 47200 - RNA, 23 nt, Artificial Sequence
  Chemically synthesized
guugcagaauuguggaguguuuu

SEQ ID NO: 47201 - RNA, 23 nt, Artificial Sequence
  Chemically synthesized
aguugcagaauuguggaguguuu

SEQ ID NO: 47202 - RNA, 23 nt, Artificial Sequence
  Chemically synthesized
gguguaaaaaucauguguugcag

SEQ ID NO: 47203 - RNA, 23 nt, Artificial Sequence
  Chemically synthesized
agguguaaaaaucauguguugca

SEQ ID NO: 47204 - RNA, 23 nt, Artificial Sequence
  Chemically synthesized
uagguguaaaaaucauguguugc

SEQ ID NO: 47205 - RNA, 23 nt, Artificial Sequence
  Chemically synthesized
cuagguguaaaaaucauguguug

SEQ ID NO: 47206 - RNA, 23 nt, Artificial Sequence
  Chemically synthesized
acuagguguaaaaaucauguguu

SEQ ID NO: 47207 - RNA, 23 nt, Artificial Sequence
  Chemically synthesized
gaacugcuauuuccucuaaugaa

SEQ ID NO: 47208 - RNA, 23 nt, Artificial Sequence
  Chemically synthesized
agaacugcuauuuccucuaauga

SEQ ID NO: 47209 - RNA, 23 nt, Artificial Sequence
  Chemically synthesized
cagaacugcuauuuccucuaaug

SEQ ID NO: 47210 - RNA, 23 nt, Artificial Sequence
  Chemically synthesized
acagaacugcuauuuccucuaau

SEQ ID NO: 47211 - RNA, 23 nt, Artificial Sequence
  Chemically synthesized
aacagaacugcuauuuccucuaa

SEQ ID NO: 47212 - RNA, 23 nt, Artificial Sequence
  Chemically synthesized
gggaacuaaacuugaucuuaggg

SEQ ID NO: 47213 - RNA, 23 nt, Artificial Sequence
  Chemically synthesized
ugggaacuaaacuugaucuuagg

SEQ ID NO: 47214 - RNA, 23 nt, Artificial Sequence
  Chemically synthesized
gugggaacuaaacuugaucuuag

SEQ ID NO: 47215 - RNA, 23 nt, Artificial Sequence
  Chemically synthesized
agugggaacuaaacuugaucuua

SEQ ID NO: 47216 - RNA, 23 nt, Artificial Sequence
  Chemically synthesized
uagugggaacuaaacuugaucuu

SEQ ID NO: 47217 - RNA, 23 nt, Artificial Sequence
  Chemically synthesized
cuugaccaauacugacccucuuu

SEQ ID NO: 47218 - RNA, 23 nt, Artificial Sequence
  Chemically synthesized
ccauguuacuuuauucagagcua

SEQ ID NO: 47219 - RNA, 23 nt, Artificial Sequence
  Chemically synthesized
uccauguuacuuuauucagagcu

SEQ ID NO: 47220 - RNA, 23 nt, Artificial Sequence
  Chemically synthesized
uuccauguuacuuuauucagagc

SEQ ID NO: 47221 - RNA, 23 nt, Artificial Sequence
  Chemically synthesized
uuuccauguuacuuuauucagag

SEQ ID NO: 47222 - RNA, 23 nt, Artificial Sequence
  Chemically synthesized
cuuuccauguuacuuuauucaga

SEQ ID NO: 47223 - RNA, 23 nt, Artificial Sequence
  Chemically synthesized
uggagauuuacacuacauuguac

SEQ ID NO: 47224 - RNA, 23 nt, Artificial Sequence
  Chemically synthesized
guggagauuuacacuacauugua

SEQ ID NO: 47225 - RNA, 23 nt, Artificial Sequence
  Chemically synthesized
aguggagauuuacacuacauugu

SEQ ID NO: 47226 - RNA, 23 nt, Artificial Sequence
  Chemically synthesized
aaguggagauuuacacuacauug

SEQ ID NO: 47227 - RNA, 23 nt, Artificial Sequence
  Chemically synthesized
gaaguggagauuuacacuacauu

SEQ ID NO: 47228 - RNA, 23 nt, Artificial Sequence
  Chemically synthesized
cgaaguggagauuuacacuacau

SEQ ID NO: 47229 - RNA, 23 nt, Artificial Sequence
  Chemically synthesized
caaugcauuuccuggagaauaua

SEQ ID NO: 47230 - RNA, 23 nt, Artificial Sequence
  Chemically synthesized
ccaaugcauuuccuggagaauau

SEQ ID NO: 47231 - RNA, 23 nt, Artificial Sequence
  Chemically synthesized
accaaugcauuuccuggagaaua

SEQ ID NO: 47232 - RNA, 23 nt, Artificial Sequence
  Chemically synthesized
aaccaaugcauuuccuggagaau

SEQ ID NO: 47233 - RNA, 23 nt, Artificial Sequence
  Chemically synthesized
caaccaaugcauuuccuggagaa

SEQ ID NO: 47234 - RNA, 23 nt, Artificial Sequence
  Chemically synthesized
ugauuucauagcgaguuuucuga

SEQ ID NO: 47235 - RNA, 23 nt, Artificial Sequence
  Chemically synthesized
gugauuucauagcgaguuuucug

SEQ ID NO: 47236 - RNA, 23 nt, Artificial Sequence
  Chemically synthesized
ugugauuucauagcgaguuuucu

SEQ ID NO: 47237 - RNA, 23 nt, Artificial Sequence
  Chemically synthesized
uugugauuucauagcgaguuuuc

SEQ ID NO: 47238 - RNA, 23 nt, Artificial Sequence
  Chemically synthesized
uuugugauuucauagcgaguuuu

SEQ ID NO: 47239 - RNA, 23 nt, Artificial Sequence
  Chemically synthesized
cuuugugauuucauagcgaguuu

SEQ ID NO: 47240 - RNA, 23 nt, Artificial Sequence
  Chemically synthesized
guaguucucagaugcguaaagca

SEQ ID NO: 47241 - RNA, 23 nt, Artificial Sequence
  Chemically synthesized
uguaguucucagaugcguaaagc

SEQ ID NO: 47242 - RNA, 23 nt, Artificial Sequence
  Chemically synthesized
auguaguucucagaugcguaaag

SEQ ID NO: 47243 - RNA, 23 nt, Artificial Sequence
  Chemically synthesized
uauguaguucucagaugcguaaa

SEQ ID NO: 47244 - RNA, 23 nt, Artificial Sequence
  Chemically synthesized
cuauguaguucucagaugcguaa

SEQ ID NO: 47245 - RNA, 23 nt, Artificial Sequence
  Chemically synthesized
ccuauccuauccgcaaacagaug

SEQ ID NO: 47246 - RNA, 23 nt, Artificial Sequence
  Chemically synthesized
cgcuuugccuauugauguuccuu

SEQ ID NO: 47247 - RNA, 23 nt, Artificial Sequence
  Chemically synthesized
ucgcuuugccuauugauguuccu

SEQ ID NO: 47248 - RNA, 23 nt, Artificial Sequence
  Chemically synthesized
gucgcuuugccuauugauguucc

SEQ ID NO: 47249 - RNA, 23 nt, Artificial Sequence
  Chemically synthesized
agucgcuuugccuauugauguuc

SEQ ID NO: 47250 - RNA, 23 nt, Artificial Sequence
  Chemically synthesized
uagucgcuuugccuauugauguu

SEQ ID NO: 47251 - RNA, 23 nt, Artificial Sequence
  Chemically synthesized
cgauuaguaaaagugcuuuccau

SEQ ID NO: 47252 - RNA, 23 nt, Artificial Sequence
  Chemically synthesized
ucgauuaguaaaagugcuuucca

SEQ ID NO: 47253 - RNA, 23 nt, Artificial Sequence
  Chemically synthesized
gucgauuaguaaaagugcuuucc

SEQ ID NO: 47254 - RNA, 23 nt, Artificial Sequence
  Chemically synthesized
ugucgauuaguaaaagugcuuuc

SEQ ID NO: 47255 - RNA, 23 nt, Artificial Sequence
  Chemically synthesized
uugucgauuaguaaaagugcuuu

SEQ ID NO: 47256 - RNA, 23 nt, Artificial Sequence
  Chemically synthesized
ccuucugacugagcaauaugccu

SEQ ID NO: 47257 - RNA, 23 nt, Artificial Sequence
  Chemically synthesized
cccuucugacugagcaauaugcc

SEQ ID NO: 47258 - RNA, 23 nt, Artificial Sequence
  Chemically synthesized
ccccuucugacugagcaauaugc

SEQ ID NO: 47259 - RNA, 23 nt, Artificial Sequence
  Chemically synthesized
accccuucugacugagcaauaug

SEQ ID NO: 47260 - RNA, 23 nt, Artificial Sequence
  Chemically synthesized
aaccccuucugacugagcaauau

SEQ ID NO: 47261 - RNA, 23 nt, Artificial Sequence
  Chemically synthesized
gaaccccuucugacugagcaaua

SEQ ID NO: 47262 - RNA, 23 nt, Artificial Sequence
  Chemically synthesized
cggguaaaaacucuaaaagguua

SEQ ID NO: 47263 - RNA, 23 nt, Artificial Sequence
  Chemically synthesized
acggguaaaaacucuaaaagguu

SEQ ID NO: 47264 - RNA, 23 nt, Artificial Sequence
  Chemically synthesized
cacggguaaaaacucuaaaaggu

SEQ ID NO: 47265 - RNA, 23 nt, Artificial Sequence
  Chemically synthesized
ucacggguaaaaacucuaaaagg

SEQ ID NO: 47266 - RNA, 23 nt, Artificial Sequence
  Chemically synthesized
gucacggguaaaaacucuaaaag

SEQ ID NO: 47267 - RNA, 23 nt, Artificial Sequence
  Chemically synthesized
ugucacggguaaaaacucuaaaa

SEQ ID NO: 47268 - RNA, 23 nt, Artificial Sequence
  Chemically synthesized
ggaucagucuuugugauuucaua

SEQ ID NO: 47269 - RNA, 23 nt, Artificial Sequence
  Chemically synthesized
uggaucagucuuugugauuucau

SEQ ID NO: 47270 - RNA, 23 nt, Artificial Sequence
  Chemically synthesized
uuggaucagucuuugugauuuca

SEQ ID NO: 47271 - RNA, 23 nt, Artificial Sequence
  Chemically synthesized
uuuggaucagucuuugugauuuc

SEQ ID NO: 47272 - RNA, 23 nt, Artificial Sequence
  Chemically synthesized
cuuuggaucagucuuugugauuu

SEQ ID NO: 47273 - RNA, 23 nt, Artificial Sequence
  Chemically synthesized
gccuauugauguuccuuuggguc

SEQ ID NO: 47274 - RNA, 23 nt, Artificial Sequence
  Chemically synthesized
ugccuauugauguuccuuugggu

SEQ ID NO: 47275 - RNA, 23 nt, Artificial Sequence
  Chemically synthesized
uugccuauugauguuccuuuggg

SEQ ID NO: 47276 - RNA, 23 nt, Artificial Sequence
  Chemically synthesized
uuugccuauugauguuccuuugg

SEQ ID NO: 47277 - RNA, 23 nt, Artificial Sequence
  Chemically synthesized
cuuugccuauugauguuccuuug

SEQ ID NO: 47278 - RNA, 23 nt, Artificial Sequence
  Chemically synthesized
gcuuugccuauugauguuccuuu

SEQ ID NO: 47279 - RNA, 23 nt, Artificial Sequence
  Chemically synthesized
ugcuuuccauguuacuuuauuca

SEQ ID NO: 47280 - RNA, 23 nt, Artificial Sequence
  Chemically synthesized
gugcuuuccauguuacuuuauuc

SEQ ID NO: 47281 - RNA, 23 nt, Artificial Sequence
  Chemically synthesized
agugcuuuccauguuacuuuauu

SEQ ID NO: 47282 - RNA, 23 nt, Artificial Sequence
  Chemically synthesized
aagugcuuuccauguuacuuuau

SEQ ID NO: 47283 - RNA, 23 nt, Artificial Sequence
  Chemically synthesized
aaagugcuuuccauguuacuuua

SEQ ID NO: 47284 - RNA, 23 nt, Artificial Sequence
  Chemically synthesized
gugucacggguaaaaacucuaaa

SEQ ID NO: 47285 - RNA, 23 nt, Artificial Sequence
  Chemically synthesized
agugucacggguaaaaacucuaa

SEQ ID NO: 47286 - RNA, 23 nt, Artificial Sequence
  Chemically synthesized
ggaaugaaagugucacggguaaa

SEQ ID NO: 47287 - RNA, 23 nt, Artificial Sequence
  Chemically synthesized
ggagauuuacacuacauuguaca

SEQ ID NO: 47288 - RNA, 23 nt, Artificial Sequence
  Chemically synthesized
caguguuugacgaagcgauccga

SEQ ID NO: 47289 - RNA, 23 nt, Artificial Sequence
  Chemically synthesized
acaguguuugacgaagcgauccg

SEQ ID NO: 47290 - RNA, 23 nt, Artificial Sequence
  Chemically synthesized
gacaguguuugacgaagcgaucc

SEQ ID NO: 47291 - RNA, 23 nt, Artificial Sequence
  Chemically synthesized
agacaguguuugacgaagcgauc

SEQ ID NO: 47292 - RNA, 23 nt, Artificial Sequence
  Chemically synthesized
aagacaguguuugacgaagcgau

SEQ ID NO: 47293 - RNA, 23 nt, Artificial Sequence
  Chemically synthesized
ggaacuaaacuugaucuuaggga

SEQ ID NO: 47294 - RNA, 23 nt, Artificial Sequence
  Chemically synthesized
guguaaaaaucauguguugcagc

SEQ ID NO: 47295 - RNA, 23 nt, Artificial Sequence
  Chemically synthesized
aaaagugcuuuccauguuacuuu

SEQ ID NO: 47296 - RNA, 23 nt, Artificial Sequence
  Chemically synthesized
gcuuuuccuuucucuuacaccug

SEQ ID NO: 47297 - RNA, 23 nt, Artificial Sequence
  Chemically synthesized
agcuuuuccuuucucuuacaccu

SEQ ID NO: 47298 - RNA, 23 nt, Artificial Sequence
  Chemically synthesized
aagcuuuuccuuucucuuacacc

SEQ ID NO: 47299 - RNA, 23 nt, Artificial Sequence
  Chemically synthesized
uaagcuuuuccuuucucuuacac

SEQ ID NO: 47300 - RNA, 23 nt, Artificial Sequence
  Chemically synthesized
uuaagcuuuuccuuucucuuaca

SEQ ID NO: 47301 - RNA, 23 nt, Artificial Sequence
  Chemically synthesized
ggaaauguuuucuuaagcuuuuc

SEQ ID NO: 47302 - RNA, 23 nt, Artificial Sequence
  Chemically synthesized
aggaaauguuuucuuaagcuuuu

SEQ ID NO: 47303 - RNA, 23 nt, Artificial Sequence
  Chemically synthesized
caggaaauguuuucuuaagcuuu

SEQ ID NO: 47304 - RNA, 23 nt, Artificial Sequence
  Chemically synthesized
ucaggaaauguuuucuuaagcuu

SEQ ID NO: 47305 - RNA, 23 nt, Artificial Sequence
  Chemically synthesized
aucaggaaauguuuucuuaagcu

SEQ ID NO: 47306 - RNA, 23 nt, Artificial Sequence
  Chemically synthesized
agaugaugaaagaaagguuggua

SEQ ID NO: 47307 - RNA, 23 nt, Artificial Sequence
  Chemically synthesized
uagaugaugaaagaaagguuggu

SEQ ID NO: 47308 - RNA, 23 nt, Artificial Sequence
  Chemically synthesized
guagaugaugaaagaaagguugg

SEQ ID NO: 47309 - RNA, 23 nt, Artificial Sequence
  Chemically synthesized
aguagaugaugaaagaaagguug

SEQ ID NO: 47310 - RNA, 23 nt, Artificial Sequence
  Chemically synthesized
caguagaugaugaaagaaagguu

SEQ ID NO: 47311 - RNA, 23 nt, Artificial Sequence
  Chemically synthesized
gcaguagaugaugaaagaaaggu

SEQ ID NO: 47312 - RNA, 23 nt, Artificial Sequence
  Chemically synthesized
ugcaguagaugaugaaagaaagg

SEQ ID NO: 47313 - RNA, 23 nt, Artificial Sequence
  Chemically synthesized
augcaguagaugaugaaagaaag

SEQ ID NO: 47314 - RNA, 23 nt, Artificial Sequence
  Chemically synthesized
aaugcaguagaugaugaaagaaa

SEQ ID NO: 47315 - RNA, 23 nt, Artificial Sequence
  Chemically synthesized
aaaugcaguagaugaugaaagaa

SEQ ID NO: 47316 - RNA, 23 nt, Artificial Sequence
  Chemically synthesized
acauuguacaaggaaugaaagug

SEQ ID NO: 47317 - RNA, 23 nt, Artificial Sequence
  Chemically synthesized
uacauuguacaaggaaugaaagu

SEQ ID NO: 47318 - RNA, 23 nt, Artificial Sequence
  Chemically synthesized
cuacauuguacaaggaaugaaag

SEQ ID NO: 47319 - RNA, 23 nt, Artificial Sequence
  Chemically synthesized
acuacauuguacaaggaaugaaa

SEQ ID NO: 47320 - RNA, 23 nt, Artificial Sequence
  Chemically synthesized
cacuacauuguacaaggaaugaa

SEQ ID NO: 47321 - RNA, 23 nt, Artificial Sequence
  Chemically synthesized
gagauuuacacuacauuguacaa

SEQ ID NO: 47322 - RNA, 23 nt, Artificial Sequence
  Chemically synthesized
gaacagaacugcuauuuccucua

SEQ ID NO: 47323 - RNA, 23 nt, Artificial Sequence
  Chemically synthesized
cagucuuugugauuucauagcga

SEQ ID NO: 47324 - RNA, 23 nt, Artificial Sequence
  Chemically synthesized
ucagucuuugugauuucauagcg

SEQ ID NO: 47325 - RNA, 23 nt, Artificial Sequence
  Chemically synthesized
aucagucuuugugauuucauagc

SEQ ID NO: 47326 - RNA, 23 nt, Artificial Sequence
  Chemically synthesized
gaucagucuuugugauuucauag

SEQ ID NO: 47327 - RNA, 23 nt, Artificial Sequence
  Chemically synthesized
cagacucacauucuauuaaaauu

SEQ ID NO: 47328 - RNA, 23 nt, Artificial Sequence
  Chemically synthesized
ucagacucacauucuauuaaaau

SEQ ID NO: 47329 - RNA, 23 nt, Artificial Sequence
  Chemically synthesized
uucagacucacauucuauuaaaa

SEQ ID NO: 47330 - RNA, 23 nt, Artificial Sequence
  Chemically synthesized
guucagacucacauucuauuaaa

SEQ ID NO: 47331 - RNA, 23 nt, Artificial Sequence
  Chemically synthesized
aguucagacucacauucuauuaa

SEQ ID NO: 47332 - RNA, 23 nt, Artificial Sequence
  Chemically synthesized
agauuggugcuguaaaauaccug

SEQ ID NO: 47333 - RNA, 23 nt, Artificial Sequence
  Chemically synthesized
gagauuggugcuguaaaauaccu

SEQ ID NO: 47334 - RNA, 23 nt, Artificial Sequence
  Chemically synthesized
gccacuacaacagaauuuuuuaa

SEQ ID NO: 47335 - RNA, 23 nt, Artificial Sequence
  Chemically synthesized
agccacuacaacagaauuuuuua

SEQ ID NO: 47336 - RNA, 23 nt, Artificial Sequence
  Chemically synthesized
cagccacuacaacagaauuuuuu

SEQ ID NO: 47337 - RNA, 23 nt, Artificial Sequence
  Chemically synthesized
ucagccacuacaacagaauuuuu

SEQ ID NO: 47338 - RNA, 23 nt, Artificial Sequence
  Chemically synthesized
uucagccacuacaacagaauuuu

SEQ ID NO: 47339 - RNA, 23 nt, Artificial Sequence
  Chemically synthesized
gguucuguaaacugugcuagugc

SEQ ID NO: 47340 - RNA, 23 nt, Artificial Sequence
  Chemically synthesized
agguucuguaaacugugcuagug

SEQ ID NO: 47341 - RNA, 23 nt, Artificial Sequence
  Chemically synthesized
gagguucuguaaacugugcuagu

SEQ ID NO: 47342 - RNA, 23 nt, Artificial Sequence
  Chemically synthesized
ugagguucuguaaacugugcuag

SEQ ID NO: 47343 - RNA, 23 nt, Artificial Sequence
  Chemically synthesized
gugagguucuguaaacugugcua

SEQ ID NO: 47344 - RNA, 23 nt, Artificial Sequence
  Chemically synthesized
gggucugugagguucuguaaacu

SEQ ID NO: 47345 - RNA, 23 nt, Artificial Sequence
  Chemically synthesized
ugggucugugagguucuguaaac

SEQ ID NO: 47346 - RNA, 23 nt, Artificial Sequence
  Chemically synthesized
uugggucugugagguucuguaaa

SEQ ID NO: 47347 - RNA, 23 nt, Artificial Sequence
  Chemically synthesized
uuugggucugugagguucuguaa

SEQ ID NO: 47348 - RNA, 23 nt, Artificial Sequence
  Chemically synthesized
cuuugggucugugagguucugua

SEQ ID NO: 47349 - RNA, 23 nt, Artificial Sequence
  Chemically synthesized
guaacuagguguaaaaaucaugu

SEQ ID NO: 47350 - RNA, 23 nt, Artificial Sequence
  Chemically synthesized
aguaacuagguguaaaaaucaug

SEQ ID NO: 47351 - RNA, 23 nt, Artificial Sequence
  Chemically synthesized
uaguaacuagguguaaaaaucau

SEQ ID NO: 47352 - RNA, 23 nt, Artificial Sequence
  Chemically synthesized
cuaguaacuagguguaaaaauca

SEQ ID NO: 47353 - RNA, 23 nt, Artificial Sequence
  Chemically synthesized
ucuaguaacuagguguaaaaauc

SEQ ID NO: 47354 - RNA, 23 nt, Artificial Sequence
  Chemically synthesized
gcuuuccauguuacuuuauucag

SEQ ID NO: 47355 - RNA, 23 nt, Artificial Sequence
  Chemically synthesized
aaauugggcauuuaauucaucuu

SEQ ID NO: 47356 - RNA, 23 nt, Artificial Sequence
  Chemically synthesized
gguauuaucaggaaauguuuucu

SEQ ID NO: 47357 - RNA, 23 nt, Artificial Sequence
  Chemically synthesized
ugguauuaucaggaaauguuuuc

SEQ ID NO: 47358 - RNA, 23 nt, Artificial Sequence
  Chemically synthesized
uugguauuaucaggaaauguuuu

SEQ ID NO: 47359 - RNA, 23 nt, Artificial Sequence
  Chemically synthesized
guugguauuaucaggaaauguuu

SEQ ID NO: 47360 - RNA, 23 nt, Artificial Sequence
  Chemically synthesized
gguugguauuaucaggaaauguu

SEQ ID NO: 47361 - RNA, 23 nt, Artificial Sequence
  Chemically synthesized
agguugguauuaucaggaaaugu

SEQ ID NO: 47362 - RNA, 23 nt, Artificial Sequence
  Chemically synthesized
aagguugguauuaucaggaaaug

SEQ ID NO: 47363 - RNA, 23 nt, Artificial Sequence
  Chemically synthesized
aaagguugguauuaucaggaaau

SEQ ID NO: 47364 - RNA, 23 nt, Artificial Sequence
  Chemically synthesized
gaaagguugguauuaucaggaaa

SEQ ID NO: 47365 - RNA, 23 nt, Artificial Sequence
  Chemically synthesized
agaaagguugguauuaucaggaa

SEQ ID NO: 47366 - RNA, 23 nt, Artificial Sequence
  Chemically synthesized
guacaaggaaugaaagugucacg

SEQ ID NO: 47367 - RNA, 23 nt, Artificial Sequence
  Chemically synthesized
uguacaaggaaugaaagugucac

SEQ ID NO: 47368 - RNA, 23 nt, Artificial Sequence
  Chemically synthesized
uuguacaaggaaugaaaguguca

SEQ ID NO: 47369 - RNA, 23 nt, Artificial Sequence
  Chemically synthesized
auuguacaaggaaugaaaguguc

SEQ ID NO: 47370 - RNA, 23 nt, Artificial Sequence
  Chemically synthesized
cauuguacaaggaaugaaagugu

SEQ ID NO: 47371 - RNA, 23 nt, Artificial Sequence
  Chemically synthesized
caaaauacgaaguggagauuuac

SEQ ID NO: 47372 - RNA, 23 nt, Artificial Sequence
  Chemically synthesized
acaaaauacgaaguggagauuua

SEQ ID NO: 47373 - RNA, 23 nt, Artificial Sequence
  Chemically synthesized
gacaaaauacgaaguggagauuu

SEQ ID NO: 47374 - RNA, 23 nt, Artificial Sequence
  Chemically synthesized
ugacaaaauacgaaguggagauu

SEQ ID NO: 47375 - RNA, 23 nt, Artificial Sequence
  Chemically synthesized
uugacaaaauacgaaguggagau

SEQ ID NO: 47376 - RNA, 23 nt, Artificial Sequence
  Chemically synthesized
aacugcuauuuccucuaaugaag

SEQ ID NO: 47377 - RNA, 23 nt, Artificial Sequence
  Chemically synthesized
ccuauguaguucucagaugcgua

SEQ ID NO: 47378 - RNA, 23 nt, Artificial Sequence
  Chemically synthesized
uccuauguaguucucagaugcgu

SEQ ID NO: 47379 - RNA, 23 nt, Artificial Sequence
  Chemically synthesized
cuccuauguaguucucagaugcg

SEQ ID NO: 47380 - RNA, 23 nt, Artificial Sequence
  Chemically synthesized
ucuccuauguaguucucagaugc

SEQ ID NO: 47381 - RNA, 23 nt, Artificial Sequence
  Chemically synthesized
cucuccuauguaguucucagaug

SEQ ID NO: 47382 - RNA, 23 nt, Artificial Sequence
  Chemically synthesized
gauuaagaguugccaaaauaccu

SEQ ID NO: 47383 - RNA, 23 nt, Artificial Sequence
  Chemically synthesized
agauuaagaguugccaaaauacc

SEQ ID NO: 47384 - RNA, 23 nt, Artificial Sequence
  Chemically synthesized
cagauuaagaguugccaaaauac

SEQ ID NO: 47385 - RNA, 23 nt, Artificial Sequence
  Chemically synthesized
ucagauuaagaguugccaaaaua

SEQ ID NO: 47386 - RNA, 23 nt, Artificial Sequence
  Chemically synthesized
uucagauuaagaguugccaaaau

SEQ ID NO: 47387 - RNA, 23 nt, Artificial Sequence
  Chemically synthesized
uccugcaucauuugaaaaugucc

SEQ ID NO: 47388 - RNA, 23 nt, Artificial Sequence
  Chemically synthesized
guccugcaucauuugaaaauguc

SEQ ID NO: 47389 - RNA, 23 nt, Artificial Sequence
  Chemically synthesized
aguccugcaucauuugaaaaugu

SEQ ID NO: 47390 - RNA, 23 nt, Artificial Sequence
  Chemically synthesized
gaguccugcaucauuugaaaaug

SEQ ID NO: 47391 - RNA, 23 nt, Artificial Sequence
  Chemically synthesized
ugaguccugcaucauuugaaaau

SEQ ID NO: 47392 - RNA, 23 nt, Artificial Sequence
  Chemically synthesized
uaauuugcuuuucccuugugagu

SEQ ID NO: 47393 - RNA, 23 nt, Artificial Sequence
  Chemically synthesized
uuaauuugcuuuucccuugugag

SEQ ID NO: 47394 - RNA, 23 nt, Artificial Sequence
  Chemically synthesized
cuuaauuugcuuuucccuuguga

SEQ ID NO: 47395 - RNA, 23 nt, Artificial Sequence
  Chemically synthesized
ucuuaauuugcuuuucccuugug

SEQ ID NO: 47396 - RNA, 23 nt, Artificial Sequence
  Chemically synthesized
uucuuaauuugcuuuucccuugu

SEQ ID NO: 47397 - RNA, 23 nt, Artificial Sequence
  Chemically synthesized
caagaagauuaugacagauuacg

SEQ ID NO: 47398 - RNA, 23 nt, Artificial Sequence
  Chemically synthesized
acaagaagauuaugacagauuac

SEQ ID NO: 47399 - RNA, 23 nt, Artificial Sequence
  Chemically synthesized
gacaagaagauuaugacagauua

SEQ ID NO: 47400 - RNA, 23 nt, Artificial Sequence
  Chemically synthesized
ggacaagaagauuaugacagauu

SEQ ID NO: 47401 - RNA, 23 nt, Artificial Sequence
  Chemically synthesized
uggacaagaagauuaugacagau

SEQ ID NO: 47402 - RNA, 23 nt, Artificial Sequence
  Chemically synthesized
ccggugaaucugggcuuauggga

SEQ ID NO: 47403 - RNA, 23 nt, Artificial Sequence
  Chemically synthesized
accggugaaucugggcuuauggg

SEQ ID NO: 47404 - RNA, 23 nt, Artificial Sequence
  Chemically synthesized
aaccggugaaucugggcuuaugg

SEQ ID NO: 47405 - RNA, 23 nt, Artificial Sequence
  Chemically synthesized
aaaccggugaaucugggcuuaug

SEQ ID NO: 47406 - RNA, 23 nt, Artificial Sequence
  Chemically synthesized
aaaaccggugaaucugggcuuau

SEQ ID NO: 47407 - RNA, 23 nt, Artificial Sequence
  Chemically synthesized
gaauuguggaguguuuuuacauu

SEQ ID NO: 47408 - RNA, 23 nt, Artificial Sequence
  Chemically synthesized
agaauuguggaguguuuuuacau

SEQ ID NO: 47409 - RNA, 23 nt, Artificial Sequence
  Chemically synthesized
cagaauuguggaguguuuuuaca

SEQ ID NO: 47410 - RNA, 23 nt, Artificial Sequence
  Chemically synthesized
ccacuacaacagaauuuuuuaaa

SEQ ID NO: 47411 - RNA, 23 nt, Artificial Sequence
  Chemically synthesized
cugacgauguucuguacaacuua

SEQ ID NO: 47412 - RNA, 23 nt, Artificial Sequence
  Chemically synthesized
gcugacgauguucuguacaacuu

SEQ ID NO: 47413 - RNA, 23 nt, Artificial Sequence
  Chemically synthesized
ugcugacgauguucuguacaacu

SEQ ID NO: 47414 - RNA, 23 nt, Artificial Sequence
  Chemically synthesized
gugcugacgauguucuguacaac

SEQ ID NO: 47415 - RNA, 23 nt, Artificial Sequence
  Chemically synthesized
agugcugacgauguucuguacaa

SEQ ID NO: 47416 - RNA, 23 nt, Artificial Sequence
  Chemically synthesized
aacuagguguaaaaaucaugugu

SEQ ID NO: 47417 - RNA, 23 nt, Artificial Sequence
  Chemically synthesized
uaacuagguguaaaaaucaugug

SEQ ID NO: 47418 - RNA, 23 nt, Artificial Sequence
  Chemically synthesized
ugcuuuccuuaguuuucuaguaa

SEQ ID NO: 47419 - RNA, 23 nt, Artificial Sequence
  Chemically synthesized
gugcuuuccuuaguuuucuagua

SEQ ID NO: 47420 - RNA, 23 nt, Artificial Sequence
  Chemically synthesized
agugcuuuccuuaguuuucuagu

SEQ ID NO: 47421 - RNA, 23 nt, Artificial Sequence
  Chemically synthesized
aagugcuuuccuuaguuuucuag

SEQ ID NO: 47422 - RNA, 23 nt, Artificial Sequence
  Chemically synthesized
uaagugcuuuccuuaguuuucua

SEQ ID NO: 47423 - RNA, 23 nt, Artificial Sequence
  Chemically synthesized
gcuaauaagugcuuuccuuaguu

SEQ ID NO: 47424 - RNA, 23 nt, Artificial Sequence
  Chemically synthesized
agcuaauaagugcuuuccuuagu

SEQ ID NO: 47425 - RNA, 23 nt, Artificial Sequence
  Chemically synthesized
gagcuaauaagugcuuuccuuag

SEQ ID NO: 47426 - RNA, 23 nt, Artificial Sequence
  Chemically synthesized
agagcuaauaagugcuuuccuua

SEQ ID NO: 47427 - RNA, 23 nt, Artificial Sequence
  Chemically synthesized
cagagcuaauaagugcuuuccuu

SEQ ID NO: 47428 - RNA, 23 nt, Artificial Sequence
  Chemically synthesized
uaguaaaagugcuuuccauguua

SEQ ID NO: 47429 - RNA, 23 nt, Artificial Sequence
  Chemically synthesized
uuaguaaaagugcuuuccauguu

SEQ ID NO: 47430 - RNA, 23 nt, Artificial Sequence
  Chemically synthesized
auuaguaaaagugcuuuccaugu

SEQ ID NO: 47431 - RNA, 23 nt, Artificial Sequence
  Chemically synthesized
gauuaguaaaagugcuuuccaug

SEQ ID NO: 47432 - RNA, 23 nt, Artificial Sequence
  Chemically synthesized
cuaacuuaguaagugcuuuucuu

SEQ ID NO: 47433 - RNA, 23 nt, Artificial Sequence
  Chemically synthesized
gcuaacuuaguaagugcuuuucu

SEQ ID NO: 47434 - RNA, 23 nt, Artificial Sequence
  Chemically synthesized
cgcuaacuuaguaagugcuuuuc

SEQ ID NO: 47435 - RNA, 23 nt, Artificial Sequence
  Chemically synthesized
ucgcuaacuuaguaagugcuuuu

SEQ ID NO: 47436 - RNA, 23 nt, Artificial Sequence
  Chemically synthesized
gucgcuaacuuaguaagugcuuu

SEQ ID NO: 47437 - RNA, 23 nt, Artificial Sequence
  Chemically synthesized
cuuaagcuuuuccuuucucuuac

SEQ ID NO: 47438 - RNA, 23 nt, Artificial Sequence
  Chemically synthesized
gaaagaaagguugguauuaucag

SEQ ID NO: 47439 - RNA, 23 nt, Artificial Sequence
  Chemically synthesized
ugaaagaaagguugguauuauca

SEQ ID NO: 47440 - RNA, 23 nt, Artificial Sequence
  Chemically synthesized
augaaagaaagguugguauuauc

SEQ ID NO: 47441 - RNA, 23 nt, Artificial Sequence
  Chemically synthesized
gaugaaagaaagguugguauuau

SEQ ID NO: 47442 - RNA, 23 nt, Artificial Sequence
  Chemically synthesized
ugaugaaagaaagguugguauua

SEQ ID NO: 47443 - RNA, 23 nt, Artificial Sequence
  Chemically synthesized
gucaaaugcaguagaugaugaaa

SEQ ID NO: 47444 - RNA, 23 nt, Artificial Sequence
  Chemically synthesized
ugucaaaugcaguagaugaugaa

SEQ ID NO: 47445 - RNA, 23 nt, Artificial Sequence
  Chemically synthesized
cugucaaaugcaguagaugauga

SEQ ID NO: 47446 - RNA, 23 nt, Artificial Sequence
  Chemically synthesized
ucugucaaaugcaguagaugaug

SEQ ID NO: 47447 - RNA, 23 nt, Artificial Sequence
  Chemically synthesized
uucugucaaaugcaguagaugau

SEQ ID NO: 47448 - RNA, 23 nt, Artificial Sequence
  Chemically synthesized
aagugucacggguaaaaacucua

SEQ ID NO: 47449 - RNA, 23 nt, Artificial Sequence
  Chemically synthesized
caaaggacaaagacaguauuuug

SEQ ID NO: 47450 - RNA, 23 nt, Artificial Sequence
  Chemically synthesized
ucaaaggacaaagacaguauuuu

SEQ ID NO: 47451 - RNA, 23 nt, Artificial Sequence
  Chemically synthesized
aucaaaggacaaagacaguauuu

SEQ ID NO: 47452 - RNA, 23 nt, Artificial Sequence
  Chemically synthesized
gaucaaaggacaaagacaguauu

SEQ ID NO: 47453 - RNA, 23 nt, Artificial Sequence
  Chemically synthesized
ugaucaaaggacaaagacaguau

SEQ ID NO: 47454 - RNA, 23 nt, Artificial Sequence
  Chemically synthesized
ugcuauuuccucuaaugaagaau

SEQ ID NO: 47455 - RNA, 23 nt, Artificial Sequence
  Chemically synthesized
cugcuauuuccucuaaugaagaa

SEQ ID NO: 47456 - RNA, 23 nt, Artificial Sequence
  Chemically synthesized
acugcuauuuccucuaaugaaga

SEQ ID NO: 47457 - RNA, 23 nt, Artificial Sequence
  Chemically synthesized
acaccgagcacugaacuuugcaa

SEQ ID NO: 47458 - RNA, 23 nt, Artificial Sequence
  Chemically synthesized
aacaccgagcacugaacuuugca

SEQ ID NO: 47459 - RNA, 23 nt, Artificial Sequence
  Chemically synthesized
gaacaccgagcacugaacuuugc

SEQ ID NO: 47460 - RNA, 23 nt, Artificial Sequence
  Chemically synthesized
agaacaccgagcacugaacuuug

SEQ ID NO: 47461 - RNA, 23 nt, Artificial Sequence
  Chemically synthesized
gagaacaccgagcacugaacuuu

SEQ ID NO: 47462 - RNA, 23 nt, Artificial Sequence
  Chemically synthesized
cuucugaacuacacugcauuguu

SEQ ID NO: 47463 - RNA, 23 nt, Artificial Sequence
  Chemically synthesized
ccuucugaacuacacugcauugu

SEQ ID NO: 47464 - RNA, 23 nt, Artificial Sequence
  Chemically synthesized
accuucugaacuacacugcauug

SEQ ID NO: 47465 - RNA, 23 nt, Artificial Sequence
  Chemically synthesized
uaccuucugaacuacacugcauu

SEQ ID NO: 47466 - RNA, 23 nt, Artificial Sequence
  Chemically synthesized
auaccuucugaacuacacugcau

SEQ ID NO: 47467 - RNA, 23 nt, Artificial Sequence
  Chemically synthesized
accauuuuuugaaccaaucagua

SEQ ID NO: 47468 - RNA, 23 nt, Artificial Sequence
  Chemically synthesized
aaccauuuuuugaaccaaucagu

SEQ ID NO: 47469 - RNA, 23 nt, Artificial Sequence
  Chemically synthesized
aaaccauuuuuugaaccaaucag

SEQ ID NO: 47470 - RNA, 23 nt, Artificial Sequence
  Chemically synthesized
aaaaccauuuuuugaaccaauca

SEQ ID NO: 47471 - RNA, 23 nt, Artificial Sequence
  Chemically synthesized
uaaaaccauuuuuugaaccaauc

SEQ ID NO: 47472 - RNA, 23 nt, Artificial Sequence
  Chemically synthesized
cccgugaagaagaggaagagaaa

SEQ ID NO: 47473 - RNA, 23 nt, Artificial Sequence
  Chemically synthesized
ucccgugaagaagaggaagagaa

SEQ ID NO: 47474 - RNA, 23 nt, Artificial Sequence
  Chemically synthesized
cucccgugaagaagaggaagaga

SEQ ID NO: 47475 - RNA, 23 nt, Artificial Sequence
  Chemically synthesized
ccucccgugaagaagaggaagag

SEQ ID NO: 47476 - RNA, 23 nt, Artificial Sequence
  Chemically synthesized
gccucccgugaagaagaggaaga

SEQ ID NO: 47477 - RNA, 23 nt, Artificial Sequence
  Chemically synthesized
caagacaguguuugacgaagcga

SEQ ID NO: 47478 - RNA, 23 nt, Artificial Sequence
  Chemically synthesized
ucaagacaguguuugacgaagcg

SEQ ID NO: 47479 - RNA, 23 nt, Artificial Sequence
  Chemically synthesized
cucaagacaguguuugacgaagc

SEQ ID NO: 47480 - RNA, 23 nt, Artificial Sequence
  Chemically synthesized
gcuaaggagauuggugcuguaaa

SEQ ID NO: 47481 - RNA, 23 nt, Artificial Sequence
  Chemically synthesized
gggaugauaaagacacgaucgag

SEQ ID NO: 47482 - RNA, 23 nt, Artificial Sequence
  Chemically synthesized
agggaugauaaagacacgaucga

SEQ ID NO: 47483 - RNA, 23 nt, Artificial Sequence
  Chemically synthesized
uagggaugauaaagacacgaucg

SEQ ID NO: 47484 - RNA, 23 nt, Artificial Sequence
  Chemically synthesized
uuagggaugauaaagacacgauc

SEQ ID NO: 47485 - RNA, 23 nt, Artificial Sequence
  Chemically synthesized
cuuagggaugauaaagacacgau

SEQ ID NO: 47486 - RNA, 23 nt, Artificial Sequence
  Chemically synthesized
cuagugggaacuaaacuugaucu

SEQ ID NO: 47487 - RNA, 23 nt, Artificial Sequence
  Chemically synthesized
ccuagugggaacuaaacuugauc

SEQ ID NO: 47488 - RNA, 23 nt, Artificial Sequence
  Chemically synthesized
uccuagugggaacuaaacuugau

SEQ ID NO: 47489 - RNA, 23 nt, Artificial Sequence
  Chemically synthesized
cgugcaaagugguauccugaggu

SEQ ID NO: 47490 - RNA, 23 nt, Artificial Sequence
  Chemically synthesized
ccgugcaaagugguauccugagg

SEQ ID NO: 47491 - RNA, 23 nt, Artificial Sequence
  Chemically synthesized
uccgugcaaagugguauccugag

SEQ ID NO: 47492 - RNA, 23 nt, Artificial Sequence
  Chemically synthesized
guccgugcaaagugguauccuga

SEQ ID NO: 47493 - RNA, 23 nt, Artificial Sequence
  Chemically synthesized
uguccgugcaaagugguauccug

SEQ ID NO: 47494 - RNA, 23 nt, Artificial Sequence
  Chemically synthesized
uugaaaauguccgugcaaagugg

SEQ ID NO: 47495 - RNA, 23 nt, Artificial Sequence
  Chemically synthesized
uuugaaaauguccgugcaaagug

SEQ ID NO: 47496 - RNA, 23 nt, Artificial Sequence
  Chemically synthesized
auuugaaaauguccgugcaaagu

SEQ ID NO: 47497 - RNA, 23 nt, Artificial Sequence
  Chemically synthesized
cauuugaaaauguccgugcaaag

SEQ ID NO: 47498 - RNA, 23 nt, Artificial Sequence
  Chemically synthesized
ucauuugaaaauguccgugcaaa

SEQ ID NO: 47499 - RNA, 23 nt, Artificial Sequence
  Chemically synthesized
gcaguuuuccucagcuuugggug

SEQ ID NO: 47500 - RNA, 23 nt, Artificial Sequence
  Chemically synthesized
ugcaguuuuccucagcuuugggu

SEQ ID NO: 47501 - RNA, 23 nt, Artificial Sequence
  Chemically synthesized
cugcaguuuuccucagcuuuggg

SEQ ID NO: 47502 - RNA, 23 nt, Artificial Sequence
  Chemically synthesized
ucugcaguuuuccucagcuuugg

SEQ ID NO: 47503 - RNA, 23 nt, Artificial Sequence
  Chemically synthesized
cucugcaguuuuccucagcuuug

SEQ ID NO: 47504 - RNA, 23 nt, Artificial Sequence
  Chemically synthesized
cggugaaucugggcuuaugggau

SEQ ID NO: 47505 - RNA, 23 nt, Artificial Sequence
  Chemically synthesized
gaaaaccggugaaucugggcuua

SEQ ID NO: 47506 - RNA, 23 nt, Artificial Sequence
  Chemically synthesized
uagugcugacgauguucuguaca

SEQ ID NO: 47507 - RNA, 23 nt, Artificial Sequence
  Chemically synthesized
cuagugcugacgauguucuguac

SEQ ID NO: 47508 - RNA, 23 nt, Artificial Sequence
  Chemically synthesized
gcuagugcugacgauguucugua

SEQ ID NO: 47509 - RNA, 23 nt, Artificial Sequence
  Chemically synthesized
gucuuugacaauuauucugccaa

SEQ ID NO: 47510 - RNA, 23 nt, Artificial Sequence
  Chemically synthesized
ugucuuugacaauuauucugcca

SEQ ID NO: 47511 - RNA, 23 nt, Artificial Sequence
  Chemically synthesized
cugucuuugacaauuauucugcc

SEQ ID NO: 47512 - RNA, 23 nt, Artificial Sequence
  Chemically synthesized
acugucuuugacaauuauucugc

SEQ ID NO: 47513 - RNA, 23 nt, Artificial Sequence
  Chemically synthesized
uacugucuuugacaauuauucug

SEQ ID NO: 47514 - RNA, 23 nt, Artificial Sequence
  Chemically synthesized
ccuuaguuuucuaguaacuaggu

SEQ ID NO: 47515 - RNA, 23 nt, Artificial Sequence
  Chemically synthesized
uccuuaguuuucuaguaacuagg

SEQ ID NO: 47516 - RNA, 23 nt, Artificial Sequence
  Chemically synthesized
uuccuuaguuuucuaguaacuag

SEQ ID NO: 47517 - RNA, 23 nt, Artificial Sequence
  Chemically synthesized
uuuccuuaguuuucuaguaacua

SEQ ID NO: 47518 - RNA, 23 nt, Artificial Sequence
  Chemically synthesized
cuuuccuuaguuuucuaguaacu

SEQ ID NO: 47519 - RNA, 23 nt, Artificial Sequence
  Chemically synthesized
guuacuuuauucagagcuaauaa

SEQ ID NO: 47520 - RNA, 23 nt, Artificial Sequence
  Chemically synthesized
uguuacuuuauucagagcuaaua

SEQ ID NO: 47521 - RNA, 23 nt, Artificial Sequence
  Chemically synthesized
auguuacuuuauucagagcuaau

SEQ ID NO: 47522 - RNA, 23 nt, Artificial Sequence
  Chemically synthesized
cauguuacuuuauucagagcuaa

SEQ ID NO: 47523 - RNA, 23 nt, Artificial Sequence
  Chemically synthesized
uuugucgauuaguaaaagugcuu

SEQ ID NO: 47524 - RNA, 23 nt, Artificial Sequence
  Chemically synthesized
caauaugccuccuuguauuauaa

SEQ ID NO: 47525 - RNA, 23 nt, Artificial Sequence
  Chemically synthesized
gcaauaugccuccuuguauuaua

SEQ ID NO: 47526 - RNA, 23 nt, Artificial Sequence
  Chemically synthesized
agcaauaugccuccuuguauuau

SEQ ID NO: 47527 - RNA, 23 nt, Artificial Sequence
  Chemically synthesized
gagcaauaugccuccuuguauua

SEQ ID NO: 47528 - RNA, 23 nt, Artificial Sequence
  Chemically synthesized
ugagcaauaugccuccuuguauu

SEQ ID NO: 47529 - RNA, 23 nt, Artificial Sequence
  Chemically synthesized
cugagcaauaugccuccuuguau

SEQ ID NO: 47530 - RNA, 23 nt, Artificial Sequence
  Chemically synthesized
cuuaguaagugcuuuucuuauag

SEQ ID NO: 47531 - RNA, 23 nt, Artificial Sequence
  Chemically synthesized
acuuaguaagugcuuuucuuaua

SEQ ID NO: 47532 - RNA, 23 nt, Artificial Sequence
  Chemically synthesized
aacuuaguaagugcuuuucuuau

SEQ ID NO: 47533 - RNA, 23 nt, Artificial Sequence
  Chemically synthesized
uaacuuaguaagugcuuuucuua

SEQ ID NO: 47534 - RNA, 23 nt, Artificial Sequence
  Chemically synthesized
augaugaaagaaagguugguauu

SEQ ID NO: 47535 - RNA, 23 nt, Artificial Sequence
  Chemically synthesized
caaaugcaguagaugaugaaaga

SEQ ID NO: 47536 - RNA, 23 nt, Artificial Sequence
  Chemically synthesized
gguaaaaacucuaaaagguuaau

SEQ ID NO: 47537 - RNA, 23 nt, Artificial Sequence
  Chemically synthesized
ggguaaaaacucuaaaagguuaa

SEQ ID NO: 47538 - RNA, 23 nt, Artificial Sequence
  Chemically synthesized
gcggagauuuugaacagaacugc

SEQ ID NO: 47539 - RNA, 23 nt, Artificial Sequence
  Chemically synthesized
ugcggagauuuugaacagaacug

SEQ ID NO: 47540 - RNA, 23 nt, Artificial Sequence
  Chemically synthesized
uugcggagauuuugaacagaacu

SEQ ID NO: 47541 - RNA, 23 nt, Artificial Sequence
  Chemically synthesized
uuugcggagauuuugaacagaac

SEQ ID NO: 47542 - RNA, 23 nt, Artificial Sequence
  Chemically synthesized
uuuugcggagauuuugaacagaa

SEQ ID NO: 47543 - RNA, 23 nt, Artificial Sequence
  Chemically synthesized
ucuuugugauuucauagcgaguu

SEQ ID NO: 47544 - RNA, 23 nt, Artificial Sequence
  Chemically synthesized
gcucuccuauguaguucucagau

SEQ ID NO: 47545 - RNA, 23 nt, Artificial Sequence
  Chemically synthesized
ugcucuccuauguaguucucaga

SEQ ID NO: 47546 - RNA, 23 nt, Artificial Sequence
  Chemically synthesized
gccauuuccuguuucucugcagu

SEQ ID NO: 47547 - RNA, 23 nt, Artificial Sequence
  Chemically synthesized
ggccauuuccuguuucucugcag

SEQ ID NO: 47548 - RNA, 23 nt, Artificial Sequence
  Chemically synthesized
cggccauuuccuguuucucugca

SEQ ID NO: 47549 - RNA, 23 nt, Artificial Sequence
  Chemically synthesized
gcggccauuuccuguuucucugc

SEQ ID NO: 47550 - RNA, 23 nt, Artificial Sequence
  Chemically synthesized
agcggccauuuccuguuucucug

SEQ ID NO: 47551 - RNA, 23 nt, Artificial Sequence
  Chemically synthesized
aaaaugacaagccuucuuaaagc

SEQ ID NO: 47552 - RNA, 23 nt, Artificial Sequence
  Chemically synthesized
uaaaaugacaagccuucuuaaag

SEQ ID NO: 47553 - RNA, 23 nt, Artificial Sequence
  Chemically synthesized
cuaaaaugacaagccuucuuaaa

SEQ ID NO: 47554 - RNA, 23 nt, Artificial Sequence
  Chemically synthesized
ccuaaaaugacaagccuucuuaa

SEQ ID NO: 47555 - RNA, 23 nt, Artificial Sequence
  Chemically synthesized
cccuaaaaugacaagccuucuua

SEQ ID NO: 47556 - RNA, 23 nt, Artificial Sequence
  Chemically synthesized
ccaaucaguaauuuuaagguuuu

SEQ ID NO: 47557 - RNA, 23 nt, Artificial Sequence
  Chemically synthesized
accaaucaguaauuuuaagguuu

SEQ ID NO: 47558 - RNA, 23 nt, Artificial Sequence
  Chemically synthesized
aaccaaucaguaauuuuaagguu

SEQ ID NO: 47559 - RNA, 23 nt, Artificial Sequence
  Chemically synthesized
gaaccaaucaguaauuuuaaggu

SEQ ID NO: 47560 - RNA, 23 nt, Artificial Sequence
  Chemically synthesized
ugaaccaaucaguaauuuuaagg

SEQ ID NO: 47561 - RNA, 23 nt, Artificial Sequence
  Chemically synthesized
gaaaaugccugcuguuguaaaug

SEQ ID NO: 47562 - RNA, 23 nt, Artificial Sequence
  Chemically synthesized
agaaaaugccugcuguuguaaau

SEQ ID NO: 47563 - RNA, 23 nt, Artificial Sequence
  Chemically synthesized
gagaaaaugccugcuguuguaaa

SEQ ID NO: 47564 - RNA, 23 nt, Artificial Sequence
  Chemically synthesized
agagaaaaugccugcuguuguaa

SEQ ID NO: 47565 - RNA, 23 nt, Artificial Sequence
  Chemically synthesized
aagagaaaaugccugcuguugua

SEQ ID NO: 47566 - RNA, 23 nt, Artificial Sequence
  Chemically synthesized
auguccgugcaaagugguauccu

SEQ ID NO: 47567 - RNA, 23 nt, Artificial Sequence
  Chemically synthesized
ccugcaucauuugaaaauguccg

SEQ ID NO: 47568 - RNA, 23 nt, Artificial Sequence
  Chemically synthesized
ccuugugaguccugcaucauuug

SEQ ID NO: 47569 - RNA, 23 nt, Artificial Sequence
  Chemically synthesized
cccuugugaguccugcaucauuu

SEQ ID NO: 47570 - RNA, 23 nt, Artificial Sequence
  Chemically synthesized
ucccuugugaguccugcaucauu

SEQ ID NO: 47571 - RNA, 23 nt, Artificial Sequence
  Chemically synthesized
uucccuugugaguccugcaucau

SEQ ID NO: 47572 - RNA, 23 nt, Artificial Sequence
  Chemically synthesized
uuucccuugugaguccugcauca

SEQ ID NO: 47573 - RNA, 23 nt, Artificial Sequence
  Chemically synthesized
gaagauuaugacagauuacgccc

SEQ ID NO: 47574 - RNA, 23 nt, Artificial Sequence
  Chemically synthesized
agaagauuaugacagauuacgcc

SEQ ID NO: 47575 - RNA, 23 nt, Artificial Sequence
  Chemically synthesized
aagaagauuaugacagauuacgc

SEQ ID NO: 47576 - RNA, 23 nt, Artificial Sequence
  Chemically synthesized
agcuggacaagaagauuaugaca

SEQ ID NO: 47577 - RNA, 23 nt, Artificial Sequence
  Chemically synthesized
cagcuggacaagaagauuaugac

SEQ ID NO: 47578 - RNA, 23 nt, Artificial Sequence
  Chemically synthesized
acagcuggacaagaagauuauga

SEQ ID NO: 47579 - RNA, 23 nt, Artificial Sequence
  Chemically synthesized
uacagcuggacaagaagauuaug

SEQ ID NO: 47580 - RNA, 23 nt, Artificial Sequence
  Chemically synthesized
auacagcuggacaagaagauuau

SEQ ID NO: 47581 - RNA, 23 nt, Artificial Sequence
  Chemically synthesized
cuucagccacuacaacagaauuu

SEQ ID NO: 47582 - RNA, 23 nt, Artificial Sequence
  Chemically synthesized
ccuucagccacuacaacagaauu

SEQ ID NO: 47583 - RNA, 23 nt, Artificial Sequence
  Chemically synthesized
cccuucagccacuacaacagaau

SEQ ID NO: 47584 - RNA, 23 nt, Artificial Sequence
  Chemically synthesized
cugugagguucuguaaacugugc

SEQ ID NO: 47585 - RNA, 23 nt, Artificial Sequence
  Chemically synthesized
ucugugagguucuguaaacugug

SEQ ID NO: 47586 - RNA, 23 nt, Artificial Sequence
  Chemically synthesized
gucugugagguucuguaaacugu

SEQ ID NO: 47587 - RNA, 23 nt, Artificial Sequence
  Chemically synthesized
ggucugugagguucuguaaacug

SEQ ID NO: 47588 - RNA, 23 nt, Artificial Sequence
  Chemically synthesized
gcuuuccuuaguuuucuaguaac

SEQ ID NO: 47589 - RNA, 23 nt, Artificial Sequence
  Chemically synthesized
uaaaagugcuuuccauguuacuu

SEQ ID NO: 47590 - RNA, 23 nt, Artificial Sequence
  Chemically synthesized
guaaaagugcuuuccauguuacu

SEQ ID NO: 47591 - RNA, 23 nt, Artificial Sequence
  Chemically synthesized
aguaaaagugcuuuccauguuac

SEQ ID NO: 47592 - RNA, 23 nt, Artificial Sequence
  Chemically synthesized
agguuuuuuugucgauuaguaaa

SEQ ID NO: 47593 - RNA, 23 nt, Artificial Sequence
  Chemically synthesized
aagguuuuuuugucgauuaguaa

SEQ ID NO: 47594 - RNA, 23 nt, Artificial Sequence
  Chemically synthesized
gaagguuuuuuugucgauuagua

SEQ ID NO: 47595 - RNA, 23 nt, Artificial Sequence
  Chemically synthesized
agaagguuuuuuugucgauuagu

SEQ ID NO: 47596 - RNA, 23 nt, Artificial Sequence
  Chemically synthesized
uagaagguuuuuuugucgauuag

SEQ ID NO: 47597 - RNA, 23 nt, Artificial Sequence
  Chemically synthesized
uuagaagguuuuuuugucgauua

SEQ ID NO: 47598 - RNA, 23 nt, Artificial Sequence
  Chemically synthesized
auuagaagguuuuuuugucgauu

SEQ ID NO: 47599 - RNA, 23 nt, Artificial Sequence
  Chemically synthesized
auauaucccuacugucuuugaca

SEQ ID NO: 47600 - RNA, 23 nt, Artificial Sequence
  Chemically synthesized
aauauaucccuacugucuuugac

SEQ ID NO: 47601 - RNA, 23 nt, Artificial Sequence
  Chemically synthesized
gaauauaucccuacugucuuuga

SEQ ID NO: 47602 - RNA, 23 nt, Artificial Sequence
  Chemically synthesized
agaauauaucccuacugucuuug

SEQ ID NO: 47603 - RNA, 23 nt, Artificial Sequence
  Chemically synthesized
gagaauauaucccuacugucuuu

SEQ ID NO: 47604 - RNA, 23 nt, Artificial Sequence
  Chemically synthesized
caucuuuaaacugguuguucugu

SEQ ID NO: 47605 - RNA, 23 nt, Artificial Sequence
  Chemically synthesized
ucaucuuuaaacugguuguucug

SEQ ID NO: 47606 - RNA, 23 nt, Artificial Sequence
  Chemically synthesized
uucaucuuuaaacugguuguucu

SEQ ID NO: 47607 - RNA, 23 nt, Artificial Sequence
  Chemically synthesized
auucaucuuuaaacugguuguuc

SEQ ID NO: 47608 - RNA, 23 nt, Artificial Sequence
  Chemically synthesized
aauucaucuuuaaacugguuguu

SEQ ID NO: 47609 - RNA, 23 nt, Artificial Sequence
  Chemically synthesized
uaauucaucuuuaaacugguugu

SEQ ID NO: 47610 - RNA, 23 nt, Artificial Sequence
  Chemically synthesized
uaucaggaaauguuuucuuaagc

SEQ ID NO: 47611 - RNA, 23 nt, Artificial Sequence
  Chemically synthesized
uuaucaggaaauguuuucuuaag

SEQ ID NO: 47612 - RNA, 23 nt, Artificial Sequence
  Chemically synthesized
gguuaauuucugucaaaugcagu

SEQ ID NO: 47613 - RNA, 23 nt, Artificial Sequence
  Chemically synthesized
agguuaauuucugucaaaugcag

SEQ ID NO: 47614 - RNA, 23 nt, Artificial Sequence
  Chemically synthesized
aagguuaauuucugucaaaugca

SEQ ID NO: 47615 - RNA, 23 nt, Artificial Sequence
  Chemically synthesized
aaagguuaauuucugucaaaugc

SEQ ID NO: 47616 - RNA, 23 nt, Artificial Sequence
  Chemically synthesized
aaaagguuaauuucugucaaaug

SEQ ID NO: 47617 - RNA, 23 nt, Artificial Sequence
  Chemically synthesized
acacuacauuguacaaggaauga

SEQ ID NO: 47618 - RNA, 23 nt, Artificial Sequence
  Chemically synthesized
uacacuacauuguacaaggaaug

SEQ ID NO: 47619 - RNA, 23 nt, Artificial Sequence
  Chemically synthesized
aaaauacgaaguggagauuuaca

SEQ ID NO: 47620 - RNA, 23 nt, Artificial Sequence
  Chemically synthesized
aaaggacaaagacaguauuuuga

SEQ ID NO: 47621 - RNA, 23 nt, Artificial Sequence
  Chemically synthesized
aguuuucugaccagcuuuugcgg

SEQ ID NO: 47622 - RNA, 23 nt, Artificial Sequence
  Chemically synthesized
gaguuuucugaccagcuuuugcg

SEQ ID NO: 47623 - RNA, 23 nt, Artificial Sequence
  Chemically synthesized
cacugaacuuugcaaagaccuuc

SEQ ID NO: 47624 - RNA, 23 nt, Artificial Sequence
  Chemically synthesized
gcacugaacuuugcaaagaccuu

SEQ ID NO: 47625 - RNA, 23 nt, Artificial Sequence
  Chemically synthesized
agcacugaacuuugcaaagaccu

SEQ ID NO: 47626 - RNA, 23 nt, Artificial Sequence
  Chemically synthesized
gagcacugaacuuugcaaagacc

SEQ ID NO: 47627 - RNA, 23 nt, Artificial Sequence
  Chemically synthesized
cgagcacugaacuuugcaaagac

SEQ ID NO: 47628 - RNA, 23 nt, Artificial Sequence
  Chemically synthesized
gcccuaaaaugacaagccuucuu

SEQ ID NO: 47629 - RNA, 23 nt, Artificial Sequence
  Chemically synthesized
cuaaauguaagaguucagacuca

SEQ ID NO: 47630 - RNA, 23 nt, Artificial Sequence
  Chemically synthesized
ucuaaauguaagaguucagacuc

SEQ ID NO: 47631 - RNA, 23 nt, Artificial Sequence
  Chemically synthesized
uucuaaauguaagaguucagacu

SEQ ID NO: 47632 - RNA, 23 nt, Artificial Sequence
  Chemically synthesized
guucuaaauguaagaguucagac

SEQ ID NO: 47633 - RNA, 23 nt, Artificial Sequence
  Chemically synthesized
uguucuaaauguaagaguucaga

SEQ ID NO: 47634 - RNA, 23 nt, Artificial Sequence
  Chemically synthesized
ggcuaaggagauuggugcuguaa

SEQ ID NO: 47635 - RNA, 23 nt, Artificial Sequence
  Chemically synthesized
uggcuaaggagauuggugcugua

SEQ ID NO: 47636 - RNA, 23 nt, Artificial Sequence
  Chemically synthesized
ccauggcuaaggagauuggugcu

SEQ ID NO: 47637 - RNA, 23 nt, Artificial Sequence
  Chemically synthesized
gccauggcuaaggagauuggugc

SEQ ID NO: 47638 - RNA, 23 nt, Artificial Sequence
  Chemically synthesized
agccauggcuaaggagauuggug

SEQ ID NO: 47639 - RNA, 23 nt, Artificial Sequence
  Chemically synthesized
uagccauggcuaaggagauuggu

SEQ ID NO: 47640 - RNA, 23 nt, Artificial Sequence
  Chemically synthesized
cuagccauggcuaaggagauugg

SEQ ID NO: 47641 - RNA, 23 nt, Artificial Sequence
  Chemically synthesized
gugaguccugcaucauuugaaaa

SEQ ID NO: 47642 - RNA, 23 nt, Artificial Sequence
  Chemically synthesized
ugugaguccugcaucauuugaaa

SEQ ID NO: 47643 - RNA, 23 nt, Artificial Sequence
  Chemically synthesized
uugugaguccugcaucauuugaa

SEQ ID NO: 47644 - RNA, 23 nt, Artificial Sequence
  Chemically synthesized
cuggacaagaagauuaugacaga

SEQ ID NO: 47645 - RNA, 23 nt, Artificial Sequence
  Chemically synthesized
uguuuugcauguaugacuuaaua

SEQ ID NO: 47646 - RNA, 23 nt, Artificial Sequence
  Chemically synthesized
auguuuugcauguaugacuuaau

SEQ ID NO: 47647 - RNA, 23 nt, Artificial Sequence
  Chemically synthesized
uauguuuugcauguaugacuuaa

SEQ ID NO: 47648 - RNA, 23 nt, Artificial Sequence
  Chemically synthesized
uuauguuuugcauguaugacuua

SEQ ID NO: 47649 - RNA, 23 nt, Artificial Sequence
  Chemically synthesized
auuauguuuugcauguaugacuu

SEQ ID NO: 47650 - RNA, 23 nt, Artificial Sequence
  Chemically synthesized
auuguggaguguuuuuacauuga

SEQ ID NO: 47651 - RNA, 23 nt, Artificial Sequence
  Chemically synthesized
ugcuagugcugacgauguucugu

SEQ ID NO: 47652 - RNA, 23 nt, Artificial Sequence
  Chemically synthesized
gugcuagugcugacgauguucug

SEQ ID NO: 47653 - RNA, 23 nt, Artificial Sequence
  Chemically synthesized
ugugcuagugcugacgauguucu

SEQ ID NO: 47654 - RNA, 23 nt, Artificial Sequence
  Chemically synthesized
cuaugaaccuucuuaacaucacu

SEQ ID NO: 47655 - RNA, 23 nt, Artificial Sequence
  Chemically synthesized
acuaugaaccuucuuaacaucac

SEQ ID NO: 47656 - RNA, 23 nt, Artificial Sequence
  Chemically synthesized
aacuaugaaccuucuuaacauca

SEQ ID NO: 47657 - RNA, 23 nt, Artificial Sequence
  Chemically synthesized
aaacuaugaaccuucuuaacauc

SEQ ID NO: 47658 - RNA, 23 nt, Artificial Sequence
  Chemically synthesized
uaaacuaugaaccuucuuaacau

SEQ ID NO: 47659 - RNA, 23 nt, Artificial Sequence
  Chemically synthesized
cauuagaagguuuuuuugucgau

SEQ ID NO: 47660 - RNA, 23 nt, Artificial Sequence
  Chemically synthesized
guaagugcuuuucuuauagaacc

SEQ ID NO: 47661 - RNA, 23 nt, Artificial Sequence
  Chemically synthesized
aguaagugcuuuucuuauagaac

SEQ ID NO: 47662 - RNA, 23 nt, Artificial Sequence
  Chemically synthesized
uaguaagugcuuuucuuauagaa

SEQ ID NO: 47663 - RNA, 23 nt, Artificial Sequence
  Chemically synthesized
uuaguaagugcuuuucuuauaga

SEQ ID NO: 47664 - RNA, 23 nt, Artificial Sequence
  Chemically synthesized
agucgcuaacuuaguaagugcuu

SEQ ID NO: 47665 - RNA, 23 nt, Artificial Sequence
  Chemically synthesized
ucuuaagcuuuuccuuucucuua

SEQ ID NO: 47666 - RNA, 23 nt, Artificial Sequence
  Chemically synthesized
uucuuaagcuuuuccuuucucuu

SEQ ID NO: 47667 - RNA, 23 nt, Artificial Sequence
  Chemically synthesized
uuucuuaagcuuuuccuuucucu

SEQ ID NO: 47668 - RNA, 23 nt, Artificial Sequence
  Chemically synthesized
uuuucuuaagcuuuuccuuucuc

SEQ ID NO: 47669 - RNA, 23 nt, Artificial Sequence
  Chemically synthesized
guuuucuuaagcuuuuccuuucu

SEQ ID NO: 47670 - RNA, 23 nt, Artificial Sequence
  Chemically synthesized
ucaaaugcaguagaugaugaaag

SEQ ID NO: 47671 - RNA, 23 nt, Artificial Sequence
  Chemically synthesized
uuacacuacauuguacaaggaau

SEQ ID NO: 47672 - RNA, 23 nt, Artificial Sequence
  Chemically synthesized
uuuacacuacauuguacaaggaa

SEQ ID NO: 47673 - RNA, 23 nt, Artificial Sequence
  Chemically synthesized
auuuacacuacauuguacaagga

SEQ ID NO: 47674 - RNA, 23 nt, Artificial Sequence
  Chemically synthesized
gugaucaaaggacaaagacagua

SEQ ID NO: 47675 - RNA, 23 nt, Artificial Sequence
  Chemically synthesized
gacauaacauuguacuguaaugg

SEQ ID NO: 47676 - RNA, 23 nt, Artificial Sequence
  Chemically synthesized
cgacauaacauuguacuguaaug

SEQ ID NO: 47677 - RNA, 23 nt, Artificial Sequence
  Chemically synthesized
ccgacauaacauuguacuguaau

SEQ ID NO: 47678 - RNA, 23 nt, Artificial Sequence
  Chemically synthesized
cccgacauaacauuguacuguaa

SEQ ID NO: 47679 - RNA, 23 nt, Artificial Sequence
  Chemically synthesized
ucccgacauaacauuguacugua

SEQ ID NO: 47680 - RNA, 23 nt, Artificial Sequence
  Chemically synthesized
uucccgacauaacauuguacugu

SEQ ID NO: 47681 - RNA, 23 nt, Artificial Sequence
  Chemically synthesized
guucccgacauaacauuguacug

SEQ ID NO: 47682 - RNA, 23 nt, Artificial Sequence
  Chemically synthesized
uguucccgacauaacauuguacu

SEQ ID NO: 47683 - RNA, 23 nt, Artificial Sequence
  Chemically synthesized
uugcucuccuauguaguucucag

SEQ ID NO: 47684 - RNA, 23 nt, Artificial Sequence
  Chemically synthesized
cuugcucuccuauguaguucuca

SEQ ID NO: 47685 - RNA, 23 nt, Artificial Sequence
  Chemically synthesized
acuugcucuccuauguaguucuc

SEQ ID NO: 47686 - RNA, 23 nt, Artificial Sequence
  Chemically synthesized
cgagaacaccgagcacugaacuu

SEQ ID NO: 47687 - RNA, 23 nt, Artificial Sequence
  Chemically synthesized
ccgagaacaccgagcacugaacu

SEQ ID NO: 47688 - RNA, 23 nt, Artificial Sequence
  Chemically synthesized
gccgagaacaccgagcacugaac

SEQ ID NO: 47689 - RNA, 23 nt, Artificial Sequence
  Chemically synthesized
ugaacuacacugcauuguugugc

SEQ ID NO: 47690 - RNA, 23 nt, Artificial Sequence
  Chemically synthesized
cugaacuacacugcauuguugug

SEQ ID NO: 47691 - RNA, 23 nt, Artificial Sequence
  Chemically synthesized
ucugaacuacacugcauuguugu

SEQ ID NO: 47692 - RNA, 23 nt, Artificial Sequence
  Chemically synthesized
uucugaacuacacugcauuguug

SEQ ID NO: 47693 - RNA, 23 nt, Artificial Sequence
  Chemically synthesized
cuuguucagauuaagaguugcca

SEQ ID NO: 47694 - RNA, 23 nt, Artificial Sequence
  Chemically synthesized
ucuuguucagauuaagaguugcc

SEQ ID NO: 47695 - RNA, 23 nt, Artificial Sequence
  Chemically synthesized
uucuuguucagauuaagaguugc

SEQ ID NO: 47696 - RNA, 23 nt, Artificial Sequence
  Chemically synthesized
auucuuguucagauuaagaguug

SEQ ID NO: 47697 - RNA, 23 nt, Artificial Sequence
  Chemically synthesized
cauucuuguucagauuaagaguu

SEQ ID NO: 47698 - RNA, 23 nt, Artificial Sequence
  Chemically synthesized
agcccuaaaaugacaagccuucu

SEQ ID NO: 47699 - RNA, 23 nt, Artificial Sequence
  Chemically synthesized
uagcccuaaaaugacaagccuuc

SEQ ID NO: 47700 - RNA, 23 nt, Artificial Sequence
  Chemically synthesized
ggaagagaaaaugccugcuguug

SEQ ID NO: 47701 - RNA, 23 nt, Artificial Sequence
  Chemically synthesized
aggaagagaaaaugccugcuguu

SEQ ID NO: 47702 - RNA, 23 nt, Artificial Sequence
  Chemically synthesized
gaggaagagaaaaugccugcugu

SEQ ID NO: 47703 - RNA, 23 nt, Artificial Sequence
  Chemically synthesized
agaggaagagaaaaugccugcug

SEQ ID NO: 47704 - RNA, 23 nt, Artificial Sequence
  Chemically synthesized
aagaggaagagaaaaugccugcu

SEQ ID NO: 47705 - RNA, 23 nt, Artificial Sequence
  Chemically synthesized
gagcggccauuuccuguuucucu

SEQ ID NO: 47706 - RNA, 23 nt, Artificial Sequence
  Chemically synthesized
ucccaacacucccaucauccuag

SEQ ID NO: 47707 - RNA, 23 nt, Artificial Sequence
  Chemically synthesized
gucccaacacucccaucauccua

SEQ ID NO: 47708 - RNA, 23 nt, Artificial Sequence
  Chemically synthesized
ugucccaacacucccaucauccu

SEQ ID NO: 47709 - RNA, 23 nt, Artificial Sequence
  Chemically synthesized
cugucccaacacucccaucaucc

SEQ ID NO: 47710 - RNA, 23 nt, Artificial Sequence
  Chemically synthesized
acugucccaacacucccaucauc

SEQ ID NO: 47711 - RNA, 23 nt, Artificial Sequence
  Chemically synthesized
cacugucccaacacucccaucau

SEQ ID NO: 47712 - RNA, 23 nt, Artificial Sequence
  Chemically synthesized
gcaaagugguauccugaggugcg

SEQ ID NO: 47713 - RNA, 23 nt, Artificial Sequence
  Chemically synthesized
ugcaaagugguauccugaggugc

SEQ ID NO: 47714 - RNA, 23 nt, Artificial Sequence
  Chemically synthesized
gugcaaagugguauccugaggug

SEQ ID NO: 47715 - RNA, 23 nt, Artificial Sequence
  Chemically synthesized
aauguccgugcaaagugguaucc

SEQ ID NO: 47716 - RNA, 23 nt, Artificial Sequence
  Chemically synthesized
aaauguccgugcaaagugguauc

SEQ ID NO: 47717 - RNA, 23 nt, Artificial Sequence
  Chemically synthesized
gaguguuuuuacauugaucuuuu

SEQ ID NO: 47718 - RNA, 23 nt, Artificial Sequence
  Chemically synthesized
aauuguggaguguuuuuacauug

SEQ ID NO: 47719 - RNA, 23 nt, Artificial Sequence
  Chemically synthesized
ugugagguucuguaaacugugcu

SEQ ID NO: 47720 - RNA, 23 nt, Artificial Sequence
  Chemically synthesized
cuauugauguuccuuugggucug

SEQ ID NO: 47721 - RNA, 23 nt, Artificial Sequence
  Chemically synthesized
ccuauugauguuccuuugggucu

SEQ ID NO: 47722 - RNA, 23 nt, Artificial Sequence
  Chemically synthesized
caauuauucugccaauguuaugg

SEQ ID NO: 47723 - RNA, 23 nt, Artificial Sequence
  Chemically synthesized
acaauuauucugccaauguuaug

SEQ ID NO: 47724 - RNA, 23 nt, Artificial Sequence
  Chemically synthesized
gacaauuauucugccaauguuau

SEQ ID NO: 47725 - RNA, 23 nt, Artificial Sequence
  Chemically synthesized
ugacaauuauucugccaauguua

SEQ ID NO: 47726 - RNA, 23 nt, Artificial Sequence
  Chemically synthesized
uugacaauuauucugccaauguu

SEQ ID NO: 47727 - RNA, 23 nt, Artificial Sequence
  Chemically synthesized
auaagugcuuuccuuaguuuucu

SEQ ID NO: 47728 - RNA, 23 nt, Artificial Sequence
  Chemically synthesized
uuuugucgauuaguaaaagugcu

SEQ ID NO: 47729 - RNA, 23 nt, Artificial Sequence
  Chemically synthesized
gaugaugaaagaaagguugguau

SEQ ID NO: 47730 - RNA, 23 nt, Artificial Sequence
  Chemically synthesized
uuugacaaaauacgaaguggaga

SEQ ID NO: 47731 - RNA, 23 nt, Artificial Sequence
  Chemically synthesized
uuuugacaaaauacgaaguggag

SEQ ID NO: 47732 - RNA, 23 nt, Artificial Sequence
  Chemically synthesized
auuuugacaaaauacgaagugga

SEQ ID NO: 47733 - RNA, 23 nt, Artificial Sequence
  Chemically synthesized
ugugugaucaaaggacaaagaca

SEQ ID NO: 47734 - RNA, 23 nt, Artificial Sequence
  Chemically synthesized
gugugugaucaaaggacaaagac

SEQ ID NO: 47735 - RNA, 23 nt, Artificial Sequence
  Chemically synthesized
ugugugugaucaaaggacaaaga

SEQ ID NO: 47736 - RNA, 23 nt, Artificial Sequence
  Chemically synthesized
gugugugugaucaaaggacaaag

SEQ ID NO: 47737 - RNA, 23 nt, Artificial Sequence
  Chemically synthesized
ggugugugugaucaaaggacaaa

SEQ ID NO: 47738 - RNA, 23 nt, Artificial Sequence
  Chemically synthesized
augaagcguugccauugaacuca

SEQ ID NO: 47739 - RNA, 23 nt, Artificial Sequence
  Chemically synthesized
aaugaagcguugccauugaacuc

SEQ ID NO: 47740 - RNA, 23 nt, Artificial Sequence
  Chemically synthesized
gaaugaagcguugccauugaacu

SEQ ID NO: 47741 - RNA, 23 nt, Artificial Sequence
  Chemically synthesized
cgaaugaagcguugccauugaac

SEQ ID NO: 47742 - RNA, 23 nt, Artificial Sequence
  Chemically synthesized
ccgaaugaagcguugccauugaa

SEQ ID NO: 47743 - RNA, 23 nt, Artificial Sequence
  Chemically synthesized
gaacuuugcaaagaccuucgucu

SEQ ID NO: 47744 - RNA, 23 nt, Artificial Sequence
  Chemically synthesized
ugaacuuugcaaagaccuucguc

SEQ ID NO: 47745 - RNA, 23 nt, Artificial Sequence
  Chemically synthesized
cugaacuuugcaaagaccuucgu

SEQ ID NO: 47746 - RNA, 23 nt, Artificial Sequence
  Chemically synthesized
acugaacuuugcaaagaccuucg

SEQ ID NO: 47747 - RNA, 23 nt, Artificial Sequence
  Chemically synthesized
gaacuacacugcauuguugugcc

SEQ ID NO: 47748 - RNA, 23 nt, Artificial Sequence
  Chemically synthesized
gccugcuguuguaaaugucucag

SEQ ID NO: 47749 - RNA, 23 nt, Artificial Sequence
  Chemically synthesized
ugccugcuguuguaaaugucuca

SEQ ID NO: 47750 - RNA, 23 nt, Artificial Sequence
  Chemically synthesized
augccugcuguuguaaaugucuc

SEQ ID NO: 47751 - RNA, 23 nt, Artificial Sequence
  Chemically synthesized
aaugccugcuguuguaaaugucu

SEQ ID NO: 47752 - RNA, 23 nt, Artificial Sequence
  Chemically synthesized
aaaugccugcuguuguaaauguc

SEQ ID NO: 47753 - RNA, 23 nt, Artificial Sequence
  Chemically synthesized
auggcuaaggagauuggugcugu

SEQ ID NO: 47754 - RNA, 23 nt, Artificial Sequence
  Chemically synthesized
uaaacuugaucuuagggaugaua

SEQ ID NO: 47755 - RNA, 23 nt, Artificial Sequence
  Chemically synthesized
cuaaacuugaucuuagggaugau

SEQ ID NO: 47756 - RNA, 23 nt, Artificial Sequence
  Chemically synthesized
acuaaacuugaucuuagggauga

SEQ ID NO: 47757 - RNA, 23 nt, Artificial Sequence
  Chemically synthesized
aacuaaacuugaucuuagggaug

SEQ ID NO: 47758 - RNA, 23 nt, Artificial Sequence
  Chemically synthesized
gaacuaaacuugaucuuagggau

SEQ ID NO: 47759 - RNA, 23 nt, Artificial Sequence
  Chemically synthesized
cuugugaguccugcaucauuuga

SEQ ID NO: 47760 - RNA, 23 nt, Artificial Sequence
  Chemically synthesized
cugggcuuaugggauacagcugg

SEQ ID NO: 47761 - RNA, 23 nt, Artificial Sequence
  Chemically synthesized
ucugggcuuaugggauacagcug

SEQ ID NO: 47762 - RNA, 23 nt, Artificial Sequence
  Chemically synthesized
aucugggcuuaugggauacagcu

SEQ ID NO: 47763 - RNA, 23 nt, Artificial Sequence
  Chemically synthesized
aaucugggcuuaugggauacagc

SEQ ID NO: 47764 - RNA, 23 nt, Artificial Sequence
  Chemically synthesized
gaaucugggcuuaugggauacag

SEQ ID NO: 47765 - RNA, 23 nt, Artificial Sequence
  Chemically synthesized
uguuaugguagauggaaaaccgg

SEQ ID NO: 47766 - RNA, 23 nt, Artificial Sequence
  Chemically synthesized
auguuaugguagauggaaaaccg

SEQ ID NO: 47767 - RNA, 23 nt, Artificial Sequence
  Chemically synthesized
aauguuaugguagauggaaaacc

SEQ ID NO: 47768 - RNA, 23 nt, Artificial Sequence
  Chemically synthesized
caauguuaugguagauggaaaac

SEQ ID NO: 47769 - RNA, 23 nt, Artificial Sequence
  Chemically synthesized
ccaauguuaugguagauggaaaa

SEQ ID NO: 47770 - RNA, 23 nt, Artificial Sequence
  Chemically synthesized
ccuuugggucugugagguucugu

SEQ ID NO: 47771 - RNA, 23 nt, Artificial Sequence
  Chemically synthesized
uccuuugggucugugagguucug

SEQ ID NO: 47772 - RNA, 23 nt, Artificial Sequence
  Chemically synthesized
uuccuuugggucugugagguucu

SEQ ID NO: 47773 - RNA, 23 nt, Artificial Sequence
  Chemically synthesized
guuccuuugggucugugagguuc

SEQ ID NO: 47774 - RNA, 23 nt, Artificial Sequence
  Chemically synthesized
uguuccuuugggucugugagguu

SEQ ID NO: 47775 - RNA, 23 nt, Artificial Sequence
  Chemically synthesized
guagucgcuuugccuauugaugu

SEQ ID NO: 47776 - RNA, 23 nt, Artificial Sequence
  Chemically synthesized
uguagucgcuuugccuauugaug

SEQ ID NO: 47777 - RNA, 23 nt, Artificial Sequence
  Chemically synthesized
cuguagucgcuuugccuauugau

SEQ ID NO: 47778 - RNA, 23 nt, Artificial Sequence
  Chemically synthesized
ccuguagucgcuuugccuauuga

SEQ ID NO: 47779 - RNA, 23 nt, Artificial Sequence
  Chemically synthesized
uccuguagucgcuuugccuauug

SEQ ID NO: 47780 - RNA, 23 nt, Artificial Sequence
  Chemically synthesized
aucauguguugcagcuuuauagu

SEQ ID NO: 47781 - RNA, 23 nt, Artificial Sequence
  Chemically synthesized
aaucauguguugcagcuuuauag

SEQ ID NO: 47782 - RNA, 23 nt, Artificial Sequence
  Chemically synthesized
aaaucauguguugcagcuuuaua

SEQ ID NO: 47783 - RNA, 23 nt, Artificial Sequence
  Chemically synthesized
aaaaucauguguugcagcuuuau

SEQ ID NO: 47784 - RNA, 23 nt, Artificial Sequence
  Chemically synthesized
aaaaaucauguguugcagcuuua

SEQ ID NO: 47785 - RNA, 23 nt, Artificial Sequence
  Chemically synthesized
gguuuuuuugucgauuaguaaaa

SEQ ID NO: 47786 - RNA, 23 nt, Artificial Sequence
  Chemically synthesized
gcauuagaagguuuuuuugucga

SEQ ID NO: 47787 - RNA, 23 nt, Artificial Sequence
  Chemically synthesized
ugcauuagaagguuuuuuugucg

SEQ ID NO: 47788 - RNA, 23 nt, Artificial Sequence
  Chemically synthesized
augcauuagaagguuuuuuuguc

SEQ ID NO: 47789 - RNA, 23 nt, Artificial Sequence
  Chemically synthesized
aaugcauuagaagguuuuuuugu

SEQ ID NO: 47790 - RNA, 23 nt, Artificial Sequence
  Chemically synthesized
uaaugcauuagaagguuuuuuug

SEQ ID NO: 47791 - RNA, 23 nt, Artificial Sequence
  Chemically synthesized
gauaaugcauuagaagguuuuuu

SEQ ID NO: 47792 - RNA, 23 nt, Artificial Sequence
  Chemically synthesized
ugauaaugcauuagaagguuuuu

SEQ ID NO: 47793 - RNA, 23 nt, Artificial Sequence
  Chemically synthesized
cugauaaugcauuagaagguuuu

SEQ ID NO: 47794 - RNA, 23 nt, Artificial Sequence
  Chemically synthesized
ucugauaaugcauuagaagguuu

SEQ ID NO: 47795 - RNA, 23 nt, Artificial Sequence
  Chemically synthesized
uucugauaaugcauuagaagguu

SEQ ID NO: 47796 - RNA, 23 nt, Artificial Sequence
  Chemically synthesized
uuucugauaaugcauuagaaggu

SEQ ID NO: 47797 - RNA, 23 nt, Artificial Sequence
  Chemically synthesized
gacaaagacaguauuuugacaaa

SEQ ID NO: 47798 - RNA, 23 nt, Artificial Sequence
  Chemically synthesized
ggacaaagacaguauuuugacaa

SEQ ID NO: 47799 - RNA, 23 nt, Artificial Sequence
  Chemically synthesized
aggacaaagacaguauuuugaca

SEQ ID NO: 47800 - RNA, 23 nt, Artificial Sequence
  Chemically synthesized
aaggacaaagacaguauuuugac

SEQ ID NO: 47801 - RNA, 23 nt, Artificial Sequence
  Chemically synthesized
gugugaucaaaggacaaagacag

SEQ ID NO: 47802 - RNA, 23 nt, Artificial Sequence
  Chemically synthesized
gggugugugugaucaaaggacaa

SEQ ID NO: 47803 - RNA, 23 nt, Artificial Sequence
  Chemically synthesized
cggagauuuugaacagaacugcu

SEQ ID NO: 47804 - RNA, 23 nt, Artificial Sequence
  Chemically synthesized
ucuuuggaucagucuuugugauu

SEQ ID NO: 47805 - RNA, 23 nt, Artificial Sequence
  Chemically synthesized
cuguaauggagugagcguagcag

SEQ ID NO: 47806 - RNA, 23 nt, Artificial Sequence
  Chemically synthesized
acuguaauggagugagcguagca

SEQ ID NO: 47807 - RNA, 23 nt, Artificial Sequence
  Chemically synthesized
uacuguaauggagugagcguagc

SEQ ID NO: 47808 - RNA, 23 nt, Artificial Sequence
  Chemically synthesized
guacuguaauggagugagcguag

SEQ ID NO: 47809 - RNA, 23 nt, Artificial Sequence
  Chemically synthesized
uguacuguaauggagugagcgua

SEQ ID NO: 47810 - RNA, 23 nt, Artificial Sequence
  Chemically synthesized
ugaguuagcagcacguguucccg

SEQ ID NO: 47811 - RNA, 23 nt, Artificial Sequence
  Chemically synthesized
gugaguuagcagcacguguuccc

SEQ ID NO: 47812 - RNA, 23 nt, Artificial Sequence
  Chemically synthesized
agugaguuagcagcacguguucc

SEQ ID NO: 47813 - RNA, 23 nt, Artificial Sequence
  Chemically synthesized
cagugaguuagcagcacguguuc

SEQ ID NO: 47814 - RNA, 23 nt, Artificial Sequence
  Chemically synthesized
ccagugaguuagcagcacguguu

SEQ ID NO: 47815 - RNA, 23 nt, Artificial Sequence
  Chemically synthesized
acgguagcuucugcaguuaggag

SEQ ID NO: 47816 - RNA, 23 nt, Artificial Sequence
  Chemically synthesized
gacgguagcuucugcaguuagga

SEQ ID NO: 47817 - RNA, 23 nt, Artificial Sequence
  Chemically synthesized
agacgguagcuucugcaguuagg

SEQ ID NO: 47818 - RNA, 23 nt, Artificial Sequence
  Chemically synthesized
aagacgguagcuucugcaguuag

SEQ ID NO: 47819 - RNA, 23 nt, Artificial Sequence
  Chemically synthesized
gaagacgguagcuucugcaguua

SEQ ID NO: 47820 - RNA, 23 nt, Artificial Sequence
  Chemically synthesized
guaaaacuugccuacugaucagu

SEQ ID NO: 47821 - RNA, 23 nt, Artificial Sequence
  Chemically synthesized
gguaaaacuugccuacugaucag

SEQ ID NO: 47822 - RNA, 23 nt, Artificial Sequence
  Chemically synthesized
agguaaaacuugccuacugauca

SEQ ID NO: 47823 - RNA, 23 nt, Artificial Sequence
  Chemically synthesized
uagguaaaacuugccuacugauc

SEQ ID NO: 47824 - RNA, 23 nt, Artificial Sequence
  Chemically synthesized
guagguaaaacuugccuacugau

SEQ ID NO: 47825 - RNA, 23 nt, Artificial Sequence
  Chemically synthesized
ccuuauuuuucaaaagcgccccc

SEQ ID NO: 47826 - RNA, 23 nt, Artificial Sequence
  Chemically synthesized
gccuuauuuuucaaaagcgcccc

SEQ ID NO: 47827 - RNA, 23 nt, Artificial Sequence
  Chemically synthesized
agccuuauuuuucaaaagcgccc

SEQ ID NO: 47828 - RNA, 23 nt, Artificial Sequence
  Chemically synthesized
aagccuuauuuuucaaaagcgcc

SEQ ID NO: 47829 - RNA, 23 nt, Artificial Sequence
  Chemically synthesized
aaagccuuauuuuucaaaagcgc

SEQ ID NO: 47830 - RNA, 23 nt, Artificial Sequence
  Chemically synthesized
aaaaugccugcuguuguaaaugu

SEQ ID NO: 47831 - RNA, 23 nt, Artificial Sequence
  Chemically synthesized
acacgaucgagaaacugaaggag

SEQ ID NO: 47832 - RNA, 23 nt, Artificial Sequence
  Chemically synthesized
gacacgaucgagaaacugaagga

SEQ ID NO: 47833 - RNA, 23 nt, Artificial Sequence
  Chemically synthesized
agacacgaucgagaaacugaagg

SEQ ID NO: 47834 - RNA, 23 nt, Artificial Sequence
  Chemically synthesized
aagacacgaucgagaaacugaag

SEQ ID NO: 47835 - RNA, 23 nt, Artificial Sequence
  Chemically synthesized
aaagacacgaucgagaaacugaa

SEQ ID NO: 47836 - RNA, 23 nt, Artificial Sequence
  Chemically synthesized
ugaucuuagggaugauaaagaca

SEQ ID NO: 47837 - RNA, 23 nt, Artificial Sequence
  Chemically synthesized
uugaucuuagggaugauaaagac

SEQ ID NO: 47838 - RNA, 23 nt, Artificial Sequence
  Chemically synthesized
cuugaucuuagggaugauaaaga

SEQ ID NO: 47839 - RNA, 23 nt, Artificial Sequence
  Chemically synthesized
acuugaucuuagggaugauaaag

SEQ ID NO: 47840 - RNA, 23 nt, Artificial Sequence
  Chemically synthesized
aacuugaucuuagggaugauaaa

SEQ ID NO: 47841 - RNA, 23 nt, Artificial Sequence
  Chemically synthesized
caacacucccaucauccuagugg

SEQ ID NO: 47842 - RNA, 23 nt, Artificial Sequence
  Chemically synthesized
ccaacacucccaucauccuagug

SEQ ID NO: 47843 - RNA, 23 nt, Artificial Sequence
  Chemically synthesized
cccaacacucccaucauccuagu

SEQ ID NO: 47844 - RNA, 23 nt, Artificial Sequence
  Chemically synthesized
caaagugguauccugaggugcgg

SEQ ID NO: 47845 - RNA, 23 nt, Artificial Sequence
  Chemically synthesized
gauguguucuuaauuugcuuuuc

SEQ ID NO: 47846 - RNA, 23 nt, Artificial Sequence
  Chemically synthesized
agauguguucuuaauuugcuuuu

SEQ ID NO: 47847 - RNA, 23 nt, Artificial Sequence
  Chemically synthesized
cagauguguucuuaauuugcuuu

SEQ ID NO: 47848 - RNA, 23 nt, Artificial Sequence
  Chemically synthesized
acagauguguucuuaauuugcuu

SEQ ID NO: 47849 - RNA, 23 nt, Artificial Sequence
  Chemically synthesized
aacagauguguucuuaauuugcu

SEQ ID NO: 47850 - RNA, 23 nt, Artificial Sequence
  Chemically synthesized
gcuggacaagaagauuaugacag

SEQ ID NO: 47851 - RNA, 23 nt, Artificial Sequence
  Chemically synthesized
gccaauguuaugguagauggaaa

SEQ ID NO: 47852 - RNA, 23 nt, Artificial Sequence
  Chemically synthesized
caguugcagaauuguggaguguu

SEQ ID NO: 47853 - RNA, 23 nt, Artificial Sequence
  Chemically synthesized
uaaauugacaguugcagaauugu

SEQ ID NO: 47854 - RNA, 23 nt, Artificial Sequence
  Chemically synthesized
uuaaauugacaguugcagaauug

SEQ ID NO: 47855 - RNA, 23 nt, Artificial Sequence
  Chemically synthesized
uuuaaauugacaguugcagaauu

SEQ ID NO: 47856 - RNA, 23 nt, Artificial Sequence
  Chemically synthesized
uuuuaaauugacaguugcagaau

SEQ ID NO: 47857 - RNA, 23 nt, Artificial Sequence
  Chemically synthesized
uuuuuaaauugacaguugcagaa

SEQ ID NO: 47858 - RNA, 23 nt, Artificial Sequence
  Chemically synthesized
acccuucagccacuacaacagaa

SEQ ID NO: 47859 - RNA, 23 nt, Artificial Sequence
  Chemically synthesized
gacccuucagccacuacaacaga

SEQ ID NO: 47860 - RNA, 23 nt, Artificial Sequence
  Chemically synthesized
ggacccuucagccacuacaacag

SEQ ID NO: 47861 - RNA, 23 nt, Artificial Sequence
  Chemically synthesized
gggacccuucagccacuacaaca

SEQ ID NO: 47862 - RNA, 23 nt, Artificial Sequence
  Chemically synthesized
cuguacaacuuaacucacuggcg

SEQ ID NO: 47863 - RNA, 23 nt, Artificial Sequence
  Chemically synthesized
ucuguacaacuuaacucacuggc

SEQ ID NO: 47864 - RNA, 23 nt, Artificial Sequence
  Chemically synthesized
uucuguacaacuuaacucacugg

SEQ ID NO: 47865 - RNA, 23 nt, Artificial Sequence
  Chemically synthesized
guucuguacaacuuaacucacug

SEQ ID NO: 47866 - RNA, 23 nt, Artificial Sequence
  Chemically synthesized
uguucuguacaacuuaacucacu

SEQ ID NO: 47867 - RNA, 23 nt, Artificial Sequence
  Chemically synthesized
gaaccuucuuaacaucacugucu

SEQ ID NO: 47868 - RNA, 23 nt, Artificial Sequence
  Chemically synthesized
ugaaccuucuuaacaucacuguc

SEQ ID NO: 47869 - RNA, 23 nt, Artificial Sequence
  Chemically synthesized
augaaccuucuuaacaucacugu

SEQ ID NO: 47870 - RNA, 23 nt, Artificial Sequence
  Chemically synthesized
uaugaaccuucuuaacaucacug

SEQ ID NO: 47871 - RNA, 23 nt, Artificial Sequence
  Chemically synthesized
ucauguguugcagcuuuauaguu

SEQ ID NO: 47872 - RNA, 23 nt, Artificial Sequence
  Chemically synthesized
cuacugucuuugacaauuauucu

SEQ ID NO: 47873 - RNA, 23 nt, Artificial Sequence
  Chemically synthesized
ccuacugucuuugacaauuauuc

SEQ ID NO: 47874 - RNA, 23 nt, Artificial Sequence
  Chemically synthesized
cccuacugucuuugacaauuauu

SEQ ID NO: 47875 - RNA, 23 nt, Artificial Sequence
  Chemically synthesized
ucccuacugucuuugacaauuau

SEQ ID NO: 47876 - RNA, 23 nt, Artificial Sequence
  Chemically synthesized
aucccuacugucuuugacaauua

SEQ ID NO: 47877 - RNA, 23 nt, Artificial Sequence
  Chemically synthesized
uagucgcuaacuuaguaagugcu

SEQ ID NO: 47878 - RNA, 23 nt, Artificial Sequence
  Chemically synthesized
uuagucgcuaacuuaguaagugc

SEQ ID NO: 47879 - RNA, 23 nt, Artificial Sequence
  Chemically synthesized
guuagucgcuaacuuaguaagug

SEQ ID NO: 47880 - RNA, 23 nt, Artificial Sequence
  Chemically synthesized
uguuagucgcuaacuuaguaagu

SEQ ID NO: 47881 - RNA, 23 nt, Artificial Sequence
  Chemically synthesized
cuguuagucgcuaacuuaguaag

SEQ ID NO: 47882 - RNA, 23 nt, Artificial Sequence
  Chemically synthesized
ucuguuagucgcuaacuuaguaa

SEQ ID NO: 47883 - RNA, 23 nt, Artificial Sequence
  Chemically synthesized
guuguucuguuagucgcuaacuu

SEQ ID NO: 47884 - RNA, 23 nt, Artificial Sequence
  Chemically synthesized
gguuguucuguuagucgcuaacu

SEQ ID NO: 47885 - RNA, 23 nt, Artificial Sequence
  Chemically synthesized
ugguuguucuguuagucgcuaac

SEQ ID NO: 47886 - RNA, 23 nt, Artificial Sequence
  Chemically synthesized
cugguuguucuguuagucgcuaa

SEQ ID NO: 47887 - RNA, 23 nt, Artificial Sequence
  Chemically synthesized
acugguuguucuguuagucgcua

SEQ ID NO: 47888 - RNA, 23 nt, Artificial Sequence
  Chemically synthesized
caaagacaguauuuugacaaaau

SEQ ID NO: 47889 - RNA, 23 nt, Artificial Sequence
  Chemically synthesized
acaaagacaguauuuugacaaaa

SEQ ID NO: 47890 - RNA, 23 nt, Artificial Sequence
  Chemically synthesized
ugugaucaaaggacaaagacagu

SEQ ID NO: 47891 - RNA, 23 nt, Artificial Sequence
  Chemically synthesized
ggggugugugugaucaaaggaca

SEQ ID NO: 47892 - RNA, 23 nt, Artificial Sequence
  Chemically synthesized
uggggugugugugaucaaaggac

SEQ ID NO: 47893 - RNA, 23 nt, Artificial Sequence
  Chemically synthesized
guggggugugugugaucaaagga

SEQ ID NO: 47894 - RNA, 23 nt, Artificial Sequence
  Chemically synthesized
gguggggugugugugaucaaagg

SEQ ID NO: 47895 - RNA, 23 nt, Artificial Sequence
  Chemically synthesized
cacuugcucuccuauguaguucu

SEQ ID NO: 47896 - RNA, 23 nt, Artificial Sequence
  Chemically synthesized
gacacuugcucuccuauguaguu

SEQ ID NO: 47897 - RNA, 23 nt, Artificial Sequence
  Chemically synthesized
agacacuugcucuccuauguagu

SEQ ID NO: 47898 - RNA, 23 nt, Artificial Sequence
  Chemically synthesized
cagacacuugcucuccuauguag

SEQ ID NO: 47899 - RNA, 23 nt, Artificial Sequence
  Chemically synthesized
gcagacacuugcucuccuaugua

SEQ ID NO: 47900 - RNA, 23 nt, Artificial Sequence
  Chemically synthesized
ugcagacacuugcucuccuaugu

SEQ ID NO: 47901 - RNA, 23 nt, Artificial Sequence
  Chemically synthesized
ccauucuuguucagauuaagagu

SEQ ID NO: 47902 - RNA, 23 nt, Artificial Sequence
  Chemically synthesized
cccauucuuguucagauuaagag

SEQ ID NO: 47903 - RNA, 23 nt, Artificial Sequence
  Chemically synthesized
ccccauucuuguucagauuaaga

SEQ ID NO: 47904 - RNA, 23 nt, Artificial Sequence
  Chemically synthesized
cccccauucuuguucagauuaag

SEQ ID NO: 47905 - RNA, 23 nt, Artificial Sequence
  Chemically synthesized
ccccccauucuuguucagauuaa

SEQ ID NO: 47906 - RNA, 23 nt, Artificial Sequence
  Chemically synthesized
acaagccuucuuaaagccuuauu

SEQ ID NO: 47907 - RNA, 23 nt, Artificial Sequence
  Chemically synthesized
gcuguuguaaaugucucagcccc

SEQ ID NO: 47908 - RNA, 23 nt, Artificial Sequence
  Chemically synthesized
ugcuguuguaaaugucucagccc

SEQ ID NO: 47909 - RNA, 23 nt, Artificial Sequence
  Chemically synthesized
cugcuguuguaaaugucucagcc

SEQ ID NO: 47910 - RNA, 23 nt, Artificial Sequence
  Chemically synthesized
ccugcuguuguaaaugucucagc

SEQ ID NO: 47911 - RNA, 23 nt, Artificial Sequence
  Chemically synthesized
gcuguaaaauaccuggagugcuc

SEQ ID NO: 47912 - RNA, 23 nt, Artificial Sequence
  Chemically synthesized
ugcuguaaaauaccuggagugcu

SEQ ID NO: 47913 - RNA, 23 nt, Artificial Sequence
  Chemically synthesized
gugcuguaaaauaccuggagugc

SEQ ID NO: 47914 - RNA, 23 nt, Artificial Sequence
  Chemically synthesized
ggugcuguaaaauaccuggagug

SEQ ID NO: 47915 - RNA, 23 nt, Artificial Sequence
  Chemically synthesized
uggugcuguaaaauaccuggagu

SEQ ID NO: 47916 - RNA, 23 nt, Artificial Sequence
  Chemically synthesized
cauggcuaaggagauuggugcug

SEQ ID NO: 47917 - RNA, 23 nt, Artificial Sequence
  Chemically synthesized
aaacuugaucuuagggaugauaa

SEQ ID NO: 47918 - RNA, 23 nt, Artificial Sequence
  Chemically synthesized
cauugaucuuuugcuaaugcaau

SEQ ID NO: 47919 - RNA, 23 nt, Artificial Sequence
  Chemically synthesized
acauugaucuuuugcuaaugcaa

SEQ ID NO: 47920 - RNA, 23 nt, Artificial Sequence
  Chemically synthesized
uacauugaucuuuugcuaaugca

SEQ ID NO: 47921 - RNA, 23 nt, Artificial Sequence
  Chemically synthesized
uuacauugaucuuuugcuaaugc

SEQ ID NO: 47922 - RNA, 23 nt, Artificial Sequence
  Chemically synthesized
uuuacauugaucuuuugcuaaug

SEQ ID NO: 47923 - RNA, 23 nt, Artificial Sequence
  Chemically synthesized
caacuuaacucacuggcgagaau

SEQ ID NO: 47924 - RNA, 23 nt, Artificial Sequence
  Chemically synthesized
acaacuuaacucacuggcgagaa

SEQ ID NO: 47925 - RNA, 23 nt, Artificial Sequence
  Chemically synthesized
uacaacuuaacucacuggcgaga

SEQ ID NO: 47926 - RNA, 23 nt, Artificial Sequence
  Chemically synthesized
guacaacuuaacucacuggcgag

SEQ ID NO: 47927 - RNA, 23 nt, Artificial Sequence
  Chemically synthesized
uguacaacuuaacucacuggcga

SEQ ID NO: 47928 - RNA, 23 nt, Artificial Sequence
  Chemically synthesized
gccuccuuguauuauaaaaucuu

SEQ ID NO: 47929 - RNA, 23 nt, Artificial Sequence
  Chemically synthesized
ugccuccuuguauuauaaaaucu

SEQ ID NO: 47930 - RNA, 23 nt, Artificial Sequence
  Chemically synthesized
augccuccuuguauuauaaaauc

SEQ ID NO: 47931 - RNA, 23 nt, Artificial Sequence
  Chemically synthesized
uaugccuccuuguauuauaaaau

SEQ ID NO: 47932 - RNA, 23 nt, Artificial Sequence
  Chemically synthesized
auaugccuccuuguauuauaaaa

SEQ ID NO: 47933 - RNA, 23 nt, Artificial Sequence
  Chemically synthesized
gugcuuuucuuauagaaccccuu

SEQ ID NO: 47934 - RNA, 23 nt, Artificial Sequence
  Chemically synthesized
agugcuuuucuuauagaaccccu

SEQ ID NO: 47935 - RNA, 23 nt, Artificial Sequence
  Chemically synthesized
aagugcuuuucuuauagaacccc

SEQ ID NO: 47936 - RNA, 23 nt, Artificial Sequence
  Chemically synthesized
uaagugcuuuucuuauagaaccc

SEQ ID NO: 47937 - RNA, 23 nt, Artificial Sequence
  Chemically synthesized
uuguucuguuagucgcuaacuua

SEQ ID NO: 47938 - RNA, 23 nt, Artificial Sequence
  Chemically synthesized
agaauucuguuuagcugugggug

SEQ ID NO: 47939 - RNA, 23 nt, Artificial Sequence
  Chemically synthesized
aagaauucuguuuagcugugggu

SEQ ID NO: 47940 - RNA, 23 nt, Artificial Sequence
  Chemically synthesized
gaagaauucuguuuagcuguggg

SEQ ID NO: 47941 - RNA, 23 nt, Artificial Sequence
  Chemically synthesized
ugaagaauucuguuuagcugugg

SEQ ID NO: 47942 - RNA, 23 nt, Artificial Sequence
  Chemically synthesized
augaagaauucuguuuagcugug

SEQ ID NO: 47943 - RNA, 23 nt, Artificial Sequence
  Chemically synthesized
ggagauuuugaacagaacugcua

SEQ ID NO: 47944 - RNA, 23 nt, Artificial Sequence
  Chemically synthesized
cucuuuggaucagucuuugugau

SEQ ID NO: 47945 - RNA, 23 nt, Artificial Sequence
  Chemically synthesized
acauuguacuguaauggagugag

SEQ ID NO: 47946 - RNA, 23 nt, Artificial Sequence
  Chemically synthesized
aacauuguacuguaauggaguga

SEQ ID NO: 47947 - RNA, 23 nt, Artificial Sequence
  Chemically synthesized
uaacauuguacuguaauggagug

SEQ ID NO: 47948 - RNA, 23 nt, Artificial Sequence
  Chemically synthesized
auaacauuguacuguaauggagu

SEQ ID NO: 47949 - RNA, 23 nt, Artificial Sequence
  Chemically synthesized
cauaacauuguacuguaauggag

SEQ ID NO: 47950 - RNA, 23 nt, Artificial Sequence
  Chemically synthesized
accagugaguuagcagcacgugu

SEQ ID NO: 47951 - RNA, 23 nt, Artificial Sequence
  Chemically synthesized
caccagugaguuagcagcacgug

SEQ ID NO: 47952 - RNA, 23 nt, Artificial Sequence
  Chemically synthesized
ucaccagugaguuagcagcacgu

SEQ ID NO: 47953 - RNA, 23 nt, Artificial Sequence
  Chemically synthesized
acacuugcucuccuauguaguuc

SEQ ID NO: 47954 - RNA, 23 nt, Artificial Sequence
  Chemically synthesized
ucaaugccaacuuuuuguuacag

SEQ ID NO: 47955 - RNA, 23 nt, Artificial Sequence
  Chemically synthesized
cucaaugccaacuuuuuguuaca

SEQ ID NO: 47956 - RNA, 23 nt, Artificial Sequence
  Chemically synthesized
acucaaugccaacuuuuuguuac

SEQ ID NO: 47957 - RNA, 23 nt, Artificial Sequence
  Chemically synthesized
cacucaaugccaacuuuuuguua

SEQ ID NO: 47958 - RNA, 23 nt, Artificial Sequence
  Chemically synthesized
gcacucaaugccaacuuuuuguu

SEQ ID NO: 47959 - RNA, 23 nt, Artificial Sequence
  Chemically synthesized
cuccuguagucgcuuugccuauu

SEQ ID NO: 47960 - RNA, 23 nt, Artificial Sequence
  Chemically synthesized
guugcagcuuuauaguuuuuaaa

SEQ ID NO: 47961 - RNA, 23 nt, Artificial Sequence
  Chemically synthesized
uguugcagcuuuauaguuuuuaa

SEQ ID NO: 47962 - RNA, 23 nt, Artificial Sequence
  Chemically synthesized
guguugcagcuuuauaguuuuua

SEQ ID NO: 47963 - RNA, 23 nt, Artificial Sequence
  Chemically synthesized
uguguugcagcuuuauaguuuuu

SEQ ID NO: 47964 - RNA, 23 nt, Artificial Sequence
  Chemically synthesized
auguguugcagcuuuauaguuuu

SEQ ID NO: 47965 - RNA, 23 nt, Artificial Sequence
  Chemically synthesized
guaaaaaucauguguugcagcuu

SEQ ID NO: 47966 - RNA, 23 nt, Artificial Sequence
  Chemically synthesized
uguaaaaaucauguguugcagcu

SEQ ID NO: 47967 - RNA, 23 nt, Artificial Sequence
  Chemically synthesized
gcauuuccuggagaauauauccc

SEQ ID NO: 47968 - RNA, 23 nt, Artificial Sequence
  Chemically synthesized
ugcauuuccuggagaauauaucc

SEQ ID NO: 47969 - RNA, 23 nt, Artificial Sequence
  Chemically synthesized
augcauuuccuggagaauauauc

SEQ ID NO: 47970 - RNA, 23 nt, Artificial Sequence
  Chemically synthesized
aaugcauuuccuggagaauauau

SEQ ID NO: 47971 - RNA, 23 nt, Artificial Sequence
  Chemically synthesized
aaugaagaauucuguuuagcugu

SEQ ID NO: 47972 - RNA, 23 nt, Artificial Sequence
  Chemically synthesized
uaaugaagaauucuguuuagcug

SEQ ID NO: 47973 - RNA, 23 nt, Artificial Sequence
  Chemically synthesized
gagauuuugaacagaacugcuau

SEQ ID NO: 47974 - RNA, 23 nt, Artificial Sequence
  Chemically synthesized
ucagcucuuuggaucagucuuug

SEQ ID NO: 47975 - RNA, 23 nt, Artificial Sequence
  Chemically synthesized
cucagcucuuuggaucagucuuu

SEQ ID NO: 47976 - RNA, 23 nt, Artificial Sequence
  Chemically synthesized
gcucagcucuuuggaucagucuu

SEQ ID NO: 47977 - RNA, 23 nt, Artificial Sequence
  Chemically synthesized
agcucagcucuuuggaucagucu

SEQ ID NO: 47978 - RNA, 23 nt, Artificial Sequence
  Chemically synthesized
cagcucagcucuuuggaucaguc

SEQ ID NO: 47979 - RNA, 23 nt, Artificial Sequence
  Chemically synthesized
gcagcucagcucuuuggaucagu

SEQ ID NO: 47980 - RNA, 23 nt, Artificial Sequence
  Chemically synthesized
agcagcucagcucuuuggaucag

SEQ ID NO: 47981 - RNA, 23 nt, Artificial Sequence
  Chemically synthesized
guguucccgacauaacauuguac

SEQ ID NO: 47982 - RNA, 23 nt, Artificial Sequence
  Chemically synthesized
gugcagacacuugcucuccuaug

SEQ ID NO: 47983 - RNA, 23 nt, Artificial Sequence
  Chemically synthesized
ggugcagacacuugcucuccuau

SEQ ID NO: 47984 - RNA, 23 nt, Artificial Sequence
  Chemically synthesized
ccgagcacugaacuuugcaaaga

SEQ ID NO: 47985 - RNA, 23 nt, Artificial Sequence
  Chemically synthesized
accgagcacugaacuuugcaaag

SEQ ID NO: 47986 - RNA, 23 nt, Artificial Sequence
  Chemically synthesized
caccgagcacugaacuuugcaaa

SEQ ID NO: 47987 - RNA, 23 nt, Artificial Sequence
  Chemically synthesized
cuguaaaauaccuggagugcucg

SEQ ID NO: 47988 - RNA, 23 nt, Artificial Sequence
  Chemically synthesized
uuggugcuguaaaauaccuggag

SEQ ID NO: 47989 - RNA, 23 nt, Artificial Sequence
  Chemically synthesized
auuggugcuguaaaauaccugga

SEQ ID NO: 47990 - RNA, 23 nt, Artificial Sequence
  Chemically synthesized
ggauacagcuggacaagaagauu

SEQ ID NO: 47991 - RNA, 23 nt, Artificial Sequence
  Chemically synthesized
gggauacagcuggacaagaagau

SEQ ID NO: 47992 - RNA, 23 nt, Artificial Sequence
  Chemically synthesized
ugggauacagcuggacaagaaga

SEQ ID NO: 47993 - RNA, 23 nt, Artificial Sequence
  Chemically synthesized
augggauacagcuggacaagaag

SEQ ID NO: 47994 - RNA, 23 nt, Artificial Sequence
  Chemically synthesized
uaugggauacagcuggacaagaa

SEQ ID NO: 47995 - RNA, 23 nt, Artificial Sequence
  Chemically synthesized
cuuaaacuaugaaccuucuuaac

SEQ ID NO: 47996 - RNA, 23 nt, Artificial Sequence
  Chemically synthesized
ucuuaaacuaugaaccuucuuaa

SEQ ID NO: 47997 - RNA, 23 nt, Artificial Sequence
  Chemically synthesized
uucuuaaacuaugaaccuucuua

SEQ ID NO: 47998 - RNA, 23 nt, Artificial Sequence
  Chemically synthesized
auucuuaaacuaugaaccuucuu

SEQ ID NO: 47999 - RNA, 23 nt, Artificial Sequence
  Chemically synthesized
aauucuuaaacuaugaaccuucu

SEQ ID NO: 48000 - RNA, 23 nt, Artificial Sequence
  Chemically synthesized
cuuuugcggagauuuugaacaga

SEQ ID NO: 48001 - RNA, 23 nt, Artificial Sequence
  Chemically synthesized
cguguucccgacauaacauugua

SEQ ID NO: 48002 - RNA, 23 nt, Artificial Sequence
  Chemically synthesized
cgguagcuucugcaguuaggagg

SEQ ID NO: 48003 - RNA, 23 nt, Artificial Sequence
  Chemically synthesized
cgcacucaaugccaacuuuuugu

SEQ ID NO: 48004 - RNA, 23 nt, Artificial Sequence
  Chemically synthesized
ucgcacucaaugccaacuuuuug

SEQ ID NO: 48005 - RNA, 23 nt, Artificial Sequence
  Chemically synthesized
uucgcacucaaugccaacuuuuu

SEQ ID NO: 48006 - RNA, 23 nt, Artificial Sequence
  Chemically synthesized
ccucaagacaguguuugacgaag

SEQ ID NO: 48007 - RNA, 23 nt, Artificial Sequence
  Chemically synthesized
gccucaagacaguguuugacgaa

SEQ ID NO: 48008 - RNA, 23 nt, Artificial Sequence
  Chemically synthesized
agaaacugaaggagaagaagcug

SEQ ID NO: 48009 - RNA, 23 nt, Artificial Sequence
  Chemically synthesized
gagaaacugaaggagaagaagcu

SEQ ID NO: 48010 - RNA, 23 nt, Artificial Sequence
  Chemically synthesized
cgagaaacugaaggagaagaagc

SEQ ID NO: 48011 - RNA, 23 nt, Artificial Sequence
  Chemically synthesized
ucgagaaacugaaggagaagaag

SEQ ID NO: 48012 - RNA, 23 nt, Artificial Sequence
  Chemically synthesized
aucgagaaacugaaggagaagaa

SEQ ID NO: 48013 - RNA, 23 nt, Artificial Sequence
  Chemically synthesized
ucuuagggaugauaaagacacga

SEQ ID NO: 48014 - RNA, 23 nt, Artificial Sequence
  Chemically synthesized
gcauuauguuuugcauguaugac

SEQ ID NO: 48015 - RNA, 23 nt, Artificial Sequence
  Chemically synthesized
agcauuauguuuugcauguauga

SEQ ID NO: 48016 - RNA, 23 nt, Artificial Sequence
  Chemically synthesized
uagcauuauguuuugcauguaug

SEQ ID NO: 48017 - RNA, 23 nt, Artificial Sequence
  Chemically synthesized
uuagcauuauguuuugcauguau

SEQ ID NO: 48018 - RNA, 23 nt, Artificial Sequence
  Chemically synthesized
auuagcauuauguuuugcaugua

SEQ ID NO: 48019 - RNA, 23 nt, Artificial Sequence
  Chemically synthesized
uuugacaauuauucugccaaugu

SEQ ID NO: 48020 - RNA, 23 nt, Artificial Sequence
  Chemically synthesized
ccuccuguagucgcuuugccuau

SEQ ID NO: 48021 - RNA, 23 nt, Artificial Sequence
  Chemically synthesized
cauguguugcagcuuuauaguuu

SEQ ID NO: 48022 - RNA, 23 nt, Artificial Sequence
  Chemically synthesized
ccuggagaauauaucccuacugu

SEQ ID NO: 48023 - RNA, 23 nt, Artificial Sequence
  Chemically synthesized
uccuggagaauauaucccuacug

SEQ ID NO: 48024 - RNA, 23 nt, Artificial Sequence
  Chemically synthesized
uuccuggagaauauaucccuacu

SEQ ID NO: 48025 - RNA, 23 nt, Artificial Sequence
  Chemically synthesized
uuuccuggagaauauaucccuac

SEQ ID NO: 48026 - RNA, 23 nt, Artificial Sequence
  Chemically synthesized
auuuccuggagaauauaucccua

SEQ ID NO: 48027 - RNA, 23 nt, Artificial Sequence
  Chemically synthesized
cuguuuagcugugggugugccgg

SEQ ID NO: 48028 - RNA, 23 nt, Artificial Sequence
  Chemically synthesized
ucuguuuagcugugggugugccg

SEQ ID NO: 48029 - RNA, 23 nt, Artificial Sequence
  Chemically synthesized
uucuguuuagcugugggugugcc

SEQ ID NO: 48030 - RNA, 23 nt, Artificial Sequence
  Chemically synthesized
auucuguuuagcugugggugugc

SEQ ID NO: 48031 - RNA, 23 nt, Artificial Sequence
  Chemically synthesized
aauucuguuuagcugugggugug

SEQ ID NO: 48032 - RNA, 23 nt, Artificial Sequence
  Chemically synthesized
gcuuuugcggagauuuugaacag

SEQ ID NO: 48033 - RNA, 23 nt, Artificial Sequence
  Chemically synthesized
agcuuuugcggagauuuugaaca

SEQ ID NO: 48034 - RNA, 23 nt, Artificial Sequence
  Chemically synthesized
cagcuuuugcggagauuuugaac

SEQ ID NO: 48035 - RNA, 23 nt, Artificial Sequence
  Chemically synthesized
ccagcuuuugcggagauuuugaa

SEQ ID NO: 48036 - RNA, 23 nt, Artificial Sequence
  Chemically synthesized
agcucuuuggaucagucuuugug

SEQ ID NO: 48037 - RNA, 23 nt, Artificial Sequence
  Chemically synthesized
cagcucuuuggaucagucuuugu

SEQ ID NO: 48038 - RNA, 23 nt, Artificial Sequence
  Chemically synthesized
uuguacuguaauggagugagcgu

SEQ ID NO: 48039 - RNA, 23 nt, Artificial Sequence
  Chemically synthesized
auuguacuguaauggagugagcg

SEQ ID NO: 48040 - RNA, 23 nt, Artificial Sequence
  Chemically synthesized
cauuguacuguaauggagugagc

SEQ ID NO: 48041 - RNA, 23 nt, Artificial Sequence
  Chemically synthesized
cccgaaugaagcguugccauuga

SEQ ID NO: 48042 - RNA, 23 nt, Artificial Sequence
  Chemically synthesized
ucccgaaugaagcguugccauug

SEQ ID NO: 48043 - RNA, 23 nt, Artificial Sequence
  Chemically synthesized
cucccgaaugaagcguugccauu

SEQ ID NO: 48044 - RNA, 23 nt, Artificial Sequence
  Chemically synthesized
caaaauaccuucugaacuacacu

SEQ ID NO: 48045 - RNA, 23 nt, Artificial Sequence
  Chemically synthesized
ccaaaauaccuucugaacuacac

SEQ ID NO: 48046 - RNA, 23 nt, Artificial Sequence
  Chemically synthesized
gccaaaauaccuucugaacuaca

SEQ ID NO: 48047 - RNA, 23 nt, Artificial Sequence
  Chemically synthesized
ugccaaaauaccuucugaacuac

SEQ ID NO: 48048 - RNA, 23 nt, Artificial Sequence
  Chemically synthesized
uugccaaaauaccuucugaacua

SEQ ID NO: 48049 - RNA, 23 nt, Artificial Sequence
  Chemically synthesized
agaguugccaaaauaccuucuga

SEQ ID NO: 48050 - RNA, 23 nt, Artificial Sequence
  Chemically synthesized
aagaguugccaaaauaccuucug

SEQ ID NO: 48051 - RNA, 23 nt, Artificial Sequence
  Chemically synthesized
uaagaguugccaaaauaccuucu

SEQ ID NO: 48052 - RNA, 23 nt, Artificial Sequence
  Chemically synthesized
uuaagaguugccaaaauaccuuc

SEQ ID NO: 48053 - RNA, 23 nt, Artificial Sequence
  Chemically synthesized
auuaagaguugccaaaauaccuu

SEQ ID NO: 48054 - RNA, 23 nt, Artificial Sequence
  Chemically synthesized
gccuccuguagucgcuuugccua

SEQ ID NO: 48055 - RNA, 23 nt, Artificial Sequence
  Chemically synthesized
acuugaccaauacugacccucuu

SEQ ID NO: 48056 - RNA, 23 nt, Artificial Sequence
  Chemically synthesized
cuaaugaagaauucuguuuagcu

SEQ ID NO: 48057 - RNA, 23 nt, Artificial Sequence
  Chemically synthesized
ucagaugcguaaagcagaacagc

SEQ ID NO: 48058 - RNA, 23 nt, Artificial Sequence
  Chemically synthesized
cucagaugcguaaagcagaacag

SEQ ID NO: 48059 - RNA, 23 nt, Artificial Sequence
  Chemically synthesized
ucucagaugcguaaagcagaaca

SEQ ID NO: 48060 - RNA, 23 nt, Artificial Sequence
  Chemically synthesized
uucucagaugcguaaagcagaac

SEQ ID NO: 48061 - RNA, 23 nt, Artificial Sequence
  Chemically synthesized
guucucagaugcguaaagcagaa

SEQ ID NO: 48062 - RNA, 23 nt, Artificial Sequence
  Chemically synthesized
guugccaaaauaccuucugaacu

SEQ ID NO: 48063 - RNA, 23 nt, Artificial Sequence
  Chemically synthesized
aguugccaaaauaccuucugaac

SEQ ID NO: 48064 - RNA, 23 nt, Artificial Sequence
  Chemically synthesized
gaguugccaaaauaccuucugaa

SEQ ID NO: 48065 - RNA, 23 nt, Artificial Sequence
  Chemically synthesized
ggccucaagacaguguuugacga

SEQ ID NO: 48066 - RNA, 23 nt, Artificial Sequence
  Chemically synthesized
agaagaagcugacucccaucacc

SEQ ID NO: 48067 - RNA, 23 nt, Artificial Sequence
  Chemically synthesized
gagaagaagcugacucccaucac

SEQ ID NO: 48068 - RNA, 23 nt, Artificial Sequence
  Chemically synthesized
ggagaagaagcugacucccauca

SEQ ID NO: 48069 - RNA, 23 nt, Artificial Sequence
  Chemically synthesized
aggagaagaagcugacucccauc

SEQ ID NO: 48070 - RNA, 23 nt, Artificial Sequence
  Chemically synthesized
aaggagaagaagcugacucccau

SEQ ID NO: 48071 - RNA, 23 nt, Artificial Sequence
  Chemically synthesized
uagauggaaaaccggugaaucug

SEQ ID NO: 48072 - RNA, 23 nt, Artificial Sequence
  Chemically synthesized
guagauggaaaaccggugaaucu

SEQ ID NO: 48073 - RNA, 23 nt, Artificial Sequence
  Chemically synthesized
gguagauggaaaaccggugaauc

SEQ ID NO: 48074 - RNA, 23 nt, Artificial Sequence
  Chemically synthesized
ugguagauggaaaaccggugaau

SEQ ID NO: 48075 - RNA, 23 nt, Artificial Sequence
  Chemically synthesized
augguagauggaaaaccggugaa

SEQ ID NO: 48076 - RNA, 23 nt, Artificial Sequence
  Chemically synthesized
uaugguagauggaaaaccgguga

SEQ ID NO: 48077 - RNA, 23 nt, Artificial Sequence
  Chemically synthesized
cuuugacaauuauucugccaaug

SEQ ID NO: 48078 - RNA, 23 nt, Artificial Sequence
  Chemically synthesized
ucuuugacaauuauucugccaau

SEQ ID NO: 48079 - RNA, 23 nt, Artificial Sequence
  Chemically synthesized
cacugucacuugaccaauacuga

SEQ ID NO: 48080 - RNA, 23 nt, Artificial Sequence
  Chemically synthesized
acacugucacuugaccaauacug

SEQ ID NO: 48081 - RNA, 23 nt, Artificial Sequence
  Chemically synthesized
gacacugucacuugaccaauacu

SEQ ID NO: 48082 - RNA, 23 nt, Artificial Sequence
  Chemically synthesized
cgacacugucacuugaccaauac

SEQ ID NO: 48083 - RNA, 23 nt, Artificial Sequence
  Chemically synthesized
ccgacacugucacuugaccaaua

SEQ ID NO: 48084 - RNA, 23 nt, Artificial Sequence
  Chemically synthesized
cccaaauugggcauuuaauucau

SEQ ID NO: 48085 - RNA, 23 nt, Artificial Sequence
  Chemically synthesized
ccccaaauugggcauuuaauuca

SEQ ID NO: 48086 - RNA, 23 nt, Artificial Sequence
  Chemically synthesized
uccccaaauugggcauuuaauuc

SEQ ID NO: 48087 - RNA, 23 nt, Artificial Sequence
  Chemically synthesized
cuccccaaauugggcauuuaauu

SEQ ID NO: 48088 - RNA, 23 nt, Artificial Sequence
  Chemically synthesized
ccuccccaaauugggcauuuaau

SEQ ID NO: 48089 - RNA, 23 nt, Artificial Sequence
  Chemically synthesized
aggaaugaaagugucacggguaa

SEQ ID NO: 48090 - RNA, 23 nt, Artificial Sequence
  Chemically synthesized
aaggaaugaaagugucacgggua

SEQ ID NO: 48091 - RNA, 23 nt, Artificial Sequence
  Chemically synthesized
caaggaaugaaagugucacgggu

SEQ ID NO: 48092 - RNA, 23 nt, Artificial Sequence
  Chemically synthesized
ccucccgaaugaagcguugccau

SEQ ID NO: 48093 - RNA, 23 nt, Artificial Sequence
  Chemically synthesized
cccccccauucuuguucagauua

SEQ ID NO: 48094 - RNA, 23 nt, Artificial Sequence
  Chemically synthesized
gacaagccuucuuaaagccuuau

SEQ ID NO: 48095 - RNA, 23 nt, Artificial Sequence
  Chemically synthesized
aagaagaggaagagaaaaugccu

SEQ ID NO: 48096 - RNA, 23 nt, Artificial Sequence
  Chemically synthesized
gaagaagaggaagagaaaaugcc

SEQ ID NO: 48097 - RNA, 23 nt, Artificial Sequence
  Chemically synthesized
ugaagaagaggaagagaaaaugc

SEQ ID NO: 48098 - RNA, 23 nt, Artificial Sequence
  Chemically synthesized
gugaagaagaggaagagaaaaug

SEQ ID NO: 48099 - RNA, 23 nt, Artificial Sequence
  Chemically synthesized
cgugaagaagaggaagagaaaau

SEQ ID NO: 48100 - RNA, 23 nt, Artificial Sequence
  Chemically synthesized
ccgugaagaagaggaagagaaaa

SEQ ID NO: 48101 - RNA, 23 nt, Artificial Sequence
  Chemically synthesized
ugaaggagaagaagcugacuccc

SEQ ID NO: 48102 - RNA, 23 nt, Artificial Sequence
  Chemically synthesized
cugaaggagaagaagcugacucc

SEQ ID NO: 48103 - RNA, 23 nt, Artificial Sequence
  Chemically synthesized
acugaaggagaagaagcugacuc

SEQ ID NO: 48104 - RNA, 23 nt, Artificial Sequence
  Chemically synthesized
aacugaaggagaagaagcugacu

SEQ ID NO: 48105 - RNA, 23 nt, Artificial Sequence
  Chemically synthesized
aaacugaaggagaagaagcugac

SEQ ID NO: 48106 - RNA, 23 nt, Artificial Sequence
  Chemically synthesized
gauacagcuggacaagaagauua

SEQ ID NO: 48107 - RNA, 23 nt, Artificial Sequence
  Chemically synthesized
cgauguucuguacaacuuaacuc

SEQ ID NO: 48108 - RNA, 23 nt, Artificial Sequence
  Chemically synthesized
acgauguucuguacaacuuaacu

SEQ ID NO: 48109 - RNA, 23 nt, Artificial Sequence
  Chemically synthesized
gacgauguucuguacaacuuaac

SEQ ID NO: 48110 - RNA, 23 nt, Artificial Sequence
  Chemically synthesized
ugacgauguucuguacaacuuaa

SEQ ID NO: 48111 - RNA, 23 nt, Artificial Sequence
  Chemically synthesized
uucuaguaacuagguguaaaaau

SEQ ID NO: 48112 - RNA, 23 nt, Artificial Sequence
  Chemically synthesized
uuucuaguaacuagguguaaaaa

SEQ ID NO: 48113 - RNA, 23 nt, Artificial Sequence
  Chemically synthesized
uuuucuaguaacuagguguaaaa

SEQ ID NO: 48114 - RNA, 23 nt, Artificial Sequence
  Chemically synthesized
uccuguuucucugcaguuuuccu

SEQ ID NO: 48115 - RNA, 23 nt, Artificial Sequence
  Chemically synthesized
uuccuguuucucugcaguuuucc

SEQ ID NO: 48116 - RNA, 23 nt, Artificial Sequence
  Chemically synthesized
uuuccuguuucucugcaguuuuc

SEQ ID NO: 48117 - RNA, 23 nt, Artificial Sequence
  Chemically synthesized
auuuccuguuucucugcaguuuu

SEQ ID NO: 48118 - RNA, 23 nt, Artificial Sequence
  Chemically synthesized
cauuuccuguuucucugcaguuu

SEQ ID NO: 48119 - RNA, 23 nt, Artificial Sequence
  Chemically synthesized
ccaaauugggcauuuaauucauc

SEQ ID NO: 48120 - RNA, 23 nt, Artificial Sequence
  Chemically synthesized
acaaccaaugcauuuccuggaga

SEQ ID NO: 48121 - RNA, 23 nt, Artificial Sequence
  Chemically synthesized
gcucuuuggaucagucuuuguga

SEQ ID NO: 48122 - RNA, 23 nt, Artificial Sequence
  Chemically synthesized
guucagauuaagaguugccaaaa

SEQ ID NO: 48123 - RNA, 23 nt, Artificial Sequence
  Chemically synthesized
uguucagauuaagaguugccaaa

SEQ ID NO: 48124 - RNA, 23 nt, Artificial Sequence
  Chemically synthesized
ugacaagccuucuuaaagccuua

SEQ ID NO: 48125 - RNA, 23 nt, Artificial Sequence
  Chemically synthesized
augacaagccuucuuaaagccuu

SEQ ID NO: 48126 - RNA, 23 nt, Artificial Sequence
  Chemically synthesized
gaagagaaaaugccugcuguugu

SEQ ID NO: 48127 - RNA, 23 nt, Artificial Sequence
  Chemically synthesized
agaagaggaagagaaaaugccug

SEQ ID NO: 48128 - RNA, 23 nt, Artificial Sequence
  Chemically synthesized
gaucgagaaacugaaggagaaga

SEQ ID NO: 48129 - RNA, 23 nt, Artificial Sequence
  Chemically synthesized
cgaucgagaaacugaaggagaag

SEQ ID NO: 48130 - RNA, 23 nt, Artificial Sequence
  Chemically synthesized
acgaucgagaaacugaaggagaa

SEQ ID NO: 48131 - RNA, 23 nt, Artificial Sequence
  Chemically synthesized
ggagcggccauuuccuguuucuc

SEQ ID NO: 48132 - RNA, 23 nt, Artificial Sequence
  Chemically synthesized
uggagcggccauuuccuguuucu

SEQ ID NO: 48133 - RNA, 23 nt, Artificial Sequence
  Chemically synthesized
cugugcuagugcugacgauguuc

SEQ ID NO: 48134 - RNA, 23 nt, Artificial Sequence
  Chemically synthesized
acugugcuagugcugacgauguu

SEQ ID NO: 48135 - RNA, 23 nt, Artificial Sequence
  Chemically synthesized
aacugugcuagugcugacgaugu

SEQ ID NO: 48136 - RNA, 23 nt, Artificial Sequence
  Chemically synthesized
aaacugugcuagugcugacgaug

SEQ ID NO: 48137 - RNA, 23 nt, Artificial Sequence
  Chemically synthesized
uaaacugugcuagugcugacgau

SEQ ID NO: 48138 - RNA, 23 nt, Artificial Sequence
  Chemically synthesized
aauaugccuccuuguauuauaaa

SEQ ID NO: 48139 - RNA, 23 nt, Artificial Sequence
  Chemically synthesized
ggagaauauaucccuacugucuu

SEQ ID NO: 48140 - RNA, 23 nt, Artificial Sequence
  Chemically synthesized
uggagaauauaucccuacugucu

SEQ ID NO: 48141 - RNA, 23 nt, Artificial Sequence
  Chemically synthesized
cuggagaauauaucccuacuguc

SEQ ID NO: 48142 - RNA, 23 nt, Artificial Sequence
  Chemically synthesized
ugcaggccaucaaguguguggug

SEQ ID NO: 48143 - RNA, 23 nt, Artificial Sequence
  Chemically synthesized
augcaggccaucaaguguguggu

SEQ ID NO: 48144 - RNA, 23 nt, Artificial Sequence
  Chemically synthesized
gaugcaggccaucaagugugugg

SEQ ID NO: 48145 - RNA, 23 nt, Artificial Sequence
  Chemically synthesized
ugaugcaggccaucaagugugug

SEQ ID NO: 48146 - RNA, 23 nt, Artificial Sequence
  Chemically synthesized
cugaugcaggccaucaagugugu

SEQ ID NO: 48147 - RNA, 23 nt, Artificial Sequence
  Chemically synthesized
cacgaucgagaaacugaaggaga

SEQ ID NO: 48148 - RNA, 23 nt, Artificial Sequence
  Chemically synthesized
ugccaauguuaugguagauggaa

SEQ ID NO: 48149 - RNA, 23 nt, Artificial Sequence
  Chemically synthesized
cugccaauguuaugguagaugga

SEQ ID NO: 48150 - RNA, 23 nt, Artificial Sequence
  Chemically synthesized
ucugccaauguuaugguagaugg

SEQ ID NO: 48151 - RNA, 23 nt, Artificial Sequence
  Chemically synthesized
uucugccaauguuaugguagaug

SEQ ID NO: 48152 - RNA, 23 nt, Artificial Sequence
  Chemically synthesized
auucugccaauguuaugguagau

SEQ ID NO: 48153 - RNA, 23 nt, Artificial Sequence
  Chemically synthesized
uaucccuacugucuuugacaauu

SEQ ID NO: 48154 - RNA, 23 nt, Artificial Sequence
  Chemically synthesized
gaacagccucccgaaugaagcgu

SEQ ID NO: 48155 - RNA, 23 nt, Artificial Sequence
  Chemically synthesized
agaacagccucccgaaugaagcg

SEQ ID NO: 48156 - RNA, 23 nt, Artificial Sequence
  Chemically synthesized
cagaacagccucccgaaugaagc

SEQ ID NO: 48157 - RNA, 23 nt, Artificial Sequence
  Chemically synthesized
gcagaacagccucccgaaugaag

SEQ ID NO: 48158 - RNA, 23 nt, Artificial Sequence
  Chemically synthesized
agcagaacagccucccgaaugaa

SEQ ID NO: 48159 - RNA, 23 nt, Artificial Sequence
  Chemically synthesized
agaagacgguagcuucugcaguu

SEQ ID NO: 48160 - RNA, 23 nt, Artificial Sequence
  Chemically synthesized
ccugucccuuggaaccuuuguac

SEQ ID NO: 48161 - RNA, 23 nt, Artificial Sequence
  Chemically synthesized
uccugucccuuggaaccuuugua

SEQ ID NO: 48162 - RNA, 23 nt, Artificial Sequence
  Chemically synthesized
guccugucccuuggaaccuuugu

SEQ ID NO: 48163 - RNA, 23 nt, Artificial Sequence
  Chemically synthesized
gguccugucccuuggaaccuuug

SEQ ID NO: 48164 - RNA, 23 nt, Artificial Sequence
  Chemically synthesized
ugguccugucccuuggaaccuuu

SEQ ID NO: 48165 - RNA, 23 nt, Artificial Sequence
  Chemically synthesized
agauggaaaaccggugaaucugg

SEQ ID NO: 48166 - RNA, 23 nt, Artificial Sequence
  Chemically synthesized
gcuaaugcaauuagcauuauguu

SEQ ID NO: 48167 - RNA, 23 nt, Artificial Sequence
  Chemically synthesized
ugcuaaugcaauuagcauuaugu

SEQ ID NO: 48168 - RNA, 23 nt, Artificial Sequence
  Chemically synthesized
uugcuaaugcaauuagcauuaug

SEQ ID NO: 48169 - RNA, 23 nt, Artificial Sequence
  Chemically synthesized
uuugcuaaugcaauuagcauuau

SEQ ID NO: 48170 - RNA, 23 nt, Artificial Sequence
  Chemically synthesized
uuuugcuaaugcaauuagcauua

SEQ ID NO: 48171 - RNA, 23 nt, Artificial Sequence
  Chemically synthesized
ugauguuccuuugggucugugag

SEQ ID NO: 48172 - RNA, 23 nt, Artificial Sequence
  Chemically synthesized
uugauguuccuuugggucuguga

SEQ ID NO: 48173 - RNA, 23 nt, Artificial Sequence
  Chemically synthesized
auugauguuccuuugggucugug

SEQ ID NO: 48174 - RNA, 23 nt, Artificial Sequence
  Chemically synthesized
uauugauguuccuuugggucugu

SEQ ID NO: 48175 - RNA, 23 nt, Artificial Sequence
  Chemically synthesized
accgacacugucacuugaccaau

SEQ ID NO: 48176 - RNA, 23 nt, Artificial Sequence
  Chemically synthesized
uaccgacacugucacuugaccaa

SEQ ID NO: 48177 - RNA, 23 nt, Artificial Sequence
  Chemically synthesized
auaucccuacugucuuugacaau

SEQ ID NO: 48178 - RNA, 23 nt, Artificial Sequence
  Chemically synthesized
gaccagcuuuugcggagauuuug

SEQ ID NO: 48179 - RNA, 23 nt, Artificial Sequence
  Chemically synthesized
ugaccagcuuuugcggagauuuu

SEQ ID NO: 48180 - RNA, 23 nt, Artificial Sequence
  Chemically synthesized
cugaccagcuuuugcggagauuu

SEQ ID NO: 48181 - RNA, 23 nt, Artificial Sequence
  Chemically synthesized
ucugaccagcuuuugcggagauu

SEQ ID NO: 48182 - RNA, 23 nt, Artificial Sequence
  Chemically synthesized
uucugaccagcuuuugcggagau

SEQ ID NO: 48183 - RNA, 23 nt, Artificial Sequence
  Chemically synthesized
cguagcagcucagcucuuuggau

SEQ ID NO: 48184 - RNA, 23 nt, Artificial Sequence
  Chemically synthesized
gcguagcagcucagcucuuugga

SEQ ID NO: 48185 - RNA, 23 nt, Artificial Sequence
  Chemically synthesized
agcguagcagcucagcucuuugg

SEQ ID NO: 48186 - RNA, 23 nt, Artificial Sequence
  Chemically synthesized
gagcguagcagcucagcucuuug

SEQ ID NO: 48187 - RNA, 23 nt, Artificial Sequence
  Chemically synthesized
ugagcguagcagcucagcucuuu

SEQ ID NO: 48188 - RNA, 23 nt, Artificial Sequence
  Chemically synthesized
ccauugaacucaccagugaguua

SEQ ID NO: 48189 - RNA, 23 nt, Artificial Sequence
  Chemically synthesized
gccauugaacucaccagugaguu

SEQ ID NO: 48190 - RNA, 23 nt, Artificial Sequence
  Chemically synthesized
ugccauugaacucaccagugagu

SEQ ID NO: 48191 - RNA, 23 nt, Artificial Sequence
  Chemically synthesized
uugccauugaacucaccagugag

SEQ ID NO: 48192 - RNA, 23 nt, Artificial Sequence
  Chemically synthesized
guugccauugaacucaccaguga

SEQ ID NO: 48193 - RNA, 23 nt, Artificial Sequence
  Chemically synthesized
gcguugccauugaacucaccagu

SEQ ID NO: 48194 - RNA, 23 nt, Artificial Sequence
  Chemically synthesized
agcguugccauugaacucaccag

SEQ ID NO: 48195 - RNA, 23 nt, Artificial Sequence
  Chemically synthesized
aagcguugccauugaacucacca

SEQ ID NO: 48196 - RNA, 23 nt, Artificial Sequence
  Chemically synthesized
gaagcguugccauugaacucacc

SEQ ID NO: 48197 - RNA, 23 nt, Artificial Sequence
  Chemically synthesized
ugaagcguugccauugaacucac

SEQ ID NO: 48198 - RNA, 23 nt, Artificial Sequence
  Chemically synthesized
agaugcguaaagcagaacagccu

SEQ ID NO: 48199 - RNA, 23 nt, Artificial Sequence
  Chemically synthesized
cagaugcguaaagcagaacagcc

SEQ ID NO: 48200 - RNA, 23 nt, Artificial Sequence
  Chemically synthesized
gccaacuuuuuguuacagauuaa

SEQ ID NO: 48201 - RNA, 23 nt, Artificial Sequence
  Chemically synthesized
ugccaacuuuuuguuacagauua

SEQ ID NO: 48202 - RNA, 23 nt, Artificial Sequence
  Chemically synthesized
augccaacuuuuuguuacagauu

SEQ ID NO: 48203 - RNA, 23 nt, Artificial Sequence
  Chemically synthesized
aaugccaacuuuuuguuacagau

SEQ ID NO: 48204 - RNA, 23 nt, Artificial Sequence
  Chemically synthesized
caaugccaacuuuuuguuacaga

SEQ ID NO: 48205 - RNA, 23 nt, Artificial Sequence
  Chemically synthesized
gaggccucaagacaguguuugac

SEQ ID NO: 48206 - RNA, 23 nt, Artificial Sequence
  Chemically synthesized
cgaggccucaagacaguguuuga

SEQ ID NO: 48207 - RNA, 23 nt, Artificial Sequence
  Chemically synthesized
gcgaggccucaagacaguguuug

SEQ ID NO: 48208 - RNA, 23 nt, Artificial Sequence
  Chemically synthesized
agcgaggccucaagacaguguuu

SEQ ID NO: 48209 - RNA, 23 nt, Artificial Sequence
  Chemically synthesized
cagcgaggccucaagacaguguu

SEQ ID NO: 48210 - RNA, 23 nt, Artificial Sequence
  Chemically synthesized
ucauccuagugggaacuaaacuu

SEQ ID NO: 48211 - RNA, 23 nt, Artificial Sequence
  Chemically synthesized
aucauccuagugggaacuaaacu

SEQ ID NO: 48212 - RNA, 23 nt, Artificial Sequence
  Chemically synthesized
caucauccuagugggaacuaaac

SEQ ID NO: 48213 - RNA, 23 nt, Artificial Sequence
  Chemically synthesized
ccaucauccuagugggaacuaaa

SEQ ID NO: 48214 - RNA, 23 nt, Artificial Sequence
  Chemically synthesized
cccaucauccuagugggaacuaa

SEQ ID NO: 48215 - RNA, 23 nt, Artificial Sequence
  Chemically synthesized
uuuucccuugugaguccugcauc

SEQ ID NO: 48216 - RNA, 23 nt, Artificial Sequence
  Chemically synthesized
cuuuucccuugugaguccugcau

SEQ ID NO: 48217 - RNA, 23 nt, Artificial Sequence
  Chemically synthesized
aauuagcauuauguuuugcaugu

SEQ ID NO: 48218 - RNA, 23 nt, Artificial Sequence
  Chemically synthesized
gauguucuguacaacuuaacuca

SEQ ID NO: 48219 - RNA, 23 nt, Artificial Sequence
  Chemically synthesized
acugucacuugaccaauacugac

SEQ ID NO: 48220 - RNA, 23 nt, Artificial Sequence
  Chemically synthesized
ucagagcuaauaagugcuuuccu

SEQ ID NO: 48221 - RNA, 23 nt, Artificial Sequence
  Chemically synthesized
uucagagcuaauaagugcuuucc

SEQ ID NO: 48222 - RNA, 23 nt, Artificial Sequence
  Chemically synthesized
auucagagcuaauaagugcuuuc

SEQ ID NO: 48223 - RNA, 23 nt, Artificial Sequence
  Chemically synthesized
uauucagagcuaauaagugcuuu

SEQ ID NO: 48224 - RNA, 23 nt, Artificial Sequence
  Chemically synthesized
guggagcggccauuuccuguuuc

SEQ ID NO: 48225 - RNA, 23 nt, Artificial Sequence
  Chemically synthesized
aguggagcggccauuuccuguuu

SEQ ID NO: 48226 - RNA, 23 nt, Artificial Sequence
  Chemically synthesized
acgaaguggagauuuacacuaca

SEQ ID NO: 48227 - RNA, 23 nt, Artificial Sequence
  Chemically synthesized
uacgaaguggagauuuacacuac

SEQ ID NO: 48228 - RNA, 23 nt, Artificial Sequence
  Chemically synthesized
auacgaaguggagauuuacacua

SEQ ID NO: 48229 - RNA, 23 nt, Artificial Sequence
  Chemically synthesized
uuguucagauuaagaguugccaa

SEQ ID NO: 48230 - RNA, 23 nt, Artificial Sequence
  Chemically synthesized
uguagguaaaacuugccuacuga

SEQ ID NO: 48231 - RNA, 23 nt, Artificial Sequence
  Chemically synthesized
cuguagguaaaacuugccuacug

SEQ ID NO: 48232 - RNA, 23 nt, Artificial Sequence
  Chemically synthesized
ccaacuuuuuguuacagauuaau

SEQ ID NO: 48233 - RNA, 23 nt, Artificial Sequence
  Chemically synthesized
uugguccugucccuuggaaccuu

SEQ ID NO: 48234 - RNA, 23 nt, Artificial Sequence
  Chemically synthesized
ucccaucauccuagugggaacua

SEQ ID NO: 48235 - RNA, 23 nt, Artificial Sequence
  Chemically synthesized
cucccaucauccuagugggaacu

SEQ ID NO: 48236 - RNA, 23 nt, Artificial Sequence
  Chemically synthesized
acucccaucauccuagugggaac

SEQ ID NO: 48237 - RNA, 23 nt, Artificial Sequence
  Chemically synthesized
ucucugcaguuuuccucagcuuu

SEQ ID NO: 48238 - RNA, 23 nt, Artificial Sequence
  Chemically synthesized
uucucugcaguuuuccucagcuu

SEQ ID NO: 48239 - RNA, 23 nt, Artificial Sequence
  Chemically synthesized
uuaugggauacagcuggacaaga

SEQ ID NO: 48240 - RNA, 23 nt, Artificial Sequence
  Chemically synthesized
uuaacucacuggcgagaauacag

SEQ ID NO: 48241 - RNA, 23 nt, Artificial Sequence
  Chemically synthesized
cuuaacucacuggcgagaauaca

SEQ ID NO: 48242 - RNA, 23 nt, Artificial Sequence
  Chemically synthesized
acuuaacucacuggcgagaauac

SEQ ID NO: 48243 - RNA, 23 nt, Artificial Sequence
  Chemically synthesized
aacuuaacucacuggcgagaaua

SEQ ID NO: 48244 - RNA, 23 nt, Artificial Sequence
  Chemically synthesized
uuaccgacacugucacuugacca

SEQ ID NO: 48245 - RNA, 23 nt, Artificial Sequence
  Chemically synthesized
ucacugucuugccagauuaccga

SEQ ID NO: 48246 - RNA, 23 nt, Artificial Sequence
  Chemically synthesized
aucacugucuugccagauuaccg

SEQ ID NO: 48247 - RNA, 23 nt, Artificial Sequence
  Chemically synthesized
caucacugucuugccagauuacc

SEQ ID NO: 48248 - RNA, 23 nt, Artificial Sequence
  Chemically synthesized
acaucacugucuugccagauuac

SEQ ID NO: 48249 - RNA, 23 nt, Artificial Sequence
  Chemically synthesized
aacaucacugucuugccagauua

SEQ ID NO: 48250 - RNA, 23 nt, Artificial Sequence
  Chemically synthesized
uauaucccuacugucuuugacaa

SEQ ID NO: 48251 - RNA, 23 nt, Artificial Sequence
  Chemically synthesized
acaaggaaugaaagugucacggg

SEQ ID NO: 48252 - RNA, 23 nt, Artificial Sequence
  Chemically synthesized
uacaaggaaugaaagugucacgg

SEQ ID NO: 48253 - RNA, 23 nt, Artificial Sequence
  Chemically synthesized
cuacugaucaguuacacaaccaa

SEQ ID NO: 48254 - RNA, 23 nt, Artificial Sequence
  Chemically synthesized
ccuacugaucaguuacacaacca

SEQ ID NO: 48255 - RNA, 23 nt, Artificial Sequence
  Chemically synthesized
gccuacugaucaguuacacaacc

SEQ ID NO: 48256 - RNA, 23 nt, Artificial Sequence
  Chemically synthesized
ugccuacugaucaguuacacaac

SEQ ID NO: 48257 - RNA, 23 nt, Artificial Sequence
  Chemically synthesized
uugccuacugaucaguuacacaa

SEQ ID NO: 48258 - RNA, 23 nt, Artificial Sequence
  Chemically synthesized
cuugccuacugaucaguuacaca

SEQ ID NO: 48259 - RNA, 23 nt, Artificial Sequence
  Chemically synthesized
acuugccuacugaucaguuacac

SEQ ID NO: 48260 - RNA, 23 nt, Artificial Sequence
  Chemically synthesized
aggugcagacacuugcucuccua

SEQ ID NO: 48261 - RNA, 23 nt, Artificial Sequence
  Chemically synthesized
gaguucagacucacauucuauua

SEQ ID NO: 48262 - RNA, 23 nt, Artificial Sequence
  Chemically synthesized
agaguucagacucacauucuauu

SEQ ID NO: 48263 - RNA, 23 nt, Artificial Sequence
  Chemically synthesized
ccauuuuuugaaccaaucaguaa

SEQ ID NO: 48264 - RNA, 23 nt, Artificial Sequence
  Chemically synthesized
cuucgcacucaaugccaacuuuu

SEQ ID NO: 48265 - RNA, 23 nt, Artificial Sequence
  Chemically synthesized
ccuucgcacucaaugccaacuuu

SEQ ID NO: 48266 - RNA, 23 nt, Artificial Sequence
  Chemically synthesized
gccuucgcacucaaugccaacuu

SEQ ID NO: 48267 - RNA, 23 nt, Artificial Sequence
  Chemically synthesized
gucuagccauggcuaaggagauu

SEQ ID NO: 48268 - RNA, 23 nt, Artificial Sequence
  Chemically synthesized
ggucuagccauggcuaaggagau

SEQ ID NO: 48269 - RNA, 23 nt, Artificial Sequence
  Chemically synthesized
gggucuagccauggcuaaggaga

SEQ ID NO: 48270 - RNA, 23 nt, Artificial Sequence
  Chemically synthesized
agggucuagccauggcuaaggag

SEQ ID NO: 48271 - RNA, 23 nt, Artificial Sequence
  Chemically synthesized
cagggucuagccauggcuaagga

SEQ ID NO: 48272 - RNA, 23 nt, Artificial Sequence
  Chemically synthesized
auccuagugggaacuaaacuuga

SEQ ID NO: 48273 - RNA, 23 nt, Artificial Sequence
  Chemically synthesized
cauccuagugggaacuaaacuug

SEQ ID NO: 48274 - RNA, 23 nt, Artificial Sequence
  Chemically synthesized
cuuaugggauacagcuggacaag

SEQ ID NO: 48275 - RNA, 23 nt, Artificial Sequence
  Chemically synthesized
gcuuaugggauacagcuggacaa

SEQ ID NO: 48276 - RNA, 23 nt, Artificial Sequence
  Chemically synthesized
cuuuugcuaaugcaauuagcauu

SEQ ID NO: 48277 - RNA, 23 nt, Artificial Sequence
  Chemically synthesized
ucuuuugcuaaugcaauuagcau

SEQ ID NO: 48278 - RNA, 23 nt, Artificial Sequence
  Chemically synthesized
aucuuuugcuaaugcaauuagca

SEQ ID NO: 48279 - RNA, 23 nt, Artificial Sequence
  Chemically synthesized
gaucuuuugcuaaugcaauuagc

SEQ ID NO: 48280 - RNA, 23 nt, Artificial Sequence
  Chemically synthesized
ugaucuuuugcuaaugcaauuag

SEQ ID NO: 48281 - RNA, 23 nt, Artificial Sequence
  Chemically synthesized
cuguuucucugcaguuuuccuca

SEQ ID NO: 48282 - RNA, 23 nt, Artificial Sequence
  Chemically synthesized
ccuguuucucugcaguuuuccuc

SEQ ID NO: 48283 - RNA, 23 nt, Artificial Sequence
  Chemically synthesized
guuuucuaguaacuagguguaaa

SEQ ID NO: 48284 - RNA, 23 nt, Artificial Sequence
  Chemically synthesized
uuauucagagcuaauaagugcuu

SEQ ID NO: 48285 - RNA, 23 nt, Artificial Sequence
  Chemically synthesized
cauuuccuggagaauauaucccu

SEQ ID NO: 48286 - RNA, 23 nt, Artificial Sequence
  Chemically synthesized
uuucugucaaaugcaguagauga

SEQ ID NO: 48287 - RNA, 23 nt, Artificial Sequence
  Chemically synthesized
auuucugucaaaugcaguagaug

SEQ ID NO: 48288 - RNA, 23 nt, Artificial Sequence
  Chemically synthesized
aauuucugucaaaugcaguagau

SEQ ID NO: 48289 - RNA, 23 nt, Artificial Sequence
  Chemically synthesized
cacaaccaaugcauuuccuggag

SEQ ID NO: 48290 - RNA, 23 nt, Artificial Sequence
  Chemically synthesized
accagcuuuugcggagauuuuga

SEQ ID NO: 48291 - RNA, 23 nt, Artificial Sequence
  Chemically synthesized
ugaucaguuacacaaccaaugca

SEQ ID NO: 48292 - RNA, 23 nt, Artificial Sequence
  Chemically synthesized
cugaucaguuacacaaccaaugc

SEQ ID NO: 48293 - RNA, 23 nt, Artificial Sequence
  Chemically synthesized
acugaucaguuacacaaccaaug

SEQ ID NO: 48294 - RNA, 23 nt, Artificial Sequence
  Chemically synthesized
uacugaucaguuacacaaccaau

SEQ ID NO: 48295 - RNA, 23 nt, Artificial Sequence
  Chemically synthesized
aagcagaacagccucccgaauga

SEQ ID NO: 48296 - RNA, 23 nt, Artificial Sequence
  Chemically synthesized
gcguaaagcagaacagccucccg

SEQ ID NO: 48297 - RNA, 23 nt, Artificial Sequence
  Chemically synthesized
ugcguaaagcagaacagccuccc

SEQ ID NO: 48298 - RNA, 23 nt, Artificial Sequence
  Chemically synthesized
augcguaaagcagaacagccucc

SEQ ID NO: 48299 - RNA, 23 nt, Artificial Sequence
  Chemically synthesized
gaugcguaaagcagaacagccuc

SEQ ID NO: 48300 - RNA, 23 nt, Artificial Sequence
  Chemically synthesized
aacuugccuacugaucaguuaca

SEQ ID NO: 48301 - RNA, 23 nt, Artificial Sequence
  Chemically synthesized
aaacuugccuacugaucaguuac

SEQ ID NO: 48302 - RNA, 23 nt, Artificial Sequence
  Chemically synthesized
aaaacuugccuacugaucaguua

SEQ ID NO: 48303 - RNA, 23 nt, Artificial Sequence
  Chemically synthesized
uaaagccuuauuuuucaaaagcg

SEQ ID NO: 48304 - RNA, 23 nt, Artificial Sequence
  Chemically synthesized
uuagcccuaaaaugacaagccuu

SEQ ID NO: 48305 - RNA, 23 nt, Artificial Sequence
  Chemically synthesized
uuuagcccuaaaaugacaagccu

SEQ ID NO: 48306 - RNA, 23 nt, Artificial Sequence
  Chemically synthesized
cgccucccgugaagaagaggaag

SEQ ID NO: 48307 - RNA, 23 nt, Artificial Sequence
  Chemically synthesized
ccgccucccgugaagaagaggaa

SEQ ID NO: 48308 - RNA, 23 nt, Artificial Sequence
  Chemically synthesized
gcuauuuccucuaaugaagaauu

SEQ ID NO: 48309 - RNA, 23 nt, Artificial Sequence
  Chemically synthesized
uugaacagaacugcuauuuccuc

SEQ ID NO: 48310 - RNA, 23 nt, Artificial Sequence
  Chemically synthesized
uuugaacagaacugcuauuuccu

SEQ ID NO: 48311 - RNA, 23 nt, Artificial Sequence
  Chemically synthesized
uuuugaacagaacugcuauuucc

SEQ ID NO: 48312 - RNA, 23 nt, Artificial Sequence
  Chemically synthesized
auuuugaacagaacugcuauuuc

SEQ ID NO: 48313 - RNA, 23 nt, Artificial Sequence
  Chemically synthesized
gauuuugaacagaacugcuauuu

SEQ ID NO: 48314 - RNA, 23 nt, Artificial Sequence
  Chemically synthesized
acacaaccaaugcauuuccugga

SEQ ID NO: 48315 - RNA, 23 nt, Artificial Sequence
  Chemically synthesized
uacacaaccaaugcauuuccugg

SEQ ID NO: 48316 - RNA, 23 nt, Artificial Sequence
  Chemically synthesized
uuacacaaccaaugcauuuccug

SEQ ID NO: 48317 - RNA, 23 nt, Artificial Sequence
  Chemically synthesized
guuacacaaccaaugcauuuccu

SEQ ID NO: 48318 - RNA, 23 nt, Artificial Sequence
  Chemically synthesized
uuucugaccagcuuuugcggaga

SEQ ID NO: 48319 - RNA, 23 nt, Artificial Sequence
  Chemically synthesized
aaugacaagccuucuuaaagccu

SEQ ID NO: 48320 - RNA, 23 nt, Artificial Sequence
  Chemically synthesized
aaaugacaagccuucuuaaagcc

SEQ ID NO: 48321 - RNA, 23 nt, Artificial Sequence
  Chemically synthesized
uaagaguucagacucacauucua

SEQ ID NO: 48322 - RNA, 23 nt, Artificial Sequence
  Chemically synthesized
guaagaguucagacucacauucu

SEQ ID NO: 48323 - RNA, 23 nt, Artificial Sequence
  Chemically synthesized
uguaagaguucagacucacauuc

SEQ ID NO: 48324 - RNA, 23 nt, Artificial Sequence
  Chemically synthesized
auguaagaguucagacucacauu

SEQ ID NO: 48325 - RNA, 23 nt, Artificial Sequence
  Chemically synthesized
aauguaagaguucagacucacau

SEQ ID NO: 48326 - RNA, 23 nt, Artificial Sequence
  Chemically synthesized
cugacucccaucaccuauccgca

SEQ ID NO: 48327 - RNA, 23 nt, Artificial Sequence
  Chemically synthesized
gcugacucccaucaccuauccgc

SEQ ID NO: 48328 - RNA, 23 nt, Artificial Sequence
  Chemically synthesized
agcugacucccaucaccuauccg

SEQ ID NO: 48329 - RNA, 23 nt, Artificial Sequence
  Chemically synthesized
aagcugacucccaucaccuaucc

SEQ ID NO: 48330 - RNA, 23 nt, Artificial Sequence
  Chemically synthesized
gaagcugacucccaucaccuauc

SEQ ID NO: 48331 - RNA, 23 nt, Artificial Sequence
  Chemically synthesized
agaagcugacucccaucaccuau

SEQ ID NO: 48332 - RNA, 23 nt, Artificial Sequence
  Chemically synthesized
uauucugccaauguuaugguaga

SEQ ID NO: 48333 - RNA, 23 nt, Artificial Sequence
  Chemically synthesized
uuauucugccaauguuaugguag

SEQ ID NO: 48334 - RNA, 23 nt, Artificial Sequence
  Chemically synthesized
auuauucugccaauguuauggua

SEQ ID NO: 48335 - RNA, 23 nt, Artificial Sequence
  Chemically synthesized
uucuguuagucgcuaacuuagua

SEQ ID NO: 48336 - RNA, 23 nt, Artificial Sequence
  Chemically synthesized
guucuguuagucgcuaacuuagu

SEQ ID NO: 48337 - RNA, 23 nt, Artificial Sequence
  Chemically synthesized
uguucuguuagucgcuaacuuag

SEQ ID NO: 48338 - RNA, 23 nt, Artificial Sequence
  Chemically synthesized
aauacgaaguggagauuuacacu

SEQ ID NO: 48339 - RNA, 23 nt, Artificial Sequence
  Chemically synthesized
aaauacgaaguggagauuuacac

SEQ ID NO: 48340 - RNA, 23 nt, Artificial Sequence
  Chemically synthesized
ugaacagaacugcuauuuccucu

SEQ ID NO: 48341 - RNA, 23 nt, Artificial Sequence
  Chemically synthesized
cguugccauugaacucaccagug

SEQ ID NO: 48342 - RNA, 23 nt, Artificial Sequence
  Chemically synthesized
ccuucgucuuugagaagacggua

SEQ ID NO: 48343 - RNA, 23 nt, Artificial Sequence
  Chemically synthesized
accuucgucuuugagaagacggu

SEQ ID NO: 48344 - RNA, 23 nt, Artificial Sequence
  Chemically synthesized
gaccuucgucuuugagaagacgg

SEQ ID NO: 48345 - RNA, 23 nt, Artificial Sequence
  Chemically synthesized
agaccuucgucuuugagaagacg

SEQ ID NO: 48346 - RNA, 23 nt, Artificial Sequence
  Chemically synthesized
aagaccuucgucuuugagaagac

SEQ ID NO: 48347 - RNA, 23 nt, Artificial Sequence
  Chemically synthesized
aaagaccuucgucuuugagaaga

SEQ ID NO: 48348 - RNA, 23 nt, Artificial Sequence
  Chemically synthesized
caaagaccuucgucuuugagaag

SEQ ID NO: 48349 - RNA, 23 nt, Artificial Sequence
  Chemically synthesized
gcaaagaccuucgucuuugagaa

SEQ ID NO: 48350 - RNA, 23 nt, Artificial Sequence
  Chemically synthesized
ugcaaagaccuucgucuuugaga

SEQ ID NO: 48351 - RNA, 23 nt, Artificial Sequence
  Chemically synthesized
uugcaaagaccuucgucuuugag

SEQ ID NO: 48352 - RNA, 23 nt, Artificial Sequence
  Chemically synthesized
uuugcaaagaccuucgucuuuga

SEQ ID NO: 48353 - RNA, 23 nt, Artificial Sequence
  Chemically synthesized
cuuugcaaagaccuucgucuuug

SEQ ID NO: 48354 - RNA, 23 nt, Artificial Sequence
  Chemically synthesized
uuaaagccuuauuuuucaaaagc

SEQ ID NO: 48355 - RNA, 23 nt, Artificial Sequence
  Chemically synthesized
ucuagccauggcuaaggagauug

SEQ ID NO: 48356 - RNA, 23 nt, Artificial Sequence
  Chemically synthesized
acacucccaucauccuaguggga

SEQ ID NO: 48357 - RNA, 23 nt, Artificial Sequence
  Chemically synthesized
aacacucccaucauccuaguggg

SEQ ID NO: 48358 - RNA, 23 nt, Artificial Sequence
  Chemically synthesized
uucuuaacaucacugucuugcca

SEQ ID NO: 48359 - RNA, 23 nt, Artificial Sequence
  Chemically synthesized
cuucuuaacaucacugucuugcc

SEQ ID NO: 48360 - RNA, 23 nt, Artificial Sequence
  Chemically synthesized
ccuucuuaacaucacugucuugc

SEQ ID NO: 48361 - RNA, 23 nt, Artificial Sequence
  Chemically synthesized
accuucuuaacaucacugucuug

SEQ ID NO: 48362 - RNA, 23 nt, Artificial Sequence
  Chemically synthesized
aaccuucuuaacaucacugucuu

SEQ ID NO: 48363 - RNA, 23 nt, Artificial Sequence
  Chemically synthesized
aguuacacaaccaaugcauuucc

SEQ ID NO: 48364 - RNA, 23 nt, Artificial Sequence
  Chemically synthesized
cauagcgaguuuucugaccagcu

SEQ ID NO: 48365 - RNA, 23 nt, Artificial Sequence
  Chemically synthesized
gcauuguugugccgagaacaccg

SEQ ID NO: 48366 - RNA, 23 nt, Artificial Sequence
  Chemically synthesized
ugcauuguugugccgagaacacc

SEQ ID NO: 48367 - RNA, 23 nt, Artificial Sequence
  Chemically synthesized
cugcauuguugugccgagaacac

SEQ ID NO: 48368 - RNA, 23 nt, Artificial Sequence
  Chemically synthesized
acugcauuguugugccgagaaca

SEQ ID NO: 48369 - RNA, 23 nt, Artificial Sequence
  Chemically synthesized
cacugcauuguugugccgagaac

SEQ ID NO: 48370 - RNA, 23 nt, Artificial Sequence
  Chemically synthesized
uuggugcuguaaaauaccuggag

SEQ ID NO: 48371 - RNA, 23 nt, Artificial Sequence
  Chemically synthesized
auuggugcuguaaaauaccugga

SEQ ID NO: 48372 - RNA, 23 nt, Artificial Sequence
  Chemically synthesized
gauuggugcuguaaaauaccugg

SEQ ID NO: 48373 - RNA, 23 nt, Artificial Sequence
  Chemically synthesized
agauuggugcuguaaaauaccug

SEQ ID NO: 48374 - RNA, 23 nt, Artificial Sequence
  Chemically synthesized
gagauuggugcuguaaaauaccu

SEQ ID NO: 48375 - RNA, 23 nt, Artificial Sequence
  Chemically synthesized
gaaaauguccgugcaaaguggua

SEQ ID NO: 48376 - RNA, 23 nt, Artificial Sequence
  Chemically synthesized
uguucuuaauuugcuuuucccuu

SEQ ID NO: 48377 - RNA, 23 nt, Artificial Sequence
  Chemically synthesized
guguucuuaauuugcuuuucccu

SEQ ID NO: 48378 - RNA, 23 nt, Artificial Sequence
  Chemically synthesized
ccauaaaaccauuuuuugaacca

SEQ ID NO: 48379 - RNA, 23 nt, Artificial Sequence
  Chemically synthesized
caaauugggcauuuaauucaucu

SEQ ID NO: 48380 - RNA, 23 nt, Artificial Sequence
  Chemically synthesized
gaauucuguuuagcugugggugu

SEQ ID NO: 48381 - RNA, 23 nt, Artificial Sequence
  Chemically synthesized
gucuuugugauuucauagcgagu

SEQ ID NO: 48382 - RNA, 23 nt, Artificial Sequence
  Chemically synthesized
uuccuuucucuuacaccugccau

SEQ ID NO: 48383 - RNA, 23 nt, Artificial Sequence
  Chemically synthesized
cucuaaaagguuaauuucuguca

SEQ ID NO: 48384 - RNA, 23 nt, Artificial Sequence
  Chemically synthesized
ugaaucugggcuuaugggauaca

SEQ ID NO: 48385 - RNA, 23 nt, Artificial Sequence
  Chemically synthesized
acaguugcagaauuguggagugu

SEQ ID NO: 48386 - RNA, 23 nt, Artificial Sequence
  Chemically synthesized
uccuuucucuuacaccugccaug

SEQ ID NO: 48387 - RNA, 23 nt, Artificial Sequence
  Chemically synthesized
acucuaaaagguuaauuucuguc

SEQ ID NO: 48388 - RNA, 23 nt, Artificial Sequence
  Chemically synthesized
ggugaaucugggcuuaugggaua

SEQ ID NO: 48389 - RNA, 23 nt, Artificial Sequence
  Chemically synthesized
guaaacugugcuagugcugacga

SEQ ID NO: 48390 - RNA, 23 nt, Artificial Sequence
  Chemically synthesized
gaaauguuuucuuaagcuuuucc

SEQ ID NO: 48391 - RNA, 23 nt, Artificial Sequence
  Chemically synthesized
uccauaaaaccauuuuuugaacc

SEQ ID NO: 48392 - RNA, 23 nt, Artificial Sequence
  Chemically synthesized
augauaaagacacgaucgagaaa

SEQ ID NO: 48393 - RNA, 23 nt, Artificial Sequence
  Chemically synthesized
acacugcauuguugugccgagaa

SEQ ID NO: 48394 - RNA, 23 nt, Artificial Sequence
  Chemically synthesized
gcauguaugacuuaauaaauccu

SEQ ID NO: 48395 - RNA, 23 nt, Artificial Sequence
  Chemically synthesized
gaaacugaaggagaagaagcuga

SEQ ID NO: 48396 - RNA, 23 nt, Artificial Sequence
  Chemically synthesized
aguuuucuaguaacuagguguaa

SEQ ID NO: 48397 - RNA, 23 nt, Artificial Sequence
  Chemically synthesized
uaguuuucuaguaacuaggugua

SEQ ID NO: 48398 - RNA, 23 nt, Artificial Sequence
  Chemically synthesized
uaaaaaucauguguugcagcuuu

SEQ ID NO: 48399 - RNA, 23 nt, Artificial Sequence
  Chemically synthesized
cuaauaagugcuuuccuuaguuu

SEQ ID NO: 48400 - RNA, 23 nt, Artificial Sequence
  Chemically synthesized
gcaauuagcauuauguuuugcau

SEQ ID NO: 48401 - RNA, 23 nt, Artificial Sequence
  Chemically synthesized
guguuuuuacauugaucuuuugc

SEQ ID NO: 48402 - RNA, 23 nt, Artificial Sequence
  Chemically synthesized
ucaguuacacaaccaaugcauuu

SEQ ID NO: 48403 - RNA, 23 nt, Artificial Sequence
  Chemically synthesized
agauuuacacuacauuguacaag

SEQ ID NO: 48404 - RNA, 23 nt, Artificial Sequence
  Chemically synthesized
cuauuuccucuaaugaagaauuc

SEQ ID NO: 48405 - RNA, 23 nt, Artificial Sequence
  Chemically synthesized
aucauuugaaaauguccgugcaa

SEQ ID NO: 48406 - RNA, 23 nt, Artificial Sequence
  Chemically synthesized
ccagauuaccgacacugucacuu

SEQ ID NO: 48407 - RNA, 23 nt, Artificial Sequence
  Chemically synthesized
uccucuaaugaagaauucuguuu

SEQ ID NO: 48408 - RNA, 23 nt, Artificial Sequence
  Chemically synthesized
gcaguuaggaggugcagacacuu

SEQ ID NO: 48409 - RNA, 23 nt, Artificial Sequence
  Chemically synthesized
agaauacagcgugggacccuuca

SEQ ID NO: 48410 - RNA, 23 nt, Artificial Sequence
  Chemically synthesized
guuaauuucugucaaaugcagua

SEQ ID NO: 48411 - RNA, 23 nt, Artificial Sequence
  Chemically synthesized
guauuuugacaaaauacgaagug

SEQ ID NO: 48412 - RNA, 23 nt, Artificial Sequence
  Chemically synthesized
agauuuugaacagaacugcuauu

SEQ ID NO: 48413 - RNA, 23 nt, Artificial Sequence
  Chemically synthesized
ccauuuccuguuucucugcaguu

SEQ ID NO: 48414 - RNA, 23 nt, Artificial Sequence
  Chemically synthesized
aagaagcugacucccaucaccua

SEQ ID NO: 48415 - RNA, 23 nt, Artificial Sequence
  Chemically synthesized
agauuaccgacacugucacuuga

SEQ ID NO: 48416 - RNA, 23 nt, Artificial Sequence
  Chemically synthesized
agacaguauuuugacaaaauacg

SEQ ID NO: 48417 - RNA, 23 nt, Artificial Sequence
  Chemically synthesized
cucuaaugaagaauucuguuuag

SEQ ID NO: 48418 - RNA, 23 nt, Artificial Sequence
  Chemically synthesized
ccucuaaugaagaauucuguuua

SEQ ID NO: 48419 - RNA, 23 nt, Artificial Sequence
  Chemically synthesized
caauuagcauuauguuuugcaug

SEQ ID NO: 48420 - RNA, 23 nt, Artificial Sequence
  Chemically synthesized
aucaguuacacaaccaaugcauu

SEQ ID NO: 48421 - RNA, 23 nt, Artificial Sequence
  Chemically synthesized
gaaggagaagaagcugacuccca

SEQ ID NO: 48422 - RNA, 23 nt, Artificial Sequence
  Chemically synthesized
cacuugaccaauacugacccucu

SEQ ID NO: 48423 - RNA, 23 nt, Artificial Sequence
  Chemically synthesized
uuccucuaaugaagaauucuguu

SEQ ID NO: 48424 - RNA, 23 nt, Artificial Sequence
  Chemically synthesized
ggaaaaccggugaaucugggcuu

SEQ ID NO: 48425 - RNA, 23 nt, Artificial Sequence
  Chemically synthesized
ucacuugaccaauacugacccuc

SEQ ID NO: 48426 - RNA, 23 nt, Artificial Sequence
  Chemically synthesized
ucuuuaaacugguuguucuguua

SEQ ID NO: 48427 - RNA, 23 nt, Artificial Sequence
  Chemically synthesized
cgucuuugagaagacgguagcuu

SEQ ID NO: 48428 - RNA, 23 nt, Artificial Sequence
  Chemically synthesized
gucacuugaccaauacugacccu

SEQ ID NO: 48429 - RNA, 23 nt, Artificial Sequence
  Chemically synthesized
gucuugccagauuaccgacacug

SEQ ID NO: 48430 - RNA, 23 nt, Artificial Sequence
  Chemically synthesized
uaaaacuugccuacugaucaguu

SEQ ID NO: 48431 - RNA, 23 nt, Artificial Sequence
  Chemically synthesized
gagcuguagguaaaacuugccua

SEQ ID NO: 48432 - RNA, 23 nt, Artificial Sequence
  Chemically synthesized
gcacguguucccgacauaacauu

SEQ ID NO: 48433 - RNA, 23 nt, Artificial Sequence
  Chemically synthesized
guagcuucugcaguuaggaggug

SEQ ID NO: 48434 - RNA, 23 nt, Artificial Sequence
  Chemically synthesized
uggaaaaccggugaaucugggcu

SEQ ID NO: 48435 - RNA, 23 nt, Artificial Sequence
  Chemically synthesized
ugcaauuagcauuauguuuugca

SEQ ID NO: 48436 - RNA, 23 nt, Artificial Sequence
  Chemically synthesized
gccagauuaccgacacugucacu

SEQ ID NO: 48437 - RNA, 23 nt, Artificial Sequence
  Chemically synthesized
gcuguagguaaaacuugccuacu

SEQ ID NO: 48438 - RNA, 23 nt, Artificial Sequence
  Chemically synthesized
agcacguguucccgacauaacau

SEQ ID NO: 48439 - RNA, 23 nt, Artificial Sequence
  Chemically synthesized
ugagaagacgguagcuucugcag

SEQ ID NO: 48440 - RNA, 23 nt, Artificial Sequence
  Chemically synthesized
cuacacugcauuguugugccgag

SEQ ID NO: 48441 - RNA, 23 nt, Artificial Sequence
  Chemically synthesized
agccuucgcacucaaugccaacu

SEQ ID NO: 48442 - RNA, 23 nt, Artificial Sequence
  Chemically synthesized
ggaugauaaagacacgaucgaga

SEQ ID NO: 48443 - RNA, 23 nt, Artificial Sequence
  Chemically synthesized
acauaacauuguacuguaaugga

SEQ ID NO: 48444 - RNA, 23 nt, Artificial Sequence
  Chemically synthesized
acuuugcaaagaccuucgucuuu

SEQ ID NO: 48445 - RNA, 23 nt, Artificial Sequence
  Chemically synthesized
uaacaucacugucuugccagauu

SEQ ID NO: 48446 - RNA, 23 nt, Artificial Sequence
  Chemically synthesized
cugacugagcaauaugccuccuu

SEQ ID NO: 48447 - RNA, 23 nt, Artificial Sequence
  Chemically synthesized
ucgucuuugagaagacgguagcu

SEQ ID NO: 48448 - RNA, 23 nt, Artificial Sequence
  Chemically synthesized
acugagcaauaugccuccuugua

SEQ ID NO: 48449 - RNA, 23 nt, Artificial Sequence
  Chemically synthesized
aaauguaagaguucagacucaca

SEQ ID NO: 48450 - RNA, 23 nt, Artificial Sequence
  Chemically synthesized
gcaucauuugaaaauguccgugc

SEQ ID NO: 48451 - RNA, 23 nt, Artificial Sequence
  Chemically synthesized
guaauggagugagcguagcagcu

SEQ ID NO: 48452 - RNA, 23 nt, Artificial Sequence
  Chemically synthesized
acguguucccgacauaacauugu

SEQ ID NO: 48453 - RNA, 23 nt, Artificial Sequence
  Chemically synthesized
agcuucugcaguuaggaggugca

SEQ ID NO: 48454 - RNA, 23 nt, Artificial Sequence
  Chemically synthesized
gacugagcaauaugccuccuugu

SEQ ID NO: 48455 - RNA, 23 nt, Artificial Sequence
  Chemically synthesized
caguuaggaggugcagacacuug

SEQ ID NO: 48456 - RNA, 23 nt, Artificial Sequence
  Chemically synthesized
cuuuaaacugguuguucuguuag

SEQ ID NO: 48457 - RNA, 23 nt, Artificial Sequence
  Chemically synthesized
uaaagcagaacagccucccgaau

SEQ ID NO: 48458 - RNA, 23 nt, Artificial Sequence
  Chemically synthesized
cacucccaucauccuagugggaa

SEQ ID NO: 48459 - RNA, 23 nt, Artificial Sequence
  Chemically synthesized
ggcuuaugggauacagcuggaca

SEQ ID NO: 48460 - RNA, 23 nt, Artificial Sequence
  Chemically synthesized
ugacugagcaauaugccuccuug

SEQ ID NO: 48461 - RNA, 23 nt, Artificial Sequence
  Chemically synthesized
agcagcacguguucccgacauaa

SEQ ID NO: 48462 - RNA, 23 nt, Artificial Sequence
  Chemically synthesized
guucuugguccugucccuuggaa

SEQ ID NO: 48463 - RNA, 23 nt, Artificial Sequence
  Chemically synthesized
uuagcagcacguguucccgacau

SEQ ID NO: 48464 - RNA, 23 nt, Artificial Sequence
  Chemically synthesized
gagguaaagagggucaguauugg

SEQ ID NO: 48465 - RNA, 23 nt, Artificial Sequence
  Chemically synthesized
agguaaagagggucaguauuggu

SEQ ID NO: 48466 - RNA, 23 nt, Artificial Sequence
  Chemically synthesized
gguaaagagggucaguauugguc

SEQ ID NO: 48467 - RNA, 23 nt, Artificial Sequence
  Chemically synthesized
guaaagagggucaguauugguca

SEQ ID NO: 48468 - RNA, 23 nt, Artificial Sequence
  Chemically synthesized
uaaagagggucaguauuggucaa

SEQ ID NO: 48469 - RNA, 23 nt, Artificial Sequence
  Chemically synthesized
ugaaaaauaaggcuuuaagaagg

SEQ ID NO: 48470 - RNA, 23 nt, Artificial Sequence
  Chemically synthesized
gaaaaauaaggcuuuaagaaggc

SEQ ID NO: 48471 - RNA, 23 nt, Artificial Sequence
  Chemically synthesized
aaaaauaaggcuuuaagaaggcu

SEQ ID NO: 48472 - RNA, 23 nt, Artificial Sequence
  Chemically synthesized
aaaauaaggcuuuaagaaggcuu

SEQ ID NO: 48473 - RNA, 23 nt, Artificial Sequence
  Chemically synthesized
aaauaaggcuuuaagaaggcuug

SEQ ID NO: 48474 - RNA, 23 nt, Artificial Sequence
  Chemically synthesized
gguauuuuacagcaccaaucucc

SEQ ID NO: 48475 - RNA, 23 nt, Artificial Sequence
  Chemically synthesized
guauuuuacagcaccaaucuccu

SEQ ID NO: 48476 - RNA, 23 nt, Artificial Sequence
  Chemically synthesized
uauuuuacagcaccaaucuccuu

SEQ ID NO: 48477 - RNA, 23 nt, Artificial Sequence
  Chemically synthesized
auuuuacagcaccaaucuccuua

SEQ ID NO: 48478 - RNA, 23 nt, Artificial Sequence
  Chemically synthesized
uuuuacagcaccaaucuccuuag

SEQ ID NO: 48479 - RNA, 23 nt, Artificial Sequence
  Chemically synthesized
aucuguuugcggauaggauaggg

SEQ ID NO: 48480 - RNA, 23 nt, Artificial Sequence
  Chemically synthesized
ucuguuugcggauaggauagggg

SEQ ID NO: 48481 - RNA, 23 nt, Artificial Sequence
  Chemically synthesized
cuguuugcggauaggauaggggg

SEQ ID NO: 48482 - RNA, 23 nt, Artificial Sequence
  Chemically synthesized
uguuugcggauaggauagggggc

SEQ ID NO: 48483 - RNA, 23 nt, Artificial Sequence
  Chemically synthesized
guuugcggauaggauagggggcg

SEQ ID NO: 48484 - RNA, 23 nt, Artificial Sequence
  Chemically synthesized
guuuaaagaugaauuaaaugccc

SEQ ID NO: 48485 - RNA, 23 nt, Artificial Sequence
  Chemically synthesized
uuuaaagaugaauuaaaugccca

SEQ ID NO: 48486 - RNA, 23 nt, Artificial Sequence
  Chemically synthesized
uuaaagaugaauuaaaugcccaa

SEQ ID NO: 48487 - RNA, 23 nt, Artificial Sequence
  Chemically synthesized
uaaagaugaauuaaaugcccaau

SEQ ID NO: 48488 - RNA, 23 nt, Artificial Sequence
  Chemically synthesized
aaagaugaauuaaaugcccaauu

SEQ ID NO: 48489 - RNA, 23 nt, Artificial Sequence
  Chemically synthesized
gaguuuuuacccgugacacuuuc

SEQ ID NO: 48490 - RNA, 23 nt, Artificial Sequence
  Chemically synthesized
aguuuuuacccgugacacuuuca

SEQ ID NO: 48491 - RNA, 23 nt, Artificial Sequence
  Chemically synthesized
guuuuuacccgugacacuuucau

SEQ ID NO: 48492 - RNA, 23 nt, Artificial Sequence
  Chemically synthesized
uuuuuacccgugacacuuucauu

SEQ ID NO: 48493 - RNA, 23 nt, Artificial Sequence
  Chemically synthesized
uuuuacccgugacacuuucauuc

SEQ ID NO: 48494 - RNA, 23 nt, Artificial Sequence
  Chemically synthesized
gcaaaagcuggucagaaaacucg

SEQ ID NO: 48495 - RNA, 23 nt, Artificial Sequence
  Chemically synthesized
caaaagcuggucagaaaacucgc

SEQ ID NO: 48496 - RNA, 23 nt, Artificial Sequence
  Chemically synthesized
aaaagcuggucagaaaacucgcu

SEQ ID NO: 48497 - RNA, 23 nt, Artificial Sequence
  Chemically synthesized
aaagcuggucagaaaacucgcua

SEQ ID NO: 48498 - RNA, 23 nt, Artificial Sequence
  Chemically synthesized
aagcuggucagaaaacucgcuau

SEQ ID NO: 48499 - RNA, 23 nt, Artificial Sequence
  Chemically synthesized
aaagaucaauguaaaaacacucc

SEQ ID NO: 48500 - RNA, 23 nt, Artificial Sequence
  Chemically synthesized
aagaucaauguaaaaacacucca

SEQ ID NO: 48501 - RNA, 23 nt, Artificial Sequence
  Chemically synthesized
agaucaauguaaaaacacuccac

SEQ ID NO: 48502 - RNA, 23 nt, Artificial Sequence
  Chemically synthesized
gaucaauguaaaaacacuccaca

SEQ ID NO: 48503 - RNA, 23 nt, Artificial Sequence
  Chemically synthesized
aucaauguaaaaacacuccacaa

SEQ ID NO: 48504 - RNA, 23 nt, Artificial Sequence
  Chemically synthesized
guaaaaacacuccacaauucugc

SEQ ID NO: 48505 - RNA, 23 nt, Artificial Sequence
  Chemically synthesized
uaaaaacacuccacaauucugca

SEQ ID NO: 48506 - RNA, 23 nt, Artificial Sequence
  Chemically synthesized
aaaaacacuccacaauucugcaa

SEQ ID NO: 48507 - RNA, 23 nt, Artificial Sequence
  Chemically synthesized
aaaacacuccacaauucugcaac

SEQ ID NO: 48508 - RNA, 23 nt, Artificial Sequence
  Chemically synthesized
aaacacuccacaauucugcaacu

SEQ ID NO: 48509 - RNA, 23 nt, Artificial Sequence
  Chemically synthesized
cugcaacacaugauuuuuacacc

SEQ ID NO: 48510 - RNA, 23 nt, Artificial Sequence
  Chemically synthesized
ugcaacacaugauuuuuacaccu

SEQ ID NO: 48511 - RNA, 23 nt, Artificial Sequence
  Chemically synthesized
gcaacacaugauuuuuacaccua

SEQ ID NO: 48512 - RNA, 23 nt, Artificial Sequence
  Chemically synthesized
caacacaugauuuuuacaccuag

SEQ ID NO: 48513 - RNA, 23 nt, Artificial Sequence
  Chemically synthesized
aacacaugauuuuuacaccuagu

SEQ ID NO: 48514 - RNA, 23 nt, Artificial Sequence
  Chemically synthesized
uucauuagaggaaauagcaguuc

SEQ ID NO: 48515 - RNA, 23 nt, Artificial Sequence
  Chemically synthesized
ucauuagaggaaauagcaguucu

SEQ ID NO: 48516 - RNA, 23 nt, Artificial Sequence
  Chemically synthesized
cauuagaggaaauagcaguucug

SEQ ID NO: 48517 - RNA, 23 nt, Artificial Sequence
  Chemically synthesized
auuagaggaaauagcaguucugu

SEQ ID NO: 48518 - RNA, 23 nt, Artificial Sequence
  Chemically synthesized
uuagaggaaauagcaguucuguu

SEQ ID NO: 48519 - RNA, 23 nt, Artificial Sequence
  Chemically synthesized
cccuaagaucaaguuuaguuccc

SEQ ID NO: 48520 - RNA, 23 nt, Artificial Sequence
  Chemically synthesized
ccuaagaucaaguuuaguuccca

SEQ ID NO: 48521 - RNA, 23 nt, Artificial Sequence
  Chemically synthesized
cuaagaucaaguuuaguucccac

SEQ ID NO: 48522 - RNA, 23 nt, Artificial Sequence
  Chemically synthesized
uaagaucaaguuuaguucccacu

SEQ ID NO: 48523 - RNA, 23 nt, Artificial Sequence
  Chemically synthesized
aagaucaaguuuaguucccacua

SEQ ID NO: 48524 - RNA, 23 nt, Artificial Sequence
  Chemically synthesized
aaagagggucaguauuggucaag

SEQ ID NO: 48525 - RNA, 23 nt, Artificial Sequence
  Chemically synthesized
uagcucugaauaaaguaacaugg

SEQ ID NO: 48526 - RNA, 23 nt, Artificial Sequence
  Chemically synthesized
agcucugaauaaaguaacaugga

SEQ ID NO: 48527 - RNA, 23 nt, Artificial Sequence
  Chemically synthesized
gcucugaauaaaguaacauggaa

SEQ ID NO: 48528 - RNA, 23 nt, Artificial Sequence
  Chemically synthesized
cucugaauaaaguaacauggaaa

SEQ ID NO: 48529 - RNA, 23 nt, Artificial Sequence
  Chemically synthesized
ucugaauaaaguaacauggaaag

SEQ ID NO: 48530 - RNA, 23 nt, Artificial Sequence
  Chemically synthesized
guacaauguaguguaaaucucca

SEQ ID NO: 48531 - RNA, 23 nt, Artificial Sequence
  Chemically synthesized
uacaauguaguguaaaucuccac

SEQ ID NO: 48532 - RNA, 23 nt, Artificial Sequence
  Chemically synthesized
acaauguaguguaaaucuccacu

SEQ ID NO: 48533 - RNA, 23 nt, Artificial Sequence
  Chemically synthesized
caauguaguguaaaucuccacuu

SEQ ID NO: 48534 - RNA, 23 nt, Artificial Sequence
  Chemically synthesized
aauguaguguaaaucuccacuuc

SEQ ID NO: 48535 - RNA, 23 nt, Artificial Sequence
  Chemically synthesized
auguaguguaaaucuccacuucg

SEQ ID NO: 48536 - RNA, 23 nt, Artificial Sequence
  Chemically synthesized
uauauucuccaggaaaugcauug

SEQ ID NO: 48537 - RNA, 23 nt, Artificial Sequence
  Chemically synthesized
auauucuccaggaaaugcauugg

SEQ ID NO: 48538 - RNA, 23 nt, Artificial Sequence
  Chemically synthesized
uauucuccaggaaaugcauuggu

SEQ ID NO: 48539 - RNA, 23 nt, Artificial Sequence
  Chemically synthesized
auucuccaggaaaugcauugguu

SEQ ID NO: 48540 - RNA, 23 nt, Artificial Sequence
  Chemically synthesized
uucuccaggaaaugcauugguug

SEQ ID NO: 48541 - RNA, 23 nt, Artificial Sequence
  Chemically synthesized
ucagaaaacucgcuaugaaauca

SEQ ID NO: 48542 - RNA, 23 nt, Artificial Sequence
  Chemically synthesized
cagaaaacucgcuaugaaaucac

SEQ ID NO: 48543 - RNA, 23 nt, Artificial Sequence
  Chemically synthesized
agaaaacucgcuaugaaaucaca

SEQ ID NO: 48544 - RNA, 23 nt, Artificial Sequence
  Chemically synthesized
gaaaacucgcuaugaaaucacaa

SEQ ID NO: 48545 - RNA, 23 nt, Artificial Sequence
  Chemically synthesized
aaaacucgcuaugaaaucacaaa

SEQ ID NO: 48546 - RNA, 23 nt, Artificial Sequence
  Chemically synthesized
aaacucgcuaugaaaucacaaag

SEQ ID NO: 48547 - RNA, 23 nt, Artificial Sequence
  Chemically synthesized
ugcuuuacgcaucugagaacuac

SEQ ID NO: 48548 - RNA, 23 nt, Artificial Sequence
  Chemically synthesized
gcuuuacgcaucugagaacuaca

SEQ ID NO: 48549 - RNA, 23 nt, Artificial Sequence
  Chemically synthesized
cuuuacgcaucugagaacuacau

SEQ ID NO: 48550 - RNA, 23 nt, Artificial Sequence
  Chemically synthesized
uuuacgcaucugagaacuacaua

SEQ ID NO: 48551 - RNA, 23 nt, Artificial Sequence
  Chemically synthesized
uuacgcaucugagaacuacauag

SEQ ID NO: 48552 - RNA, 23 nt, Artificial Sequence
  Chemically synthesized
caucuguuugcggauaggauagg

SEQ ID NO: 48553 - RNA, 23 nt, Artificial Sequence
  Chemically synthesized
aaggaacaucaauaggcaaagcg

SEQ ID NO: 48554 - RNA, 23 nt, Artificial Sequence
  Chemically synthesized
aggaacaucaauaggcaaagcga

SEQ ID NO: 48555 - RNA, 23 nt, Artificial Sequence
  Chemically synthesized
ggaacaucaauaggcaaagcgac

SEQ ID NO: 48556 - RNA, 23 nt, Artificial Sequence
  Chemically synthesized
gaacaucaauaggcaaagcgacu

SEQ ID NO: 48557 - RNA, 23 nt, Artificial Sequence
  Chemically synthesized
aacaucaauaggcaaagcgacua

SEQ ID NO: 48558 - RNA, 23 nt, Artificial Sequence
  Chemically synthesized
auggaaagcacuuuuacuaaucg

SEQ ID NO: 48559 - RNA, 23 nt, Artificial Sequence
  Chemically synthesized
uggaaagcacuuuuacuaaucga

SEQ ID NO: 48560 - RNA, 23 nt, Artificial Sequence
  Chemically synthesized
ggaaagcacuuuuacuaaucgac

SEQ ID NO: 48561 - RNA, 23 nt, Artificial Sequence
  Chemically synthesized
gaaagcacuuuuacuaaucgaca

SEQ ID NO: 48562 - RNA, 23 nt, Artificial Sequence
  Chemically synthesized
aaagcacuuuuacuaaucgacaa

SEQ ID NO: 48563 - RNA, 23 nt, Artificial Sequence
  Chemically synthesized
aggcauauugcucagucagaagg

SEQ ID NO: 48564 - RNA, 23 nt, Artificial Sequence
  Chemically synthesized
ggcauauugcucagucagaaggg

SEQ ID NO: 48565 - RNA, 23 nt, Artificial Sequence
  Chemically synthesized
gcauauugcucagucagaagggg

SEQ ID NO: 48566 - RNA, 23 nt, Artificial Sequence
  Chemically synthesized
cauauugcucagucagaaggggu

SEQ ID NO: 48567 - RNA, 23 nt, Artificial Sequence
  Chemically synthesized
auauugcucagucagaagggguu

SEQ ID NO: 48568 - RNA, 23 nt, Artificial Sequence
  Chemically synthesized
uauugcucagucagaagggguuc

SEQ ID NO: 48569 - RNA, 23 nt, Artificial Sequence
  Chemically synthesized
uaaccuuuuagaguuuuuacccg

SEQ ID NO: 48570 - RNA, 23 nt, Artificial Sequence
  Chemically synthesized
aaccuuuuagaguuuuuacccgu

SEQ ID NO: 48571 - RNA, 23 nt, Artificial Sequence
  Chemically synthesized
accuuuuagaguuuuuacccgug

SEQ ID NO: 48572 - RNA, 23 nt, Artificial Sequence
  Chemically synthesized
ccuuuuagaguuuuuacccguga

SEQ ID NO: 48573 - RNA, 23 nt, Artificial Sequence
  Chemically synthesized
cuuuuagaguuuuuacccgugac

SEQ ID NO: 48574 - RNA, 23 nt, Artificial Sequence
  Chemically synthesized
uuuuagaguuuuuacccgugaca

SEQ ID NO: 48575 - RNA, 23 nt, Artificial Sequence
  Chemically synthesized
uaugaaaucacaaagacugaucc

SEQ ID NO: 48576 - RNA, 23 nt, Artificial Sequence
  Chemically synthesized
augaaaucacaaagacugaucca

SEQ ID NO: 48577 - RNA, 23 nt, Artificial Sequence
  Chemically synthesized
ugaaaucacaaagacugauccaa

SEQ ID NO: 48578 - RNA, 23 nt, Artificial Sequence
  Chemically synthesized
gaaaucacaaagacugauccaaa

SEQ ID NO: 48579 - RNA, 23 nt, Artificial Sequence
  Chemically synthesized
aaaucacaaagacugauccaaag

SEQ ID NO: 48580 - RNA, 23 nt, Artificial Sequence
  Chemically synthesized
gacccaaaggaacaucaauaggc

SEQ ID NO: 48581 - RNA, 23 nt, Artificial Sequence
  Chemically synthesized
acccaaaggaacaucaauaggca

SEQ ID NO: 48582 - RNA, 23 nt, Artificial Sequence
  Chemically synthesized
cccaaaggaacaucaauaggcaa

SEQ ID NO: 48583 - RNA, 23 nt, Artificial Sequence
  Chemically synthesized
ccaaaggaacaucaauaggcaaa

SEQ ID NO: 48584 - RNA, 23 nt, Artificial Sequence
  Chemically synthesized
caaaggaacaucaauaggcaaag

SEQ ID NO: 48585 - RNA, 23 nt, Artificial Sequence
  Chemically synthesized
aaaggaacaucaauaggcaaagc

SEQ ID NO: 48586 - RNA, 23 nt, Artificial Sequence
  Chemically synthesized
ugaauaaaguaacauggaaagca

SEQ ID NO: 48587 - RNA, 23 nt, Artificial Sequence
  Chemically synthesized
gaauaaaguaacauggaaagcac

SEQ ID NO: 48588 - RNA, 23 nt, Artificial Sequence
  Chemically synthesized
aauaaaguaacauggaaagcacu

SEQ ID NO: 48589 - RNA, 23 nt, Artificial Sequence
  Chemically synthesized
auaaaguaacauggaaagcacuu

SEQ ID NO: 48590 - RNA, 23 nt, Artificial Sequence
  Chemically synthesized
uaaaguaacauggaaagcacuuu

SEQ ID NO: 48591 - RNA, 23 nt, Artificial Sequence
  Chemically synthesized
uuuagaguuuuuacccgugacac

SEQ ID NO: 48592 - RNA, 23 nt, Artificial Sequence
  Chemically synthesized
uuagaguuuuuacccgugacacu

SEQ ID NO: 48593 - RNA, 23 nt, Artificial Sequence
  Chemically synthesized
uuuacccgugacacuuucauucc

SEQ ID NO: 48594 - RNA, 23 nt, Artificial Sequence
  Chemically synthesized
uguacaauguaguguaaaucucc

SEQ ID NO: 48595 - RNA, 23 nt, Artificial Sequence
  Chemically synthesized
ucggaucgcuucgucaaacacug

SEQ ID NO: 48596 - RNA, 23 nt, Artificial Sequence
  Chemically synthesized
cggaucgcuucgucaaacacugu

SEQ ID NO: 48597 - RNA, 23 nt, Artificial Sequence
  Chemically synthesized
ggaucgcuucgucaaacacuguc

SEQ ID NO: 48598 - RNA, 23 nt, Artificial Sequence
  Chemically synthesized
gaucgcuucgucaaacacugucu

SEQ ID NO: 48599 - RNA, 23 nt, Artificial Sequence
  Chemically synthesized
aucgcuucgucaaacacugucuu

SEQ ID NO: 48600 - RNA, 23 nt, Artificial Sequence
  Chemically synthesized
ucccuaagaucaaguuuaguucc

SEQ ID NO: 48601 - RNA, 23 nt, Artificial Sequence
  Chemically synthesized
gcugcaacacaugauuuuuacac

SEQ ID NO: 48602 - RNA, 23 nt, Artificial Sequence
  Chemically synthesized
aaaguaacauggaaagcacuuuu

SEQ ID NO: 48603 - RNA, 23 nt, Artificial Sequence
  Chemically synthesized
cagguguaagagaaaggaaaagc

SEQ ID NO: 48604 - RNA, 23 nt, Artificial Sequence
  Chemically synthesized
agguguaagagaaaggaaaagcu

SEQ ID NO: 48605 - RNA, 23 nt, Artificial Sequence
  Chemically synthesized
gguguaagagaaaggaaaagcuu

SEQ ID NO: 48606 - RNA, 23 nt, Artificial Sequence
  Chemically synthesized
guguaagagaaaggaaaagcuua

SEQ ID NO: 48607 - RNA, 23 nt, Artificial Sequence
  Chemically synthesized
uguaagagaaaggaaaagcuuaa

SEQ ID NO: 48608 - RNA, 23 nt, Artificial Sequence
  Chemically synthesized
gaaaagcuuaagaaaacauuucc

SEQ ID NO: 48609 - RNA, 23 nt, Artificial Sequence
  Chemically synthesized
aaaagcuuaagaaaacauuuccu

SEQ ID NO: 48610 - RNA, 23 nt, Artificial Sequence
  Chemically synthesized
aaagcuuaagaaaacauuuccug

SEQ ID NO: 48611 - RNA, 23 nt, Artificial Sequence
  Chemically synthesized
aagcuuaagaaaacauuuccuga

SEQ ID NO: 48612 - RNA, 23 nt, Artificial Sequence
  Chemically synthesized
agcuuaagaaaacauuuccugau

SEQ ID NO: 48613 - RNA, 23 nt, Artificial Sequence
  Chemically synthesized
uaccaaccuuucuuucaucaucu

SEQ ID NO: 48614 - RNA, 23 nt, Artificial Sequence
  Chemically synthesized
accaaccuuucuuucaucaucua

SEQ ID NO: 48615 - RNA, 23 nt, Artificial Sequence
  Chemically synthesized
ccaaccuuucuuucaucaucuac

SEQ ID NO: 48616 - RNA, 23 nt, Artificial Sequence
  Chemically synthesized
caaccuuucuuucaucaucuacu

SEQ ID NO: 48617 - RNA, 23 nt, Artificial Sequence
  Chemically synthesized
aaccuuucuuucaucaucuacug

SEQ ID NO: 48618 - RNA, 23 nt, Artificial Sequence
  Chemically synthesized
accuuucuuucaucaucuacugc

SEQ ID NO: 48619 - RNA, 23 nt, Artificial Sequence
  Chemically synthesized
ccuuucuuucaucaucuacugca

SEQ ID NO: 48620 - RNA, 23 nt, Artificial Sequence
  Chemically synthesized
cuuucuuucaucaucuacugcau

SEQ ID NO: 48621 - RNA, 23 nt, Artificial Sequence
  Chemically synthesized
uuucuuucaucaucuacugcauu

SEQ ID NO: 48622 - RNA, 23 nt, Artificial Sequence
  Chemically synthesized
uucuuucaucaucuacugcauuu

SEQ ID NO: 48623 - RNA, 23 nt, Artificial Sequence
  Chemically synthesized
cacuuucauuccuuguacaaugu

SEQ ID NO: 48624 - RNA, 23 nt, Artificial Sequence
  Chemically synthesized
acuuucauuccuuguacaaugua

SEQ ID NO: 48625 - RNA, 23 nt, Artificial Sequence
  Chemically synthesized
cuuucauuccuuguacaauguag

SEQ ID NO: 48626 - RNA, 23 nt, Artificial Sequence
  Chemically synthesized
uuucauuccuuguacaauguagu

SEQ ID NO: 48627 - RNA, 23 nt, Artificial Sequence
  Chemically synthesized
uucauuccuuguacaauguagug

SEQ ID NO: 48628 - RNA, 23 nt, Artificial Sequence
  Chemically synthesized
uuguacaauguaguguaaaucuc

SEQ ID NO: 48629 - RNA, 23 nt, Artificial Sequence
  Chemically synthesized
uagaggaaauagcaguucuguuc

SEQ ID NO: 48630 - RNA, 23 nt, Artificial Sequence
  Chemically synthesized
ucgcuaugaaaucacaaagacug

SEQ ID NO: 48631 - RNA, 23 nt, Artificial Sequence
  Chemically synthesized
cgcuaugaaaucacaaagacuga

SEQ ID NO: 48632 - RNA, 23 nt, Artificial Sequence
  Chemically synthesized
gcuaugaaaucacaaagacugau

SEQ ID NO: 48633 - RNA, 23 nt, Artificial Sequence
  Chemically synthesized
cuaugaaaucacaaagacugauc

SEQ ID NO: 48634 - RNA, 23 nt, Artificial Sequence
  Chemically synthesized
aauuuuaauagaaugugagucug

SEQ ID NO: 48635 - RNA, 23 nt, Artificial Sequence
  Chemically synthesized
auuuuaauagaaugugagucuga

SEQ ID NO: 48636 - RNA, 23 nt, Artificial Sequence
  Chemically synthesized
uuuuaauagaaugugagucugaa

SEQ ID NO: 48637 - RNA, 23 nt, Artificial Sequence
  Chemically synthesized
uuuaauagaaugugagucugaac

SEQ ID NO: 48638 - RNA, 23 nt, Artificial Sequence
  Chemically synthesized
uuaauagaaugugagucugaacu

SEQ ID NO: 48639 - RNA, 23 nt, Artificial Sequence
  Chemically synthesized
cagguauuuuacagcaccaaucu

SEQ ID NO: 48640 - RNA, 23 nt, Artificial Sequence
  Chemically synthesized
agguauuuuacagcaccaaucuc

SEQ ID NO: 48641 - RNA, 23 nt, Artificial Sequence
  Chemically synthesized
uuaaaaaauucuguuguaguggc

SEQ ID NO: 48642 - RNA, 23 nt, Artificial Sequence
  Chemically synthesized
uaaaaaauucuguuguaguggcu

SEQ ID NO: 48643 - RNA, 23 nt, Artificial Sequence
  Chemically synthesized
aaaaaauucuguuguaguggcug

SEQ ID NO: 48644 - RNA, 23 nt, Artificial Sequence
  Chemically synthesized
aaaaauucuguuguaguggcuga

SEQ ID NO: 48645 - RNA, 23 nt, Artificial Sequence
  Chemically synthesized
aaaauucuguuguaguggcugaa

SEQ ID NO: 48646 - RNA, 23 nt, Artificial Sequence
  Chemically synthesized
gcacuagcacaguuuacagaacc

SEQ ID NO: 48647 - RNA, 23 nt, Artificial Sequence
  Chemically synthesized
cacuagcacaguuuacagaaccu

SEQ ID NO: 48648 - RNA, 23 nt, Artificial Sequence
  Chemically synthesized
acuagcacaguuuacagaaccuc

SEQ ID NO: 48649 - RNA, 23 nt, Artificial Sequence
  Chemically synthesized
cuagcacaguuuacagaaccuca

SEQ ID NO: 48650 - RNA, 23 nt, Artificial Sequence
  Chemically synthesized
uagcacaguuuacagaaccucac

SEQ ID NO: 48651 - RNA, 23 nt, Artificial Sequence
  Chemically synthesized
aguuuacagaaccucacagaccc

SEQ ID NO: 48652 - RNA, 23 nt, Artificial Sequence
  Chemically synthesized
guuuacagaaccucacagaccca

SEQ ID NO: 48653 - RNA, 23 nt, Artificial Sequence
  Chemically synthesized
uuuacagaaccucacagacccaa

SEQ ID NO: 48654 - RNA, 23 nt, Artificial Sequence
  Chemically synthesized
uuacagaaccucacagacccaaa

SEQ ID NO: 48655 - RNA, 23 nt, Artificial Sequence
  Chemically synthesized
uacagaaccucacagacccaaag

SEQ ID NO: 48656 - RNA, 23 nt, Artificial Sequence
  Chemically synthesized
acaugauuuuuacaccuaguuac

SEQ ID NO: 48657 - RNA, 23 nt, Artificial Sequence
  Chemically synthesized
caugauuuuuacaccuaguuacu

SEQ ID NO: 48658 - RNA, 23 nt, Artificial Sequence
  Chemically synthesized
augauuuuuacaccuaguuacua

SEQ ID NO: 48659 - RNA, 23 nt, Artificial Sequence
  Chemically synthesized
ugauuuuuacaccuaguuacuag

SEQ ID NO: 48660 - RNA, 23 nt, Artificial Sequence
  Chemically synthesized
gauuuuuacaccuaguuacuaga

SEQ ID NO: 48661 - RNA, 23 nt, Artificial Sequence
  Chemically synthesized
cugaauaaaguaacauggaaagc

SEQ ID NO: 48662 - RNA, 23 nt, Artificial Sequence
  Chemically synthesized
aagaugaauuaaaugcccaauuu

SEQ ID NO: 48663 - RNA, 23 nt, Artificial Sequence
  Chemically synthesized
agaaaacauuuccugauaauacc

SEQ ID NO: 48664 - RNA, 23 nt, Artificial Sequence
  Chemically synthesized
gaaaacauuuccugauaauacca

SEQ ID NO: 48665 - RNA, 23 nt, Artificial Sequence
  Chemically synthesized
aaaacauuuccugauaauaccaa

SEQ ID NO: 48666 - RNA, 23 nt, Artificial Sequence
  Chemically synthesized
aaacauuuccugauaauaccaac

SEQ ID NO: 48667 - RNA, 23 nt, Artificial Sequence
  Chemically synthesized
aacauuuccugauaauaccaacc

SEQ ID NO: 48668 - RNA, 23 nt, Artificial Sequence
  Chemically synthesized
acauuuccugauaauaccaaccu

SEQ ID NO: 48669 - RNA, 23 nt, Artificial Sequence
  Chemically synthesized
cauuuccugauaauaccaaccuu

SEQ ID NO: 48670 - RNA, 23 nt, Artificial Sequence
  Chemically synthesized
auuuccugauaauaccaaccuuu

SEQ ID NO: 48671 - RNA, 23 nt, Artificial Sequence
  Chemically synthesized
uuuccugauaauaccaaccuuuc

SEQ ID NO: 48672 - RNA, 23 nt, Artificial Sequence
  Chemically synthesized
uuccugauaauaccaaccuuucu

SEQ ID NO: 48673 - RNA, 23 nt, Artificial Sequence
  Chemically synthesized
cgugacacuuucauuccuuguac

SEQ ID NO: 48674 - RNA, 23 nt, Artificial Sequence
  Chemically synthesized
gugacacuuucauuccuuguaca

SEQ ID NO: 48675 - RNA, 23 nt, Artificial Sequence
  Chemically synthesized
ugacacuuucauuccuuguacaa

SEQ ID NO: 48676 - RNA, 23 nt, Artificial Sequence
  Chemically synthesized
gacacuuucauuccuuguacaau

SEQ ID NO: 48677 - RNA, 23 nt, Artificial Sequence
  Chemically synthesized
acacuuucauuccuuguacaaug

SEQ ID NO: 48678 - RNA, 23 nt, Artificial Sequence
  Chemically synthesized
guaaaucuccacuucguauuuug

SEQ ID NO: 48679 - RNA, 23 nt, Artificial Sequence
  Chemically synthesized
uaaaucuccacuucguauuuugu

SEQ ID NO: 48680 - RNA, 23 nt, Artificial Sequence
  Chemically synthesized
aaaucuccacuucguauuuuguc

SEQ ID NO: 48681 - RNA, 23 nt, Artificial Sequence
  Chemically synthesized
aaucuccacuucguauuuuguca

SEQ ID NO: 48682 - RNA, 23 nt, Artificial Sequence
  Chemically synthesized
aucuccacuucguauuuugucaa

SEQ ID NO: 48683 - RNA, 23 nt, Artificial Sequence
  Chemically synthesized
cuucauuagaggaaauagcaguu

SEQ ID NO: 48684 - RNA, 23 nt, Artificial Sequence
  Chemically synthesized
uacgcaucugagaacuacauagg

SEQ ID NO: 48685 - RNA, 23 nt, Artificial Sequence
  Chemically synthesized
acgcaucugagaacuacauagga

SEQ ID NO: 48686 - RNA, 23 nt, Artificial Sequence
  Chemically synthesized
cgcaucugagaacuacauaggag

SEQ ID NO: 48687 - RNA, 23 nt, Artificial Sequence
  Chemically synthesized
gcaucugagaacuacauaggaga

SEQ ID NO: 48688 - RNA, 23 nt, Artificial Sequence
  Chemically synthesized
caucugagaacuacauaggagag

SEQ ID NO: 48689 - RNA, 23 nt, Artificial Sequence
  Chemically synthesized
agguauuuuggcaacucuuaauc

SEQ ID NO: 48690 - RNA, 23 nt, Artificial Sequence
  Chemically synthesized
gguauuuuggcaacucuuaaucu

SEQ ID NO: 48691 - RNA, 23 nt, Artificial Sequence
  Chemically synthesized
guauuuuggcaacucuuaaucug

SEQ ID NO: 48692 - RNA, 23 nt, Artificial Sequence
  Chemically synthesized
uauuuuggcaacucuuaaucuga

SEQ ID NO: 48693 - RNA, 23 nt, Artificial Sequence
  Chemically synthesized
auuuuggcaacucuuaaucugaa

SEQ ID NO: 48694 - RNA, 23 nt, Artificial Sequence
  Chemically synthesized
ggacauuuucaaaugaugcagga

SEQ ID NO: 48695 - RNA, 23 nt, Artificial Sequence
  Chemically synthesized
gacauuuucaaaugaugcaggac

SEQ ID NO: 48696 - RNA, 23 nt, Artificial Sequence
  Chemically synthesized
acauuuucaaaugaugcaggacu

SEQ ID NO: 48697 - RNA, 23 nt, Artificial Sequence
  Chemically synthesized
cauuuucaaaugaugcaggacuc

SEQ ID NO: 48698 - RNA, 23 nt, Artificial Sequence
  Chemically synthesized
auuuucaaaugaugcaggacuca

SEQ ID NO: 48699 - RNA, 23 nt, Artificial Sequence
  Chemically synthesized
acucacaagggaaaagcaaauua

SEQ ID NO: 48700 - RNA, 23 nt, Artificial Sequence
  Chemically synthesized
cucacaagggaaaagcaaauuaa

SEQ ID NO: 48701 - RNA, 23 nt, Artificial Sequence
  Chemically synthesized
ucacaagggaaaagcaaauuaag

SEQ ID NO: 48702 - RNA, 23 nt, Artificial Sequence
  Chemically synthesized
cacaagggaaaagcaaauuaaga

SEQ ID NO: 48703 - RNA, 23 nt, Artificial Sequence
  Chemically synthesized
acaagggaaaagcaaauuaagaa

SEQ ID NO: 48704 - RNA, 23 nt, Artificial Sequence
  Chemically synthesized
cguaaucugucauaaucuucuug

SEQ ID NO: 48705 - RNA, 23 nt, Artificial Sequence
  Chemically synthesized
guaaucugucauaaucuucuugu

SEQ ID NO: 48706 - RNA, 23 nt, Artificial Sequence
  Chemically synthesized
uaaucugucauaaucuucuuguc

SEQ ID NO: 48707 - RNA, 23 nt, Artificial Sequence
  Chemically synthesized
aaucugucauaaucuucuugucc

SEQ ID NO: 48708 - RNA, 23 nt, Artificial Sequence
  Chemically synthesized
aucugucauaaucuucuugucca

SEQ ID NO: 48709 - RNA, 23 nt, Artificial Sequence
  Chemically synthesized
ucccauaagcccagauucaccgg

SEQ ID NO: 48710 - RNA, 23 nt, Artificial Sequence
  Chemically synthesized
cccauaagcccagauucaccggu

SEQ ID NO: 48711 - RNA, 23 nt, Artificial Sequence
  Chemically synthesized
ccauaagcccagauucaccgguu

SEQ ID NO: 48712 - RNA, 23 nt, Artificial Sequence
  Chemically synthesized
cauaagcccagauucaccgguuu

SEQ ID NO: 48713 - RNA, 23 nt, Artificial Sequence
  Chemically synthesized
auaagcccagauucaccgguuuu

SEQ ID NO: 48714 - RNA, 23 nt, Artificial Sequence
  Chemically synthesized
aauguaaaaacacuccacaauuc

SEQ ID NO: 48715 - RNA, 23 nt, Artificial Sequence
  Chemically synthesized
auguaaaaacacuccacaauucu

SEQ ID NO: 48716 - RNA, 23 nt, Artificial Sequence
  Chemically synthesized
uguaaaaacacuccacaauucug

SEQ ID NO: 48717 - RNA, 23 nt, Artificial Sequence
  Chemically synthesized
uuuaaaaaauucuguuguagugg

SEQ ID NO: 48718 - RNA, 23 nt, Artificial Sequence
  Chemically synthesized
uaaguuguacagaacaucgucag

SEQ ID NO: 48719 - RNA, 23 nt, Artificial Sequence
  Chemically synthesized
aaguuguacagaacaucgucagc

SEQ ID NO: 48720 - RNA, 23 nt, Artificial Sequence
  Chemically synthesized
aguuguacagaacaucgucagca

SEQ ID NO: 48721 - RNA, 23 nt, Artificial Sequence
  Chemically synthesized
guuguacagaacaucgucagcac

SEQ ID NO: 48722 - RNA, 23 nt, Artificial Sequence
  Chemically synthesized
uuguacagaacaucgucagcacu

SEQ ID NO: 48723 - RNA, 23 nt, Artificial Sequence
  Chemically synthesized
acacaugauuuuuacaccuaguu

SEQ ID NO: 48724 - RNA, 23 nt, Artificial Sequence
  Chemically synthesized
cacaugauuuuuacaccuaguua

SEQ ID NO: 48725 - RNA, 23 nt, Artificial Sequence
  Chemically synthesized
uuacuagaaaacuaaggaaagca

SEQ ID NO: 48726 - RNA, 23 nt, Artificial Sequence
  Chemically synthesized
uacuagaaaacuaaggaaagcac

SEQ ID NO: 48727 - RNA, 23 nt, Artificial Sequence
  Chemically synthesized
acuagaaaacuaaggaaagcacu

SEQ ID NO: 48728 - RNA, 23 nt, Artificial Sequence
  Chemically synthesized
cuagaaaacuaaggaaagcacuu

SEQ ID NO: 48729 - RNA, 23 nt, Artificial Sequence
  Chemically synthesized
uagaaaacuaaggaaagcacuua

SEQ ID NO: 48730 - RNA, 23 nt, Artificial Sequence
  Chemically synthesized
aacuaaggaaagcacuuauuagc

SEQ ID NO: 48731 - RNA, 23 nt, Artificial Sequence
  Chemically synthesized
acuaaggaaagcacuuauuagcu

SEQ ID NO: 48732 - RNA, 23 nt, Artificial Sequence
  Chemically synthesized
cuaaggaaagcacuuauuagcuc

SEQ ID NO: 48733 - RNA, 23 nt, Artificial Sequence
  Chemically synthesized
uaaggaaagcacuuauuagcucu

SEQ ID NO: 48734 - RNA, 23 nt, Artificial Sequence
  Chemically synthesized
aaggaaagcacuuauuagcucug

SEQ ID NO: 48735 - RNA, 23 nt, Artificial Sequence
  Chemically synthesized
uaacauggaaagcacuuuuacua

SEQ ID NO: 48736 - RNA, 23 nt, Artificial Sequence
  Chemically synthesized
aacauggaaagcacuuuuacuaa

SEQ ID NO: 48737 - RNA, 23 nt, Artificial Sequence
  Chemically synthesized
acauggaaagcacuuuuacuaau

SEQ ID NO: 48738 - RNA, 23 nt, Artificial Sequence
  Chemically synthesized
cauggaaagcacuuuuacuaauc

SEQ ID NO: 48739 - RNA, 23 nt, Artificial Sequence
  Chemically synthesized
aagaaaagcacuuacuaaguuag

SEQ ID NO: 48740 - RNA, 23 nt, Artificial Sequence
  Chemically synthesized
agaaaagcacuuacuaaguuagc

SEQ ID NO: 48741 - RNA, 23 nt, Artificial Sequence
  Chemically synthesized
gaaaagcacuuacuaaguuagcg

SEQ ID NO: 48742 - RNA, 23 nt, Artificial Sequence
  Chemically synthesized
aaaagcacuuacuaaguuagcga

SEQ ID NO: 48743 - RNA, 23 nt, Artificial Sequence
  Chemically synthesized
aaagcacuuacuaaguuagcgac

SEQ ID NO: 48744 - RNA, 23 nt, Artificial Sequence
  Chemically synthesized
guaagagaaaggaaaagcuuaag

SEQ ID NO: 48745 - RNA, 23 nt, Artificial Sequence
  Chemically synthesized
cugauaauaccaaccuuucuuuc

SEQ ID NO: 48746 - RNA, 23 nt, Artificial Sequence
  Chemically synthesized
ugauaauaccaaccuuucuuuca

SEQ ID NO: 48747 - RNA, 23 nt, Artificial Sequence
  Chemically synthesized
gauaauaccaaccuuucuuucau

SEQ ID NO: 48748 - RNA, 23 nt, Artificial Sequence
  Chemically synthesized
auaauaccaaccuuucuuucauc

SEQ ID NO: 48749 - RNA, 23 nt, Artificial Sequence
  Chemically synthesized
uaauaccaaccuuucuuucauca

SEQ ID NO: 48750 - RNA, 23 nt, Artificial Sequence
  Chemically synthesized
uuucaucaucuacugcauuugac

SEQ ID NO: 48751 - RNA, 23 nt, Artificial Sequence
  Chemically synthesized
uucaucaucuacugcauuugaca

SEQ ID NO: 48752 - RNA, 23 nt, Artificial Sequence
  Chemically synthesized
ucaucaucuacugcauuugacag

SEQ ID NO: 48753 - RNA, 23 nt, Artificial Sequence
  Chemically synthesized
caucaucuacugcauuugacaga

SEQ ID NO: 48754 - RNA, 23 nt, Artificial Sequence
  Chemically synthesized
aucaucuacugcauuugacagaa

SEQ ID NO: 48755 - RNA, 23 nt, Artificial Sequence
  Chemically synthesized
uagaguuuuuacccgugacacuu

SEQ ID NO: 48756 - RNA, 23 nt, Artificial Sequence
  Chemically synthesized
caaaauacugucuuuguccuuug

SEQ ID NO: 48757 - RNA, 23 nt, Artificial Sequence
  Chemically synthesized
aaaauacugucuuuguccuuuga

SEQ ID NO: 48758 - RNA, 23 nt, Artificial Sequence
  Chemically synthesized
aaauacugucuuuguccuuugau

SEQ ID NO: 48759 - RNA, 23 nt, Artificial Sequence
  Chemically synthesized
aauacugucuuuguccuuugauc

SEQ ID NO: 48760 - RNA, 23 nt, Artificial Sequence
  Chemically synthesized
auacugucuuuguccuuugauca

SEQ ID NO: 48761 - RNA, 23 nt, Artificial Sequence
  Chemically synthesized
auucuucauuagaggaaauagca

SEQ ID NO: 48762 - RNA, 23 nt, Artificial Sequence
  Chemically synthesized
uucuucauuagaggaaauagcag

SEQ ID NO: 48763 - RNA, 23 nt, Artificial Sequence
  Chemically synthesized
ucuucauuagaggaaauagcagu

SEQ ID NO: 48764 - RNA, 23 nt, Artificial Sequence
  Chemically synthesized
uugcaaaguucagugcucggugu

SEQ ID NO: 48765 - RNA, 23 nt, Artificial Sequence
  Chemically synthesized
ugcaaaguucagugcucgguguu

SEQ ID NO: 48766 - RNA, 23 nt, Artificial Sequence
  Chemically synthesized
gcaaaguucagugcucgguguuc

SEQ ID NO: 48767 - RNA, 23 nt, Artificial Sequence
  Chemically synthesized
caaaguucagugcucgguguucu

SEQ ID NO: 48768 - RNA, 23 nt, Artificial Sequence
  Chemically synthesized
aaaguucagugcucgguguucuc

SEQ ID NO: 48769 - RNA, 23 nt, Artificial Sequence
  Chemically synthesized
aacaaugcaguguaguucagaag

SEQ ID NO: 48770 - RNA, 23 nt, Artificial Sequence
  Chemically synthesized
acaaugcaguguaguucagaagg

SEQ ID NO: 48771 - RNA, 23 nt, Artificial Sequence
  Chemically synthesized
caaugcaguguaguucagaaggu

SEQ ID NO: 48772 - RNA, 23 nt, Artificial Sequence
  Chemically synthesized
aaugcaguguaguucagaaggua

SEQ ID NO: 48773 - RNA, 23 nt, Artificial Sequence
  Chemically synthesized
augcaguguaguucagaagguau

SEQ ID NO: 48774 - RNA, 23 nt, Artificial Sequence
  Chemically synthesized
uacugauugguucaaaaaauggu

SEQ ID NO: 48775 - RNA, 23 nt, Artificial Sequence
  Chemically synthesized
acugauugguucaaaaaaugguu

SEQ ID NO: 48776 - RNA, 23 nt, Artificial Sequence
  Chemically synthesized
cugauugguucaaaaaaugguuu

SEQ ID NO: 48777 - RNA, 23 nt, Artificial Sequence
  Chemically synthesized
ugauugguucaaaaaaugguuuu

SEQ ID NO: 48778 - RNA, 23 nt, Artificial Sequence
  Chemically synthesized
gauugguucaaaaaaugguuuua

SEQ ID NO: 48779 - RNA, 23 nt, Artificial Sequence
  Chemically synthesized
uuucucuuccucuucuucacggg

SEQ ID NO: 48780 - RNA, 23 nt, Artificial Sequence
  Chemically synthesized
uucucuuccucuucuucacggga

SEQ ID NO: 48781 - RNA, 23 nt, Artificial Sequence
  Chemically synthesized
ucucuuccucuucuucacgggag

SEQ ID NO: 48782 - RNA, 23 nt, Artificial Sequence
  Chemically synthesized
cucuuccucuucuucacgggagg

SEQ ID NO: 48783 - RNA, 23 nt, Artificial Sequence
  Chemically synthesized
ucuuccucuucuucacgggaggc

SEQ ID NO: 48784 - RNA, 23 nt, Artificial Sequence
  Chemically synthesized
ucgcuucgucaaacacugucuug

SEQ ID NO: 48785 - RNA, 23 nt, Artificial Sequence
  Chemically synthesized
cgcuucgucaaacacugucuuga

SEQ ID NO: 48786 - RNA, 23 nt, Artificial Sequence
  Chemically synthesized
gcuucgucaaacacugucuugag

SEQ ID NO: 48787 - RNA, 23 nt, Artificial Sequence
  Chemically synthesized
uuuacagcaccaaucuccuuagc

SEQ ID NO: 48788 - RNA, 23 nt, Artificial Sequence
  Chemically synthesized
cucgaucgugucuuuaucauccc

SEQ ID NO: 48789 - RNA, 23 nt, Artificial Sequence
  Chemically synthesized
ucgaucgugucuuuaucaucccu

SEQ ID NO: 48790 - RNA, 23 nt, Artificial Sequence
  Chemically synthesized
cgaucgugucuuuaucaucccua

SEQ ID NO: 48791 - RNA, 23 nt, Artificial Sequence
  Chemically synthesized
gaucgugucuuuaucaucccuaa

SEQ ID NO: 48792 - RNA, 23 nt, Artificial Sequence
  Chemically synthesized
aucgugucuuuaucaucccuaag

SEQ ID NO: 48793 - RNA, 23 nt, Artificial Sequence
  Chemically synthesized
agaucaaguuuaguucccacuag

SEQ ID NO: 48794 - RNA, 23 nt, Artificial Sequence
  Chemically synthesized
gaucaaguuuaguucccacuagg

SEQ ID NO: 48795 - RNA, 23 nt, Artificial Sequence
  Chemically synthesized
aucaaguuuaguucccacuagga

SEQ ID NO: 48796 - RNA, 23 nt, Artificial Sequence
  Chemically synthesized
accucaggauaccacuuugcacg

SEQ ID NO: 48797 - RNA, 23 nt, Artificial Sequence
  Chemically synthesized
ccucaggauaccacuuugcacgg

SEQ ID NO: 48798 - RNA, 23 nt, Artificial Sequence
  Chemically synthesized
cucaggauaccacuuugcacgga

SEQ ID NO: 48799 - RNA, 23 nt, Artificial Sequence
  Chemically synthesized
ucaggauaccacuuugcacggac

SEQ ID NO: 48800 - RNA, 23 nt, Artificial Sequence
  Chemically synthesized
caggauaccacuuugcacggaca

SEQ ID NO: 48801 - RNA, 23 nt, Artificial Sequence
  Chemically synthesized
ccacuuugcacggacauuuucaa

SEQ ID NO: 48802 - RNA, 23 nt, Artificial Sequence
  Chemically synthesized
cacuuugcacggacauuuucaaa

SEQ ID NO: 48803 - RNA, 23 nt, Artificial Sequence
  Chemically synthesized
acuuugcacggacauuuucaaau

SEQ ID NO: 48804 - RNA, 23 nt, Artificial Sequence
  Chemically synthesized
cuuugcacggacauuuucaaaug

SEQ ID NO: 48805 - RNA, 23 nt, Artificial Sequence
  Chemically synthesized
uuugcacggacauuuucaaauga

SEQ ID NO: 48806 - RNA, 23 nt, Artificial Sequence
  Chemically synthesized
cacccaaagcugaggaaaacugc

SEQ ID NO: 48807 - RNA, 23 nt, Artificial Sequence
  Chemically synthesized
acccaaagcugaggaaaacugca

SEQ ID NO: 48808 - RNA, 23 nt, Artificial Sequence
  Chemically synthesized
cccaaagcugaggaaaacugcag

SEQ ID NO: 48809 - RNA, 23 nt, Artificial Sequence
  Chemically synthesized
ccaaagcugaggaaaacugcaga

SEQ ID NO: 48810 - RNA, 23 nt, Artificial Sequence
  Chemically synthesized
caaagcugaggaaaacugcagag

SEQ ID NO: 48811 - RNA, 23 nt, Artificial Sequence
  Chemically synthesized
aucccauaagcccagauucaccg

SEQ ID NO: 48812 - RNA, 23 nt, Artificial Sequence
  Chemically synthesized
uaagcccagauucaccgguuuuc

SEQ ID NO: 48813 - RNA, 23 nt, Artificial Sequence
  Chemically synthesized
uguacagaacaucgucagcacua

SEQ ID NO: 48814 - RNA, 23 nt, Artificial Sequence
  Chemically synthesized
guacagaacaucgucagcacuag

SEQ ID NO: 48815 - RNA, 23 nt, Artificial Sequence
  Chemically synthesized
uacagaacaucgucagcacuagc

SEQ ID NO: 48816 - RNA, 23 nt, Artificial Sequence
  Chemically synthesized
uuggcagaauaauugucaaagac

SEQ ID NO: 48817 - RNA, 23 nt, Artificial Sequence
  Chemically synthesized
uggcagaauaauugucaaagaca

SEQ ID NO: 48818 - RNA, 23 nt, Artificial Sequence
  Chemically synthesized
ggcagaauaauugucaaagacag

SEQ ID NO: 48819 - RNA, 23 nt, Artificial Sequence
  Chemically synthesized
gcagaauaauugucaaagacagu

SEQ ID NO: 48820 - RNA, 23 nt, Artificial Sequence
  Chemically synthesized
cagaauaauugucaaagacagua

SEQ ID NO: 48821 - RNA, 23 nt, Artificial Sequence
  Chemically synthesized
accuaguuacuagaaaacuaagg

SEQ ID NO: 48822 - RNA, 23 nt, Artificial Sequence
  Chemically synthesized
ccuaguuacuagaaaacuaagga

SEQ ID NO: 48823 - RNA, 23 nt, Artificial Sequence
  Chemically synthesized
cuaguuacuagaaaacuaaggaa

SEQ ID NO: 48824 - RNA, 23 nt, Artificial Sequence
  Chemically synthesized
uaguuacuagaaaacuaaggaaa

SEQ ID NO: 48825 - RNA, 23 nt, Artificial Sequence
  Chemically synthesized
aguuacuagaaaacuaaggaaag

SEQ ID NO: 48826 - RNA, 23 nt, Artificial Sequence
  Chemically synthesized
uuauuagcucugaauaaaguaac

SEQ ID NO: 48827 - RNA, 23 nt, Artificial Sequence
  Chemically synthesized
uauuagcucugaauaaaguaaca

SEQ ID NO: 48828 - RNA, 23 nt, Artificial Sequence
  Chemically synthesized
auuagcucugaauaaaguaacau

SEQ ID NO: 48829 - RNA, 23 nt, Artificial Sequence
  Chemically synthesized
uuagcucugaauaaaguaacaug

SEQ ID NO: 48830 - RNA, 23 nt, Artificial Sequence
  Chemically synthesized
aagcacuuuuacuaaucgacaaa

SEQ ID NO: 48831 - RNA, 23 nt, Artificial Sequence
  Chemically synthesized
uuauaauacaaggaggcauauug

SEQ ID NO: 48832 - RNA, 23 nt, Artificial Sequence
  Chemically synthesized
uauaauacaaggaggcauauugc

SEQ ID NO: 48833 - RNA, 23 nt, Artificial Sequence
  Chemically synthesized
auaauacaaggaggcauauugcu

SEQ ID NO: 48834 - RNA, 23 nt, Artificial Sequence
  Chemically synthesized
uaauacaaggaggcauauugcuc

SEQ ID NO: 48835 - RNA, 23 nt, Artificial Sequence
  Chemically synthesized
aauacaaggaggcauauugcuca

SEQ ID NO: 48836 - RNA, 23 nt, Artificial Sequence
  Chemically synthesized
auacaaggaggcauauugcucag

SEQ ID NO: 48837 - RNA, 23 nt, Artificial Sequence
  Chemically synthesized
cuauaagaaaagcacuuacuaag

SEQ ID NO: 48838 - RNA, 23 nt, Artificial Sequence
  Chemically synthesized
uauaagaaaagcacuuacuaagu

SEQ ID NO: 48839 - RNA, 23 nt, Artificial Sequence
  Chemically synthesized
auaagaaaagcacuuacuaaguu

SEQ ID NO: 48840 - RNA, 23 nt, Artificial Sequence
  Chemically synthesized
uaagaaaagcacuuacuaaguua

SEQ ID NO: 48841 - RNA, 23 nt, Artificial Sequence
  Chemically synthesized
aauaccaaccuuucuuucaucau

SEQ ID NO: 48842 - RNA, 23 nt, Artificial Sequence
  Chemically synthesized
ucuuucaucaucuacugcauuug

SEQ ID NO: 48843 - RNA, 23 nt, Artificial Sequence
  Chemically synthesized
auuaaccuuuuagaguuuuuacc

SEQ ID NO: 48844 - RNA, 23 nt, Artificial Sequence
  Chemically synthesized
uuaaccuuuuagaguuuuuaccc

SEQ ID NO: 48845 - RNA, 23 nt, Artificial Sequence
  Chemically synthesized
gcaguucuguucaaaaucuccgc

SEQ ID NO: 48846 - RNA, 23 nt, Artificial Sequence
  Chemically synthesized
caguucuguucaaaaucuccgca

SEQ ID NO: 48847 - RNA, 23 nt, Artificial Sequence
  Chemically synthesized
aguucuguucaaaaucuccgcaa

SEQ ID NO: 48848 - RNA, 23 nt, Artificial Sequence
  Chemically synthesized
guucuguucaaaaucuccgcaaa

SEQ ID NO: 48849 - RNA, 23 nt, Artificial Sequence
  Chemically synthesized
uucuguucaaaaucuccgcaaaa

SEQ ID NO: 48850 - RNA, 23 nt, Artificial Sequence
  Chemically synthesized
aacucgcuaugaaaucacaaaga

SEQ ID NO: 48851 - RNA, 23 nt, Artificial Sequence
  Chemically synthesized
aucugagaacuacauaggagagc

SEQ ID NO: 48852 - RNA, 23 nt, Artificial Sequence
  Chemically synthesized
ucugagaacuacauaggagagca

SEQ ID NO: 48853 - RNA, 23 nt, Artificial Sequence
  Chemically synthesized
acugcagagaaacaggaaauggc

SEQ ID NO: 48854 - RNA, 23 nt, Artificial Sequence
  Chemically synthesized
cugcagagaaacaggaaauggcc

SEQ ID NO: 48855 - RNA, 23 nt, Artificial Sequence
  Chemically synthesized
ugcagagaaacaggaaauggccg

SEQ ID NO: 48856 - RNA, 23 nt, Artificial Sequence
  Chemically synthesized
gcagagaaacaggaaauggccgc

SEQ ID NO: 48857 - RNA, 23 nt, Artificial Sequence
  Chemically synthesized
cagagaaacaggaaauggccgcu

SEQ ID NO: 48858 - RNA, 23 nt, Artificial Sequence
  Chemically synthesized
gcuuuaagaaggcuugucauuuu

SEQ ID NO: 48859 - RNA, 23 nt, Artificial Sequence
  Chemically synthesized
cuuuaagaaggcuugucauuuua

SEQ ID NO: 48860 - RNA, 23 nt, Artificial Sequence
  Chemically synthesized
uuuaagaaggcuugucauuuuag

SEQ ID NO: 48861 - RNA, 23 nt, Artificial Sequence
  Chemically synthesized
uuaagaaggcuugucauuuuagg

SEQ ID NO: 48862 - RNA, 23 nt, Artificial Sequence
  Chemically synthesized
uaagaaggcuugucauuuuaggg

SEQ ID NO: 48863 - RNA, 23 nt, Artificial Sequence
  Chemically synthesized
aaaaccuuaaaauuacugauugg

SEQ ID NO: 48864 - RNA, 23 nt, Artificial Sequence
  Chemically synthesized
aaaccuuaaaauuacugauuggu

SEQ ID NO: 48865 - RNA, 23 nt, Artificial Sequence
  Chemically synthesized
aaccuuaaaauuacugauugguu

SEQ ID NO: 48866 - RNA, 23 nt, Artificial Sequence
  Chemically synthesized
accuuaaaauuacugauugguuc

SEQ ID NO: 48867 - RNA, 23 nt, Artificial Sequence
  Chemically synthesized
ccuuaaaauuacugauugguuca

SEQ ID NO: 48868 - RNA, 23 nt, Artificial Sequence
  Chemically synthesized
cauuuacaacagcaggcauuuuc

SEQ ID NO: 48869 - RNA, 23 nt, Artificial Sequence
  Chemically synthesized
auuuacaacagcaggcauuuucu

SEQ ID NO: 48870 - RNA, 23 nt, Artificial Sequence
  Chemically synthesized
uuuacaacagcaggcauuuucuc

SEQ ID NO: 48871 - RNA, 23 nt, Artificial Sequence
  Chemically synthesized
uuacaacagcaggcauuuucucu

SEQ ID NO: 48872 - RNA, 23 nt, Artificial Sequence
  Chemically synthesized
uacaacagcaggcauuuucucuu

SEQ ID NO: 48873 - RNA, 23 nt, Artificial Sequence
  Chemically synthesized
aggauaccacuuugcacggacau

SEQ ID NO: 48874 - RNA, 23 nt, Artificial Sequence
  Chemically synthesized
cggacauuuucaaaugaugcagg

SEQ ID NO: 48875 - RNA, 23 nt, Artificial Sequence
  Chemically synthesized
caaaugaugcaggacucacaagg

SEQ ID NO: 48876 - RNA, 23 nt, Artificial Sequence
  Chemically synthesized
aaaugaugcaggacucacaaggg

SEQ ID NO: 48877 - RNA, 23 nt, Artificial Sequence
  Chemically synthesized
aaugaugcaggacucacaaggga

SEQ ID NO: 48878 - RNA, 23 nt, Artificial Sequence
  Chemically synthesized
augaugcaggacucacaagggaa

SEQ ID NO: 48879 - RNA, 23 nt, Artificial Sequence
  Chemically synthesized
ugaugcaggacucacaagggaaa

SEQ ID NO: 48880 - RNA, 23 nt, Artificial Sequence
  Chemically synthesized
gggcguaaucugucauaaucuuc

SEQ ID NO: 48881 - RNA, 23 nt, Artificial Sequence
  Chemically synthesized
ggcguaaucugucauaaucuucu

SEQ ID NO: 48882 - RNA, 23 nt, Artificial Sequence
  Chemically synthesized
gcguaaucugucauaaucuucuu

SEQ ID NO: 48883 - RNA, 23 nt, Artificial Sequence
  Chemically synthesized
ugucauaaucuucuuguccagcu

SEQ ID NO: 48884 - RNA, 23 nt, Artificial Sequence
  Chemically synthesized
gucauaaucuucuuguccagcug

SEQ ID NO: 48885 - RNA, 23 nt, Artificial Sequence
  Chemically synthesized
ucauaaucuucuuguccagcugu

SEQ ID NO: 48886 - RNA, 23 nt, Artificial Sequence
  Chemically synthesized
cauaaucuucuuguccagcugua

SEQ ID NO: 48887 - RNA, 23 nt, Artificial Sequence
  Chemically synthesized
auaaucuucuuguccagcuguau

SEQ ID NO: 48888 - RNA, 23 nt, Artificial Sequence
  Chemically synthesized
aaauucuguuguaguggcugaag

SEQ ID NO: 48889 - RNA, 23 nt, Artificial Sequence
  Chemically synthesized
aauucuguuguaguggcugaagg

SEQ ID NO: 48890 - RNA, 23 nt, Artificial Sequence
  Chemically synthesized
auucuguuguaguggcugaaggg

SEQ ID NO: 48891 - RNA, 23 nt, Artificial Sequence
  Chemically synthesized
gcacaguuuacagaaccucacag

SEQ ID NO: 48892 - RNA, 23 nt, Artificial Sequence
  Chemically synthesized
cacaguuuacagaaccucacaga

SEQ ID NO: 48893 - RNA, 23 nt, Artificial Sequence
  Chemically synthesized
acaguuuacagaaccucacagac

SEQ ID NO: 48894 - RNA, 23 nt, Artificial Sequence
  Chemically synthesized
caguuuacagaaccucacagacc

SEQ ID NO: 48895 - RNA, 23 nt, Artificial Sequence
  Chemically synthesized
guuacuagaaaacuaaggaaagc

SEQ ID NO: 48896 - RNA, 23 nt, Artificial Sequence
  Chemically synthesized
aaguaacauggaaagcacuuuua

SEQ ID NO: 48897 - RNA, 23 nt, Artificial Sequence
  Chemically synthesized
aguaacauggaaagcacuuuuac

SEQ ID NO: 48898 - RNA, 23 nt, Artificial Sequence
  Chemically synthesized
guaacauggaaagcacuuuuacu

SEQ ID NO: 48899 - RNA, 23 nt, Artificial Sequence
  Chemically synthesized
uuuacuaaucgacaaaaaaaccu

SEQ ID NO: 48900 - RNA, 23 nt, Artificial Sequence
  Chemically synthesized
uuacuaaucgacaaaaaaaccuu

SEQ ID NO: 48901 - RNA, 23 nt, Artificial Sequence
  Chemically synthesized
uacuaaucgacaaaaaaaccuuc

SEQ ID NO: 48902 - RNA, 23 nt, Artificial Sequence
  Chemically synthesized
acuaaucgacaaaaaaaccuucu

SEQ ID NO: 48903 - RNA, 23 nt, Artificial Sequence
  Chemically synthesized
cuaaucgacaaaaaaaccuucua

SEQ ID NO: 48904 - RNA, 23 nt, Artificial Sequence
  Chemically synthesized
uaaucgacaaaaaaaccuucuaa

SEQ ID NO: 48905 - RNA, 23 nt, Artificial Sequence
  Chemically synthesized
aaucgacaaaaaaaccuucuaau

SEQ ID NO: 48906 - RNA, 23 nt, Artificial Sequence
  Chemically synthesized
ugucaaagacaguagggauauau

SEQ ID NO: 48907 - RNA, 23 nt, Artificial Sequence
  Chemically synthesized
gucaaagacaguagggauauauu

SEQ ID NO: 48908 - RNA, 23 nt, Artificial Sequence
  Chemically synthesized
ucaaagacaguagggauauauuc

SEQ ID NO: 48909 - RNA, 23 nt, Artificial Sequence
  Chemically synthesized
caaagacaguagggauauauucu

SEQ ID NO: 48910 - RNA, 23 nt, Artificial Sequence
  Chemically synthesized
aaagacaguagggauauauucuc

SEQ ID NO: 48911 - RNA, 23 nt, Artificial Sequence
  Chemically synthesized
acagaacaaccaguuuaaagaug

SEQ ID NO: 48912 - RNA, 23 nt, Artificial Sequence
  Chemically synthesized
cagaacaaccaguuuaaagauga

SEQ ID NO: 48913 - RNA, 23 nt, Artificial Sequence
  Chemically synthesized
agaacaaccaguuuaaagaugaa

SEQ ID NO: 48914 - RNA, 23 nt, Artificial Sequence
  Chemically synthesized
gaacaaccaguuuaaagaugaau

SEQ ID NO: 48915 - RNA, 23 nt, Artificial Sequence
  Chemically synthesized
aacaaccaguuuaaagaugaauu

SEQ ID NO: 48916 - RNA, 23 nt, Artificial Sequence
  Chemically synthesized
acaaccaguuuaaagaugaauua

SEQ ID NO: 48917 - RNA, 23 nt, Artificial Sequence
  Chemically synthesized
gcuuaagaaaacauuuccugaua

SEQ ID NO: 48918 - RNA, 23 nt, Artificial Sequence
  Chemically synthesized
cuuaagaaaacauuuccugauaa

SEQ ID NO: 48919 - RNA, 23 nt, Artificial Sequence
  Chemically synthesized
acugcauuugacagaaauuaacc

SEQ ID NO: 48920 - RNA, 23 nt, Artificial Sequence
  Chemically synthesized
cugcauuugacagaaauuaaccu

SEQ ID NO: 48921 - RNA, 23 nt, Artificial Sequence
  Chemically synthesized
ugcauuugacagaaauuaaccuu

SEQ ID NO: 48922 - RNA, 23 nt, Artificial Sequence
  Chemically synthesized
gcauuugacagaaauuaaccuuu

SEQ ID NO: 48923 - RNA, 23 nt, Artificial Sequence
  Chemically synthesized
cauuugacagaaauuaaccuuuu

SEQ ID NO: 48924 - RNA, 23 nt, Artificial Sequence
  Chemically synthesized
ucauuccuuguacaauguagugu

SEQ ID NO: 48925 - RNA, 23 nt, Artificial Sequence
  Chemically synthesized
cauuccuuguacaauguagugua

SEQ ID NO: 48926 - RNA, 23 nt, Artificial Sequence
  Chemically synthesized
uguaaaucuccacuucguauuuu

SEQ ID NO: 48927 - RNA, 23 nt, Artificial Sequence
  Chemically synthesized
ucaaaauacugucuuuguccuuu

SEQ ID NO: 48928 - RNA, 23 nt, Artificial Sequence
  Chemically synthesized
ccgcaaaagcuggucagaaaacu

SEQ ID NO: 48929 - RNA, 23 nt, Artificial Sequence
  Chemically synthesized
cgcaaaagcuggucagaaaacuc

SEQ ID NO: 48930 - RNA, 23 nt, Artificial Sequence
  Chemically synthesized
gaaggucuuugcaaaguucagug

SEQ ID NO: 48931 - RNA, 23 nt, Artificial Sequence
  Chemically synthesized
aaggucuuugcaaaguucagugc

SEQ ID NO: 48932 - RNA, 23 nt, Artificial Sequence
  Chemically synthesized
aggucuuugcaaaguucagugcu

SEQ ID NO: 48933 - RNA, 23 nt, Artificial Sequence
  Chemically synthesized
ggucuuugcaaaguucagugcuc

SEQ ID NO: 48934 - RNA, 23 nt, Artificial Sequence
  Chemically synthesized
gucuuugcaaaguucagugcucg

SEQ ID NO: 48935 - RNA, 23 nt, Artificial Sequence
  Chemically synthesized
aagaaggcuugucauuuuagggc

SEQ ID NO: 48936 - RNA, 23 nt, Artificial Sequence
  Chemically synthesized
ugagucugaacucuuacauuuag

SEQ ID NO: 48937 - RNA, 23 nt, Artificial Sequence
  Chemically synthesized
gagucugaacucuuacauuuaga

SEQ ID NO: 48938 - RNA, 23 nt, Artificial Sequence
  Chemically synthesized
agucugaacucuuacauuuagaa

SEQ ID NO: 48939 - RNA, 23 nt, Artificial Sequence
  Chemically synthesized
gucugaacucuuacauuuagaac

SEQ ID NO: 48940 - RNA, 23 nt, Artificial Sequence
  Chemically synthesized
ucugaacucuuacauuuagaaca

SEQ ID NO: 48941 - RNA, 23 nt, Artificial Sequence
  Chemically synthesized
uuacagcaccaaucuccuuagcc

SEQ ID NO: 48942 - RNA, 23 nt, Artificial Sequence
  Chemically synthesized
uacagcaccaaucuccuuagcca

SEQ ID NO: 48943 - RNA, 23 nt, Artificial Sequence
  Chemically synthesized
agcaccaaucuccuuagccaugg

SEQ ID NO: 48944 - RNA, 23 nt, Artificial Sequence
  Chemically synthesized
gcaccaaucuccuuagccauggc

SEQ ID NO: 48945 - RNA, 23 nt, Artificial Sequence
  Chemically synthesized
caccaaucuccuuagccauggcu

SEQ ID NO: 48946 - RNA, 23 nt, Artificial Sequence
  Chemically synthesized
accaaucuccuuagccauggcua

SEQ ID NO: 48947 - RNA, 23 nt, Artificial Sequence
  Chemically synthesized
ccaaucuccuuagccauggcuag

SEQ ID NO: 48948 - RNA, 23 nt, Artificial Sequence
  Chemically synthesized
uuuucaaaugaugcaggacucac

SEQ ID NO: 48949 - RNA, 23 nt, Artificial Sequence
  Chemically synthesized
uuucaaaugaugcaggacucaca

SEQ ID NO: 48950 - RNA, 23 nt, Artificial Sequence
  Chemically synthesized
uucaaaugaugcaggacucacaa

SEQ ID NO: 48951 - RNA, 23 nt, Artificial Sequence
  Chemically synthesized
ucugucauaaucuucuuguccag

SEQ ID NO: 48952 - RNA, 23 nt, Artificial Sequence
  Chemically synthesized
uauuaagucauacaugcaaaaca

SEQ ID NO: 48953 - RNA, 23 nt, Artificial Sequence
  Chemically synthesized
auuaagucauacaugcaaaacau

SEQ ID NO: 48954 - RNA, 23 nt, Artificial Sequence
  Chemically synthesized
uuaagucauacaugcaaaacaua

SEQ ID NO: 48955 - RNA, 23 nt, Artificial Sequence
  Chemically synthesized
uaagucauacaugcaaaacauaa

SEQ ID NO: 48956 - RNA, 23 nt, Artificial Sequence
  Chemically synthesized
aagucauacaugcaaaacauaau

SEQ ID NO: 48957 - RNA, 23 nt, Artificial Sequence
  Chemically synthesized
ucaauguaaaaacacuccacaau

SEQ ID NO: 48958 - RNA, 23 nt, Artificial Sequence
  Chemically synthesized
acagaacaucgucagcacuagca

SEQ ID NO: 48959 - RNA, 23 nt, Artificial Sequence
  Chemically synthesized
cagaacaucgucagcacuagcac

SEQ ID NO: 48960 - RNA, 23 nt, Artificial Sequence
  Chemically synthesized
agaacaucgucagcacuagcaca

SEQ ID NO: 48961 - RNA, 23 nt, Artificial Sequence
  Chemically synthesized
agugauguuaagaagguucauag

SEQ ID NO: 48962 - RNA, 23 nt, Artificial Sequence
  Chemically synthesized
gugauguuaagaagguucauagu

SEQ ID NO: 48963 - RNA, 23 nt, Artificial Sequence
  Chemically synthesized
ugauguuaagaagguucauaguu

SEQ ID NO: 48964 - RNA, 23 nt, Artificial Sequence
  Chemically synthesized
gauguuaagaagguucauaguuu

SEQ ID NO: 48965 - RNA, 23 nt, Artificial Sequence
  Chemically synthesized
auguuaagaagguucauaguuua

SEQ ID NO: 48966 - RNA, 23 nt, Artificial Sequence
  Chemically synthesized
aucgacaaaaaaaccuucuaaug

SEQ ID NO: 48967 - RNA, 23 nt, Artificial Sequence
  Chemically synthesized
gguucuauaagaaaagcacuuac

SEQ ID NO: 48968 - RNA, 23 nt, Artificial Sequence
  Chemically synthesized
guucuauaagaaaagcacuuacu

SEQ ID NO: 48969 - RNA, 23 nt, Artificial Sequence
  Chemically synthesized
uucuauaagaaaagcacuuacua

SEQ ID NO: 48970 - RNA, 23 nt, Artificial Sequence
  Chemically synthesized
ucuauaagaaaagcacuuacuaa

SEQ ID NO: 48971 - RNA, 23 nt, Artificial Sequence
  Chemically synthesized
aagcacuuacuaaguuagcgacu

SEQ ID NO: 48972 - RNA, 23 nt, Artificial Sequence
  Chemically synthesized
uaagagaaaggaaaagcuuaaga

SEQ ID NO: 48973 - RNA, 23 nt, Artificial Sequence
  Chemically synthesized
aagagaaaggaaaagcuuaagaa

SEQ ID NO: 48974 - RNA, 23 nt, Artificial Sequence
  Chemically synthesized
agagaaaggaaaagcuuaagaaa

SEQ ID NO: 48975 - RNA, 23 nt, Artificial Sequence
  Chemically synthesized
gagaaaggaaaagcuuaagaaaa

SEQ ID NO: 48976 - RNA, 23 nt, Artificial Sequence
  Chemically synthesized
agaaaggaaaagcuuaagaaaac

SEQ ID NO: 48977 - RNA, 23 nt, Artificial Sequence
  Chemically synthesized
cuuucaucaucuacugcauuuga

SEQ ID NO: 48978 - RNA, 23 nt, Artificial Sequence
  Chemically synthesized
auuccuuguacaauguaguguaa

SEQ ID NO: 48979 - RNA, 23 nt, Artificial Sequence
  Chemically synthesized
uuccuuguacaauguaguguaaa

SEQ ID NO: 48980 - RNA, 23 nt, Artificial Sequence
  Chemically synthesized
uccuuguacaauguaguguaaau

SEQ ID NO: 48981 - RNA, 23 nt, Artificial Sequence
  Chemically synthesized
uacugucuuuguccuuugaucac

SEQ ID NO: 48982 - RNA, 23 nt, Artificial Sequence
  Chemically synthesized
ccauuacaguacaauguuauguc

SEQ ID NO: 48983 - RNA, 23 nt, Artificial Sequence
  Chemically synthesized
cauuacaguacaauguuaugucg

SEQ ID NO: 48984 - RNA, 23 nt, Artificial Sequence
  Chemically synthesized
auuacaguacaauguuaugucgg

SEQ ID NO: 48985 - RNA, 23 nt, Artificial Sequence
  Chemically synthesized
uuacaguacaauguuaugucggg

SEQ ID NO: 48986 - RNA, 23 nt, Artificial Sequence
  Chemically synthesized
uacaguacaauguuaugucggga

SEQ ID NO: 48987 - RNA, 23 nt, Artificial Sequence
  Chemically synthesized
acaguacaauguuaugucgggaa

SEQ ID NO: 48988 - RNA, 23 nt, Artificial Sequence
  Chemically synthesized
caguacaauguuaugucgggaac

SEQ ID NO: 48989 - RNA, 23 nt, Artificial Sequence
  Chemically synthesized
aguacaauguuaugucgggaaca

SEQ ID NO: 48990 - RNA, 23 nt, Artificial Sequence
  Chemically synthesized
cugagaacuacauaggagagcaa

SEQ ID NO: 48991 - RNA, 23 nt, Artificial Sequence
  Chemically synthesized
ugagaacuacauaggagagcaag

SEQ ID NO: 48992 - RNA, 23 nt, Artificial Sequence
  Chemically synthesized
gagaacuacauaggagagcaagu

SEQ ID NO: 48993 - RNA, 23 nt, Artificial Sequence
  Chemically synthesized
aaguucagugcucgguguucucg

SEQ ID NO: 48994 - RNA, 23 nt, Artificial Sequence
  Chemically synthesized
aguucagugcucgguguucucgg

SEQ ID NO: 48995 - RNA, 23 nt, Artificial Sequence
  Chemically synthesized
guucagugcucgguguucucggc

SEQ ID NO: 48996 - RNA, 23 nt, Artificial Sequence
  Chemically synthesized
gcacaacaaugcaguguaguuca

SEQ ID NO: 48997 - RNA, 23 nt, Artificial Sequence
  Chemically synthesized
cacaacaaugcaguguaguucag

SEQ ID NO: 48998 - RNA, 23 nt, Artificial Sequence
  Chemically synthesized
acaacaaugcaguguaguucaga

SEQ ID NO: 48999 - RNA, 23 nt, Artificial Sequence
  Chemically synthesized
caacaaugcaguguaguucagaa

SEQ ID NO: 49000 - RNA, 23 nt, Artificial Sequence
  Chemically synthesized
uggcaacucuuaaucugaacaag

SEQ ID NO: 49001 - RNA, 23 nt, Artificial Sequence
  Chemically synthesized
ggcaacucuuaaucugaacaaga

SEQ ID NO: 49002 - RNA, 23 nt, Artificial Sequence
  Chemically synthesized
gcaacucuuaaucugaacaagaa

SEQ ID NO: 49003 - RNA, 23 nt, Artificial Sequence
  Chemically synthesized
caacucuuaaucugaacaagaau

SEQ ID NO: 49004 - RNA, 23 nt, Artificial Sequence
  Chemically synthesized
aacucuuaaucugaacaagaaug

SEQ ID NO: 49005 - RNA, 23 nt, Artificial Sequence
  Chemically synthesized
agaaggcuugucauuuuagggcu

SEQ ID NO: 49006 - RNA, 23 nt, Artificial Sequence
  Chemically synthesized
gaaggcuugucauuuuagggcua

SEQ ID NO: 49007 - RNA, 23 nt, Artificial Sequence
  Chemically synthesized
caacagcaggcauuuucucuucc

SEQ ID NO: 49008 - RNA, 23 nt, Artificial Sequence
  Chemically synthesized
aacagcaggcauuuucucuuccu

SEQ ID NO: 49009 - RNA, 23 nt, Artificial Sequence
  Chemically synthesized
acagcaggcauuuucucuuccuc

SEQ ID NO: 49010 - RNA, 23 nt, Artificial Sequence
  Chemically synthesized
cagcaggcauuuucucuuccucu

SEQ ID NO: 49011 - RNA, 23 nt, Artificial Sequence
  Chemically synthesized
agcaggcauuuucucuuccucuu

SEQ ID NO: 49012 - RNA, 23 nt, Artificial Sequence
  Chemically synthesized
agagaaacaggaaauggccgcuc

SEQ ID NO: 49013 - RNA, 23 nt, Artificial Sequence
  Chemically synthesized
cuaggaugaugggaguguuggga

SEQ ID NO: 49014 - RNA, 23 nt, Artificial Sequence
  Chemically synthesized
uaggaugaugggaguguugggac

SEQ ID NO: 49015 - RNA, 23 nt, Artificial Sequence
  Chemically synthesized
aggaugaugggaguguugggaca

SEQ ID NO: 49016 - RNA, 23 nt, Artificial Sequence
  Chemically synthesized
ggaugaugggaguguugggacag

SEQ ID NO: 49017 - RNA, 23 nt, Artificial Sequence
  Chemically synthesized
gaugaugggaguguugggacagu

SEQ ID NO: 49018 - RNA, 23 nt, Artificial Sequence
  Chemically synthesized
augaugggaguguugggacagug

SEQ ID NO: 49019 - RNA, 23 nt, Artificial Sequence
  Chemically synthesized
cgcaccucaggauaccacuuugc

SEQ ID NO: 49020 - RNA, 23 nt, Artificial Sequence
  Chemically synthesized
gcaccucaggauaccacuuugca

SEQ ID NO: 49021 - RNA, 23 nt, Artificial Sequence
  Chemically synthesized
caccucaggauaccacuuugcac

SEQ ID NO: 49022 - RNA, 23 nt, Artificial Sequence
  Chemically synthesized
ggauaccacuuugcacggacauu

SEQ ID NO: 49023 - RNA, 23 nt, Artificial Sequence
  Chemically synthesized
gauaccacuuugcacggacauuu

SEQ ID NO: 49024 - RNA, 23 nt, Artificial Sequence
  Chemically synthesized
aaaagaucaauguaaaaacacuc

SEQ ID NO: 49025 - RNA, 23 nt, Artificial Sequence
  Chemically synthesized
caauguaaaaacacuccacaauu

SEQ ID NO: 49026 - RNA, 23 nt, Artificial Sequence
  Chemically synthesized
agcacaguuuacagaaccucaca

SEQ ID NO: 49027 - RNA, 23 nt, Artificial Sequence
  Chemically synthesized
cagacccaaaggaacaucaauag

SEQ ID NO: 49028 - RNA, 23 nt, Artificial Sequence
  Chemically synthesized
agacccaaaggaacaucaauagg

SEQ ID NO: 49029 - RNA, 23 nt, Artificial Sequence
  Chemically synthesized
ccauaacauuggcagaauaauug

SEQ ID NO: 49030 - RNA, 23 nt, Artificial Sequence
  Chemically synthesized
cauaacauuggcagaauaauugu

SEQ ID NO: 49031 - RNA, 23 nt, Artificial Sequence
  Chemically synthesized
auaacauuggcagaauaauuguc

SEQ ID NO: 49032 - RNA, 23 nt, Artificial Sequence
  Chemically synthesized
uaacauuggcagaauaauuguca

SEQ ID NO: 49033 - RNA, 23 nt, Artificial Sequence
  Chemically synthesized
aacauuggcagaauaauugucaa

SEQ ID NO: 49034 - RNA, 23 nt, Artificial Sequence
  Chemically synthesized
agaaaacuaaggaaagcacuuau

SEQ ID NO: 49035 - RNA, 23 nt, Artificial Sequence
  Chemically synthesized
agcacuuuuacuaaucgacaaaa

SEQ ID NO: 49036 - RNA, 23 nt, Artificial Sequence
  Chemically synthesized
auaccaaccuuucuuucaucauc

SEQ ID NO: 49037 - RNA, 23 nt, Artificial Sequence
  Chemically synthesized
ucuccacuucguauuuugucaaa

SEQ ID NO: 49038 - RNA, 23 nt, Artificial Sequence
  Chemically synthesized
cuccacuucguauuuugucaaaa

SEQ ID NO: 49039 - RNA, 23 nt, Artificial Sequence
  Chemically synthesized
uccacuucguauuuugucaaaau

SEQ ID NO: 49040 - RNA, 23 nt, Artificial Sequence
  Chemically synthesized
ugucuuuguccuuugaucacaca

SEQ ID NO: 49041 - RNA, 23 nt, Artificial Sequence
  Chemically synthesized
gucuuuguccuuugaucacacac

SEQ ID NO: 49042 - RNA, 23 nt, Artificial Sequence
  Chemically synthesized
ucuuuguccuuugaucacacaca

SEQ ID NO: 49043 - RNA, 23 nt, Artificial Sequence
  Chemically synthesized
cuuuguccuuugaucacacacac

SEQ ID NO: 49044 - RNA, 23 nt, Artificial Sequence
  Chemically synthesized
uuuguccuuugaucacacacacc

SEQ ID NO: 49045 - RNA, 23 nt, Artificial Sequence
  Chemically synthesized
ugaguucaauggcaacgcuucau

SEQ ID NO: 49046 - RNA, 23 nt, Artificial Sequence
  Chemically synthesized
gaguucaauggcaacgcuucauu

SEQ ID NO: 49047 - RNA, 23 nt, Artificial Sequence
  Chemically synthesized
aguucaauggcaacgcuucauuc

SEQ ID NO: 49048 - RNA, 23 nt, Artificial Sequence
  Chemically synthesized
guucaauggcaacgcuucauucg

SEQ ID NO: 49049 - RNA, 23 nt, Artificial Sequence
  Chemically synthesized
uucaauggcaacgcuucauucgg

SEQ ID NO: 49050 - RNA, 23 nt, Artificial Sequence
  Chemically synthesized
agacgaaggucuuugcaaaguuc

SEQ ID NO: 49051 - RNA, 23 nt, Artificial Sequence
  Chemically synthesized
gacgaaggucuuugcaaaguuca

SEQ ID NO: 49052 - RNA, 23 nt, Artificial Sequence
  Chemically synthesized
acgaaggucuuugcaaaguucag

SEQ ID NO: 49053 - RNA, 23 nt, Artificial Sequence
  Chemically synthesized
cgaaggucuuugcaaaguucagu

SEQ ID NO: 49054 - RNA, 23 nt, Artificial Sequence
  Chemically synthesized
ggcacaacaaugcaguguaguuc

SEQ ID NO: 49055 - RNA, 23 nt, Artificial Sequence
  Chemically synthesized
cugagacauuuacaacagcaggc

SEQ ID NO: 49056 - RNA, 23 nt, Artificial Sequence
  Chemically synthesized
ugagacauuuacaacagcaggca

SEQ ID NO: 49057 - RNA, 23 nt, Artificial Sequence
  Chemically synthesized
gagacauuuacaacagcaggcau

SEQ ID NO: 49058 - RNA, 23 nt, Artificial Sequence
  Chemically synthesized
agacauuuacaacagcaggcauu

SEQ ID NO: 49059 - RNA, 23 nt, Artificial Sequence
  Chemically synthesized
gacauuuacaacagcaggcauuu

SEQ ID NO: 49060 - RNA, 23 nt, Artificial Sequence
  Chemically synthesized
acagcaccaaucuccuuagccau

SEQ ID NO: 49061 - RNA, 23 nt, Artificial Sequence
  Chemically synthesized
uaucaucccuaagaucaaguuua

SEQ ID NO: 49062 - RNA, 23 nt, Artificial Sequence
  Chemically synthesized
aucaucccuaagaucaaguuuag

SEQ ID NO: 49063 - RNA, 23 nt, Artificial Sequence
  Chemically synthesized
ucaucccuaagaucaaguuuagu

SEQ ID NO: 49064 - RNA, 23 nt, Artificial Sequence
  Chemically synthesized
caucccuaagaucaaguuuaguu

SEQ ID NO: 49065 - RNA, 23 nt, Artificial Sequence
  Chemically synthesized
aucccuaagaucaaguuuaguuc

SEQ ID NO: 49066 - RNA, 23 nt, Artificial Sequence
  Chemically synthesized
ucaaaugaugcaggacucacaag

SEQ ID NO: 49067 - RNA, 23 nt, Artificial Sequence
  Chemically synthesized
ccagcuguaucccauaagcccag

SEQ ID NO: 49068 - RNA, 23 nt, Artificial Sequence
  Chemically synthesized
cagcuguaucccauaagcccaga

SEQ ID NO: 49069 - RNA, 23 nt, Artificial Sequence
  Chemically synthesized
agcuguaucccauaagcccagau

SEQ ID NO: 49070 - RNA, 23 nt, Artificial Sequence
  Chemically synthesized
gcuguaucccauaagcccagauu

SEQ ID NO: 49071 - RNA, 23 nt, Artificial Sequence
  Chemically synthesized
cuguaucccauaagcccagauuc

SEQ ID NO: 49072 - RNA, 23 nt, Artificial Sequence
  Chemically synthesized
ccgguuuuccaucuaccauaaca

SEQ ID NO: 49073 - RNA, 23 nt, Artificial Sequence
  Chemically synthesized
cgguuuuccaucuaccauaacau

SEQ ID NO: 49074 - RNA, 23 nt, Artificial Sequence
  Chemically synthesized
gguuuuccaucuaccauaacauu

SEQ ID NO: 49075 - RNA, 23 nt, Artificial Sequence
  Chemically synthesized
guuuuccaucuaccauaacauug

SEQ ID NO: 49076 - RNA, 23 nt, Artificial Sequence
  Chemically synthesized
uuuuccaucuaccauaacauugg

SEQ ID NO: 49077 - RNA, 23 nt, Artificial Sequence
  Chemically synthesized
acagaaccucacagacccaaagg

SEQ ID NO: 49078 - RNA, 23 nt, Artificial Sequence
  Chemically synthesized
cagaaccucacagacccaaagga

SEQ ID NO: 49079 - RNA, 23 nt, Artificial Sequence
  Chemically synthesized
agaaccucacagacccaaaggaa

SEQ ID NO: 49080 - RNA, 23 nt, Artificial Sequence
  Chemically synthesized
gaaccucacagacccaaaggaac

SEQ ID NO: 49081 - RNA, 23 nt, Artificial Sequence
  Chemically synthesized
aaccucacagacccaaaggaaca

SEQ ID NO: 49082 - RNA, 23 nt, Artificial Sequence
  Chemically synthesized
acaucaauaggcaaagcgacuac

SEQ ID NO: 49083 - RNA, 23 nt, Artificial Sequence
  Chemically synthesized
caucaauaggcaaagcgacuaca

SEQ ID NO: 49084 - RNA, 23 nt, Artificial Sequence
  Chemically synthesized
aucaauaggcaaagcgacuacag

SEQ ID NO: 49085 - RNA, 23 nt, Artificial Sequence
  Chemically synthesized
ucaauaggcaaagcgacuacagg

SEQ ID NO: 49086 - RNA, 23 nt, Artificial Sequence
  Chemically synthesized
caauaggcaaagcgacuacagga

SEQ ID NO: 49087 - RNA, 23 nt, Artificial Sequence
  Chemically synthesized
acuauaaagcugcaacacaugau

SEQ ID NO: 49088 - RNA, 23 nt, Artificial Sequence
  Chemically synthesized
cuauaaagcugcaacacaugauu

SEQ ID NO: 49089 - RNA, 23 nt, Artificial Sequence
  Chemically synthesized
uauaaagcugcaacacaugauuu

SEQ ID NO: 49090 - RNA, 23 nt, Artificial Sequence
  Chemically synthesized
auaaagcugcaacacaugauuuu

SEQ ID NO: 49091 - RNA, 23 nt, Artificial Sequence
  Chemically synthesized
uaaagcugcaacacaugauuuuu

SEQ ID NO: 49092 - RNA, 23 nt, Artificial Sequence
  Chemically synthesized
uuuuacuaaucgacaaaaaaacc

SEQ ID NO: 49093 - RNA, 23 nt, Artificial Sequence
  Chemically synthesized
ucgacaaaaaaaccuucuaaugc

SEQ ID NO: 49094 - RNA, 23 nt, Artificial Sequence
  Chemically synthesized
cgacaaaaaaaccuucuaaugca

SEQ ID NO: 49095 - RNA, 23 nt, Artificial Sequence
  Chemically synthesized
gacaaaaaaaccuucuaaugcau

SEQ ID NO: 49096 - RNA, 23 nt, Artificial Sequence
  Chemically synthesized
acaaaaaaaccuucuaaugcauu

SEQ ID NO: 49097 - RNA, 23 nt, Artificial Sequence
  Chemically synthesized
caaaaaaaccuucuaaugcauua

SEQ ID NO: 49098 - RNA, 23 nt, Artificial Sequence
  Chemically synthesized
aaaaaaccuucuaaugcauuauc

SEQ ID NO: 49099 - RNA, 23 nt, Artificial Sequence
  Chemically synthesized
aaaaaccuucuaaugcauuauca

SEQ ID NO: 49100 - RNA, 23 nt, Artificial Sequence
  Chemically synthesized
aaaaccuucuaaugcauuaucag

SEQ ID NO: 49101 - RNA, 23 nt, Artificial Sequence
  Chemically synthesized
aaaccuucuaaugcauuaucaga

SEQ ID NO: 49102 - RNA, 23 nt, Artificial Sequence
  Chemically synthesized
aaccuucuaaugcauuaucagaa

SEQ ID NO: 49103 - RNA, 23 nt, Artificial Sequence
  Chemically synthesized
accuucuaaugcauuaucagaaa

SEQ ID NO: 49104 - RNA, 23 nt, Artificial Sequence
  Chemically synthesized
uuugucaaaauacugucuuuguc

SEQ ID NO: 49105 - RNA, 23 nt, Artificial Sequence
  Chemically synthesized
uugucaaaauacugucuuugucc

SEQ ID NO: 49106 - RNA, 23 nt, Artificial Sequence
  Chemically synthesized
ugucaaaauacugucuuuguccu

SEQ ID NO: 49107 - RNA, 23 nt, Artificial Sequence
  Chemically synthesized
gucaaaauacugucuuuguccuu

SEQ ID NO: 49108 - RNA, 23 nt, Artificial Sequence
  Chemically synthesized
cugucuuuguccuuugaucacac

SEQ ID NO: 49109 - RNA, 23 nt, Artificial Sequence
  Chemically synthesized
uuguccuuugaucacacacaccc

SEQ ID NO: 49110 - RNA, 23 nt, Artificial Sequence
  Chemically synthesized
agcaguucuguucaaaaucuccg

SEQ ID NO: 49111 - RNA, 23 nt, Artificial Sequence
  Chemically synthesized
aaucacaaagacugauccaaaga

SEQ ID NO: 49112 - RNA, 23 nt, Artificial Sequence
  Chemically synthesized
cugcuacgcucacuccauuacag

SEQ ID NO: 49113 - RNA, 23 nt, Artificial Sequence
  Chemically synthesized
ugcuacgcucacuccauuacagu

SEQ ID NO: 49114 - RNA, 23 nt, Artificial Sequence
  Chemically synthesized
gcuacgcucacuccauuacagua

SEQ ID NO: 49115 - RNA, 23 nt, Artificial Sequence
  Chemically synthesized
cuacgcucacuccauuacaguac

SEQ ID NO: 49116 - RNA, 23 nt, Artificial Sequence
  Chemically synthesized
uacgcucacuccauuacaguaca

SEQ ID NO: 49117 - RNA, 23 nt, Artificial Sequence
  Chemically synthesized
cgggaacacgugcugcuaacuca

SEQ ID NO: 49118 - RNA, 23 nt, Artificial Sequence
  Chemically synthesized
gggaacacgugcugcuaacucac

SEQ ID NO: 49119 - RNA, 23 nt, Artificial Sequence
  Chemically synthesized
ggaacacgugcugcuaacucacu

SEQ ID NO: 49120 - RNA, 23 nt, Artificial Sequence
  Chemically synthesized
gaacacgugcugcuaacucacug

SEQ ID NO: 49121 - RNA, 23 nt, Artificial Sequence
  Chemically synthesized
aacacgugcugcuaacucacugg

SEQ ID NO: 49122 - RNA, 23 nt, Artificial Sequence
  Chemically synthesized
cuccuaacugcagaagcuaccgu

SEQ ID NO: 49123 - RNA, 23 nt, Artificial Sequence
  Chemically synthesized
uccuaacugcagaagcuaccguc

SEQ ID NO: 49124 - RNA, 23 nt, Artificial Sequence
  Chemically synthesized
ccuaacugcagaagcuaccgucu

SEQ ID NO: 49125 - RNA, 23 nt, Artificial Sequence
  Chemically synthesized
cuaacugcagaagcuaccgucuu

SEQ ID NO: 49126 - RNA, 23 nt, Artificial Sequence
  Chemically synthesized
uaacugcagaagcuaccgucuuc

SEQ ID NO: 49127 - RNA, 23 nt, Artificial Sequence
  Chemically synthesized
acugaucaguaggcaaguuuuac

SEQ ID NO: 49128 - RNA, 23 nt, Artificial Sequence
  Chemically synthesized
cugaucaguaggcaaguuuuacc

SEQ ID NO: 49129 - RNA, 23 nt, Artificial Sequence
  Chemically synthesized
ugaucaguaggcaaguuuuaccu

SEQ ID NO: 49130 - RNA, 23 nt, Artificial Sequence
  Chemically synthesized
gaucaguaggcaaguuuuaccua

SEQ ID NO: 49131 - RNA, 23 nt, Artificial Sequence
  Chemically synthesized
aucaguaggcaaguuuuaccuac

SEQ ID NO: 49132 - RNA, 23 nt, Artificial Sequence
  Chemically synthesized
gggggcgcuuuugaaaaauaagg

SEQ ID NO: 49133 - RNA, 23 nt, Artificial Sequence
  Chemically synthesized
ggggcgcuuuugaaaaauaaggc

SEQ ID NO: 49134 - RNA, 23 nt, Artificial Sequence
  Chemically synthesized
gggcgcuuuugaaaaauaaggcu

SEQ ID NO: 49135 - RNA, 23 nt, Artificial Sequence
  Chemically synthesized
ggcgcuuuugaaaaauaaggcuu

SEQ ID NO: 49136 - RNA, 23 nt, Artificial Sequence
  Chemically synthesized
gcgcuuuugaaaaauaaggcuuu

SEQ ID NO: 49137 - RNA, 23 nt, Artificial Sequence
  Chemically synthesized
acauuuacaacagcaggcauuuu

SEQ ID NO: 49138 - RNA, 23 nt, Artificial Sequence
  Chemically synthesized
cuccuucaguuucucgaucgugu

SEQ ID NO: 49139 - RNA, 23 nt, Artificial Sequence
  Chemically synthesized
uccuucaguuucucgaucguguc

SEQ ID NO: 49140 - RNA, 23 nt, Artificial Sequence
  Chemically synthesized
ccuucaguuucucgaucgugucu

SEQ ID NO: 49141 - RNA, 23 nt, Artificial Sequence
  Chemically synthesized
cuucaguuucucgaucgugucuu

SEQ ID NO: 49142 - RNA, 23 nt, Artificial Sequence
  Chemically synthesized
uucaguuucucgaucgugucuuu

SEQ ID NO: 49143 - RNA, 23 nt, Artificial Sequence
  Chemically synthesized
ugucuuuaucaucccuaagauca

SEQ ID NO: 49144 - RNA, 23 nt, Artificial Sequence
  Chemically synthesized
gucuuuaucaucccuaagaucaa

SEQ ID NO: 49145 - RNA, 23 nt, Artificial Sequence
  Chemically synthesized
ucuuuaucaucccuaagaucaag

SEQ ID NO: 49146 - RNA, 23 nt, Artificial Sequence
  Chemically synthesized
cuuuaucaucccuaagaucaagu

SEQ ID NO: 49147 - RNA, 23 nt, Artificial Sequence
  Chemically synthesized
uuuaucaucccuaagaucaaguu

SEQ ID NO: 49148 - RNA, 23 nt, Artificial Sequence
  Chemically synthesized
ccacuaggaugaugggaguguug

SEQ ID NO: 49149 - RNA, 23 nt, Artificial Sequence
  Chemically synthesized
cacuaggaugaugggaguguugg

SEQ ID NO: 49150 - RNA, 23 nt, Artificial Sequence
  Chemically synthesized
acuaggaugaugggaguguuggg

SEQ ID NO: 49151 - RNA, 23 nt, Artificial Sequence
  Chemically synthesized
ccgcaccucaggauaccacuuug

SEQ ID NO: 49152 - RNA, 23 nt, Artificial Sequence
  Chemically synthesized
gaaaagcaaauuaagaacacauc

SEQ ID NO: 49153 - RNA, 23 nt, Artificial Sequence
  Chemically synthesized
aaaagcaaauuaagaacacaucu

SEQ ID NO: 49154 - RNA, 23 nt, Artificial Sequence
  Chemically synthesized
aaagcaaauuaagaacacaucug

SEQ ID NO: 49155 - RNA, 23 nt, Artificial Sequence
  Chemically synthesized
aagcaaauuaagaacacaucugu

SEQ ID NO: 49156 - RNA, 23 nt, Artificial Sequence
  Chemically synthesized
agcaaauuaagaacacaucuguu

SEQ ID NO: 49157 - RNA, 23 nt, Artificial Sequence
  Chemically synthesized
cugucauaaucuucuuguccagc

SEQ ID NO: 49158 - RNA, 23 nt, Artificial Sequence
  Chemically synthesized
uuuccaucuaccauaacauuggc

SEQ ID NO: 49159 - RNA, 23 nt, Artificial Sequence
  Chemically synthesized
aacacuccacaauucugcaacug

SEQ ID NO: 49160 - RNA, 23 nt, Artificial Sequence
  Chemically synthesized
acaauucugcaacugucaauuua

SEQ ID NO: 49161 - RNA, 23 nt, Artificial Sequence
  Chemically synthesized
caauucugcaacugucaauuuaa

SEQ ID NO: 49162 - RNA, 23 nt, Artificial Sequence
  Chemically synthesized
aauucugcaacugucaauuuaaa

SEQ ID NO: 49163 - RNA, 23 nt, Artificial Sequence
  Chemically synthesized
auucugcaacugucaauuuaaaa

SEQ ID NO: 49164 - RNA, 23 nt, Artificial Sequence
  Chemically synthesized
uucugcaacugucaauuuaaaaa

SEQ ID NO: 49165 - RNA, 23 nt, Artificial Sequence
  Chemically synthesized
uucuguuguaguggcugaagggu

SEQ ID NO: 49166 - RNA, 23 nt, Artificial Sequence
  Chemically synthesized
ucuguuguaguggcugaaggguc

SEQ ID NO: 49167 - RNA, 23 nt, Artificial Sequence
  Chemically synthesized
cuguuguaguggcugaagggucc

SEQ ID NO: 49168 - RNA, 23 nt, Artificial Sequence
  Chemically synthesized
uguuguaguggcugaaggguccc

SEQ ID NO: 49169 - RNA, 23 nt, Artificial Sequence
  Chemically synthesized
cgccagugaguuaaguuguacag

SEQ ID NO: 49170 - RNA, 23 nt, Artificial Sequence
  Chemically synthesized
gccagugaguuaaguuguacaga

SEQ ID NO: 49171 - RNA, 23 nt, Artificial Sequence
  Chemically synthesized
ccagugaguuaaguuguacagaa

SEQ ID NO: 49172 - RNA, 23 nt, Artificial Sequence
  Chemically synthesized
cagugaguuaaguuguacagaac

SEQ ID NO: 49173 - RNA, 23 nt, Artificial Sequence
  Chemically synthesized
agugaguuaaguuguacagaaca

SEQ ID NO: 49174 - RNA, 23 nt, Artificial Sequence
  Chemically synthesized
agacagugauguuaagaagguuc

SEQ ID NO: 49175 - RNA, 23 nt, Artificial Sequence
  Chemically synthesized
gacagugauguuaagaagguuca

SEQ ID NO: 49176 - RNA, 23 nt, Artificial Sequence
  Chemically synthesized
acagugauguuaagaagguucau

SEQ ID NO: 49177 - RNA, 23 nt, Artificial Sequence
  Chemically synthesized
cagugauguuaagaagguucaua

SEQ ID NO: 49178 - RNA, 23 nt, Artificial Sequence
  Chemically synthesized
aacuauaaagcugcaacacauga

SEQ ID NO: 49179 - RNA, 23 nt, Artificial Sequence
  Chemically synthesized
agaauaauugucaaagacaguag

SEQ ID NO: 49180 - RNA, 23 nt, Artificial Sequence
  Chemically synthesized
gaauaauugucaaagacaguagg

SEQ ID NO: 49181 - RNA, 23 nt, Artificial Sequence
  Chemically synthesized
aauaauugucaaagacaguaggg

SEQ ID NO: 49182 - RNA, 23 nt, Artificial Sequence
  Chemically synthesized
auaauugucaaagacaguaggga

SEQ ID NO: 49183 - RNA, 23 nt, Artificial Sequence
  Chemically synthesized
uaauugucaaagacaguagggau

SEQ ID NO: 49184 - RNA, 23 nt, Artificial Sequence
  Chemically synthesized
agcacuuacuaaguuagcgacua

SEQ ID NO: 49185 - RNA, 23 nt, Artificial Sequence
  Chemically synthesized
gcacuuacuaaguuagcgacuaa

SEQ ID NO: 49186 - RNA, 23 nt, Artificial Sequence
  Chemically synthesized
cacuuacuaaguuagcgacuaac

SEQ ID NO: 49187 - RNA, 23 nt, Artificial Sequence
  Chemically synthesized
acuuacuaaguuagcgacuaaca

SEQ ID NO: 49188 - RNA, 23 nt, Artificial Sequence
  Chemically synthesized
cuuacuaaguuagcgacuaacag

SEQ ID NO: 49189 - RNA, 23 nt, Artificial Sequence
  Chemically synthesized
uuacuaaguuagcgacuaacaga

SEQ ID NO: 49190 - RNA, 23 nt, Artificial Sequence
  Chemically synthesized
aaguuagcgacuaacagaacaac

SEQ ID NO: 49191 - RNA, 23 nt, Artificial Sequence
  Chemically synthesized
aguuagcgacuaacagaacaacc

SEQ ID NO: 49192 - RNA, 23 nt, Artificial Sequence
  Chemically synthesized
guuagcgacuaacagaacaacca

SEQ ID NO: 49193 - RNA, 23 nt, Artificial Sequence
  Chemically synthesized
uuagcgacuaacagaacaaccag

SEQ ID NO: 49194 - RNA, 23 nt, Artificial Sequence
  Chemically synthesized
uagcgacuaacagaacaaccagu

SEQ ID NO: 49195 - RNA, 23 nt, Artificial Sequence
  Chemically synthesized
auuuugucaaaauacugucuuug

SEQ ID NO: 49196 - RNA, 23 nt, Artificial Sequence
  Chemically synthesized
uuuugucaaaauacugucuuugu

SEQ ID NO: 49197 - RNA, 23 nt, Artificial Sequence
  Chemically synthesized
acugucuuuguccuuugaucaca

SEQ ID NO: 49198 - RNA, 23 nt, Artificial Sequence
  Chemically synthesized
uguccuuugaucacacacacccc

SEQ ID NO: 49199 - RNA, 23 nt, Artificial Sequence
  Chemically synthesized
guccuuugaucacacacacccca

SEQ ID NO: 49200 - RNA, 23 nt, Artificial Sequence
  Chemically synthesized
uccuuugaucacacacaccccac

SEQ ID NO: 49201 - RNA, 23 nt, Artificial Sequence
  Chemically synthesized
ccuuugaucacacacaccccacc

SEQ ID NO: 49202 - RNA, 23 nt, Artificial Sequence
  Chemically synthesized
agaacuacauaggagagcaagug

SEQ ID NO: 49203 - RNA, 23 nt, Artificial Sequence
  Chemically synthesized
aacuacauaggagagcaaguguc

SEQ ID NO: 49204 - RNA, 23 nt, Artificial Sequence
  Chemically synthesized
acuacauaggagagcaagugucu

SEQ ID NO: 49205 - RNA, 23 nt, Artificial Sequence
  Chemically synthesized
cuacauaggagagcaagugucug

SEQ ID NO: 49206 - RNA, 23 nt, Artificial Sequence
  Chemically synthesized
uacauaggagagcaagugucugc

SEQ ID NO: 49207 - RNA, 23 nt, Artificial Sequence
  Chemically synthesized
acauaggagagcaagugucugca

SEQ ID NO: 49208 - RNA, 23 nt, Artificial Sequence
  Chemically synthesized
acucuuaaucugaacaagaaugg

SEQ ID NO: 49209 - RNA, 23 nt, Artificial Sequence
  Chemically synthesized
cucuuaaucugaacaagaauggg

SEQ ID NO: 49210 - RNA, 23 nt, Artificial Sequence
  Chemically synthesized
ucuuaaucugaacaagaaugggg

SEQ ID NO: 49211 - RNA, 23 nt, Artificial Sequence
  Chemically synthesized
cuuaaucugaacaagaauggggg

SEQ ID NO: 49212 - RNA, 23 nt, Artificial Sequence
  Chemically synthesized
uuaaucugaacaagaaugggggg

SEQ ID NO: 49213 - RNA, 23 nt, Artificial Sequence
  Chemically synthesized
aauaaggcuuuaagaaggcuugu

SEQ ID NO: 49214 - RNA, 23 nt, Artificial Sequence
  Chemically synthesized
ggggcugagacauuuacaacagc

SEQ ID NO: 49215 - RNA, 23 nt, Artificial Sequence
  Chemically synthesized
gggcugagacauuuacaacagca

SEQ ID NO: 49216 - RNA, 23 nt, Artificial Sequence
  Chemically synthesized
ggcugagacauuuacaacagcag

SEQ ID NO: 49217 - RNA, 23 nt, Artificial Sequence
  Chemically synthesized
gcugagacauuuacaacagcagg

SEQ ID NO: 49218 - RNA, 23 nt, Artificial Sequence
  Chemically synthesized
gagcacuccagguauuuuacagc

SEQ ID NO: 49219 - RNA, 23 nt, Artificial Sequence
  Chemically synthesized
agcacuccagguauuuuacagca

SEQ ID NO: 49220 - RNA, 23 nt, Artificial Sequence
  Chemically synthesized
gcacuccagguauuuuacagcac

SEQ ID NO: 49221 - RNA, 23 nt, Artificial Sequence
  Chemically synthesized
cacuccagguauuuuacagcacc

SEQ ID NO: 49222 - RNA, 23 nt, Artificial Sequence
  Chemically synthesized
acuccagguauuuuacagcacca

SEQ ID NO: 49223 - RNA, 23 nt, Artificial Sequence
  Chemically synthesized
cagcaccaaucuccuuagccaug

SEQ ID NO: 49224 - RNA, 23 nt, Artificial Sequence
  Chemically synthesized
uuaucaucccuaagaucaaguuu

SEQ ID NO: 49225 - RNA, 23 nt, Artificial Sequence
  Chemically synthesized
auugcauuagcaaaagaucaaug

SEQ ID NO: 49226 - RNA, 23 nt, Artificial Sequence
  Chemically synthesized
uugcauuagcaaaagaucaaugu

SEQ ID NO: 49227 - RNA, 23 nt, Artificial Sequence
  Chemically synthesized
ugcauuagcaaaagaucaaugua

SEQ ID NO: 49228 - RNA, 23 nt, Artificial Sequence
  Chemically synthesized
gcauuagcaaaagaucaauguaa

SEQ ID NO: 49229 - RNA, 23 nt, Artificial Sequence
  Chemically synthesized
cauuagcaaaagaucaauguaaa

SEQ ID NO: 49230 - RNA, 23 nt, Artificial Sequence
  Chemically synthesized
auucucgccagugaguuaaguug

SEQ ID NO: 49231 - RNA, 23 nt, Artificial Sequence
  Chemically synthesized
uucucgccagugaguuaaguugu

SEQ ID NO: 49232 - RNA, 23 nt, Artificial Sequence
  Chemically synthesized
ucucgccagugaguuaaguugua

SEQ ID NO: 49233 - RNA, 23 nt, Artificial Sequence
  Chemically synthesized
cucgccagugaguuaaguuguac

SEQ ID NO: 49234 - RNA, 23 nt, Artificial Sequence
  Chemically synthesized
ucgccagugaguuaaguuguaca

SEQ ID NO: 49235 - RNA, 23 nt, Artificial Sequence
  Chemically synthesized
aagauuuuauaauacaaggaggc

SEQ ID NO: 49236 - RNA, 23 nt, Artificial Sequence
  Chemically synthesized
agauuuuauaauacaaggaggca

SEQ ID NO: 49237 - RNA, 23 nt, Artificial Sequence
  Chemically synthesized
gauuuuauaauacaaggaggcau

SEQ ID NO: 49238 - RNA, 23 nt, Artificial Sequence
  Chemically synthesized
auuuuauaauacaaggaggcaua

SEQ ID NO: 49239 - RNA, 23 nt, Artificial Sequence
  Chemically synthesized
uuuuauaauacaaggaggcauau

SEQ ID NO: 49240 - RNA, 23 nt, Artificial Sequence
  Chemically synthesized
aagggguucuauaagaaaagcac

SEQ ID NO: 49241 - RNA, 23 nt, Artificial Sequence
  Chemically synthesized
agggguucuauaagaaaagcacu

SEQ ID NO: 49242 - RNA, 23 nt, Artificial Sequence
  Chemically synthesized
gggguucuauaagaaaagcacuu

SEQ ID NO: 49243 - RNA, 23 nt, Artificial Sequence
  Chemically synthesized
ggguucuauaagaaaagcacuua

SEQ ID NO: 49244 - RNA, 23 nt, Artificial Sequence
  Chemically synthesized
uaaguuagcgacuaacagaacaa

SEQ ID NO: 49245 - RNA, 23 nt, Artificial Sequence
  Chemically synthesized
cacccacagcuaaacagaauucu

SEQ ID NO: 49246 - RNA, 23 nt, Artificial Sequence
  Chemically synthesized
acccacagcuaaacagaauucuu

SEQ ID NO: 49247 - RNA, 23 nt, Artificial Sequence
  Chemically synthesized
cccacagcuaaacagaauucuuc

SEQ ID NO: 49248 - RNA, 23 nt, Artificial Sequence
  Chemically synthesized
ccacagcuaaacagaauucuuca

SEQ ID NO: 49249 - RNA, 23 nt, Artificial Sequence
  Chemically synthesized
cacagcuaaacagaauucuucau

SEQ ID NO: 49250 - RNA, 23 nt, Artificial Sequence
  Chemically synthesized
uagcaguucuguucaaaaucucc

SEQ ID NO: 49251 - RNA, 23 nt, Artificial Sequence
  Chemically synthesized
aucacaaagacugauccaaagag

SEQ ID NO: 49252 - RNA, 23 nt, Artificial Sequence
  Chemically synthesized
cucacuccauuacaguacaaugu

SEQ ID NO: 49253 - RNA, 23 nt, Artificial Sequence
  Chemically synthesized
ucacuccauuacaguacaauguu

SEQ ID NO: 49254 - RNA, 23 nt, Artificial Sequence
  Chemically synthesized
cacuccauuacaguacaauguua

SEQ ID NO: 49255 - RNA, 23 nt, Artificial Sequence
  Chemically synthesized
acuccauuacaguacaauguuau

SEQ ID NO: 49256 - RNA, 23 nt, Artificial Sequence
  Chemically synthesized
cuccauuacaguacaauguuaug

SEQ ID NO: 49257 - RNA, 23 nt, Artificial Sequence
  Chemically synthesized
acacgugcugcuaacucacuggu

SEQ ID NO: 49258 - RNA, 23 nt, Artificial Sequence
  Chemically synthesized
cacgugcugcuaacucacuggug

SEQ ID NO: 49259 - RNA, 23 nt, Artificial Sequence
  Chemically synthesized
acgugcugcuaacucacugguga

SEQ ID NO: 49260 - RNA, 23 nt, Artificial Sequence
  Chemically synthesized
gaacuacauaggagagcaagugu

SEQ ID NO: 49261 - RNA, 23 nt, Artificial Sequence
  Chemically synthesized
cuguaacaaaaaguuggcauuga

SEQ ID NO: 49262 - RNA, 23 nt, Artificial Sequence
  Chemically synthesized
uguaacaaaaaguuggcauugag

SEQ ID NO: 49263 - RNA, 23 nt, Artificial Sequence
  Chemically synthesized
guaacaaaaaguuggcauugagu

SEQ ID NO: 49264 - RNA, 23 nt, Artificial Sequence
  Chemically synthesized
uaacaaaaaguuggcauugagug

SEQ ID NO: 49265 - RNA, 23 nt, Artificial Sequence
  Chemically synthesized
aacaaaaaguuggcauugagugc

SEQ ID NO: 49266 - RNA, 23 nt, Artificial Sequence
  Chemically synthesized
aauaggcaaagcgacuacaggag

SEQ ID NO: 49267 - RNA, 23 nt, Artificial Sequence
  Chemically synthesized
uuuaaaaacuauaaagcugcaac

SEQ ID NO: 49268 - RNA, 23 nt, Artificial Sequence
  Chemically synthesized
uuaaaaacuauaaagcugcaaca

SEQ ID NO: 49269 - RNA, 23 nt, Artificial Sequence
  Chemically synthesized
uaaaaacuauaaagcugcaacac

SEQ ID NO: 49270 - RNA, 23 nt, Artificial Sequence
  Chemically synthesized
aaaaacuauaaagcugcaacaca

SEQ ID NO: 49271 - RNA, 23 nt, Artificial Sequence
  Chemically synthesized
aaaacuauaaagcugcaacacau

SEQ ID NO: 49272 - RNA, 23 nt, Artificial Sequence
  Chemically synthesized
aagcugcaacacaugauuuuuac

SEQ ID NO: 49273 - RNA, 23 nt, Artificial Sequence
  Chemically synthesized
agcugcaacacaugauuuuuaca

SEQ ID NO: 49274 - RNA, 23 nt, Artificial Sequence
  Chemically synthesized
gggauauauucuccaggaaaugc

SEQ ID NO: 49275 - RNA, 23 nt, Artificial Sequence
  Chemically synthesized
ggauauauucuccaggaaaugca

SEQ ID NO: 49276 - RNA, 23 nt, Artificial Sequence
  Chemically synthesized
gauauauucuccaggaaaugcau

SEQ ID NO: 49277 - RNA, 23 nt, Artificial Sequence
  Chemically synthesized
auauauucuccaggaaaugcauu

SEQ ID NO: 49278 - RNA, 23 nt, Artificial Sequence
  Chemically synthesized
acagcuaaacagaauucuucauu

SEQ ID NO: 49279 - RNA, 23 nt, Artificial Sequence
  Chemically synthesized
cagcuaaacagaauucuucauua

SEQ ID NO: 49280 - RNA, 23 nt, Artificial Sequence
  Chemically synthesized
auagcaguucuguucaaaaucuc

SEQ ID NO: 49281 - RNA, 23 nt, Artificial Sequence
  Chemically synthesized
caaagacugauccaaagagcuga

SEQ ID NO: 49282 - RNA, 23 nt, Artificial Sequence
  Chemically synthesized
aaagacugauccaaagagcugag

SEQ ID NO: 49283 - RNA, 23 nt, Artificial Sequence
  Chemically synthesized
aagacugauccaaagagcugagc

SEQ ID NO: 49284 - RNA, 23 nt, Artificial Sequence
  Chemically synthesized
agacugauccaaagagcugagcu

SEQ ID NO: 49285 - RNA, 23 nt, Artificial Sequence
  Chemically synthesized
gacugauccaaagagcugagcug

SEQ ID NO: 49286 - RNA, 23 nt, Artificial Sequence
  Chemically synthesized
acugauccaaagagcugagcugc

SEQ ID NO: 49287 - RNA, 23 nt, Artificial Sequence
  Chemically synthesized
cugauccaaagagcugagcugcu

SEQ ID NO: 49288 - RNA, 23 nt, Artificial Sequence
  Chemically synthesized
guacaauguuaugucgggaacac

SEQ ID NO: 49289 - RNA, 23 nt, Artificial Sequence
  Chemically synthesized
cauaggagagcaagugucugcac

SEQ ID NO: 49290 - RNA, 23 nt, Artificial Sequence
  Chemically synthesized
auaggagagcaagugucugcacc

SEQ ID NO: 49291 - RNA, 23 nt, Artificial Sequence
  Chemically synthesized
ucuuugcaaaguucagugcucgg

SEQ ID NO: 49292 - RNA, 23 nt, Artificial Sequence
  Chemically synthesized
cuuugcaaaguucagugcucggu

SEQ ID NO: 49293 - RNA, 23 nt, Artificial Sequence
  Chemically synthesized
uuugcaaaguucagugcucggug

SEQ ID NO: 49294 - RNA, 23 nt, Artificial Sequence
  Chemically synthesized
cgagcacuccagguauuuuacag

SEQ ID NO: 49295 - RNA, 23 nt, Artificial Sequence
  Chemically synthesized
cuccagguauuuuacagcaccaa

SEQ ID NO: 49296 - RNA, 23 nt, Artificial Sequence
  Chemically synthesized
uccagguauuuuacagcaccaau

SEQ ID NO: 49297 - RNA, 23 nt, Artificial Sequence
  Chemically synthesized
aaucuucuuguccagcuguaucc

SEQ ID NO: 49298 - RNA, 23 nt, Artificial Sequence
  Chemically synthesized
aucuucuuguccagcuguauccc

SEQ ID NO: 49299 - RNA, 23 nt, Artificial Sequence
  Chemically synthesized
ucuucuuguccagcuguauccca

SEQ ID NO: 49300 - RNA, 23 nt, Artificial Sequence
  Chemically synthesized
cuucuuguccagcuguaucccau

SEQ ID NO: 49301 - RNA, 23 nt, Artificial Sequence
  Chemically synthesized
uucuuguccagcuguaucccaua

SEQ ID NO: 49302 - RNA, 23 nt, Artificial Sequence
  Chemically synthesized
guuaagaagguucauaguuuaag

SEQ ID NO: 49303 - RNA, 23 nt, Artificial Sequence
  Chemically synthesized
uuaagaagguucauaguuuaaga

SEQ ID NO: 49304 - RNA, 23 nt, Artificial Sequence
  Chemically synthesized
uaagaagguucauaguuuaagaa

SEQ ID NO: 49305 - RNA, 23 nt, Artificial Sequence
  Chemically synthesized
aagaagguucauaguuuaagaau

SEQ ID NO: 49306 - RNA, 23 nt, Artificial Sequence
  Chemically synthesized
agaagguucauaguuuaagaauu

SEQ ID NO: 49307 - RNA, 23 nt, Artificial Sequence
  Chemically synthesized
ucuguucaaaaucuccgcaaaag

SEQ ID NO: 49308 - RNA, 23 nt, Artificial Sequence
  Chemically synthesized
uacaauguuaugucgggaacacg

SEQ ID NO: 49309 - RNA, 23 nt, Artificial Sequence
  Chemically synthesized
ccuccuaacugcagaagcuaccg

SEQ ID NO: 49310 - RNA, 23 nt, Artificial Sequence
  Chemically synthesized
acaaaaaguuggcauugagugcg

SEQ ID NO: 49311 - RNA, 23 nt, Artificial Sequence
  Chemically synthesized
caaaaaguuggcauugagugcga

SEQ ID NO: 49312 - RNA, 23 nt, Artificial Sequence
  Chemically synthesized
aaaaaguuggcauugagugcgaa

SEQ ID NO: 49313 - RNA, 23 nt, Artificial Sequence
  Chemically synthesized
cuucgucaaacacugucuugagg

SEQ ID NO: 49314 - RNA, 23 nt, Artificial Sequence
  Chemically synthesized
uucgucaaacacugucuugaggc

SEQ ID NO: 49315 - RNA, 23 nt, Artificial Sequence
  Chemically synthesized
cagcuucuucuccuucaguuucu

SEQ ID NO: 49316 - RNA, 23 nt, Artificial Sequence
  Chemically synthesized
agcuucuucuccuucaguuucuc

SEQ ID NO: 49317 - RNA, 23 nt, Artificial Sequence
  Chemically synthesized
gcuucuucuccuucaguuucucg

SEQ ID NO: 49318 - RNA, 23 nt, Artificial Sequence
  Chemically synthesized
cuucuucuccuucaguuucucga

SEQ ID NO: 49319 - RNA, 23 nt, Artificial Sequence
  Chemically synthesized
uucuucuccuucaguuucucgau

SEQ ID NO: 49320 - RNA, 23 nt, Artificial Sequence
  Chemically synthesized
ucgugucuuuaucaucccuaaga

SEQ ID NO: 49321 - RNA, 23 nt, Artificial Sequence
  Chemically synthesized
gucauacaugcaaaacauaaugc

SEQ ID NO: 49322 - RNA, 23 nt, Artificial Sequence
  Chemically synthesized
ucauacaugcaaaacauaaugcu

SEQ ID NO: 49323 - RNA, 23 nt, Artificial Sequence
  Chemically synthesized
cauacaugcaaaacauaaugcua

SEQ ID NO: 49324 - RNA, 23 nt, Artificial Sequence
  Chemically synthesized
auacaugcaaaacauaaugcuaa

SEQ ID NO: 49325 - RNA, 23 nt, Artificial Sequence
  Chemically synthesized
uacaugcaaaacauaaugcuaau

SEQ ID NO: 49326 - RNA, 23 nt, Artificial Sequence
  Chemically synthesized
acauuggcagaauaauugucaaa

SEQ ID NO: 49327 - RNA, 23 nt, Artificial Sequence
  Chemically synthesized
auaggcaaagcgacuacaggagg

SEQ ID NO: 49328 - RNA, 23 nt, Artificial Sequence
  Chemically synthesized
aaacuauaaagcugcaacacaug

SEQ ID NO: 49329 - RNA, 23 nt, Artificial Sequence
  Chemically synthesized
acaguagggauauauucuccagg

SEQ ID NO: 49330 - RNA, 23 nt, Artificial Sequence
  Chemically synthesized
caguagggauauauucuccagga

SEQ ID NO: 49331 - RNA, 23 nt, Artificial Sequence
  Chemically synthesized
aguagggauauauucuccaggaa

SEQ ID NO: 49332 - RNA, 23 nt, Artificial Sequence
  Chemically synthesized
guagggauauauucuccaggaaa

SEQ ID NO: 49333 - RNA, 23 nt, Artificial Sequence
  Chemically synthesized
uagggauauauucuccaggaaau

SEQ ID NO: 49334 - RNA, 23 nt, Artificial Sequence
  Chemically synthesized
ccggcacacccacagcuaaacag

SEQ ID NO: 49335 - RNA, 23 nt, Artificial Sequence
  Chemically synthesized
cggcacacccacagcuaaacaga

SEQ ID NO: 49336 - RNA, 23 nt, Artificial Sequence
  Chemically synthesized
ggcacacccacagcuaaacagaa

SEQ ID NO: 49337 - RNA, 23 nt, Artificial Sequence
  Chemically synthesized
gcacacccacagcuaaacagaau

SEQ ID NO: 49338 - RNA, 23 nt, Artificial Sequence
  Chemically synthesized
cacacccacagcuaaacagaauu

SEQ ID NO: 49339 - RNA, 23 nt, Artificial Sequence
  Chemically synthesized
cuguucaaaaucuccgcaaaagc

SEQ ID NO: 49340 - RNA, 23 nt, Artificial Sequence
  Chemically synthesized
uguucaaaaucuccgcaaaagcu

SEQ ID NO: 49341 - RNA, 23 nt, Artificial Sequence
  Chemically synthesized
guucaaaaucuccgcaaaagcug

SEQ ID NO: 49342 - RNA, 23 nt, Artificial Sequence
  Chemically synthesized
uucaaaaucuccgcaaaagcugg

SEQ ID NO: 49343 - RNA, 23 nt, Artificial Sequence
  Chemically synthesized
cacaaagacugauccaaagagcu

SEQ ID NO: 49344 - RNA, 23 nt, Artificial Sequence
  Chemically synthesized
acaaagacugauccaaagagcug

SEQ ID NO: 49345 - RNA, 23 nt, Artificial Sequence
  Chemically synthesized
acgcucacuccauuacaguacaa

SEQ ID NO: 49346 - RNA, 23 nt, Artificial Sequence
  Chemically synthesized
cgcucacuccauuacaguacaau

SEQ ID NO: 49347 - RNA, 23 nt, Artificial Sequence
  Chemically synthesized
gcucacuccauuacaguacaaug

SEQ ID NO: 49348 - RNA, 23 nt, Artificial Sequence
  Chemically synthesized
ucaauggcaacgcuucauucggg

SEQ ID NO: 49349 - RNA, 23 nt, Artificial Sequence
  Chemically synthesized
caauggcaacgcuucauucggga

SEQ ID NO: 49350 - RNA, 23 nt, Artificial Sequence
  Chemically synthesized
aauggcaacgcuucauucgggag

SEQ ID NO: 49351 - RNA, 23 nt, Artificial Sequence
  Chemically synthesized
aguguaguucagaagguauuuug

SEQ ID NO: 49352 - RNA, 23 nt, Artificial Sequence
  Chemically synthesized
guguaguucagaagguauuuugg

SEQ ID NO: 49353 - RNA, 23 nt, Artificial Sequence
  Chemically synthesized
uguaguucagaagguauuuuggc

SEQ ID NO: 49354 - RNA, 23 nt, Artificial Sequence
  Chemically synthesized
guaguucagaagguauuuuggca

SEQ ID NO: 49355 - RNA, 23 nt, Artificial Sequence
  Chemically synthesized
uaguucagaagguauuuuggcaa

SEQ ID NO: 49356 - RNA, 23 nt, Artificial Sequence
  Chemically synthesized
ucagaagguauuuuggcaacucu

SEQ ID NO: 49357 - RNA, 23 nt, Artificial Sequence
  Chemically synthesized
cagaagguauuuuggcaacucuu

SEQ ID NO: 49358 - RNA, 23 nt, Artificial Sequence
  Chemically synthesized
agaagguauuuuggcaacucuua

SEQ ID NO: 49359 - RNA, 23 nt, Artificial Sequence
  Chemically synthesized
gaagguauuuuggcaacucuuaa

SEQ ID NO: 49360 - RNA, 23 nt, Artificial Sequence
  Chemically synthesized
aagguauuuuggcaacucuuaau

SEQ ID NO: 49361 - RNA, 23 nt, Artificial Sequence
  Chemically synthesized
uaggcaaagcgacuacaggaggc

SEQ ID NO: 49362 - RNA, 23 nt, Artificial Sequence
  Chemically synthesized
aagagggucaguauuggucaagu

SEQ ID NO: 49363 - RNA, 23 nt, Artificial Sequence
  Chemically synthesized
agcuaaacagaauucuucauuag

SEQ ID NO: 49364 - RNA, 23 nt, Artificial Sequence
  Chemically synthesized
gcuguucugcuuuacgcaucuga

SEQ ID NO: 49365 - RNA, 23 nt, Artificial Sequence
  Chemically synthesized
cuguucugcuuuacgcaucugag

SEQ ID NO: 49366 - RNA, 23 nt, Artificial Sequence
  Chemically synthesized
uguucugcuuuacgcaucugaga

SEQ ID NO: 49367 - RNA, 23 nt, Artificial Sequence
  Chemically synthesized
guucugcuuuacgcaucugagaa

SEQ ID NO: 49368 - RNA, 23 nt, Artificial Sequence
  Chemically synthesized
uucugcuuuacgcaucugagaac

SEQ ID NO: 49369 - RNA, 23 nt, Artificial Sequence
  Chemically synthesized
aguucagaagguauuuuggcaac

SEQ ID NO: 49370 - RNA, 23 nt, Artificial Sequence
  Chemically synthesized
guucagaagguauuuuggcaacu

SEQ ID NO: 49371 - RNA, 23 nt, Artificial Sequence
  Chemically synthesized
uucagaagguauuuuggcaacuc

SEQ ID NO: 49372 - RNA, 23 nt, Artificial Sequence
  Chemically synthesized
ucgucaaacacugucuugaggcc

SEQ ID NO: 49373 - RNA, 23 nt, Artificial Sequence
  Chemically synthesized
ggugaugggagucagcuucuucu

SEQ ID NO: 49374 - RNA, 23 nt, Artificial Sequence
  Chemically synthesized
gugaugggagucagcuucuucuc

SEQ ID NO: 49375 - RNA, 23 nt, Artificial Sequence
  Chemically synthesized
ugaugggagucagcuucuucucc

SEQ ID NO: 49376 - RNA, 23 nt, Artificial Sequence
  Chemically synthesized
gaugggagucagcuucuucuccu

SEQ ID NO: 49377 - RNA, 23 nt, Artificial Sequence
  Chemically synthesized
augggagucagcuucuucuccuu

SEQ ID NO: 49378 - RNA, 23 nt, Artificial Sequence
  Chemically synthesized
cagauucaccgguuuuccaucua

SEQ ID NO: 49379 - RNA, 23 nt, Artificial Sequence
  Chemically synthesized
agauucaccgguuuuccaucuac

SEQ ID NO: 49380 - RNA, 23 nt, Artificial Sequence
  Chemically synthesized
gauucaccgguuuuccaucuacc

SEQ ID NO: 49381 - RNA, 23 nt, Artificial Sequence
  Chemically synthesized
auucaccgguuuuccaucuacca

SEQ ID NO: 49382 - RNA, 23 nt, Artificial Sequence
  Chemically synthesized
uucaccgguuuuccaucuaccau

SEQ ID NO: 49383 - RNA, 23 nt, Artificial Sequence
  Chemically synthesized
ucaccgguuuuccaucuaccaua

SEQ ID NO: 49384 - RNA, 23 nt, Artificial Sequence
  Chemically synthesized
cauuggcagaauaauugucaaag

SEQ ID NO: 49385 - RNA, 23 nt, Artificial Sequence
  Chemically synthesized
auuggcagaauaauugucaaaga

SEQ ID NO: 49386 - RNA, 23 nt, Artificial Sequence
  Chemically synthesized
ucaguauuggucaagugacagug

SEQ ID NO: 49387 - RNA, 23 nt, Artificial Sequence
  Chemically synthesized
caguauuggucaagugacagugu

SEQ ID NO: 49388 - RNA, 23 nt, Artificial Sequence
  Chemically synthesized
aguauuggucaagugacaguguc

SEQ ID NO: 49389 - RNA, 23 nt, Artificial Sequence
  Chemically synthesized
guauuggucaagugacagugucg

SEQ ID NO: 49390 - RNA, 23 nt, Artificial Sequence
  Chemically synthesized
uauuggucaagugacagugucgg

SEQ ID NO: 49391 - RNA, 23 nt, Artificial Sequence
  Chemically synthesized
augaauuaaaugcccaauuuggg

SEQ ID NO: 49392 - RNA, 23 nt, Artificial Sequence
  Chemically synthesized
ugaauuaaaugcccaauuugggg

SEQ ID NO: 49393 - RNA, 23 nt, Artificial Sequence
  Chemically synthesized
gaauuaaaugcccaauuugggga

SEQ ID NO: 49394 - RNA, 23 nt, Artificial Sequence
  Chemically synthesized
aauuaaaugcccaauuuggggag

SEQ ID NO: 49395 - RNA, 23 nt, Artificial Sequence
  Chemically synthesized
auuaaaugcccaauuuggggagg

SEQ ID NO: 49396 - RNA, 23 nt, Artificial Sequence
  Chemically synthesized
uuacccgugacacuuucauuccu

SEQ ID NO: 49397 - RNA, 23 nt, Artificial Sequence
  Chemically synthesized
uacccgugacacuuucauuccuu

SEQ ID NO: 49398 - RNA, 23 nt, Artificial Sequence
  Chemically synthesized
acccgugacacuuucauuccuug

SEQ ID NO: 49399 - RNA, 23 nt, Artificial Sequence
  Chemically synthesized
auggcaacgcuucauucgggagg

SEQ ID NO: 49400 - RNA, 23 nt, Artificial Sequence
  Chemically synthesized
uaaucugaacaagaauggggggg

SEQ ID NO: 49401 - RNA, 23 nt, Artificial Sequence
  Chemically synthesized
auaaggcuuuaagaaggcuuguc

SEQ ID NO: 49402 - RNA, 23 nt, Artificial Sequence
  Chemically synthesized
aggcauuuucucuuccucuucuu

SEQ ID NO: 49403 - RNA, 23 nt, Artificial Sequence
  Chemically synthesized
ggcauuuucucuuccucuucuuc

SEQ ID NO: 49404 - RNA, 23 nt, Artificial Sequence
  Chemically synthesized
gcauuuucucuuccucuucuuca

SEQ ID NO: 49405 - RNA, 23 nt, Artificial Sequence
  Chemically synthesized
cauuuucucuuccucuucuucac

SEQ ID NO: 49406 - RNA, 23 nt, Artificial Sequence
  Chemically synthesized
auuuucucuuccucuucuucacg

SEQ ID NO: 49407 - RNA, 23 nt, Artificial Sequence
  Chemically synthesized
uuuucucuuccucuucuucacgg

SEQ ID NO: 49408 - RNA, 23 nt, Artificial Sequence
  Chemically synthesized
gggagucagcuucuucuccuuca

SEQ ID NO: 49409 - RNA, 23 nt, Artificial Sequence
  Chemically synthesized
ggagucagcuucuucuccuucag

SEQ ID NO: 49410 - RNA, 23 nt, Artificial Sequence
  Chemically synthesized
gagucagcuucuucuccuucagu

SEQ ID NO: 49411 - RNA, 23 nt, Artificial Sequence
  Chemically synthesized
agucagcuucuucuccuucaguu

SEQ ID NO: 49412 - RNA, 23 nt, Artificial Sequence
  Chemically synthesized
gucagcuucuucuccuucaguuu

SEQ ID NO: 49413 - RNA, 23 nt, Artificial Sequence
  Chemically synthesized
uaaucuucuuguccagcuguauc

SEQ ID NO: 49414 - RNA, 23 nt, Artificial Sequence
  Chemically synthesized
gaguuaaguuguacagaacaucg

SEQ ID NO: 49415 - RNA, 23 nt, Artificial Sequence
  Chemically synthesized
aguuaaguuguacagaacaucgu

SEQ ID NO: 49416 - RNA, 23 nt, Artificial Sequence
  Chemically synthesized
guuaaguuguacagaacaucguc

SEQ ID NO: 49417 - RNA, 23 nt, Artificial Sequence
  Chemically synthesized
uuaaguuguacagaacaucguca

SEQ ID NO: 49418 - RNA, 23 nt, Artificial Sequence
  Chemically synthesized
auuuuuacaccuaguuacuagaa

SEQ ID NO: 49419 - RNA, 23 nt, Artificial Sequence
  Chemically synthesized
uuuuuacaccuaguuacuagaaa

SEQ ID NO: 49420 - RNA, 23 nt, Artificial Sequence
  Chemically synthesized
uuuuacaccuaguuacuagaaaa

SEQ ID NO: 49421 - RNA, 23 nt, Artificial Sequence
  Chemically synthesized
aggaaaacugcagagaaacagga

SEQ ID NO: 49422 - RNA, 23 nt, Artificial Sequence
  Chemically synthesized
ggaaaacugcagagaaacaggaa

SEQ ID NO: 49423 - RNA, 23 nt, Artificial Sequence
  Chemically synthesized
gaaaacugcagagaaacaggaaa

SEQ ID NO: 49424 - RNA, 23 nt, Artificial Sequence
  Chemically synthesized
aaaacugcagagaaacaggaaau

SEQ ID NO: 49425 - RNA, 23 nt, Artificial Sequence
  Chemically synthesized
aaacugcagagaaacaggaaaug

SEQ ID NO: 49426 - RNA, 23 nt, Artificial Sequence
  Chemically synthesized
gaugaauuaaaugcccaauuugg

SEQ ID NO: 49427 - RNA, 23 nt, Artificial Sequence
  Chemically synthesized
ucuccaggaaaugcauugguugu

SEQ ID NO: 49428 - RNA, 23 nt, Artificial Sequence
  Chemically synthesized
ucacaaagacugauccaaagagc

SEQ ID NO: 49429 - RNA, 23 nt, Artificial Sequence
  Chemically synthesized
uuuuggcaacucuuaaucugaac

SEQ ID NO: 49430 - RNA, 23 nt, Artificial Sequence
  Chemically synthesized
uuuggcaacucuuaaucugaaca

SEQ ID NO: 49431 - RNA, 23 nt, Artificial Sequence
  Chemically synthesized
uaaggcuuuaagaaggcuuguca

SEQ ID NO: 49432 - RNA, 23 nt, Artificial Sequence
  Chemically synthesized
aaggcuuuaagaaggcuugucau

SEQ ID NO: 49433 - RNA, 23 nt, Artificial Sequence
  Chemically synthesized
acaacagcaggcauuuucucuuc

SEQ ID NO: 49434 - RNA, 23 nt, Artificial Sequence
  Chemically synthesized
caggcauuuucucuuccucuucu

SEQ ID NO: 49435 - RNA, 23 nt, Artificial Sequence
  Chemically synthesized
ucuucuccuucaguuucucgauc

SEQ ID NO: 49436 - RNA, 23 nt, Artificial Sequence
  Chemically synthesized
cuucuccuucaguuucucgaucg

SEQ ID NO: 49437 - RNA, 23 nt, Artificial Sequence
  Chemically synthesized
uucuccuucaguuucucgaucgu

SEQ ID NO: 49438 - RNA, 23 nt, Artificial Sequence
  Chemically synthesized
gagaaacaggaaauggccgcucc

SEQ ID NO: 49439 - RNA, 23 nt, Artificial Sequence
  Chemically synthesized
agaaacaggaaauggccgcucca

SEQ ID NO: 49440 - RNA, 23 nt, Artificial Sequence
  Chemically synthesized
gaacaucgucagcacuagcacag

SEQ ID NO: 49441 - RNA, 23 nt, Artificial Sequence
  Chemically synthesized
aacaucgucagcacuagcacagu

SEQ ID NO: 49442 - RNA, 23 nt, Artificial Sequence
  Chemically synthesized
acaucgucagcacuagcacaguu

SEQ ID NO: 49443 - RNA, 23 nt, Artificial Sequence
  Chemically synthesized
caucgucagcacuagcacaguuu

SEQ ID NO: 49444 - RNA, 23 nt, Artificial Sequence
  Chemically synthesized
aucgucagcacuagcacaguuua

SEQ ID NO: 49445 - RNA, 23 nt, Artificial Sequence
  Chemically synthesized
uuuauaauacaaggaggcauauu

SEQ ID NO: 49446 - RNA, 23 nt, Artificial Sequence
  Chemically synthesized
aagacaguagggauauauucucc

SEQ ID NO: 49447 - RNA, 23 nt, Artificial Sequence
  Chemically synthesized
agacaguagggauauauucucca

SEQ ID NO: 49448 - RNA, 23 nt, Artificial Sequence
  Chemically synthesized
gacaguagggauauauucuccag

SEQ ID NO: 49449 - RNA, 23 nt, Artificial Sequence
  Chemically synthesized
caccacacacuugauggccugca

SEQ ID NO: 49450 - RNA, 23 nt, Artificial Sequence
  Chemically synthesized
accacacacuugauggccugcau

SEQ ID NO: 49451 - RNA, 23 nt, Artificial Sequence
  Chemically synthesized
ccacacacuugauggccugcauc

SEQ ID NO: 49452 - RNA, 23 nt, Artificial Sequence
  Chemically synthesized
cacacacuugauggccugcauca

SEQ ID NO: 49453 - RNA, 23 nt, Artificial Sequence
  Chemically synthesized
acacacuugauggccugcaucag

SEQ ID NO: 49454 - RNA, 23 nt, Artificial Sequence
  Chemically synthesized
ucuccuucaguuucucgaucgug

SEQ ID NO: 49455 - RNA, 23 nt, Artificial Sequence
  Chemically synthesized
uuccaucuaccauaacauuggca

SEQ ID NO: 49456 - RNA, 23 nt, Artificial Sequence
  Chemically synthesized
uccaucuaccauaacauuggcag

SEQ ID NO: 49457 - RNA, 23 nt, Artificial Sequence
  Chemically synthesized
ccaucuaccauaacauuggcaga

SEQ ID NO: 49458 - RNA, 23 nt, Artificial Sequence
  Chemically synthesized
caucuaccauaacauuggcagaa

SEQ ID NO: 49459 - RNA, 23 nt, Artificial Sequence
  Chemically synthesized
aucuaccauaacauuggcagaau

SEQ ID NO: 49460 - RNA, 23 nt, Artificial Sequence
  Chemically synthesized
aauugucaaagacaguagggaua

SEQ ID NO: 49461 - RNA, 23 nt, Artificial Sequence
  Chemically synthesized
acgcuucauucgggaggcuguuc

SEQ ID NO: 49462 - RNA, 23 nt, Artificial Sequence
  Chemically synthesized
cgcuucauucgggaggcuguucu

SEQ ID NO: 49463 - RNA, 23 nt, Artificial Sequence
  Chemically synthesized
gcuucauucgggaggcuguucug

SEQ ID NO: 49464 - RNA, 23 nt, Artificial Sequence
  Chemically synthesized
cuucauucgggaggcuguucugc

SEQ ID NO: 49465 - RNA, 23 nt, Artificial Sequence
  Chemically synthesized
uucauucgggaggcuguucugcu

SEQ ID NO: 49466 - RNA, 23 nt, Artificial Sequence
  Chemically synthesized
aacugcagaagcuaccgucuucu

SEQ ID NO: 49467 - RNA, 23 nt, Artificial Sequence
  Chemically synthesized
guacaaagguuccaagggacagg

SEQ ID NO: 49468 - RNA, 23 nt, Artificial Sequence
  Chemically synthesized
uacaaagguuccaagggacagga

SEQ ID NO: 49469 - RNA, 23 nt, Artificial Sequence
  Chemically synthesized
acaaagguuccaagggacaggac

SEQ ID NO: 49470 - RNA, 23 nt, Artificial Sequence
  Chemically synthesized
caaagguuccaagggacaggacc

SEQ ID NO: 49471 - RNA, 23 nt, Artificial Sequence
  Chemically synthesized
aaagguuccaagggacaggacca

SEQ ID NO: 49472 - RNA, 23 nt, Artificial Sequence
  Chemically synthesized
ccagauucaccgguuuuccaucu

SEQ ID NO: 49473 - RNA, 23 nt, Artificial Sequence
  Chemically synthesized
aacauaaugcuaauugcauuagc

SEQ ID NO: 49474 - RNA, 23 nt, Artificial Sequence
  Chemically synthesized
acauaaugcuaauugcauuagca

SEQ ID NO: 49475 - RNA, 23 nt, Artificial Sequence
  Chemically synthesized
cauaaugcuaauugcauuagcaa

SEQ ID NO: 49476 - RNA, 23 nt, Artificial Sequence
  Chemically synthesized
auaaugcuaauugcauuagcaaa

SEQ ID NO: 49477 - RNA, 23 nt, Artificial Sequence
  Chemically synthesized
uaaugcuaauugcauuagcaaaa

SEQ ID NO: 49478 - RNA, 23 nt, Artificial Sequence
  Chemically synthesized
cucacagacccaaaggaacauca

SEQ ID NO: 49479 - RNA, 23 nt, Artificial Sequence
  Chemically synthesized
ucacagacccaaaggaacaucaa

SEQ ID NO: 49480 - RNA, 23 nt, Artificial Sequence
  Chemically synthesized
cacagacccaaaggaacaucaau

SEQ ID NO: 49481 - RNA, 23 nt, Artificial Sequence
  Chemically synthesized
acagacccaaaggaacaucaaua

SEQ ID NO: 49482 - RNA, 23 nt, Artificial Sequence
  Chemically synthesized
auuggucaagugacagugucggu

SEQ ID NO: 49483 - RNA, 23 nt, Artificial Sequence
  Chemically synthesized
uuggucaagugacagugucggua

SEQ ID NO: 49484 - RNA, 23 nt, Artificial Sequence
  Chemically synthesized
auugucaaagacaguagggauau

SEQ ID NO: 49485 - RNA, 23 nt, Artificial Sequence
  Chemically synthesized
caaaaucuccgcaaaagcugguc

SEQ ID NO: 49486 - RNA, 23 nt, Artificial Sequence
  Chemically synthesized
aaaaucuccgcaaaagcugguca

SEQ ID NO: 49487 - RNA, 23 nt, Artificial Sequence
  Chemically synthesized
aaaucuccgcaaaagcuggucag

SEQ ID NO: 49488 - RNA, 23 nt, Artificial Sequence
  Chemically synthesized
aaucuccgcaaaagcuggucaga

SEQ ID NO: 49489 - RNA, 23 nt, Artificial Sequence
  Chemically synthesized
aucuccgcaaaagcuggucagaa

SEQ ID NO: 49490 - RNA, 23 nt, Artificial Sequence
  Chemically synthesized
auccaaagagcugagcugcuacg

SEQ ID NO: 49491 - RNA, 23 nt, Artificial Sequence
  Chemically synthesized
uccaaagagcugagcugcuacgc

SEQ ID NO: 49492 - RNA, 23 nt, Artificial Sequence
  Chemically synthesized
ccaaagagcugagcugcuacgcu

SEQ ID NO: 49493 - RNA, 23 nt, Artificial Sequence
  Chemically synthesized
caaagagcugagcugcuacgcuc

SEQ ID NO: 49494 - RNA, 23 nt, Artificial Sequence
  Chemically synthesized
aaagagcugagcugcuacgcuca

SEQ ID NO: 49495 - RNA, 23 nt, Artificial Sequence
  Chemically synthesized
uaacucacuggugaguucaaugg

SEQ ID NO: 49496 - RNA, 23 nt, Artificial Sequence
  Chemically synthesized
aacucacuggugaguucaauggc

SEQ ID NO: 49497 - RNA, 23 nt, Artificial Sequence
  Chemically synthesized
acucacuggugaguucaauggca

SEQ ID NO: 49498 - RNA, 23 nt, Artificial Sequence
  Chemically synthesized
cucacuggugaguucaauggcaa

SEQ ID NO: 49499 - RNA, 23 nt, Artificial Sequence
  Chemically synthesized
ucacuggugaguucaauggcaac

SEQ ID NO: 49500 - RNA, 23 nt, Artificial Sequence
  Chemically synthesized
acuggugaguucaauggcaacgc

SEQ ID NO: 49501 - RNA, 23 nt, Artificial Sequence
  Chemically synthesized
cuggugaguucaauggcaacgcu

SEQ ID NO: 49502 - RNA, 23 nt, Artificial Sequence
  Chemically synthesized
uggugaguucaauggcaacgcuu

SEQ ID NO: 49503 - RNA, 23 nt, Artificial Sequence
  Chemically synthesized
ggugaguucaauggcaacgcuuc

SEQ ID NO: 49504 - RNA, 23 nt, Artificial Sequence
  Chemically synthesized
gugaguucaauggcaacgcuuca

SEQ ID NO: 49505 - RNA, 23 nt, Artificial Sequence
  Chemically synthesized
aggcuguucugcuuuacgcaucu

SEQ ID NO: 49506 - RNA, 23 nt, Artificial Sequence
  Chemically synthesized
ggcuguucugcuuuacgcaucug

SEQ ID NO: 49507 - RNA, 23 nt, Artificial Sequence
  Chemically synthesized
uuaaucuguaacaaaaaguuggc

SEQ ID NO: 49508 - RNA, 23 nt, Artificial Sequence
  Chemically synthesized
uaaucuguaacaaaaaguuggca

SEQ ID NO: 49509 - RNA, 23 nt, Artificial Sequence
  Chemically synthesized
aaucuguaacaaaaaguuggcau

SEQ ID NO: 49510 - RNA, 23 nt, Artificial Sequence
  Chemically synthesized
aucuguaacaaaaaguuggcauu

SEQ ID NO: 49511 - RNA, 23 nt, Artificial Sequence
  Chemically synthesized
ucuguaacaaaaaguuggcauug

SEQ ID NO: 49512 - RNA, 23 nt, Artificial Sequence
  Chemically synthesized
gucaaacacugucuugaggccuc

SEQ ID NO: 49513 - RNA, 23 nt, Artificial Sequence
  Chemically synthesized
ucaaacacugucuugaggccucg

SEQ ID NO: 49514 - RNA, 23 nt, Artificial Sequence
  Chemically synthesized
caaacacugucuugaggccucgc

SEQ ID NO: 49515 - RNA, 23 nt, Artificial Sequence
  Chemically synthesized
aaacacugucuugaggccucgcu

SEQ ID NO: 49516 - RNA, 23 nt, Artificial Sequence
  Chemically synthesized
aacacugucuugaggccucgcug

SEQ ID NO: 49517 - RNA, 23 nt, Artificial Sequence
  Chemically synthesized
aaguuuaguucccacuaggauga

SEQ ID NO: 49518 - RNA, 23 nt, Artificial Sequence
  Chemically synthesized
aguuuaguucccacuaggaugau

SEQ ID NO: 49519 - RNA, 23 nt, Artificial Sequence
  Chemically synthesized
guuuaguucccacuaggaugaug

SEQ ID NO: 49520 - RNA, 23 nt, Artificial Sequence
  Chemically synthesized
uuuaguucccacuaggaugaugg

SEQ ID NO: 49521 - RNA, 23 nt, Artificial Sequence
  Chemically synthesized
uuaguucccacuaggaugauggg

SEQ ID NO: 49522 - RNA, 23 nt, Artificial Sequence
  Chemically synthesized
gaugcaggacucacaagggaaaa

SEQ ID NO: 49523 - RNA, 23 nt, Artificial Sequence
  Chemically synthesized
augcaggacucacaagggaaaag

SEQ ID NO: 49524 - RNA, 23 nt, Artificial Sequence
  Chemically synthesized
acaugcaaaacauaaugcuaauu

SEQ ID NO: 49525 - RNA, 23 nt, Artificial Sequence
  Chemically synthesized
ugaguuaaguuguacagaacauc

SEQ ID NO: 49526 - RNA, 23 nt, Artificial Sequence
  Chemically synthesized
gucaguauuggucaagugacagu

SEQ ID NO: 49527 - RNA, 23 nt, Artificial Sequence
  Chemically synthesized
aggaaagcacuuauuagcucuga

SEQ ID NO: 49528 - RNA, 23 nt, Artificial Sequence
  Chemically synthesized
ggaaagcacuuauuagcucugaa

SEQ ID NO: 49529 - RNA, 23 nt, Artificial Sequence
  Chemically synthesized
gaaagcacuuauuagcucugaau

SEQ ID NO: 49530 - RNA, 23 nt, Artificial Sequence
  Chemically synthesized
aaagcacuuauuagcucugaaua

SEQ ID NO: 49531 - RNA, 23 nt, Artificial Sequence
  Chemically synthesized
gaaacaggaaauggccgcuccac

SEQ ID NO: 49532 - RNA, 23 nt, Artificial Sequence
  Chemically synthesized
aaacaggaaauggccgcuccacu

SEQ ID NO: 49533 - RNA, 23 nt, Artificial Sequence
  Chemically synthesized
uguaguguaaaucuccacuucgu

SEQ ID NO: 49534 - RNA, 23 nt, Artificial Sequence
  Chemically synthesized
guaguguaaaucuccacuucgua

SEQ ID NO: 49535 - RNA, 23 nt, Artificial Sequence
  Chemically synthesized
uaguguaaaucuccacuucguau

SEQ ID NO: 49536 - RNA, 23 nt, Artificial Sequence
  Chemically synthesized
uuggcaacucuuaaucugaacaa

SEQ ID NO: 49537 - RNA, 23 nt, Artificial Sequence
  Chemically synthesized
ucaguaggcaaguuuuaccuaca

SEQ ID NO: 49538 - RNA, 23 nt, Artificial Sequence
  Chemically synthesized
caguaggcaaguuuuaccuacag

SEQ ID NO: 49539 - RNA, 23 nt, Artificial Sequence
  Chemically synthesized
auuaaucuguaacaaaaaguugg

SEQ ID NO: 49540 - RNA, 23 nt, Artificial Sequence
  Chemically synthesized
aagguuccaagggacaggaccaa

SEQ ID NO: 49541 - RNA, 23 nt, Artificial Sequence
  Chemically synthesized
uaguucccacuaggaugauggga

SEQ ID NO: 49542 - RNA, 23 nt, Artificial Sequence
  Chemically synthesized
aguucccacuaggaugaugggag

SEQ ID NO: 49543 - RNA, 23 nt, Artificial Sequence
  Chemically synthesized
guucccacuaggaugaugggagu

SEQ ID NO: 49544 - RNA, 23 nt, Artificial Sequence
  Chemically synthesized
aaagcugaggaaaacugcagaga

SEQ ID NO: 49545 - RNA, 23 nt, Artificial Sequence
  Chemically synthesized
aagcugaggaaaacugcagagaa

SEQ ID NO: 49546 - RNA, 23 nt, Artificial Sequence
  Chemically synthesized
ucuuguccagcuguaucccauaa

SEQ ID NO: 49547 - RNA, 23 nt, Artificial Sequence
  Chemically synthesized
cuguauucucgccagugaguuaa

SEQ ID NO: 49548 - RNA, 23 nt, Artificial Sequence
  Chemically synthesized
uguauucucgccagugaguuaag

SEQ ID NO: 49549 - RNA, 23 nt, Artificial Sequence
  Chemically synthesized
guauucucgccagugaguuaagu

SEQ ID NO: 49550 - RNA, 23 nt, Artificial Sequence
  Chemically synthesized
uauucucgccagugaguuaaguu

SEQ ID NO: 49551 - RNA, 23 nt, Artificial Sequence
  Chemically synthesized
uggucaagugacagugucgguaa

SEQ ID NO: 49552 - RNA, 23 nt, Artificial Sequence
  Chemically synthesized
ucgguaaucuggcaagacaguga

SEQ ID NO: 49553 - RNA, 23 nt, Artificial Sequence
  Chemically synthesized
cgguaaucuggcaagacagugau

SEQ ID NO: 49554 - RNA, 23 nt, Artificial Sequence
  Chemically synthesized
gguaaucuggcaagacagugaug

SEQ ID NO: 49555 - RNA, 23 nt, Artificial Sequence
  Chemically synthesized
guaaucuggcaagacagugaugu

SEQ ID NO: 49556 - RNA, 23 nt, Artificial Sequence
  Chemically synthesized
uaaucuggcaagacagugauguu

SEQ ID NO: 49557 - RNA, 23 nt, Artificial Sequence
  Chemically synthesized
uugucaaagacaguagggauaua

SEQ ID NO: 49558 - RNA, 23 nt, Artificial Sequence
  Chemically synthesized
cccgugacacuuucauuccuugu

SEQ ID NO: 49559 - RNA, 23 nt, Artificial Sequence
  Chemically synthesized
ccgugacacuuucauuccuugua

SEQ ID NO: 49560 - RNA, 23 nt, Artificial Sequence
  Chemically synthesized
uugguuguguaacugaucaguag

SEQ ID NO: 49561 - RNA, 23 nt, Artificial Sequence
  Chemically synthesized
ugguuguguaacugaucaguagg

SEQ ID NO: 49562 - RNA, 23 nt, Artificial Sequence
  Chemically synthesized
gguuguguaacugaucaguaggc

SEQ ID NO: 49563 - RNA, 23 nt, Artificial Sequence
  Chemically synthesized
guuguguaacugaucaguaggca

SEQ ID NO: 49564 - RNA, 23 nt, Artificial Sequence
  Chemically synthesized
uuguguaacugaucaguaggcaa

SEQ ID NO: 49565 - RNA, 23 nt, Artificial Sequence
  Chemically synthesized
uguguaacugaucaguaggcaag

SEQ ID NO: 49566 - RNA, 23 nt, Artificial Sequence
  Chemically synthesized
guguaacugaucaguaggcaagu

SEQ ID NO: 49567 - RNA, 23 nt, Artificial Sequence
  Chemically synthesized
uaggagagcaagugucugcaccu

SEQ ID NO: 49568 - RNA, 23 nt, Artificial Sequence
  Chemically synthesized
uaauagaaugugagucugaacuc

SEQ ID NO: 49569 - RNA, 23 nt, Artificial Sequence
  Chemically synthesized
aauagaaugugagucugaacucu

SEQ ID NO: 49570 - RNA, 23 nt, Artificial Sequence
  Chemically synthesized
uuacugauugguucaaaaaaugg

SEQ ID NO: 49571 - RNA, 23 nt, Artificial Sequence
  Chemically synthesized
aaaaguuggcauugagugcgaag

SEQ ID NO: 49572 - RNA, 23 nt, Artificial Sequence
  Chemically synthesized
aaaguuggcauugagugcgaagg

SEQ ID NO: 49573 - RNA, 23 nt, Artificial Sequence
  Chemically synthesized
aaguuggcauugagugcgaaggc

SEQ ID NO: 49574 - RNA, 23 nt, Artificial Sequence
  Chemically synthesized
aaucuccuuagccauggcuagac

SEQ ID NO: 49575 - RNA, 23 nt, Artificial Sequence
  Chemically synthesized
aucuccuuagccauggcuagacc

SEQ ID NO: 49576 - RNA, 23 nt, Artificial Sequence
  Chemically synthesized
ucuccuuagccauggcuagaccc

SEQ ID NO: 49577 - RNA, 23 nt, Artificial Sequence
  Chemically synthesized
cuccuuagccauggcuagacccu

SEQ ID NO: 49578 - RNA, 23 nt, Artificial Sequence
  Chemically synthesized
uccuuagccauggcuagacccug

SEQ ID NO: 49579 - RNA, 23 nt, Artificial Sequence
  Chemically synthesized
ucaaguuuaguucccacuaggau

SEQ ID NO: 49580 - RNA, 23 nt, Artificial Sequence
  Chemically synthesized
caaguuuaguucccacuaggaug

SEQ ID NO: 49581 - RNA, 23 nt, Artificial Sequence
  Chemically synthesized
cuuguccagcuguaucccauaag

SEQ ID NO: 49582 - RNA, 23 nt, Artificial Sequence
  Chemically synthesized
uuguccagcuguaucccauaagc

SEQ ID NO: 49583 - RNA, 23 nt, Artificial Sequence
  Chemically synthesized
aaugcuaauugcauuagcaaaag

SEQ ID NO: 49584 - RNA, 23 nt, Artificial Sequence
  Chemically synthesized
augcuaauugcauuagcaaaaga

SEQ ID NO: 49585 - RNA, 23 nt, Artificial Sequence
  Chemically synthesized
ugcuaauugcauuagcaaaagau

SEQ ID NO: 49586 - RNA, 23 nt, Artificial Sequence
  Chemically synthesized
gcuaauugcauuagcaaaagauc

SEQ ID NO: 49587 - RNA, 23 nt, Artificial Sequence
  Chemically synthesized
cuaauugcauuagcaaaagauca

SEQ ID NO: 49588 - RNA, 23 nt, Artificial Sequence
  Chemically synthesized
ugaggaaaacugcagagaaacag

SEQ ID NO: 49589 - RNA, 23 nt, Artificial Sequence
  Chemically synthesized
gaggaaaacugcagagaaacagg

SEQ ID NO: 49590 - RNA, 23 nt, Artificial Sequence
  Chemically synthesized
uuuacaccuaguuacuagaaaac

SEQ ID NO: 49591 - RNA, 23 nt, Artificial Sequence
  Chemically synthesized
aagcacuuauuagcucugaauaa

SEQ ID NO: 49592 - RNA, 23 nt, Artificial Sequence
  Chemically synthesized
agggauauauucuccaggaaaug

SEQ ID NO: 49593 - RNA, 23 nt, Artificial Sequence
  Chemically synthesized
ucaucuacugcauuugacagaaa

SEQ ID NO: 49594 - RNA, 23 nt, Artificial Sequence
  Chemically synthesized
caucuacugcauuugacagaaau

SEQ ID NO: 49595 - RNA, 23 nt, Artificial Sequence
  Chemically synthesized
aucuacugcauuugacagaaauu

SEQ ID NO: 49596 - RNA, 23 nt, Artificial Sequence
  Chemically synthesized
cuccaggaaaugcauugguugug

SEQ ID NO: 49597 - RNA, 23 nt, Artificial Sequence
  Chemically synthesized
ucaaaaucuccgcaaaagcuggu

SEQ ID NO: 49598 - RNA, 23 nt, Artificial Sequence
  Chemically synthesized
ugcauugguuguguaacugauca

SEQ ID NO: 49599 - RNA, 23 nt, Artificial Sequence
  Chemically synthesized
gcauugguuguguaacugaucag

SEQ ID NO: 49600 - RNA, 23 nt, Artificial Sequence
  Chemically synthesized
cauugguuguguaacugaucagu

SEQ ID NO: 49601 - RNA, 23 nt, Artificial Sequence
  Chemically synthesized
auugguuguguaacugaucagua

SEQ ID NO: 49602 - RNA, 23 nt, Artificial Sequence
  Chemically synthesized
ucauucgggaggcuguucugcuu

SEQ ID NO: 49603 - RNA, 23 nt, Artificial Sequence
  Chemically synthesized
cgggaggcuguucugcuuuacgc

SEQ ID NO: 49604 - RNA, 23 nt, Artificial Sequence
  Chemically synthesized
gggaggcuguucugcuuuacgca

SEQ ID NO: 49605 - RNA, 23 nt, Artificial Sequence
  Chemically synthesized
ggaggcuguucugcuuuacgcau

SEQ ID NO: 49606 - RNA, 23 nt, Artificial Sequence
  Chemically synthesized
gaggcuguucugcuuuacgcauc

SEQ ID NO: 49607 - RNA, 23 nt, Artificial Sequence
  Chemically synthesized
uguaacugaucaguaggcaaguu

SEQ ID NO: 49608 - RNA, 23 nt, Artificial Sequence
  Chemically synthesized
guaacugaucaguaggcaaguuu

SEQ ID NO: 49609 - RNA, 23 nt, Artificial Sequence
  Chemically synthesized
uaacugaucaguaggcaaguuuu

SEQ ID NO: 49610 - RNA, 23 nt, Artificial Sequence
  Chemically synthesized
cgcuuuugaaaaauaaggcuuua

SEQ ID NO: 49611 - RNA, 23 nt, Artificial Sequence
  Chemically synthesized
aaggcuugucauuuuagggcuaa

SEQ ID NO: 49612 - RNA, 23 nt, Artificial Sequence
  Chemically synthesized
aggcuugucauuuuagggcuaaa

SEQ ID NO: 49613 - RNA, 23 nt, Artificial Sequence
  Chemically synthesized
cuuccucuucuucacgggaggcg

SEQ ID NO: 49614 - RNA, 23 nt, Artificial Sequence
  Chemically synthesized
uuccucuucuucacgggaggcgg

SEQ ID NO: 49615 - RNA, 23 nt, Artificial Sequence
  Chemically synthesized
aauucuucauuagaggaaauagc

SEQ ID NO: 49616 - RNA, 23 nt, Artificial Sequence
  Chemically synthesized
gaggaaauagcaguucuguucaa

SEQ ID NO: 49617 - RNA, 23 nt, Artificial Sequence
  Chemically synthesized
aggaaauagcaguucuguucaaa

SEQ ID NO: 49618 - RNA, 23 nt, Artificial Sequence
  Chemically synthesized
ggaaauagcaguucuguucaaaa

SEQ ID NO: 49619 - RNA, 23 nt, Artificial Sequence
  Chemically synthesized
gaaauagcaguucuguucaaaau

SEQ ID NO: 49620 - RNA, 23 nt, Artificial Sequence
  Chemically synthesized
aaauagcaguucuguucaaaauc

SEQ ID NO: 49621 - RNA, 23 nt, Artificial Sequence
  Chemically synthesized
uccaggaaaugcauugguugugu

SEQ ID NO: 49622 - RNA, 23 nt, Artificial Sequence
  Chemically synthesized
ccaggaaaugcauugguugugua

SEQ ID NO: 49623 - RNA, 23 nt, Artificial Sequence
  Chemically synthesized
caggaaaugcauugguuguguaa

SEQ ID NO: 49624 - RNA, 23 nt, Artificial Sequence
  Chemically synthesized
aggaaaugcauugguuguguaac

SEQ ID NO: 49625 - RNA, 23 nt, Artificial Sequence
  Chemically synthesized
ucuccgcaaaagcuggucagaaa

SEQ ID NO: 49626 - RNA, 23 nt, Artificial Sequence
  Chemically synthesized
aggcuuuaagaaggcuugucauu

SEQ ID NO: 49627 - RNA, 23 nt, Artificial Sequence
  Chemically synthesized
ggcuuuaagaaggcuugucauuu

SEQ ID NO: 49628 - RNA, 23 nt, Artificial Sequence
  Chemically synthesized
uagaaugugagucugaacucuua

SEQ ID NO: 49629 - RNA, 23 nt, Artificial Sequence
  Chemically synthesized
agaaugugagucugaacucuuac

SEQ ID NO: 49630 - RNA, 23 nt, Artificial Sequence
  Chemically synthesized
gaaugugagucugaacucuuaca

SEQ ID NO: 49631 - RNA, 23 nt, Artificial Sequence
  Chemically synthesized
aaugugagucugaacucuuacau

SEQ ID NO: 49632 - RNA, 23 nt, Artificial Sequence
  Chemically synthesized
augugagucugaacucuuacauu

SEQ ID NO: 49633 - RNA, 23 nt, Artificial Sequence
  Chemically synthesized
ugcggauaggugaugggagucag

SEQ ID NO: 49634 - RNA, 23 nt, Artificial Sequence
  Chemically synthesized
gcggauaggugaugggagucagc

SEQ ID NO: 49635 - RNA, 23 nt, Artificial Sequence
  Chemically synthesized
cggauaggugaugggagucagcu

SEQ ID NO: 49636 - RNA, 23 nt, Artificial Sequence
  Chemically synthesized
ggauaggugaugggagucagcuu

SEQ ID NO: 49637 - RNA, 23 nt, Artificial Sequence
  Chemically synthesized
gauaggugaugggagucagcuuc

SEQ ID NO: 49638 - RNA, 23 nt, Artificial Sequence
  Chemically synthesized
auaggugaugggagucagcuucu

SEQ ID NO: 49639 - RNA, 23 nt, Artificial Sequence
  Chemically synthesized
ucuaccauaacauuggcagaaua

SEQ ID NO: 49640 - RNA, 23 nt, Artificial Sequence
  Chemically synthesized
cuaccauaacauuggcagaauaa

SEQ ID NO: 49641 - RNA, 23 nt, Artificial Sequence
  Chemically synthesized
uaccauaacauuggcagaauaau

SEQ ID NO: 49642 - RNA, 23 nt, Artificial Sequence
  Chemically synthesized
uacuaaguuagcgacuaacagaa

SEQ ID NO: 49643 - RNA, 23 nt, Artificial Sequence
  Chemically synthesized
acuaaguuagcgacuaacagaac

SEQ ID NO: 49644 - RNA, 23 nt, Artificial Sequence
  Chemically synthesized
cuaaguuagcgacuaacagaaca

SEQ ID NO: 49645 - RNA, 23 nt, Artificial Sequence
  Chemically synthesized
aguguaaaucuccacuucguauu

SEQ ID NO: 49646 - RNA, 23 nt, Artificial Sequence
  Chemically synthesized
guguaaaucuccacuucguauuu

SEQ ID NO: 49647 - RNA, 23 nt, Artificial Sequence
  Chemically synthesized
agaggaaauagcaguucuguuca

SEQ ID NO: 49648 - RNA, 23 nt, Artificial Sequence
  Chemically synthesized
cacuggugaguucaauggcaacg

SEQ ID NO: 49649 - RNA, 23 nt, Artificial Sequence
  Chemically synthesized
uaccgucuucucaaagacgaagg

SEQ ID NO: 49650 - RNA, 23 nt, Artificial Sequence
  Chemically synthesized
accgucuucucaaagacgaaggu

SEQ ID NO: 49651 - RNA, 23 nt, Artificial Sequence
  Chemically synthesized
ccgucuucucaaagacgaagguc

SEQ ID NO: 49652 - RNA, 23 nt, Artificial Sequence
  Chemically synthesized
cgucuucucaaagacgaaggucu

SEQ ID NO: 49653 - RNA, 23 nt, Artificial Sequence
  Chemically synthesized
gucuucucaaagacgaaggucuu

SEQ ID NO: 49654 - RNA, 23 nt, Artificial Sequence
  Chemically synthesized
ucuucucaaagacgaaggucuuu

SEQ ID NO: 49655 - RNA, 23 nt, Artificial Sequence
  Chemically synthesized
cuucucaaagacgaaggucuuug

SEQ ID NO: 49656 - RNA, 23 nt, Artificial Sequence
  Chemically synthesized
uucucaaagacgaaggucuuugc

SEQ ID NO: 49657 - RNA, 23 nt, Artificial Sequence
  Chemically synthesized
ucucaaagacgaaggucuuugca

SEQ ID NO: 49658 - RNA, 23 nt, Artificial Sequence
  Chemically synthesized
cucaaagacgaaggucuuugcaa

SEQ ID NO: 49659 - RNA, 23 nt, Artificial Sequence
  Chemically synthesized
ucaaagacgaaggucuuugcaaa

SEQ ID NO: 49660 - RNA, 23 nt, Artificial Sequence
  Chemically synthesized
caaagacgaaggucuuugcaaag

SEQ ID NO: 49661 - RNA, 23 nt, Artificial Sequence
  Chemically synthesized
gcuuuugaaaaauaaggcuuuaa

SEQ ID NO: 49662 - RNA, 23 nt, Artificial Sequence
  Chemically synthesized
caaucuccuuagccauggcuaga

SEQ ID NO: 49663 - RNA, 23 nt, Artificial Sequence
  Chemically synthesized
ucccacuaggaugaugggagugu

SEQ ID NO: 49664 - RNA, 23 nt, Artificial Sequence
  Chemically synthesized
cccacuaggaugaugggaguguu

SEQ ID NO: 49665 - RNA, 23 nt, Artificial Sequence
  Chemically synthesized
uggcaagacagugauguuaagaa

SEQ ID NO: 49666 - RNA, 23 nt, Artificial Sequence
  Chemically synthesized
ggcaagacagugauguuaagaag

SEQ ID NO: 49667 - RNA, 23 nt, Artificial Sequence
  Chemically synthesized
gcaagacagugauguuaagaagg

SEQ ID NO: 49668 - RNA, 23 nt, Artificial Sequence
  Chemically synthesized
caagacagugauguuaagaaggu

SEQ ID NO: 49669 - RNA, 23 nt, Artificial Sequence
  Chemically synthesized
aagacagugauguuaagaagguu

SEQ ID NO: 49670 - RNA, 23 nt, Artificial Sequence
  Chemically synthesized
ggaaaugcauugguuguguaacu

SEQ ID NO: 49671 - RNA, 23 nt, Artificial Sequence
  Chemically synthesized
agcuggucagaaaacucgcuaug

SEQ ID NO: 49672 - RNA, 23 nt, Artificial Sequence
  Chemically synthesized
cgguguucucggcacaacaaugc

SEQ ID NO: 49673 - RNA, 23 nt, Artificial Sequence
  Chemically synthesized
gguguucucggcacaacaaugca

SEQ ID NO: 49674 - RNA, 23 nt, Artificial Sequence
  Chemically synthesized
guguucucggcacaacaaugcag

SEQ ID NO: 49675 - RNA, 23 nt, Artificial Sequence
  Chemically synthesized
uguucucggcacaacaaugcagu

SEQ ID NO: 49676 - RNA, 23 nt, Artificial Sequence
  Chemically synthesized
guucucggcacaacaaugcagug

SEQ ID NO: 49677 - RNA, 23 nt, Artificial Sequence
  Chemically synthesized
cuccagguauuuuacagcaccaa

SEQ ID NO: 49678 - RNA, 23 nt, Artificial Sequence
  Chemically synthesized
uccagguauuuuacagcaccaau

SEQ ID NO: 49679 - RNA, 23 nt, Artificial Sequence
  Chemically synthesized
ccagguauuuuacagcaccaauc

SEQ ID NO: 49680 - RNA, 23 nt, Artificial Sequence
  Chemically synthesized
cagguauuuuacagcaccaaucu

SEQ ID NO: 49681 - RNA, 23 nt, Artificial Sequence
  Chemically synthesized
agguauuuuacagcaccaaucuc

SEQ ID NO: 49682 - RNA, 23 nt, Artificial Sequence
  Chemically synthesized
uaccacuuugcacggacauuuuc

SEQ ID NO: 49683 - RNA, 23 nt, Artificial Sequence
  Chemically synthesized
aagggaaaagcaaauuaagaaca

SEQ ID NO: 49684 - RNA, 23 nt, Artificial Sequence
  Chemically synthesized
agggaaaagcaaauuaagaacac

SEQ ID NO: 49685 - RNA, 23 nt, Artificial Sequence
  Chemically synthesized
ugguucaaaaaaugguuuuaugg

SEQ ID NO: 49686 - RNA, 23 nt, Artificial Sequence
  Chemically synthesized
agaugaauuaaaugcccaauuug

SEQ ID NO: 49687 - RNA, 23 nt, Artificial Sequence
  Chemically synthesized
acacccacagcuaaacagaauuc

SEQ ID NO: 49688 - RNA, 23 nt, Artificial Sequence
  Chemically synthesized
acucgcuaugaaaucacaaagac

SEQ ID NO: 49689 - RNA, 23 nt, Artificial Sequence
  Chemically synthesized
auggcagguguaagagaaaggaa

SEQ ID NO: 49690 - RNA, 23 nt, Artificial Sequence
  Chemically synthesized
ugacagaaauuaaccuuuuagag

SEQ ID NO: 49691 - RNA, 23 nt, Artificial Sequence
  Chemically synthesized
uguaucccauaagcccagauuca

SEQ ID NO: 49692 - RNA, 23 nt, Artificial Sequence
  Chemically synthesized
acacuccacaauucugcaacugu

SEQ ID NO: 49693 - RNA, 23 nt, Artificial Sequence
  Chemically synthesized
cauggcagguguaagagaaagga

SEQ ID NO: 49694 - RNA, 23 nt, Artificial Sequence
  Chemically synthesized
gacagaaauuaaccuuuuagagu

SEQ ID NO: 49695 - RNA, 23 nt, Artificial Sequence
  Chemically synthesized
uaucccauaagcccagauucacc

SEQ ID NO: 49696 - RNA, 23 nt, Artificial Sequence
  Chemically synthesized
ucgucagcacuagcacaguuuac

SEQ ID NO: 49697 - RNA, 23 nt, Artificial Sequence
  Chemically synthesized
ggaaaagcuuaagaaaacauuuc

SEQ ID NO: 49698 - RNA, 23 nt, Artificial Sequence
  Chemically synthesized
gguucaaaaaaugguuuuaugga

SEQ ID NO: 49699 - RNA, 23 nt, Artificial Sequence
  Chemically synthesized
uuucucgaucgugucuuuaucau

SEQ ID NO: 49700 - RNA, 23 nt, Artificial Sequence
  Chemically synthesized
uucucggcacaacaaugcagugu

SEQ ID NO: 49701 - RNA, 23 nt, Artificial Sequence
  Chemically synthesized
aggauuuauuaagucauacaugc

SEQ ID NO: 49702 - RNA, 23 nt, Artificial Sequence
  Chemically synthesized
ucagcuucuucuccuucaguuuc

SEQ ID NO: 49703 - RNA, 23 nt, Artificial Sequence
  Chemically synthesized
uuacaccuaguuacuagaaaacu

SEQ ID NO: 49704 - RNA, 23 nt, Artificial Sequence
  Chemically synthesized
uacaccuaguuacuagaaaacua

SEQ ID NO: 49705 - RNA, 23 nt, Artificial Sequence
  Chemically synthesized
aaagcugcaacacaugauuuuua

SEQ ID NO: 49706 - RNA, 23 nt, Artificial Sequence
  Chemically synthesized
aaacuaaggaaagcacuuauuag

SEQ ID NO: 49707 - RNA, 23 nt, Artificial Sequence
  Chemically synthesized
augcaaaacauaaugcuaauugc

SEQ ID NO: 49708 - RNA, 23 nt, Artificial Sequence
  Chemically synthesized
gcaaaagaucaauguaaaaacac

SEQ ID NO: 49709 - RNA, 23 nt, Artificial Sequence
  Chemically synthesized
aaaugcauugguuguguaacuga

SEQ ID NO: 49710 - RNA, 23 nt, Artificial Sequence
  Chemically synthesized
cuuguacaauguaguguaaaucu

SEQ ID NO: 49711 - RNA, 23 nt, Artificial Sequence
  Chemically synthesized
gaauucuucauuagaggaaauag

SEQ ID NO: 49712 - RNA, 23 nt, Artificial Sequence
  Chemically synthesized
uugcacggacauuuucaaaugau

SEQ ID NO: 49713 - RNA, 23 nt, Artificial Sequence
  Chemically synthesized
aagugacagugucgguaaucugg

SEQ ID NO: 49714 - RNA, 23 nt, Artificial Sequence
  Chemically synthesized
aaacagaauucuucauuagagga

SEQ ID NO: 49715 - RNA, 23 nt, Artificial Sequence
  Chemically synthesized
aagugucugcaccuccuaacugc

SEQ ID NO: 49716 - RNA, 23 nt, Artificial Sequence
  Chemically synthesized
ugaagggucccacgcuguauucu

SEQ ID NO: 49717 - RNA, 23 nt, Artificial Sequence
  Chemically synthesized
uacugcauuugacagaaauuaac

SEQ ID NO: 49718 - RNA, 23 nt, Artificial Sequence
  Chemically synthesized
cacuucguauuuugucaaaauac

SEQ ID NO: 49719 - RNA, 23 nt, Artificial Sequence
  Chemically synthesized
aauagcaguucuguucaaaaucu

SEQ ID NO: 49720 - RNA, 23 nt, Artificial Sequence
  Chemically synthesized
aacugcagagaaacaggaaaugg

SEQ ID NO: 49721 - RNA, 23 nt, Artificial Sequence
  Chemically synthesized
uaggugaugggagucagcuucuu

SEQ ID NO: 49722 - RNA, 23 nt, Artificial Sequence
  Chemically synthesized
ucaagugacagugucgguaaucu

SEQ ID NO: 49723 - RNA, 23 nt, Artificial Sequence
  Chemically synthesized
cguauuuugucaaaauacugucu

SEQ ID NO: 49724 - RNA, 23 nt, Artificial Sequence
  Chemically synthesized
cuaaacagaauucuucauuagag

SEQ ID NO: 49725 - RNA, 23 nt, Artificial Sequence
  Chemically synthesized
uaaacagaauucuucauuagagg

SEQ ID NO: 49726 - RNA, 23 nt, Artificial Sequence
  Chemically synthesized
caugcaaaacauaaugcuaauug

SEQ ID NO: 49727 - RNA, 23 nt, Artificial Sequence
  Chemically synthesized
aaugcauugguuguguaacugau

SEQ ID NO: 49728 - RNA, 23 nt, Artificial Sequence
  Chemically synthesized
ugggagucagcuucuucuccuuc

SEQ ID NO: 49729 - RNA, 23 nt, Artificial Sequence
  Chemically synthesized
agagggucaguauuggucaagug

SEQ ID NO: 49730 - RNA, 23 nt, Artificial Sequence
  Chemically synthesized
aacagaauucuucauuagaggaa

SEQ ID NO: 49731 - RNA, 23 nt, Artificial Sequence
  Chemically synthesized
aagcccagauucaccgguuuucc

SEQ ID NO: 49732 - RNA, 23 nt, Artificial Sequence
  Chemically synthesized
gagggucaguauuggucaaguga

SEQ ID NO: 49733 - RNA, 23 nt, Artificial Sequence
  Chemically synthesized
uaacagaacaaccaguuuaaaga

SEQ ID NO: 49734 - RNA, 23 nt, Artificial Sequence
  Chemically synthesized
aagcuaccgucuucucaaagacg

SEQ ID NO: 49735 - RNA, 23 nt, Artificial Sequence
  Chemically synthesized
agggucaguauuggucaagugac

SEQ ID NO: 49736 - RNA, 23 nt, Artificial Sequence
  Chemically synthesized
cagugucgguaaucuggcaagac

SEQ ID NO: 49737 - RNA, 23 nt, Artificial Sequence
  Chemically synthesized
aacugaucaguaggcaaguuuua

SEQ ID NO: 49738 - RNA, 23 nt, Artificial Sequence
  Chemically synthesized
uaggcaaguuuuaccuacagcuc

SEQ ID NO: 49739 - RNA, 23 nt, Artificial Sequence
  Chemically synthesized
aauguuaugucgggaacacgugc

SEQ ID NO: 49740 - RNA, 23 nt, Artificial Sequence
  Chemically synthesized
caccuccuaacugcagaagcuac

SEQ ID NO: 49741 - RNA, 23 nt, Artificial Sequence
  Chemically synthesized
agcccagauucaccgguuuucca

SEQ ID NO: 49742 - RNA, 23 nt, Artificial Sequence
  Chemically synthesized
ugcaaaacauaaugcuaauugca

SEQ ID NO: 49743 - RNA, 23 nt, Artificial Sequence
  Chemically synthesized
agugacagugucgguaaucuggc

SEQ ID NO: 49744 - RNA, 23 nt, Artificial Sequence
  Chemically synthesized
aguaggcaaguuuuaccuacagc

SEQ ID NO: 49745 - RNA, 23 nt, Artificial Sequence
  Chemically synthesized
auguuaugucgggaacacgugcu

SEQ ID NO: 49746 - RNA, 23 nt, Artificial Sequence
  Chemically synthesized
cugcagaagcuaccgucuucuca

SEQ ID NO: 49747 - RNA, 23 nt, Artificial Sequence
  Chemically synthesized
cucggcacaacaaugcaguguag

SEQ ID NO: 49748 - RNA, 23 nt, Artificial Sequence
  Chemically synthesized
aguuggcauugagugcgaaggcu

SEQ ID NO: 49749 - RNA, 23 nt, Artificial Sequence
  Chemically synthesized
ucucgaucgugucuuuaucaucc

SEQ ID NO: 49750 - RNA, 23 nt, Artificial Sequence
  Chemically synthesized
uccauuacaguacaauguuaugu

SEQ ID NO: 49751 - RNA, 23 nt, Artificial Sequence
  Chemically synthesized
aaagacgaaggucuuugcaaagu

SEQ ID NO: 49752 - RNA, 23 nt, Artificial Sequence
  Chemically synthesized
aaucuggcaagacagugauguua

SEQ ID NO: 49753 - RNA, 23 nt, Artificial Sequence
  Chemically synthesized
aaggaggcauauugcucagucag

SEQ ID NO: 49754 - RNA, 23 nt, Artificial Sequence
  Chemically synthesized
agcuaccgucuucucaaagacga

SEQ ID NO: 49755 - RNA, 23 nt, Artificial Sequence
  Chemically synthesized
uacaaggaggcauauugcucagu

SEQ ID NO: 49756 - RNA, 23 nt, Artificial Sequence
  Chemically synthesized
ugugagucugaacucuuacauuu

SEQ ID NO: 49757 - RNA, 23 nt, Artificial Sequence
  Chemically synthesized
gcacggacauuuucaaaugaugc

SEQ ID NO: 49758 - RNA, 23 nt, Artificial Sequence
  Chemically synthesized
agcugcuacgcucacuccauuac

SEQ ID NO: 49759 - RNA, 23 nt, Artificial Sequence
  Chemically synthesized
acaauguuaugucgggaacacgu

SEQ ID NO: 49760 - RNA, 23 nt, Artificial Sequence
  Chemically synthesized
ugcaccuccuaacugcagaagcu

SEQ ID NO: 49761 - RNA, 23 nt, Artificial Sequence
  Chemically synthesized
acaaggaggcauauugcucaguc

SEQ ID NO: 49762 - RNA, 23 nt, Artificial Sequence
  Chemically synthesized
caagugucugcaccuccuaacug

SEQ ID NO: 49763 - RNA, 23 nt, Artificial Sequence
  Chemically synthesized
cuaacagaacaaccaguuuaaag

SEQ ID NO: 49764 - RNA, 23 nt, Artificial Sequence
  Chemically synthesized
auucgggaggcuguucugcuuua

SEQ ID NO: 49765 - RNA, 23 nt, Artificial Sequence
  Chemically synthesized
uucccacuaggaugaugggagug

SEQ ID NO: 49766 - RNA, 23 nt, Artificial Sequence
  Chemically synthesized
uguccagcuguaucccauaagcc

SEQ ID NO: 49767 - RNA, 23 nt, Artificial Sequence
  Chemically synthesized
caaggaggcauauugcucaguca

SEQ ID NO: 49768 - RNA, 23 nt, Artificial Sequence
  Chemically synthesized
uuaugucgggaacacgugcugcu

SEQ ID NO: 49769 - RNA, 23 nt, Artificial Sequence
  Chemically synthesized
uuccaagggacaggaccaagaac

SEQ ID NO: 49770 - RNA, 23 nt, Artificial Sequence
  Chemically synthesized
augucgggaacacgugcugcuaa

SEQ ID NO: 49771 - RNA, 23 nt, Artificial Sequence
  Chemically synthesized
cccaauguuucguauaucuguuc

SEQ ID NO: 49772 - RNA, 23 nt, Artificial Sequence
  Chemically synthesized
acccaauguuucguauaucuguu

SEQ ID NO: 49773 - RNA, 23 nt, Artificial Sequence
  Chemically synthesized
aacccaauguuucguauaucugu

SEQ ID NO: 49774 - RNA, 23 nt, Artificial Sequence
  Chemically synthesized
gaacccaauguuucguauaucug

SEQ ID NO: 49775 - RNA, 23 nt, Artificial Sequence
  Chemically synthesized
agaacccaauguuucguauaucu

SEQ ID NO: 49776 - RNA, 23 nt, Artificial Sequence
  Chemically synthesized
gcaugaaaguuagcagagacaag

SEQ ID NO: 49777 - RNA, 23 nt, Artificial Sequence
  Chemically synthesized
agcaugaaaguuagcagagacaa

SEQ ID NO: 49778 - RNA, 23 nt, Artificial Sequence
  Chemically synthesized
cagcaugaaaguuagcagagaca

SEQ ID NO: 49779 - RNA, 23 nt, Artificial Sequence
  Chemically synthesized
gcagcaugaaaguuagcagagac

SEQ ID NO: 49780 - RNA, 23 nt, Artificial Sequence
  Chemically synthesized
ggcagcaugaaaguuagcagaga

SEQ ID NO: 49781 - RNA, 23 nt, Artificial Sequence
  Chemically synthesized
ccgacuaacaccacuggaagcuu

SEQ ID NO: 49782 - RNA, 23 nt, Artificial Sequence
  Chemically synthesized
cccgacuaacaccacuggaagcu

SEQ ID NO: 49783 - RNA, 23 nt, Artificial Sequence
  Chemically synthesized
gcccgacuaacaccacuggaagc

SEQ ID NO: 49784 - RNA, 23 nt, Artificial Sequence
  Chemically synthesized
ugcccgacuaacaccacuggaag

SEQ ID NO: 49785 - RNA, 23 nt, Artificial Sequence
  Chemically synthesized
cugcccgacuaacaccacuggaa

SEQ ID NO: 49786 - RNA, 23 nt, Artificial Sequence
  Chemically synthesized
ggagaaauauaucgcuuguuuug

SEQ ID NO: 49787 - RNA, 23 nt, Artificial Sequence
  Chemically synthesized
aggagaaauauaucgcuuguuuu

SEQ ID NO: 49788 - RNA, 23 nt, Artificial Sequence
  Chemically synthesized
aaggagaaauauaucgcuuguuu

SEQ ID NO: 49789 - RNA, 23 nt, Artificial Sequence
  Chemically synthesized
gaaggagaaauauaucgcuuguu

SEQ ID NO: 49790 - RNA, 23 nt, Artificial Sequence
  Chemically synthesized
ugaaggagaaauauaucgcuugu

SEQ ID NO: 49791 - RNA, 23 nt, Artificial Sequence
  Chemically synthesized
cccaacauaaagacaaaaggaag

SEQ ID NO: 49792 - RNA, 23 nt, Artificial Sequence
  Chemically synthesized
ccccaacauaaagacaaaaggaa

SEQ ID NO: 49793 - RNA, 23 nt, Artificial Sequence
  Chemically synthesized
accccaacauaaagacaaaagga

SEQ ID NO: 49794 - RNA, 23 nt, Artificial Sequence
  Chemically synthesized
caccccaacauaaagacaaaagg

SEQ ID NO: 49795 - RNA, 23 nt, Artificial Sequence
  Chemically synthesized
acaccccaacauaaagacaaaag

SEQ ID NO: 49796 - RNA, 23 nt, Artificial Sequence
  Chemically synthesized
ccaaaugucaaacuaccaaaugg

SEQ ID NO: 49797 - RNA, 23 nt, Artificial Sequence
  Chemically synthesized
cccaaaugucaaacuaccaaaug

SEQ ID NO: 49798 - RNA, 23 nt, Artificial Sequence
  Chemically synthesized
acccaaaugucaaacuaccaaau

SEQ ID NO: 49799 - RNA, 23 nt, Artificial Sequence
  Chemically synthesized
gacccaaaugucaaacuaccaaa

SEQ ID NO: 49800 - RNA, 23 nt, Artificial Sequence
  Chemically synthesized
ggacccaaaugucaaacuaccaa

SEQ ID NO: 49801 - RNA, 23 nt, Artificial Sequence
  Chemically synthesized
gagaacccaauguuucguauauc

SEQ ID NO: 49802 - RNA, 23 nt, Artificial Sequence
  Chemically synthesized
ggagaacccaauguuucguauau

SEQ ID NO: 49803 - RNA, 23 nt, Artificial Sequence
  Chemically synthesized
aggagaacccaauguuucguaua

SEQ ID NO: 49804 - RNA, 23 nt, Artificial Sequence
  Chemically synthesized
gaggagaacccaauguuucguau

SEQ ID NO: 49805 - RNA, 23 nt, Artificial Sequence
  Chemically synthesized
ggacaagagauuuaagaaucgag

SEQ ID NO: 49806 - RNA, 23 nt, Artificial Sequence
  Chemically synthesized
aggacaagagauuuaagaaucga

SEQ ID NO: 49807 - RNA, 23 nt, Artificial Sequence
  Chemically synthesized
caggacaagagauuuaagaaucg

SEQ ID NO: 49808 - RNA, 23 nt, Artificial Sequence
  Chemically synthesized
gcaggacaagagauuuaagaauc

SEQ ID NO: 49809 - RNA, 23 nt, Artificial Sequence
  Chemically synthesized
ugcaggacaagagauuuaagaau

SEQ ID NO: 49810 - RNA, 23 nt, Artificial Sequence
  Chemically synthesized
ccacaagaagucagcuauacaga

SEQ ID NO: 49811 - RNA, 23 nt, Artificial Sequence
  Chemically synthesized
gccacaagaagucagcuauacag

SEQ ID NO: 49812 - RNA, 23 nt, Artificial Sequence
  Chemically synthesized
ggccacaagaagucagcuauaca

SEQ ID NO: 49813 - RNA, 23 nt, Artificial Sequence
  Chemically synthesized
aggccacaagaagucagcuauac

SEQ ID NO: 49814 - RNA, 23 nt, Artificial Sequence
  Chemically synthesized
caggccacaagaagucagcuaua

SEQ ID NO: 49815 - RNA, 23 nt, Artificial Sequence
  Chemically synthesized
ccauccuuauuccuccucaugcu

SEQ ID NO: 49816 - RNA, 23 nt, Artificial Sequence
  Chemically synthesized
accauccuuauuccuccucaugc

SEQ ID NO: 49817 - RNA, 23 nt, Artificial Sequence
  Chemically synthesized
uaccauccuuauuccuccucaug

SEQ ID NO: 49818 - RNA, 23 nt, Artificial Sequence
  Chemically synthesized
cuaccauccuuauuccuccucau

SEQ ID NO: 49819 - RNA, 23 nt, Artificial Sequence
  Chemically synthesized
gcuaccauccuuauuccuccuca

SEQ ID NO: 49820 - RNA, 23 nt, Artificial Sequence
  Chemically synthesized
cgaggagaacccaauguuucgua

SEQ ID NO: 49821 - RNA, 23 nt, Artificial Sequence
  Chemically synthesized
ccgaggagaacccaauguuucgu

SEQ ID NO: 49822 - RNA, 23 nt, Artificial Sequence
  Chemically synthesized
caccugcacucuucaacuucacc

SEQ ID NO: 49823 - RNA, 23 nt, Artificial Sequence
  Chemically synthesized
acaccugcacucuucaacuucac

SEQ ID NO: 49824 - RNA, 23 nt, Artificial Sequence
  Chemically synthesized
cacaccugcacucuucaacuuca

SEQ ID NO: 49825 - RNA, 23 nt, Artificial Sequence
  Chemically synthesized
acacaccugcacucuucaacuuc

SEQ ID NO: 49826 - RNA, 23 nt, Artificial Sequence
  Chemically synthesized
gacacaccugcacucuucaacuu

SEQ ID NO: 49827 - RNA, 23 nt, Artificial Sequence
  Chemically synthesized
agaacuuaaugcugcauuuaucg

SEQ ID NO: 49828 - RNA, 23 nt, Artificial Sequence
  Chemically synthesized
gagaacuuaaugcugcauuuauc

SEQ ID NO: 49829 - RNA, 23 nt, Artificial Sequence
  Chemically synthesized
ggagaacuuaaugcugcauuuau

SEQ ID NO: 49830 - RNA, 23 nt, Artificial Sequence
  Chemically synthesized
gggagaacuuaaugcugcauuua

SEQ ID NO: 49831 - RNA, 23 nt, Artificial Sequence
  Chemically synthesized
ugggagaacuuaaugcugcauuu

SEQ ID NO: 49832 - RNA, 23 nt, Artificial Sequence
  Chemically synthesized
gugggagaacuuaaugcugcauu

SEQ ID NO: 49833 - RNA, 23 nt, Artificial Sequence
  Chemically synthesized
ugugggagaacuuaaugcugcau

SEQ ID NO: 49834 - RNA, 23 nt, Artificial Sequence
  Chemically synthesized
ccaaacuacacagaauuuaaauu

SEQ ID NO: 49835 - RNA, 23 nt, Artificial Sequence
  Chemically synthesized
cccaaacuacacagaauuuaaau

SEQ ID NO: 49836 - RNA, 23 nt, Artificial Sequence
  Chemically synthesized
acccaaacuacacagaauuuaaa

SEQ ID NO: 49837 - RNA, 23 nt, Artificial Sequence
  Chemically synthesized
aacccaaacuacacagaauuuaa

SEQ ID NO: 49838 - RNA, 23 nt, Artificial Sequence
  Chemically synthesized
gaacccaaacuacacagaauuua

SEQ ID NO: 49839 - RNA, 23 nt, Artificial Sequence
  Chemically synthesized
ggauauuaaaccgcagaaccucu

SEQ ID NO: 49840 - RNA, 23 nt, Artificial Sequence
  Chemically synthesized
gggauauuaaaccgcagaaccuc

SEQ ID NO: 49841 - RNA, 23 nt, Artificial Sequence
  Chemically synthesized
cgggauauuaaaccgcagaaccu

SEQ ID NO: 49842 - RNA, 23 nt, Artificial Sequence
  Chemically synthesized
ucgggauauuaaaccgcagaacc

SEQ ID NO: 49843 - RNA, 23 nt, Artificial Sequence
  Chemically synthesized
aucgggauauuaaaccgcagaac

SEQ ID NO: 49844 - RNA, 23 nt, Artificial Sequence
  Chemically synthesized
gagaaauauaucgcuuguuuugu

SEQ ID NO: 49845 - RNA, 23 nt, Artificial Sequence
  Chemically synthesized
cugucuugaaggagaaauauauc

SEQ ID NO: 49846 - RNA, 23 nt, Artificial Sequence
  Chemically synthesized
ucugucuugaaggagaaauauau

SEQ ID NO: 49847 - RNA, 23 nt, Artificial Sequence
  Chemically synthesized
aucugucuugaaggagaaauaua

SEQ ID NO: 49848 - RNA, 23 nt, Artificial Sequence
  Chemically synthesized
gaucugucuugaaggagaaauau

SEQ ID NO: 49849 - RNA, 23 nt, Artificial Sequence
  Chemically synthesized
cgaucugucuugaaggagaaaua

SEQ ID NO: 49850 - RNA, 23 nt, Artificial Sequence
  Chemically synthesized
ccaacauaaagacaaaaggaaga

SEQ ID NO: 49851 - RNA, 23 nt, Artificial Sequence
  Chemically synthesized
gcauuuaucguuaaccuaacacc

SEQ ID NO: 49852 - RNA, 23 nt, Artificial Sequence
  Chemically synthesized
ugcauuuaucguuaaccuaacac

SEQ ID NO: 49853 - RNA, 23 nt, Artificial Sequence
  Chemically synthesized
cugcauuuaucguuaaccuaaca

SEQ ID NO: 49854 - RNA, 23 nt, Artificial Sequence
  Chemically synthesized
gcugcauuuaucguuaaccuaac

SEQ ID NO: 49855 - RNA, 23 nt, Artificial Sequence
  Chemically synthesized
ugcugcauuuaucguuaaccuaa

SEQ ID NO: 49856 - RNA, 23 nt, Artificial Sequence
  Chemically synthesized
caaaugucaaacuaccaaauggg

SEQ ID NO: 49857 - RNA, 23 nt, Artificial Sequence
  Chemically synthesized
gccacugauuauaccucuaguau

SEQ ID NO: 49858 - RNA, 23 nt, Artificial Sequence
  Chemically synthesized
agccacugauuauaccucuagua

SEQ ID NO: 49859 - RNA, 23 nt, Artificial Sequence
  Chemically synthesized
gagccacugauuauaccucuagu

SEQ ID NO: 49860 - RNA, 23 nt, Artificial Sequence
  Chemically synthesized
ggagccacugauuauaccucuag

SEQ ID NO: 49861 - RNA, 23 nt, Artificial Sequence
  Chemically synthesized
uggagccacugauuauaccucua

SEQ ID NO: 49862 - RNA, 23 nt, Artificial Sequence
  Chemically synthesized
ccaauguuucguauaucuguucu

SEQ ID NO: 49863 - RNA, 23 nt, Artificial Sequence
  Chemically synthesized
gccagcugcacaggaaaaaccac

SEQ ID NO: 49864 - RNA, 23 nt, Artificial Sequence
  Chemically synthesized
agccagcugcacaggaaaaacca

SEQ ID NO: 49865 - RNA, 23 nt, Artificial Sequence
  Chemically synthesized
cagccagcugcacaggaaaaacc

SEQ ID NO: 49866 - RNA, 23 nt, Artificial Sequence
  Chemically synthesized
gcagccagcugcacaggaaaaac

SEQ ID NO: 49867 - RNA, 23 nt, Artificial Sequence
  Chemically synthesized
agcagccagcugcacaggaaaaa

SEQ ID NO: 49868 - RNA, 23 nt, Artificial Sequence
  Chemically synthesized
caagaacugucaaguaauccacc

SEQ ID NO: 49869 - RNA, 23 nt, Artificial Sequence
  Chemically synthesized
ucaagaacugucaaguaauccac

SEQ ID NO: 49870 - RNA, 23 nt, Artificial Sequence
  Chemically synthesized
cucaagaacugucaaguaaucca

SEQ ID NO: 49871 - RNA, 23 nt, Artificial Sequence
  Chemically synthesized
acucaagaacugucaaguaaucc

SEQ ID NO: 49872 - RNA, 23 nt, Artificial Sequence
  Chemically synthesized
cacucaagaacugucaaguaauc

SEQ ID NO: 49873 - RNA, 23 nt, Artificial Sequence
  Chemically synthesized
agacacaccugcacucuucaacu

SEQ ID NO: 49874 - RNA, 23 nt, Artificial Sequence
  Chemically synthesized
gagacacaccugcacucuucaac

SEQ ID NO: 49875 - RNA, 23 nt, Artificial Sequence
  Chemically synthesized
cgagacacaccugcacucuucaa

SEQ ID NO: 49876 - RNA, 23 nt, Artificial Sequence
  Chemically synthesized
ggacauuucaccucaggagugcg

SEQ ID NO: 49877 - RNA, 23 nt, Artificial Sequence
  Chemically synthesized
aggacauuucaccucaggagugc

SEQ ID NO: 49878 - RNA, 23 nt, Artificial Sequence
  Chemically synthesized
caggacauuucaccucaggagug

SEQ ID NO: 49879 - RNA, 23 nt, Artificial Sequence
  Chemically synthesized
acaggacauuucaccucaggagu

SEQ ID NO: 49880 - RNA, 23 nt, Artificial Sequence
  Chemically synthesized
aacaggacauuucaccucaggag

SEQ ID NO: 49881 - RNA, 23 nt, Artificial Sequence
  Chemically synthesized
ccacugauuauaccucuaguaua

SEQ ID NO: 49882 - RNA, 23 nt, Artificial Sequence
  Chemically synthesized
ggaaacaguauacagaguugcca

SEQ ID NO: 49883 - RNA, 23 nt, Artificial Sequence
  Chemically synthesized
cggaaacaguauacagaguugcc

SEQ ID NO: 49884 - RNA, 23 nt, Artificial Sequence
  Chemically synthesized
ccggaaacaguauacagaguugc

SEQ ID NO: 49885 - RNA, 23 nt, Artificial Sequence
  Chemically synthesized
uccggaaacaguauacagaguug

SEQ ID NO: 49886 - RNA, 23 nt, Artificial Sequence
  Chemically synthesized
uuccggaaacaguauacagaguu

SEQ ID NO: 49887 - RNA, 23 nt, Artificial Sequence
  Chemically synthesized
agaaaguauugcaggacaagaga

SEQ ID NO: 49888 - RNA, 23 nt, Artificial Sequence
  Chemically synthesized
aagaaaguauugcaggacaagag

SEQ ID NO: 49889 - RNA, 23 nt, Artificial Sequence
  Chemically synthesized
caagaaaguauugcaggacaaga

SEQ ID NO: 49890 - RNA, 23 nt, Artificial Sequence
  Chemically synthesized
ucaagaaaguauugcaggacaag

SEQ ID NO: 49891 - RNA, 23 nt, Artificial Sequence
  Chemically synthesized
aucaagaaaguauugcaggacaa

SEQ ID NO: 49892 - RNA, 23 nt, Artificial Sequence
  Chemically synthesized
ccaucaagaaaguauugcaggac

SEQ ID NO: 49893 - RNA, 23 nt, Artificial Sequence
  Chemically synthesized
gccaucaagaaaguauugcagga

SEQ ID NO: 49894 - RNA, 23 nt, Artificial Sequence
  Chemically synthesized
cgccaucaagaaaguauugcagg

SEQ ID NO: 49895 - RNA, 23 nt, Artificial Sequence
  Chemically synthesized
ucgccaucaagaaaguauugcag

SEQ ID NO: 49896 - RNA, 23 nt, Artificial Sequence
  Chemically synthesized
gucgccaucaagaaaguauugca

SEQ ID NO: 49897 - RNA, 23 nt, Artificial Sequence
  Chemically synthesized
uugaaggagaaauauaucgcuug

SEQ ID NO: 49898 - RNA, 23 nt, Artificial Sequence
  Chemically synthesized
cuugaaggagaaauauaucgcuu

SEQ ID NO: 49899 - RNA, 23 nt, Artificial Sequence
  Chemically synthesized
ucuugaaggagaaauauaucgcu

SEQ ID NO: 49900 - RNA, 23 nt, Artificial Sequence
  Chemically synthesized
gguauaucaagccaaacuuugug

SEQ ID NO: 49901 - RNA, 23 nt, Artificial Sequence
  Chemically synthesized
ugguauaucaagccaaacuuugu

SEQ ID NO: 49902 - RNA, 23 nt, Artificial Sequence
  Chemically synthesized
gugguauaucaagccaaacuuug

SEQ ID NO: 49903 - RNA, 23 nt, Artificial Sequence
  Chemically synthesized
ugugguauaucaagccaaacuuu

SEQ ID NO: 49904 - RNA, 23 nt, Artificial Sequence
  Chemically synthesized
gugugguauaucaagccaaacuu

SEQ ID NO: 49905 - RNA, 23 nt, Artificial Sequence
  Chemically synthesized
gucuugaaggagaaauauaucgc

SEQ ID NO: 49906 - RNA, 23 nt, Artificial Sequence
  Chemically synthesized
ugucuugaaggagaaauauaucg

SEQ ID NO: 49907 - RNA, 23 nt, Artificial Sequence
  Chemically synthesized
caagaagucagcuauacagacac

SEQ ID NO: 49908 - RNA, 23 nt, Artificial Sequence
  Chemically synthesized
acaagaagucagcuauacagaca

SEQ ID NO: 49909 - RNA, 23 nt, Artificial Sequence
  Chemically synthesized
cacaagaagucagcuauacagac

SEQ ID NO: 49910 - RNA, 23 nt, Artificial Sequence
  Chemically synthesized
cauccuuauuccuccucaugcuc

SEQ ID NO: 49911 - RNA, 23 nt, Artificial Sequence
  Chemically synthesized
gcacucuucaacuucaccacuca

SEQ ID NO: 49912 - RNA, 23 nt, Artificial Sequence
  Chemically synthesized
ugcacucuucaacuucaccacuc

SEQ ID NO: 49913 - RNA, 23 nt, Artificial Sequence
  Chemically synthesized
cugcacucuucaacuucaccacu

SEQ ID NO: 49914 - RNA, 23 nt, Artificial Sequence
  Chemically synthesized
ccugcacucuucaacuucaccac

SEQ ID NO: 49915 - RNA, 23 nt, Artificial Sequence
  Chemically synthesized
accugcacucuucaacuucacca

SEQ ID NO: 49916 - RNA, 23 nt, Artificial Sequence
  Chemically synthesized
ugaacccaaacuacacagaauuu

SEQ ID NO: 49917 - RNA, 23 nt, Artificial Sequence
  Chemically synthesized
ggaucaguugguagaaauaauca

SEQ ID NO: 49918 - RNA, 23 nt, Artificial Sequence
  Chemically synthesized
uggaucaguugguagaaauaauc

SEQ ID NO: 49919 - RNA, 23 nt, Artificial Sequence
  Chemically synthesized
guggaucaguugguagaaauaau

SEQ ID NO: 49920 - RNA, 23 nt, Artificial Sequence
  Chemically synthesized
uguggaucaguugguagaaauaa

SEQ ID NO: 49921 - RNA, 23 nt, Artificial Sequence
  Chemically synthesized
guguggaucaguugguagaaaua

SEQ ID NO: 49922 - RNA, 23 nt, Artificial Sequence
  Chemically synthesized
cugugauuuaugucaaguuguau

SEQ ID NO: 49923 - RNA, 23 nt, Artificial Sequence
  Chemically synthesized
ccugugauuuaugucaaguugua

SEQ ID NO: 49924 - RNA, 23 nt, Artificial Sequence
  Chemically synthesized
cccugugauuuaugucaaguugu

SEQ ID NO: 49925 - RNA, 23 nt, Artificial Sequence
  Chemically synthesized
ucccugugauuuaugucaaguug

SEQ ID NO: 49926 - RNA, 23 nt, Artificial Sequence
  Chemically synthesized
cucccugugauuuaugucaaguu

SEQ ID NO: 49927 - RNA, 23 nt, Artificial Sequence
  Chemically synthesized
ggucgccaucaagaaaguauugc

SEQ ID NO: 49928 - RNA, 23 nt, Artificial Sequence
  Chemically synthesized
uggucgccaucaagaaaguauug

SEQ ID NO: 49929 - RNA, 23 nt, Artificial Sequence
  Chemically synthesized
cuggucgccaucaagaaaguauu

SEQ ID NO: 49930 - RNA, 23 nt, Artificial Sequence
  Chemically synthesized
ccgaucugucuugaaggagaaau

SEQ ID NO: 49931 - RNA, 23 nt, Artificial Sequence
  Chemically synthesized
gccgaucugucuugaaggagaaa

SEQ ID NO: 49932 - RNA, 23 nt, Artificial Sequence
  Chemically synthesized
ugccgaucugucuugaaggagaa

SEQ ID NO: 49933 - RNA, 23 nt, Artificial Sequence
  Chemically synthesized
gugccgaucugucuugaaggaga

SEQ ID NO: 49934 - RNA, 23 nt, Artificial Sequence
  Chemically synthesized
ggcuaccauccuuauuccuccuc

SEQ ID NO: 49935 - RNA, 23 nt, Artificial Sequence
  Chemically synthesized
ccacucaagaacugucaaguaau

SEQ ID NO: 49936 - RNA, 23 nt, Artificial Sequence
  Chemically synthesized
cgacuaacaccacuggaagcuug

SEQ ID NO: 49937 - RNA, 23 nt, Artificial Sequence
  Chemically synthesized
gguguggaucaguugguagaaau

SEQ ID NO: 49938 - RNA, 23 nt, Artificial Sequence
  Chemically synthesized
ggauccugauacugcuguauuaa

SEQ ID NO: 49939 - RNA, 23 nt, Artificial Sequence
  Chemically synthesized
uggauccugauacugcuguauua

SEQ ID NO: 49940 - RNA, 23 nt, Artificial Sequence
  Chemically synthesized
uuggauccugauacugcuguauu

SEQ ID NO: 49941 - RNA, 23 nt, Artificial Sequence
  Chemically synthesized
guuggauccugauacugcuguau

SEQ ID NO: 49942 - RNA, 23 nt, Artificial Sequence
  Chemically synthesized
uguuggauccugauacugcugua

SEQ ID NO: 49943 - RNA, 23 nt, Artificial Sequence
  Chemically synthesized
gccaucgggauauuaaaccgcag

SEQ ID NO: 49944 - RNA, 23 nt, Artificial Sequence
  Chemically synthesized
ugccaucgggauauuaaaccgca

SEQ ID NO: 49945 - RNA, 23 nt, Artificial Sequence
  Chemically synthesized
cugccaucgggauauuaaaccgc

SEQ ID NO: 49946 - RNA, 23 nt, Artificial Sequence
  Chemically synthesized
ucugccaucgggauauuaaaccg

SEQ ID NO: 49947 - RNA, 23 nt, Artificial Sequence
  Chemically synthesized
aucugccaucgggauauuaaacc

SEQ ID NO: 49948 - RNA, 23 nt, Artificial Sequence
  Chemically synthesized
aaucugccaucgggauauuaaac

SEQ ID NO: 49949 - RNA, 23 nt, Artificial Sequence
  Chemically synthesized
gaaucugccaucgggauauuaaa

SEQ ID NO: 49950 - RNA, 23 nt, Artificial Sequence
  Chemically synthesized
ggaaucugccaucgggauauuaa

SEQ ID NO: 49951 - RNA, 23 nt, Artificial Sequence
  Chemically synthesized
uggaaucugccaucgggauauua

SEQ ID NO: 49952 - RNA, 23 nt, Artificial Sequence
  Chemically synthesized
uuggaaucugccaucgggauauu

SEQ ID NO: 49953 - RNA, 23 nt, Artificial Sequence
  Chemically synthesized
uuuggaaucugccaucgggauau

SEQ ID NO: 49954 - RNA, 23 nt, Artificial Sequence
  Chemically synthesized
gcucccugugauuuaugucaagu

SEQ ID NO: 49955 - RNA, 23 nt, Artificial Sequence
  Chemically synthesized
cgcucccugugauuuaugucaag

SEQ ID NO: 49956 - RNA, 23 nt, Artificial Sequence
  Chemically synthesized
acgcucccugugauuuaugucaa

SEQ ID NO: 49957 - RNA, 23 nt, Artificial Sequence
  Chemically synthesized
acacuauagucgagccaaacaga

SEQ ID NO: 49958 - RNA, 23 nt, Artificial Sequence
  Chemically synthesized
gacacuauagucgagccaaacag

SEQ ID NO: 49959 - RNA, 23 nt, Artificial Sequence
  Chemically synthesized
agacacuauagucgagccaaaca

SEQ ID NO: 49960 - RNA, 23 nt, Artificial Sequence
  Chemically synthesized
cagacacuauagucgagccaaac

SEQ ID NO: 49961 - RNA, 23 nt, Artificial Sequence
  Chemically synthesized
ccagacacuauagucgagccaaa

SEQ ID NO: 49962 - RNA, 23 nt, Artificial Sequence
  Chemically synthesized
gaaagcuagaucacuguaacaua

SEQ ID NO: 49963 - RNA, 23 nt, Artificial Sequence
  Chemically synthesized
agaaagcuagaucacuguaacau

SEQ ID NO: 49964 - RNA, 23 nt, Artificial Sequence
  Chemically synthesized
gagaaagcuagaucacuguaaca

SEQ ID NO: 49965 - RNA, 23 nt, Artificial Sequence
  Chemically synthesized
ugagaaagcuagaucacuguaac

SEQ ID NO: 49966 - RNA, 23 nt, Artificial Sequence
  Chemically synthesized
augagaaagcuagaucacuguaa

SEQ ID NO: 49967 - RNA, 23 nt, Artificial Sequence
  Chemically synthesized
guauacaaaaggagugaaaagcc

SEQ ID NO: 49968 - RNA, 23 nt, Artificial Sequence
  Chemically synthesized
aguauacaaaaggagugaaaagc

SEQ ID NO: 49969 - RNA, 23 nt, Artificial Sequence
  Chemically synthesized
uaguauacaaaaggagugaaaag

SEQ ID NO: 49970 - RNA, 23 nt, Artificial Sequence
  Chemically synthesized
auaguauacaaaaggagugaaaa

SEQ ID NO: 49971 - RNA, 23 nt, Artificial Sequence
  Chemically synthesized
uauaguauacaaaaggagugaaa

SEQ ID NO: 49972 - RNA, 23 nt, Artificial Sequence
  Chemically synthesized
cagcuauacagacacuaaaguga

SEQ ID NO: 49973 - RNA, 23 nt, Artificial Sequence
  Chemically synthesized
ucagcuauacagacacuaaagug

SEQ ID NO: 49974 - RNA, 23 nt, Artificial Sequence
  Chemically synthesized
gucagcuauacagacacuaaagu

SEQ ID NO: 49975 - RNA, 23 nt, Artificial Sequence
  Chemically synthesized
agucagcuauacagacacuaaag

SEQ ID NO: 49976 - RNA, 23 nt, Artificial Sequence
  Chemically synthesized
aagucagcuauacagacacuaaa

SEQ ID NO: 49977 - RNA, 23 nt, Artificial Sequence
  Chemically synthesized
ugaaaguuagcagagacaaggac

SEQ ID NO: 49978 - RNA, 23 nt, Artificial Sequence
  Chemically synthesized
augaaaguuagcagagacaagga

SEQ ID NO: 49979 - RNA, 23 nt, Artificial Sequence
  Chemically synthesized
caugaaaguuagcagagacaagg

SEQ ID NO: 49980 - RNA, 23 nt, Artificial Sequence
  Chemically synthesized
ggaaaaaccaccaguuacuugag

SEQ ID NO: 49981 - RNA, 23 nt, Artificial Sequence
  Chemically synthesized
aggaaaaaccaccaguuacuuga

SEQ ID NO: 49982 - RNA, 23 nt, Artificial Sequence
  Chemically synthesized
caggaaaaaccaccaguuacuug

SEQ ID NO: 49983 - RNA, 23 nt, Artificial Sequence
  Chemically synthesized
acaggaaaaaccaccaguuacuu

SEQ ID NO: 49984 - RNA, 23 nt, Artificial Sequence
  Chemically synthesized
cacaggaaaaaccaccaguuacu

SEQ ID NO: 49985 - RNA, 23 nt, Artificial Sequence
  Chemically synthesized
uggcuaccauccuuauuccuccu

SEQ ID NO: 49986 - RNA, 23 nt, Artificial Sequence
  Chemically synthesized
cuggcuaccauccuuauuccucc

SEQ ID NO: 49987 - RNA, 23 nt, Artificial Sequence
  Chemically synthesized
ucuggcuaccauccuuauuccuc

SEQ ID NO: 49988 - RNA, 23 nt, Artificial Sequence
  Chemically synthesized
cucuggcuaccauccuuauuccu

SEQ ID NO: 49989 - RNA, 23 nt, Artificial Sequence
  Chemically synthesized
gggacccaaaugucaaacuacca

SEQ ID NO: 49990 - RNA, 23 nt, Artificial Sequence
  Chemically synthesized
ugaauuacgggacccaaauguca

SEQ ID NO: 49991 - RNA, 23 nt, Artificial Sequence
  Chemically synthesized
augaauuacgggacccaaauguc

SEQ ID NO: 49992 - RNA, 23 nt, Artificial Sequence
  Chemically synthesized
gaugaauuacgggacccaaaugu

SEQ ID NO: 49993 - RNA, 23 nt, Artificial Sequence
  Chemically synthesized
ugaugaauuacgggacccaaaug

SEQ ID NO: 49994 - RNA, 23 nt, Artificial Sequence
  Chemically synthesized
uugaugaauuacgggacccaaau

SEQ ID NO: 49995 - RNA, 23 nt, Artificial Sequence
  Chemically synthesized
augcugcauuuaucguuaaccua

SEQ ID NO: 49996 - RNA, 23 nt, Artificial Sequence
  Chemically synthesized
aaugcugcauuuaucguuaaccu

SEQ ID NO: 49997 - RNA, 23 nt, Artificial Sequence
  Chemically synthesized
gcacauucauuuuuugaugaauu

SEQ ID NO: 49998 - RNA, 23 nt, Artificial Sequence
  Chemically synthesized
ugcacauucauuuuuugaugaau

SEQ ID NO: 49999 - RNA, 23 nt, Artificial Sequence
  Chemically synthesized
gugcacauucauuuuuugaugaa

SEQ ID NO: 50000 - RNA, 23 nt, Artificial Sequence
  Chemically synthesized
ugugcacauucauuuuuugauga

SEQ ID NO: 50001 - RNA, 23 nt, Artificial Sequence
  Chemically synthesized
uugugcacauucauuuuuugaug

SEQ ID NO: 50002 - RNA, 23 nt, Artificial Sequence
  Chemically synthesized
gaacuuaaugcugcauuuaucgu

SEQ ID NO: 50003 - RNA, 23 nt, Artificial Sequence
  Chemically synthesized
augaacccaaacuacacagaauu

SEQ ID NO: 50004 - RNA, 23 nt, Artificial Sequence
  Chemically synthesized
cugugggagaacuuaaugcugca

SEQ ID NO: 50005 - RNA, 23 nt, Artificial Sequence
  Chemically synthesized
ugguagaaauaaucaagguccug

SEQ ID NO: 50006 - RNA, 23 nt, Artificial Sequence
  Chemically synthesized
uugguagaaauaaucaagguccu

SEQ ID NO: 50007 - RNA, 23 nt, Artificial Sequence
  Chemically synthesized
guugguagaaauaaucaaggucc

SEQ ID NO: 50008 - RNA, 23 nt, Artificial Sequence
  Chemically synthesized
aguugguagaaauaaucaagguc

SEQ ID NO: 50009 - RNA, 23 nt, Artificial Sequence
  Chemically synthesized
caguugguagaaauaaucaaggu

SEQ ID NO: 50010 - RNA, 23 nt, Artificial Sequence
  Chemically synthesized
ucaguugguagaaauaaucaagg

SEQ ID NO: 50011 - RNA, 23 nt, Artificial Sequence
  Chemically synthesized
aucaguugguagaaauaaucaag

SEQ ID NO: 50012 - RNA, 23 nt, Artificial Sequence
  Chemically synthesized
gaucaguugguagaaauaaucaa

SEQ ID NO: 50013 - RNA, 23 nt, Artificial Sequence
  Chemically synthesized
ugguguggaucaguugguagaaa

SEQ ID NO: 50014 - RNA, 23 nt, Artificial Sequence
  Chemically synthesized
ugagcuguuacuaggacaaccaa

SEQ ID NO: 50015 - RNA, 23 nt, Artificial Sequence
  Chemically synthesized
cugagcuguuacuaggacaacca

SEQ ID NO: 50016 - RNA, 23 nt, Artificial Sequence
  Chemically synthesized
gcugagcuguuacuaggacaacc

SEQ ID NO: 50017 - RNA, 23 nt, Artificial Sequence
  Chemically synthesized
ggcugagcuguuacuaggacaac

SEQ ID NO: 50018 - RNA, 23 nt, Artificial Sequence
  Chemically synthesized
uggcugagcuguuacuaggacaa

SEQ ID NO: 50019 - RNA, 23 nt, Artificial Sequence
  Chemically synthesized
cuuuggaaucugccaucgggaua

SEQ ID NO: 50020 - RNA, 23 nt, Artificial Sequence
  Chemically synthesized
caaguuguauauguaucagcugu

SEQ ID NO: 50021 - RNA, 23 nt, Artificial Sequence
  Chemically synthesized
ucaaguuguauauguaucagcug

SEQ ID NO: 50022 - RNA, 23 nt, Artificial Sequence
  Chemically synthesized
gucaaguuguauauguaucagcu

SEQ ID NO: 50023 - RNA, 23 nt, Artificial Sequence
  Chemically synthesized
ugucaaguuguauauguaucagc

SEQ ID NO: 50024 - RNA, 23 nt, Artificial Sequence
  Chemically synthesized
augucaaguuguauauguaucag

SEQ ID NO: 50025 - RNA, 23 nt, Artificial Sequence
  Chemically synthesized
gacgcucccugugauuuauguca

SEQ ID NO: 50026 - RNA, 23 nt, Artificial Sequence
  Chemically synthesized
agacgcucccugugauuuauguc

SEQ ID NO: 50027 - RNA, 23 nt, Artificial Sequence
  Chemically synthesized
cagacgcucccugugauuuaugu

SEQ ID NO: 50028 - RNA, 23 nt, Artificial Sequence
  Chemically synthesized
acagacgcucccugugauuuaug

SEQ ID NO: 50029 - RNA, 23 nt, Artificial Sequence
  Chemically synthesized
aacagacgcucccugugauuuau

SEQ ID NO: 50030 - RNA, 23 nt, Artificial Sequence
  Chemically synthesized
cuaucuuaaucuggugcuggacu

SEQ ID NO: 50031 - RNA, 23 nt, Artificial Sequence
  Chemically synthesized
ucuaucuuaaucuggugcuggac

SEQ ID NO: 50032 - RNA, 23 nt, Artificial Sequence
  Chemically synthesized
gucuaucuuaaucuggugcugga

SEQ ID NO: 50033 - RNA, 23 nt, Artificial Sequence
  Chemically synthesized
ggucuaucuuaaucuggugcugg

SEQ ID NO: 50034 - RNA, 23 nt, Artificial Sequence
  Chemically synthesized
aggucuaucuuaaucuggugcug

SEQ ID NO: 50035 - RNA, 23 nt, Artificial Sequence
  Chemically synthesized
gaggucuaucuuaaucuggugcu

SEQ ID NO: 50036 - RNA, 23 nt, Artificial Sequence
  Chemically synthesized
ugaggucuaucuuaaucuggugc

SEQ ID NO: 50037 - RNA, 23 nt, Artificial Sequence
  Chemically synthesized
augaggucuaucuuaaucuggug

SEQ ID NO: 50038 - RNA, 23 nt, Artificial Sequence
  Chemically synthesized
gaugaggucuaucuuaaucuggu

SEQ ID NO: 50039 - RNA, 23 nt, Artificial Sequence
  Chemically synthesized
agaugaggucuaucuuaaucugg

SEQ ID NO: 50040 - RNA, 23 nt, Artificial Sequence
  Chemically synthesized
aagaugaggucuaucuuaaucug

SEQ ID NO: 50041 - RNA, 23 nt, Artificial Sequence
  Chemically synthesized
acuggucgccaucaagaaaguau

SEQ ID NO: 50042 - RNA, 23 nt, Artificial Sequence
  Chemically synthesized
cgaagagagugaucaugucaggg

SEQ ID NO: 50043 - RNA, 23 nt, Artificial Sequence
  Chemically synthesized
gcgaagagagugaucaugucagg

SEQ ID NO: 50044 - RNA, 23 nt, Artificial Sequence
  Chemically synthesized
cgcgaagagagugaucaugucag

SEQ ID NO: 50045 - RNA, 23 nt, Artificial Sequence
  Chemically synthesized
ucgcgaagagagugaucauguca

SEQ ID NO: 50046 - RNA, 23 nt, Artificial Sequence
  Chemically synthesized
uucgcgaagagagugaucauguc

SEQ ID NO: 50047 - RNA, 23 nt, Artificial Sequence
  Chemically synthesized
cgugccgaucugucuugaaggag

SEQ ID NO: 50048 - RNA, 23 nt, Artificial Sequence
  Chemically synthesized
ccgugccgaucugucuugaagga

SEQ ID NO: 50049 - RNA, 23 nt, Artificial Sequence
  Chemically synthesized
ggaaaaggugauucgcgaagaga

SEQ ID NO: 50050 - RNA, 23 nt, Artificial Sequence
  Chemically synthesized
aggaaaaggugauucgcgaagag

SEQ ID NO: 50051 - RNA, 23 nt, Artificial Sequence
  Chemically synthesized
aaggaaaaggugauucgcgaaga

SEQ ID NO: 50052 - RNA, 23 nt, Artificial Sequence
  Chemically synthesized
gaaggaaaaggugauucgcgaag

SEQ ID NO: 50053 - RNA, 23 nt, Artificial Sequence
  Chemically synthesized
ggaaggaaaaggugauucgcgaa

SEQ ID NO: 50054 - RNA, 23 nt, Artificial Sequence
  Chemically synthesized
gaaggaaggaaaaggugauucgc

SEQ ID NO: 50055 - RNA, 23 nt, Artificial Sequence
  Chemically synthesized
ggaaggaaggaaaaggugauucg

SEQ ID NO: 50056 - RNA, 23 nt, Artificial Sequence
  Chemically synthesized
aggaaggaaggaaaaggugauuc

SEQ ID NO: 50057 - RNA, 23 nt, Artificial Sequence
  Chemically synthesized
gaggaaggaaggaaaaggugauu

SEQ ID NO: 50058 - RNA, 23 nt, Artificial Sequence
  Chemically synthesized
ggaggaaggaaggaaaaggugau

SEQ ID NO: 50059 - RNA, 23 nt, Artificial Sequence
  Chemically synthesized
gaccaauaaugcugcuucugcau

SEQ ID NO: 50060 - RNA, 23 nt, Artificial Sequence
  Chemically synthesized
agaccaauaaugcugcuucugca

SEQ ID NO: 50061 - RNA, 23 nt, Artificial Sequence
  Chemically synthesized
cagaccaauaaugcugcuucugc

SEQ ID NO: 50062 - RNA, 23 nt, Artificial Sequence
  Chemically synthesized
acagaccaauaaugcugcuucug

SEQ ID NO: 50063 - RNA, 23 nt, Artificial Sequence
  Chemically synthesized
gacagaccaauaaugcugcuucu

SEQ ID NO: 50064 - RNA, 23 nt, Artificial Sequence
  Chemically synthesized
ccuuauuccuccucaugcucgga

SEQ ID NO: 50065 - RNA, 23 nt, Artificial Sequence
  Chemically synthesized
uccuuauuccuccucaugcucgg

SEQ ID NO: 50066 - RNA, 23 nt, Artificial Sequence
  Chemically synthesized
auccuuauuccuccucaugcucg

SEQ ID NO: 50067 - RNA, 23 nt, Artificial Sequence
  Chemically synthesized
cucuucaacuucaccacucaaga

SEQ ID NO: 50068 - RNA, 23 nt, Artificial Sequence
  Chemically synthesized
acucuucaacuucaccacucaag

SEQ ID NO: 50069 - RNA, 23 nt, Artificial Sequence
  Chemically synthesized
cacucuucaacuucaccacucaa

SEQ ID NO: 50070 - RNA, 23 nt, Artificial Sequence
  Chemically synthesized
acaccaacugcccgacuaacacc

SEQ ID NO: 50071 - RNA, 23 nt, Artificial Sequence
  Chemically synthesized
uacaccaacugcccgacuaacac

SEQ ID NO: 50072 - RNA, 23 nt, Artificial Sequence
  Chemically synthesized
auacaccaacugcccgacuaaca

SEQ ID NO: 50073 - RNA, 23 nt, Artificial Sequence
  Chemically synthesized
uauacaccaacugcccgacuaac

SEQ ID NO: 50074 - RNA, 23 nt, Artificial Sequence
  Chemically synthesized
guauacaccaacugcccgacuaa

SEQ ID NO: 50075 - RNA, 23 nt, Artificial Sequence
  Chemically synthesized
gucaggaacaggacauuucaccu

SEQ ID NO: 50076 - RNA, 23 nt, Artificial Sequence
  Chemically synthesized
cgucaggaacaggacauuucacc

SEQ ID NO: 50077 - RNA, 23 nt, Artificial Sequence
  Chemically synthesized
ucgucaggaacaggacauuucac

SEQ ID NO: 50078 - RNA, 23 nt, Artificial Sequence
  Chemically synthesized
uucgucaggaacaggacauuuca

SEQ ID NO: 50079 - RNA, 23 nt, Artificial Sequence
  Chemically synthesized
auucgucaggaacaggacauuuc

SEQ ID NO: 50080 - RNA, 23 nt, Artificial Sequence
  Chemically synthesized
agggagcaaaucagagaaaugaa

SEQ ID NO: 50081 - RNA, 23 nt, Artificial Sequence
  Chemically synthesized
aagggagcaaaucagagaaauga

SEQ ID NO: 50082 - RNA, 23 nt, Artificial Sequence
  Chemically synthesized
caagggagcaaaucagagaaaug

SEQ ID NO: 50083 - RNA, 23 nt, Artificial Sequence
  Chemically synthesized
acaagggagcaaaucagagaaau

SEQ ID NO: 50084 - RNA, 23 nt, Artificial Sequence
  Chemically synthesized
aacaagggagcaaaucagagaaa

SEQ ID NO: 50085 - RNA, 23 nt, Artificial Sequence
  Chemically synthesized
gguagaaauaaucaagguccugg

SEQ ID NO: 50086 - RNA, 23 nt, Artificial Sequence
  Chemically synthesized
cuguauuaaaacucugugacuuu

SEQ ID NO: 50087 - RNA, 23 nt, Artificial Sequence
  Chemically synthesized
gcuguauuaaaacucugugacuu

SEQ ID NO: 50088 - RNA, 23 nt, Artificial Sequence
  Chemically synthesized
ugcuguauuaaaacucugugacu

SEQ ID NO: 50089 - RNA, 23 nt, Artificial Sequence
  Chemically synthesized
cugcuguauuaaaacucugugac

SEQ ID NO: 50090 - RNA, 23 nt, Artificial Sequence
  Chemically synthesized
acugcuguauuaaaacucuguga

SEQ ID NO: 50091 - RNA, 23 nt, Artificial Sequence
  Chemically synthesized
uacugcuguauuaaaacucugug

SEQ ID NO: 50092 - RNA, 23 nt, Artificial Sequence
  Chemically synthesized
aaacagacgcucccugugauuua

SEQ ID NO: 50093 - RNA, 23 nt, Artificial Sequence
  Chemically synthesized
caucaagaaaguauugcaggaca

SEQ ID NO: 50094 - RNA, 23 nt, Artificial Sequence
  Chemically synthesized
aggaaggaaaaggugauucgcga

SEQ ID NO: 50095 - RNA, 23 nt, Artificial Sequence
  Chemically synthesized
aaggaaggaaaaggugauucgcg

SEQ ID NO: 50096 - RNA, 23 nt, Artificial Sequence
  Chemically synthesized
ccagcugcacaggaaaaaccacc

SEQ ID NO: 50097 - RNA, 23 nt, Artificial Sequence
  Chemically synthesized
ggacagaccaauaaugcugcuuc

SEQ ID NO: 50098 - RNA, 23 nt, Artificial Sequence
  Chemically synthesized
uggacagaccaauaaugcugcuu

SEQ ID NO: 50099 - RNA, 23 nt, Artificial Sequence
  Chemically synthesized
guggacagaccaauaaugcugcu

SEQ ID NO: 50100 - RNA, 23 nt, Artificial Sequence
  Chemically synthesized
cguggacagaccaauaaugcugc

SEQ ID NO: 50101 - RNA, 23 nt, Artificial Sequence
  Chemically synthesized
ccguggacagaccaauaaugcug

SEQ ID NO: 50102 - RNA, 23 nt, Artificial Sequence
  Chemically synthesized
caacuucaccacucaagaacugu

SEQ ID NO: 50103 - RNA, 23 nt, Artificial Sequence
  Chemically synthesized
ucaacuucaccacucaagaacug

SEQ ID NO: 50104 - RNA, 23 nt, Artificial Sequence
  Chemically synthesized
uucaacuucaccacucaagaacu

SEQ ID NO: 50105 - RNA, 23 nt, Artificial Sequence
  Chemically synthesized
cuucaacuucaccacucaagaac

SEQ ID NO: 50106 - RNA, 23 nt, Artificial Sequence
  Chemically synthesized
ucuucaacuucaccacucaagaa

SEQ ID NO: 50107 - RNA, 23 nt, Artificial Sequence
  Chemically synthesized
cauuuaucguuaaccuaacaccc

SEQ ID NO: 50108 - RNA, 23 nt, Artificial Sequence
  Chemically synthesized
cuggaagcuugugcacauucauu

SEQ ID NO: 50109 - RNA, 23 nt, Artificial Sequence
  Chemically synthesized
acuggaagcuugugcacauucau

SEQ ID NO: 50110 - RNA, 23 nt, Artificial Sequence
  Chemically synthesized
cacuggaagcuugugcacauuca

SEQ ID NO: 50111 - RNA, 23 nt, Artificial Sequence
  Chemically synthesized
ccacuggaagcuugugcacauuc

SEQ ID NO: 50112 - RNA, 23 nt, Artificial Sequence
  Chemically synthesized
accacuggaagcuugugcacauu

SEQ ID NO: 50113 - RNA, 23 nt, Artificial Sequence
  Chemically synthesized
ggauucgucaggaacaggacauu

SEQ ID NO: 50114 - RNA, 23 nt, Artificial Sequence
  Chemically synthesized
aggauucgucaggaacaggacau

SEQ ID NO: 50115 - RNA, 23 nt, Artificial Sequence
  Chemically synthesized
aaggauucgucaggaacaggaca

SEQ ID NO: 50116 - RNA, 23 nt, Artificial Sequence
  Chemically synthesized
uaaggauucgucaggaacaggac

SEQ ID NO: 50117 - RNA, 23 nt, Artificial Sequence
  Chemically synthesized
cuaaggauucgucaggaacagga

SEQ ID NO: 50118 - RNA, 23 nt, Artificial Sequence
  Chemically synthesized
gcaaaucagagaaaugaacccaa

SEQ ID NO: 50119 - RNA, 23 nt, Artificial Sequence
  Chemically synthesized
agcaaaucagagaaaugaaccca

SEQ ID NO: 50120 - RNA, 23 nt, Artificial Sequence
  Chemically synthesized
gagcaaaucagagaaaugaaccc

SEQ ID NO: 50121 - RNA, 23 nt, Artificial Sequence
  Chemically synthesized
ggagcaaaucagagaaaugaacc

SEQ ID NO: 50122 - RNA, 23 nt, Artificial Sequence
  Chemically synthesized
gggagcaaaucagagaaaugaac

SEQ ID NO: 50123 - RNA, 23 nt, Artificial Sequence
  Chemically synthesized
ccaacaagggagcaaaucagaga

SEQ ID NO: 50124 - RNA, 23 nt, Artificial Sequence
  Chemically synthesized
uccaacaagggagcaaaucagag

SEQ ID NO: 50125 - RNA, 23 nt, Artificial Sequence
  Chemically synthesized
cuccaacaagggagcaaaucaga

SEQ ID NO: 50126 - RNA, 23 nt, Artificial Sequence
  Chemically synthesized
acuccaacaagggagcaaaucag

SEQ ID NO: 50127 - RNA, 23 nt, Artificial Sequence
  Chemically synthesized
aacuccaacaagggagcaaauca

SEQ ID NO: 50128 - RNA, 23 nt, Artificial Sequence
  Chemically synthesized
ggauagugguguggaucaguugg

SEQ ID NO: 50129 - RNA, 23 nt, Artificial Sequence
  Chemically synthesized
gggauagugguguggaucaguug

SEQ ID NO: 50130 - RNA, 23 nt, Artificial Sequence
  Chemically synthesized
ggggauagugguguggaucaguu

SEQ ID NO: 50131 - RNA, 23 nt, Artificial Sequence
  Chemically synthesized
aggggauagugguguggaucagu

SEQ ID NO: 50132 - RNA, 23 nt, Artificial Sequence
  Chemically synthesized
caggggauagugguguggaucag

SEQ ID NO: 50133 - RNA, 23 nt, Artificial Sequence
  Chemically synthesized
guauaucuguucucgguacuaua

SEQ ID NO: 50134 - RNA, 23 nt, Artificial Sequence
  Chemically synthesized
cguauaucuguucucgguacuau

SEQ ID NO: 50135 - RNA, 23 nt, Artificial Sequence
  Chemically synthesized
ucguauaucuguucucgguacua

SEQ ID NO: 50136 - RNA, 23 nt, Artificial Sequence
  Chemically synthesized
uucguauaucuguucucgguacu

SEQ ID NO: 50137 - RNA, 23 nt, Artificial Sequence
  Chemically synthesized
uuucguauaucuguucucgguac

SEQ ID NO: 50138 - RNA, 23 nt, Artificial Sequence
  Chemically synthesized
auacugcuguauuaaaacucugu

SEQ ID NO: 50139 - RNA, 23 nt, Artificial Sequence
  Chemically synthesized
gauacugcuguauuaaaacucug

SEQ ID NO: 50140 - RNA, 23 nt, Artificial Sequence
  Chemically synthesized
uguauauguaucagcuguuccga

SEQ ID NO: 50141 - RNA, 23 nt, Artificial Sequence
  Chemically synthesized
uuguauauguaucagcuguuccg

SEQ ID NO: 50142 - RNA, 23 nt, Artificial Sequence
  Chemically synthesized
guuguauauguaucagcuguucc

SEQ ID NO: 50143 - RNA, 23 nt, Artificial Sequence
  Chemically synthesized
aguuguauauguaucagcuguuc

SEQ ID NO: 50144 - RNA, 23 nt, Artificial Sequence
  Chemically synthesized
aaguuguauauguaucagcuguu

SEQ ID NO: 50145 - RNA, 23 nt, Artificial Sequence
  Chemically synthesized
uaugucaaguuguauauguauca

SEQ ID NO: 50146 - RNA, 23 nt, Artificial Sequence
  Chemically synthesized
uuaugucaaguuguauauguauc

SEQ ID NO: 50147 - RNA, 23 nt, Artificial Sequence
  Chemically synthesized
cuauagucgagccaaacagacgc

SEQ ID NO: 50148 - RNA, 23 nt, Artificial Sequence
  Chemically synthesized
acuauagucgagccaaacagacg

SEQ ID NO: 50149 - RNA, 23 nt, Artificial Sequence
  Chemically synthesized
cacuauagucgagccaaacagac

SEQ ID NO: 50150 - RNA, 23 nt, Artificial Sequence
  Chemically synthesized
guuccggaaacaguauacagagu

SEQ ID NO: 50151 - RNA, 23 nt, Artificial Sequence
  Chemically synthesized
ccagaucaugagaaagcuagauc

SEQ ID NO: 50152 - RNA, 23 nt, Artificial Sequence
  Chemically synthesized
uccagaucaugagaaagcuagau

SEQ ID NO: 50153 - RNA, 23 nt, Artificial Sequence
  Chemically synthesized
cuccagaucaugagaaagcuaga

SEQ ID NO: 50154 - RNA, 23 nt, Artificial Sequence
  Chemically synthesized
gcuccagaucaugagaaagcuag

SEQ ID NO: 50155 - RNA, 23 nt, Artificial Sequence
  Chemically synthesized
agcuccagaucaugagaaagcua

SEQ ID NO: 50156 - RNA, 23 nt, Artificial Sequence
  Chemically synthesized
aacuggucgccaucaagaaagua

SEQ ID NO: 50157 - RNA, 23 nt, Artificial Sequence
  Chemically synthesized
gaacuggucgccaucaagaaagu

SEQ ID NO: 50158 - RNA, 23 nt, Artificial Sequence
  Chemically synthesized
ggugugguauaucaagccaaacu

SEQ ID NO: 50159 - RNA, 23 nt, Artificial Sequence
  Chemically synthesized
gcagcaaggugacaacaguggug

SEQ ID NO: 50160 - RNA, 23 nt, Artificial Sequence
  Chemically synthesized
ggcagcaaggugacaacaguggu

SEQ ID NO: 50161 - RNA, 23 nt, Artificial Sequence
  Chemically synthesized
cggcagcaaggugacaacagugg

SEQ ID NO: 50162 - RNA, 23 nt, Artificial Sequence
  Chemically synthesized
acggcagcaaggugacaacagug

SEQ ID NO: 50163 - RNA, 23 nt, Artificial Sequence
  Chemically synthesized
gacggcagcaaggugacaacagu

SEQ ID NO: 50164 - RNA, 23 nt, Artificial Sequence
  Chemically synthesized
auucgcgaagagagugaucaugu

SEQ ID NO: 50165 - RNA, 23 nt, Artificial Sequence
  Chemically synthesized
gauucgcgaagagagugaucaug

SEQ ID NO: 50166 - RNA, 23 nt, Artificial Sequence
  Chemically synthesized
ccaacuccaccugaacagucccg

SEQ ID NO: 50167 - RNA, 23 nt, Artificial Sequence
  Chemically synthesized
uccaacuccaccugaacaguccc

SEQ ID NO: 50168 - RNA, 23 nt, Artificial Sequence
  Chemically synthesized
uuccaacuccaccugaacagucc

SEQ ID NO: 50169 - RNA, 23 nt, Artificial Sequence
  Chemically synthesized
cuuccaacuccaccugaacaguc

SEQ ID NO: 50170 - RNA, 23 nt, Artificial Sequence
  Chemically synthesized
gcuuccaacuccaccugaacagu

SEQ ID NO: 50171 - RNA, 23 nt, Artificial Sequence
  Chemically synthesized
caccacucaagaacugucaagua

SEQ ID NO: 50172 - RNA, 23 nt, Artificial Sequence
  Chemically synthesized
ucaccacucaagaacugucaagu

SEQ ID NO: 50173 - RNA, 23 nt, Artificial Sequence
  Chemically synthesized
uucaccacucaagaacugucaag

SEQ ID NO: 50174 - RNA, 23 nt, Artificial Sequence
  Chemically synthesized
cuucaccacucaagaacugucaa

SEQ ID NO: 50175 - RNA, 23 nt, Artificial Sequence
  Chemically synthesized
acuucaccacucaagaacuguca

SEQ ID NO: 50176 - RNA, 23 nt, Artificial Sequence
  Chemically synthesized
cuugugcacauucauuuuuugau

SEQ ID NO: 50177 - RNA, 23 nt, Artificial Sequence
  Chemically synthesized
gcuugugcacauucauuuuuuga

SEQ ID NO: 50178 - RNA, 23 nt, Artificial Sequence
  Chemically synthesized
agcuugugcacauucauuuuuug

SEQ ID NO: 50179 - RNA, 23 nt, Artificial Sequence
  Chemically synthesized
aagcuugugcacauucauuuuuu

SEQ ID NO: 50180 - RNA, 23 nt, Artificial Sequence
  Chemically synthesized
gaagcuugugcacauucauuuuu

SEQ ID NO: 50181 - RNA, 23 nt, Artificial Sequence
  Chemically synthesized
uaaugcugcauuuaucguuaacc

SEQ ID NO: 50182 - RNA, 23 nt, Artificial Sequence
  Chemically synthesized
uuaaugcugcauuuaucguuaac

SEQ ID NO: 50183 - RNA, 23 nt, Artificial Sequence
  Chemically synthesized
aguauacaccaacugcccgacua

SEQ ID NO: 50184 - RNA, 23 nt, Artificial Sequence
  Chemically synthesized
caacaagggagcaaaucagagaa

SEQ ID NO: 50185 - RNA, 23 nt, Artificial Sequence
  Chemically synthesized
guagaaauaaucaagguccuggg

SEQ ID NO: 50186 - RNA, 23 nt, Artificial Sequence
  Chemically synthesized
uuggagccacugauuauaccucu

SEQ ID NO: 50187 - RNA, 23 nt, Artificial Sequence
  Chemically synthesized
uuuggagccacugauuauaccuc

SEQ ID NO: 50188 - RNA, 23 nt, Artificial Sequence
  Chemically synthesized
cuuuggagccacugauuauaccu

SEQ ID NO: 50189 - RNA, 23 nt, Artificial Sequence
  Chemically synthesized
guuucguauaucuguucucggua

SEQ ID NO: 50190 - RNA, 23 nt, Artificial Sequence
  Chemically synthesized
uguuucguauaucuguucucggu

SEQ ID NO: 50191 - RNA, 23 nt, Artificial Sequence
  Chemically synthesized
ugauacugcuguauuaaaacucu

SEQ ID NO: 50192 - RNA, 23 nt, Artificial Sequence
  Chemically synthesized
gccuauauccauuccuuuggaau

SEQ ID NO: 50193 - RNA, 23 nt, Artificial Sequence
  Chemically synthesized
agccuauauccauuccuuuggaa

SEQ ID NO: 50194 - RNA, 23 nt, Artificial Sequence
  Chemically synthesized
uagccuauauccauuccuuugga

SEQ ID NO: 50195 - RNA, 23 nt, Artificial Sequence
  Chemically synthesized
uuagccuauauccauuccuuugg

SEQ ID NO: 50196 - RNA, 23 nt, Artificial Sequence
  Chemically synthesized
uuuagccuauauccauuccuuug

SEQ ID NO: 50197 - RNA, 23 nt, Artificial Sequence
  Chemically synthesized
guuuagccuauauccauuccuuu

SEQ ID NO: 50198 - RNA, 23 nt, Artificial Sequence
  Chemically synthesized
aguuuagccuauauccauuccuu

SEQ ID NO: 50199 - RNA, 23 nt, Artificial Sequence
  Chemically synthesized
guauauguaucagcuguuccgaa

SEQ ID NO: 50200 - RNA, 23 nt, Artificial Sequence
  Chemically synthesized
gugauuuaugucaaguuguauau

SEQ ID NO: 50201 - RNA, 23 nt, Artificial Sequence
  Chemically synthesized
ugugauuuaugucaaguuguaua

SEQ ID NO: 50202 - RNA, 23 nt, Artificial Sequence
  Chemically synthesized
gaagaaagaugaggucuaucuua

SEQ ID NO: 50203 - RNA, 23 nt, Artificial Sequence
  Chemically synthesized
agaagaaagaugaggucuaucuu

SEQ ID NO: 50204 - RNA, 23 nt, Artificial Sequence
  Chemically synthesized
gagaagaaagaugaggucuaucu

SEQ ID NO: 50205 - RNA, 23 nt, Artificial Sequence
  Chemically synthesized
ugagaagaaagaugaggucuauc

SEQ ID NO: 50206 - RNA, 23 nt, Artificial Sequence
  Chemically synthesized
gugagaagaaagaugaggucuau

SEQ ID NO: 50207 - RNA, 23 nt, Artificial Sequence
  Chemically synthesized
ccaguggugagaagaaagaugag

SEQ ID NO: 50208 - RNA, 23 nt, Artificial Sequence
  Chemically synthesized
uccaguggugagaagaaagauga

SEQ ID NO: 50209 - RNA, 23 nt, Artificial Sequence
  Chemically synthesized
cuccaguggugagaagaaagaug

SEQ ID NO: 50210 - RNA, 23 nt, Artificial Sequence
  Chemically synthesized
acuccaguggugagaagaaagau

SEQ ID NO: 50211 - RNA, 23 nt, Artificial Sequence
  Chemically synthesized
uacuccaguggugagaagaaaga

SEQ ID NO: 50212 - RNA, 23 nt, Artificial Sequence
  Chemically synthesized
caugagaaagcuagaucacugua

SEQ ID NO: 50213 - RNA, 23 nt, Artificial Sequence
  Chemically synthesized
ucaugagaaagcuagaucacugu

SEQ ID NO: 50214 - RNA, 23 nt, Artificial Sequence
  Chemically synthesized
uugcaggacaagagauuuaagaa

SEQ ID NO: 50215 - RNA, 23 nt, Artificial Sequence
  Chemically synthesized
auugcaggacaagagauuuaaga

SEQ ID NO: 50216 - RNA, 23 nt, Artificial Sequence
  Chemically synthesized
uauugcaggacaagagauuuaag

SEQ ID NO: 50217 - RNA, 23 nt, Artificial Sequence
  Chemically synthesized
guauugcaggacaagagauuuaa

SEQ ID NO: 50218 - RNA, 23 nt, Artificial Sequence
  Chemically synthesized
ggaucauuuggugugguauauca

SEQ ID NO: 50219 - RNA, 23 nt, Artificial Sequence
  Chemically synthesized
uggaucauuuggugugguauauc

SEQ ID NO: 50220 - RNA, 23 nt, Artificial Sequence
  Chemically synthesized
auggaucauuuggugugguauau

SEQ ID NO: 50221 - RNA, 23 nt, Artificial Sequence
  Chemically synthesized
aauggaucauuuggugugguaua

SEQ ID NO: 50222 - RNA, 23 nt, Artificial Sequence
  Chemically synthesized
aaauggaucauuuggugugguau

SEQ ID NO: 50223 - RNA, 23 nt, Artificial Sequence
  Chemically synthesized
gaaauggaucauuugguguggua

SEQ ID NO: 50224 - RNA, 23 nt, Artificial Sequence
  Chemically synthesized
ugauuggaaauggaucauuuggu

SEQ ID NO: 50225 - RNA, 23 nt, Artificial Sequence
  Chemically synthesized
gugauuggaaauggaucauuugg

SEQ ID NO: 50226 - RNA, 23 nt, Artificial Sequence
  Chemically synthesized
agugauuggaaauggaucauuug

SEQ ID NO: 50227 - RNA, 23 nt, Artificial Sequence
  Chemically synthesized
aagugauuggaaauggaucauuu

SEQ ID NO: 50228 - RNA, 23 nt, Artificial Sequence
  Chemically synthesized
aaagugauuggaaauggaucauu

SEQ ID NO: 50229 - RNA, 23 nt, Artificial Sequence
  Chemically synthesized
gaaaaggugauucgcgaagagag

SEQ ID NO: 50230 - RNA, 23 nt, Artificial Sequence
  Chemically synthesized
gcacaggaaaaaccaccaguuac

SEQ ID NO: 50231 - RNA, 23 nt, Artificial Sequence
  Chemically synthesized
ugcacaggaaaaaccaccaguua

SEQ ID NO: 50232 - RNA, 23 nt, Artificial Sequence
  Chemically synthesized
cugcacaggaaaaaccaccaguu

SEQ ID NO: 50233 - RNA, 23 nt, Artificial Sequence
  Chemically synthesized
gcugcacaggaaaaaccaccagu

SEQ ID NO: 50234 - RNA, 23 nt, Artificial Sequence
  Chemically synthesized
agcugcacaggaaaaaccaccag

SEQ ID NO: 50235 - RNA, 23 nt, Artificial Sequence
  Chemically synthesized
accacucaagaacugucaaguaa

SEQ ID NO: 50236 - RNA, 23 nt, Artificial Sequence
  Chemically synthesized
ggaagcuugugcacauucauuuu

SEQ ID NO: 50237 - RNA, 23 nt, Artificial Sequence
  Chemically synthesized
cuuaaugcugcauuuaucguuaa

SEQ ID NO: 50238 - RNA, 23 nt, Artificial Sequence
  Chemically synthesized
ccgucugcuggaguauacaccaa

SEQ ID NO: 50239 - RNA, 23 nt, Artificial Sequence
  Chemically synthesized
gccgucugcuggaguauacacca

SEQ ID NO: 50240 - RNA, 23 nt, Artificial Sequence
  Chemically synthesized
agccgucugcuggaguauacacc

SEQ ID NO: 50241 - RNA, 23 nt, Artificial Sequence
  Chemically synthesized
uagccgucugcuggaguauacac

SEQ ID NO: 50242 - RNA, 23 nt, Artificial Sequence
  Chemically synthesized
guagccgucugcuggaguauaca

SEQ ID NO: 50243 - RNA, 23 nt, Artificial Sequence
  Chemically synthesized
acuaaggauucgucaggaacagg

SEQ ID NO: 50244 - RNA, 23 nt, Artificial Sequence
  Chemically synthesized
gacuaaggauucgucaggaacag

SEQ ID NO: 50245 - RNA, 23 nt, Artificial Sequence
  Chemically synthesized
ggacuaaggauucgucaggaaca

SEQ ID NO: 50246 - RNA, 23 nt, Artificial Sequence
  Chemically synthesized
uggacuaaggauucgucaggaac

SEQ ID NO: 50247 - RNA, 23 nt, Artificial Sequence
  Chemically synthesized
uuggacuaaggauucgucaggaa

SEQ ID NO: 50248 - RNA, 23 nt, Artificial Sequence
  Chemically synthesized
guauuaaaacucugugacuuugg

SEQ ID NO: 50249 - RNA, 23 nt, Artificial Sequence
  Chemically synthesized
uguauuaaaacucugugacuuug

SEQ ID NO: 50250 - RNA, 23 nt, Artificial Sequence
  Chemically synthesized
gaaacaguauacagaguugccag

SEQ ID NO: 50251 - RNA, 23 nt, Artificial Sequence
  Chemically synthesized
ggugagaagaaagaugaggucua

SEQ ID NO: 50252 - RNA, 23 nt, Artificial Sequence
  Chemically synthesized
ugcguuauuucuucuacuccagu

SEQ ID NO: 50253 - RNA, 23 nt, Artificial Sequence
  Chemically synthesized
uugcguuauuucuucuacuccag

SEQ ID NO: 50254 - RNA, 23 nt, Artificial Sequence
  Chemically synthesized
auugcguuauuucuucuacucca

SEQ ID NO: 50255 - RNA, 23 nt, Artificial Sequence
  Chemically synthesized
gauugcguuauuucuucuacucc

SEQ ID NO: 50256 - RNA, 23 nt, Artificial Sequence
  Chemically synthesized
cgauugcguuauuucuucuacuc

SEQ ID NO: 50257 - RNA, 23 nt, Artificial Sequence
  Chemically synthesized
ccgauugcguuauuucuucuacu

SEQ ID NO: 50258 - RNA, 23 nt, Artificial Sequence
  Chemically synthesized
uccgauugcguuauuucuucuac

SEQ ID NO: 50259 - RNA, 23 nt, Artificial Sequence
  Chemically synthesized
guccgauugcguuauuucuucua

SEQ ID NO: 50260 - RNA, 23 nt, Artificial Sequence
  Chemically synthesized
aguccgauugcguuauuucuucu

SEQ ID NO: 50261 - RNA, 23 nt, Artificial Sequence
  Chemically synthesized
uaguccgauugcguuauuucuuc

SEQ ID NO: 50262 - RNA, 23 nt, Artificial Sequence
  Chemically synthesized
acuguaacauaguccgauugcgu

SEQ ID NO: 50263 - RNA, 23 nt, Artificial Sequence
  Chemically synthesized
cacuguaacauaguccgauugcg

SEQ ID NO: 50264 - RNA, 23 nt, Artificial Sequence
  Chemically synthesized
ucacuguaacauaguccgauugc

SEQ ID NO: 50265 - RNA, 23 nt, Artificial Sequence
  Chemically synthesized
aucacuguaacauaguccgauug

SEQ ID NO: 50266 - RNA, 23 nt, Artificial Sequence
  Chemically synthesized
gaucacuguaacauaguccgauu

SEQ ID NO: 50267 - RNA, 23 nt, Artificial Sequence
  Chemically synthesized
agaucacuguaacauaguccgau

SEQ ID NO: 50268 - RNA, 23 nt, Artificial Sequence
  Chemically synthesized
cuagaucacuguaacauaguccg

SEQ ID NO: 50269 - RNA, 23 nt, Artificial Sequence
  Chemically synthesized
gcuagaucacuguaacauagucc

SEQ ID NO: 50270 - RNA, 23 nt, Artificial Sequence
  Chemically synthesized
agcuagaucacuguaacauaguc

SEQ ID NO: 50271 - RNA, 23 nt, Artificial Sequence
  Chemically synthesized
agaaauaaucaagguccugggaa

SEQ ID NO: 50272 - RNA, 23 nt, Artificial Sequence
  Chemically synthesized
caauguuucguauaucuguucuc

SEQ ID NO: 50273 - RNA, 23 nt, Artificial Sequence
  Chemically synthesized
auauguuaaauauccgugccgau

SEQ ID NO: 50274 - RNA, 23 nt, Artificial Sequence
  Chemically synthesized
caccucuggcuaccauccuuauu

SEQ ID NO: 50275 - RNA, 23 nt, Artificial Sequence
  Chemically synthesized
gaaaguauugcaggacaagagau

SEQ ID NO: 50276 - RNA, 23 nt, Artificial Sequence
  Chemically synthesized
cuguuccgaaguuuagccuauau

SEQ ID NO: 50277 - RNA, 23 nt, Artificial Sequence
  Chemically synthesized
cuguaacauaguccgauugcguu

SEQ ID NO: 50278 - RNA, 23 nt, Artificial Sequence
  Chemically synthesized
ggugauucgcgaagagagugauc

SEQ ID NO: 50279 - RNA, 23 nt, Artificial Sequence
  Chemically synthesized
gaucauuuggugugguauaucaa

SEQ ID NO: 50280 - RNA, 23 nt, Artificial Sequence
  Chemically synthesized
gaaaaaccaccaguuacuugagu

SEQ ID NO: 50281 - RNA, 23 nt, Artificial Sequence
  Chemically synthesized
uguguguuggcugagcuguuacu

SEQ ID NO: 50282 - RNA, 23 nt, Artificial Sequence
  Chemically synthesized
acaguauacagaguugccagaca

SEQ ID NO: 50283 - RNA, 23 nt, Artificial Sequence
  Chemically synthesized
aguauugcaggacaagagauuua

SEQ ID NO: 50284 - RNA, 23 nt, Artificial Sequence
  Chemically synthesized
ugauucgcgaagagagugaucau

SEQ ID NO: 50285 - RNA, 23 nt, Artificial Sequence
  Chemically synthesized
gcuguguguuggcugagcuguua

SEQ ID NO: 50286 - RNA, 23 nt, Artificial Sequence
  Chemically synthesized
ccucuuguuggauccugauacug

SEQ ID NO: 50287 - RNA, 23 nt, Artificial Sequence
  Chemically synthesized
ccaccucuggcuaccauccuuau

SEQ ID NO: 50288 - RNA, 23 nt, Artificial Sequence
  Chemically synthesized
acauaguccgauugcguuauuuc

SEQ ID NO: 50289 - RNA, 23 nt, Artificial Sequence
  Chemically synthesized
caacauaaagacaaaaggaagaa

SEQ ID NO: 50290 - RNA, 23 nt, Artificial Sequence
  Chemically synthesized
caaacuaccaaaugggcgagaca

SEQ ID NO: 50291 - RNA, 23 nt, Artificial Sequence
  Chemically synthesized
uggaagcuugugcacauucauuu

SEQ ID NO: 50292 - RNA, 23 nt, Artificial Sequence
  Chemically synthesized
gugaaaagccaagaggacgaagu

SEQ ID NO: 50293 - RNA, 23 nt, Artificial Sequence
  Chemically synthesized
guaacauaguccgauugcguuau

SEQ ID NO: 50294 - RNA, 23 nt, Artificial Sequence
  Chemically synthesized
cagaugcuaauacuggagaccgu

SEQ ID NO: 50295 - RNA, 23 nt, Artificial Sequence
  Chemically synthesized
cuguuacuaggacaaccaauauu

SEQ ID NO: 50296 - RNA, 23 nt, Artificial Sequence
  Chemically synthesized
gaggacgaagucuuuuucuuuuu

SEQ ID NO: 50297 - RNA, 23 nt, Artificial Sequence
  Chemically synthesized
gaaaagccaagaggacgaagucu

SEQ ID NO: 50298 - RNA, 23 nt, Artificial Sequence
  Chemically synthesized
caaaaggagugaaaagccaagag

SEQ ID NO: 50299 - RNA, 23 nt, Artificial Sequence
  Chemically synthesized
guggugagaagaaagaugagguc

SEQ ID NO: 50300 - RNA, 23 nt, Artificial Sequence
  Chemically synthesized
aacauaguccgauugcguuauuu

SEQ ID NO: 50301 - RNA, 23 nt, Artificial Sequence
  Chemically synthesized
ucaaacuaccaaaugggcgagac

SEQ ID NO: 50302 - RNA, 23 nt, Artificial Sequence
  Chemically synthesized
caauugcacuguguagccgucug

SEQ ID NO: 50303 - RNA, 23 nt, Artificial Sequence
  Chemically synthesized
gcaauugcacuguguagccgucu

SEQ ID NO: 50304 - RNA, 23 nt, Artificial Sequence
  Chemically synthesized
ggaacuccaacaagggagcaaau

SEQ ID NO: 50305 - RNA, 23 nt, Artificial Sequence
  Chemically synthesized
ggugcuggacuauguuccggaaa

SEQ ID NO: 50306 - RNA, 23 nt, Artificial Sequence
  Chemically synthesized
gcguuauuucuucuacuccagug

SEQ ID NO: 50307 - RNA, 23 nt, Artificial Sequence
  Chemically synthesized
uaacauaguccgauugcguuauu

SEQ ID NO: 50308 - RNA, 23 nt, Artificial Sequence
  Chemically synthesized
gcuaauacuggagaccguggaca

SEQ ID NO: 50309 - RNA, 23 nt, Artificial Sequence
  Chemically synthesized
cgaaguuuagccuauauccauuc

SEQ ID NO: 50310 - RNA, 23 nt, Artificial Sequence
  Chemically synthesized
ccgaaguuuagccuauauccauu

SEQ ID NO: 50311 - RNA, 23 nt, Artificial Sequence
  Chemically synthesized
gcuucugcaucagcuuccaacuc

SEQ ID NO: 50312 - RNA, 23 nt, Artificial Sequence
  Chemically synthesized
ccaaacagacgcucccugugauu

SEQ ID NO: 50313 - RNA, 23 nt, Artificial Sequence
  Chemically synthesized
acaaaugccacagcagcgucaga

SEQ ID NO: 50314 - RNA, 23 nt, Artificial Sequence
  Chemically synthesized
guauggucugcuggcuguguguu

SEQ ID NO: 50315 - RNA, 23 nt, Artificial Sequence
  Chemically synthesized
gaaguuuagccuauauccauucc

SEQ ID NO: 50316 - RNA, 23 nt, Artificial Sequence
  Chemically synthesized
caaacagacgcucccugugauuu

SEQ ID NO: 50317 - RNA, 23 nt, Artificial Sequence
  Chemically synthesized
acaagagauuuaagaaucgagag

SEQ ID NO: 50318 - RNA, 23 nt, Artificial Sequence
  Chemically synthesized
ggaaauggaucauuugguguggu

SEQ ID NO: 50319 - RNA, 23 nt, Artificial Sequence
  Chemically synthesized
gaagucagcuauacagacacuaa

SEQ ID NO: 50320 - RNA, 23 nt, Artificial Sequence
  Chemically synthesized
cagcuuuuggcagcaugaaaguu

SEQ ID NO: 50321 - RNA, 23 nt, Artificial Sequence
  Chemically synthesized
agaguugaucuuuggagccacug

SEQ ID NO: 50322 - RNA, 23 nt, Artificial Sequence
  Chemically synthesized
ccaucgggauauuaaaccgcaga

SEQ ID NO: 50323 - RNA, 23 nt, Artificial Sequence
  Chemically synthesized
gugcuggacuauguuccggaaac

SEQ ID NO: 50324 - RNA, 23 nt, Artificial Sequence
  Chemically synthesized
agaagucagcuauacagacacua

SEQ ID NO: 50325 - RNA, 23 nt, Artificial Sequence
  Chemically synthesized
agaaaaggaggaaggaaggaaaa

SEQ ID NO: 50326 - RNA, 23 nt, Artificial Sequence
  Chemically synthesized
agacaaaaggaagaaaaggagga

SEQ ID NO: 50327 - RNA, 23 nt, Artificial Sequence
  Chemically synthesized
ggagaccguggacagaccaauaa

SEQ ID NO: 50328 - RNA, 23 nt, Artificial Sequence
  Chemically synthesized
cagaguugaucuuuggagccacu

SEQ ID NO: 50329 - RNA, 23 nt, Artificial Sequence
  Chemically synthesized
acucugugacuuuggaagugcaa

SEQ ID NO: 50330 - RNA, 23 nt, Artificial Sequence
  Chemically synthesized
ccacagcagcgucagaugcuaau

SEQ ID NO: 50331 - RNA, 23 nt, Artificial Sequence
  Chemically synthesized
gaauuacgggacccaaaugucaa

SEQ ID NO: 50332 - RNA, 23 nt, Artificial Sequence
  Chemically synthesized
ggaacaggacauuucaccucagg

SEQ ID NO: 50333 - RNA, 23 nt, Artificial Sequence
  Chemically synthesized
ugggaacuccaacaagggagcaa

SEQ ID NO: 50334 - RNA, 23 nt, Artificial Sequence
  Chemically synthesized
guccgaggagaacccaauguuuc

SEQ ID NO: 50335 - RNA, 23 nt, Artificial Sequence
  Chemically synthesized
ccugauacugcuguauuaaaacu

SEQ ID NO: 50336 - RNA, 23 nt, Artificial Sequence
  Chemically synthesized
gacaggccacaagaagucagcua

SEQ ID NO: 50337 - RNA, 23 nt, Artificial Sequence
  Chemically synthesized
uggcagcaugaaaguuagcagag

SEQ ID NO: 50338 - RNA, 23 nt, Artificial Sequence
  Chemically synthesized
gaacaggacauuucaccucagga

SEQ ID NO: 50339 - RNA, 23 nt, Artificial Sequence
  Chemically synthesized
acacagaauuuaaauucccucaa

SEQ ID NO: 50340 - RNA, 23 nt, Artificial Sequence
  Chemically synthesized
gaaaugaacccaaacuacacaga

SEQ ID NO: 50341 - RNA, 23 nt, Artificial Sequence
  Chemically synthesized
gggaacuccaacaagggagcaaa

SEQ ID NO: 50342 - RNA, 23 nt, Artificial Sequence
  Chemically synthesized
caucgggauauuaaaccgcagaa

SEQ ID NO: 50343 - RNA, 23 nt, Artificial Sequence
  Chemically synthesized
ggaagaaaaggaggaaggaagga

SEQ ID NO: 50344 - RNA, 23 nt, Artificial Sequence
  Chemically synthesized
aggaacaggacauuucaccucag

SEQ ID NO: 50345 - RNA, 23 nt, Artificial Sequence
  Chemically synthesized
aaaugaacccaaacuacacagaa

SEQ ID NO: 50346 - RNA, 23 nt, Artificial Sequence
  Chemically synthesized
gaacuccaacaagggagcaaauc

SEQ ID NO: 50347 - RNA, 23 nt, Artificial Sequence
  Chemically synthesized
gcuguuacuaggacaaccaauau

SEQ ID NO: 50348 - RNA, 23 nt, Artificial Sequence
  Chemically synthesized
gaagucuuuuucuuuuucuucug

SEQ ID NO: 50349 - RNA, 23 nt, Artificial Sequence
  Chemically synthesized
ugaucuuuggagccacugauuau

SEQ ID NO: 50350 - RNA, 23 nt, Artificial Sequence
  Chemically synthesized
gguccgaggagaacccaauguuu

SEQ ID NO: 50351 - RNA, 23 nt, Artificial Sequence
  Chemically synthesized
agaggacgaagucuuuuucuuuu

SEQ ID NO: 50352 - RNA, 23 nt, Artificial Sequence
  Chemically synthesized
ccaagaggacgaagucuuuuucu

SEQ ID NO: 50353 - RNA, 23 nt, Artificial Sequence
  Chemically synthesized
ggagaacuggucgccaucaagaa

SEQ ID NO: 50354 - RNA, 23 nt, Artificial Sequence
  Chemically synthesized
aggagaacuggucgccaucaaga

SEQ ID NO: 50355 - RNA, 23 nt, Artificial Sequence
  Chemically synthesized
cagccuucagcuuuuggcagcau

SEQ ID NO: 50356 - RNA, 23 nt, Artificial Sequence
  Chemically synthesized
gaaaaggaggaaggaaggaaaag

SEQ ID NO: 50357 - RNA, 23 nt, Artificial Sequence
  Chemically synthesized
acaaaaggaagaaaaggaggaag

SEQ ID NO: 50358 - RNA, 23 nt, Artificial Sequence
  Chemically synthesized
gagcuguuacuaggacaaccaau

SEQ ID NO: 50359 - RNA, 23 nt, Artificial Sequence
  Chemically synthesized
agucuuuuucuuuuucuucugug

SEQ ID NO: 50360 - RNA, 23 nt, Artificial Sequence
  Chemically synthesized
uugaucuuuggagccacugauua

SEQ ID NO: 50361 - RNA, 23 nt, Artificial Sequence
  Chemically synthesized
aggacgaagucuuuuucuuuuuc

SEQ ID NO: 50362 - RNA, 23 nt, Artificial Sequence
  Chemically synthesized
gaaagaugaggucuaucuuaauc

SEQ ID NO: 50363 - RNA, 23 nt, Artificial Sequence
  Chemically synthesized
gucaaguaauccaccucuggcua

SEQ ID NO: 50364 - RNA, 23 nt, Artificial Sequence
  Chemically synthesized
cgggacccaaaugucaaacuacc

SEQ ID NO: 50365 - RNA, 23 nt, Artificial Sequence
  Chemically synthesized
acgggacccaaaugucaaacuac

SEQ ID NO: 50366 - RNA, 23 nt, Artificial Sequence
  Chemically synthesized
gauucgucaggaacaggacauuu

SEQ ID NO: 50367 - RNA, 23 nt, Artificial Sequence
  Chemically synthesized
caaaucagagaaaugaacccaaa

SEQ ID NO: 50368 - RNA, 23 nt, Artificial Sequence
  Chemically synthesized
gauccugauacugcuguauuaaa

SEQ ID NO: 50369 - RNA, 23 nt, Artificial Sequence
  Chemically synthesized
ccuauauccauuccuuuggaauc

SEQ ID NO: 50370 - RNA, 23 nt, Artificial Sequence
  Chemically synthesized
ucaggagaacuggucgccaucaa

SEQ ID NO: 50371 - RNA, 23 nt, Artificial Sequence
  Chemically synthesized
gaacagauauacgaaacauuggg

SEQ ID NO: 50372 - RNA, 23 nt, Artificial Sequence
  Chemically synthesized
aacagauauacgaaacauugggu

SEQ ID NO: 50373 - RNA, 23 nt, Artificial Sequence
  Chemically synthesized
acagauauacgaaacauuggguu

SEQ ID NO: 50374 - RNA, 23 nt, Artificial Sequence
  Chemically synthesized
cagauauacgaaacauuggguuc

SEQ ID NO: 50375 - RNA, 23 nt, Artificial Sequence
  Chemically synthesized
agauauacgaaacauuggguucu

SEQ ID NO: 50376 - RNA, 23 nt, Artificial Sequence
  Chemically synthesized
cuugucucugcuaacuuucaugc

SEQ ID NO: 50377 - RNA, 23 nt, Artificial Sequence
  Chemically synthesized
uugucucugcuaacuuucaugcu

SEQ ID NO: 50378 - RNA, 23 nt, Artificial Sequence
  Chemically synthesized
ugucucugcuaacuuucaugcug

SEQ ID NO: 50379 - RNA, 23 nt, Artificial Sequence
  Chemically synthesized
gucucugcuaacuuucaugcugc

SEQ ID NO: 50380 - RNA, 23 nt, Artificial Sequence
  Chemically synthesized
ucucugcuaacuuucaugcugcc

SEQ ID NO: 50381 - RNA, 23 nt, Artificial Sequence
  Chemically synthesized
aagcuuccagugguguuagucgg

SEQ ID NO: 50382 - RNA, 23 nt, Artificial Sequence
  Chemically synthesized
agcuuccagugguguuagucggg

SEQ ID NO: 50383 - RNA, 23 nt, Artificial Sequence
  Chemically synthesized
gcuuccagugguguuagucgggc

SEQ ID NO: 50384 - RNA, 23 nt, Artificial Sequence
  Chemically synthesized
cuuccagugguguuagucgggca

SEQ ID NO: 50385 - RNA, 23 nt, Artificial Sequence
  Chemically synthesized
uuccagugguguuagucgggcag

SEQ ID NO: 50386 - RNA, 23 nt, Artificial Sequence
  Chemically synthesized
caaaacaagcgauauauuucucc

SEQ ID NO: 50387 - RNA, 23 nt, Artificial Sequence
  Chemically synthesized
aaaacaagcgauauauuucuccu

SEQ ID NO: 50388 - RNA, 23 nt, Artificial Sequence
  Chemically synthesized
aaacaagcgauauauuucuccuu

SEQ ID NO: 50389 - RNA, 23 nt, Artificial Sequence
  Chemically synthesized
aacaagcgauauauuucuccuuc

SEQ ID NO: 50390 - RNA, 23 nt, Artificial Sequence
  Chemically synthesized
acaagcgauauauuucuccuuca

SEQ ID NO: 50391 - RNA, 23 nt, Artificial Sequence
  Chemically synthesized
cuuccuuuugucuuuauguuggg

SEQ ID NO: 50392 - RNA, 23 nt, Artificial Sequence
  Chemically synthesized
uuccuuuugucuuuauguugggg

SEQ ID NO: 50393 - RNA, 23 nt, Artificial Sequence
  Chemically synthesized
uccuuuugucuuuauguuggggu

SEQ ID NO: 50394 - RNA, 23 nt, Artificial Sequence
  Chemically synthesized
ccuuuugucuuuauguuggggug

SEQ ID NO: 50395 - RNA, 23 nt, Artificial Sequence
  Chemically synthesized
cuuuugucuuuauguuggggugu

SEQ ID NO: 50396 - RNA, 23 nt, Artificial Sequence
  Chemically synthesized
ccauuugguaguuugacauuugg

SEQ ID NO: 50397 - RNA, 23 nt, Artificial Sequence
  Chemically synthesized
cauuugguaguuugacauuuggg

SEQ ID NO: 50398 - RNA, 23 nt, Artificial Sequence
  Chemically synthesized
auuugguaguuugacauuugggu

SEQ ID NO: 50399 - RNA, 23 nt, Artificial Sequence
  Chemically synthesized
uuugguaguuugacauuuggguc

SEQ ID NO: 50400 - RNA, 23 nt, Artificial Sequence
  Chemically synthesized
uugguaguuugacauuugggucc

SEQ ID NO: 50401 - RNA, 23 nt, Artificial Sequence
  Chemically synthesized
gauauacgaaacauuggguucuc

SEQ ID NO: 50402 - RNA, 23 nt, Artificial Sequence
  Chemically synthesized
auauacgaaacauuggguucucc

SEQ ID NO: 50403 - RNA, 23 nt, Artificial Sequence
  Chemically synthesized
uauacgaaacauuggguucuccu

SEQ ID NO: 50404 - RNA, 23 nt, Artificial Sequence
  Chemically synthesized
auacgaaacauuggguucuccuc

SEQ ID NO: 50405 - RNA, 23 nt, Artificial Sequence
  Chemically synthesized
cucgauucuuaaaucucuugucc

SEQ ID NO: 50406 - RNA, 23 nt, Artificial Sequence
  Chemically synthesized
ucgauucuuaaaucucuuguccu

SEQ ID NO: 50407 - RNA, 23 nt, Artificial Sequence
  Chemically synthesized
cgauucuuaaaucucuuguccug

SEQ ID NO: 50408 - RNA, 23 nt, Artificial Sequence
  Chemically synthesized
gauucuuaaaucucuuguccugc

SEQ ID NO: 50409 - RNA, 23 nt, Artificial Sequence
  Chemically synthesized
auucuuaaaucucuuguccugca

SEQ ID NO: 50410 - RNA, 23 nt, Artificial Sequence
  Chemically synthesized
ucuguauagcugacuucuugugg

SEQ ID NO: 50411 - RNA, 23 nt, Artificial Sequence
  Chemically synthesized
cuguauagcugacuucuuguggc

SEQ ID NO: 50412 - RNA, 23 nt, Artificial Sequence
  Chemically synthesized
uguauagcugacuucuuguggcc

SEQ ID NO: 50413 - RNA, 23 nt, Artificial Sequence
  Chemically synthesized
guauagcugacuucuuguggccu

SEQ ID NO: 50414 - RNA, 23 nt, Artificial Sequence
  Chemically synthesized
uauagcugacuucuuguggccug

SEQ ID NO: 50415 - RNA, 23 nt, Artificial Sequence
  Chemically synthesized
agcaugaggaggaauaaggaugg

SEQ ID NO: 50416 - RNA, 23 nt, Artificial Sequence
  Chemically synthesized
gcaugaggaggaauaaggauggu

SEQ ID NO: 50417 - RNA, 23 nt, Artificial Sequence
  Chemically synthesized
caugaggaggaauaaggauggua

SEQ ID NO: 50418 - RNA, 23 nt, Artificial Sequence
  Chemically synthesized
augaggaggaauaaggaugguag

SEQ ID NO: 50419 - RNA, 23 nt, Artificial Sequence
  Chemically synthesized
ugaggaggaauaaggaugguagc

SEQ ID NO: 50420 - RNA, 23 nt, Artificial Sequence
  Chemically synthesized
uacgaaacauuggguucuccucg

SEQ ID NO: 50421 - RNA, 23 nt, Artificial Sequence
  Chemically synthesized
acgaaacauuggguucuccucgg

SEQ ID NO: 50422 - RNA, 23 nt, Artificial Sequence
  Chemically synthesized
ggugaaguugaagagugcaggug

SEQ ID NO: 50423 - RNA, 23 nt, Artificial Sequence
  Chemically synthesized
gugaaguugaagagugcaggugu

SEQ ID NO: 50424 - RNA, 23 nt, Artificial Sequence
  Chemically synthesized
ugaaguugaagagugcaggugug

SEQ ID NO: 50425 - RNA, 23 nt, Artificial Sequence
  Chemically synthesized
gaaguugaagagugcaggugugu

SEQ ID NO: 50426 - RNA, 23 nt, Artificial Sequence
  Chemically synthesized
aaguugaagagugcagguguguc

SEQ ID NO: 50427 - RNA, 23 nt, Artificial Sequence
  Chemically synthesized
cgauaaaugcagcauuaaguucu

SEQ ID NO: 50428 - RNA, 23 nt, Artificial Sequence
  Chemically synthesized
gauaaaugcagcauuaaguucuc

SEQ ID NO: 50429 - RNA, 23 nt, Artificial Sequence
  Chemically synthesized
auaaaugcagcauuaaguucucc

SEQ ID NO: 50430 - RNA, 23 nt, Artificial Sequence
  Chemically synthesized
uaaaugcagcauuaaguucuccc

SEQ ID NO: 50431 - RNA, 23 nt, Artificial Sequence
  Chemically synthesized
aaaugcagcauuaaguucuccca

SEQ ID NO: 50432 - RNA, 23 nt, Artificial Sequence
  Chemically synthesized
aaugcagcauuaaguucucccac

SEQ ID NO: 50433 - RNA, 23 nt, Artificial Sequence
  Chemically synthesized
augcagcauuaaguucucccaca

SEQ ID NO: 50434 - RNA, 23 nt, Artificial Sequence
  Chemically synthesized
aauuuaaauucuguguaguuugg

SEQ ID NO: 50435 - RNA, 23 nt, Artificial Sequence
  Chemically synthesized
auuuaaauucuguguaguuuggg

SEQ ID NO: 50436 - RNA, 23 nt, Artificial Sequence
  Chemically synthesized
uuuaaauucuguguaguuugggu

SEQ ID NO: 50437 - RNA, 23 nt, Artificial Sequence
  Chemically synthesized
uuaaauucuguguaguuuggguu

SEQ ID NO: 50438 - RNA, 23 nt, Artificial Sequence
  Chemically synthesized
uaaauucuguguaguuuggguuc

SEQ ID NO: 50439 - RNA, 23 nt, Artificial Sequence
  Chemically synthesized
agagguucugcgguuuaauaucc

SEQ ID NO: 50440 - RNA, 23 nt, Artificial Sequence
  Chemically synthesized
gagguucugcgguuuaauauccc

SEQ ID NO: 50441 - RNA, 23 nt, Artificial Sequence
  Chemically synthesized
agguucugcgguuuaauaucccg

SEQ ID NO: 50442 - RNA, 23 nt, Artificial Sequence
  Chemically synthesized
gguucugcgguuuaauaucccga

SEQ ID NO: 50443 - RNA, 23 nt, Artificial Sequence
  Chemically synthesized
guucugcgguuuaauaucccgau

SEQ ID NO: 50444 - RNA, 23 nt, Artificial Sequence
  Chemically synthesized
acaaaacaagcgauauauuucuc

SEQ ID NO: 50445 - RNA, 23 nt, Artificial Sequence
  Chemically synthesized
gauauauuucuccuucaagacag

SEQ ID NO: 50446 - RNA, 23 nt, Artificial Sequence
  Chemically synthesized
auauauuucuccuucaagacaga

SEQ ID NO: 50447 - RNA, 23 nt, Artificial Sequence
  Chemically synthesized
uauauuucuccuucaagacagau

SEQ ID NO: 50448 - RNA, 23 nt, Artificial Sequence
  Chemically synthesized
auauuucuccuucaagacagauc

SEQ ID NO: 50449 - RNA, 23 nt, Artificial Sequence
  Chemically synthesized
uauuucuccuucaagacagaucg

SEQ ID NO: 50450 - RNA, 23 nt, Artificial Sequence
  Chemically synthesized
ucuuccuuuugucuuuauguugg

SEQ ID NO: 50451 - RNA, 23 nt, Artificial Sequence
  Chemically synthesized
gguguuagguuaacgauaaaugc

SEQ ID NO: 50452 - RNA, 23 nt, Artificial Sequence
  Chemically synthesized
guguuagguuaacgauaaaugca

SEQ ID NO: 50453 - RNA, 23 nt, Artificial Sequence
  Chemically synthesized
uguuagguuaacgauaaaugcag

SEQ ID NO: 50454 - RNA, 23 nt, Artificial Sequence
  Chemically synthesized
guuagguuaacgauaaaugcagc

SEQ ID NO: 50455 - RNA, 23 nt, Artificial Sequence
  Chemically synthesized
uuagguuaacgauaaaugcagca

SEQ ID NO: 50456 - RNA, 23 nt, Artificial Sequence
  Chemically synthesized
cccauuugguaguuugacauuug

SEQ ID NO: 50457 - RNA, 23 nt, Artificial Sequence
  Chemically synthesized
auacuagagguauaaucaguggc

SEQ ID NO: 50458 - RNA, 23 nt, Artificial Sequence
  Chemically synthesized
uacuagagguauaaucaguggcu

SEQ ID NO: 50459 - RNA, 23 nt, Artificial Sequence
  Chemically synthesized
acuagagguauaaucaguggcuc

SEQ ID NO: 50460 - RNA, 23 nt, Artificial Sequence
  Chemically synthesized
cuagagguauaaucaguggcucc

SEQ ID NO: 50461 - RNA, 23 nt, Artificial Sequence
  Chemically synthesized
uagagguauaaucaguggcucca

SEQ ID NO: 50462 - RNA, 23 nt, Artificial Sequence
  Chemically synthesized
agaacagauauacgaaacauugg

SEQ ID NO: 50463 - RNA, 23 nt, Artificial Sequence
  Chemically synthesized
gugguuuuuccugugcagcuggc

SEQ ID NO: 50464 - RNA, 23 nt, Artificial Sequence
  Chemically synthesized
ugguuuuuccugugcagcuggcu

SEQ ID NO: 50465 - RNA, 23 nt, Artificial Sequence
  Chemically synthesized
gguuuuuccugugcagcuggcug

SEQ ID NO: 50466 - RNA, 23 nt, Artificial Sequence
  Chemically synthesized
guuuuuccugugcagcuggcugc

SEQ ID NO: 50467 - RNA, 23 nt, Artificial Sequence
  Chemically synthesized
uuuuuccugugcagcuggcugcu

SEQ ID NO: 50468 - RNA, 23 nt, Artificial Sequence
  Chemically synthesized
gguggauuacuugacaguucuug

SEQ ID NO: 50469 - RNA, 23 nt, Artificial Sequence
  Chemically synthesized
guggauuacuugacaguucuuga

SEQ ID NO: 50470 - RNA, 23 nt, Artificial Sequence
  Chemically synthesized
uggauuacuugacaguucuugag

SEQ ID NO: 50471 - RNA, 23 nt, Artificial Sequence
  Chemically synthesized
ggauuacuugacaguucuugagu

SEQ ID NO: 50472 - RNA, 23 nt, Artificial Sequence
  Chemically synthesized
gauuacuugacaguucuugagug

SEQ ID NO: 50473 - RNA, 23 nt, Artificial Sequence
  Chemically synthesized
aguugaagagugcaggugugucu

SEQ ID NO: 50474 - RNA, 23 nt, Artificial Sequence
  Chemically synthesized
guugaagagugcaggugugucuc

SEQ ID NO: 50475 - RNA, 23 nt, Artificial Sequence
  Chemically synthesized
uugaagagugcaggugugucucg

SEQ ID NO: 50476 - RNA, 23 nt, Artificial Sequence
  Chemically synthesized
cgcacuccugaggugaaaugucc

SEQ ID NO: 50477 - RNA, 23 nt, Artificial Sequence
  Chemically synthesized
gcacuccugaggugaaauguccu

SEQ ID NO: 50478 - RNA, 23 nt, Artificial Sequence
  Chemically synthesized
cacuccugaggugaaauguccug

SEQ ID NO: 50479 - RNA, 23 nt, Artificial Sequence
  Chemically synthesized
acuccugaggugaaauguccugu

SEQ ID NO: 50480 - RNA, 23 nt, Artificial Sequence
  Chemically synthesized
cuccugaggugaaauguccuguu

SEQ ID NO: 50481 - RNA, 23 nt, Artificial Sequence
  Chemically synthesized
uauacuagagguauaaucagugg

SEQ ID NO: 50482 - RNA, 23 nt, Artificial Sequence
  Chemically synthesized
uggcaacucuguauacuguuucc

SEQ ID NO: 50483 - RNA, 23 nt, Artificial Sequence
  Chemically synthesized
ggcaacucuguauacuguuuccg

SEQ ID NO: 50484 - RNA, 23 nt, Artificial Sequence
  Chemically synthesized
gcaacucuguauacuguuuccgg

SEQ ID NO: 50485 - RNA, 23 nt, Artificial Sequence
  Chemically synthesized
caacucuguauacuguuuccgga

SEQ ID NO: 50486 - RNA, 23 nt, Artificial Sequence
  Chemically synthesized
aacucuguauacuguuuccggaa

SEQ ID NO: 50487 - RNA, 23 nt, Artificial Sequence
  Chemically synthesized
ucucuuguccugcaauacuuucu

SEQ ID NO: 50488 - RNA, 23 nt, Artificial Sequence
  Chemically synthesized
cucuuguccugcaauacuuucuu

SEQ ID NO: 50489 - RNA, 23 nt, Artificial Sequence
  Chemically synthesized
ucuuguccugcaauacuuucuug

SEQ ID NO: 50490 - RNA, 23 nt, Artificial Sequence
  Chemically synthesized
cuuguccugcaauacuuucuuga

SEQ ID NO: 50491 - RNA, 23 nt, Artificial Sequence
  Chemically synthesized
uuguccugcaauacuuucuugau

SEQ ID NO: 50492 - RNA, 23 nt, Artificial Sequence
  Chemically synthesized
guccugcaauacuuucuugaugg

SEQ ID NO: 50493 - RNA, 23 nt, Artificial Sequence
  Chemically synthesized
uccugcaauacuuucuugauggc

SEQ ID NO: 50494 - RNA, 23 nt, Artificial Sequence
  Chemically synthesized
ccugcaauacuuucuugauggcg

SEQ ID NO: 50495 - RNA, 23 nt, Artificial Sequence
  Chemically synthesized
cugcaauacuuucuugauggcga

SEQ ID NO: 50496 - RNA, 23 nt, Artificial Sequence
  Chemically synthesized
ugcaauacuuucuugauggcgac

SEQ ID NO: 50497 - RNA, 23 nt, Artificial Sequence
  Chemically synthesized
caagcgauauauuucuccuucaa

SEQ ID NO: 50498 - RNA, 23 nt, Artificial Sequence
  Chemically synthesized
aagcgauauauuucuccuucaag

SEQ ID NO: 50499 - RNA, 23 nt, Artificial Sequence
  Chemically synthesized
agcgauauauuucuccuucaaga

SEQ ID NO: 50500 - RNA, 23 nt, Artificial Sequence
  Chemically synthesized
cacaaaguuuggcuugauauacc

SEQ ID NO: 50501 - RNA, 23 nt, Artificial Sequence
  Chemically synthesized
acaaaguuuggcuugauauacca

SEQ ID NO: 50502 - RNA, 23 nt, Artificial Sequence
  Chemically synthesized
caaaguuuggcuugauauaccac

SEQ ID NO: 50503 - RNA, 23 nt, Artificial Sequence
  Chemically synthesized
aaaguuuggcuugauauaccaca

SEQ ID NO: 50504 - RNA, 23 nt, Artificial Sequence
  Chemically synthesized
aaguuuggcuugauauaccacac

SEQ ID NO: 50505 - RNA, 23 nt, Artificial Sequence
  Chemically synthesized
gcgauauauuucuccuucaagac

SEQ ID NO: 50506 - RNA, 23 nt, Artificial Sequence
  Chemically synthesized
cgauauauuucuccuucaagaca

SEQ ID NO: 50507 - RNA, 23 nt, Artificial Sequence
  Chemically synthesized
gugucuguauagcugacuucuug

SEQ ID NO: 50508 - RNA, 23 nt, Artificial Sequence
  Chemically synthesized
ugucuguauagcugacuucuugu

SEQ ID NO: 50509 - RNA, 23 nt, Artificial Sequence
  Chemically synthesized
gucuguauagcugacuucuugug

SEQ ID NO: 50510 - RNA, 23 nt, Artificial Sequence
  Chemically synthesized
gagcaugaggaggaauaaggaug

SEQ ID NO: 50511 - RNA, 23 nt, Artificial Sequence
  Chemically synthesized
ugaguggugaaguugaagagugc

SEQ ID NO: 50512 - RNA, 23 nt, Artificial Sequence
  Chemically synthesized
gaguggugaaguugaagagugca

SEQ ID NO: 50513 - RNA, 23 nt, Artificial Sequence
  Chemically synthesized
aguggugaaguugaagagugcag

SEQ ID NO: 50514 - RNA, 23 nt, Artificial Sequence
  Chemically synthesized
guggugaaguugaagagugcagg

SEQ ID NO: 50515 - RNA, 23 nt, Artificial Sequence
  Chemically synthesized
uggugaaguugaagagugcaggu

SEQ ID NO: 50516 - RNA, 23 nt, Artificial Sequence
  Chemically synthesized
aaauucuguguaguuuggguuca

SEQ ID NO: 50517 - RNA, 23 nt, Artificial Sequence
  Chemically synthesized
ugauuauuucuaccaacugaucc

SEQ ID NO: 50518 - RNA, 23 nt, Artificial Sequence
  Chemically synthesized
gauuauuucuaccaacugaucca

SEQ ID NO: 50519 - RNA, 23 nt, Artificial Sequence
  Chemically synthesized
auuauuucuaccaacugauccac

SEQ ID NO: 50520 - RNA, 23 nt, Artificial Sequence
  Chemically synthesized
uuauuucuaccaacugauccaca

SEQ ID NO: 50521 - RNA, 23 nt, Artificial Sequence
  Chemically synthesized
uauuucuaccaacugauccacac

SEQ ID NO: 50522 - RNA, 23 nt, Artificial Sequence
  Chemically synthesized
auacaacuugacauaaaucacag

SEQ ID NO: 50523 - RNA, 23 nt, Artificial Sequence
  Chemically synthesized
uacaacuugacauaaaucacagg

SEQ ID NO: 50524 - RNA, 23 nt, Artificial Sequence
  Chemically synthesized
acaacuugacauaaaucacaggg

SEQ ID NO: 50525 - RNA, 23 nt, Artificial Sequence
  Chemically synthesized
caacuugacauaaaucacaggga

SEQ ID NO: 50526 - RNA, 23 nt, Artificial Sequence
  Chemically synthesized
aacuugacauaaaucacagggag

SEQ ID NO: 50527 - RNA, 23 nt, Artificial Sequence
  Chemically synthesized
gcaauacuuucuugauggcgacc

SEQ ID NO: 50528 - RNA, 23 nt, Artificial Sequence
  Chemically synthesized
caauacuuucuugauggcgacca

SEQ ID NO: 50529 - RNA, 23 nt, Artificial Sequence
  Chemically synthesized
aauacuuucuugauggcgaccag

SEQ ID NO: 50530 - RNA, 23 nt, Artificial Sequence
  Chemically synthesized
auuucuccuucaagacagaucgg

SEQ ID NO: 50531 - RNA, 23 nt, Artificial Sequence
  Chemically synthesized
uuucuccuucaagacagaucggc

SEQ ID NO: 50532 - RNA, 23 nt, Artificial Sequence
  Chemically synthesized
uucuccuucaagacagaucggca

SEQ ID NO: 50533 - RNA, 23 nt, Artificial Sequence
  Chemically synthesized
ucuccuucaagacagaucggcac

SEQ ID NO: 50534 - RNA, 23 nt, Artificial Sequence
  Chemically synthesized
gaggaggaauaaggaugguagcc

SEQ ID NO: 50535 - RNA, 23 nt, Artificial Sequence
  Chemically synthesized
auuacuugacaguucuugagugg

SEQ ID NO: 50536 - RNA, 23 nt, Artificial Sequence
  Chemically synthesized
caagcuuccagugguguuagucg

SEQ ID NO: 50537 - RNA, 23 nt, Artificial Sequence
  Chemically synthesized
auuucuaccaacugauccacacc

SEQ ID NO: 50538 - RNA, 23 nt, Artificial Sequence
  Chemically synthesized
uuaauacagcaguaucaggaucc

SEQ ID NO: 50539 - RNA, 23 nt, Artificial Sequence
  Chemically synthesized
uaauacagcaguaucaggaucca

SEQ ID NO: 50540 - RNA, 23 nt, Artificial Sequence
  Chemically synthesized
aauacagcaguaucaggauccaa

SEQ ID NO: 50541 - RNA, 23 nt, Artificial Sequence
  Chemically synthesized
auacagcaguaucaggauccaac

SEQ ID NO: 50542 - RNA, 23 nt, Artificial Sequence
  Chemically synthesized
uacagcaguaucaggauccaaca

SEQ ID NO: 50543 - RNA, 23 nt, Artificial Sequence
  Chemically synthesized
cugcgguuuaauaucccgauggc

SEQ ID NO: 50544 - RNA, 23 nt, Artificial Sequence
  Chemically synthesized
ugcgguuuaauaucccgauggca

SEQ ID NO: 50545 - RNA, 23 nt, Artificial Sequence
  Chemically synthesized
gcgguuuaauaucccgauggcag

SEQ ID NO: 50546 - RNA, 23 nt, Artificial Sequence
  Chemically synthesized
cgguuuaauaucccgauggcaga

SEQ ID NO: 50547 - RNA, 23 nt, Artificial Sequence
  Chemically synthesized
gguuuaauaucccgauggcagau

SEQ ID NO: 50548 - RNA, 23 nt, Artificial Sequence
  Chemically synthesized
guuuaauaucccgauggcagauu

SEQ ID NO: 50549 - RNA, 23 nt, Artificial Sequence
  Chemically synthesized
uuuaauaucccgauggcagauuc

SEQ ID NO: 50550 - RNA, 23 nt, Artificial Sequence
  Chemically synthesized
uuaauaucccgauggcagauucc

SEQ ID NO: 50551 - RNA, 23 nt, Artificial Sequence
  Chemically synthesized
uaauaucccgauggcagauucca

SEQ ID NO: 50552 - RNA, 23 nt, Artificial Sequence
  Chemically synthesized
aauaucccgauggcagauuccaa

SEQ ID NO: 50553 - RNA, 23 nt, Artificial Sequence
  Chemically synthesized
auaucccgauggcagauuccaaa

SEQ ID NO: 50554 - RNA, 23 nt, Artificial Sequence
  Chemically synthesized
acuugacauaaaucacagggagc

SEQ ID NO: 50555 - RNA, 23 nt, Artificial Sequence
  Chemically synthesized
cuugacauaaaucacagggagcg

SEQ ID NO: 50556 - RNA, 23 nt, Artificial Sequence
  Chemically synthesized
uugacauaaaucacagggagcgu

SEQ ID NO: 50557 - RNA, 23 nt, Artificial Sequence
  Chemically synthesized
ucuguuuggcucgacuauagugu

SEQ ID NO: 50558 - RNA, 23 nt, Artificial Sequence
  Chemically synthesized
cuguuuggcucgacuauaguguc

SEQ ID NO: 50559 - RNA, 23 nt, Artificial Sequence
  Chemically synthesized
uguuuggcucgacuauagugucu

SEQ ID NO: 50560 - RNA, 23 nt, Artificial Sequence
  Chemically synthesized
guuuggcucgacuauagugucug

SEQ ID NO: 50561 - RNA, 23 nt, Artificial Sequence
  Chemically synthesized
uuuggcucgacuauagugucugg

SEQ ID NO: 50562 - RNA, 23 nt, Artificial Sequence
  Chemically synthesized
uauguuacagugaucuagcuuuc

SEQ ID NO: 50563 - RNA, 23 nt, Artificial Sequence
  Chemically synthesized
auguuacagugaucuagcuuucu

SEQ ID NO: 50564 - RNA, 23 nt, Artificial Sequence
  Chemically synthesized
uguuacagugaucuagcuuucuc

SEQ ID NO: 50565 - RNA, 23 nt, Artificial Sequence
  Chemically synthesized
guuacagugaucuagcuuucuca

SEQ ID NO: 50566 - RNA, 23 nt, Artificial Sequence
  Chemically synthesized
uuacagugaucuagcuuucucau

SEQ ID NO: 50567 - RNA, 23 nt, Artificial Sequence
  Chemically synthesized
ggcuuuucacuccuuuuguauac

SEQ ID NO: 50568 - RNA, 23 nt, Artificial Sequence
  Chemically synthesized
gcuuuucacuccuuuuguauacu

SEQ ID NO: 50569 - RNA, 23 nt, Artificial Sequence
  Chemically synthesized
cuuuucacuccuuuuguauacua

SEQ ID NO: 50570 - RNA, 23 nt, Artificial Sequence
  Chemically synthesized
uuuucacuccuuuuguauacuau

SEQ ID NO: 50571 - RNA, 23 nt, Artificial Sequence
  Chemically synthesized
uuucacuccuuuuguauacuaua

SEQ ID NO: 50572 - RNA, 23 nt, Artificial Sequence
  Chemically synthesized
ucacuuuagugucuguauagcug

SEQ ID NO: 50573 - RNA, 23 nt, Artificial Sequence
  Chemically synthesized
cacuuuagugucuguauagcuga

SEQ ID NO: 50574 - RNA, 23 nt, Artificial Sequence
  Chemically synthesized
acuuuagugucuguauagcugac

SEQ ID NO: 50575 - RNA, 23 nt, Artificial Sequence
  Chemically synthesized
cuuuagugucuguauagcugacu

SEQ ID NO: 50576 - RNA, 23 nt, Artificial Sequence
  Chemically synthesized
uuuagugucuguauagcugacuu

SEQ ID NO: 50577 - RNA, 23 nt, Artificial Sequence
  Chemically synthesized
guccuugucucugcuaacuuuca

SEQ ID NO: 50578 - RNA, 23 nt, Artificial Sequence
  Chemically synthesized
uccuugucucugcuaacuuucau

SEQ ID NO: 50579 - RNA, 23 nt, Artificial Sequence
  Chemically synthesized
ccuugucucugcuaacuuucaug

SEQ ID NO: 50580 - RNA, 23 nt, Artificial Sequence
  Chemically synthesized
cucaaguaacuggugguuuuucc

SEQ ID NO: 50581 - RNA, 23 nt, Artificial Sequence
  Chemically synthesized
ucaaguaacuggugguuuuuccu

SEQ ID NO: 50582 - RNA, 23 nt, Artificial Sequence
  Chemically synthesized
caaguaacuggugguuuuuccug

SEQ ID NO: 50583 - RNA, 23 nt, Artificial Sequence
  Chemically synthesized
aaguaacuggugguuuuuccugu

SEQ ID NO: 50584 - RNA, 23 nt, Artificial Sequence
  Chemically synthesized
aguaacuggugguuuuuccugug

SEQ ID NO: 50585 - RNA, 23 nt, Artificial Sequence
  Chemically synthesized
aggaggaauaaggaugguagcca

SEQ ID NO: 50586 - RNA, 23 nt, Artificial Sequence
  Chemically synthesized
ggaggaauaaggaugguagccag

SEQ ID NO: 50587 - RNA, 23 nt, Artificial Sequence
  Chemically synthesized
gaggaauaaggaugguagccaga

SEQ ID NO: 50588 - RNA, 23 nt, Artificial Sequence
  Chemically synthesized
aggaauaaggaugguagccagag

SEQ ID NO: 50589 - RNA, 23 nt, Artificial Sequence
  Chemically synthesized
ugguaguuugacauuuggguccc

SEQ ID NO: 50590 - RNA, 23 nt, Artificial Sequence
  Chemically synthesized
ugacauuugggucccguaauuca

SEQ ID NO: 50591 - RNA, 23 nt, Artificial Sequence
  Chemically synthesized
gacauuugggucccguaauucau

SEQ ID NO: 50592 - RNA, 23 nt, Artificial Sequence
  Chemically synthesized
acauuugggucccguaauucauc

SEQ ID NO: 50593 - RNA, 23 nt, Artificial Sequence
  Chemically synthesized
cauuugggucccguaauucauca

SEQ ID NO: 50594 - RNA, 23 nt, Artificial Sequence
  Chemically synthesized
auuugggucccguaauucaucaa

SEQ ID NO: 50595 - RNA, 23 nt, Artificial Sequence
  Chemically synthesized
uagguuaacgauaaaugcagcau

SEQ ID NO: 50596 - RNA, 23 nt, Artificial Sequence
  Chemically synthesized
agguuaacgauaaaugcagcauu

SEQ ID NO: 50597 - RNA, 23 nt, Artificial Sequence
  Chemically synthesized
aauucaucaaaaaaugaaugugc

SEQ ID NO: 50598 - RNA, 23 nt, Artificial Sequence
  Chemically synthesized
auucaucaaaaaaugaaugugca

SEQ ID NO: 50599 - RNA, 23 nt, Artificial Sequence
  Chemically synthesized
uucaucaaaaaaugaaugugcac

SEQ ID NO: 50600 - RNA, 23 nt, Artificial Sequence
  Chemically synthesized
ucaucaaaaaaugaaugugcaca

SEQ ID NO: 50601 - RNA, 23 nt, Artificial Sequence
  Chemically synthesized
caucaaaaaaugaaugugcacaa

SEQ ID NO: 50602 - RNA, 23 nt, Artificial Sequence
  Chemically synthesized
acgauaaaugcagcauuaaguuc

SEQ ID NO: 50603 - RNA, 23 nt, Artificial Sequence
  Chemically synthesized
aauucuguguaguuuggguucau

SEQ ID NO: 50604 - RNA, 23 nt, Artificial Sequence
  Chemically synthesized
ugcagcauuaaguucucccacag

SEQ ID NO: 50605 - RNA, 23 nt, Artificial Sequence
  Chemically synthesized
caggaccuugauuauuucuacca

SEQ ID NO: 50606 - RNA, 23 nt, Artificial Sequence
  Chemically synthesized
aggaccuugauuauuucuaccaa

SEQ ID NO: 50607 - RNA, 23 nt, Artificial Sequence
  Chemically synthesized
ggaccuugauuauuucuaccaac

SEQ ID NO: 50608 - RNA, 23 nt, Artificial Sequence
  Chemically synthesized
gaccuugauuauuucuaccaacu

SEQ ID NO: 50609 - RNA, 23 nt, Artificial Sequence
  Chemically synthesized
accuugauuauuucuaccaacug

SEQ ID NO: 50610 - RNA, 23 nt, Artificial Sequence
  Chemically synthesized
ccuugauuauuucuaccaacuga

SEQ ID NO: 50611 - RNA, 23 nt, Artificial Sequence
  Chemically synthesized
cuugauuauuucuaccaacugau

SEQ ID NO: 50612 - RNA, 23 nt, Artificial Sequence
  Chemically synthesized
uugauuauuucuaccaacugauc

SEQ ID NO: 50613 - RNA, 23 nt, Artificial Sequence
  Chemically synthesized
uuucuaccaacugauccacacca

SEQ ID NO: 50614 - RNA, 23 nt, Artificial Sequence
  Chemically synthesized
uugguuguccuaguaacagcuca

SEQ ID NO: 50615 - RNA, 23 nt, Artificial Sequence
  Chemically synthesized
ugguuguccuaguaacagcucag

SEQ ID NO: 50616 - RNA, 23 nt, Artificial Sequence
  Chemically synthesized
gguuguccuaguaacagcucagc

SEQ ID NO: 50617 - RNA, 23 nt, Artificial Sequence
  Chemically synthesized
guuguccuaguaacagcucagcc

SEQ ID NO: 50618 - RNA, 23 nt, Artificial Sequence
  Chemically synthesized
uuguccuaguaacagcucagcca

SEQ ID NO: 50619 - RNA, 23 nt, Artificial Sequence
  Chemically synthesized
uaucccgauggcagauuccaaag

SEQ ID NO: 50620 - RNA, 23 nt, Artificial Sequence
  Chemically synthesized
acagcugauacauauacaacuug

SEQ ID NO: 50621 - RNA, 23 nt, Artificial Sequence
  Chemically synthesized
cagcugauacauauacaacuuga

SEQ ID NO: 50622 - RNA, 23 nt, Artificial Sequence
  Chemically synthesized
agcugauacauauacaacuugac

SEQ ID NO: 50623 - RNA, 23 nt, Artificial Sequence
  Chemically synthesized
gcugauacauauacaacuugaca

SEQ ID NO: 50624 - RNA, 23 nt, Artificial Sequence
  Chemically synthesized
cugauacauauacaacuugacau

SEQ ID NO: 50625 - RNA, 23 nt, Artificial Sequence
  Chemically synthesized
ugacauaaaucacagggagcguc

SEQ ID NO: 50626 - RNA, 23 nt, Artificial Sequence
  Chemically synthesized
gacauaaaucacagggagcgucu

SEQ ID NO: 50627 - RNA, 23 nt, Artificial Sequence
  Chemically synthesized
acauaaaucacagggagcgucug

SEQ ID NO: 50628 - RNA, 23 nt, Artificial Sequence
  Chemically synthesized
cauaaaucacagggagcgucugu

SEQ ID NO: 50629 - RNA, 23 nt, Artificial Sequence
  Chemically synthesized
auaaaucacagggagcgucuguu

SEQ ID NO: 50630 - RNA, 23 nt, Artificial Sequence
  Chemically synthesized
aguccagcaccagauuaagauag

SEQ ID NO: 50631 - RNA, 23 nt, Artificial Sequence
  Chemically synthesized
guccagcaccagauuaagauaga

SEQ ID NO: 50632 - RNA, 23 nt, Artificial Sequence
  Chemically synthesized
uccagcaccagauuaagauagac

SEQ ID NO: 50633 - RNA, 23 nt, Artificial Sequence
  Chemically synthesized
ccagcaccagauuaagauagacc

SEQ ID NO: 50634 - RNA, 23 nt, Artificial Sequence
  Chemically synthesized
cagcaccagauuaagauagaccu

SEQ ID NO: 50635 - RNA, 23 nt, Artificial Sequence
  Chemically synthesized
agcaccagauuaagauagaccuc

SEQ ID NO: 50636 - RNA, 23 nt, Artificial Sequence
  Chemically synthesized
gcaccagauuaagauagaccuca

SEQ ID NO: 50637 - RNA, 23 nt, Artificial Sequence
  Chemically synthesized
caccagauuaagauagaccucau

SEQ ID NO: 50638 - RNA, 23 nt, Artificial Sequence
  Chemically synthesized
accagauuaagauagaccucauc

SEQ ID NO: 50639 - RNA, 23 nt, Artificial Sequence
  Chemically synthesized
ccagauuaagauagaccucaucu

SEQ ID NO: 50640 - RNA, 23 nt, Artificial Sequence
  Chemically synthesized
cagauuaagauagaccucaucuu

SEQ ID NO: 50641 - RNA, 23 nt, Artificial Sequence
  Chemically synthesized
auacuuucuugauggcgaccagu

SEQ ID NO: 50642 - RNA, 23 nt, Artificial Sequence
  Chemically synthesized
cccugacaugaucacucucuucg

SEQ ID NO: 50643 - RNA, 23 nt, Artificial Sequence
  Chemically synthesized
ccugacaugaucacucucuucgc

SEQ ID NO: 50644 - RNA, 23 nt, Artificial Sequence
  Chemically synthesized
cugacaugaucacucucuucgcg

SEQ ID NO: 50645 - RNA, 23 nt, Artificial Sequence
  Chemically synthesized
ugacaugaucacucucuucgcga

SEQ ID NO: 50646 - RNA, 23 nt, Artificial Sequence
  Chemically synthesized
gacaugaucacucucuucgcgaa

SEQ ID NO: 50647 - RNA, 23 nt, Artificial Sequence
  Chemically synthesized
cuccuucaagacagaucggcacg

SEQ ID NO: 50648 - RNA, 23 nt, Artificial Sequence
  Chemically synthesized
uccuucaagacagaucggcacgg

SEQ ID NO: 50649 - RNA, 23 nt, Artificial Sequence
  Chemically synthesized
ucucuucgcgaaucaccuuuucc

SEQ ID NO: 50650 - RNA, 23 nt, Artificial Sequence
  Chemically synthesized
cucuucgcgaaucaccuuuuccu

SEQ ID NO: 50651 - RNA, 23 nt, Artificial Sequence
  Chemically synthesized
ucuucgcgaaucaccuuuuccuu

SEQ ID NO: 50652 - RNA, 23 nt, Artificial Sequence
  Chemically synthesized
cuucgcgaaucaccuuuuccuuc

SEQ ID NO: 50653 - RNA, 23 nt, Artificial Sequence
  Chemically synthesized
uucgcgaaucaccuuuuccuucc

SEQ ID NO: 50654 - RNA, 23 nt, Artificial Sequence
  Chemically synthesized
gcgaaucaccuuuuccuuccuuc

SEQ ID NO: 50655 - RNA, 23 nt, Artificial Sequence
  Chemically synthesized
cgaaucaccuuuuccuuccuucc

SEQ ID NO: 50656 - RNA, 23 nt, Artificial Sequence
  Chemically synthesized
gaaucaccuuuuccuuccuuccu

SEQ ID NO: 50657 - RNA, 23 nt, Artificial Sequence
  Chemically synthesized
aaucaccuuuuccuuccuuccuc

SEQ ID NO: 50658 - RNA, 23 nt, Artificial Sequence
  Chemically synthesized
aucaccuuuuccuuccuuccucc

SEQ ID NO: 50659 - RNA, 23 nt, Artificial Sequence
  Chemically synthesized
augcagaagcagcauuauugguc

SEQ ID NO: 50660 - RNA, 23 nt, Artificial Sequence
  Chemically synthesized
ugcagaagcagcauuauuggucu

SEQ ID NO: 50661 - RNA, 23 nt, Artificial Sequence
  Chemically synthesized
gcagaagcagcauuauuggucug

SEQ ID NO: 50662 - RNA, 23 nt, Artificial Sequence
  Chemically synthesized
cagaagcagcauuauuggucugu

SEQ ID NO: 50663 - RNA, 23 nt, Artificial Sequence
  Chemically synthesized
agaagcagcauuauuggucuguc

SEQ ID NO: 50664 - RNA, 23 nt, Artificial Sequence
  Chemically synthesized
uccgagcaugaggaggaauaagg

SEQ ID NO: 50665 - RNA, 23 nt, Artificial Sequence
  Chemically synthesized
ccgagcaugaggaggaauaagga

SEQ ID NO: 50666 - RNA, 23 nt, Artificial Sequence
  Chemically synthesized
cgagcaugaggaggaauaaggau

SEQ ID NO: 50667 - RNA, 23 nt, Artificial Sequence
  Chemically synthesized
ucuugaguggugaaguugaagag

SEQ ID NO: 50668 - RNA, 23 nt, Artificial Sequence
  Chemically synthesized
cuugaguggugaaguugaagagu

SEQ ID NO: 50669 - RNA, 23 nt, Artificial Sequence
  Chemically synthesized
uugaguggugaaguugaagagug

SEQ ID NO: 50670 - RNA, 23 nt, Artificial Sequence
  Chemically synthesized
gguguuagucgggcaguuggugu

SEQ ID NO: 50671 - RNA, 23 nt, Artificial Sequence
  Chemically synthesized
guguuagucgggcaguuggugua

SEQ ID NO: 50672 - RNA, 23 nt, Artificial Sequence
  Chemically synthesized
uguuagucgggcaguugguguau

SEQ ID NO: 50673 - RNA, 23 nt, Artificial Sequence
  Chemically synthesized
guuagucgggcaguugguguaua

SEQ ID NO: 50674 - RNA, 23 nt, Artificial Sequence
  Chemically synthesized
uuagucgggcaguugguguauac

SEQ ID NO: 50675 - RNA, 23 nt, Artificial Sequence
  Chemically synthesized
aggugaaauguccuguuccugac

SEQ ID NO: 50676 - RNA, 23 nt, Artificial Sequence
  Chemically synthesized
ggugaaauguccuguuccugacg

SEQ ID NO: 50677 - RNA, 23 nt, Artificial Sequence
  Chemically synthesized
gugaaauguccuguuccugacga

SEQ ID NO: 50678 - RNA, 23 nt, Artificial Sequence
  Chemically synthesized
ugaaauguccuguuccugacgaa

SEQ ID NO: 50679 - RNA, 23 nt, Artificial Sequence
  Chemically synthesized
gaaauguccuguuccugacgaau

SEQ ID NO: 50680 - RNA, 23 nt, Artificial Sequence
  Chemically synthesized
uucauuucucugauuugcucccu

SEQ ID NO: 50681 - RNA, 23 nt, Artificial Sequence
  Chemically synthesized
ucauuucucugauuugcucccuu

SEQ ID NO: 50682 - RNA, 23 nt, Artificial Sequence
  Chemically synthesized
cauuucucugauuugcucccuug

SEQ ID NO: 50683 - RNA, 23 nt, Artificial Sequence
  Chemically synthesized
auuucucugauuugcucccuugu

SEQ ID NO: 50684 - RNA, 23 nt, Artificial Sequence
  Chemically synthesized
uuucucugauuugcucccuuguu

SEQ ID NO: 50685 - RNA, 23 nt, Artificial Sequence
  Chemically synthesized
ccaggaccuugauuauuucuacc

SEQ ID NO: 50686 - RNA, 23 nt, Artificial Sequence
  Chemically synthesized
aaagucacagaguuuuaauacag

SEQ ID NO: 50687 - RNA, 23 nt, Artificial Sequence
  Chemically synthesized
aagucacagaguuuuaauacagc

SEQ ID NO: 50688 - RNA, 23 nt, Artificial Sequence
  Chemically synthesized
agucacagaguuuuaauacagca

SEQ ID NO: 50689 - RNA, 23 nt, Artificial Sequence
  Chemically synthesized
gucacagaguuuuaauacagcag

SEQ ID NO: 50690 - RNA, 23 nt, Artificial Sequence
  Chemically synthesized
ucacagaguuuuaauacagcagu

SEQ ID NO: 50691 - RNA, 23 nt, Artificial Sequence
  Chemically synthesized
cacagaguuuuaauacagcagua

SEQ ID NO: 50692 - RNA, 23 nt, Artificial Sequence
  Chemically synthesized
uaaaucacagggagcgucuguuu

SEQ ID NO: 50693 - RNA, 23 nt, Artificial Sequence
  Chemically synthesized
uguccugcaauacuuucuugaug

SEQ ID NO: 50694 - RNA, 23 nt, Artificial Sequence
  Chemically synthesized
ucgcgaaucaccuuuuccuuccu

SEQ ID NO: 50695 - RNA, 23 nt, Artificial Sequence
  Chemically synthesized
cgcgaaucaccuuuuccuuccuu

SEQ ID NO: 50696 - RNA, 23 nt, Artificial Sequence
  Chemically synthesized
ggugguuuuuccugugcagcugg

SEQ ID NO: 50697 - RNA, 23 nt, Artificial Sequence
  Chemically synthesized
gaagcagcauuauuggucugucc

SEQ ID NO: 50698 - RNA, 23 nt, Artificial Sequence
  Chemically synthesized
aagcagcauuauuggucugucca

SEQ ID NO: 50699 - RNA, 23 nt, Artificial Sequence
  Chemically synthesized
agcagcauuauuggucuguccac

SEQ ID NO: 50700 - RNA, 23 nt, Artificial Sequence
  Chemically synthesized
gcagcauuauuggucuguccacg

SEQ ID NO: 50701 - RNA, 23 nt, Artificial Sequence
  Chemically synthesized
cagcauuauuggucuguccacgg

SEQ ID NO: 50702 - RNA, 23 nt, Artificial Sequence
  Chemically synthesized
acaguucuugaguggugaaguug

SEQ ID NO: 50703 - RNA, 23 nt, Artificial Sequence
  Chemically synthesized
caguucuugaguggugaaguuga

SEQ ID NO: 50704 - RNA, 23 nt, Artificial Sequence
  Chemically synthesized
aguucuugaguggugaaguugaa

SEQ ID NO: 50705 - RNA, 23 nt, Artificial Sequence
  Chemically synthesized
guucuugaguggugaaguugaag

SEQ ID NO: 50706 - RNA, 23 nt, Artificial Sequence
  Chemically synthesized
uucuugaguggugaaguugaaga

SEQ ID NO: 50707 - RNA, 23 nt, Artificial Sequence
  Chemically synthesized
ggguguuagguuaacgauaaaug

SEQ ID NO: 50708 - RNA, 23 nt, Artificial Sequence
  Chemically synthesized
aaugaaugugcacaagcuuccag

SEQ ID NO: 50709 - RNA, 23 nt, Artificial Sequence
  Chemically synthesized
augaaugugcacaagcuuccagu

SEQ ID NO: 50710 - RNA, 23 nt, Artificial Sequence
  Chemically synthesized
ugaaugugcacaagcuuccagug

SEQ ID NO: 50711 - RNA, 23 nt, Artificial Sequence
  Chemically synthesized
gaaugugcacaagcuuccagugg

SEQ ID NO: 50712 - RNA, 23 nt, Artificial Sequence
  Chemically synthesized
aaugugcacaagcuuccaguggu

SEQ ID NO: 50713 - RNA, 23 nt, Artificial Sequence
  Chemically synthesized
aauguccuguuccugacgaaucc

SEQ ID NO: 50714 - RNA, 23 nt, Artificial Sequence
  Chemically synthesized
auguccuguuccugacgaauccu

SEQ ID NO: 50715 - RNA, 23 nt, Artificial Sequence
  Chemically synthesized
uguccuguuccugacgaauccuu

SEQ ID NO: 50716 - RNA, 23 nt, Artificial Sequence
  Chemically synthesized
guccuguuccugacgaauccuua

SEQ ID NO: 50717 - RNA, 23 nt, Artificial Sequence
  Chemically synthesized
uccuguuccugacgaauccuuag

SEQ ID NO: 50718 - RNA, 23 nt, Artificial Sequence
  Chemically synthesized
uuggguucauuucucugauuugc

SEQ ID NO: 50719 - RNA, 23 nt, Artificial Sequence
  Chemically synthesized
uggguucauuucucugauuugcu

SEQ ID NO: 50720 - RNA, 23 nt, Artificial Sequence
  Chemically synthesized
ggguucauuucucugauuugcuc

SEQ ID NO: 50721 - RNA, 23 nt, Artificial Sequence
  Chemically synthesized
gguucauuucucugauuugcucc

SEQ ID NO: 50722 - RNA, 23 nt, Artificial Sequence
  Chemically synthesized
guucauuucucugauuugcuccc

SEQ ID NO: 50723 - RNA, 23 nt, Artificial Sequence
  Chemically synthesized
ucucugauuugcucccuuguugg

SEQ ID NO: 50724 - RNA, 23 nt, Artificial Sequence
  Chemically synthesized
cucugauuugcucccuuguugga

SEQ ID NO: 50725 - RNA, 23 nt, Artificial Sequence
  Chemically synthesized
ucugauuugcucccuuguuggag

SEQ ID NO: 50726 - RNA, 23 nt, Artificial Sequence
  Chemically synthesized
cugauuugcucccuuguuggagu

SEQ ID NO: 50727 - RNA, 23 nt, Artificial Sequence
  Chemically synthesized
ugauuugcucccuuguuggaguu

SEQ ID NO: 50728 - RNA, 23 nt, Artificial Sequence
  Chemically synthesized
ccaacugauccacaccacuaucc

SEQ ID NO: 50729 - RNA, 23 nt, Artificial Sequence
  Chemically synthesized
caacugauccacaccacuauccc

SEQ ID NO: 50730 - RNA, 23 nt, Artificial Sequence
  Chemically synthesized
aacugauccacaccacuaucccc

SEQ ID NO: 50731 - RNA, 23 nt, Artificial Sequence
  Chemically synthesized
acugauccacaccacuauccccu

SEQ ID NO: 50732 - RNA, 23 nt, Artificial Sequence
  Chemically synthesized
cugauccacaccacuauccccug

SEQ ID NO: 50733 - RNA, 23 nt, Artificial Sequence
  Chemically synthesized
uauaguaccgagaacagauauac

SEQ ID NO: 50734 - RNA, 23 nt, Artificial Sequence
  Chemically synthesized
auaguaccgagaacagauauacg

SEQ ID NO: 50735 - RNA, 23 nt, Artificial Sequence
  Chemically synthesized
uaguaccgagaacagauauacga

SEQ ID NO: 50736 - RNA, 23 nt, Artificial Sequence
  Chemically synthesized
aguaccgagaacagauauacgaa

SEQ ID NO: 50737 - RNA, 23 nt, Artificial Sequence
  Chemically synthesized
guaccgagaacagauauacgaaa

SEQ ID NO: 50738 - RNA, 23 nt, Artificial Sequence
  Chemically synthesized
acagaguuuuaauacagcaguau

SEQ ID NO: 50739 - RNA, 23 nt, Artificial Sequence
  Chemically synthesized
cagaguuuuaauacagcaguauc

SEQ ID NO: 50740 - RNA, 23 nt, Artificial Sequence
  Chemically synthesized
ucggaacagcugauacauauaca

SEQ ID NO: 50741 - RNA, 23 nt, Artificial Sequence
  Chemically synthesized
cggaacagcugauacauauacaa

SEQ ID NO: 50742 - RNA, 23 nt, Artificial Sequence
  Chemically synthesized
ggaacagcugauacauauacaac

SEQ ID NO: 50743 - RNA, 23 nt, Artificial Sequence
  Chemically synthesized
gaacagcugauacauauacaacu

SEQ ID NO: 50744 - RNA, 23 nt, Artificial Sequence
  Chemically synthesized
aacagcugauacauauacaacuu

SEQ ID NO: 50745 - RNA, 23 nt, Artificial Sequence
  Chemically synthesized
ugauacauauacaacuugacaua

SEQ ID NO: 50746 - RNA, 23 nt, Artificial Sequence
  Chemically synthesized
gauacauauacaacuugacauaa

SEQ ID NO: 50747 - RNA, 23 nt, Artificial Sequence
  Chemically synthesized
gcgucuguuuggcucgacuauag

SEQ ID NO: 50748 - RNA, 23 nt, Artificial Sequence
  Chemically synthesized
cgucuguuuggcucgacuauagu

SEQ ID NO: 50749 - RNA, 23 nt, Artificial Sequence
  Chemically synthesized
gucuguuuggcucgacuauagug

SEQ ID NO: 50750 - RNA, 23 nt, Artificial Sequence
  Chemically synthesized
acucuguauacuguuuccggaac

SEQ ID NO: 50751 - RNA, 23 nt, Artificial Sequence
  Chemically synthesized
gaucuagcuuucucaugaucugg

SEQ ID NO: 50752 - RNA, 23 nt, Artificial Sequence
  Chemically synthesized
aucuagcuuucucaugaucugga

SEQ ID NO: 50753 - RNA, 23 nt, Artificial Sequence
  Chemically synthesized
ucuagcuuucucaugaucuggag

SEQ ID NO: 50754 - RNA, 23 nt, Artificial Sequence
  Chemically synthesized
cuagcuuucucaugaucuggagc

SEQ ID NO: 50755 - RNA, 23 nt, Artificial Sequence
  Chemically synthesized
uagcuuucucaugaucuggagcu

SEQ ID NO: 50756 - RNA, 23 nt, Artificial Sequence
  Chemically synthesized
uacuuucuugauggcgaccaguu

SEQ ID NO: 50757 - RNA, 23 nt, Artificial Sequence
  Chemically synthesized
acuuucuugauggcgaccaguuc

SEQ ID NO: 50758 - RNA, 23 nt, Artificial Sequence
  Chemically synthesized
aguuuggcuugauauaccacacc

SEQ ID NO: 50759 - RNA, 23 nt, Artificial Sequence
  Chemically synthesized
caccacuguugucaccuugcugc

SEQ ID NO: 50760 - RNA, 23 nt, Artificial Sequence
  Chemically synthesized
accacuguugucaccuugcugcc

SEQ ID NO: 50761 - RNA, 23 nt, Artificial Sequence
  Chemically synthesized
ccacuguugucaccuugcugccg

SEQ ID NO: 50762 - RNA, 23 nt, Artificial Sequence
  Chemically synthesized
cacuguugucaccuugcugccgu

SEQ ID NO: 50763 - RNA, 23 nt, Artificial Sequence
  Chemically synthesized
acuguugucaccuugcugccguc

SEQ ID NO: 50764 - RNA, 23 nt, Artificial Sequence
  Chemically synthesized
acaugaucacucucuucgcgaau

SEQ ID NO: 50765 - RNA, 23 nt, Artificial Sequence
  Chemically synthesized
caugaucacucucuucgcgaauc

SEQ ID NO: 50766 - RNA, 23 nt, Artificial Sequence
  Chemically synthesized
cgggacuguucagguggaguugg

SEQ ID NO: 50767 - RNA, 23 nt, Artificial Sequence
  Chemically synthesized
gggacuguucagguggaguugga

SEQ ID NO: 50768 - RNA, 23 nt, Artificial Sequence
  Chemically synthesized
ggacuguucagguggaguuggaa

SEQ ID NO: 50769 - RNA, 23 nt, Artificial Sequence
  Chemically synthesized
gacuguucagguggaguuggaag

SEQ ID NO: 50770 - RNA, 23 nt, Artificial Sequence
  Chemically synthesized
acuguucagguggaguuggaagc

SEQ ID NO: 50771 - RNA, 23 nt, Artificial Sequence
  Chemically synthesized
uacuugacaguucuugaguggug

SEQ ID NO: 50772 - RNA, 23 nt, Artificial Sequence
  Chemically synthesized
acuugacaguucuugagugguga

SEQ ID NO: 50773 - RNA, 23 nt, Artificial Sequence
  Chemically synthesized
cuugacaguucuugaguggugaa

SEQ ID NO: 50774 - RNA, 23 nt, Artificial Sequence
  Chemically synthesized
uugacaguucuugaguggugaag

SEQ ID NO: 50775 - RNA, 23 nt, Artificial Sequence
  Chemically synthesized
ugacaguucuugaguggugaagu

SEQ ID NO: 50776 - RNA, 23 nt, Artificial Sequence
  Chemically synthesized
aucaaaaaaugaaugugcacaag

SEQ ID NO: 50777 - RNA, 23 nt, Artificial Sequence
  Chemically synthesized
ucaaaaaaugaaugugcacaagc

SEQ ID NO: 50778 - RNA, 23 nt, Artificial Sequence
  Chemically synthesized
caaaaaaugaaugugcacaagcu

SEQ ID NO: 50779 - RNA, 23 nt, Artificial Sequence
  Chemically synthesized
aaaaaaugaaugugcacaagcuu

SEQ ID NO: 50780 - RNA, 23 nt, Artificial Sequence
  Chemically synthesized
aaaaaugaaugugcacaagcuuc

SEQ ID NO: 50781 - RNA, 23 nt, Artificial Sequence
  Chemically synthesized
gguuaacgauaaaugcagcauua

SEQ ID NO: 50782 - RNA, 23 nt, Artificial Sequence
  Chemically synthesized
guuaacgauaaaugcagcauuaa

SEQ ID NO: 50783 - RNA, 23 nt, Artificial Sequence
  Chemically synthesized
uagucgggcaguugguguauacu

SEQ ID NO: 50784 - RNA, 23 nt, Artificial Sequence
  Chemically synthesized
uucucugauuugcucccuuguug

SEQ ID NO: 50785 - RNA, 23 nt, Artificial Sequence
  Chemically synthesized
cccaggaccuugauuauuucuac

SEQ ID NO: 50786 - RNA, 23 nt, Artificial Sequence
  Chemically synthesized
agagguauaaucaguggcuccaa

SEQ ID NO: 50787 - RNA, 23 nt, Artificial Sequence
  Chemically synthesized
gagguauaaucaguggcuccaaa

SEQ ID NO: 50788 - RNA, 23 nt, Artificial Sequence
  Chemically synthesized
agguauaaucaguggcuccaaag

SEQ ID NO: 50789 - RNA, 23 nt, Artificial Sequence
  Chemically synthesized
uaccgagaacagauauacgaaac

SEQ ID NO: 50790 - RNA, 23 nt, Artificial Sequence
  Chemically synthesized
accgagaacagauauacgaaaca

SEQ ID NO: 50791 - RNA, 23 nt, Artificial Sequence
  Chemically synthesized
agaguuuuaauacagcaguauca

SEQ ID NO: 50792 - RNA, 23 nt, Artificial Sequence
  Chemically synthesized
auuccaaaggaauggauauaggc

SEQ ID NO: 50793 - RNA, 23 nt, Artificial Sequence
  Chemically synthesized
uuccaaaggaauggauauaggcu

SEQ ID NO: 50794 - RNA, 23 nt, Artificial Sequence
  Chemically synthesized
uccaaaggaauggauauaggcua

SEQ ID NO: 50795 - RNA, 23 nt, Artificial Sequence
  Chemically synthesized
ccaaaggaauggauauaggcuaa

SEQ ID NO: 50796 - RNA, 23 nt, Artificial Sequence
  Chemically synthesized
caaaggaauggauauaggcuaaa

SEQ ID NO: 50797 - RNA, 23 nt, Artificial Sequence
  Chemically synthesized
aaaggaauggauauaggcuaaac

SEQ ID NO: 50798 - RNA, 23 nt, Artificial Sequence
  Chemically synthesized
aaggaauggauauaggcuaaacu

SEQ ID NO: 50799 - RNA, 23 nt, Artificial Sequence
  Chemically synthesized
uucggaacagcugauacauauac

SEQ ID NO: 50800 - RNA, 23 nt, Artificial Sequence
  Chemically synthesized
auauacaacuugacauaaaucac

SEQ ID NO: 50801 - RNA, 23 nt, Artificial Sequence
  Chemically synthesized
uauacaacuugacauaaaucaca

SEQ ID NO: 50802 - RNA, 23 nt, Artificial Sequence
  Chemically synthesized
uaagauagaccucaucuuucuuc

SEQ ID NO: 50803 - RNA, 23 nt, Artificial Sequence
  Chemically synthesized
aagauagaccucaucuuucuucu

SEQ ID NO: 50804 - RNA, 23 nt, Artificial Sequence
  Chemically synthesized
agauagaccucaucuuucuucuc

SEQ ID NO: 50805 - RNA, 23 nt, Artificial Sequence
  Chemically synthesized
gauagaccucaucuuucuucuca

SEQ ID NO: 50806 - RNA, 23 nt, Artificial Sequence
  Chemically synthesized
auagaccucaucuuucuucucac

SEQ ID NO: 50807 - RNA, 23 nt, Artificial Sequence
  Chemically synthesized
cucaucuuucuucucaccacugg

SEQ ID NO: 50808 - RNA, 23 nt, Artificial Sequence
  Chemically synthesized
ucaucuuucuucucaccacugga

SEQ ID NO: 50809 - RNA, 23 nt, Artificial Sequence
  Chemically synthesized
caucuuucuucucaccacuggag

SEQ ID NO: 50810 - RNA, 23 nt, Artificial Sequence
  Chemically synthesized
aucuuucuucucaccacuggagu

SEQ ID NO: 50811 - RNA, 23 nt, Artificial Sequence
  Chemically synthesized
ucuuucuucucaccacuggagua

SEQ ID NO: 50812 - RNA, 23 nt, Artificial Sequence
  Chemically synthesized
uacagugaucuagcuuucucaug

SEQ ID NO: 50813 - RNA, 23 nt, Artificial Sequence
  Chemically synthesized
acagugaucuagcuuucucauga

SEQ ID NO: 50814 - RNA, 23 nt, Artificial Sequence
  Chemically synthesized
uucuuaaaucucuuguccugcaa

SEQ ID NO: 50815 - RNA, 23 nt, Artificial Sequence
  Chemically synthesized
ucuuaaaucucuuguccugcaau

SEQ ID NO: 50816 - RNA, 23 nt, Artificial Sequence
  Chemically synthesized
cuuaaaucucuuguccugcaaua

SEQ ID NO: 50817 - RNA, 23 nt, Artificial Sequence
  Chemically synthesized
uuaaaucucuuguccugcaauac

SEQ ID NO: 50818 - RNA, 23 nt, Artificial Sequence
  Chemically synthesized
ugauauaccacaccaaaugaucc

SEQ ID NO: 50819 - RNA, 23 nt, Artificial Sequence
  Chemically synthesized
gauauaccacaccaaaugaucca

SEQ ID NO: 50820 - RNA, 23 nt, Artificial Sequence
  Chemically synthesized
auauaccacaccaaaugauccau

SEQ ID NO: 50821 - RNA, 23 nt, Artificial Sequence
  Chemically synthesized
uauaccacaccaaaugauccauu

SEQ ID NO: 50822 - RNA, 23 nt, Artificial Sequence
  Chemically synthesized
auaccacaccaaaugauccauuu

SEQ ID NO: 50823 - RNA, 23 nt, Artificial Sequence
  Chemically synthesized
uaccacaccaaaugauccauuuc

SEQ ID NO: 50824 - RNA, 23 nt, Artificial Sequence
  Chemically synthesized
accaaaugauccauuuccaauca

SEQ ID NO: 50825 - RNA, 23 nt, Artificial Sequence
  Chemically synthesized
ccaaaugauccauuuccaaucac

SEQ ID NO: 50826 - RNA, 23 nt, Artificial Sequence
  Chemically synthesized
caaaugauccauuuccaaucacu

SEQ ID NO: 50827 - RNA, 23 nt, Artificial Sequence
  Chemically synthesized
aaaugauccauuuccaaucacuu

SEQ ID NO: 50828 - RNA, 23 nt, Artificial Sequence
  Chemically synthesized
aaugauccauuuccaaucacuuu

SEQ ID NO: 50829 - RNA, 23 nt, Artificial Sequence
  Chemically synthesized
cucucuucgcgaaucaccuuuuc

SEQ ID NO: 50830 - RNA, 23 nt, Artificial Sequence
  Chemically synthesized
guaacuggugguuuuuccugugc

SEQ ID NO: 50831 - RNA, 23 nt, Artificial Sequence
  Chemically synthesized
uaacuggugguuuuuccugugca

SEQ ID NO: 50832 - RNA, 23 nt, Artificial Sequence
  Chemically synthesized
aacuggugguuuuuccugugcag

SEQ ID NO: 50833 - RNA, 23 nt, Artificial Sequence
  Chemically synthesized
acuggugguuuuuccugugcagc

SEQ ID NO: 50834 - RNA, 23 nt, Artificial Sequence
  Chemically synthesized
cuggugguuuuuccugugcagcu

SEQ ID NO: 50835 - RNA, 23 nt, Artificial Sequence
  Chemically synthesized
uuacuugacaguucuugaguggu

SEQ ID NO: 50836 - RNA, 23 nt, Artificial Sequence
  Chemically synthesized
aaaaugaaugugcacaagcuucc

SEQ ID NO: 50837 - RNA, 23 nt, Artificial Sequence
  Chemically synthesized
uuaacgauaaaugcagcauuaag

SEQ ID NO: 50838 - RNA, 23 nt, Artificial Sequence
  Chemically synthesized
uugguguauacuccagcagacgg

SEQ ID NO: 50839 - RNA, 23 nt, Artificial Sequence
  Chemically synthesized
ugguguauacuccagcagacggc

SEQ ID NO: 50840 - RNA, 23 nt, Artificial Sequence
  Chemically synthesized
gguguauacuccagcagacggcu

SEQ ID NO: 50841 - RNA, 23 nt, Artificial Sequence
  Chemically synthesized
guguauacuccagcagacggcua

SEQ ID NO: 50842 - RNA, 23 nt, Artificial Sequence
  Chemically synthesized
uguauacuccagcagacggcuac

SEQ ID NO: 50843 - RNA, 23 nt, Artificial Sequence
  Chemically synthesized
ccuguuccugacgaauccuuagu

SEQ ID NO: 50844 - RNA, 23 nt, Artificial Sequence
  Chemically synthesized
cuguuccugacgaauccuuaguc

SEQ ID NO: 50845 - RNA, 23 nt, Artificial Sequence
  Chemically synthesized
uguuccugacgaauccuuagucc

SEQ ID NO: 50846 - RNA, 23 nt, Artificial Sequence
  Chemically synthesized
guuccugacgaauccuuagucca

SEQ ID NO: 50847 - RNA, 23 nt, Artificial Sequence
  Chemically synthesized
uuccugacgaauccuuaguccaa

SEQ ID NO: 50848 - RNA, 23 nt, Artificial Sequence
  Chemically synthesized
ccaaagucacagaguuuuaauac

SEQ ID NO: 50849 - RNA, 23 nt, Artificial Sequence
  Chemically synthesized
caaagucacagaguuuuaauaca

SEQ ID NO: 50850 - RNA, 23 nt, Artificial Sequence
  Chemically synthesized
cuggcaacucuguauacuguuuc

SEQ ID NO: 50851 - RNA, 23 nt, Artificial Sequence
  Chemically synthesized
uagaccucaucuuucuucucacc

SEQ ID NO: 50852 - RNA, 23 nt, Artificial Sequence
  Chemically synthesized
acuggaguagaagaaauaacgca

SEQ ID NO: 50853 - RNA, 23 nt, Artificial Sequence
  Chemically synthesized
cuggaguagaagaaauaacgcaa

SEQ ID NO: 50854 - RNA, 23 nt, Artificial Sequence
  Chemically synthesized
uggaguagaagaaauaacgcaau

SEQ ID NO: 50855 - RNA, 23 nt, Artificial Sequence
  Chemically synthesized
ggaguagaagaaauaacgcaauc

SEQ ID NO: 50856 - RNA, 23 nt, Artificial Sequence
  Chemically synthesized
gaguagaagaaauaacgcaaucg

SEQ ID NO: 50857 - RNA, 23 nt, Artificial Sequence
  Chemically synthesized
aguagaagaaauaacgcaaucgg

SEQ ID NO: 50858 - RNA, 23 nt, Artificial Sequence
  Chemically synthesized
guagaagaaauaacgcaaucgga

SEQ ID NO: 50859 - RNA, 23 nt, Artificial Sequence
  Chemically synthesized
uagaagaaauaacgcaaucggac

SEQ ID NO: 50860 - RNA, 23 nt, Artificial Sequence
  Chemically synthesized
agaagaaauaacgcaaucggacu

SEQ ID NO: 50861 - RNA, 23 nt, Artificial Sequence
  Chemically synthesized
gaagaaauaacgcaaucggacua

SEQ ID NO: 50862 - RNA, 23 nt, Artificial Sequence
  Chemically synthesized
acgcaaucggacuauguuacagu

SEQ ID NO: 50863 - RNA, 23 nt, Artificial Sequence
  Chemically synthesized
cgcaaucggacuauguuacagug

SEQ ID NO: 50864 - RNA, 23 nt, Artificial Sequence
  Chemically synthesized
gcaaucggacuauguuacaguga

SEQ ID NO: 50865 - RNA, 23 nt, Artificial Sequence
  Chemically synthesized
caaucggacuauguuacagugau

SEQ ID NO: 50866 - RNA, 23 nt, Artificial Sequence
  Chemically synthesized
aaucggacuauguuacagugauc

SEQ ID NO: 50867 - RNA, 23 nt, Artificial Sequence
  Chemically synthesized
aucggacuauguuacagugaucu

SEQ ID NO: 50868 - RNA, 23 nt, Artificial Sequence
  Chemically synthesized
cggacuauguuacagugaucuag

SEQ ID NO: 50869 - RNA, 23 nt, Artificial Sequence
  Chemically synthesized
ggacuauguuacagugaucuagc

SEQ ID NO: 50870 - RNA, 23 nt, Artificial Sequence
  Chemically synthesized
gacuauguuacagugaucuagcu

SEQ ID NO: 50871 - RNA, 23 nt, Artificial Sequence
  Chemically synthesized
uucccaggaccuugauuauuucu

SEQ ID NO: 50872 - RNA, 23 nt, Artificial Sequence
  Chemically synthesized
gagaacagauauacgaaacauug

SEQ ID NO: 50873 - RNA, 23 nt, Artificial Sequence
  Chemically synthesized
aucggcacggauauuuaacauau

SEQ ID NO: 50874 - RNA, 23 nt, Artificial Sequence
  Chemically synthesized
aauaaggaugguagccagaggug

SEQ ID NO: 50875 - RNA, 23 nt, Artificial Sequence
  Chemically synthesized
aucucuuguccugcaauacuuuc

SEQ ID NO: 50876 - RNA, 23 nt, Artificial Sequence
  Chemically synthesized
auauaggcuaaacuucggaacag

SEQ ID NO: 50877 - RNA, 23 nt, Artificial Sequence
  Chemically synthesized
aacgcaaucggacuauguuacag

SEQ ID NO: 50878 - RNA, 23 nt, Artificial Sequence
  Chemically synthesized
gaucacucucuucgcgaaucacc

SEQ ID NO: 50879 - RNA, 23 nt, Artificial Sequence
  Chemically synthesized
uugauauaccacaccaaaugauc

SEQ ID NO: 50880 - RNA, 23 nt, Artificial Sequence
  Chemically synthesized
acucaaguaacuggugguuuuuc

SEQ ID NO: 50881 - RNA, 23 nt, Artificial Sequence
  Chemically synthesized
aguaacagcucagccaacacaca

SEQ ID NO: 50882 - RNA, 23 nt, Artificial Sequence
  Chemically synthesized
ugucuggcaacucuguauacugu

SEQ ID NO: 50883 - RNA, 23 nt, Artificial Sequence
  Chemically synthesized
uaaaucucuuguccugcaauacu

SEQ ID NO: 50884 - RNA, 23 nt, Artificial Sequence
  Chemically synthesized
augaucacucucuucgcgaauca

SEQ ID NO: 50885 - RNA, 23 nt, Artificial Sequence
  Chemically synthesized
uaacagcucagccaacacacagc

SEQ ID NO: 50886 - RNA, 23 nt, Artificial Sequence
  Chemically synthesized
caguaucaggauccaacaagagg

SEQ ID NO: 50887 - RNA, 23 nt, Artificial Sequence
  Chemically synthesized
auaaggaugguagccagaggugg

SEQ ID NO: 50888 - RNA, 23 nt, Artificial Sequence
  Chemically synthesized
gaaauaacgcaaucggacuaugu

SEQ ID NO: 50889 - RNA, 23 nt, Artificial Sequence
  Chemically synthesized
uucuuccuuuugucuuuauguug

SEQ ID NO: 50890 - RNA, 23 nt, Artificial Sequence
  Chemically synthesized
ugucucgcccauuugguaguuug

SEQ ID NO: 50891 - RNA, 23 nt, Artificial Sequence
  Chemically synthesized
aaaugaaugugcacaagcuucca

SEQ ID NO: 50892 - RNA, 23 nt, Artificial Sequence
  Chemically synthesized
acuucguccucuuggcuuuucac

SEQ ID NO: 50893 - RNA, 23 nt, Artificial Sequence
  Chemically synthesized
auaacgcaaucggacuauguuac

SEQ ID NO: 50894 - RNA, 23 nt, Artificial Sequence
  Chemically synthesized
acggucuccaguauuagcaucug

SEQ ID NO: 50895 - RNA, 23 nt, Artificial Sequence
  Chemically synthesized
aauauugguuguccuaguaacag

SEQ ID NO: 50896 - RNA, 23 nt, Artificial Sequence
  Chemically synthesized
aaaaagaaaaagacuucguccuc

SEQ ID NO: 50897 - RNA, 23 nt, Artificial Sequence
  Chemically synthesized
agacuucguccucuuggcuuuuc

SEQ ID NO: 50898 - RNA, 23 nt, Artificial Sequence
  Chemically synthesized
cucuuggcuuuucacuccuuuug

SEQ ID NO: 50899 - RNA, 23 nt, Artificial Sequence
  Chemically synthesized
gaccucaucuuucuucucaccac

SEQ ID NO: 50900 - RNA, 23 nt, Artificial Sequence
  Chemically synthesized
aaauaacgcaaucggacuauguu

SEQ ID NO: 50901 - RNA, 23 nt, Artificial Sequence
  Chemically synthesized
gucucgcccauuugguaguuuga

SEQ ID NO: 50902 - RNA, 23 nt, Artificial Sequence
  Chemically synthesized
cagacggcuacacagugcaauug

SEQ ID NO: 50903 - RNA, 23 nt, Artificial Sequence
  Chemically synthesized
agacggcuacacagugcaauugc

SEQ ID NO: 50904 - RNA, 23 nt, Artificial Sequence
  Chemically synthesized
auuugcucccuuguuggaguucc

SEQ ID NO: 50905 - RNA, 23 nt, Artificial Sequence
  Chemically synthesized
uuuccggaacauaguccagcacc

SEQ ID NO: 50906 - RNA, 23 nt, Artificial Sequence
  Chemically synthesized
cacuggaguagaagaaauaacgc

SEQ ID NO: 50907 - RNA, 23 nt, Artificial Sequence
  Chemically synthesized
aauaacgcaaucggacuauguua

SEQ ID NO: 50908 - RNA, 23 nt, Artificial Sequence
  Chemically synthesized
uguccacggucuccaguauuagc

SEQ ID NO: 50909 - RNA, 23 nt, Artificial Sequence
  Chemically synthesized
gaauggauauaggcuaaacuucg

SEQ ID NO: 50910 - RNA, 23 nt, Artificial Sequence
  Chemically synthesized
aauggauauaggcuaaacuucgg

SEQ ID NO: 50911 - RNA, 23 nt, Artificial Sequence
  Chemically synthesized
gaguuggaagcugaugcagaagc

SEQ ID NO: 50912 - RNA, 23 nt, Artificial Sequence
  Chemically synthesized
aaucacagggagcgucuguuugg

SEQ ID NO: 50913 - RNA, 23 nt, Artificial Sequence
  Chemically synthesized
ucugacgcugcuguggcauuugu

SEQ ID NO: 50914 - RNA, 23 nt, Artificial Sequence
  Chemically synthesized
aacacacagccagcagaccauac

SEQ ID NO: 50915 - RNA, 23 nt, Artificial Sequence
  Chemically synthesized
ggaauggauauaggcuaaacuuc

SEQ ID NO: 50916 - RNA, 23 nt, Artificial Sequence
  Chemically synthesized
aaaucacagggagcgucuguuug

SEQ ID NO: 50917 - RNA, 23 nt, Artificial Sequence
  Chemically synthesized
cucucgauucuuaaaucucuugu

SEQ ID NO: 50918 - RNA, 23 nt, Artificial Sequence
  Chemically synthesized
accacaccaaaugauccauuucc

SEQ ID NO: 50919 - RNA, 23 nt, Artificial Sequence
  Chemically synthesized
uuagugucuguauagcugacuuc

SEQ ID NO: 50920 - RNA, 23 nt, Artificial Sequence
  Chemically synthesized
aacuuucaugcugccaaaagcug

SEQ ID NO: 50921 - RNA, 23 nt, Artificial Sequence
  Chemically synthesized
caguggcuccaaagaucaacucu

SEQ ID NO: 50922 - RNA, 23 nt, Artificial Sequence
  Chemically synthesized
ucugcgguuuaauaucccgaugg

SEQ ID NO: 50923 - RNA, 23 nt, Artificial Sequence
  Chemically synthesized
guuuccggaacauaguccagcac

SEQ ID NO: 50924 - RNA, 23 nt, Artificial Sequence
  Chemically synthesized
uagugucuguauagcugacuucu

SEQ ID NO: 50925 - RNA, 23 nt, Artificial Sequence
  Chemically synthesized
uuuuccuuccuuccuccuuuucu

SEQ ID NO: 50926 - RNA, 23 nt, Artificial Sequence
  Chemically synthesized
uccuccuuuucuuccuuuugucu

SEQ ID NO: 50927 - RNA, 23 nt, Artificial Sequence
  Chemically synthesized
uuauuggucuguccacggucucc

SEQ ID NO: 50928 - RNA, 23 nt, Artificial Sequence
  Chemically synthesized
aguggcuccaaagaucaacucug

SEQ ID NO: 50929 - RNA, 23 nt, Artificial Sequence
  Chemically synthesized
uugcacuuccaaagucacagagu

SEQ ID NO: 50930 - RNA, 23 nt, Artificial Sequence
  Chemically synthesized
auuagcaucugacgcugcugugg

SEQ ID NO: 50931 - RNA, 23 nt, Artificial Sequence
  Chemically synthesized
uugacauuugggucccguaauuc

SEQ ID NO: 50932 - RNA, 23 nt, Artificial Sequence
  Chemically synthesized
ccugaggugaaauguccuguucc

SEQ ID NO: 50933 - RNA, 23 nt, Artificial Sequence
  Chemically synthesized
uugcucccuuguuggaguuccca

SEQ ID NO: 50934 - RNA, 23 nt, Artificial Sequence
  Chemically synthesized
gaaacauuggguucuccucggac

SEQ ID NO: 50935 - RNA, 23 nt, Artificial Sequence
  Chemically synthesized
aguuuuaauacagcaguaucagg

SEQ ID NO: 50936 - RNA, 23 nt, Artificial Sequence
  Chemically synthesized
uagcugacuucuuguggccuguc

SEQ ID NO: 50937 - RNA, 23 nt, Artificial Sequence
  Chemically synthesized
cucugcuaacuuucaugcugcca

SEQ ID NO: 50938 - RNA, 23 nt, Artificial Sequence
  Chemically synthesized
uccugaggugaaauguccuguuc

SEQ ID NO: 50939 - RNA, 23 nt, Artificial Sequence
  Chemically synthesized
uugagggaauuuaaauucugugu

SEQ ID NO: 50940 - RNA, 23 nt, Artificial Sequence
  Chemically synthesized
ucuguguaguuuggguucauuuc

SEQ ID NO: 50941 - RNA, 23 nt, Artificial Sequence
  Chemically synthesized
uuugcucccuuguuggaguuccc

SEQ ID NO: 50942 - RNA, 23 nt, Artificial Sequence
  Chemically synthesized
uucugcgguuuaauaucccgaug

SEQ ID NO: 50943 - RNA, 23 nt, Artificial Sequence
  Chemically synthesized
uccuuccuuccuccuuuucuucc

SEQ ID NO: 50944 - RNA, 23 nt, Artificial Sequence
  Chemically synthesized
cugaggugaaauguccuguuccu

SEQ ID NO: 50945 - RNA, 23 nt, Artificial Sequence
  Chemically synthesized
uucuguguaguuuggguucauuu

SEQ ID NO: 50946 - RNA, 23 nt, Artificial Sequence
  Chemically synthesized
gauuugcucccuuguuggaguuc

SEQ ID NO: 50947 - RNA, 23 nt, Artificial Sequence
  Chemically synthesized
auauugguuguccuaguaacagc

SEQ ID NO: 50948 - RNA, 23 nt, Artificial Sequence
  Chemically synthesized
cagaagaaaaagaaaaagacuuc

SEQ ID NO: 50949 - RNA, 23 nt, Artificial Sequence
  Chemically synthesized
auaaucaguggcuccaaagauca

SEQ ID NO: 50950 - RNA, 23 nt, Artificial Sequence
  Chemically synthesized
aaacauuggguucuccucggacc

SEQ ID NO: 50951 - RNA, 23 nt, Artificial Sequence
  Chemically synthesized
aaaagaaaaagacuucguccucu

SEQ ID NO: 50952 - RNA, 23 nt, Artificial Sequence
  Chemically synthesized
agaaaaagacuucguccucuugg

SEQ ID NO: 50953 - RNA, 23 nt, Artificial Sequence
  Chemically synthesized
uucuugauggcgaccaguucucc

SEQ ID NO: 50954 - RNA, 23 nt, Artificial Sequence
  Chemically synthesized
ucuugauggcgaccaguucuccu

SEQ ID NO: 50955 - RNA, 23 nt, Artificial Sequence
  Chemically synthesized
augcugccaaaagcugaaggcug

SEQ ID NO: 50956 - RNA, 23 nt, Artificial Sequence
  Chemically synthesized
cuuuuccuuccuuccuccuuuuc

SEQ ID NO: 50957 - RNA, 23 nt, Artificial Sequence
  Chemically synthesized
cuuccuccuuuucuuccuuuugu

SEQ ID NO: 50958 - RNA, 23 nt, Artificial Sequence
  Chemically synthesized
auugguuguccuaguaacagcuc

SEQ ID NO: 50959 - RNA, 23 nt, Artificial Sequence
  Chemically synthesized
cacagaagaaaaagaaaaagacu

SEQ ID NO: 50960 - RNA, 23 nt, Artificial Sequence
  Chemically synthesized
uaaucaguggcuccaaagaucaa

SEQ ID NO: 50961 - RNA, 23 nt, Artificial Sequence
  Chemically synthesized
gaaaaagaaaaagacuucguccu

SEQ ID NO: 50962 - RNA, 23 nt, Artificial Sequence
  Chemically synthesized
gauuaagauagaccucaucuuuc

SEQ ID NO: 50963 - RNA, 23 nt, Artificial Sequence
  Chemically synthesized
uagccagagguggauuacuugac

SEQ ID NO: 50964 - RNA, 23 nt, Artificial Sequence
  Chemically synthesized
gguaguuugacauuugggucccg

SEQ ID NO: 50965 - RNA, 23 nt, Artificial Sequence
  Chemically synthesized
guaguuugacauuugggucccgu

SEQ ID NO: 50966 - RNA, 23 nt, Artificial Sequence
  Chemically synthesized
aaauguccuguuccugacgaauc

SEQ ID NO: 50967 - RNA, 23 nt, Artificial Sequence
  Chemically synthesized
uuuggguucauuucucugauuug

SEQ ID NO: 50968 - RNA, 23 nt, Artificial Sequence
  Chemically synthesized
uuuaauacagcaguaucaggauc

SEQ ID NO: 50969 - RNA, 23 nt, Artificial Sequence
  Chemically synthesized
gauuccaaaggaauggauauagg

SEQ ID NO: 50970 - RNA, 23 nt, Artificial Sequence
  Chemically synthesized
uugauggcgaccaguucuccuga

SEQ ID NO: 50971 - RNA, 18 nt, Artificial Sequence
  Chemically synthesized
cgagaaacaggcgauaau

SEQ ID NO: 50972 - RNA, 19 nt, Artificial Sequence
  Chemically synthesized
auuaucgccuguuucucgg

SEQ ID NO: 50973 - RNA, 19 nt, Artificial Sequence
  Chemically synthesized
ccagacgccauuuaaaagu

SEQ ID NO: 50974 - RNA, 19 nt, Artificial Sequence
  Chemically synthesized
acuuuuaaauggcgucugg

SEQ ID NO: 50975 - RNA, 19 nt, Artificial Sequence
  Chemically synthesized
guggcucugauugcuuuau

SEQ ID NO: 50976 - RNA, 19 nt, Artificial Sequence
  Chemically synthesized
auaaagcaaucagagccac

SEQ ID NO: 50977 - RNA, 19 nt, Artificial Sequence
  Chemically synthesized
ccaaagggaaauaugcuuu

SEQ ID NO: 50978 - RNA, 19 nt, Artificial Sequence
  Chemically synthesized
aaagcauauuucccuuugg

SEQ ID NO: 50979 - RNA, 19 nt, Artificial Sequence
  Chemically synthesized
cacaacuacaccacgagaa

SEQ ID NO: 50980 - RNA, 19 nt, Artificial Sequence
  Chemically synthesized
uucucgugguguaguugug

SEQ ID NO: 50981 - RNA, 19 nt, Artificial Sequence
  Chemically synthesized
gacaaugccuggaucgaga

SEQ ID NO: 50982 - RNA, 19 nt, Artificial Sequence
  Chemically synthesized
ucucgauccaggcauuguc

SEQ ID NO: 50983 - RNA, 19 nt, Artificial Sequence
  Chemically synthesized
ccaagaacuucaacaugaa

SEQ ID NO: 50984 - RNA, 19 nt, Artificial Sequence
  Chemically synthesized
uucauguugaaguucuugg

SEQ ID NO: 50985 - RNA, 19 nt, Artificial Sequence
  Chemically synthesized
gacagagucuugaagauuu

SEQ ID NO: 50986 - RNA, 19 nt, Artificial Sequence
  Chemically synthesized
aaaucuucaagacucuguc

SEQ ID NO: 50987 - RNA, 19 nt, Artificial Sequence
  Chemically synthesized
guggcauauucuaagaaau

SEQ ID NO: 50988 - RNA, 19 nt, Artificial Sequence
  Chemically synthesized
auuucuuagaauaugccac

SEQ ID NO: 50989 - RNA, 19 nt, Artificial Sequence
  Chemically synthesized
cccagacauuaacuucaau

SEQ ID NO: 50990 - RNA, 19 nt, Artificial Sequence
  Chemically synthesized
auugaaguuaaugucuggg

SEQ ID NO: 50991 - RNA, 19 nt, Artificial Sequence
  Chemically synthesized
gggugcauuuauuucaaaa

SEQ ID NO: 50992 - RNA, 19 nt, Artificial Sequence
  Chemically synthesized
uuuugaaauaaaugcaccc

SEQ ID NO: 50993 - RNA, 23 nt, Artificial Sequence
  Chemically synthesized
ccgagaaacaggcgauaauuuuu

SEQ ID NO: 50994 - RNA, 23 nt, Artificial Sequence
  Chemically synthesized
uccgagaaacaggcgauaauuuu

SEQ ID NO: 50995 - RNA, 23 nt, Artificial Sequence
  Chemically synthesized
uuccgagaaacaggcgauaauuu

SEQ ID NO: 50996 - RNA, 23 nt, Artificial Sequence
  Chemically synthesized
cuuccgagaaacaggcgauaauu

SEQ ID NO: 50997 - RNA, 23 nt, Artificial Sequence
  Chemically synthesized
ucuuccgagaaacaggcgauaau

SEQ ID NO: 50998 - RNA, 23 nt, Artificial Sequence
  Chemically synthesized
gaucaucuuuuccuacguuugcu

SEQ ID NO: 50999 - RNA, 23 nt, Artificial Sequence
  Chemically synthesized
ugaucaucuuuuccuacguuugc

SEQ ID NO: 51000 - RNA, 23 nt, Artificial Sequence
  Chemically synthesized
gugaucaucuuuuccuacguuug

SEQ ID NO: 51001 - RNA, 23 nt, Artificial Sequence
  Chemically synthesized
cgugaucaucuuuuccuacguuu

SEQ ID NO: 51002 - RNA, 23 nt, Artificial Sequence
  Chemically synthesized
acgugaucaucuuuuccuacguu

SEQ ID NO: 51003 - RNA, 23 nt, Artificial Sequence
  Chemically synthesized
cacgugaucaucuuuuccuacgu

SEQ ID NO: 51004 - RNA, 23 nt, Artificial Sequence
  Chemically synthesized
cgagaaacaggcgauaauuuuuc

SEQ ID NO: 51005 - RNA, 23 nt, Artificial Sequence
  Chemically synthesized
ccagguuuaaacaucacuuguac

SEQ ID NO: 51006 - RNA, 23 nt, Artificial Sequence
  Chemically synthesized
gccagguuuaaacaucacuugua

SEQ ID NO: 51007 - RNA, 23 nt, Artificial Sequence
  Chemically synthesized
ugccagguuuaaacaucacuugu

SEQ ID NO: 51008 - RNA, 23 nt, Artificial Sequence
  Chemically synthesized
cugccagguuuaaacaucacuug

SEQ ID NO: 51009 - RNA, 23 nt, Artificial Sequence
  Chemically synthesized
ccugccagguuuaaacaucacuu

SEQ ID NO: 51010 - RNA, 23 nt, Artificial Sequence
  Chemically synthesized
ccacgugaucaucuuuuccuacg

SEQ ID NO: 51011 - RNA, 23 nt, Artificial Sequence
  Chemically synthesized
uccacgugaucaucuuuuccuac

SEQ ID NO: 51012 - RNA, 23 nt, Artificial Sequence
  Chemically synthesized
uuccacgugaucaucuuuuccua

SEQ ID NO: 51013 - RNA, 23 nt, Artificial Sequence
  Chemically synthesized
ggaggaaaauuugacauuaucca

SEQ ID NO: 51014 - RNA, 23 nt, Artificial Sequence
  Chemically synthesized
cggaggaaaauuugacauuaucc

SEQ ID NO: 51015 - RNA, 23 nt, Artificial Sequence
  Chemically synthesized
ccggaggaaaauuugacauuauc

SEQ ID NO: 51016 - RNA, 23 nt, Artificial Sequence
  Chemically synthesized
accggaggaaaauuugacauuau

SEQ ID NO: 51017 - RNA, 23 nt, Artificial Sequence
  Chemically synthesized
caccggaggaaaauuugacauua

SEQ ID NO: 51018 - RNA, 23 nt, Artificial Sequence
  Chemically synthesized
ugauaaaagucuucgggauccgu

SEQ ID NO: 51019 - RNA, 23 nt, Artificial Sequence
  Chemically synthesized
cugauaaaagucuucgggauccg

SEQ ID NO: 51020 - RNA, 23 nt, Artificial Sequence
  Chemically synthesized
ucugauaaaagucuucgggaucc

SEQ ID NO: 51021 - RNA, 23 nt, Artificial Sequence
  Chemically synthesized
cucugauaaaagucuucgggauc

SEQ ID NO: 51022 - RNA, 23 nt, Artificial Sequence
  Chemically synthesized
acucugauaaaagucuucgggau

SEQ ID NO: 51023 - RNA, 23 nt, Artificial Sequence
  Chemically synthesized
cgauaauuuuucagauguggcaa

SEQ ID NO: 51024 - RNA, 23 nt, Artificial Sequence
  Chemically synthesized
gcgauaauuuuucagauguggca

SEQ ID NO: 51025 - RNA, 23 nt, Artificial Sequence
  Chemically synthesized
ggcgauaauuuuucagauguggc

SEQ ID NO: 51026 - RNA, 23 nt, Artificial Sequence
  Chemically synthesized
aggcgauaauuuuucagaugugg

SEQ ID NO: 51027 - RNA, 23 nt, Artificial Sequence
  Chemically synthesized
caggcgauaauuuuucagaugug

SEQ ID NO: 51028 - RNA, 23 nt, Artificial Sequence
  Chemically synthesized
acaggcgauaauuuuucagaugu

SEQ ID NO: 51029 - RNA, 23 nt, Artificial Sequence
  Chemically synthesized
aacaggcgauaauuuuucagaug

SEQ ID NO: 51030 - RNA, 23 nt, Artificial Sequence
  Chemically synthesized
ccgaaaacuucacugugcucauc

SEQ ID NO: 51031 - RNA, 23 nt, Artificial Sequence
  Chemically synthesized
gccgaaaacuucacugugcucau

SEQ ID NO: 51032 - RNA, 23 nt, Artificial Sequence
  Chemically synthesized
ugccgaaaacuucacugugcuca

SEQ ID NO: 51033 - RNA, 23 nt, Artificial Sequence
  Chemically synthesized
gugccgaaaacuucacugugcuc

SEQ ID NO: 51034 - RNA, 23 nt, Artificial Sequence
  Chemically synthesized
agugccgaaaacuucacugugcu

SEQ ID NO: 51035 - RNA, 23 nt, Artificial Sequence
  Chemically synthesized
gcagacuacaccuucccuuugca

SEQ ID NO: 51036 - RNA, 23 nt, Artificial Sequence
  Chemically synthesized
cgcagacuacaccuucccuuugc

SEQ ID NO: 51037 - RNA, 23 nt, Artificial Sequence
  Chemically synthesized
ccgcagacuacaccuucccuuug

SEQ ID NO: 51038 - RNA, 23 nt, Artificial Sequence
  Chemically synthesized
accgcagacuacaccuucccuuu

SEQ ID NO: 51039 - RNA, 23 nt, Artificial Sequence
  Chemically synthesized
caccgcagacuacaccuucccuu

SEQ ID NO: 51040 - RNA, 23 nt, Artificial Sequence
  Chemically synthesized
aucaucuuuuccuacguuugcuu

SEQ ID NO: 51041 - RNA, 23 nt, Artificial Sequence
  Chemically synthesized
gguucuuccacgugaucaucuuu

SEQ ID NO: 51042 - RNA, 23 nt, Artificial Sequence
  Chemically synthesized
ugguucuuccacgugaucaucuu

SEQ ID NO: 51043 - RNA, 23 nt, Artificial Sequence
  Chemically synthesized
gugguucuuccacgugaucaucu

SEQ ID NO: 51044 - RNA, 23 nt, Artificial Sequence
  Chemically synthesized
agugguucuuccacgugaucauc

SEQ ID NO: 51045 - RNA, 23 nt, Artificial Sequence
  Chemically synthesized
aagugguucuuccacgugaucau

SEQ ID NO: 51046 - RNA, 23 nt, Artificial Sequence
  Chemically synthesized
aaacaggcgauaauuuuucagau

SEQ ID NO: 51047 - RNA, 23 nt, Artificial Sequence
  Chemically synthesized
gguuuaaacaucacuuguaccuu

SEQ ID NO: 51048 - RNA, 23 nt, Artificial Sequence
  Chemically synthesized
agguuuaaacaucacuuguaccu

SEQ ID NO: 51049 - RNA, 23 nt, Artificial Sequence
  Chemically synthesized
cagguuuaaacaucacuuguacc

SEQ ID NO: 51050 - RNA, 23 nt, Artificial Sequence
  Chemically synthesized
ucaagaacaauaucgacuucccc

SEQ ID NO: 51051 - RNA, 23 nt, Artificial Sequence
  Chemically synthesized
aucaagaacaauaucgacuuccc

SEQ ID NO: 51052 - RNA, 23 nt, Artificial Sequence
  Chemically synthesized
caucaagaacaauaucgacuucc

SEQ ID NO: 51053 - RNA, 23 nt, Artificial Sequence
  Chemically synthesized
ucaucaagaacaauaucgacuuc

SEQ ID NO: 51054 - RNA, 23 nt, Artificial Sequence
  Chemically synthesized
cucaucaagaacaauaucgacuu

SEQ ID NO: 51055 - RNA, 23 nt, Artificial Sequence
  Chemically synthesized
cgauggacuucacagauuugucc

SEQ ID NO: 51056 - RNA, 23 nt, Artificial Sequence
  Chemically synthesized
gcgauggacuucacagauuuguc

SEQ ID NO: 51057 - RNA, 23 nt, Artificial Sequence
  Chemically synthesized
ugcgauggacuucacagauuugu

SEQ ID NO: 51058 - RNA, 23 nt, Artificial Sequence
  Chemically synthesized
cugcgauggacuucacagauuug

SEQ ID NO: 51059 - RNA, 23 nt, Artificial Sequence
  Chemically synthesized
ccugcgauggacuucacagauuu

SEQ ID NO: 51060 - RNA, 23 nt, Artificial Sequence
  Chemically synthesized
ggagaagucugcaagaugucaag

SEQ ID NO: 51061 - RNA, 23 nt, Artificial Sequence
  Chemically synthesized
gggagaagucugcaagaugucaa

SEQ ID NO: 51062 - RNA, 23 nt, Artificial Sequence
  Chemically synthesized
agggagaagucugcaagauguca

SEQ ID NO: 51063 - RNA, 23 nt, Artificial Sequence
  Chemically synthesized
uagggagaagucugcaagauguc

SEQ ID NO: 51064 - RNA, 23 nt, Artificial Sequence
  Chemically synthesized
cuagggagaagucugcaagaugu

SEQ ID NO: 51065 - RNA, 23 nt, Artificial Sequence
  Chemically synthesized
cgcucccauauuuaucccuggug

SEQ ID NO: 51066 - RNA, 23 nt, Artificial Sequence
  Chemically synthesized
ucgcucccauauuuaucccuggu

SEQ ID NO: 51067 - RNA, 23 nt, Artificial Sequence
  Chemically synthesized
gucgcucccauauuuaucccugg

SEQ ID NO: 51068 - RNA, 23 nt, Artificial Sequence
  Chemically synthesized
ugucgcucccauauuuaucccug

SEQ ID NO: 51069 - RNA, 23 nt, Artificial Sequence
  Chemically synthesized
cugucgcucccauauuuaucccu

SEQ ID NO: 51070 - RNA, 23 nt, Artificial Sequence
  Chemically synthesized
gcaccggaggaaaauuugacauu

SEQ ID NO: 51071 - RNA, 23 nt, Artificial Sequence
  Chemically synthesized
ccaguaugagacgaacaaaguca

SEQ ID NO: 51072 - RNA, 23 nt, Artificial Sequence
  Chemically synthesized
uccaguaugagacgaacaaaguc

SEQ ID NO: 51073 - RNA, 23 nt, Artificial Sequence
  Chemically synthesized
uuccaguaugagacgaacaaagu

SEQ ID NO: 51074 - RNA, 23 nt, Artificial Sequence
  Chemically synthesized
uuuccaguaugagacgaacaaag

SEQ ID NO: 51075 - RNA, 23 nt, Artificial Sequence
  Chemically synthesized
uuuuccaguaugagacgaacaaa

SEQ ID NO: 51076 - RNA, 23 nt, Artificial Sequence
  Chemically synthesized
gcucaucaagaacaauaucgacu

SEQ ID NO: 51077 - RNA, 23 nt, Artificial Sequence
  Chemically synthesized
ugcucaucaagaacaauaucgac

SEQ ID NO: 51078 - RNA, 23 nt, Artificial Sequence
  Chemically synthesized
gugcucaucaagaacaauaucga

SEQ ID NO: 51079 - RNA, 23 nt, Artificial Sequence
  Chemically synthesized
gcagagcaaaggaauucagaccg

SEQ ID NO: 51080 - RNA, 23 nt, Artificial Sequence
  Chemically synthesized
cgcagagcaaaggaauucagacc

SEQ ID NO: 51081 - RNA, 23 nt, Artificial Sequence
  Chemically synthesized
ccgcagagcaaaggaauucagac

SEQ ID NO: 51082 - RNA, 23 nt, Artificial Sequence
  Chemically synthesized
cccgcagagcaaaggaauucaga

SEQ ID NO: 51083 - RNA, 23 nt, Artificial Sequence
  Chemically synthesized
acccgcagagcaaaggaauucag

SEQ ID NO: 51084 - RNA, 23 nt, Artificial Sequence
  Chemically synthesized
ggauagcagaggugaaagaggag

SEQ ID NO: 51085 - RNA, 23 nt, Artificial Sequence
  Chemically synthesized
gggauagcagaggugaaagagga

SEQ ID NO: 51086 - RNA, 23 nt, Artificial Sequence
  Chemically synthesized
ggggauagcagaggugaaagagg

SEQ ID NO: 51087 - RNA, 23 nt, Artificial Sequence
  Chemically synthesized
aggggauagcagaggugaaagag

SEQ ID NO: 51088 - RNA, 23 nt, Artificial Sequence
  Chemically synthesized
aaggggauagcagaggugaaaga

SEQ ID NO: 51089 - RNA, 23 nt, Artificial Sequence
  Chemically synthesized
acuagggagaagucugcaagaug

SEQ ID NO: 51090 - RNA, 23 nt, Artificial Sequence
  Chemically synthesized
uacuagggagaagucugcaagau

SEQ ID NO: 51091 - RNA, 23 nt, Artificial Sequence
  Chemically synthesized
acgaauacuacuacaggaagaag

SEQ ID NO: 51092 - RNA, 23 nt, Artificial Sequence
  Chemically synthesized
aacgaauacuacuacaggaagaa

SEQ ID NO: 51093 - RNA, 23 nt, Artificial Sequence
  Chemically synthesized
caacgaauacuacuacaggaaga

SEQ ID NO: 51094 - RNA, 23 nt, Artificial Sequence
  Chemically synthesized
ucaacgaauacuacuacaggaag

SEQ ID NO: 51095 - RNA, 23 nt, Artificial Sequence
  Chemically synthesized
gucaacgaauacuacuacaggaa

SEQ ID NO: 51096 - RNA, 23 nt, Artificial Sequence
  Chemically synthesized
ccuguguggucaacgaauacuac

SEQ ID NO: 51097 - RNA, 23 nt, Artificial Sequence
  Chemically synthesized
cccuguguggucaacgaauacua

SEQ ID NO: 51098 - RNA, 23 nt, Artificial Sequence
  Chemically synthesized
gcccuguguggucaacgaauacu

SEQ ID NO: 51099 - RNA, 23 nt, Artificial Sequence
  Chemically synthesized
agcccuguguggucaacgaauac

SEQ ID NO: 51100 - RNA, 23 nt, Artificial Sequence
  Chemically synthesized
cagcccuguguggucaacgaaua

SEQ ID NO: 51101 - RNA, 23 nt, Artificial Sequence
  Chemically synthesized
ggcaccggaggaaaauuugacau

SEQ ID NO: 51102 - RNA, 23 nt, Artificial Sequence
  Chemically synthesized
caagaacaauaucgacuuccccg

SEQ ID NO: 51103 - RNA, 23 nt, Artificial Sequence
  Chemically synthesized
cagugccgaaaacuucacugugc

SEQ ID NO: 51104 - RNA, 23 nt, Artificial Sequence
  Chemically synthesized
ggaacucuuucuucgugaugaca

SEQ ID NO: 51105 - RNA, 23 nt, Artificial Sequence
  Chemically synthesized
gggaacucuuucuucgugaugac

SEQ ID NO: 51106 - RNA, 23 nt, Artificial Sequence
  Chemically synthesized
ggggaacucuuucuucgugauga

SEQ ID NO: 51107 - RNA, 23 nt, Artificial Sequence
  Chemically synthesized
aggggaacucuuucuucgugaug

SEQ ID NO: 51108 - RNA, 23 nt, Artificial Sequence
  Chemically synthesized
caggggaacucuuucuucgugau

SEQ ID NO: 51109 - RNA, 23 nt, Artificial Sequence
  Chemically synthesized
ucuuuuccuacguuugcuuugcu

SEQ ID NO: 51110 - RNA, 23 nt, Artificial Sequence
  Chemically synthesized
aucuuuuccuacguuugcuuugc

SEQ ID NO: 51111 - RNA, 23 nt, Artificial Sequence
  Chemically synthesized
caucuuuuccuacguuugcuuug

SEQ ID NO: 51112 - RNA, 23 nt, Artificial Sequence
  Chemically synthesized
ucaucuuuuccuacguuugcuuu

SEQ ID NO: 51113 - RNA, 23 nt, Artificial Sequence
  Chemically synthesized
cuuccacgugaucaucuuuuccu

SEQ ID NO: 51114 - RNA, 23 nt, Artificial Sequence
  Chemically synthesized
ucuuccacgugaucaucuuuucc

SEQ ID NO: 51115 - RNA, 23 nt, Artificial Sequence
  Chemically synthesized
uucuuccacgugaucaucuuuuc

SEQ ID NO: 51116 - RNA, 23 nt, Artificial Sequence
  Chemically synthesized
guucuuccacgugaucaucuuuu

SEQ ID NO: 51117 - RNA, 23 nt, Artificial Sequence
  Chemically synthesized
agauacagcugcuuagaaaggag

SEQ ID NO: 51118 - RNA, 23 nt, Artificial Sequence
  Chemically synthesized
gagauacagcugcuuagaaagga

SEQ ID NO: 51119 - RNA, 23 nt, Artificial Sequence
  Chemically synthesized
ggagauacagcugcuuagaaagg

SEQ ID NO: 51120 - RNA, 23 nt, Artificial Sequence
  Chemically synthesized
aggagauacagcugcuuagaaag

SEQ ID NO: 51121 - RNA, 23 nt, Artificial Sequence
  Chemically synthesized
gaggagauacagcugcuuagaaa

SEQ ID NO: 51122 - RNA, 23 nt, Artificial Sequence
  Chemically synthesized
ccaaagccgacauuaaaguaugu

SEQ ID NO: 51123 - RNA, 23 nt, Artificial Sequence
  Chemically synthesized
gccaaagccgacauuaaaguaug

SEQ ID NO: 51124 - RNA, 23 nt, Artificial Sequence
  Chemically synthesized
agccaaagccgacauuaaaguau

SEQ ID NO: 51125 - RNA, 23 nt, Artificial Sequence
  Chemically synthesized
gagccaaagccgacauuaaagua

SEQ ID NO: 51126 - RNA, 23 nt, Artificial Sequence
  Chemically synthesized
ggagccaaagccgacauuaaagu

SEQ ID NO: 51127 - RNA, 23 nt, Artificial Sequence
  Chemically synthesized
uggucaacgaauacuacuacagg

SEQ ID NO: 51128 - RNA, 23 nt, Artificial Sequence
  Chemically synthesized
guggucaacgaauacuacuacag

SEQ ID NO: 51129 - RNA, 23 nt, Artificial Sequence
  Chemically synthesized
uguggucaacgaauacuacuaca

SEQ ID NO: 51130 - RNA, 23 nt, Artificial Sequence
  Chemically synthesized
guguggucaacgaauacuacuac

SEQ ID NO: 51131 - RNA, 23 nt, Artificial Sequence
  Chemically synthesized
uguguggucaacgaauacuacua

SEQ ID NO: 51132 - RNA, 23 nt, Artificial Sequence
  Chemically synthesized
gcucaacccucuccuacuucggu

SEQ ID NO: 51133 - RNA, 23 nt, Artificial Sequence
  Chemically synthesized
ggcucaacccucuccuacuucgg

SEQ ID NO: 51134 - RNA, 23 nt, Artificial Sequence
  Chemically synthesized
cggcucaacccucuccuacuucg

SEQ ID NO: 51135 - RNA, 23 nt, Artificial Sequence
  Chemically synthesized
ucggcucaacccucuccuacuuc

SEQ ID NO: 51136 - RNA, 23 nt, Artificial Sequence
  Chemically synthesized
aucggcucaacccucuccuacuu

SEQ ID NO: 51137 - RNA, 23 nt, Artificial Sequence
  Chemically synthesized
uccugccagguuuaaacaucacu

SEQ ID NO: 51138 - RNA, 23 nt, Artificial Sequence
  Chemically synthesized
guuuuccaguaugagacgaacaa

SEQ ID NO: 51139 - RNA, 23 nt, Artificial Sequence
  Chemically synthesized
ucacugugcucaucaagaacaau

SEQ ID NO: 51140 - RNA, 23 nt, Artificial Sequence
  Chemically synthesized
uucacugugcucaucaagaacaa

SEQ ID NO: 51141 - RNA, 23 nt, Artificial Sequence
  Chemically synthesized
cuucacugugcucaucaagaaca

SEQ ID NO: 51142 - RNA, 23 nt, Artificial Sequence
  Chemically synthesized
acuucacugugcucaucaagaac

SEQ ID NO: 51143 - RNA, 23 nt, Artificial Sequence
  Chemically synthesized
aacuucacugugcucaucaagaa

SEQ ID NO: 51144 - RNA, 23 nt, Artificial Sequence
  Chemically synthesized
cgagguuguaaaaagggauggau

SEQ ID NO: 51145 - RNA, 23 nt, Artificial Sequence
  Chemically synthesized
ccgagguuguaaaaagggaugga

SEQ ID NO: 51146 - RNA, 23 nt, Artificial Sequence
  Chemically synthesized
accgagguuguaaaaagggaugg

SEQ ID NO: 51147 - RNA, 23 nt, Artificial Sequence
  Chemically synthesized
gaccgagguuguaaaaagggaug

SEQ ID NO: 51148 - RNA, 23 nt, Artificial Sequence
  Chemically synthesized
ugaccgagguuguaaaaagggau

SEQ ID NO: 51149 - RNA, 23 nt, Artificial Sequence
  Chemically synthesized
ugacaaacuuucucaaaacagaa

SEQ ID NO: 51150 - RNA, 23 nt, Artificial Sequence
  Chemically synthesized
augacaaacuuucucaaaacaga

SEQ ID NO: 51151 - RNA, 23 nt, Artificial Sequence
  Chemically synthesized
gaugacaaacuuucucaaaacag

SEQ ID NO: 51152 - RNA, 23 nt, Artificial Sequence
  Chemically synthesized
ugaugacaaacuuucucaaaaca

SEQ ID NO: 51153 - RNA, 23 nt, Artificial Sequence
  Chemically synthesized
gugaugacaaacuuucucaaaac

SEQ ID NO: 51154 - RNA, 23 nt, Artificial Sequence
  Chemically synthesized
agaauggagugaagaaguuggug

SEQ ID NO: 51155 - RNA, 23 nt, Artificial Sequence
  Chemically synthesized
gagaauggagugaagaaguuggu

SEQ ID NO: 51156 - RNA, 23 nt, Artificial Sequence
  Chemically synthesized
ggagaauggagugaagaaguugg

SEQ ID NO: 51157 - RNA, 23 nt, Artificial Sequence
  Chemically synthesized
uggagaauggagugaagaaguug

SEQ ID NO: 51158 - RNA, 23 nt, Artificial Sequence
  Chemically synthesized
guggagaauggagugaagaaguu

SEQ ID NO: 51159 - RNA, 23 nt, Artificial Sequence
  Chemically synthesized
gcaguacaguggcuucaagaguc

SEQ ID NO: 51160 - RNA, 23 nt, Artificial Sequence
  Chemically synthesized
ggcaguacaguggcuucaagagu

SEQ ID NO: 51161 - RNA, 23 nt, Artificial Sequence
  Chemically synthesized
gggcaguacaguggcuucaagag

SEQ ID NO: 51162 - RNA, 23 nt, Artificial Sequence
  Chemically synthesized
agggcaguacaguggcuucaaga

SEQ ID NO: 51163 - RNA, 23 nt, Artificial Sequence
  Chemically synthesized
aagggcaguacaguggcuucaag

SEQ ID NO: 51164 - RNA, 23 nt, Artificial Sequence
  Chemically synthesized
gaagucugcaagaugucaagggc

SEQ ID NO: 51165 - RNA, 23 nt, Artificial Sequence
  Chemically synthesized
agaagucugcaagaugucaaggg

SEQ ID NO: 51166 - RNA, 23 nt, Artificial Sequence
  Chemically synthesized
gagaagucugcaagaugucaagg

SEQ ID NO: 51167 - RNA, 23 nt, Artificial Sequence
  Chemically synthesized
ggaagaagugcgaguccauugug

SEQ ID NO: 51168 - RNA, 23 nt, Artificial Sequence
  Chemically synthesized
aggaagaagugcgaguccauugu

SEQ ID NO: 51169 - RNA, 23 nt, Artificial Sequence
  Chemically synthesized
caggaagaagugcgaguccauug

SEQ ID NO: 51170 - RNA, 23 nt, Artificial Sequence
  Chemically synthesized
acaggaagaagugcgaguccauu

SEQ ID NO: 51171 - RNA, 23 nt, Artificial Sequence
  Chemically synthesized
uacaggaagaagugcgaguccau

SEQ ID NO: 51172 - RNA, 23 nt, Artificial Sequence
  Chemically synthesized
ggucaacgaauacuacuacagga

SEQ ID NO: 51173 - RNA, 23 nt, Artificial Sequence
  Chemically synthesized
cuguguggucaacgaauacuacu

SEQ ID NO: 51174 - RNA, 23 nt, Artificial Sequence
  Chemically synthesized
gcucccauauuuaucccuggugc

SEQ ID NO: 51175 - RNA, 23 nt, Artificial Sequence
  Chemically synthesized
agcaugaauuauggcaccauuaa

SEQ ID NO: 51176 - RNA, 23 nt, Artificial Sequence
  Chemically synthesized
gagcaugaauuauggcaccauua

SEQ ID NO: 51177 - RNA, 23 nt, Artificial Sequence
  Chemically synthesized
agagcaugaauuauggcaccauu

SEQ ID NO: 51178 - RNA, 23 nt, Artificial Sequence
  Chemically synthesized
cagagcaugaauuauggcaccau

SEQ ID NO: 51179 - RNA, 23 nt, Artificial Sequence
  Chemically synthesized
ccagagcaugaauuauggcacca

SEQ ID NO: 51180 - RNA, 23 nt, Artificial Sequence
  Chemically synthesized
gaaacggacucugauaaaagucu

SEQ ID NO: 51181 - RNA, 23 nt, Artificial Sequence
  Chemically synthesized
agaaacggacucugauaaaaguc

SEQ ID NO: 51182 - RNA, 23 nt, Artificial Sequence
  Chemically synthesized
gagaaacggacucugauaaaagu

SEQ ID NO: 51183 - RNA, 23 nt, Artificial Sequence
  Chemically synthesized
ugagaaacggacucugauaaaag

SEQ ID NO: 51184 - RNA, 23 nt, Artificial Sequence
  Chemically synthesized
uugagaaacggacucugauaaaa

SEQ ID NO: 51185 - RNA, 23 nt, Artificial Sequence
  Chemically synthesized
gaaacaggcgauaauuuuucaga

SEQ ID NO: 51186 - RNA, 23 nt, Artificial Sequence
  Chemically synthesized
agaaacaggcgauaauuuuucag

SEQ ID NO: 51187 - RNA, 23 nt, Artificial Sequence
  Chemically synthesized
gagaaacaggcgauaauuuuuca

SEQ ID NO: 51188 - RNA, 23 nt, Artificial Sequence
  Chemically synthesized
ccuuccacaagacucagaaucca

SEQ ID NO: 51189 - RNA, 23 nt, Artificial Sequence
  Chemically synthesized
accuuccacaagacucagaaucc

SEQ ID NO: 51190 - RNA, 23 nt, Artificial Sequence
  Chemically synthesized
uaccuuccacaagacucagaauc

SEQ ID NO: 51191 - RNA, 23 nt, Artificial Sequence
  Chemically synthesized
guaccuuccacaagacucagaau

SEQ ID NO: 51192 - RNA, 23 nt, Artificial Sequence
  Chemically synthesized
uguaccuuccacaagacucagaa

SEQ ID NO: 51193 - RNA, 23 nt, Artificial Sequence
  Chemically synthesized
cacaacuacaccacgagaaacau

SEQ ID NO: 51194 - RNA, 23 nt, Artificial Sequence
  Chemically synthesized
ccacaacuacaccacgagaaaca

SEQ ID NO: 51195 - RNA, 23 nt, Artificial Sequence
  Chemically synthesized
gccacaacuacaccacgagaaac

SEQ ID NO: 51196 - RNA, 23 nt, Artificial Sequence
  Chemically synthesized
ggccacaacuacaccacgagaaa

SEQ ID NO: 51197 - RNA, 23 nt, Artificial Sequence
  Chemically synthesized
cggccacaacuacaccacgagaa

SEQ ID NO: 51198 - RNA, 23 nt, Artificial Sequence
  Chemically synthesized
gacccgcagagcaaaggaauuca

SEQ ID NO: 51199 - RNA, 23 nt, Artificial Sequence
  Chemically synthesized
acaccgcagacuacaccuucccu

SEQ ID NO: 51200 - RNA, 23 nt, Artificial Sequence
  Chemically synthesized
gacaccgcagacuacaccuuccc

SEQ ID NO: 51201 - RNA, 23 nt, Artificial Sequence
  Chemically synthesized
ugacaccgcagacuacaccuucc

SEQ ID NO: 51202 - RNA, 23 nt, Artificial Sequence
  Chemically synthesized
uugacaccgcagacuacaccuuc

SEQ ID NO: 51203 - RNA, 23 nt, Artificial Sequence
  Chemically synthesized
uuugacaccgcagacuacaccuu

SEQ ID NO: 51204 - RNA, 23 nt, Artificial Sequence
  Chemically synthesized
cguggagaauggagugaagaagu

SEQ ID NO: 51205 - RNA, 23 nt, Artificial Sequence
  Chemically synthesized
ucguggagaauggagugaagaag

SEQ ID NO: 51206 - RNA, 23 nt, Artificial Sequence
  Chemically synthesized
gcagcuacuagggagaagucugc

SEQ ID NO: 51207 - RNA, 23 nt, Artificial Sequence
  Chemically synthesized
agcagcuacuagggagaagucug

SEQ ID NO: 51208 - RNA, 23 nt, Artificial Sequence
  Chemically synthesized
cagcagcuacuagggagaagucu

SEQ ID NO: 51209 - RNA, 23 nt, Artificial Sequence
  Chemically synthesized
ccagcagcuacuagggagaaguc

SEQ ID NO: 51210 - RNA, 23 nt, Artificial Sequence
  Chemically synthesized
accagcagcuacuagggagaagu

SEQ ID NO: 51211 - RNA, 23 nt, Artificial Sequence
  Chemically synthesized
cgaauacuacuacaggaagaagu

SEQ ID NO: 51212 - RNA, 23 nt, Artificial Sequence
  Chemically synthesized
gacuuccucaucgacacuuacuc

SEQ ID NO: 51213 - RNA, 23 nt, Artificial Sequence
  Chemically synthesized
cgacuuccucaucgacacuuacu

SEQ ID NO: 51214 - RNA, 23 nt, Artificial Sequence
  Chemically synthesized
ucgacuuccucaucgacacuuac

SEQ ID NO: 51215 - RNA, 23 nt, Artificial Sequence
  Chemically synthesized
aucgacuuccucaucgacacuua

SEQ ID NO: 51216 - RNA, 23 nt, Artificial Sequence
  Chemically synthesized
caucgacuuccucaucgacacuu

SEQ ID NO: 51217 - RNA, 23 nt, Artificial Sequence
  Chemically synthesized
uggcaccggaggaaaauuugaca

SEQ ID NO: 51218 - RNA, 23 nt, Artificial Sequence
  Chemically synthesized
uuggcaccggaggaaaauuugac

SEQ ID NO: 51219 - RNA, 23 nt, Artificial Sequence
  Chemically synthesized
uuuggcaccggaggaaaauuuga

SEQ ID NO: 51220 - RNA, 23 nt, Artificial Sequence
  Chemically synthesized
uuuuggcaccggaggaaaauuug

SEQ ID NO: 51221 - RNA, 23 nt, Artificial Sequence
  Chemically synthesized
uuuuuggcaccggaggaaaauuu

SEQ ID NO: 51222 - RNA, 23 nt, Artificial Sequence
  Chemically synthesized
acaacuacaccacgagaaacauc

SEQ ID NO: 51223 - RNA, 23 nt, Artificial Sequence
  Chemically synthesized
agaacaauaucgacuuccccggc

SEQ ID NO: 51224 - RNA, 23 nt, Artificial Sequence
  Chemically synthesized
aagaacaauaucgacuuccccgg

SEQ ID NO: 51225 - RNA, 23 nt, Artificial Sequence
  Chemically synthesized
ggacccgcagagcaaaggaauuc

SEQ ID NO: 51226 - RNA, 23 nt, Artificial Sequence
  Chemically synthesized
gacaaacuuucucaaaacagaag

SEQ ID NO: 51227 - RNA, 23 nt, Artificial Sequence
  Chemically synthesized
gaagggcaguacaguggcuucaa

SEQ ID NO: 51228 - RNA, 23 nt, Artificial Sequence
  Chemically synthesized
cgaagagugaagggcaguacagu

SEQ ID NO: 51229 - RNA, 23 nt, Artificial Sequence
  Chemically synthesized
ccgaagagugaagggcaguacag

SEQ ID NO: 51230 - RNA, 23 nt, Artificial Sequence
  Chemically synthesized
uccgaagagugaagggcaguaca

SEQ ID NO: 51231 - RNA, 23 nt, Artificial Sequence
  Chemically synthesized
uuccgaagagugaagggcaguac

SEQ ID NO: 51232 - RNA, 23 nt, Artificial Sequence
  Chemically synthesized
uuuccgaagagugaagggcagua

SEQ ID NO: 51233 - RNA, 23 nt, Artificial Sequence
  Chemically synthesized
agaggagauacagcugcuuagaa

SEQ ID NO: 51234 - RNA, 23 nt, Artificial Sequence
  Chemically synthesized
cagaggagauacagcugcuuaga

SEQ ID NO: 51235 - RNA, 23 nt, Artificial Sequence
  Chemically synthesized
cuacuagggagaagucugcaaga

SEQ ID NO: 51236 - RNA, 23 nt, Artificial Sequence
  Chemically synthesized
gcuacuagggagaagucugcaag

SEQ ID NO: 51237 - RNA, 23 nt, Artificial Sequence
  Chemically synthesized
cauuaaaguauguguccuuugug

SEQ ID NO: 51238 - RNA, 23 nt, Artificial Sequence
  Chemically synthesized
acauuaaaguauguguccuuugu

SEQ ID NO: 51239 - RNA, 23 nt, Artificial Sequence
  Chemically synthesized
gacauuaaaguauguguccuuug

SEQ ID NO: 51240 - RNA, 23 nt, Artificial Sequence
  Chemically synthesized
cgacauuaaaguauguguccuuu

SEQ ID NO: 51241 - RNA, 23 nt, Artificial Sequence
  Chemically synthesized
ccgacauuaaaguauguguccuu

SEQ ID NO: 51242 - RNA, 23 nt, Artificial Sequence
  Chemically synthesized
gaauacuacuacaggaagaagug

SEQ ID NO: 51243 - RNA, 23 nt, Artificial Sequence
  Chemically synthesized
gcugucgcucccauauuuauccc

SEQ ID NO: 51244 - RNA, 23 nt, Artificial Sequence
  Chemically synthesized
ugcugucgcucccauauuuaucc

SEQ ID NO: 51245 - RNA, 23 nt, Artificial Sequence
  Chemically synthesized
cugcugucgcucccauauuuauc

SEQ ID NO: 51246 - RNA, 23 nt, Artificial Sequence
  Chemically synthesized
acugcugucgcucccauauuuau

SEQ ID NO: 51247 - RNA, 23 nt, Artificial Sequence
  Chemically synthesized
acuuccucaucgacacuuacucc

SEQ ID NO: 51248 - RNA, 23 nt, Artificial Sequence
  Chemically synthesized
uccagagcaugaauuauggcacc

SEQ ID NO: 51249 - RNA, 23 nt, Artificial Sequence
  Chemically synthesized
auccagagcaugaauuauggcac

SEQ ID NO: 51250 - RNA, 23 nt, Artificial Sequence
  Chemically synthesized
ggaaaacaauguugagaaacgga

SEQ ID NO: 51251 - RNA, 23 nt, Artificial Sequence
  Chemically synthesized
aggaaaacaauguugagaaacgg

SEQ ID NO: 51252 - RNA, 23 nt, Artificial Sequence
  Chemically synthesized
aaggaaaacaauguugagaaacg

SEQ ID NO: 51253 - RNA, 23 nt, Artificial Sequence
  Chemically synthesized
caaggaaaacaauguugagaaac

SEQ ID NO: 51254 - RNA, 23 nt, Artificial Sequence
  Chemically synthesized
acaaggaaaacaauguugagaaa

SEQ ID NO: 51255 - RNA, 23 nt, Artificial Sequence
  Chemically synthesized
caguaugagacgaacaaagucac

SEQ ID NO: 51256 - RNA, 23 nt, Artificial Sequence
  Chemically synthesized
aaacuucacugugcucaucaaga

SEQ ID NO: 51257 - RNA, 23 nt, Artificial Sequence
  Chemically synthesized
aaaacuucacugugcucaucaag

SEQ ID NO: 51258 - RNA, 23 nt, Artificial Sequence
  Chemically synthesized
gaaaacuucacugugcucaucaa

SEQ ID NO: 51259 - RNA, 23 nt, Artificial Sequence
  Chemically synthesized
cugaccgagguuguaaaaaggga

SEQ ID NO: 51260 - RNA, 23 nt, Artificial Sequence
  Chemically synthesized
ucugaccgagguuguaaaaaggg

SEQ ID NO: 51261 - RNA, 23 nt, Artificial Sequence
  Chemically synthesized
cucugaccgagguuguaaaaagg

SEQ ID NO: 51262 - RNA, 23 nt, Artificial Sequence
  Chemically synthesized
ccucugaccgagguuguaaaaag

SEQ ID NO: 51263 - RNA, 23 nt, Artificial Sequence
  Chemically synthesized
gcaggggaacucuuucuucguga

SEQ ID NO: 51264 - RNA, 23 nt, Artificial Sequence
  Chemically synthesized
cagacuacaccuucccuuugcag

SEQ ID NO: 51265 - RNA, 23 nt, Artificial Sequence
  Chemically synthesized
aucguggagaauggagugaagaa

SEQ ID NO: 51266 - RNA, 23 nt, Artificial Sequence
  Chemically synthesized
gaucguggagaauggagugaaga

SEQ ID NO: 51267 - RNA, 23 nt, Artificial Sequence
  Chemically synthesized
agaucguggagaauggagugaag

SEQ ID NO: 51268 - RNA, 23 nt, Artificial Sequence
  Chemically synthesized
gagaucguggagaauggagugaa

SEQ ID NO: 51269 - RNA, 23 nt, Artificial Sequence
  Chemically synthesized
ccagaggagauacagcugcuuag

SEQ ID NO: 51270 - RNA, 23 nt, Artificial Sequence
  Chemically synthesized
accagaggagauacagcugcuua

SEQ ID NO: 51271 - RNA, 23 nt, Artificial Sequence
  Chemically synthesized
aaccagaggagauacagcugcuu

SEQ ID NO: 51272 - RNA, 23 nt, Artificial Sequence
  Chemically synthesized
ucacagauuuguccaggcugccc

SEQ ID NO: 51273 - RNA, 23 nt, Artificial Sequence
  Chemically synthesized
uucacagauuuguccaggcugcc

SEQ ID NO: 51274 - RNA, 23 nt, Artificial Sequence
  Chemically synthesized
cuucacagauuuguccaggcugc

SEQ ID NO: 51275 - RNA, 23 nt, Artificial Sequence
  Chemically synthesized
acuucacagauuuguccaggcug

SEQ ID NO: 51276 - RNA, 23 nt, Artificial Sequence
  Chemically synthesized
gacuucacagauuuguccaggcu

SEQ ID NO: 51277 - RNA, 23 nt, Artificial Sequence
  Chemically synthesized
gcaagaugucaagggccaagaag

SEQ ID NO: 51278 - RNA, 23 nt, Artificial Sequence
  Chemically synthesized
ugcaagaugucaagggccaagaa

SEQ ID NO: 51279 - RNA, 23 nt, Artificial Sequence
  Chemically synthesized
cugcaagaugucaagggccaaga

SEQ ID NO: 51280 - RNA, 23 nt, Artificial Sequence
  Chemically synthesized
ucugcaagaugucaagggccaag

SEQ ID NO: 51281 - RNA, 23 nt, Artificial Sequence
  Chemically synthesized
gucugcaagaugucaagggccaa

SEQ ID NO: 51282 - RNA, 23 nt, Artificial Sequence
  Chemically synthesized
aaagccgacauuaaaguaugugu

SEQ ID NO: 51283 - RNA, 23 nt, Artificial Sequence
  Chemically synthesized
caaagccgacauuaaaguaugug

SEQ ID NO: 51284 - RNA, 23 nt, Artificial Sequence
  Chemically synthesized
uggagccaaagccgacauuaaag

SEQ ID NO: 51285 - RNA, 23 nt, Artificial Sequence
  Chemically synthesized
ccagcugguuguguacaucggcu

SEQ ID NO: 51286 - RNA, 23 nt, Artificial Sequence
  Chemically synthesized
uccagcugguuguguacaucggc

SEQ ID NO: 51287 - RNA, 23 nt, Artificial Sequence
  Chemically synthesized
auccagcugguuguguacaucgg

SEQ ID NO: 51288 - RNA, 23 nt, Artificial Sequence
  Chemically synthesized
uauccagcugguuguguacaucg

SEQ ID NO: 51289 - RNA, 23 nt, Artificial Sequence
  Chemically synthesized
uuauccagcugguuguguacauc

SEQ ID NO: 51290 - RNA, 23 nt, Artificial Sequence
  Chemically synthesized
uuguaccuuccacaagacucaga

SEQ ID NO: 51291 - RNA, 23 nt, Artificial Sequence
  Chemically synthesized
cuuguaccuuccacaagacucag

SEQ ID NO: 51292 - RNA, 23 nt, Artificial Sequence
  Chemically synthesized
acuuguaccuuccacaagacuca

SEQ ID NO: 51293 - RNA, 23 nt, Artificial Sequence
  Chemically synthesized
guuuaaacaucacuuguaccuuc

SEQ ID NO: 51294 - RNA, 23 nt, Artificial Sequence
  Chemically synthesized
ugaacagugccgaaaacuucacu

SEQ ID NO: 51295 - RNA, 23 nt, Artificial Sequence
  Chemically synthesized
uugaacagugccgaaaacuucac

SEQ ID NO: 51296 - RNA, 23 nt, Artificial Sequence
  Chemically synthesized
cuugaacagugccgaaaacuuca

SEQ ID NO: 51297 - RNA, 23 nt, Artificial Sequence
  Chemically synthesized
ucuugaacagugccgaaaacuuc

SEQ ID NO: 51298 - RNA, 23 nt, Artificial Sequence
  Chemically synthesized
cucuugaacagugccgaaaacuu

SEQ ID NO: 51299 - RNA, 23 nt, Artificial Sequence
  Chemically synthesized
ucucuugaacagugccgaaaacu

SEQ ID NO: 51300 - RNA, 23 nt, Artificial Sequence
  Chemically synthesized
cucucuugaacagugccgaaaac

SEQ ID NO: 51301 - RNA, 23 nt, Artificial Sequence
  Chemically synthesized
gcucucuugaacagugccgaaaa

SEQ ID NO: 51302 - RNA, 23 nt, Artificial Sequence
  Chemically synthesized
ugcucucuugaacagugccgaaa

SEQ ID NO: 51303 - RNA, 23 nt, Artificial Sequence
  Chemically synthesized
ucucaaaacagaaggccaagagc

SEQ ID NO: 51304 - RNA, 23 nt, Artificial Sequence
  Chemically synthesized
uucucaaaacagaaggccaagag

SEQ ID NO: 51305 - RNA, 23 nt, Artificial Sequence
  Chemically synthesized
uuucucaaaacagaaggccaaga

SEQ ID NO: 51306 - RNA, 23 nt, Artificial Sequence
  Chemically synthesized
cuuucucaaaacagaaggccaag

SEQ ID NO: 51307 - RNA, 23 nt, Artificial Sequence
  Chemically synthesized
acuuucucaaaacagaaggccaa

SEQ ID NO: 51308 - RNA, 23 nt, Artificial Sequence
  Chemically synthesized
ggagaucguggagaauggaguga

SEQ ID NO: 51309 - RNA, 23 nt, Artificial Sequence
  Chemically synthesized
aggagaucguggagaauggagug

SEQ ID NO: 51310 - RNA, 23 nt, Artificial Sequence
  Chemically synthesized
gaggagaucguggagaauggagu

SEQ ID NO: 51311 - RNA, 23 nt, Artificial Sequence
  Chemically synthesized
agaggagaucguggagaauggag

SEQ ID NO: 51312 - RNA, 23 nt, Artificial Sequence
  Chemically synthesized
aagaggagaucguggagaaugga

SEQ ID NO: 51313 - RNA, 23 nt, Artificial Sequence
  Chemically synthesized
cagaggugaaagaggagaucgug

SEQ ID NO: 51314 - RNA, 23 nt, Artificial Sequence
  Chemically synthesized
gcagaggugaaagaggagaucgu

SEQ ID NO: 51315 - RNA, 23 nt, Artificial Sequence
  Chemically synthesized
agcagaggugaaagaggagaucg

SEQ ID NO: 51316 - RNA, 23 nt, Artificial Sequence
  Chemically synthesized
uagcagaggugaaagaggagauc

SEQ ID NO: 51317 - RNA, 23 nt, Artificial Sequence
  Chemically synthesized
auagcagaggugaaagaggagau

SEQ ID NO: 51318 - RNA, 23 nt, Artificial Sequence
  Chemically synthesized
gaaggggauagcagaggugaaag

SEQ ID NO: 51319 - RNA, 23 nt, Artificial Sequence
  Chemically synthesized
uccuacguuugcuuugcucuggu

SEQ ID NO: 51320 - RNA, 23 nt, Artificial Sequence
  Chemically synthesized
uuccuacguuugcuuugcucugg

SEQ ID NO: 51321 - RNA, 23 nt, Artificial Sequence
  Chemically synthesized
uuuccuacguuugcuuugcucug

SEQ ID NO: 51322 - RNA, 23 nt, Artificial Sequence
  Chemically synthesized
uuuuccuacguuugcuuugcucu

SEQ ID NO: 51323 - RNA, 23 nt, Artificial Sequence
  Chemically synthesized
cuuuuccuacguuugcuuugcuc

SEQ ID NO: 51324 - RNA, 23 nt, Artificial Sequence
  Chemically synthesized
ugcuuagaaaggaggcgacuccu

SEQ ID NO: 51325 - RNA, 23 nt, Artificial Sequence
  Chemically synthesized
cugcuuagaaaggaggcgacucc

SEQ ID NO: 51326 - RNA, 23 nt, Artificial Sequence
  Chemically synthesized
gcugcuuagaaaggaggcgacuc

SEQ ID NO: 51327 - RNA, 23 nt, Artificial Sequence
  Chemically synthesized
agcugcuuagaaaggaggcgacu

SEQ ID NO: 51328 - RNA, 23 nt, Artificial Sequence
  Chemically synthesized
cagcugcuuagaaaggaggcgac

SEQ ID NO: 51329 - RNA, 23 nt, Artificial Sequence
  Chemically synthesized
gcaccauuaagugguucuuccac

SEQ ID NO: 51330 - RNA, 23 nt, Artificial Sequence
  Chemically synthesized
ggcaccauuaagugguucuucca

SEQ ID NO: 51331 - RNA, 23 nt, Artificial Sequence
  Chemically synthesized
uggcaccauuaagugguucuucc

SEQ ID NO: 51332 - RNA, 23 nt, Artificial Sequence
  Chemically synthesized
auggcaccauuaagugguucuuc

SEQ ID NO: 51333 - RNA, 23 nt, Artificial Sequence
  Chemically synthesized
uauggcaccauuaagugguucuu

SEQ ID NO: 51334 - RNA, 23 nt, Artificial Sequence
  Chemically synthesized
agaagugcgaguccauuguggag

SEQ ID NO: 51335 - RNA, 23 nt, Artificial Sequence
  Chemically synthesized
aagaagugcgaguccauugugga

SEQ ID NO: 51336 - RNA, 23 nt, Artificial Sequence
  Chemically synthesized
gaagaagugcgaguccauugugg

SEQ ID NO: 51337 - RNA, 23 nt, Artificial Sequence
  Chemically synthesized
ucaaaacagaaggccaagagcag

SEQ ID NO: 51338 - RNA, 23 nt, Artificial Sequence
  Chemically synthesized
cucaaaacagaaggccaagagca

SEQ ID NO: 51339 - RNA, 23 nt, Artificial Sequence
  Chemically synthesized
gagugaagaaguuggugcacagu

SEQ ID NO: 51340 - RNA, 23 nt, Artificial Sequence
  Chemically synthesized
ggagugaagaaguuggugcacag

SEQ ID NO: 51341 - RNA, 23 nt, Artificial Sequence
  Chemically synthesized
uggagugaagaaguuggugcaca

SEQ ID NO: 51342 - RNA, 23 nt, Artificial Sequence
  Chemically synthesized
auggagugaagaaguuggugcac

SEQ ID NO: 51343 - RNA, 23 nt, Artificial Sequence
  Chemically synthesized
aauggagugaagaaguuggugca

SEQ ID NO: 51344 - RNA, 23 nt, Artificial Sequence
  Chemically synthesized
gaauggagugaagaaguuggugc

SEQ ID NO: 51345 - RNA, 23 nt, Artificial Sequence
  Chemically synthesized
gauagcagaggugaaagaggaga

SEQ ID NO: 51346 - RNA, 23 nt, Artificial Sequence
  Chemically synthesized
acguuugcuuugcucuggugagu

SEQ ID NO: 51347 - RNA, 23 nt, Artificial Sequence
  Chemically synthesized
uacguuugcuuugcucuggugag

SEQ ID NO: 51348 - RNA, 23 nt, Artificial Sequence
  Chemically synthesized
cuacguuugcuuugcucugguga

SEQ ID NO: 51349 - RNA, 23 nt, Artificial Sequence
  Chemically synthesized
ccuacguuugcuuugcucuggug

SEQ ID NO: 51350 - RNA, 23 nt, Artificial Sequence
  Chemically synthesized
acagcugcuuagaaaggaggcga

SEQ ID NO: 51351 - RNA, 23 nt, Artificial Sequence
  Chemically synthesized
uacagcugcuuagaaaggaggcg

SEQ ID NO: 51352 - RNA, 23 nt, Artificial Sequence
  Chemically synthesized
auacagcugcuuagaaaggaggc

SEQ ID NO: 51353 - RNA, 23 nt, Artificial Sequence
  Chemically synthesized
gauacagcugcuuagaaaggagg

SEQ ID NO: 51354 - RNA, 23 nt, Artificial Sequence
  Chemically synthesized
gacaaccagaggagauacagcug

SEQ ID NO: 51355 - RNA, 23 nt, Artificial Sequence
  Chemically synthesized
ggacaaccagaggagauacagcu

SEQ ID NO: 51356 - RNA, 23 nt, Artificial Sequence
  Chemically synthesized
uggacaaccagaggagauacagc

SEQ ID NO: 51357 - RNA, 23 nt, Artificial Sequence
  Chemically synthesized
cuggacaaccagaggagauacag

SEQ ID NO: 51358 - RNA, 23 nt, Artificial Sequence
  Chemically synthesized
ccuggacaaccagaggagauaca

SEQ ID NO: 51359 - RNA, 23 nt, Artificial Sequence
  Chemically synthesized
uguucaucgacuuccucaucgac

SEQ ID NO: 51360 - RNA, 23 nt, Artificial Sequence
  Chemically synthesized
guguucaucgacuuccucaucga

SEQ ID NO: 51361 - RNA, 23 nt, Artificial Sequence
  Chemically synthesized
uguguucaucgacuuccucaucg

SEQ ID NO: 51362 - RNA, 23 nt, Artificial Sequence
  Chemically synthesized
cuguguucaucgacuuccucauc

SEQ ID NO: 51363 - RNA, 23 nt, Artificial Sequence
  Chemically synthesized
gcuguguucaucgacuuccucau

SEQ ID NO: 51364 - RNA, 23 nt, Artificial Sequence
  Chemically synthesized
cguuuugacauccugguuuuugg

SEQ ID NO: 51365 - RNA, 23 nt, Artificial Sequence
  Chemically synthesized
ccguuuugacauccugguuuuug

SEQ ID NO: 51366 - RNA, 23 nt, Artificial Sequence
  Chemically synthesized
uccguuuugacauccugguuuuu

SEQ ID NO: 51367 - RNA, 23 nt, Artificial Sequence
  Chemically synthesized
auccguuuugacauccugguuuu

SEQ ID NO: 51368 - RNA, 23 nt, Artificial Sequence
  Chemically synthesized
gauccguuuugacauccugguuu

SEQ ID NO: 51369 - RNA, 23 nt, Artificial Sequence
  Chemically synthesized
acaauguugagaaacggacucug

SEQ ID NO: 51370 - RNA, 23 nt, Artificial Sequence
  Chemically synthesized
aacaauguugagaaacggacucu

SEQ ID NO: 51371 - RNA, 23 nt, Artificial Sequence
  Chemically synthesized
aaacaauguugagaaacggacuc

SEQ ID NO: 51372 - RNA, 23 nt, Artificial Sequence
  Chemically synthesized
aaaacaauguugagaaacggacu

SEQ ID NO: 51373 - RNA, 23 nt, Artificial Sequence
  Chemically synthesized
gaaaacaauguugagaaacggac

SEQ ID NO: 51374 - RNA, 23 nt, Artificial Sequence
  Chemically synthesized
gacucagaauccacaguguccca

SEQ ID NO: 51375 - RNA, 23 nt, Artificial Sequence
  Chemically synthesized
agacucagaauccacaguguccc

SEQ ID NO: 51376 - RNA, 23 nt, Artificial Sequence
  Chemically synthesized
aagacucagaauccacagugucc

SEQ ID NO: 51377 - RNA, 23 nt, Artificial Sequence
  Chemically synthesized
caagacucagaauccacaguguc

SEQ ID NO: 51378 - RNA, 23 nt, Artificial Sequence
  Chemically synthesized
acaagacucagaauccacagugu

SEQ ID NO: 51379 - RNA, 23 nt, Artificial Sequence
  Chemically synthesized
uccucugaccgagguuguaaaaa

SEQ ID NO: 51380 - RNA, 23 nt, Artificial Sequence
  Chemically synthesized
gcagugauguuuuccaguaugag

SEQ ID NO: 51381 - RNA, 23 nt, Artificial Sequence
  Chemically synthesized
ugcagugauguuuuccaguauga

SEQ ID NO: 51382 - RNA, 23 nt, Artificial Sequence
  Chemically synthesized
cugcagugauguuuuccaguaug

SEQ ID NO: 51383 - RNA, 23 nt, Artificial Sequence
  Chemically synthesized
gcugcagugauguuuuccaguau

SEQ ID NO: 51384 - RNA, 23 nt, Artificial Sequence
  Chemically synthesized
agcugcagugauguuuuccagua

SEQ ID NO: 51385 - RNA, 23 nt, Artificial Sequence
  Chemically synthesized
acaaacuuucucaaaacagaagg

SEQ ID NO: 51386 - RNA, 23 nt, Artificial Sequence
  Chemically synthesized
ugagugacaagcuguaccagcgg

SEQ ID NO: 51387 - RNA, 23 nt, Artificial Sequence
  Chemically synthesized
gugagugacaagcuguaccagcg

SEQ ID NO: 51388 - RNA, 23 nt, Artificial Sequence
  Chemically synthesized
ggugagugacaagcuguaccagc

SEQ ID NO: 51389 - RNA, 23 nt, Artificial Sequence
  Chemically synthesized
uggugagugacaagcuguaccag

SEQ ID NO: 51390 - RNA, 23 nt, Artificial Sequence
  Chemically synthesized
cuggugagugacaagcuguacca

SEQ ID NO: 51391 - RNA, 23 nt, Artificial Sequence
  Chemically synthesized
ucuggugagugacaagcuguacc

SEQ ID NO: 51392 - RNA, 23 nt, Artificial Sequence
  Chemically synthesized
cucuggugagugacaagcuguac

SEQ ID NO: 51393 - RNA, 23 nt, Artificial Sequence
  Chemically synthesized
gcucuggugagugacaagcugua

SEQ ID NO: 51394 - RNA, 23 nt, Artificial Sequence
  Chemically synthesized
cguuugcuuugcucuggugagug

SEQ ID NO: 51395 - RNA, 23 nt, Artificial Sequence
  Chemically synthesized
uccuggacaaccagaggagauac

SEQ ID NO: 51396 - RNA, 23 nt, Artificial Sequence
  Chemically synthesized
agaugucaagggccaagaagucc

SEQ ID NO: 51397 - RNA, 23 nt, Artificial Sequence
  Chemically synthesized
aagaugucaagggccaagaaguc

SEQ ID NO: 51398 - RNA, 23 nt, Artificial Sequence
  Chemically synthesized
caagaugucaagggccaagaagu

SEQ ID NO: 51399 - RNA, 23 nt, Artificial Sequence
  Chemically synthesized
cuacaggaagaagugcgagucca

SEQ ID NO: 51400 - RNA, 23 nt, Artificial Sequence
  Chemically synthesized
acuacaggaagaagugcgagucc

SEQ ID NO: 51401 - RNA, 23 nt, Artificial Sequence
  Chemically synthesized
uacuacaggaagaagugcgaguc

SEQ ID NO: 51402 - RNA, 23 nt, Artificial Sequence
  Chemically synthesized
uccucaucgacacuuacuccagu

SEQ ID NO: 51403 - RNA, 23 nt, Artificial Sequence
  Chemically synthesized
uuccucaucgacacuuacuccag

SEQ ID NO: 51404 - RNA, 23 nt, Artificial Sequence
  Chemically synthesized
cuuccucaucgacacuuacucca

SEQ ID NO: 51405 - RNA, 23 nt, Artificial Sequence
  Chemically synthesized
cgcuguguucaucgacuuccuca

SEQ ID NO: 51406 - RNA, 23 nt, Artificial Sequence
  Chemically synthesized
ccgcuguguucaucgacuuccuc

SEQ ID NO: 51407 - RNA, 23 nt, Artificial Sequence
  Chemically synthesized
gccgcuguguucaucgacuuccu

SEQ ID NO: 51408 - RNA, 23 nt, Artificial Sequence
  Chemically synthesized
ggccgcuguguucaucgacuucc

SEQ ID NO: 51409 - RNA, 23 nt, Artificial Sequence
  Chemically synthesized
uggccgcuguguucaucgacuuc

SEQ ID NO: 51410 - RNA, 23 nt, Artificial Sequence
  Chemically synthesized
guuguguacaucggcucaacccu

SEQ ID NO: 51411 - RNA, 23 nt, Artificial Sequence
  Chemically synthesized
gguuguguacaucggcucaaccc

SEQ ID NO: 51412 - RNA, 23 nt, Artificial Sequence
  Chemically synthesized
ugguuguguacaucggcucaacc

SEQ ID NO: 51413 - RNA, 23 nt, Artificial Sequence
  Chemically synthesized
cugguuguguacaucggcucaac

SEQ ID NO: 51414 - RNA, 23 nt, Artificial Sequence
  Chemically synthesized
gcugguuguguacaucggcucaa

SEQ ID NO: 51415 - RNA, 23 nt, Artificial Sequence
  Chemically synthesized
ggauccguuuugacauccugguu

SEQ ID NO: 51416 - RNA, 23 nt, Artificial Sequence
  Chemically synthesized
guuguaaaaagggauggauggac

SEQ ID NO: 51417 - RNA, 23 nt, Artificial Sequence
  Chemically synthesized
gguuguaaaaagggauggaugga

SEQ ID NO: 51418 - RNA, 23 nt, Artificial Sequence
  Chemically synthesized
agguuguaaaaagggauggaugg

SEQ ID NO: 51419 - RNA, 23 nt, Artificial Sequence
  Chemically synthesized
gagguuguaaaaagggauggaug

SEQ ID NO: 51420 - RNA, 23 nt, Artificial Sequence
  Chemically synthesized
cgugaugacaaacuuucucaaaa

SEQ ID NO: 51421 - RNA, 23 nt, Artificial Sequence
  Chemically synthesized
ucgugaugacaaacuuucucaaa

SEQ ID NO: 51422 - RNA, 23 nt, Artificial Sequence
  Chemically synthesized
uucgugaugacaaacuuucucaa

SEQ ID NO: 51423 - RNA, 23 nt, Artificial Sequence
  Chemically synthesized
cuucgugaugacaaacuuucuca

SEQ ID NO: 51424 - RNA, 23 nt, Artificial Sequence
  Chemically synthesized
ucuucgugaugacaaacuuucuc

SEQ ID NO: 51425 - RNA, 23 nt, Artificial Sequence
  Chemically synthesized
gaagagugaagggcaguacagug

SEQ ID NO: 51426 - RNA, 23 nt, Artificial Sequence
  Chemically synthesized
caaccagaggagauacagcugcu

SEQ ID NO: 51427 - RNA, 23 nt, Artificial Sequence
  Chemically synthesized
agucugcaagaugucaagggcca

SEQ ID NO: 51428 - RNA, 23 nt, Artificial Sequence
  Chemically synthesized
aaccagcagcuacuagggagaag

SEQ ID NO: 51429 - RNA, 23 nt, Artificial Sequence
  Chemically synthesized
cuacaaggaaaacaauguugaga

SEQ ID NO: 51430 - RNA, 23 nt, Artificial Sequence
  Chemically synthesized
acuacaaggaaaacaauguugag

SEQ ID NO: 51431 - RNA, 23 nt, Artificial Sequence
  Chemically synthesized
uacuacaaggaaaacaauguuga

SEQ ID NO: 51432 - RNA, 23 nt, Artificial Sequence
  Chemically synthesized
guacuacaaggaaaacaauguug

SEQ ID NO: 51433 - RNA, 23 nt, Artificial Sequence
  Chemically synthesized
aguacuacaaggaaaacaauguu

SEQ ID NO: 51434 - RNA, 23 nt, Artificial Sequence
  Chemically synthesized
caaagucacucggauccagagca

SEQ ID NO: 51435 - RNA, 23 nt, Artificial Sequence
  Chemically synthesized
acaaagucacucggauccagagc

SEQ ID NO: 51436 - RNA, 23 nt, Artificial Sequence
  Chemically synthesized
aacaaagucacucggauccagag

SEQ ID NO: 51437 - RNA, 23 nt, Artificial Sequence
  Chemically synthesized
gaacaaagucacucggauccaga

SEQ ID NO: 51438 - RNA, 23 nt, Artificial Sequence
  Chemically synthesized
cgaacaaagucacucggauccag

SEQ ID NO: 51439 - RNA, 23 nt, Artificial Sequence
  Chemically synthesized
agcugguuguguacaucggcuca

SEQ ID NO: 51440 - RNA, 23 nt, Artificial Sequence
  Chemically synthesized
cagcugguuguguacaucggcuc

SEQ ID NO: 51441 - RNA, 23 nt, Artificial Sequence
  Chemically synthesized
guuuugacauccugguuuuuggc

SEQ ID NO: 51442 - RNA, 23 nt, Artificial Sequence
  Chemically synthesized
uacaaggaaaacaauguugagaa

SEQ ID NO: 51443 - RNA, 23 nt, Artificial Sequence
  Chemically synthesized
cagugauguuuuccaguaugaga

SEQ ID NO: 51444 - RNA, 23 nt, Artificial Sequence
  Chemically synthesized
acucuuucuucgugaugacaaac

SEQ ID NO: 51445 - RNA, 23 nt, Artificial Sequence
  Chemically synthesized
aacucuuucuucgugaugacaaa

SEQ ID NO: 51446 - RNA, 23 nt, Artificial Sequence
  Chemically synthesized
gaacucuuucuucgugaugacaa

SEQ ID NO: 51447 - RNA, 23 nt, Artificial Sequence
  Chemically synthesized
gaggauccggaaagaguuuccga

SEQ ID NO: 51448 - RNA, 23 nt, Artificial Sequence
  Chemically synthesized
ggaggauccggaaagaguuuccg

SEQ ID NO: 51449 - RNA, 23 nt, Artificial Sequence
  Chemically synthesized
uggaggauccggaaagaguuucc

SEQ ID NO: 51450 - RNA, 23 nt, Artificial Sequence
  Chemically synthesized
cuggaggauccggaaagaguuuc

SEQ ID NO: 51451 - RNA, 23 nt, Artificial Sequence
  Chemically synthesized
gcuggaggauccggaaagaguuu

SEQ ID NO: 51452 - RNA, 23 nt, Artificial Sequence
  Chemically synthesized
uaacugcugucgcucccauauuu

SEQ ID NO: 51453 - RNA, 23 nt, Artificial Sequence
  Chemically synthesized
guaacugcugucgcucccauauu

SEQ ID NO: 51454 - RNA, 23 nt, Artificial Sequence
  Chemically synthesized
aguaacugcugucgcucccauau

SEQ ID NO: 51455 - RNA, 23 nt, Artificial Sequence
  Chemically synthesized
caguaacugcugucgcucccaua

SEQ ID NO: 51456 - RNA, 23 nt, Artificial Sequence
  Chemically synthesized
ccaguaacugcugucgcucccau

SEQ ID NO: 51457 - RNA, 23 nt, Artificial Sequence
  Chemically synthesized
gcaugaauuauggcaccauuaag

SEQ ID NO: 51458 - RNA, 23 nt, Artificial Sequence
  Chemically synthesized
aaguacuacaaggaaaacaaugu

SEQ ID NO: 51459 - RNA, 23 nt, Artificial Sequence
  Chemically synthesized
caaguacuacaaggaaaacaaug

SEQ ID NO: 51460 - RNA, 23 nt, Artificial Sequence
  Chemically synthesized
ccaaguacuacaaggaaaacaau

SEQ ID NO: 51461 - RNA, 23 nt, Artificial Sequence
  Chemically synthesized
uuauggcaccauuaagugguucu

SEQ ID NO: 51462 - RNA, 23 nt, Artificial Sequence
  Chemically synthesized
ggacucugauaaaagucuucggg

SEQ ID NO: 51463 - RNA, 23 nt, Artificial Sequence
  Chemically synthesized
cggacucugauaaaagucuucgg

SEQ ID NO: 51464 - RNA, 23 nt, Artificial Sequence
  Chemically synthesized
acggacucugauaaaagucuucg

SEQ ID NO: 51465 - RNA, 23 nt, Artificial Sequence
  Chemically synthesized
aacggacucugauaaaagucuuc

SEQ ID NO: 51466 - RNA, 23 nt, Artificial Sequence
  Chemically synthesized
aaacggacucugauaaaagucuu

SEQ ID NO: 51467 - RNA, 23 nt, Artificial Sequence
  Chemically synthesized
gccaaguacuacaaggaaaacaa

SEQ ID NO: 51468 - RNA, 23 nt, Artificial Sequence
  Chemically synthesized
ggauccagagcaugaauuauggc

SEQ ID NO: 51469 - RNA, 23 nt, Artificial Sequence
  Chemically synthesized
cggauccagagcaugaauuaugg

SEQ ID NO: 51470 - RNA, 23 nt, Artificial Sequence
  Chemically synthesized
ucggauccagagcaugaauuaug

SEQ ID NO: 51471 - RNA, 23 nt, Artificial Sequence
  Chemically synthesized
cucggauccagagcaugaauuau

SEQ ID NO: 51472 - RNA, 23 nt, Artificial Sequence
  Chemically synthesized
acucggauccagagcaugaauua

SEQ ID NO: 51473 - RNA, 23 nt, Artificial Sequence
  Chemically synthesized
ggagacaucuuccgagaaacagg

SEQ ID NO: 51474 - RNA, 23 nt, Artificial Sequence
  Chemically synthesized
aggagacaucuuccgagaaacag

SEQ ID NO: 51475 - RNA, 23 nt, Artificial Sequence
  Chemically synthesized
uaggagacaucuuccgagaaaca

SEQ ID NO: 51476 - RNA, 23 nt, Artificial Sequence
  Chemically synthesized
cuaggagacaucuuccgagaaac

SEQ ID NO: 51477 - RNA, 23 nt, Artificial Sequence
  Chemically synthesized
acuaggagacaucuuccgagaaa

SEQ ID NO: 51478 - RNA, 23 nt, Artificial Sequence
  Chemically synthesized
gugauguuuuccaguaugagacg

SEQ ID NO: 51479 - RNA, 23 nt, Artificial Sequence
  Chemically synthesized
agugauguuuuccaguaugagac

SEQ ID NO: 51480 - RNA, 23 nt, Artificial Sequence
  Chemically synthesized
gggauccguuuugacauccuggu

SEQ ID NO: 51481 - RNA, 23 nt, Artificial Sequence
  Chemically synthesized
gucuucgggauccguuuugacau

SEQ ID NO: 51482 - RNA, 23 nt, Artificial Sequence
  Chemically synthesized
agucuucgggauccguuuugaca

SEQ ID NO: 51483 - RNA, 23 nt, Artificial Sequence
  Chemically synthesized
aagucuucgggauccguuuugac

SEQ ID NO: 51484 - RNA, 23 nt, Artificial Sequence
  Chemically synthesized
aaagucuucgggauccguuuuga

SEQ ID NO: 51485 - RNA, 23 nt, Artificial Sequence
  Chemically synthesized
aaaagucuucgggauccguuuug

SEQ ID NO: 51486 - RNA, 23 nt, Artificial Sequence
  Chemically synthesized
agacaucuuccgagaaacaggcg

SEQ ID NO: 51487 - RNA, 23 nt, Artificial Sequence
  Chemically synthesized
gagacaucuuccgagaaacaggc

SEQ ID NO: 51488 - RNA, 23 nt, Artificial Sequence
  Chemically synthesized
agaaguuggugcacagugucuuu

SEQ ID NO: 51489 - RNA, 23 nt, Artificial Sequence
  Chemically synthesized
aagaaguuggugcacagugucuu

SEQ ID NO: 51490 - RNA, 23 nt, Artificial Sequence
  Chemically synthesized
gaagaaguuggugcacagugucu

SEQ ID NO: 51491 - RNA, 23 nt, Artificial Sequence
  Chemically synthesized
ugaagaaguuggugcacaguguc

SEQ ID NO: 51492 - RNA, 23 nt, Artificial Sequence
  Chemically synthesized
gugaagaaguuggugcacagugu

SEQ ID NO: 51493 - RNA, 23 nt, Artificial Sequence
  Chemically synthesized
uuaaacaucacuuguaccuucca

SEQ ID NO: 51494 - RNA, 23 nt, Artificial Sequence
  Chemically synthesized
gauaauuuuucagauguggcaau

SEQ ID NO: 51495 - RNA, 23 nt, Artificial Sequence
  Chemically synthesized
ucagcccuguguggucaacgaau

SEQ ID NO: 51496 - RNA, 23 nt, Artificial Sequence
  Chemically synthesized
guauguguccuuuguggaugaau

SEQ ID NO: 51497 - RNA, 23 nt, Artificial Sequence
  Chemically synthesized
gaaaauuugacauuauccagcug

SEQ ID NO: 51498 - RNA, 23 nt, Artificial Sequence
  Chemically synthesized
gagaaacauccugccagguuuaa

SEQ ID NO: 51499 - RNA, 23 nt, Artificial Sequence
  Chemically synthesized
uaauuuuucagauguggcaauuc

SEQ ID NO: 51500 - RNA, 23 nt, Artificial Sequence
  Chemically synthesized
ggaaagaguuuccgaagagugaa

SEQ ID NO: 51501 - RNA, 23 nt, Artificial Sequence
  Chemically synthesized
cccauuuuccgacuaggagacau

SEQ ID NO: 51502 - RNA, 23 nt, Artificial Sequence
  Chemically synthesized
aacauccugccagguuuaaacau

SEQ ID NO: 51503 - RNA, 23 nt, Artificial Sequence
  Chemically synthesized
agaaacauccugccagguuuaaa

SEQ ID NO: 51504 - RNA, 23 nt, Artificial Sequence
  Chemically synthesized
ugaaagaggagaucguggagaau

SEQ ID NO: 51505 - RNA, 23 nt, Artificial Sequence
  Chemically synthesized
ccauuaagugguucuuccacgug

SEQ ID NO: 51506 - RNA, 23 nt, Artificial Sequence
  Chemically synthesized
agggaaccagaagaccugugaag

SEQ ID NO: 51507 - RNA, 23 nt, Artificial Sequence
  Chemically synthesized
gugacaagcuguaccagcggaaa

SEQ ID NO: 51508 - RNA, 23 nt, Artificial Sequence
  Chemically synthesized
ucccauauuuaucccuggugcaa

SEQ ID NO: 51509 - RNA, 23 nt, Artificial Sequence
  Chemically synthesized
gaaguuggugcacagugucuuug

SEQ ID NO: 51510 - RNA, 23 nt, Artificial Sequence
  Chemically synthesized
gugaaagaggagaucguggagaa

SEQ ID NO: 51511 - RNA, 23 nt, Artificial Sequence
  Chemically synthesized
ggugaaagaggagaucguggaga

SEQ ID NO: 51512 - RNA, 23 nt, Artificial Sequence
  Chemically synthesized
ugacaagcuguaccagcggaaag

SEQ ID NO: 51513 - RNA, 23 nt, Artificial Sequence
  Chemically synthesized
ccauuuuccgacuaggagacauc

SEQ ID NO: 51514 - RNA, 23 nt, Artificial Sequence
  Chemically synthesized
cuguuccucugaccgagguugua

SEQ ID NO: 51515 - RNA, 23 nt, Artificial Sequence
  Chemically synthesized
ugauguuuuccaguaugagacga

SEQ ID NO: 51516 - RNA, 23 nt, Artificial Sequence
  Chemically synthesized
gaaagaggagaucguggagaaug

SEQ ID NO: 51517 - RNA, 23 nt, Artificial Sequence
  Chemically synthesized
caagaagucccaagaccugcgau

SEQ ID NO: 51518 - RNA, 23 nt, Artificial Sequence
  Chemically synthesized
cgccaaguacuacaaggaaaaca

SEQ ID NO: 51519 - RNA, 23 nt, Artificial Sequence
  Chemically synthesized
ucacuuguaccuuccacaagacu

SEQ ID NO: 51520 - RNA, 23 nt, Artificial Sequence
  Chemically synthesized
cacugugcucaucaagaacaaua

SEQ ID NO: 51521 - RNA, 23 nt, Artificial Sequence
  Chemically synthesized
cgagaaacauccugccagguuua

SEQ ID NO: 51522 - RNA, 23 nt, Artificial Sequence
  Chemically synthesized
agcaaaggaauucagaccggaag

SEQ ID NO: 51523 - RNA, 23 nt, Artificial Sequence
  Chemically synthesized
cucccauauuuaucccuggugca

SEQ ID NO: 51524 - RNA, 23 nt, Artificial Sequence
  Chemically synthesized
cugugcucaucaagaacaauauc

SEQ ID NO: 51525 - RNA, 23 nt, Artificial Sequence
  Chemically synthesized
gcagcugcagugauguuuuccag

SEQ ID NO: 51526 - RNA, 23 nt, Artificial Sequence
  Chemically synthesized
cuuuguggaugaaucccacauua

SEQ ID NO: 51527 - RNA, 23 nt, Artificial Sequence
  Chemically synthesized
ccuuuguggaugaaucccacauu

SEQ ID NO: 51528 - RNA, 23 nt, Artificial Sequence
  Chemically synthesized
ugcgaguccauuguggagccaaa

SEQ ID NO: 51529 - RNA, 23 nt, Artificial Sequence
  Chemically synthesized
ccauauuuaucccuggugcaagu

SEQ ID NO: 51530 - RNA, 23 nt, Artificial Sequence
  Chemically synthesized
gauaaaagucuucgggauccguu

SEQ ID NO: 51531 - RNA, 23 nt, Artificial Sequence
  Chemically synthesized
aguauguguccuuuguggaugaa

SEQ ID NO: 51532 - RNA, 23 nt, Artificial Sequence
  Chemically synthesized
gccgacauuaaaguauguguccu

SEQ ID NO: 51533 - RNA, 23 nt, Artificial Sequence
  Chemically synthesized
acgccaaguacuacaaggaaaac

SEQ ID NO: 51534 - RNA, 23 nt, Artificial Sequence
  Chemically synthesized
gaaucccacauuaggauggugaa

SEQ ID NO: 51535 - RNA, 23 nt, Artificial Sequence
  Chemically synthesized
ggaugaaucccacauuaggaugg

SEQ ID NO: 51536 - RNA, 23 nt, Artificial Sequence
  Chemically synthesized
uccuuuguggaugaaucccacau

SEQ ID NO: 51537 - RNA, 23 nt, Artificial Sequence
  Chemically synthesized
ugacauuauccagcugguugugu

SEQ ID NO: 51538 - RNA, 23 nt, Artificial Sequence
  Chemically synthesized
cacuuguaccuuccacaagacuc

SEQ ID NO: 51539 - RNA, 23 nt, Artificial Sequence
  Chemically synthesized
cgaaaacuucacugugcucauca

SEQ ID NO: 51540 - RNA, 23 nt, Artificial Sequence
  Chemically synthesized
gcuuagaaaggaggcgacuccua

SEQ ID NO: 51541 - RNA, 23 nt, Artificial Sequence
  Chemically synthesized
ugaaucccacauuaggaugguga

SEQ ID NO: 51542 - RNA, 23 nt, Artificial Sequence
  Chemically synthesized
guggagccaaagccgacauuaaa

SEQ ID NO: 51543 - RNA, 23 nt, Artificial Sequence
  Chemically synthesized
cucaucgacacuuacuccaguaa

SEQ ID NO: 51544 - RNA, 23 nt, Artificial Sequence
  Chemically synthesized
auacgccaaguacuacaaggaaa

SEQ ID NO: 51545 - RNA, 23 nt, Artificial Sequence
  Chemically synthesized
gacuaggagacaucuuccgagaa

SEQ ID NO: 51546 - RNA, 23 nt, Artificial Sequence
  Chemically synthesized
ucagaauccacagugucccauuu

SEQ ID NO: 51547 - RNA, 23 nt, Artificial Sequence
  Chemically synthesized
acaucacuuguaccuuccacaag

SEQ ID NO: 51548 - RNA, 23 nt, Artificial Sequence
  Chemically synthesized
aacaucacuuguaccuuccacaa

SEQ ID NO: 51549 - RNA, 23 nt, Artificial Sequence
  Chemically synthesized
cacgagaaacauccugccagguu

SEQ ID NO: 51550 - RNA, 23 nt, Artificial Sequence
  Chemically synthesized
uggacccgcagagcaaaggaauu

SEQ ID NO: 51551 - RNA, 23 nt, Artificial Sequence
  Chemically synthesized
guacaguggcuucaagaguccuu

SEQ ID NO: 51552 - RNA, 23 nt, Artificial Sequence
  Chemically synthesized
accugcgauggacuucacagauu

SEQ ID NO: 51553 - RNA, 23 nt, Artificial Sequence
  Chemically synthesized
caagaccugcgauggacuucaca

SEQ ID NO: 51554 - RNA, 23 nt, Artificial Sequence
  Chemically synthesized
agcuacuagggagaagucugcaa

SEQ ID NO: 51555 - RNA, 23 nt, Artificial Sequence
  Chemically synthesized
gaaccagcagcuacuagggagaa

SEQ ID NO: 51556 - RNA, 23 nt, Artificial Sequence
  Chemically synthesized
cccauauuuaucccuggugcaag

SEQ ID NO: 51557 - RNA, 23 nt, Artificial Sequence
  Chemically synthesized
caauguugagaaacggacucuga

SEQ ID NO: 51558 - RNA, 23 nt, Artificial Sequence
  Chemically synthesized
ucacucggauccagagcaugaau

SEQ ID NO: 51559 - RNA, 23 nt, Artificial Sequence
  Chemically synthesized
cacagugucccauuuuccgacua

SEQ ID NO: 51560 - RNA, 23 nt, Artificial Sequence
  Chemically synthesized
acaccacgagaaacauccugcca

SEQ ID NO: 51561 - RNA, 23 nt, Artificial Sequence
  Chemically synthesized
ggaaccagaagaccugugaaguc

SEQ ID NO: 51562 - RNA, 23 nt, Artificial Sequence
  Chemically synthesized
cucuuucuucgugaugacaaacu

SEQ ID NO: 51563 - RNA, 23 nt, Artificial Sequence
  Chemically synthesized
gugucuuugacaccgcagacuac

SEQ ID NO: 51564 - RNA, 23 nt, Artificial Sequence
  Chemically synthesized
gacauuauccagcugguugugua

SEQ ID NO: 51565 - RNA, 23 nt, Artificial Sequence
  Chemically synthesized
guugagaaacggacucugauaaa

SEQ ID NO: 51566 - RNA, 23 nt, Artificial Sequence
  Chemically synthesized
cacucggauccagagcaugaauu

SEQ ID NO: 51567 - RNA, 23 nt, Artificial Sequence
  Chemically synthesized
acagugucccauuuuccgacuag

SEQ ID NO: 51568 - RNA, 23 nt, Artificial Sequence
  Chemically synthesized
caguucugugcacaccaagguga

SEQ ID NO: 51569 - RNA, 23 nt, Artificial Sequence
  Chemically synthesized
guccuuuguggaugaaucccaca

SEQ ID NO: 51570 - RNA, 23 nt, Artificial Sequence
  Chemically synthesized
ucagauacgccaaguacuacaag

SEQ ID NO: 51571 - RNA, 23 nt, Artificial Sequence
  Chemically synthesized
cgacuaggagacaucuuccgaga

SEQ ID NO: 51572 - RNA, 23 nt, Artificial Sequence
  Chemically synthesized
cagaauccacagugucccauuuu

SEQ ID NO: 51573 - RNA, 23 nt, Artificial Sequence
  Chemically synthesized
ccacaagacucagaauccacagu

SEQ ID NO: 51574 - RNA, 23 nt, Artificial Sequence
  Chemically synthesized
cugcucucuugaacagugccgaa

SEQ ID NO: 51575 - RNA, 23 nt, Artificial Sequence
  Chemically synthesized
ugaagggaaccagaagaccugug

SEQ ID NO: 51576 - RNA, 23 nt, Artificial Sequence
  Chemically synthesized
gaauucagaccggaaggugugua

SEQ ID NO: 51577 - RNA, 23 nt, Artificial Sequence
  Chemically synthesized
cuuucuucgugaugacaaacuuu

SEQ ID NO: 51578 - RNA, 23 nt, Artificial Sequence
  Chemically synthesized
cggaaagaguuuccgaagaguga

SEQ ID NO: 51579 - RNA, 23 nt, Artificial Sequence
  Chemically synthesized
ccggaaagaguuuccgaagagug

SEQ ID NO: 51580 - RNA, 23 nt, Artificial Sequence
  Chemically synthesized
ugcaucaccaccucagagcuguu

SEQ ID NO: 51581 - RNA, 23 nt, Artificial Sequence
  Chemically synthesized
ucaucgacacuuacuccaguaac

SEQ ID NO: 51582 - RNA, 23 nt, Artificial Sequence
  Chemically synthesized
ugguuuuuggcaccggaggaaaa

SEQ ID NO: 51583 - RNA, 23 nt, Artificial Sequence
  Chemically synthesized
guggcuucaagaguccuuacuga

SEQ ID NO: 51584 - RNA, 23 nt, Artificial Sequence
  Chemically synthesized
caguggcuucaagaguccuuacu

SEQ ID NO: 51585 - RNA, 23 nt, Artificial Sequence
  Chemically synthesized
acaguggcuucaagaguccuuac

SEQ ID NO: 51586 - RNA, 23 nt, Artificial Sequence
  Chemically synthesized
ccacauuaggauggugaaccagc

SEQ ID NO: 51587 - RNA, 23 nt, Artificial Sequence
  Chemically synthesized
guggaugaaucccacauuaggau

SEQ ID NO: 51588 - RNA, 23 nt, Artificial Sequence
  Chemically synthesized
uaaaguauguguccuuuguggau

SEQ ID NO: 51589 - RNA, 23 nt, Artificial Sequence
  Chemically synthesized
uguggagccaaagccgacauuaa

SEQ ID NO: 51590 - RNA, 23 nt, Artificial Sequence
  Chemically synthesized
acacuuacuccaguaacugcugu

SEQ ID NO: 51591 - RNA, 23 nt, Artificial Sequence
  Chemically synthesized
ccucaucgacacuuacuccagua

SEQ ID NO: 51592 - RNA, 23 nt, Artificial Sequence
  Chemically synthesized
ggaaaauuugacauuauccagcu

SEQ ID NO: 51593 - RNA, 23 nt, Artificial Sequence
  Chemically synthesized
ccagacgccauuuaaaagucugc

SEQ ID NO: 51594 - RNA, 23 nt, Artificial Sequence
  Chemically synthesized
gccagacgccauuuaaaagucug

SEQ ID NO: 51595 - RNA, 23 nt, Artificial Sequence
  Chemically synthesized
agccagacgccauuuaaaagucu

SEQ ID NO: 51596 - RNA, 23 nt, Artificial Sequence
  Chemically synthesized
aagccagacgccauuuaaaaguc

SEQ ID NO: 51597 - RNA, 23 nt, Artificial Sequence
  Chemically synthesized
gaagccagacgccauuuaaaagu

SEQ ID NO: 51598 - RNA, 23 nt, Artificial Sequence
  Chemically synthesized
guggcucugauugcuuuauccaa

SEQ ID NO: 51599 - RNA, 23 nt, Artificial Sequence
  Chemically synthesized
gguggcucugauugcuuuaucca

SEQ ID NO: 51600 - RNA, 23 nt, Artificial Sequence
  Chemically synthesized
ggguggcucugauugcuuuaucc

SEQ ID NO: 51601 - RNA, 23 nt, Artificial Sequence
  Chemically synthesized
uggguggcucugauugcuuuauc

SEQ ID NO: 51602 - RNA, 23 nt, Artificial Sequence
  Chemically synthesized
auggguggcucugauugcuuuau

SEQ ID NO: 51603 - RNA, 23 nt, Artificial Sequence
  Chemically synthesized
ccaaagggaaauaugcuuucauc

SEQ ID NO: 51604 - RNA, 23 nt, Artificial Sequence
  Chemically synthesized
gccaaagggaaauaugcuuucau

SEQ ID NO: 51605 - RNA, 23 nt, Artificial Sequence
  Chemically synthesized
agccaaagggaaauaugcuuuca

SEQ ID NO: 51606 - RNA, 23 nt, Artificial Sequence
  Chemically synthesized
cagccaaagggaaauaugcuuuc

SEQ ID NO: 51607 - RNA, 23 nt, Artificial Sequence
  Chemically synthesized
ucagccaaagggaaauaugcuuu

SEQ ID NO: 51608 - RNA, 23 nt, Artificial Sequence
  Chemically synthesized
aaaaauuaucgccuguuucucgg

SEQ ID NO: 51609 - RNA, 23 nt, Artificial Sequence
  Chemically synthesized
aaaauuaucgccuguuucucgga

SEQ ID NO: 51610 - RNA, 23 nt, Artificial Sequence
  Chemically synthesized
aaauuaucgccuguuucucggaa

SEQ ID NO: 51611 - RNA, 23 nt, Artificial Sequence
  Chemically synthesized
aauuaucgccuguuucucggaag

SEQ ID NO: 51612 - RNA, 23 nt, Artificial Sequence
  Chemically synthesized
auuaucgccuguuucucggaaga

SEQ ID NO: 51613 - RNA, 23 nt, Artificial Sequence
  Chemically synthesized
agcaaacguaggaaaagaugauc

SEQ ID NO: 51614 - RNA, 23 nt, Artificial Sequence
  Chemically synthesized
gcaaacguaggaaaagaugauca

SEQ ID NO: 51615 - RNA, 23 nt, Artificial Sequence
  Chemically synthesized
caaacguaggaaaagaugaucac

SEQ ID NO: 51616 - RNA, 23 nt, Artificial Sequence
  Chemically synthesized
aaacguaggaaaagaugaucacg

SEQ ID NO: 51617 - RNA, 23 nt, Artificial Sequence
  Chemically synthesized
aacguaggaaaagaugaucacgu

SEQ ID NO: 51618 - RNA, 23 nt, Artificial Sequence
  Chemically synthesized
acguaggaaaagaugaucacgug

SEQ ID NO: 51619 - RNA, 23 nt, Artificial Sequence
  Chemically synthesized
gaaaaauuaucgccuguuucucg

SEQ ID NO: 51620 - RNA, 23 nt, Artificial Sequence
  Chemically synthesized
guacaagugauguuuaaaccugg

SEQ ID NO: 51621 - RNA, 23 nt, Artificial Sequence
  Chemically synthesized
uacaagugauguuuaaaccuggc

SEQ ID NO: 51622 - RNA, 23 nt, Artificial Sequence
  Chemically synthesized
acaagugauguuuaaaccuggca

SEQ ID NO: 51623 - RNA, 23 nt, Artificial Sequence
  Chemically synthesized
caagugauguuuaaaccuggcag

SEQ ID NO: 51624 - RNA, 23 nt, Artificial Sequence
  Chemically synthesized
aagugauguuuaaaccuggcagg

SEQ ID NO: 51625 - RNA, 23 nt, Artificial Sequence
  Chemically synthesized
cguaggaaaagaugaucacgugg

SEQ ID NO: 51626 - RNA, 23 nt, Artificial Sequence
  Chemically synthesized
guaggaaaagaugaucacgugga

SEQ ID NO: 51627 - RNA, 23 nt, Artificial Sequence
  Chemically synthesized
uaggaaaagaugaucacguggaa

SEQ ID NO: 51628 - RNA, 23 nt, Artificial Sequence
  Chemically synthesized
uggauaaugucaaauuuuccucc

SEQ ID NO: 51629 - RNA, 23 nt, Artificial Sequence
  Chemically synthesized
ggauaaugucaaauuuuccuccg

SEQ ID NO: 51630 - RNA, 23 nt, Artificial Sequence
  Chemically synthesized
gauaaugucaaauuuuccuccgg

SEQ ID NO: 51631 - RNA, 23 nt, Artificial Sequence
  Chemically synthesized
auaaugucaaauuuuccuccggu

SEQ ID NO: 51632 - RNA, 23 nt, Artificial Sequence
  Chemically synthesized
uaaugucaaauuuuccuccggug

SEQ ID NO: 51633 - RNA, 23 nt, Artificial Sequence
  Chemically synthesized
acggaucccgaagacuuuuauca

SEQ ID NO: 51634 - RNA, 23 nt, Artificial Sequence
  Chemically synthesized
cggaucccgaagacuuuuaucag

SEQ ID NO: 51635 - RNA, 23 nt, Artificial Sequence
  Chemically synthesized
ggaucccgaagacuuuuaucaga

SEQ ID NO: 51636 - RNA, 23 nt, Artificial Sequence
  Chemically synthesized
gaucccgaagacuuuuaucagag

SEQ ID NO: 51637 - RNA, 23 nt, Artificial Sequence
  Chemically synthesized
aucccgaagacuuuuaucagagu

SEQ ID NO: 51638 - RNA, 23 nt, Artificial Sequence
  Chemically synthesized
uugccacaucugaaaaauuaucg

SEQ ID NO: 51639 - RNA, 23 nt, Artificial Sequence
  Chemically synthesized
ugccacaucugaaaaauuaucgc

SEQ ID NO: 51640 - RNA, 23 nt, Artificial Sequence
  Chemically synthesized
gccacaucugaaaaauuaucgcc

SEQ ID NO: 51641 - RNA, 23 nt, Artificial Sequence
  Chemically synthesized
ccacaucugaaaaauuaucgccu

SEQ ID NO: 51642 - RNA, 23 nt, Artificial Sequence
  Chemically synthesized
cacaucugaaaaauuaucgccug

SEQ ID NO: 51643 - RNA, 23 nt, Artificial Sequence
  Chemically synthesized
acaucugaaaaauuaucgccugu

SEQ ID NO: 51644 - RNA, 23 nt, Artificial Sequence
  Chemically synthesized
caucugaaaaauuaucgccuguu

SEQ ID NO: 51645 - RNA, 23 nt, Artificial Sequence
  Chemically synthesized
gaugagcacagugaaguuuucgg

SEQ ID NO: 51646 - RNA, 23 nt, Artificial Sequence
  Chemically synthesized
augagcacagugaaguuuucggc

SEQ ID NO: 51647 - RNA, 23 nt, Artificial Sequence
  Chemically synthesized
ugagcacagugaaguuuucggca

SEQ ID NO: 51648 - RNA, 23 nt, Artificial Sequence
  Chemically synthesized
gagcacagugaaguuuucggcac

SEQ ID NO: 51649 - RNA, 23 nt, Artificial Sequence
  Chemically synthesized
agcacagugaaguuuucggcacu

SEQ ID NO: 51650 - RNA, 23 nt, Artificial Sequence
  Chemically synthesized
ugcaaagggaagguguagucugc

SEQ ID NO: 51651 - RNA, 23 nt, Artificial Sequence
  Chemically synthesized
gcaaagggaagguguagucugcg

SEQ ID NO: 51652 - RNA, 23 nt, Artificial Sequence
  Chemically synthesized
caaagggaagguguagucugcgg

SEQ ID NO: 51653 - RNA, 23 nt, Artificial Sequence
  Chemically synthesized
aaagggaagguguagucugcggu

SEQ ID NO: 51654 - RNA, 23 nt, Artificial Sequence
  Chemically synthesized
aagggaagguguagucugcggug

SEQ ID NO: 51655 - RNA, 23 nt, Artificial Sequence
  Chemically synthesized
aagcaaacguaggaaaagaugau

SEQ ID NO: 51656 - RNA, 23 nt, Artificial Sequence
  Chemically synthesized
aaagaugaucacguggaagaacc

SEQ ID NO: 51657 - RNA, 23 nt, Artificial Sequence
  Chemically synthesized
aagaugaucacguggaagaacca

SEQ ID NO: 51658 - RNA, 23 nt, Artificial Sequence
  Chemically synthesized
agaugaucacguggaagaaccac

SEQ ID NO: 51659 - RNA, 23 nt, Artificial Sequence
  Chemically synthesized
gaugaucacguggaagaaccacu

SEQ ID NO: 51660 - RNA, 23 nt, Artificial Sequence
  Chemically synthesized
augaucacguggaagaaccacuu

SEQ ID NO: 51661 - RNA, 23 nt, Artificial Sequence
  Chemically synthesized
aucugaaaaauuaucgccuguuu

SEQ ID NO: 51662 - RNA, 23 nt, Artificial Sequence
  Chemically synthesized
aagguacaagugauguuuaaacc

SEQ ID NO: 51663 - RNA, 23 nt, Artificial Sequence
  Chemically synthesized
agguacaagugauguuuaaaccu

SEQ ID NO: 51664 - RNA, 23 nt, Artificial Sequence
  Chemically synthesized
gguacaagugauguuuaaaccug

SEQ ID NO: 51665 - RNA, 23 nt, Artificial Sequence
  Chemically synthesized
ggggaagucgauauuguucuuga

SEQ ID NO: 51666 - RNA, 23 nt, Artificial Sequence
  Chemically synthesized
gggaagucgauauuguucuugau

SEQ ID NO: 51667 - RNA, 23 nt, Artificial Sequence
  Chemically synthesized
ggaagucgauauuguucuugaug

SEQ ID NO: 51668 - RNA, 23 nt, Artificial Sequence
  Chemically synthesized
gaagucgauauuguucuugauga

SEQ ID NO: 51669 - RNA, 23 nt, Artificial Sequence
  Chemically synthesized
aagucgauauuguucuugaugag

SEQ ID NO: 51670 - RNA, 23 nt, Artificial Sequence
  Chemically synthesized
ggacaaaucugugaaguccaucg

SEQ ID NO: 51671 - RNA, 23 nt, Artificial Sequence
  Chemically synthesized
gacaaaucugugaaguccaucgc

SEQ ID NO: 51672 - RNA, 23 nt, Artificial Sequence
  Chemically synthesized
acaaaucugugaaguccaucgca

SEQ ID NO: 51673 - RNA, 23 nt, Artificial Sequence
  Chemically synthesized
caaaucugugaaguccaucgcag

SEQ ID NO: 51674 - RNA, 23 nt, Artificial Sequence
  Chemically synthesized
aaaucugugaaguccaucgcagg

SEQ ID NO: 51675 - RNA, 23 nt, Artificial Sequence
  Chemically synthesized
cuugacaucuugcagacuucucc

SEQ ID NO: 51676 - RNA, 23 nt, Artificial Sequence
  Chemically synthesized
uugacaucuugcagacuucuccc

SEQ ID NO: 51677 - RNA, 23 nt, Artificial Sequence
  Chemically synthesized
ugacaucuugcagacuucucccu

SEQ ID NO: 51678 - RNA, 23 nt, Artificial Sequence
  Chemically synthesized
gacaucuugcagacuucucccua

SEQ ID NO: 51679 - RNA, 23 nt, Artificial Sequence
  Chemically synthesized
acaucuugcagacuucucccuag

SEQ ID NO: 51680 - RNA, 23 nt, Artificial Sequence
  Chemically synthesized
caccagggauaaauaugggagcg

SEQ ID NO: 51681 - RNA, 23 nt, Artificial Sequence
  Chemically synthesized
accagggauaaauaugggagcga

SEQ ID NO: 51682 - RNA, 23 nt, Artificial Sequence
  Chemically synthesized
ccagggauaaauaugggagcgac

SEQ ID NO: 51683 - RNA, 23 nt, Artificial Sequence
  Chemically synthesized
cagggauaaauaugggagcgaca

SEQ ID NO: 51684 - RNA, 23 nt, Artificial Sequence
  Chemically synthesized
agggauaaauaugggagcgacag

SEQ ID NO: 51685 - RNA, 23 nt, Artificial Sequence
  Chemically synthesized
aaugucaaauuuuccuccggugc

SEQ ID NO: 51686 - RNA, 23 nt, Artificial Sequence
  Chemically synthesized
ugacuuuguucgucucauacugg

SEQ ID NO: 51687 - RNA, 23 nt, Artificial Sequence
  Chemically synthesized
gacuuuguucgucucauacugga

SEQ ID NO: 51688 - RNA, 23 nt, Artificial Sequence
  Chemically synthesized
acuuuguucgucucauacuggaa

SEQ ID NO: 51689 - RNA, 23 nt, Artificial Sequence
  Chemically synthesized
cuuuguucgucucauacuggaaa

SEQ ID NO: 51690 - RNA, 23 nt, Artificial Sequence
  Chemically synthesized
uuuguucgucucauacuggaaaa

SEQ ID NO: 51691 - RNA, 23 nt, Artificial Sequence
  Chemically synthesized
agucgauauuguucuugaugagc

SEQ ID NO: 51692 - RNA, 23 nt, Artificial Sequence
  Chemically synthesized
gucgauauuguucuugaugagca

SEQ ID NO: 51693 - RNA, 23 nt, Artificial Sequence
  Chemically synthesized
ucgauauuguucuugaugagcac

SEQ ID NO: 51694 - RNA, 23 nt, Artificial Sequence
  Chemically synthesized
cggucugaauuccuuugcucugc

SEQ ID NO: 51695 - RNA, 23 nt, Artificial Sequence
  Chemically synthesized
ggucugaauuccuuugcucugcg

SEQ ID NO: 51696 - RNA, 23 nt, Artificial Sequence
  Chemically synthesized
gucugaauuccuuugcucugcgg

SEQ ID NO: 51697 - RNA, 23 nt, Artificial Sequence
  Chemically synthesized
ucugaauuccuuugcucugcggg

SEQ ID NO: 51698 - RNA, 23 nt, Artificial Sequence
  Chemically synthesized
cugaauuccuuugcucugcgggu

SEQ ID NO: 51699 - RNA, 23 nt, Artificial Sequence
  Chemically synthesized
cuccucuuucaccucugcuaucc

SEQ ID NO: 51700 - RNA, 23 nt, Artificial Sequence
  Chemically synthesized
uccucuuucaccucugcuauccc

SEQ ID NO: 51701 - RNA, 23 nt, Artificial Sequence
  Chemically synthesized
ccucuuucaccucugcuaucccc

SEQ ID NO: 51702 - RNA, 23 nt, Artificial Sequence
  Chemically synthesized
cucuuucaccucugcuauccccu

SEQ ID NO: 51703 - RNA, 23 nt, Artificial Sequence
  Chemically synthesized
ucuuucaccucugcuauccccuu

SEQ ID NO: 51704 - RNA, 23 nt, Artificial Sequence
  Chemically synthesized
caucuugcagacuucucccuagu

SEQ ID NO: 51705 - RNA, 23 nt, Artificial Sequence
  Chemically synthesized
aucuugcagacuucucccuagua

SEQ ID NO: 51706 - RNA, 23 nt, Artificial Sequence
  Chemically synthesized
cuucuuccuguaguaguauucgu

SEQ ID NO: 51707 - RNA, 23 nt, Artificial Sequence
  Chemically synthesized
uucuuccuguaguaguauucguu

SEQ ID NO: 51708 - RNA, 23 nt, Artificial Sequence
  Chemically synthesized
ucuuccuguaguaguauucguug

SEQ ID NO: 51709 - RNA, 23 nt, Artificial Sequence
  Chemically synthesized
cuuccuguaguaguauucguuga

SEQ ID NO: 51710 - RNA, 23 nt, Artificial Sequence
  Chemically synthesized
uuccuguaguaguauucguugac

SEQ ID NO: 51711 - RNA, 23 nt, Artificial Sequence
  Chemically synthesized
guaguauucguugaccacacagg

SEQ ID NO: 51712 - RNA, 23 nt, Artificial Sequence
  Chemically synthesized
uaguauucguugaccacacaggg

SEQ ID NO: 51713 - RNA, 23 nt, Artificial Sequence
  Chemically synthesized
aguauucguugaccacacagggc

SEQ ID NO: 51714 - RNA, 23 nt, Artificial Sequence
  Chemically synthesized
guauucguugaccacacagggcu

SEQ ID NO: 51715 - RNA, 23 nt, Artificial Sequence
  Chemically synthesized
uauucguugaccacacagggcug

SEQ ID NO: 51716 - RNA, 23 nt, Artificial Sequence
  Chemically synthesized
augucaaauuuuccuccggugcc

SEQ ID NO: 51717 - RNA, 23 nt, Artificial Sequence
  Chemically synthesized
cggggaagucgauauuguucuug

SEQ ID NO: 51718 - RNA, 23 nt, Artificial Sequence
  Chemically synthesized
gcacagugaaguuuucggcacug

SEQ ID NO: 51719 - RNA, 23 nt, Artificial Sequence
  Chemically synthesized
ugucaucacgaagaaagaguucc

SEQ ID NO: 51720 - RNA, 23 nt, Artificial Sequence
  Chemically synthesized
gucaucacgaagaaagaguuccc

SEQ ID NO: 51721 - RNA, 23 nt, Artificial Sequence
  Chemically synthesized
ucaucacgaagaaagaguucccc

SEQ ID NO: 51722 - RNA, 23 nt, Artificial Sequence
  Chemically synthesized
caucacgaagaaagaguuccccu

SEQ ID NO: 51723 - RNA, 23 nt, Artificial Sequence
  Chemically synthesized
aucacgaagaaagaguuccccug

SEQ ID NO: 51724 - RNA, 23 nt, Artificial Sequence
  Chemically synthesized
agcaaagcaaacguaggaaaaga

SEQ ID NO: 51725 - RNA, 23 nt, Artificial Sequence
  Chemically synthesized
gcaaagcaaacguaggaaaagau

SEQ ID NO: 51726 - RNA, 23 nt, Artificial Sequence
  Chemically synthesized
caaagcaaacguaggaaaagaug

SEQ ID NO: 51727 - RNA, 23 nt, Artificial Sequence
  Chemically synthesized
aaagcaaacguaggaaaagauga

SEQ ID NO: 51728 - RNA, 23 nt, Artificial Sequence
  Chemically synthesized
aggaaaagaugaucacguggaag

SEQ ID NO: 51729 - RNA, 23 nt, Artificial Sequence
  Chemically synthesized
ggaaaagaugaucacguggaaga

SEQ ID NO: 51730 - RNA, 23 nt, Artificial Sequence
  Chemically synthesized
gaaaagaugaucacguggaagaa

SEQ ID NO: 51731 - RNA, 23 nt, Artificial Sequence
  Chemically synthesized
aaaagaugaucacguggaagaac

SEQ ID NO: 51732 - RNA, 23 nt, Artificial Sequence
  Chemically synthesized
cuccuuucuaagcagcuguaucu

SEQ ID NO: 51733 - RNA, 23 nt, Artificial Sequence
  Chemically synthesized
uccuuucuaagcagcuguaucuc

SEQ ID NO: 51734 - RNA, 23 nt, Artificial Sequence
  Chemically synthesized
ccuuucuaagcagcuguaucucc

SEQ ID NO: 51735 - RNA, 23 nt, Artificial Sequence
  Chemically synthesized
cuuucuaagcagcuguaucuccu

SEQ ID NO: 51736 - RNA, 23 nt, Artificial Sequence
  Chemically synthesized
uuucuaagcagcuguaucuccuc

SEQ ID NO: 51737 - RNA, 23 nt, Artificial Sequence
  Chemically synthesized
acauacuuuaaugucggcuuugg

SEQ ID NO: 51738 - RNA, 23 nt, Artificial Sequence
  Chemically synthesized
cauacuuuaaugucggcuuuggc

SEQ ID NO: 51739 - RNA, 23 nt, Artificial Sequence
  Chemically synthesized
auacuuuaaugucggcuuuggcu

SEQ ID NO: 51740 - RNA, 23 nt, Artificial Sequence
  Chemically synthesized
uacuuuaaugucggcuuuggcuc

SEQ ID NO: 51741 - RNA, 23 nt, Artificial Sequence
  Chemically synthesized
acuuuaaugucggcuuuggcucc

SEQ ID NO: 51742 - RNA, 23 nt, Artificial Sequence
  Chemically synthesized
ccuguaguaguauucguugacca

SEQ ID NO: 51743 - RNA, 23 nt, Artificial Sequence
  Chemically synthesized
cuguaguaguauucguugaccac

SEQ ID NO: 51744 - RNA, 23 nt, Artificial Sequence
  Chemically synthesized
uguaguaguauucguugaccaca

SEQ ID NO: 51745 - RNA, 23 nt, Artificial Sequence
  Chemically synthesized
guaguaguauucguugaccacac

SEQ ID NO: 51746 - RNA, 23 nt, Artificial Sequence
  Chemically synthesized
uaguaguauucguugaccacaca

SEQ ID NO: 51747 - RNA, 23 nt, Artificial Sequence
  Chemically synthesized
accgaaguaggagaggguugagc

SEQ ID NO: 51748 - RNA, 23 nt, Artificial Sequence
  Chemically synthesized
ccgaaguaggagaggguugagcc

SEQ ID NO: 51749 - RNA, 23 nt, Artificial Sequence
  Chemically synthesized
cgaaguaggagaggguugagccg

SEQ ID NO: 51750 - RNA, 23 nt, Artificial Sequence
  Chemically synthesized
gaaguaggagaggguugagccga

SEQ ID NO: 51751 - RNA, 23 nt, Artificial Sequence
  Chemically synthesized
aaguaggagaggguugagccgau

SEQ ID NO: 51752 - RNA, 23 nt, Artificial Sequence
  Chemically synthesized
agugauguuuaaaccuggcagga

SEQ ID NO: 51753 - RNA, 23 nt, Artificial Sequence
  Chemically synthesized
uuguucgucucauacuggaaaac

SEQ ID NO: 51754 - RNA, 23 nt, Artificial Sequence
  Chemically synthesized
auuguucuugaugagcacaguga

SEQ ID NO: 51755 - RNA, 23 nt, Artificial Sequence
  Chemically synthesized
uuguucuugaugagcacagugaa

SEQ ID NO: 51756 - RNA, 23 nt, Artificial Sequence
  Chemically synthesized
uguucuugaugagcacagugaag

SEQ ID NO: 51757 - RNA, 23 nt, Artificial Sequence
  Chemically synthesized
guucuugaugagcacagugaagu

SEQ ID NO: 51758 - RNA, 23 nt, Artificial Sequence
  Chemically synthesized
uucuugaugagcacagugaaguu

SEQ ID NO: 51759 - RNA, 23 nt, Artificial Sequence
  Chemically synthesized
auccaucccuuuuuacaaccucg

SEQ ID NO: 51760 - RNA, 23 nt, Artificial Sequence
  Chemically synthesized
uccaucccuuuuuacaaccucgg

SEQ ID NO: 51761 - RNA, 23 nt, Artificial Sequence
  Chemically synthesized
ccaucccuuuuuacaaccucggu

SEQ ID NO: 51762 - RNA, 23 nt, Artificial Sequence
  Chemically synthesized
caucccuuuuuacaaccucgguc

SEQ ID NO: 51763 - RNA, 23 nt, Artificial Sequence
  Chemically synthesized
aucccuuuuuacaaccucgguca

SEQ ID NO: 51764 - RNA, 23 nt, Artificial Sequence
  Chemically synthesized
uucuguuuugagaaaguuuguca

SEQ ID NO: 51765 - RNA, 23 nt, Artificial Sequence
  Chemically synthesized
ucuguuuugagaaaguuugucau

SEQ ID NO: 51766 - RNA, 23 nt, Artificial Sequence
  Chemically synthesized
cuguuuugagaaaguuugucauc

SEQ ID NO: 51767 - RNA, 23 nt, Artificial Sequence
  Chemically synthesized
uguuuugagaaaguuugucauca

SEQ ID NO: 51768 - RNA, 23 nt, Artificial Sequence
  Chemically synthesized
guuuugagaaaguuugucaucac

SEQ ID NO: 51769 - RNA, 23 nt, Artificial Sequence
  Chemically synthesized
caccaacuucuucacuccauucu

SEQ ID NO: 51770 - RNA, 23 nt, Artificial Sequence
  Chemically synthesized
accaacuucuucacuccauucuc

SEQ ID NO: 51771 - RNA, 23 nt, Artificial Sequence
  Chemically synthesized
ccaacuucuucacuccauucucc

SEQ ID NO: 51772 - RNA, 23 nt, Artificial Sequence
  Chemically synthesized
caacuucuucacuccauucucca

SEQ ID NO: 51773 - RNA, 23 nt, Artificial Sequence
  Chemically synthesized
aacuucuucacuccauucuccac

SEQ ID NO: 51774 - RNA, 23 nt, Artificial Sequence
  Chemically synthesized
gacucuugaagccacuguacugc

SEQ ID NO: 51775 - RNA, 23 nt, Artificial Sequence
  Chemically synthesized
acucuugaagccacuguacugcc

SEQ ID NO: 51776 - RNA, 23 nt, Artificial Sequence
  Chemically synthesized
cucuugaagccacuguacugccc

SEQ ID NO: 51777 - RNA, 23 nt, Artificial Sequence
  Chemically synthesized
ucuugaagccacuguacugcccu

SEQ ID NO: 51778 - RNA, 23 nt, Artificial Sequence
  Chemically synthesized
cuugaagccacuguacugcccuu

SEQ ID NO: 51779 - RNA, 23 nt, Artificial Sequence
  Chemically synthesized
gcccuugacaucuugcagacuuc

SEQ ID NO: 51780 - RNA, 23 nt, Artificial Sequence
  Chemically synthesized
cccuugacaucuugcagacuucu

SEQ ID NO: 51781 - RNA, 23 nt, Artificial Sequence
  Chemically synthesized
ccuugacaucuugcagacuucuc

SEQ ID NO: 51782 - RNA, 23 nt, Artificial Sequence
  Chemically synthesized
cacaauggacucgcacuucuucc

SEQ ID NO: 51783 - RNA, 23 nt, Artificial Sequence
  Chemically synthesized
acaauggacucgcacuucuuccu

SEQ ID NO: 51784 - RNA, 23 nt, Artificial Sequence
  Chemically synthesized
caauggacucgcacuucuuccug

SEQ ID NO: 51785 - RNA, 23 nt, Artificial Sequence
  Chemically synthesized
aauggacucgcacuucuuccugu

SEQ ID NO: 51786 - RNA, 23 nt, Artificial Sequence
  Chemically synthesized
auggacucgcacuucuuccugua

SEQ ID NO: 51787 - RNA, 23 nt, Artificial Sequence
  Chemically synthesized
uccuguaguaguauucguugacc

SEQ ID NO: 51788 - RNA, 23 nt, Artificial Sequence
  Chemically synthesized
aguaguauucguugaccacacag

SEQ ID NO: 51789 - RNA, 23 nt, Artificial Sequence
  Chemically synthesized
gcaccagggauaaauaugggagc

SEQ ID NO: 51790 - RNA, 23 nt, Artificial Sequence
  Chemically synthesized
uuaauggugccauaauucaugcu

SEQ ID NO: 51791 - RNA, 23 nt, Artificial Sequence
  Chemically synthesized
uaauggugccauaauucaugcuc

SEQ ID NO: 51792 - RNA, 23 nt, Artificial Sequence
  Chemically synthesized
aauggugccauaauucaugcucu

SEQ ID NO: 51793 - RNA, 23 nt, Artificial Sequence
  Chemically synthesized
auggugccauaauucaugcucug

SEQ ID NO: 51794 - RNA, 23 nt, Artificial Sequence
  Chemically synthesized
uggugccauaauucaugcucugg

SEQ ID NO: 51795 - RNA, 23 nt, Artificial Sequence
  Chemically synthesized
agacuuuuaucagaguccguuuc

SEQ ID NO: 51796 - RNA, 23 nt, Artificial Sequence
  Chemically synthesized
gacuuuuaucagaguccguuucu

SEQ ID NO: 51797 - RNA, 23 nt, Artificial Sequence
  Chemically synthesized
acuuuuaucagaguccguuucuc

SEQ ID NO: 51798 - RNA, 23 nt, Artificial Sequence
  Chemically synthesized
cuuuuaucagaguccguuucuca

SEQ ID NO: 51799 - RNA, 23 nt, Artificial Sequence
  Chemically synthesized
uuuuaucagaguccguuucucaa

SEQ ID NO: 51800 - RNA, 23 nt, Artificial Sequence
  Chemically synthesized
ucugaaaaauuaucgccuguuuc

SEQ ID NO: 51801 - RNA, 23 nt, Artificial Sequence
  Chemically synthesized
cugaaaaauuaucgccuguuucu

SEQ ID NO: 51802 - RNA, 23 nt, Artificial Sequence
  Chemically synthesized
ugaaaaauuaucgccuguuucuc

SEQ ID NO: 51803 - RNA, 23 nt, Artificial Sequence
  Chemically synthesized
uggauucugagucuuguggaagg

SEQ ID NO: 51804 - RNA, 23 nt, Artificial Sequence
  Chemically synthesized
ggauucugagucuuguggaaggu

SEQ ID NO: 51805 - RNA, 23 nt, Artificial Sequence
  Chemically synthesized
gauucugagucuuguggaaggua

SEQ ID NO: 51806 - RNA, 23 nt, Artificial Sequence
  Chemically synthesized
auucugagucuuguggaagguac

SEQ ID NO: 51807 - RNA, 23 nt, Artificial Sequence
  Chemically synthesized
uucugagucuuguggaagguaca

SEQ ID NO: 51808 - RNA, 23 nt, Artificial Sequence
  Chemically synthesized
auguuucucgugguguaguugug

SEQ ID NO: 51809 - RNA, 23 nt, Artificial Sequence
  Chemically synthesized
uguuucucgugguguaguugugg

SEQ ID NO: 51810 - RNA, 23 nt, Artificial Sequence
  Chemically synthesized
guuucucgugguguaguuguggc

SEQ ID NO: 51811 - RNA, 23 nt, Artificial Sequence
  Chemically synthesized
uuucucgugguguaguuguggcc

SEQ ID NO: 51812 - RNA, 23 nt, Artificial Sequence
  Chemically synthesized
uucucgugguguaguuguggccg

SEQ ID NO: 51813 - RNA, 23 nt, Artificial Sequence
  Chemically synthesized
ugaauuccuuugcucugcggguc

SEQ ID NO: 51814 - RNA, 23 nt, Artificial Sequence
  Chemically synthesized
agggaagguguagucugcggugu

SEQ ID NO: 51815 - RNA, 23 nt, Artificial Sequence
  Chemically synthesized
gggaagguguagucugcgguguc

SEQ ID NO: 51816 - RNA, 23 nt, Artificial Sequence
  Chemically synthesized
ggaagguguagucugcgguguca

SEQ ID NO: 51817 - RNA, 23 nt, Artificial Sequence
  Chemically synthesized
gaagguguagucugcggugucaa

SEQ ID NO: 51818 - RNA, 23 nt, Artificial Sequence
  Chemically synthesized
aagguguagucugcggugucaaa

SEQ ID NO: 51819 - RNA, 23 nt, Artificial Sequence
  Chemically synthesized
acuucuucacuccauucuccacg

SEQ ID NO: 51820 - RNA, 23 nt, Artificial Sequence
  Chemically synthesized
cuucuucacuccauucuccacga

SEQ ID NO: 51821 - RNA, 23 nt, Artificial Sequence
  Chemically synthesized
gcagacuucucccuaguagcugc

SEQ ID NO: 51822 - RNA, 23 nt, Artificial Sequence
  Chemically synthesized
cagacuucucccuaguagcugcu

SEQ ID NO: 51823 - RNA, 23 nt, Artificial Sequence
  Chemically synthesized
agacuucucccuaguagcugcug

SEQ ID NO: 51824 - RNA, 23 nt, Artificial Sequence
  Chemically synthesized
gacuucucccuaguagcugcugg

SEQ ID NO: 51825 - RNA, 23 nt, Artificial Sequence
  Chemically synthesized
acuucucccuaguagcugcuggu

SEQ ID NO: 51826 - RNA, 23 nt, Artificial Sequence
  Chemically synthesized
acuucuuccuguaguaguauucg

SEQ ID NO: 51827 - RNA, 23 nt, Artificial Sequence
  Chemically synthesized
gaguaagugucgaugaggaaguc

SEQ ID NO: 51828 - RNA, 23 nt, Artificial Sequence
  Chemically synthesized
aguaagugucgaugaggaagucg

SEQ ID NO: 51829 - RNA, 23 nt, Artificial Sequence
  Chemically synthesized
guaagugucgaugaggaagucga

SEQ ID NO: 51830 - RNA, 23 nt, Artificial Sequence
  Chemically synthesized
uaagugucgaugaggaagucgau

SEQ ID NO: 51831 - RNA, 23 nt, Artificial Sequence
  Chemically synthesized
aagugucgaugaggaagucgaug

SEQ ID NO: 51832 - RNA, 23 nt, Artificial Sequence
  Chemically synthesized
ugucaaauuuuccuccggugcca

SEQ ID NO: 51833 - RNA, 23 nt, Artificial Sequence
  Chemically synthesized
gucaaauuuuccuccggugccaa

SEQ ID NO: 51834 - RNA, 23 nt, Artificial Sequence
  Chemically synthesized
ucaaauuuuccuccggugccaaa

SEQ ID NO: 51835 - RNA, 23 nt, Artificial Sequence
  Chemically synthesized
caaauuuuccuccggugccaaaa

SEQ ID NO: 51836 - RNA, 23 nt, Artificial Sequence
  Chemically synthesized
aaauuuuccuccggugccaaaaa

SEQ ID NO: 51837 - RNA, 23 nt, Artificial Sequence
  Chemically synthesized
gauguuucucgugguguaguugu

SEQ ID NO: 51838 - RNA, 23 nt, Artificial Sequence
  Chemically synthesized
gccggggaagucgauauuguucu

SEQ ID NO: 51839 - RNA, 23 nt, Artificial Sequence
  Chemically synthesized
ccggggaagucgauauuguucuu

SEQ ID NO: 51840 - RNA, 23 nt, Artificial Sequence
  Chemically synthesized
gaauuccuuugcucugcgggucc

SEQ ID NO: 51841 - RNA, 23 nt, Artificial Sequence
  Chemically synthesized
cuucuguuuugagaaaguuuguc

SEQ ID NO: 51842 - RNA, 23 nt, Artificial Sequence
  Chemically synthesized
uugaagccacuguacugcccuuc

SEQ ID NO: 51843 - RNA, 23 nt, Artificial Sequence
  Chemically synthesized
acuguacugcccuucacucuucg

SEQ ID NO: 51844 - RNA, 23 nt, Artificial Sequence
  Chemically synthesized
cuguacugcccuucacucuucgg

SEQ ID NO: 51845 - RNA, 23 nt, Artificial Sequence
  Chemically synthesized
uguacugcccuucacucuucgga

SEQ ID NO: 51846 - RNA, 23 nt, Artificial Sequence
  Chemically synthesized
guacugcccuucacucuucggaa

SEQ ID NO: 51847 - RNA, 23 nt, Artificial Sequence
  Chemically synthesized
uacugcccuucacucuucggaaa

SEQ ID NO: 51848 - RNA, 23 nt, Artificial Sequence
  Chemically synthesized
uucuaagcagcuguaucuccucu

SEQ ID NO: 51849 - RNA, 23 nt, Artificial Sequence
  Chemically synthesized
ucuaagcagcuguaucuccucug

SEQ ID NO: 51850 - RNA, 23 nt, Artificial Sequence
  Chemically synthesized
ucuugcagacuucucccuaguag

SEQ ID NO: 51851 - RNA, 23 nt, Artificial Sequence
  Chemically synthesized
cuugcagacuucucccuaguagc

SEQ ID NO: 51852 - RNA, 23 nt, Artificial Sequence
  Chemically synthesized
cacaaaggacacauacuuuaaug

SEQ ID NO: 51853 - RNA, 23 nt, Artificial Sequence
  Chemically synthesized
acaaaggacacauacuuuaaugu

SEQ ID NO: 51854 - RNA, 23 nt, Artificial Sequence
  Chemically synthesized
caaaggacacauacuuuaauguc

SEQ ID NO: 51855 - RNA, 23 nt, Artificial Sequence
  Chemically synthesized
aaaggacacauacuuuaaugucg

SEQ ID NO: 51856 - RNA, 23 nt, Artificial Sequence
  Chemically synthesized
aaggacacauacuuuaaugucgg

SEQ ID NO: 51857 - RNA, 23 nt, Artificial Sequence
  Chemically synthesized
cacuucuuccuguaguaguauuc

SEQ ID NO: 51858 - RNA, 23 nt, Artificial Sequence
  Chemically synthesized
gggauaaauaugggagcgacagc

SEQ ID NO: 51859 - RNA, 23 nt, Artificial Sequence
  Chemically synthesized
ggauaaauaugggagcgacagca

SEQ ID NO: 51860 - RNA, 23 nt, Artificial Sequence
  Chemically synthesized
gauaaauaugggagcgacagcag

SEQ ID NO: 51861 - RNA, 23 nt, Artificial Sequence
  Chemically synthesized
auaaauaugggagcgacagcagu

SEQ ID NO: 51862 - RNA, 23 nt, Artificial Sequence
  Chemically synthesized
ggaguaagugucgaugaggaagu

SEQ ID NO: 51863 - RNA, 23 nt, Artificial Sequence
  Chemically synthesized
ggugccauaauucaugcucugga

SEQ ID NO: 51864 - RNA, 23 nt, Artificial Sequence
  Chemically synthesized
gugccauaauucaugcucuggau

SEQ ID NO: 51865 - RNA, 23 nt, Artificial Sequence
  Chemically synthesized
uccguuucucaacauuguuuucc

SEQ ID NO: 51866 - RNA, 23 nt, Artificial Sequence
  Chemically synthesized
ccguuucucaacauuguuuuccu

SEQ ID NO: 51867 - RNA, 23 nt, Artificial Sequence
  Chemically synthesized
cguuucucaacauuguuuuccuu

SEQ ID NO: 51868 - RNA, 23 nt, Artificial Sequence
  Chemically synthesized
guuucucaacauuguuuuccuug

SEQ ID NO: 51869 - RNA, 23 nt, Artificial Sequence
  Chemically synthesized
uuucucaacauuguuuuccuugu

SEQ ID NO: 51870 - RNA, 23 nt, Artificial Sequence
  Chemically synthesized
gugacuuuguucgucucauacug

SEQ ID NO: 51871 - RNA, 23 nt, Artificial Sequence
  Chemically synthesized
ucuugaugagcacagugaaguuu

SEQ ID NO: 51872 - RNA, 23 nt, Artificial Sequence
  Chemically synthesized
cuugaugagcacagugaaguuuu

SEQ ID NO: 51873 - RNA, 23 nt, Artificial Sequence
  Chemically synthesized
uugaugagcacagugaaguuuuc

SEQ ID NO: 51874 - RNA, 23 nt, Artificial Sequence
  Chemically synthesized
ucccuuuuuacaaccucggucag

SEQ ID NO: 51875 - RNA, 23 nt, Artificial Sequence
  Chemically synthesized
cccuuuuuacaaccucggucaga

SEQ ID NO: 51876 - RNA, 23 nt, Artificial Sequence
  Chemically synthesized
ccuuuuuacaaccucggucagag

SEQ ID NO: 51877 - RNA, 23 nt, Artificial Sequence
  Chemically synthesized
cuuuuuacaaccucggucagagg

SEQ ID NO: 51878 - RNA, 23 nt, Artificial Sequence
  Chemically synthesized
ucacgaagaaagaguuccccugc

SEQ ID NO: 51879 - RNA, 23 nt, Artificial Sequence
  Chemically synthesized
cugcaaagggaagguguagucug

SEQ ID NO: 51880 - RNA, 23 nt, Artificial Sequence
  Chemically synthesized
uucuucacuccauucuccacgau

SEQ ID NO: 51881 - RNA, 23 nt, Artificial Sequence
  Chemically synthesized
ucuucacuccauucuccacgauc

SEQ ID NO: 51882 - RNA, 23 nt, Artificial Sequence
  Chemically synthesized
cuucacuccauucuccacgaucu

SEQ ID NO: 51883 - RNA, 23 nt, Artificial Sequence
  Chemically synthesized
uucacuccauucuccacgaucuc

SEQ ID NO: 51884 - RNA, 23 nt, Artificial Sequence
  Chemically synthesized
cuaagcagcuguaucuccucugg

SEQ ID NO: 51885 - RNA, 23 nt, Artificial Sequence
  Chemically synthesized
uaagcagcuguaucuccucuggu

SEQ ID NO: 51886 - RNA, 23 nt, Artificial Sequence
  Chemically synthesized
aagcagcuguaucuccucugguu

SEQ ID NO: 51887 - RNA, 23 nt, Artificial Sequence
  Chemically synthesized
gggcagccuggacaaaucuguga

SEQ ID NO: 51888 - RNA, 23 nt, Artificial Sequence
  Chemically synthesized
ggcagccuggacaaaucugugaa

SEQ ID NO: 51889 - RNA, 23 nt, Artificial Sequence
  Chemically synthesized
gcagccuggacaaaucugugaag

SEQ ID NO: 51890 - RNA, 23 nt, Artificial Sequence
  Chemically synthesized
cagccuggacaaaucugugaagu

SEQ ID NO: 51891 - RNA, 23 nt, Artificial Sequence
  Chemically synthesized
agccuggacaaaucugugaaguc

SEQ ID NO: 51892 - RNA, 23 nt, Artificial Sequence
  Chemically synthesized
cuucuuggcccuugacaucuugc

SEQ ID NO: 51893 - RNA, 23 nt, Artificial Sequence
  Chemically synthesized
uucuuggcccuugacaucuugca

SEQ ID NO: 51894 - RNA, 23 nt, Artificial Sequence
  Chemically synthesized
ucuuggcccuugacaucuugcag

SEQ ID NO: 51895 - RNA, 23 nt, Artificial Sequence
  Chemically synthesized
cuuggcccuugacaucuugcaga

SEQ ID NO: 51896 - RNA, 23 nt, Artificial Sequence
  Chemically synthesized
uuggcccuugacaucuugcagac

SEQ ID NO: 51897 - RNA, 23 nt, Artificial Sequence
  Chemically synthesized
acacauacuuuaaugucggcuuu

SEQ ID NO: 51898 - RNA, 23 nt, Artificial Sequence
  Chemically synthesized
cacauacuuuaaugucggcuuug

SEQ ID NO: 51899 - RNA, 23 nt, Artificial Sequence
  Chemically synthesized
cuuuaaugucggcuuuggcucca

SEQ ID NO: 51900 - RNA, 23 nt, Artificial Sequence
  Chemically synthesized
agccgauguacacaaccagcugg

SEQ ID NO: 51901 - RNA, 23 nt, Artificial Sequence
  Chemically synthesized
gccgauguacacaaccagcugga

SEQ ID NO: 51902 - RNA, 23 nt, Artificial Sequence
  Chemically synthesized
ccgauguacacaaccagcuggau

SEQ ID NO: 51903 - RNA, 23 nt, Artificial Sequence
  Chemically synthesized
cgauguacacaaccagcuggaua

SEQ ID NO: 51904 - RNA, 23 nt, Artificial Sequence
  Chemically synthesized
gauguacacaaccagcuggauaa

SEQ ID NO: 51905 - RNA, 23 nt, Artificial Sequence
  Chemically synthesized
ucugagucuuguggaagguacaa

SEQ ID NO: 51906 - RNA, 23 nt, Artificial Sequence
  Chemically synthesized
cugagucuuguggaagguacaag

SEQ ID NO: 51907 - RNA, 23 nt, Artificial Sequence
  Chemically synthesized
ugagucuuguggaagguacaagu

SEQ ID NO: 51908 - RNA, 23 nt, Artificial Sequence
  Chemically synthesized
gaagguacaagugauguuuaaac

SEQ ID NO: 51909 - RNA, 23 nt, Artificial Sequence
  Chemically synthesized
agugaaguuuucggcacuguuca

SEQ ID NO: 51910 - RNA, 23 nt, Artificial Sequence
  Chemically synthesized
gugaaguuuucggcacuguucaa

SEQ ID NO: 51911 - RNA, 23 nt, Artificial Sequence
  Chemically synthesized
ugaaguuuucggcacuguucaag

SEQ ID NO: 51912 - RNA, 23 nt, Artificial Sequence
  Chemically synthesized
gaaguuuucggcacuguucaaga

SEQ ID NO: 51913 - RNA, 23 nt, Artificial Sequence
  Chemically synthesized
aaguuuucggcacuguucaagag

SEQ ID NO: 51914 - RNA, 23 nt, Artificial Sequence
  Chemically synthesized
aguuuucggcacuguucaagaga

SEQ ID NO: 51915 - RNA, 23 nt, Artificial Sequence
  Chemically synthesized
guuuucggcacuguucaagagag

SEQ ID NO: 51916 - RNA, 23 nt, Artificial Sequence
  Chemically synthesized
uuuucggcacuguucaagagagc

SEQ ID NO: 51917 - RNA, 23 nt, Artificial Sequence
  Chemically synthesized
uuucggcacuguucaagagagca

SEQ ID NO: 51918 - RNA, 23 nt, Artificial Sequence
  Chemically synthesized
gcucuuggccuucuguuuugaga

SEQ ID NO: 51919 - RNA, 23 nt, Artificial Sequence
  Chemically synthesized
cucuuggccuucuguuuugagaa

SEQ ID NO: 51920 - RNA, 23 nt, Artificial Sequence
  Chemically synthesized
ucuuggccuucuguuuugagaaa

SEQ ID NO: 51921 - RNA, 23 nt, Artificial Sequence
  Chemically synthesized
cuuggccuucuguuuugagaaag

SEQ ID NO: 51922 - RNA, 23 nt, Artificial Sequence
  Chemically synthesized
uuggccuucuguuuugagaaagu

SEQ ID NO: 51923 - RNA, 23 nt, Artificial Sequence
  Chemically synthesized
ucacuccauucuccacgaucucc

SEQ ID NO: 51924 - RNA, 23 nt, Artificial Sequence
  Chemically synthesized
cacuccauucuccacgaucuccu

SEQ ID NO: 51925 - RNA, 23 nt, Artificial Sequence
  Chemically synthesized
acuccauucuccacgaucuccuc

SEQ ID NO: 51926 - RNA, 23 nt, Artificial Sequence
  Chemically synthesized
cuccauucuccacgaucuccucu

SEQ ID NO: 51927 - RNA, 23 nt, Artificial Sequence
  Chemically synthesized
uccauucuccacgaucuccucuu

SEQ ID NO: 51928 - RNA, 23 nt, Artificial Sequence
  Chemically synthesized
cacgaucuccucuuucaccucug

SEQ ID NO: 51929 - RNA, 23 nt, Artificial Sequence
  Chemically synthesized
acgaucuccucuuucaccucugc

SEQ ID NO: 51930 - RNA, 23 nt, Artificial Sequence
  Chemically synthesized
cgaucuccucuuucaccucugcu

SEQ ID NO: 51931 - RNA, 23 nt, Artificial Sequence
  Chemically synthesized
gaucuccucuuucaccucugcua

SEQ ID NO: 51932 - RNA, 23 nt, Artificial Sequence
  Chemically synthesized
aucuccucuuucaccucugcuau

SEQ ID NO: 51933 - RNA, 23 nt, Artificial Sequence
  Chemically synthesized
cuuucaccucugcuauccccuuc

SEQ ID NO: 51934 - RNA, 23 nt, Artificial Sequence
  Chemically synthesized
accagagcaaagcaaacguagga

SEQ ID NO: 51935 - RNA, 23 nt, Artificial Sequence
  Chemically synthesized
ccagagcaaagcaaacguaggaa

SEQ ID NO: 51936 - RNA, 23 nt, Artificial Sequence
  Chemically synthesized
cagagcaaagcaaacguaggaaa

SEQ ID NO: 51937 - RNA, 23 nt, Artificial Sequence
  Chemically synthesized
agagcaaagcaaacguaggaaaa

SEQ ID NO: 51938 - RNA, 23 nt, Artificial Sequence
  Chemically synthesized
gagcaaagcaaacguaggaaaag

SEQ ID NO: 51939 - RNA, 23 nt, Artificial Sequence
  Chemically synthesized
aggagucgccuccuuucuaagca

SEQ ID NO: 51940 - RNA, 23 nt, Artificial Sequence
  Chemically synthesized
ggagucgccuccuuucuaagcag

SEQ ID NO: 51941 - RNA, 23 nt, Artificial Sequence
  Chemically synthesized
gagucgccuccuuucuaagcagc

SEQ ID NO: 51942 - RNA, 23 nt, Artificial Sequence
  Chemically synthesized
agucgccuccuuucuaagcagcu

SEQ ID NO: 51943 - RNA, 23 nt, Artificial Sequence
  Chemically synthesized
gucgccuccuuucuaagcagcug

SEQ ID NO: 51944 - RNA, 23 nt, Artificial Sequence
  Chemically synthesized
guggaagaaccacuuaauggugc

SEQ ID NO: 51945 - RNA, 23 nt, Artificial Sequence
  Chemically synthesized
uggaagaaccacuuaauggugcc

SEQ ID NO: 51946 - RNA, 23 nt, Artificial Sequence
  Chemically synthesized
ggaagaaccacuuaauggugcca

SEQ ID NO: 51947 - RNA, 23 nt, Artificial Sequence
  Chemically synthesized
gaagaaccacuuaauggugccau

SEQ ID NO: 51948 - RNA, 23 nt, Artificial Sequence
  Chemically synthesized
aagaaccacuuaauggugccaua

SEQ ID NO: 51949 - RNA, 23 nt, Artificial Sequence
  Chemically synthesized
cuccacaauggacucgcacuucu

SEQ ID NO: 51950 - RNA, 23 nt, Artificial Sequence
  Chemically synthesized
uccacaauggacucgcacuucuu

SEQ ID NO: 51951 - RNA, 23 nt, Artificial Sequence
  Chemically synthesized
ccacaauggacucgcacuucuuc

SEQ ID NO: 51952 - RNA, 23 nt, Artificial Sequence
  Chemically synthesized
cugcucuuggccuucuguuuuga

SEQ ID NO: 51953 - RNA, 23 nt, Artificial Sequence
  Chemically synthesized
ugcucuuggccuucuguuuugag

SEQ ID NO: 51954 - RNA, 23 nt, Artificial Sequence
  Chemically synthesized
acugugcaccaacuucuucacuc

SEQ ID NO: 51955 - RNA, 23 nt, Artificial Sequence
  Chemically synthesized
cugugcaccaacuucuucacucc

SEQ ID NO: 51956 - RNA, 23 nt, Artificial Sequence
  Chemically synthesized
ugugcaccaacuucuucacucca

SEQ ID NO: 51957 - RNA, 23 nt, Artificial Sequence
  Chemically synthesized
gugcaccaacuucuucacuccau

SEQ ID NO: 51958 - RNA, 23 nt, Artificial Sequence
  Chemically synthesized
ugcaccaacuucuucacuccauu

SEQ ID NO: 51959 - RNA, 23 nt, Artificial Sequence
  Chemically synthesized
gcaccaacuucuucacuccauuc

SEQ ID NO: 51960 - RNA, 23 nt, Artificial Sequence
  Chemically synthesized
ucuccucuuucaccucugcuauc

SEQ ID NO: 51961 - RNA, 23 nt, Artificial Sequence
  Chemically synthesized
acucaccagagcaaagcaaacgu

SEQ ID NO: 51962 - RNA, 23 nt, Artificial Sequence
  Chemically synthesized
cucaccagagcaaagcaaacgua

SEQ ID NO: 51963 - RNA, 23 nt, Artificial Sequence
  Chemically synthesized
ucaccagagcaaagcaaacguag

SEQ ID NO: 51964 - RNA, 23 nt, Artificial Sequence
  Chemically synthesized
caccagagcaaagcaaacguagg

SEQ ID NO: 51965 - RNA, 23 nt, Artificial Sequence
  Chemically synthesized
ucgccuccuuucuaagcagcugu

SEQ ID NO: 51966 - RNA, 23 nt, Artificial Sequence
  Chemically synthesized
cgccuccuuucuaagcagcugua

SEQ ID NO: 51967 - RNA, 23 nt, Artificial Sequence
  Chemically synthesized
gccuccuuucuaagcagcuguau

SEQ ID NO: 51968 - RNA, 23 nt, Artificial Sequence
  Chemically synthesized
ccuccuuucuaagcagcuguauc

SEQ ID NO: 51969 - RNA, 23 nt, Artificial Sequence
  Chemically synthesized
cagcuguaucuccucugguuguc

SEQ ID NO: 51970 - RNA, 23 nt, Artificial Sequence
  Chemically synthesized
agcuguaucuccucugguugucc

SEQ ID NO: 51971 - RNA, 23 nt, Artificial Sequence
  Chemically synthesized
gcuguaucuccucugguugucca

SEQ ID NO: 51972 - RNA, 23 nt, Artificial Sequence
  Chemically synthesized
cuguaucuccucugguuguccag

SEQ ID NO: 51973 - RNA, 23 nt, Artificial Sequence
  Chemically synthesized
uguaucuccucugguuguccagg

SEQ ID NO: 51974 - RNA, 23 nt, Artificial Sequence
  Chemically synthesized
gucgaugaggaagucgaugaaca

SEQ ID NO: 51975 - RNA, 23 nt, Artificial Sequence
  Chemically synthesized
ucgaugaggaagucgaugaacac

SEQ ID NO: 51976 - RNA, 23 nt, Artificial Sequence
  Chemically synthesized
cgaugaggaagucgaugaacaca

SEQ ID NO: 51977 - RNA, 23 nt, Artificial Sequence
  Chemically synthesized
gaugaggaagucgaugaacacag

SEQ ID NO: 51978 - RNA, 23 nt, Artificial Sequence
  Chemically synthesized
augaggaagucgaugaacacagc

SEQ ID NO: 51979 - RNA, 23 nt, Artificial Sequence
  Chemically synthesized
ccaaaaaccaggaugucaaaacg

SEQ ID NO: 51980 - RNA, 23 nt, Artificial Sequence
  Chemically synthesized
caaaaaccaggaugucaaaacgg

SEQ ID NO: 51981 - RNA, 23 nt, Artificial Sequence
  Chemically synthesized
aaaaaccaggaugucaaaacgga

SEQ ID NO: 51982 - RNA, 23 nt, Artificial Sequence
  Chemically synthesized
aaaaccaggaugucaaaacggau

SEQ ID NO: 51983 - RNA, 23 nt, Artificial Sequence
  Chemically synthesized
aaaccaggaugucaaaacggauc

SEQ ID NO: 51984 - RNA, 23 nt, Artificial Sequence
  Chemically synthesized
cagaguccguuucucaacauugu

SEQ ID NO: 51985 - RNA, 23 nt, Artificial Sequence
  Chemically synthesized
agaguccguuucucaacauuguu

SEQ ID NO: 51986 - RNA, 23 nt, Artificial Sequence
  Chemically synthesized
gaguccguuucucaacauuguuu

SEQ ID NO: 51987 - RNA, 23 nt, Artificial Sequence
  Chemically synthesized
aguccguuucucaacauuguuuu

SEQ ID NO: 51988 - RNA, 23 nt, Artificial Sequence
  Chemically synthesized
guccguuucucaacauuguuuuc

SEQ ID NO: 51989 - RNA, 23 nt, Artificial Sequence
  Chemically synthesized
ugggacacuguggauucugaguc

SEQ ID NO: 51990 - RNA, 23 nt, Artificial Sequence
  Chemically synthesized
gggacacuguggauucugagucu

SEQ ID NO: 51991 - RNA, 23 nt, Artificial Sequence
  Chemically synthesized
ggacacuguggauucugagucuu

SEQ ID NO: 51992 - RNA, 23 nt, Artificial Sequence
  Chemically synthesized
gacacuguggauucugagucuug

SEQ ID NO: 51993 - RNA, 23 nt, Artificial Sequence
  Chemically synthesized
acacuguggauucugagucuugu

SEQ ID NO: 51994 - RNA, 23 nt, Artificial Sequence
  Chemically synthesized
uuuuuacaaccucggucagagga

SEQ ID NO: 51995 - RNA, 23 nt, Artificial Sequence
  Chemically synthesized
cucauacuggaaaacaucacugc

SEQ ID NO: 51996 - RNA, 23 nt, Artificial Sequence
  Chemically synthesized
ucauacuggaaaacaucacugca

SEQ ID NO: 51997 - RNA, 23 nt, Artificial Sequence
  Chemically synthesized
cauacuggaaaacaucacugcag

SEQ ID NO: 51998 - RNA, 23 nt, Artificial Sequence
  Chemically synthesized
auacuggaaaacaucacugcagc

SEQ ID NO: 51999 - RNA, 23 nt, Artificial Sequence
  Chemically synthesized
uacuggaaaacaucacugcagcu

SEQ ID NO: 52000 - RNA, 23 nt, Artificial Sequence
  Chemically synthesized
ccuucuguuuugagaaaguuugu

SEQ ID NO: 52001 - RNA, 23 nt, Artificial Sequence
  Chemically synthesized
ccgcugguacagcuugucacuca

SEQ ID NO: 52002 - RNA, 23 nt, Artificial Sequence
  Chemically synthesized
cgcugguacagcuugucacucac

SEQ ID NO: 52003 - RNA, 23 nt, Artificial Sequence
  Chemically synthesized
gcugguacagcuugucacucacc

SEQ ID NO: 52004 - RNA, 23 nt, Artificial Sequence
  Chemically synthesized
cugguacagcuugucacucacca

SEQ ID NO: 52005 - RNA, 23 nt, Artificial Sequence
  Chemically synthesized
ugguacagcuugucacucaccag

SEQ ID NO: 52006 - RNA, 23 nt, Artificial Sequence
  Chemically synthesized
gguacagcuugucacucaccaga

SEQ ID NO: 52007 - RNA, 23 nt, Artificial Sequence
  Chemically synthesized
guacagcuugucacucaccagag

SEQ ID NO: 52008 - RNA, 23 nt, Artificial Sequence
  Chemically synthesized
uacagcuugucacucaccagagc

SEQ ID NO: 52009 - RNA, 23 nt, Artificial Sequence
  Chemically synthesized
cacucaccagagcaaagcaaacg

SEQ ID NO: 52010 - RNA, 23 nt, Artificial Sequence
  Chemically synthesized
guaucuccucugguuguccagga

SEQ ID NO: 52011 - RNA, 23 nt, Artificial Sequence
  Chemically synthesized
ggacuucuuggcccuugacaucu

SEQ ID NO: 52012 - RNA, 23 nt, Artificial Sequence
  Chemically synthesized
gacuucuuggcccuugacaucuu

SEQ ID NO: 52013 - RNA, 23 nt, Artificial Sequence
  Chemically synthesized
acuucuuggcccuugacaucuug

SEQ ID NO: 52014 - RNA, 23 nt, Artificial Sequence
  Chemically synthesized
uggacucgcacuucuuccuguag

SEQ ID NO: 52015 - RNA, 23 nt, Artificial Sequence
  Chemically synthesized
ggacucgcacuucuuccuguagu

SEQ ID NO: 52016 - RNA, 23 nt, Artificial Sequence
  Chemically synthesized
gacucgcacuucuuccuguagua

SEQ ID NO: 52017 - RNA, 23 nt, Artificial Sequence
  Chemically synthesized
acuggaguaagugucgaugagga

SEQ ID NO: 52018 - RNA, 23 nt, Artificial Sequence
  Chemically synthesized
cuggaguaagugucgaugaggaa

SEQ ID NO: 52019 - RNA, 23 nt, Artificial Sequence
  Chemically synthesized
uggaguaagugucgaugaggaag

SEQ ID NO: 52020 - RNA, 23 nt, Artificial Sequence
  Chemically synthesized
ugaggaagucgaugaacacagcg

SEQ ID NO: 52021 - RNA, 23 nt, Artificial Sequence
  Chemically synthesized
gaggaagucgaugaacacagcgg

SEQ ID NO: 52022 - RNA, 23 nt, Artificial Sequence
  Chemically synthesized
aggaagucgaugaacacagcggc

SEQ ID NO: 52023 - RNA, 23 nt, Artificial Sequence
  Chemically synthesized
ggaagucgaugaacacagcggcc

SEQ ID NO: 52024 - RNA, 23 nt, Artificial Sequence
  Chemically synthesized
gaagucgaugaacacagcggcca

SEQ ID NO: 52025 - RNA, 23 nt, Artificial Sequence
  Chemically synthesized
aggguugagccgauguacacaac

SEQ ID NO: 52026 - RNA, 23 nt, Artificial Sequence
  Chemically synthesized
ggguugagccgauguacacaacc

SEQ ID NO: 52027 - RNA, 23 nt, Artificial Sequence
  Chemically synthesized
gguugagccgauguacacaacca

SEQ ID NO: 52028 - RNA, 23 nt, Artificial Sequence
  Chemically synthesized
guugagccgauguacacaaccag

SEQ ID NO: 52029 - RNA, 23 nt, Artificial Sequence
  Chemically synthesized
uugagccgauguacacaaccagc

SEQ ID NO: 52030 - RNA, 23 nt, Artificial Sequence
  Chemically synthesized
aaccaggaugucaaaacggaucc

SEQ ID NO: 52031 - RNA, 23 nt, Artificial Sequence
  Chemically synthesized
guccauccaucccuuuuuacaac

SEQ ID NO: 52032 - RNA, 23 nt, Artificial Sequence
  Chemically synthesized
uccauccaucccuuuuuacaacc

SEQ ID NO: 52033 - RNA, 23 nt, Artificial Sequence
  Chemically synthesized
ccauccaucccuuuuuacaaccu

SEQ ID NO: 52034 - RNA, 23 nt, Artificial Sequence
  Chemically synthesized
cauccaucccuuuuuacaaccuc

SEQ ID NO: 52035 - RNA, 23 nt, Artificial Sequence
  Chemically synthesized
uuuugagaaaguuugucaucacg

SEQ ID NO: 52036 - RNA, 23 nt, Artificial Sequence
  Chemically synthesized
uuugagaaaguuugucaucacga

SEQ ID NO: 52037 - RNA, 23 nt, Artificial Sequence
  Chemically synthesized
uugagaaaguuugucaucacgaa

SEQ ID NO: 52038 - RNA, 23 nt, Artificial Sequence
  Chemically synthesized
ugagaaaguuugucaucacgaag

SEQ ID NO: 52039 - RNA, 23 nt, Artificial Sequence
  Chemically synthesized
gagaaaguuugucaucacgaaga

SEQ ID NO: 52040 - RNA, 23 nt, Artificial Sequence
  Chemically synthesized
cacuguacugcccuucacucuuc

SEQ ID NO: 52041 - RNA, 23 nt, Artificial Sequence
  Chemically synthesized
agcagcuguaucuccucugguug

SEQ ID NO: 52042 - RNA, 23 nt, Artificial Sequence
  Chemically synthesized
uggcccuugacaucuugcagacu

SEQ ID NO: 52043 - RNA, 23 nt, Artificial Sequence
  Chemically synthesized
cuucucccuaguagcugcugguu

SEQ ID NO: 52044 - RNA, 23 nt, Artificial Sequence
  Chemically synthesized
ucucaacauuguuuuccuuguag

SEQ ID NO: 52045 - RNA, 23 nt, Artificial Sequence
  Chemically synthesized
cucaacauuguuuuccuuguagu

SEQ ID NO: 52046 - RNA, 23 nt, Artificial Sequence
  Chemically synthesized
ucaacauuguuuuccuuguagua

SEQ ID NO: 52047 - RNA, 23 nt, Artificial Sequence
  Chemically synthesized
caacauuguuuuccuuguaguac

SEQ ID NO: 52048 - RNA, 23 nt, Artificial Sequence
  Chemically synthesized
aacauuguuuuccuuguaguacu

SEQ ID NO: 52049 - RNA, 23 nt, Artificial Sequence
  Chemically synthesized
ugcucuggauccgagugacuuug

SEQ ID NO: 52050 - RNA, 23 nt, Artificial Sequence
  Chemically synthesized
gcucuggauccgagugacuuugu

SEQ ID NO: 52051 - RNA, 23 nt, Artificial Sequence
  Chemically synthesized
cucuggauccgagugacuuuguu

SEQ ID NO: 52052 - RNA, 23 nt, Artificial Sequence
  Chemically synthesized
ucuggauccgagugacuuuguuc

SEQ ID NO: 52053 - RNA, 23 nt, Artificial Sequence
  Chemically synthesized
cuggauccgagugacuuuguucg

SEQ ID NO: 52054 - RNA, 23 nt, Artificial Sequence
  Chemically synthesized
ugagccgauguacacaaccagcu

SEQ ID NO: 52055 - RNA, 23 nt, Artificial Sequence
  Chemically synthesized
gagccgauguacacaaccagcug

SEQ ID NO: 52056 - RNA, 23 nt, Artificial Sequence
  Chemically synthesized
gccaaaaaccaggaugucaaaac

SEQ ID NO: 52057 - RNA, 23 nt, Artificial Sequence
  Chemically synthesized
uucucaacauuguuuuccuugua

SEQ ID NO: 52058 - RNA, 23 nt, Artificial Sequence
  Chemically synthesized
ucucauacuggaaaacaucacug

SEQ ID NO: 52059 - RNA, 23 nt, Artificial Sequence
  Chemically synthesized
guuugucaucacgaagaaagagu

SEQ ID NO: 52060 - RNA, 23 nt, Artificial Sequence
  Chemically synthesized
uuugucaucacgaagaaagaguu

SEQ ID NO: 52061 - RNA, 23 nt, Artificial Sequence
  Chemically synthesized
uugucaucacgaagaaagaguuc

SEQ ID NO: 52062 - RNA, 23 nt, Artificial Sequence
  Chemically synthesized
ucggaaacucuuuccggauccuc

SEQ ID NO: 52063 - RNA, 23 nt, Artificial Sequence
  Chemically synthesized
cggaaacucuuuccggauccucc

SEQ ID NO: 52064 - RNA, 23 nt, Artificial Sequence
  Chemically synthesized
ggaaacucuuuccggauccucca

SEQ ID NO: 52065 - RNA, 23 nt, Artificial Sequence
  Chemically synthesized
gaaacucuuuccggauccuccag

SEQ ID NO: 52066 - RNA, 23 nt, Artificial Sequence
  Chemically synthesized
aaacucuuuccggauccuccagc

SEQ ID NO: 52067 - RNA, 23 nt, Artificial Sequence
  Chemically synthesized
aaauaugggagcgacagcaguua

SEQ ID NO: 52068 - RNA, 23 nt, Artificial Sequence
  Chemically synthesized
aauaugggagcgacagcaguuac

SEQ ID NO: 52069 - RNA, 23 nt, Artificial Sequence
  Chemically synthesized
auaugggagcgacagcaguuacu

SEQ ID NO: 52070 - RNA, 23 nt, Artificial Sequence
  Chemically synthesized
uaugggagcgacagcaguuacug

SEQ ID NO: 52071 - RNA, 23 nt, Artificial Sequence
  Chemically synthesized
augggagcgacagcaguuacugg

SEQ ID NO: 52072 - RNA, 23 nt, Artificial Sequence
  Chemically synthesized
cuuaauggugccauaauucaugc

SEQ ID NO: 52073 - RNA, 23 nt, Artificial Sequence
  Chemically synthesized
acauuguuuuccuuguaguacuu

SEQ ID NO: 52074 - RNA, 23 nt, Artificial Sequence
  Chemically synthesized
cauuguuuuccuuguaguacuug

SEQ ID NO: 52075 - RNA, 23 nt, Artificial Sequence
  Chemically synthesized
auuguuuuccuuguaguacuugg

SEQ ID NO: 52076 - RNA, 23 nt, Artificial Sequence
  Chemically synthesized
agaaccacuuaauggugccauaa

SEQ ID NO: 52077 - RNA, 23 nt, Artificial Sequence
  Chemically synthesized
cccgaagacuuuuaucagagucc

SEQ ID NO: 52078 - RNA, 23 nt, Artificial Sequence
  Chemically synthesized
ccgaagacuuuuaucagaguccg

SEQ ID NO: 52079 - RNA, 23 nt, Artificial Sequence
  Chemically synthesized
cgaagacuuuuaucagaguccgu

SEQ ID NO: 52080 - RNA, 23 nt, Artificial Sequence
  Chemically synthesized
gaagacuuuuaucagaguccguu

SEQ ID NO: 52081 - RNA, 23 nt, Artificial Sequence
  Chemically synthesized
aagacuuuuaucagaguccguuu

SEQ ID NO: 52082 - RNA, 23 nt, Artificial Sequence
  Chemically synthesized
uuguuuuccuuguaguacuuggc

SEQ ID NO: 52083 - RNA, 23 nt, Artificial Sequence
  Chemically synthesized
gccauaauucaugcucuggaucc

SEQ ID NO: 52084 - RNA, 23 nt, Artificial Sequence
  Chemically synthesized
ccauaauucaugcucuggauccg

SEQ ID NO: 52085 - RNA, 23 nt, Artificial Sequence
  Chemically synthesized
cauaauucaugcucuggauccga

SEQ ID NO: 52086 - RNA, 23 nt, Artificial Sequence
  Chemically synthesized
auaauucaugcucuggauccgag

SEQ ID NO: 52087 - RNA, 23 nt, Artificial Sequence
  Chemically synthesized
uaauucaugcucuggauccgagu

SEQ ID NO: 52088 - RNA, 23 nt, Artificial Sequence
  Chemically synthesized
ccuguuucucggaagaugucucc

SEQ ID NO: 52089 - RNA, 23 nt, Artificial Sequence
  Chemically synthesized
cuguuucucggaagaugucuccu

SEQ ID NO: 52090 - RNA, 23 nt, Artificial Sequence
  Chemically synthesized
uguuucucggaagaugucuccua

SEQ ID NO: 52091 - RNA, 23 nt, Artificial Sequence
  Chemically synthesized
guuucucggaagaugucuccuag

SEQ ID NO: 52092 - RNA, 23 nt, Artificial Sequence
  Chemically synthesized
uuucucggaagaugucuccuagu

SEQ ID NO: 52093 - RNA, 23 nt, Artificial Sequence
  Chemically synthesized
cgucucauacuggaaaacaucac

SEQ ID NO: 52094 - RNA, 23 nt, Artificial Sequence
  Chemically synthesized
gucucauacuggaaaacaucacu

SEQ ID NO: 52095 - RNA, 23 nt, Artificial Sequence
  Chemically synthesized
accaggaugucaaaacggauccc

SEQ ID NO: 52096 - RNA, 23 nt, Artificial Sequence
  Chemically synthesized
augucaaaacggaucccgaagac

SEQ ID NO: 52097 - RNA, 23 nt, Artificial Sequence
  Chemically synthesized
ugucaaaacggaucccgaagacu

SEQ ID NO: 52098 - RNA, 23 nt, Artificial Sequence
  Chemically synthesized
gucaaaacggaucccgaagacuu

SEQ ID NO: 52099 - RNA, 23 nt, Artificial Sequence
  Chemically synthesized
ucaaaacggaucccgaagacuuu

SEQ ID NO: 52100 - RNA, 23 nt, Artificial Sequence
  Chemically synthesized
caaaacggaucccgaagacuuuu

SEQ ID NO: 52101 - RNA, 23 nt, Artificial Sequence
  Chemically synthesized
cgccuguuucucggaagaugucu

SEQ ID NO: 52102 - RNA, 23 nt, Artificial Sequence
  Chemically synthesized
gccuguuucucggaagaugucuc

SEQ ID NO: 52103 - RNA, 23 nt, Artificial Sequence
  Chemically synthesized
aaagacacugugcaccaacuucu

SEQ ID NO: 52104 - RNA, 23 nt, Artificial Sequence
  Chemically synthesized
aagacacugugcaccaacuucuu

SEQ ID NO: 52105 - RNA, 23 nt, Artificial Sequence
  Chemically synthesized
agacacugugcaccaacuucuuc

SEQ ID NO: 52106 - RNA, 23 nt, Artificial Sequence
  Chemically synthesized
gacacugugcaccaacuucuuca

SEQ ID NO: 52107 - RNA, 23 nt, Artificial Sequence
  Chemically synthesized
acacugugcaccaacuucuucac

SEQ ID NO: 52108 - RNA, 23 nt, Artificial Sequence
  Chemically synthesized
uggaagguacaagugauguuuaa

SEQ ID NO: 52109 - RNA, 23 nt, Artificial Sequence
  Chemically synthesized
auugccacaucugaaaaauuauc

SEQ ID NO: 52110 - RNA, 23 nt, Artificial Sequence
  Chemically synthesized
auucguugaccacacagggcuga

SEQ ID NO: 52111 - RNA, 23 nt, Artificial Sequence
  Chemically synthesized
auucauccacaaaggacacauac

SEQ ID NO: 52112 - RNA, 23 nt, Artificial Sequence
  Chemically synthesized
cagcuggauaaugucaaauuuuc

SEQ ID NO: 52113 - RNA, 23 nt, Artificial Sequence
  Chemically synthesized
uuaaaccuggcaggauguuucuc

SEQ ID NO: 52114 - RNA, 23 nt, Artificial Sequence
  Chemically synthesized
gaauugccacaucugaaaaauua

SEQ ID NO: 52115 - RNA, 23 nt, Artificial Sequence
  Chemically synthesized
uucacucuucggaaacucuuucc

SEQ ID NO: 52116 - RNA, 23 nt, Artificial Sequence
  Chemically synthesized
augucuccuagucggaaaauggg

SEQ ID NO: 52117 - RNA, 23 nt, Artificial Sequence
  Chemically synthesized
auguuuaaaccuggcaggauguu

SEQ ID NO: 52118 - RNA, 23 nt, Artificial Sequence
  Chemically synthesized
uuuaaaccuggcaggauguuucu

SEQ ID NO: 52119 - RNA, 23 nt, Artificial Sequence
  Chemically synthesized
auucuccacgaucuccucuuuca

SEQ ID NO: 52120 - RNA, 23 nt, Artificial Sequence
  Chemically synthesized
cacguggaagaaccacuuaaugg

SEQ ID NO: 52121 - RNA, 23 nt, Artificial Sequence
  Chemically synthesized
cuucacaggucuucugguucccu

SEQ ID NO: 52122 - RNA, 23 nt, Artificial Sequence
  Chemically synthesized
uuuccgcugguacagcuugucac

SEQ ID NO: 52123 - RNA, 23 nt, Artificial Sequence
  Chemically synthesized
uugcaccagggauaaauauggga

SEQ ID NO: 52124 - RNA, 23 nt, Artificial Sequence
  Chemically synthesized
caaagacacugugcaccaacuuc

SEQ ID NO: 52125 - RNA, 23 nt, Artificial Sequence
  Chemically synthesized
uucuccacgaucuccucuuucac

SEQ ID NO: 52126 - RNA, 23 nt, Artificial Sequence
  Chemically synthesized
ucuccacgaucuccucuuucacc

SEQ ID NO: 52127 - RNA, 23 nt, Artificial Sequence
  Chemically synthesized
cuuuccgcugguacagcuuguca

SEQ ID NO: 52128 - RNA, 23 nt, Artificial Sequence
  Chemically synthesized
gaugucuccuagucggaaaaugg

SEQ ID NO: 52129 - RNA, 23 nt, Artificial Sequence
  Chemically synthesized
uacaaccucggucagaggaacag

SEQ ID NO: 52130 - RNA, 23 nt, Artificial Sequence
  Chemically synthesized
ucgucucauacuggaaaacauca

SEQ ID NO: 52131 - RNA, 23 nt, Artificial Sequence
  Chemically synthesized
cauucuccacgaucuccucuuuc

SEQ ID NO: 52132 - RNA, 23 nt, Artificial Sequence
  Chemically synthesized
aucgcaggucuugggacuucuug

SEQ ID NO: 52133 - RNA, 23 nt, Artificial Sequence
  Chemically synthesized
uguuuuccuuguaguacuuggcg

SEQ ID NO: 52134 - RNA, 23 nt, Artificial Sequence
  Chemically synthesized
agucuuguggaagguacaaguga

SEQ ID NO: 52135 - RNA, 23 nt, Artificial Sequence
  Chemically synthesized
uauuguucuugaugagcacagug

SEQ ID NO: 52136 - RNA, 23 nt, Artificial Sequence
  Chemically synthesized
uaaaccuggcaggauguuucucg

SEQ ID NO: 52137 - RNA, 23 nt, Artificial Sequence
  Chemically synthesized
cuuccggucugaauuccuuugcu

SEQ ID NO: 52138 - RNA, 23 nt, Artificial Sequence
  Chemically synthesized
ugcaccagggauaaauaugggag

SEQ ID NO: 52139 - RNA, 23 nt, Artificial Sequence
  Chemically synthesized
gauauuguucuugaugagcacag

SEQ ID NO: 52140 - RNA, 23 nt, Artificial Sequence
  Chemically synthesized
cuggaaaacaucacugcagcugc

SEQ ID NO: 52141 - RNA, 23 nt, Artificial Sequence
  Chemically synthesized
uaaugugggauucauccacaaag

SEQ ID NO: 52142 - RNA, 23 nt, Artificial Sequence
  Chemically synthesized
aaugugggauucauccacaaagg

SEQ ID NO: 52143 - RNA, 23 nt, Artificial Sequence
  Chemically synthesized
uuuggcuccacaauggacucgca

SEQ ID NO: 52144 - RNA, 23 nt, Artificial Sequence
  Chemically synthesized
acuugcaccagggauaaauaugg

SEQ ID NO: 52145 - RNA, 23 nt, Artificial Sequence
  Chemically synthesized
aacggaucccgaagacuuuuauc

SEQ ID NO: 52146 - RNA, 23 nt, Artificial Sequence
  Chemically synthesized
uucauccacaaaggacacauacu

SEQ ID NO: 52147 - RNA, 23 nt, Artificial Sequence
  Chemically synthesized
aggacacauacuuuaaugucggc

SEQ ID NO: 52148 - RNA, 23 nt, Artificial Sequence
  Chemically synthesized
guuuuccuuguaguacuuggcgu

SEQ ID NO: 52149 - RNA, 23 nt, Artificial Sequence
  Chemically synthesized
uucaccauccuaaugugggauuc

SEQ ID NO: 52150 - RNA, 23 nt, Artificial Sequence
  Chemically synthesized
ccauccuaaugugggauucaucc

SEQ ID NO: 52151 - RNA, 23 nt, Artificial Sequence
  Chemically synthesized
augugggauucauccacaaagga

SEQ ID NO: 52152 - RNA, 23 nt, Artificial Sequence
  Chemically synthesized
acacaaccagcuggauaauguca

SEQ ID NO: 52153 - RNA, 23 nt, Artificial Sequence
  Chemically synthesized
gagucuuguggaagguacaagug

SEQ ID NO: 52154 - RNA, 23 nt, Artificial Sequence
  Chemically synthesized
ugaugagcacagugaaguuuucg

SEQ ID NO: 52155 - RNA, 23 nt, Artificial Sequence
  Chemically synthesized
uaggagucgccuccuuucuaagc

SEQ ID NO: 52156 - RNA, 23 nt, Artificial Sequence
  Chemically synthesized
ucaccauccuaaugugggauuca

SEQ ID NO: 52157 - RNA, 23 nt, Artificial Sequence
  Chemically synthesized
uuuaaugucggcuuuggcuccac

SEQ ID NO: 52158 - RNA, 23 nt, Artificial Sequence
  Chemically synthesized
uuacuggaguaagugucgaugag

SEQ ID NO: 52159 - RNA, 23 nt, Artificial Sequence
  Chemically synthesized
uuuccuuguaguacuuggcguau

SEQ ID NO: 52160 - RNA, 23 nt, Artificial Sequence
  Chemically synthesized
uucucggaagaugucuccuaguc

SEQ ID NO: 52161 - RNA, 23 nt, Artificial Sequence
  Chemically synthesized
aaaugggacacuguggauucuga

SEQ ID NO: 52162 - RNA, 23 nt, Artificial Sequence
  Chemically synthesized
cuuguggaagguacaagugaugu

SEQ ID NO: 52163 - RNA, 23 nt, Artificial Sequence
  Chemically synthesized
uuguggaagguacaagugauguu

SEQ ID NO: 52164 - RNA, 23 nt, Artificial Sequence
  Chemically synthesized
aaccuggcaggauguuucucgug

SEQ ID NO: 52165 - RNA, 23 nt, Artificial Sequence
  Chemically synthesized
aauuccuuugcucugcgggucca

SEQ ID NO: 52166 - RNA, 23 nt, Artificial Sequence
  Chemically synthesized
aaggacucuugaagccacuguac

SEQ ID NO: 52167 - RNA, 23 nt, Artificial Sequence
  Chemically synthesized
aaucugugaaguccaucgcaggu

SEQ ID NO: 52168 - RNA, 23 nt, Artificial Sequence
  Chemically synthesized
ugugaaguccaucgcaggucuug

SEQ ID NO: 52169 - RNA, 23 nt, Artificial Sequence
  Chemically synthesized
uugcagacuucucccuaguagcu

SEQ ID NO: 52170 - RNA, 23 nt, Artificial Sequence
  Chemically synthesized
uucucccuaguagcugcugguuc

SEQ ID NO: 52171 - RNA, 23 nt, Artificial Sequence
  Chemically synthesized
cuugcaccagggauaaauauggg

SEQ ID NO: 52172 - RNA, 23 nt, Artificial Sequence
  Chemically synthesized
ucagaguccguuucucaacauug

SEQ ID NO: 52173 - RNA, 23 nt, Artificial Sequence
  Chemically synthesized
auucaugcucuggauccgaguga

SEQ ID NO: 52174 - RNA, 23 nt, Artificial Sequence
  Chemically synthesized
uagucggaaaaugggacacugug

SEQ ID NO: 52175 - RNA, 23 nt, Artificial Sequence
  Chemically synthesized
uggcaggauguuucucguggugu

SEQ ID NO: 52176 - RNA, 23 nt, Artificial Sequence
  Chemically synthesized
gacuucacaggucuucugguucc

SEQ ID NO: 52177 - RNA, 23 nt, Artificial Sequence
  Chemically synthesized
aguuugucaucacgaagaaagag

SEQ ID NO: 52178 - RNA, 23 nt, Artificial Sequence
  Chemically synthesized
guagucugcggugucaaagacac

SEQ ID NO: 52179 - RNA, 23 nt, Artificial Sequence
  Chemically synthesized
uacacaaccagcuggauaauguc

SEQ ID NO: 52180 - RNA, 23 nt, Artificial Sequence
  Chemically synthesized
uuuaucagaguccguuucucaac

SEQ ID NO: 52181 - RNA, 23 nt, Artificial Sequence
  Chemically synthesized
aauucaugcucuggauccgagug

SEQ ID NO: 52182 - RNA, 23 nt, Artificial Sequence
  Chemically synthesized
cuagucggaaaaugggacacugu

SEQ ID NO: 52183 - RNA, 23 nt, Artificial Sequence
  Chemically synthesized
ucaccuuggugugcacagaacug

SEQ ID NO: 52184 - RNA, 23 nt, Artificial Sequence
  Chemically synthesized
ugugggauucauccacaaaggac

SEQ ID NO: 52185 - RNA, 23 nt, Artificial Sequence
  Chemically synthesized
cuuguaguacuuggcguaucuga

SEQ ID NO: 52186 - RNA, 23 nt, Artificial Sequence
  Chemically synthesized
ucucggaagaugucuccuagucg

SEQ ID NO: 52187 - RNA, 23 nt, Artificial Sequence
  Chemically synthesized
aaaaugggacacuguggauucug

SEQ ID NO: 52188 - RNA, 23 nt, Artificial Sequence
  Chemically synthesized
acuguggauucugagucuugugg

SEQ ID NO: 52189 - RNA, 23 nt, Artificial Sequence
  Chemically synthesized
uucggcacuguucaagagagcag

SEQ ID NO: 52190 - RNA, 23 nt, Artificial Sequence
  Chemically synthesized
cacaggucuucugguucccuuca

SEQ ID NO: 52191 - RNA, 23 nt, Artificial Sequence
  Chemically synthesized
uacacaccuuccggucugaauuc

SEQ ID NO: 52192 - RNA, 23 nt, Artificial Sequence
  Chemically synthesized
aaaguuugucaucacgaagaaag

SEQ ID NO: 52193 - RNA, 23 nt, Artificial Sequence
  Chemically synthesized
ucacucuucggaaacucuuuccg

SEQ ID NO: 52194 - RNA, 23 nt, Artificial Sequence
  Chemically synthesized
cacucuucggaaacucuuuccgg

SEQ ID NO: 52195 - RNA, 23 nt, Artificial Sequence
  Chemically synthesized
aacagcucugagguggugaugca

SEQ ID NO: 52196 - RNA, 23 nt, Artificial Sequence
  Chemically synthesized
guuacuggaguaagugucgauga

SEQ ID NO: 52197 - RNA, 23 nt, Artificial Sequence
  Chemically synthesized
uuuuccuccggugccaaaaacca

SEQ ID NO: 52198 - RNA, 23 nt, Artificial Sequence
  Chemically synthesized
ucaguaaggacucuugaagccac

SEQ ID NO: 52199 - RNA, 23 nt, Artificial Sequence
  Chemically synthesized
aguaaggacucuugaagccacug

SEQ ID NO: 52200 - RNA, 23 nt, Artificial Sequence
  Chemically synthesized
guaaggacucuugaagccacugu

SEQ ID NO: 52201 - RNA, 23 nt, Artificial Sequence
  Chemically synthesized
gcugguucaccauccuaaugugg

SEQ ID NO: 52202 - RNA, 23 nt, Artificial Sequence
  Chemically synthesized
auccuaaugugggauucauccac

SEQ ID NO: 52203 - RNA, 23 nt, Artificial Sequence
  Chemically synthesized
auccacaaaggacacauacuuua

SEQ ID NO: 52204 - RNA, 23 nt, Artificial Sequence
  Chemically synthesized
uuaaugucggcuuuggcuccaca

SEQ ID NO: 52205 - RNA, 23 nt, Artificial Sequence
  Chemically synthesized
acagcaguuacuggaguaagugu

SEQ ID NO: 52206 - RNA, 23 nt, Artificial Sequence
  Chemically synthesized
uacuggaguaagugucgaugagg

SEQ ID NO: 52207 - RNA, 23 nt, Artificial Sequence
  Chemically synthesized
agcuggauaaugucaaauuuucc

SEQ ID NO: 52208 - RNA, 23 nt, Artificial Sequence
  Chemically synthesized
gcagacuuuuaaauggcgucugg

SEQ ID NO: 52209 - RNA, 23 nt, Artificial Sequence
  Chemically synthesized
cagacuuuuaaauggcgucuggc

SEQ ID NO: 52210 - RNA, 23 nt, Artificial Sequence
  Chemically synthesized
agacuuuuaaauggcgucuggcu

SEQ ID NO: 52211 - RNA, 23 nt, Artificial Sequence
  Chemically synthesized
gacuuuuaaauggcgucuggcuu

SEQ ID NO: 52212 - RNA, 23 nt, Artificial Sequence
  Chemically synthesized
acuuuuaaauggcgucuggcuuc

SEQ ID NO: 52213 - RNA, 23 nt, Artificial Sequence
  Chemically synthesized
uuggauaaagcaaucagagccac

SEQ ID NO: 52214 - RNA, 23 nt, Artificial Sequence
  Chemically synthesized
uggauaaagcaaucagagccacc

SEQ ID NO: 52215 - RNA, 23 nt, Artificial Sequence
  Chemically synthesized
ggauaaagcaaucagagccaccc

SEQ ID NO: 52216 - RNA, 23 nt, Artificial Sequence
  Chemically synthesized
gauaaagcaaucagagccaccca

SEQ ID NO: 52217 - RNA, 23 nt, Artificial Sequence
  Chemically synthesized
auaaagcaaucagagccacccau

SEQ ID NO: 52218 - RNA, 23 nt, Artificial Sequence
  Chemically synthesized
gaugaaagcauauuucccuuugg

SEQ ID NO: 52219 - RNA, 23 nt, Artificial Sequence
  Chemically synthesized
augaaagcauauuucccuuuggc

SEQ ID NO: 52220 - RNA, 23 nt, Artificial Sequence
  Chemically synthesized
ugaaagcauauuucccuuuggcu

SEQ ID NO: 52221 - RNA, 23 nt, Artificial Sequence
  Chemically synthesized
gaaagcauauuucccuuuggcug

SEQ ID NO: 52222 - RNA, 23 nt, Artificial Sequence
  Chemically synthesized
aaagcauauuucccuuuggcuga

SEQ ID NO: 52223 - RNA, 23 nt, Artificial Sequence
  Chemically synthesized
cggcaacaaugacaagcaagaaa

SEQ ID NO: 52224 - RNA, 23 nt, Artificial Sequence
  Chemically synthesized
ucggcaacaaugacaagcaagaa

SEQ ID NO: 52225 - RNA, 23 nt, Artificial Sequence
  Chemically synthesized
uucggcaacaaugacaagcaaga

SEQ ID NO: 52226 - RNA, 23 nt, Artificial Sequence
  Chemically synthesized
cuucggcaacaaugacaagcaag

SEQ ID NO: 52227 - RNA, 23 nt, Artificial Sequence
  Chemically synthesized
ccuucggcaacaaugacaagcaa

SEQ ID NO: 52228 - RNA, 23 nt, Artificial Sequence
  Chemically synthesized
ccaagaucaucauugugaagcgg

SEQ ID NO: 52229 - RNA, 23 nt, Artificial Sequence
  Chemically synthesized
cccaagaucaucauugugaagcg

SEQ ID NO: 52230 - RNA, 23 nt, Artificial Sequence
  Chemically synthesized
gcccaagaucaucauugugaagc

SEQ ID NO: 52231 - RNA, 23 nt, Artificial Sequence
  Chemically synthesized
ggcccaagaucaucauugugaag

SEQ ID NO: 52232 - RNA, 23 nt, Artificial Sequence
  Chemically synthesized
gggcccaagaucaucauugugaa

SEQ ID NO: 52233 - RNA, 23 nt, Artificial Sequence
  Chemically synthesized
accugaacauccucuccuacuuc

SEQ ID NO: 52234 - RNA, 23 nt, Artificial Sequence
  Chemically synthesized
caccugaacauccucuccuacuu

SEQ ID NO: 52235 - RNA, 23 nt, Artificial Sequence
  Chemically synthesized
ccaccugaacauccucuccuacu

SEQ ID NO: 52236 - RNA, 23 nt, Artificial Sequence
  Chemically synthesized
uccaccugaacauccucuccuac

SEQ ID NO: 52237 - RNA, 23 nt, Artificial Sequence
  Chemically synthesized
uuccaccugaacauccucuccua

SEQ ID NO: 52238 - RNA, 23 nt, Artificial Sequence
  Chemically synthesized
acaagcagcucaagaacaagcug

SEQ ID NO: 52239 - RNA, 23 nt, Artificial Sequence
  Chemically synthesized
cacaagcagcucaagaacaagcu

SEQ ID NO: 52240 - RNA, 23 nt, Artificial Sequence
  Chemically synthesized
gcacaagcagcucaagaacaagc

SEQ ID NO: 52241 - RNA, 23 nt, Artificial Sequence
  Chemically synthesized
ggcacaagcagcucaagaacaag

SEQ ID NO: 52242 - RNA, 23 nt, Artificial Sequence
  Chemically synthesized
aggcacaagcagcucaagaacaa

SEQ ID NO: 52243 - RNA, 23 nt, Artificial Sequence
  Chemically synthesized
gcacauuuuuaccaucaguaaga

SEQ ID NO: 52244 - RNA, 23 nt, Artificial Sequence
  Chemically synthesized
ugcacauuuuuaccaucaguaag

SEQ ID NO: 52245 - RNA, 23 nt, Artificial Sequence
  Chemically synthesized
augcacauuuuuaccaucaguaa

SEQ ID NO: 52246 - RNA, 23 nt, Artificial Sequence
  Chemically synthesized
caugcacauuuuuaccaucagua

SEQ ID NO: 52247 - RNA, 23 nt, Artificial Sequence
  Chemically synthesized
ucaugcacauuuuuaccaucagu

SEQ ID NO: 52248 - RNA, 23 nt, Artificial Sequence
  Chemically synthesized
acaccuugcucuaccuguacgag

SEQ ID NO: 52249 - RNA, 23 nt, Artificial Sequence
  Chemically synthesized
gacaccuugcucuaccuguacga

SEQ ID NO: 52250 - RNA, 23 nt, Artificial Sequence
  Chemically synthesized
ggacaccuugcucuaccuguacg

SEQ ID NO: 52251 - RNA, 23 nt, Artificial Sequence
  Chemically synthesized
gggacaccuugcucuaccuguac

SEQ ID NO: 52252 - RNA, 23 nt, Artificial Sequence
  Chemically synthesized
ugggacaccuugcucuaccugua

SEQ ID NO: 52253 - RNA, 23 nt, Artificial Sequence
  Chemically synthesized
acaucacuaucucccugauccag

SEQ ID NO: 52254 - RNA, 23 nt, Artificial Sequence
  Chemically synthesized
gacaucacuaucucccugaucca

SEQ ID NO: 52255 - RNA, 23 nt, Artificial Sequence
  Chemically synthesized
ggacaucacuaucucccugaucc

SEQ ID NO: 52256 - RNA, 23 nt, Artificial Sequence
  Chemically synthesized
cggacaucacuaucucccugauc

SEQ ID NO: 52257 - RNA, 23 nt, Artificial Sequence
  Chemically synthesized
ucggacaucacuaucucccugau

SEQ ID NO: 52258 - RNA, 23 nt, Artificial Sequence
  Chemically synthesized
cgacagcuaccacgugaaugccc

SEQ ID NO: 52259 - RNA, 23 nt, Artificial Sequence
  Chemically synthesized
gcgacagcuaccacgugaaugcc

SEQ ID NO: 52260 - RNA, 23 nt, Artificial Sequence
  Chemically synthesized
ggcgacagcuaccacgugaaugc

SEQ ID NO: 52261 - RNA, 23 nt, Artificial Sequence
  Chemically synthesized
gggcgacagcuaccacgugaaug

SEQ ID NO: 52262 - RNA, 23 nt, Artificial Sequence
  Chemically synthesized
cgggcgacagcuaccacgugaau

SEQ ID NO: 52263 - RNA, 23 nt, Artificial Sequence
  Chemically synthesized
ugaacauccucuccuacuucgcc

SEQ ID NO: 52264 - RNA, 23 nt, Artificial Sequence
  Chemically synthesized
cugaacauccucuccuacuucgc

SEQ ID NO: 52265 - RNA, 23 nt, Artificial Sequence
  Chemically synthesized
ccugaacauccucuccuacuucg

SEQ ID NO: 52266 - RNA, 23 nt, Artificial Sequence
  Chemically synthesized
ccaaggacaugaaguuugugucu

SEQ ID NO: 52267 - RNA, 23 nt, Artificial Sequence
  Chemically synthesized
gccaaggacaugaaguuuguguc

SEQ ID NO: 52268 - RNA, 23 nt, Artificial Sequence
  Chemically synthesized
ggccaaggacaugaaguuugugu

SEQ ID NO: 52269 - RNA, 23 nt, Artificial Sequence
  Chemically synthesized
aggccaaggacaugaaguuugug

SEQ ID NO: 52270 - RNA, 23 nt, Artificial Sequence
  Chemically synthesized
gaggccaaggacaugaaguuugu

SEQ ID NO: 52271 - RNA, 23 nt, Artificial Sequence
  Chemically synthesized
cagcugcacucaucuccaacaag

SEQ ID NO: 52272 - RNA, 23 nt, Artificial Sequence
  Chemically synthesized
acagcugcacucaucuccaacaa

SEQ ID NO: 52273 - RNA, 23 nt, Artificial Sequence
  Chemically synthesized
gacagcugcacucaucuccaaca

SEQ ID NO: 52274 - RNA, 23 nt, Artificial Sequence
  Chemically synthesized
ugacagcugcacucaucuccaac

SEQ ID NO: 52275 - RNA, 23 nt, Artificial Sequence
  Chemically synthesized
augacagcugcacucaucuccaa

SEQ ID NO: 52276 - RNA, 23 nt, Artificial Sequence
  Chemically synthesized
cccgcagugagaucuucauggau

SEQ ID NO: 52277 - RNA, 23 nt, Artificial Sequence
  Chemically synthesized
gcccgcagugagaucuucaugga

SEQ ID NO: 52278 - RNA, 23 nt, Artificial Sequence
  Chemically synthesized
ugcccgcagugagaucuucaugg

SEQ ID NO: 52279 - RNA, 23 nt, Artificial Sequence
  Chemically synthesized
uugcccgcagugagaucuucaug

SEQ ID NO: 52280 - RNA, 23 nt, Artificial Sequence
  Chemically synthesized
auugcccgcagugagaucuucau

SEQ ID NO: 52281 - RNA, 23 nt, Artificial Sequence
  Chemically synthesized
gcaacagcagccucuucaagagc

SEQ ID NO: 52282 - RNA, 23 nt, Artificial Sequence
  Chemically synthesized
agcaacagcagccucuucaagag

SEQ ID NO: 52283 - RNA, 23 nt, Artificial Sequence
  Chemically synthesized
cagcaacagcagccucuucaaga

SEQ ID NO: 52284 - RNA, 23 nt, Artificial Sequence
  Chemically synthesized
gcagcaacagcagccucuucaag

SEQ ID NO: 52285 - RNA, 23 nt, Artificial Sequence
  Chemically synthesized
cgcagcaacagcagccucuucaa

SEQ ID NO: 52286 - RNA, 23 nt, Artificial Sequence
  Chemically synthesized
ggaagagcauaaagaagaugcug

SEQ ID NO: 52287 - RNA, 23 nt, Artificial Sequence
  Chemically synthesized
aggaagagcauaaagaagaugcu

SEQ ID NO: 52288 - RNA, 23 nt, Artificial Sequence
  Chemically synthesized
caggaagagcauaaagaagaugc

SEQ ID NO: 52289 - RNA, 23 nt, Artificial Sequence
  Chemically synthesized
gcaggaagagcauaaagaagaug

SEQ ID NO: 52290 - RNA, 23 nt, Artificial Sequence
  Chemically synthesized
ugcaggaagagcauaaagaagau

SEQ ID NO: 52291 - RNA, 23 nt, Artificial Sequence
  Chemically synthesized
ccaugugucucuagaaccccagu

SEQ ID NO: 52292 - RNA, 23 nt, Artificial Sequence
  Chemically synthesized
cccaugugucucuagaaccccag

SEQ ID NO: 52293 - RNA, 23 nt, Artificial Sequence
  Chemically synthesized
ccccaugugucucuagaacccca

SEQ ID NO: 52294 - RNA, 23 nt, Artificial Sequence
  Chemically synthesized
accccaugugucucuagaacccc

SEQ ID NO: 52295 - RNA, 23 nt, Artificial Sequence
  Chemically synthesized
caccccaugugucucuagaaccc

SEQ ID NO: 52296 - RNA, 23 nt, Artificial Sequence
  Chemically synthesized
ucgaggacaucagcaauaagguu

SEQ ID NO: 52297 - RNA, 23 nt, Artificial Sequence
  Chemically synthesized
aucgaggacaucagcaauaaggu

SEQ ID NO: 52298 - RNA, 23 nt, Artificial Sequence
  Chemically synthesized
gaucgaggacaucagcaauaagg

SEQ ID NO: 52299 - RNA, 23 nt, Artificial Sequence
  Chemically synthesized
agaucgaggacaucagcaauaag

SEQ ID NO: 52300 - RNA, 23 nt, Artificial Sequence
  Chemically synthesized
aagaucgaggacaucagcaauaa

SEQ ID NO: 52301 - RNA, 23 nt, Artificial Sequence
  Chemically synthesized
cugcacucaucuccaacaagccu

SEQ ID NO: 52302 - RNA, 23 nt, Artificial Sequence
  Chemically synthesized
gcugcacucaucuccaacaagcc

SEQ ID NO: 52303 - RNA, 23 nt, Artificial Sequence
  Chemically synthesized
agcugcacucaucuccaacaagc

SEQ ID NO: 52304 - RNA, 23 nt, Artificial Sequence
  Chemically synthesized
gcagugagaucuucauggaugag

SEQ ID NO: 52305 - RNA, 23 nt, Artificial Sequence
  Chemically synthesized
cgcagugagaucuucauggauga

SEQ ID NO: 52306 - RNA, 23 nt, Artificial Sequence
  Chemically synthesized
ccgcagugagaucuucauggaug

SEQ ID NO: 52307 - RNA, 23 nt, Artificial Sequence
  Chemically synthesized
gcguguucuuccaggagauguuu

SEQ ID NO: 52308 - RNA, 23 nt, Artificial Sequence
  Chemically synthesized
agcguguucuuccaggagauguu

SEQ ID NO: 52309 - RNA, 23 nt, Artificial Sequence
  Chemically synthesized
gagcguguucuuccaggagaugu

SEQ ID NO: 52310 - RNA, 23 nt, Artificial Sequence
  Chemically synthesized
ugagcguguucuuccaggagaug

SEQ ID NO: 52311 - RNA, 23 nt, Artificial Sequence
  Chemically synthesized
cugagcguguucuuccaggagau

SEQ ID NO: 52312 - RNA, 23 nt, Artificial Sequence
  Chemically synthesized
cugucuucauuuuccuaaaccug

SEQ ID NO: 52313 - RNA, 23 nt, Artificial Sequence
  Chemically synthesized
ccugucuucauuuuccuaaaccu

SEQ ID NO: 52314 - RNA, 23 nt, Artificial Sequence
  Chemically synthesized
cccugucuucauuuuccuaaacc

SEQ ID NO: 52315 - RNA, 23 nt, Artificial Sequence
  Chemically synthesized
ucccugucuucauuuuccuaaac

SEQ ID NO: 52316 - RNA, 23 nt, Artificial Sequence
  Chemically synthesized
cucccugucuucauuuuccuaaa

SEQ ID NO: 52317 - RNA, 23 nt, Artificial Sequence
  Chemically synthesized
ccacgauccaguacaacguggug

SEQ ID NO: 52318 - RNA, 23 nt, Artificial Sequence
  Chemically synthesized
uccacgauccaguacaacguggu

SEQ ID NO: 52319 - RNA, 23 nt, Artificial Sequence
  Chemically synthesized
guccacgauccaguacaacgugg

SEQ ID NO: 52320 - RNA, 23 nt, Artificial Sequence
  Chemically synthesized
uguccacgauccaguacaacgug

SEQ ID NO: 52321 - RNA, 23 nt, Artificial Sequence
  Chemically synthesized
cuguccacgauccaguacaacgu

SEQ ID NO: 52322 - RNA, 23 nt, Artificial Sequence
  Chemically synthesized
ucgacggugugaacuucaacccg

SEQ ID NO: 52323 - RNA, 23 nt, Artificial Sequence
  Chemically synthesized
aucgacggugugaacuucaaccc

SEQ ID NO: 52324 - RNA, 23 nt, Artificial Sequence
  Chemically synthesized
caucgacggugugaacuucaacc

SEQ ID NO: 52325 - RNA, 23 nt, Artificial Sequence
  Chemically synthesized
acaucgacggugugaacuucaac

SEQ ID NO: 52326 - RNA, 23 nt, Artificial Sequence
  Chemically synthesized
uacaucgacggugugaacuucaa

SEQ ID NO: 52327 - RNA, 23 nt, Artificial Sequence
  Chemically synthesized
ggaugaugaaggacgucuucuuc

SEQ ID NO: 52328 - RNA, 23 nt, Artificial Sequence
  Chemically synthesized
cggaugaugaaggacgucuucuu

SEQ ID NO: 52329 - RNA, 23 nt, Artificial Sequence
  Chemically synthesized
gcggaugaugaaggacgucuucu

SEQ ID NO: 52330 - RNA, 23 nt, Artificial Sequence
  Chemically synthesized
agcggaugaugaaggacgucuuc

SEQ ID NO: 52331 - RNA, 23 nt, Artificial Sequence
  Chemically synthesized
aagcggaugaugaaggacgucuu

SEQ ID NO: 52332 - RNA, 23 nt, Artificial Sequence
  Chemically synthesized
cacauuuuuaccaucaguaagac

SEQ ID NO: 52333 - RNA, 23 nt, Artificial Sequence
  Chemically synthesized
gcaacaaugacaagcaagaaagc

SEQ ID NO: 52334 - RNA, 23 nt, Artificial Sequence
  Chemically synthesized
ggcaacaaugacaagcaagaaag

SEQ ID NO: 52335 - RNA, 23 nt, Artificial Sequence
  Chemically synthesized
cgaggacaucagcaauaagguug

SEQ ID NO: 52336 - RNA, 23 nt, Artificial Sequence
  Chemically synthesized
accuccucaucgccauguucaac

SEQ ID NO: 52337 - RNA, 23 nt, Artificial Sequence
  Chemically synthesized
aaccuccucaucgccauguucaa

SEQ ID NO: 52338 - RNA, 23 nt, Artificial Sequence
  Chemically synthesized
caaccuccucaucgccauguuca

SEQ ID NO: 52339 - RNA, 23 nt, Artificial Sequence
  Chemically synthesized
ucaaccuccucaucgccauguuc

SEQ ID NO: 52340 - RNA, 23 nt, Artificial Sequence
  Chemically synthesized
cucaaccuccucaucgccauguu

SEQ ID NO: 52341 - RNA, 23 nt, Artificial Sequence
  Chemically synthesized
ggggcccaagaucaucauuguga

SEQ ID NO: 52342 - RNA, 23 nt, Artificial Sequence
  Chemically synthesized
gaagaaagaaugcguguauuuug

SEQ ID NO: 52343 - RNA, 23 nt, Artificial Sequence
  Chemically synthesized
agaagaaagaaugcguguauuuu

SEQ ID NO: 52344 - RNA, 23 nt, Artificial Sequence
  Chemically synthesized
aagaagaaagaaugcguguauuu

SEQ ID NO: 52345 - RNA, 23 nt, Artificial Sequence
  Chemically synthesized
caagaagaaagaaugcguguauu

SEQ ID NO: 52346 - RNA, 23 nt, Artificial Sequence
  Chemically synthesized
ucaagaagaaagaaugcguguau

SEQ ID NO: 52347 - RNA, 23 nt, Artificial Sequence
  Chemically synthesized
cuuccaccugaacauccucuccu

SEQ ID NO: 52348 - RNA, 23 nt, Artificial Sequence
  Chemically synthesized
ggaggccaaggacaugaaguuug

SEQ ID NO: 52349 - RNA, 23 nt, Artificial Sequence
  Chemically synthesized
ggagauguuugagaccuucacgg

SEQ ID NO: 52350 - RNA, 23 nt, Artificial Sequence
  Chemically synthesized
aggagauguuugagaccuucacg

SEQ ID NO: 52351 - RNA, 23 nt, Artificial Sequence
  Chemically synthesized
caggagauguuugagaccuucac

SEQ ID NO: 52352 - RNA, 23 nt, Artificial Sequence
  Chemically synthesized
ccaggagauguuugagaccuuca

SEQ ID NO: 52353 - RNA, 23 nt, Artificial Sequence
  Chemically synthesized
uccaggagauguuugagaccuuc

SEQ ID NO: 52354 - RNA, 23 nt, Artificial Sequence
  Chemically synthesized
uuccaggagauguuugagaccuu

SEQ ID NO: 52355 - RNA, 23 nt, Artificial Sequence
  Chemically synthesized
gcaaccacucucacuucauccuc

SEQ ID NO: 52356 - RNA, 23 nt, Artificial Sequence
  Chemically synthesized
agcaaccacucucacuucauccu

SEQ ID NO: 52357 - RNA, 23 nt, Artificial Sequence
  Chemically synthesized
cagcaaccacucucacuucaucc

SEQ ID NO: 52358 - RNA, 23 nt, Artificial Sequence
  Chemically synthesized
acagcaaccacucucacuucauc

SEQ ID NO: 52359 - RNA, 23 nt, Artificial Sequence
  Chemically synthesized
gacagcaaccacucucacuucau

SEQ ID NO: 52360 - RNA, 23 nt, Artificial Sequence
  Chemically synthesized
agaaggugaaaaaguacguccga

SEQ ID NO: 52361 - RNA, 23 nt, Artificial Sequence
  Chemically synthesized
cagaaggugaaaaaguacguccg

SEQ ID NO: 52362 - RNA, 23 nt, Artificial Sequence
  Chemically synthesized
ccagaaggugaaaaaguacgucc

SEQ ID NO: 52363 - RNA, 23 nt, Artificial Sequence
  Chemically synthesized
gccagaaggugaaaaaguacguc

SEQ ID NO: 52364 - RNA, 23 nt, Artificial Sequence
  Chemically synthesized
agccagaaggugaaaaaguacgu

SEQ ID NO: 52365 - RNA, 23 nt, Artificial Sequence
  Chemically synthesized
ggccuaugucugugaggaagggg

SEQ ID NO: 52366 - RNA, 23 nt, Artificial Sequence
  Chemically synthesized
aggccuaugucugugaggaaggg

SEQ ID NO: 52367 - RNA, 23 nt, Artificial Sequence
  Chemically synthesized
caggccuaugucugugaggaagg

SEQ ID NO: 52368 - RNA, 23 nt, Artificial Sequence
  Chemically synthesized
ucaggccuaugucugugaggaag

SEQ ID NO: 52369 - RNA, 23 nt, Artificial Sequence
  Chemically synthesized
cucaggccuaugucugugaggaa

SEQ ID NO: 52370 - RNA, 23 nt, Artificial Sequence
  Chemically synthesized
cuuuugaaaacuugcugaagugc

SEQ ID NO: 52371 - RNA, 23 nt, Artificial Sequence
  Chemically synthesized
ucuuuugaaaacuugcugaagug

SEQ ID NO: 52372 - RNA, 23 nt, Artificial Sequence
  Chemically synthesized
gucuuuugaaaacuugcugaagu

SEQ ID NO: 52373 - RNA, 23 nt, Artificial Sequence
  Chemically synthesized
cgucuuuugaaaacuugcugaag

SEQ ID NO: 52374 - RNA, 23 nt, Artificial Sequence
  Chemically synthesized
ccgucuuuugaaaacuugcugaa

SEQ ID NO: 52375 - RNA, 23 nt, Artificial Sequence
  Chemically synthesized
cugcaggaagagcauaaagaaga

SEQ ID NO: 52376 - RNA, 23 nt, Artificial Sequence
  Chemically synthesized
ucugcaggaagagcauaaagaag

SEQ ID NO: 52377 - RNA, 23 nt, Artificial Sequence
  Chemically synthesized
aucugcaggaagagcauaaagaa

SEQ ID NO: 52378 - RNA, 23 nt, Artificial Sequence
  Chemically synthesized
ggacaucagcaauaagguugacg

SEQ ID NO: 52379 - RNA, 23 nt, Artificial Sequence
  Chemically synthesized
aggacaucagcaauaagguugac

SEQ ID NO: 52380 - RNA, 23 nt, Artificial Sequence
  Chemically synthesized
gaggacaucagcaauaagguuga

SEQ ID NO: 52381 - RNA, 23 nt, Artificial Sequence
  Chemically synthesized
gaggcacaagcagcucaagaaca

SEQ ID NO: 52382 - RNA, 23 nt, Artificial Sequence
  Chemically synthesized
agaggcacaagcagcucaagaac

SEQ ID NO: 52383 - RNA, 23 nt, Artificial Sequence
  Chemically synthesized
accugcagcucuucaucaagagg

SEQ ID NO: 52384 - RNA, 23 nt, Artificial Sequence
  Chemically synthesized
caccugcagcucuucaucaagag

SEQ ID NO: 52385 - RNA, 23 nt, Artificial Sequence
  Chemically synthesized
ccaccugcagcucuucaucaaga

SEQ ID NO: 52386 - RNA, 23 nt, Artificial Sequence
  Chemically synthesized
gccaccugcagcucuucaucaag

SEQ ID NO: 52387 - RNA, 23 nt, Artificial Sequence
  Chemically synthesized
agccaccugcagcucuucaucaa

SEQ ID NO: 52388 - RNA, 23 nt, Artificial Sequence
  Chemically synthesized
gcguguauuuuguggaaaguucc

SEQ ID NO: 52389 - RNA, 23 nt, Artificial Sequence
  Chemically synthesized
ugcguguauuuuguggaaaguuc

SEQ ID NO: 52390 - RNA, 23 nt, Artificial Sequence
  Chemically synthesized
augcguguauuuuguggaaaguu

SEQ ID NO: 52391 - RNA, 23 nt, Artificial Sequence
  Chemically synthesized
aaugcguguauuuuguggaaagu

SEQ ID NO: 52392 - RNA, 23 nt, Artificial Sequence
  Chemically synthesized
gaaugcguguauuuuguggaaag

SEQ ID NO: 52393 - RNA, 23 nt, Artificial Sequence
  Chemically synthesized
ucauugugaagcggaugaugaag

SEQ ID NO: 52394 - RNA, 23 nt, Artificial Sequence
  Chemically synthesized
aucauugugaagcggaugaugaa

SEQ ID NO: 52395 - RNA, 23 nt, Artificial Sequence
  Chemically synthesized
caucauugugaagcggaugauga

SEQ ID NO: 52396 - RNA, 23 nt, Artificial Sequence
  Chemically synthesized
ucaucauugugaagcggaugaug

SEQ ID NO: 52397 - RNA, 23 nt, Artificial Sequence
  Chemically synthesized
aucaucauugugaagcggaugau

SEQ ID NO: 52398 - RNA, 23 nt, Artificial Sequence
  Chemically synthesized
gaucaucauugugaagcggauga

SEQ ID NO: 52399 - RNA, 23 nt, Artificial Sequence
  Chemically synthesized
agaucaucauugugaagcggaug

SEQ ID NO: 52400 - RNA, 23 nt, Artificial Sequence
  Chemically synthesized
aagaucaucauugugaagcggau

SEQ ID NO: 52401 - RNA, 23 nt, Artificial Sequence
  Chemically synthesized
uggggcccaagaucaucauugug

SEQ ID NO: 52402 - RNA, 23 nt, Artificial Sequence
  Chemically synthesized
cuggggcccaagaucaucauugu

SEQ ID NO: 52403 - RNA, 23 nt, Artificial Sequence
  Chemically synthesized
cgaagagagagcccagaaacugc

SEQ ID NO: 52404 - RNA, 23 nt, Artificial Sequence
  Chemically synthesized
acgaagagagagcccagaaacug

SEQ ID NO: 52405 - RNA, 23 nt, Artificial Sequence
  Chemically synthesized
gacgaagagagagcccagaaacu

SEQ ID NO: 52406 - RNA, 23 nt, Artificial Sequence
  Chemically synthesized
ggacgaagagagagcccagaaac

SEQ ID NO: 52407 - RNA, 23 nt, Artificial Sequence
  Chemically synthesized
aggacgaagagagagcccagaaa

SEQ ID NO: 52408 - RNA, 23 nt, Artificial Sequence
  Chemically synthesized
gcagaccaaggaaagaggaggug

SEQ ID NO: 52409 - RNA, 23 nt, Artificial Sequence
  Chemically synthesized
agcagaccaaggaaagaggaggu

SEQ ID NO: 52410 - RNA, 23 nt, Artificial Sequence
  Chemically synthesized
gagcagaccaaggaaagaggagg

SEQ ID NO: 52411 - RNA, 23 nt, Artificial Sequence
  Chemically synthesized
ggagcagaccaaggaaagaggag

SEQ ID NO: 52412 - RNA, 23 nt, Artificial Sequence
  Chemically synthesized
cggagcagaccaaggaaagagga

SEQ ID NO: 52413 - RNA, 23 nt, Artificial Sequence
  Chemically synthesized
ucggagcagaccaaggaaagagg

SEQ ID NO: 52414 - RNA, 23 nt, Artificial Sequence
  Chemically synthesized
aucggagcagaccaaggaaagag

SEQ ID NO: 52415 - RNA, 23 nt, Artificial Sequence
  Chemically synthesized
uaucggagcagaccaaggaaaga

SEQ ID NO: 52416 - RNA, 23 nt, Artificial Sequence
  Chemically synthesized
ugaacaggcugaacucuaaccug

SEQ ID NO: 52417 - RNA, 23 nt, Artificial Sequence
  Chemically synthesized
cugaacaggcugaacucuaaccu

SEQ ID NO: 52418 - RNA, 23 nt, Artificial Sequence
  Chemically synthesized
gcugaacaggcugaacucuaacc

SEQ ID NO: 52419 - RNA, 23 nt, Artificial Sequence
  Chemically synthesized
agcugaacaggcugaacucuaac

SEQ ID NO: 52420 - RNA, 23 nt, Artificial Sequence
  Chemically synthesized
gagcugaacaggcugaacucuaa

SEQ ID NO: 52421 - RNA, 23 nt, Artificial Sequence
  Chemically synthesized
acuguccacgauccaguacaacg

SEQ ID NO: 52422 - RNA, 23 nt, Artificial Sequence
  Chemically synthesized
cacuguccacgauccaguacaac

SEQ ID NO: 52423 - RNA, 23 nt, Artificial Sequence
  Chemically synthesized
ccacuguccacgauccaguacaa

SEQ ID NO: 52424 - RNA, 23 nt, Artificial Sequence
  Chemically synthesized
gaagaucgaggacaucagcaaua

SEQ ID NO: 52425 - RNA, 23 nt, Artificial Sequence
  Chemically synthesized
agaagaucgaggacaucagcaau

SEQ ID NO: 52426 - RNA, 23 nt, Artificial Sequence
  Chemically synthesized
cagaagaucgaggacaucagcaa

SEQ ID NO: 52427 - RNA, 23 nt, Artificial Sequence
  Chemically synthesized
ccgacaguuccagcaaaagcagc

SEQ ID NO: 52428 - RNA, 23 nt, Artificial Sequence
  Chemically synthesized
accgacaguuccagcaaaagcag

SEQ ID NO: 52429 - RNA, 23 nt, Artificial Sequence
  Chemically synthesized
aaccgacaguuccagcaaaagca

SEQ ID NO: 52430 - RNA, 23 nt, Artificial Sequence
  Chemically synthesized
gaaccgacaguuccagcaaaagc

SEQ ID NO: 52431 - RNA, 23 nt, Artificial Sequence
  Chemically synthesized
agaaccgacaguuccagcaaaag

SEQ ID NO: 52432 - RNA, 23 nt, Artificial Sequence
  Chemically synthesized
cgacggugugaacuucaacccgg

SEQ ID NO: 52433 - RNA, 23 nt, Artificial Sequence
  Chemically synthesized
cuacaucgacggugugaacuuca

SEQ ID NO: 52434 - RNA, 23 nt, Artificial Sequence
  Chemically synthesized
gcuacaucgacggugugaacuuc

SEQ ID NO: 52435 - RNA, 23 nt, Artificial Sequence
  Chemically synthesized
ggcuacaucgacggugugaacuu

SEQ ID NO: 52436 - RNA, 23 nt, Artificial Sequence
  Chemically synthesized
ugaagcggaugaugaaggacguc

SEQ ID NO: 52437 - RNA, 23 nt, Artificial Sequence
  Chemically synthesized
gugaagcggaugaugaaggacgu

SEQ ID NO: 52438 - RNA, 23 nt, Artificial Sequence
  Chemically synthesized
ugugaagcggaugaugaaggacg

SEQ ID NO: 52439 - RNA, 23 nt, Artificial Sequence
  Chemically synthesized
uugugaagcggaugaugaaggac

SEQ ID NO: 52440 - RNA, 23 nt, Artificial Sequence
  Chemically synthesized
auugugaagcggaugaugaagga

SEQ ID NO: 52441 - RNA, 23 nt, Artificial Sequence
  Chemically synthesized
gccuuguacuucagugacuucug

SEQ ID NO: 52442 - RNA, 23 nt, Artificial Sequence
  Chemically synthesized
agccuuguacuucagugacuucu

SEQ ID NO: 52443 - RNA, 23 nt, Artificial Sequence
  Chemically synthesized
cagccuuguacuucagugacuuc

SEQ ID NO: 52444 - RNA, 23 nt, Artificial Sequence
  Chemically synthesized
gcagccuuguacuucagugacuu

SEQ ID NO: 52445 - RNA, 23 nt, Artificial Sequence
  Chemically synthesized
ggcagccuuguacuucagugacu

SEQ ID NO: 52446 - RNA, 23 nt, Artificial Sequence
  Chemically synthesized
uggaggccaaggacaugaaguuu

SEQ ID NO: 52447 - RNA, 23 nt, Artificial Sequence
  Chemically synthesized
cuggaggccaaggacaugaaguu

SEQ ID NO: 52448 - RNA, 23 nt, Artificial Sequence
  Chemically synthesized
ccauccgugaccuucucauuugg

SEQ ID NO: 52449 - RNA, 23 nt, Artificial Sequence
  Chemically synthesized
cccauccgugaccuucucauuug

SEQ ID NO: 52450 - RNA, 23 nt, Artificial Sequence
  Chemically synthesized
ccccauccgugaccuucucauuu

SEQ ID NO: 52451 - RNA, 23 nt, Artificial Sequence
  Chemically synthesized
accccauccgugaccuucucauu

SEQ ID NO: 52452 - RNA, 23 nt, Artificial Sequence
  Chemically synthesized
gaccccauccgugaccuucucau

SEQ ID NO: 52453 - RNA, 23 nt, Artificial Sequence
  Chemically synthesized
cguggauuccugaaaacaucaag

SEQ ID NO: 52454 - RNA, 23 nt, Artificial Sequence
  Chemically synthesized
ucguggauuccugaaaacaucaa

SEQ ID NO: 52455 - RNA, 23 nt, Artificial Sequence
  Chemically synthesized
uucguggauuccugaaaacauca

SEQ ID NO: 52456 - RNA, 23 nt, Artificial Sequence
  Chemically synthesized
guucguggauuccugaaaacauc

SEQ ID NO: 52457 - RNA, 23 nt, Artificial Sequence
  Chemically synthesized
aguucguggauuccugaaaacau

SEQ ID NO: 52458 - RNA, 23 nt, Artificial Sequence
  Chemically synthesized
caguucguggauuccugaaaaca

SEQ ID NO: 52459 - RNA, 23 nt, Artificial Sequence
  Chemically synthesized
ucaguucguggauuccugaaaac

SEQ ID NO: 52460 - RNA, 23 nt, Artificial Sequence
  Chemically synthesized
cucaguucguggauuccugaaaa

SEQ ID NO: 52461 - RNA, 23 nt, Artificial Sequence
  Chemically synthesized
gugagaucuucauggaugagugg

SEQ ID NO: 52462 - RNA, 23 nt, Artificial Sequence
  Chemically synthesized
agugagaucuucauggaugagug

SEQ ID NO: 52463 - RNA, 23 nt, Artificial Sequence
  Chemically synthesized
cagugagaucuucauggaugagu

SEQ ID NO: 52464 - RNA, 23 nt, Artificial Sequence
  Chemically synthesized
cuaucucccugauccagcagaaa

SEQ ID NO: 52465 - RNA, 23 nt, Artificial Sequence
  Chemically synthesized
acuaucucccugauccagcagaa

SEQ ID NO: 52466 - RNA, 23 nt, Artificial Sequence
  Chemically synthesized
cacuaucucccugauccagcaga

SEQ ID NO: 52467 - RNA, 23 nt, Artificial Sequence
  Chemically synthesized
ucacuaucucccugauccagcag

SEQ ID NO: 52468 - RNA, 23 nt, Artificial Sequence
  Chemically synthesized
aucacuaucucccugauccagca

SEQ ID NO: 52469 - RNA, 23 nt, Artificial Sequence
  Chemically synthesized
cgaguacauacuggaugaggaug

SEQ ID NO: 52470 - RNA, 23 nt, Artificial Sequence
  Chemically synthesized
ccgaguacauacuggaugaggau

SEQ ID NO: 52471 - RNA, 23 nt, Artificial Sequence
  Chemically synthesized
gccgaguacauacuggaugagga

SEQ ID NO: 52472 - RNA, 23 nt, Artificial Sequence
  Chemically synthesized
cgccgaguacauacuggaugagg

SEQ ID NO: 52473 - RNA, 23 nt, Artificial Sequence
  Chemically synthesized
ccgccgaguacauacuggaugag

SEQ ID NO: 52474 - RNA, 23 nt, Artificial Sequence
  Chemically synthesized
cccuucggcaacaaugacaagca

SEQ ID NO: 52475 - RNA, 23 nt, Artificial Sequence
  Chemically synthesized
ugaaaaaguacguccgagucucc

SEQ ID NO: 52476 - RNA, 23 nt, Artificial Sequence
  Chemically synthesized
gugaaaaaguacguccgagucuc

SEQ ID NO: 52477 - RNA, 23 nt, Artificial Sequence
  Chemically synthesized
ggugaaaaaguacguccgagucu

SEQ ID NO: 52478 - RNA, 23 nt, Artificial Sequence
  Chemically synthesized
aggugaaaaaguacguccgaguc

SEQ ID NO: 52479 - RNA, 23 nt, Artificial Sequence
  Chemically synthesized
aaggugaaaaaguacguccgagu

SEQ ID NO: 52480 - RNA, 23 nt, Artificial Sequence
  Chemically synthesized
gaaggugaaaaaguacguccgag

SEQ ID NO: 52481 - RNA, 23 nt, Artificial Sequence
  Chemically synthesized
agcucccugucuucauuuuccua

SEQ ID NO: 52482 - RNA, 23 nt, Artificial Sequence
  Chemically synthesized
cagcucccugucuucauuuuccu

SEQ ID NO: 52483 - RNA, 23 nt, Artificial Sequence
  Chemically synthesized
ucagcucccugucuucauuuucc

SEQ ID NO: 52484 - RNA, 23 nt, Artificial Sequence
  Chemically synthesized
aucagcucccugucuucauuuuc

SEQ ID NO: 52485 - RNA, 23 nt, Artificial Sequence
  Chemically synthesized
caucagcucccugucuucauuuu

SEQ ID NO: 52486 - RNA, 23 nt, Artificial Sequence
  Chemically synthesized
gccuaugucugugaggaaggggc

SEQ ID NO: 52487 - RNA, 23 nt, Artificial Sequence
  Chemically synthesized
augaccucaugaacuggaagggg

SEQ ID NO: 52488 - RNA, 23 nt, Artificial Sequence
  Chemically synthesized
gaugaccucaugaacuggaaggg

SEQ ID NO: 52489 - RNA, 23 nt, Artificial Sequence
  Chemically synthesized
agaugaccucaugaacuggaagg

SEQ ID NO: 52490 - RNA, 23 nt, Artificial Sequence
  Chemically synthesized
cagaugaccucaugaacuggaag

SEQ ID NO: 52491 - RNA, 23 nt, Artificial Sequence
  Chemically synthesized
gcagaugaccucaugaacuggaa

SEQ ID NO: 52492 - RNA, 23 nt, Artificial Sequence
  Chemically synthesized
cugcagaugaccucaugaacugg

SEQ ID NO: 52493 - RNA, 23 nt, Artificial Sequence
  Chemically synthesized
gcugcagaugaccucaugaacug

SEQ ID NO: 52494 - RNA, 23 nt, Artificial Sequence
  Chemically synthesized
ugcugcagaugaccucaugaacu

SEQ ID NO: 52495 - RNA, 23 nt, Artificial Sequence
  Chemically synthesized
cugcugcagaugaccucaugaac

SEQ ID NO: 52496 - RNA, 23 nt, Artificial Sequence
  Chemically synthesized
ucugcugcagaugaccucaugaa

SEQ ID NO: 52497 - RNA, 23 nt, Artificial Sequence
  Chemically synthesized
agaaugacguggagcugaacagg

SEQ ID NO: 52498 - RNA, 23 nt, Artificial Sequence
  Chemically synthesized
cagaaugacguggagcugaacag

SEQ ID NO: 52499 - RNA, 23 nt, Artificial Sequence
  Chemically synthesized
ccagaaugacguggagcugaaca

SEQ ID NO: 52500 - RNA, 23 nt, Artificial Sequence
  Chemically synthesized
accagaaugacguggagcugaac

SEQ ID NO: 52501 - RNA, 23 nt, Artificial Sequence
  Chemically synthesized
gaccagaaugacguggagcugaa

SEQ ID NO: 52502 - RNA, 23 nt, Artificial Sequence
  Chemically synthesized
ggaguuccugaucuaugacccac

SEQ ID NO: 52503 - RNA, 23 nt, Artificial Sequence
  Chemically synthesized
cggaguuccugaucuaugaccca

SEQ ID NO: 52504 - RNA, 23 nt, Artificial Sequence
  Chemically synthesized
acggaguuccugaucuaugaccc

SEQ ID NO: 52505 - RNA, 23 nt, Artificial Sequence
  Chemically synthesized
gacggaguuccugaucuaugacc

SEQ ID NO: 52506 - RNA, 23 nt, Artificial Sequence
  Chemically synthesized
agacggaguuccugaucuaugac

SEQ ID NO: 52507 - RNA, 23 nt, Artificial Sequence
  Chemically synthesized
uccucaucgccauguucaacuac

SEQ ID NO: 52508 - RNA, 23 nt, Artificial Sequence
  Chemically synthesized
cuccucaucgccauguucaacua

SEQ ID NO: 52509 - RNA, 23 nt, Artificial Sequence
  Chemically synthesized
ccuccucaucgccauguucaacu

SEQ ID NO: 52510 - RNA, 23 nt, Artificial Sequence
  Chemically synthesized
gggcuacaucgacggugugaacu

SEQ ID NO: 52511 - RNA, 23 nt, Artificial Sequence
  Chemically synthesized
cgggcuacaucgacggugugaac

SEQ ID NO: 52512 - RNA, 23 nt, Artificial Sequence
  Chemically synthesized
ccgggcuacaucgacggugugaa

SEQ ID NO: 52513 - RNA, 23 nt, Artificial Sequence
  Chemically synthesized
agaaugcguguauuuuguggaaa

SEQ ID NO: 52514 - RNA, 23 nt, Artificial Sequence
  Chemically synthesized
caagaucaucauugugaagcgga

SEQ ID NO: 52515 - RNA, 23 nt, Artificial Sequence
  Chemically synthesized
aucaagaagaaagaaugcgugua

SEQ ID NO: 52516 - RNA, 23 nt, Artificial Sequence
  Chemically synthesized
ccuggaggccaaggacaugaagu

SEQ ID NO: 52517 - RNA, 23 nt, Artificial Sequence
  Chemically synthesized
cccuggaggccaaggacaugaag

SEQ ID NO: 52518 - RNA, 23 nt, Artificial Sequence
  Chemically synthesized
gcccuggaggccaaggacaugaa

SEQ ID NO: 52519 - RNA, 23 nt, Artificial Sequence
  Chemically synthesized
ccuucucauuugggccauugucc

SEQ ID NO: 52520 - RNA, 23 nt, Artificial Sequence
  Chemically synthesized
accuucucauuugggccauuguc

SEQ ID NO: 52521 - RNA, 23 nt, Artificial Sequence
  Chemically synthesized
gaccuucucauuugggccauugu

SEQ ID NO: 52522 - RNA, 23 nt, Artificial Sequence
  Chemically synthesized
ugaccuucucauuugggccauug

SEQ ID NO: 52523 - RNA, 23 nt, Artificial Sequence
  Chemically synthesized
gugaccuucucauuugggccauu

SEQ ID NO: 52524 - RNA, 23 nt, Artificial Sequence
  Chemically synthesized
ccuugcucuaccuguacgagaac

SEQ ID NO: 52525 - RNA, 23 nt, Artificial Sequence
  Chemically synthesized
accuugcucuaccuguacgagaa

SEQ ID NO: 52526 - RNA, 23 nt, Artificial Sequence
  Chemically synthesized
caccuugcucuaccuguacgaga

SEQ ID NO: 52527 - RNA, 23 nt, Artificial Sequence
  Chemically synthesized
gcaguggaagccuucagaucugc

SEQ ID NO: 52528 - RNA, 23 nt, Artificial Sequence
  Chemically synthesized
ggcaguggaagccuucagaucug

SEQ ID NO: 52529 - RNA, 23 nt, Artificial Sequence
  Chemically synthesized
uggcaguggaagccuucagaucu

SEQ ID NO: 52530 - RNA, 23 nt, Artificial Sequence
  Chemically synthesized
guggcaguggaagccuucagauc

SEQ ID NO: 52531 - RNA, 23 nt, Artificial Sequence
  Chemically synthesized
aguggcaguggaagccuucagau

SEQ ID NO: 52532 - RNA, 23 nt, Artificial Sequence
  Chemically synthesized
ccaaaaagauccaagauaucguc

SEQ ID NO: 52533 - RNA, 23 nt, Artificial Sequence
  Chemically synthesized
accaaaaagauccaagauaucgu

SEQ ID NO: 52534 - RNA, 23 nt, Artificial Sequence
  Chemically synthesized
gaccaaaaagauccaagauaucg

SEQ ID NO: 52535 - RNA, 23 nt, Artificial Sequence
  Chemically synthesized
ggaccaaaaagauccaagauauc

SEQ ID NO: 52536 - RNA, 23 nt, Artificial Sequence
  Chemically synthesized
uggaccaaaaagauccaagauau

SEQ ID NO: 52537 - RNA, 23 nt, Artificial Sequence
  Chemically synthesized
gucgaguggaccaaaaagaucca

SEQ ID NO: 52538 - RNA, 23 nt, Artificial Sequence
  Chemically synthesized
ugucgaguggaccaaaaagaucc

SEQ ID NO: 52539 - RNA, 23 nt, Artificial Sequence
  Chemically synthesized
uugucgaguggaccaaaaagauc

SEQ ID NO: 52540 - RNA, 23 nt, Artificial Sequence
  Chemically synthesized
auugucgaguggaccaaaaagau

SEQ ID NO: 52541 - RNA, 23 nt, Artificial Sequence
  Chemically synthesized
gauugucgaguggaccaaaaaga

SEQ ID NO: 52542 - RNA, 23 nt, Artificial Sequence
  Chemically synthesized
cuucacggaaagcaggauugucg

SEQ ID NO: 52543 - RNA, 23 nt, Artificial Sequence
  Chemically synthesized
ccuucacggaaagcaggauuguc

SEQ ID NO: 52544 - RNA, 23 nt, Artificial Sequence
  Chemically synthesized
accuucacggaaagcaggauugu

SEQ ID NO: 52545 - RNA, 23 nt, Artificial Sequence
  Chemically synthesized
gaccuucacggaaagcaggauug

SEQ ID NO: 52546 - RNA, 23 nt, Artificial Sequence
  Chemically synthesized
agaccuucacggaaagcaggauu

SEQ ID NO: 52547 - RNA, 23 nt, Artificial Sequence
  Chemically synthesized
cguugcacaccaucgacaacgcc

SEQ ID NO: 52548 - RNA, 23 nt, Artificial Sequence
  Chemically synthesized
acguugcacaccaucgacaacgc

SEQ ID NO: 52549 - RNA, 23 nt, Artificial Sequence
  Chemically synthesized
cacguugcacaccaucgacaacg

SEQ ID NO: 52550 - RNA, 23 nt, Artificial Sequence
  Chemically synthesized
gcacguugcacaccaucgacaac

SEQ ID NO: 52551 - RNA, 23 nt, Artificial Sequence
  Chemically synthesized
ggcacguugcacaccaucgacaa

SEQ ID NO: 52552 - RNA, 23 nt, Artificial Sequence
  Chemically synthesized
caaggaaagaggagguguggcca

SEQ ID NO: 52553 - RNA, 23 nt, Artificial Sequence
  Chemically synthesized
ccaaggaaagaggagguguggcc

SEQ ID NO: 52554 - RNA, 23 nt, Artificial Sequence
  Chemically synthesized
accaaggaaagaggagguguggc

SEQ ID NO: 52555 - RNA, 23 nt, Artificial Sequence
  Chemically synthesized
gaccaaggaaagaggaggugugg

SEQ ID NO: 52556 - RNA, 23 nt, Artificial Sequence
  Chemically synthesized
agaccaaggaaagaggaggugug

SEQ ID NO: 52557 - RNA, 23 nt, Artificial Sequence
  Chemically synthesized
ccaagaacuucaacaugaagccg

SEQ ID NO: 52558 - RNA, 23 nt, Artificial Sequence
  Chemically synthesized
gccaagaacuucaacaugaagcc

SEQ ID NO: 52559 - RNA, 23 nt, Artificial Sequence
  Chemically synthesized
ggccaagaacuucaacaugaagc

SEQ ID NO: 52560 - RNA, 23 nt, Artificial Sequence
  Chemically synthesized
gggccaagaacuucaacaugaag

SEQ ID NO: 52561 - RNA, 23 nt, Artificial Sequence
  Chemically synthesized
ggggccaagaacuucaacaugaa

SEQ ID NO: 52562 - RNA, 23 nt, Artificial Sequence
  Chemically synthesized
ugucuucauuuuccuaaaccugg

SEQ ID NO: 52563 - RNA, 23 nt, Artificial Sequence
  Chemically synthesized
gcugaacucuaaccugcacgccu

SEQ ID NO: 52564 - RNA, 23 nt, Artificial Sequence
  Chemically synthesized
ggcugaacucuaaccugcacgcc

SEQ ID NO: 52565 - RNA, 23 nt, Artificial Sequence
  Chemically synthesized
aggcugaacucuaaccugcacgc

SEQ ID NO: 52566 - RNA, 23 nt, Artificial Sequence
  Chemically synthesized
caggcugaacucuaaccugcacg

SEQ ID NO: 52567 - RNA, 23 nt, Artificial Sequence
  Chemically synthesized
acaggcugaacucuaaccugcac

SEQ ID NO: 52568 - RNA, 23 nt, Artificial Sequence
  Chemically synthesized
gccgucuuuugaaaacuugcuga

SEQ ID NO: 52569 - RNA, 23 nt, Artificial Sequence
  Chemically synthesized
ggccgucuuuugaaaacuugcug

SEQ ID NO: 52570 - RNA, 23 nt, Artificial Sequence
  Chemically synthesized
acaucagcaauaagguugacgcc

SEQ ID NO: 52571 - RNA, 23 nt, Artificial Sequence
  Chemically synthesized
gacaucagcaauaagguugacgc

SEQ ID NO: 52572 - RNA, 23 nt, Artificial Sequence
  Chemically synthesized
acaagcuggagaagaacgaggag

SEQ ID NO: 52573 - RNA, 23 nt, Artificial Sequence
  Chemically synthesized
aacaagcuggagaagaacgagga

SEQ ID NO: 52574 - RNA, 23 nt, Artificial Sequence
  Chemically synthesized
gaacaagcuggagaagaacgagg

SEQ ID NO: 52575 - RNA, 23 nt, Artificial Sequence
  Chemically synthesized
agaacaagcuggagaagaacgag

SEQ ID NO: 52576 - RNA, 23 nt, Artificial Sequence
  Chemically synthesized
aagaacaagcuggagaagaacga

SEQ ID NO: 52577 - RNA, 23 nt, Artificial Sequence
  Chemically synthesized
cguguauuuuguggaaaguucca

SEQ ID NO: 52578 - RNA, 23 nt, Artificial Sequence
  Chemically synthesized
gaagcggaugaugaaggacgucu

SEQ ID NO: 52579 - RNA, 23 nt, Artificial Sequence
  Chemically synthesized
gcuggggcccaagaucaucauug

SEQ ID NO: 52580 - RNA, 23 nt, Artificial Sequence
  Chemically synthesized
agaaagaaugcguguauuuugug

SEQ ID NO: 52581 - RNA, 23 nt, Artificial Sequence
  Chemically synthesized
aagaaagaaugcguguauuuugu

SEQ ID NO: 52582 - RNA, 23 nt, Artificial Sequence
  Chemically synthesized
ccuuguacuucagugacuucugg

SEQ ID NO: 52583 - RNA, 23 nt, Artificial Sequence
  Chemically synthesized
ggaggaguaugagcacagagcca

SEQ ID NO: 52584 - RNA, 23 nt, Artificial Sequence
  Chemically synthesized
cggaggaguaugagcacagagcc

SEQ ID NO: 52585 - RNA, 23 nt, Artificial Sequence
  Chemically synthesized
gcggaggaguaugagcacagagc

SEQ ID NO: 52586 - RNA, 23 nt, Artificial Sequence
  Chemically synthesized
ggcggaggaguaugagcacagag

SEQ ID NO: 52587 - RNA, 23 nt, Artificial Sequence
  Chemically synthesized
uggcggaggaguaugagcacaga

SEQ ID NO: 52588 - RNA, 23 nt, Artificial Sequence
  Chemically synthesized
guggauuccugaaaacaucaaga

SEQ ID NO: 52589 - RNA, 23 nt, Artificial Sequence
  Chemically synthesized
ccaacaagccugaguuugugaag

SEQ ID NO: 52590 - RNA, 23 nt, Artificial Sequence
  Chemically synthesized
uccaacaagccugaguuugugaa

SEQ ID NO: 52591 - RNA, 23 nt, Artificial Sequence
  Chemically synthesized
cuccaacaagccugaguuuguga

SEQ ID NO: 52592 - RNA, 23 nt, Artificial Sequence
  Chemically synthesized
ucuccaacaagccugaguuugug

SEQ ID NO: 52593 - RNA, 23 nt, Artificial Sequence
  Chemically synthesized
aucuccaacaagccugaguuugu

SEQ ID NO: 52594 - RNA, 23 nt, Artificial Sequence
  Chemically synthesized
agccucaguucguggauuccuga

SEQ ID NO: 52595 - RNA, 23 nt, Artificial Sequence
  Chemically synthesized
aagccucaguucguggauuccug

SEQ ID NO: 52596 - RNA, 23 nt, Artificial Sequence
  Chemically synthesized
aaagccucaguucguggauuccu

SEQ ID NO: 52597 - RNA, 23 nt, Artificial Sequence
  Chemically synthesized
gaaagccucaguucguggauucc

SEQ ID NO: 52598 - RNA, 23 nt, Artificial Sequence
  Chemically synthesized
agaaagccucaguucguggauuc

SEQ ID NO: 52599 - RNA, 23 nt, Artificial Sequence
  Chemically synthesized
ucgaguggaccaaaaagauccaa

SEQ ID NO: 52600 - RNA, 23 nt, Artificial Sequence
  Chemically synthesized
cagaccaaggaaagaggaggugu

SEQ ID NO: 52601 - RNA, 23 nt, Artificial Sequence
  Chemically synthesized
ccaggcuggagaaguucauaucg

SEQ ID NO: 52602 - RNA, 23 nt, Artificial Sequence
  Chemically synthesized
accaggcuggagaaguucauauc

SEQ ID NO: 52603 - RNA, 23 nt, Artificial Sequence
  Chemically synthesized
gaccaggcuggagaaguucauau

SEQ ID NO: 52604 - RNA, 23 nt, Artificial Sequence
  Chemically synthesized
ggaccaggcuggagaaguucaua

SEQ ID NO: 52605 - RNA, 23 nt, Artificial Sequence
  Chemically synthesized
aggaccaggcuggagaaguucau

SEQ ID NO: 52606 - RNA, 23 nt, Artificial Sequence
  Chemically synthesized
caaccacucucacuucauccucg

SEQ ID NO: 52607 - RNA, 23 nt, Artificial Sequence
  Chemically synthesized
caacaaugacaagcaagaaagcc

SEQ ID NO: 52608 - RNA, 23 nt, Artificial Sequence
  Chemically synthesized
ucuucauuuuccuaaaccugggc

SEQ ID NO: 52609 - RNA, 23 nt, Artificial Sequence
  Chemically synthesized
gucuucauuuuccuaaaccuggg

SEQ ID NO: 52610 - RNA, 23 nt, Artificial Sequence
  Chemically synthesized
agaaacauguccaggagaugcca

SEQ ID NO: 52611 - RNA, 23 nt, Artificial Sequence
  Chemically synthesized
aagaaacauguccaggagaugcc

SEQ ID NO: 52612 - RNA, 23 nt, Artificial Sequence
  Chemically synthesized
aaagaaacauguccaggagaugc

SEQ ID NO: 52613 - RNA, 23 nt, Artificial Sequence
  Chemically synthesized
caaagaaacauguccaggagaug

SEQ ID NO: 52614 - RNA, 23 nt, Artificial Sequence
  Chemically synthesized
ccaaagaaacauguccaggagau

SEQ ID NO: 52615 - RNA, 23 nt, Artificial Sequence
  Chemically synthesized
ccuucugguuuggugucaacagc

SEQ ID NO: 52616 - RNA, 23 nt, Artificial Sequence
  Chemically synthesized
gccuucugguuuggugucaacag

SEQ ID NO: 52617 - RNA, 23 nt, Artificial Sequence
  Chemically synthesized
ggccuucugguuuggugucaaca

SEQ ID NO: 52618 - RNA, 23 nt, Artificial Sequence
  Chemically synthesized
gggccuucugguuuggugucaac

SEQ ID NO: 52619 - RNA, 23 nt, Artificial Sequence
  Chemically synthesized
ggggccuucugguuuggugucaa

SEQ ID NO: 52620 - RNA, 23 nt, Artificial Sequence
  Chemically synthesized
gacaaugccuggaucgagacggu

SEQ ID NO: 52621 - RNA, 23 nt, Artificial Sequence
  Chemically synthesized
ggacaaugccuggaucgagacgg

SEQ ID NO: 52622 - RNA, 23 nt, Artificial Sequence
  Chemically synthesized
cggacaaugccuggaucgagacg

SEQ ID NO: 52623 - RNA, 23 nt, Artificial Sequence
  Chemically synthesized
acggacaaugccuggaucgagac

SEQ ID NO: 52624 - RNA, 23 nt, Artificial Sequence
  Chemically synthesized
cacggacaaugccuggaucgaga

SEQ ID NO: 52625 - RNA, 23 nt, Artificial Sequence
  Chemically synthesized
acaaaggcuacauggaugacccg

SEQ ID NO: 52626 - RNA, 23 nt, Artificial Sequence
  Chemically synthesized
uacaaaggcuacauggaugaccc

SEQ ID NO: 52627 - RNA, 23 nt, Artificial Sequence
  Chemically synthesized
guacaaaggcuacauggaugacc

SEQ ID NO: 52628 - RNA, 23 nt, Artificial Sequence
  Chemically synthesized
uguacaaaggcuacauggaugac

SEQ ID NO: 52629 - RNA, 23 nt, Artificial Sequence
  Chemically synthesized
guguacaaaggcuacauggauga

SEQ ID NO: 52630 - RNA, 23 nt, Artificial Sequence
  Chemically synthesized
gguguacaaaggcuacauggaug

SEQ ID NO: 52631 - RNA, 23 nt, Artificial Sequence
  Chemically synthesized
agguguacaaaggcuacauggau

SEQ ID NO: 52632 - RNA, 23 nt, Artificial Sequence
  Chemically synthesized
uggagguguacaaaggcuacaug

SEQ ID NO: 52633 - RNA, 23 nt, Artificial Sequence
  Chemically synthesized
auggagguguacaaaggcuacau

SEQ ID NO: 52634 - RNA, 23 nt, Artificial Sequence
  Chemically synthesized
cauggagguguacaaaggcuaca

SEQ ID NO: 52635 - RNA, 23 nt, Artificial Sequence
  Chemically synthesized
gcauggagguguacaaaggcuac

SEQ ID NO: 52636 - RNA, 23 nt, Artificial Sequence
  Chemically synthesized
ggcauggagguguacaaaggcua

SEQ ID NO: 52637 - RNA, 23 nt, Artificial Sequence
  Chemically synthesized
cggcauggagguguacaaaggcu

SEQ ID NO: 52638 - RNA, 23 nt, Artificial Sequence
  Chemically synthesized
gcggcauggagguguacaaaggc

SEQ ID NO: 52639 - RNA, 23 nt, Artificial Sequence
  Chemically synthesized
ugcggcauggagguguacaaagg

SEQ ID NO: 52640 - RNA, 23 nt, Artificial Sequence
  Chemically synthesized
gugcggcauggagguguacaaag

SEQ ID NO: 52641 - RNA, 23 nt, Artificial Sequence
  Chemically synthesized
agugcggcauggagguguacaaa

SEQ ID NO: 52642 - RNA, 23 nt, Artificial Sequence
  Chemically synthesized
gcagaagaucgaggacaucagca

SEQ ID NO: 52643 - RNA, 23 nt, Artificial Sequence
  Chemically synthesized
agcagaagaucgaggacaucagc

SEQ ID NO: 52644 - RNA, 23 nt, Artificial Sequence
  Chemically synthesized
gagcagaagaucgaggacaucag

SEQ ID NO: 52645 - RNA, 23 nt, Artificial Sequence
  Chemically synthesized
uccuccuacucugccucuaccug

SEQ ID NO: 52646 - RNA, 23 nt, Artificial Sequence
  Chemically synthesized
guccuccuacucugccucuaccu

SEQ ID NO: 52647 - RNA, 23 nt, Artificial Sequence
  Chemically synthesized
gguccuccuacucugccucuacc

SEQ ID NO: 52648 - RNA, 23 nt, Artificial Sequence
  Chemically synthesized
cgguccuccuacucugccucuac

SEQ ID NO: 52649 - RNA, 23 nt, Artificial Sequence
  Chemically synthesized
acgguccuccuacucugccucua

SEQ ID NO: 52650 - RNA, 23 nt, Artificial Sequence
  Chemically synthesized
caucaagaagaaagaaugcgugu

SEQ ID NO: 52651 - RNA, 23 nt, Artificial Sequence
  Chemically synthesized
acaucaagaagaaagaaugcgug

SEQ ID NO: 52652 - RNA, 23 nt, Artificial Sequence
  Chemically synthesized
ccucaguucguggauuccugaaa

SEQ ID NO: 52653 - RNA, 23 nt, Artificial Sequence
  Chemically synthesized
agaucuucauggaugaguggcag

SEQ ID NO: 52654 - RNA, 23 nt, Artificial Sequence
  Chemically synthesized
gagaucuucauggaugaguggca

SEQ ID NO: 52655 - RNA, 23 nt, Artificial Sequence
  Chemically synthesized
ugagaucuucauggaugaguggc

SEQ ID NO: 52656 - RNA, 23 nt, Artificial Sequence
  Chemically synthesized
acugagcguguucuuccaggaga

SEQ ID NO: 52657 - RNA, 23 nt, Artificial Sequence
  Chemically synthesized
guacauacuggaugaggauggcc

SEQ ID NO: 52658 - RNA, 23 nt, Artificial Sequence
  Chemically synthesized
aguacauacuggaugaggauggc

SEQ ID NO: 52659 - RNA, 23 nt, Artificial Sequence
  Chemically synthesized
gaguacauacuggaugaggaugg

SEQ ID NO: 52660 - RNA, 23 nt, Artificial Sequence
  Chemically synthesized
ugaucuaccaccucaugacccag

SEQ ID NO: 52661 - RNA, 23 nt, Artificial Sequence
  Chemically synthesized
gugaucuaccaccucaugaccca

SEQ ID NO: 52662 - RNA, 23 nt, Artificial Sequence
  Chemically synthesized
cgugaucuaccaccucaugaccc

SEQ ID NO: 52663 - RNA, 23 nt, Artificial Sequence
  Chemically synthesized
gcgugaucuaccaccucaugacc

SEQ ID NO: 52664 - RNA, 23 nt, Artificial Sequence
  Chemically synthesized
agcgugaucuaccaccucaugac

SEQ ID NO: 52665 - RNA, 23 nt, Artificial Sequence
  Chemically synthesized
caaauaaaguuccugacacgucc

SEQ ID NO: 52666 - RNA, 23 nt, Artificial Sequence
  Chemically synthesized
acaaauaaaguuccugacacguc

SEQ ID NO: 52667 - RNA, 23 nt, Artificial Sequence
  Chemically synthesized
cacaaauaaaguuccugacacgu

SEQ ID NO: 52668 - RNA, 23 nt, Artificial Sequence
  Chemically synthesized
ccacaaauaaaguuccugacacg

SEQ ID NO: 52669 - RNA, 23 nt, Artificial Sequence
  Chemically synthesized
uccacaaauaaaguuccugacac

SEQ ID NO: 52670 - RNA, 23 nt, Artificial Sequence
  Chemically synthesized
gcuuuccacaaauaaaguuccug

SEQ ID NO: 52671 - RNA, 23 nt, Artificial Sequence
  Chemically synthesized
ugcuuuccacaaauaaaguuccu

SEQ ID NO: 52672 - RNA, 23 nt, Artificial Sequence
  Chemically synthesized
gugcuuuccacaaauaaaguucc

SEQ ID NO: 52673 - RNA, 23 nt, Artificial Sequence
  Chemically synthesized
ugugcuuuccacaaauaaaguuc

SEQ ID NO: 52674 - RNA, 23 nt, Artificial Sequence
  Chemically synthesized
cugugcuuuccacaaauaaaguu

SEQ ID NO: 52675 - RNA, 23 nt, Artificial Sequence
  Chemically synthesized
ggagguguacaaaggcuacaugg

SEQ ID NO: 52676 - RNA, 23 nt, Artificial Sequence
  Chemically synthesized
gaaaguuccaaacugucugaugc

SEQ ID NO: 52677 - RNA, 23 nt, Artificial Sequence
  Chemically synthesized
ggaaaguuccaaacugucugaug

SEQ ID NO: 52678 - RNA, 23 nt, Artificial Sequence
  Chemically synthesized
uggaaaguuccaaacugucugau

SEQ ID NO: 52679 - RNA, 23 nt, Artificial Sequence
  Chemically synthesized
guggaaaguuccaaacugucuga

SEQ ID NO: 52680 - RNA, 23 nt, Artificial Sequence
  Chemically synthesized
uguggaaaguuccaaacugucug

SEQ ID NO: 52681 - RNA, 23 nt, Artificial Sequence
  Chemically synthesized
caagaacaagcuggagaagaacg

SEQ ID NO: 52682 - RNA, 23 nt, Artificial Sequence
  Chemically synthesized
ucaagaacaagcuggagaagaac

SEQ ID NO: 52683 - RNA, 23 nt, Artificial Sequence
  Chemically synthesized
cucaagaacaagcuggagaagaa

SEQ ID NO: 52684 - RNA, 23 nt, Artificial Sequence
  Chemically synthesized
agcacacggaccagauuuggaag

SEQ ID NO: 52685 - RNA, 23 nt, Artificial Sequence
  Chemically synthesized
gagcacacggaccagauuuggaa

SEQ ID NO: 52686 - RNA, 23 nt, Artificial Sequence
  Chemically synthesized
ggagcacacggaccagauuugga

SEQ ID NO: 52687 - RNA, 23 nt, Artificial Sequence
  Chemically synthesized
aggagcacacggaccagauuugg

SEQ ID NO: 52688 - RNA, 23 nt, Artificial Sequence
  Chemically synthesized
caggagcacacggaccagauuug

SEQ ID NO: 52689 - RNA, 23 nt, Artificial Sequence
  Chemically synthesized
gcaggagcacacggaccagauuu

SEQ ID NO: 52690 - RNA, 23 nt, Artificial Sequence
  Chemically synthesized
guguauuuuguggaaaguuccaa

SEQ ID NO: 52691 - RNA, 23 nt, Artificial Sequence
  Chemically synthesized
accacuccuaccucaccaucuuc

SEQ ID NO: 52692 - RNA, 23 nt, Artificial Sequence
  Chemically synthesized
uaccacuccuaccucaccaucuu

SEQ ID NO: 52693 - RNA, 23 nt, Artificial Sequence
  Chemically synthesized
cuaccacuccuaccucaccaucu

SEQ ID NO: 52694 - RNA, 23 nt, Artificial Sequence
  Chemically synthesized
ucuaccacuccuaccucaccauc

SEQ ID NO: 52695 - RNA, 23 nt, Artificial Sequence
  Chemically synthesized
gucuaccacuccuaccucaccau

SEQ ID NO: 52696 - RNA, 23 nt, Artificial Sequence
  Chemically synthesized
gaaagaaugcguguauuuugugg

SEQ ID NO: 52697 - RNA, 23 nt, Artificial Sequence
  Chemically synthesized
agugcgggcugaugaagaaggca

SEQ ID NO: 52698 - RNA, 23 nt, Artificial Sequence
  Chemically synthesized
gagugcgggcugaugaagaaggc

SEQ ID NO: 52699 - RNA, 23 nt, Artificial Sequence
  Chemically synthesized
cgagugcgggcugaugaagaagg

SEQ ID NO: 52700 - RNA, 23 nt, Artificial Sequence
  Chemically synthesized
acgagugcgggcugaugaagaag

SEQ ID NO: 52701 - RNA, 23 nt, Artificial Sequence
  Chemically synthesized
gacgagugcgggcugaugaagaa

SEQ ID NO: 52702 - RNA, 23 nt, Artificial Sequence
  Chemically synthesized
guggaagccuucagaucugcacc

SEQ ID NO: 52703 - RNA, 23 nt, Artificial Sequence
  Chemically synthesized
aguggaagccuucagaucugcac

SEQ ID NO: 52704 - RNA, 23 nt, Artificial Sequence
  Chemically synthesized
caguggaagccuucagaucugca

SEQ ID NO: 52705 - RNA, 23 nt, Artificial Sequence
  Chemically synthesized
aagaaagccucaguucguggauu

SEQ ID NO: 52706 - RNA, 23 nt, Artificial Sequence
  Chemically synthesized
ggaaagcaggauugucgagugga

SEQ ID NO: 52707 - RNA, 23 nt, Artificial Sequence
  Chemically synthesized
cggaaagcaggauugucgagugg

SEQ ID NO: 52708 - RNA, 23 nt, Artificial Sequence
  Chemically synthesized
acggaaagcaggauugucgagug

SEQ ID NO: 52709 - RNA, 23 nt, Artificial Sequence
  Chemically synthesized
cacggaaagcaggauugucgagu

SEQ ID NO: 52710 - RNA, 23 nt, Artificial Sequence
  Chemically synthesized
ucacggaaagcaggauugucgag

SEQ ID NO: 52711 - RNA, 23 nt, Artificial Sequence
  Chemically synthesized
uucacggaaagcaggauugucga

SEQ ID NO: 52712 - RNA, 23 nt, Artificial Sequence
  Chemically synthesized
cuuccaggagauguuugagaccu

SEQ ID NO: 52713 - RNA, 23 nt, Artificial Sequence
  Chemically synthesized
ucuuccaggagauguuugagacc

SEQ ID NO: 52714 - RNA, 23 nt, Artificial Sequence
  Chemically synthesized
uucuuccaggagauguuugagac

SEQ ID NO: 52715 - RNA, 23 nt, Artificial Sequence
  Chemically synthesized
uguucuuccaggagauguuugag

SEQ ID NO: 52716 - RNA, 23 nt, Artificial Sequence
  Chemically synthesized
guguucuuccaggagauguuuga

SEQ ID NO: 52717 - RNA, 23 nt, Artificial Sequence
  Chemically synthesized
cguguucuuccaggagauguuug

SEQ ID NO: 52718 - RNA, 23 nt, Artificial Sequence
  Chemically synthesized
gaaguucauaucggagcagacca

SEQ ID NO: 52719 - RNA, 23 nt, Artificial Sequence
  Chemically synthesized
agaaguucauaucggagcagacc

SEQ ID NO: 52720 - RNA, 23 nt, Artificial Sequence
  Chemically synthesized
gagaaguucauaucggagcagac

SEQ ID NO: 52721 - RNA, 23 nt, Artificial Sequence
  Chemically synthesized
ggagaaguucauaucggagcaga

SEQ ID NO: 52722 - RNA, 23 nt, Artificial Sequence
  Chemically synthesized
uggagaaguucauaucggagcag

SEQ ID NO: 52723 - RNA, 23 nt, Artificial Sequence
  Chemically synthesized
cugaaacuggcaguggcauggaa

SEQ ID NO: 52724 - RNA, 23 nt, Artificial Sequence
  Chemically synthesized
ugaaacuggcaguggcauggaau

SEQ ID NO: 52725 - RNA, 23 nt, Artificial Sequence
  Chemically synthesized
ggauugucgaguggaccaaaaag

SEQ ID NO: 52726 - RNA, 23 nt, Artificial Sequence
  Chemically synthesized
gcaagaaagccucaguucgugga

SEQ ID NO: 52727 - RNA, 23 nt, Artificial Sequence
  Chemically synthesized
ccaucugcaggaagagcauaaag

SEQ ID NO: 52728 - RNA, 23 nt, Artificial Sequence
  Chemically synthesized
gaaacuggcaguggcauggaauc

SEQ ID NO: 52729 - RNA, 23 nt, Artificial Sequence
  Chemically synthesized
caggauugucgaguggaccaaaa

SEQ ID NO: 52730 - RNA, 23 nt, Artificial Sequence
  Chemically synthesized
aaggaaagaggagguguggccau

SEQ ID NO: 52731 - RNA, 23 nt, Artificial Sequence
  Chemically synthesized
cccaucagcucccugucuucauu

SEQ ID NO: 52732 - RNA, 23 nt, Artificial Sequence
  Chemically synthesized
gguuuggugucaacagcucacag

SEQ ID NO: 52733 - RNA, 23 nt, Artificial Sequence
  Chemically synthesized
cuacauggaugacccgaggaaca

SEQ ID NO: 52734 - RNA, 23 nt, Artificial Sequence
  Chemically synthesized
aagaaugcguguauuuuguggaa

SEQ ID NO: 52735 - RNA, 23 nt, Artificial Sequence
  Chemically synthesized
acauccucuccuacuucgccuuc

SEQ ID NO: 52736 - RNA, 23 nt, Artificial Sequence
  Chemically synthesized
cugguuuggugucaacagcucac

SEQ ID NO: 52737 - RNA, 23 nt, Artificial Sequence
  Chemically synthesized
ucauggaugaguggcaguggaag

SEQ ID NO: 52738 - RNA, 23 nt, Artificial Sequence
  Chemically synthesized
aggauugucgaguggaccaaaaa

SEQ ID NO: 52739 - RNA, 23 nt, Artificial Sequence
  Chemically synthesized
caagaaagccucaguucguggau

SEQ ID NO: 52740 - RNA, 23 nt, Artificial Sequence
  Chemically synthesized
ggcuggagaaguucauaucggag

SEQ ID NO: 52741 - RNA, 23 nt, Artificial Sequence
  Chemically synthesized
gcaauaagguugacgccauggug

SEQ ID NO: 52742 - RNA, 23 nt, Artificial Sequence
  Chemically synthesized
agauuuggaaguuccagcgccau

SEQ ID NO: 52743 - RNA, 23 nt, Artificial Sequence
  Chemically synthesized
gacauugcccgcagugagaucuu

SEQ ID NO: 52744 - RNA, 23 nt, Artificial Sequence
  Chemically synthesized
ccaucuugcaggccuugcugaaa

SEQ ID NO: 52745 - RNA, 23 nt, Artificial Sequence
  Chemically synthesized
acccaucagcucccugucuucau

SEQ ID NO: 52746 - RNA, 23 nt, Artificial Sequence
  Chemically synthesized
gaacgugguaaaacccaagacau

SEQ ID NO: 52747 - RNA, 23 nt, Artificial Sequence
  Chemically synthesized
ggaacgugguaaaacccaagaca

SEQ ID NO: 52748 - RNA, 23 nt, Artificial Sequence
  Chemically synthesized
cugaaggaguuugucaccuggga

SEQ ID NO: 52749 - RNA, 23 nt, Artificial Sequence
  Chemically synthesized
uuccugaucuaugacccacccuu

SEQ ID NO: 52750 - RNA, 23 nt, Artificial Sequence
  Chemically synthesized
gcucccugucuucauuuuccuaa

SEQ ID NO: 52751 - RNA, 23 nt, Artificial Sequence
  Chemically synthesized
ccugaucuaugacccacccuuuu

SEQ ID NO: 52752 - RNA, 23 nt, Artificial Sequence
  Chemically synthesized
gggagacggaguuccugaucuau

SEQ ID NO: 52753 - RNA, 23 nt, Artificial Sequence
  Chemically synthesized
cucugucuuccaccugacccaaa

SEQ ID NO: 52754 - RNA, 23 nt, Artificial Sequence
  Chemically synthesized
ccagaaccgacaguuccagcaaa

SEQ ID NO: 52755 - RNA, 23 nt, Artificial Sequence
  Chemically synthesized
gcucaugcacauuuuuaccauca

SEQ ID NO: 52756 - RNA, 23 nt, Artificial Sequence
  Chemically synthesized
cccaaguuucuccucugacccau

SEQ ID NO: 52757 - RNA, 23 nt, Artificial Sequence
  Chemically synthesized
ggagacggaguuccugaucuaug

SEQ ID NO: 52758 - RNA, 23 nt, Artificial Sequence
  Chemically synthesized
ccauguucaacuacaccuuccag

SEQ ID NO: 52759 - RNA, 23 nt, Artificial Sequence
  Chemically synthesized
cucucuggacuucauccuguucu

SEQ ID NO: 52760 - RNA, 23 nt, Artificial Sequence
  Chemically synthesized
ccugagccagaaggugaaaaagu

SEQ ID NO: 52761 - RNA, 23 nt, Artificial Sequence
  Chemically synthesized
ccaucagcucccugucuucauuu

SEQ ID NO: 52762 - RNA, 23 nt, Artificial Sequence
  Chemically synthesized
ccaaguuucuccucugacccauc

SEQ ID NO: 52763 - RNA, 23 nt, Artificial Sequence
  Chemically synthesized
gcacacagugggacccaaagaaa

SEQ ID NO: 52764 - RNA, 23 nt, Artificial Sequence
  Chemically synthesized
ugaaaacuugcugaagugcggca

SEQ ID NO: 52765 - RNA, 23 nt, Artificial Sequence
  Chemically synthesized
cgauccaguacaacgugguggau

SEQ ID NO: 52766 - RNA, 23 nt, Artificial Sequence
  Chemically synthesized
ccuccggcucaugcacauuuuua

SEQ ID NO: 52767 - RNA, 23 nt, Artificial Sequence
  Chemically synthesized
aggucauuggccugaggcaaguu

SEQ ID NO: 52768 - RNA, 23 nt, Artificial Sequence
  Chemically synthesized
gccaucugcaggaagagcauaaa

SEQ ID NO: 52769 - RNA, 23 nt, Artificial Sequence
  Chemically synthesized
cugaucuaugacccacccuuuua

SEQ ID NO: 52770 - RNA, 23 nt, Artificial Sequence
  Chemically synthesized
ugaaggagaacuaccuccagaac

SEQ ID NO: 52771 - RNA, 23 nt, Artificial Sequence
  Chemically synthesized
cgccauguucaacuacaccuucc

SEQ ID NO: 52772 - RNA, 23 nt, Artificial Sequence
  Chemically synthesized
ccucaucgccauguucaacuaca

SEQ ID NO: 52773 - RNA, 23 nt, Artificial Sequence
  Chemically synthesized
acgucuucuucuuccucuuccug

SEQ ID NO: 52774 - RNA, 23 nt, Artificial Sequence
  Chemically synthesized
acgaugacagcugcacucaucuc

SEQ ID NO: 52775 - RNA, 23 nt, Artificial Sequence
  Chemically synthesized
cgaguggaccaaaaagauccaag

SEQ ID NO: 52776 - RNA, 23 nt, Artificial Sequence
  Chemically synthesized
caaguuucuccucugacccauca

SEQ ID NO: 52777 - RNA, 23 nt, Artificial Sequence
  Chemically synthesized
gcucauccaccauggaggucauu

SEQ ID NO: 52778 - RNA, 23 nt, Artificial Sequence
  Chemically synthesized
ggagaucuaccugaaggagaacu

SEQ ID NO: 52779 - RNA, 23 nt, Artificial Sequence
  Chemically synthesized
caagaggcacaagcagcucaaga

SEQ ID NO: 52780 - RNA, 23 nt, Artificial Sequence
  Chemically synthesized
gccauguucaacuacaccuucca

SEQ ID NO: 52781 - RNA, 23 nt, Artificial Sequence
  Chemically synthesized
ucgccauguucaacuacaccuuc

SEQ ID NO: 52782 - RNA, 23 nt, Artificial Sequence
  Chemically synthesized
caagaccacuuuggccacgagaa

SEQ ID NO: 52783 - RNA, 23 nt, Artificial Sequence
  Chemically synthesized
gcaggauugucgaguggaccaaa

SEQ ID NO: 52784 - RNA, 23 nt, Artificial Sequence
  Chemically synthesized
cauaucggagcagaccaaggaaa

SEQ ID NO: 52785 - RNA, 23 nt, Artificial Sequence
  Chemically synthesized
gccuccggcucaugcacauuuuu

SEQ ID NO: 52786 - RNA, 23 nt, Artificial Sequence
  Chemically synthesized
ucaucuccaacaagccugaguuu

SEQ ID NO: 52787 - RNA, 23 nt, Artificial Sequence
  Chemically synthesized
gccucaguucguggauuccugaa

SEQ ID NO: 52788 - RNA, 23 nt, Artificial Sequence
  Chemically synthesized
gaaagaggagguguggccaucaa

SEQ ID NO: 52789 - RNA, 23 nt, Artificial Sequence
  Chemically synthesized
ucauaucggagcagaccaaggaa

SEQ ID NO: 52790 - RNA, 23 nt, Artificial Sequence
  Chemically synthesized
cucuucugugcuuuccacaaaua

SEQ ID NO: 52791 - RNA, 23 nt, Artificial Sequence
  Chemically synthesized
ccaagacauuaaaucugccaucu

SEQ ID NO: 52792 - RNA, 23 nt, Artificial Sequence
  Chemically synthesized
gaacuccugacugucaggauaaa

SEQ ID NO: 52793 - RNA, 23 nt, Artificial Sequence
  Chemically synthesized
gagaugcuaccucggaagcugaa

SEQ ID NO: 52794 - RNA, 23 nt, Artificial Sequence
  Chemically synthesized
gagccaucugcaggaagagcaua

SEQ ID NO: 52795 - RNA, 23 nt, Artificial Sequence
  Chemically synthesized
uccugaucuaugacccacccuuu

SEQ ID NO: 52796 - RNA, 23 nt, Artificial Sequence
  Chemically synthesized
gucauccucucucuggacuucau

SEQ ID NO: 52797 - RNA, 23 nt, Artificial Sequence
  Chemically synthesized
gugguggucuuccaccugaacau

SEQ ID NO: 52798 - RNA, 23 nt, Artificial Sequence
  Chemically synthesized
ggugcagcugaaggaguuuguca

SEQ ID NO: 52799 - RNA, 23 nt, Artificial Sequence
  Chemically synthesized
agcagaaacugagcguguucuuc

SEQ ID NO: 52800 - RNA, 23 nt, Artificial Sequence
  Chemically synthesized
caacagcagccucuucaagagcu

SEQ ID NO: 52801 - RNA, 23 nt, Artificial Sequence
  Chemically synthesized
ccuagacagcaaccacucucacu

SEQ ID NO: 52802 - RNA, 23 nt, Artificial Sequence
  Chemically synthesized
caagacauuaaaucugccaucuc

SEQ ID NO: 52803 - RNA, 23 nt, Artificial Sequence
  Chemically synthesized
cccaagacauuaaaucugccauc

SEQ ID NO: 52804 - RNA, 23 nt, Artificial Sequence
  Chemically synthesized
acccaagacauuaaaucugccau

SEQ ID NO: 52805 - RNA, 23 nt, Artificial Sequence
  Chemically synthesized
gggaacgugguaaaacccaagac

SEQ ID NO: 52806 - RNA, 23 nt, Artificial Sequence
  Chemically synthesized
cacacagugggacccaaagaaac

SEQ ID NO: 52807 - RNA, 23 nt, Artificial Sequence
  Chemically synthesized
gcacugucugaacuccugacugu

SEQ ID NO: 52808 - RNA, 23 nt, Artificial Sequence
  Chemically synthesized
agccaucugcaggaagagcauaa

SEQ ID NO: 52809 - RNA, 23 nt, Artificial Sequence
  Chemically synthesized
cagaaccgacaguuccagcaaaa

SEQ ID NO: 52810 - RNA, 23 nt, Artificial Sequence
  Chemically synthesized
acacggaccagauuuggaaguuc

SEQ ID NO: 52811 - RNA, 23 nt, Artificial Sequence
  Chemically synthesized
gcacacggaccagauuuggaagu

SEQ ID NO: 52812 - RNA, 23 nt, Artificial Sequence
  Chemically synthesized
ccggcucaugcacauuuuuacca

SEQ ID NO: 52813 - RNA, 23 nt, Artificial Sequence
  Chemically synthesized
ucauuugggccauuguccagaac

SEQ ID NO: 52814 - RNA, 23 nt, Artificial Sequence
  Chemically synthesized
aguggaccaaaaagauccaagau

SEQ ID NO: 52815 - RNA, 23 nt, Artificial Sequence
  Chemically synthesized
ccagcagaaacugagcguguucu

SEQ ID NO: 52816 - RNA, 23 nt, Artificial Sequence
  Chemically synthesized
gccugucucggacaucacuaucu

SEQ ID NO: 52817 - RNA, 23 nt, Artificial Sequence
  Chemically synthesized
cuagacagcaaccacucucacuu

SEQ ID NO: 52818 - RNA, 23 nt, Artificial Sequence
  Chemically synthesized
aggagaugccaaccgaugccuuu

SEQ ID NO: 52819 - RNA, 23 nt, Artificial Sequence
  Chemically synthesized
aacgugguaaaacccaagacauu

SEQ ID NO: 52820 - RNA, 23 nt, Artificial Sequence
  Chemically synthesized
gagguguacaaaggcuacaugga

SEQ ID NO: 52821 - RNA, 23 nt, Artificial Sequence
  Chemically synthesized
gcuauccugggagaucuaccuga

SEQ ID NO: 52822 - RNA, 23 nt, Artificial Sequence
  Chemically synthesized
guacuucagugacuucuggaaua

SEQ ID NO: 52823 - RNA, 23 nt, Artificial Sequence
  Chemically synthesized
uuucuugcuugucauuguugccg

SEQ ID NO: 52824 - RNA, 23 nt, Artificial Sequence
  Chemically synthesized
uucuugcuugucauuguugccga

SEQ ID NO: 52825 - RNA, 23 nt, Artificial Sequence
  Chemically synthesized
ucuugcuugucauuguugccgaa

SEQ ID NO: 52826 - RNA, 23 nt, Artificial Sequence
  Chemically synthesized
cuugcuugucauuguugccgaag

SEQ ID NO: 52827 - RNA, 23 nt, Artificial Sequence
  Chemically synthesized
uugcuugucauuguugccgaagg

SEQ ID NO: 52828 - RNA, 23 nt, Artificial Sequence
  Chemically synthesized
ccgcuucacaaugaugaucuugg

SEQ ID NO: 52829 - RNA, 23 nt, Artificial Sequence
  Chemically synthesized
cgcuucacaaugaugaucuuggg

SEQ ID NO: 52830 - RNA, 23 nt, Artificial Sequence
  Chemically synthesized
gcuucacaaugaugaucuugggc

SEQ ID NO: 52831 - RNA, 23 nt, Artificial Sequence
  Chemically synthesized
cuucacaaugaugaucuugggcc

SEQ ID NO: 52832 - RNA, 23 nt, Artificial Sequence
  Chemically synthesized
uucacaaugaugaucuugggccc

SEQ ID NO: 52833 - RNA, 23 nt, Artificial Sequence
  Chemically synthesized
gaaguaggagaggauguucaggu

SEQ ID NO: 52834 - RNA, 23 nt, Artificial Sequence
  Chemically synthesized
aaguaggagaggauguucaggug

SEQ ID NO: 52835 - RNA, 23 nt, Artificial Sequence
  Chemically synthesized
aguaggagaggauguucaggugg

SEQ ID NO: 52836 - RNA, 23 nt, Artificial Sequence
  Chemically synthesized
guaggagaggauguucaggugga

SEQ ID NO: 52837 - RNA, 23 nt, Artificial Sequence
  Chemically synthesized
uaggagaggauguucagguggaa

SEQ ID NO: 52838 - RNA, 23 nt, Artificial Sequence
  Chemically synthesized
cagcuuguucuugagcugcuugu

SEQ ID NO: 52839 - RNA, 23 nt, Artificial Sequence
  Chemically synthesized
agcuuguucuugagcugcuugug

SEQ ID NO: 52840 - RNA, 23 nt, Artificial Sequence
  Chemically synthesized
gcuuguucuugagcugcuugugc

SEQ ID NO: 52841 - RNA, 23 nt, Artificial Sequence
  Chemically synthesized
cuuguucuugagcugcuugugcc

SEQ ID NO: 52842 - RNA, 23 nt, Artificial Sequence
  Chemically synthesized
uuguucuugagcugcuugugccu

SEQ ID NO: 52843 - RNA, 23 nt, Artificial Sequence
  Chemically synthesized
ucuuacugaugguaaaaaugugc

SEQ ID NO: 52844 - RNA, 23 nt, Artificial Sequence
  Chemically synthesized
cuuacugaugguaaaaaugugca

SEQ ID NO: 52845 - RNA, 23 nt, Artificial Sequence
  Chemically synthesized
uuacugaugguaaaaaugugcau

SEQ ID NO: 52846 - RNA, 23 nt, Artificial Sequence
  Chemically synthesized
uacugaugguaaaaaugugcaug

SEQ ID NO: 52847 - RNA, 23 nt, Artificial Sequence
  Chemically synthesized
acugaugguaaaaaugugcauga

SEQ ID NO: 52848 - RNA, 23 nt, Artificial Sequence
  Chemically synthesized
cucguacagguagagcaaggugu

SEQ ID NO: 52849 - RNA, 23 nt, Artificial Sequence
  Chemically synthesized
ucguacagguagagcaagguguc

SEQ ID NO: 52850 - RNA, 23 nt, Artificial Sequence
  Chemically synthesized
cguacagguagagcaaggugucc

SEQ ID NO: 52851 - RNA, 23 nt, Artificial Sequence
  Chemically synthesized
guacagguagagcaagguguccc

SEQ ID NO: 52852 - RNA, 23 nt, Artificial Sequence
  Chemically synthesized
uacagguagagcaagguguccca

SEQ ID NO: 52853 - RNA, 23 nt, Artificial Sequence
  Chemically synthesized
cuggaucagggagauagugaugu

SEQ ID NO: 52854 - RNA, 23 nt, Artificial Sequence
  Chemically synthesized
uggaucagggagauagugauguc

SEQ ID NO: 52855 - RNA, 23 nt, Artificial Sequence
  Chemically synthesized
ggaucagggagauagugaugucc

SEQ ID NO: 52856 - RNA, 23 nt, Artificial Sequence
  Chemically synthesized
gaucagggagauagugauguccg

SEQ ID NO: 52857 - RNA, 23 nt, Artificial Sequence
  Chemically synthesized
aucagggagauagugauguccga

SEQ ID NO: 52858 - RNA, 23 nt, Artificial Sequence
  Chemically synthesized
gggcauucacgugguagcugucg

SEQ ID NO: 52859 - RNA, 23 nt, Artificial Sequence
  Chemically synthesized
ggcauucacgugguagcugucgc

SEQ ID NO: 52860 - RNA, 23 nt, Artificial Sequence
  Chemically synthesized
gcauucacgugguagcugucgcc

SEQ ID NO: 52861 - RNA, 23 nt, Artificial Sequence
  Chemically synthesized
cauucacgugguagcugucgccc

SEQ ID NO: 52862 - RNA, 23 nt, Artificial Sequence
  Chemically synthesized
auucacgugguagcugucgcccg

SEQ ID NO: 52863 - RNA, 23 nt, Artificial Sequence
  Chemically synthesized
ggcgaaguaggagaggauguuca

SEQ ID NO: 52864 - RNA, 23 nt, Artificial Sequence
  Chemically synthesized
gcgaaguaggagaggauguucag

SEQ ID NO: 52865 - RNA, 23 nt, Artificial Sequence
  Chemically synthesized
cgaaguaggagaggauguucagg

SEQ ID NO: 52866 - RNA, 23 nt, Artificial Sequence
  Chemically synthesized
agacacaaacuucauguccuugg

SEQ ID NO: 52867 - RNA, 23 nt, Artificial Sequence
  Chemically synthesized
gacacaaacuucauguccuuggc

SEQ ID NO: 52868 - RNA, 23 nt, Artificial Sequence
  Chemically synthesized
acacaaacuucauguccuuggcc

SEQ ID NO: 52869 - RNA, 23 nt, Artificial Sequence
  Chemically synthesized
cacaaacuucauguccuuggccu

SEQ ID NO: 52870 - RNA, 23 nt, Artificial Sequence
  Chemically synthesized
acaaacuucauguccuuggccuc

SEQ ID NO: 52871 - RNA, 23 nt, Artificial Sequence
  Chemically synthesized
cuuguuggagaugagugcagcug

SEQ ID NO: 52872 - RNA, 23 nt, Artificial Sequence
  Chemically synthesized
uuguuggagaugagugcagcugu

SEQ ID NO: 52873 - RNA, 23 nt, Artificial Sequence
  Chemically synthesized
uguuggagaugagugcagcuguc

SEQ ID NO: 52874 - RNA, 23 nt, Artificial Sequence
  Chemically synthesized
guuggagaugagugcagcuguca

SEQ ID NO: 52875 - RNA, 23 nt, Artificial Sequence
  Chemically synthesized
uuggagaugagugcagcugucau

SEQ ID NO: 52876 - RNA, 23 nt, Artificial Sequence
  Chemically synthesized
auccaugaagaucucacugcggg

SEQ ID NO: 52877 - RNA, 23 nt, Artificial Sequence
  Chemically synthesized
uccaugaagaucucacugcgggc

SEQ ID NO: 52878 - RNA, 23 nt, Artificial Sequence
  Chemically synthesized
ccaugaagaucucacugcgggca

SEQ ID NO: 52879 - RNA, 23 nt, Artificial Sequence
  Chemically synthesized
caugaagaucucacugcgggcaa

SEQ ID NO: 52880 - RNA, 23 nt, Artificial Sequence
  Chemically synthesized
augaagaucucacugcgggcaau

SEQ ID NO: 52881 - RNA, 23 nt, Artificial Sequence
  Chemically synthesized
gcucuugaagaggcugcuguugc

SEQ ID NO: 52882 - RNA, 23 nt, Artificial Sequence
  Chemically synthesized
cucuugaagaggcugcuguugcu

SEQ ID NO: 52883 - RNA, 23 nt, Artificial Sequence
  Chemically synthesized
ucuugaagaggcugcuguugcug

SEQ ID NO: 52884 - RNA, 23 nt, Artificial Sequence
  Chemically synthesized
cuugaagaggcugcuguugcugc

SEQ ID NO: 52885 - RNA, 23 nt, Artificial Sequence
  Chemically synthesized
uugaagaggcugcuguugcugcg

SEQ ID NO: 52886 - RNA, 23 nt, Artificial Sequence
  Chemically synthesized
cagcaucuucuuuaugcucuucc

SEQ ID NO: 52887 - RNA, 23 nt, Artificial Sequence
  Chemically synthesized
agcaucuucuuuaugcucuuccu

SEQ ID NO: 52888 - RNA, 23 nt, Artificial Sequence
  Chemically synthesized
gcaucuucuuuaugcucuuccug

SEQ ID NO: 52889 - RNA, 23 nt, Artificial Sequence
  Chemically synthesized
caucuucuuuaugcucuuccugc

SEQ ID NO: 52890 - RNA, 23 nt, Artificial Sequence
  Chemically synthesized
aucuucuuuaugcucuuccugca

SEQ ID NO: 52891 - RNA, 23 nt, Artificial Sequence
  Chemically synthesized
acugggguucuagagacacaugg

SEQ ID NO: 52892 - RNA, 23 nt, Artificial Sequence
  Chemically synthesized
cugggguucuagagacacauggg

SEQ ID NO: 52893 - RNA, 23 nt, Artificial Sequence
  Chemically synthesized
ugggguucuagagacacaugggg

SEQ ID NO: 52894 - RNA, 23 nt, Artificial Sequence
  Chemically synthesized
gggguucuagagacacauggggu

SEQ ID NO: 52895 - RNA, 23 nt, Artificial Sequence
  Chemically synthesized
ggguucuagagacacauggggug

SEQ ID NO: 52896 - RNA, 23 nt, Artificial Sequence
  Chemically synthesized
aaccuuauugcugauguccucga

SEQ ID NO: 52897 - RNA, 23 nt, Artificial Sequence
  Chemically synthesized
accuuauugcugauguccucgau

SEQ ID NO: 52898 - RNA, 23 nt, Artificial Sequence
  Chemically synthesized
ccuuauugcugauguccucgauc

SEQ ID NO: 52899 - RNA, 23 nt, Artificial Sequence
  Chemically synthesized
cuuauugcugauguccucgaucu

SEQ ID NO: 52900 - RNA, 23 nt, Artificial Sequence
  Chemically synthesized
uuauugcugauguccucgaucuu

SEQ ID NO: 52901 - RNA, 23 nt, Artificial Sequence
  Chemically synthesized
aggcuuguuggagaugagugcag

SEQ ID NO: 52902 - RNA, 23 nt, Artificial Sequence
  Chemically synthesized
ggcuuguuggagaugagugcagc

SEQ ID NO: 52903 - RNA, 23 nt, Artificial Sequence
  Chemically synthesized
gcuuguuggagaugagugcagcu

SEQ ID NO: 52904 - RNA, 23 nt, Artificial Sequence
  Chemically synthesized
cucauccaugaagaucucacugc

SEQ ID NO: 52905 - RNA, 23 nt, Artificial Sequence
  Chemically synthesized
ucauccaugaagaucucacugcg

SEQ ID NO: 52906 - RNA, 23 nt, Artificial Sequence
  Chemically synthesized
cauccaugaagaucucacugcgg

SEQ ID NO: 52907 - RNA, 23 nt, Artificial Sequence
  Chemically synthesized
aaacaucuccuggaagaacacgc

SEQ ID NO: 52908 - RNA, 23 nt, Artificial Sequence
  Chemically synthesized
aacaucuccuggaagaacacgcu

SEQ ID NO: 52909 - RNA, 23 nt, Artificial Sequence
  Chemically synthesized
acaucuccuggaagaacacgcuc

SEQ ID NO: 52910 - RNA, 23 nt, Artificial Sequence
  Chemically synthesized
caucuccuggaagaacacgcuca

SEQ ID NO: 52911 - RNA, 23 nt, Artificial Sequence
  Chemically synthesized
aucuccuggaagaacacgcucag

SEQ ID NO: 52912 - RNA, 23 nt, Artificial Sequence
  Chemically synthesized
cagguuuaggaaaaugaagacag

SEQ ID NO: 52913 - RNA, 23 nt, Artificial Sequence
  Chemically synthesized
agguuuaggaaaaugaagacagg

SEQ ID NO: 52914 - RNA, 23 nt, Artificial Sequence
  Chemically synthesized
gguuuaggaaaaugaagacaggg

SEQ ID NO: 52915 - RNA, 23 nt, Artificial Sequence
  Chemically synthesized
guuuaggaaaaugaagacaggga

SEQ ID NO: 52916 - RNA, 23 nt, Artificial Sequence
  Chemically synthesized
uuuaggaaaaugaagacagggag

SEQ ID NO: 52917 - RNA, 23 nt, Artificial Sequence
  Chemically synthesized
caccacguuguacuggaucgugg

SEQ ID NO: 52918 - RNA, 23 nt, Artificial Sequence
  Chemically synthesized
accacguuguacuggaucgugga

SEQ ID NO: 52919 - RNA, 23 nt, Artificial Sequence
  Chemically synthesized
ccacguuguacuggaucguggac

SEQ ID NO: 52920 - RNA, 23 nt, Artificial Sequence
  Chemically synthesized
cacguuguacuggaucguggaca

SEQ ID NO: 52921 - RNA, 23 nt, Artificial Sequence
  Chemically synthesized
acguuguacuggaucguggacag

SEQ ID NO: 52922 - RNA, 23 nt, Artificial Sequence
  Chemically synthesized
cggguugaaguucacaccgucga

SEQ ID NO: 52923 - RNA, 23 nt, Artificial Sequence
  Chemically synthesized
ggguugaaguucacaccgucgau

SEQ ID NO: 52924 - RNA, 23 nt, Artificial Sequence
  Chemically synthesized
gguugaaguucacaccgucgaug

SEQ ID NO: 52925 - RNA, 23 nt, Artificial Sequence
  Chemically synthesized
guugaaguucacaccgucgaugu

SEQ ID NO: 52926 - RNA, 23 nt, Artificial Sequence
  Chemically synthesized
uugaaguucacaccgucgaugua

SEQ ID NO: 52927 - RNA, 23 nt, Artificial Sequence
  Chemically synthesized
gaagaagacguccuucaucaucc

SEQ ID NO: 52928 - RNA, 23 nt, Artificial Sequence
  Chemically synthesized
aagaagacguccuucaucauccg

SEQ ID NO: 52929 - RNA, 23 nt, Artificial Sequence
  Chemically synthesized
agaagacguccuucaucauccgc

SEQ ID NO: 52930 - RNA, 23 nt, Artificial Sequence
  Chemically synthesized
gaagacguccuucaucauccgcu

SEQ ID NO: 52931 - RNA, 23 nt, Artificial Sequence
  Chemically synthesized
aagacguccuucaucauccgcuu

SEQ ID NO: 52932 - RNA, 23 nt, Artificial Sequence
  Chemically synthesized
gucuuacugaugguaaaaaugug

SEQ ID NO: 52933 - RNA, 23 nt, Artificial Sequence
  Chemically synthesized
gcuuucuugcuugucauuguugc

SEQ ID NO: 52934 - RNA, 23 nt, Artificial Sequence
  Chemically synthesized
cuuucuugcuugucauuguugcc

SEQ ID NO: 52935 - RNA, 23 nt, Artificial Sequence
  Chemically synthesized
caaccuuauugcugauguccucg

SEQ ID NO: 52936 - RNA, 23 nt, Artificial Sequence
  Chemically synthesized
guugaacauggcgaugaggaggu

SEQ ID NO: 52937 - RNA, 23 nt, Artificial Sequence
  Chemically synthesized
uugaacauggcgaugaggagguu

SEQ ID NO: 52938 - RNA, 23 nt, Artificial Sequence
  Chemically synthesized
ugaacauggcgaugaggagguug

SEQ ID NO: 52939 - RNA, 23 nt, Artificial Sequence
  Chemically synthesized
gaacauggcgaugaggagguuga

SEQ ID NO: 52940 - RNA, 23 nt, Artificial Sequence
  Chemically synthesized
aacauggcgaugaggagguugag

SEQ ID NO: 52941 - RNA, 23 nt, Artificial Sequence
  Chemically synthesized
ucacaaugaugaucuugggcccc

SEQ ID NO: 52942 - RNA, 23 nt, Artificial Sequence
  Chemically synthesized
caaaauacacgcauucuuucuuc

SEQ ID NO: 52943 - RNA, 23 nt, Artificial Sequence
  Chemically synthesized
aaaauacacgcauucuuucuucu

SEQ ID NO: 52944 - RNA, 23 nt, Artificial Sequence
  Chemically synthesized
aaauacacgcauucuuucuucuu

SEQ ID NO: 52945 - RNA, 23 nt, Artificial Sequence
  Chemically synthesized
aauacacgcauucuuucuucuug

SEQ ID NO: 52946 - RNA, 23 nt, Artificial Sequence
  Chemically synthesized
auacacgcauucuuucuucuuga

SEQ ID NO: 52947 - RNA, 23 nt, Artificial Sequence
  Chemically synthesized
aggagaggauguucagguggaag

SEQ ID NO: 52948 - RNA, 23 nt, Artificial Sequence
  Chemically synthesized
caaacuucauguccuuggccucc

SEQ ID NO: 52949 - RNA, 23 nt, Artificial Sequence
  Chemically synthesized
ccgugaaggucucaaacaucucc

SEQ ID NO: 52950 - RNA, 23 nt, Artificial Sequence
  Chemically synthesized
cgugaaggucucaaacaucuccu

SEQ ID NO: 52951 - RNA, 23 nt, Artificial Sequence
  Chemically synthesized
gugaaggucucaaacaucuccug

SEQ ID NO: 52952 - RNA, 23 nt, Artificial Sequence
  Chemically synthesized
ugaaggucucaaacaucuccugg

SEQ ID NO: 52953 - RNA, 23 nt, Artificial Sequence
  Chemically synthesized
gaaggucucaaacaucuccugga

SEQ ID NO: 52954 - RNA, 23 nt, Artificial Sequence
  Chemically synthesized
aaggucucaaacaucuccuggaa

SEQ ID NO: 52955 - RNA, 23 nt, Artificial Sequence
  Chemically synthesized
gaggaugaagugagagugguugc

SEQ ID NO: 52956 - RNA, 23 nt, Artificial Sequence
  Chemically synthesized
aggaugaagugagagugguugcu

SEQ ID NO: 52957 - RNA, 23 nt, Artificial Sequence
  Chemically synthesized
ggaugaagugagagugguugcug

SEQ ID NO: 52958 - RNA, 23 nt, Artificial Sequence
  Chemically synthesized
gaugaagugagagugguugcugu

SEQ ID NO: 52959 - RNA, 23 nt, Artificial Sequence
  Chemically synthesized
augaagugagagugguugcuguc

SEQ ID NO: 52960 - RNA, 23 nt, Artificial Sequence
  Chemically synthesized
ucggacguacuuuuucaccuucu

SEQ ID NO: 52961 - RNA, 23 nt, Artificial Sequence
  Chemically synthesized
cggacguacuuuuucaccuucug

SEQ ID NO: 52962 - RNA, 23 nt, Artificial Sequence
  Chemically synthesized
ggacguacuuuuucaccuucugg

SEQ ID NO: 52963 - RNA, 23 nt, Artificial Sequence
  Chemically synthesized
gacguacuuuuucaccuucuggc

SEQ ID NO: 52964 - RNA, 23 nt, Artificial Sequence
  Chemically synthesized
acguacuuuuucaccuucuggcu

SEQ ID NO: 52965 - RNA, 23 nt, Artificial Sequence
  Chemically synthesized
ccccuuccucacagacauaggcc

SEQ ID NO: 52966 - RNA, 23 nt, Artificial Sequence
  Chemically synthesized
cccuuccucacagacauaggccu

SEQ ID NO: 52967 - RNA, 23 nt, Artificial Sequence
  Chemically synthesized
ccuuccucacagacauaggccug

SEQ ID NO: 52968 - RNA, 23 nt, Artificial Sequence
  Chemically synthesized
cuuccucacagacauaggccuga

SEQ ID NO: 52969 - RNA, 23 nt, Artificial Sequence
  Chemically synthesized
uuccucacagacauaggccugag

SEQ ID NO: 52970 - RNA, 23 nt, Artificial Sequence
  Chemically synthesized
gcacuucagcaaguuuucaaaag

SEQ ID NO: 52971 - RNA, 23 nt, Artificial Sequence
  Chemically synthesized
cacuucagcaaguuuucaaaaga

SEQ ID NO: 52972 - RNA, 23 nt, Artificial Sequence
  Chemically synthesized
acuucagcaaguuuucaaaagac

SEQ ID NO: 52973 - RNA, 23 nt, Artificial Sequence
  Chemically synthesized
cuucagcaaguuuucaaaagacg

SEQ ID NO: 52974 - RNA, 23 nt, Artificial Sequence
  Chemically synthesized
uucagcaaguuuucaaaagacgg

SEQ ID NO: 52975 - RNA, 23 nt, Artificial Sequence
  Chemically synthesized
ucuucuuuaugcucuuccugcag

SEQ ID NO: 52976 - RNA, 23 nt, Artificial Sequence
  Chemically synthesized
cuucuuuaugcucuuccugcaga

SEQ ID NO: 52977 - RNA, 23 nt, Artificial Sequence
  Chemically synthesized
uucuuuaugcucuuccugcagau

SEQ ID NO: 52978 - RNA, 23 nt, Artificial Sequence
  Chemically synthesized
cgucaaccuuauugcugaugucc

SEQ ID NO: 52979 - RNA, 23 nt, Artificial Sequence
  Chemically synthesized
gucaaccuuauugcugauguccu

SEQ ID NO: 52980 - RNA, 23 nt, Artificial Sequence
  Chemically synthesized
ucaaccuuauugcugauguccuc

SEQ ID NO: 52981 - RNA, 23 nt, Artificial Sequence
  Chemically synthesized
uguucuugagcugcuugugccuc

SEQ ID NO: 52982 - RNA, 23 nt, Artificial Sequence
  Chemically synthesized
guucuugagcugcuugugccucu

SEQ ID NO: 52983 - RNA, 23 nt, Artificial Sequence
  Chemically synthesized
ccucuugaugaagagcugcaggu

SEQ ID NO: 52984 - RNA, 23 nt, Artificial Sequence
  Chemically synthesized
cucuugaugaagagcugcaggug

SEQ ID NO: 52985 - RNA, 23 nt, Artificial Sequence
  Chemically synthesized
ucuugaugaagagcugcaggugg

SEQ ID NO: 52986 - RNA, 23 nt, Artificial Sequence
  Chemically synthesized
cuugaugaagagcugcagguggc

SEQ ID NO: 52987 - RNA, 23 nt, Artificial Sequence
  Chemically synthesized
uugaugaagagcugcagguggcu

SEQ ID NO: 52988 - RNA, 23 nt, Artificial Sequence
  Chemically synthesized
ggaacuuuccacaaaauacacgc

SEQ ID NO: 52989 - RNA, 23 nt, Artificial Sequence
  Chemically synthesized
gaacuuuccacaaaauacacgca

SEQ ID NO: 52990 - RNA, 23 nt, Artificial Sequence
  Chemically synthesized
aacuuuccacaaaauacacgcau

SEQ ID NO: 52991 - RNA, 23 nt, Artificial Sequence
  Chemically synthesized
acuuuccacaaaauacacgcauu

SEQ ID NO: 52992 - RNA, 23 nt, Artificial Sequence
  Chemically synthesized
cuuuccacaaaauacacgcauuc

SEQ ID NO: 52993 - RNA, 23 nt, Artificial Sequence
  Chemically synthesized
cuucaucauccgcuucacaauga

SEQ ID NO: 52994 - RNA, 23 nt, Artificial Sequence
  Chemically synthesized
uucaucauccgcuucacaaugau

SEQ ID NO: 52995 - RNA, 23 nt, Artificial Sequence
  Chemically synthesized
ucaucauccgcuucacaaugaug

SEQ ID NO: 52996 - RNA, 23 nt, Artificial Sequence
  Chemically synthesized
caucauccgcuucacaaugauga

SEQ ID NO: 52997 - RNA, 23 nt, Artificial Sequence
  Chemically synthesized
aucauccgcuucacaaugaugau

SEQ ID NO: 52998 - RNA, 23 nt, Artificial Sequence
  Chemically synthesized
ucauccgcuucacaaugaugauc

SEQ ID NO: 52999 - RNA, 23 nt, Artificial Sequence
  Chemically synthesized
cauccgcuucacaaugaugaucu

SEQ ID NO: 53000 - RNA, 23 nt, Artificial Sequence
  Chemically synthesized
auccgcuucacaaugaugaucuu

SEQ ID NO: 53001 - RNA, 23 nt, Artificial Sequence
  Chemically synthesized
cacaaugaugaucuugggcccca

SEQ ID NO: 53002 - RNA, 23 nt, Artificial Sequence
  Chemically synthesized
acaaugaugaucuugggccccag

SEQ ID NO: 53003 - RNA, 23 nt, Artificial Sequence
  Chemically synthesized
gcaguuucugggcucucucuucg

SEQ ID NO: 53004 - RNA, 23 nt, Artificial Sequence
  Chemically synthesized
caguuucugggcucucucuucgu

SEQ ID NO: 53005 - RNA, 23 nt, Artificial Sequence
  Chemically synthesized
aguuucugggcucucucuucguc

SEQ ID NO: 53006 - RNA, 23 nt, Artificial Sequence
  Chemically synthesized
guuucugggcucucucuucgucc

SEQ ID NO: 53007 - RNA, 23 nt, Artificial Sequence
  Chemically synthesized
uuucugggcucucucuucguccu

SEQ ID NO: 53008 - RNA, 23 nt, Artificial Sequence
  Chemically synthesized
caccuccucuuuccuuggucugc

SEQ ID NO: 53009 - RNA, 23 nt, Artificial Sequence
  Chemically synthesized
accuccucuuuccuuggucugcu

SEQ ID NO: 53010 - RNA, 23 nt, Artificial Sequence
  Chemically synthesized
ccuccucuuuccuuggucugcuc

SEQ ID NO: 53011 - RNA, 23 nt, Artificial Sequence
  Chemically synthesized
cuccucuuuccuuggucugcucc

SEQ ID NO: 53012 - RNA, 23 nt, Artificial Sequence
  Chemically synthesized
uccucuuuccuuggucugcuccg

SEQ ID NO: 53013 - RNA, 23 nt, Artificial Sequence
  Chemically synthesized
ccucuuuccuuggucugcuccga

SEQ ID NO: 53014 - RNA, 23 nt, Artificial Sequence
  Chemically synthesized
cucuuuccuuggucugcuccgau

SEQ ID NO: 53015 - RNA, 23 nt, Artificial Sequence
  Chemically synthesized
ucuuuccuuggucugcuccgaua

SEQ ID NO: 53016 - RNA, 23 nt, Artificial Sequence
  Chemically synthesized
cagguuagaguucagccuguuca

SEQ ID NO: 53017 - RNA, 23 nt, Artificial Sequence
  Chemically synthesized
agguuagaguucagccuguucag

SEQ ID NO: 53018 - RNA, 23 nt, Artificial Sequence
  Chemically synthesized
gguuagaguucagccuguucagc

SEQ ID NO: 53019 - RNA, 23 nt, Artificial Sequence
  Chemically synthesized
guuagaguucagccuguucagcu

SEQ ID NO: 53020 - RNA, 23 nt, Artificial Sequence
  Chemically synthesized
uuagaguucagccuguucagcuc

SEQ ID NO: 53021 - RNA, 23 nt, Artificial Sequence
  Chemically synthesized
cguuguacuggaucguggacagu

SEQ ID NO: 53022 - RNA, 23 nt, Artificial Sequence
  Chemically synthesized
guuguacuggaucguggacagug

SEQ ID NO: 53023 - RNA, 23 nt, Artificial Sequence
  Chemically synthesized
uuguacuggaucguggacagugg

SEQ ID NO: 53024 - RNA, 23 nt, Artificial Sequence
  Chemically synthesized
uauugcugauguccucgaucuuc

SEQ ID NO: 53025 - RNA, 23 nt, Artificial Sequence
  Chemically synthesized
auugcugauguccucgaucuucu

SEQ ID NO: 53026 - RNA, 23 nt, Artificial Sequence
  Chemically synthesized
uugcugauguccucgaucuucug

SEQ ID NO: 53027 - RNA, 23 nt, Artificial Sequence
  Chemically synthesized
gcugcuuuugcuggaacugucgg

SEQ ID NO: 53028 - RNA, 23 nt, Artificial Sequence
  Chemically synthesized
cugcuuuugcuggaacugucggu

SEQ ID NO: 53029 - RNA, 23 nt, Artificial Sequence
  Chemically synthesized
ugcuuuugcuggaacugucgguu

SEQ ID NO: 53030 - RNA, 23 nt, Artificial Sequence
  Chemically synthesized
gcuuuugcuggaacugucgguuc

SEQ ID NO: 53031 - RNA, 23 nt, Artificial Sequence
  Chemically synthesized
cuuuugcuggaacugucgguucu

SEQ ID NO: 53032 - RNA, 23 nt, Artificial Sequence
  Chemically synthesized
ccggguugaaguucacaccgucg

SEQ ID NO: 53033 - RNA, 23 nt, Artificial Sequence
  Chemically synthesized
ugaaguucacaccgucgauguag

SEQ ID NO: 53034 - RNA, 23 nt, Artificial Sequence
  Chemically synthesized
gaaguucacaccgucgauguagc

SEQ ID NO: 53035 - RNA, 23 nt, Artificial Sequence
  Chemically synthesized
aaguucacaccgucgauguagcc

SEQ ID NO: 53036 - RNA, 23 nt, Artificial Sequence
  Chemically synthesized
gacguccuucaucauccgcuuca

SEQ ID NO: 53037 - RNA, 23 nt, Artificial Sequence
  Chemically synthesized
acguccuucaucauccgcuucac

SEQ ID NO: 53038 - RNA, 23 nt, Artificial Sequence
  Chemically synthesized
cguccuucaucauccgcuucaca

SEQ ID NO: 53039 - RNA, 23 nt, Artificial Sequence
  Chemically synthesized
guccuucaucauccgcuucacaa

SEQ ID NO: 53040 - RNA, 23 nt, Artificial Sequence
  Chemically synthesized
uccuucaucauccgcuucacaau

SEQ ID NO: 53041 - RNA, 23 nt, Artificial Sequence
  Chemically synthesized
cagaagucacugaaguacaaggc

SEQ ID NO: 53042 - RNA, 23 nt, Artificial Sequence
  Chemically synthesized
agaagucacugaaguacaaggcu

SEQ ID NO: 53043 - RNA, 23 nt, Artificial Sequence
  Chemically synthesized
gaagucacugaaguacaaggcug

SEQ ID NO: 53044 - RNA, 23 nt, Artificial Sequence
  Chemically synthesized
aagucacugaaguacaaggcugc

SEQ ID NO: 53045 - RNA, 23 nt, Artificial Sequence
  Chemically synthesized
agucacugaaguacaaggcugcc

SEQ ID NO: 53046 - RNA, 23 nt, Artificial Sequence
  Chemically synthesized
aaacuucauguccuuggccucca

SEQ ID NO: 53047 - RNA, 23 nt, Artificial Sequence
  Chemically synthesized
aacuucauguccuuggccuccag

SEQ ID NO: 53048 - RNA, 23 nt, Artificial Sequence
  Chemically synthesized
ccaaaugagaaggucacggaugg

SEQ ID NO: 53049 - RNA, 23 nt, Artificial Sequence
  Chemically synthesized
caaaugagaaggucacggauggg

SEQ ID NO: 53050 - RNA, 23 nt, Artificial Sequence
  Chemically synthesized
aaaugagaaggucacggaugggg

SEQ ID NO: 53051 - RNA, 23 nt, Artificial Sequence
  Chemically synthesized
aaugagaaggucacggauggggu

SEQ ID NO: 53052 - RNA, 23 nt, Artificial Sequence
  Chemically synthesized
augagaaggucacggaugggguc

SEQ ID NO: 53053 - RNA, 23 nt, Artificial Sequence
  Chemically synthesized
cuugauguuuucaggaauccacg

SEQ ID NO: 53054 - RNA, 23 nt, Artificial Sequence
  Chemically synthesized
uugauguuuucaggaauccacga

SEQ ID NO: 53055 - RNA, 23 nt, Artificial Sequence
  Chemically synthesized
ugauguuuucaggaauccacgaa

SEQ ID NO: 53056 - RNA, 23 nt, Artificial Sequence
  Chemically synthesized
gauguuuucaggaauccacgaac

SEQ ID NO: 53057 - RNA, 23 nt, Artificial Sequence
  Chemically synthesized
auguuuucaggaauccacgaacu

SEQ ID NO: 53058 - RNA, 23 nt, Artificial Sequence
  Chemically synthesized
uguuuucaggaauccacgaacug

SEQ ID NO: 53059 - RNA, 23 nt, Artificial Sequence
  Chemically synthesized
guuuucaggaauccacgaacuga

SEQ ID NO: 53060 - RNA, 23 nt, Artificial Sequence
  Chemically synthesized
uuuucaggaauccacgaacugag

SEQ ID NO: 53061 - RNA, 23 nt, Artificial Sequence
  Chemically synthesized
ccacucauccaugaagaucucac

SEQ ID NO: 53062 - RNA, 23 nt, Artificial Sequence
  Chemically synthesized
cacucauccaugaagaucucacu

SEQ ID NO: 53063 - RNA, 23 nt, Artificial Sequence
  Chemically synthesized
acucauccaugaagaucucacug

SEQ ID NO: 53064 - RNA, 23 nt, Artificial Sequence
  Chemically synthesized
uuucugcuggaucagggagauag

SEQ ID NO: 53065 - RNA, 23 nt, Artificial Sequence
  Chemically synthesized
uucugcuggaucagggagauagu

SEQ ID NO: 53066 - RNA, 23 nt, Artificial Sequence
  Chemically synthesized
ucugcuggaucagggagauagug

SEQ ID NO: 53067 - RNA, 23 nt, Artificial Sequence
  Chemically synthesized
cugcuggaucagggagauaguga

SEQ ID NO: 53068 - RNA, 23 nt, Artificial Sequence
  Chemically synthesized
ugcuggaucagggagauagugau

SEQ ID NO: 53069 - RNA, 23 nt, Artificial Sequence
  Chemically synthesized
cauccucauccaguauguacucg

SEQ ID NO: 53070 - RNA, 23 nt, Artificial Sequence
  Chemically synthesized
auccucauccaguauguacucgg

SEQ ID NO: 53071 - RNA, 23 nt, Artificial Sequence
  Chemically synthesized
uccucauccaguauguacucggc

SEQ ID NO: 53072 - RNA, 23 nt, Artificial Sequence
  Chemically synthesized
ccucauccaguauguacucggcg

SEQ ID NO: 53073 - RNA, 23 nt, Artificial Sequence
  Chemically synthesized
cucauccaguauguacucggcgg

SEQ ID NO: 53074 - RNA, 23 nt, Artificial Sequence
  Chemically synthesized
ugcuugucauuguugccgaaggg

SEQ ID NO: 53075 - RNA, 23 nt, Artificial Sequence
  Chemically synthesized
ggagacucggacguacuuuuuca

SEQ ID NO: 53076 - RNA, 23 nt, Artificial Sequence
  Chemically synthesized
gagacucggacguacuuuuucac

SEQ ID NO: 53077 - RNA, 23 nt, Artificial Sequence
  Chemically synthesized
agacucggacguacuuuuucacc

SEQ ID NO: 53078 - RNA, 23 nt, Artificial Sequence
  Chemically synthesized
gacucggacguacuuuuucaccu

SEQ ID NO: 53079 - RNA, 23 nt, Artificial Sequence
  Chemically synthesized
acucggacguacuuuuucaccuu

SEQ ID NO: 53080 - RNA, 23 nt, Artificial Sequence
  Chemically synthesized
cucggacguacuuuuucaccuuc

SEQ ID NO: 53081 - RNA, 23 nt, Artificial Sequence
  Chemically synthesized
uaggaaaaugaagacagggagcu

SEQ ID NO: 53082 - RNA, 23 nt, Artificial Sequence
  Chemically synthesized
aggaaaaugaagacagggagcug

SEQ ID NO: 53083 - RNA, 23 nt, Artificial Sequence
  Chemically synthesized
ggaaaaugaagacagggagcuga

SEQ ID NO: 53084 - RNA, 23 nt, Artificial Sequence
  Chemically synthesized
gaaaaugaagacagggagcugau

SEQ ID NO: 53085 - RNA, 23 nt, Artificial Sequence
  Chemically synthesized
aaaaugaagacagggagcugaug

SEQ ID NO: 53086 - RNA, 23 nt, Artificial Sequence
  Chemically synthesized
gccccuuccucacagacauaggc

SEQ ID NO: 53087 - RNA, 23 nt, Artificial Sequence
  Chemically synthesized
ccccuuccaguucaugaggucau

SEQ ID NO: 53088 - RNA, 23 nt, Artificial Sequence
  Chemically synthesized
cccuuccaguucaugaggucauc

SEQ ID NO: 53089 - RNA, 23 nt, Artificial Sequence
  Chemically synthesized
ccuuccaguucaugaggucaucu

SEQ ID NO: 53090 - RNA, 23 nt, Artificial Sequence
  Chemically synthesized
cuuccaguucaugaggucaucug

SEQ ID NO: 53091 - RNA, 23 nt, Artificial Sequence
  Chemically synthesized
uuccaguucaugaggucaucugc

SEQ ID NO: 53092 - RNA, 23 nt, Artificial Sequence
  Chemically synthesized
ccaguucaugaggucaucugcag

SEQ ID NO: 53093 - RNA, 23 nt, Artificial Sequence
  Chemically synthesized
caguucaugaggucaucugcagc

SEQ ID NO: 53094 - RNA, 23 nt, Artificial Sequence
  Chemically synthesized
aguucaugaggucaucugcagca

SEQ ID NO: 53095 - RNA, 23 nt, Artificial Sequence
  Chemically synthesized
guucaugaggucaucugcagcag

SEQ ID NO: 53096 - RNA, 23 nt, Artificial Sequence
  Chemically synthesized
uucaugaggucaucugcagcaga

SEQ ID NO: 53097 - RNA, 23 nt, Artificial Sequence
  Chemically synthesized
ccuguucagcuccacgucauucu

SEQ ID NO: 53098 - RNA, 23 nt, Artificial Sequence
  Chemically synthesized
cuguucagcuccacgucauucug

SEQ ID NO: 53099 - RNA, 23 nt, Artificial Sequence
  Chemically synthesized
uguucagcuccacgucauucugg

SEQ ID NO: 53100 - RNA, 23 nt, Artificial Sequence
  Chemically synthesized
guucagcuccacgucauucuggu

SEQ ID NO: 53101 - RNA, 23 nt, Artificial Sequence
  Chemically synthesized
uucagcuccacgucauucugguc

SEQ ID NO: 53102 - RNA, 23 nt, Artificial Sequence
  Chemically synthesized
gugggucauagaucaggaacucc

SEQ ID NO: 53103 - RNA, 23 nt, Artificial Sequence
  Chemically synthesized
ugggucauagaucaggaacuccg

SEQ ID NO: 53104 - RNA, 23 nt, Artificial Sequence
  Chemically synthesized
gggucauagaucaggaacuccgu

SEQ ID NO: 53105 - RNA, 23 nt, Artificial Sequence
  Chemically synthesized
ggucauagaucaggaacuccguc

SEQ ID NO: 53106 - RNA, 23 nt, Artificial Sequence
  Chemically synthesized
gucauagaucaggaacuccgucu

SEQ ID NO: 53107 - RNA, 23 nt, Artificial Sequence
  Chemically synthesized
guaguugaacauggcgaugagga

SEQ ID NO: 53108 - RNA, 23 nt, Artificial Sequence
  Chemically synthesized
uaguugaacauggcgaugaggag

SEQ ID NO: 53109 - RNA, 23 nt, Artificial Sequence
  Chemically synthesized
aguugaacauggcgaugaggagg

SEQ ID NO: 53110 - RNA, 23 nt, Artificial Sequence
  Chemically synthesized
aguucacaccgucgauguagccc

SEQ ID NO: 53111 - RNA, 23 nt, Artificial Sequence
  Chemically synthesized
guucacaccgucgauguagcccg

SEQ ID NO: 53112 - RNA, 23 nt, Artificial Sequence
  Chemically synthesized
uucacaccgucgauguagcccgg

SEQ ID NO: 53113 - RNA, 23 nt, Artificial Sequence
  Chemically synthesized
uuuccacaaaauacacgcauucu

SEQ ID NO: 53114 - RNA, 23 nt, Artificial Sequence
  Chemically synthesized
uccgcuucacaaugaugaucuug

SEQ ID NO: 53115 - RNA, 23 nt, Artificial Sequence
  Chemically synthesized
uacacgcauucuuucuucuugau

SEQ ID NO: 53116 - RNA, 23 nt, Artificial Sequence
  Chemically synthesized
acuucauguccuuggccuccagg

SEQ ID NO: 53117 - RNA, 23 nt, Artificial Sequence
  Chemically synthesized
cuucauguccuuggccuccaggg

SEQ ID NO: 53118 - RNA, 23 nt, Artificial Sequence
  Chemically synthesized
uucauguccuuggccuccagggc

SEQ ID NO: 53119 - RNA, 23 nt, Artificial Sequence
  Chemically synthesized
ggacaauggcccaaaugagaagg

SEQ ID NO: 53120 - RNA, 23 nt, Artificial Sequence
  Chemically synthesized
gacaauggcccaaaugagaaggu

SEQ ID NO: 53121 - RNA, 23 nt, Artificial Sequence
  Chemically synthesized
acaauggcccaaaugagaagguc

SEQ ID NO: 53122 - RNA, 23 nt, Artificial Sequence
  Chemically synthesized
caauggcccaaaugagaagguca

SEQ ID NO: 53123 - RNA, 23 nt, Artificial Sequence
  Chemically synthesized
aauggcccaaaugagaaggucac

SEQ ID NO: 53124 - RNA, 23 nt, Artificial Sequence
  Chemically synthesized
guucucguacagguagagcaagg

SEQ ID NO: 53125 - RNA, 23 nt, Artificial Sequence
  Chemically synthesized
uucucguacagguagagcaaggu

SEQ ID NO: 53126 - RNA, 23 nt, Artificial Sequence
  Chemically synthesized
ucucguacagguagagcaaggug

SEQ ID NO: 53127 - RNA, 23 nt, Artificial Sequence
  Chemically synthesized
gcagaucugaaggcuuccacugc

SEQ ID NO: 53128 - RNA, 23 nt, Artificial Sequence
  Chemically synthesized
cagaucugaaggcuuccacugcc

SEQ ID NO: 53129 - RNA, 23 nt, Artificial Sequence
  Chemically synthesized
agaucugaaggcuuccacugcca

SEQ ID NO: 53130 - RNA, 23 nt, Artificial Sequence
  Chemically synthesized
gaucugaaggcuuccacugccac

SEQ ID NO: 53131 - RNA, 23 nt, Artificial Sequence
  Chemically synthesized
aucugaaggcuuccacugccacu

SEQ ID NO: 53132 - RNA, 23 nt, Artificial Sequence
  Chemically synthesized
gacgauaucuuggaucuuuuugg

SEQ ID NO: 53133 - RNA, 23 nt, Artificial Sequence
  Chemically synthesized
acgauaucuuggaucuuuuuggu

SEQ ID NO: 53134 - RNA, 23 nt, Artificial Sequence
  Chemically synthesized
cgauaucuuggaucuuuuugguc

SEQ ID NO: 53135 - RNA, 23 nt, Artificial Sequence
  Chemically synthesized
gauaucuuggaucuuuuuggucc

SEQ ID NO: 53136 - RNA, 23 nt, Artificial Sequence
  Chemically synthesized
auaucuuggaucuuuuuggucca

SEQ ID NO: 53137 - RNA, 23 nt, Artificial Sequence
  Chemically synthesized
uggaucuuuuugguccacucgac

SEQ ID NO: 53138 - RNA, 23 nt, Artificial Sequence
  Chemically synthesized
ggaucuuuuugguccacucgaca

SEQ ID NO: 53139 - RNA, 23 nt, Artificial Sequence
  Chemically synthesized
gaucuuuuugguccacucgacaa

SEQ ID NO: 53140 - RNA, 23 nt, Artificial Sequence
  Chemically synthesized
aucuuuuugguccacucgacaau

SEQ ID NO: 53141 - RNA, 23 nt, Artificial Sequence
  Chemically synthesized
ucuuuuugguccacucgacaauc

SEQ ID NO: 53142 - RNA, 23 nt, Artificial Sequence
  Chemically synthesized
cgacaauccugcuuuccgugaag

SEQ ID NO: 53143 - RNA, 23 nt, Artificial Sequence
  Chemically synthesized
gacaauccugcuuuccgugaagg

SEQ ID NO: 53144 - RNA, 23 nt, Artificial Sequence
  Chemically synthesized
acaauccugcuuuccgugaaggu

SEQ ID NO: 53145 - RNA, 23 nt, Artificial Sequence
  Chemically synthesized
caauccugcuuuccgugaagguc

SEQ ID NO: 53146 - RNA, 23 nt, Artificial Sequence
  Chemically synthesized
aauccugcuuuccgugaaggucu

SEQ ID NO: 53147 - RNA, 23 nt, Artificial Sequence
  Chemically synthesized
ggcguugucgauggugugcaacg

SEQ ID NO: 53148 - RNA, 23 nt, Artificial Sequence
  Chemically synthesized
gcguugucgauggugugcaacgu

SEQ ID NO: 53149 - RNA, 23 nt, Artificial Sequence
  Chemically synthesized
cguugucgauggugugcaacgug

SEQ ID NO: 53150 - RNA, 23 nt, Artificial Sequence
  Chemically synthesized
guugucgauggugugcaacgugc

SEQ ID NO: 53151 - RNA, 23 nt, Artificial Sequence
  Chemically synthesized
uugucgauggugugcaacgugcc

SEQ ID NO: 53152 - RNA, 23 nt, Artificial Sequence
  Chemically synthesized
uggccacaccuccucuuuccuug

SEQ ID NO: 53153 - RNA, 23 nt, Artificial Sequence
  Chemically synthesized
ggccacaccuccucuuuccuugg

SEQ ID NO: 53154 - RNA, 23 nt, Artificial Sequence
  Chemically synthesized
gccacaccuccucuuuccuuggu

SEQ ID NO: 53155 - RNA, 23 nt, Artificial Sequence
  Chemically synthesized
ccacaccuccucuuuccuugguc

SEQ ID NO: 53156 - RNA, 23 nt, Artificial Sequence
  Chemically synthesized
cacaccuccucuuuccuuggucu

SEQ ID NO: 53157 - RNA, 23 nt, Artificial Sequence
  Chemically synthesized
cggcuucauguugaaguucuugg

SEQ ID NO: 53158 - RNA, 23 nt, Artificial Sequence
  Chemically synthesized
ggcuucauguugaaguucuuggc

SEQ ID NO: 53159 - RNA, 23 nt, Artificial Sequence
  Chemically synthesized
gcuucauguugaaguucuuggcc

SEQ ID NO: 53160 - RNA, 23 nt, Artificial Sequence
  Chemically synthesized
cuucauguugaaguucuuggccc

SEQ ID NO: 53161 - RNA, 23 nt, Artificial Sequence
  Chemically synthesized
uucauguugaaguucuuggcccc

SEQ ID NO: 53162 - RNA, 23 nt, Artificial Sequence
  Chemically synthesized
ccagguuuaggaaaaugaagaca

SEQ ID NO: 53163 - RNA, 23 nt, Artificial Sequence
  Chemically synthesized
aggcgugcagguuagaguucagc

SEQ ID NO: 53164 - RNA, 23 nt, Artificial Sequence
  Chemically synthesized
ggcgugcagguuagaguucagcc

SEQ ID NO: 53165 - RNA, 23 nt, Artificial Sequence
  Chemically synthesized
gcgugcagguuagaguucagccu

SEQ ID NO: 53166 - RNA, 23 nt, Artificial Sequence
  Chemically synthesized
cgugcagguuagaguucagccug

SEQ ID NO: 53167 - RNA, 23 nt, Artificial Sequence
  Chemically synthesized
gugcagguuagaguucagccugu

SEQ ID NO: 53168 - RNA, 23 nt, Artificial Sequence
  Chemically synthesized
ucagcaaguuuucaaaagacggc

SEQ ID NO: 53169 - RNA, 23 nt, Artificial Sequence
  Chemically synthesized
cagcaaguuuucaaaagacggcc

SEQ ID NO: 53170 - RNA, 23 nt, Artificial Sequence
  Chemically synthesized
ggcgucaaccuuauugcugaugu

SEQ ID NO: 53171 - RNA, 23 nt, Artificial Sequence
  Chemically synthesized
gcgucaaccuuauugcugauguc

SEQ ID NO: 53172 - RNA, 23 nt, Artificial Sequence
  Chemically synthesized
cuccucguucuucuccagcuugu

SEQ ID NO: 53173 - RNA, 23 nt, Artificial Sequence
  Chemically synthesized
uccucguucuucuccagcuuguu

SEQ ID NO: 53174 - RNA, 23 nt, Artificial Sequence
  Chemically synthesized
ccucguucuucuccagcuuguuc

SEQ ID NO: 53175 - RNA, 23 nt, Artificial Sequence
  Chemically synthesized
cucguucuucuccagcuuguucu

SEQ ID NO: 53176 - RNA, 23 nt, Artificial Sequence
  Chemically synthesized
ucguucuucuccagcuuguucuu

SEQ ID NO: 53177 - RNA, 23 nt, Artificial Sequence
  Chemically synthesized
uggaacuuuccacaaaauacacg

SEQ ID NO: 53178 - RNA, 23 nt, Artificial Sequence
  Chemically synthesized
agacguccuucaucauccgcuuc

SEQ ID NO: 53179 - RNA, 23 nt, Artificial Sequence
  Chemically synthesized
caaugaugaucuugggccccagc

SEQ ID NO: 53180 - RNA, 23 nt, Artificial Sequence
  Chemically synthesized
cacaaaauacacgcauucuuucu

SEQ ID NO: 53181 - RNA, 23 nt, Artificial Sequence
  Chemically synthesized
acaaaauacacgcauucuuucuu

SEQ ID NO: 53182 - RNA, 23 nt, Artificial Sequence
  Chemically synthesized
ccagaagucacugaaguacaagg

SEQ ID NO: 53183 - RNA, 23 nt, Artificial Sequence
  Chemically synthesized
uggcucugugcucauacuccucc

SEQ ID NO: 53184 - RNA, 23 nt, Artificial Sequence
  Chemically synthesized
ggcucugugcucauacuccuccg

SEQ ID NO: 53185 - RNA, 23 nt, Artificial Sequence
  Chemically synthesized
gcucugugcucauacuccuccgc

SEQ ID NO: 53186 - RNA, 23 nt, Artificial Sequence
  Chemically synthesized
cucugugcucauacuccuccgcc

SEQ ID NO: 53187 - RNA, 23 nt, Artificial Sequence
  Chemically synthesized
ucugugcucauacuccuccgcca

SEQ ID NO: 53188 - RNA, 23 nt, Artificial Sequence
  Chemically synthesized
ucuugauguuuucaggaauccac

SEQ ID NO: 53189 - RNA, 23 nt, Artificial Sequence
  Chemically synthesized
cuucacaaacucaggcuuguugg

SEQ ID NO: 53190 - RNA, 23 nt, Artificial Sequence
  Chemically synthesized
uucacaaacucaggcuuguugga

SEQ ID NO: 53191 - RNA, 23 nt, Artificial Sequence
  Chemically synthesized
ucacaaacucaggcuuguuggag

SEQ ID NO: 53192 - RNA, 23 nt, Artificial Sequence
  Chemically synthesized
cacaaacucaggcuuguuggaga

SEQ ID NO: 53193 - RNA, 23 nt, Artificial Sequence
  Chemically synthesized
acaaacucaggcuuguuggagau

SEQ ID NO: 53194 - RNA, 23 nt, Artificial Sequence
  Chemically synthesized
ucaggaauccacgaacugaggcu

SEQ ID NO: 53195 - RNA, 23 nt, Artificial Sequence
  Chemically synthesized
caggaauccacgaacugaggcuu

SEQ ID NO: 53196 - RNA, 23 nt, Artificial Sequence
  Chemically synthesized
aggaauccacgaacugaggcuuu

SEQ ID NO: 53197 - RNA, 23 nt, Artificial Sequence
  Chemically synthesized
ggaauccacgaacugaggcuuuc

SEQ ID NO: 53198 - RNA, 23 nt, Artificial Sequence
  Chemically synthesized
gaauccacgaacugaggcuuucu

SEQ ID NO: 53199 - RNA, 23 nt, Artificial Sequence
  Chemically synthesized
uuggaucuuuuugguccacucga

SEQ ID NO: 53200 - RNA, 23 nt, Artificial Sequence
  Chemically synthesized
acaccuccucuuuccuuggucug

SEQ ID NO: 53201 - RNA, 23 nt, Artificial Sequence
  Chemically synthesized
cgauaugaacuucuccagccugg

SEQ ID NO: 53202 - RNA, 23 nt, Artificial Sequence
  Chemically synthesized
gauaugaacuucuccagccuggu

SEQ ID NO: 53203 - RNA, 23 nt, Artificial Sequence
  Chemically synthesized
auaugaacuucuccagccugguc

SEQ ID NO: 53204 - RNA, 23 nt, Artificial Sequence
  Chemically synthesized
uaugaacuucuccagccuggucc

SEQ ID NO: 53205 - RNA, 23 nt, Artificial Sequence
  Chemically synthesized
augaacuucuccagccugguccu

SEQ ID NO: 53206 - RNA, 23 nt, Artificial Sequence
  Chemically synthesized
cgaggaugaagugagagugguug

SEQ ID NO: 53207 - RNA, 23 nt, Artificial Sequence
  Chemically synthesized
ggcuuucuugcuugucauuguug

SEQ ID NO: 53208 - RNA, 23 nt, Artificial Sequence
  Chemically synthesized
gcccagguuuaggaaaaugaaga

SEQ ID NO: 53209 - RNA, 23 nt, Artificial Sequence
  Chemically synthesized
cccagguuuaggaaaaugaagac

SEQ ID NO: 53210 - RNA, 23 nt, Artificial Sequence
  Chemically synthesized
uggcaucuccuggacauguuucu

SEQ ID NO: 53211 - RNA, 23 nt, Artificial Sequence
  Chemically synthesized
ggcaucuccuggacauguuucuu

SEQ ID NO: 53212 - RNA, 23 nt, Artificial Sequence
  Chemically synthesized
gcaucuccuggacauguuucuuu

SEQ ID NO: 53213 - RNA, 23 nt, Artificial Sequence
  Chemically synthesized
caucuccuggacauguuucuuug

SEQ ID NO: 53214 - RNA, 23 nt, Artificial Sequence
  Chemically synthesized
aucuccuggacauguuucuuugg

SEQ ID NO: 53215 - RNA, 23 nt, Artificial Sequence
  Chemically synthesized
gcuguugacaccaaaccagaagg

SEQ ID NO: 53216 - RNA, 23 nt, Artificial Sequence
  Chemically synthesized
cuguugacaccaaaccagaaggc

SEQ ID NO: 53217 - RNA, 23 nt, Artificial Sequence
  Chemically synthesized
uguugacaccaaaccagaaggcc

SEQ ID NO: 53218 - RNA, 23 nt, Artificial Sequence
  Chemically synthesized
guugacaccaaaccagaaggccc

SEQ ID NO: 53219 - RNA, 23 nt, Artificial Sequence
  Chemically synthesized
uugacaccaaaccagaaggcccc

SEQ ID NO: 53220 - RNA, 23 nt, Artificial Sequence
  Chemically synthesized
accgucucgauccaggcauuguc

SEQ ID NO: 53221 - RNA, 23 nt, Artificial Sequence
  Chemically synthesized
ccgucucgauccaggcauugucc

SEQ ID NO: 53222 - RNA, 23 nt, Artificial Sequence
  Chemically synthesized
cgucucgauccaggcauuguccg

SEQ ID NO: 53223 - RNA, 23 nt, Artificial Sequence
  Chemically synthesized
gucucgauccaggcauuguccgu

SEQ ID NO: 53224 - RNA, 23 nt, Artificial Sequence
  Chemically synthesized
ucucgauccaggcauuguccgug

SEQ ID NO: 53225 - RNA, 23 nt, Artificial Sequence
  Chemically synthesized
cgggucauccauguagccuuugu

SEQ ID NO: 53226 - RNA, 23 nt, Artificial Sequence
  Chemically synthesized
gggucauccauguagccuuugua

SEQ ID NO: 53227 - RNA, 23 nt, Artificial Sequence
  Chemically synthesized
ggucauccauguagccuuuguac

SEQ ID NO: 53228 - RNA, 23 nt, Artificial Sequence
  Chemically synthesized
gucauccauguagccuuuguaca

SEQ ID NO: 53229 - RNA, 23 nt, Artificial Sequence
  Chemically synthesized
ucauccauguagccuuuguacac

SEQ ID NO: 53230 - RNA, 23 nt, Artificial Sequence
  Chemically synthesized
cauccauguagccuuuguacacc

SEQ ID NO: 53231 - RNA, 23 nt, Artificial Sequence
  Chemically synthesized
auccauguagccuuuguacaccu

SEQ ID NO: 53232 - RNA, 23 nt, Artificial Sequence
  Chemically synthesized
cauguagccuuuguacaccucca

SEQ ID NO: 53233 - RNA, 23 nt, Artificial Sequence
  Chemically synthesized
auguagccuuuguacaccuccau

SEQ ID NO: 53234 - RNA, 23 nt, Artificial Sequence
  Chemically synthesized
uguagccuuuguacaccuccaug

SEQ ID NO: 53235 - RNA, 23 nt, Artificial Sequence
  Chemically synthesized
guagccuuuguacaccuccaugc

SEQ ID NO: 53236 - RNA, 23 nt, Artificial Sequence
  Chemically synthesized
uagccuuuguacaccuccaugcc

SEQ ID NO: 53237 - RNA, 23 nt, Artificial Sequence
  Chemically synthesized
agccuuuguacaccuccaugccg

SEQ ID NO: 53238 - RNA, 23 nt, Artificial Sequence
  Chemically synthesized
gccuuuguacaccuccaugccgc

SEQ ID NO: 53239 - RNA, 23 nt, Artificial Sequence
  Chemically synthesized
ccuuuguacaccuccaugccgca

SEQ ID NO: 53240 - RNA, 23 nt, Artificial Sequence
  Chemically synthesized
cuuuguacaccuccaugccgcac

SEQ ID NO: 53241 - RNA, 23 nt, Artificial Sequence
  Chemically synthesized
uuuguacaccuccaugccgcacu

SEQ ID NO: 53242 - RNA, 23 nt, Artificial Sequence
  Chemically synthesized
ugcugauguccucgaucuucugc

SEQ ID NO: 53243 - RNA, 23 nt, Artificial Sequence
  Chemically synthesized
gcugauguccucgaucuucugcu

SEQ ID NO: 53244 - RNA, 23 nt, Artificial Sequence
  Chemically synthesized
cugauguccucgaucuucugcuc

SEQ ID NO: 53245 - RNA, 23 nt, Artificial Sequence
  Chemically synthesized
cagguagaggcagaguaggagga

SEQ ID NO: 53246 - RNA, 23 nt, Artificial Sequence
  Chemically synthesized
agguagaggcagaguaggaggac

SEQ ID NO: 53247 - RNA, 23 nt, Artificial Sequence
  Chemically synthesized
gguagaggcagaguaggaggacc

SEQ ID NO: 53248 - RNA, 23 nt, Artificial Sequence
  Chemically synthesized
guagaggcagaguaggaggaccg

SEQ ID NO: 53249 - RNA, 23 nt, Artificial Sequence
  Chemically synthesized
uagaggcagaguaggaggaccgu

SEQ ID NO: 53250 - RNA, 23 nt, Artificial Sequence
  Chemically synthesized
acacgcauucuuucuucuugaug

SEQ ID NO: 53251 - RNA, 23 nt, Artificial Sequence
  Chemically synthesized
cacgcauucuuucuucuugaugu

SEQ ID NO: 53252 - RNA, 23 nt, Artificial Sequence
  Chemically synthesized
uuucaggaauccacgaacugagg

SEQ ID NO: 53253 - RNA, 23 nt, Artificial Sequence
  Chemically synthesized
cugccacucauccaugaagaucu

SEQ ID NO: 53254 - RNA, 23 nt, Artificial Sequence
  Chemically synthesized
ugccacucauccaugaagaucuc

SEQ ID NO: 53255 - RNA, 23 nt, Artificial Sequence
  Chemically synthesized
gccacucauccaugaagaucuca

SEQ ID NO: 53256 - RNA, 23 nt, Artificial Sequence
  Chemically synthesized
ucuccuggaagaacacgcucagu

SEQ ID NO: 53257 - RNA, 23 nt, Artificial Sequence
  Chemically synthesized
ggccauccucauccaguauguac

SEQ ID NO: 53258 - RNA, 23 nt, Artificial Sequence
  Chemically synthesized
gccauccucauccaguauguacu

SEQ ID NO: 53259 - RNA, 23 nt, Artificial Sequence
  Chemically synthesized
ccauccucauccaguauguacuc

SEQ ID NO: 53260 - RNA, 23 nt, Artificial Sequence
  Chemically synthesized
cugggucaugaggugguagauca

SEQ ID NO: 53261 - RNA, 23 nt, Artificial Sequence
  Chemically synthesized
ugggucaugaggugguagaucac

SEQ ID NO: 53262 - RNA, 23 nt, Artificial Sequence
  Chemically synthesized
gggucaugaggugguagaucacg

SEQ ID NO: 53263 - RNA, 23 nt, Artificial Sequence
  Chemically synthesized
ggucaugaggugguagaucacgc

SEQ ID NO: 53264 - RNA, 23 nt, Artificial Sequence
  Chemically synthesized
gucaugaggugguagaucacgcu

SEQ ID NO: 53265 - RNA, 23 nt, Artificial Sequence
  Chemically synthesized
ggacgugucaggaacuuuauuug

SEQ ID NO: 53266 - RNA, 23 nt, Artificial Sequence
  Chemically synthesized
gacgugucaggaacuuuauuugu

SEQ ID NO: 53267 - RNA, 23 nt, Artificial Sequence
  Chemically synthesized
acgugucaggaacuuuauuugug

SEQ ID NO: 53268 - RNA, 23 nt, Artificial Sequence
  Chemically synthesized
cgugucaggaacuuuauuugugg

SEQ ID NO: 53269 - RNA, 23 nt, Artificial Sequence
  Chemically synthesized
gugucaggaacuuuauuugugga

SEQ ID NO: 53270 - RNA, 23 nt, Artificial Sequence
  Chemically synthesized
caggaacuuuauuuguggaaagc

SEQ ID NO: 53271 - RNA, 23 nt, Artificial Sequence
  Chemically synthesized
aggaacuuuauuuguggaaagca

SEQ ID NO: 53272 - RNA, 23 nt, Artificial Sequence
  Chemically synthesized
ggaacuuuauuuguggaaagcac

SEQ ID NO: 53273 - RNA, 23 nt, Artificial Sequence
  Chemically synthesized
gaacuuuauuuguggaaagcaca

SEQ ID NO: 53274 - RNA, 23 nt, Artificial Sequence
  Chemically synthesized
aacuuuauuuguggaaagcacag

SEQ ID NO: 53275 - RNA, 23 nt, Artificial Sequence
  Chemically synthesized
ccauguagccuuuguacaccucc

SEQ ID NO: 53276 - RNA, 23 nt, Artificial Sequence
  Chemically synthesized
gcaucagacaguuuggaacuuuc

SEQ ID NO: 53277 - RNA, 23 nt, Artificial Sequence
  Chemically synthesized
caucagacaguuuggaacuuucc

SEQ ID NO: 53278 - RNA, 23 nt, Artificial Sequence
  Chemically synthesized
aucagacaguuuggaacuuucca

SEQ ID NO: 53279 - RNA, 23 nt, Artificial Sequence
  Chemically synthesized
ucagacaguuuggaacuuuccac

SEQ ID NO: 53280 - RNA, 23 nt, Artificial Sequence
  Chemically synthesized
cagacaguuuggaacuuuccaca

SEQ ID NO: 53281 - RNA, 23 nt, Artificial Sequence
  Chemically synthesized
cguucuucuccagcuuguucuug

SEQ ID NO: 53282 - RNA, 23 nt, Artificial Sequence
  Chemically synthesized
guucuucuccagcuuguucuuga

SEQ ID NO: 53283 - RNA, 23 nt, Artificial Sequence
  Chemically synthesized
uucuucuccagcuuguucuugag

SEQ ID NO: 53284 - RNA, 23 nt, Artificial Sequence
  Chemically synthesized
cuuccaaaucugguccgugugcu

SEQ ID NO: 53285 - RNA, 23 nt, Artificial Sequence
  Chemically synthesized
uuccaaaucugguccgugugcuc

SEQ ID NO: 53286 - RNA, 23 nt, Artificial Sequence
  Chemically synthesized
uccaaaucugguccgugugcucc

SEQ ID NO: 53287 - RNA, 23 nt, Artificial Sequence
  Chemically synthesized
ccaaaucugguccgugugcuccu

SEQ ID NO: 53288 - RNA, 23 nt, Artificial Sequence
  Chemically synthesized
caaaucugguccgugugcuccug

SEQ ID NO: 53289 - RNA, 23 nt, Artificial Sequence
  Chemically synthesized
aaaucugguccgugugcuccugc

SEQ ID NO: 53290 - RNA, 23 nt, Artificial Sequence
  Chemically synthesized
uuggaacuuuccacaaaauacac

SEQ ID NO: 53291 - RNA, 23 nt, Artificial Sequence
  Chemically synthesized
gaagauggugagguaggaguggu

SEQ ID NO: 53292 - RNA, 23 nt, Artificial Sequence
  Chemically synthesized
aagauggugagguaggaguggua

SEQ ID NO: 53293 - RNA, 23 nt, Artificial Sequence
  Chemically synthesized
agauggugagguaggagugguag

SEQ ID NO: 53294 - RNA, 23 nt, Artificial Sequence
  Chemically synthesized
gauggugagguaggagugguaga

SEQ ID NO: 53295 - RNA, 23 nt, Artificial Sequence
  Chemically synthesized
auggugagguaggagugguagac

SEQ ID NO: 53296 - RNA, 23 nt, Artificial Sequence
  Chemically synthesized
ccacaaaauacacgcauucuuuc

SEQ ID NO: 53297 - RNA, 23 nt, Artificial Sequence
  Chemically synthesized
ugccuucuucaucagcccgcacu

SEQ ID NO: 53298 - RNA, 23 nt, Artificial Sequence
  Chemically synthesized
gccuucuucaucagcccgcacuc

SEQ ID NO: 53299 - RNA, 23 nt, Artificial Sequence
  Chemically synthesized
ccuucuucaucagcccgcacucg

SEQ ID NO: 53300 - RNA, 23 nt, Artificial Sequence
  Chemically synthesized
cuucuucaucagcccgcacucgu

SEQ ID NO: 53301 - RNA, 23 nt, Artificial Sequence
  Chemically synthesized
uucuucaucagcccgcacucguc

SEQ ID NO: 53302 - RNA, 23 nt, Artificial Sequence
  Chemically synthesized
ggugcagaucugaaggcuuccac

SEQ ID NO: 53303 - RNA, 23 nt, Artificial Sequence
  Chemically synthesized
gugcagaucugaaggcuuccacu

SEQ ID NO: 53304 - RNA, 23 nt, Artificial Sequence
  Chemically synthesized
ugcagaucugaaggcuuccacug

SEQ ID NO: 53305 - RNA, 23 nt, Artificial Sequence
  Chemically synthesized
aauccacgaacugaggcuuucuu

SEQ ID NO: 53306 - RNA, 23 nt, Artificial Sequence
  Chemically synthesized
uccacucgacaauccugcuuucc

SEQ ID NO: 53307 - RNA, 23 nt, Artificial Sequence
  Chemically synthesized
ccacucgacaauccugcuuuccg

SEQ ID NO: 53308 - RNA, 23 nt, Artificial Sequence
  Chemically synthesized
cacucgacaauccugcuuuccgu

SEQ ID NO: 53309 - RNA, 23 nt, Artificial Sequence
  Chemically synthesized
acucgacaauccugcuuuccgug

SEQ ID NO: 53310 - RNA, 23 nt, Artificial Sequence
  Chemically synthesized
cucgacaauccugcuuuccguga

SEQ ID NO: 53311 - RNA, 23 nt, Artificial Sequence
  Chemically synthesized
ucgacaauccugcuuuccgugaa

SEQ ID NO: 53312 - RNA, 23 nt, Artificial Sequence
  Chemically synthesized
aggucucaaacaucuccuggaag

SEQ ID NO: 53313 - RNA, 23 nt, Artificial Sequence
  Chemically synthesized
ggucucaaacaucuccuggaaga

SEQ ID NO: 53314 - RNA, 23 nt, Artificial Sequence
  Chemically synthesized
gucucaaacaucuccuggaagaa

SEQ ID NO: 53315 - RNA, 23 nt, Artificial Sequence
  Chemically synthesized
cucaaacaucuccuggaagaaca

SEQ ID NO: 53316 - RNA, 23 nt, Artificial Sequence
  Chemically synthesized
ucaaacaucuccuggaagaacac

SEQ ID NO: 53317 - RNA, 23 nt, Artificial Sequence
  Chemically synthesized
caaacaucuccuggaagaacacg

SEQ ID NO: 53318 - RNA, 23 nt, Artificial Sequence
  Chemically synthesized
uggucugcuccgauaugaacuuc

SEQ ID NO: 53319 - RNA, 23 nt, Artificial Sequence
  Chemically synthesized
ggucugcuccgauaugaacuucu

SEQ ID NO: 53320 - RNA, 23 nt, Artificial Sequence
  Chemically synthesized
gucugcuccgauaugaacuucuc

SEQ ID NO: 53321 - RNA, 23 nt, Artificial Sequence
  Chemically synthesized
ucugcuccgauaugaacuucucc

SEQ ID NO: 53322 - RNA, 23 nt, Artificial Sequence
  Chemically synthesized
cugcuccgauaugaacuucucca

SEQ ID NO: 53323 - RNA, 23 nt, Artificial Sequence
  Chemically synthesized
uuccaugccacugccaguuucag

SEQ ID NO: 53324 - RNA, 23 nt, Artificial Sequence
  Chemically synthesized
auuccaugccacugccaguuuca

SEQ ID NO: 53325 - RNA, 23 nt, Artificial Sequence
  Chemically synthesized
cuuuuugguccacucgacaaucc

SEQ ID NO: 53326 - RNA, 23 nt, Artificial Sequence
  Chemically synthesized
uccacgaacugaggcuuucuugc

SEQ ID NO: 53327 - RNA, 23 nt, Artificial Sequence
  Chemically synthesized
cuuuaugcucuuccugcagaugg

SEQ ID NO: 53328 - RNA, 23 nt, Artificial Sequence
  Chemically synthesized
gauuccaugccacugccaguuuc

SEQ ID NO: 53329 - RNA, 23 nt, Artificial Sequence
  Chemically synthesized
uuuugguccacucgacaauccug

SEQ ID NO: 53330 - RNA, 23 nt, Artificial Sequence
  Chemically synthesized
auggccacaccuccucuuuccuu

SEQ ID NO: 53331 - RNA, 23 nt, Artificial Sequence
  Chemically synthesized
aaugaagacagggagcugauggg

SEQ ID NO: 53332 - RNA, 23 nt, Artificial Sequence
  Chemically synthesized
cugugagcuguugacaccaaacc

SEQ ID NO: 53333 - RNA, 23 nt, Artificial Sequence
  Chemically synthesized
uguuccucgggucauccauguag

SEQ ID NO: 53334 - RNA, 23 nt, Artificial Sequence
  Chemically synthesized
uuccacaaaauacacgcauucuu

SEQ ID NO: 53335 - RNA, 23 nt, Artificial Sequence
  Chemically synthesized
gaaggcgaaguaggagaggaugu

SEQ ID NO: 53336 - RNA, 23 nt, Artificial Sequence
  Chemically synthesized
gugagcuguugacaccaaaccag

SEQ ID NO: 53337 - RNA, 23 nt, Artificial Sequence
  Chemically synthesized
cuuccacugccacucauccauga

SEQ ID NO: 53338 - RNA, 23 nt, Artificial Sequence
  Chemically synthesized
uuuuugguccacucgacaauccu

SEQ ID NO: 53339 - RNA, 23 nt, Artificial Sequence
  Chemically synthesized
auccacgaacugaggcuuucuug

SEQ ID NO: 53340 - RNA, 23 nt, Artificial Sequence
  Chemically synthesized
cuccgauaugaacuucuccagcc

SEQ ID NO: 53341 - RNA, 23 nt, Artificial Sequence
  Chemically synthesized
caccauggcgucaaccuuauugc

SEQ ID NO: 53342 - RNA, 23 nt, Artificial Sequence
  Chemically synthesized
auggcgcuggaacuuccaaaucu

SEQ ID NO: 53343 - RNA, 23 nt, Artificial Sequence
  Chemically synthesized
aagaucucacugcgggcaauguc

SEQ ID NO: 53344 - RNA, 23 nt, Artificial Sequence
  Chemically synthesized
uuucagcaaggccugcaagaugg

SEQ ID NO: 53345 - RNA, 23 nt, Artificial Sequence
  Chemically synthesized
augaagacagggagcugaugggu

SEQ ID NO: 53346 - RNA, 23 nt, Artificial Sequence
  Chemically synthesized
augucuuggguuuuaccacguuc

SEQ ID NO: 53347 - RNA, 23 nt, Artificial Sequence
  Chemically synthesized
ugucuuggguuuuaccacguucc

SEQ ID NO: 53348 - RNA, 23 nt, Artificial Sequence
  Chemically synthesized
ucccaggugacaaacuccuucag

SEQ ID NO: 53349 - RNA, 23 nt, Artificial Sequence
  Chemically synthesized
aagggugggucauagaucaggaa

SEQ ID NO: 53350 - RNA, 23 nt, Artificial Sequence
  Chemically synthesized
uuaggaaaaugaagacagggagc

SEQ ID NO: 53351 - RNA, 23 nt, Artificial Sequence
  Chemically synthesized
aaaagggugggucauagaucagg

SEQ ID NO: 53352 - RNA, 23 nt, Artificial Sequence
  Chemically synthesized
auagaucaggaacuccgucuccc

SEQ ID NO: 53353 - RNA, 23 nt, Artificial Sequence
  Chemically synthesized
uuugggucagguggaagacagag

SEQ ID NO: 53354 - RNA, 23 nt, Artificial Sequence
  Chemically synthesized
uuugcuggaacugucgguucugg

SEQ ID NO: 53355 - RNA, 23 nt, Artificial Sequence
  Chemically synthesized
ugaugguaaaaaugugcaugagc

SEQ ID NO: 53356 - RNA, 23 nt, Artificial Sequence
  Chemically synthesized
augggucagaggagaaacuuggg

SEQ ID NO: 53357 - RNA, 23 nt, Artificial Sequence
  Chemically synthesized
cauagaucaggaacuccgucucc

SEQ ID NO: 53358 - RNA, 23 nt, Artificial Sequence
  Chemically synthesized
cuggaagguguaguugaacaugg

SEQ ID NO: 53359 - RNA, 23 nt, Artificial Sequence
  Chemically synthesized
agaacaggaugaaguccagagag

SEQ ID NO: 53360 - RNA, 23 nt, Artificial Sequence
  Chemically synthesized
acuuuuucaccuucuggcucagg

SEQ ID NO: 53361 - RNA, 23 nt, Artificial Sequence
  Chemically synthesized
aaaugaagacagggagcugaugg

SEQ ID NO: 53362 - RNA, 23 nt, Artificial Sequence
  Chemically synthesized
gaugggucagaggagaaacuugg

SEQ ID NO: 53363 - RNA, 23 nt, Artificial Sequence
  Chemically synthesized
uuucuuugggucccacugugugc

SEQ ID NO: 53364 - RNA, 23 nt, Artificial Sequence
  Chemically synthesized
ugccgcacuucagcaaguuuuca

SEQ ID NO: 53365 - RNA, 23 nt, Artificial Sequence
  Chemically synthesized
auccaccacguuguacuggaucg

SEQ ID NO: 53366 - RNA, 23 nt, Artificial Sequence
  Chemically synthesized
uaaaaaugugcaugagccggagg

SEQ ID NO: 53367 - RNA, 23 nt, Artificial Sequence
  Chemically synthesized
aacuugccucaggccaaugaccu

SEQ ID NO: 53368 - RNA, 23 nt, Artificial Sequence
  Chemically synthesized
uuuaugcucuuccugcagauggc

SEQ ID NO: 53369 - RNA, 23 nt, Artificial Sequence
  Chemically synthesized
uaaaagggugggucauagaucag

SEQ ID NO: 53370 - RNA, 23 nt, Artificial Sequence
  Chemically synthesized
guucuggagguaguucuccuuca

SEQ ID NO: 53371 - RNA, 23 nt, Artificial Sequence
  Chemically synthesized
ggaagguguaguugaacauggcg

SEQ ID NO: 53372 - RNA, 23 nt, Artificial Sequence
  Chemically synthesized
uguaguugaacauggcgaugagg

SEQ ID NO: 53373 - RNA, 23 nt, Artificial Sequence
  Chemically synthesized
caggaagaggaagaagaagacgu

SEQ ID NO: 53374 - RNA, 23 nt, Artificial Sequence
  Chemically synthesized
gagaugagugcagcugucaucgu

SEQ ID NO: 53375 - RNA, 23 nt, Artificial Sequence
  Chemically synthesized
cuuggaucuuuuugguccacucg

SEQ ID NO: 53376 - RNA, 23 nt, Artificial Sequence
  Chemically synthesized
ugaugggucagaggagaaacuug

SEQ ID NO: 53377 - RNA, 23 nt, Artificial Sequence
  Chemically synthesized
aaugaccuccaugguggaugagc

SEQ ID NO: 53378 - RNA, 23 nt, Artificial Sequence
  Chemically synthesized
aguucuccuucagguagaucucc

SEQ ID NO: 53379 - RNA, 23 nt, Artificial Sequence
  Chemically synthesized
ucuugagcugcuugugccucuug

SEQ ID NO: 53380 - RNA, 23 nt, Artificial Sequence
  Chemically synthesized
uggaagguguaguugaacauggc

SEQ ID NO: 53381 - RNA, 23 nt, Artificial Sequence
  Chemically synthesized
gaagguguaguugaacauggcga

SEQ ID NO: 53382 - RNA, 23 nt, Artificial Sequence
  Chemically synthesized
uucucguggccaaaguggucuug

SEQ ID NO: 53383 - RNA, 23 nt, Artificial Sequence
  Chemically synthesized
uuugguccacucgacaauccugc

SEQ ID NO: 53384 - RNA, 23 nt, Artificial Sequence
  Chemically synthesized
uuuccuuggucugcuccgauaug

SEQ ID NO: 53385 - RNA, 23 nt, Artificial Sequence
  Chemically synthesized
aaaaaugugcaugagccggaggc

SEQ ID NO: 53386 - RNA, 23 nt, Artificial Sequence
  Chemically synthesized
aaacucaggcuuguuggagauga

SEQ ID NO: 53387 - RNA, 23 nt, Artificial Sequence
  Chemically synthesized
uucaggaauccacgaacugaggc

SEQ ID NO: 53388 - RNA, 23 nt, Artificial Sequence
  Chemically synthesized
uugauggccacaccuccucuuuc

SEQ ID NO: 53389 - RNA, 23 nt, Artificial Sequence
  Chemically synthesized
uuccuuggucugcuccgauauga

SEQ ID NO: 53390 - RNA, 23 nt, Artificial Sequence
  Chemically synthesized
uauuuguggaaagcacagaagag

SEQ ID NO: 53391 - RNA, 23 nt, Artificial Sequence
  Chemically synthesized
agauggcagauuuaaugucuugg

SEQ ID NO: 53392 - RNA, 23 nt, Artificial Sequence
  Chemically synthesized
uuuauccugacagucaggaguuc

SEQ ID NO: 53393 - RNA, 23 nt, Artificial Sequence
  Chemically synthesized
uucagcuuccgagguagcaucuc

SEQ ID NO: 53394 - RNA, 23 nt, Artificial Sequence
  Chemically synthesized
uaugcucuuccugcagauggcuc

SEQ ID NO: 53395 - RNA, 23 nt, Artificial Sequence
  Chemically synthesized
aaagggugggucauagaucagga

SEQ ID NO: 53396 - RNA, 23 nt, Artificial Sequence
  Chemically synthesized
augaaguccagagagaggaugac

SEQ ID NO: 53397 - RNA, 23 nt, Artificial Sequence
  Chemically synthesized
auguucagguggaagaccaccac

SEQ ID NO: 53398 - RNA, 23 nt, Artificial Sequence
  Chemically synthesized
ugacaaacuccuucagcugcacc

SEQ ID NO: 53399 - RNA, 23 nt, Artificial Sequence
  Chemically synthesized
gaagaacacgcucaguuucugcu

SEQ ID NO: 53400 - RNA, 23 nt, Artificial Sequence
  Chemically synthesized
agcucuugaagaggcugcuguug

SEQ ID NO: 53401 - RNA, 23 nt, Artificial Sequence
  Chemically synthesized
agugagagugguugcugucuagg

SEQ ID NO: 53402 - RNA, 23 nt, Artificial Sequence
  Chemically synthesized
gagauggcagauuuaaugucuug

SEQ ID NO: 53403 - RNA, 23 nt, Artificial Sequence
  Chemically synthesized
gauggcagauuuaaugucuuggg

SEQ ID NO: 53404 - RNA, 23 nt, Artificial Sequence
  Chemically synthesized
auggcagauuuaaugucuugggu

SEQ ID NO: 53405 - RNA, 23 nt, Artificial Sequence
  Chemically synthesized
gucuuggguuuuaccacguuccc

SEQ ID NO: 53406 - RNA, 23 nt, Artificial Sequence
  Chemically synthesized
guuucuuugggucccacugugug

SEQ ID NO: 53407 - RNA, 23 nt, Artificial Sequence
  Chemically synthesized
acagucaggaguucagacagugc

SEQ ID NO: 53408 - RNA, 23 nt, Artificial Sequence
  Chemically synthesized
uuaugcucuuccugcagauggcu

SEQ ID NO: 53409 - RNA, 23 nt, Artificial Sequence
  Chemically synthesized
uuuugcuggaacugucgguucug

SEQ ID NO: 53410 - RNA, 23 nt, Artificial Sequence
  Chemically synthesized
gaacuuccaaaucugguccgugu

SEQ ID NO: 53411 - RNA, 23 nt, Artificial Sequence
  Chemically synthesized
acuuccaaaucugguccgugugc

SEQ ID NO: 53412 - RNA, 23 nt, Artificial Sequence
  Chemically synthesized
ugguaaaaaugugcaugagccgg

SEQ ID NO: 53413 - RNA, 23 nt, Artificial Sequence
  Chemically synthesized
guucuggacaauggcccaaauga

SEQ ID NO: 53414 - RNA, 23 nt, Artificial Sequence
  Chemically synthesized
aucuuggaucuuuuugguccacu

SEQ ID NO: 53415 - RNA, 23 nt, Artificial Sequence
  Chemically synthesized
agaacacgcucaguuucugcugg

SEQ ID NO: 53416 - RNA, 23 nt, Artificial Sequence
  Chemically synthesized
agauagugauguccgagacaggc

SEQ ID NO: 53417 - RNA, 23 nt, Artificial Sequence
  Chemically synthesized
aagugagagugguugcugucuag

SEQ ID NO: 53418 - RNA, 23 nt, Artificial Sequence
  Chemically synthesized
aaaggcaucgguuggcaucuccu

SEQ ID NO: 53419 - RNA, 23 nt, Artificial Sequence
  Chemically synthesized
aaugucuuggguuuuaccacguu

SEQ ID NO: 53420 - RNA, 23 nt, Artificial Sequence
  Chemically synthesized
uccauguagccuuuguacaccuc

SEQ ID NO: 53421 - RNA, 23 nt, Artificial Sequence
  Chemically synthesized
ucagguagaucucccaggauagc

SEQ ID NO: 53422 - RNA, 23 nt, Artificial Sequence
  Chemically synthesized
uauuccagaagucacugaaguac

SEQ ID NO: 53423 - RNA, 23 nt, Artificial Sequence
  Chemically synthesized
gcacuucucaacaaauuuacacg

SEQ ID NO: 53424 - RNA, 23 nt, Artificial Sequence
  Chemically synthesized
ugcacuucucaacaaauuuacac

SEQ ID NO: 53425 - RNA, 23 nt, Artificial Sequence
  Chemically synthesized
cugcacuucucaacaaauuuaca

SEQ ID NO: 53426 - RNA, 23 nt, Artificial Sequence
  Chemically synthesized
acugcacuucucaacaaauuuac

SEQ ID NO: 53427 - RNA, 23 nt, Artificial Sequence
  Chemically synthesized
gacugcacuucucaacaaauuua

SEQ ID NO: 53428 - RNA, 23 nt, Artificial Sequence
  Chemically synthesized
ccauauauuauaccaguugcuuc

SEQ ID NO: 53429 - RNA, 23 nt, Artificial Sequence
  Chemically synthesized
cccauauauuauaccaguugcuu

SEQ ID NO: 53430 - RNA, 23 nt, Artificial Sequence
  Chemically synthesized
gcccauauauuauaccaguugcu

SEQ ID NO: 53431 - RNA, 23 nt, Artificial Sequence
  Chemically synthesized
ugcccauauauuauaccaguugc

SEQ ID NO: 53432 - RNA, 23 nt, Artificial Sequence
  Chemically synthesized
cugcccauauauuauaccaguug

SEQ ID NO: 53433 - RNA, 23 nt, Artificial Sequence
  Chemically synthesized
gcaaaaugaagggaaacacacgg

SEQ ID NO: 53434 - RNA, 23 nt, Artificial Sequence
  Chemically synthesized
ggcaaaaugaagggaaacacacg

SEQ ID NO: 53435 - RNA, 23 nt, Artificial Sequence
  Chemically synthesized
uggcaaaaugaagggaaacacac

SEQ ID NO: 53436 - RNA, 23 nt, Artificial Sequence
  Chemically synthesized
guggcaaaaugaagggaaacaca

SEQ ID NO: 53437 - RNA, 23 nt, Artificial Sequence
  Chemically synthesized
aguggcaaaaugaagggaaacac

SEQ ID NO: 53438 - RNA, 23 nt, Artificial Sequence
  Chemically synthesized
aaguggcaaaaugaagggaaaca

SEQ ID NO: 53439 - RNA, 23 nt, Artificial Sequence
  Chemically synthesized
gacauuaacuucaaucgauuguu

SEQ ID NO: 53440 - RNA, 23 nt, Artificial Sequence
  Chemically synthesized
agacauuaacuucaaucgauugu

SEQ ID NO: 53441 - RNA, 23 nt, Artificial Sequence
  Chemically synthesized
cagacauuaacuucaaucgauug

SEQ ID NO: 53442 - RNA, 23 nt, Artificial Sequence
  Chemically synthesized
ccagacauuaacuucaaucgauu

SEQ ID NO: 53443 - RNA, 23 nt, Artificial Sequence
  Chemically synthesized
cccagacauuaacuucaaucgau

SEQ ID NO: 53444 - RNA, 23 nt, Artificial Sequence
  Chemically synthesized
cucaacaaauuuacacgacccca

SEQ ID NO: 53445 - RNA, 23 nt, Artificial Sequence
  Chemically synthesized
ucucaacaaauuuacacgacccc

SEQ ID NO: 53446 - RNA, 23 nt, Artificial Sequence
  Chemically synthesized
uucucaacaaauuuacacgaccc

SEQ ID NO: 53447 - RNA, 23 nt, Artificial Sequence
  Chemically synthesized
cuucucaacaaauuuacacgacc

SEQ ID NO: 53448 - RNA, 23 nt, Artificial Sequence
  Chemically synthesized
acuucucaacaaauuuacacgac

SEQ ID NO: 53449 - RNA, 23 nt, Artificial Sequence
  Chemically synthesized
uaaguggcaaaaugaagggaaac

SEQ ID NO: 53450 - RNA, 23 nt, Artificial Sequence
  Chemically synthesized
guaaguggcaaaaugaagggaaa

SEQ ID NO: 53451 - RNA, 23 nt, Artificial Sequence
  Chemically synthesized
acccagacauuaacuucaaucga

SEQ ID NO: 53452 - RNA, 23 nt, Artificial Sequence
  Chemically synthesized
uacccagacauuaacuucaaucg

SEQ ID NO: 53453 - RNA, 23 nt, Artificial Sequence
  Chemically synthesized
uuacccagacauuaacuucaauc

SEQ ID NO: 53454 - RNA, 23 nt, Artificial Sequence
  Chemically synthesized
guuacccagacauuaacuucaau

SEQ ID NO: 53455 - RNA, 23 nt, Artificial Sequence
  Chemically synthesized
agagaauagagacaaucaacagu

SEQ ID NO: 53456 - RNA, 23 nt, Artificial Sequence
  Chemically synthesized
aagagaauagagacaaucaacag

SEQ ID NO: 53457 - RNA, 23 nt, Artificial Sequence
  Chemically synthesized
gaagagaauagagacaaucaaca

SEQ ID NO: 53458 - RNA, 23 nt, Artificial Sequence
  Chemically synthesized
ugaagagaauagagacaaucaac

SEQ ID NO: 53459 - RNA, 23 nt, Artificial Sequence
  Chemically synthesized
gugaagagaauagagacaaucaa

SEQ ID NO: 53460 - RNA, 23 nt, Artificial Sequence
  Chemically synthesized
ggaaucucuuuaacugauuuugc

SEQ ID NO: 53461 - RNA, 23 nt, Artificial Sequence
  Chemically synthesized
aggaaucucuuuaacugauuuug

SEQ ID NO: 53462 - RNA, 23 nt, Artificial Sequence
  Chemically synthesized
caggaaucucuuuaacugauuuu

SEQ ID NO: 53463 - RNA, 23 nt, Artificial Sequence
  Chemically synthesized
ccaggaaucucuuuaacugauuu

SEQ ID NO: 53464 - RNA, 23 nt, Artificial Sequence
  Chemically synthesized
uccaggaaucucuuuaacugauu

SEQ ID NO: 53465 - RNA, 23 nt, Artificial Sequence
  Chemically synthesized
ccaggaaacaaguugaaauccag

SEQ ID NO: 53466 - RNA, 23 nt, Artificial Sequence
  Chemically synthesized
gccaggaaacaaguugaaaucca

SEQ ID NO: 53467 - RNA, 23 nt, Artificial Sequence
  Chemically synthesized
ugccaggaaacaaguugaaaucc

SEQ ID NO: 53468 - RNA, 23 nt, Artificial Sequence
  Chemically synthesized
augccaggaaacaaguugaaauc

SEQ ID NO: 53469 - RNA, 23 nt, Artificial Sequence
  Chemically synthesized
gaugccaggaaacaaguugaaau

SEQ ID NO: 53470 - RNA, 23 nt, Artificial Sequence
  Chemically synthesized
ccauucauauaccaugcugucga

SEQ ID NO: 53471 - RNA, 23 nt, Artificial Sequence
  Chemically synthesized
uccauucauauaccaugcugucg

SEQ ID NO: 53472 - RNA, 23 nt, Artificial Sequence
  Chemically synthesized
auccauucauauaccaugcuguc

SEQ ID NO: 53473 - RNA, 23 nt, Artificial Sequence
  Chemically synthesized
uauccauucauauaccaugcugu

SEQ ID NO: 53474 - RNA, 23 nt, Artificial Sequence
  Chemically synthesized
uuauccauucauauaccaugcug

SEQ ID NO: 53475 - RNA, 23 nt, Artificial Sequence
  Chemically synthesized
gaauguagaaugcagaaauucua

SEQ ID NO: 53476 - RNA, 23 nt, Artificial Sequence
  Chemically synthesized
ugaauguagaaugcagaaauucu

SEQ ID NO: 53477 - RNA, 23 nt, Artificial Sequence
  Chemically synthesized
cugaauguagaaugcagaaauuc

SEQ ID NO: 53478 - RNA, 23 nt, Artificial Sequence
  Chemically synthesized
ccugaauguagaaugcagaaauu

SEQ ID NO: 53479 - RNA, 23 nt, Artificial Sequence
  Chemically synthesized
gccugaauguagaaugcagaaau

SEQ ID NO: 53480 - RNA, 23 nt, Artificial Sequence
  Chemically synthesized
ccacucaacucuuaauaugcuug

SEQ ID NO: 53481 - RNA, 23 nt, Artificial Sequence
  Chemically synthesized
uccacucaacucuuaauaugcuu

SEQ ID NO: 53482 - RNA, 23 nt, Artificial Sequence
  Chemically synthesized
uuccacucaacucuuaauaugcu

SEQ ID NO: 53483 - RNA, 23 nt, Artificial Sequence
  Chemically synthesized
cuuccacucaacucuuaauaugc

SEQ ID NO: 53484 - RNA, 23 nt, Artificial Sequence
  Chemically synthesized
ccuuccacucaacucuuaauaug

SEQ ID NO: 53485 - RNA, 23 nt, Artificial Sequence
  Chemically synthesized
cacgacgaaaugcuaagaugaaa

SEQ ID NO: 53486 - RNA, 23 nt, Artificial Sequence
  Chemically synthesized
ccacgacgaaaugcuaagaugaa

SEQ ID NO: 53487 - RNA, 23 nt, Artificial Sequence
  Chemically synthesized
uccacgacgaaaugcuaagauga

SEQ ID NO: 53488 - RNA, 23 nt, Artificial Sequence
  Chemically synthesized
uuccacgacgaaaugcuaagaug

SEQ ID NO: 53489 - RNA, 23 nt, Artificial Sequence
  Chemically synthesized
uuuccacgacgaaaugcuaagau

SEQ ID NO: 53490 - RNA, 23 nt, Artificial Sequence
  Chemically synthesized
caacaaauuuacacgaccccaaa

SEQ ID NO: 53491 - RNA, 23 nt, Artificial Sequence
  Chemically synthesized
ucaacaaauuuacacgaccccaa

SEQ ID NO: 53492 - RNA, 23 nt, Artificial Sequence
  Chemically synthesized
ggauggacacuaaaggaaucaag

SEQ ID NO: 53493 - RNA, 23 nt, Artificial Sequence
  Chemically synthesized
uggauggacacuaaaggaaucaa

SEQ ID NO: 53494 - RNA, 23 nt, Artificial Sequence
  Chemically synthesized
uuggauggacacuaaaggaauca

SEQ ID NO: 53495 - RNA, 23 nt, Artificial Sequence
  Chemically synthesized
guuggauggacacuaaaggaauc

SEQ ID NO: 53496 - RNA, 23 nt, Artificial Sequence
  Chemically synthesized
aguuggauggacacuaaaggaau

SEQ ID NO: 53497 - RNA, 23 nt, Artificial Sequence
  Chemically synthesized
agccugaauguagaaugcagaaa

SEQ ID NO: 53498 - RNA, 23 nt, Artificial Sequence
  Chemically synthesized
uagccugaauguagaaugcagaa

SEQ ID NO: 53499 - RNA, 23 nt, Artificial Sequence
  Chemically synthesized
cuagccugaauguagaaugcaga

SEQ ID NO: 53500 - RNA, 23 nt, Artificial Sequence
  Chemically synthesized
ucuagccugaauguagaaugcag

SEQ ID NO: 53501 - RNA, 23 nt, Artificial Sequence
  Chemically synthesized
cggugaaguuagauuacauuucc

SEQ ID NO: 53502 - RNA, 23 nt, Artificial Sequence
  Chemically synthesized
gcggugaaguuagauuacauuuc

SEQ ID NO: 53503 - RNA, 23 nt, Artificial Sequence
  Chemically synthesized
ggcggugaaguuagauuacauuu

SEQ ID NO: 53504 - RNA, 23 nt, Artificial Sequence
  Chemically synthesized
gggcggugaaguuagauuacauu

SEQ ID NO: 53505 - RNA, 23 nt, Artificial Sequence
  Chemically synthesized
agggcggugaaguuagauuacau

SEQ ID NO: 53506 - RNA, 23 nt, Artificial Sequence
  Chemically synthesized
aagggcggugaaguuagauuaca

SEQ ID NO: 53507 - RNA, 23 nt, Artificial Sequence
  Chemically synthesized
uaagggcggugaaguuagauuac

SEQ ID NO: 53508 - RNA, 23 nt, Artificial Sequence
  Chemically synthesized
cuaagggcggugaaguuagauua

SEQ ID NO: 53509 - RNA, 23 nt, Artificial Sequence
  Chemically synthesized
ggaaacgguacucuacuaagggc

SEQ ID NO: 53510 - RNA, 23 nt, Artificial Sequence
  Chemically synthesized
aggaaacgguacucuacuaaggg

SEQ ID NO: 53511 - RNA, 23 nt, Artificial Sequence
  Chemically synthesized
uaggaaacgguacucuacuaagg

SEQ ID NO: 53512 - RNA, 23 nt, Artificial Sequence
  Chemically synthesized
uuaggaaacgguacucuacuaag

SEQ ID NO: 53513 - RNA, 23 nt, Artificial Sequence
  Chemically synthesized
uuuaggaaacgguacucuacuaa

SEQ ID NO: 53514 - RNA, 23 nt, Artificial Sequence
  Chemically synthesized
agugaagagaauagagacaauca

SEQ ID NO: 53515 - RNA, 23 nt, Artificial Sequence
  Chemically synthesized
uagugaagagaauagagacaauc

SEQ ID NO: 53516 - RNA, 23 nt, Artificial Sequence
  Chemically synthesized
auagugaagagaauagagacaau

SEQ ID NO: 53517 - RNA, 23 nt, Artificial Sequence
  Chemically synthesized
gggaacuucaugcugauuuguac

SEQ ID NO: 53518 - RNA, 23 nt, Artificial Sequence
  Chemically synthesized
ugggaacuucaugcugauuugua

SEQ ID NO: 53519 - RNA, 23 nt, Artificial Sequence
  Chemically synthesized
cugggaacuucaugcugauuugu

SEQ ID NO: 53520 - RNA, 23 nt, Artificial Sequence
  Chemically synthesized
acugggaacuucaugcugauuug

SEQ ID NO: 53521 - RNA, 23 nt, Artificial Sequence
  Chemically synthesized
aacugggaacuucaugcugauuu

SEQ ID NO: 53522 - RNA, 23 nt, Artificial Sequence
  Chemically synthesized
uggaauaaaaggagguuuuccug

SEQ ID NO: 53523 - RNA, 23 nt, Artificial Sequence
  Chemically synthesized
guggaauaaaaggagguuuuccu

SEQ ID NO: 53524 - RNA, 23 nt, Artificial Sequence
  Chemically synthesized
uguggaauaaaaggagguuuucc

SEQ ID NO: 53525 - RNA, 23 nt, Artificial Sequence
  Chemically synthesized
auguggaauaaaaggagguuuuc

SEQ ID NO: 53526 - RNA, 23 nt, Artificial Sequence
  Chemically synthesized
aauguggaauaaaaggagguuuu

SEQ ID NO: 53527 - RNA, 23 nt, Artificial Sequence
  Chemically synthesized
gcauaaugcaaaccuccuagguu

SEQ ID NO: 53528 - RNA, 23 nt, Artificial Sequence
  Chemically synthesized
ugcauaaugcaaaccuccuaggu

SEQ ID NO: 53529 - RNA, 23 nt, Artificial Sequence
  Chemically synthesized
uugcauaaugcaaaccuccuagg

SEQ ID NO: 53530 - RNA, 23 nt, Artificial Sequence
  Chemically synthesized
guugcauaaugcaaaccuccuag

SEQ ID NO: 53531 - RNA, 23 nt, Artificial Sequence
  Chemically synthesized
uguugcauaaugcaaaccuccua

SEQ ID NO: 53532 - RNA, 23 nt, Artificial Sequence
  Chemically synthesized
cucaacucuuaauaugcuugcau

SEQ ID NO: 53533 - RNA, 23 nt, Artificial Sequence
  Chemically synthesized
acucaacucuuaauaugcuugca

SEQ ID NO: 53534 - RNA, 23 nt, Artificial Sequence
  Chemically synthesized
cacucaacucuuaauaugcuugc

SEQ ID NO: 53535 - RNA, 23 nt, Artificial Sequence
  Chemically synthesized
cgauacuacaaugaagaaugcag

SEQ ID NO: 53536 - RNA, 23 nt, Artificial Sequence
  Chemically synthesized
acgauacuacaaugaagaaugca

SEQ ID NO: 53537 - RNA, 23 nt, Artificial Sequence
  Chemically synthesized
uacgauacuacaaugaagaaugc

SEQ ID NO: 53538 - RNA, 23 nt, Artificial Sequence
  Chemically synthesized
cuacgauacuacaaugaagaaug

SEQ ID NO: 53539 - RNA, 23 nt, Artificial Sequence
  Chemically synthesized
gcuacgauacuacaaugaagaau

SEQ ID NO: 53540 - RNA, 23 nt, Artificial Sequence
  Chemically synthesized
agccuuaauacagauauuggcag

SEQ ID NO: 53541 - RNA, 23 nt, Artificial Sequence
  Chemically synthesized
aagccuuaauacagauauuggca

SEQ ID NO: 53542 - RNA, 23 nt, Artificial Sequence
  Chemically synthesized
aaagccuuaauacagauauuggc

SEQ ID NO: 53543 - RNA, 23 nt, Artificial Sequence
  Chemically synthesized
aaaagccuuaauacagauauugg

SEQ ID NO: 53544 - RNA, 23 nt, Artificial Sequence
  Chemically synthesized
uaaaagccuuaauacagauauug

SEQ ID NO: 53545 - RNA, 23 nt, Artificial Sequence
  Chemically synthesized
gcaugcuacagguggauuuugca

SEQ ID NO: 53546 - RNA, 23 nt, Artificial Sequence
  Chemically synthesized
ggcaugcuacagguggauuuugc

SEQ ID NO: 53547 - RNA, 23 nt, Artificial Sequence
  Chemically synthesized
aggcaugcuacagguggauuuug

SEQ ID NO: 53548 - RNA, 23 nt, Artificial Sequence
  Chemically synthesized
aaggcaugcuacagguggauuuu

SEQ ID NO: 53549 - RNA, 23 nt, Artificial Sequence
  Chemically synthesized
caaggcaugcuacagguggauuu

SEQ ID NO: 53550 - RNA, 23 nt, Artificial Sequence
  Chemically synthesized
aguuacccagacauuaacuucaa

SEQ ID NO: 53551 - RNA, 23 nt, Artificial Sequence
  Chemically synthesized
caagaauagaauccaugaugagu

SEQ ID NO: 53552 - RNA, 23 nt, Artificial Sequence
  Chemically synthesized
acaagaauagaauccaugaugag

SEQ ID NO: 53553 - RNA, 23 nt, Artificial Sequence
  Chemically synthesized
uacaagaauagaauccaugauga

SEQ ID NO: 53554 - RNA, 23 nt, Artificial Sequence
  Chemically synthesized
auacaagaauagaauccaugaug

SEQ ID NO: 53555 - RNA, 23 nt, Artificial Sequence
  Chemically synthesized
aauacaagaauagaauccaugau

SEQ ID NO: 53556 - RNA, 23 nt, Artificial Sequence
  Chemically synthesized
ggaacagauugccagucuuuuag

SEQ ID NO: 53557 - RNA, 23 nt, Artificial Sequence
  Chemically synthesized
aggaacagauugccagucuuuua

SEQ ID NO: 53558 - RNA, 23 nt, Artificial Sequence
  Chemically synthesized
caggaacagauugccagucuuuu

SEQ ID NO: 53559 - RNA, 23 nt, Artificial Sequence
  Chemically synthesized
gcaggaacagauugccagucuuu

SEQ ID NO: 53560 - RNA, 23 nt, Artificial Sequence
  Chemically synthesized
cgcaggaacagauugccagucuu

SEQ ID NO: 53561 - RNA, 23 nt, Artificial Sequence
  Chemically synthesized
ggaaucagaaaguuuggauagua

SEQ ID NO: 53562 - RNA, 23 nt, Artificial Sequence
  Chemically synthesized
cggaaucagaaaguuuggauagu

SEQ ID NO: 53563 - RNA, 23 nt, Artificial Sequence
  Chemically synthesized
gcggaaucagaaaguuuggauag

SEQ ID NO: 53564 - RNA, 23 nt, Artificial Sequence
  Chemically synthesized
agcggaaucagaaaguuuggaua

SEQ ID NO: 53565 - RNA, 23 nt, Artificial Sequence
  Chemically synthesized
cagcggaaucagaaaguuuggau

SEQ ID NO: 53566 - RNA, 23 nt, Artificial Sequence
  Chemically synthesized
cacuucucaacaaauuuacacga

SEQ ID NO: 53567 - RNA, 23 nt, Artificial Sequence
  Chemically synthesized
ggacacuaaaggaaucaagacag

SEQ ID NO: 53568 - RNA, 23 nt, Artificial Sequence
  Chemically synthesized
uggacacuaaaggaaucaagaca

SEQ ID NO: 53569 - RNA, 23 nt, Artificial Sequence
  Chemically synthesized
auggacacuaaaggaaucaagac

SEQ ID NO: 53570 - RNA, 23 nt, Artificial Sequence
  Chemically synthesized
gauggacacuaaaggaaucaaga

SEQ ID NO: 53571 - RNA, 23 nt, Artificial Sequence
  Chemically synthesized
caguuggauggacacuaaaggaa

SEQ ID NO: 53572 - RNA, 23 nt, Artificial Sequence
  Chemically synthesized
ggaaauauuucuagccugaaugu

SEQ ID NO: 53573 - RNA, 23 nt, Artificial Sequence
  Chemically synthesized
uggaaauauuucuagccugaaug

SEQ ID NO: 53574 - RNA, 23 nt, Artificial Sequence
  Chemically synthesized
cuggaaauauuucuagccugaau

SEQ ID NO: 53575 - RNA, 23 nt, Artificial Sequence
  Chemically synthesized
ccuggaaauauuucuagccugaa

SEQ ID NO: 53576 - RNA, 23 nt, Artificial Sequence
  Chemically synthesized
accuggaaauauuucuagccuga

SEQ ID NO: 53577 - RNA, 23 nt, Artificial Sequence
  Chemically synthesized
cgcacuggaaugaaugauuuaaa

SEQ ID NO: 53578 - RNA, 23 nt, Artificial Sequence
  Chemically synthesized
ucgcacuggaaugaaugauuuaa

SEQ ID NO: 53579 - RNA, 23 nt, Artificial Sequence
  Chemically synthesized
gucgcacuggaaugaaugauuua

SEQ ID NO: 53580 - RNA, 23 nt, Artificial Sequence
  Chemically synthesized
agucgcacuggaaugaaugauuu

SEQ ID NO: 53581 - RNA, 23 nt, Artificial Sequence
  Chemically synthesized
gagucgcacuggaaugaaugauu

SEQ ID NO: 53582 - RNA, 23 nt, Artificial Sequence
  Chemically synthesized
ccuucaagguuccaagcaagaga

SEQ ID NO: 53583 - RNA, 23 nt, Artificial Sequence
  Chemically synthesized
accuucaagguuccaagcaagag

SEQ ID NO: 53584 - RNA, 23 nt, Artificial Sequence
  Chemically synthesized
aaccuucaagguuccaagcaaga

SEQ ID NO: 53585 - RNA, 23 nt, Artificial Sequence
  Chemically synthesized
aaaccuucaagguuccaagcaag

SEQ ID NO: 53586 - RNA, 23 nt, Artificial Sequence
  Chemically synthesized
uaaaccuucaagguuccaagcaa

SEQ ID NO: 53587 - RNA, 23 nt, Artificial Sequence
  Chemically synthesized
caaauugacuagacaagaaaguu

SEQ ID NO: 53588 - RNA, 23 nt, Artificial Sequence
  Chemically synthesized
acaaauugacuagacaagaaagu

SEQ ID NO: 53589 - RNA, 23 nt, Artificial Sequence
  Chemically synthesized
aacaaauugacuagacaagaaag

SEQ ID NO: 53590 - RNA, 23 nt, Artificial Sequence
  Chemically synthesized
caacaaauugacuagacaagaaa

SEQ ID NO: 53591 - RNA, 23 nt, Artificial Sequence
  Chemically synthesized
acaacaaauugacuagacaagaa

SEQ ID NO: 53592 - RNA, 23 nt, Artificial Sequence
  Chemically synthesized
cucugaggauguugguacugggc

SEQ ID NO: 53593 - RNA, 23 nt, Artificial Sequence
  Chemically synthesized
gcucugaggauguugguacuggg

SEQ ID NO: 53594 - RNA, 23 nt, Artificial Sequence
  Chemically synthesized
ggcucugaggauguugguacugg

SEQ ID NO: 53595 - RNA, 23 nt, Artificial Sequence
  Chemically synthesized
uggcucugaggauguugguacug

SEQ ID NO: 53596 - RNA, 23 nt, Artificial Sequence
  Chemically synthesized
uuggcucugaggauguugguacu

SEQ ID NO: 53597 - RNA, 23 nt, Artificial Sequence
  Chemically synthesized
gugagcacauaaaaucuaaauaa

SEQ ID NO: 53598 - RNA, 23 nt, Artificial Sequence
  Chemically synthesized
ugugagcacauaaaaucuaaaua

SEQ ID NO: 53599 - RNA, 23 nt, Artificial Sequence
  Chemically synthesized
augugagcacauaaaaucuaaau

SEQ ID NO: 53600 - RNA, 23 nt, Artificial Sequence
  Chemically synthesized
uaugugagcacauaaaaucuaaa

SEQ ID NO: 53601 - RNA, 23 nt, Artificial Sequence
  Chemically synthesized
auaugugagcacauaaaaucuaa

SEQ ID NO: 53602 - RNA, 23 nt, Artificial Sequence
  Chemically synthesized
cucuuuaagugugucuauaugug

SEQ ID NO: 53603 - RNA, 23 nt, Artificial Sequence
  Chemically synthesized
gcucuuuaagugugucuauaugu

SEQ ID NO: 53604 - RNA, 23 nt, Artificial Sequence
  Chemically synthesized
ugcucuuuaagugugucuauaug

SEQ ID NO: 53605 - RNA, 23 nt, Artificial Sequence
  Chemically synthesized
augcucuuuaagugugucuauau

SEQ ID NO: 53606 - RNA, 23 nt, Artificial Sequence
  Chemically synthesized
uaugcucuuuaagugugucuaua

SEQ ID NO: 53607 - RNA, 23 nt, Artificial Sequence
  Chemically synthesized
ugaggcauauucauauaaccaaa

SEQ ID NO: 53608 - RNA, 23 nt, Artificial Sequence
  Chemically synthesized
uugaggcauauucauauaaccaa

SEQ ID NO: 53609 - RNA, 23 nt, Artificial Sequence
  Chemically synthesized
cuugaggcauauucauauaacca

SEQ ID NO: 53610 - RNA, 23 nt, Artificial Sequence
  Chemically synthesized
gcuugaggcauauucauauaacc

SEQ ID NO: 53611 - RNA, 23 nt, Artificial Sequence
  Chemically synthesized
ugcuugaggcauauucauauaac

SEQ ID NO: 53612 - RNA, 23 nt, Artificial Sequence
  Chemically synthesized
aaauguggaauaaaaggagguuu

SEQ ID NO: 53613 - RNA, 23 nt, Artificial Sequence
  Chemically synthesized
cugucuuuuuuccucugaucagu

SEQ ID NO: 53614 - RNA, 23 nt, Artificial Sequence
  Chemically synthesized
ucugucuuuuuuccucugaucag

SEQ ID NO: 53615 - RNA, 23 nt, Artificial Sequence
  Chemically synthesized
gucugucuuuuuuccucugauca

SEQ ID NO: 53616 - RNA, 23 nt, Artificial Sequence
  Chemically synthesized
ugucugucuuuuuuccucugauc

SEQ ID NO: 53617 - RNA, 23 nt, Artificial Sequence
  Chemically synthesized
uugucugucuuuuuuccucugau

SEQ ID NO: 53618 - RNA, 23 nt, Artificial Sequence
  Chemically synthesized
aggguuuuuuucauauguguugc

SEQ ID NO: 53619 - RNA, 23 nt, Artificial Sequence
  Chemically synthesized
uaggguuuuuuucauauguguug

SEQ ID NO: 53620 - RNA, 23 nt, Artificial Sequence
  Chemically synthesized
uuaggguuuuuuucauauguguu

SEQ ID NO: 53621 - RNA, 23 nt, Artificial Sequence
  Chemically synthesized
auuaggguuuuuuucauaugugu

SEQ ID NO: 53622 - RNA, 23 nt, Artificial Sequence
  Chemically synthesized
aauuaggguuuuuuucauaugug

SEQ ID NO: 53623 - RNA, 23 nt, Artificial Sequence
  Chemically synthesized
gccuuccacucaacucuuaauau

SEQ ID NO: 53624 - RNA, 23 nt, Artificial Sequence
  Chemically synthesized
agccuuccacucaacucuuaaua

SEQ ID NO: 53625 - RNA, 23 nt, Artificial Sequence
  Chemically synthesized
gagccuuccacucaacucuuaau

SEQ ID NO: 53626 - RNA, 23 nt, Artificial Sequence
  Chemically synthesized
ugagccuuccacucaacucuuaa

SEQ ID NO: 53627 - RNA, 23 nt, Artificial Sequence
  Chemically synthesized
gugagccuuccacucaacucuua

SEQ ID NO: 53628 - RNA, 23 nt, Artificial Sequence
  Chemically synthesized
gcaauguguaaguggcaaaauga

SEQ ID NO: 53629 - RNA, 23 nt, Artificial Sequence
  Chemically synthesized
agcaauguguaaguggcaaaaug

SEQ ID NO: 53630 - RNA, 23 nt, Artificial Sequence
  Chemically synthesized
cagcaauguguaaguggcaaaau

SEQ ID NO: 53631 - RNA, 23 nt, Artificial Sequence
  Chemically synthesized
gcagcaauguguaaguggcaaaa

SEQ ID NO: 53632 - RNA, 23 nt, Artificial Sequence
  Chemically synthesized
ugcagcaauguguaaguggcaaa

SEQ ID NO: 53633 - RNA, 23 nt, Artificial Sequence
  Chemically synthesized
acaucuaaacucccuccauccug

SEQ ID NO: 53634 - RNA, 23 nt, Artificial Sequence
  Chemically synthesized
uacaucuaaacucccuccauccu

SEQ ID NO: 53635 - RNA, 23 nt, Artificial Sequence
  Chemically synthesized
guacaucuaaacucccuccaucc

SEQ ID NO: 53636 - RNA, 23 nt, Artificial Sequence
  Chemically synthesized
gguacaucuaaacucccuccauc

SEQ ID NO: 53637 - RNA, 23 nt, Artificial Sequence
  Chemically synthesized
ugguacaucuaaacucccuccau

SEQ ID NO: 53638 - RNA, 23 nt, Artificial Sequence
  Chemically synthesized
cggagaaacuuaaaacgcucuuc

SEQ ID NO: 53639 - RNA, 23 nt, Artificial Sequence
  Chemically synthesized
ccggagaaacuuaaaacgcucuu

SEQ ID NO: 53640 - RNA, 23 nt, Artificial Sequence
  Chemically synthesized
accggagaaacuuaaaacgcucu

SEQ ID NO: 53641 - RNA, 23 nt, Artificial Sequence
  Chemically synthesized
aaccggagaaacuuaaaacgcuc

SEQ ID NO: 53642 - RNA, 23 nt, Artificial Sequence
  Chemically synthesized
aaaccggagaaacuuaaaacgcu

SEQ ID NO: 53643 - RNA, 23 nt, Artificial Sequence
  Chemically synthesized
cuaagaugaaaucggaguauucu

SEQ ID NO: 53644 - RNA, 23 nt, Artificial Sequence
  Chemically synthesized
gcuaagaugaaaucggaguauuc

SEQ ID NO: 53645 - RNA, 23 nt, Artificial Sequence
  Chemically synthesized
ugcuaagaugaaaucggaguauu

SEQ ID NO: 53646 - RNA, 23 nt, Artificial Sequence
  Chemically synthesized
augcuaagaugaaaucggaguau

SEQ ID NO: 53647 - RNA, 23 nt, Artificial Sequence
  Chemically synthesized
aaugcuaagaugaaaucggagua

SEQ ID NO: 53648 - RNA, 23 nt, Artificial Sequence
  Chemically synthesized
auuuccacgacgaaaugcuaaga

SEQ ID NO: 53649 - RNA, 23 nt, Artificial Sequence
  Chemically synthesized
cagaaaguuuggauaguaaagaa

SEQ ID NO: 53650 - RNA, 23 nt, Artificial Sequence
  Chemically synthesized
ucagaaaguuuggauaguaaaga

SEQ ID NO: 53651 - RNA, 23 nt, Artificial Sequence
  Chemically synthesized
aucagaaaguuuggauaguaaag

SEQ ID NO: 53652 - RNA, 23 nt, Artificial Sequence
  Chemically synthesized
aaucagaaaguuuggauaguaaa

SEQ ID NO: 53653 - RNA, 23 nt, Artificial Sequence
  Chemically synthesized
gaaucagaaaguuuggauaguaa

SEQ ID NO: 53654 - RNA, 23 nt, Artificial Sequence
  Chemically synthesized
aggaugcuauucugaaauacaau

SEQ ID NO: 53655 - RNA, 23 nt, Artificial Sequence
  Chemically synthesized
aaggaugcuauucugaaauacaa

SEQ ID NO: 53656 - RNA, 23 nt, Artificial Sequence
  Chemically synthesized
gaaggaugcuauucugaaauaca

SEQ ID NO: 53657 - RNA, 23 nt, Artificial Sequence
  Chemically synthesized
ugaaggaugcuauucugaaauac

SEQ ID NO: 53658 - RNA, 23 nt, Artificial Sequence
  Chemically synthesized
uugaaggaugcuauucugaaaua

SEQ ID NO: 53659 - RNA, 23 nt, Artificial Sequence
  Chemically synthesized
ccuuuuccaacacauuauaaaga

SEQ ID NO: 53660 - RNA, 23 nt, Artificial Sequence
  Chemically synthesized
accuuuuccaacacauuauaaag

SEQ ID NO: 53661 - RNA, 23 nt, Artificial Sequence
  Chemically synthesized
aaccuuuuccaacacauuauaaa

SEQ ID NO: 53662 - RNA, 23 nt, Artificial Sequence
  Chemically synthesized
aaaccuuuuccaacacauuauaa

SEQ ID NO: 53663 - RNA, 23 nt, Artificial Sequence
  Chemically synthesized
uaaaccuuuuccaacacauuaua

SEQ ID NO: 53664 - RNA, 23 nt, Artificial Sequence
  Chemically synthesized
ugcuaaacuaccuggaaauauuu

SEQ ID NO: 53665 - RNA, 23 nt, Artificial Sequence
  Chemically synthesized
augcuaaacuaccuggaaauauu

SEQ ID NO: 53666 - RNA, 23 nt, Artificial Sequence
  Chemically synthesized
aaugcuaaacuaccuggaaauau

SEQ ID NO: 53667 - RNA, 23 nt, Artificial Sequence
  Chemically synthesized
aaaugcuaaacuaccuggaaaua

SEQ ID NO: 53668 - RNA, 23 nt, Artificial Sequence
  Chemically synthesized
uaaaugcuaaacuaccuggaaau

SEQ ID NO: 53669 - RNA, 23 nt, Artificial Sequence
  Chemically synthesized
uccucccaaacagcaaauaaacc

SEQ ID NO: 53670 - RNA, 23 nt, Artificial Sequence
  Chemically synthesized
uuccucccaaacagcaaauaaac

SEQ ID NO: 53671 - RNA, 23 nt, Artificial Sequence
  Chemically synthesized
guuccucccaaacagcaaauaaa

SEQ ID NO: 53672 - RNA, 23 nt, Artificial Sequence
  Chemically synthesized
aguuccucccaaacagcaaauaa

SEQ ID NO: 53673 - RNA, 23 nt, Artificial Sequence
  Chemically synthesized
uaguuccucccaaacagcaaaua

SEQ ID NO: 53674 - RNA, 23 nt, Artificial Sequence
  Chemically synthesized
ucaagacucagaagcagaugagg

SEQ ID NO: 53675 - RNA, 23 nt, Artificial Sequence
  Chemically synthesized
gucaagacucagaagcagaugag

SEQ ID NO: 53676 - RNA, 23 nt, Artificial Sequence
  Chemically synthesized
ugucaagacucagaagcagauga

SEQ ID NO: 53677 - RNA, 23 nt, Artificial Sequence
  Chemically synthesized
uugucaagacucagaagcagaug

SEQ ID NO: 53678 - RNA, 23 nt, Artificial Sequence
  Chemically synthesized
guugucaagacucagaagcagau

SEQ ID NO: 53679 - RNA, 23 nt, Artificial Sequence
  Chemically synthesized
guuggcucugaggauguugguac

SEQ ID NO: 53680 - RNA, 23 nt, Artificial Sequence
  Chemically synthesized
uguuggcucugaggauguuggua

SEQ ID NO: 53681 - RNA, 23 nt, Artificial Sequence
  Chemically synthesized
ucagcaagaugagauagaugugg

SEQ ID NO: 53682 - RNA, 23 nt, Artificial Sequence
  Chemically synthesized
gucagcaagaugagauagaugug

SEQ ID NO: 53683 - RNA, 23 nt, Artificial Sequence
  Chemically synthesized
ugucagcaagaugagauagaugu

SEQ ID NO: 53684 - RNA, 23 nt, Artificial Sequence
  Chemically synthesized
uugucagcaagaugagauagaug

SEQ ID NO: 53685 - RNA, 23 nt, Artificial Sequence
  Chemically synthesized
guugucagcaagaugagauagau

SEQ ID NO: 53686 - RNA, 23 nt, Artificial Sequence
  Chemically synthesized
ggaacuucaugcugauuuguaca

SEQ ID NO: 53687 - RNA, 23 nt, Artificial Sequence
  Chemically synthesized
uguaaguggcaaaaugaagggaa

SEQ ID NO: 53688 - RNA, 23 nt, Artificial Sequence
  Chemically synthesized
ugguuugucugucuuuuuuccuc

SEQ ID NO: 53689 - RNA, 23 nt, Artificial Sequence
  Chemically synthesized
augguuugucugucuuuuuuccu

SEQ ID NO: 53690 - RNA, 23 nt, Artificial Sequence
  Chemically synthesized
aaugguuugucugucuuuuuucc

SEQ ID NO: 53691 - RNA, 23 nt, Artificial Sequence
  Chemically synthesized
uaaugguuugucugucuuuuuuc

SEQ ID NO: 53692 - RNA, 23 nt, Artificial Sequence
  Chemically synthesized
guaaugguuugucugucuuuuuu

SEQ ID NO: 53693 - RNA, 23 nt, Artificial Sequence
  Chemically synthesized
ccugcccauauauuauaccaguu

SEQ ID NO: 53694 - RNA, 23 nt, Artificial Sequence
  Chemically synthesized
uccugcccauauauuauaccagu

SEQ ID NO: 53695 - RNA, 23 nt, Artificial Sequence
  Chemically synthesized
uuccugcccauauauuauaccag

SEQ ID NO: 53696 - RNA, 23 nt, Artificial Sequence
  Chemically synthesized
cuuccugcccauauauuauacca

SEQ ID NO: 53697 - RNA, 23 nt, Artificial Sequence
  Chemically synthesized
ggacuuagauauguuuuguuucu

SEQ ID NO: 53698 - RNA, 23 nt, Artificial Sequence
  Chemically synthesized
uggacuuagauauguuuuguuuc

SEQ ID NO: 53699 - RNA, 23 nt, Artificial Sequence
  Chemically synthesized
guggacuuagauauguuuuguuu

SEQ ID NO: 53700 - RNA, 23 nt, Artificial Sequence
  Chemically synthesized
cguggacuuagauauguuuuguu

SEQ ID NO: 53701 - RNA, 23 nt, Artificial Sequence
  Chemically synthesized
acguggacuuagauauguuuugu

SEQ ID NO: 53702 - RNA, 23 nt, Artificial Sequence
  Chemically synthesized
cacguggacuuagauauguuuug

SEQ ID NO: 53703 - RNA, 23 nt, Artificial Sequence
  Chemically synthesized
ucacguggacuuagauauguuuu

SEQ ID NO: 53704 - RNA, 23 nt, Artificial Sequence
  Chemically synthesized
cucacguggacuuagauauguuu

SEQ ID NO: 53705 - RNA, 23 nt, Artificial Sequence
  Chemically synthesized
gcugucagguguaauauaugaau

SEQ ID NO: 53706 - RNA, 23 nt, Artificial Sequence
  Chemically synthesized
agcugucagguguaauauaugaa

SEQ ID NO: 53707 - RNA, 23 nt, Artificial Sequence
  Chemically synthesized
gagcugucagguguaauauauga

SEQ ID NO: 53708 - RNA, 23 nt, Artificial Sequence
  Chemically synthesized
ugagcugucagguguaauauaug

SEQ ID NO: 53709 - RNA, 23 nt, Artificial Sequence
  Chemically synthesized
uugagcugucagguguaauauau

SEQ ID NO: 53710 - RNA, 23 nt, Artificial Sequence
  Chemically synthesized
uuuauccauucauauaccaugcu

SEQ ID NO: 53711 - RNA, 23 nt, Artificial Sequence
  Chemically synthesized
gaauugaugagagacauuuacag

SEQ ID NO: 53712 - RNA, 23 nt, Artificial Sequence
  Chemically synthesized
agaauugaugagagacauuuaca

SEQ ID NO: 53713 - RNA, 23 nt, Artificial Sequence
  Chemically synthesized
cagaauugaugagagacauuuac

SEQ ID NO: 53714 - RNA, 23 nt, Artificial Sequence
  Chemically synthesized
ucagaauugaugagagacauuua

SEQ ID NO: 53715 - RNA, 23 nt, Artificial Sequence
  Chemically synthesized
cucagaauugaugagagacauuu

SEQ ID NO: 53716 - RNA, 23 nt, Artificial Sequence
  Chemically synthesized
gacgaaaugcuaagaugaaaucg

SEQ ID NO: 53717 - RNA, 23 nt, Artificial Sequence
  Chemically synthesized
cgacgaaaugcuaagaugaaauc

SEQ ID NO: 53718 - RNA, 23 nt, Artificial Sequence
  Chemically synthesized
acgacgaaaugcuaagaugaaau

SEQ ID NO: 53719 - RNA, 23 nt, Artificial Sequence
  Chemically synthesized
gccaauaccacuccugaaacaga

SEQ ID NO: 53720 - RNA, 23 nt, Artificial Sequence
  Chemically synthesized
agccaauaccacuccugaaacag

SEQ ID NO: 53721 - RNA, 23 nt, Artificial Sequence
  Chemically synthesized
cagccaauaccacuccugaaaca

SEQ ID NO: 53722 - RNA, 23 nt, Artificial Sequence
  Chemically synthesized
ccagccaauaccacuccugaaac

SEQ ID NO: 53723 - RNA, 23 nt, Artificial Sequence
  Chemically synthesized
cccagccaauaccacuccugaaa

SEQ ID NO: 53724 - RNA, 23 nt, Artificial Sequence
  Chemically synthesized
ggaugcuauucugaaauacaaug

SEQ ID NO: 53725 - RNA, 23 nt, Artificial Sequence
  Chemically synthesized
agacugcacuucucaacaaauuu

SEQ ID NO: 53726 - RNA, 23 nt, Artificial Sequence
  Chemically synthesized
cuaaaccuuuuccaacacauuau

SEQ ID NO: 53727 - RNA, 23 nt, Artificial Sequence
  Chemically synthesized
ccuaaaccuuuuccaacacauua

SEQ ID NO: 53728 - RNA, 23 nt, Artificial Sequence
  Chemically synthesized
uccuaaaccuuuuccaacacauu

SEQ ID NO: 53729 - RNA, 23 nt, Artificial Sequence
  Chemically synthesized
uuccuaaaccuuuuccaacacau

SEQ ID NO: 53730 - RNA, 23 nt, Artificial Sequence
  Chemically synthesized
guuccuaaaccuuuuccaacaca

SEQ ID NO: 53731 - RNA, 23 nt, Artificial Sequence
  Chemically synthesized
aguuccuaaaccuuuuccaacac

SEQ ID NO: 53732 - RNA, 23 nt, Artificial Sequence
  Chemically synthesized
ccagauaagaaguggcuuggaac

SEQ ID NO: 53733 - RNA, 23 nt, Artificial Sequence
  Chemically synthesized
uccagauaagaaguggcuuggaa

SEQ ID NO: 53734 - RNA, 23 nt, Artificial Sequence
  Chemically synthesized
cuccagauaagaaguggcuugga

SEQ ID NO: 53735 - RNA, 23 nt, Artificial Sequence
  Chemically synthesized
ucuccagauaagaaguggcuugg

SEQ ID NO: 53736 - RNA, 23 nt, Artificial Sequence
  Chemically synthesized
uucuccagauaagaaguggcuug

SEQ ID NO: 53737 - RNA, 23 nt, Artificial Sequence
  Chemically synthesized
cuaaacuaccuggaaauauuucu

SEQ ID NO: 53738 - RNA, 23 nt, Artificial Sequence
  Chemically synthesized
gcuaaacuaccuggaaauauuuc

SEQ ID NO: 53739 - RNA, 23 nt, Artificial Sequence
  Chemically synthesized
ggugaaguuagauuacauuucca

SEQ ID NO: 53740 - RNA, 23 nt, Artificial Sequence
  Chemically synthesized
agguuuugaugaacaagaagaug

SEQ ID NO: 53741 - RNA, 23 nt, Artificial Sequence
  Chemically synthesized
cagguuuugaugaacaagaagau

SEQ ID NO: 53742 - RNA, 23 nt, Artificial Sequence
  Chemically synthesized
ccagguuuugaugaacaagaaga

SEQ ID NO: 53743 - RNA, 23 nt, Artificial Sequence
  Chemically synthesized
uccagguuuugaugaacaagaag

SEQ ID NO: 53744 - RNA, 23 nt, Artificial Sequence
  Chemically synthesized
guccagguuuugaugaacaagaa

SEQ ID NO: 53745 - RNA, 23 nt, Artificial Sequence
  Chemically synthesized
ggauguggauaauucuaaaaaua

SEQ ID NO: 53746 - RNA, 23 nt, Artificial Sequence
  Chemically synthesized
uggauguggauaauucuaaaaau

SEQ ID NO: 53747 - RNA, 23 nt, Artificial Sequence
  Chemically synthesized
auggauguggauaauucuaaaaa

SEQ ID NO: 53748 - RNA, 23 nt, Artificial Sequence
  Chemically synthesized
gauggauguggauaauucuaaaa

SEQ ID NO: 53749 - RNA, 23 nt, Artificial Sequence
  Chemically synthesized
cgauggauguggauaauucuaaa

SEQ ID NO: 53750 - RNA, 23 nt, Artificial Sequence
  Chemically synthesized
gcaaaugcaaagcagacuacgga

SEQ ID NO: 53751 - RNA, 23 nt, Artificial Sequence
  Chemically synthesized
ugcaaaugcaaagcagacuacgg

SEQ ID NO: 53752 - RNA, 23 nt, Artificial Sequence
  Chemically synthesized
uugcaaaugcaaagcagacuacg

SEQ ID NO: 53753 - RNA, 23 nt, Artificial Sequence
  Chemically synthesized
cuugcaaaugcaaagcagacuac

SEQ ID NO: 53754 - RNA, 23 nt, Artificial Sequence
  Chemically synthesized
gcuugcaaaugcaaagcagacua

SEQ ID NO: 53755 - RNA, 23 nt, Artificial Sequence
  Chemically synthesized
agaauagagacaaucaacaguuu

SEQ ID NO: 53756 - RNA, 23 nt, Artificial Sequence
  Chemically synthesized
gagaauagagacaaucaacaguu

SEQ ID NO: 53757 - RNA, 23 nt, Artificial Sequence
  Chemically synthesized
gauagugaagagaauagagacaa

SEQ ID NO: 53758 - RNA, 23 nt, Artificial Sequence
  Chemically synthesized
guaugcucuuuaagugugucuau

SEQ ID NO: 53759 - RNA, 23 nt, Artificial Sequence
  Chemically synthesized
gaaaggaaauguggaauaaaagg

SEQ ID NO: 53760 - RNA, 23 nt, Artificial Sequence
  Chemically synthesized
ugaaaggaaauguggaauaaaag

SEQ ID NO: 53761 - RNA, 23 nt, Artificial Sequence
  Chemically synthesized
augaaaggaaauguggaauaaaa

SEQ ID NO: 53762 - RNA, 23 nt, Artificial Sequence
  Chemically synthesized
gaugaaaggaaauguggaauaaa

SEQ ID NO: 53763 - RNA, 23 nt, Artificial Sequence
  Chemically synthesized
agaugaaaggaaauguggaauaa

SEQ ID NO: 53764 - RNA, 23 nt, Artificial Sequence
  Chemically synthesized
uguaaugguuugucugucuuuuu

SEQ ID NO: 53765 - RNA, 23 nt, Artificial Sequence
  Chemically synthesized
cuguaaugguuugucugucuuuu

SEQ ID NO: 53766 - RNA, 23 nt, Artificial Sequence
  Chemically synthesized
ucuguaaugguuugucugucuuu

SEQ ID NO: 53767 - RNA, 23 nt, Artificial Sequence
  Chemically synthesized
aucuguaaugguuugucugucuu

SEQ ID NO: 53768 - RNA, 23 nt, Artificial Sequence
  Chemically synthesized
auccaggaaucucuuuaacugau

SEQ ID NO: 53769 - RNA, 23 nt, Artificial Sequence
  Chemically synthesized
caaguugaaauccaggaaucucu

SEQ ID NO: 53770 - RNA, 23 nt, Artificial Sequence
  Chemically synthesized
acaaguugaaauccaggaaucuc

SEQ ID NO: 53771 - RNA, 23 nt, Artificial Sequence
  Chemically synthesized
aacaaguugaaauccaggaaucu

SEQ ID NO: 53772 - RNA, 23 nt, Artificial Sequence
  Chemically synthesized
aaacaaguugaaauccaggaauc

SEQ ID NO: 53773 - RNA, 23 nt, Artificial Sequence
  Chemically synthesized
gaaacaaguugaaauccaggaau

SEQ ID NO: 53774 - RNA, 23 nt, Artificial Sequence
  Chemically synthesized
acucacguggacuuagauauguu

SEQ ID NO: 53775 - RNA, 23 nt, Artificial Sequence
  Chemically synthesized
cgcaaucucuuccacacaugugc

SEQ ID NO: 53776 - RNA, 23 nt, Artificial Sequence
  Chemically synthesized
acgcaaucucuuccacacaugug

SEQ ID NO: 53777 - RNA, 23 nt, Artificial Sequence
  Chemically synthesized
gacgcaaucucuuccacacaugu

SEQ ID NO: 53778 - RNA, 23 nt, Artificial Sequence
  Chemically synthesized
ggacgcaaucucuuccacacaug

SEQ ID NO: 53779 - RNA, 23 nt, Artificial Sequence
  Chemically synthesized
aggacgcaaucucuuccacacau

SEQ ID NO: 53780 - RNA, 23 nt, Artificial Sequence
  Chemically synthesized
caagcuuuauccauucauauacc

SEQ ID NO: 53781 - RNA, 23 nt, Artificial Sequence
  Chemically synthesized
ucaagcuuuauccauucauauac

SEQ ID NO: 53782 - RNA, 23 nt, Artificial Sequence
  Chemically synthesized
aucaagcuuuauccauucauaua

SEQ ID NO: 53783 - RNA, 23 nt, Artificial Sequence
  Chemically synthesized
caucaagcuuuauccauucauau

SEQ ID NO: 53784 - RNA, 23 nt, Artificial Sequence
  Chemically synthesized
acaucaagcuuuauccauucaua

SEQ ID NO: 53785 - RNA, 23 nt, Artificial Sequence
  Chemically synthesized
acucagaauugaugagagacauu

SEQ ID NO: 53786 - RNA, 23 nt, Artificial Sequence
  Chemically synthesized
gacucagaauugaugagagacau

SEQ ID NO: 53787 - RNA, 23 nt, Artificial Sequence
  Chemically synthesized
gccuuaauacagauauuggcagc

SEQ ID NO: 53788 - RNA, 23 nt, Artificial Sequence
  Chemically synthesized
gaaaauguuucucagcuaagucu

SEQ ID NO: 53789 - RNA, 23 nt, Artificial Sequence
  Chemically synthesized
agaaaauguuucucagcuaaguc

SEQ ID NO: 53790 - RNA, 23 nt, Artificial Sequence
  Chemically synthesized
uagaaaauguuucucagcuaagu

SEQ ID NO: 53791 - RNA, 23 nt, Artificial Sequence
  Chemically synthesized
uuagaaaauguuucucagcuaag

SEQ ID NO: 53792 - RNA, 23 nt, Artificial Sequence
  Chemically synthesized
auuagaaaauguuucucagcuaa

SEQ ID NO: 53793 - RNA, 23 nt, Artificial Sequence
  Chemically synthesized
gaaaaacccuugacacgauugca

SEQ ID NO: 53794 - RNA, 23 nt, Artificial Sequence
  Chemically synthesized
ugaaaaacccuugacacgauugc

SEQ ID NO: 53795 - RNA, 23 nt, Artificial Sequence
  Chemically synthesized
gugaaaaacccuugacacgauug

SEQ ID NO: 53796 - RNA, 23 nt, Artificial Sequence
  Chemically synthesized
ugugaaaaacccuugacacgauu

SEQ ID NO: 53797 - RNA, 23 nt, Artificial Sequence
  Chemically synthesized
augugaaaaacccuugacacgau

SEQ ID NO: 53798 - RNA, 23 nt, Artificial Sequence
  Chemically synthesized
acagagucuugaagauuuuccag

SEQ ID NO: 53799 - RNA, 23 nt, Artificial Sequence
  Chemically synthesized
gacagagucuugaagauuuucca

SEQ ID NO: 53800 - RNA, 23 nt, Artificial Sequence
  Chemically synthesized
agacagagucuugaagauuuucc

SEQ ID NO: 53801 - RNA, 23 nt, Artificial Sequence
  Chemically synthesized
aagacagagucuugaagauuuuc

SEQ ID NO: 53802 - RNA, 23 nt, Artificial Sequence
  Chemically synthesized
caagacagagucuugaagauuuu

SEQ ID NO: 53803 - RNA, 23 nt, Artificial Sequence
  Chemically synthesized
ugaaucauuccaucacaaugucg

SEQ ID NO: 53804 - RNA, 23 nt, Artificial Sequence
  Chemically synthesized
augaaucauuccaucacaauguc

SEQ ID NO: 53805 - RNA, 23 nt, Artificial Sequence
  Chemically synthesized
gaugaaucauuccaucacaaugu

SEQ ID NO: 53806 - RNA, 23 nt, Artificial Sequence
  Chemically synthesized
agaugaaucauuccaucacaaug

SEQ ID NO: 53807 - RNA, 23 nt, Artificial Sequence
  Chemically synthesized
aagaugaaucauuccaucacaau

SEQ ID NO: 53808 - RNA, 23 nt, Artificial Sequence
  Chemically synthesized
ugaucgauuucugggauaaggua

SEQ ID NO: 53809 - RNA, 23 nt, Artificial Sequence
  Chemically synthesized
uugaucgauuucugggauaaggu

SEQ ID NO: 53810 - RNA, 23 nt, Artificial Sequence
  Chemically synthesized
uuugaucgauuucugggauaagg

SEQ ID NO: 53811 - RNA, 23 nt, Artificial Sequence
  Chemically synthesized
cuuugaucgauuucugggauaag

SEQ ID NO: 53812 - RNA, 23 nt, Artificial Sequence
  Chemically synthesized
gcuuugaucgauuucugggauaa

SEQ ID NO: 53813 - RNA, 23 nt, Artificial Sequence
  Chemically synthesized
gaaauacaauguggcauauucua

SEQ ID NO: 53814 - RNA, 23 nt, Artificial Sequence
  Chemically synthesized
ugaaauacaauguggcauauucu

SEQ ID NO: 53815 - RNA, 23 nt, Artificial Sequence
  Chemically synthesized
cugaaauacaauguggcauauuc

SEQ ID NO: 53816 - RNA, 23 nt, Artificial Sequence
  Chemically synthesized
ucugaaauacaauguggcauauu

SEQ ID NO: 53817 - RNA, 23 nt, Artificial Sequence
  Chemically synthesized
uucugaaauacaauguggcauau

SEQ ID NO: 53818 - RNA, 23 nt, Artificial Sequence
  Chemically synthesized
auucugaaauacaauguggcaua

SEQ ID NO: 53819 - RNA, 23 nt, Artificial Sequence
  Chemically synthesized
aguaacuauucggguagaucuuu

SEQ ID NO: 53820 - RNA, 23 nt, Artificial Sequence
  Chemically synthesized
caguaacuauucggguagaucuu

SEQ ID NO: 53821 - RNA, 23 nt, Artificial Sequence
  Chemically synthesized
acaguaacuauucggguagaucu

SEQ ID NO: 53822 - RNA, 23 nt, Artificial Sequence
  Chemically synthesized
cacaguaacuauucggguagauc

SEQ ID NO: 53823 - RNA, 23 nt, Artificial Sequence
  Chemically synthesized
acacaguaacuauucggguagau

SEQ ID NO: 53824 - RNA, 23 nt, Artificial Sequence
  Chemically synthesized
cacacaguaacuauucggguaga

SEQ ID NO: 53825 - RNA, 23 nt, Artificial Sequence
  Chemically synthesized
ccaguuggauggacacuaaagga

SEQ ID NO: 53826 - RNA, 23 nt, Artificial Sequence
  Chemically synthesized
accaguuggauggacacuaaagg

SEQ ID NO: 53827 - RNA, 23 nt, Artificial Sequence
  Chemically synthesized
uaccaguuggauggacacuaaag

SEQ ID NO: 53828 - RNA, 23 nt, Artificial Sequence
  Chemically synthesized
uuaccaguuggauggacacuaaa

SEQ ID NO: 53829 - RNA, 23 nt, Artificial Sequence
  Chemically synthesized
ggagaugagaagaaugccucggu

SEQ ID NO: 53830 - RNA, 23 nt, Artificial Sequence
  Chemically synthesized
aggagaugagaagaaugccucgg

SEQ ID NO: 53831 - RNA, 23 nt, Artificial Sequence
  Chemically synthesized
gaggagaugagaagaaugccucg

SEQ ID NO: 53832 - RNA, 23 nt, Artificial Sequence
  Chemically synthesized
ugaggagaugagaagaaugccuc

SEQ ID NO: 53833 - RNA, 23 nt, Artificial Sequence
  Chemically synthesized
uugaggagaugagaagaaugccu

SEQ ID NO: 53834 - RNA, 23 nt, Artificial Sequence
  Chemically synthesized
ccauugaggagaugagaagaaug

SEQ ID NO: 53835 - RNA, 23 nt, Artificial Sequence
  Chemically synthesized
cccauugaggagaugagaagaau

SEQ ID NO: 53836 - RNA, 23 nt, Artificial Sequence
  Chemically synthesized
ucccauugaggagaugagaagaa

SEQ ID NO: 53837 - RNA, 23 nt, Artificial Sequence
  Chemically synthesized
cucccauugaggagaugagaaga

SEQ ID NO: 53838 - RNA, 23 nt, Artificial Sequence
  Chemically synthesized
acucccauugaggagaugagaag

SEQ ID NO: 53839 - RNA, 23 nt, Artificial Sequence
  Chemically synthesized
uucuagccugaauguagaaugca

SEQ ID NO: 53840 - RNA, 23 nt, Artificial Sequence
  Chemically synthesized
uuucuagccugaauguagaaugc

SEQ ID NO: 53841 - RNA, 23 nt, Artificial Sequence
  Chemically synthesized
auuucuagccugaauguagaaug

SEQ ID NO: 53842 - RNA, 23 nt, Artificial Sequence
  Chemically synthesized
ccaccucgcuuguuuucaaacaa

SEQ ID NO: 53843 - RNA, 23 nt, Artificial Sequence
  Chemically synthesized
gccaccucgcuuguuuucaaaca

SEQ ID NO: 53844 - RNA, 23 nt, Artificial Sequence
  Chemically synthesized
cgccaccucgcuuguuuucaaac

SEQ ID NO: 53845 - RNA, 23 nt, Artificial Sequence
  Chemically synthesized
gcgccaccucgcuuguuuucaaa

SEQ ID NO: 53846 - RNA, 23 nt, Artificial Sequence
  Chemically synthesized
agcgccaccucgcuuguuuucaa

SEQ ID NO: 53847 - RNA, 23 nt, Artificial Sequence
  Chemically synthesized
acuaagggcggugaaguuagauu

SEQ ID NO: 53848 - RNA, 23 nt, Artificial Sequence
  Chemically synthesized
aguccagguuuugaugaacaaga

SEQ ID NO: 53849 - RNA, 23 nt, Artificial Sequence
  Chemically synthesized
aaguccagguuuugaugaacaag

SEQ ID NO: 53850 - RNA, 23 nt, Artificial Sequence
  Chemically synthesized
caaguccagguuuugaugaacaa

SEQ ID NO: 53851 - RNA, 23 nt, Artificial Sequence
  Chemically synthesized
gacaaguccagguuuugaugaac

SEQ ID NO: 53852 - RNA, 23 nt, Artificial Sequence
  Chemically synthesized
agacaaguccagguuuugaugaa

SEQ ID NO: 53853 - RNA, 23 nt, Artificial Sequence
  Chemically synthesized
gagacaaguccagguuuugauga

SEQ ID NO: 53854 - RNA, 23 nt, Artificial Sequence
  Chemically synthesized
ggagacaaguccagguuuugaug

SEQ ID NO: 53855 - RNA, 23 nt, Artificial Sequence
  Chemically synthesized
aggagacaaguccagguuuugau

SEQ ID NO: 53856 - RNA, 23 nt, Artificial Sequence
  Chemically synthesized
gcagaugaggagacaaguccagg

SEQ ID NO: 53857 - RNA, 23 nt, Artificial Sequence
  Chemically synthesized
agcagaugaggagacaaguccag

SEQ ID NO: 53858 - RNA, 23 nt, Artificial Sequence
  Chemically synthesized
aagcagaugaggagacaagucca

SEQ ID NO: 53859 - RNA, 23 nt, Artificial Sequence
  Chemically synthesized
gaagcagaugaggagacaagucc

SEQ ID NO: 53860 - RNA, 23 nt, Artificial Sequence
  Chemically synthesized
agaagcagaugaggagacaaguc

SEQ ID NO: 53861 - RNA, 23 nt, Artificial Sequence
  Chemically synthesized
ccgauggauguggauaauucuaa

SEQ ID NO: 53862 - RNA, 23 nt, Artificial Sequence
  Chemically synthesized
accgauggauguggauaauucua

SEQ ID NO: 53863 - RNA, 23 nt, Artificial Sequence
  Chemically synthesized
caccgauggauguggauaauucu

SEQ ID NO: 53864 - RNA, 23 nt, Artificial Sequence
  Chemically synthesized
ucaccgauggauguggauaauuc

SEQ ID NO: 53865 - RNA, 23 nt, Artificial Sequence
  Chemically synthesized
ccaucucucucagguuagugaaa

SEQ ID NO: 53866 - RNA, 23 nt, Artificial Sequence
  Chemically synthesized
uccaucucucucagguuagugaa

SEQ ID NO: 53867 - RNA, 23 nt, Artificial Sequence
  Chemically synthesized
guccaucucucucagguuaguga

SEQ ID NO: 53868 - RNA, 23 nt, Artificial Sequence
  Chemically synthesized
aguccaucucucucagguuagug

SEQ ID NO: 53869 - RNA, 23 nt, Artificial Sequence
  Chemically synthesized
caguccaucucucucagguuagu

SEQ ID NO: 53870 - RNA, 23 nt, Artificial Sequence
  Chemically synthesized
uauaugugagcacauaaaaucua

SEQ ID NO: 53871 - RNA, 23 nt, Artificial Sequence
  Chemically synthesized
gugcuugaggcauauucauauaa

SEQ ID NO: 53872 - RNA, 23 nt, Artificial Sequence
  Chemically synthesized
ggugcuugaggcauauucauaua

SEQ ID NO: 53873 - RNA, 23 nt, Artificial Sequence
  Chemically synthesized
uggugcuugaggcauauucauau

SEQ ID NO: 53874 - RNA, 23 nt, Artificial Sequence
  Chemically synthesized
ggacuaauguuucuuuuguggug

SEQ ID NO: 53875 - RNA, 23 nt, Artificial Sequence
  Chemically synthesized
aggacuaauguuucuuuuguggu

SEQ ID NO: 53876 - RNA, 23 nt, Artificial Sequence
  Chemically synthesized
uaggacuaauguuucuuuugugg

SEQ ID NO: 53877 - RNA, 23 nt, Artificial Sequence
  Chemically synthesized
uuaggacuaauguuucuuuugug

SEQ ID NO: 53878 - RNA, 23 nt, Artificial Sequence
  Chemically synthesized
auuaggacuaauguuucuuuugu

SEQ ID NO: 53879 - RNA, 23 nt, Artificial Sequence
  Chemically synthesized
ggaauaaaaggagguuuuccuga

SEQ ID NO: 53880 - RNA, 23 nt, Artificial Sequence
  Chemically synthesized
gagaugaaaggaaauguggaaua

SEQ ID NO: 53881 - RNA, 23 nt, Artificial Sequence
  Chemically synthesized
ugcuaaaaaucucccugugagcc

SEQ ID NO: 53882 - RNA, 23 nt, Artificial Sequence
  Chemically synthesized
uugcuaaaaaucucccugugagc

SEQ ID NO: 53883 - RNA, 23 nt, Artificial Sequence
  Chemically synthesized
uuugcuaaaaaucucccugugag

SEQ ID NO: 53884 - RNA, 23 nt, Artificial Sequence
  Chemically synthesized
uuuugcuaaaaaucucccuguga

SEQ ID NO: 53885 - RNA, 23 nt, Artificial Sequence
  Chemically synthesized
auuuugcuaaaaaucucccugug

SEQ ID NO: 53886 - RNA, 23 nt, Artificial Sequence
  Chemically synthesized
caggaaacaaguugaaauccagg

SEQ ID NO: 53887 - RNA, 23 nt, Artificial Sequence
  Chemically synthesized
gucaguugguacaucuaaacucc

SEQ ID NO: 53888 - RNA, 23 nt, Artificial Sequence
  Chemically synthesized
ugucaguugguacaucuaaacuc

SEQ ID NO: 53889 - RNA, 23 nt, Artificial Sequence
  Chemically synthesized
uugucaguugguacaucuaaacu

SEQ ID NO: 53890 - RNA, 23 nt, Artificial Sequence
  Chemically synthesized
guugucaguugguacaucuaaac

SEQ ID NO: 53891 - RNA, 23 nt, Artificial Sequence
  Chemically synthesized
aguugucaguugguacaucuaaa

SEQ ID NO: 53892 - RNA, 23 nt, Artificial Sequence
  Chemically synthesized
gucagguguaauauaugaauuga

SEQ ID NO: 53893 - RNA, 23 nt, Artificial Sequence
  Chemically synthesized
ugucagguguaauauaugaauug

SEQ ID NO: 53894 - RNA, 23 nt, Artificial Sequence
  Chemically synthesized
cugucagguguaauauaugaauu

SEQ ID NO: 53895 - RNA, 23 nt, Artificial Sequence
  Chemically synthesized
cgaauagcaucuccucccaccuc

SEQ ID NO: 53896 - RNA, 23 nt, Artificial Sequence
  Chemically synthesized
gcgaauagcaucuccucccaccu

SEQ ID NO: 53897 - RNA, 23 nt, Artificial Sequence
  Chemically synthesized
agcgaauagcaucuccucccacc

SEQ ID NO: 53898 - RNA, 23 nt, Artificial Sequence
  Chemically synthesized
gagcgaauagcaucuccucccac

SEQ ID NO: 53899 - RNA, 23 nt, Artificial Sequence
  Chemically synthesized
cgagcgaauagcaucuccuccca

SEQ ID NO: 53900 - RNA, 23 nt, Artificial Sequence
  Chemically synthesized
ucauauaccaugcugucgagucc

SEQ ID NO: 53901 - RNA, 23 nt, Artificial Sequence
  Chemically synthesized
uucauauaccaugcugucgaguc

SEQ ID NO: 53902 - RNA, 23 nt, Artificial Sequence
  Chemically synthesized
auucauauaccaugcugucgagu

SEQ ID NO: 53903 - RNA, 23 nt, Artificial Sequence
  Chemically synthesized
cauucauauaccaugcugucgag

SEQ ID NO: 53904 - RNA, 23 nt, Artificial Sequence
  Chemically synthesized
gcuuuauccauucauauaccaug

SEQ ID NO: 53905 - RNA, 23 nt, Artificial Sequence
  Chemically synthesized
agcuuuauccauucauauaccau

SEQ ID NO: 53906 - RNA, 23 nt, Artificial Sequence
  Chemically synthesized
aagcuuuauccauucauauacca

SEQ ID NO: 53907 - RNA, 23 nt, Artificial Sequence
  Chemically synthesized
acaaugaagaaugcagaaacugu

SEQ ID NO: 53908 - RNA, 23 nt, Artificial Sequence
  Chemically synthesized
uacaaugaagaaugcagaaacug

SEQ ID NO: 53909 - RNA, 23 nt, Artificial Sequence
  Chemically synthesized
cuacaaugaagaaugcagaaacu

SEQ ID NO: 53910 - RNA, 23 nt, Artificial Sequence
  Chemically synthesized
acuacaaugaagaaugcagaaac

SEQ ID NO: 53911 - RNA, 23 nt, Artificial Sequence
  Chemically synthesized
uacuacaaugaagaaugcagaaa

SEQ ID NO: 53912 - RNA, 23 nt, Artificial Sequence
  Chemically synthesized
agagaaucuuucugcaguggcca

SEQ ID NO: 53913 - RNA, 23 nt, Artificial Sequence
  Chemically synthesized
cagagaaucuuucugcaguggcc

SEQ ID NO: 53914 - RNA, 23 nt, Artificial Sequence
  Chemically synthesized
ucagagaaucuuucugcaguggc

SEQ ID NO: 53915 - RNA, 23 nt, Artificial Sequence
  Chemically synthesized
uucagagaaucuuucugcagugg

SEQ ID NO: 53916 - RNA, 23 nt, Artificial Sequence
  Chemically synthesized
cuucagagaaucuuucugcagug

SEQ ID NO: 53917 - RNA, 23 nt, Artificial Sequence
  Chemically synthesized
ccaaggcaugcuacagguggauu

SEQ ID NO: 53918 - RNA, 23 nt, Artificial Sequence
  Chemically synthesized
gccaaggcaugcuacagguggau

SEQ ID NO: 53919 - RNA, 23 nt, Artificial Sequence
  Chemically synthesized
ugaugaguucuguacaaaaagau

SEQ ID NO: 53920 - RNA, 23 nt, Artificial Sequence
  Chemically synthesized
augaugaguucuguacaaaaaga

SEQ ID NO: 53921 - RNA, 23 nt, Artificial Sequence
  Chemically synthesized
caugaugaguucuguacaaaaag

SEQ ID NO: 53922 - RNA, 23 nt, Artificial Sequence
  Chemically synthesized
ccaugaugaguucuguacaaaaa

SEQ ID NO: 53923 - RNA, 23 nt, Artificial Sequence
  Chemically synthesized
gguuaaaagccuuaauacagaua

SEQ ID NO: 53924 - RNA, 23 nt, Artificial Sequence
  Chemically synthesized
uccaugaugaguucuguacaaaa

SEQ ID NO: 53925 - RNA, 23 nt, Artificial Sequence
  Chemically synthesized
gucuuuuuuccucugaucaguau

SEQ ID NO: 53926 - RNA, 23 nt, Artificial Sequence
  Chemically synthesized
caacauuuauaucaguccaucuu

SEQ ID NO: 53927 - RNA, 23 nt, Artificial Sequence
  Chemically synthesized
caauguguaaguggcaaaaugaa

SEQ ID NO: 53928 - RNA, 23 nt, Artificial Sequence
  Chemically synthesized
caaucgauuguuugagggacguu

SEQ ID NO: 53929 - RNA, 23 nt, Artificial Sequence
  Chemically synthesized
gaaauauuucuagccugaaugua

SEQ ID NO: 53930 - RNA, 23 nt, Artificial Sequence
  Chemically synthesized
caauacaagaauagaauccauga

SEQ ID NO: 53931 - RNA, 23 nt, Artificial Sequence
  Chemically synthesized
acaauacaagaauagaauccaug

SEQ ID NO: 53932 - RNA, 23 nt, Artificial Sequence
  Chemically synthesized
cgguggugggaaagugaacgaau

SEQ ID NO: 53933 - RNA, 23 nt, Artificial Sequence
  Chemically synthesized
agagagaaagcaggcgaguguuu

SEQ ID NO: 53934 - RNA, 23 nt, Artificial Sequence
  Chemically synthesized
ccuuaauacagauauuggcagcu

SEQ ID NO: 53935 - RNA, 23 nt, Artificial Sequence
  Chemically synthesized
agcuuugaucgauuucugggaua

SEQ ID NO: 53936 - RNA, 23 nt, Artificial Sequence
  Chemically synthesized
ccaaaacuugaaggaugcuauuc

SEQ ID NO: 53937 - RNA, 23 nt, Artificial Sequence
  Chemically synthesized
cagaagaaaagaacagugggaaa

SEQ ID NO: 53938 - RNA, 23 nt, Artificial Sequence
  Chemically synthesized
ucagguuagugaaaugaggcucu

SEQ ID NO: 53939 - RNA, 23 nt, Artificial Sequence
  Chemically synthesized
gaaauguggaauaaaaggagguu

SEQ ID NO: 53940 - RNA, 23 nt, Artificial Sequence
  Chemically synthesized
ccagaaauuguacuuuugaggua

SEQ ID NO: 53941 - RNA, 23 nt, Artificial Sequence
  Chemically synthesized
ugcuacgauacuacaaugaagaa

SEQ ID NO: 53942 - RNA, 23 nt, Artificial Sequence
  Chemically synthesized
ccgcuuuuuaaucaauccugagu

SEQ ID NO: 53943 - RNA, 23 nt, Artificial Sequence
  Chemically synthesized
ucgauuguuugagggacguucau

SEQ ID NO: 53944 - RNA, 23 nt, Artificial Sequence
  Chemically synthesized
ucaaucgauuguuugagggacgu

SEQ ID NO: 53945 - RNA, 23 nt, Artificial Sequence
  Chemically synthesized
cccuaaauacguuccaccucacc

SEQ ID NO: 53946 - RNA, 23 nt, Artificial Sequence
  Chemically synthesized
uuaaaugcuaaacuaccuggaaa

SEQ ID NO: 53947 - RNA, 23 nt, Artificial Sequence
  Chemically synthesized
ugauuuaaaugcuaaacuaccug

SEQ ID NO: 53948 - RNA, 23 nt, Artificial Sequence
  Chemically synthesized
gguacucuacuaagggcggugaa

SEQ ID NO: 53949 - RNA, 23 nt, Artificial Sequence
  Chemically synthesized
cggagcagcuuuuggaaagugaa

SEQ ID NO: 53950 - RNA, 23 nt, Artificial Sequence
  Chemically synthesized
cuuuuuuccucugaucaguauuu

SEQ ID NO: 53951 - RNA, 23 nt, Artificial Sequence
  Chemically synthesized
cauuaacuucaaucgauuguuug

SEQ ID NO: 53952 - RNA, 23 nt, Artificial Sequence
  Chemically synthesized
gcucaacauuuauaucaguccau

SEQ ID NO: 53953 - RNA, 23 nt, Artificial Sequence
  Chemically synthesized
cgauuucugggauaagguacuug

SEQ ID NO: 53954 - RNA, 23 nt, Artificial Sequence
  Chemically synthesized
guaacuauucggguagaucuuuu

SEQ ID NO: 53955 - RNA, 23 nt, Artificial Sequence
  Chemically synthesized
ccuaaauacguuccaccucaccu

SEQ ID NO: 53956 - RNA, 23 nt, Artificial Sequence
  Chemically synthesized
cguaugcucuuuaagugugucua

SEQ ID NO: 53957 - RNA, 23 nt, Artificial Sequence
  Chemically synthesized
acguaugcucuuuaagugugucu

SEQ ID NO: 53958 - RNA, 23 nt, Artificial Sequence
  Chemically synthesized
agaaacucccauaucaucuauau

SEQ ID NO: 53959 - RNA, 23 nt, Artificial Sequence
  Chemically synthesized
acauauugaaguuucucugguau

SEQ ID NO: 53960 - RNA, 23 nt, Artificial Sequence
  Chemically synthesized
gaacugggaacuucaugcugauu

SEQ ID NO: 53961 - RNA, 23 nt, Artificial Sequence
  Chemically synthesized
ggagcagcuuuuggaaagugaac

SEQ ID NO: 53962 - RNA, 23 nt, Artificial Sequence
  Chemically synthesized
gcaugcacauuuuccuuacugaa

SEQ ID NO: 53963 - RNA, 23 nt, Artificial Sequence
  Chemically synthesized
ugaaugucuaauuaucacaggua

SEQ ID NO: 53964 - RNA, 23 nt, Artificial Sequence
  Chemically synthesized
gcaggacuugugcaagaagaaau

SEQ ID NO: 53965 - RNA, 23 nt, Artificial Sequence
  Chemically synthesized
gcuacuuuagaagagucacagag

SEQ ID NO: 53966 - RNA, 23 nt, Artificial Sequence
  Chemically synthesized
ucaacauuuauaucaguccaucu

SEQ ID NO: 53967 - RNA, 23 nt, Artificial Sequence
  Chemically synthesized
acaauguggcauauucuaagaaa

SEQ ID NO: 53968 - RNA, 23 nt, Artificial Sequence
  Chemically synthesized
agaagaaaagaacagugggaaac

SEQ ID NO: 53969 - RNA, 23 nt, Artificial Sequence
  Chemically synthesized
gcagaaauucuaagcaacaugga

SEQ ID NO: 53970 - RNA, 23 nt, Artificial Sequence
  Chemically synthesized
ggagagagucgcacuggaaugaa

SEQ ID NO: 53971 - RNA, 23 nt, Artificial Sequence
  Chemically synthesized
gaaacucccauaucaucuauauu

SEQ ID NO: 53972 - RNA, 23 nt, Artificial Sequence
  Chemically synthesized
cagaaacucccauaucaucuaua

SEQ ID NO: 53973 - RNA, 23 nt, Artificial Sequence
  Chemically synthesized
gaaucucuuuaacugauuuugcu

SEQ ID NO: 53974 - RNA, 23 nt, Artificial Sequence
  Chemically synthesized
cagguguaauauaugaauugacu

SEQ ID NO: 53975 - RNA, 23 nt, Artificial Sequence
  Chemically synthesized
ucagguguaauauaugaauugac

SEQ ID NO: 53976 - RNA, 23 nt, Artificial Sequence
  Chemically synthesized
ugaacaaggcuuacuguggauuu

SEQ ID NO: 53977 - RNA, 23 nt, Artificial Sequence
  Chemically synthesized
gagaaaaugagacgcgagcugaa

SEQ ID NO: 53978 - RNA, 23 nt, Artificial Sequence
  Chemically synthesized
cgcuuuuuaaucaauccugaguu

SEQ ID NO: 53979 - RNA, 23 nt, Artificial Sequence
  Chemically synthesized
gaugaaaucggaguauucuaguu

SEQ ID NO: 53980 - RNA, 23 nt, Artificial Sequence
  Chemically synthesized
gcagaagcucaacauuuauauca

SEQ ID NO: 53981 - RNA, 23 nt, Artificial Sequence
  Chemically synthesized
acaacaauacaagaauagaaucc

SEQ ID NO: 53982 - RNA, 23 nt, Artificial Sequence
  Chemically synthesized
caauguggcauauucuaagaaau

SEQ ID NO: 53983 - RNA, 23 nt, Artificial Sequence
  Chemically synthesized
cagauaagaaguggcuuggaacu

SEQ ID NO: 53984 - RNA, 23 nt, Artificial Sequence
  Chemically synthesized
cuaaauacguuccaccucaccuu

SEQ ID NO: 53985 - RNA, 23 nt, Artificial Sequence
  Chemically synthesized
gcacuggaaugaaugauuuaaau

SEQ ID NO: 53986 - RNA, 23 nt, Artificial Sequence
  Chemically synthesized
gagagagucgcacuggaaugaau

SEQ ID NO: 53987 - RNA, 23 nt, Artificial Sequence
  Chemically synthesized
gacauugaauuuaggaaacggua

SEQ ID NO: 53988 - RNA, 23 nt, Artificial Sequence
  Chemically synthesized
cgcugacauugaauuuaggaaac

SEQ ID NO: 53989 - RNA, 23 nt, Artificial Sequence
  Chemically synthesized
ggaagaugaacaggccagagaag

SEQ ID NO: 53990 - RNA, 23 nt, Artificial Sequence
  Chemically synthesized
acagauagugaagagaauagaga

SEQ ID NO: 53991 - RNA, 23 nt, Artificial Sequence
  Chemically synthesized
gcugauuuguacauauugaaguu

SEQ ID NO: 53992 - RNA, 23 nt, Artificial Sequence
  Chemically synthesized
acacacggagcagcuuuuggaaa

SEQ ID NO: 53993 - RNA, 23 nt, Artificial Sequence
  Chemically synthesized
ucuuuuuuccucugaucaguauu

SEQ ID NO: 53994 - RNA, 23 nt, Artificial Sequence
  Chemically synthesized
ugucuuuuuuccucugaucagua

SEQ ID NO: 53995 - RNA, 23 nt, Artificial Sequence
  Chemically synthesized
uguuugagcugucagguguaaua

SEQ ID NO: 53996 - RNA, 23 nt, Artificial Sequence
  Chemically synthesized
gucuaauuaucacagguacugag

SEQ ID NO: 53997 - RNA, 23 nt, Artificial Sequence
  Chemically synthesized
uuaaaacgcucuucugcuacuuu

SEQ ID NO: 53998 - RNA, 23 nt, Artificial Sequence
  Chemically synthesized
aacaaaauuuguacccaguggaa

SEQ ID NO: 53999 - RNA, 23 nt, Artificial Sequence
  Chemically synthesized
ggguagaucuuuugcgagcagga

SEQ ID NO: 54000 - RNA, 23 nt, Artificial Sequence
  Chemically synthesized
agaucccuaaauacguuccaccu

SEQ ID NO: 54001 - RNA, 23 nt, Artificial Sequence
  Chemically synthesized
gcaacauggaaaaaaggauucua

SEQ ID NO: 54002 - RNA, 23 nt, Artificial Sequence
  Chemically synthesized
cuauuaccaguuggauggacacu

SEQ ID NO: 54003 - RNA, 23 nt, Artificial Sequence
  Chemically synthesized
ugacauugaauuuaggaaacggu

SEQ ID NO: 54004 - RNA, 23 nt, Artificial Sequence
  Chemically synthesized
ccaaacagcaaauaaaccuucaa

SEQ ID NO: 54005 - RNA, 23 nt, Artificial Sequence
  Chemically synthesized
cuaaaaauaguugucaagacuca

SEQ ID NO: 54006 - RNA, 23 nt, Artificial Sequence
  Chemically synthesized
ugagauagauguggugccagaga

SEQ ID NO: 54007 - RNA, 23 nt, Artificial Sequence
  Chemically synthesized
cuaauguuucuuuuguggugcuu

SEQ ID NO: 54008 - RNA, 23 nt, Artificial Sequence
  Chemically synthesized
cucuuaauaugcuugcauuguuu

SEQ ID NO: 54009 - RNA, 23 nt, Artificial Sequence
  Chemically synthesized
uucuuuuguccaucagaucucuu

SEQ ID NO: 54010 - RNA, 23 nt, Artificial Sequence
  Chemically synthesized
gcugagcgagaugugguuuauuu

SEQ ID NO: 54011 - RNA, 23 nt, Artificial Sequence
  Chemically synthesized
cugaaaaaaguacacaguauuug

SEQ ID NO: 54012 - RNA, 23 nt, Artificial Sequence
  Chemically synthesized
uccgcuuuuuaaucaauccugag

SEQ ID NO: 54013 - RNA, 23 nt, Artificial Sequence
  Chemically synthesized
agaaauccgcuuuuuaaucaauc

SEQ ID NO: 54014 - RNA, 23 nt, Artificial Sequence
  Chemically synthesized
gaagaaauccgcuuuuuaaucaa

SEQ ID NO: 54015 - RNA, 23 nt, Artificial Sequence
  Chemically synthesized
ggguuggugacauuuacaagaca

SEQ ID NO: 54016 - RNA, 23 nt, Artificial Sequence
  Chemically synthesized
ugaaaucggaguauucuaguuac

SEQ ID NO: 54017 - RNA, 23 nt, Artificial Sequence
  Chemically synthesized
ucgauuucugggauaagguacuu

SEQ ID NO: 54018 - RNA, 23 nt, Artificial Sequence
  Chemically synthesized
cagcuuugaucgauuucugggau

SEQ ID NO: 54019 - RNA, 23 nt, Artificial Sequence
  Chemically synthesized
gcauauucuaagaaaugggacuu

SEQ ID NO: 54020 - RNA, 23 nt, Artificial Sequence
  Chemically synthesized
ggcauauucuaagaaaugggacu

SEQ ID NO: 54021 - RNA, 23 nt, Artificial Sequence
  Chemically synthesized
cuauucugaaauacaauguggca

SEQ ID NO: 54022 - RNA, 23 nt, Artificial Sequence
  Chemically synthesized
gcucauucagacugcacuucuca

SEQ ID NO: 54023 - RNA, 23 nt, Artificial Sequence
  Chemically synthesized
guggcauauucuaagaaauggga

SEQ ID NO: 54024 - RNA, 23 nt, Artificial Sequence
  Chemically synthesized
uguggcauauucuaagaaauggg

SEQ ID NO: 54025 - RNA, 23 nt, Artificial Sequence
  Chemically synthesized
auguggcauauucuaagaaaugg

SEQ ID NO: 54026 - RNA, 23 nt, Artificial Sequence
  Chemically synthesized
aauguggcauauucuaagaaaug

SEQ ID NO: 54027 - RNA, 23 nt, Artificial Sequence
  Chemically synthesized
caauguggcauauucuaagaaau

SEQ ID NO: 54028 - RNA, 23 nt, Artificial Sequence
  Chemically synthesized
gaagaucccuaaauacguuccac

SEQ ID NO: 54029 - RNA, 23 nt, Artificial Sequence
  Chemically synthesized
ggaagaucccuaaauacguucca

SEQ ID NO: 54030 - RNA, 23 nt, Artificial Sequence
  Chemically synthesized
aggaagaucccuaaauacguucc

SEQ ID NO: 54031 - RNA, 23 nt, Artificial Sequence
  Chemically synthesized
aaggaagaucccuaaauacguuc

SEQ ID NO: 54032 - RNA, 23 nt, Artificial Sequence
  Chemically synthesized
aaaggaagaucccuaaauacguu

SEQ ID NO: 54033 - RNA, 23 nt, Artificial Sequence
  Chemically synthesized
cguguaaauuuguugagaagugc

SEQ ID NO: 54034 - RNA, 23 nt, Artificial Sequence
  Chemically synthesized
guguaaauuuguugagaagugca

SEQ ID NO: 54035 - RNA, 23 nt, Artificial Sequence
  Chemically synthesized
uguaaauuuguugagaagugcag

SEQ ID NO: 54036 - RNA, 23 nt, Artificial Sequence
  Chemically synthesized
guaaauuuguugagaagugcagu

SEQ ID NO: 54037 - RNA, 23 nt, Artificial Sequence
  Chemically synthesized
uaaauuuguugagaagugcaguc

SEQ ID NO: 54038 - RNA, 23 nt, Artificial Sequence
  Chemically synthesized
gaagcaacugguauaauauaugg

SEQ ID NO: 54039 - RNA, 23 nt, Artificial Sequence
  Chemically synthesized
aagcaacugguauaauauauggg

SEQ ID NO: 54040 - RNA, 23 nt, Artificial Sequence
  Chemically synthesized
agcaacugguauaauauaugggc

SEQ ID NO: 54041 - RNA, 23 nt, Artificial Sequence
  Chemically synthesized
gcaacugguauaauauaugggca

SEQ ID NO: 54042 - RNA, 23 nt, Artificial Sequence
  Chemically synthesized
caacugguauaauauaugggcag

SEQ ID NO: 54043 - RNA, 23 nt, Artificial Sequence
  Chemically synthesized
ccguguguuucccuucauuuugc

SEQ ID NO: 54044 - RNA, 23 nt, Artificial Sequence
  Chemically synthesized
cguguguuucccuucauuuugcc

SEQ ID NO: 54045 - RNA, 23 nt, Artificial Sequence
  Chemically synthesized
guguguuucccuucauuuugcca

SEQ ID NO: 54046 - RNA, 23 nt, Artificial Sequence
  Chemically synthesized
uguguuucccuucauuuugccac

SEQ ID NO: 54047 - RNA, 23 nt, Artificial Sequence
  Chemically synthesized
guguuucccuucauuuugccacu

SEQ ID NO: 54048 - RNA, 23 nt, Artificial Sequence
  Chemically synthesized
uguuucccuucauuuugccacuu

SEQ ID NO: 54049 - RNA, 23 nt, Artificial Sequence
  Chemically synthesized
aacaaucgauugaaguuaauguc

SEQ ID NO: 54050 - RNA, 23 nt, Artificial Sequence
  Chemically synthesized
acaaucgauugaaguuaaugucu

SEQ ID NO: 54051 - RNA, 23 nt, Artificial Sequence
  Chemically synthesized
caaucgauugaaguuaaugucug

SEQ ID NO: 54052 - RNA, 23 nt, Artificial Sequence
  Chemically synthesized
aaucgauugaaguuaaugucugg

SEQ ID NO: 54053 - RNA, 23 nt, Artificial Sequence
  Chemically synthesized
aucgauugaaguuaaugucuggg

SEQ ID NO: 54054 - RNA, 23 nt, Artificial Sequence
  Chemically synthesized
uggggucguguaaauuuguugag

SEQ ID NO: 54055 - RNA, 23 nt, Artificial Sequence
  Chemically synthesized
ggggucguguaaauuuguugaga

SEQ ID NO: 54056 - RNA, 23 nt, Artificial Sequence
  Chemically synthesized
gggucguguaaauuuguugagaa

SEQ ID NO: 54057 - RNA, 23 nt, Artificial Sequence
  Chemically synthesized
ggucguguaaauuuguugagaag

SEQ ID NO: 54058 - RNA, 23 nt, Artificial Sequence
  Chemically synthesized
gucguguaaauuuguugagaagu

SEQ ID NO: 54059 - RNA, 23 nt, Artificial Sequence
  Chemically synthesized
guuucccuucauuuugccacuua

SEQ ID NO: 54060 - RNA, 23 nt, Artificial Sequence
  Chemically synthesized
uuucccuucauuuugccacuuac

SEQ ID NO: 54061 - RNA, 23 nt, Artificial Sequence
  Chemically synthesized
ucgauugaaguuaaugucugggu

SEQ ID NO: 54062 - RNA, 23 nt, Artificial Sequence
  Chemically synthesized
cgauugaaguuaaugucugggua

SEQ ID NO: 54063 - RNA, 23 nt, Artificial Sequence
  Chemically synthesized
gauugaaguuaaugucuggguaa

SEQ ID NO: 54064 - RNA, 23 nt, Artificial Sequence
  Chemically synthesized
auugaaguuaaugucuggguaac

SEQ ID NO: 54065 - RNA, 23 nt, Artificial Sequence
  Chemically synthesized
acuguugauugucucuauucucu

SEQ ID NO: 54066 - RNA, 23 nt, Artificial Sequence
  Chemically synthesized
cuguugauugucucuauucucuu

SEQ ID NO: 54067 - RNA, 23 nt, Artificial Sequence
  Chemically synthesized
uguugauugucucuauucucuuc

SEQ ID NO: 54068 - RNA, 23 nt, Artificial Sequence
  Chemically synthesized
guugauugucucuauucucuuca

SEQ ID NO: 54069 - RNA, 23 nt, Artificial Sequence
  Chemically synthesized
uugauugucucuauucucuucac

SEQ ID NO: 54070 - RNA, 23 nt, Artificial Sequence
  Chemically synthesized
gcaaaaucaguuaaagagauucc

SEQ ID NO: 54071 - RNA, 23 nt, Artificial Sequence
  Chemically synthesized
caaaaucaguuaaagagauuccu

SEQ ID NO: 54072 - RNA, 23 nt, Artificial Sequence
  Chemically synthesized
aaaaucaguuaaagagauuccug

SEQ ID NO: 54073 - RNA, 23 nt, Artificial Sequence
  Chemically synthesized
aaaucaguuaaagagauuccugg

SEQ ID NO: 54074 - RNA, 23 nt, Artificial Sequence
  Chemically synthesized
aaucaguuaaagagauuccugga

SEQ ID NO: 54075 - RNA, 23 nt, Artificial Sequence
  Chemically synthesized
cuggauuucaacuuguuuccugg

SEQ ID NO: 54076 - RNA, 23 nt, Artificial Sequence
  Chemically synthesized
uggauuucaacuuguuuccuggc

SEQ ID NO: 54077 - RNA, 23 nt, Artificial Sequence
  Chemically synthesized
ggauuucaacuuguuuccuggca

SEQ ID NO: 54078 - RNA, 23 nt, Artificial Sequence
  Chemically synthesized
gauuucaacuuguuuccuggcau

SEQ ID NO: 54079 - RNA, 23 nt, Artificial Sequence
  Chemically synthesized
auuucaacuuguuuccuggcauc

SEQ ID NO: 54080 - RNA, 23 nt, Artificial Sequence
  Chemically synthesized
ucgacagcaugguauaugaaugg

SEQ ID NO: 54081 - RNA, 23 nt, Artificial Sequence
  Chemically synthesized
cgacagcaugguauaugaaugga

SEQ ID NO: 54082 - RNA, 23 nt, Artificial Sequence
  Chemically synthesized
gacagcaugguauaugaauggau

SEQ ID NO: 54083 - RNA, 23 nt, Artificial Sequence
  Chemically synthesized
acagcaugguauaugaauggaua

SEQ ID NO: 54084 - RNA, 23 nt, Artificial Sequence
  Chemically synthesized
cagcaugguauaugaauggauaa

SEQ ID NO: 54085 - RNA, 23 nt, Artificial Sequence
  Chemically synthesized
uagaauuucugcauucuacauuc

SEQ ID NO: 54086 - RNA, 23 nt, Artificial Sequence
  Chemically synthesized
agaauuucugcauucuacauuca

SEQ ID NO: 54087 - RNA, 23 nt, Artificial Sequence
  Chemically synthesized
gaauuucugcauucuacauucag

SEQ ID NO: 54088 - RNA, 23 nt, Artificial Sequence
  Chemically synthesized
aauuucugcauucuacauucagg

SEQ ID NO: 54089 - RNA, 23 nt, Artificial Sequence
  Chemically synthesized
auuucugcauucuacauucaggc

SEQ ID NO: 54090 - RNA, 23 nt, Artificial Sequence
  Chemically synthesized
caagcauauuaagaguugagugg

SEQ ID NO: 54091 - RNA, 23 nt, Artificial Sequence
  Chemically synthesized
aagcauauuaagaguugagugga

SEQ ID NO: 54092 - RNA, 23 nt, Artificial Sequence
  Chemically synthesized
agcauauuaagaguugaguggaa

SEQ ID NO: 54093 - RNA, 23 nt, Artificial Sequence
  Chemically synthesized
gcauauuaagaguugaguggaag

SEQ ID NO: 54094 - RNA, 23 nt, Artificial Sequence
  Chemically synthesized
cauauuaagaguugaguggaagg

SEQ ID NO: 54095 - RNA, 23 nt, Artificial Sequence
  Chemically synthesized
uuucaucuuagcauuucgucgug

SEQ ID NO: 54096 - RNA, 23 nt, Artificial Sequence
  Chemically synthesized
uucaucuuagcauuucgucgugg

SEQ ID NO: 54097 - RNA, 23 nt, Artificial Sequence
  Chemically synthesized
ucaucuuagcauuucgucgugga

SEQ ID NO: 54098 - RNA, 23 nt, Artificial Sequence
  Chemically synthesized
caucuuagcauuucgucguggaa

SEQ ID NO: 54099 - RNA, 23 nt, Artificial Sequence
  Chemically synthesized
aucuuagcauuucgucguggaaa

SEQ ID NO: 54100 - RNA, 23 nt, Artificial Sequence
  Chemically synthesized
uuuggggucguguaaauuuguug

SEQ ID NO: 54101 - RNA, 23 nt, Artificial Sequence
  Chemically synthesized
uuggggucguguaaauuuguuga

SEQ ID NO: 54102 - RNA, 23 nt, Artificial Sequence
  Chemically synthesized
cuugauuccuuuaguguccaucc

SEQ ID NO: 54103 - RNA, 23 nt, Artificial Sequence
  Chemically synthesized
uugauuccuuuaguguccaucca

SEQ ID NO: 54104 - RNA, 23 nt, Artificial Sequence
  Chemically synthesized
ugauuccuuuaguguccauccaa

SEQ ID NO: 54105 - RNA, 23 nt, Artificial Sequence
  Chemically synthesized
gauuccuuuaguguccauccaac

SEQ ID NO: 54106 - RNA, 23 nt, Artificial Sequence
  Chemically synthesized
auuccuuuaguguccauccaacu

SEQ ID NO: 54107 - RNA, 23 nt, Artificial Sequence
  Chemically synthesized
uuucugcauucuacauucaggcu

SEQ ID NO: 54108 - RNA, 23 nt, Artificial Sequence
  Chemically synthesized
uucugcauucuacauucaggcua

SEQ ID NO: 54109 - RNA, 23 nt, Artificial Sequence
  Chemically synthesized
ucugcauucuacauucaggcuag

SEQ ID NO: 54110 - RNA, 23 nt, Artificial Sequence
  Chemically synthesized
cugcauucuacauucaggcuaga

SEQ ID NO: 54111 - RNA, 23 nt, Artificial Sequence
  Chemically synthesized
ggaaauguaaucuaacuucaccg

SEQ ID NO: 54112 - RNA, 23 nt, Artificial Sequence
  Chemically synthesized
gaaauguaaucuaacuucaccgc

SEQ ID NO: 54113 - RNA, 23 nt, Artificial Sequence
  Chemically synthesized
aaauguaaucuaacuucaccgcc

SEQ ID NO: 54114 - RNA, 23 nt, Artificial Sequence
  Chemically synthesized
aauguaaucuaacuucaccgccc

SEQ ID NO: 54115 - RNA, 23 nt, Artificial Sequence
  Chemically synthesized
auguaaucuaacuucaccgcccu

SEQ ID NO: 54116 - RNA, 23 nt, Artificial Sequence
  Chemically synthesized
uguaaucuaacuucaccgcccuu

SEQ ID NO: 54117 - RNA, 23 nt, Artificial Sequence
  Chemically synthesized
guaaucuaacuucaccgcccuua

SEQ ID NO: 54118 - RNA, 23 nt, Artificial Sequence
  Chemically synthesized
uaaucuaacuucaccgcccuuag

SEQ ID NO: 54119 - RNA, 23 nt, Artificial Sequence
  Chemically synthesized
gcccuuaguagaguaccguuucc

SEQ ID NO: 54120 - RNA, 23 nt, Artificial Sequence
  Chemically synthesized
cccuuaguagaguaccguuuccu

SEQ ID NO: 54121 - RNA, 23 nt, Artificial Sequence
  Chemically synthesized
ccuuaguagaguaccguuuccua

SEQ ID NO: 54122 - RNA, 23 nt, Artificial Sequence
  Chemically synthesized
cuuaguagaguaccguuuccuaa

SEQ ID NO: 54123 - RNA, 23 nt, Artificial Sequence
  Chemically synthesized
uuaguagaguaccguuuccuaaa

SEQ ID NO: 54124 - RNA, 23 nt, Artificial Sequence
  Chemically synthesized
ugauugucucuauucucuucacu

SEQ ID NO: 54125 - RNA, 23 nt, Artificial Sequence
  Chemically synthesized
gauugucucuauucucuucacua

SEQ ID NO: 54126 - RNA, 23 nt, Artificial Sequence
  Chemically synthesized
auugucucuauucucuucacuau

SEQ ID NO: 54127 - RNA, 23 nt, Artificial Sequence
  Chemically synthesized
guacaaaucagcaugaaguuccc

SEQ ID NO: 54128 - RNA, 23 nt, Artificial Sequence
  Chemically synthesized
uacaaaucagcaugaaguuccca

SEQ ID NO: 54129 - RNA, 23 nt, Artificial Sequence
  Chemically synthesized
acaaaucagcaugaaguucccag

SEQ ID NO: 54130 - RNA, 23 nt, Artificial Sequence
  Chemically synthesized
caaaucagcaugaaguucccagu

SEQ ID NO: 54131 - RNA, 23 nt, Artificial Sequence
  Chemically synthesized
aaaucagcaugaaguucccaguu

SEQ ID NO: 54132 - RNA, 23 nt, Artificial Sequence
  Chemically synthesized
caggaaaaccuccuuuuauucca

SEQ ID NO: 54133 - RNA, 23 nt, Artificial Sequence
  Chemically synthesized
aggaaaaccuccuuuuauuccac

SEQ ID NO: 54134 - RNA, 23 nt, Artificial Sequence
  Chemically synthesized
ggaaaaccuccuuuuauuccaca

SEQ ID NO: 54135 - RNA, 23 nt, Artificial Sequence
  Chemically synthesized
gaaaaccuccuuuuauuccacau

SEQ ID NO: 54136 - RNA, 23 nt, Artificial Sequence
  Chemically synthesized
aaaaccuccuuuuauuccacauu

SEQ ID NO: 54137 - RNA, 23 nt, Artificial Sequence
  Chemically synthesized
aaccuaggagguuugcauuaugc

SEQ ID NO: 54138 - RNA, 23 nt, Artificial Sequence
  Chemically synthesized
accuaggagguuugcauuaugca

SEQ ID NO: 54139 - RNA, 23 nt, Artificial Sequence
  Chemically synthesized
ccuaggagguuugcauuaugcaa

SEQ ID NO: 54140 - RNA, 23 nt, Artificial Sequence
  Chemically synthesized
cuaggagguuugcauuaugcaac

SEQ ID NO: 54141 - RNA, 23 nt, Artificial Sequence
  Chemically synthesized
uaggagguuugcauuaugcaaca

SEQ ID NO: 54142 - RNA, 23 nt, Artificial Sequence
  Chemically synthesized
augcaagcauauuaagaguugag

SEQ ID NO: 54143 - RNA, 23 nt, Artificial Sequence
  Chemically synthesized
ugcaagcauauuaagaguugagu

SEQ ID NO: 54144 - RNA, 23 nt, Artificial Sequence
  Chemically synthesized
gcaagcauauuaagaguugagug

SEQ ID NO: 54145 - RNA, 23 nt, Artificial Sequence
  Chemically synthesized
cugcauucuucauuguaguaucg

SEQ ID NO: 54146 - RNA, 23 nt, Artificial Sequence
  Chemically synthesized
ugcauucuucauuguaguaucgu

SEQ ID NO: 54147 - RNA, 23 nt, Artificial Sequence
  Chemically synthesized
gcauucuucauuguaguaucgua

SEQ ID NO: 54148 - RNA, 23 nt, Artificial Sequence
  Chemically synthesized
cauucuucauuguaguaucguag

SEQ ID NO: 54149 - RNA, 23 nt, Artificial Sequence
  Chemically synthesized
auucuucauuguaguaucguagc

SEQ ID NO: 54150 - RNA, 23 nt, Artificial Sequence
  Chemically synthesized
cugccaauaucuguauuaaggcu

SEQ ID NO: 54151 - RNA, 23 nt, Artificial Sequence
  Chemically synthesized
ugccaauaucuguauuaaggcuu

SEQ ID NO: 54152 - RNA, 23 nt, Artificial Sequence
  Chemically synthesized
gccaauaucuguauuaaggcuuu

SEQ ID NO: 54153 - RNA, 23 nt, Artificial Sequence
  Chemically synthesized
ccaauaucuguauuaaggcuuuu

SEQ ID NO: 54154 - RNA, 23 nt, Artificial Sequence
  Chemically synthesized
caauaucuguauuaaggcuuuua

SEQ ID NO: 54155 - RNA, 23 nt, Artificial Sequence
  Chemically synthesized
ugcaaaauccaccuguagcaugc

SEQ ID NO: 54156 - RNA, 23 nt, Artificial Sequence
  Chemically synthesized
gcaaaauccaccuguagcaugcc

SEQ ID NO: 54157 - RNA, 23 nt, Artificial Sequence
  Chemically synthesized
caaaauccaccuguagcaugccu

SEQ ID NO: 54158 - RNA, 23 nt, Artificial Sequence
  Chemically synthesized
aaaauccaccuguagcaugccuu

SEQ ID NO: 54159 - RNA, 23 nt, Artificial Sequence
  Chemically synthesized
aaauccaccuguagcaugccuug

SEQ ID NO: 54160 - RNA, 23 nt, Artificial Sequence
  Chemically synthesized
uugaaguuaaugucuggguaacu

SEQ ID NO: 54161 - RNA, 23 nt, Artificial Sequence
  Chemically synthesized
acucaucauggauucuauucuug

SEQ ID NO: 54162 - RNA, 23 nt, Artificial Sequence
  Chemically synthesized
cucaucauggauucuauucuugu

SEQ ID NO: 54163 - RNA, 23 nt, Artificial Sequence
  Chemically synthesized
ucaucauggauucuauucuugua

SEQ ID NO: 54164 - RNA, 23 nt, Artificial Sequence
  Chemically synthesized
caucauggauucuauucuuguau

SEQ ID NO: 54165 - RNA, 23 nt, Artificial Sequence
  Chemically synthesized
aucauggauucuauucuuguauu

SEQ ID NO: 54166 - RNA, 23 nt, Artificial Sequence
  Chemically synthesized
cuaaaagacuggcaaucuguucc

SEQ ID NO: 54167 - RNA, 23 nt, Artificial Sequence
  Chemically synthesized
uaaaagacuggcaaucuguuccu

SEQ ID NO: 54168 - RNA, 23 nt, Artificial Sequence
  Chemically synthesized
aaaagacuggcaaucuguuccug

SEQ ID NO: 54169 - RNA, 23 nt, Artificial Sequence
  Chemically synthesized
aaagacuggcaaucuguuccugc

SEQ ID NO: 54170 - RNA, 23 nt, Artificial Sequence
  Chemically synthesized
aagacuggcaaucuguuccugcg

SEQ ID NO: 54171 - RNA, 23 nt, Artificial Sequence
  Chemically synthesized
uacuauccaaacuuucugauucc

SEQ ID NO: 54172 - RNA, 23 nt, Artificial Sequence
  Chemically synthesized
acuauccaaacuuucugauuccg

SEQ ID NO: 54173 - RNA, 23 nt, Artificial Sequence
  Chemically synthesized
cuauccaaacuuucugauuccgc

SEQ ID NO: 54174 - RNA, 23 nt, Artificial Sequence
  Chemically synthesized
uauccaaacuuucugauuccgcu

SEQ ID NO: 54175 - RNA, 23 nt, Artificial Sequence
  Chemically synthesized
auccaaacuuucugauuccgcug

SEQ ID NO: 54176 - RNA, 23 nt, Artificial Sequence
  Chemically synthesized
ucguguaaauuuguugagaagug

SEQ ID NO: 54177 - RNA, 23 nt, Artificial Sequence
  Chemically synthesized
cugucuugauuccuuuagugucc

SEQ ID NO: 54178 - RNA, 23 nt, Artificial Sequence
  Chemically synthesized
ugucuugauuccuuuagugucca

SEQ ID NO: 54179 - RNA, 23 nt, Artificial Sequence
  Chemically synthesized
gucuugauuccuuuaguguccau

SEQ ID NO: 54180 - RNA, 23 nt, Artificial Sequence
  Chemically synthesized
ucuugauuccuuuaguguccauc

SEQ ID NO: 54181 - RNA, 23 nt, Artificial Sequence
  Chemically synthesized
uuccuuuaguguccauccaacug

SEQ ID NO: 54182 - RNA, 23 nt, Artificial Sequence
  Chemically synthesized
acauucaggcuagaaauauuucc

SEQ ID NO: 54183 - RNA, 23 nt, Artificial Sequence
  Chemically synthesized
cauucaggcuagaaauauuucca

SEQ ID NO: 54184 - RNA, 23 nt, Artificial Sequence
  Chemically synthesized
auucaggcuagaaauauuuccag

SEQ ID NO: 54185 - RNA, 23 nt, Artificial Sequence
  Chemically synthesized
uucaggcuagaaauauuuccagg

SEQ ID NO: 54186 - RNA, 23 nt, Artificial Sequence
  Chemically synthesized
ucaggcuagaaauauuuccaggu

SEQ ID NO: 54187 - RNA, 23 nt, Artificial Sequence
  Chemically synthesized
uuuaaaucauucauuccagugcg

SEQ ID NO: 54188 - RNA, 23 nt, Artificial Sequence
  Chemically synthesized
uuaaaucauucauuccagugcga

SEQ ID NO: 54189 - RNA, 23 nt, Artificial Sequence
  Chemically synthesized
uaaaucauucauuccagugcgac

SEQ ID NO: 54190 - RNA, 23 nt, Artificial Sequence
  Chemically synthesized
aaaucauucauuccagugcgacu

SEQ ID NO: 54191 - RNA, 23 nt, Artificial Sequence
  Chemically synthesized
aaucauucauuccagugcgacuc

SEQ ID NO: 54192 - RNA, 23 nt, Artificial Sequence
  Chemically synthesized
ucucuugcuuggaaccuugaagg

SEQ ID NO: 54193 - RNA, 23 nt, Artificial Sequence
  Chemically synthesized
cucuugcuuggaaccuugaaggu

SEQ ID NO: 54194 - RNA, 23 nt, Artificial Sequence
  Chemically synthesized
ucuugcuuggaaccuugaagguu

SEQ ID NO: 54195 - RNA, 23 nt, Artificial Sequence
  Chemically synthesized
cuugcuuggaaccuugaagguuu

SEQ ID NO: 54196 - RNA, 23 nt, Artificial Sequence
  Chemically synthesized
uugcuuggaaccuugaagguuua

SEQ ID NO: 54197 - RNA, 23 nt, Artificial Sequence
  Chemically synthesized
aacuuucuugucuagucaauuug

SEQ ID NO: 54198 - RNA, 23 nt, Artificial Sequence
  Chemically synthesized
acuuucuugucuagucaauuugu

SEQ ID NO: 54199 - RNA, 23 nt, Artificial Sequence
  Chemically synthesized
cuuucuugucuagucaauuuguu

SEQ ID NO: 54200 - RNA, 23 nt, Artificial Sequence
  Chemically synthesized
uuucuugucuagucaauuuguug

SEQ ID NO: 54201 - RNA, 23 nt, Artificial Sequence
  Chemically synthesized
uucuugucuagucaauuuguugu

SEQ ID NO: 54202 - RNA, 23 nt, Artificial Sequence
  Chemically synthesized
gcccaguaccaacauccucagag

SEQ ID NO: 54203 - RNA, 23 nt, Artificial Sequence
  Chemically synthesized
cccaguaccaacauccucagagc

SEQ ID NO: 54204 - RNA, 23 nt, Artificial Sequence
  Chemically synthesized
ccaguaccaacauccucagagcc

SEQ ID NO: 54205 - RNA, 23 nt, Artificial Sequence
  Chemically synthesized
caguaccaacauccucagagcca

SEQ ID NO: 54206 - RNA, 23 nt, Artificial Sequence
  Chemically synthesized
aguaccaacauccucagagccaa

SEQ ID NO: 54207 - RNA, 23 nt, Artificial Sequence
  Chemically synthesized
uuauuuagauuuuaugugcucac

SEQ ID NO: 54208 - RNA, 23 nt, Artificial Sequence
  Chemically synthesized
uauuuagauuuuaugugcucaca

SEQ ID NO: 54209 - RNA, 23 nt, Artificial Sequence
  Chemically synthesized
auuuagauuuuaugugcucacau

SEQ ID NO: 54210 - RNA, 23 nt, Artificial Sequence
  Chemically synthesized
uuuagauuuuaugugcucacaua

SEQ ID NO: 54211 - RNA, 23 nt, Artificial Sequence
  Chemically synthesized
uuagauuuuaugugcucacauau

SEQ ID NO: 54212 - RNA, 23 nt, Artificial Sequence
  Chemically synthesized
cacauauagacacacuuaaagag

SEQ ID NO: 54213 - RNA, 23 nt, Artificial Sequence
  Chemically synthesized
acauauagacacacuuaaagagc

SEQ ID NO: 54214 - RNA, 23 nt, Artificial Sequence
  Chemically synthesized
cauauagacacacuuaaagagca

SEQ ID NO: 54215 - RNA, 23 nt, Artificial Sequence
  Chemically synthesized
auauagacacacuuaaagagcau

SEQ ID NO: 54216 - RNA, 23 nt, Artificial Sequence
  Chemically synthesized
uauagacacacuuaaagagcaua

SEQ ID NO: 54217 - RNA, 23 nt, Artificial Sequence
  Chemically synthesized
uuugguuauaugaauaugccuca

SEQ ID NO: 54218 - RNA, 23 nt, Artificial Sequence
  Chemically synthesized
uugguuauaugaauaugccucaa

SEQ ID NO: 54219 - RNA, 23 nt, Artificial Sequence
  Chemically synthesized
ugguuauaugaauaugccucaag

SEQ ID NO: 54220 - RNA, 23 nt, Artificial Sequence
  Chemically synthesized
gguuauaugaauaugccucaagc

SEQ ID NO: 54221 - RNA, 23 nt, Artificial Sequence
  Chemically synthesized
guuauaugaauaugccucaagca

SEQ ID NO: 54222 - RNA, 23 nt, Artificial Sequence
  Chemically synthesized
aaaccuccuuuuauuccacauuu

SEQ ID NO: 54223 - RNA, 23 nt, Artificial Sequence
  Chemically synthesized
acugaucagaggaaaaaagacag

SEQ ID NO: 54224 - RNA, 23 nt, Artificial Sequence
  Chemically synthesized
cugaucagaggaaaaaagacaga

SEQ ID NO: 54225 - RNA, 23 nt, Artificial Sequence
  Chemically synthesized
ugaucagaggaaaaaagacagac

SEQ ID NO: 54226 - RNA, 23 nt, Artificial Sequence
  Chemically synthesized
gaucagaggaaaaaagacagaca

SEQ ID NO: 54227 - RNA, 23 nt, Artificial Sequence
  Chemically synthesized
aucagaggaaaaaagacagacaa

SEQ ID NO: 54228 - RNA, 23 nt, Artificial Sequence
  Chemically synthesized
gcaacacauaugaaaaaaacccu

SEQ ID NO: 54229 - RNA, 23 nt, Artificial Sequence
  Chemically synthesized
caacacauaugaaaaaaacccua

SEQ ID NO: 54230 - RNA, 23 nt, Artificial Sequence
  Chemically synthesized
aacacauaugaaaaaaacccuaa

SEQ ID NO: 54231 - RNA, 23 nt, Artificial Sequence
  Chemically synthesized
acacauaugaaaaaaacccuaau

SEQ ID NO: 54232 - RNA, 23 nt, Artificial Sequence
  Chemically synthesized
cacauaugaaaaaaacccuaauu

SEQ ID NO: 54233 - RNA, 23 nt, Artificial Sequence
  Chemically synthesized
auauuaagaguugaguggaaggc

SEQ ID NO: 54234 - RNA, 23 nt, Artificial Sequence
  Chemically synthesized
uauuaagaguugaguggaaggcu

SEQ ID NO: 54235 - RNA, 23 nt, Artificial Sequence
  Chemically synthesized
auuaagaguugaguggaaggcuc

SEQ ID NO: 54236 - RNA, 23 nt, Artificial Sequence
  Chemically synthesized
uuaagaguugaguggaaggcuca

SEQ ID NO: 54237 - RNA, 23 nt, Artificial Sequence
  Chemically synthesized
uaagaguugaguggaaggcucac

SEQ ID NO: 54238 - RNA, 23 nt, Artificial Sequence
  Chemically synthesized
ucauuuugccacuuacacauugc

SEQ ID NO: 54239 - RNA, 23 nt, Artificial Sequence
  Chemically synthesized
cauuuugccacuuacacauugcu

SEQ ID NO: 54240 - RNA, 23 nt, Artificial Sequence
  Chemically synthesized
auuuugccacuuacacauugcug

SEQ ID NO: 54241 - RNA, 23 nt, Artificial Sequence
  Chemically synthesized
uuuugccacuuacacauugcugc

SEQ ID NO: 54242 - RNA, 23 nt, Artificial Sequence
  Chemically synthesized
uuugccacuuacacauugcugca

SEQ ID NO: 54243 - RNA, 23 nt, Artificial Sequence
  Chemically synthesized
caggauggagggaguuuagaugu

SEQ ID NO: 54244 - RNA, 23 nt, Artificial Sequence
  Chemically synthesized
aggauggagggaguuuagaugua

SEQ ID NO: 54245 - RNA, 23 nt, Artificial Sequence
  Chemically synthesized
ggauggagggaguuuagauguac

SEQ ID NO: 54246 - RNA, 23 nt, Artificial Sequence
  Chemically synthesized
gauggagggaguuuagauguacc

SEQ ID NO: 54247 - RNA, 23 nt, Artificial Sequence
  Chemically synthesized
auggagggaguuuagauguacca

SEQ ID NO: 54248 - RNA, 23 nt, Artificial Sequence
  Chemically synthesized
gaagagcguuuuaaguuucuccg

SEQ ID NO: 54249 - RNA, 23 nt, Artificial Sequence
  Chemically synthesized
aagagcguuuuaaguuucuccgg

SEQ ID NO: 54250 - RNA, 23 nt, Artificial Sequence
  Chemically synthesized
agagcguuuuaaguuucuccggu

SEQ ID NO: 54251 - RNA, 23 nt, Artificial Sequence
  Chemically synthesized
gagcguuuuaaguuucuccgguu

SEQ ID NO: 54252 - RNA, 23 nt, Artificial Sequence
  Chemically synthesized
agcguuuuaaguuucuccgguuu

SEQ ID NO: 54253 - RNA, 23 nt, Artificial Sequence
  Chemically synthesized
agaauacuccgauuucaucuuag

SEQ ID NO: 54254 - RNA, 23 nt, Artificial Sequence
  Chemically synthesized
gaauacuccgauuucaucuuagc

SEQ ID NO: 54255 - RNA, 23 nt, Artificial Sequence
  Chemically synthesized
aauacuccgauuucaucuuagca

SEQ ID NO: 54256 - RNA, 23 nt, Artificial Sequence
  Chemically synthesized
auacuccgauuucaucuuagcau

SEQ ID NO: 54257 - RNA, 23 nt, Artificial Sequence
  Chemically synthesized
uacuccgauuucaucuuagcauu

SEQ ID NO: 54258 - RNA, 23 nt, Artificial Sequence
  Chemically synthesized
ucuuagcauuucgucguggaaau

SEQ ID NO: 54259 - RNA, 23 nt, Artificial Sequence
  Chemically synthesized
uucuuuacuauccaaacuuucug

SEQ ID NO: 54260 - RNA, 23 nt, Artificial Sequence
  Chemically synthesized
ucuuuacuauccaaacuuucuga

SEQ ID NO: 54261 - RNA, 23 nt, Artificial Sequence
  Chemically synthesized
cuuuacuauccaaacuuucugau

SEQ ID NO: 54262 - RNA, 23 nt, Artificial Sequence
  Chemically synthesized
uuuacuauccaaacuuucugauu

SEQ ID NO: 54263 - RNA, 23 nt, Artificial Sequence
  Chemically synthesized
uuacuauccaaacuuucugauuc

SEQ ID NO: 54264 - RNA, 23 nt, Artificial Sequence
  Chemically synthesized
auuguauuucagaauagcauccu

SEQ ID NO: 54265 - RNA, 23 nt, Artificial Sequence
  Chemically synthesized
uuguauuucagaauagcauccuu

SEQ ID NO: 54266 - RNA, 23 nt, Artificial Sequence
  Chemically synthesized
uguauuucagaauagcauccuuc

SEQ ID NO: 54267 - RNA, 23 nt, Artificial Sequence
  Chemically synthesized
guauuucagaauagcauccuuca

SEQ ID NO: 54268 - RNA, 23 nt, Artificial Sequence
  Chemically synthesized
uauuucagaauagcauccuucaa

SEQ ID NO: 54269 - RNA, 23 nt, Artificial Sequence
  Chemically synthesized
ucuuuauaauguguuggaaaagg

SEQ ID NO: 54270 - RNA, 23 nt, Artificial Sequence
  Chemically synthesized
cuuuauaauguguuggaaaaggu

SEQ ID NO: 54271 - RNA, 23 nt, Artificial Sequence
  Chemically synthesized
uuuauaauguguuggaaaagguu

SEQ ID NO: 54272 - RNA, 23 nt, Artificial Sequence
  Chemically synthesized
uuauaauguguuggaaaagguuu

SEQ ID NO: 54273 - RNA, 23 nt, Artificial Sequence
  Chemically synthesized
uauaauguguuggaaaagguuua

SEQ ID NO: 54274 - RNA, 23 nt, Artificial Sequence
  Chemically synthesized
aaauauuuccagguaguuuagca

SEQ ID NO: 54275 - RNA, 23 nt, Artificial Sequence
  Chemically synthesized
aauauuuccagguaguuuagcau

SEQ ID NO: 54276 - RNA, 23 nt, Artificial Sequence
  Chemically synthesized
auauuuccagguaguuuagcauu

SEQ ID NO: 54277 - RNA, 23 nt, Artificial Sequence
  Chemically synthesized
uauuuccagguaguuuagcauuu

SEQ ID NO: 54278 - RNA, 23 nt, Artificial Sequence
  Chemically synthesized
auuuccagguaguuuagcauuua

SEQ ID NO: 54279 - RNA, 23 nt, Artificial Sequence
  Chemically synthesized
gguuuauuugcuguuugggagga

SEQ ID NO: 54280 - RNA, 23 nt, Artificial Sequence
  Chemically synthesized
guuuauuugcuguuugggaggaa

SEQ ID NO: 54281 - RNA, 23 nt, Artificial Sequence
  Chemically synthesized
uuuauuugcuguuugggaggaac

SEQ ID NO: 54282 - RNA, 23 nt, Artificial Sequence
  Chemically synthesized
uuauuugcuguuugggaggaacu

SEQ ID NO: 54283 - RNA, 23 nt, Artificial Sequence
  Chemically synthesized
uauuugcuguuugggaggaacua

SEQ ID NO: 54284 - RNA, 23 nt, Artificial Sequence
  Chemically synthesized
ccucaucugcuucugagucuuga

SEQ ID NO: 54285 - RNA, 23 nt, Artificial Sequence
  Chemically synthesized
cucaucugcuucugagucuugac

SEQ ID NO: 54286 - RNA, 23 nt, Artificial Sequence
  Chemically synthesized
ucaucugcuucugagucuugaca

SEQ ID NO: 54287 - RNA, 23 nt, Artificial Sequence
  Chemically synthesized
caucugcuucugagucuugacaa

SEQ ID NO: 54288 - RNA, 23 nt, Artificial Sequence
  Chemically synthesized
aucugcuucugagucuugacaac

SEQ ID NO: 54289 - RNA, 23 nt, Artificial Sequence
  Chemically synthesized
guaccaacauccucagagccaac

SEQ ID NO: 54290 - RNA, 23 nt, Artificial Sequence
  Chemically synthesized
uaccaacauccucagagccaaca

SEQ ID NO: 54291 - RNA, 23 nt, Artificial Sequence
  Chemically synthesized
ccacaucuaucucaucuugcuga

SEQ ID NO: 54292 - RNA, 23 nt, Artificial Sequence
  Chemically synthesized
cacaucuaucucaucuugcugac

SEQ ID NO: 54293 - RNA, 23 nt, Artificial Sequence
  Chemically synthesized
acaucuaucucaucuugcugaca

SEQ ID NO: 54294 - RNA, 23 nt, Artificial Sequence
  Chemically synthesized
caucuaucucaucuugcugacaa

SEQ ID NO: 54295 - RNA, 23 nt, Artificial Sequence
  Chemically synthesized
aucuaucucaucuugcugacaac

SEQ ID NO: 54296 - RNA, 23 nt, Artificial Sequence
  Chemically synthesized
uguacaaaucagcaugaaguucc

SEQ ID NO: 54297 - RNA, 23 nt, Artificial Sequence
  Chemically synthesized
uucccuucauuuugccacuuaca

SEQ ID NO: 54298 - RNA, 23 nt, Artificial Sequence
  Chemically synthesized
gaggaaaaaagacagacaaacca

SEQ ID NO: 54299 - RNA, 23 nt, Artificial Sequence
  Chemically synthesized
aggaaaaaagacagacaaaccau

SEQ ID NO: 54300 - RNA, 23 nt, Artificial Sequence
  Chemically synthesized
ggaaaaaagacagacaaaccauu

SEQ ID NO: 54301 - RNA, 23 nt, Artificial Sequence
  Chemically synthesized
gaaaaaagacagacaaaccauua

SEQ ID NO: 54302 - RNA, 23 nt, Artificial Sequence
  Chemically synthesized
aaaaaagacagacaaaccauuac

SEQ ID NO: 54303 - RNA, 23 nt, Artificial Sequence
  Chemically synthesized
aacugguauaauauaugggcagg

SEQ ID NO: 54304 - RNA, 23 nt, Artificial Sequence
  Chemically synthesized
acugguauaauauaugggcagga

SEQ ID NO: 54305 - RNA, 23 nt, Artificial Sequence
  Chemically synthesized
cugguauaauauaugggcaggaa

SEQ ID NO: 54306 - RNA, 23 nt, Artificial Sequence
  Chemically synthesized
ugguauaauauaugggcaggaag

SEQ ID NO: 54307 - RNA, 23 nt, Artificial Sequence
  Chemically synthesized
agaaacaaaacauaucuaagucc

SEQ ID NO: 54308 - RNA, 23 nt, Artificial Sequence
  Chemically synthesized
gaaacaaaacauaucuaagucca

SEQ ID NO: 54309 - RNA, 23 nt, Artificial Sequence
  Chemically synthesized
aaacaaaacauaucuaaguccac

SEQ ID NO: 54310 - RNA, 23 nt, Artificial Sequence
  Chemically synthesized
aacaaaacauaucuaaguccacg

SEQ ID NO: 54311 - RNA, 23 nt, Artificial Sequence
  Chemically synthesized
acaaaacauaucuaaguccacgu

SEQ ID NO: 54312 - RNA, 23 nt, Artificial Sequence
  Chemically synthesized
caaaacauaucuaaguccacgug

SEQ ID NO: 54313 - RNA, 23 nt, Artificial Sequence
  Chemically synthesized
aaaacauaucuaaguccacguga

SEQ ID NO: 54314 - RNA, 23 nt, Artificial Sequence
  Chemically synthesized
aaacauaucuaaguccacgugag

SEQ ID NO: 54315 - RNA, 23 nt, Artificial Sequence
  Chemically synthesized
auucauauauuacaccugacagc

SEQ ID NO: 54316 - RNA, 23 nt, Artificial Sequence
  Chemically synthesized
uucauauauuacaccugacagcu

SEQ ID NO: 54317 - RNA, 23 nt, Artificial Sequence
  Chemically synthesized
ucauauauuacaccugacagcuc

SEQ ID NO: 54318 - RNA, 23 nt, Artificial Sequence
  Chemically synthesized
cauauauuacaccugacagcuca

SEQ ID NO: 54319 - RNA, 23 nt, Artificial Sequence
  Chemically synthesized
auauauuacaccugacagcucaa

SEQ ID NO: 54320 - RNA, 23 nt, Artificial Sequence
  Chemically synthesized
agcaugguauaugaauggauaaa

SEQ ID NO: 54321 - RNA, 23 nt, Artificial Sequence
  Chemically synthesized
cuguaaaugucucucaucaauuc

SEQ ID NO: 54322 - RNA, 23 nt, Artificial Sequence
  Chemically synthesized
uguaaaugucucucaucaauucu

SEQ ID NO: 54323 - RNA, 23 nt, Artificial Sequence
  Chemically synthesized
guaaaugucucucaucaauucug

SEQ ID NO: 54324 - RNA, 23 nt, Artificial Sequence
  Chemically synthesized
uaaaugucucucaucaauucuga

SEQ ID NO: 54325 - RNA, 23 nt, Artificial Sequence
  Chemically synthesized
aaaugucucucaucaauucugag

SEQ ID NO: 54326 - RNA, 23 nt, Artificial Sequence
  Chemically synthesized
cgauuucaucuuagcauuucguc

SEQ ID NO: 54327 - RNA, 23 nt, Artificial Sequence
  Chemically synthesized
gauuucaucuuagcauuucgucg

SEQ ID NO: 54328 - RNA, 23 nt, Artificial Sequence
  Chemically synthesized
auuucaucuuagcauuucgucgu

SEQ ID NO: 54329 - RNA, 23 nt, Artificial Sequence
  Chemically synthesized
ucuguuucaggagugguauuggc

SEQ ID NO: 54330 - RNA, 23 nt, Artificial Sequence
  Chemically synthesized
cuguuucaggagugguauuggcu

SEQ ID NO: 54331 - RNA, 23 nt, Artificial Sequence
  Chemically synthesized
uguuucaggagugguauuggcug

SEQ ID NO: 54332 - RNA, 23 nt, Artificial Sequence
  Chemically synthesized
guuucaggagugguauuggcugg

SEQ ID NO: 54333 - RNA, 23 nt, Artificial Sequence
  Chemically synthesized
uuucaggagugguauuggcuggg

SEQ ID NO: 54334 - RNA, 23 nt, Artificial Sequence
  Chemically synthesized
cauuguauuucagaauagcaucc

SEQ ID NO: 54335 - RNA, 23 nt, Artificial Sequence
  Chemically synthesized
aaauuuguugagaagugcagucu

SEQ ID NO: 54336 - RNA, 23 nt, Artificial Sequence
  Chemically synthesized
auaauguguuggaaaagguuuag

SEQ ID NO: 54337 - RNA, 23 nt, Artificial Sequence
  Chemically synthesized
uaauguguuggaaaagguuuagg

SEQ ID NO: 54338 - RNA, 23 nt, Artificial Sequence
  Chemically synthesized
aauguguuggaaaagguuuagga

SEQ ID NO: 54339 - RNA, 23 nt, Artificial Sequence
  Chemically synthesized
auguguuggaaaagguuuaggaa

SEQ ID NO: 54340 - RNA, 23 nt, Artificial Sequence
  Chemically synthesized
uguguuggaaaagguuuaggaac

SEQ ID NO: 54341 - RNA, 23 nt, Artificial Sequence
  Chemically synthesized
guguuggaaaagguuuaggaacu

SEQ ID NO: 54342 - RNA, 23 nt, Artificial Sequence
  Chemically synthesized
guuccaagccacuucuuaucugg

SEQ ID NO: 54343 - RNA, 23 nt, Artificial Sequence
  Chemically synthesized
uuccaagccacuucuuaucugga

SEQ ID NO: 54344 - RNA, 23 nt, Artificial Sequence
  Chemically synthesized
uccaagccacuucuuaucuggag

SEQ ID NO: 54345 - RNA, 23 nt, Artificial Sequence
  Chemically synthesized
ccaagccacuucuuaucuggaga

SEQ ID NO: 54346 - RNA, 23 nt, Artificial Sequence
  Chemically synthesized
caagccacuucuuaucuggagaa

SEQ ID NO: 54347 - RNA, 23 nt, Artificial Sequence
  Chemically synthesized
agaaauauuuccagguaguuuag

SEQ ID NO: 54348 - RNA, 23 nt, Artificial Sequence
  Chemically synthesized
gaaauauuuccagguaguuuagc

SEQ ID NO: 54349 - RNA, 23 nt, Artificial Sequence
  Chemically synthesized
uggaaauguaaucuaacuucacc

SEQ ID NO: 54350 - RNA, 23 nt, Artificial Sequence
  Chemically synthesized
caucuucuuguucaucaaaaccu

SEQ ID NO: 54351 - RNA, 23 nt, Artificial Sequence
  Chemically synthesized
aucuucuuguucaucaaaaccug

SEQ ID NO: 54352 - RNA, 23 nt, Artificial Sequence
  Chemically synthesized
ucuucuuguucaucaaaaccugg

SEQ ID NO: 54353 - RNA, 23 nt, Artificial Sequence
  Chemically synthesized
cuucuuguucaucaaaaccugga

SEQ ID NO: 54354 - RNA, 23 nt, Artificial Sequence
  Chemically synthesized
uucuuguucaucaaaaccuggac

SEQ ID NO: 54355 - RNA, 23 nt, Artificial Sequence
  Chemically synthesized
uauuuuuagaauuauccacaucc

SEQ ID NO: 54356 - RNA, 23 nt, Artificial Sequence
  Chemically synthesized
auuuuuagaauuauccacaucca

SEQ ID NO: 54357 - RNA, 23 nt, Artificial Sequence
  Chemically synthesized
uuuuuagaauuauccacauccau

SEQ ID NO: 54358 - RNA, 23 nt, Artificial Sequence
  Chemically synthesized
uuuuagaauuauccacauccauc

SEQ ID NO: 54359 - RNA, 23 nt, Artificial Sequence
  Chemically synthesized
uuuagaauuauccacauccaucg

SEQ ID NO: 54360 - RNA, 23 nt, Artificial Sequence
  Chemically synthesized
uccguagucugcuuugcauuugc

SEQ ID NO: 54361 - RNA, 23 nt, Artificial Sequence
  Chemically synthesized
ccguagucugcuuugcauuugca

SEQ ID NO: 54362 - RNA, 23 nt, Artificial Sequence
  Chemically synthesized
cguagucugcuuugcauuugcaa

SEQ ID NO: 54363 - RNA, 23 nt, Artificial Sequence
  Chemically synthesized
guagucugcuuugcauuugcaag

SEQ ID NO: 54364 - RNA, 23 nt, Artificial Sequence
  Chemically synthesized
uagucugcuuugcauuugcaagc

SEQ ID NO: 54365 - RNA, 23 nt, Artificial Sequence
  Chemically synthesized
aaacuguugauugucucuauucu

SEQ ID NO: 54366 - RNA, 23 nt, Artificial Sequence
  Chemically synthesized
aacuguugauugucucuauucuc

SEQ ID NO: 54367 - RNA, 23 nt, Artificial Sequence
  Chemically synthesized
uugucucuauucucuucacuauc

SEQ ID NO: 54368 - RNA, 23 nt, Artificial Sequence
  Chemically synthesized
auagacacacuuaaagagcauac

SEQ ID NO: 54369 - RNA, 23 nt, Artificial Sequence
  Chemically synthesized
ccuuuuauuccacauuuccuuuc

SEQ ID NO: 54370 - RNA, 23 nt, Artificial Sequence
  Chemically synthesized
cuuuuauuccacauuuccuuuca

SEQ ID NO: 54371 - RNA, 23 nt, Artificial Sequence
  Chemically synthesized
uuuuauuccacauuuccuuucau

SEQ ID NO: 54372 - RNA, 23 nt, Artificial Sequence
  Chemically synthesized
uuuauuccacauuuccuuucauc

SEQ ID NO: 54373 - RNA, 23 nt, Artificial Sequence
  Chemically synthesized
uuauuccacauuuccuuucaucu

SEQ ID NO: 54374 - RNA, 23 nt, Artificial Sequence
  Chemically synthesized
aaaaagacagacaaaccauuaca

SEQ ID NO: 54375 - RNA, 23 nt, Artificial Sequence
  Chemically synthesized
aaaagacagacaaaccauuacag

SEQ ID NO: 54376 - RNA, 23 nt, Artificial Sequence
  Chemically synthesized
aaagacagacaaaccauuacaga

SEQ ID NO: 54377 - RNA, 23 nt, Artificial Sequence
  Chemically synthesized
aagacagacaaaccauuacagau

SEQ ID NO: 54378 - RNA, 23 nt, Artificial Sequence
  Chemically synthesized
aucaguuaaagagauuccuggau

SEQ ID NO: 54379 - RNA, 23 nt, Artificial Sequence
  Chemically synthesized
agagauuccuggauuucaacuug

SEQ ID NO: 54380 - RNA, 23 nt, Artificial Sequence
  Chemically synthesized
gagauuccuggauuucaacuugu

SEQ ID NO: 54381 - RNA, 23 nt, Artificial Sequence
  Chemically synthesized
agauuccuggauuucaacuuguu

SEQ ID NO: 54382 - RNA, 23 nt, Artificial Sequence
  Chemically synthesized
gauuccuggauuucaacuuguuu

SEQ ID NO: 54383 - RNA, 23 nt, Artificial Sequence
  Chemically synthesized
auuccuggauuucaacuuguuuc

SEQ ID NO: 54384 - RNA, 23 nt, Artificial Sequence
  Chemically synthesized
aacauaucuaaguccacgugagu

SEQ ID NO: 54385 - RNA, 23 nt, Artificial Sequence
  Chemically synthesized
gcacauguguggaagagauugcg

SEQ ID NO: 54386 - RNA, 23 nt, Artificial Sequence
  Chemically synthesized
cacauguguggaagagauugcgu

SEQ ID NO: 54387 - RNA, 23 nt, Artificial Sequence
  Chemically synthesized
acauguguggaagagauugcguc

SEQ ID NO: 54388 - RNA, 23 nt, Artificial Sequence
  Chemically synthesized
cauguguggaagagauugcgucc

SEQ ID NO: 54389 - RNA, 23 nt, Artificial Sequence
  Chemically synthesized
auguguggaagagauugcguccu

SEQ ID NO: 54390 - RNA, 23 nt, Artificial Sequence
  Chemically synthesized
gguauaugaauggauaaagcuug

SEQ ID NO: 54391 - RNA, 23 nt, Artificial Sequence
  Chemically synthesized
guauaugaauggauaaagcuuga

SEQ ID NO: 54392 - RNA, 23 nt, Artificial Sequence
  Chemically synthesized
uauaugaauggauaaagcuugau

SEQ ID NO: 54393 - RNA, 23 nt, Artificial Sequence
  Chemically synthesized
auaugaauggauaaagcuugaug

SEQ ID NO: 54394 - RNA, 23 nt, Artificial Sequence
  Chemically synthesized
uaugaauggauaaagcuugaugu

SEQ ID NO: 54395 - RNA, 23 nt, Artificial Sequence
  Chemically synthesized
aaugucucucaucaauucugagu

SEQ ID NO: 54396 - RNA, 23 nt, Artificial Sequence
  Chemically synthesized
augucucucaucaauucugaguc

SEQ ID NO: 54397 - RNA, 23 nt, Artificial Sequence
  Chemically synthesized
gcugccaauaucuguauuaaggc

SEQ ID NO: 54398 - RNA, 23 nt, Artificial Sequence
  Chemically synthesized
agacuuagcugagaaacauuuuc

SEQ ID NO: 54399 - RNA, 23 nt, Artificial Sequence
  Chemically synthesized
gacuuagcugagaaacauuuucu

SEQ ID NO: 54400 - RNA, 23 nt, Artificial Sequence
  Chemically synthesized
acuuagcugagaaacauuuucua

SEQ ID NO: 54401 - RNA, 23 nt, Artificial Sequence
  Chemically synthesized
cuuagcugagaaacauuuucuaa

SEQ ID NO: 54402 - RNA, 23 nt, Artificial Sequence
  Chemically synthesized
uuagcugagaaacauuuucuaau

SEQ ID NO: 54403 - RNA, 23 nt, Artificial Sequence
  Chemically synthesized
ugcaaucgugucaaggguuuuuc

SEQ ID NO: 54404 - RNA, 23 nt, Artificial Sequence
  Chemically synthesized
gcaaucgugucaaggguuuuuca

SEQ ID NO: 54405 - RNA, 23 nt, Artificial Sequence
  Chemically synthesized
caaucgugucaaggguuuuucac

SEQ ID NO: 54406 - RNA, 23 nt, Artificial Sequence
  Chemically synthesized
aaucgugucaaggguuuuucaca

SEQ ID NO: 54407 - RNA, 23 nt, Artificial Sequence
  Chemically synthesized
aucgugucaaggguuuuucacau

SEQ ID NO: 54408 - RNA, 23 nt, Artificial Sequence
  Chemically synthesized
cuggaaaaucuucaagacucugu

SEQ ID NO: 54409 - RNA, 23 nt, Artificial Sequence
  Chemically synthesized
uggaaaaucuucaagacucuguc

SEQ ID NO: 54410 - RNA, 23 nt, Artificial Sequence
  Chemically synthesized
ggaaaaucuucaagacucugucu

SEQ ID NO: 54411 - RNA, 23 nt, Artificial Sequence
  Chemically synthesized
gaaaaucuucaagacucugucuu

SEQ ID NO: 54412 - RNA, 23 nt, Artificial Sequence
  Chemically synthesized
aaaaucuucaagacucugucuug

SEQ ID NO: 54413 - RNA, 23 nt, Artificial Sequence
  Chemically synthesized
cgacauugugauggaaugauuca

SEQ ID NO: 54414 - RNA, 23 nt, Artificial Sequence
  Chemically synthesized
gacauugugauggaaugauucau

SEQ ID NO: 54415 - RNA, 23 nt, Artificial Sequence
  Chemically synthesized
acauugugauggaaugauucauc

SEQ ID NO: 54416 - RNA, 23 nt, Artificial Sequence
  Chemically synthesized
cauugugauggaaugauucaucu

SEQ ID NO: 54417 - RNA, 23 nt, Artificial Sequence
  Chemically synthesized
auugugauggaaugauucaucuu

SEQ ID NO: 54418 - RNA, 23 nt, Artificial Sequence
  Chemically synthesized
uaccuuaucccagaaaucgauca

SEQ ID NO: 54419 - RNA, 23 nt, Artificial Sequence
  Chemically synthesized
accuuaucccagaaaucgaucaa

SEQ ID NO: 54420 - RNA, 23 nt, Artificial Sequence
  Chemically synthesized
ccuuaucccagaaaucgaucaaa

SEQ ID NO: 54421 - RNA, 23 nt, Artificial Sequence
  Chemically synthesized
cuuaucccagaaaucgaucaaag

SEQ ID NO: 54422 - RNA, 23 nt, Artificial Sequence
  Chemically synthesized
uuaucccagaaaucgaucaaagc

SEQ ID NO: 54423 - RNA, 23 nt, Artificial Sequence
  Chemically synthesized
uagaauaugccacauuguauuuc

SEQ ID NO: 54424 - RNA, 23 nt, Artificial Sequence
  Chemically synthesized
agaauaugccacauuguauuuca

SEQ ID NO: 54425 - RNA, 23 nt, Artificial Sequence
  Chemically synthesized
gaauaugccacauuguauuucag

SEQ ID NO: 54426 - RNA, 23 nt, Artificial Sequence
  Chemically synthesized
aauaugccacauuguauuucaga

SEQ ID NO: 54427 - RNA, 23 nt, Artificial Sequence
  Chemically synthesized
auaugccacauuguauuucagaa

SEQ ID NO: 54428 - RNA, 23 nt, Artificial Sequence
  Chemically synthesized
uaugccacauuguauuucagaau

SEQ ID NO: 54429 - RNA, 23 nt, Artificial Sequence
  Chemically synthesized
aaagaucuacccgaauaguuacu

SEQ ID NO: 54430 - RNA, 23 nt, Artificial Sequence
  Chemically synthesized
aagaucuacccgaauaguuacug

SEQ ID NO: 54431 - RNA, 23 nt, Artificial Sequence
  Chemically synthesized
agaucuacccgaauaguuacugu

SEQ ID NO: 54432 - RNA, 23 nt, Artificial Sequence
  Chemically synthesized
gaucuacccgaauaguuacugug

SEQ ID NO: 54433 - RNA, 23 nt, Artificial Sequence
  Chemically synthesized
aucuacccgaauaguuacugugu

SEQ ID NO: 54434 - RNA, 23 nt, Artificial Sequence
  Chemically synthesized
ucuacccgaauaguuacugugug

SEQ ID NO: 54435 - RNA, 23 nt, Artificial Sequence
  Chemically synthesized
uccuuuaguguccauccaacugg

SEQ ID NO: 54436 - RNA, 23 nt, Artificial Sequence
  Chemically synthesized
ccuuuaguguccauccaacuggu

SEQ ID NO: 54437 - RNA, 23 nt, Artificial Sequence
  Chemically synthesized
cuuuaguguccauccaacuggua

SEQ ID NO: 54438 - RNA, 23 nt, Artificial Sequence
  Chemically synthesized
uuuaguguccauccaacugguaa

SEQ ID NO: 54439 - RNA, 23 nt, Artificial Sequence
  Chemically synthesized
accgaggcauucuucucaucucc

SEQ ID NO: 54440 - RNA, 23 nt, Artificial Sequence
  Chemically synthesized
ccgaggcauucuucucaucuccu

SEQ ID NO: 54441 - RNA, 23 nt, Artificial Sequence
  Chemically synthesized
cgaggcauucuucucaucuccuc

SEQ ID NO: 54442 - RNA, 23 nt, Artificial Sequence
  Chemically synthesized
gaggcauucuucucaucuccuca

SEQ ID NO: 54443 - RNA, 23 nt, Artificial Sequence
  Chemically synthesized
aggcauucuucucaucuccucaa

SEQ ID NO: 54444 - RNA, 23 nt, Artificial Sequence
  Chemically synthesized
cauucuucucaucuccucaaugg

SEQ ID NO: 54445 - RNA, 23 nt, Artificial Sequence
  Chemically synthesized
auucuucucaucuccucaauggg

SEQ ID NO: 54446 - RNA, 23 nt, Artificial Sequence
  Chemically synthesized
uucuucucaucuccucaauggga

SEQ ID NO: 54447 - RNA, 23 nt, Artificial Sequence
  Chemically synthesized
ucuucucaucuccucaaugggag

SEQ ID NO: 54448 - RNA, 23 nt, Artificial Sequence
  Chemically synthesized
cuucucaucuccucaaugggagu

SEQ ID NO: 54449 - RNA, 23 nt, Artificial Sequence
  Chemically synthesized
ugcauucuacauucaggcuagaa

SEQ ID NO: 54450 - RNA, 23 nt, Artificial Sequence
  Chemically synthesized
gcauucuacauucaggcuagaaa

SEQ ID NO: 54451 - RNA, 23 nt, Artificial Sequence
  Chemically synthesized
cauucuacauucaggcuagaaau

SEQ ID NO: 54452 - RNA, 23 nt, Artificial Sequence
  Chemically synthesized
uuguuugaaaacaagcgaggugg

SEQ ID NO: 54453 - RNA, 23 nt, Artificial Sequence
  Chemically synthesized
uguuugaaaacaagcgagguggc

SEQ ID NO: 54454 - RNA, 23 nt, Artificial Sequence
  Chemically synthesized
guuugaaaacaagcgagguggcg

SEQ ID NO: 54455 - RNA, 23 nt, Artificial Sequence
  Chemically synthesized
uuugaaaacaagcgagguggcgc

SEQ ID NO: 54456 - RNA, 23 nt, Artificial Sequence
  Chemically synthesized
uugaaaacaagcgagguggcgcu

SEQ ID NO: 54457 - RNA, 23 nt, Artificial Sequence
  Chemically synthesized
aaucuaacuucaccgcccuuagu

SEQ ID NO: 54458 - RNA, 23 nt, Artificial Sequence
  Chemically synthesized
ucuuguucaucaaaaccuggacu

SEQ ID NO: 54459 - RNA, 23 nt, Artificial Sequence
  Chemically synthesized
cuuguucaucaaaaccuggacuu

SEQ ID NO: 54460 - RNA, 23 nt, Artificial Sequence
  Chemically synthesized
uuguucaucaaaaccuggacuug

SEQ ID NO: 54461 - RNA, 23 nt, Artificial Sequence
  Chemically synthesized
guucaucaaaaccuggacuuguc

SEQ ID NO: 54462 - RNA, 23 nt, Artificial Sequence
  Chemically synthesized
uucaucaaaaccuggacuugucu

SEQ ID NO: 54463 - RNA, 23 nt, Artificial Sequence
  Chemically synthesized
ucaucaaaaccuggacuugucuc

SEQ ID NO: 54464 - RNA, 23 nt, Artificial Sequence
  Chemically synthesized
caucaaaaccuggacuugucucc

SEQ ID NO: 54465 - RNA, 23 nt, Artificial Sequence
  Chemically synthesized
aucaaaaccuggacuugucuccu

SEQ ID NO: 54466 - RNA, 23 nt, Artificial Sequence
  Chemically synthesized
ccuggacuugucuccucaucugc

SEQ ID NO: 54467 - RNA, 23 nt, Artificial Sequence
  Chemically synthesized
cuggacuugucuccucaucugcu

SEQ ID NO: 54468 - RNA, 23 nt, Artificial Sequence
  Chemically synthesized
uggacuugucuccucaucugcuu

SEQ ID NO: 54469 - RNA, 23 nt, Artificial Sequence
  Chemically synthesized
ggacuugucuccucaucugcuuc

SEQ ID NO: 54470 - RNA, 23 nt, Artificial Sequence
  Chemically synthesized
gacuugucuccucaucugcuucu

SEQ ID NO: 54471 - RNA, 23 nt, Artificial Sequence
  Chemically synthesized
uuagaauuauccacauccaucgg

SEQ ID NO: 54472 - RNA, 23 nt, Artificial Sequence
  Chemically synthesized
uagaauuauccacauccaucggu

SEQ ID NO: 54473 - RNA, 23 nt, Artificial Sequence
  Chemically synthesized
agaauuauccacauccaucggug

SEQ ID NO: 54474 - RNA, 23 nt, Artificial Sequence
  Chemically synthesized
gaauuauccacauccaucgguga

SEQ ID NO: 54475 - RNA, 23 nt, Artificial Sequence
  Chemically synthesized
uuucacuaaccugagagagaugg

SEQ ID NO: 54476 - RNA, 23 nt, Artificial Sequence
  Chemically synthesized
uucacuaaccugagagagaugga

SEQ ID NO: 54477 - RNA, 23 nt, Artificial Sequence
  Chemically synthesized
ucacuaaccugagagagauggac

SEQ ID NO: 54478 - RNA, 23 nt, Artificial Sequence
  Chemically synthesized
cacuaaccugagagagauggacu

SEQ ID NO: 54479 - RNA, 23 nt, Artificial Sequence
  Chemically synthesized
acuaaccugagagagauggacug

SEQ ID NO: 54480 - RNA, 23 nt, Artificial Sequence
  Chemically synthesized
uagauuuuaugugcucacauaua

SEQ ID NO: 54481 - RNA, 23 nt, Artificial Sequence
  Chemically synthesized
uuauaugaauaugccucaagcac

SEQ ID NO: 54482 - RNA, 23 nt, Artificial Sequence
  Chemically synthesized
uauaugaauaugccucaagcacc

SEQ ID NO: 54483 - RNA, 23 nt, Artificial Sequence
  Chemically synthesized
auaugaauaugccucaagcacca

SEQ ID NO: 54484 - RNA, 23 nt, Artificial Sequence
  Chemically synthesized
caccacaaaagaaacauuagucc

SEQ ID NO: 54485 - RNA, 23 nt, Artificial Sequence
  Chemically synthesized
accacaaaagaaacauuaguccu

SEQ ID NO: 54486 - RNA, 23 nt, Artificial Sequence
  Chemically synthesized
ccacaaaagaaacauuaguccua

SEQ ID NO: 54487 - RNA, 23 nt, Artificial Sequence
  Chemically synthesized
cacaaaagaaacauuaguccuaa

SEQ ID NO: 54488 - RNA, 23 nt, Artificial Sequence
  Chemically synthesized
acaaaagaaacauuaguccuaau

SEQ ID NO: 54489 - RNA, 23 nt, Artificial Sequence
  Chemically synthesized
ucaggaaaaccuccuuuuauucc

SEQ ID NO: 54490 - RNA, 23 nt, Artificial Sequence
  Chemically synthesized
uauuccacauuuccuuucaucuc

SEQ ID NO: 54491 - RNA, 23 nt, Artificial Sequence
  Chemically synthesized
ggcucacagggagauuuuuagca

SEQ ID NO: 54492 - RNA, 23 nt, Artificial Sequence
  Chemically synthesized
gcucacagggagauuuuuagcaa

SEQ ID NO: 54493 - RNA, 23 nt, Artificial Sequence
  Chemically synthesized
cucacagggagauuuuuagcaaa

SEQ ID NO: 54494 - RNA, 23 nt, Artificial Sequence
  Chemically synthesized
ucacagggagauuuuuagcaaaa

SEQ ID NO: 54495 - RNA, 23 nt, Artificial Sequence
  Chemically synthesized
cacagggagauuuuuagcaaaau

SEQ ID NO: 54496 - RNA, 23 nt, Artificial Sequence
  Chemically synthesized
ccuggauuucaacuuguuuccug

SEQ ID NO: 54497 - RNA, 23 nt, Artificial Sequence
  Chemically synthesized
ggaguuuagauguaccaacugac

SEQ ID NO: 54498 - RNA, 23 nt, Artificial Sequence
  Chemically synthesized
gaguuuagauguaccaacugaca

SEQ ID NO: 54499 - RNA, 23 nt, Artificial Sequence
  Chemically synthesized
aguuuagauguaccaacugacaa

SEQ ID NO: 54500 - RNA, 23 nt, Artificial Sequence
  Chemically synthesized
guuuagauguaccaacugacaac

SEQ ID NO: 54501 - RNA, 23 nt, Artificial Sequence
  Chemically synthesized
uuuagauguaccaacugacaacu

SEQ ID NO: 54502 - RNA, 23 nt, Artificial Sequence
  Chemically synthesized
ucaauucauauauuacaccugac

SEQ ID NO: 54503 - RNA, 23 nt, Artificial Sequence
  Chemically synthesized
caauucauauauuacaccugaca

SEQ ID NO: 54504 - RNA, 23 nt, Artificial Sequence
  Chemically synthesized
aauucauauauuacaccugacag

SEQ ID NO: 54505 - RNA, 23 nt, Artificial Sequence
  Chemically synthesized
gaggugggaggagaugcuauucg

SEQ ID NO: 54506 - RNA, 23 nt, Artificial Sequence
  Chemically synthesized
aggugggaggagaugcuauucgc

SEQ ID NO: 54507 - RNA, 23 nt, Artificial Sequence
  Chemically synthesized
ggugggaggagaugcuauucgcu

SEQ ID NO: 54508 - RNA, 23 nt, Artificial Sequence
  Chemically synthesized
gugggaggagaugcuauucgcuc

SEQ ID NO: 54509 - RNA, 23 nt, Artificial Sequence
  Chemically synthesized
ugggaggagaugcuauucgcucg

SEQ ID NO: 54510 - RNA, 23 nt, Artificial Sequence
  Chemically synthesized
ggacucgacagcaugguauauga

SEQ ID NO: 54511 - RNA, 23 nt, Artificial Sequence
  Chemically synthesized
gacucgacagcaugguauaugaa

SEQ ID NO: 54512 - RNA, 23 nt, Artificial Sequence
  Chemically synthesized
acucgacagcaugguauaugaau

SEQ ID NO: 54513 - RNA, 23 nt, Artificial Sequence
  Chemically synthesized
cucgacagcaugguauaugaaug

SEQ ID NO: 54514 - RNA, 23 nt, Artificial Sequence
  Chemically synthesized
caugguauaugaauggauaaagc

SEQ ID NO: 54515 - RNA, 23 nt, Artificial Sequence
  Chemically synthesized
augguauaugaauggauaaagcu

SEQ ID NO: 54516 - RNA, 23 nt, Artificial Sequence
  Chemically synthesized
ugguauaugaauggauaaagcuu

SEQ ID NO: 54517 - RNA, 23 nt, Artificial Sequence
  Chemically synthesized
acaguuucugcauucuucauugu

SEQ ID NO: 54518 - RNA, 23 nt, Artificial Sequence
  Chemically synthesized
caguuucugcauucuucauugua

SEQ ID NO: 54519 - RNA, 23 nt, Artificial Sequence
  Chemically synthesized
aguuucugcauucuucauuguag

SEQ ID NO: 54520 - RNA, 23 nt, Artificial Sequence
  Chemically synthesized
guuucugcauucuucauuguagu

SEQ ID NO: 54521 - RNA, 23 nt, Artificial Sequence
  Chemically synthesized
uuucugcauucuucauuguagua

SEQ ID NO: 54522 - RNA, 23 nt, Artificial Sequence
  Chemically synthesized
uggccacugcagaaagauucucu

SEQ ID NO: 54523 - RNA, 23 nt, Artificial Sequence
  Chemically synthesized
ggccacugcagaaagauucucug

SEQ ID NO: 54524 - RNA, 23 nt, Artificial Sequence
  Chemically synthesized
gccacugcagaaagauucucuga

SEQ ID NO: 54525 - RNA, 23 nt, Artificial Sequence
  Chemically synthesized
ccacugcagaaagauucucugaa

SEQ ID NO: 54526 - RNA, 23 nt, Artificial Sequence
  Chemically synthesized
cacugcagaaagauucucugaag

SEQ ID NO: 54527 - RNA, 23 nt, Artificial Sequence
  Chemically synthesized
aauccaccuguagcaugccuugg

SEQ ID NO: 54528 - RNA, 23 nt, Artificial Sequence
  Chemically synthesized
auccaccuguagcaugccuuggc

SEQ ID NO: 54529 - RNA, 23 nt, Artificial Sequence
  Chemically synthesized
aucuuuuuguacagaacucauca

SEQ ID NO: 54530 - RNA, 23 nt, Artificial Sequence
  Chemically synthesized
ucuuuuuguacagaacucaucau

SEQ ID NO: 54531 - RNA, 23 nt, Artificial Sequence
  Chemically synthesized
cuuuuuguacagaacucaucaug

SEQ ID NO: 54532 - RNA, 23 nt, Artificial Sequence
  Chemically synthesized
uuuuuguacagaacucaucaugg

SEQ ID NO: 54533 - RNA, 23 nt, Artificial Sequence
  Chemically synthesized
uaucuguauuaaggcuuuuaacc

SEQ ID NO: 54534 - RNA, 23 nt, Artificial Sequence
  Chemically synthesized
uuuuguacagaacucaucaugga

SEQ ID NO: 54535 - RNA, 23 nt, Artificial Sequence
  Chemically synthesized
auacugaucagaggaaaaaagac

SEQ ID NO: 54536 - RNA, 23 nt, Artificial Sequence
  Chemically synthesized
aagauggacugauauaaauguug

SEQ ID NO: 54537 - RNA, 23 nt, Artificial Sequence
  Chemically synthesized
uucauuuugccacuuacacauug

SEQ ID NO: 54538 - RNA, 23 nt, Artificial Sequence
  Chemically synthesized
aacgucccucaaacaaucgauug

SEQ ID NO: 54539 - RNA, 23 nt, Artificial Sequence
  Chemically synthesized
uacauucaggcuagaaauauuuc

SEQ ID NO: 54540 - RNA, 23 nt, Artificial Sequence
  Chemically synthesized
ucauggauucuauucuuguauug

SEQ ID NO: 54541 - RNA, 23 nt, Artificial Sequence
  Chemically synthesized
cauggauucuauucuuguauugu

SEQ ID NO: 54542 - RNA, 23 nt, Artificial Sequence
  Chemically synthesized
auucguucacuuucccaccaccg

SEQ ID NO: 54543 - RNA, 23 nt, Artificial Sequence
  Chemically synthesized
aaacacucgccugcuuucucucu

SEQ ID NO: 54544 - RNA, 23 nt, Artificial Sequence
  Chemically synthesized
agcugccaauaucuguauuaagg

SEQ ID NO: 54545 - RNA, 23 nt, Artificial Sequence
  Chemically synthesized
uaucccagaaaucgaucaaagcu

SEQ ID NO: 54546 - RNA, 23 nt, Artificial Sequence
  Chemically synthesized
gaauagcauccuucaaguuuugg

SEQ ID NO: 54547 - RNA, 23 nt, Artificial Sequence
  Chemically synthesized
uuucccacuguucuuuucuucug

SEQ ID NO: 54548 - RNA, 23 nt, Artificial Sequence
  Chemically synthesized
agagccucauuucacuaaccuga

SEQ ID NO: 54549 - RNA, 23 nt, Artificial Sequence
  Chemically synthesized
aaccuccuuuuauuccacauuuc

SEQ ID NO: 54550 - RNA, 23 nt, Artificial Sequence
  Chemically synthesized
uaccucaaaaguacaauuucugg

SEQ ID NO: 54551 - RNA, 23 nt, Artificial Sequence
  Chemically synthesized
uucuucauuguaguaucguagca

SEQ ID NO: 54552 - RNA, 23 nt, Artificial Sequence
  Chemically synthesized
acucaggauugauuaaaaagcgg

SEQ ID NO: 54553 - RNA, 23 nt, Artificial Sequence
  Chemically synthesized
augaacgucccucaaacaaucga

SEQ ID NO: 54554 - RNA, 23 nt, Artificial Sequence
  Chemically synthesized
acgucccucaaacaaucgauuga

SEQ ID NO: 54555 - RNA, 23 nt, Artificial Sequence
  Chemically synthesized
ggugagguggaacguauuuaggg

SEQ ID NO: 54556 - RNA, 23 nt, Artificial Sequence
  Chemically synthesized
uuuccagguaguuuagcauuuaa

SEQ ID NO: 54557 - RNA, 23 nt, Artificial Sequence
  Chemically synthesized
cagguaguuuagcauuuaaauca

SEQ ID NO: 54558 - RNA, 23 nt, Artificial Sequence
  Chemically synthesized
uucaccgcccuuaguagaguacc

SEQ ID NO: 54559 - RNA, 23 nt, Artificial Sequence
  Chemically synthesized
uucacuuuccaaaagcugcuccg

SEQ ID NO: 54560 - RNA, 23 nt, Artificial Sequence
  Chemically synthesized
aaauacugaucagaggaaaaaag

SEQ ID NO: 54561 - RNA, 23 nt, Artificial Sequence
  Chemically synthesized
caaacaaucgauugaaguuaaug

SEQ ID NO: 54562 - RNA, 23 nt, Artificial Sequence
  Chemically synthesized
auggacugauauaaauguugagc

SEQ ID NO: 54563 - RNA, 23 nt, Artificial Sequence
  Chemically synthesized
caaguaccuuaucccagaaaucg

SEQ ID NO: 54564 - RNA, 23 nt, Artificial Sequence
  Chemically synthesized
aaaagaucuacccgaauaguuac

SEQ ID NO: 54565 - RNA, 23 nt, Artificial Sequence
  Chemically synthesized
aggugagguggaacguauuuagg

SEQ ID NO: 54566 - RNA, 23 nt, Artificial Sequence
  Chemically synthesized
uagacacacuuaaagagcauacg

SEQ ID NO: 54567 - RNA, 23 nt, Artificial Sequence
  Chemically synthesized
agacacacuuaaagagcauacgu

SEQ ID NO: 54568 - RNA, 23 nt, Artificial Sequence
  Chemically synthesized
auauagaugauaugggaguuucu

SEQ ID NO: 54569 - RNA, 23 nt, Artificial Sequence
  Chemically synthesized
auaccagagaaacuucaauaugu

SEQ ID NO: 54570 - RNA, 23 nt, Artificial Sequence
  Chemically synthesized
aaucagcaugaaguucccaguuc

SEQ ID NO: 54571 - RNA, 23 nt, Artificial Sequence
  Chemically synthesized
guucacuuuccaaaagcugcucc

SEQ ID NO: 54572 - RNA, 23 nt, Artificial Sequence
  Chemically synthesized
uucaguaaggaaaaugugcaugc

SEQ ID NO: 54573 - RNA, 23 nt, Artificial Sequence
  Chemically synthesized
uaccugugauaauuagacauuca

SEQ ID NO: 54574 - RNA, 23 nt, Artificial Sequence
  Chemically synthesized
auuucuucuugcacaaguccugc

SEQ ID NO: 54575 - RNA, 23 nt, Artificial Sequence
  Chemically synthesized
cucugugacucuucuaaaguagc

SEQ ID NO: 54576 - RNA, 23 nt, Artificial Sequence
  Chemically synthesized
agauggacugauauaaauguuga

SEQ ID NO: 54577 - RNA, 23 nt, Artificial Sequence
  Chemically synthesized
uuucuuagaauaugccacauugu

SEQ ID NO: 54578 - RNA, 23 nt, Artificial Sequence
  Chemically synthesized
guuucccacuguucuuuucuucu

SEQ ID NO: 54579 - RNA, 23 nt, Artificial Sequence
  Chemically synthesized
uccauguugcuuagaauuucugc

SEQ ID NO: 54580 - RNA, 23 nt, Artificial Sequence
  Chemically synthesized
uucauuccagugcgacucucucc

SEQ ID NO: 54581 - RNA, 23 nt, Artificial Sequence
  Chemically synthesized
aauauagaugauaugggaguuuc

SEQ ID NO: 54582 - RNA, 23 nt, Artificial Sequence
  Chemically synthesized
uauagaugauaugggaguuucug

SEQ ID NO: 54583 - RNA, 23 nt, Artificial Sequence
  Chemically synthesized
agcaaaaucaguuaaagagauuc

SEQ ID NO: 54584 - RNA, 23 nt, Artificial Sequence
  Chemically synthesized
agucaauucauauauuacaccug

SEQ ID NO: 54585 - RNA, 23 nt, Artificial Sequence
  Chemically synthesized
gucaauucauauauuacaccuga

SEQ ID NO: 54586 - RNA, 23 nt, Artificial Sequence
  Chemically synthesized
aaauccacaguaagccuuguuca

SEQ ID NO: 54587 - RNA, 23 nt, Artificial Sequence
  Chemically synthesized
uucagcucgcgucucauuuucuc

SEQ ID NO: 54588 - RNA, 23 nt, Artificial Sequence
  Chemically synthesized
aacucaggauugauuaaaaagcg

SEQ ID NO: 54589 - RNA, 23 nt, Artificial Sequence
  Chemically synthesized
aacuagaauacuccgauuucauc

SEQ ID NO: 54590 - RNA, 23 nt, Artificial Sequence
  Chemically synthesized
ugauauaaauguugagcuucugc

SEQ ID NO: 54591 - RNA, 23 nt, Artificial Sequence
  Chemically synthesized
ggauucuauucuuguauuguugu

SEQ ID NO: 54592 - RNA, 23 nt, Artificial Sequence
  Chemically synthesized
auuucuuagaauaugccacauug

SEQ ID NO: 54593 - RNA, 23 nt, Artificial Sequence
  Chemically synthesized
aguuccaagccacuucuuaucug

SEQ ID NO: 54594 - RNA, 23 nt, Artificial Sequence
  Chemically synthesized
aaggugagguggaacguauuuag

SEQ ID NO: 54595 - RNA, 23 nt, Artificial Sequence
  Chemically synthesized
auuuaaaucauucauuccagugc

SEQ ID NO: 54596 - RNA, 23 nt, Artificial Sequence
  Chemically synthesized
auucauuccagugcgacucucuc

SEQ ID NO: 54597 - RNA, 23 nt, Artificial Sequence
  Chemically synthesized
uaccguuuccuaaauucaauguc

SEQ ID NO: 54598 - RNA, 23 nt, Artificial Sequence
  Chemically synthesized
guuuccuaaauucaaugucagcg

SEQ ID NO: 54599 - RNA, 23 nt, Artificial Sequence
  Chemically synthesized
cuucucuggccuguucaucuucc

SEQ ID NO: 54600 - RNA, 23 nt, Artificial Sequence
  Chemically synthesized
ucucuauucucuucacuaucugu

SEQ ID NO: 54601 - RNA, 23 nt, Artificial Sequence
  Chemically synthesized
aacuucaauauguacaaaucagc

SEQ ID NO: 54602 - RNA, 23 nt, Artificial Sequence
  Chemically synthesized
uuuccaaaagcugcuccgugugu

SEQ ID NO: 54603 - RNA, 23 nt, Artificial Sequence
  Chemically synthesized
aauacugaucagaggaaaaaaga

SEQ ID NO: 54604 - RNA, 23 nt, Artificial Sequence
  Chemically synthesized
uacugaucagaggaaaaaagaca

SEQ ID NO: 54605 - RNA, 23 nt, Artificial Sequence
  Chemically synthesized
uauuacaccugacagcucaaaca

SEQ ID NO: 54606 - RNA, 23 nt, Artificial Sequence
  Chemically synthesized
cucaguaccugugauaauuagac

SEQ ID NO: 54607 - RNA, 23 nt, Artificial Sequence
  Chemically synthesized
aaaguagcagaagagcguuuuaa

SEQ ID NO: 54608 - RNA, 23 nt, Artificial Sequence
  Chemically synthesized
uuccacuggguacaaauuuuguu

SEQ ID NO: 54609 - RNA, 23 nt, Artificial Sequence
  Chemically synthesized
uccugcucgcaaaagaucuaccc

SEQ ID NO: 54610 - RNA, 23 nt, Artificial Sequence
  Chemically synthesized
agguggaacguauuuagggaucu

SEQ ID NO: 54611 - RNA, 23 nt, Artificial Sequence
  Chemically synthesized
uagaauccuuuuuuccauguugc

SEQ ID NO: 54612 - RNA, 23 nt, Artificial Sequence
  Chemically synthesized
aguguccauccaacugguaauag

SEQ ID NO: 54613 - RNA, 23 nt, Artificial Sequence
  Chemically synthesized
accguuuccuaaauucaauguca

SEQ ID NO: 54614 - RNA, 23 nt, Artificial Sequence
  Chemically synthesized
uugaagguuuauuugcuguuugg

SEQ ID NO: 54615 - RNA, 23 nt, Artificial Sequence
  Chemically synthesized
ugagucuugacaacuauuuuuag

SEQ ID NO: 54616 - RNA, 23 nt, Artificial Sequence
  Chemically synthesized
ucucuggcaccacaucuaucuca

SEQ ID NO: 54617 - RNA, 23 nt, Artificial Sequence
  Chemically synthesized
aagcaccacaaaagaaacauuag

SEQ ID NO: 54618 - RNA, 23 nt, Artificial Sequence
  Chemically synthesized
aaacaaugcaagcauauuaagag

SEQ ID NO: 54619 - RNA, 23 nt, Artificial Sequence
  Chemically synthesized
aagagaucugauggacaaaagaa

SEQ ID NO: 54620 - RNA, 23 nt, Artificial Sequence
  Chemically synthesized
aaauaaaccacaucucgcucagc

SEQ ID NO: 54621 - RNA, 23 nt, Artificial Sequence
  Chemically synthesized
caaauacuguguacuuuuuucag

SEQ ID NO: 54622 - RNA, 23 nt, Artificial Sequence
  Chemically synthesized
cucaggauugauuaaaaagcgga

SEQ ID NO: 54623 - RNA, 23 nt, Artificial Sequence
  Chemically synthesized
gauugauuaaaaagcggauuucu

SEQ ID NO: 54624 - RNA, 23 nt, Artificial Sequence
  Chemically synthesized
uugauuaaaaagcggauuucuuc

SEQ ID NO: 54625 - RNA, 23 nt, Artificial Sequence
  Chemically synthesized
ugucuuguaaaugucaccaaccc

SEQ ID NO: 54626 - RNA, 23 nt, Artificial Sequence
  Chemically synthesized
guaacuagaauacuccgauuuca

SEQ ID NO: 54627 - RNA, 23 nt, Artificial Sequence
  Chemically synthesized
aaguaccuuaucccagaaaucga

SEQ ID NO: 54628 - RNA, 23 nt, Artificial Sequence
  Chemically synthesized
aucccagaaaucgaucaaagcug

SEQ ID NO: 54629 - RNA, 23 nt, Artificial Sequence
  Chemically synthesized
aagucccauuucuuagaauaugc

SEQ ID NO: 54630 - RNA, 23 nt, Artificial Sequence
  Chemically synthesized
agucccauuucuuagaauaugcc

SEQ ID NO: 54631 - RNA, 23 nt, Artificial Sequence
  Chemically synthesized
ugccacauuguauuucagaauag

SEQ ID NO: 54632 - RNA, 23 nt, Artificial Sequence
  Chemically synthesized
ugagaagugcagucugaaugagc

SEQ ID NO: 54633 - RNA, 23 nt, Artificial Sequence
  Chemically synthesized
ucccauuucuuagaauaugccac

SEQ ID NO: 54634 - RNA, 23 nt, Artificial Sequence
  Chemically synthesized
cccauuucuuagaauaugccaca

SEQ ID NO: 54635 - RNA, 23 nt, Artificial Sequence
  Chemically synthesized
ccauuucuuagaauaugccacau

SEQ ID NO: 54636 - RNA, 23 nt, Artificial Sequence
  Chemically synthesized
cauuucuuagaauaugccacauu

SEQ ID NO: 54637 - RNA, 23 nt, Artificial Sequence
  Chemically synthesized
auuucuuagaauaugccacauug

SEQ ID NO: 54638 - RNA, 23 nt, Artificial Sequence
  Chemically synthesized
guggaacguauuuagggaucuuc

SEQ ID NO: 54639 - RNA, 23 nt, Artificial Sequence
  Chemically synthesized
uggaacguauuuagggaucuucc

SEQ ID NO: 54640 - RNA, 23 nt, Artificial Sequence
  Chemically synthesized
ggaacguauuuagggaucuuccu

SEQ ID NO: 54641 - RNA, 23 nt, Artificial Sequence
  Chemically synthesized
gaacguauuuagggaucuuccuu

SEQ ID NO: 54642 - RNA, 23 nt, Artificial Sequence
  Chemically synthesized
aacguauuuagggaucuuccuuu

SEQ ID NO: 54643 - RNA, 23 nt, Artificial Sequence
  Chemically synthesized
gggugcauuuauuucaaaacauc

SEQ ID NO: 54644 - RNA, 23 nt, Artificial Sequence
  Chemically synthesized
agggugcauuuauuucaaaacau

SEQ ID NO: 54645 - RNA, 23 nt, Artificial Sequence
  Chemically synthesized
aagggugcauuuauuucaaaaca

SEQ ID NO: 54646 - RNA, 23 nt, Artificial Sequence
  Chemically synthesized
caagggugcauuuauuucaaaac

SEQ ID NO: 54647 - RNA, 23 nt, Artificial Sequence
  Chemically synthesized
ucaagggugcauuuauuucaaaa

SEQ ID NO: 54648 - RNA, 23 nt, Artificial Sequence
  Chemically synthesized
gcaugauguauuuuuguacccuu

SEQ ID NO: 54649 - RNA, 23 nt, Artificial Sequence
  Chemically synthesized
ugcaugauguauuuuuguacccu

SEQ ID NO: 54650 - RNA, 23 nt, Artificial Sequence
  Chemically synthesized
uugcaugauguauuuuuguaccc

SEQ ID NO: 54651 - RNA, 23 nt, Artificial Sequence
  Chemically synthesized
guugcaugauguauuuuuguacc

SEQ ID NO: 54652 - RNA, 23 nt, Artificial Sequence
  Chemically synthesized
uguugcaugauguauuuuuguac

SEQ ID NO: 54653 - RNA, 23 nt, Artificial Sequence
  Chemically synthesized
ugcucaaguuuuucagaaagcau

SEQ ID NO: 54654 - RNA, 23 nt, Artificial Sequence
  Chemically synthesized
augcucaaguuuuucagaaagca

SEQ ID NO: 54655 - RNA, 23 nt, Artificial Sequence
  Chemically synthesized
aaugcucaaguuuuucagaaagc

SEQ ID NO: 54656 - RNA, 23 nt, Artificial Sequence
  Chemically synthesized
gaaugcucaaguuuuucagaaag

SEQ ID NO: 54657 - RNA, 23 nt, Artificial Sequence
  Chemically synthesized
ugaaugcucaaguuuuucagaaa

SEQ ID NO: 54658 - RNA, 23 nt, Artificial Sequence
  Chemically synthesized
cuacagaccugacaaguuucuuc

SEQ ID NO: 54659 - RNA, 23 nt, Artificial Sequence
  Chemically synthesized
ucuacagaccugacaaguuucuu

SEQ ID NO: 54660 - RNA, 23 nt, Artificial Sequence
  Chemically synthesized
aucuacagaccugacaaguuucu

SEQ ID NO: 54661 - RNA, 23 nt, Artificial Sequence
  Chemically synthesized
uaucuacagaccugacaaguuuc

SEQ ID NO: 54662 - RNA, 23 nt, Artificial Sequence
  Chemically synthesized
auaucuacagaccugacaaguuu

SEQ ID NO: 54663 - RNA, 23 nt, Artificial Sequence
  Chemically synthesized
ggaaucgauuauaagcaaaagga

SEQ ID NO: 54664 - RNA, 23 nt, Artificial Sequence
  Chemically synthesized
uggaaucgauuauaagcaaaagg

SEQ ID NO: 54665 - RNA, 23 nt, Artificial Sequence
  Chemically synthesized
cuggaaucgauuauaagcaaaag

SEQ ID NO: 54666 - RNA, 23 nt, Artificial Sequence
  Chemically synthesized
gcuggaaucgauuauaagcaaaa

SEQ ID NO: 54667 - RNA, 23 nt, Artificial Sequence
  Chemically synthesized
agcuggaaucgauuauaagcaaa

SEQ ID NO: 54668 - RNA, 23 nt, Artificial Sequence
  Chemically synthesized
ggaaguccauaauuugcaaccag

SEQ ID NO: 54669 - RNA, 23 nt, Artificial Sequence
  Chemically synthesized
uggaaguccauaauuugcaacca

SEQ ID NO: 54670 - RNA, 23 nt, Artificial Sequence
  Chemically synthesized
guggaaguccauaauuugcaacc

SEQ ID NO: 54671 - RNA, 23 nt, Artificial Sequence
  Chemically synthesized
uguggaaguccauaauuugcaac

SEQ ID NO: 54672 - RNA, 23 nt, Artificial Sequence
  Chemically synthesized
guguggaaguccauaauuugcaa

SEQ ID NO: 54673 - RNA, 23 nt, Artificial Sequence
  Chemically synthesized
gcaguaaaaucuuugacaaaaac

SEQ ID NO: 54674 - RNA, 23 nt, Artificial Sequence
  Chemically synthesized
cgcaguaaaaucuuugacaaaaa

SEQ ID NO: 54675 - RNA, 23 nt, Artificial Sequence
  Chemically synthesized
ccgcaguaaaaucuuugacaaaa

SEQ ID NO: 54676 - RNA, 23 nt, Artificial Sequence
  Chemically synthesized
cccgcaguaaaaucuuugacaaa

SEQ ID NO: 54677 - RNA, 23 nt, Artificial Sequence
  Chemically synthesized
ucccgcaguaaaaucuuugacaa

SEQ ID NO: 54678 - RNA, 23 nt, Artificial Sequence
  Chemically synthesized
uucaagggugcauuuauuucaaa

SEQ ID NO: 54679 - RNA, 23 nt, Artificial Sequence
  Chemically synthesized
gcucaaguuuuucagaaagcauu

SEQ ID NO: 54680 - RNA, 23 nt, Artificial Sequence
  Chemically synthesized
ucucaugugauccuuuuauguua

SEQ ID NO: 54681 - RNA, 23 nt, Artificial Sequence
  Chemically synthesized
uucucaugugauccuuuuauguu

SEQ ID NO: 54682 - RNA, 23 nt, Artificial Sequence
  Chemically synthesized
auucucaugugauccuuuuaugu

SEQ ID NO: 54683 - RNA, 23 nt, Artificial Sequence
  Chemically synthesized
aauucucaugugauccuuuuaug

SEQ ID NO: 54684 - RNA, 23 nt, Artificial Sequence
  Chemically synthesized
uaauucucaugugauccuuuuau

SEQ ID NO: 54685 - RNA, 23 nt, Artificial Sequence
  Chemically synthesized
gauguauuuuuguacccuuccua

SEQ ID NO: 54686 - RNA, 23 nt, Artificial Sequence
  Chemically synthesized
ugauguauuuuuguacccuuccu

SEQ ID NO: 54687 - RNA, 23 nt, Artificial Sequence
  Chemically synthesized
augauguauuuuuguacccuucc

SEQ ID NO: 54688 - RNA, 23 nt, Artificial Sequence
  Chemically synthesized
caugauguauuuuuguacccuuc

SEQ ID NO: 54689 - RNA, 23 nt, Artificial Sequence
  Chemically synthesized
cgauuauaagcaaaaggaauauu

SEQ ID NO: 54690 - RNA, 23 nt, Artificial Sequence
  Chemically synthesized
ucgauuauaagcaaaaggaauau

SEQ ID NO: 54691 - RNA, 23 nt, Artificial Sequence
  Chemically synthesized
aucgauuauaagcaaaaggaaua

SEQ ID NO: 54692 - RNA, 23 nt, Artificial Sequence
  Chemically synthesized
aaucgauuauaagcaaaaggaau

SEQ ID NO: 54693 - RNA, 23 nt, Artificial Sequence
  Chemically synthesized
gaaucgauuauaagcaaaaggaa

SEQ ID NO: 54694 - RNA, 23 nt, Artificial Sequence
  Chemically synthesized
gagcuggaaucgauuauaagcaa

SEQ ID NO: 54695 - RNA, 23 nt, Artificial Sequence
  Chemically synthesized
agagcuggaaucgauuauaagca

SEQ ID NO: 54696 - RNA, 23 nt, Artificial Sequence
  Chemically synthesized
aagagcuggaaucgauuauaagc

SEQ ID NO: 54697 - RNA, 23 nt, Artificial Sequence
  Chemically synthesized
aaagagcuggaaucgauuauaag

SEQ ID NO: 54698 - RNA, 23 nt, Artificial Sequence
  Chemically synthesized
aaaagagcuggaaucgauuauaa

SEQ ID NO: 54699 - RNA, 23 nt, Artificial Sequence
  Chemically synthesized
guauuuuuguacccuuccuacag

SEQ ID NO: 54700 - RNA, 23 nt, Artificial Sequence
  Chemically synthesized
uguauuuuuguacccuuccuaca

SEQ ID NO: 54701 - RNA, 23 nt, Artificial Sequence
  Chemically synthesized
auguauuuuuguacccuuccuac

SEQ ID NO: 54702 - RNA, 23 nt, Artificial Sequence
  Chemically synthesized
cucaugugauccuuuuauguuau

SEQ ID NO: 54703 - RNA, 23 nt, Artificial Sequence
  Chemically synthesized
uaaaagagcuggaaucgauuaua

SEQ ID NO: 54704 - RNA, 23 nt, Artificial Sequence
  Chemically synthesized
ccuuguugcaugauguauuuuug

SEQ ID NO: 54705 - RNA, 23 nt, Artificial Sequence
  Chemically synthesized
accuuguugcaugauguauuuuu

SEQ ID NO: 54706 - RNA, 23 nt, Artificial Sequence
  Chemically synthesized
gaccuuguugcaugauguauuuu

SEQ ID NO: 54707 - RNA, 23 nt, Artificial Sequence
  Chemically synthesized
ugaccuuguugcaugauguauuu

SEQ ID NO: 54708 - RNA, 23 nt, Artificial Sequence
  Chemically synthesized
augaccuuguugcaugauguauu

SEQ ID NO: 54709 - RNA, 23 nt, Artificial Sequence
  Chemically synthesized
gugaaugcucaaguuuuucagaa

SEQ ID NO: 54710 - RNA, 23 nt, Artificial Sequence
  Chemically synthesized
uuaauucucaugugauccuuuua

SEQ ID NO: 54711 - RNA, 23 nt, Artificial Sequence
  Chemically synthesized
uuuaauucucaugugauccuuuu

SEQ ID NO: 54712 - RNA, 23 nt, Artificial Sequence
  Chemically synthesized
cuuuaauucucaugugauccuuu

SEQ ID NO: 54713 - RNA, 23 nt, Artificial Sequence
  Chemically synthesized
acuuuaauucucaugugauccuu

SEQ ID NO: 54714 - RNA, 23 nt, Artificial Sequence
  Chemically synthesized
cacuuuaauucucaugugauccu

SEQ ID NO: 54715 - RNA, 23 nt, Artificial Sequence
  Chemically synthesized
ucacuuuaauucucaugugaucc

SEQ ID NO: 54716 - RNA, 23 nt, Artificial Sequence
  Chemically synthesized
uucacuuuaauucucaugugauc

SEQ ID NO: 54717 - RNA, 23 nt, Artificial Sequence
  Chemically synthesized
cuucacuuuaauucucaugugau

SEQ ID NO: 54718 - RNA, 23 nt, Artificial Sequence
  Chemically synthesized
acuucacuuuaauucucauguga

SEQ ID NO: 54719 - RNA, 23 nt, Artificial Sequence
  Chemically synthesized
acagaccugacaaguuucuucag

SEQ ID NO: 54720 - RNA, 23 nt, Artificial Sequence
  Chemically synthesized
uacagaccugacaaguuucuuca

SEQ ID NO: 54721 - RNA, 23 nt, Artificial Sequence
  Chemically synthesized
aucccgcaguaaaaucuuugaca

SEQ ID NO: 54722 - RNA, 23 nt, Artificial Sequence
  Chemically synthesized
gaucccgcaguaaaaucuuugac

SEQ ID NO: 54723 - RNA, 23 nt, Artificial Sequence
  Chemically synthesized
ggaucccgcaguaaaaucuuuga

SEQ ID NO: 54724 - RNA, 23 nt, Artificial Sequence
  Chemically synthesized
gucaaaccauaaacuucaugguc

SEQ ID NO: 54725 - RNA, 23 nt, Artificial Sequence
  Chemically synthesized
agucaaaccauaaacuucauggu

SEQ ID NO: 54726 - RNA, 23 nt, Artificial Sequence
  Chemically synthesized
uagucaaaccauaaacuucaugg

SEQ ID NO: 54727 - RNA, 23 nt, Artificial Sequence
  Chemically synthesized
auagucaaaccauaaacuucaug

SEQ ID NO: 54728 - RNA, 23 nt, Artificial Sequence
  Chemically synthesized
gauagucaaaccauaaacuucau

SEQ ID NO: 54729 - RNA, 23 nt, Artificial Sequence
  Chemically synthesized
cucaaguuuuucagaaagcauua

SEQ ID NO: 54730 - RNA, 23 nt, Artificial Sequence
  Chemically synthesized
ccacaccaaaccucucuuauuag

SEQ ID NO: 54731 - RNA, 23 nt, Artificial Sequence
  Chemically synthesized
accacaccaaaccucucuuauua

SEQ ID NO: 54732 - RNA, 23 nt, Artificial Sequence
  Chemically synthesized
caccacaccaaaccucucuuauu

SEQ ID NO: 54733 - RNA, 23 nt, Artificial Sequence
  Chemically synthesized
ucaccacaccaaaccucucuuau

SEQ ID NO: 54734 - RNA, 23 nt, Artificial Sequence
  Chemically synthesized
aucaccacaccaaaccucucuua

SEQ ID NO: 54735 - RNA, 23 nt, Artificial Sequence
  Chemically synthesized
acaaguuucuucagugugugaaa

SEQ ID NO: 54736 - RNA, 23 nt, Artificial Sequence
  Chemically synthesized
gacaaguuucuucagugugugaa

SEQ ID NO: 54737 - RNA, 23 nt, Artificial Sequence
  Chemically synthesized
ugacaaguuucuucaguguguga

SEQ ID NO: 54738 - RNA, 23 nt, Artificial Sequence
  Chemically synthesized
cugacaaguuucuucagugugug

SEQ ID NO: 54739 - RNA, 23 nt, Artificial Sequence
  Chemically synthesized
ccugacaaguuucuucagugugu

SEQ ID NO: 54740 - RNA, 23 nt, Artificial Sequence
  Chemically synthesized
accugacaaguuucuucagugug

SEQ ID NO: 54741 - RNA, 23 nt, Artificial Sequence
  Chemically synthesized
gaccugacaaguuucuucagugu

SEQ ID NO: 54742 - RNA, 23 nt, Artificial Sequence
  Chemically synthesized
agaccugacaaguuucuucagug

SEQ ID NO: 54743 - RNA, 23 nt, Artificial Sequence
  Chemically synthesized
cagaccugacaaguuucuucagu

SEQ ID NO: 54744 - RNA, 23 nt, Artificial Sequence
  Chemically synthesized
acaugguggaagagaagauucca

SEQ ID NO: 54745 - RNA, 23 nt, Artificial Sequence
  Chemically synthesized
uacaugguggaagagaagauucc

SEQ ID NO: 54746 - RNA, 23 nt, Artificial Sequence
  Chemically synthesized
auacaugguggaagagaagauuc

SEQ ID NO: 54747 - RNA, 23 nt, Artificial Sequence
  Chemically synthesized
gauacaugguggaagagaagauu

SEQ ID NO: 54748 - RNA, 23 nt, Artificial Sequence
  Chemically synthesized
ugauacaugguggaagagaagau

SEQ ID NO: 54749 - RNA, 23 nt, Artificial Sequence
  Chemically synthesized
cuuguugcaugauguauuuuugu

SEQ ID NO: 54750 - RNA, 23 nt, Artificial Sequence
  Chemically synthesized
caagugaagaaaagugaaugcuc

SEQ ID NO: 54751 - RNA, 23 nt, Artificial Sequence
  Chemically synthesized
gcaagugaagaaaagugaaugcu

SEQ ID NO: 54752 - RNA, 23 nt, Artificial Sequence
  Chemically synthesized
ggcaagugaagaaaagugaaugc

SEQ ID NO: 54753 - RNA, 23 nt, Artificial Sequence
  Chemically synthesized
aggcaagugaagaaaagugaaug

SEQ ID NO: 54754 - RNA, 23 nt, Artificial Sequence
  Chemically synthesized
caggcaagugaagaaaagugaau

SEQ ID NO: 54755 - RNA, 23 nt, Artificial Sequence
  Chemically synthesized
gaacaggcaagugaagaaaagug

SEQ ID NO: 54756 - RNA, 23 nt, Artificial Sequence
  Chemically synthesized
agaacaggcaagugaagaaaagu

SEQ ID NO: 54757 - RNA, 23 nt, Artificial Sequence
  Chemically synthesized
uagaacaggcaagugaagaaaag

SEQ ID NO: 54758 - RNA, 23 nt, Artificial Sequence
  Chemically synthesized
uuagaacaggcaagugaagaaaa

SEQ ID NO: 54759 - RNA, 23 nt, Artificial Sequence
  Chemically synthesized
auuagaacaggcaagugaagaaa

SEQ ID NO: 54760 - RNA, 23 nt, Artificial Sequence
  Chemically synthesized
ccaaaccucucuuauuagaacag

SEQ ID NO: 54761 - RNA, 23 nt, Artificial Sequence
  Chemically synthesized
accaaaccucucuuauuagaaca

SEQ ID NO: 54762 - RNA, 23 nt, Artificial Sequence
  Chemically synthesized
caccaaaccucucuuauuagaac

SEQ ID NO: 54763 - RNA, 23 nt, Artificial Sequence
  Chemically synthesized
acaccaaaccucucuuauuagaa

SEQ ID NO: 54764 - RNA, 23 nt, Artificial Sequence
  Chemically synthesized
cacaccaaaccucucuuauuaga

SEQ ID NO: 54765 - RNA, 23 nt, Artificial Sequence
  Chemically synthesized
cccaaagucuuaaaauaacuuau

SEQ ID NO: 54766 - RNA, 23 nt, Artificial Sequence
  Chemically synthesized
ccccaaagucuuaaaauaacuua

SEQ ID NO: 54767 - RNA, 23 nt, Artificial Sequence
  Chemically synthesized
uccccaaagucuuaaaauaacuu

SEQ ID NO: 54768 - RNA, 23 nt, Artificial Sequence
  Chemically synthesized
uuccccaaagucuuaaaauaacu

SEQ ID NO: 54769 - RNA, 23 nt, Artificial Sequence
  Chemically synthesized
uuuccccaaagucuuaaaauaac

SEQ ID NO: 54770 - RNA, 23 nt, Artificial Sequence
  Chemically synthesized
agagaagauuccagagacuuaug

SEQ ID NO: 54771 - RNA, 23 nt, Artificial Sequence
  Chemically synthesized
aagagaagauuccagagacuuau

SEQ ID NO: 54772 - RNA, 23 nt, Artificial Sequence
  Chemically synthesized
gaagagaagauuccagagacuua

SEQ ID NO: 54773 - RNA, 23 nt, Artificial Sequence
  Chemically synthesized
ggaagagaagauuccagagacuu

SEQ ID NO: 54774 - RNA, 23 nt, Artificial Sequence
  Chemically synthesized
uggaagagaagauuccagagacu

SEQ ID NO: 54775 - RNA, 23 nt, Artificial Sequence
  Chemically synthesized
gaauucaacacuuccaaaauaaa

SEQ ID NO: 54776 - RNA, 23 nt, Artificial Sequence
  Chemically synthesized
ugaauucaacacuuccaaaauaa

SEQ ID NO: 54777 - RNA, 23 nt, Artificial Sequence
  Chemically synthesized
gugaauucaacacuuccaaaaua

SEQ ID NO: 54778 - RNA, 23 nt, Artificial Sequence
  Chemically synthesized
ggugaauucaacacuuccaaaau

SEQ ID NO: 54779 - RNA, 23 nt, Artificial Sequence
  Chemically synthesized
uggugaauucaacacuuccaaaa

SEQ ID NO: 54780 - RNA, 23 nt, Artificial Sequence
  Chemically synthesized
uuucaagggugcauuuauuucaa

SEQ ID NO: 54781 - RNA, 23 nt, Artificial Sequence
  Chemically synthesized
agugaaugcucaaguuuuucaga

SEQ ID NO: 54782 - RNA, 23 nt, Artificial Sequence
  Chemically synthesized
aagugaaugcucaaguuuuucag

SEQ ID NO: 54783 - RNA, 23 nt, Artificial Sequence
  Chemically synthesized
aaagugaaugcucaaguuuuuca

SEQ ID NO: 54784 - RNA, 23 nt, Artificial Sequence
  Chemically synthesized
aaaagugaaugcucaaguuuuuc

SEQ ID NO: 54785 - RNA, 23 nt, Artificial Sequence
  Chemically synthesized
gaaaagugaaugcucaaguuuuu

SEQ ID NO: 54786 - RNA, 23 nt, Artificial Sequence
  Chemically synthesized
acaggcaagugaagaaaagugaa

SEQ ID NO: 54787 - RNA, 23 nt, Artificial Sequence
  Chemically synthesized
aacaggcaagugaagaaaaguga

SEQ ID NO: 54788 - RNA, 23 nt, Artificial Sequence
  Chemically synthesized
uauuagaacaggcaagugaagaa

SEQ ID NO: 54789 - RNA, 23 nt, Artificial Sequence
  Chemically synthesized
ucaucagcauaccuuuauuguga

SEQ ID NO: 54790 - RNA, 23 nt, Artificial Sequence
  Chemically synthesized
aucaucagcauaccuuuauugug

SEQ ID NO: 54791 - RNA, 23 nt, Artificial Sequence
  Chemically synthesized
uaucaucagcauaccuuuauugu

SEQ ID NO: 54792 - RNA, 23 nt, Artificial Sequence
  Chemically synthesized
auaucaucagcauaccuuuauug

SEQ ID NO: 54793 - RNA, 23 nt, Artificial Sequence
  Chemically synthesized
uauaucaucagcauaccuuuauu

SEQ ID NO: 54794 - RNA, 23 nt, Artificial Sequence
  Chemically synthesized
ugagaugagacauguagacugcc

SEQ ID NO: 54795 - RNA, 23 nt, Artificial Sequence
  Chemically synthesized
cugagaugagacauguagacugc

SEQ ID NO: 54796 - RNA, 23 nt, Artificial Sequence
  Chemically synthesized
ccugagaugagacauguagacug

SEQ ID NO: 54797 - RNA, 23 nt, Artificial Sequence
  Chemically synthesized
uccugagaugagacauguagacu

SEQ ID NO: 54798 - RNA, 23 nt, Artificial Sequence
  Chemically synthesized
auccugagaugagacauguagac

SEQ ID NO: 54799 - RNA, 23 nt, Artificial Sequence
  Chemically synthesized
uugugguuuaugucaucauacau

SEQ ID NO: 54800 - RNA, 23 nt, Artificial Sequence
  Chemically synthesized
cuugugguuuaugucaucauaca

SEQ ID NO: 54801 - RNA, 23 nt, Artificial Sequence
  Chemically synthesized
ccuugugguuuaugucaucauac

SEQ ID NO: 54802 - RNA, 23 nt, Artificial Sequence
  Chemically synthesized
uccuugugguuuaugucaucaua

SEQ ID NO: 54803 - RNA, 23 nt, Artificial Sequence
  Chemically synthesized
cuccuugugguuuaugucaucau

SEQ ID NO: 54804 - RNA, 23 nt, Artificial Sequence
  Chemically synthesized
ggauucaucuugcacaucugaga

SEQ ID NO: 54805 - RNA, 23 nt, Artificial Sequence
  Chemically synthesized
aggauucaucuugcacaucugag

SEQ ID NO: 54806 - RNA, 23 nt, Artificial Sequence
  Chemically synthesized
gaggauucaucuugcacaucuga

SEQ ID NO: 54807 - RNA, 23 nt, Artificial Sequence
  Chemically synthesized
ugaggauucaucuugcacaucug

SEQ ID NO: 54808 - RNA, 23 nt, Artificial Sequence
  Chemically synthesized
cugaggauucaucuugcacaucu

SEQ ID NO: 54809 - RNA, 23 nt, Artificial Sequence
  Chemically synthesized
caaguuucuucagugugugaaaa

SEQ ID NO: 54810 - RNA, 23 nt, Artificial Sequence
  Chemically synthesized
gugauacaugguggaagagaaga

SEQ ID NO: 54811 - RNA, 23 nt, Artificial Sequence
  Chemically synthesized
ggugauacaugguggaagagaag

SEQ ID NO: 54812 - RNA, 23 nt, Artificial Sequence
  Chemically synthesized
gggugauacaugguggaagagaa

SEQ ID NO: 54813 - RNA, 23 nt, Artificial Sequence
  Chemically synthesized
ugggugauacaugguggaagaga

SEQ ID NO: 54814 - RNA, 23 nt, Artificial Sequence
  Chemically synthesized
cugggugauacaugguggaagag

SEQ ID NO: 54815 - RNA, 23 nt, Artificial Sequence
  Chemically synthesized
ccugggugauacaugguggaaga

SEQ ID NO: 54816 - RNA, 23 nt, Artificial Sequence
  Chemically synthesized
caaguacacugaaauucauccug

SEQ ID NO: 54817 - RNA, 23 nt, Artificial Sequence
  Chemically synthesized
ucaaguacacugaaauucauccu

SEQ ID NO: 54818 - RNA, 23 nt, Artificial Sequence
  Chemically synthesized
gucaaguacacugaaauucaucc

SEQ ID NO: 54819 - RNA, 23 nt, Artificial Sequence
  Chemically synthesized
cgucaaguacacugaaauucauc

SEQ ID NO: 54820 - RNA, 23 nt, Artificial Sequence
  Chemically synthesized
gcgucaaguacacugaaauucau

SEQ ID NO: 54821 - RNA, 23 nt, Artificial Sequence
  Chemically synthesized
guccauaauuugcaaccagagaa

SEQ ID NO: 54822 - RNA, 23 nt, Artificial Sequence
  Chemically synthesized
aguccauaauuugcaaccagaga

SEQ ID NO: 54823 - RNA, 23 nt, Artificial Sequence
  Chemically synthesized
aaguccauaauuugcaaccagag

SEQ ID NO: 54824 - RNA, 23 nt, Artificial Sequence
  Chemically synthesized
gaaguccauaauuugcaaccaga

SEQ ID NO: 54825 - RNA, 23 nt, Artificial Sequence
  Chemically synthesized
gaauaaaagaucuggcccaucag

SEQ ID NO: 54826 - RNA, 23 nt, Artificial Sequence
  Chemically synthesized
agaauaaaagaucuggcccauca

SEQ ID NO: 54827 - RNA, 23 nt, Artificial Sequence
  Chemically synthesized
cagaauaaaagaucuggcccauc

SEQ ID NO: 54828 - RNA, 23 nt, Artificial Sequence
  Chemically synthesized
gcagaauaaaagaucuggcccau

SEQ ID NO: 54829 - RNA, 23 nt, Artificial Sequence
  Chemically synthesized
agcagaauaaaagaucuggccca

SEQ ID NO: 54830 - RNA, 23 nt, Artificial Sequence
  Chemically synthesized
cuuucaagggugcauuuauuuca

SEQ ID NO: 54831 - RNA, 23 nt, Artificial Sequence
  Chemically synthesized
caaaguguaugggaugcuuucaa

SEQ ID NO: 54832 - RNA, 23 nt, Artificial Sequence
  Chemically synthesized
ccaaaguguaugggaugcuuuca

SEQ ID NO: 54833 - RNA, 23 nt, Artificial Sequence
  Chemically synthesized
gccaaaguguaugggaugcuuuc

SEQ ID NO: 54834 - RNA, 23 nt, Artificial Sequence
  Chemically synthesized
ugccaaaguguaugggaugcuuu

SEQ ID NO: 54835 - RNA, 23 nt, Artificial Sequence
  Chemically synthesized
cugccaaaguguaugggaugcuu

SEQ ID NO: 54836 - RNA, 23 nt, Artificial Sequence
  Chemically synthesized
gcauuacauuuccaaaugaauga

SEQ ID NO: 54837 - RNA, 23 nt, Artificial Sequence
  Chemically synthesized
agcauuacauuuccaaaugaaug

SEQ ID NO: 54838 - RNA, 23 nt, Artificial Sequence
  Chemically synthesized
aagcauuacauuuccaaaugaau

SEQ ID NO: 54839 - RNA, 23 nt, Artificial Sequence
  Chemically synthesized
aaagcauuacauuuccaaaugaa

SEQ ID NO: 54840 - RNA, 23 nt, Artificial Sequence
  Chemically synthesized
gaaagcauuacauuuccaaauga

SEQ ID NO: 54841 - RNA, 23 nt, Artificial Sequence
  Chemically synthesized
agaaaagugaaugcucaaguuuu

SEQ ID NO: 54842 - RNA, 23 nt, Artificial Sequence
  Chemically synthesized
aagaaaagugaaugcucaaguuu

SEQ ID NO: 54843 - RNA, 23 nt, Artificial Sequence
  Chemically synthesized
gaagaaaagugaaugcucaaguu

SEQ ID NO: 54844 - RNA, 23 nt, Artificial Sequence
  Chemically synthesized
ugaagaaaagugaaugcucaagu

SEQ ID NO: 54845 - RNA, 23 nt, Artificial Sequence
  Chemically synthesized
ugaaaaaucaccacaccaaaccu

SEQ ID NO: 54846 - RNA, 23 nt, Artificial Sequence
  Chemically synthesized
uugaaaaaucaccacaccaaacc

SEQ ID NO: 54847 - RNA, 23 nt, Artificial Sequence
  Chemically synthesized
auugaaaaaucaccacaccaaac

SEQ ID NO: 54848 - RNA, 23 nt, Artificial Sequence
  Chemically synthesized
uauugaaaaaucaccacaccaaa

SEQ ID NO: 54849 - RNA, 23 nt, Artificial Sequence
  Chemically synthesized
cuauugaaaaaucaccacaccaa

SEQ ID NO: 54850 - RNA, 23 nt, Artificial Sequence
  Chemically synthesized
guaacauccuuucuauugaaaaa

SEQ ID NO: 54851 - RNA, 23 nt, Artificial Sequence
  Chemically synthesized
gguaacauccuuucuauugaaaa

SEQ ID NO: 54852 - RNA, 23 nt, Artificial Sequence
  Chemically synthesized
ugguaacauccuuucuauugaaa

SEQ ID NO: 54853 - RNA, 23 nt, Artificial Sequence
  Chemically synthesized
uugguaacauccuuucuauugaa

SEQ ID NO: 54854 - RNA, 23 nt, Artificial Sequence
  Chemically synthesized
auugguaacauccuuucuauuga

SEQ ID NO: 54855 - RNA, 23 nt, Artificial Sequence
  Chemically synthesized
acauguagacugccaaaguguau

SEQ ID NO: 54856 - RNA, 23 nt, Artificial Sequence
  Chemically synthesized
gacauguagacugccaaagugua

SEQ ID NO: 54857 - RNA, 23 nt, Artificial Sequence
  Chemically synthesized
agacauguagacugccaaagugu

SEQ ID NO: 54858 - RNA, 23 nt, Artificial Sequence
  Chemically synthesized
gagacauguagacugccaaagug

SEQ ID NO: 54859 - RNA, 23 nt, Artificial Sequence
  Chemically synthesized
ugagacauguagacugccaaagu

SEQ ID NO: 54860 - RNA, 23 nt, Artificial Sequence
  Chemically synthesized
acuccuugugguuuaugucauca

SEQ ID NO: 54861 - RNA, 23 nt, Artificial Sequence
  Chemically synthesized
gacuccuugugguuuaugucauc

SEQ ID NO: 54862 - RNA, 23 nt, Artificial Sequence
  Chemically synthesized
cauccugagaugagacauguaga

SEQ ID NO: 54863 - RNA, 23 nt, Artificial Sequence
  Chemically synthesized
ucauccugagaugagacauguag

SEQ ID NO: 54864 - RNA, 23 nt, Artificial Sequence
  Chemically synthesized
cagucgcugugguuguuuuagcu

SEQ ID NO: 54865 - RNA, 23 nt, Artificial Sequence
  Chemically synthesized
ccagucgcugugguuguuuuagc

SEQ ID NO: 54866 - RNA, 23 nt, Artificial Sequence
  Chemically synthesized
gccagucgcugugguuguuuuag

SEQ ID NO: 54867 - RNA, 23 nt, Artificial Sequence
  Chemically synthesized
agccagucgcugugguuguuuua

SEQ ID NO: 54868 - RNA, 23 nt, Artificial Sequence
  Chemically synthesized
gagccagucgcugugguuguuuu

SEQ ID NO: 54869 - RNA, 23 nt, Artificial Sequence
  Chemically synthesized
gaagauuccagagacuuaugcca

SEQ ID NO: 54870 - RNA, 23 nt, Artificial Sequence
  Chemically synthesized
agaagauuccagagacuuaugcc

SEQ ID NO: 54871 - RNA, 23 nt, Artificial Sequence
  Chemically synthesized
gagaagauuccagagacuuaugc

SEQ ID NO: 54872 - RNA, 23 nt, Artificial Sequence
  Chemically synthesized
gccugggugauacaugguggaag

SEQ ID NO: 54873 - RNA, 23 nt, Artificial Sequence
  Chemically synthesized
guauucuggaaaacgguuucccg

SEQ ID NO: 54874 - RNA, 23 nt, Artificial Sequence
  Chemically synthesized
aguauucuggaaaacgguuuccc

SEQ ID NO: 54875 - RNA, 23 nt, Artificial Sequence
  Chemically synthesized
caguauucuggaaaacgguuucc

SEQ ID NO: 54876 - RNA, 23 nt, Artificial Sequence
  Chemically synthesized
ucaguauucuggaaaacgguuuc

SEQ ID NO: 54877 - RNA, 23 nt, Artificial Sequence
  Chemically synthesized
uucaguauucuggaaaacgguuu

SEQ ID NO: 54878 - RNA, 23 nt, Artificial Sequence
  Chemically synthesized
gcuuucaagggugcauuuauuuc

SEQ ID NO: 54879 - RNA, 23 nt, Artificial Sequence
  Chemically synthesized
ugcuuucaagggugcauuuauuu

SEQ ID NO: 54880 - RNA, 23 nt, Artificial Sequence
  Chemically synthesized
augcuuucaagggugcauuuauu

SEQ ID NO: 54881 - RNA, 23 nt, Artificial Sequence
  Chemically synthesized
gaugcuuucaagggugcauuuau

SEQ ID NO: 54882 - RNA, 23 nt, Artificial Sequence
  Chemically synthesized
ggaugcuuucaagggugcauuua

SEQ ID NO: 54883 - RNA, 23 nt, Artificial Sequence
  Chemically synthesized
aaugaccuuguugcaugauguau

SEQ ID NO: 54884 - RNA, 23 nt, Artificial Sequence
  Chemically synthesized
gaaugaccuuguugcaugaugua

SEQ ID NO: 54885 - RNA, 23 nt, Artificial Sequence
  Chemically synthesized
ugaaugaccuuguugcaugaugu

SEQ ID NO: 54886 - RNA, 23 nt, Artificial Sequence
  Chemically synthesized
cucuuauuagaacaggcaaguga

SEQ ID NO: 54887 - RNA, 23 nt, Artificial Sequence
  Chemically synthesized
ucucuuauuagaacaggcaagug

SEQ ID NO: 54888 - RNA, 23 nt, Artificial Sequence
  Chemically synthesized
cucucuuauuagaacaggcaagu

SEQ ID NO: 54889 - RNA, 23 nt, Artificial Sequence
  Chemically synthesized
ccucucuuauuagaacaggcaag

SEQ ID NO: 54890 - RNA, 23 nt, Artificial Sequence
  Chemically synthesized
accucucuuauuagaacaggcaa

SEQ ID NO: 54891 - RNA, 23 nt, Artificial Sequence
  Chemically synthesized
agaugagacauguagacugccaa

SEQ ID NO: 54892 - RNA, 23 nt, Artificial Sequence
  Chemically synthesized
gagaugagacauguagacugcca

SEQ ID NO: 54893 - RNA, 23 nt, Artificial Sequence
  Chemically synthesized
gugguuguuuuagcuccuugacu

SEQ ID NO: 54894 - RNA, 23 nt, Artificial Sequence
  Chemically synthesized
ugugguuguuuuagcuccuugac

SEQ ID NO: 54895 - RNA, 23 nt, Artificial Sequence
  Chemically synthesized
cugugguuguuuuagcuccuuga

SEQ ID NO: 54896 - RNA, 23 nt, Artificial Sequence
  Chemically synthesized
gcugugguuguuuuagcuccuug

SEQ ID NO: 54897 - RNA, 23 nt, Artificial Sequence
  Chemically synthesized
cgcugugguuguuuuagcuccuu

SEQ ID NO: 54898 - RNA, 23 nt, Artificial Sequence
  Chemically synthesized
ccugaggauucaucuugcacauc

SEQ ID NO: 54899 - RNA, 23 nt, Artificial Sequence
  Chemically synthesized
uccugaggauucaucuugcacau

SEQ ID NO: 54900 - RNA, 23 nt, Artificial Sequence
  Chemically synthesized
gugugugaaaaauccugaggauu

SEQ ID NO: 54901 - RNA, 23 nt, Artificial Sequence
  Chemically synthesized
agugugugaaaaauccugaggau

SEQ ID NO: 54902 - RNA, 23 nt, Artificial Sequence
  Chemically synthesized
cagugugugaaaaauccugagga

SEQ ID NO: 54903 - RNA, 23 nt, Artificial Sequence
  Chemically synthesized
ucagugugugaaaaauccugagg

SEQ ID NO: 54904 - RNA, 23 nt, Artificial Sequence
  Chemically synthesized
uucagugugugaaaaauccugag

SEQ ID NO: 54905 - RNA, 23 nt, Artificial Sequence
  Chemically synthesized
auaaaagagcuggaaucgauuau

SEQ ID NO: 54906 - RNA, 23 nt, Artificial Sequence
  Chemically synthesized
uccauaauuugcaaccagagaag

SEQ ID NO: 54907 - RNA, 23 nt, Artificial Sequence
  Chemically synthesized
cucaauggaucccgcaguaaaau

SEQ ID NO: 54908 - RNA, 23 nt, Artificial Sequence
  Chemically synthesized
gcucaauggaucccgcaguaaaa

SEQ ID NO: 54909 - RNA, 23 nt, Artificial Sequence
  Chemically synthesized
ugcucaauggaucccgcaguaaa

SEQ ID NO: 54910 - RNA, 23 nt, Artificial Sequence
  Chemically synthesized
augcucaauggaucccgcaguaa

SEQ ID NO: 54911 - RNA, 23 nt, Artificial Sequence
  Chemically synthesized
gaugcucaauggaucccgcagua

SEQ ID NO: 54912 - RNA, 23 nt, Artificial Sequence
  Chemically synthesized
ggagaaaggacugcagcaacaac

SEQ ID NO: 54913 - RNA, 23 nt, Artificial Sequence
  Chemically synthesized
uggagaaaggacugcagcaacaa

SEQ ID NO: 54914 - RNA, 23 nt, Artificial Sequence
  Chemically synthesized
cuggagaaaggacugcagcaaca

SEQ ID NO: 54915 - RNA, 23 nt, Artificial Sequence
  Chemically synthesized
acuggagaaaggacugcagcaac

SEQ ID NO: 54916 - RNA, 23 nt, Artificial Sequence
  Chemically synthesized
gacuggagaaaggacugcagcaa

SEQ ID NO: 54917 - RNA, 23 nt, Artificial Sequence
  Chemically synthesized
acauuacugaagaagacuaucag

SEQ ID NO: 54918 - RNA, 23 nt, Artificial Sequence
  Chemically synthesized
aacauuacugaagaagacuauca

SEQ ID NO: 54919 - RNA, 23 nt, Artificial Sequence
  Chemically synthesized
caacauuacugaagaagacuauc

SEQ ID NO: 54920 - RNA, 23 nt, Artificial Sequence
  Chemically synthesized
gcaacauuacugaagaagacuau

SEQ ID NO: 54921 - RNA, 23 nt, Artificial Sequence
  Chemically synthesized
ugcaacauuacugaagaagacua

SEQ ID NO: 54922 - RNA, 23 nt, Artificial Sequence
  Chemically synthesized
uugcaacauuacugaagaagacu

SEQ ID NO: 54923 - RNA, 23 nt, Artificial Sequence
  Chemically synthesized
cuugcaacauuacugaagaagac

SEQ ID NO: 54924 - RNA, 23 nt, Artificial Sequence
  Chemically synthesized
ccuugcaacauuacugaagaaga

SEQ ID NO: 54925 - RNA, 23 nt, Artificial Sequence
  Chemically synthesized
gggaggugcaguuucagaaccca

SEQ ID NO: 54926 - RNA, 23 nt, Artificial Sequence
  Chemically synthesized
ggggaggugcaguuucagaaccc

SEQ ID NO: 54927 - RNA, 23 nt, Artificial Sequence
  Chemically synthesized
aggggaggugcaguuucagaacc

SEQ ID NO: 54928 - RNA, 23 nt, Artificial Sequence
  Chemically synthesized
aaggggaggugcaguuucagaac

SEQ ID NO: 54929 - RNA, 23 nt, Artificial Sequence
  Chemically synthesized
gaaggggaggugcaguuucagaa

SEQ ID NO: 54930 - RNA, 23 nt, Artificial Sequence
  Chemically synthesized
guguaugggaugcuuucaagggu

SEQ ID NO: 54931 - RNA, 23 nt, Artificial Sequence
  Chemically synthesized
aguguaugggaugcuuucaaggg

SEQ ID NO: 54932 - RNA, 23 nt, Artificial Sequence
  Chemically synthesized
aaguguaugggaugcuuucaagg

SEQ ID NO: 54933 - RNA, 23 nt, Artificial Sequence
  Chemically synthesized
aaaguguaugggaugcuuucaag

SEQ ID NO: 54934 - RNA, 23 nt, Artificial Sequence
  Chemically synthesized
gugaagaaaagugaaugcucaag

SEQ ID NO: 54935 - RNA, 23 nt, Artificial Sequence
  Chemically synthesized
agugaagaaaagugaaugcucaa

SEQ ID NO: 54936 - RNA, 23 nt, Artificial Sequence
  Chemically synthesized
aagugaagaaaagugaaugcuca

SEQ ID NO: 54937 - RNA, 23 nt, Artificial Sequence
  Chemically synthesized
acuuauaucaucagcauaccuuu

SEQ ID NO: 54938 - RNA, 23 nt, Artificial Sequence
  Chemically synthesized
aacuuauaucaucagcauaccuu

SEQ ID NO: 54939 - RNA, 23 nt, Artificial Sequence
  Chemically synthesized
uaacuuauaucaucagcauaccu

SEQ ID NO: 54940 - RNA, 23 nt, Artificial Sequence
  Chemically synthesized
auaacuuauaucaucagcauacc

SEQ ID NO: 54941 - RNA, 23 nt, Artificial Sequence
  Chemically synthesized
aauaacuuauaucaucagcauac

SEQ ID NO: 54942 - RNA, 23 nt, Artificial Sequence
  Chemically synthesized
uucauccugagaugagacaugua

SEQ ID NO: 54943 - RNA, 23 nt, Artificial Sequence
  Chemically synthesized
gguuguuuuagcuccuugacucc

SEQ ID NO: 54944 - RNA, 23 nt, Artificial Sequence
  Chemically synthesized
ugguuguuuuagcuccuugacuc

SEQ ID NO: 54945 - RNA, 23 nt, Artificial Sequence
  Chemically synthesized
caugguggaagagaagauuccag

SEQ ID NO: 54946 - RNA, 23 nt, Artificial Sequence
  Chemically synthesized
agagaagguucagacacuagagg

SEQ ID NO: 54947 - RNA, 23 nt, Artificial Sequence
  Chemically synthesized
cagagaagguucagacacuagag

SEQ ID NO: 54948 - RNA, 23 nt, Artificial Sequence
  Chemically synthesized
ccagagaagguucagacacuaga

SEQ ID NO: 54949 - RNA, 23 nt, Artificial Sequence
  Chemically synthesized
accagagaagguucagacacuag

SEQ ID NO: 54950 - RNA, 23 nt, Artificial Sequence
  Chemically synthesized
aaccagagaagguucagacacua

SEQ ID NO: 54951 - RNA, 23 nt, Artificial Sequence
  Chemically synthesized
auaauuugcaaccagagaagguu

SEQ ID NO: 54952 - RNA, 23 nt, Artificial Sequence
  Chemically synthesized
cauaauuugcaaccagagaaggu

SEQ ID NO: 54953 - RNA, 23 nt, Artificial Sequence
  Chemically synthesized
ccauaauuugcaaccagagaagg

SEQ ID NO: 54954 - RNA, 23 nt, Artificial Sequence
  Chemically synthesized
ugcgucaaguacacugaaauuca

SEQ ID NO: 54955 - RNA, 23 nt, Artificial Sequence
  Chemically synthesized
augcgucaaguacacugaaauuc

SEQ ID NO: 54956 - RNA, 23 nt, Artificial Sequence
  Chemically synthesized
gaugcgucaaguacacugaaauu

SEQ ID NO: 54957 - RNA, 23 nt, Artificial Sequence
  Chemically synthesized
uggaucccgcaguaaaaucuuug

SEQ ID NO: 54958 - RNA, 23 nt, Artificial Sequence
  Chemically synthesized
auggaucccgcaguaaaaucuuu

SEQ ID NO: 54959 - RNA, 23 nt, Artificial Sequence
  Chemically synthesized
ugguccaugugaugcucaaugga

SEQ ID NO: 54960 - RNA, 23 nt, Artificial Sequence
  Chemically synthesized
gugguccaugugaugcucaaugg

SEQ ID NO: 54961 - RNA, 23 nt, Artificial Sequence
  Chemically synthesized
ugugguccaugugaugcucaaug

SEQ ID NO: 54962 - RNA, 23 nt, Artificial Sequence
  Chemically synthesized
augugguccaugugaugcucaau

SEQ ID NO: 54963 - RNA, 23 nt, Artificial Sequence
  Chemically synthesized
gaugugguccaugugaugcucaa

SEQ ID NO: 54964 - RNA, 23 nt, Artificial Sequence
  Chemically synthesized
uggcccaucaguucacacagguc

SEQ ID NO: 54965 - RNA, 23 nt, Artificial Sequence
  Chemically synthesized
cuggcccaucaguucacacaggu

SEQ ID NO: 54966 - RNA, 23 nt, Artificial Sequence
  Chemically synthesized
ucuggcccaucaguucacacagg

SEQ ID NO: 54967 - RNA, 23 nt, Artificial Sequence
  Chemically synthesized
aucuggcccaucaguucacacag

SEQ ID NO: 54968 - RNA, 23 nt, Artificial Sequence
  Chemically synthesized
gaucuggcccaucaguucacaca

SEQ ID NO: 54969 - RNA, 23 nt, Artificial Sequence
  Chemically synthesized
aaaacauccuugcaacauuacug

SEQ ID NO: 54970 - RNA, 23 nt, Artificial Sequence
  Chemically synthesized
caaaacauccuugcaacauuacu

SEQ ID NO: 54971 - RNA, 23 nt, Artificial Sequence
  Chemically synthesized
ucaaaacauccuugcaacauuac

SEQ ID NO: 54972 - RNA, 23 nt, Artificial Sequence
  Chemically synthesized
uucaaaacauccuugcaacauua

SEQ ID NO: 54973 - RNA, 23 nt, Artificial Sequence
  Chemically synthesized
uuucaaaacauccuugcaacauu

SEQ ID NO: 54974 - RNA, 23 nt, Artificial Sequence
  Chemically synthesized
auuucaaaacauccuugcaacau

SEQ ID NO: 54975 - RNA, 23 nt, Artificial Sequence
  Chemically synthesized
agaaagcauuacauuuccaaaug

SEQ ID NO: 54976 - RNA, 23 nt, Artificial Sequence
  Chemically synthesized
cagaaagcauuacauuuccaaau

SEQ ID NO: 54977 - RNA, 23 nt, Artificial Sequence
  Chemically synthesized
ucagaaagcauuacauuuccaaa

SEQ ID NO: 54978 - RNA, 23 nt, Artificial Sequence
  Chemically synthesized
uucagaaagcauuacauuuccaa

SEQ ID NO: 54979 - RNA, 23 nt, Artificial Sequence
  Chemically synthesized
guagacugccaaaguguauggga

SEQ ID NO: 54980 - RNA, 23 nt, Artificial Sequence
  Chemically synthesized
uguagacugccaaaguguauggg

SEQ ID NO: 54981 - RNA, 23 nt, Artificial Sequence
  Chemically synthesized
auguagacugccaaaguguaugg

SEQ ID NO: 54982 - RNA, 23 nt, Artificial Sequence
  Chemically synthesized
cauguagacugccaaaguguaug

SEQ ID NO: 54983 - RNA, 23 nt, Artificial Sequence
  Chemically synthesized
gaaaaaucaccacaccaaaccuc

SEQ ID NO: 54984 - RNA, 23 nt, Artificial Sequence
  Chemically synthesized
gcauaccuuuauugugaucuauc

SEQ ID NO: 54985 - RNA, 23 nt, Artificial Sequence
  Chemically synthesized
agcauaccuuuauugugaucuau

SEQ ID NO: 54986 - RNA, 23 nt, Artificial Sequence
  Chemically synthesized
cagcauaccuuuauugugaucua

SEQ ID NO: 54987 - RNA, 23 nt, Artificial Sequence
  Chemically synthesized
ucagcauaccuuuauugugaucu

SEQ ID NO: 54988 - RNA, 23 nt, Artificial Sequence
  Chemically synthesized
aucagcauaccuuuauugugauc

SEQ ID NO: 54989 - RNA, 23 nt, Artificial Sequence
  Chemically synthesized
uuauaucaucagcauaccuuuau

SEQ ID NO: 54990 - RNA, 23 nt, Artificial Sequence
  Chemically synthesized
gugcagagcugaagauuuuggag

SEQ ID NO: 54991 - RNA, 23 nt, Artificial Sequence
  Chemically synthesized
ggugcagagcugaagauuuugga

SEQ ID NO: 54992 - RNA, 23 nt, Artificial Sequence
  Chemically synthesized
uggugcagagcugaagauuuugg

SEQ ID NO: 54993 - RNA, 23 nt, Artificial Sequence
  Chemically synthesized
cuggugcagagcugaagauuuug

SEQ ID NO: 54994 - RNA, 23 nt, Artificial Sequence
  Chemically synthesized
gcuggugcagagcugaagauuuu

SEQ ID NO: 54995 - RNA, 23 nt, Artificial Sequence
  Chemically synthesized
cauaaaagagcuggaaucgauua

SEQ ID NO: 54996 - RNA, 23 nt, Artificial Sequence
  Chemically synthesized
ccauaaaagagcuggaaucgauu

SEQ ID NO: 54997 - RNA, 23 nt, Artificial Sequence
  Chemically synthesized
accauaaaagagcuggaaucgau

SEQ ID NO: 54998 - RNA, 23 nt, Artificial Sequence
  Chemically synthesized
ugacaaaaacagcacuuuuggga

SEQ ID NO: 54999 - RNA, 23 nt, Artificial Sequence
  Chemically synthesized
uugacaaaaacagcacuuuuggg

SEQ ID NO: 55000 - RNA, 23 nt, Artificial Sequence
  Chemically synthesized
uuugacaaaaacagcacuuuugg

SEQ ID NO: 55001 - RNA, 23 nt, Artificial Sequence
  Chemically synthesized
cuuugacaaaaacagcacuuuug

SEQ ID NO: 55002 - RNA, 23 nt, Artificial Sequence
  Chemically synthesized
ucuuugacaaaaacagcacuuuu

SEQ ID NO: 55003 - RNA, 23 nt, Artificial Sequence
  Chemically synthesized
cuaccuugcugaugaccucacau

SEQ ID NO: 55004 - RNA, 23 nt, Artificial Sequence
  Chemically synthesized
gcuaccuugcugaugaccucaca

SEQ ID NO: 55005 - RNA, 23 nt, Artificial Sequence
  Chemically synthesized
ggcuaccuugcugaugaccucac

SEQ ID NO: 55006 - RNA, 23 nt, Artificial Sequence
  Chemically synthesized
aggcuaccuugcugaugaccuca

SEQ ID NO: 55007 - RNA, 23 nt, Artificial Sequence
  Chemically synthesized
uaggcuaccuugcugaugaccuc

SEQ ID NO: 55008 - RNA, 23 nt, Artificial Sequence
  Chemically synthesized
cuaaugaaguugggaacucagac

SEQ ID NO: 55009 - RNA, 23 nt, Artificial Sequence
  Chemically synthesized
acuaaugaaguugggaacucaga

SEQ ID NO: 55010 - RNA, 23 nt, Artificial Sequence
  Chemically synthesized
cacuaaugaaguugggaacucag

SEQ ID NO: 55011 - RNA, 23 nt, Artificial Sequence
  Chemically synthesized
ccacuaaugaaguugggaacuca

SEQ ID NO: 55012 - RNA, 23 nt, Artificial Sequence
  Chemically synthesized
gccacuaaugaaguugggaacuc

SEQ ID NO: 55013 - RNA, 23 nt, Artificial Sequence
  Chemically synthesized
aaacauccuugcaacauuacuga

SEQ ID NO: 55014 - RNA, 23 nt, Artificial Sequence
  Chemically synthesized
ggugcauuuauuucaaaacaucc

SEQ ID NO: 55015 - RNA, 23 nt, Artificial Sequence
  Chemically synthesized
guauguuaaguuacuucacuuua

SEQ ID NO: 55016 - RNA, 23 nt, Artificial Sequence
  Chemically synthesized
uguauguuaaguuacuucacuuu

SEQ ID NO: 55017 - RNA, 23 nt, Artificial Sequence
  Chemically synthesized
uuguauguuaaguuacuucacuu

SEQ ID NO: 55018 - RNA, 23 nt, Artificial Sequence
  Chemically synthesized
auuguauguuaaguuacuucacu

SEQ ID NO: 55019 - RNA, 23 nt, Artificial Sequence
  Chemically synthesized
aauuguauguuaaguuacuucac

SEQ ID NO: 55020 - RNA, 23 nt, Artificial Sequence
  Chemically synthesized
caucagcauaccuuuauugugau

SEQ ID NO: 55021 - RNA, 23 nt, Artificial Sequence
  Chemically synthesized
acaucugagaucugagccagucg

SEQ ID NO: 55022 - RNA, 23 nt, Artificial Sequence
  Chemically synthesized
cacaucugagaucugagccaguc

SEQ ID NO: 55023 - RNA, 23 nt, Artificial Sequence
  Chemically synthesized
gcacaucugagaucugagccagu

SEQ ID NO: 55024 - RNA, 23 nt, Artificial Sequence
  Chemically synthesized
ugcacaucugagaucugagccag

SEQ ID NO: 55025 - RNA, 23 nt, Artificial Sequence
  Chemically synthesized
uugcacaucugagaucugagcca

SEQ ID NO: 55026 - RNA, 23 nt, Artificial Sequence
  Chemically synthesized
ucaucuugcacaucugagaucug

SEQ ID NO: 55027 - RNA, 23 nt, Artificial Sequence
  Chemically synthesized
uucaucuugcacaucugagaucu

SEQ ID NO: 55028 - RNA, 23 nt, Artificial Sequence
  Chemically synthesized
auucaucuugcacaucugagauc

SEQ ID NO: 55029 - RNA, 23 nt, Artificial Sequence
  Chemically synthesized
gauucaucuugcacaucugagau

SEQ ID NO: 55030 - RNA, 23 nt, Artificial Sequence
  Chemically synthesized
ggccugggugauacaugguggaa

SEQ ID NO: 55031 - RNA, 23 nt, Artificial Sequence
  Chemically synthesized
aggccugggugauacauggugga

SEQ ID NO: 55032 - RNA, 23 nt, Artificial Sequence
  Chemically synthesized
gugaugugguccaugugaugcuc

SEQ ID NO: 55033 - RNA, 23 nt, Artificial Sequence
  Chemically synthesized
ugugaugugguccaugugaugcu

SEQ ID NO: 55034 - RNA, 23 nt, Artificial Sequence
  Chemically synthesized
cugugaugugguccaugugaugc

SEQ ID NO: 55035 - RNA, 23 nt, Artificial Sequence
  Chemically synthesized
ccugugaugugguccaugugaug

SEQ ID NO: 55036 - RNA, 23 nt, Artificial Sequence
  Chemically synthesized
gccugugaugugguccaugugau

SEQ ID NO: 55037 - RNA, 23 nt, Artificial Sequence
  Chemically synthesized
ccagacuggagaaaggacugcag

SEQ ID NO: 55038 - RNA, 23 nt, Artificial Sequence
  Chemically synthesized
cccagacuggagaaaggacugca

SEQ ID NO: 55039 - RNA, 23 nt, Artificial Sequence
  Chemically synthesized
gcccagacuggagaaaggacugc

SEQ ID NO: 55040 - RNA, 23 nt, Artificial Sequence
  Chemically synthesized
ugcccagacuggagaaaggacug

SEQ ID NO: 55041 - RNA, 23 nt, Artificial Sequence
  Chemically synthesized
uugcccagacuggagaaaggacu

SEQ ID NO: 55042 - RNA, 23 nt, Artificial Sequence
  Chemically synthesized
ucaguucacacagguccagcggg

SEQ ID NO: 55043 - RNA, 23 nt, Artificial Sequence
  Chemically synthesized
aucaguucacacagguccagcgg

SEQ ID NO: 55044 - RNA, 23 nt, Artificial Sequence
  Chemically synthesized
caucaguucacacagguccagcg

SEQ ID NO: 55045 - RNA, 23 nt, Artificial Sequence
  Chemically synthesized
ccaucaguucacacagguccagc

SEQ ID NO: 55046 - RNA, 23 nt, Artificial Sequence
  Chemically synthesized
cccaucaguucacacagguccag

SEQ ID NO: 55047 - RNA, 23 nt, Artificial Sequence
  Chemically synthesized
agccacuaaugaaguugggaacu

SEQ ID NO: 55048 - RNA, 23 nt, Artificial Sequence
  Chemically synthesized
cagccacuaaugaaguugggaac

SEQ ID NO: 55049 - RNA, 23 nt, Artificial Sequence
  Chemically synthesized
augaaugaccuuguugcaugaug

SEQ ID NO: 55050 - RNA, 23 nt, Artificial Sequence
  Chemically synthesized
aaugaaugaccuuguugcaugau

SEQ ID NO: 55051 - RNA, 23 nt, Artificial Sequence
  Chemically synthesized
aaaugaaugaccuuguugcauga

SEQ ID NO: 55052 - RNA, 23 nt, Artificial Sequence
  Chemically synthesized
caaaugaaugaccuuguugcaug

SEQ ID NO: 55053 - RNA, 23 nt, Artificial Sequence
  Chemically synthesized
caaguuuuucagaaagcauuaca

SEQ ID NO: 55054 - RNA, 23 nt, Artificial Sequence
  Chemically synthesized
ucaaguuuuucagaaagcauuac

SEQ ID NO: 55055 - RNA, 23 nt, Artificial Sequence
  Chemically synthesized
aaucaccacaccaaaccucucuu

SEQ ID NO: 55056 - RNA, 23 nt, Artificial Sequence
  Chemically synthesized
uauugguaacauccuuucuauug

SEQ ID NO: 55057 - RNA, 23 nt, Artificial Sequence
  Chemically synthesized
ccuuuauugugaucuaucaauag

SEQ ID NO: 55058 - RNA, 23 nt, Artificial Sequence
  Chemically synthesized
accuuuauugugaucuaucaaua

SEQ ID NO: 55059 - RNA, 23 nt, Artificial Sequence
  Chemically synthesized
uaccuuuauugugaucuaucaau

SEQ ID NO: 55060 - RNA, 23 nt, Artificial Sequence
  Chemically synthesized
auaccuuuauugugaucuaucaa

SEQ ID NO: 55061 - RNA, 23 nt, Artificial Sequence
  Chemically synthesized
cauaccuuuauugugaucuauca

SEQ ID NO: 55062 - RNA, 23 nt, Artificial Sequence
  Chemically synthesized
gcugaagauuuuggaggguccuc

SEQ ID NO: 55063 - RNA, 23 nt, Artificial Sequence
  Chemically synthesized
agcugaagauuuuggaggguccu

SEQ ID NO: 55064 - RNA, 23 nt, Artificial Sequence
  Chemically synthesized
gagcugaagauuuuggagggucc

SEQ ID NO: 55065 - RNA, 23 nt, Artificial Sequence
  Chemically synthesized
agagcugaagauuuuggaggguc

SEQ ID NO: 55066 - RNA, 23 nt, Artificial Sequence
  Chemically synthesized
cagagcugaagauuuuggagggu

SEQ ID NO: 55067 - RNA, 23 nt, Artificial Sequence
  Chemically synthesized
ugcuggugcagagcugaagauuu

SEQ ID NO: 55068 - RNA, 23 nt, Artificial Sequence
  Chemically synthesized
cugcuggugcagagcugaagauu

SEQ ID NO: 55069 - RNA, 23 nt, Artificial Sequence
  Chemically synthesized
ccugcuggugcagagcugaagau

SEQ ID NO: 55070 - RNA, 23 nt, Artificial Sequence
  Chemically synthesized
uugacuccuugugguuuauguca

SEQ ID NO: 55071 - RNA, 23 nt, Artificial Sequence
  Chemically synthesized
cuugacuccuugugguuuauguc

SEQ ID NO: 55072 - RNA, 23 nt, Artificial Sequence
  Chemically synthesized
ccuugacuccuugugguuuaugu

SEQ ID NO: 55073 - RNA, 23 nt, Artificial Sequence
  Chemically synthesized
uccuugacuccuugugguuuaug

SEQ ID NO: 55074 - RNA, 23 nt, Artificial Sequence
  Chemically synthesized
cuccuugacuccuugugguuuau

SEQ ID NO: 55075 - RNA, 23 nt, Artificial Sequence
  Chemically synthesized
agcuccuugacuccuugugguuu

SEQ ID NO: 55076 - RNA, 23 nt, Artificial Sequence
  Chemically synthesized
uagcuccuugacuccuugugguu

SEQ ID NO: 55077 - RNA, 23 nt, Artificial Sequence
  Chemically synthesized
uuagcuccuugacuccuuguggu

SEQ ID NO: 55078 - RNA, 23 nt, Artificial Sequence
  Chemically synthesized
uuuagcuccuugacuccuugugg

SEQ ID NO: 55079 - RNA, 23 nt, Artificial Sequence
  Chemically synthesized
uuuuagcuccuugacuccuugug

SEQ ID NO: 55080 - RNA, 23 nt, Artificial Sequence
  Chemically synthesized
auccugaggauucaucuugcaca

SEQ ID NO: 55081 - RNA, 23 nt, Artificial Sequence
  Chemically synthesized
aauccugaggauucaucuugcac

SEQ ID NO: 55082 - RNA, 23 nt, Artificial Sequence
  Chemically synthesized
aaauccugaggauucaucuugca

SEQ ID NO: 55083 - RNA, 23 nt, Artificial Sequence
  Chemically synthesized
caaccagagaagguucagacacu

SEQ ID NO: 55084 - RNA, 23 nt, Artificial Sequence
  Chemically synthesized
aucuuugacaaaaacagcacuuu

SEQ ID NO: 55085 - RNA, 23 nt, Artificial Sequence
  Chemically synthesized
caauggaucccgcaguaaaaucu

SEQ ID NO: 55086 - RNA, 23 nt, Artificial Sequence
  Chemically synthesized
ucaauggaucccgcaguaaaauc

SEQ ID NO: 55087 - RNA, 23 nt, Artificial Sequence
  Chemically synthesized
gguccaugugaugcucaauggau

SEQ ID NO: 55088 - RNA, 23 nt, Artificial Sequence
  Chemically synthesized
aucagccacuaaugaaguuggga

SEQ ID NO: 55089 - RNA, 23 nt, Artificial Sequence
  Chemically synthesized
uaucagccacuaaugaaguuggg

SEQ ID NO: 55090 - RNA, 23 nt, Artificial Sequence
  Chemically synthesized
cuaucagccacuaaugaaguugg

SEQ ID NO: 55091 - RNA, 23 nt, Artificial Sequence
  Chemically synthesized
acuaucagccacuaaugaaguug

SEQ ID NO: 55092 - RNA, 23 nt, Artificial Sequence
  Chemically synthesized
gacuaucagccacuaaugaaguu

SEQ ID NO: 55093 - RNA, 23 nt, Artificial Sequence
  Chemically synthesized
cauuacugaagaagacuaucagc

SEQ ID NO: 55094 - RNA, 23 nt, Artificial Sequence
  Chemically synthesized
ggaggugcaguuucagaacccag

SEQ ID NO: 55095 - RNA, 23 nt, Artificial Sequence
  Chemically synthesized
ugggaugcuuucaagggugcauu

SEQ ID NO: 55096 - RNA, 23 nt, Artificial Sequence
  Chemically synthesized
augggaugcuuucaagggugcau

SEQ ID NO: 55097 - RNA, 23 nt, Artificial Sequence
  Chemically synthesized
uaugggaugcuuucaagggugca

SEQ ID NO: 55098 - RNA, 23 nt, Artificial Sequence
  Chemically synthesized
guaugggaugcuuucaagggugc

SEQ ID NO: 55099 - RNA, 23 nt, Artificial Sequence
  Chemically synthesized
uguaugggaugcuuucaagggug

SEQ ID NO: 55100 - RNA, 23 nt, Artificial Sequence
  Chemically synthesized
agaagguucagacacuagaggcc

SEQ ID NO: 55101 - RNA, 23 nt, Artificial Sequence
  Chemically synthesized
gagaagguucagacacuagaggc

SEQ ID NO: 55102 - RNA, 23 nt, Artificial Sequence
  Chemically synthesized
ucagccacuaaugaaguugggaa

SEQ ID NO: 55103 - RNA, 23 nt, Artificial Sequence
  Chemically synthesized
acauuuccaaaugaaugaccuug

SEQ ID NO: 55104 - RNA, 23 nt, Artificial Sequence
  Chemically synthesized
uacauuuccaaaugaaugaccuu

SEQ ID NO: 55105 - RNA, 23 nt, Artificial Sequence
  Chemically synthesized
uuacauuuccaaaugaaugaccu

SEQ ID NO: 55106 - RNA, 23 nt, Artificial Sequence
  Chemically synthesized
auuacauuuccaaaugaaugacc

SEQ ID NO: 55107 - RNA, 23 nt, Artificial Sequence
  Chemically synthesized
cauuacauuuccaaaugaaugac

SEQ ID NO: 55108 - RNA, 23 nt, Artificial Sequence
  Chemically synthesized
cugaagauuuuggaggguccucc

SEQ ID NO: 55109 - RNA, 23 nt, Artificial Sequence
  Chemically synthesized
caauuuuccugcaagaauaucua

SEQ ID NO: 55110 - RNA, 23 nt, Artificial Sequence
  Chemically synthesized
ucaauuuuccugcaagaauaucu

SEQ ID NO: 55111 - RNA, 23 nt, Artificial Sequence
  Chemically synthesized
uucaauuuuccugcaagaauauc

SEQ ID NO: 55112 - RNA, 23 nt, Artificial Sequence
  Chemically synthesized
auucaauuuuccugcaagaauau

SEQ ID NO: 55113 - RNA, 23 nt, Artificial Sequence
  Chemically synthesized
uauucaauuuuccugcaagaaua

SEQ ID NO: 55114 - RNA, 23 nt, Artificial Sequence
  Chemically synthesized
ugccugugaugugguccauguga

SEQ ID NO: 55115 - RNA, 23 nt, Artificial Sequence
  Chemically synthesized
cugccugugaugugguccaugug

SEQ ID NO: 55116 - RNA, 23 nt, Artificial Sequence
  Chemically synthesized
gcugccugugaugugguccaugu

SEQ ID NO: 55117 - RNA, 23 nt, Artificial Sequence
  Chemically synthesized
agauucuucuuuggagcagaaua

SEQ ID NO: 55118 - RNA, 23 nt, Artificial Sequence
  Chemically synthesized
aagauucuucuuuggagcagaau

SEQ ID NO: 55119 - RNA, 23 nt, Artificial Sequence
  Chemically synthesized
caagauucuucuuuggagcagaa

SEQ ID NO: 55120 - RNA, 23 nt, Artificial Sequence
  Chemically synthesized
acaagauucuucuuuggagcaga

SEQ ID NO: 55121 - RNA, 23 nt, Artificial Sequence
  Chemically synthesized
aacaagauucuucuuuggagcag

SEQ ID NO: 55122 - RNA, 23 nt, Artificial Sequence
  Chemically synthesized
cucagaccguaccuugcaacaag

SEQ ID NO: 55123 - RNA, 23 nt, Artificial Sequence
  Chemically synthesized
acucagaccguaccuugcaacaa

SEQ ID NO: 55124 - RNA, 23 nt, Artificial Sequence
  Chemically synthesized
aacucagaccguaccuugcaaca

SEQ ID NO: 55125 - RNA, 23 nt, Artificial Sequence
  Chemically synthesized
gaacucagaccguaccuugcaac

SEQ ID NO: 55126 - RNA, 23 nt, Artificial Sequence
  Chemically synthesized
ggaacucagaccguaccuugcaa

SEQ ID NO: 55127 - RNA, 23 nt, Artificial Sequence
  Chemically synthesized
gcagagcugaagauuuuggaggg

SEQ ID NO: 55128 - RNA, 23 nt, Artificial Sequence
  Chemically synthesized
ugcagagcugaagauuuuggagg

SEQ ID NO: 55129 - RNA, 23 nt, Artificial Sequence
  Chemically synthesized
uuguugcaugauguauuuuugua

SEQ ID NO: 55130 - RNA, 23 nt, Artificial Sequence
  Chemically synthesized
aaaucaccacaccaaaccucucu

SEQ ID NO: 55131 - RNA, 23 nt, Artificial Sequence
  Chemically synthesized
ggaguguggaaguccauaauuug

SEQ ID NO: 55132 - RNA, 23 nt, Artificial Sequence
  Chemically synthesized
gggaguguggaaguccauaauuu

SEQ ID NO: 55133 - RNA, 23 nt, Artificial Sequence
  Chemically synthesized
ugggaguguggaaguccauaauu

SEQ ID NO: 55134 - RNA, 23 nt, Artificial Sequence
  Chemically synthesized
uugggaguguggaaguccauaau

SEQ ID NO: 55135 - RNA, 23 nt, Artificial Sequence
  Chemically synthesized
uuugggaguguggaaguccauaa

SEQ ID NO: 55136 - RNA, 23 nt, Artificial Sequence
  Chemically synthesized
cuauggccaacugcgaguucagc

SEQ ID NO: 55137 - RNA, 23 nt, Artificial Sequence
  Chemically synthesized
ccuauggccaacugcgaguucag

SEQ ID NO: 55138 - RNA, 23 nt, Artificial Sequence
  Chemically synthesized
cccuauggccaacugcgaguuca

SEQ ID NO: 55139 - RNA, 23 nt, Artificial Sequence
  Chemically synthesized
gcccuauggccaacugcgaguuc

SEQ ID NO: 55140 - RNA, 23 nt, Artificial Sequence
  Chemically synthesized
agcccuauggccaacugcgaguu

SEQ ID NO: 55141 - RNA, 23 nt, Artificial Sequence
  Chemically synthesized
ccaggaucccaccauaaaagagc

SEQ ID NO: 55142 - RNA, 23 nt, Artificial Sequence
  Chemically synthesized
gccaggaucccaccauaaaagag

SEQ ID NO: 55143 - RNA, 23 nt, Artificial Sequence
  Chemically synthesized
ugccaggaucccaccauaaaaga

SEQ ID NO: 55144 - RNA, 23 nt, Artificial Sequence
  Chemically synthesized
augccaggaucccaccauaaaag

SEQ ID NO: 55145 - RNA, 23 nt, Artificial Sequence
  Chemically synthesized
uaugccaggaucccaccauaaaa

SEQ ID NO: 55146 - RNA, 23 nt, Artificial Sequence
  Chemically synthesized
guggaagagaagauuccagagac

SEQ ID NO: 55147 - RNA, 23 nt, Artificial Sequence
  Chemically synthesized
gguggaagagaagauuccagaga

SEQ ID NO: 55148 - RNA, 23 nt, Artificial Sequence
  Chemically synthesized
agaccguaccuugcaacaagauu

SEQ ID NO: 55149 - RNA, 23 nt, Artificial Sequence
  Chemically synthesized
cagaccguaccuugcaacaagau

SEQ ID NO: 55150 - RNA, 23 nt, Artificial Sequence
  Chemically synthesized
ucagaccguaccuugcaacaaga

SEQ ID NO: 55151 - RNA, 23 nt, Artificial Sequence
  Chemically synthesized
ccauaaacuucauggucaugggu

SEQ ID NO: 55152 - RNA, 23 nt, Artificial Sequence
  Chemically synthesized
accauaaacuucauggucauggg

SEQ ID NO: 55153 - RNA, 23 nt, Artificial Sequence
  Chemically synthesized
aaccauaaacuucauggucaugg

SEQ ID NO: 55154 - RNA, 23 nt, Artificial Sequence
  Chemically synthesized
aaaccauaaacuucauggucaug

SEQ ID NO: 55155 - RNA, 23 nt, Artificial Sequence
  Chemically synthesized
caaaccauaaacuucauggucau

SEQ ID NO: 55156 - RNA, 23 nt, Artificial Sequence
  Chemically synthesized
cagauagucaaaccauaaacuuc

SEQ ID NO: 55157 - RNA, 23 nt, Artificial Sequence
  Chemically synthesized
acagauagucaaaccauaaacuu

SEQ ID NO: 55158 - RNA, 23 nt, Artificial Sequence
  Chemically synthesized
uacagauagucaaaccauaaacu

SEQ ID NO: 55159 - RNA, 23 nt, Artificial Sequence
  Chemically synthesized
cuacagauagucaaaccauaaac

SEQ ID NO: 55160 - RNA, 23 nt, Artificial Sequence
  Chemically synthesized
ccuacagauagucaaaccauaaa

SEQ ID NO: 55161 - RNA, 23 nt, Artificial Sequence
  Chemically synthesized
augagacauguagacugccaaag

SEQ ID NO: 55162 - RNA, 23 nt, Artificial Sequence
  Chemically synthesized
gaugagacauguagacugccaaa

SEQ ID NO: 55163 - RNA, 23 nt, Artificial Sequence
  Chemically synthesized
agaauaucuacagaccugacaag

SEQ ID NO: 55164 - RNA, 23 nt, Artificial Sequence
  Chemically synthesized
aagaauaucuacagaccugacaa

SEQ ID NO: 55165 - RNA, 23 nt, Artificial Sequence
  Chemically synthesized
caagaauaucuacagaccugaca

SEQ ID NO: 55166 - RNA, 23 nt, Artificial Sequence
  Chemically synthesized
gcaagaauaucuacagaccugac

SEQ ID NO: 55167 - RNA, 23 nt, Artificial Sequence
  Chemically synthesized
ugcaagaauaucuacagaccuga

SEQ ID NO: 55168 - RNA, 23 nt, Artificial Sequence
  Chemically synthesized
aguguggaaguccauaauuugca

SEQ ID NO: 55169 - RNA, 23 nt, Artificial Sequence
  Chemically synthesized
gaguguggaaguccauaauuugc

SEQ ID NO: 55170 - RNA, 23 nt, Artificial Sequence
  Chemically synthesized
acaacccuguuucaguauucugg

SEQ ID NO: 55171 - RNA, 23 nt, Artificial Sequence
  Chemically synthesized
aacaacccuguuucaguauucug

SEQ ID NO: 55172 - RNA, 23 nt, Artificial Sequence
  Chemically synthesized
caacaacccuguuucaguauucu

SEQ ID NO: 55173 - RNA, 23 nt, Artificial Sequence
  Chemically synthesized
gcaacaacccuguuucaguauuc

SEQ ID NO: 55174 - RNA, 23 nt, Artificial Sequence
  Chemically synthesized
agcaacaacccuguuucaguauu

SEQ ID NO: 55175 - RNA, 23 nt, Artificial Sequence
  Chemically synthesized
ugguuuaugucaucauacaugac

SEQ ID NO: 55176 - RNA, 23 nt, Artificial Sequence
  Chemically synthesized
gugguuuaugucaucauacauga

SEQ ID NO: 55177 - RNA, 23 nt, Artificial Sequence
  Chemically synthesized
ugugguuuaugucaucauacaug

SEQ ID NO: 55178 - RNA, 23 nt, Artificial Sequence
  Chemically synthesized
cugaaauucauccugagaugaga

SEQ ID NO: 55179 - RNA, 23 nt, Artificial Sequence
  Chemically synthesized
acugaaauucauccugagaugag

SEQ ID NO: 55180 - RNA, 23 nt, Artificial Sequence
  Chemically synthesized
cacugaaauucauccugagauga

SEQ ID NO: 55181 - RNA, 23 nt, Artificial Sequence
  Chemically synthesized
acacugaaauucauccugagaug

SEQ ID NO: 55182 - RNA, 23 nt, Artificial Sequence
  Chemically synthesized
uacacugaaauucauccugagau

SEQ ID NO: 55183 - RNA, 23 nt, Artificial Sequence
  Chemically synthesized
uuaugccaggaucccaccauaaa

SEQ ID NO: 55184 - RNA, 23 nt, Artificial Sequence
  Chemically synthesized
cagagacuuaugccaggauccca

SEQ ID NO: 55185 - RNA, 23 nt, Artificial Sequence
  Chemically synthesized
ccagagacuuaugccaggauccc

SEQ ID NO: 55186 - RNA, 23 nt, Artificial Sequence
  Chemically synthesized
uccagagacuuaugccaggaucc

SEQ ID NO: 55187 - RNA, 23 nt, Artificial Sequence
  Chemically synthesized
uuccagagacuuaugccaggauc

SEQ ID NO: 55188 - RNA, 23 nt, Artificial Sequence
  Chemically synthesized
auuccagagacuuaugccaggau

SEQ ID NO: 55189 - RNA, 23 nt, Artificial Sequence
  Chemically synthesized
uggagcagaauaaaagaucuggc

SEQ ID NO: 55190 - RNA, 23 nt, Artificial Sequence
  Chemically synthesized
uuggagcagaauaaaagaucugg

SEQ ID NO: 55191 - RNA, 23 nt, Artificial Sequence
  Chemically synthesized
uuuggagcagaauaaaagaucug

SEQ ID NO: 55192 - RNA, 23 nt, Artificial Sequence
  Chemically synthesized
cuuuggagcagaauaaaagaucu

SEQ ID NO: 55193 - RNA, 23 nt, Artificial Sequence
  Chemically synthesized
ucuuuggagcagaauaaaagauc

SEQ ID NO: 55194 - RNA, 23 nt, Artificial Sequence
  Chemically synthesized
agaagacuaucagccacuaauga

SEQ ID NO: 55195 - RNA, 23 nt, Artificial Sequence
  Chemically synthesized
aagaagacuaucagccacuaaug

SEQ ID NO: 55196 - RNA, 23 nt, Artificial Sequence
  Chemically synthesized
gaagaagacuaucagccacuaau

SEQ ID NO: 55197 - RNA, 23 nt, Artificial Sequence
  Chemically synthesized
ugaagaagacuaucagccacuaa

SEQ ID NO: 55198 - RNA, 23 nt, Artificial Sequence
  Chemically synthesized
cugaagaagacuaucagccacua

SEQ ID NO: 55199 - RNA, 23 nt, Artificial Sequence
  Chemically synthesized
ccuuccuacagauagucaaacca

SEQ ID NO: 55200 - RNA, 23 nt, Artificial Sequence
  Chemically synthesized
cccuuccuacagauagucaaacc

SEQ ID NO: 55201 - RNA, 23 nt, Artificial Sequence
  Chemically synthesized
acccuuccuacagauagucaaac

SEQ ID NO: 55202 - RNA, 23 nt, Artificial Sequence
  Chemically synthesized
uacccuuccuacagauagucaaa

SEQ ID NO: 55203 - RNA, 23 nt, Artificial Sequence
  Chemically synthesized
guacccuuccuacagauagucaa

SEQ ID NO: 55204 - RNA, 23 nt, Artificial Sequence
  Chemically synthesized
uacuucacuuuaauucucaugug

SEQ ID NO: 55205 - RNA, 23 nt, Artificial Sequence
  Chemically synthesized
ggaggguccuccacaauaagguc

SEQ ID NO: 55206 - RNA, 23 nt, Artificial Sequence
  Chemically synthesized
uggaggguccuccacaauaaggu

SEQ ID NO: 55207 - RNA, 23 nt, Artificial Sequence
  Chemically synthesized
uuggaggguccuccacaauaagg

SEQ ID NO: 55208 - RNA, 23 nt, Artificial Sequence
  Chemically synthesized
uuuggaggguccuccacaauaag

SEQ ID NO: 55209 - RNA, 23 nt, Artificial Sequence
  Chemically synthesized
uuuuggaggguccuccacaauaa

SEQ ID NO: 55210 - RNA, 23 nt, Artificial Sequence
  Chemically synthesized
cugcaagaauaucuacagaccug

SEQ ID NO: 55211 - RNA, 23 nt, Artificial Sequence
  Chemically synthesized
ccugcaagaauaucuacagaccu

SEQ ID NO: 55212 - RNA, 23 nt, Artificial Sequence
  Chemically synthesized
agagacuuaugccaggaucccac

SEQ ID NO: 55213 - RNA, 23 nt, Artificial Sequence
  Chemically synthesized
guggugaauucaacacuuccaaa

SEQ ID NO: 55214 - RNA, 23 nt, Artificial Sequence
  Chemically synthesized
uguggugaauucaacacuuccaa

SEQ ID NO: 55215 - RNA, 23 nt, Artificial Sequence
  Chemically synthesized
uucuuuggagcagaauaaaagau

SEQ ID NO: 55216 - RNA, 23 nt, Artificial Sequence
  Chemically synthesized
agauagucaaaccauaaacuuca

SEQ ID NO: 55217 - RNA, 23 nt, Artificial Sequence
  Chemically synthesized
uccuacagauagucaaaccauaa

SEQ ID NO: 55218 - RNA, 23 nt, Artificial Sequence
  Chemically synthesized
ucauacaugacucagcauaccug

SEQ ID NO: 55219 - RNA, 23 nt, Artificial Sequence
  Chemically synthesized
aucauacaugacucagcauaccu

SEQ ID NO: 55220 - RNA, 23 nt, Artificial Sequence
  Chemically synthesized
caucauacaugacucagcauacc

SEQ ID NO: 55221 - RNA, 23 nt, Artificial Sequence
  Chemically synthesized
ucaucauacaugacucagcauac

SEQ ID NO: 55222 - RNA, 23 nt, Artificial Sequence
  Chemically synthesized
gucaucauacaugacucagcaua

SEQ ID NO: 55223 - RNA, 23 nt, Artificial Sequence
  Chemically synthesized
ugacuccuugugguuuaugucau

SEQ ID NO: 55224 - RNA, 23 nt, Artificial Sequence
  Chemically synthesized
gcuccuugacuccuugugguuua

SEQ ID NO: 55225 - RNA, 23 nt, Artificial Sequence
  Chemically synthesized
caccauaaaagagcuggaaucga

SEQ ID NO: 55226 - RNA, 23 nt, Artificial Sequence
  Chemically synthesized
ccaccauaaaagagcuggaaucg

SEQ ID NO: 55227 - RNA, 23 nt, Artificial Sequence
  Chemically synthesized
cccaccauaaaagagcuggaauc

SEQ ID NO: 55228 - RNA, 23 nt, Artificial Sequence
  Chemically synthesized
ucccaccauaaaagagcuggaau

SEQ ID NO: 55229 - RNA, 23 nt, Artificial Sequence
  Chemically synthesized
aucccaccauaaaagagcuggaa

SEQ ID NO: 55230 - RNA, 23 nt, Artificial Sequence
  Chemically synthesized
guacacugaaauucauccugaga

SEQ ID NO: 55231 - RNA, 23 nt, Artificial Sequence
  Chemically synthesized
aguacacugaaauucauccugag

SEQ ID NO: 55232 - RNA, 23 nt, Artificial Sequence
  Chemically synthesized
aaguacacugaaauucauccuga

SEQ ID NO: 55233 - RNA, 23 nt, Artificial Sequence
  Chemically synthesized
cagcaacaacccuguuucaguau

SEQ ID NO: 55234 - RNA, 23 nt, Artificial Sequence
  Chemically synthesized
gcagcaacaacccuguuucagua

SEQ ID NO: 55235 - RNA, 23 nt, Artificial Sequence
  Chemically synthesized
gaagacuaucagccacuaaugaa

SEQ ID NO: 55236 - RNA, 23 nt, Artificial Sequence
  Chemically synthesized
acugccaaaguguaugggaugcu

SEQ ID NO: 55237 - RNA, 23 nt, Artificial Sequence
  Chemically synthesized
gacugccaaaguguaugggaugc

SEQ ID NO: 55238 - RNA, 23 nt, Artificial Sequence
  Chemically synthesized
agacugccaaaguguaugggaug

SEQ ID NO: 55239 - RNA, 23 nt, Artificial Sequence
  Chemically synthesized
uagacugccaaaguguaugggau

SEQ ID NO: 55240 - RNA, 23 nt, Artificial Sequence
  Chemically synthesized
auauugguaacauccuuucuauu

SEQ ID NO: 55241 - RNA, 23 nt, Artificial Sequence
  Chemically synthesized
uauauugguaacauccuuucuau

SEQ ID NO: 55242 - RNA, 23 nt, Artificial Sequence
  Chemically synthesized
ccuccacaauaaggucaaugcca

SEQ ID NO: 55243 - RNA, 23 nt, Artificial Sequence
  Chemically synthesized
uccuccacaauaaggucaaugcc

SEQ ID NO: 55244 - RNA, 23 nt, Artificial Sequence
  Chemically synthesized
guccuccacaauaaggucaaugc

SEQ ID NO: 55245 - RNA, 23 nt, Artificial Sequence
  Chemically synthesized
gguccuccacaauaaggucaaug

SEQ ID NO: 55246 - RNA, 23 nt, Artificial Sequence
  Chemically synthesized
ggguccuccacaauaaggucaau

SEQ ID NO: 55247 - RNA, 23 nt, Artificial Sequence
  Chemically synthesized
uccugcaagaauaucuacagacc

SEQ ID NO: 55248 - RNA, 23 nt, Artificial Sequence
  Chemically synthesized
auauucaauuuuccugcaagaau

SEQ ID NO: 55249 - RNA, 23 nt, Artificial Sequence
  Chemically synthesized
caggaucccaccauaaaagagcu

SEQ ID NO: 55250 - RNA, 23 nt, Artificial Sequence
  Chemically synthesized
ucaguauccugguccugauccuc

SEQ ID NO: 55251 - RNA, 23 nt, Artificial Sequence
  Chemically synthesized
gucaguauccugguccugauccu

SEQ ID NO: 55252 - RNA, 23 nt, Artificial Sequence
  Chemically synthesized
cgucaguauccugguccugaucc

SEQ ID NO: 55253 - RNA, 23 nt, Artificial Sequence
  Chemically synthesized
gcgucaguauccugguccugauc

SEQ ID NO: 55254 - RNA, 23 nt, Artificial Sequence
  Chemically synthesized
ggcgucaguauccugguccugau

SEQ ID NO: 55255 - RNA, 23 nt, Artificial Sequence
  Chemically synthesized
ccaaaugaaugaccuuguugcau

SEQ ID NO: 55256 - RNA, 23 nt, Artificial Sequence
  Chemically synthesized
uccaaaugaaugaccuuguugca

SEQ ID NO: 55257 - RNA, 23 nt, Artificial Sequence
  Chemically synthesized
uuccaaaugaaugaccuuguugc

SEQ ID NO: 55258 - RNA, 23 nt, Artificial Sequence
  Chemically synthesized
uuuccaaaugaaugaccuuguug

SEQ ID NO: 55259 - RNA, 23 nt, Artificial Sequence
  Chemically synthesized
auuuccaaaugaaugaccuuguu

SEQ ID NO: 55260 - RNA, 23 nt, Artificial Sequence
  Chemically synthesized
cuccacaauaaggucaaugccag

SEQ ID NO: 55261 - RNA, 23 nt, Artificial Sequence
  Chemically synthesized
aggguccuccacaauaaggucaa

SEQ ID NO: 55262 - RNA, 23 nt, Artificial Sequence
  Chemically synthesized
ggaauauucaauuuuccugcaag

SEQ ID NO: 55263 - RNA, 23 nt, Artificial Sequence
  Chemically synthesized
aggaauauucaauuuuccugcaa

SEQ ID NO: 55264 - RNA, 23 nt, Artificial Sequence
  Chemically synthesized
aaggaauauucaauuuuccugca

SEQ ID NO: 55265 - RNA, 23 nt, Artificial Sequence
  Chemically synthesized
aaaggaauauucaauuuuccugc

SEQ ID NO: 55266 - RNA, 23 nt, Artificial Sequence
  Chemically synthesized
aaaaggaauauucaauuuuccug

SEQ ID NO: 55267 - RNA, 23 nt, Artificial Sequence
  Chemically synthesized
cgaugcgucaaguacacugaaau

SEQ ID NO: 55268 - RNA, 23 nt, Artificial Sequence
  Chemically synthesized
ugcagcaacaacccuguuucagu

SEQ ID NO: 55269 - RNA, 23 nt, Artificial Sequence
  Chemically synthesized
cugcagcaacaacccuguuucag

SEQ ID NO: 55270 - RNA, 23 nt, Artificial Sequence
  Chemically synthesized
acugcagcaacaacccuguuuca

SEQ ID NO: 55271 - RNA, 23 nt, Artificial Sequence
  Chemically synthesized
gacugcagcaacaacccuguuuc

SEQ ID NO: 55272 - RNA, 23 nt, Artificial Sequence
  Chemically synthesized
ggacugcagcaacaacccuguuu

SEQ ID NO: 55273 - RNA, 23 nt, Artificial Sequence
  Chemically synthesized
gcaacaagauucuucuuuggagc

SEQ ID NO: 55274 - RNA, 23 nt, Artificial Sequence
  Chemically synthesized
ugcaacaagauucuucuuuggag

SEQ ID NO: 55275 - RNA, 23 nt, Artificial Sequence
  Chemically synthesized
uugcaacaagauucuucuuugga

SEQ ID NO: 55276 - RNA, 23 nt, Artificial Sequence
  Chemically synthesized
cuugcaacaagauucuucuuugg

SEQ ID NO: 55277 - RNA, 23 nt, Artificial Sequence
  Chemically synthesized
ccuugcaacaagauucuucuuug

SEQ ID NO: 55278 - RNA, 23 nt, Artificial Sequence
  Chemically synthesized
aagacuaucagccacuaaugaag

SEQ ID NO: 55279 - RNA, 23 nt, Artificial Sequence
  Chemically synthesized
acugaagaagacuaucagccacu

SEQ ID NO: 55280 - RNA, 23 nt, Artificial Sequence
  Chemically synthesized
uacugaagaagacuaucagccac

SEQ ID NO: 55281 - RNA, 23 nt, Artificial Sequence
  Chemically synthesized
uguacccuuccuacagauaguca

SEQ ID NO: 55282 - RNA, 23 nt, Artificial Sequence
  Chemically synthesized
uuguacccuuccuacagauaguc

SEQ ID NO: 55283 - RNA, 23 nt, Artificial Sequence
  Chemically synthesized
ugugaaaaauccugaggauucau

SEQ ID NO: 55284 - RNA, 23 nt, Artificial Sequence
  Chemically synthesized
gugugaaaaauccugaggauuca

SEQ ID NO: 55285 - RNA, 23 nt, Artificial Sequence
  Chemically synthesized
ugugugaaaaauccugaggauuc

SEQ ID NO: 55286 - RNA, 23 nt, Artificial Sequence
  Chemically synthesized
uuuugggaguguggaaguccaua

SEQ ID NO: 55287 - RNA, 23 nt, Artificial Sequence
  Chemically synthesized
gcccaucaguucacacaggucca

SEQ ID NO: 55288 - RNA, 23 nt, Artificial Sequence
  Chemically synthesized
ggcccaucaguucacacaggucc

SEQ ID NO: 55289 - RNA, 23 nt, Artificial Sequence
  Chemically synthesized
gagcagaauaaaagaucuggccc

SEQ ID NO: 55290 - RNA, 23 nt, Artificial Sequence
  Chemically synthesized
ggagcagaauaaaagaucuggcc

SEQ ID NO: 55291 - RNA, 23 nt, Artificial Sequence
  Chemically synthesized
gagagcccaacucugucuuggcg

SEQ ID NO: 55292 - RNA, 23 nt, Artificial Sequence
  Chemically synthesized
ggagagcccaacucugucuuggc

SEQ ID NO: 55293 - RNA, 23 nt, Artificial Sequence
  Chemically synthesized
aggagagcccaacucugucuugg

SEQ ID NO: 55294 - RNA, 23 nt, Artificial Sequence
  Chemically synthesized
uaggagagcccaacucugucuug

SEQ ID NO: 55295 - RNA, 23 nt, Artificial Sequence
  Chemically synthesized
cuaggagagcccaacucugucuu

SEQ ID NO: 55296 - RNA, 23 nt, Artificial Sequence
  Chemically synthesized
ucuauugaaaaaucaccacacca

SEQ ID NO: 55297 - RNA, 23 nt, Artificial Sequence
  Chemically synthesized
uucuauugaaaaaucaccacacc

SEQ ID NO: 55298 - RNA, 23 nt, Artificial Sequence
  Chemically synthesized
uuucuauugaaaaaucaccacac

SEQ ID NO: 55299 - RNA, 23 nt, Artificial Sequence
  Chemically synthesized
cuuucuauugaaaaaucaccaca

SEQ ID NO: 55300 - RNA, 23 nt, Artificial Sequence
  Chemically synthesized
cagagacggaagccuuuuucccc

SEQ ID NO: 55301 - RNA, 23 nt, Artificial Sequence
  Chemically synthesized
ccagagacggaagccuuuuuccc

SEQ ID NO: 55302 - RNA, 23 nt, Artificial Sequence
  Chemically synthesized
gccagagacggaagccuuuuucc

SEQ ID NO: 55303 - RNA, 23 nt, Artificial Sequence
  Chemically synthesized
ugccagagacggaagccuuuuuc

SEQ ID NO: 55304 - RNA, 23 nt, Artificial Sequence
  Chemically synthesized
augccagagacggaagccuuuuu

SEQ ID NO: 55305 - RNA, 23 nt, Artificial Sequence
  Chemically synthesized
aaugccagagacggaagccuuuu

SEQ ID NO: 55306 - RNA, 23 nt, Artificial Sequence
  Chemically synthesized
uuccugcaagaauaucuacagac

SEQ ID NO: 55307 - RNA, 23 nt, Artificial Sequence
  Chemically synthesized
uuuccugcaagaauaucuacaga

SEQ ID NO: 55308 - RNA, 23 nt, Artificial Sequence
  Chemically synthesized
gaucccaccauaaaagagcugga

SEQ ID NO: 55309 - RNA, 23 nt, Artificial Sequence
  Chemically synthesized
gauuccagagacuuaugccagga

SEQ ID NO: 55310 - RNA, 23 nt, Artificial Sequence
  Chemically synthesized
gcgaugcgucaaguacacugaaa

SEQ ID NO: 55311 - RNA, 23 nt, Artificial Sequence
  Chemically synthesized
uccuugcaacauuacugaagaag

SEQ ID NO: 55312 - RNA, 23 nt, Artificial Sequence
  Chemically synthesized
auccuugcaacauuacugaagaa

SEQ ID NO: 55313 - RNA, 23 nt, Artificial Sequence
  Chemically synthesized
ucaaaccauaaacuucaugguca

SEQ ID NO: 55314 - RNA, 23 nt, Artificial Sequence
  Chemically synthesized
uuccuacagauagucaaaccaua

SEQ ID NO: 55315 - RNA, 23 nt, Artificial Sequence
  Chemically synthesized
cuuccuacagauagucaaaccau

SEQ ID NO: 55316 - RNA, 23 nt, Artificial Sequence
  Chemically synthesized
uuuguacccuuccuacagauagu

SEQ ID NO: 55317 - RNA, 23 nt, Artificial Sequence
  Chemically synthesized
uuuuguacccuuccuacagauag

SEQ ID NO: 55318 - RNA, 23 nt, Artificial Sequence
  Chemically synthesized
uuuuuguacccuuccuacagaua

SEQ ID NO: 55319 - RNA, 23 nt, Artificial Sequence
  Chemically synthesized
auuuuuguacccuuccuacagau

SEQ ID NO: 55320 - RNA, 23 nt, Artificial Sequence
  Chemically synthesized
gaggguccuccacaauaagguca

SEQ ID NO: 55321 - RNA, 23 nt, Artificial Sequence
  Chemically synthesized
gguuuaugucaucauacaugacu

SEQ ID NO: 55322 - RNA, 23 nt, Artificial Sequence
  Chemically synthesized
ugagccagucgcugugguuguuu

SEQ ID NO: 55323 - RNA, 23 nt, Artificial Sequence
  Chemically synthesized
uuuuccugcaagaauaucuacag

SEQ ID NO: 55324 - RNA, 23 nt, Artificial Sequence
  Chemically synthesized
ugaaauucauccugagaugagac

SEQ ID NO: 55325 - RNA, 23 nt, Artificial Sequence
  Chemically synthesized
aauggaucccgcaguaaaaucuu

SEQ ID NO: 55326 - RNA, 23 nt, Artificial Sequence
  Chemically synthesized
cgcgaugcgucaaguacacugaa

SEQ ID NO: 55327 - RNA, 23 nt, Artificial Sequence
  Chemically synthesized
gcgcgaugcgucaaguacacuga

SEQ ID NO: 55328 - RNA, 23 nt, Artificial Sequence
  Chemically synthesized
ggcgcgaugcgucaaguacacug

SEQ ID NO: 55329 - RNA, 23 nt, Artificial Sequence
  Chemically synthesized
caacccuguuucaguauucugga

SEQ ID NO: 55330 - RNA, 23 nt, Artificial Sequence
  Chemically synthesized
agacuaucagccacuaaugaagu

SEQ ID NO: 55331 - RNA, 23 nt, Artificial Sequence
  Chemically synthesized
uuucagaaagcauuacauuucca

SEQ ID NO: 55332 - RNA, 23 nt, Artificial Sequence
  Chemically synthesized
uuuucagaaagcauuacauuucc

SEQ ID NO: 55333 - RNA, 23 nt, Artificial Sequence
  Chemically synthesized
uuuuucagaaagcauuacauuuc

SEQ ID NO: 55334 - RNA, 23 nt, Artificial Sequence
  Chemically synthesized
agagacggaagccuuuuucccca

SEQ ID NO: 55335 - RNA, 23 nt, Artificial Sequence
  Chemically synthesized
acaauaaggucaaugccagagac

SEQ ID NO: 55336 - RNA, 23 nt, Artificial Sequence
  Chemically synthesized
cacaauaaggucaaugccagaga

SEQ ID NO: 55337 - RNA, 23 nt, Artificial Sequence
  Chemically synthesized
ccacaauaaggucaaugccagag

SEQ ID NO: 55338 - RNA, 23 nt, Artificial Sequence
  Chemically synthesized
uccacaauaaggucaaugccaga

SEQ ID NO: 55339 - RNA, 23 nt, Artificial Sequence
  Chemically synthesized
acaugacucagcauaccugcugg

SEQ ID NO: 55340 - RNA, 23 nt, Artificial Sequence
  Chemically synthesized
uacaugacucagcauaccugcug

SEQ ID NO: 55341 - RNA, 23 nt, Artificial Sequence
  Chemically synthesized
auacaugacucagcauaccugcu

SEQ ID NO: 55342 - RNA, 23 nt, Artificial Sequence
  Chemically synthesized
cauacaugacucagcauaccugc

SEQ ID NO: 55343 - RNA, 23 nt, Artificial Sequence
  Chemically synthesized
ucgcugugguuguuuuagcuccu

SEQ ID NO: 55344 - RNA, 23 nt, Artificial Sequence
  Chemically synthesized
gucgcugugguuguuuuagcucc

SEQ ID NO: 55345 - RNA, 23 nt, Artificial Sequence
  Chemically synthesized
agucgcugugguuguuuuagcuc

SEQ ID NO: 55346 - RNA, 23 nt, Artificial Sequence
  Chemically synthesized
gugaaaaauccugaggauucauc

SEQ ID NO: 55347 - RNA, 23 nt, Artificial Sequence
  Chemically synthesized
aggacugcagcaacaacccuguu

SEQ ID NO: 55348 - RNA, 23 nt, Artificial Sequence
  Chemically synthesized
guguggugaauucaacacuucca

SEQ ID NO: 55349 - RNA, 23 nt, Artificial Sequence
  Chemically synthesized
gguguggugaauucaacacuucc

SEQ ID NO: 55350 - RNA, 23 nt, Artificial Sequence
  Chemically synthesized
ugguguggugaauucaacacuuc

SEQ ID NO: 55351 - RNA, 23 nt, Artificial Sequence
  Chemically synthesized
augguguggugaauucaacacuu

SEQ ID NO: 55352 - RNA, 23 nt, Artificial Sequence
  Chemically synthesized
caacaagauucuucuuuggagca

SEQ ID NO: 55353 - RNA, 23 nt, Artificial Sequence
  Chemically synthesized
gggaacucagaccguaccuugca

SEQ ID NO: 55354 - RNA, 23 nt, Artificial Sequence
  Chemically synthesized
ugggaacucagaccguaccuugc

SEQ ID NO: 55355 - RNA, 23 nt, Artificial Sequence
  Chemically synthesized
uugggaacucagaccguaccuug

SEQ ID NO: 55356 - RNA, 23 nt, Artificial Sequence
  Chemically synthesized
guugggaacucagaccguaccuu

SEQ ID NO: 55357 - RNA, 23 nt, Artificial Sequence
  Chemically synthesized
gggaugcuuucaagggugcauuu

SEQ ID NO: 55358 - RNA, 23 nt, Artificial Sequence
  Chemically synthesized
aaccucucuuauuagaacaggca

SEQ ID NO: 55359 - RNA, 23 nt, Artificial Sequence
  Chemically synthesized
aaaccucucuuauuagaacaggc

SEQ ID NO: 55360 - RNA, 23 nt, Artificial Sequence
  Chemically synthesized
caaaccucucuuauuagaacagg

SEQ ID NO: 55361 - RNA, 23 nt, Artificial Sequence
  Chemically synthesized
gucaaugccagagacggaagccu

SEQ ID NO: 55362 - RNA, 23 nt, Artificial Sequence
  Chemically synthesized
ggucaaugccagagacggaagcc

SEQ ID NO: 55363 - RNA, 23 nt, Artificial Sequence
  Chemically synthesized
aggucaaugccagagacggaagc

SEQ ID NO: 55364 - RNA, 23 nt, Artificial Sequence
  Chemically synthesized
aaggucaaugccagagacggaag

SEQ ID NO: 55365 - RNA, 23 nt, Artificial Sequence
  Chemically synthesized
uaaggucaaugccagagacggaa

SEQ ID NO: 55366 - RNA, 23 nt, Artificial Sequence
  Chemically synthesized
ugacucagcauaccugcuggugc

SEQ ID NO: 55367 - RNA, 23 nt, Artificial Sequence
  Chemically synthesized
augacucagcauaccugcuggug

SEQ ID NO: 55368 - RNA, 23 nt, Artificial Sequence
  Chemically synthesized
caugacucagcauaccugcuggu

SEQ ID NO: 55369 - RNA, 23 nt, Artificial Sequence
  Chemically synthesized
ggaucccaccauaaaagagcugg

SEQ ID NO: 55370 - RNA, 23 nt, Artificial Sequence
  Chemically synthesized
aggaucccaccauaaaagagcug

SEQ ID NO: 55371 - RNA, 23 nt, Artificial Sequence
  Chemically synthesized
ugcaaccagagaagguucagaca

SEQ ID NO: 55372 - RNA, 23 nt, Artificial Sequence
  Chemically synthesized
uugcaaccagagaagguucagac

SEQ ID NO: 55373 - RNA, 23 nt, Artificial Sequence
  Chemically synthesized
uuugcaaccagagaagguucaga

SEQ ID NO: 55374 - RNA, 23 nt, Artificial Sequence
  Chemically synthesized
auuugcaaccagagaagguucag

SEQ ID NO: 55375 - RNA, 23 nt, Artificial Sequence
  Chemically synthesized
aauuugcaaccagagaagguuca

SEQ ID NO: 55376 - RNA, 23 nt, Artificial Sequence
  Chemically synthesized
cagcacuuuugggaguguggaag

SEQ ID NO: 55377 - RNA, 23 nt, Artificial Sequence
  Chemically synthesized
acagcacuuuugggaguguggaa

SEQ ID NO: 55378 - RNA, 23 nt, Artificial Sequence
  Chemically synthesized
aacagcacuuuugggagugugga

SEQ ID NO: 55379 - RNA, 23 nt, Artificial Sequence
  Chemically synthesized
aaacagcacuuuugggagugugg

SEQ ID NO: 55380 - RNA, 23 nt, Artificial Sequence
  Chemically synthesized
aaaacagcacuuuugggagugug

SEQ ID NO: 55381 - RNA, 23 nt, Artificial Sequence
  Chemically synthesized
guauccugguccugauccucguc

SEQ ID NO: 55382 - RNA, 23 nt, Artificial Sequence
  Chemically synthesized
aguauccugguccugauccucgu

SEQ ID NO: 55383 - RNA, 23 nt, Artificial Sequence
  Chemically synthesized
caguauccugguccugauccucg

SEQ ID NO: 55384 - RNA, 23 nt, Artificial Sequence
  Chemically synthesized
ccuugcugaugaccucacauggu

SEQ ID NO: 55385 - RNA, 23 nt, Artificial Sequence
  Chemically synthesized
accuugcugaugaccucacaugg

SEQ ID NO: 55386 - RNA, 23 nt, Artificial Sequence
  Chemically synthesized
uaccuugcugaugaccucacaug

SEQ ID NO: 55387 - RNA, 23 nt, Artificial Sequence
  Chemically synthesized
cuaggcuaccuugcugaugaccu

SEQ ID NO: 55388 - RNA, 23 nt, Artificial Sequence
  Chemically synthesized
gcuaggcuaccuugcugaugacc

SEQ ID NO: 55389 - RNA, 23 nt, Artificial Sequence
  Chemically synthesized
ugcuaggcuaccuugcugaugac

SEQ ID NO: 55390 - RNA, 23 nt, Artificial Sequence
  Chemically synthesized
ugaaaaauccugaggauucaucu

SEQ ID NO: 55391 - RNA, 23 nt, Artificial Sequence
  Chemically synthesized
cuuaugccaggaucccaccauaa

SEQ ID NO: 55392 - RNA, 23 nt, Artificial Sequence
  Chemically synthesized
gcaaccagagaagguucagacac

SEQ ID NO: 55393 - RNA, 23 nt, Artificial Sequence
  Chemically synthesized
caugguguggugaauucaacacu

SEQ ID NO: 55394 - RNA, 23 nt, Artificial Sequence
  Chemically synthesized
acaugguguggugaauucaacac

SEQ ID NO: 55395 - RNA, 23 nt, Artificial Sequence
  Chemically synthesized
cuucuuuggagcagaauaaaaga

SEQ ID NO: 55396 - RNA, 23 nt, Artificial Sequence
  Chemically synthesized
ucuucuuuggagcagaauaaaag

SEQ ID NO: 55397 - RNA, 23 nt, Artificial Sequence
  Chemically synthesized
uucuucuuuggagcagaauaaaa

SEQ ID NO: 55398 - RNA, 23 nt, Artificial Sequence
  Chemically synthesized
auucuucuuuggagcagaauaaa

SEQ ID NO: 55399 - RNA, 23 nt, Artificial Sequence
  Chemically synthesized
gauucuucuuuggagcagaauaa

SEQ ID NO: 55400 - RNA, 23 nt, Artificial Sequence
  Chemically synthesized
cauccuugcaacauuacugaaga

SEQ ID NO: 55401 - RNA, 23 nt, Artificial Sequence
  Chemically synthesized
auuuuggaggguccuccacaaua

SEQ ID NO: 55402 - RNA, 23 nt, Artificial Sequence
  Chemically synthesized
cuugcacaucugagaucugagcc

SEQ ID NO: 55403 - RNA, 23 nt, Artificial Sequence
  Chemically synthesized
ucuugcacaucugagaucugagc

SEQ ID NO: 55404 - RNA, 23 nt, Artificial Sequence
  Chemically synthesized
auuuuccugcaagaauaucuaca

SEQ ID NO: 55405 - RNA, 23 nt, Artificial Sequence
  Chemically synthesized
acuuaugccaggaucccaccaua

SEQ ID NO: 55406 - RNA, 23 nt, Artificial Sequence
  Chemically synthesized
ccaugugaugcucaauggauccc

SEQ ID NO: 55407 - RNA, 23 nt, Artificial Sequence
  Chemically synthesized
uccaugugaugcucaauggaucc

SEQ ID NO: 55408 - RNA, 23 nt, Artificial Sequence
  Chemically synthesized
guccaugugaugcucaauggauc

SEQ ID NO: 55409 - RNA, 23 nt, Artificial Sequence
  Chemically synthesized
cccuguuucaguauucuggaaaa

SEQ ID NO: 55410 - RNA, 23 nt, Artificial Sequence
  Chemically synthesized
acccuguuucaguauucuggaaa

SEQ ID NO: 55411 - RNA, 23 nt, Artificial Sequence
  Chemically synthesized
aacccuguuucaguauucuggaa

SEQ ID NO: 55412 - RNA, 23 nt, Artificial Sequence
  Chemically synthesized
cuaucaaucuugcccagacugga

SEQ ID NO: 55413 - RNA, 23 nt, Artificial Sequence
  Chemically synthesized
acuaucaaucuugcccagacugg

SEQ ID NO: 55414 - RNA, 23 nt, Artificial Sequence
  Chemically synthesized
aacuaucaaucuugcccagacug

SEQ ID NO: 55415 - RNA, 23 nt, Artificial Sequence
  Chemically synthesized
aaacuaucaaucuugcccagacu

SEQ ID NO: 55416 - RNA, 23 nt, Artificial Sequence
  Chemically synthesized
uaaacuaucaaucuugcccagac

SEQ ID NO: 55417 - RNA, 23 nt, Artificial Sequence
  Chemically synthesized
cucacaugguguggugaauucaa

SEQ ID NO: 55418 - RNA, 23 nt, Artificial Sequence
  Chemically synthesized
ccucacaugguguggugaauuca

SEQ ID NO: 55419 - RNA, 23 nt, Artificial Sequence
  Chemically synthesized
accucacaugguguggugaauuc

SEQ ID NO: 55420 - RNA, 23 nt, Artificial Sequence
  Chemically synthesized
gaccucacaugguguggugaauu

SEQ ID NO: 55421 - RNA, 23 nt, Artificial Sequence
  Chemically synthesized
ugaccucacaugguguggugaau

SEQ ID NO: 55422 - RNA, 23 nt, Artificial Sequence
  Chemically synthesized
accuugcaacaagauucuucuuu

SEQ ID NO: 55423 - RNA, 23 nt, Artificial Sequence
  Chemically synthesized
guaccuugcaacaagauucuucu

SEQ ID NO: 55424 - RNA, 23 nt, Artificial Sequence
  Chemically synthesized
cguaccuugcaacaagauucuuc

SEQ ID NO: 55425 - RNA, 23 nt, Artificial Sequence
  Chemically synthesized
ccguaccuugcaacaagauucuu

SEQ ID NO: 55426 - RNA, 23 nt, Artificial Sequence
  Chemically synthesized
accguaccuugcaacaagauucu

SEQ ID NO: 55427 - RNA, 23 nt, Artificial Sequence
  Chemically synthesized
gaccguaccuugcaacaagauuc

SEQ ID NO: 55428 - RNA, 23 nt, Artificial Sequence
  Chemically synthesized
acauccuugcaacauuacugaag

SEQ ID NO: 55429 - RNA, 23 nt, Artificial Sequence
  Chemically synthesized
aacauccuugcaacauuacugaa

SEQ ID NO: 55430 - RNA, 23 nt, Artificial Sequence
  Chemically synthesized
aaaaacagcacuuuugggagugu

SEQ ID NO: 55431 - RNA, 23 nt, Artificial Sequence
  Chemically synthesized
gacaaaaacagcacuuuugggag

SEQ ID NO: 55432 - RNA, 23 nt, Artificial Sequence
  Chemically synthesized
uuucaguauucuggaaaacgguu

SEQ ID NO: 55433 - RNA, 23 nt, Artificial Sequence
  Chemically synthesized
guuucaguauucuggaaaacggu

SEQ ID NO: 55434 - RNA, 23 nt, Artificial Sequence
  Chemically synthesized
uguuucaguauucuggaaaacgg

SEQ ID NO: 55435 - RNA, 23 nt, Artificial Sequence
  Chemically synthesized
cuguuucaguauucuggaaaacg

SEQ ID NO: 55436 - RNA, 23 nt, Artificial Sequence
  Chemically synthesized
ccuguuucaguauucuggaaaac

SEQ ID NO: 55437 - RNA, 23 nt, Artificial Sequence
  Chemically synthesized
cacaugguguggugaauucaaca

SEQ ID NO: 55438 - RNA, 23 nt, Artificial Sequence
  Chemically synthesized
ucacaugguguggugaauucaac

SEQ ID NO: 55439 - RNA, 23 nt, Artificial Sequence
  Chemically synthesized
cauuuccaaaugaaugaccuugu

SEQ ID NO: 55440 - RNA, 23 nt, Artificial Sequence
  Chemically synthesized
ugaucuaucaauagucaagaaaa

SEQ ID NO: 55441 - RNA, 23 nt, Artificial Sequence
  Chemically synthesized
gugaucuaucaauagucaagaaa

SEQ ID NO: 55442 - RNA, 23 nt, Artificial Sequence
  Chemically synthesized
ugugaucuaucaauagucaagaa

SEQ ID NO: 55443 - RNA, 23 nt, Artificial Sequence
  Chemically synthesized
uugugaucuaucaauagucaaga

SEQ ID NO: 55444 - RNA, 23 nt, Artificial Sequence
  Chemically synthesized
auugugaucuaucaauagucaag

SEQ ID NO: 55445 - RNA, 23 nt, Artificial Sequence
  Chemically synthesized
caguuucagaacccagccagccu

SEQ ID NO: 55446 - RNA, 23 nt, Artificial Sequence
  Chemically synthesized
gcaguuucagaacccagccagcc

SEQ ID NO: 55447 - RNA, 23 nt, Artificial Sequence
  Chemically synthesized
ugcaguuucagaacccagccagc

SEQ ID NO: 55448 - RNA, 23 nt, Artificial Sequence
  Chemically synthesized
gugcaguuucagaacccagccag

SEQ ID NO: 55449 - RNA, 23 nt, Artificial Sequence
  Chemically synthesized
ggugcaguuucagaacccagcca

SEQ ID NO: 55450 - RNA, 23 nt, Artificial Sequence
  Chemically synthesized
cuuuugggaguguggaaguccau

SEQ ID NO: 55451 - RNA, 23 nt, Artificial Sequence
  Chemically synthesized
cacuuuugggaguguggaagucc

SEQ ID NO: 55452 - RNA, 23 nt, Artificial Sequence
  Chemically synthesized
gcacuuuugggaguguggaaguc

SEQ ID NO: 55453 - RNA, 23 nt, Artificial Sequence
  Chemically synthesized
agcacuuuugggaguguggaagu

SEQ ID NO: 55454 - RNA, 23 nt, Artificial Sequence
  Chemically synthesized
agaaaggacugcagcaacaaccc

SEQ ID NO: 55455 - RNA, 23 nt, Artificial Sequence
  Chemically synthesized
gagaaaggacugcagcaacaacc

SEQ ID NO: 55456 - RNA, 23 nt, Artificial Sequence
  Chemically synthesized
augaccucacaugguguggugaa

SEQ ID NO: 55457 - RNA, 23 nt, Artificial Sequence
  Chemically synthesized
cugcuaggcuaccuugcugauga

SEQ ID NO: 55458 - RNA, 23 nt, Artificial Sequence
  Chemically synthesized
gcugcuaggcuaccuugcugaug

SEQ ID NO: 55459 - RNA, 23 nt, Artificial Sequence
  Chemically synthesized
cgcugcuaggcuaccuugcugau

SEQ ID NO: 55460 - RNA, 23 nt, Artificial Sequence
  Chemically synthesized
uaaacuucauggucauggguaaa

SEQ ID NO: 55461 - RNA, 23 nt, Artificial Sequence
  Chemically synthesized
auaaacuucauggucauggguaa

SEQ ID NO: 55462 - RNA, 23 nt, Artificial Sequence
  Chemically synthesized
uauugugaucuaucaauagucaa

SEQ ID NO: 55463 - RNA, 23 nt, Artificial Sequence
  Chemically synthesized
aggugcaguuucagaacccagcc

SEQ ID NO: 55464 - RNA, 23 nt, Artificial Sequence
  Chemically synthesized
gaggugcaguuucagaacccagc

SEQ ID NO: 55465 - RNA, 23 nt, Artificial Sequence
  Chemically synthesized
gaaaggacugcagcaacaacccu

SEQ ID NO: 55466 - RNA, 23 nt, Artificial Sequence
  Chemically synthesized
gaugaccucacauggugugguga

SEQ ID NO: 55467 - RNA, 23 nt, Artificial Sequence
  Chemically synthesized
ugaugaccucacaugguguggug

SEQ ID NO: 55468 - RNA, 23 nt, Artificial Sequence
  Chemically synthesized
cugaugaccucacaugguguggu

SEQ ID NO: 55469 - RNA, 23 nt, Artificial Sequence
  Chemically synthesized
gcugaugaccucacauggugugg

SEQ ID NO: 55470 - RNA, 23 nt, Artificial Sequence
  Chemically synthesized
ugcugaugaccucacauggugug

SEQ ID NO: 55471 - RNA, 23 nt, Artificial Sequence
  Chemically synthesized
uugcugaugaccucacauggugu

SEQ ID NO: 55472 - RNA, 23 nt, Artificial Sequence
  Chemically synthesized
cuugcugaugaccucacauggug

SEQ ID NO: 55473 - RNA, 23 nt, Artificial Sequence
  Chemically synthesized
uuauugugaucuaucaauaguca

SEQ ID NO: 55474 - RNA, 23 nt, Artificial Sequence
  Chemically synthesized
uaccuugcaacaagauucuucuu

SEQ ID NO: 55475 - RNA, 23 nt, Artificial Sequence
  Chemically synthesized
ucuucagugugugaaaaauccug

SEQ ID NO: 55476 - RNA, 23 nt, Artificial Sequence
  Chemically synthesized
uucuucagugugugaaaaauccu

SEQ ID NO: 55477 - RNA, 23 nt, Artificial Sequence
  Chemically synthesized
uuucuucagugugugaaaaaucc

SEQ ID NO: 55478 - RNA, 23 nt, Artificial Sequence
  Chemically synthesized
guuucuucagugugugaaaaauc

SEQ ID NO: 55479 - RNA, 23 nt, Artificial Sequence
  Chemically synthesized
aguuucuucagugugugaaaaau

SEQ ID NO: 55480 - RNA, 23 nt, Artificial Sequence
  Chemically synthesized
gaaaaauccugaggauucaucuu

SEQ ID NO: 55481 - RNA, 23 nt, Artificial Sequence
  Chemically synthesized
aaguuucuucagugugugaaaaa

SEQ ID NO: 55482 - RNA, 23 nt, Artificial Sequence
  Chemically synthesized
ugcagaagcugccugugaugugg

SEQ ID NO: 55483 - RNA, 23 nt, Artificial Sequence
  Chemically synthesized
uugcagaagcugccugugaugug

SEQ ID NO: 55484 - RNA, 23 nt, Artificial Sequence
  Chemically synthesized
uuugcagaagcugccugugaugu

SEQ ID NO: 55485 - RNA, 23 nt, Artificial Sequence
  Chemically synthesized
guuugcagaagcugccugugaug

SEQ ID NO: 55486 - RNA, 23 nt, Artificial Sequence
  Chemically synthesized
gguuugcagaagcugccugugau

SEQ ID NO: 55487 - RNA, 23 nt, Artificial Sequence
  Chemically synthesized
ugguggaagagaagauuccagag

SEQ ID NO: 55488 - RNA, 23 nt, Artificial Sequence
  Chemically synthesized
augguggaagagaagauuccaga

SEQ ID NO: 55489 - RNA, 23 nt, Artificial Sequence
  Chemically synthesized
agcugccugugaugugguccaug

SEQ ID NO: 55490 - RNA, 23 nt, Artificial Sequence
  Chemically synthesized
aagcugccugugaugugguccau

SEQ ID NO: 55491 - RNA, 23 nt, Artificial Sequence
  Chemically synthesized
guuacuucacuuuaauucucaug

SEQ ID NO: 55492 - RNA, 23 nt, Artificial Sequence
  Chemically synthesized
gaauauucaauuuuccugcaaga

SEQ ID NO: 55493 - RNA, 23 nt, Artificial Sequence
  Chemically synthesized
gcaagaauaucuacagaccugac

SEQ ID NO: 55494 - RNA, 23 nt, Artificial Sequence
  Chemically synthesized
agaauaucuacagaccugacaag

SEQ ID NO: 55495 - RNA, 23 nt, Artificial Sequence
  Chemically synthesized
caagaauaucuacagaccugaca

SEQ ID NO: 55496 - RNA, 23 nt, Artificial Sequence
  Chemically synthesized
cacuagaggccugggugauacau

SEQ ID NO: 55497 - RNA, 23 nt, Artificial Sequence
  Chemically synthesized
cuuauaucaucagcauaccuuua

SEQ ID NO: 55498 - RNA, 23 nt, Artificial Sequence
  Chemically synthesized
gcauuuauuucaaaacauccuug

SEQ ID NO: 55499 - RNA, 23 nt, Artificial Sequence
  Chemically synthesized
gaagaagacuaucagccacuaau

SEQ ID NO: 55500 - RNA, 23 nt, Artificial Sequence
  Chemically synthesized
ugaagaagacuaucagccacuaa

SEQ ID NO: 55501 - RNA, 23 nt, Artificial Sequence
  Chemically synthesized
guuuuagcuccuugacuccuugu

SEQ ID NO: 55502 - RNA, 23 nt, Artificial Sequence
  Chemically synthesized
ggaaaacgguuucccgcagguuu

SEQ ID NO: 55503 - RNA, 23 nt, Artificial Sequence
  Chemically synthesized
ugaugugguccaugugaugcuca

SEQ ID NO: 55504 - RNA, 23 nt, Artificial Sequence
  Chemically synthesized
cuaggagagcccaacucugucuu

SEQ ID NO: 55505 - RNA, 23 nt, Artificial Sequence
  Chemically synthesized
gcgaugcgucaaguacacugaaa

SEQ ID NO: 55506 - RNA, 23 nt, Artificial Sequence
  Chemically synthesized
guacacugaaauucauccugaga

SEQ ID NO: 55507 - RNA, 23 nt, Artificial Sequence
  Chemically synthesized
caacucugucuuggcgucaguau

SEQ ID NO: 55508 - RNA, 23 nt, Artificial Sequence
  Chemically synthesized
uggaaaacgguuucccgcagguu

SEQ ID NO: 55509 - RNA, 23 nt, Artificial Sequence
  Chemically synthesized
cccuguuucaguauucuggaaaa

SEQ ID NO: 55510 - RNA, 23 nt, Artificial Sequence
  Chemically synthesized
uacacugaaauucauccugagau

SEQ ID NO: 55511 - RNA, 23 nt, Artificial Sequence
  Chemically synthesized
gggaugcuuucaagggugcauuu

SEQ ID NO: 55512 - RNA, 23 nt, Artificial Sequence
  Chemically synthesized
ccaacucugucuuggcgucagua

SEQ ID NO: 55513 - RNA, 23 nt, Artificial Sequence
  Chemically synthesized
ggguccuccacaauaaggucaau

SEQ ID NO: 55514 - RNA, 23 nt, Artificial Sequence
  Chemically synthesized
agcaacaacccuguuucaguauu

SEQ ID NO: 55515 - RNA, 23 nt, Artificial Sequence
  Chemically synthesized
acagauagucaaaccauaaacuu

SEQ ID NO: 55516 - RNA, 23 nt, Artificial Sequence
  Chemically synthesized
ccuacagauagucaaaccauaaa

SEQ ID NO: 55517 - RNA, 23 nt, Artificial Sequence
  Chemically synthesized
ggaauauucaauuuuccugcaag

SEQ ID NO: 55518 - RNA, 23 nt, Artificial Sequence
  Chemically synthesized
gaaauucauccugagaugagaca

SEQ ID NO: 55519 - RNA, 23 nt, Artificial Sequence
  Chemically synthesized
ccacaauaaggucaaugccagag

SEQ ID NO: 55520 - RNA, 23 nt, Artificial Sequence
  Chemically synthesized
aggaauauucaauuuuccugcaa

SEQ ID NO: 55521 - RNA, 23 nt, Artificial Sequence
  Chemically synthesized
gaugagacauguagacugccaaa

SEQ ID NO: 55522 - RNA, 23 nt, Artificial Sequence
  Chemically synthesized
ugcaacaagauucuucuuuggag

SEQ ID NO: 55523 - RNA, 23 nt, Artificial Sequence
  Chemically synthesized
gaagacuaucagccacuaaugaa

SEQ ID NO: 55524 - RNA, 23 nt, Artificial Sequence
  Chemically synthesized
cuacagauagucaaaccauaaac

SEQ ID NO: 55525 - RNA, 23 nt, Artificial Sequence
  Chemically synthesized
gguccuccacaauaaggucaaug

SEQ ID NO: 55526 - RNA, 23 nt, Artificial Sequence
  Chemically synthesized
gucaucauacaugacucagcaua

SEQ ID NO: 55527 - RNA, 23 nt, Artificial Sequence
  Chemically synthesized
cgcgaugcgucaaguacacugaa

SEQ ID NO: 55528 - RNA, 23 nt, Artificial Sequence
  Chemically synthesized
agaagacuaucagccacuaauga

SEQ ID NO: 55529 - RNA, 23 nt, Artificial Sequence
  Chemically synthesized
ccauaaacuucauggucaugggu

SEQ ID NO: 55530 - RNA, 23 nt, Artificial Sequence
  Chemically synthesized
caaaccauaaacuucauggucau

SEQ ID NO: 55531 - RNA, 23 nt, Artificial Sequence
  Chemically synthesized
gcuccuugacuccuugugguuua

SEQ ID NO: 55532 - RNA, 23 nt, Artificial Sequence
  Chemically synthesized
caacaacccuguuucaguauucu

SEQ ID NO: 55533 - RNA, 23 nt, Artificial Sequence
  Chemically synthesized
cgaugcgucaaguacacugaaau

SEQ ID NO: 55534 - RNA, 23 nt, Artificial Sequence
  Chemically synthesized
cuuccuacagauagucaaaccau

SEQ ID NO: 55535 - RNA, 23 nt, Artificial Sequence
  Chemically synthesized
guacccuuccuacagauagucaa

SEQ ID NO: 55536 - RNA, 23 nt, Artificial Sequence
  Chemically synthesized
cauccuuucuauugaaaaaucac

SEQ ID NO: 55537 - RNA, 23 nt, Artificial Sequence
  Chemically synthesized
ucauacaugacucagcauaccug

SEQ ID NO: 55538 - RNA, 23 nt, Artificial Sequence
  Chemically synthesized
ugucaucauacaugacucagcau

SEQ ID NO: 55539 - RNA, 23 nt, Artificial Sequence
  Chemically synthesized
cugcaagaauaucuacagaccug

SEQ ID NO: 55540 - RNA, 23 nt, Artificial Sequence
  Chemically synthesized
caccauaaaagagcuggaaucga

SEQ ID NO: 55541 - RNA, 23 nt, Artificial Sequence
  Chemically synthesized
uucuucuuuggagcagaauaaaa

SEQ ID NO: 55542 - RNA, 23 nt, Artificial Sequence
  Chemically synthesized
ccguaccuugcaacaagauucuu

SEQ ID NO: 55543 - RNA, 23 nt, Artificial Sequence
  Chemically synthesized
uuuuuguacccuuccuacagaua

SEQ ID NO: 55544 - RNA, 23 nt, Artificial Sequence
  Chemically synthesized
gugaucuaucaauagucaagaaa

SEQ ID NO: 55545 - RNA, 23 nt, Artificial Sequence
  Chemically synthesized
ugugaucuaucaauagucaagaa

SEQ ID NO: 55546 - RNA, 23 nt, Artificial Sequence
  Chemically synthesized
caaugccagagacggaagccuuu

SEQ ID NO: 55547 - RNA, 23 nt, Artificial Sequence
  Chemically synthesized
ccugcaagaauaucuacagaccu

SEQ ID NO: 55548 - RNA, 23 nt, Artificial Sequence
  Chemically synthesized
ggacugcagcaacaacccuguuu

SEQ ID NO: 55549 - RNA, 23 nt, Artificial Sequence
  Chemically synthesized
cagauagucaaaccauaaacuuc

SEQ ID NO: 55550 - RNA, 23 nt, Artificial Sequence
  Chemically synthesized
gguuuaugucaucauacaugacu

SEQ ID NO: 55551 - RNA, 23 nt, Artificial Sequence
  Chemically synthesized
agacuuaugccaggaucccacca

SEQ ID NO: 55552 - RNA, 23 nt, Artificial Sequence
  Chemically synthesized
agguuugcagaagcugccuguga

SEQ ID NO: 55553 - RNA, 23 nt, Artificial Sequence
  Chemically synthesized
guguggugaauucaacacuucca

SEQ ID NO: 55554 - RNA, 23 nt, Artificial Sequence
  Chemically synthesized
ugguguggugaauucaacacuuc

SEQ ID NO: 55555 - RNA, 23 nt, Artificial Sequence
  Chemically synthesized
uccuacagauagucaaaccauaa

SEQ ID NO: 55556 - RNA, 23 nt, Artificial Sequence
  Chemically synthesized
ccaaaugaaugaccuuguugcau

SEQ ID NO: 55557 - RNA, 23 nt, Artificial Sequence
  Chemically synthesized
ugguuuaugucaucauacaugac

SEQ ID NO: 55558 - RNA, 23 nt, Artificial Sequence
  Chemically synthesized
ugagccagucgcugugguuguuu

SEQ ID NO: 55559 - RNA, 23 nt, Artificial Sequence
  Chemically synthesized
cccaccauaaaagagcuggaauc

SEQ ID NO: 55560 - RNA, 23 nt, Artificial Sequence
  Chemically synthesized
ucccaccauaaaagagcuggaau

SEQ ID NO: 55561 - RNA, 23 nt, Artificial Sequence
  Chemically synthesized
gguuugcagaagcugccugugau

SEQ ID NO: 55562 - RNA, 23 nt, Artificial Sequence
  Chemically synthesized
gcagcaacaacccuguuucagua

SEQ ID NO: 55563 - RNA, 23 nt, Artificial Sequence
  Chemically synthesized
guggugaauucaacacuuccaaa

SEQ ID NO: 55564 - RNA, 23 nt, Artificial Sequence
  Chemically synthesized
cucacaugguguggugaauucaa

SEQ ID NO: 55565 - RNA, 23 nt, Artificial Sequence
  Chemically synthesized
ugaaguugggaacucagaccgua

SEQ ID NO: 55566 - RNA, 23 nt, Artificial Sequence
  Chemically synthesized
cugaagaagacuaucagccacua

SEQ ID NO: 55567 - RNA, 23 nt, Artificial Sequence
  Chemically synthesized
ugugguuuaugucaucauacaug

SEQ ID NO: 55568 - RNA, 23 nt, Artificial Sequence
  Chemically synthesized
ugugugaaaaauccugaggauuc

SEQ ID NO: 55569 - RNA, 23 nt, Artificial Sequence
  Chemically synthesized
gcaacaacccuguuucaguauuc

SEQ ID NO: 55570 - RNA, 23 nt, Artificial Sequence
  Chemically synthesized
cagcaacaacccuguuucaguau

SEQ ID NO: 55571 - RNA, 23 nt, Artificial Sequence
  Chemically synthesized
agaucuggcccaucaguucacac

SEQ ID NO: 55572 - RNA, 23 nt, Artificial Sequence
  Chemically synthesized
caacaagauucuucuuuggagca

SEQ ID NO: 55573 - RNA, 23 nt, Artificial Sequence
  Chemically synthesized
ucaaaccauaaacuucaugguca

SEQ ID NO: 55574 - RNA, 23 nt, Artificial Sequence
  Chemically synthesized
ccuuccuacagauagucaaacca

SEQ ID NO: 55575 - RNA, 23 nt, Artificial Sequence
  Chemically synthesized
ccuccacaauaaggucaaugcca

SEQ ID NO: 55576 - RNA, 23 nt, Artificial Sequence
  Chemically synthesized
gaagauuuuggaggguccuccac

SEQ ID NO: 55577 - RNA, 23 nt, Artificial Sequence
  Chemically synthesized
ugacuccuugugguuuaugucau

SEQ ID NO: 55578 - RNA, 23 nt, Artificial Sequence
  Chemically synthesized
aggaucccaccauaaaagagcug

SEQ ID NO: 55579 - RNA, 23 nt, Artificial Sequence
  Chemically synthesized
uuaugccaggaucccaccauaaa

SEQ ID NO: 55580 - RNA, 23 nt, Artificial Sequence
  Chemically synthesized
cuuaugccaggaucccaccauaa

SEQ ID NO: 55581 - RNA, 23 nt, Artificial Sequence
  Chemically synthesized
gacuuaugccaggaucccaccau

SEQ ID NO: 55582 - RNA, 23 nt, Artificial Sequence
  Chemically synthesized
ccaaaauaaacuaucaaucuugc

SEQ ID NO: 55583 - RNA, 23 nt, Artificial Sequence
  Chemically synthesized
acaugguguggugaauucaacac

SEQ ID NO: 55584 - RNA, 23 nt, Artificial Sequence
  Chemically synthesized
accucacaugguguggugaauuc

SEQ ID NO: 55585 - RNA, 23 nt, Artificial Sequence
  Chemically synthesized
ugaccucacaugguguggugaau

SEQ ID NO: 55586 - RNA, 23 nt, Artificial Sequence
  Chemically synthesized
aaaccauaaacuucauggucaug

SEQ ID NO: 55587 - RNA, 23 nt, Artificial Sequence
  Chemically synthesized
uuccuacagauagucaaaccaua

SEQ ID NO: 55588 - RNA, 23 nt, Artificial Sequence
  Chemically synthesized
acccuuccuacagauagucaaac

SEQ ID NO: 55589 - RNA, 23 nt, Artificial Sequence
  Chemically synthesized
ccuuucuauugaaaaaucaccac

SEQ ID NO: 55590 - RNA, 23 nt, Artificial Sequence
  Chemically synthesized
acacuagaggccugggugauaca

SEQ ID NO: 55591 - RNA, 23 nt, Artificial Sequence
  Chemically synthesized
gauguuuugaaauaaaugcaccc

SEQ ID NO: 55592 - RNA, 23 nt, Artificial Sequence
  Chemically synthesized
auguuuugaaauaaaugcacccu

SEQ ID NO: 55593 - RNA, 23 nt, Artificial Sequence
  Chemically synthesized
uguuuugaaauaaaugcacccuu

SEQ ID NO: 55594 - RNA, 23 nt, Artificial Sequence
  Chemically synthesized
guuuugaaauaaaugcacccuug

SEQ ID NO: 55595 - RNA, 23 nt, Artificial Sequence
  Chemically synthesized
uuuugaaauaaaugcacccuuga

SEQ ID NO: 55596 - RNA, 23 nt, Artificial Sequence
  Chemically synthesized
aaggguacaaaaauacaucaugc

SEQ ID NO: 55597 - RNA, 23 nt, Artificial Sequence
  Chemically synthesized
aggguacaaaaauacaucaugca

SEQ ID NO: 55598 - RNA, 23 nt, Artificial Sequence
  Chemically synthesized
ggguacaaaaauacaucaugcaa

SEQ ID NO: 55599 - RNA, 23 nt, Artificial Sequence
  Chemically synthesized
gguacaaaaauacaucaugcaac

SEQ ID NO: 55600 - RNA, 23 nt, Artificial Sequence
  Chemically synthesized
guacaaaaauacaucaugcaaca

SEQ ID NO: 55601 - RNA, 23 nt, Artificial Sequence
  Chemically synthesized
augcuuucugaaaaacuugagca

SEQ ID NO: 55602 - RNA, 23 nt, Artificial Sequence
  Chemically synthesized
ugcuuucugaaaaacuugagcau

SEQ ID NO: 55603 - RNA, 23 nt, Artificial Sequence
  Chemically synthesized
gcuuucugaaaaacuugagcauu

SEQ ID NO: 55604 - RNA, 23 nt, Artificial Sequence
  Chemically synthesized
cuuucugaaaaacuugagcauuc

SEQ ID NO: 55605 - RNA, 23 nt, Artificial Sequence
  Chemically synthesized
uuucugaaaaacuugagcauuca

SEQ ID NO: 55606 - RNA, 23 nt, Artificial Sequence
  Chemically synthesized
gaagaaacuugucaggucuguag

SEQ ID NO: 55607 - RNA, 23 nt, Artificial Sequence
  Chemically synthesized
aagaaacuugucaggucuguaga

SEQ ID NO: 55608 - RNA, 23 nt, Artificial Sequence
  Chemically synthesized
agaaacuugucaggucuguagau

SEQ ID NO: 55609 - RNA, 23 nt, Artificial Sequence
  Chemically synthesized
gaaacuugucaggucuguagaua

SEQ ID NO: 55610 - RNA, 23 nt, Artificial Sequence
  Chemically synthesized
aaacuugucaggucuguagauau

SEQ ID NO: 55611 - RNA, 23 nt, Artificial Sequence
  Chemically synthesized
uccuuuugcuuauaaucgauucc

SEQ ID NO: 55612 - RNA, 23 nt, Artificial Sequence
  Chemically synthesized
ccuuuugcuuauaaucgauucca

SEQ ID NO: 55613 - RNA, 23 nt, Artificial Sequence
  Chemically synthesized
cuuuugcuuauaaucgauuccag

SEQ ID NO: 55614 - RNA, 23 nt, Artificial Sequence
  Chemically synthesized
uuuugcuuauaaucgauuccagc

SEQ ID NO: 55615 - RNA, 23 nt, Artificial Sequence
  Chemically synthesized
uuugcuuauaaucgauuccagcu

SEQ ID NO: 55616 - RNA, 23 nt, Artificial Sequence
  Chemically synthesized
cugguugcaaauuauggacuucc

SEQ ID NO: 55617 - RNA, 23 nt, Artificial Sequence
  Chemically synthesized
ugguugcaaauuauggacuucca

SEQ ID NO: 55618 - RNA, 23 nt, Artificial Sequence
  Chemically synthesized
gguugcaaauuauggacuuccac

SEQ ID NO: 55619 - RNA, 23 nt, Artificial Sequence
  Chemically synthesized
guugcaaauuauggacuuccaca

SEQ ID NO: 55620 - RNA, 23 nt, Artificial Sequence
  Chemically synthesized
uugcaaauuauggacuuccacac

SEQ ID NO: 55621 - RNA, 23 nt, Artificial Sequence
  Chemically synthesized
guuuuugucaaagauuuuacugc

SEQ ID NO: 55622 - RNA, 23 nt, Artificial Sequence
  Chemically synthesized
uuuuugucaaagauuuuacugcg

SEQ ID NO: 55623 - RNA, 23 nt, Artificial Sequence
  Chemically synthesized
uuuugucaaagauuuuacugcgg

SEQ ID NO: 55624 - RNA, 23 nt, Artificial Sequence
  Chemically synthesized
uuugucaaagauuuuacugcggg

SEQ ID NO: 55625 - RNA, 23 nt, Artificial Sequence
  Chemically synthesized
uugucaaagauuuuacugcggga

SEQ ID NO: 55626 - RNA, 23 nt, Artificial Sequence
  Chemically synthesized
uuugaaauaaaugcacccuugaa

SEQ ID NO: 55627 - RNA, 23 nt, Artificial Sequence
  Chemically synthesized
aaugcuuucugaaaaacuugagc

SEQ ID NO: 55628 - RNA, 23 nt, Artificial Sequence
  Chemically synthesized
uaacauaaaaggaucacaugaga

SEQ ID NO: 55629 - RNA, 23 nt, Artificial Sequence
  Chemically synthesized
aacauaaaaggaucacaugagaa

SEQ ID NO: 55630 - RNA, 23 nt, Artificial Sequence
  Chemically synthesized
acauaaaaggaucacaugagaau

SEQ ID NO: 55631 - RNA, 23 nt, Artificial Sequence
  Chemically synthesized
cauaaaaggaucacaugagaauu

SEQ ID NO: 55632 - RNA, 23 nt, Artificial Sequence
  Chemically synthesized
auaaaaggaucacaugagaauua

SEQ ID NO: 55633 - RNA, 23 nt, Artificial Sequence
  Chemically synthesized
uaggaaggguacaaaaauacauc

SEQ ID NO: 55634 - RNA, 23 nt, Artificial Sequence
  Chemically synthesized
aggaaggguacaaaaauacauca

SEQ ID NO: 55635 - RNA, 23 nt, Artificial Sequence
  Chemically synthesized
ggaaggguacaaaaauacaucau

SEQ ID NO: 55636 - RNA, 23 nt, Artificial Sequence
  Chemically synthesized
gaaggguacaaaaauacaucaug

SEQ ID NO: 55637 - RNA, 23 nt, Artificial Sequence
  Chemically synthesized
aauauuccuuuugcuuauaaucg

SEQ ID NO: 55638 - RNA, 23 nt, Artificial Sequence
  Chemically synthesized
auauuccuuuugcuuauaaucga

SEQ ID NO: 55639 - RNA, 23 nt, Artificial Sequence
  Chemically synthesized
uauuccuuuugcuuauaaucgau

SEQ ID NO: 55640 - RNA, 23 nt, Artificial Sequence
  Chemically synthesized
auuccuuuugcuuauaaucgauu

SEQ ID NO: 55641 - RNA, 23 nt, Artificial Sequence
  Chemically synthesized
uuccuuuugcuuauaaucgauuc

SEQ ID NO: 55642 - RNA, 23 nt, Artificial Sequence
  Chemically synthesized
uugcuuauaaucgauuccagcuc

SEQ ID NO: 55643 - RNA, 23 nt, Artificial Sequence
  Chemically synthesized
ugcuuauaaucgauuccagcucu

SEQ ID NO: 55644 - RNA, 23 nt, Artificial Sequence
  Chemically synthesized
gcuuauaaucgauuccagcucuu

SEQ ID NO: 55645 - RNA, 23 nt, Artificial Sequence
  Chemically synthesized
cuuauaaucgauuccagcucuuu

SEQ ID NO: 55646 - RNA, 23 nt, Artificial Sequence
  Chemically synthesized
uuauaaucgauuccagcucuuuu

SEQ ID NO: 55647 - RNA, 23 nt, Artificial Sequence
  Chemically synthesized
cuguaggaaggguacaaaaauac

SEQ ID NO: 55648 - RNA, 23 nt, Artificial Sequence
  Chemically synthesized
uguaggaaggguacaaaaauaca

SEQ ID NO: 55649 - RNA, 23 nt, Artificial Sequence
  Chemically synthesized
guaggaaggguacaaaaauacau

SEQ ID NO: 55650 - RNA, 23 nt, Artificial Sequence
  Chemically synthesized
auaacauaaaaggaucacaugag

SEQ ID NO: 55651 - RNA, 23 nt, Artificial Sequence
  Chemically synthesized
uauaaucgauuccagcucuuuua

SEQ ID NO: 55652 - RNA, 23 nt, Artificial Sequence
  Chemically synthesized
caaaaauacaucaugcaacaagg

SEQ ID NO: 55653 - RNA, 23 nt, Artificial Sequence
  Chemically synthesized
aaaaauacaucaugcaacaaggu

SEQ ID NO: 55654 - RNA, 23 nt, Artificial Sequence
  Chemically synthesized
aaaauacaucaugcaacaagguc

SEQ ID NO: 55655 - RNA, 23 nt, Artificial Sequence
  Chemically synthesized
aaauacaucaugcaacaagguca

SEQ ID NO: 55656 - RNA, 23 nt, Artificial Sequence
  Chemically synthesized
aauacaucaugcaacaaggucau

SEQ ID NO: 55657 - RNA, 23 nt, Artificial Sequence
  Chemically synthesized
uucugaaaaacuugagcauucac

SEQ ID NO: 55658 - RNA, 23 nt, Artificial Sequence
  Chemically synthesized
uaaaaggaucacaugagaauuaa

SEQ ID NO: 55659 - RNA, 23 nt, Artificial Sequence
  Chemically synthesized
aaaaggaucacaugagaauuaaa

SEQ ID NO: 55660 - RNA, 23 nt, Artificial Sequence
  Chemically synthesized
aaaggaucacaugagaauuaaag

SEQ ID NO: 55661 - RNA, 23 nt, Artificial Sequence
  Chemically synthesized
aaggaucacaugagaauuaaagu

SEQ ID NO: 55662 - RNA, 23 nt, Artificial Sequence
  Chemically synthesized
aggaucacaugagaauuaaagug

SEQ ID NO: 55663 - RNA, 23 nt, Artificial Sequence
  Chemically synthesized
ggaucacaugagaauuaaaguga

SEQ ID NO: 55664 - RNA, 23 nt, Artificial Sequence
  Chemically synthesized
gaucacaugagaauuaaagugaa

SEQ ID NO: 55665 - RNA, 23 nt, Artificial Sequence
  Chemically synthesized
aucacaugagaauuaaagugaag

SEQ ID NO: 55666 - RNA, 23 nt, Artificial Sequence
  Chemically synthesized
ucacaugagaauuaaagugaagu

SEQ ID NO: 55667 - RNA, 23 nt, Artificial Sequence
  Chemically synthesized
cugaagaaacuugucaggucugu

SEQ ID NO: 55668 - RNA, 23 nt, Artificial Sequence
  Chemically synthesized
ugaagaaacuugucaggucugua

SEQ ID NO: 55669 - RNA, 23 nt, Artificial Sequence
  Chemically synthesized
ugucaaagauuuuacugcgggau

SEQ ID NO: 55670 - RNA, 23 nt, Artificial Sequence
  Chemically synthesized
gucaaagauuuuacugcgggauc

SEQ ID NO: 55671 - RNA, 23 nt, Artificial Sequence
  Chemically synthesized
ucaaagauuuuacugcgggaucc

SEQ ID NO: 55672 - RNA, 23 nt, Artificial Sequence
  Chemically synthesized
gaccaugaaguuuaugguuugac

SEQ ID NO: 55673 - RNA, 23 nt, Artificial Sequence
  Chemically synthesized
accaugaaguuuaugguuugacu

SEQ ID NO: 55674 - RNA, 23 nt, Artificial Sequence
  Chemically synthesized
ccaugaaguuuaugguuugacua

SEQ ID NO: 55675 - RNA, 23 nt, Artificial Sequence
  Chemically synthesized
caugaaguuuaugguuugacuau

SEQ ID NO: 55676 - RNA, 23 nt, Artificial Sequence
  Chemically synthesized
augaaguuuaugguuugacuauc

SEQ ID NO: 55677 - RNA, 23 nt, Artificial Sequence
  Chemically synthesized
uaaugcuuucugaaaaacuugag

SEQ ID NO: 55678 - RNA, 23 nt, Artificial Sequence
  Chemically synthesized
cuaauaagagagguuuggugugg

SEQ ID NO: 55679 - RNA, 23 nt, Artificial Sequence
  Chemically synthesized
uaauaagagagguuugguguggu

SEQ ID NO: 55680 - RNA, 23 nt, Artificial Sequence
  Chemically synthesized
aauaagagagguuugguguggug

SEQ ID NO: 55681 - RNA, 23 nt, Artificial Sequence
  Chemically synthesized
auaagagagguuuggugugguga

SEQ ID NO: 55682 - RNA, 23 nt, Artificial Sequence
  Chemically synthesized
uaagagagguuugguguggugau

SEQ ID NO: 55683 - RNA, 23 nt, Artificial Sequence
  Chemically synthesized
uuucacacacugaagaaacuugu

SEQ ID NO: 55684 - RNA, 23 nt, Artificial Sequence
  Chemically synthesized
uucacacacugaagaaacuuguc

SEQ ID NO: 55685 - RNA, 23 nt, Artificial Sequence
  Chemically synthesized
ucacacacugaagaaacuuguca

SEQ ID NO: 55686 - RNA, 23 nt, Artificial Sequence
  Chemically synthesized
cacacacugaagaaacuugucag

SEQ ID NO: 55687 - RNA, 23 nt, Artificial Sequence
  Chemically synthesized
acacacugaagaaacuugucagg

SEQ ID NO: 55688 - RNA, 23 nt, Artificial Sequence
  Chemically synthesized
cacacugaagaaacuugucaggu

SEQ ID NO: 55689 - RNA, 23 nt, Artificial Sequence
  Chemically synthesized
acacugaagaaacuugucagguc

SEQ ID NO: 55690 - RNA, 23 nt, Artificial Sequence
  Chemically synthesized
cacugaagaaacuugucaggucu

SEQ ID NO: 55691 - RNA, 23 nt, Artificial Sequence
  Chemically synthesized
acugaagaaacuugucaggucug

SEQ ID NO: 55692 - RNA, 23 nt, Artificial Sequence
  Chemically synthesized
uggaaucuucucuuccaccaugu

SEQ ID NO: 55693 - RNA, 23 nt, Artificial Sequence
  Chemically synthesized
ggaaucuucucuuccaccaugua

SEQ ID NO: 55694 - RNA, 23 nt, Artificial Sequence
  Chemically synthesized
gaaucuucucuuccaccauguau

SEQ ID NO: 55695 - RNA, 23 nt, Artificial Sequence
  Chemically synthesized
aaucuucucuuccaccauguauc

SEQ ID NO: 55696 - RNA, 23 nt, Artificial Sequence
  Chemically synthesized
aucuucucuuccaccauguauca

SEQ ID NO: 55697 - RNA, 23 nt, Artificial Sequence
  Chemically synthesized
acaaaaauacaucaugcaacaag

SEQ ID NO: 55698 - RNA, 23 nt, Artificial Sequence
  Chemically synthesized
gagcauucacuuuucuucacuug

SEQ ID NO: 55699 - RNA, 23 nt, Artificial Sequence
  Chemically synthesized
agcauucacuuuucuucacuugc

SEQ ID NO: 55700 - RNA, 23 nt, Artificial Sequence
  Chemically synthesized
gcauucacuuuucuucacuugcc

SEQ ID NO: 55701 - RNA, 23 nt, Artificial Sequence
  Chemically synthesized
cauucacuuuucuucacuugccu

SEQ ID NO: 55702 - RNA, 23 nt, Artificial Sequence
  Chemically synthesized
auucacuuuucuucacuugccug

SEQ ID NO: 55703 - RNA, 23 nt, Artificial Sequence
  Chemically synthesized
cacuuuucuucacuugccuguuc

SEQ ID NO: 55704 - RNA, 23 nt, Artificial Sequence
  Chemically synthesized
acuuuucuucacuugccuguucu

SEQ ID NO: 55705 - RNA, 23 nt, Artificial Sequence
  Chemically synthesized
cuuuucuucacuugccuguucua

SEQ ID NO: 55706 - RNA, 23 nt, Artificial Sequence
  Chemically synthesized
uuuucuucacuugccuguucuaa

SEQ ID NO: 55707 - RNA, 23 nt, Artificial Sequence
  Chemically synthesized
uuucuucacuugccuguucuaau

SEQ ID NO: 55708 - RNA, 23 nt, Artificial Sequence
  Chemically synthesized
cuguucuaauaagagagguuugg

SEQ ID NO: 55709 - RNA, 23 nt, Artificial Sequence
  Chemically synthesized
uguucuaauaagagagguuuggu

SEQ ID NO: 55710 - RNA, 23 nt, Artificial Sequence
  Chemically synthesized
guucuaauaagagagguuuggug

SEQ ID NO: 55711 - RNA, 23 nt, Artificial Sequence
  Chemically synthesized
uucuaauaagagagguuuggugu

SEQ ID NO: 55712 - RNA, 23 nt, Artificial Sequence
  Chemically synthesized
ucuaauaagagagguuuggugug

SEQ ID NO: 55713 - RNA, 23 nt, Artificial Sequence
  Chemically synthesized
auaaguuauuuuaagacuuuggg

SEQ ID NO: 55714 - RNA, 23 nt, Artificial Sequence
  Chemically synthesized
uaaguuauuuuaagacuuugggg

SEQ ID NO: 55715 - RNA, 23 nt, Artificial Sequence
  Chemically synthesized
aaguuauuuuaagacuuugggga

SEQ ID NO: 55716 - RNA, 23 nt, Artificial Sequence
  Chemically synthesized
aguuauuuuaagacuuuggggaa

SEQ ID NO: 55717 - RNA, 23 nt, Artificial Sequence
  Chemically synthesized
guuauuuuaagacuuuggggaaa

SEQ ID NO: 55718 - RNA, 23 nt, Artificial Sequence
  Chemically synthesized
cauaagucucuggaaucuucucu

SEQ ID NO: 55719 - RNA, 23 nt, Artificial Sequence
  Chemically synthesized
auaagucucuggaaucuucucuu

SEQ ID NO: 55720 - RNA, 23 nt, Artificial Sequence
  Chemically synthesized
uaagucucuggaaucuucucuuc

SEQ ID NO: 55721 - RNA, 23 nt, Artificial Sequence
  Chemically synthesized
aagucucuggaaucuucucuucc

SEQ ID NO: 55722 - RNA, 23 nt, Artificial Sequence
  Chemically synthesized
agucucuggaaucuucucuucca

SEQ ID NO: 55723 - RNA, 23 nt, Artificial Sequence
  Chemically synthesized
uuuauuuuggaaguguugaauuc

SEQ ID NO: 55724 - RNA, 23 nt, Artificial Sequence
  Chemically synthesized
uuauuuuggaaguguugaauuca

SEQ ID NO: 55725 - RNA, 23 nt, Artificial Sequence
  Chemically synthesized
uauuuuggaaguguugaauucac

SEQ ID NO: 55726 - RNA, 23 nt, Artificial Sequence
  Chemically synthesized
auuuuggaaguguugaauucacc

SEQ ID NO: 55727 - RNA, 23 nt, Artificial Sequence
  Chemically synthesized
uuuuggaaguguugaauucacca

SEQ ID NO: 55728 - RNA, 23 nt, Artificial Sequence
  Chemically synthesized
uugaaauaaaugcacccuugaaa

SEQ ID NO: 55729 - RNA, 23 nt, Artificial Sequence
  Chemically synthesized
ucugaaaaacuugagcauucacu

SEQ ID NO: 55730 - RNA, 23 nt, Artificial Sequence
  Chemically synthesized
cugaaaaacuugagcauucacuu

SEQ ID NO: 55731 - RNA, 23 nt, Artificial Sequence
  Chemically synthesized
ugaaaaacuugagcauucacuuu

SEQ ID NO: 55732 - RNA, 23 nt, Artificial Sequence
  Chemically synthesized
gaaaaacuugagcauucacuuuu

SEQ ID NO: 55733 - RNA, 23 nt, Artificial Sequence
  Chemically synthesized
aaaaacuugagcauucacuuuuc

SEQ ID NO: 55734 - RNA, 23 nt, Artificial Sequence
  Chemically synthesized
uucacuuuucuucacuugccugu

SEQ ID NO: 55735 - RNA, 23 nt, Artificial Sequence
  Chemically synthesized
ucacuuuucuucacuugccuguu

SEQ ID NO: 55736 - RNA, 23 nt, Artificial Sequence
  Chemically synthesized
uucuucacuugccuguucuaaua

SEQ ID NO: 55737 - RNA, 23 nt, Artificial Sequence
  Chemically synthesized
ucacaauaaagguaugcugauga

SEQ ID NO: 55738 - RNA, 23 nt, Artificial Sequence
  Chemically synthesized
cacaauaaagguaugcugaugau

SEQ ID NO: 55739 - RNA, 23 nt, Artificial Sequence
  Chemically synthesized
acaauaaagguaugcugaugaua

SEQ ID NO: 55740 - RNA, 23 nt, Artificial Sequence
  Chemically synthesized
caauaaagguaugcugaugauau

SEQ ID NO: 55741 - RNA, 23 nt, Artificial Sequence
  Chemically synthesized
aauaaagguaugcugaugauaua

SEQ ID NO: 55742 - RNA, 23 nt, Artificial Sequence
  Chemically synthesized
ggcagucuacaugucucaucuca

SEQ ID NO: 55743 - RNA, 23 nt, Artificial Sequence
  Chemically synthesized
gcagucuacaugucucaucucag

SEQ ID NO: 55744 - RNA, 23 nt, Artificial Sequence
  Chemically synthesized
cagucuacaugucucaucucagg

SEQ ID NO: 55745 - RNA, 23 nt, Artificial Sequence
  Chemically synthesized
agucuacaugucucaucucagga

SEQ ID NO: 55746 - RNA, 23 nt, Artificial Sequence
  Chemically synthesized
gucuacaugucucaucucaggau

SEQ ID NO: 55747 - RNA, 23 nt, Artificial Sequence
  Chemically synthesized
auguaugaugacauaaaccacaa

SEQ ID NO: 55748 - RNA, 23 nt, Artificial Sequence
  Chemically synthesized
uguaugaugacauaaaccacaag

SEQ ID NO: 55749 - RNA, 23 nt, Artificial Sequence
  Chemically synthesized
guaugaugacauaaaccacaagg

SEQ ID NO: 55750 - RNA, 23 nt, Artificial Sequence
  Chemically synthesized
uaugaugacauaaaccacaagga

SEQ ID NO: 55751 - RNA, 23 nt, Artificial Sequence
  Chemically synthesized
augaugacauaaaccacaaggag

SEQ ID NO: 55752 - RNA, 23 nt, Artificial Sequence
  Chemically synthesized
ucucagaugugcaagaugaaucc

SEQ ID NO: 55753 - RNA, 23 nt, Artificial Sequence
  Chemically synthesized
cucagaugugcaagaugaauccu

SEQ ID NO: 55754 - RNA, 23 nt, Artificial Sequence
  Chemically synthesized
ucagaugugcaagaugaauccuc

SEQ ID NO: 55755 - RNA, 23 nt, Artificial Sequence
  Chemically synthesized
cagaugugcaagaugaauccuca

SEQ ID NO: 55756 - RNA, 23 nt, Artificial Sequence
  Chemically synthesized
agaugugcaagaugaauccucag

SEQ ID NO: 55757 - RNA, 23 nt, Artificial Sequence
  Chemically synthesized
uuuucacacacugaagaaacuug

SEQ ID NO: 55758 - RNA, 23 nt, Artificial Sequence
  Chemically synthesized
ucuucucuuccaccauguaucac

SEQ ID NO: 55759 - RNA, 23 nt, Artificial Sequence
  Chemically synthesized
cuucucuuccaccauguaucacc

SEQ ID NO: 55760 - RNA, 23 nt, Artificial Sequence
  Chemically synthesized
uucucuuccaccauguaucaccc

SEQ ID NO: 55761 - RNA, 23 nt, Artificial Sequence
  Chemically synthesized
ucucuuccaccauguaucaccca

SEQ ID NO: 55762 - RNA, 23 nt, Artificial Sequence
  Chemically synthesized
cucuuccaccauguaucacccag

SEQ ID NO: 55763 - RNA, 23 nt, Artificial Sequence
  Chemically synthesized
ucuuccaccauguaucacccagg

SEQ ID NO: 55764 - RNA, 23 nt, Artificial Sequence
  Chemically synthesized
caggaugaauuucaguguacuug

SEQ ID NO: 55765 - RNA, 23 nt, Artificial Sequence
  Chemically synthesized
aggaugaauuucaguguacuuga

SEQ ID NO: 55766 - RNA, 23 nt, Artificial Sequence
  Chemically synthesized
ggaugaauuucaguguacuugac

SEQ ID NO: 55767 - RNA, 23 nt, Artificial Sequence
  Chemically synthesized
gaugaauuucaguguacuugacg

SEQ ID NO: 55768 - RNA, 23 nt, Artificial Sequence
  Chemically synthesized
augaauuucaguguacuugacgc

SEQ ID NO: 55769 - RNA, 23 nt, Artificial Sequence
  Chemically synthesized
uucucugguugcaaauuauggac

SEQ ID NO: 55770 - RNA, 23 nt, Artificial Sequence
  Chemically synthesized
ucucugguugcaaauuauggacu

SEQ ID NO: 55771 - RNA, 23 nt, Artificial Sequence
  Chemically synthesized
cucugguugcaaauuauggacuu

SEQ ID NO: 55772 - RNA, 23 nt, Artificial Sequence
  Chemically synthesized
ucugguugcaaauuauggacuuc

SEQ ID NO: 55773 - RNA, 23 nt, Artificial Sequence
  Chemically synthesized
cugaugggccagaucuuuuauuc

SEQ ID NO: 55774 - RNA, 23 nt, Artificial Sequence
  Chemically synthesized
ugaugggccagaucuuuuauucu

SEQ ID NO: 55775 - RNA, 23 nt, Artificial Sequence
  Chemically synthesized
gaugggccagaucuuuuauucug

SEQ ID NO: 55776 - RNA, 23 nt, Artificial Sequence
  Chemically synthesized
augggccagaucuuuuauucugc

SEQ ID NO: 55777 - RNA, 23 nt, Artificial Sequence
  Chemically synthesized
ugggccagaucuuuuauucugcu

SEQ ID NO: 55778 - RNA, 23 nt, Artificial Sequence
  Chemically synthesized
ugaaauaaaugcacccuugaaag

SEQ ID NO: 55779 - RNA, 23 nt, Artificial Sequence
  Chemically synthesized
uugaaagcaucccauacacuuug

SEQ ID NO: 55780 - RNA, 23 nt, Artificial Sequence
  Chemically synthesized
ugaaagcaucccauacacuuugg

SEQ ID NO: 55781 - RNA, 23 nt, Artificial Sequence
  Chemically synthesized
gaaagcaucccauacacuuuggc

SEQ ID NO: 55782 - RNA, 23 nt, Artificial Sequence
  Chemically synthesized
aaagcaucccauacacuuuggca

SEQ ID NO: 55783 - RNA, 23 nt, Artificial Sequence
  Chemically synthesized
aagcaucccauacacuuuggcag

SEQ ID NO: 55784 - RNA, 23 nt, Artificial Sequence
  Chemically synthesized
ucauucauuuggaaauguaaugc

SEQ ID NO: 55785 - RNA, 23 nt, Artificial Sequence
  Chemically synthesized
cauucauuuggaaauguaaugcu

SEQ ID NO: 55786 - RNA, 23 nt, Artificial Sequence
  Chemically synthesized
auucauuuggaaauguaaugcuu

SEQ ID NO: 55787 - RNA, 23 nt, Artificial Sequence
  Chemically synthesized
uucauuuggaaauguaaugcuuu

SEQ ID NO: 55788 - RNA, 23 nt, Artificial Sequence
  Chemically synthesized
ucauuuggaaauguaaugcuuuc

SEQ ID NO: 55789 - RNA, 23 nt, Artificial Sequence
  Chemically synthesized
aaaacuugagcauucacuuuucu

SEQ ID NO: 55790 - RNA, 23 nt, Artificial Sequence
  Chemically synthesized
aaacuugagcauucacuuuucuu

SEQ ID NO: 55791 - RNA, 23 nt, Artificial Sequence
  Chemically synthesized
aacuugagcauucacuuuucuuc

SEQ ID NO: 55792 - RNA, 23 nt, Artificial Sequence
  Chemically synthesized
acuugagcauucacuuuucuuca

SEQ ID NO: 55793 - RNA, 23 nt, Artificial Sequence
  Chemically synthesized
agguuugguguggugauuuuuca

SEQ ID NO: 55794 - RNA, 23 nt, Artificial Sequence
  Chemically synthesized
gguuugguguggugauuuuucaa

SEQ ID NO: 55795 - RNA, 23 nt, Artificial Sequence
  Chemically synthesized
guuugguguggugauuuuucaau

SEQ ID NO: 55796 - RNA, 23 nt, Artificial Sequence
  Chemically synthesized
uuugguguggugauuuuucaaua

SEQ ID NO: 55797 - RNA, 23 nt, Artificial Sequence
  Chemically synthesized
uugguguggugauuuuucaauag

SEQ ID NO: 55798 - RNA, 23 nt, Artificial Sequence
  Chemically synthesized
uuuuucaauagaaaggauguuac

SEQ ID NO: 55799 - RNA, 23 nt, Artificial Sequence
  Chemically synthesized
uuuucaauagaaaggauguuacc

SEQ ID NO: 55800 - RNA, 23 nt, Artificial Sequence
  Chemically synthesized
uuucaauagaaaggauguuacca

SEQ ID NO: 55801 - RNA, 23 nt, Artificial Sequence
  Chemically synthesized
uucaauagaaaggauguuaccaa

SEQ ID NO: 55802 - RNA, 23 nt, Artificial Sequence
  Chemically synthesized
ucaauagaaaggauguuaccaau

SEQ ID NO: 55803 - RNA, 23 nt, Artificial Sequence
  Chemically synthesized
auacacuuuggcagucuacaugu

SEQ ID NO: 55804 - RNA, 23 nt, Artificial Sequence
  Chemically synthesized
uacacuuuggcagucuacauguc

SEQ ID NO: 55805 - RNA, 23 nt, Artificial Sequence
  Chemically synthesized
acacuuuggcagucuacaugucu

SEQ ID NO: 55806 - RNA, 23 nt, Artificial Sequence
  Chemically synthesized
cacuuuggcagucuacaugucuc

SEQ ID NO: 55807 - RNA, 23 nt, Artificial Sequence
  Chemically synthesized
acuuuggcagucuacaugucuca

SEQ ID NO: 55808 - RNA, 23 nt, Artificial Sequence
  Chemically synthesized
ugaugacauaaaccacaaggagu

SEQ ID NO: 55809 - RNA, 23 nt, Artificial Sequence
  Chemically synthesized
gaugacauaaaccacaaggaguc

SEQ ID NO: 55810 - RNA, 23 nt, Artificial Sequence
  Chemically synthesized
ucuacaugucucaucucaggaug

SEQ ID NO: 55811 - RNA, 23 nt, Artificial Sequence
  Chemically synthesized
cuacaugucucaucucaggauga

SEQ ID NO: 55812 - RNA, 23 nt, Artificial Sequence
  Chemically synthesized
agcuaaaacaaccacagcgacug

SEQ ID NO: 55813 - RNA, 23 nt, Artificial Sequence
  Chemically synthesized
gcuaaaacaaccacagcgacugg

SEQ ID NO: 55814 - RNA, 23 nt, Artificial Sequence
  Chemically synthesized
cuaaaacaaccacagcgacuggc

SEQ ID NO: 55815 - RNA, 23 nt, Artificial Sequence
  Chemically synthesized
uaaaacaaccacagcgacuggcu

SEQ ID NO: 55816 - RNA, 23 nt, Artificial Sequence
  Chemically synthesized
aaaacaaccacagcgacuggcuc

SEQ ID NO: 55817 - RNA, 23 nt, Artificial Sequence
  Chemically synthesized
uggcauaagucucuggaaucuuc

SEQ ID NO: 55818 - RNA, 23 nt, Artificial Sequence
  Chemically synthesized
ggcauaagucucuggaaucuucu

SEQ ID NO: 55819 - RNA, 23 nt, Artificial Sequence
  Chemically synthesized
gcauaagucucuggaaucuucuc

SEQ ID NO: 55820 - RNA, 23 nt, Artificial Sequence
  Chemically synthesized
cuuccaccauguaucacccaggc

SEQ ID NO: 55821 - RNA, 23 nt, Artificial Sequence
  Chemically synthesized
cgggaaaccguuuuccagaauac

SEQ ID NO: 55822 - RNA, 23 nt, Artificial Sequence
  Chemically synthesized
gggaaaccguuuuccagaauacu

SEQ ID NO: 55823 - RNA, 23 nt, Artificial Sequence
  Chemically synthesized
ggaaaccguuuuccagaauacug

SEQ ID NO: 55824 - RNA, 23 nt, Artificial Sequence
  Chemically synthesized
gaaaccguuuuccagaauacuga

SEQ ID NO: 55825 - RNA, 23 nt, Artificial Sequence
  Chemically synthesized
aaaccguuuuccagaauacugaa

SEQ ID NO: 55826 - RNA, 23 nt, Artificial Sequence
  Chemically synthesized
gaaauaaaugcacccuugaaagc

SEQ ID NO: 55827 - RNA, 23 nt, Artificial Sequence
  Chemically synthesized
aaauaaaugcacccuugaaagca

SEQ ID NO: 55828 - RNA, 23 nt, Artificial Sequence
  Chemically synthesized
aauaaaugcacccuugaaagcau

SEQ ID NO: 55829 - RNA, 23 nt, Artificial Sequence
  Chemically synthesized
auaaaugcacccuugaaagcauc

SEQ ID NO: 55830 - RNA, 23 nt, Artificial Sequence
  Chemically synthesized
uaaaugcacccuugaaagcaucc

SEQ ID NO: 55831 - RNA, 23 nt, Artificial Sequence
  Chemically synthesized
auacaucaugcaacaaggucauu

SEQ ID NO: 55832 - RNA, 23 nt, Artificial Sequence
  Chemically synthesized
uacaucaugcaacaaggucauuc

SEQ ID NO: 55833 - RNA, 23 nt, Artificial Sequence
  Chemically synthesized
acaucaugcaacaaggucauuca

SEQ ID NO: 55834 - RNA, 23 nt, Artificial Sequence
  Chemically synthesized
ucacuugccuguucuaauaagag

SEQ ID NO: 55835 - RNA, 23 nt, Artificial Sequence
  Chemically synthesized
cacuugccuguucuaauaagaga

SEQ ID NO: 55836 - RNA, 23 nt, Artificial Sequence
  Chemically synthesized
acuugccuguucuaauaagagag

SEQ ID NO: 55837 - RNA, 23 nt, Artificial Sequence
  Chemically synthesized
cuugccuguucuaauaagagagg

SEQ ID NO: 55838 - RNA, 23 nt, Artificial Sequence
  Chemically synthesized
uugccuguucuaauaagagaggu

SEQ ID NO: 55839 - RNA, 23 nt, Artificial Sequence
  Chemically synthesized
uuggcagucuacaugucucaucu

SEQ ID NO: 55840 - RNA, 23 nt, Artificial Sequence
  Chemically synthesized
uggcagucuacaugucucaucuc

SEQ ID NO: 55841 - RNA, 23 nt, Artificial Sequence
  Chemically synthesized
agucaaggagcuaaaacaaccac

SEQ ID NO: 55842 - RNA, 23 nt, Artificial Sequence
  Chemically synthesized
gucaaggagcuaaaacaaccaca

SEQ ID NO: 55843 - RNA, 23 nt, Artificial Sequence
  Chemically synthesized
ucaaggagcuaaaacaaccacag

SEQ ID NO: 55844 - RNA, 23 nt, Artificial Sequence
  Chemically synthesized
caaggagcuaaaacaaccacagc

SEQ ID NO: 55845 - RNA, 23 nt, Artificial Sequence
  Chemically synthesized
aaggagcuaaaacaaccacagcg

SEQ ID NO: 55846 - RNA, 23 nt, Artificial Sequence
  Chemically synthesized
gaugugcaagaugaauccucagg

SEQ ID NO: 55847 - RNA, 23 nt, Artificial Sequence
  Chemically synthesized
augugcaagaugaauccucagga

SEQ ID NO: 55848 - RNA, 23 nt, Artificial Sequence
  Chemically synthesized
aauccucaggauuuuucacacac

SEQ ID NO: 55849 - RNA, 23 nt, Artificial Sequence
  Chemically synthesized
auccucaggauuuuucacacacu

SEQ ID NO: 55850 - RNA, 23 nt, Artificial Sequence
  Chemically synthesized
uccucaggauuuuucacacacug

SEQ ID NO: 55851 - RNA, 23 nt, Artificial Sequence
  Chemically synthesized
ccucaggauuuuucacacacuga

SEQ ID NO: 55852 - RNA, 23 nt, Artificial Sequence
  Chemically synthesized
cucaggauuuuucacacacugaa

SEQ ID NO: 55853 - RNA, 23 nt, Artificial Sequence
  Chemically synthesized
auaaucgauuccagcucuuuuau

SEQ ID NO: 55854 - RNA, 23 nt, Artificial Sequence
  Chemically synthesized
cuucucugguugcaaauuaugga

SEQ ID NO: 55855 - RNA, 23 nt, Artificial Sequence
  Chemically synthesized
auuuuacugcgggauccauugag

SEQ ID NO: 55856 - RNA, 23 nt, Artificial Sequence
  Chemically synthesized
uuuuacugcgggauccauugagc

SEQ ID NO: 55857 - RNA, 23 nt, Artificial Sequence
  Chemically synthesized
uuuacugcgggauccauugagca

SEQ ID NO: 55858 - RNA, 23 nt, Artificial Sequence
  Chemically synthesized
uuacugcgggauccauugagcau

SEQ ID NO: 55859 - RNA, 23 nt, Artificial Sequence
  Chemically synthesized
uacugcgggauccauugagcauc

SEQ ID NO: 55860 - RNA, 23 nt, Artificial Sequence
  Chemically synthesized
guuguugcugcaguccuuucucc

SEQ ID NO: 55861 - RNA, 23 nt, Artificial Sequence
  Chemically synthesized
uuguugcugcaguccuuucucca

SEQ ID NO: 55862 - RNA, 23 nt, Artificial Sequence
  Chemically synthesized
uguugcugcaguccuuucuccag

SEQ ID NO: 55863 - RNA, 23 nt, Artificial Sequence
  Chemically synthesized
guugcugcaguccuuucuccagu

SEQ ID NO: 55864 - RNA, 23 nt, Artificial Sequence
  Chemically synthesized
uugcugcaguccuuucuccaguc

SEQ ID NO: 55865 - RNA, 23 nt, Artificial Sequence
  Chemically synthesized
cugauagucuucuucaguaaugu

SEQ ID NO: 55866 - RNA, 23 nt, Artificial Sequence
  Chemically synthesized
ugauagucuucuucaguaauguu

SEQ ID NO: 55867 - RNA, 23 nt, Artificial Sequence
  Chemically synthesized
gauagucuucuucaguaauguug

SEQ ID NO: 55868 - RNA, 23 nt, Artificial Sequence
  Chemically synthesized
auagucuucuucaguaauguugc

SEQ ID NO: 55869 - RNA, 23 nt, Artificial Sequence
  Chemically synthesized
uagucuucuucaguaauguugca

SEQ ID NO: 55870 - RNA, 23 nt, Artificial Sequence
  Chemically synthesized
agucuucuucaguaauguugcaa

SEQ ID NO: 55871 - RNA, 23 nt, Artificial Sequence
  Chemically synthesized
gucuucuucaguaauguugcaag

SEQ ID NO: 55872 - RNA, 23 nt, Artificial Sequence
  Chemically synthesized
ucuucuucaguaauguugcaagg

SEQ ID NO: 55873 - RNA, 23 nt, Artificial Sequence
  Chemically synthesized
uggguucugaaacugcaccuccc

SEQ ID NO: 55874 - RNA, 23 nt, Artificial Sequence
  Chemically synthesized
ggguucugaaacugcaccucccc

SEQ ID NO: 55875 - RNA, 23 nt, Artificial Sequence
  Chemically synthesized
gguucugaaacugcaccuccccu

SEQ ID NO: 55876 - RNA, 23 nt, Artificial Sequence
  Chemically synthesized
guucugaaacugcaccuccccuu

SEQ ID NO: 55877 - RNA, 23 nt, Artificial Sequence
  Chemically synthesized
uucugaaacugcaccuccccuuc

SEQ ID NO: 55878 - RNA, 23 nt, Artificial Sequence
  Chemically synthesized
acccuugaaagcaucccauacac

SEQ ID NO: 55879 - RNA, 23 nt, Artificial Sequence
  Chemically synthesized
cccuugaaagcaucccauacacu

SEQ ID NO: 55880 - RNA, 23 nt, Artificial Sequence
  Chemically synthesized
ccuugaaagcaucccauacacuu

SEQ ID NO: 55881 - RNA, 23 nt, Artificial Sequence
  Chemically synthesized
cuugaaagcaucccauacacuuu

SEQ ID NO: 55882 - RNA, 23 nt, Artificial Sequence
  Chemically synthesized
cuugagcauucacuuuucuucac

SEQ ID NO: 55883 - RNA, 23 nt, Artificial Sequence
  Chemically synthesized
uugagcauucacuuuucuucacu

SEQ ID NO: 55884 - RNA, 23 nt, Artificial Sequence
  Chemically synthesized
ugagcauucacuuuucuucacuu

SEQ ID NO: 55885 - RNA, 23 nt, Artificial Sequence
  Chemically synthesized
aaagguaugcugaugauauaagu

SEQ ID NO: 55886 - RNA, 23 nt, Artificial Sequence
  Chemically synthesized
aagguaugcugaugauauaaguu

SEQ ID NO: 55887 - RNA, 23 nt, Artificial Sequence
  Chemically synthesized
agguaugcugaugauauaaguua

SEQ ID NO: 55888 - RNA, 23 nt, Artificial Sequence
  Chemically synthesized
gguaugcugaugauauaaguuau

SEQ ID NO: 55889 - RNA, 23 nt, Artificial Sequence
  Chemically synthesized
guaugcugaugauauaaguuauu

SEQ ID NO: 55890 - RNA, 23 nt, Artificial Sequence
  Chemically synthesized
uacaugucucaucucaggaugaa

SEQ ID NO: 55891 - RNA, 23 nt, Artificial Sequence
  Chemically synthesized
ggagucaaggagcuaaaacaacc

SEQ ID NO: 55892 - RNA, 23 nt, Artificial Sequence
  Chemically synthesized
gagucaaggagcuaaaacaacca

SEQ ID NO: 55893 - RNA, 23 nt, Artificial Sequence
  Chemically synthesized
cuggaaucuucucuuccaccaug

SEQ ID NO: 55894 - RNA, 23 nt, Artificial Sequence
  Chemically synthesized
ccucuagugucugaaccuucucu

SEQ ID NO: 55895 - RNA, 23 nt, Artificial Sequence
  Chemically synthesized
cucuagugucugaaccuucucug

SEQ ID NO: 55896 - RNA, 23 nt, Artificial Sequence
  Chemically synthesized
ucuagugucugaaccuucucugg

SEQ ID NO: 55897 - RNA, 23 nt, Artificial Sequence
  Chemically synthesized
cuagugucugaaccuucucuggu

SEQ ID NO: 55898 - RNA, 23 nt, Artificial Sequence
  Chemically synthesized
uagugucugaaccuucucugguu

SEQ ID NO: 55899 - RNA, 23 nt, Artificial Sequence
  Chemically synthesized
aaccuucucugguugcaaauuau

SEQ ID NO: 55900 - RNA, 23 nt, Artificial Sequence
  Chemically synthesized
accuucucugguugcaaauuaug

SEQ ID NO: 55901 - RNA, 23 nt, Artificial Sequence
  Chemically synthesized
ccuucucugguugcaaauuaugg

SEQ ID NO: 55902 - RNA, 23 nt, Artificial Sequence
  Chemically synthesized
ugaauuucaguguacuugacgca

SEQ ID NO: 55903 - RNA, 23 nt, Artificial Sequence
  Chemically synthesized
gaauuucaguguacuugacgcau

SEQ ID NO: 55904 - RNA, 23 nt, Artificial Sequence
  Chemically synthesized
aauuucaguguacuugacgcauc

SEQ ID NO: 55905 - RNA, 23 nt, Artificial Sequence
  Chemically synthesized
caaagauuuuacugcgggaucca

SEQ ID NO: 55906 - RNA, 23 nt, Artificial Sequence
  Chemically synthesized
aaagauuuuacugcgggauccau

SEQ ID NO: 55907 - RNA, 23 nt, Artificial Sequence
  Chemically synthesized
uccauugagcaucacauggacca

SEQ ID NO: 55908 - RNA, 23 nt, Artificial Sequence
  Chemically synthesized
ccauugagcaucacauggaccac

SEQ ID NO: 55909 - RNA, 23 nt, Artificial Sequence
  Chemically synthesized
cauugagcaucacauggaccaca

SEQ ID NO: 55910 - RNA, 23 nt, Artificial Sequence
  Chemically synthesized
auugagcaucacauggaccacau

SEQ ID NO: 55911 - RNA, 23 nt, Artificial Sequence
  Chemically synthesized
uugagcaucacauggaccacauc

SEQ ID NO: 55912 - RNA, 23 nt, Artificial Sequence
  Chemically synthesized
gaccugugugaacugaugggcca

SEQ ID NO: 55913 - RNA, 23 nt, Artificial Sequence
  Chemically synthesized
accugugugaacugaugggccag

SEQ ID NO: 55914 - RNA, 23 nt, Artificial Sequence
  Chemically synthesized
ccugugugaacugaugggccaga

SEQ ID NO: 55915 - RNA, 23 nt, Artificial Sequence
  Chemically synthesized
cugugugaacugaugggccagau

SEQ ID NO: 55916 - RNA, 23 nt, Artificial Sequence
  Chemically synthesized
ugugugaacugaugggccagauc

SEQ ID NO: 55917 - RNA, 23 nt, Artificial Sequence
  Chemically synthesized
caguaauguugcaaggauguuuu

SEQ ID NO: 55918 - RNA, 23 nt, Artificial Sequence
  Chemically synthesized
aguaauguugcaaggauguuuug

SEQ ID NO: 55919 - RNA, 23 nt, Artificial Sequence
  Chemically synthesized
guaauguugcaaggauguuuuga

SEQ ID NO: 55920 - RNA, 23 nt, Artificial Sequence
  Chemically synthesized
uaauguugcaaggauguuuugaa

SEQ ID NO: 55921 - RNA, 23 nt, Artificial Sequence
  Chemically synthesized
aauguugcaaggauguuuugaaa

SEQ ID NO: 55922 - RNA, 23 nt, Artificial Sequence
  Chemically synthesized
auguugcaaggauguuuugaaau

SEQ ID NO: 55923 - RNA, 23 nt, Artificial Sequence
  Chemically synthesized
cauuuggaaauguaaugcuuucu

SEQ ID NO: 55924 - RNA, 23 nt, Artificial Sequence
  Chemically synthesized
auuuggaaauguaaugcuuucug

SEQ ID NO: 55925 - RNA, 23 nt, Artificial Sequence
  Chemically synthesized
uuuggaaauguaaugcuuucuga

SEQ ID NO: 55926 - RNA, 23 nt, Artificial Sequence
  Chemically synthesized
uuggaaauguaaugcuuucugaa

SEQ ID NO: 55927 - RNA, 23 nt, Artificial Sequence
  Chemically synthesized
ucccauacacuuuggcagucuac

SEQ ID NO: 55928 - RNA, 23 nt, Artificial Sequence
  Chemically synthesized
cccauacacuuuggcagucuaca

SEQ ID NO: 55929 - RNA, 23 nt, Artificial Sequence
  Chemically synthesized
ccauacacuuuggcagucuacau

SEQ ID NO: 55930 - RNA, 23 nt, Artificial Sequence
  Chemically synthesized
cauacacuuuggcagucuacaug

SEQ ID NO: 55931 - RNA, 23 nt, Artificial Sequence
  Chemically synthesized
gagguuugguguggugauuuuuc

SEQ ID NO: 55932 - RNA, 23 nt, Artificial Sequence
  Chemically synthesized
gauagaucacaauaaagguaugc

SEQ ID NO: 55933 - RNA, 23 nt, Artificial Sequence
  Chemically synthesized
auagaucacaauaaagguaugcu

SEQ ID NO: 55934 - RNA, 23 nt, Artificial Sequence
  Chemically synthesized
uagaucacaauaaagguaugcug

SEQ ID NO: 55935 - RNA, 23 nt, Artificial Sequence
  Chemically synthesized
agaucacaauaaagguaugcuga

SEQ ID NO: 55936 - RNA, 23 nt, Artificial Sequence
  Chemically synthesized
gaucacaauaaagguaugcugau

SEQ ID NO: 55937 - RNA, 23 nt, Artificial Sequence
  Chemically synthesized
auaaagguaugcugaugauauaa

SEQ ID NO: 55938 - RNA, 23 nt, Artificial Sequence
  Chemically synthesized
cuccaaaaucuucagcucugcac

SEQ ID NO: 55939 - RNA, 23 nt, Artificial Sequence
  Chemically synthesized
uccaaaaucuucagcucugcacc

SEQ ID NO: 55940 - RNA, 23 nt, Artificial Sequence
  Chemically synthesized
ccaaaaucuucagcucugcacca

SEQ ID NO: 55941 - RNA, 23 nt, Artificial Sequence
  Chemically synthesized
caaaaucuucagcucugcaccag

SEQ ID NO: 55942 - RNA, 23 nt, Artificial Sequence
  Chemically synthesized
aaaaucuucagcucugcaccagc

SEQ ID NO: 55943 - RNA, 23 nt, Artificial Sequence
  Chemically synthesized
uaaucgauuccagcucuuuuaug

SEQ ID NO: 55944 - RNA, 23 nt, Artificial Sequence
  Chemically synthesized
aaucgauuccagcucuuuuaugg

SEQ ID NO: 55945 - RNA, 23 nt, Artificial Sequence
  Chemically synthesized
aucgauuccagcucuuuuauggu

SEQ ID NO: 55946 - RNA, 23 nt, Artificial Sequence
  Chemically synthesized
ucccaaaagugcuguuuuuguca

SEQ ID NO: 55947 - RNA, 23 nt, Artificial Sequence
  Chemically synthesized
cccaaaagugcuguuuuugucaa

SEQ ID NO: 55948 - RNA, 23 nt, Artificial Sequence
  Chemically synthesized
ccaaaagugcuguuuuugucaaa

SEQ ID NO: 55949 - RNA, 23 nt, Artificial Sequence
  Chemically synthesized
caaaagugcuguuuuugucaaag

SEQ ID NO: 55950 - RNA, 23 nt, Artificial Sequence
  Chemically synthesized
aaaagugcuguuuuugucaaaga

SEQ ID NO: 55951 - RNA, 23 nt, Artificial Sequence
  Chemically synthesized
augugaggucaucagcaagguag

SEQ ID NO: 55952 - RNA, 23 nt, Artificial Sequence
  Chemically synthesized
ugugaggucaucagcaagguagc

SEQ ID NO: 55953 - RNA, 23 nt, Artificial Sequence
  Chemically synthesized
gugaggucaucagcaagguagcc

SEQ ID NO: 55954 - RNA, 23 nt, Artificial Sequence
  Chemically synthesized
ugaggucaucagcaagguagccu

SEQ ID NO: 55955 - RNA, 23 nt, Artificial Sequence
  Chemically synthesized
gaggucaucagcaagguagccua

SEQ ID NO: 55956 - RNA, 23 nt, Artificial Sequence
  Chemically synthesized
gucugaguucccaacuucauuag

SEQ ID NO: 55957 - RNA, 23 nt, Artificial Sequence
  Chemically synthesized
ucugaguucccaacuucauuagu

SEQ ID NO: 55958 - RNA, 23 nt, Artificial Sequence
  Chemically synthesized
cugaguucccaacuucauuagug

SEQ ID NO: 55959 - RNA, 23 nt, Artificial Sequence
  Chemically synthesized
ugaguucccaacuucauuagugg

SEQ ID NO: 55960 - RNA, 23 nt, Artificial Sequence
  Chemically synthesized
gaguucccaacuucauuaguggc

SEQ ID NO: 55961 - RNA, 23 nt, Artificial Sequence
  Chemically synthesized
ucaguaauguugcaaggauguuu

SEQ ID NO: 55962 - RNA, 23 nt, Artificial Sequence
  Chemically synthesized
ggauguuuugaaauaaaugcacc

SEQ ID NO: 55963 - RNA, 23 nt, Artificial Sequence
  Chemically synthesized
uaaagugaaguaacuuaacauac

SEQ ID NO: 55964 - RNA, 23 nt, Artificial Sequence
  Chemically synthesized
aaagugaaguaacuuaacauaca

SEQ ID NO: 55965 - RNA, 23 nt, Artificial Sequence
  Chemically synthesized
aagugaaguaacuuaacauacaa

SEQ ID NO: 55966 - RNA, 23 nt, Artificial Sequence
  Chemically synthesized
agugaaguaacuuaacauacaau

SEQ ID NO: 55967 - RNA, 23 nt, Artificial Sequence
  Chemically synthesized
gugaaguaacuuaacauacaauu

SEQ ID NO: 55968 - RNA, 23 nt, Artificial Sequence
  Chemically synthesized
aucacaauaaagguaugcugaug

SEQ ID NO: 55969 - RNA, 23 nt, Artificial Sequence
  Chemically synthesized
cgacuggcucagaucucagaugu

SEQ ID NO: 55970 - RNA, 23 nt, Artificial Sequence
  Chemically synthesized
gacuggcucagaucucagaugug

SEQ ID NO: 55971 - RNA, 23 nt, Artificial Sequence
  Chemically synthesized
acuggcucagaucucagaugugc

SEQ ID NO: 55972 - RNA, 23 nt, Artificial Sequence
  Chemically synthesized
cuggcucagaucucagaugugca

SEQ ID NO: 55973 - RNA, 23 nt, Artificial Sequence
  Chemically synthesized
uggcucagaucucagaugugcaa

SEQ ID NO: 55974 - RNA, 23 nt, Artificial Sequence
  Chemically synthesized
cagaucucagaugugcaagauga

SEQ ID NO: 55975 - RNA, 23 nt, Artificial Sequence
  Chemically synthesized
agaucucagaugugcaagaugaa

SEQ ID NO: 55976 - RNA, 23 nt, Artificial Sequence
  Chemically synthesized
gaucucagaugugcaagaugaau

SEQ ID NO: 55977 - RNA, 23 nt, Artificial Sequence
  Chemically synthesized
aucucagaugugcaagaugaauc

SEQ ID NO: 55978 - RNA, 23 nt, Artificial Sequence
  Chemically synthesized
uuccaccauguaucacccaggcc

SEQ ID NO: 55979 - RNA, 23 nt, Artificial Sequence
  Chemically synthesized
uccaccauguaucacccaggccu

SEQ ID NO: 55980 - RNA, 23 nt, Artificial Sequence
  Chemically synthesized
gagcaucacauggaccacaucac

SEQ ID NO: 55981 - RNA, 23 nt, Artificial Sequence
  Chemically synthesized
agcaucacauggaccacaucaca

SEQ ID NO: 55982 - RNA, 23 nt, Artificial Sequence
  Chemically synthesized
gcaucacauggaccacaucacag

SEQ ID NO: 55983 - RNA, 23 nt, Artificial Sequence
  Chemically synthesized
caucacauggaccacaucacagg

SEQ ID NO: 55984 - RNA, 23 nt, Artificial Sequence
  Chemically synthesized
aucacauggaccacaucacaggc

SEQ ID NO: 55985 - RNA, 23 nt, Artificial Sequence
  Chemically synthesized
cugcaguccuuucuccagucugg

SEQ ID NO: 55986 - RNA, 23 nt, Artificial Sequence
  Chemically synthesized
ugcaguccuuucuccagucuggg

SEQ ID NO: 55987 - RNA, 23 nt, Artificial Sequence
  Chemically synthesized
gcaguccuuucuccagucugggc

SEQ ID NO: 55988 - RNA, 23 nt, Artificial Sequence
  Chemically synthesized
caguccuuucuccagucugggca

SEQ ID NO: 55989 - RNA, 23 nt, Artificial Sequence
  Chemically synthesized
aguccuuucuccagucugggcaa

SEQ ID NO: 55990 - RNA, 23 nt, Artificial Sequence
  Chemically synthesized
cccgcuggaccugugugaacuga

SEQ ID NO: 55991 - RNA, 23 nt, Artificial Sequence
  Chemically synthesized
ccgcuggaccugugugaacugau

SEQ ID NO: 55992 - RNA, 23 nt, Artificial Sequence
  Chemically synthesized
cgcuggaccugugugaacugaug

SEQ ID NO: 55993 - RNA, 23 nt, Artificial Sequence
  Chemically synthesized
gcuggaccugugugaacugaugg

SEQ ID NO: 55994 - RNA, 23 nt, Artificial Sequence
  Chemically synthesized
cuggaccugugugaacugauggg

SEQ ID NO: 55995 - RNA, 23 nt, Artificial Sequence
  Chemically synthesized
aguucccaacuucauuaguggcu

SEQ ID NO: 55996 - RNA, 23 nt, Artificial Sequence
  Chemically synthesized
guucccaacuucauuaguggcug

SEQ ID NO: 55997 - RNA, 23 nt, Artificial Sequence
  Chemically synthesized
caucaugcaacaaggucauucau

SEQ ID NO: 55998 - RNA, 23 nt, Artificial Sequence
  Chemically synthesized
aucaugcaacaaggucauucauu

SEQ ID NO: 55999 - RNA, 23 nt, Artificial Sequence
  Chemically synthesized
ucaugcaacaaggucauucauuu

SEQ ID NO: 56000 - RNA, 23 nt, Artificial Sequence
  Chemically synthesized
caugcaacaaggucauucauuug

SEQ ID NO: 56001 - RNA, 23 nt, Artificial Sequence
  Chemically synthesized
uguaaugcuuucugaaaaacuug

SEQ ID NO: 56002 - RNA, 23 nt, Artificial Sequence
  Chemically synthesized
guaaugcuuucugaaaaacuuga

SEQ ID NO: 56003 - RNA, 23 nt, Artificial Sequence
  Chemically synthesized
aagagagguuugguguggugauu

SEQ ID NO: 56004 - RNA, 23 nt, Artificial Sequence
  Chemically synthesized
caauagaaaggauguuaccaaua

SEQ ID NO: 56005 - RNA, 23 nt, Artificial Sequence
  Chemically synthesized
cuauugauagaucacaauaaagg

SEQ ID NO: 56006 - RNA, 23 nt, Artificial Sequence
  Chemically synthesized
uauugauagaucacaauaaaggu

SEQ ID NO: 56007 - RNA, 23 nt, Artificial Sequence
  Chemically synthesized
auugauagaucacaauaaaggua

SEQ ID NO: 56008 - RNA, 23 nt, Artificial Sequence
  Chemically synthesized
uugauagaucacaauaaagguau

SEQ ID NO: 56009 - RNA, 23 nt, Artificial Sequence
  Chemically synthesized
ugauagaucacaauaaagguaug

SEQ ID NO: 56010 - RNA, 23 nt, Artificial Sequence
  Chemically synthesized
gaggacccuccaaaaucuucagc

SEQ ID NO: 56011 - RNA, 23 nt, Artificial Sequence
  Chemically synthesized
aggacccuccaaaaucuucagcu

SEQ ID NO: 56012 - RNA, 23 nt, Artificial Sequence
  Chemically synthesized
ggacccuccaaaaucuucagcuc

SEQ ID NO: 56013 - RNA, 23 nt, Artificial Sequence
  Chemically synthesized
gacccuccaaaaucuucagcucu

SEQ ID NO: 56014 - RNA, 23 nt, Artificial Sequence
  Chemically synthesized
acccuccaaaaucuucagcucug

SEQ ID NO: 56015 - RNA, 23 nt, Artificial Sequence
  Chemically synthesized
aaaucuucagcucugcaccagca

SEQ ID NO: 56016 - RNA, 23 nt, Artificial Sequence
  Chemically synthesized
aaucuucagcucugcaccagcag

SEQ ID NO: 56017 - RNA, 23 nt, Artificial Sequence
  Chemically synthesized
aucuucagcucugcaccagcagg

SEQ ID NO: 56018 - RNA, 23 nt, Artificial Sequence
  Chemically synthesized
ugacauaaaccacaaggagucaa

SEQ ID NO: 56019 - RNA, 23 nt, Artificial Sequence
  Chemically synthesized
gacauaaaccacaaggagucaag

SEQ ID NO: 56020 - RNA, 23 nt, Artificial Sequence
  Chemically synthesized
acauaaaccacaaggagucaagg

SEQ ID NO: 56021 - RNA, 23 nt, Artificial Sequence
  Chemically synthesized
cauaaaccacaaggagucaagga

SEQ ID NO: 56022 - RNA, 23 nt, Artificial Sequence
  Chemically synthesized
auaaaccacaaggagucaaggag

SEQ ID NO: 56023 - RNA, 23 nt, Artificial Sequence
  Chemically synthesized
aaaccacaaggagucaaggagcu

SEQ ID NO: 56024 - RNA, 23 nt, Artificial Sequence
  Chemically synthesized
aaccacaaggagucaaggagcua

SEQ ID NO: 56025 - RNA, 23 nt, Artificial Sequence
  Chemically synthesized
accacaaggagucaaggagcuaa

SEQ ID NO: 56026 - RNA, 23 nt, Artificial Sequence
  Chemically synthesized
ccacaaggagucaaggagcuaaa

SEQ ID NO: 56027 - RNA, 23 nt, Artificial Sequence
  Chemically synthesized
cacaaggagucaaggagcuaaaa

SEQ ID NO: 56028 - RNA, 23 nt, Artificial Sequence
  Chemically synthesized
ugugcaagaugaauccucaggau

SEQ ID NO: 56029 - RNA, 23 nt, Artificial Sequence
  Chemically synthesized
gugcaagaugaauccucaggauu

SEQ ID NO: 56030 - RNA, 23 nt, Artificial Sequence
  Chemically synthesized
ugcaagaugaauccucaggauuu

SEQ ID NO: 56031 - RNA, 23 nt, Artificial Sequence
  Chemically synthesized
agugucugaaccuucucugguug

SEQ ID NO: 56032 - RNA, 23 nt, Artificial Sequence
  Chemically synthesized
aaagugcuguuuuugucaaagau

SEQ ID NO: 56033 - RNA, 23 nt, Artificial Sequence
  Chemically synthesized
agauuuuacugcgggauccauug

SEQ ID NO: 56034 - RNA, 23 nt, Artificial Sequence
  Chemically synthesized
gauuuuacugcgggauccauuga

SEQ ID NO: 56035 - RNA, 23 nt, Artificial Sequence
  Chemically synthesized
auccauugagcaucacauggacc

SEQ ID NO: 56036 - RNA, 23 nt, Artificial Sequence
  Chemically synthesized
ucccaacuucauuaguggcugau

SEQ ID NO: 56037 - RNA, 23 nt, Artificial Sequence
  Chemically synthesized
cccaacuucauuaguggcugaua

SEQ ID NO: 56038 - RNA, 23 nt, Artificial Sequence
  Chemically synthesized
ccaacuucauuaguggcugauag

SEQ ID NO: 56039 - RNA, 23 nt, Artificial Sequence
  Chemically synthesized
caacuucauuaguggcugauagu

SEQ ID NO: 56040 - RNA, 23 nt, Artificial Sequence
  Chemically synthesized
aacuucauuaguggcugauaguc

SEQ ID NO: 56041 - RNA, 23 nt, Artificial Sequence
  Chemically synthesized
gcugauagucuucuucaguaaug

SEQ ID NO: 56042 - RNA, 23 nt, Artificial Sequence
  Chemically synthesized
cuggguucugaaacugcaccucc

SEQ ID NO: 56043 - RNA, 23 nt, Artificial Sequence
  Chemically synthesized
aaugcacccuugaaagcauccca

SEQ ID NO: 56044 - RNA, 23 nt, Artificial Sequence
  Chemically synthesized
augcacccuugaaagcaucccau

SEQ ID NO: 56045 - RNA, 23 nt, Artificial Sequence
  Chemically synthesized
ugcacccuugaaagcaucccaua

SEQ ID NO: 56046 - RNA, 23 nt, Artificial Sequence
  Chemically synthesized
gcacccuugaaagcaucccauac

SEQ ID NO: 56047 - RNA, 23 nt, Artificial Sequence
  Chemically synthesized
cacccuugaaagcaucccauaca

SEQ ID NO: 56048 - RNA, 23 nt, Artificial Sequence
  Chemically synthesized
ggccucuagugucugaaccuucu

SEQ ID NO: 56049 - RNA, 23 nt, Artificial Sequence
  Chemically synthesized
gccucuagugucugaaccuucuc

SEQ ID NO: 56050 - RNA, 23 nt, Artificial Sequence
  Chemically synthesized
uucccaacuucauuaguggcuga

SEQ ID NO: 56051 - RNA, 23 nt, Artificial Sequence
  Chemically synthesized
caaggucauucauuuggaaaugu

SEQ ID NO: 56052 - RNA, 23 nt, Artificial Sequence
  Chemically synthesized
aaggucauucauuuggaaaugua

SEQ ID NO: 56053 - RNA, 23 nt, Artificial Sequence
  Chemically synthesized
aggucauucauuuggaaauguaa

SEQ ID NO: 56054 - RNA, 23 nt, Artificial Sequence
  Chemically synthesized
ggucauucauuuggaaauguaau

SEQ ID NO: 56055 - RNA, 23 nt, Artificial Sequence
  Chemically synthesized
gucauucauuuggaaauguaaug

SEQ ID NO: 56056 - RNA, 23 nt, Artificial Sequence
  Chemically synthesized
ggaggacccuccaaaaucuucag

SEQ ID NO: 56057 - RNA, 23 nt, Artificial Sequence
  Chemically synthesized
uagauauucuugcaggaaaauug

SEQ ID NO: 56058 - RNA, 23 nt, Artificial Sequence
  Chemically synthesized
agauauucuugcaggaaaauuga

SEQ ID NO: 56059 - RNA, 23 nt, Artificial Sequence
  Chemically synthesized
gauauucuugcaggaaaauugaa

SEQ ID NO: 56060 - RNA, 23 nt, Artificial Sequence
  Chemically synthesized
auauucuugcaggaaaauugaau

SEQ ID NO: 56061 - RNA, 23 nt, Artificial Sequence
  Chemically synthesized
uauucuugcaggaaaauugaaua

SEQ ID NO: 56062 - RNA, 23 nt, Artificial Sequence
  Chemically synthesized
ucacauggaccacaucacaggca

SEQ ID NO: 56063 - RNA, 23 nt, Artificial Sequence
  Chemically synthesized
cacauggaccacaucacaggcag

SEQ ID NO: 56064 - RNA, 23 nt, Artificial Sequence
  Chemically synthesized
acauggaccacaucacaggcagc

SEQ ID NO: 56065 - RNA, 23 nt, Artificial Sequence
  Chemically synthesized
uauucugcuccaaagaagaaucu

SEQ ID NO: 56066 - RNA, 23 nt, Artificial Sequence
  Chemically synthesized
auucugcuccaaagaagaaucuu

SEQ ID NO: 56067 - RNA, 23 nt, Artificial Sequence
  Chemically synthesized
uucugcuccaaagaagaaucuug

SEQ ID NO: 56068 - RNA, 23 nt, Artificial Sequence
  Chemically synthesized
ucugcuccaaagaagaaucuugu

SEQ ID NO: 56069 - RNA, 23 nt, Artificial Sequence
  Chemically synthesized
cugcuccaaagaagaaucuuguu

SEQ ID NO: 56070 - RNA, 23 nt, Artificial Sequence
  Chemically synthesized
cuuguugcaagguacggucugag

SEQ ID NO: 56071 - RNA, 23 nt, Artificial Sequence
  Chemically synthesized
uuguugcaagguacggucugagu

SEQ ID NO: 56072 - RNA, 23 nt, Artificial Sequence
  Chemically synthesized
uguugcaagguacggucugaguu

SEQ ID NO: 56073 - RNA, 23 nt, Artificial Sequence
  Chemically synthesized
guugcaagguacggucugaguuc

SEQ ID NO: 56074 - RNA, 23 nt, Artificial Sequence
  Chemically synthesized
uugcaagguacggucugaguucc

SEQ ID NO: 56075 - RNA, 23 nt, Artificial Sequence
  Chemically synthesized
cccuccaaaaucuucagcucugc

SEQ ID NO: 56076 - RNA, 23 nt, Artificial Sequence
  Chemically synthesized
ccuccaaaaucuucagcucugca

SEQ ID NO: 56077 - RNA, 23 nt, Artificial Sequence
  Chemically synthesized
uacaaaaauacaucaugcaacaa

SEQ ID NO: 56078 - RNA, 23 nt, Artificial Sequence
  Chemically synthesized
agagagguuugguguggugauuu

SEQ ID NO: 56079 - RNA, 23 nt, Artificial Sequence
  Chemically synthesized
caaauuauggacuuccacacucc

SEQ ID NO: 56080 - RNA, 23 nt, Artificial Sequence
  Chemically synthesized
aaauuauggacuuccacacuccc

SEQ ID NO: 56081 - RNA, 23 nt, Artificial Sequence
  Chemically synthesized
aauuauggacuuccacacuccca

SEQ ID NO: 56082 - RNA, 23 nt, Artificial Sequence
  Chemically synthesized
auuauggacuuccacacucccaa

SEQ ID NO: 56083 - RNA, 23 nt, Artificial Sequence
  Chemically synthesized
uuauggacuuccacacucccaaa

SEQ ID NO: 56084 - RNA, 23 nt, Artificial Sequence
  Chemically synthesized
gcugaacucgcaguuggccauag

SEQ ID NO: 56085 - RNA, 23 nt, Artificial Sequence
  Chemically synthesized
cugaacucgcaguuggccauagg

SEQ ID NO: 56086 - RNA, 23 nt, Artificial Sequence
  Chemically synthesized
ugaacucgcaguuggccauaggg

SEQ ID NO: 56087 - RNA, 23 nt, Artificial Sequence
  Chemically synthesized
gaacucgcaguuggccauagggc

SEQ ID NO: 56088 - RNA, 23 nt, Artificial Sequence
  Chemically synthesized
aacucgcaguuggccauagggcu

SEQ ID NO: 56089 - RNA, 23 nt, Artificial Sequence
  Chemically synthesized
gcucuuuuauggugggauccugg

SEQ ID NO: 56090 - RNA, 23 nt, Artificial Sequence
  Chemically synthesized
cucuuuuauggugggauccuggc

SEQ ID NO: 56091 - RNA, 23 nt, Artificial Sequence
  Chemically synthesized
ucuuuuauggugggauccuggca

SEQ ID NO: 56092 - RNA, 23 nt, Artificial Sequence
  Chemically synthesized
cuuuuauggugggauccuggcau

SEQ ID NO: 56093 - RNA, 23 nt, Artificial Sequence
  Chemically synthesized
uuuuauggugggauccuggcaua

SEQ ID NO: 56094 - RNA, 23 nt, Artificial Sequence
  Chemically synthesized
gucucuggaaucuucucuuccac

SEQ ID NO: 56095 - RNA, 23 nt, Artificial Sequence
  Chemically synthesized
ucucuggaaucuucucuuccacc

SEQ ID NO: 56096 - RNA, 23 nt, Artificial Sequence
  Chemically synthesized
aaucuuguugcaagguacggucu

SEQ ID NO: 56097 - RNA, 23 nt, Artificial Sequence
  Chemically synthesized
aucuuguugcaagguacggucug

SEQ ID NO: 56098 - RNA, 23 nt, Artificial Sequence
  Chemically synthesized
ucuuguugcaagguacggucuga

SEQ ID NO: 56099 - RNA, 23 nt, Artificial Sequence
  Chemically synthesized
acccaugaccaugaaguuuaugg

SEQ ID NO: 56100 - RNA, 23 nt, Artificial Sequence
  Chemically synthesized
cccaugaccaugaaguuuauggu

SEQ ID NO: 56101 - RNA, 23 nt, Artificial Sequence
  Chemically synthesized
ccaugaccaugaaguuuaugguu

SEQ ID NO: 56102 - RNA, 23 nt, Artificial Sequence
  Chemically synthesized
caugaccaugaaguuuaugguuu

SEQ ID NO: 56103 - RNA, 23 nt, Artificial Sequence
  Chemically synthesized
augaccaugaaguuuaugguuug

SEQ ID NO: 56104 - RNA, 23 nt, Artificial Sequence
  Chemically synthesized
gaaguuuaugguuugacuaucug

SEQ ID NO: 56105 - RNA, 23 nt, Artificial Sequence
  Chemically synthesized
aaguuuaugguuugacuaucugu

SEQ ID NO: 56106 - RNA, 23 nt, Artificial Sequence
  Chemically synthesized
aguuuaugguuugacuaucugua

SEQ ID NO: 56107 - RNA, 23 nt, Artificial Sequence
  Chemically synthesized
guuuaugguuugacuaucuguag

SEQ ID NO: 56108 - RNA, 23 nt, Artificial Sequence
  Chemically synthesized
uuuaugguuugacuaucuguagg

SEQ ID NO: 56109 - RNA, 23 nt, Artificial Sequence
  Chemically synthesized
cuuuggcagucuacaugucucau

SEQ ID NO: 56110 - RNA, 23 nt, Artificial Sequence
  Chemically synthesized
uuuggcagucuacaugucucauc

SEQ ID NO: 56111 - RNA, 23 nt, Artificial Sequence
  Chemically synthesized
cuugucaggucuguagauauucu

SEQ ID NO: 56112 - RNA, 23 nt, Artificial Sequence
  Chemically synthesized
uugucaggucuguagauauucuu

SEQ ID NO: 56113 - RNA, 23 nt, Artificial Sequence
  Chemically synthesized
ugucaggucuguagauauucuug

SEQ ID NO: 56114 - RNA, 23 nt, Artificial Sequence
  Chemically synthesized
gucaggucuguagauauucuugc

SEQ ID NO: 56115 - RNA, 23 nt, Artificial Sequence
  Chemically synthesized
ucaggucuguagauauucuugca

SEQ ID NO: 56116 - RNA, 23 nt, Artificial Sequence
  Chemically synthesized
ugcaaauuauggacuuccacacu

SEQ ID NO: 56117 - RNA, 23 nt, Artificial Sequence
  Chemically synthesized
gcaaauuauggacuuccacacuc

SEQ ID NO: 56118 - RNA, 23 nt, Artificial Sequence
  Chemically synthesized
ccagaauacugaaacaggguugu

SEQ ID NO: 56119 - RNA, 23 nt, Artificial Sequence
  Chemically synthesized
cagaauacugaaacaggguuguu

SEQ ID NO: 56120 - RNA, 23 nt, Artificial Sequence
  Chemically synthesized
agaauacugaaacaggguuguug

SEQ ID NO: 56121 - RNA, 23 nt, Artificial Sequence
  Chemically synthesized
gaauacugaaacaggguuguugc

SEQ ID NO: 56122 - RNA, 23 nt, Artificial Sequence
  Chemically synthesized
aauacugaaacaggguuguugcu

SEQ ID NO: 56123 - RNA, 23 nt, Artificial Sequence
  Chemically synthesized
gucauguaugaugacauaaacca

SEQ ID NO: 56124 - RNA, 23 nt, Artificial Sequence
  Chemically synthesized
ucauguaugaugacauaaaccac

SEQ ID NO: 56125 - RNA, 23 nt, Artificial Sequence
  Chemically synthesized
cauguaugaugacauaaaccaca

SEQ ID NO: 56126 - RNA, 23 nt, Artificial Sequence
  Chemically synthesized
ucucaucucaggaugaauuucag

SEQ ID NO: 56127 - RNA, 23 nt, Artificial Sequence
  Chemically synthesized
cucaucucaggaugaauuucagu

SEQ ID NO: 56128 - RNA, 23 nt, Artificial Sequence
  Chemically synthesized
ucaucucaggaugaauuucagug

SEQ ID NO: 56129 - RNA, 23 nt, Artificial Sequence
  Chemically synthesized
caucucaggaugaauuucagugu

SEQ ID NO: 56130 - RNA, 23 nt, Artificial Sequence
  Chemically synthesized
aucucaggaugaauuucagugua

SEQ ID NO: 56131 - RNA, 23 nt, Artificial Sequence
  Chemically synthesized
uuuauggugggauccuggcauaa

SEQ ID NO: 56132 - RNA, 23 nt, Artificial Sequence
  Chemically synthesized
ugggauccuggcauaagucucug

SEQ ID NO: 56133 - RNA, 23 nt, Artificial Sequence
  Chemically synthesized
gggauccuggcauaagucucugg

SEQ ID NO: 56134 - RNA, 23 nt, Artificial Sequence
  Chemically synthesized
ggauccuggcauaagucucugga

SEQ ID NO: 56135 - RNA, 23 nt, Artificial Sequence
  Chemically synthesized
gauccuggcauaagucucuggaa

SEQ ID NO: 56136 - RNA, 23 nt, Artificial Sequence
  Chemically synthesized
auccuggcauaagucucuggaau

SEQ ID NO: 56137 - RNA, 23 nt, Artificial Sequence
  Chemically synthesized
gccagaucuuuuauucugcucca

SEQ ID NO: 56138 - RNA, 23 nt, Artificial Sequence
  Chemically synthesized
ccagaucuuuuauucugcuccaa

SEQ ID NO: 56139 - RNA, 23 nt, Artificial Sequence
  Chemically synthesized
cagaucuuuuauucugcuccaaa

SEQ ID NO: 56140 - RNA, 23 nt, Artificial Sequence
  Chemically synthesized
agaucuuuuauucugcuccaaag

SEQ ID NO: 56141 - RNA, 23 nt, Artificial Sequence
  Chemically synthesized
gaucuuuuauucugcuccaaaga

SEQ ID NO: 56142 - RNA, 23 nt, Artificial Sequence
  Chemically synthesized
ucauuaguggcugauagucuucu

SEQ ID NO: 56143 - RNA, 23 nt, Artificial Sequence
  Chemically synthesized
cauuaguggcugauagucuucuu

SEQ ID NO: 56144 - RNA, 23 nt, Artificial Sequence
  Chemically synthesized
auuaguggcugauagucuucuuc

SEQ ID NO: 56145 - RNA, 23 nt, Artificial Sequence
  Chemically synthesized
uuaguggcugauagucuucuuca

SEQ ID NO: 56146 - RNA, 23 nt, Artificial Sequence
  Chemically synthesized
uaguggcugauagucuucuucag

SEQ ID NO: 56147 - RNA, 23 nt, Artificial Sequence
  Chemically synthesized
ugguuugacuaucuguaggaagg

SEQ ID NO: 56148 - RNA, 23 nt, Artificial Sequence
  Chemically synthesized
gguuugacuaucuguaggaaggg

SEQ ID NO: 56149 - RNA, 23 nt, Artificial Sequence
  Chemically synthesized
guuugacuaucuguaggaagggu

SEQ ID NO: 56150 - RNA, 23 nt, Artificial Sequence
  Chemically synthesized
uuugacuaucuguaggaagggua

SEQ ID NO: 56151 - RNA, 23 nt, Artificial Sequence
  Chemically synthesized
uugacuaucuguaggaaggguac

SEQ ID NO: 56152 - RNA, 23 nt, Artificial Sequence
  Chemically synthesized
cacaugagaauuaaagugaagua

SEQ ID NO: 56153 - RNA, 23 nt, Artificial Sequence
  Chemically synthesized
gaccuuauuguggaggacccucc

SEQ ID NO: 56154 - RNA, 23 nt, Artificial Sequence
  Chemically synthesized
accuuauuguggaggacccucca

SEQ ID NO: 56155 - RNA, 23 nt, Artificial Sequence
  Chemically synthesized
ccuuauuguggaggacccuccaa

SEQ ID NO: 56156 - RNA, 23 nt, Artificial Sequence
  Chemically synthesized
cuuauuguggaggacccuccaaa

SEQ ID NO: 56157 - RNA, 23 nt, Artificial Sequence
  Chemically synthesized
uuauuguggaggacccuccaaaa

SEQ ID NO: 56158 - RNA, 23 nt, Artificial Sequence
  Chemically synthesized
caggucuguagauauucuugcag

SEQ ID NO: 56159 - RNA, 23 nt, Artificial Sequence
  Chemically synthesized
aggucuguagauauucuugcagg

SEQ ID NO: 56160 - RNA, 23 nt, Artificial Sequence
  Chemically synthesized
gugggauccuggcauaagucucu

SEQ ID NO: 56161 - RNA, 23 nt, Artificial Sequence
  Chemically synthesized
uuuggaaguguugaauucaccac

SEQ ID NO: 56162 - RNA, 23 nt, Artificial Sequence
  Chemically synthesized
uuggaaguguugaauucaccaca

SEQ ID NO: 56163 - RNA, 23 nt, Artificial Sequence
  Chemically synthesized
aucuuuuauucugcuccaaagaa

SEQ ID NO: 56164 - RNA, 23 nt, Artificial Sequence
  Chemically synthesized
ugaaguuuaugguuugacuaucu

SEQ ID NO: 56165 - RNA, 23 nt, Artificial Sequence
  Chemically synthesized
uuaugguuugacuaucuguagga

SEQ ID NO: 56166 - RNA, 23 nt, Artificial Sequence
  Chemically synthesized
cagguaugcugagucauguauga

SEQ ID NO: 56167 - RNA, 23 nt, Artificial Sequence
  Chemically synthesized
agguaugcugagucauguaugau

SEQ ID NO: 56168 - RNA, 23 nt, Artificial Sequence
  Chemically synthesized
gguaugcugagucauguaugaug

SEQ ID NO: 56169 - RNA, 23 nt, Artificial Sequence
  Chemically synthesized
guaugcugagucauguaugauga

SEQ ID NO: 56170 - RNA, 23 nt, Artificial Sequence
  Chemically synthesized
uaugcugagucauguaugaugac

SEQ ID NO: 56171 - RNA, 23 nt, Artificial Sequence
  Chemically synthesized
augacauaaaccacaaggaguca

SEQ ID NO: 56172 - RNA, 23 nt, Artificial Sequence
  Chemically synthesized
uaaaccacaaggagucaaggagc

SEQ ID NO: 56173 - RNA, 23 nt, Artificial Sequence
  Chemically synthesized
ucgauuccagcucuuuuauggug

SEQ ID NO: 56174 - RNA, 23 nt, Artificial Sequence
  Chemically synthesized
cgauuccagcucuuuuauggugg

SEQ ID NO: 56175 - RNA, 23 nt, Artificial Sequence
  Chemically synthesized
gauuccagcucuuuuaugguggg

SEQ ID NO: 56176 - RNA, 23 nt, Artificial Sequence
  Chemically synthesized
auuccagcucuuuuaugguggga

SEQ ID NO: 56177 - RNA, 23 nt, Artificial Sequence
  Chemically synthesized
uuccagcucuuuuauggugggau

SEQ ID NO: 56178 - RNA, 23 nt, Artificial Sequence
  Chemically synthesized
ucucaggaugaauuucaguguac

SEQ ID NO: 56179 - RNA, 23 nt, Artificial Sequence
  Chemically synthesized
cucaggaugaauuucaguguacu

SEQ ID NO: 56180 - RNA, 23 nt, Artificial Sequence
  Chemically synthesized
ucaggaugaauuucaguguacuu

SEQ ID NO: 56181 - RNA, 23 nt, Artificial Sequence
  Chemically synthesized
auacugaaacaggguuguugcug

SEQ ID NO: 56182 - RNA, 23 nt, Artificial Sequence
  Chemically synthesized
uacugaaacaggguuguugcugc

SEQ ID NO: 56183 - RNA, 23 nt, Artificial Sequence
  Chemically synthesized
uucauuaguggcugauagucuuc

SEQ ID NO: 56184 - RNA, 23 nt, Artificial Sequence
  Chemically synthesized
agcaucccauacacuuuggcagu

SEQ ID NO: 56185 - RNA, 23 nt, Artificial Sequence
  Chemically synthesized
gcaucccauacacuuuggcaguc

SEQ ID NO: 56186 - RNA, 23 nt, Artificial Sequence
  Chemically synthesized
caucccauacacuuuggcagucu

SEQ ID NO: 56187 - RNA, 23 nt, Artificial Sequence
  Chemically synthesized
aucccauacacuuuggcagucua

SEQ ID NO: 56188 - RNA, 23 nt, Artificial Sequence
  Chemically synthesized
aauagaaaggauguuaccaauau

SEQ ID NO: 56189 - RNA, 23 nt, Artificial Sequence
  Chemically synthesized
auagaaaggauguuaccaauaua

SEQ ID NO: 56190 - RNA, 23 nt, Artificial Sequence
  Chemically synthesized
uggcauugaccuuauuguggagg

SEQ ID NO: 56191 - RNA, 23 nt, Artificial Sequence
  Chemically synthesized
ggcauugaccuuauuguggagga

SEQ ID NO: 56192 - RNA, 23 nt, Artificial Sequence
  Chemically synthesized
gcauugaccuuauuguggaggac

SEQ ID NO: 56193 - RNA, 23 nt, Artificial Sequence
  Chemically synthesized
cauugaccuuauuguggaggacc

SEQ ID NO: 56194 - RNA, 23 nt, Artificial Sequence
  Chemically synthesized
auugaccuuauuguggaggaccc

SEQ ID NO: 56195 - RNA, 23 nt, Artificial Sequence
  Chemically synthesized
ggucuguagauauucuugcagga

SEQ ID NO: 56196 - RNA, 23 nt, Artificial Sequence
  Chemically synthesized
auucuugcaggaaaauugaauau

SEQ ID NO: 56197 - RNA, 23 nt, Artificial Sequence
  Chemically synthesized
agcucuuuuauggugggauccug

SEQ ID NO: 56198 - RNA, 23 nt, Artificial Sequence
  Chemically synthesized
gaggaucaggaccaggauacuga

SEQ ID NO: 56199 - RNA, 23 nt, Artificial Sequence
  Chemically synthesized
aggaucaggaccaggauacugac

SEQ ID NO: 56200 - RNA, 23 nt, Artificial Sequence
  Chemically synthesized
ggaucaggaccaggauacugacg

SEQ ID NO: 56201 - RNA, 23 nt, Artificial Sequence
  Chemically synthesized
gaucaggaccaggauacugacgc

SEQ ID NO: 56202 - RNA, 23 nt, Artificial Sequence
  Chemically synthesized
aucaggaccaggauacugacgcc

SEQ ID NO: 56203 - RNA, 23 nt, Artificial Sequence
  Chemically synthesized
augcaacaaggucauucauuugg

SEQ ID NO: 56204 - RNA, 23 nt, Artificial Sequence
  Chemically synthesized
ugcaacaaggucauucauuugga

SEQ ID NO: 56205 - RNA, 23 nt, Artificial Sequence
  Chemically synthesized
gcaacaaggucauucauuuggaa

SEQ ID NO: 56206 - RNA, 23 nt, Artificial Sequence
  Chemically synthesized
caacaaggucauucauuuggaaa

SEQ ID NO: 56207 - RNA, 23 nt, Artificial Sequence
  Chemically synthesized
aacaaggucauucauuuggaaau

SEQ ID NO: 56208 - RNA, 23 nt, Artificial Sequence
  Chemically synthesized
cuggcauugaccuuauuguggag

SEQ ID NO: 56209 - RNA, 23 nt, Artificial Sequence
  Chemically synthesized
uugaccuuauuguggaggacccu

SEQ ID NO: 56210 - RNA, 23 nt, Artificial Sequence
  Chemically synthesized
cuugcaggaaaauugaauauucc

SEQ ID NO: 56211 - RNA, 23 nt, Artificial Sequence
  Chemically synthesized
uugcaggaaaauugaauauuccu

SEQ ID NO: 56212 - RNA, 23 nt, Artificial Sequence
  Chemically synthesized
ugcaggaaaauugaauauuccuu

SEQ ID NO: 56213 - RNA, 23 nt, Artificial Sequence
  Chemically synthesized
gcaggaaaauugaauauuccuuu

SEQ ID NO: 56214 - RNA, 23 nt, Artificial Sequence
  Chemically synthesized
caggaaaauugaauauuccuuuu

SEQ ID NO: 56215 - RNA, 23 nt, Artificial Sequence
  Chemically synthesized
auuucaguguacuugacgcaucg

SEQ ID NO: 56216 - RNA, 23 nt, Artificial Sequence
  Chemically synthesized
acugaaacaggguuguugcugca

SEQ ID NO: 56217 - RNA, 23 nt, Artificial Sequence
  Chemically synthesized
cugaaacaggguuguugcugcag

SEQ ID NO: 56218 - RNA, 23 nt, Artificial Sequence
  Chemically synthesized
ugaaacaggguuguugcugcagu

SEQ ID NO: 56219 - RNA, 23 nt, Artificial Sequence
  Chemically synthesized
gaaacaggguuguugcugcaguc

SEQ ID NO: 56220 - RNA, 23 nt, Artificial Sequence
  Chemically synthesized
aaacaggguuguugcugcagucc

SEQ ID NO: 56221 - RNA, 23 nt, Artificial Sequence
  Chemically synthesized
gcuccaaagaagaaucuuguugc

SEQ ID NO: 56222 - RNA, 23 nt, Artificial Sequence
  Chemically synthesized
cuccaaagaagaaucuuguugca

SEQ ID NO: 56223 - RNA, 23 nt, Artificial Sequence
  Chemically synthesized
uccaaagaagaaucuuguugcaa

SEQ ID NO: 56224 - RNA, 23 nt, Artificial Sequence
  Chemically synthesized
ccaaagaagaaucuuguugcaag

SEQ ID NO: 56225 - RNA, 23 nt, Artificial Sequence
  Chemically synthesized
caaagaagaaucuuguugcaagg

SEQ ID NO: 56226 - RNA, 23 nt, Artificial Sequence
  Chemically synthesized
cuucauuaguggcugauagucuu

SEQ ID NO: 56227 - RNA, 23 nt, Artificial Sequence
  Chemically synthesized
aguggcugauagucuucuucagu

SEQ ID NO: 56228 - RNA, 23 nt, Artificial Sequence
  Chemically synthesized
guggcugauagucuucuucagua

SEQ ID NO: 56229 - RNA, 23 nt, Artificial Sequence
  Chemically synthesized
ugacuaucuguaggaaggguaca

SEQ ID NO: 56230 - RNA, 23 nt, Artificial Sequence
  Chemically synthesized
gacuaucuguaggaaggguacaa

SEQ ID NO: 56231 - RNA, 23 nt, Artificial Sequence
  Chemically synthesized
augaauccucaggauuuuucaca

SEQ ID NO: 56232 - RNA, 23 nt, Artificial Sequence
  Chemically synthesized
ugaauccucaggauuuuucacac

SEQ ID NO: 56233 - RNA, 23 nt, Artificial Sequence
  Chemically synthesized
gaauccucaggauuuuucacaca

SEQ ID NO: 56234 - RNA, 23 nt, Artificial Sequence
  Chemically synthesized
uauggacuuccacacucccaaaa

SEQ ID NO: 56235 - RNA, 23 nt, Artificial Sequence
  Chemically synthesized
uggaccugugugaacugaugggc

SEQ ID NO: 56236 - RNA, 23 nt, Artificial Sequence
  Chemically synthesized
ggaccugugugaacugaugggcc

SEQ ID NO: 56237 - RNA, 23 nt, Artificial Sequence
  Chemically synthesized
gggccagaucuuuuauucugcuc

SEQ ID NO: 56238 - RNA, 23 nt, Artificial Sequence
  Chemically synthesized
ggccagaucuuuuauucugcucc

SEQ ID NO: 56239 - RNA, 23 nt, Artificial Sequence
  Chemically synthesized
cgccaagacagaguugggcucuc

SEQ ID NO: 56240 - RNA, 23 nt, Artificial Sequence
  Chemically synthesized
gccaagacagaguugggcucucc

SEQ ID NO: 56241 - RNA, 23 nt, Artificial Sequence
  Chemically synthesized
ccaagacagaguugggcucuccu

SEQ ID NO: 56242 - RNA, 23 nt, Artificial Sequence
  Chemically synthesized
caagacagaguugggcucuccua

SEQ ID NO: 56243 - RNA, 23 nt, Artificial Sequence
  Chemically synthesized
aagacagaguugggcucuccuag

SEQ ID NO: 56244 - RNA, 23 nt, Artificial Sequence
  Chemically synthesized
ugguguggugauuuuucaauaga

SEQ ID NO: 56245 - RNA, 23 nt, Artificial Sequence
  Chemically synthesized
gguguggugauuuuucaauagaa

SEQ ID NO: 56246 - RNA, 23 nt, Artificial Sequence
  Chemically synthesized
guguggugauuuuucaauagaaa

SEQ ID NO: 56247 - RNA, 23 nt, Artificial Sequence
  Chemically synthesized
uguggugauuuuucaauagaaag

SEQ ID NO: 56248 - RNA, 23 nt, Artificial Sequence
  Chemically synthesized
ggggaaaaaggcuuccgucucug

SEQ ID NO: 56249 - RNA, 23 nt, Artificial Sequence
  Chemically synthesized
gggaaaaaggcuuccgucucugg

SEQ ID NO: 56250 - RNA, 23 nt, Artificial Sequence
  Chemically synthesized
ggaaaaaggcuuccgucucuggc

SEQ ID NO: 56251 - RNA, 23 nt, Artificial Sequence
  Chemically synthesized
gaaaaaggcuuccgucucuggca

SEQ ID NO: 56252 - RNA, 23 nt, Artificial Sequence
  Chemically synthesized
aaaaaggcuuccgucucuggcau

SEQ ID NO: 56253 - RNA, 23 nt, Artificial Sequence
  Chemically synthesized
aaaaggcuuccgucucuggcauu

SEQ ID NO: 56254 - RNA, 23 nt, Artificial Sequence
  Chemically synthesized
gucuguagauauucuugcaggaa

SEQ ID NO: 56255 - RNA, 23 nt, Artificial Sequence
  Chemically synthesized
ucuguagauauucuugcaggaaa

SEQ ID NO: 56256 - RNA, 23 nt, Artificial Sequence
  Chemically synthesized
uccagcucuuuuauggugggauc

SEQ ID NO: 56257 - RNA, 23 nt, Artificial Sequence
  Chemically synthesized
uccuggcauaagucucuggaauc

SEQ ID NO: 56258 - RNA, 23 nt, Artificial Sequence
  Chemically synthesized
uuucaguguacuugacgcaucgc

SEQ ID NO: 56259 - RNA, 23 nt, Artificial Sequence
  Chemically synthesized
cuucuucaguaauguugcaagga

SEQ ID NO: 56260 - RNA, 23 nt, Artificial Sequence
  Chemically synthesized
uucuucaguaauguugcaaggau

SEQ ID NO: 56261 - RNA, 23 nt, Artificial Sequence
  Chemically synthesized
ugaccaugaaguuuaugguuuga

SEQ ID NO: 56262 - RNA, 23 nt, Artificial Sequence
  Chemically synthesized
uaugguuugacuaucuguaggaa

SEQ ID NO: 56263 - RNA, 23 nt, Artificial Sequence
  Chemically synthesized
augguuugacuaucuguaggaag

SEQ ID NO: 56264 - RNA, 23 nt, Artificial Sequence
  Chemically synthesized
acuaucuguaggaaggguacaaa

SEQ ID NO: 56265 - RNA, 23 nt, Artificial Sequence
  Chemically synthesized
cuaucuguaggaaggguacaaaa

SEQ ID NO: 56266 - RNA, 23 nt, Artificial Sequence
  Chemically synthesized
uaucuguaggaaggguacaaaaa

SEQ ID NO: 56267 - RNA, 23 nt, Artificial Sequence
  Chemically synthesized
aucuguaggaaggguacaaaaau

SEQ ID NO: 56268 - RNA, 23 nt, Artificial Sequence
  Chemically synthesized
ugaccuuauuguggaggacccuc

SEQ ID NO: 56269 - RNA, 23 nt, Artificial Sequence
  Chemically synthesized
agucauguaugaugacauaaacc

SEQ ID NO: 56270 - RNA, 23 nt, Artificial Sequence
  Chemically synthesized
aaacaaccacagcgacuggcuca

SEQ ID NO: 56271 - RNA, 23 nt, Artificial Sequence
  Chemically synthesized
cuguagauauucuugcaggaaaa

SEQ ID NO: 56272 - RNA, 23 nt, Artificial Sequence
  Chemically synthesized
gucucaucucaggaugaauuuca

SEQ ID NO: 56273 - RNA, 23 nt, Artificial Sequence
  Chemically synthesized
aagauuuuacugcgggauccauu

SEQ ID NO: 56274 - RNA, 23 nt, Artificial Sequence
  Chemically synthesized
uucaguguacuugacgcaucgcg

SEQ ID NO: 56275 - RNA, 23 nt, Artificial Sequence
  Chemically synthesized
ucaguguacuugacgcaucgcgc

SEQ ID NO: 56276 - RNA, 23 nt, Artificial Sequence
  Chemically synthesized
caguguacuugacgcaucgcgcc

SEQ ID NO: 56277 - RNA, 23 nt, Artificial Sequence
  Chemically synthesized
uccagaauacugaaacaggguug

SEQ ID NO: 56278 - RNA, 23 nt, Artificial Sequence
  Chemically synthesized
acuucauuaguggcugauagucu

SEQ ID NO: 56279 - RNA, 23 nt, Artificial Sequence
  Chemically synthesized
uggaaauguaaugcuuucugaaa

SEQ ID NO: 56280 - RNA, 23 nt, Artificial Sequence
  Chemically synthesized
ggaaauguaaugcuuucugaaaa

SEQ ID NO: 56281 - RNA, 23 nt, Artificial Sequence
  Chemically synthesized
gaaauguaaugcuuucugaaaaa

SEQ ID NO: 56282 - RNA, 23 nt, Artificial Sequence
  Chemically synthesized
uggggaaaaaggcuuccgucucu

SEQ ID NO: 56283 - RNA, 23 nt, Artificial Sequence
  Chemically synthesized
gucucuggcauugaccuuauugu

SEQ ID NO: 56284 - RNA, 23 nt, Artificial Sequence
  Chemically synthesized
ucucuggcauugaccuuauugug

SEQ ID NO: 56285 - RNA, 23 nt, Artificial Sequence
  Chemically synthesized
cucuggcauugaccuuauugugg

SEQ ID NO: 56286 - RNA, 23 nt, Artificial Sequence
  Chemically synthesized
ucuggcauugaccuuauugugga

SEQ ID NO: 56287 - RNA, 23 nt, Artificial Sequence
  Chemically synthesized
ccagcagguaugcugagucaugu

SEQ ID NO: 56288 - RNA, 23 nt, Artificial Sequence
  Chemically synthesized
cagcagguaugcugagucaugua

SEQ ID NO: 56289 - RNA, 23 nt, Artificial Sequence
  Chemically synthesized
agcagguaugcugagucauguau

SEQ ID NO: 56290 - RNA, 23 nt, Artificial Sequence
  Chemically synthesized
gcagguaugcugagucauguaug

SEQ ID NO: 56291 - RNA, 23 nt, Artificial Sequence
  Chemically synthesized
aggagcuaaaacaaccacagcga

SEQ ID NO: 56292 - RNA, 23 nt, Artificial Sequence
  Chemically synthesized
ggagcuaaaacaaccacagcgac

SEQ ID NO: 56293 - RNA, 23 nt, Artificial Sequence
  Chemically synthesized
gagcuaaaacaaccacagcgacu

SEQ ID NO: 56294 - RNA, 23 nt, Artificial Sequence
  Chemically synthesized
gaugaauccucaggauuuuucac

SEQ ID NO: 56295 - RNA, 23 nt, Artificial Sequence
  Chemically synthesized
aacaggguuguugcugcaguccu

SEQ ID NO: 56296 - RNA, 23 nt, Artificial Sequence
  Chemically synthesized
uggaaguguugaauucaccacac

SEQ ID NO: 56297 - RNA, 23 nt, Artificial Sequence
  Chemically synthesized
ggaaguguugaauucaccacacc

SEQ ID NO: 56298 - RNA, 23 nt, Artificial Sequence
  Chemically synthesized
gaaguguugaauucaccacacca

SEQ ID NO: 56299 - RNA, 23 nt, Artificial Sequence
  Chemically synthesized
aaguguugaauucaccacaccau

SEQ ID NO: 56300 - RNA, 23 nt, Artificial Sequence
  Chemically synthesized
ugcuccaaagaagaaucuuguug

SEQ ID NO: 56301 - RNA, 23 nt, Artificial Sequence
  Chemically synthesized
ugcaagguacggucugaguuccc

SEQ ID NO: 56302 - RNA, 23 nt, Artificial Sequence
  Chemically synthesized
gcaagguacggucugaguuccca

SEQ ID NO: 56303 - RNA, 23 nt, Artificial Sequence
  Chemically synthesized
caagguacggucugaguucccaa

SEQ ID NO: 56304 - RNA, 23 nt, Artificial Sequence
  Chemically synthesized
aagguacggucugaguucccaac

SEQ ID NO: 56305 - RNA, 23 nt, Artificial Sequence
  Chemically synthesized
aaaugcacccuugaaagcauccc

SEQ ID NO: 56306 - RNA, 23 nt, Artificial Sequence
  Chemically synthesized
ugccuguucuaauaagagagguu

SEQ ID NO: 56307 - RNA, 23 nt, Artificial Sequence
  Chemically synthesized
gccuguucuaauaagagagguuu

SEQ ID NO: 56308 - RNA, 23 nt, Artificial Sequence
  Chemically synthesized
ccuguucuaauaagagagguuug

SEQ ID NO: 56309 - RNA, 23 nt, Artificial Sequence
  Chemically synthesized
aggcuuccgucucuggcauugac

SEQ ID NO: 56310 - RNA, 23 nt, Artificial Sequence
  Chemically synthesized
ggcuuccgucucuggcauugacc

SEQ ID NO: 56311 - RNA, 23 nt, Artificial Sequence
  Chemically synthesized
gcuuccgucucuggcauugaccu

SEQ ID NO: 56312 - RNA, 23 nt, Artificial Sequence
  Chemically synthesized
cuuccgucucuggcauugaccuu

SEQ ID NO: 56313 - RNA, 23 nt, Artificial Sequence
  Chemically synthesized
uuccgucucuggcauugaccuua

SEQ ID NO: 56314 - RNA, 23 nt, Artificial Sequence
  Chemically synthesized
gcaccagcagguaugcugaguca

SEQ ID NO: 56315 - RNA, 23 nt, Artificial Sequence
  Chemically synthesized
caccagcagguaugcugagucau

SEQ ID NO: 56316 - RNA, 23 nt, Artificial Sequence
  Chemically synthesized
accagcagguaugcugagucaug

SEQ ID NO: 56317 - RNA, 23 nt, Artificial Sequence
  Chemically synthesized
ccagcucuuuuauggugggaucc

SEQ ID NO: 56318 - RNA, 23 nt, Artificial Sequence
  Chemically synthesized
cagcucuuuuauggugggauccu

SEQ ID NO: 56319 - RNA, 23 nt, Artificial Sequence
  Chemically synthesized
ugucugaaccuucucugguugca

SEQ ID NO: 56320 - RNA, 23 nt, Artificial Sequence
  Chemically synthesized
gucugaaccuucucugguugcaa

SEQ ID NO: 56321 - RNA, 23 nt, Artificial Sequence
  Chemically synthesized
ucugaaccuucucugguugcaaa

SEQ ID NO: 56322 - RNA, 23 nt, Artificial Sequence
  Chemically synthesized
cugaaccuucucugguugcaaau

SEQ ID NO: 56323 - RNA, 23 nt, Artificial Sequence
  Chemically synthesized
ugaaccuucucugguugcaaauu

SEQ ID NO: 56324 - RNA, 23 nt, Artificial Sequence
  Chemically synthesized
cuuccacacucccaaaagugcug

SEQ ID NO: 56325 - RNA, 23 nt, Artificial Sequence
  Chemically synthesized
uuccacacucccaaaagugcugu

SEQ ID NO: 56326 - RNA, 23 nt, Artificial Sequence
  Chemically synthesized
uccacacucccaaaagugcuguu

SEQ ID NO: 56327 - RNA, 23 nt, Artificial Sequence
  Chemically synthesized
ccacacucccaaaagugcuguuu

SEQ ID NO: 56328 - RNA, 23 nt, Artificial Sequence
  Chemically synthesized
cacacucccaaaagugcuguuuu

SEQ ID NO: 56329 - RNA, 23 nt, Artificial Sequence
  Chemically synthesized
gacgaggaucaggaccaggauac

SEQ ID NO: 56330 - RNA, 23 nt, Artificial Sequence
  Chemically synthesized
acgaggaucaggaccaggauacu

SEQ ID NO: 56331 - RNA, 23 nt, Artificial Sequence
  Chemically synthesized
cgaggaucaggaccaggauacug

SEQ ID NO: 56332 - RNA, 23 nt, Artificial Sequence
  Chemically synthesized
accaugugaggucaucagcaagg

SEQ ID NO: 56333 - RNA, 23 nt, Artificial Sequence
  Chemically synthesized
ccaugugaggucaucagcaaggu

SEQ ID NO: 56334 - RNA, 23 nt, Artificial Sequence
  Chemically synthesized
caugugaggucaucagcaaggua

SEQ ID NO: 56335 - RNA, 23 nt, Artificial Sequence
  Chemically synthesized
aggucaucagcaagguagccuag

SEQ ID NO: 56336 - RNA, 23 nt, Artificial Sequence
  Chemically synthesized
ggucaucagcaagguagccuagc

SEQ ID NO: 56337 - RNA, 23 nt, Artificial Sequence
  Chemically synthesized
gucaucagcaagguagccuagca

SEQ ID NO: 56338 - RNA, 23 nt, Artificial Sequence
  Chemically synthesized
agaugaauccucaggauuuuuca

SEQ ID NO: 56339 - RNA, 23 nt, Artificial Sequence
  Chemically synthesized
uuauggugggauccuggcauaag

SEQ ID NO: 56340 - RNA, 23 nt, Artificial Sequence
  Chemically synthesized
gugucugaaccuucucugguugc

SEQ ID NO: 56341 - RNA, 23 nt, Artificial Sequence
  Chemically synthesized
aguguugaauucaccacaccaug

SEQ ID NO: 56342 - RNA, 23 nt, Artificial Sequence
  Chemically synthesized
guguugaauucaccacaccaugu

SEQ ID NO: 56343 - RNA, 23 nt, Artificial Sequence
  Chemically synthesized
ucuuuuauucugcuccaaagaag

SEQ ID NO: 56344 - RNA, 23 nt, Artificial Sequence
  Chemically synthesized
cuuuuauucugcuccaaagaaga

SEQ ID NO: 56345 - RNA, 23 nt, Artificial Sequence
  Chemically synthesized
uuuuauucugcuccaaagaagaa

SEQ ID NO: 56346 - RNA, 23 nt, Artificial Sequence
  Chemically synthesized
uuuauucugcuccaaagaagaau

SEQ ID NO: 56347 - RNA, 23 nt, Artificial Sequence
  Chemically synthesized
uuauucugcuccaaagaagaauc

SEQ ID NO: 56348 - RNA, 23 nt, Artificial Sequence
  Chemically synthesized
ucuucaguaauguugcaaggaug

SEQ ID NO: 56349 - RNA, 23 nt, Artificial Sequence
  Chemically synthesized
uauuguggaggacccuccaaaau

SEQ ID NO: 56350 - RNA, 23 nt, Artificial Sequence
  Chemically synthesized
ggcucagaucucagaugugcaag

SEQ ID NO: 56351 - RNA, 23 nt, Artificial Sequence
  Chemically synthesized
gcucagaucucagaugugcaaga

SEQ ID NO: 56352 - RNA, 23 nt, Artificial Sequence
  Chemically synthesized
uguagauauucuugcaggaaaau

SEQ ID NO: 56353 - RNA, 23 nt, Artificial Sequence
  Chemically synthesized
uauggugggauccuggcauaagu

SEQ ID NO: 56354 - RNA, 23 nt, Artificial Sequence
  Chemically synthesized
gggauccauugagcaucacaugg

SEQ ID NO: 56355 - RNA, 23 nt, Artificial Sequence
  Chemically synthesized
ggauccauugagcaucacaugga

SEQ ID NO: 56356 - RNA, 23 nt, Artificial Sequence
  Chemically synthesized
gauccauugagcaucacauggac

SEQ ID NO: 56357 - RNA, 23 nt, Artificial Sequence
  Chemically synthesized
uuuuccagaauacugaaacaggg

SEQ ID NO: 56358 - RNA, 23 nt, Artificial Sequence
  Chemically synthesized
uuuccagaauacugaaacagggu

SEQ ID NO: 56359 - RNA, 23 nt, Artificial Sequence
  Chemically synthesized
uuccagaauacugaaacaggguu

SEQ ID NO: 56360 - RNA, 23 nt, Artificial Sequence
  Chemically synthesized
uccagucugggcaagauugauag

SEQ ID NO: 56361 - RNA, 23 nt, Artificial Sequence
  Chemically synthesized
ccagucugggcaagauugauagu

SEQ ID NO: 56362 - RNA, 23 nt, Artificial Sequence
  Chemically synthesized
cagucugggcaagauugauaguu

SEQ ID NO: 56363 - RNA, 23 nt, Artificial Sequence
  Chemically synthesized
agucugggcaagauugauaguuu

SEQ ID NO: 56364 - RNA, 23 nt, Artificial Sequence
  Chemically synthesized
gucugggcaagauugauaguuua

SEQ ID NO: 56365 - RNA, 23 nt, Artificial Sequence
  Chemically synthesized
uugaauucaccacaccaugugag

SEQ ID NO: 56366 - RNA, 23 nt, Artificial Sequence
  Chemically synthesized
ugaauucaccacaccaugugagg

SEQ ID NO: 56367 - RNA, 23 nt, Artificial Sequence
  Chemically synthesized
gaauucaccacaccaugugaggu

SEQ ID NO: 56368 - RNA, 23 nt, Artificial Sequence
  Chemically synthesized
aauucaccacaccaugugagguc

SEQ ID NO: 56369 - RNA, 23 nt, Artificial Sequence
  Chemically synthesized
auucaccacaccaugugagguca

SEQ ID NO: 56370 - RNA, 23 nt, Artificial Sequence
  Chemically synthesized
aaagaagaaucuuguugcaaggu

SEQ ID NO: 56371 - RNA, 23 nt, Artificial Sequence
  Chemically synthesized
agaagaaucuuguugcaagguac

SEQ ID NO: 56372 - RNA, 23 nt, Artificial Sequence
  Chemically synthesized
gaagaaucuuguugcaagguacg

SEQ ID NO: 56373 - RNA, 23 nt, Artificial Sequence
  Chemically synthesized
aagaaucuuguugcaagguacgg

SEQ ID NO: 56374 - RNA, 23 nt, Artificial Sequence
  Chemically synthesized
agaaucuuguugcaagguacggu

SEQ ID NO: 56375 - RNA, 23 nt, Artificial Sequence
  Chemically synthesized
gaaucuuguugcaagguacgguc

SEQ ID NO: 56376 - RNA, 23 nt, Artificial Sequence
  Chemically synthesized
cuucaguaauguugcaaggaugu

SEQ ID NO: 56377 - RNA, 23 nt, Artificial Sequence
  Chemically synthesized
uucaguaauguugcaaggauguu

SEQ ID NO: 56378 - RNA, 23 nt, Artificial Sequence
  Chemically synthesized
acacucccaaaagugcuguuuuu

SEQ ID NO: 56379 - RNA, 23 nt, Artificial Sequence
  Chemically synthesized
cucccaaaagugcuguuuuuguc

SEQ ID NO: 56380 - RNA, 23 nt, Artificial Sequence
  Chemically synthesized
aaccguuuuccagaauacugaaa

SEQ ID NO: 56381 - RNA, 23 nt, Artificial Sequence
  Chemically synthesized
accguuuuccagaauacugaaac

SEQ ID NO: 56382 - RNA, 23 nt, Artificial Sequence
  Chemically synthesized
ccguuuuccagaauacugaaaca

SEQ ID NO: 56383 - RNA, 23 nt, Artificial Sequence
  Chemically synthesized
cguuuuccagaauacugaaacag

SEQ ID NO: 56384 - RNA, 23 nt, Artificial Sequence
  Chemically synthesized
guuuuccagaauacugaaacagg

SEQ ID NO: 56385 - RNA, 23 nt, Artificial Sequence
  Chemically synthesized
uguugaauucaccacaccaugug

SEQ ID NO: 56386 - RNA, 23 nt, Artificial Sequence
  Chemically synthesized
guugaauucaccacaccauguga

SEQ ID NO: 56387 - RNA, 23 nt, Artificial Sequence
  Chemically synthesized
acaaggucauucauuuggaaaug

SEQ ID NO: 56388 - RNA, 23 nt, Artificial Sequence
  Chemically synthesized
uuuucuugacuauugauagauca

SEQ ID NO: 56389 - RNA, 23 nt, Artificial Sequence
  Chemically synthesized
uuucuugacuauugauagaucac

SEQ ID NO: 56390 - RNA, 23 nt, Artificial Sequence
  Chemically synthesized
uucuugacuauugauagaucaca

SEQ ID NO: 56391 - RNA, 23 nt, Artificial Sequence
  Chemically synthesized
ucuugacuauugauagaucacaa

SEQ ID NO: 56392 - RNA, 23 nt, Artificial Sequence
  Chemically synthesized
cuugacuauugauagaucacaau

SEQ ID NO: 56393 - RNA, 23 nt, Artificial Sequence
  Chemically synthesized
aggcuggcuggguucugaaacug

SEQ ID NO: 56394 - RNA, 23 nt, Artificial Sequence
  Chemically synthesized
ggcuggcuggguucugaaacugc

SEQ ID NO: 56395 - RNA, 23 nt, Artificial Sequence
  Chemically synthesized
gcuggcuggguucugaaacugca

SEQ ID NO: 56396 - RNA, 23 nt, Artificial Sequence
  Chemically synthesized
cuggcuggguucugaaacugcac

SEQ ID NO: 56397 - RNA, 23 nt, Artificial Sequence
  Chemically synthesized
uggcuggguucugaaacugcacc

SEQ ID NO: 56398 - RNA, 23 nt, Artificial Sequence
  Chemically synthesized
auggacuuccacacucccaaaag

SEQ ID NO: 56399 - RNA, 23 nt, Artificial Sequence
  Chemically synthesized
ggacuuccacacucccaaaagug

SEQ ID NO: 56400 - RNA, 23 nt, Artificial Sequence
  Chemically synthesized
gacuuccacacucccaaaagugc

SEQ ID NO: 56401 - RNA, 23 nt, Artificial Sequence
  Chemically synthesized
acuuccacacucccaaaagugcu

SEQ ID NO: 56402 - RNA, 23 nt, Artificial Sequence
  Chemically synthesized
ggguuguugcugcaguccuuucu

SEQ ID NO: 56403 - RNA, 23 nt, Artificial Sequence
  Chemically synthesized
gguuguugcugcaguccuuucuc

SEQ ID NO: 56404 - RNA, 23 nt, Artificial Sequence
  Chemically synthesized
uucaccacaccaugugaggucau

SEQ ID NO: 56405 - RNA, 23 nt, Artificial Sequence
  Chemically synthesized
ucaucagcaagguagccuagcag

SEQ ID NO: 56406 - RNA, 23 nt, Artificial Sequence
  Chemically synthesized
caucagcaagguagccuagcagc

SEQ ID NO: 56407 - RNA, 23 nt, Artificial Sequence
  Chemically synthesized
aucagcaagguagccuagcagcg

SEQ ID NO: 56408 - RNA, 23 nt, Artificial Sequence
  Chemically synthesized
uuuacccaugaccaugaaguuua

SEQ ID NO: 56409 - RNA, 23 nt, Artificial Sequence
  Chemically synthesized
uuacccaugaccaugaaguuuau

SEQ ID NO: 56410 - RNA, 23 nt, Artificial Sequence
  Chemically synthesized
uugacuauugauagaucacaaua

SEQ ID NO: 56411 - RNA, 23 nt, Artificial Sequence
  Chemically synthesized
ggcuggguucugaaacugcaccu

SEQ ID NO: 56412 - RNA, 23 nt, Artificial Sequence
  Chemically synthesized
gcuggguucugaaacugcaccuc

SEQ ID NO: 56413 - RNA, 23 nt, Artificial Sequence
  Chemically synthesized
aggguuguugcugcaguccuuuc

SEQ ID NO: 56414 - RNA, 23 nt, Artificial Sequence
  Chemically synthesized
ucaccacaccaugugaggucauc

SEQ ID NO: 56415 - RNA, 23 nt, Artificial Sequence
  Chemically synthesized
caccacaccaugugaggucauca

SEQ ID NO: 56416 - RNA, 23 nt, Artificial Sequence
  Chemically synthesized
accacaccaugugaggucaucag

SEQ ID NO: 56417 - RNA, 23 nt, Artificial Sequence
  Chemically synthesized
ccacaccaugugaggucaucagc

SEQ ID NO: 56418 - RNA, 23 nt, Artificial Sequence
  Chemically synthesized
cacaccaugugaggucaucagca

SEQ ID NO: 56419 - RNA, 23 nt, Artificial Sequence
  Chemically synthesized
acaccaugugaggucaucagcaa

SEQ ID NO: 56420 - RNA, 23 nt, Artificial Sequence
  Chemically synthesized
caccaugugaggucaucagcaag

SEQ ID NO: 56421 - RNA, 23 nt, Artificial Sequence
  Chemically synthesized
ugacuauugauagaucacaauaa

SEQ ID NO: 56422 - RNA, 23 nt, Artificial Sequence
  Chemically synthesized
aagaagaaucuuguugcaaggua

SEQ ID NO: 56423 - RNA, 23 nt, Artificial Sequence
  Chemically synthesized
caggauuuuucacacacugaaga

SEQ ID NO: 56424 - RNA, 23 nt, Artificial Sequence
  Chemically synthesized
aggauuuuucacacacugaagaa

SEQ ID NO: 56425 - RNA, 23 nt, Artificial Sequence
  Chemically synthesized
ggauuuuucacacacugaagaaa

SEQ ID NO: 56426 - RNA, 23 nt, Artificial Sequence
  Chemically synthesized
gauuuuucacacacugaagaaac

SEQ ID NO: 56427 - RNA, 23 nt, Artificial Sequence
  Chemically synthesized
auuuuucacacacugaagaaacu

SEQ ID NO: 56428 - RNA, 23 nt, Artificial Sequence
  Chemically synthesized
aagaugaauccucaggauuuuuc

SEQ ID NO: 56429 - RNA, 23 nt, Artificial Sequence
  Chemically synthesized
uuuuucacacacugaagaaacuu

SEQ ID NO: 56430 - RNA, 23 nt, Artificial Sequence
  Chemically synthesized
ccacaucacaggcagcuucugca

SEQ ID NO: 56431 - RNA, 23 nt, Artificial Sequence
  Chemically synthesized
cacaucacaggcagcuucugcaa

SEQ ID NO: 56432 - RNA, 23 nt, Artificial Sequence
  Chemically synthesized
acaucacaggcagcuucugcaaa

SEQ ID NO: 56433 - RNA, 23 nt, Artificial Sequence
  Chemically synthesized
caucacaggcagcuucugcaaac

SEQ ID NO: 56434 - RNA, 23 nt, Artificial Sequence
  Chemically synthesized
aucacaggcagcuucugcaaacc

SEQ ID NO: 56435 - RNA, 23 nt, Artificial Sequence
  Chemically synthesized
cucuggaaucuucucuuccacca

SEQ ID NO: 56436 - RNA, 23 nt, Artificial Sequence
  Chemically synthesized
ucuggaaucuucucuuccaccau

SEQ ID NO: 56437 - RNA, 23 nt, Artificial Sequence
  Chemically synthesized
cauggaccacaucacaggcagcu

SEQ ID NO: 56438 - RNA, 23 nt, Artificial Sequence
  Chemically synthesized
auggaccacaucacaggcagcuu

SEQ ID NO: 56439 - RNA, 23 nt, Artificial Sequence
  Chemically synthesized
caugagaauuaaagugaaguaac

SEQ ID NO: 56440 - RNA, 23 nt, Artificial Sequence
  Chemically synthesized
ucuugcaggaaaauugaauauuc

SEQ ID NO: 56441 - RNA, 23 nt, Artificial Sequence
  Chemically synthesized
gucaggucuguagauauucuugc

SEQ ID NO: 56442 - RNA, 23 nt, Artificial Sequence
  Chemically synthesized
cuugucaggucuguagauauucu

SEQ ID NO: 56443 - RNA, 23 nt, Artificial Sequence
  Chemically synthesized
ugucaggucuguagauauucuug

SEQ ID NO: 56444 - RNA, 23 nt, Artificial Sequence
  Chemically synthesized
auguaucacccaggccucuagug

SEQ ID NO: 56445 - RNA, 23 nt, Artificial Sequence
  Chemically synthesized
uaaagguaugcugaugauauaag

SEQ ID NO: 56446 - RNA, 23 nt, Artificial Sequence
  Chemically synthesized
caaggauguuuugaaauaaaugc

SEQ ID NO: 56447 - RNA, 23 nt, Artificial Sequence
  Chemically synthesized
auuaguggcugauagucuucuuc

SEQ ID NO: 56448 - RNA, 23 nt, Artificial Sequence
  Chemically synthesized
uuaguggcugauagucuucuuca

SEQ ID NO: 56449 - RNA, 23 nt, Artificial Sequence
  Chemically synthesized
acaaggagucaaggagcuaaaac

SEQ ID NO: 56450 - RNA, 23 nt, Artificial Sequence
  Chemically synthesized
aaaccugcgggaaaccguuuucc

SEQ ID NO: 56451 - RNA, 23 nt, Artificial Sequence
  Chemically synthesized
ugagcaucacauggaccacauca

SEQ ID NO: 56452 - RNA, 23 nt, Artificial Sequence
  Chemically synthesized
aagacagaguugggcucuccuag

SEQ ID NO: 56453 - RNA, 23 nt, Artificial Sequence
  Chemically synthesized
uuucaguguacuugacgcaucgc

SEQ ID NO: 56454 - RNA, 23 nt, Artificial Sequence
  Chemically synthesized
ucucaggaugaauuucaguguac

SEQ ID NO: 56455 - RNA, 23 nt, Artificial Sequence
  Chemically synthesized
auacugacgccaagacagaguug

SEQ ID NO: 56456 - RNA, 23 nt, Artificial Sequence
  Chemically synthesized
aaccugcgggaaaccguuuucca

SEQ ID NO: 56457 - RNA, 23 nt, Artificial Sequence
  Chemically synthesized
uuuuccagaauacugaaacaggg

SEQ ID NO: 56458 - RNA, 23 nt, Artificial Sequence
  Chemically synthesized
aucucaggaugaauuucagugua

SEQ ID NO: 56459 - RNA, 23 nt, Artificial Sequence
  Chemically synthesized
aaaugcacccuugaaagcauccc

SEQ ID NO: 56460 - RNA, 23 nt, Artificial Sequence
  Chemically synthesized
uacugacgccaagacagaguugg

SEQ ID NO: 56461 - RNA, 23 nt, Artificial Sequence
  Chemically synthesized
auugaccuuauuguggaggaccc

SEQ ID NO: 56462 - RNA, 23 nt, Artificial Sequence
  Chemically synthesized
aauacugaaacaggguuguugcu

SEQ ID NO: 56463 - RNA, 23 nt, Artificial Sequence
  Chemically synthesized
aaguuuaugguuugacuaucugu

SEQ ID NO: 56464 - RNA, 23 nt, Artificial Sequence
  Chemically synthesized
uuuaugguuugacuaucuguagg

SEQ ID NO: 56465 - RNA, 23 nt, Artificial Sequence
  Chemically synthesized
cuugcaggaaaauugaauauucc

SEQ ID NO: 56466 - RNA, 23 nt, Artificial Sequence
  Chemically synthesized
ugucucaucucaggaugaauuuc

SEQ ID NO: 56467 - RNA, 23 nt, Artificial Sequence
  Chemically synthesized
cucuggcauugaccuuauugugg

SEQ ID NO: 56468 - RNA, 23 nt, Artificial Sequence
  Chemically synthesized
uugcaggaaaauugaauauuccu

SEQ ID NO: 56469 - RNA, 23 nt, Artificial Sequence
  Chemically synthesized
uuuggcagucuacaugucucauc

SEQ ID NO: 56470 - RNA, 23 nt, Artificial Sequence
  Chemically synthesized
cuccaaagaagaaucuuguugca

SEQ ID NO: 56471 - RNA, 23 nt, Artificial Sequence
  Chemically synthesized
uucauuaguggcugauagucuuc

SEQ ID NO: 56472 - RNA, 23 nt, Artificial Sequence
  Chemically synthesized
guuuaugguuugacuaucuguag

SEQ ID NO: 56473 - RNA, 23 nt, Artificial Sequence
  Chemically synthesized
cauugaccuuauuguggaggacc

SEQ ID NO: 56474 - RNA, 23 nt, Artificial Sequence
  Chemically synthesized
uaugcugagucauguaugaugac

SEQ ID NO: 56475 - RNA, 23 nt, Artificial Sequence
  Chemically synthesized
uucaguguacuugacgcaucgcg

SEQ ID NO: 56476 - RNA, 23 nt, Artificial Sequence
  Chemically synthesized
ucauuaguggcugauagucuucu

SEQ ID NO: 56477 - RNA, 23 nt, Artificial Sequence
  Chemically synthesized
acccaugaccaugaaguuuaugg

SEQ ID NO: 56478 - RNA, 23 nt, Artificial Sequence
  Chemically synthesized
augaccaugaaguuuaugguuug

SEQ ID NO: 56479 - RNA, 23 nt, Artificial Sequence
  Chemically synthesized
uaaaccacaaggagucaaggagc

SEQ ID NO: 56480 - RNA, 23 nt, Artificial Sequence
  Chemically synthesized
agaauacugaaacaggguuguug

SEQ ID NO: 56481 - RNA, 23 nt, Artificial Sequence
  Chemically synthesized
auuucaguguacuugacgcaucg

SEQ ID NO: 56482 - RNA, 23 nt, Artificial Sequence
  Chemically synthesized
augguuugacuaucuguaggaag

SEQ ID NO: 56483 - RNA, 23 nt, Artificial Sequence
  Chemically synthesized
uugacuaucuguaggaaggguac

SEQ ID NO: 56484 - RNA, 23 nt, Artificial Sequence
  Chemically synthesized
gugauuuuucaauagaaaggaug

SEQ ID NO: 56485 - RNA, 23 nt, Artificial Sequence
  Chemically synthesized
cagguaugcugagucauguauga

SEQ ID NO: 56486 - RNA, 23 nt, Artificial Sequence
  Chemically synthesized
augcugagucauguaugaugaca

SEQ ID NO: 56487 - RNA, 23 nt, Artificial Sequence
  Chemically synthesized
caggucuguagauauucuugcag

SEQ ID NO: 56488 - RNA, 23 nt, Artificial Sequence
  Chemically synthesized
ucgauuccagcucuuuuauggug

SEQ ID NO: 56489 - RNA, 23 nt, Artificial Sequence
  Chemically synthesized
uuuuauucugcuccaaagaagaa

SEQ ID NO: 56490 - RNA, 23 nt, Artificial Sequence
  Chemically synthesized
aagaaucuuguugcaagguacgg

SEQ ID NO: 56491 - RNA, 23 nt, Artificial Sequence
  Chemically synthesized
uaucuguaggaaggguacaaaaa

SEQ ID NO: 56492 - RNA, 23 nt, Artificial Sequence
  Chemically synthesized
uuucuugacuauugauagaucac

SEQ ID NO: 56493 - RNA, 23 nt, Artificial Sequence
  Chemically synthesized
uucuugacuauugauagaucaca

SEQ ID NO: 56494 - RNA, 23 nt, Artificial Sequence
  Chemically synthesized
aaaggcuuccgucucuggcauug

SEQ ID NO: 56495 - RNA, 23 nt, Artificial Sequence
  Chemically synthesized
aggucuguagauauucuugcagg

SEQ ID NO: 56496 - RNA, 23 nt, Artificial Sequence
  Chemically synthesized
aaacaggguuguugcugcagucc

SEQ ID NO: 56497 - RNA, 23 nt, Artificial Sequence
  Chemically synthesized
gaaguuuaugguuugacuaucug

SEQ ID NO: 56498 - RNA, 23 nt, Artificial Sequence
  Chemically synthesized
agucauguaugaugacauaaacc

SEQ ID NO: 56499 - RNA, 23 nt, Artificial Sequence
  Chemically synthesized
uggugggauccuggcauaagucu

SEQ ID NO: 56500 - RNA, 23 nt, Artificial Sequence
  Chemically synthesized
ucacaggcagcuucugcaaaccu

SEQ ID NO: 56501 - RNA, 23 nt, Artificial Sequence
  Chemically synthesized
uggaaguguugaauucaccacac

SEQ ID NO: 56502 - RNA, 23 nt, Artificial Sequence
  Chemically synthesized
gaaguguugaauucaccacacca

SEQ ID NO: 56503 - RNA, 23 nt, Artificial Sequence
  Chemically synthesized
uuaugguuugacuaucuguagga

SEQ ID NO: 56504 - RNA, 23 nt, Artificial Sequence
  Chemically synthesized
augcaacaaggucauucauuugg

SEQ ID NO: 56505 - RNA, 23 nt, Artificial Sequence
  Chemically synthesized
gucauguaugaugacauaaacca

SEQ ID NO: 56506 - RNA, 23 nt, Artificial Sequence
  Chemically synthesized
aaacaaccacagcgacuggcuca

SEQ ID NO: 56507 - RNA, 23 nt, Artificial Sequence
  Chemically synthesized
gauuccagcucuuuuaugguggg

SEQ ID NO: 56508 - RNA, 23 nt, Artificial Sequence
  Chemically synthesized
auuccagcucuuuuaugguggga

SEQ ID NO: 56509 - RNA, 23 nt, Artificial Sequence
  Chemically synthesized
aucacaggcagcuucugcaaacc

SEQ ID NO: 56510 - RNA, 23 nt, Artificial Sequence
  Chemically synthesized
uacugaaacaggguuguugcugc

SEQ ID NO: 56511 - RNA, 23 nt, Artificial Sequence
  Chemically synthesized
uuuggaaguguugaauucaccac

SEQ ID NO: 56512 - RNA, 23 nt, Artificial Sequence
  Chemically synthesized
uugaauucaccacaccaugugag

SEQ ID NO: 56513 - RNA, 23 nt, Artificial Sequence
  Chemically synthesized
uacggucugaguucccaacuuca

SEQ ID NO: 56514 - RNA, 23 nt, Artificial Sequence
  Chemically synthesized
uaguggcugauagucuucuucag

SEQ ID NO: 56515 - RNA, 23 nt, Artificial Sequence
  Chemically synthesized
cauguaugaugacauaaaccaca

SEQ ID NO: 56516 - RNA, 23 nt, Artificial Sequence
  Chemically synthesized
gaauccucaggauuuuucacaca

SEQ ID NO: 56517 - RNA, 23 nt, Artificial Sequence
  Chemically synthesized
gaauacugaaacaggguuguugc

SEQ ID NO: 56518 - RNA, 23 nt, Artificial Sequence
  Chemically synthesized
auacugaaacaggguuguugcug

SEQ ID NO: 56519 - RNA, 23 nt, Artificial Sequence
  Chemically synthesized
gugugaacugaugggccagaucu

SEQ ID NO: 56520 - RNA, 23 nt, Artificial Sequence
  Chemically synthesized
ugcuccaaagaagaaucuuguug

SEQ ID NO: 56521 - RNA, 23 nt, Artificial Sequence
  Chemically synthesized
ugaccaugaaguuuaugguuuga

SEQ ID NO: 56522 - RNA, 23 nt, Artificial Sequence
  Chemically synthesized
ugguuugacuaucuguaggaagg

SEQ ID NO: 56523 - RNA, 23 nt, Artificial Sequence
  Chemically synthesized
uggcauugaccuuauuguggagg

SEQ ID NO: 56524 - RNA, 23 nt, Artificial Sequence
  Chemically synthesized
guggaggacccuccaaaaucuuc

SEQ ID NO: 56525 - RNA, 23 nt, Artificial Sequence
  Chemically synthesized
augacauaaaccacaaggaguca

SEQ ID NO: 56526 - RNA, 23 nt, Artificial Sequence
  Chemically synthesized
cagcucuuuuauggugggauccu

SEQ ID NO: 56527 - RNA, 23 nt, Artificial Sequence
  Chemically synthesized
uuuauggugggauccuggcauaa

SEQ ID NO: 56528 - RNA, 23 nt, Artificial Sequence
  Chemically synthesized
uuauggugggauccuggcauaag

SEQ ID NO: 56529 - RNA, 23 nt, Artificial Sequence
  Chemically synthesized
auggugggauccuggcauaaguc

SEQ ID NO: 56530 - RNA, 23 nt, Artificial Sequence
  Chemically synthesized
gcaagauugauaguuuauuuugg

SEQ ID NO: 56531 - RNA, 23 nt, Artificial Sequence
  Chemically synthesized
guguugaauucaccacaccaugu

SEQ ID NO: 56532 - RNA, 23 nt, Artificial Sequence
  Chemically synthesized
gaauucaccacaccaugugaggu

SEQ ID NO: 56533 - RNA, 23 nt, Artificial Sequence
  Chemically synthesized
auucaccacaccaugugagguca

SEQ ID NO: 56534 - RNA, 23 nt, Artificial Sequence
  Chemically synthesized
caugaccaugaaguuuaugguuu

SEQ ID NO: 56535 - RNA, 23 nt, Artificial Sequence
  Chemically synthesized
uaugguuugacuaucuguaggaa

SEQ ID NO: 56536 - RNA, 23 nt, Artificial Sequence
  Chemically synthesized
guuugacuaucuguaggaagggu

SEQ ID NO: 56537 - RNA, 23 nt, Artificial Sequence
  Chemically synthesized
guggugauuuuucaauagaaagg

SEQ ID NO: 56538 - RNA, 23 nt, Artificial Sequence
  Chemically synthesized
uguaucacccaggccucuagugu

SEQ ID NO: 56539 - RNA, 23 nt, Artificial Sequence
  Chemically synthesized
gcaacaaccucaaaaucaaucaa

SEQ ID NO: 56540 - RNA, 23 nt, Artificial Sequence
  Chemically synthesized
agcaacaaccucaaaaucaauca

SEQ ID NO: 56541 - RNA, 23 nt, Artificial Sequence
  Chemically synthesized
cagcaacaaccucaaaaucaauc

SEQ ID NO: 56542 - RNA, 23 nt, Artificial Sequence
  Chemically synthesized
ucagcaacaaccucaaaaucaau

SEQ ID NO: 56543 - RNA, 23 nt, Artificial Sequence
  Chemically synthesized
aucagcaacaaccucaaaaucaa

SEQ ID NO: 56544 - RNA, 23 nt, Artificial Sequence
  Chemically synthesized
gcauagaugaucgaaaauuacgg

SEQ ID NO: 56545 - RNA, 23 nt, Artificial Sequence
  Chemically synthesized
ugcauagaugaucgaaaauuacg

SEQ ID NO: 56546 - RNA, 23 nt, Artificial Sequence
  Chemically synthesized
augcauagaugaucgaaaauuac

SEQ ID NO: 56547 - RNA, 23 nt, Artificial Sequence
  Chemically synthesized
aaugcauagaugaucgaaaauua

SEQ ID NO: 56548 - RNA, 23 nt, Artificial Sequence
  Chemically synthesized
caaugcauagaugaucgaaaauu

SEQ ID NO: 56549 - RNA, 23 nt, Artificial Sequence
  Chemically synthesized
gcaaaauccaauagaaguauugc

SEQ ID NO: 56550 - RNA, 23 nt, Artificial Sequence
  Chemically synthesized
ugcaaaauccaauagaaguauug

SEQ ID NO: 56551 - RNA, 23 nt, Artificial Sequence
  Chemically synthesized
uugcaaaauccaauagaaguauu

SEQ ID NO: 56552 - RNA, 23 nt, Artificial Sequence
  Chemically synthesized
cuugcaaaauccaauagaaguau

SEQ ID NO: 56553 - RNA, 23 nt, Artificial Sequence
  Chemically synthesized
ucuugcaaaauccaauagaagua

SEQ ID NO: 56554 - RNA, 23 nt, Artificial Sequence
  Chemically synthesized
ggauauuguucguaaucuuggac

SEQ ID NO: 56555 - RNA, 23 nt, Artificial Sequence
  Chemically synthesized
uggauauuguucguaaucuugga

SEQ ID NO: 56556 - RNA, 23 nt, Artificial Sequence
  Chemically synthesized
auggauauuguucguaaucuugg

SEQ ID NO: 56557 - RNA, 23 nt, Artificial Sequence
  Chemically synthesized
gauggauauuguucguaaucuug

SEQ ID NO: 56558 - RNA, 23 nt, Artificial Sequence
  Chemically synthesized
ugauggauauuguucguaaucuu

SEQ ID NO: 56559 - RNA, 23 nt, Artificial Sequence
  Chemically synthesized
ccauuucuaaagugaccuuauca

SEQ ID NO: 56560 - RNA, 23 nt, Artificial Sequence
  Chemically synthesized
gccauuucuaaagugaccuuauc

SEQ ID NO: 56561 - RNA, 23 nt, Artificial Sequence
  Chemically synthesized
agccauuucuaaagugaccuuau

SEQ ID NO: 56562 - RNA, 23 nt, Artificial Sequence
  Chemically synthesized
aagccauuucuaaagugaccuua

SEQ ID NO: 56563 - RNA, 23 nt, Artificial Sequence
  Chemically synthesized
caagccauuucuaaagugaccuu

SEQ ID NO: 56564 - RNA, 23 nt, Artificial Sequence
  Chemically synthesized
ccauuguagauugucuuuuuuau

SEQ ID NO: 56565 - RNA, 23 nt, Artificial Sequence
  Chemically synthesized
accauuguagauugucuuuuuua

SEQ ID NO: 56566 - RNA, 23 nt, Artificial Sequence
  Chemically synthesized
caccauuguagauugucuuuuuu

SEQ ID NO: 56567 - RNA, 23 nt, Artificial Sequence
  Chemically synthesized
gcaccauuguagauugucuuuuu

SEQ ID NO: 56568 - RNA, 23 nt, Artificial Sequence
  Chemically synthesized
cgcaccauuguagauugucuuuu

SEQ ID NO: 56569 - RNA, 23 nt, Artificial Sequence
  Chemically synthesized
ccuuauuaaacauguagacuaua

SEQ ID NO: 56570 - RNA, 23 nt, Artificial Sequence
  Chemically synthesized
uccuuauuaaacauguagacuau

SEQ ID NO: 56571 - RNA, 23 nt, Artificial Sequence
  Chemically synthesized
uuccuuauuaaacauguagacua

SEQ ID NO: 56572 - RNA, 23 nt, Artificial Sequence
  Chemically synthesized
uuuccuuauuaaacauguagacu

SEQ ID NO: 56573 - RNA, 23 nt, Artificial Sequence
  Chemically synthesized
cuuuccuuauuaaacauguagac

SEQ ID NO: 56574 - RNA, 23 nt, Artificial Sequence
  Chemically synthesized
gcagaagucuugagcuauucaga

SEQ ID NO: 56575 - RNA, 23 nt, Artificial Sequence
  Chemically synthesized
ugcagaagucuugagcuauucag

SEQ ID NO: 56576 - RNA, 23 nt, Artificial Sequence
  Chemically synthesized
gugcagaagucuugagcuauuca

SEQ ID NO: 56577 - RNA, 23 nt, Artificial Sequence
  Chemically synthesized
ggugcagaagucuugagcuauuc

SEQ ID NO: 56578 - RNA, 23 nt, Artificial Sequence
  Chemically synthesized
uggugcagaagucuugagcuauu

SEQ ID NO: 56579 - RNA, 23 nt, Artificial Sequence
  Chemically synthesized
ccacugauaaaggcuuuauuagg

SEQ ID NO: 56580 - RNA, 23 nt, Artificial Sequence
  Chemically synthesized
accacugauaaaggcuuuauuag

SEQ ID NO: 56581 - RNA, 23 nt, Artificial Sequence
  Chemically synthesized
gaccacugauaaaggcuuuauua

SEQ ID NO: 56582 - RNA, 23 nt, Artificial Sequence
  Chemically synthesized
ugaccacugauaaaggcuuuauu

SEQ ID NO: 56583 - RNA, 23 nt, Artificial Sequence
  Chemically synthesized
gugaccacugauaaaggcuuuau

SEQ ID NO: 56584 - RNA, 23 nt, Artificial Sequence
  Chemically synthesized
cccaggcaauacucaagaaggag

SEQ ID NO: 56585 - RNA, 23 nt, Artificial Sequence
  Chemically synthesized
acccaggcaauacucaagaagga

SEQ ID NO: 56586 - RNA, 23 nt, Artificial Sequence
  Chemically synthesized
uacccaggcaauacucaagaagg

SEQ ID NO: 56587 - RNA, 23 nt, Artificial Sequence
  Chemically synthesized
uuacccaggcaauacucaagaag

SEQ ID NO: 56588 - RNA, 23 nt, Artificial Sequence
  Chemically synthesized
guuacccaggcaauacucaagaa

SEQ ID NO: 56589 - RNA, 23 nt, Artificial Sequence
  Chemically synthesized
gcguuuauuuauaacugguugca

SEQ ID NO: 56590 - RNA, 23 nt, Artificial Sequence
  Chemically synthesized
ugcguuuauuuauaacugguugc

SEQ ID NO: 56591 - RNA, 23 nt, Artificial Sequence
  Chemically synthesized
uugcguuuauuuauaacugguug

SEQ ID NO: 56592 - RNA, 23 nt, Artificial Sequence
  Chemically synthesized
uuugcguuuauuuauaacugguu

SEQ ID NO: 56593 - RNA, 23 nt, Artificial Sequence
  Chemically synthesized
auuugcguuuauuuauaacuggu

SEQ ID NO: 56594 - RNA, 23 nt, Artificial Sequence
  Chemically synthesized
gccaagccauuucuaaagugacc

SEQ ID NO: 56595 - RNA, 23 nt, Artificial Sequence
  Chemically synthesized
ugccaagccauuucuaaagugac

SEQ ID NO: 56596 - RNA, 23 nt, Artificial Sequence
  Chemically synthesized
uugccaagccauuucuaaaguga

SEQ ID NO: 56597 - RNA, 23 nt, Artificial Sequence
  Chemically synthesized
guugccaagccauuucuaaagug

SEQ ID NO: 56598 - RNA, 23 nt, Artificial Sequence
  Chemically synthesized
uguugccaagccauuucuaaagu

SEQ ID NO: 56599 - RNA, 23 nt, Artificial Sequence
  Chemically synthesized
caacaauccaggauauuuuucua

SEQ ID NO: 56600 - RNA, 23 nt, Artificial Sequence
  Chemically synthesized
ucaacaauccaggauauuuuucu

SEQ ID NO: 56601 - RNA, 23 nt, Artificial Sequence
  Chemically synthesized
aucaacaauccaggauauuuuuc

SEQ ID NO: 56602 - RNA, 23 nt, Artificial Sequence
  Chemically synthesized
caucaacaauccaggauauuuuu

SEQ ID NO: 56603 - RNA, 23 nt, Artificial Sequence
  Chemically synthesized
acaucaacaauccaggauauuuu

SEQ ID NO: 56604 - RNA, 23 nt, Artificial Sequence
  Chemically synthesized
aacaucaacaauccaggauauuu

SEQ ID NO: 56605 - RNA, 23 nt, Artificial Sequence
  Chemically synthesized
caacaucaacaauccaggauauu

SEQ ID NO: 56606 - RNA, 23 nt, Artificial Sequence
  Chemically synthesized
acaacaucaacaauccaggauau

SEQ ID NO: 56607 - RNA, 23 nt, Artificial Sequence
  Chemically synthesized
aacaacaucaacaauccaggaua

SEQ ID NO: 56608 - RNA, 23 nt, Artificial Sequence
  Chemically synthesized
gcaucauaaucauagcaauccac

SEQ ID NO: 56609 - RNA, 23 nt, Artificial Sequence
  Chemically synthesized
ggcaucauaaucauagcaaucca

SEQ ID NO: 56610 - RNA, 23 nt, Artificial Sequence
  Chemically synthesized
uggcaucauaaucauagcaaucc

SEQ ID NO: 56611 - RNA, 23 nt, Artificial Sequence
  Chemically synthesized
cuggcaucauaaucauagcaauc

SEQ ID NO: 56612 - RNA, 23 nt, Artificial Sequence
  Chemically synthesized
ucuggcaucauaaucauagcaau

SEQ ID NO: 56613 - RNA, 23 nt, Artificial Sequence
  Chemically synthesized
gcacugaguuuggcauuuuucug

SEQ ID NO: 56614 - RNA, 23 nt, Artificial Sequence
  Chemically synthesized
ggcacugaguuuggcauuuuucu

SEQ ID NO: 56615 - RNA, 23 nt, Artificial Sequence
  Chemically synthesized
aggcacugaguuuggcauuuuuc

SEQ ID NO: 56616 - RNA, 23 nt, Artificial Sequence
  Chemically synthesized
aaggcacugaguuuggcauuuuu

SEQ ID NO: 56617 - RNA, 23 nt, Artificial Sequence
  Chemically synthesized
aaaggcacugaguuuggcauuuu

SEQ ID NO: 56618 - RNA, 23 nt, Artificial Sequence
  Chemically synthesized
ccuuccuucauguccucuacaca

SEQ ID NO: 56619 - RNA, 23 nt, Artificial Sequence
  Chemically synthesized
gccuuccuucauguccucuacac

SEQ ID NO: 56620 - RNA, 23 nt, Artificial Sequence
  Chemically synthesized
ugccuuccuucauguccucuaca

SEQ ID NO: 56621 - RNA, 23 nt, Artificial Sequence
  Chemically synthesized
uugccuuccuucauguccucuac

SEQ ID NO: 56622 - RNA, 23 nt, Artificial Sequence
  Chemically synthesized
uuugccuuccuucauguccucua

SEQ ID NO: 56623 - RNA, 23 nt, Artificial Sequence
  Chemically synthesized
cccuuauguuuaugaaaagaaag

SEQ ID NO: 56624 - RNA, 23 nt, Artificial Sequence
  Chemically synthesized
acccuuauguuuaugaaaagaaa

SEQ ID NO: 56625 - RNA, 23 nt, Artificial Sequence
  Chemically synthesized
uacccuuauguuuaugaaaagaa

SEQ ID NO: 56626 - RNA, 23 nt, Artificial Sequence
  Chemically synthesized
cuacccuuauguuuaugaaaaga

SEQ ID NO: 56627 - RNA, 23 nt, Artificial Sequence
  Chemically synthesized
ucuacccuuauguuuaugaaaag

SEQ ID NO: 56628 - RNA, 23 nt, Artificial Sequence
  Chemically synthesized
caaaccucuuuccuuauuaaaca

SEQ ID NO: 56629 - RNA, 23 nt, Artificial Sequence
  Chemically synthesized
ucaaaccucuuuccuuauuaaac

SEQ ID NO: 56630 - RNA, 23 nt, Artificial Sequence
  Chemically synthesized
uucaaaccucuuuccuuauuaaa

SEQ ID NO: 56631 - RNA, 23 nt, Artificial Sequence
  Chemically synthesized
uuucaaaccucuuuccuuauuaa

SEQ ID NO: 56632 - RNA, 23 nt, Artificial Sequence
  Chemically synthesized
uuuucaaaccucuuuccuuauua

SEQ ID NO: 56633 - RNA, 23 nt, Artificial Sequence
  Chemically synthesized
gucuggcaucauaaucauagcaa

SEQ ID NO: 56634 - RNA, 23 nt, Artificial Sequence
  Chemically synthesized
ccaggcaauacucaagaaggaga

SEQ ID NO: 56635 - RNA, 23 nt, Artificial Sequence
  Chemically synthesized
gcaagagacuguauguauuuuug

SEQ ID NO: 56636 - RNA, 23 nt, Artificial Sequence
  Chemically synthesized
agcaagagacuguauguauuuuu

SEQ ID NO: 56637 - RNA, 23 nt, Artificial Sequence
  Chemically synthesized
aagcaagagacuguauguauuuu

SEQ ID NO: 56638 - RNA, 23 nt, Artificial Sequence
  Chemically synthesized
aaagcaagagacuguauguauuu

SEQ ID NO: 56639 - RNA, 23 nt, Artificial Sequence
  Chemically synthesized
aaaagcaagagacuguauguauu

SEQ ID NO: 56640 - RNA, 23 nt, Artificial Sequence
  Chemically synthesized
aucuacccuuauguuuaugaaaa

SEQ ID NO: 56641 - RNA, 23 nt, Artificial Sequence
  Chemically synthesized
aaucuacccuuauguuuaugaaa

SEQ ID NO: 56642 - RNA, 23 nt, Artificial Sequence
  Chemically synthesized
uaaucuacccuuauguuuaugaa

SEQ ID NO: 56643 - RNA, 23 nt, Artificial Sequence
  Chemically synthesized
cagaaucuaaugcagaguaccuu

SEQ ID NO: 56644 - RNA, 23 nt, Artificial Sequence
  Chemically synthesized
ccagaaucuaaugcagaguaccu

SEQ ID NO: 56645 - RNA, 23 nt, Artificial Sequence
  Chemically synthesized
uccagaaucuaaugcagaguacc

SEQ ID NO: 56646 - RNA, 23 nt, Artificial Sequence
  Chemically synthesized
auccagaaucuaaugcagaguac

SEQ ID NO: 56647 - RNA, 23 nt, Artificial Sequence
  Chemically synthesized
uauccagaaucuaaugcagagua

SEQ ID NO: 56648 - RNA, 23 nt, Artificial Sequence
  Chemically synthesized
auauccagaaucuaaugcagagu

SEQ ID NO: 56649 - RNA, 23 nt, Artificial Sequence
  Chemically synthesized
caaccucaaaaucaaucaauauc

SEQ ID NO: 56650 - RNA, 23 nt, Artificial Sequence
  Chemically synthesized
acaaccucaaaaucaaucaauau

SEQ ID NO: 56651 - RNA, 23 nt, Artificial Sequence
  Chemically synthesized
aacaaccucaaaaucaaucaaua

SEQ ID NO: 56652 - RNA, 23 nt, Artificial Sequence
  Chemically synthesized
caacaaccucaaaaucaaucaau

SEQ ID NO: 56653 - RNA, 23 nt, Artificial Sequence
  Chemically synthesized
ggaugauggcuuuuauaaaugug

SEQ ID NO: 56654 - RNA, 23 nt, Artificial Sequence
  Chemically synthesized
gggaugauggcuuuuauaaaugu

SEQ ID NO: 56655 - RNA, 23 nt, Artificial Sequence
  Chemically synthesized
agggaugauggcuuuuauaaaug

SEQ ID NO: 56656 - RNA, 23 nt, Artificial Sequence
  Chemically synthesized
aagggaugauggcuuuuauaaau

SEQ ID NO: 56657 - RNA, 23 nt, Artificial Sequence
  Chemically synthesized
uaagggaugauggcuuuuauaaa

SEQ ID NO: 56658 - RNA, 23 nt, Artificial Sequence
  Chemically synthesized
gaacuguauuccuuuuaacagau

SEQ ID NO: 56659 - RNA, 23 nt, Artificial Sequence
  Chemically synthesized
cgaacuguauuccuuuuaacaga

SEQ ID NO: 56660 - RNA, 23 nt, Artificial Sequence
  Chemically synthesized
gcgaacuguauuccuuuuaacag

SEQ ID NO: 56661 - RNA, 23 nt, Artificial Sequence
  Chemically synthesized
ggcgaacuguauuccuuuuaaca

SEQ ID NO: 56662 - RNA, 23 nt, Artificial Sequence
  Chemically synthesized
gggcgaacuguauuccuuuuaac

SEQ ID NO: 56663 - RNA, 23 nt, Artificial Sequence
  Chemically synthesized
ccaguuuacuuaagguagaaaga

SEQ ID NO: 56664 - RNA, 23 nt, Artificial Sequence
  Chemically synthesized
uccaguuuacuuaagguagaaag

SEQ ID NO: 56665 - RNA, 23 nt, Artificial Sequence
  Chemically synthesized
cuccaguuuacuuaagguagaaa

SEQ ID NO: 56666 - RNA, 23 nt, Artificial Sequence
  Chemically synthesized
ccuccaguuuacuuaagguagaa

SEQ ID NO: 56667 - RNA, 23 nt, Artificial Sequence
  Chemically synthesized
uccuccaguuuacuuaagguaga

SEQ ID NO: 56668 - RNA, 23 nt, Artificial Sequence
  Chemically synthesized
ccauauuaacacagcugacuccu

SEQ ID NO: 56669 - RNA, 23 nt, Artificial Sequence
  Chemically synthesized
accauauuaacacagcugacucc

SEQ ID NO: 56670 - RNA, 23 nt, Artificial Sequence
  Chemically synthesized
gaccauauuaacacagcugacuc

SEQ ID NO: 56671 - RNA, 23 nt, Artificial Sequence
  Chemically synthesized
ugaccauauuaacacagcugacu

SEQ ID NO: 56672 - RNA, 23 nt, Artificial Sequence
  Chemically synthesized
uugaccauauuaacacagcugac

SEQ ID NO: 56673 - RNA, 23 nt, Artificial Sequence
  Chemically synthesized
ugguagacaucagcaacaaccuc

SEQ ID NO: 56674 - RNA, 23 nt, Artificial Sequence
  Chemically synthesized
uugguagacaucagcaacaaccu

SEQ ID NO: 56675 - RNA, 23 nt, Artificial Sequence
  Chemically synthesized
auugguagacaucagcaacaacc

SEQ ID NO: 56676 - RNA, 23 nt, Artificial Sequence
  Chemically synthesized
uauugguagacaucagcaacaac

SEQ ID NO: 56677 - RNA, 23 nt, Artificial Sequence
  Chemically synthesized
auauugguagacaucagcaacaa

SEQ ID NO: 56678 - RNA, 23 nt, Artificial Sequence
  Chemically synthesized
ccaugcucuuuuuguuaaagaag

SEQ ID NO: 56679 - RNA, 23 nt, Artificial Sequence
  Chemically synthesized
accaugcucuuuuuguuaaagaa

SEQ ID NO: 56680 - RNA, 23 nt, Artificial Sequence
  Chemically synthesized
aaccaugcucuuuuuguuaaaga

SEQ ID NO: 56681 - RNA, 23 nt, Artificial Sequence
  Chemically synthesized
uaaccaugcucuuuuuguuaaag

SEQ ID NO: 56682 - RNA, 23 nt, Artificial Sequence
  Chemically synthesized
uuaaccaugcucuuuuuguuaaa

SEQ ID NO: 56683 - RNA, 23 nt, Artificial Sequence
  Chemically synthesized
ggauacugcucuuuuacuugagc

SEQ ID NO: 56684 - RNA, 23 nt, Artificial Sequence
  Chemically synthesized
uggauacugcucuuuuacuugag

SEQ ID NO: 56685 - RNA, 23 nt, Artificial Sequence
  Chemically synthesized
cuggauacugcucuuuuacuuga

SEQ ID NO: 56686 - RNA, 23 nt, Artificial Sequence
  Chemically synthesized
gcuggauacugcucuuuuacuug

SEQ ID NO: 56687 - RNA, 23 nt, Artificial Sequence
  Chemically synthesized
ggcuggauacugcucuuuuacuu

SEQ ID NO: 56688 - RNA, 23 nt, Artificial Sequence
  Chemically synthesized
ucgcaccauuguagauugucuuu

SEQ ID NO: 56689 - RNA, 23 nt, Artificial Sequence
  Chemically synthesized
aucgcaccauuguagauugucuu

SEQ ID NO: 56690 - RNA, 23 nt, Artificial Sequence
  Chemically synthesized
caucgcaccauuguagauugucu

SEQ ID NO: 56691 - RNA, 23 nt, Artificial Sequence
  Chemically synthesized
uuuuucaaaccucuuuccuuauu

SEQ ID NO: 56692 - RNA, 23 nt, Artificial Sequence
  Chemically synthesized
ccagaauuuuagacagcaagcua

SEQ ID NO: 56693 - RNA, 23 nt, Artificial Sequence
  Chemically synthesized
accagaauuuuagacagcaagcu

SEQ ID NO: 56694 - RNA, 23 nt, Artificial Sequence
  Chemically synthesized
aaccagaauuuuagacagcaagc

SEQ ID NO: 56695 - RNA, 23 nt, Artificial Sequence
  Chemically synthesized
aaaccagaauuuuagacagcaag

SEQ ID NO: 56696 - RNA, 23 nt, Artificial Sequence
  Chemically synthesized
gaaaccagaauuuuagacagcaa

SEQ ID NO: 56697 - RNA, 23 nt, Artificial Sequence
  Chemically synthesized
gcauguaauucuuccucuauaaa

SEQ ID NO: 56698 - RNA, 23 nt, Artificial Sequence
  Chemically synthesized
ggcauguaauucuuccucuauaa

SEQ ID NO: 56699 - RNA, 23 nt, Artificial Sequence
  Chemically synthesized
uggcauguaauucuuccucuaua

SEQ ID NO: 56700 - RNA, 23 nt, Artificial Sequence
  Chemically synthesized
cuggcauguaauucuuccucuau

SEQ ID NO: 56701 - RNA, 23 nt, Artificial Sequence
  Chemically synthesized
gcuggcauguaauucuuccucua

SEQ ID NO: 56702 - RNA, 23 nt, Artificial Sequence
  Chemically synthesized
ggcuuuauuagguauaucugagg

SEQ ID NO: 56703 - RNA, 23 nt, Artificial Sequence
  Chemically synthesized
aggcuuuauuagguauaucugag

SEQ ID NO: 56704 - RNA, 23 nt, Artificial Sequence
  Chemically synthesized
aaggcuuuauuagguauaucuga

SEQ ID NO: 56705 - RNA, 23 nt, Artificial Sequence
  Chemically synthesized
aaaggcuuuauuagguauaucug

SEQ ID NO: 56706 - RNA, 23 nt, Artificial Sequence
  Chemically synthesized
uaaaggcuuuauuagguauaucu

SEQ ID NO: 56707 - RNA, 23 nt, Artificial Sequence
  Chemically synthesized
cacugauaaaggcuuuauuaggu

SEQ ID NO: 56708 - RNA, 23 nt, Artificial Sequence
  Chemically synthesized
acauuucguauggcuauuuccau

SEQ ID NO: 56709 - RNA, 23 nt, Artificial Sequence
  Chemically synthesized
uacauuucguauggcuauuucca

SEQ ID NO: 56710 - RNA, 23 nt, Artificial Sequence
  Chemically synthesized
auacauuucguauggcuauuucc

SEQ ID NO: 56711 - RNA, 23 nt, Artificial Sequence
  Chemically synthesized
aauacauuucguauggcuauuuc

SEQ ID NO: 56712 - RNA, 23 nt, Artificial Sequence
  Chemically synthesized
uaauacauuucguauggcuauuu

SEQ ID NO: 56713 - RNA, 23 nt, Artificial Sequence
  Chemically synthesized
ucaccuauguuaugcaaaacagu

SEQ ID NO: 56714 - RNA, 23 nt, Artificial Sequence
  Chemically synthesized
cucaccuauguuaugcaaaacag

SEQ ID NO: 56715 - RNA, 23 nt, Artificial Sequence
  Chemically synthesized
acucaccuauguuaugcaaaaca

SEQ ID NO: 56716 - RNA, 23 nt, Artificial Sequence
  Chemically synthesized
uacucaccuauguuaugcaaaac

SEQ ID NO: 56717 - RNA, 23 nt, Artificial Sequence
  Chemically synthesized
cuacucaccuauguuaugcaaaa

SEQ ID NO: 56718 - RNA, 23 nt, Artificial Sequence
  Chemically synthesized
ucacuacucaccuauguuaugca

SEQ ID NO: 56719 - RNA, 23 nt, Artificial Sequence
  Chemically synthesized
gucacuacucaccuauguuaugc

SEQ ID NO: 56720 - RNA, 23 nt, Artificial Sequence
  Chemically synthesized
ugucacuacucaccuauguuaug

SEQ ID NO: 56721 - RNA, 23 nt, Artificial Sequence
  Chemically synthesized
augucacuacucaccuauguuau

SEQ ID NO: 56722 - RNA, 23 nt, Artificial Sequence
  Chemically synthesized
aaugucacuacucaccuauguua

SEQ ID NO: 56723 - RNA, 23 nt, Artificial Sequence
  Chemically synthesized
ggaugguucucacuguuuuucug

SEQ ID NO: 56724 - RNA, 23 nt, Artificial Sequence
  Chemically synthesized
aggaugguucucacuguuuuucu

SEQ ID NO: 56725 - RNA, 23 nt, Artificial Sequence
  Chemically synthesized
uaggaugguucucacuguuuuuc

SEQ ID NO: 56726 - RNA, 23 nt, Artificial Sequence
  Chemically synthesized
uuaggaugguucucacuguuuuu

SEQ ID NO: 56727 - RNA, 23 nt, Artificial Sequence
  Chemically synthesized
uuuaggaugguucucacuguuuu

SEQ ID NO: 56728 - RNA, 23 nt, Artificial Sequence
  Chemically synthesized
gcacuauauuagguuaaguauua

SEQ ID NO: 56729 - RNA, 23 nt, Artificial Sequence
  Chemically synthesized
ugcacuauauuagguuaaguauu

SEQ ID NO: 56730 - RNA, 23 nt, Artificial Sequence
  Chemically synthesized
uugcacuauauuagguuaaguau

SEQ ID NO: 56731 - RNA, 23 nt, Artificial Sequence
  Chemically synthesized
auugcacuauauuagguuaagua

SEQ ID NO: 56732 - RNA, 23 nt, Artificial Sequence
  Chemically synthesized
aauugcacuauauuagguuaagu

SEQ ID NO: 56733 - RNA, 23 nt, Artificial Sequence
  Chemically synthesized
ccaugaugaauucuagugaaaug

SEQ ID NO: 56734 - RNA, 23 nt, Artificial Sequence
  Chemically synthesized
accaugaugaauucuagugaaau

SEQ ID NO: 56735 - RNA, 23 nt, Artificial Sequence
  Chemically synthesized
uaccaugaugaauucuagugaaa

SEQ ID NO: 56736 - RNA, 23 nt, Artificial Sequence
  Chemically synthesized
uuaccaugaugaauucuagugaa

SEQ ID NO: 56737 - RNA, 23 nt, Artificial Sequence
  Chemically synthesized
auuaccaugaugaauucuaguga

SEQ ID NO: 56738 - RNA, 23 nt, Artificial Sequence
  Chemically synthesized
gaaugagguuuuuguuguuuuuu

SEQ ID NO: 56739 - RNA, 23 nt, Artificial Sequence
  Chemically synthesized
ggaaugagguuuuuguuguuuuu

SEQ ID NO: 56740 - RNA, 23 nt, Artificial Sequence
  Chemically synthesized
gggaaugagguuuuuguuguuuu

SEQ ID NO: 56741 - RNA, 23 nt, Artificial Sequence
  Chemically synthesized
agggaaugagguuuuuguuguuu

SEQ ID NO: 56742 - RNA, 23 nt, Artificial Sequence
  Chemically synthesized
aagggaaugagguuuuuguuguu

SEQ ID NO: 56743 - RNA, 23 nt, Artificial Sequence
  Chemically synthesized
aaagggaaugagguuuuuguugu

SEQ ID NO: 56744 - RNA, 23 nt, Artificial Sequence
  Chemically synthesized
ggagaaaacuuguauagaugcac

SEQ ID NO: 56745 - RNA, 23 nt, Artificial Sequence
  Chemically synthesized
uggagaaaacuuguauagaugca

SEQ ID NO: 56746 - RNA, 23 nt, Artificial Sequence
  Chemically synthesized
auggagaaaacuuguauagaugc

SEQ ID NO: 56747 - RNA, 23 nt, Artificial Sequence
  Chemically synthesized
uauggagaaaacuuguauagaug

SEQ ID NO: 56748 - RNA, 23 nt, Artificial Sequence
  Chemically synthesized
uuauggagaaaacuuguauagau

SEQ ID NO: 56749 - RNA, 23 nt, Artificial Sequence
  Chemically synthesized
ggaacucaaaacacuagaaaaag

SEQ ID NO: 56750 - RNA, 23 nt, Artificial Sequence
  Chemically synthesized
aggaacucaaaacacuagaaaaa

SEQ ID NO: 56751 - RNA, 23 nt, Artificial Sequence
  Chemically synthesized
aaggaacucaaaacacuagaaaa

SEQ ID NO: 56752 - RNA, 23 nt, Artificial Sequence
  Chemically synthesized
aaaggaacucaaaacacuagaaa

SEQ ID NO: 56753 - RNA, 23 nt, Artificial Sequence
  Chemically synthesized
gaaaggaacucaaaacacuagaa

SEQ ID NO: 56754 - RNA, 23 nt, Artificial Sequence
  Chemically synthesized
gcacugugcuggugaucaaguuu

SEQ ID NO: 56755 - RNA, 23 nt, Artificial Sequence
  Chemically synthesized
ugcacugugcuggugaucaaguu

SEQ ID NO: 56756 - RNA, 23 nt, Artificial Sequence
  Chemically synthesized
uugcacugugcuggugaucaagu

SEQ ID NO: 56757 - RNA, 23 nt, Artificial Sequence
  Chemically synthesized
cuugcacugugcuggugaucaag

SEQ ID NO: 56758 - RNA, 23 nt, Artificial Sequence
  Chemically synthesized
ccuugcacugugcuggugaucaa

SEQ ID NO: 56759 - RNA, 23 nt, Artificial Sequence
  Chemically synthesized
ggcuuaucauuccuugcacugug

SEQ ID NO: 56760 - RNA, 23 nt, Artificial Sequence
  Chemically synthesized
gggcuuaucauuccuugcacugu

SEQ ID NO: 56761 - RNA, 23 nt, Artificial Sequence
  Chemically synthesized
agggcuuaucauuccuugcacug

SEQ ID NO: 56762 - RNA, 23 nt, Artificial Sequence
  Chemically synthesized
uagggcuuaucauuccuugcacu

SEQ ID NO: 56763 - RNA, 23 nt, Artificial Sequence
  Chemically synthesized
uuagggcuuaucauuccuugcac

SEQ ID NO: 56764 - RNA, 23 nt, Artificial Sequence
  Chemically synthesized
guuagggcuuaucauuccuugca

SEQ ID NO: 56765 - RNA, 23 nt, Artificial Sequence
  Chemically synthesized
ccaaaucguaucuuuccaauaac

SEQ ID NO: 56766 - RNA, 23 nt, Artificial Sequence
  Chemically synthesized
uccaaaucguaucuuuccaauaa

SEQ ID NO: 56767 - RNA, 23 nt, Artificial Sequence
  Chemically synthesized
uuccaaaucguaucuuuccaaua

SEQ ID NO: 56768 - RNA, 23 nt, Artificial Sequence
  Chemically synthesized
auuccaaaucguaucuuuccaau

SEQ ID NO: 56769 - RNA, 23 nt, Artificial Sequence
  Chemically synthesized
cauuccaaaucguaucuuuccaa

SEQ ID NO: 56770 - RNA, 23 nt, Artificial Sequence
  Chemically synthesized
cugugugucuucuuguuuuucua

SEQ ID NO: 56771 - RNA, 23 nt, Artificial Sequence
  Chemically synthesized
gcugugugucuucuuguuuuucu

SEQ ID NO: 56772 - RNA, 23 nt, Artificial Sequence
  Chemically synthesized
ugcugugugucuucuuguuuuuc

SEQ ID NO: 56773 - RNA, 23 nt, Artificial Sequence
  Chemically synthesized
gugcugugugucuucuuguuuuu

SEQ ID NO: 56774 - RNA, 23 nt, Artificial Sequence
  Chemically synthesized
ugugcugugugucuucuuguuuu

SEQ ID NO: 56775 - RNA, 23 nt, Artificial Sequence
  Chemically synthesized
cugcagcuauuuccaauguggag

SEQ ID NO: 56776 - RNA, 23 nt, Artificial Sequence
  Chemically synthesized
ccugcagcuauuuccaaugugga

SEQ ID NO: 56777 - RNA, 23 nt, Artificial Sequence
  Chemically synthesized
cccugcagcuauuuccaaugugg

SEQ ID NO: 56778 - RNA, 23 nt, Artificial Sequence
  Chemically synthesized
ccccugcagcuauuuccaaugug

SEQ ID NO: 56779 - RNA, 23 nt, Artificial Sequence
  Chemically synthesized
cccccugcagcuauuuccaaugu

SEQ ID NO: 56780 - RNA, 23 nt, Artificial Sequence
  Chemically synthesized
agaaucuaaugcagaguaccuug

SEQ ID NO: 56781 - RNA, 23 nt, Artificial Sequence
  Chemically synthesized
uuaagggaugauggcuuuuauaa

SEQ ID NO: 56782 - RNA, 23 nt, Artificial Sequence
  Chemically synthesized
ugaugguuuuggcauaauagcug

SEQ ID NO: 56783 - RNA, 23 nt, Artificial Sequence
  Chemically synthesized
cugaugguuuuggcauaauagcu

SEQ ID NO: 56784 - RNA, 23 nt, Artificial Sequence
  Chemically synthesized
ucugaugguuuuggcauaauagc

SEQ ID NO: 56785 - RNA, 23 nt, Artificial Sequence
  Chemically synthesized
cucugaugguuuuggcauaauag

SEQ ID NO: 56786 - RNA, 23 nt, Artificial Sequence
  Chemically synthesized
acucugaugguuuuggcauaaua

SEQ ID NO: 56787 - RNA, 23 nt, Artificial Sequence
  Chemically synthesized
gccuaguaaaaaugcucuaccug

SEQ ID NO: 56788 - RNA, 23 nt, Artificial Sequence
  Chemically synthesized
agccuaguaaaaaugcucuaccu

SEQ ID NO: 56789 - RNA, 23 nt, Artificial Sequence
  Chemically synthesized
uagccuaguaaaaaugcucuacc

SEQ ID NO: 56790 - RNA, 23 nt, Artificial Sequence
  Chemically synthesized
auagccuaguaaaaaugcucuac

SEQ ID NO: 56791 - RNA, 23 nt, Artificial Sequence
  Chemically synthesized
uauagccuaguaaaaaugcucua

SEQ ID NO: 56792 - RNA, 23 nt, Artificial Sequence
  Chemically synthesized
agagaagucuuuggaguuaacca

SEQ ID NO: 56793 - RNA, 23 nt, Artificial Sequence
  Chemically synthesized
uagagaagucuuuggaguuaacc

SEQ ID NO: 56794 - RNA, 23 nt, Artificial Sequence
  Chemically synthesized
cuagagaagucuuuggaguuaac

SEQ ID NO: 56795 - RNA, 23 nt, Artificial Sequence
  Chemically synthesized
ucuagagaagucuuuggaguuaa

SEQ ID NO: 56796 - RNA, 23 nt, Artificial Sequence
  Chemically synthesized
gucuagagaagucuuuggaguua

SEQ ID NO: 56797 - RNA, 23 nt, Artificial Sequence
  Chemically synthesized
ccaagccauuucuaaagugaccu

SEQ ID NO: 56798 - RNA, 23 nt, Artificial Sequence
  Chemically synthesized
gcauuuuucaaaccucuuuccuu

SEQ ID NO: 56799 - RNA, 23 nt, Artificial Sequence
  Chemically synthesized
ggcauuuuucaaaccucuuuccu

SEQ ID NO: 56800 - RNA, 23 nt, Artificial Sequence
  Chemically synthesized
aggcauuuuucaaaccucuuucc

SEQ ID NO: 56801 - RNA, 23 nt, Artificial Sequence
  Chemically synthesized
uaggcauuuuucaaaccucuuuc

SEQ ID NO: 56802 - RNA, 23 nt, Artificial Sequence
  Chemically synthesized
auaggcauuuuucaaaccucuuu

SEQ ID NO: 56803 - RNA, 23 nt, Artificial Sequence
  Chemically synthesized
cacugaguuuggcauuuuucugc

SEQ ID NO: 56804 - RNA, 23 nt, Artificial Sequence
  Chemically synthesized
caaaauaacuaaaaggcacugag

SEQ ID NO: 56805 - RNA, 23 nt, Artificial Sequence
  Chemically synthesized
ucaaaauaacuaaaaggcacuga

SEQ ID NO: 56806 - RNA, 23 nt, Artificial Sequence
  Chemically synthesized
aucaaaauaacuaaaaggcacug

SEQ ID NO: 56807 - RNA, 23 nt, Artificial Sequence
  Chemically synthesized
uaucaaaauaacuaaaaggcacu

SEQ ID NO: 56808 - RNA, 23 nt, Artificial Sequence
  Chemically synthesized
auaucaaaauaacuaaaaggcac

SEQ ID NO: 56809 - RNA, 23 nt, Artificial Sequence
  Chemically synthesized
agcuucuauaucugucuuagucu

SEQ ID NO: 56810 - RNA, 23 nt, Artificial Sequence
  Chemically synthesized
uagcuucuauaucugucuuaguc

SEQ ID NO: 56811 - RNA, 23 nt, Artificial Sequence
  Chemically synthesized
guagcuucuauaucugucuuagu

SEQ ID NO: 56812 - RNA, 23 nt, Artificial Sequence
  Chemically synthesized
aguagcuucuauaucugucuuag

SEQ ID NO: 56813 - RNA, 23 nt, Artificial Sequence
  Chemically synthesized
aaguagcuucuauaucugucuua

SEQ ID NO: 56814 - RNA, 23 nt, Artificial Sequence
  Chemically synthesized
aggguugauaaaaguucuugauc

SEQ ID NO: 56815 - RNA, 23 nt, Artificial Sequence
  Chemically synthesized
aaggguugauaaaaguucuugau

SEQ ID NO: 56816 - RNA, 23 nt, Artificial Sequence
  Chemically synthesized
gaaggguugauaaaaguucuuga

SEQ ID NO: 56817 - RNA, 23 nt, Artificial Sequence
  Chemically synthesized
agaaggguugauaaaaguucuug

SEQ ID NO: 56818 - RNA, 23 nt, Artificial Sequence
  Chemically synthesized
aagaaggguugauaaaaguucuu

SEQ ID NO: 56819 - RNA, 23 nt, Artificial Sequence
  Chemically synthesized
ugaauaaaaauggagggauaucc

SEQ ID NO: 56820 - RNA, 23 nt, Artificial Sequence
  Chemically synthesized
cugaauaaaaauggagggauauc

SEQ ID NO: 56821 - RNA, 23 nt, Artificial Sequence
  Chemically synthesized
acugaauaaaaauggagggauau

SEQ ID NO: 56822 - RNA, 23 nt, Artificial Sequence
  Chemically synthesized
gacugaauaaaaauggagggaua

SEQ ID NO: 56823 - RNA, 23 nt, Artificial Sequence
  Chemically synthesized
agacugaauaaaaauggagggau

SEQ ID NO: 56824 - RNA, 23 nt, Artificial Sequence
  Chemically synthesized
gagcuggcauguaauucuuccuc

SEQ ID NO: 56825 - RNA, 23 nt, Artificial Sequence
  Chemically synthesized
agagcuggcauguaauucuuccu

SEQ ID NO: 56826 - RNA, 23 nt, Artificial Sequence
  Chemically synthesized
uagagcuggcauguaauucuucc

SEQ ID NO: 56827 - RNA, 23 nt, Artificial Sequence
  Chemically synthesized
auagagcuggcauguaauucuuc

SEQ ID NO: 56828 - RNA, 23 nt, Artificial Sequence
  Chemically synthesized
uauagagcuggcauguaauucuu

SEQ ID NO: 56829 - RNA, 23 nt, Artificial Sequence
  Chemically synthesized
cuauagagcuggcauguaauucu

SEQ ID NO: 56830 - RNA, 23 nt, Artificial Sequence
  Chemically synthesized
ucuauagagcuggcauguaauuc

SEQ ID NO: 56831 - RNA, 23 nt, Artificial Sequence
  Chemically synthesized
aucuauagagcuggcauguaauu

SEQ ID NO: 56832 - RNA, 23 nt, Artificial Sequence
  Chemically synthesized
uaucuauagagcuggcauguaau

SEQ ID NO: 56833 - RNA, 23 nt, Artificial Sequence
  Chemically synthesized
guaucuauagagcuggcauguaa

SEQ ID NO: 56834 - RNA, 23 nt, Artificial Sequence
  Chemically synthesized
ccuaaugucuugcaaaauccaau

SEQ ID NO: 56835 - RNA, 23 nt, Artificial Sequence
  Chemically synthesized
accuaaugucuugcaaaauccaa

SEQ ID NO: 56836 - RNA, 23 nt, Artificial Sequence
  Chemically synthesized
gaccuaaugucuugcaaaaucca

SEQ ID NO: 56837 - RNA, 23 nt, Artificial Sequence
  Chemically synthesized
ugaccuaaugucuugcaaaaucc

SEQ ID NO: 56838 - RNA, 23 nt, Artificial Sequence
  Chemically synthesized
augaccuaaugucuugcaaaauc

SEQ ID NO: 56839 - RNA, 23 nt, Artificial Sequence
  Chemically synthesized
ggugaucaaguuuguccuaauca

SEQ ID NO: 56840 - RNA, 23 nt, Artificial Sequence
  Chemically synthesized
uggugaucaaguuuguccuaauc

SEQ ID NO: 56841 - RNA, 23 nt, Artificial Sequence
  Chemically synthesized
cuggugaucaaguuuguccuaau

SEQ ID NO: 56842 - RNA, 23 nt, Artificial Sequence
  Chemically synthesized
gcuggugaucaaguuuguccuaa

SEQ ID NO: 56843 - RNA, 23 nt, Artificial Sequence
  Chemically synthesized
ugcuggugaucaaguuuguccua

SEQ ID NO: 56844 - RNA, 23 nt, Artificial Sequence
  Chemically synthesized
ggcucagugauucauauguggcu

SEQ ID NO: 56845 - RNA, 23 nt, Artificial Sequence
  Chemically synthesized
uggcucagugauucauauguggc

SEQ ID NO: 56846 - RNA, 23 nt, Artificial Sequence
  Chemically synthesized
cuggcucagugauucauaugugg

SEQ ID NO: 56847 - RNA, 23 nt, Artificial Sequence
  Chemically synthesized
ccuggcucagugauucauaugug

SEQ ID NO: 56848 - RNA, 23 nt, Artificial Sequence
  Chemically synthesized
gccuggcucagugauucauaugu

SEQ ID NO: 56849 - RNA, 23 nt, Artificial Sequence
  Chemically synthesized
aggcaauacucaagaaggagaau

SEQ ID NO: 56850 - RNA, 23 nt, Artificial Sequence
  Chemically synthesized
caggcaauacucaagaaggagaa

SEQ ID NO: 56851 - RNA, 23 nt, Artificial Sequence
  Chemically synthesized
gugauuccuauucgauauuaugu

SEQ ID NO: 56852 - RNA, 23 nt, Artificial Sequence
  Chemically synthesized
ugugauuccuauucgauauuaug

SEQ ID NO: 56853 - RNA, 23 nt, Artificial Sequence
  Chemically synthesized
uugugauuccuauucgauauuau

SEQ ID NO: 56854 - RNA, 23 nt, Artificial Sequence
  Chemically synthesized
cuugugauuccuauucgauauua

SEQ ID NO: 56855 - RNA, 23 nt, Artificial Sequence
  Chemically synthesized
acuugugauuccuauucgauauu

SEQ ID NO: 56856 - RNA, 23 nt, Artificial Sequence
  Chemically synthesized
ugcagcuauuuccaauguggagg

SEQ ID NO: 56857 - RNA, 23 nt, Artificial Sequence
  Chemically synthesized
ccucuuacuaugaauucuucaga

SEQ ID NO: 56858 - RNA, 23 nt, Artificial Sequence
  Chemically synthesized
uccucuuacuaugaauucuucag

SEQ ID NO: 56859 - RNA, 23 nt, Artificial Sequence
  Chemically synthesized
uuccucuuacuaugaauucuuca

SEQ ID NO: 56860 - RNA, 23 nt, Artificial Sequence
  Chemically synthesized
cuuccucuuacuaugaauucuuc

SEQ ID NO: 56861 - RNA, 23 nt, Artificial Sequence
  Chemically synthesized
acuuccucuuacuaugaauucuu

SEQ ID NO: 56862 - RNA, 23 nt, Artificial Sequence
  Chemically synthesized
gugauggauauuguucguaaucu

SEQ ID NO: 56863 - RNA, 23 nt, Artificial Sequence
  Chemically synthesized
agugauggauauuguucguaauc

SEQ ID NO: 56864 - RNA, 23 nt, Artificial Sequence
  Chemically synthesized
gagugauggauauuguucguaau

SEQ ID NO: 56865 - RNA, 23 nt, Artificial Sequence
  Chemically synthesized
agagugauggauauuguucguaa

SEQ ID NO: 56866 - RNA, 23 nt, Artificial Sequence
  Chemically synthesized
caaucaauauccagaaucuaaug

SEQ ID NO: 56867 - RNA, 23 nt, Artificial Sequence
  Chemically synthesized
ucaaucaauauccagaaucuaau

SEQ ID NO: 56868 - RNA, 23 nt, Artificial Sequence
  Chemically synthesized
aucaaucaauauccagaaucuaa

SEQ ID NO: 56869 - RNA, 23 nt, Artificial Sequence
  Chemically synthesized
aaucaaucaauauccagaaucua

SEQ ID NO: 56870 - RNA, 23 nt, Artificial Sequence
  Chemically synthesized
aaaucaaucaauauccagaaucu

SEQ ID NO: 56871 - RNA, 23 nt, Artificial Sequence
  Chemically synthesized
gaaugaguuuacaacagaugaaa

SEQ ID NO: 56872 - RNA, 23 nt, Artificial Sequence
  Chemically synthesized
agaaugaguuuacaacagaugaa

SEQ ID NO: 56873 - RNA, 23 nt, Artificial Sequence
  Chemically synthesized
aagaaugaguuuacaacagauga

SEQ ID NO: 56874 - RNA, 23 nt, Artificial Sequence
  Chemically synthesized
aaagaaugaguuuacaacagaug

SEQ ID NO: 56875 - RNA, 23 nt, Artificial Sequence
  Chemically synthesized
gaaagaaugaguuuacaacagau

SEQ ID NO: 56876 - RNA, 23 nt, Artificial Sequence
  Chemically synthesized
caguuuacuuaagguagaaagaa

SEQ ID NO: 56877 - RNA, 23 nt, Artificial Sequence
  Chemically synthesized
ggaaaaauauugguagacaucag

SEQ ID NO: 56878 - RNA, 23 nt, Artificial Sequence
  Chemically synthesized
uggaaaaauauugguagacauca

SEQ ID NO: 56879 - RNA, 23 nt, Artificial Sequence
  Chemically synthesized
auggaaaaauauugguagacauc

SEQ ID NO: 56880 - RNA, 23 nt, Artificial Sequence
  Chemically synthesized
aauggaaaaauauugguagacau

SEQ ID NO: 56881 - RNA, 23 nt, Artificial Sequence
  Chemically synthesized
caauggaaaaauauugguagaca

SEQ ID NO: 56882 - RNA, 23 nt, Artificial Sequence
  Chemically synthesized
gcugaccuauagaaaaaaaugaa

SEQ ID NO: 56883 - RNA, 23 nt, Artificial Sequence
  Chemically synthesized
ugcugaccuauagaaaaaaauga

SEQ ID NO: 56884 - RNA, 23 nt, Artificial Sequence
  Chemically synthesized
augcugaccuauagaaaaaaaug

SEQ ID NO: 56885 - RNA, 23 nt, Artificial Sequence
  Chemically synthesized
aaugcugaccuauagaaaaaaau

SEQ ID NO: 56886 - RNA, 23 nt, Artificial Sequence
  Chemically synthesized
aaaugcugaccuauagaaaaaaa

SEQ ID NO: 56887 - RNA, 23 nt, Artificial Sequence
  Chemically synthesized
cgaaaauagaaaaugccauccau

SEQ ID NO: 56888 - RNA, 23 nt, Artificial Sequence
  Chemically synthesized
ccgaaaauagaaaaugccaucca

SEQ ID NO: 56889 - RNA, 23 nt, Artificial Sequence
  Chemically synthesized
accgaaaauagaaaaugccaucc

SEQ ID NO: 56890 - RNA, 23 nt, Artificial Sequence
  Chemically synthesized
caccgaaaauagaaaaugccauc

SEQ ID NO: 56891 - RNA, 23 nt, Artificial Sequence
  Chemically synthesized
ucaccgaaaauagaaaaugccau

SEQ ID NO: 56892 - RNA, 23 nt, Artificial Sequence
  Chemically synthesized
gagaagucuuuggaguuaaccau

SEQ ID NO: 56893 - RNA, 23 nt, Artificial Sequence
  Chemically synthesized
acaaaaaguuggacgacauugag

SEQ ID NO: 56894 - RNA, 23 nt, Artificial Sequence
  Chemically synthesized
uacaaaaaguuggacgacauuga

SEQ ID NO: 56895 - RNA, 23 nt, Artificial Sequence
  Chemically synthesized
auacaaaaaguuggacgacauug

SEQ ID NO: 56896 - RNA, 23 nt, Artificial Sequence
  Chemically synthesized
gauacaaaaaguuggacgacauu

SEQ ID NO: 56897 - RNA, 23 nt, Artificial Sequence
  Chemically synthesized
ggauacaaaaaguuggacgacau

SEQ ID NO: 56898 - RNA, 23 nt, Artificial Sequence
  Chemically synthesized
auguugccaagccauuucuaaag

SEQ ID NO: 56899 - RNA, 23 nt, Artificial Sequence
  Chemically synthesized
aaacaacaucaacaauccaggau

SEQ ID NO: 56900 - RNA, 23 nt, Artificial Sequence
  Chemically synthesized
cccacauaucaaaauaacuaaaa

SEQ ID NO: 56901 - RNA, 23 nt, Artificial Sequence
  Chemically synthesized
ucccacauaucaaaauaacuaaa

SEQ ID NO: 56902 - RNA, 23 nt, Artificial Sequence
  Chemically synthesized
uucccacauaucaaaauaacuaa

SEQ ID NO: 56903 - RNA, 23 nt, Artificial Sequence
  Chemically synthesized
cuucccacauaucaaaauaacua

SEQ ID NO: 56904 - RNA, 23 nt, Artificial Sequence
  Chemically synthesized
ucuucccacauaucaaaauaacu

SEQ ID NO: 56905 - RNA, 23 nt, Artificial Sequence
  Chemically synthesized
aucuucccacauaucaaaauaac

SEQ ID NO: 56906 - RNA, 23 nt, Artificial Sequence
  Chemically synthesized
gcugaaauuuaggaugguucuca

SEQ ID NO: 56907 - RNA, 23 nt, Artificial Sequence
  Chemically synthesized
ugcugaaauuuaggaugguucuc

SEQ ID NO: 56908 - RNA, 23 nt, Artificial Sequence
  Chemically synthesized
uugcugaaauuuaggaugguucu

SEQ ID NO: 56909 - RNA, 23 nt, Artificial Sequence
  Chemically synthesized
cuugcugaaauuuaggaugguuc

SEQ ID NO: 56910 - RNA, 23 nt, Artificial Sequence
  Chemically synthesized
ccuugcugaaauuuaggaugguu

SEQ ID NO: 56911 - RNA, 23 nt, Artificial Sequence
  Chemically synthesized
gugugaagauucaucauuaugug

SEQ ID NO: 56912 - RNA, 23 nt, Artificial Sequence
  Chemically synthesized
ggugugaagauucaucauuaugu

SEQ ID NO: 56913 - RNA, 23 nt, Artificial Sequence
  Chemically synthesized
aggugugaagauucaucauuaug

SEQ ID NO: 56914 - RNA, 23 nt, Artificial Sequence
  Chemically synthesized
gaggugugaagauucaucauuau

SEQ ID NO: 56915 - RNA, 23 nt, Artificial Sequence
  Chemically synthesized
agaggugugaagauucaucauua

SEQ ID NO: 56916 - RNA, 23 nt, Artificial Sequence
  Chemically synthesized
acaaugcauagaugaucgaaaau

SEQ ID NO: 56917 - RNA, 23 nt, Artificial Sequence
  Chemically synthesized
aacaaugcauagaugaucgaaaa

SEQ ID NO: 56918 - RNA, 23 nt, Artificial Sequence
  Chemically synthesized
guguaaauaaguagcuucuauau

SEQ ID NO: 56919 - RNA, 23 nt, Artificial Sequence
  Chemically synthesized
aguguaaauaaguagcuucuaua

SEQ ID NO: 56920 - RNA, 23 nt, Artificial Sequence
  Chemically synthesized
uaguguaaauaaguagcuucuau

SEQ ID NO: 56921 - RNA, 23 nt, Artificial Sequence
  Chemically synthesized
cuaguguaaauaaguagcuucua

SEQ ID NO: 56922 - RNA, 23 nt, Artificial Sequence
  Chemically synthesized
ucuaguguaaauaaguagcuucu

SEQ ID NO: 56923 - RNA, 23 nt, Artificial Sequence
  Chemically synthesized
ggguugauaaaaguucuugauca

SEQ ID NO: 56924 - RNA, 23 nt, Artificial Sequence
  Chemically synthesized
gcaaagaaggguugauaaaaguu

SEQ ID NO: 56925 - RNA, 23 nt, Artificial Sequence
  Chemically synthesized
agcaaagaaggguugauaaaagu

SEQ ID NO: 56926 - RNA, 23 nt, Artificial Sequence
  Chemically synthesized
aagcaaagaaggguugauaaaag

SEQ ID NO: 56927 - RNA, 23 nt, Artificial Sequence
  Chemically synthesized
uaagcaaagaaggguugauaaaa

SEQ ID NO: 56928 - RNA, 23 nt, Artificial Sequence
  Chemically synthesized
auaagcaaagaaggguugauaaa

SEQ ID NO: 56929 - RNA, 23 nt, Artificial Sequence
  Chemically synthesized
guauaggaaagacugaauaaaaa

SEQ ID NO: 56930 - RNA, 23 nt, Artificial Sequence
  Chemically synthesized
gguauaggaaagacugaauaaaa

SEQ ID NO: 56931 - RNA, 23 nt, Artificial Sequence
  Chemically synthesized
agguauaggaaagacugaauaaa

SEQ ID NO: 56932 - RNA, 23 nt, Artificial Sequence
  Chemically synthesized
uagguauaggaaagacugaauaa

SEQ ID NO: 56933 - RNA, 23 nt, Artificial Sequence
  Chemically synthesized
auagguauaggaaagacugaaua

SEQ ID NO: 56934 - RNA, 23 nt, Artificial Sequence
  Chemically synthesized
aauagguauaggaaagacugaau

SEQ ID NO: 56935 - RNA, 23 nt, Artificial Sequence
  Chemically synthesized
gucuugcaaaauccaauagaagu

SEQ ID NO: 56936 - RNA, 23 nt, Artificial Sequence
  Chemically synthesized
ugucuugcaaaauccaauagaag

SEQ ID NO: 56937 - RNA, 23 nt, Artificial Sequence
  Chemically synthesized
augucuugcaaaauccaauagaa

SEQ ID NO: 56938 - RNA, 23 nt, Artificial Sequence
  Chemically synthesized
gaagagaacaccauuuuaucuca

SEQ ID NO: 56939 - RNA, 23 nt, Artificial Sequence
  Chemically synthesized
ggaagagaacaccauuuuaucuc

SEQ ID NO: 56940 - RNA, 23 nt, Artificial Sequence
  Chemically synthesized
uggaagagaacaccauuuuaucu

SEQ ID NO: 56941 - RNA, 23 nt, Artificial Sequence
  Chemically synthesized
cuggaagagaacaccauuuuauc

SEQ ID NO: 56942 - RNA, 23 nt, Artificial Sequence
  Chemically synthesized
acuggaagagaacaccauuuuau

SEQ ID NO: 56943 - RNA, 23 nt, Artificial Sequence
  Chemically synthesized
uacuggaagagaacaccauuuua

SEQ ID NO: 56944 - RNA, 23 nt, Artificial Sequence
  Chemically synthesized
ugcuugucuuugagaaauugacu

SEQ ID NO: 56945 - RNA, 23 nt, Artificial Sequence
  Chemically synthesized
uugcuugucuuugagaaauugac

SEQ ID NO: 56946 - RNA, 23 nt, Artificial Sequence
  Chemically synthesized
auugcuugucuuugagaaauuga

SEQ ID NO: 56947 - RNA, 23 nt, Artificial Sequence
  Chemically synthesized
cauugcuugucuuugagaaauug

SEQ ID NO: 56948 - RNA, 23 nt, Artificial Sequence
  Chemically synthesized
acauugcuugucuuugagaaauu

SEQ ID NO: 56949 - RNA, 23 nt, Artificial Sequence
  Chemically synthesized
ggauuucugaacuaugguuuuga

SEQ ID NO: 56950 - RNA, 23 nt, Artificial Sequence
  Chemically synthesized
uggauuucugaacuaugguuuug

SEQ ID NO: 56951 - RNA, 23 nt, Artificial Sequence
  Chemically synthesized
cuggauuucugaacuaugguuuu

SEQ ID NO: 56952 - RNA, 23 nt, Artificial Sequence
  Chemically synthesized
gcuggauuucugaacuaugguuu

SEQ ID NO: 56953 - RNA, 23 nt, Artificial Sequence
  Chemically synthesized
agcuggauuucugaacuaugguu

SEQ ID NO: 56954 - RNA, 23 nt, Artificial Sequence
  Chemically synthesized
gaacucaaaacacuagaaaaagc

SEQ ID NO: 56955 - RNA, 23 nt, Artificial Sequence
  Chemically synthesized
guagacaacacccuuacaaggau

SEQ ID NO: 56956 - RNA, 23 nt, Artificial Sequence
  Chemically synthesized
uguagacaacacccuuacaagga

SEQ ID NO: 56957 - RNA, 23 nt, Artificial Sequence
  Chemically synthesized
guguagacaacacccuuacaagg

SEQ ID NO: 56958 - RNA, 23 nt, Artificial Sequence
  Chemically synthesized
uguguagacaacacccuuacaag

SEQ ID NO: 56959 - RNA, 23 nt, Artificial Sequence
  Chemically synthesized
auguguagacaacacccuuacaa

SEQ ID NO: 56960 - RNA, 23 nt, Artificial Sequence
  Chemically synthesized
gaagaucacugggauugaaaaug

SEQ ID NO: 56961 - RNA, 23 nt, Artificial Sequence
  Chemically synthesized
ggaagaucacugggauugaaaau

SEQ ID NO: 56962 - RNA, 23 nt, Artificial Sequence
  Chemically synthesized
uggaagaucacugggauugaaaa

SEQ ID NO: 56963 - RNA, 23 nt, Artificial Sequence
  Chemically synthesized
uuggaagaucacugggauugaaa

SEQ ID NO: 56964 - RNA, 23 nt, Artificial Sequence
  Chemically synthesized
uuuggaagaucacugggauugaa

SEQ ID NO: 56965 - RNA, 23 nt, Artificial Sequence
  Chemically synthesized
agauuccucagcccuucaaaucu

SEQ ID NO: 56966 - RNA, 23 nt, Artificial Sequence
  Chemically synthesized
gagauuccucagcccuucaaauc

SEQ ID NO: 56967 - RNA, 23 nt, Artificial Sequence
  Chemically synthesized
agagauuccucagcccuucaaau

SEQ ID NO: 56968 - RNA, 23 nt, Artificial Sequence
  Chemically synthesized
aagagauuccucagcccuucaaa

SEQ ID NO: 56969 - RNA, 23 nt, Artificial Sequence
  Chemically synthesized
gaagagauuccucagcccuucaa

SEQ ID NO: 56970 - RNA, 23 nt, Artificial Sequence
  Chemically synthesized
gugauucauauguggcuuuggga

SEQ ID NO: 56971 - RNA, 23 nt, Artificial Sequence
  Chemically synthesized
agugauucauauguggcuuuggg

SEQ ID NO: 56972 - RNA, 23 nt, Artificial Sequence
  Chemically synthesized
cagugauucauauguggcuuugg

SEQ ID NO: 56973 - RNA, 23 nt, Artificial Sequence
  Chemically synthesized
ucagugauucauauguggcuuug

SEQ ID NO: 56974 - RNA, 23 nt, Artificial Sequence
  Chemically synthesized
cucagugauucauauguggcuuu

SEQ ID NO: 56975 - RNA, 23 nt, Artificial Sequence
  Chemically synthesized
agccuggcucagugauucauaug

SEQ ID NO: 56976 - RNA, 23 nt, Artificial Sequence
  Chemically synthesized
cagccuggcucagugauucauau

SEQ ID NO: 56977 - RNA, 23 nt, Artificial Sequence
  Chemically synthesized
ccauuccaaaucguaucuuucca

SEQ ID NO: 56978 - RNA, 23 nt, Artificial Sequence
  Chemically synthesized
uccauuccaaaucguaucuuucc

SEQ ID NO: 56979 - RNA, 23 nt, Artificial Sequence
  Chemically synthesized
uuccauuccaaaucguaucuuuc

SEQ ID NO: 56980 - RNA, 23 nt, Artificial Sequence
  Chemically synthesized
uuuccauuccaaaucguaucuuu

SEQ ID NO: 56981 - RNA, 23 nt, Artificial Sequence
  Chemically synthesized
auuuccauuccaaaucguaucuu

SEQ ID NO: 56982 - RNA, 23 nt, Artificial Sequence
  Chemically synthesized
ggcuauuuccauuccaaaucgua

SEQ ID NO: 56983 - RNA, 23 nt, Artificial Sequence
  Chemically synthesized
uggcuauuuccauuccaaaucgu

SEQ ID NO: 56984 - RNA, 23 nt, Artificial Sequence
  Chemically synthesized
auggcuauuuccauuccaaaucg

SEQ ID NO: 56985 - RNA, 23 nt, Artificial Sequence
  Chemically synthesized
uauggcuauuuccauuccaaauc

SEQ ID NO: 56986 - RNA, 23 nt, Artificial Sequence
  Chemically synthesized
guauggcuauuuccauuccaaau

SEQ ID NO: 56987 - RNA, 23 nt, Artificial Sequence
  Chemically synthesized
gugucuucuuguuuuucuauugu

SEQ ID NO: 56988 - RNA, 23 nt, Artificial Sequence
  Chemically synthesized
ugugucuucuuguuuuucuauug

SEQ ID NO: 56989 - RNA, 23 nt, Artificial Sequence
  Chemically synthesized
gugugucuucuuguuuuucuauu

SEQ ID NO: 56990 - RNA, 23 nt, Artificial Sequence
  Chemically synthesized
ugugugucuucuuguuuuucuau

SEQ ID NO: 56991 - RNA, 23 nt, Artificial Sequence
  Chemically synthesized
acccccugcagcuauuuccaaug

SEQ ID NO: 56992 - RNA, 23 nt, Artificial Sequence
  Chemically synthesized
agaaagaaugaguuuacaacaga

SEQ ID NO: 56993 - RNA, 23 nt, Artificial Sequence
  Chemically synthesized
gguagaaagaaugaguuuacaac

SEQ ID NO: 56994 - RNA, 23 nt, Artificial Sequence
  Chemically synthesized
agguagaaagaaugaguuuacaa

SEQ ID NO: 56995 - RNA, 23 nt, Artificial Sequence
  Chemically synthesized
aagguagaaagaaugaguuuaca

SEQ ID NO: 56996 - RNA, 23 nt, Artificial Sequence
  Chemically synthesized
uaagguagaaagaaugaguuuac

SEQ ID NO: 56997 - RNA, 23 nt, Artificial Sequence
  Chemically synthesized
uuaagguagaaagaaugaguuua

SEQ ID NO: 56998 - RNA, 23 nt, Artificial Sequence
  Chemically synthesized
cacucugaugguuuuggcauaau

SEQ ID NO: 56999 - RNA, 23 nt, Artificial Sequence
  Chemically synthesized
aauuugcguuuauuuauaacugg

SEQ ID NO: 57000 - RNA, 23 nt, Artificial Sequence
  Chemically synthesized
caauccaggauauuuuucuauaa

SEQ ID NO: 57001 - RNA, 23 nt, Artificial Sequence
  Chemically synthesized
acaauccaggauauuuuucuaua

SEQ ID NO: 57002 - RNA, 23 nt, Artificial Sequence
  Chemically synthesized
aacaauccaggauauuuuucuau

SEQ ID NO: 57003 - RNA, 23 nt, Artificial Sequence
  Chemically synthesized
gagaggugugaagauucaucauu

SEQ ID NO: 57004 - RNA, 23 nt, Artificial Sequence
  Chemically synthesized
ugaucgaaaauuacggaaaauca

SEQ ID NO: 57005 - RNA, 23 nt, Artificial Sequence
  Chemically synthesized
augaucgaaaauuacggaaaauc

SEQ ID NO: 57006 - RNA, 23 nt, Artificial Sequence
  Chemically synthesized
gaugaucgaaaauuacggaaaau

SEQ ID NO: 57007 - RNA, 23 nt, Artificial Sequence
  Chemically synthesized
agaugaucgaaaauuacggaaaa

SEQ ID NO: 57008 - RNA, 23 nt, Artificial Sequence
  Chemically synthesized
uagaugaucgaaaauuacggaaa

SEQ ID NO: 57009 - RNA, 23 nt, Artificial Sequence
  Chemically synthesized
gcagguauaaauuugaacaaugc

SEQ ID NO: 57010 - RNA, 23 nt, Artificial Sequence
  Chemically synthesized
ugcagguauaaauuugaacaaug

SEQ ID NO: 57011 - RNA, 23 nt, Artificial Sequence
  Chemically synthesized
cugcagguauaaauuugaacaau

SEQ ID NO: 57012 - RNA, 23 nt, Artificial Sequence
  Chemically synthesized
ucugcagguauaaauuugaacaa

SEQ ID NO: 57013 - RNA, 23 nt, Artificial Sequence
  Chemically synthesized
gucugcagguauaaauuugaaca

SEQ ID NO: 57014 - RNA, 23 nt, Artificial Sequence
  Chemically synthesized
ugaauagucugcagguauaaauu

SEQ ID NO: 57015 - RNA, 23 nt, Artificial Sequence
  Chemically synthesized
augaauagucugcagguauaaau

SEQ ID NO: 57016 - RNA, 23 nt, Artificial Sequence
  Chemically synthesized
aaugaauagucugcagguauaaa

SEQ ID NO: 57017 - RNA, 23 nt, Artificial Sequence
  Chemically synthesized
aaaugaauagucugcagguauaa

SEQ ID NO: 57018 - RNA, 23 nt, Artificial Sequence
  Chemically synthesized
uaaaugaauagucugcagguaua

SEQ ID NO: 57019 - RNA, 23 nt, Artificial Sequence
  Chemically synthesized
cuauaucugucuuagucuauuau

SEQ ID NO: 57020 - RNA, 23 nt, Artificial Sequence
  Chemically synthesized
ucuauaucugucuuagucuauua

SEQ ID NO: 57021 - RNA, 23 nt, Artificial Sequence
  Chemically synthesized
uucuauaucugucuuagucuauu

SEQ ID NO: 57022 - RNA, 23 nt, Artificial Sequence
  Chemically synthesized
cuucuauaucugucuuagucuau

SEQ ID NO: 57023 - RNA, 23 nt, Artificial Sequence
  Chemically synthesized
gcuucuauaucugucuuagucua

SEQ ID NO: 57024 - RNA, 23 nt, Artificial Sequence
  Chemically synthesized
cccuuggauuucacuugcauugu

SEQ ID NO: 57025 - RNA, 23 nt, Artificial Sequence
  Chemically synthesized
ccccuuggauuucacuugcauug

SEQ ID NO: 57026 - RNA, 23 nt, Artificial Sequence
  Chemically synthesized
uccccuuggauuucacuugcauu

SEQ ID NO: 57027 - RNA, 23 nt, Artificial Sequence
  Chemically synthesized
auccccuuggauuucacuugcau

SEQ ID NO: 57028 - RNA, 23 nt, Artificial Sequence
  Chemically synthesized
uauccccuuggauuucacuugca

SEQ ID NO: 57029 - RNA, 23 nt, Artificial Sequence
  Chemically synthesized
caugaugaauucuagugaaauga

SEQ ID NO: 57030 - RNA, 23 nt, Artificial Sequence
  Chemically synthesized
auaaaggcuuuauuagguauauc

SEQ ID NO: 57031 - RNA, 23 nt, Artificial Sequence
  Chemically synthesized
uagcuggauuucugaacuauggu

SEQ ID NO: 57032 - RNA, 23 nt, Artificial Sequence
  Chemically synthesized
uuagcuggauuucugaacuaugg

SEQ ID NO: 57033 - RNA, 23 nt, Artificial Sequence
  Chemically synthesized
uuuagcuggauuucugaacuaug

SEQ ID NO: 57034 - RNA, 23 nt, Artificial Sequence
  Chemically synthesized
auuuagcuggauuucugaacuau

SEQ ID NO: 57035 - RNA, 23 nt, Artificial Sequence
  Chemically synthesized
gaaaaagcauugaauggaaaauc

SEQ ID NO: 57036 - RNA, 23 nt, Artificial Sequence
  Chemically synthesized
agaaaaagcauugaauggaaaau

SEQ ID NO: 57037 - RNA, 23 nt, Artificial Sequence
  Chemically synthesized
uagaaaaagcauugaauggaaaa

SEQ ID NO: 57038 - RNA, 23 nt, Artificial Sequence
  Chemically synthesized
cuagaaaaagcauugaauggaaa

SEQ ID NO: 57039 - RNA, 23 nt, Artificial Sequence
  Chemically synthesized
cgauauuauguacgauggagauu

SEQ ID NO: 57040 - RNA, 23 nt, Artificial Sequence
  Chemically synthesized
cugauaaaggcuuuauuagguau

SEQ ID NO: 57041 - RNA, 23 nt, Artificial Sequence
  Chemically synthesized
cguuuauuuauaacugguugcaa

SEQ ID NO: 57042 - RNA, 23 nt, Artificial Sequence
  Chemically synthesized
ugaaucuggccuuacguaauaua

SEQ ID NO: 57043 - RNA, 23 nt, Artificial Sequence
  Chemically synthesized
caaguuuguccuaaucaugccau

SEQ ID NO: 57044 - RNA, 23 nt, Artificial Sequence
  Chemically synthesized
ucgauauuauguacgauggagau

SEQ ID NO: 57045 - RNA, 23 nt, Artificial Sequence
  Chemically synthesized
cuggccuuacguaauauauuuuc

SEQ ID NO: 57046 - RNA, 23 nt, Artificial Sequence
  Chemically synthesized
gaaucuggccuuacguaauauau

SEQ ID NO: 57047 - RNA, 23 nt, Artificial Sequence
  Chemically synthesized
aaauaacuaaaaggcacugaguu

SEQ ID NO: 57048 - RNA, 23 nt, Artificial Sequence
  Chemically synthesized
gaacaaugcauagaugaucgaaa

SEQ ID NO: 57049 - RNA, 23 nt, Artificial Sequence
  Chemically synthesized
ggaaguaaaggcaaacauaaaua

SEQ ID NO: 57050 - RNA, 23 nt, Artificial Sequence
  Chemically synthesized
cugguguacggugggaagagauu

SEQ ID NO: 57051 - RNA, 23 nt, Artificial Sequence
  Chemically synthesized
acacuugugauuccuauucgaua

SEQ ID NO: 57052 - RNA, 23 nt, Artificial Sequence
  Chemically synthesized
gcuauuuccauuccaaaucguau

SEQ ID NO: 57053 - RNA, 23 nt, Artificial Sequence
  Chemically synthesized
agauaauacauuucguauggcua

SEQ ID NO: 57054 - RNA, 23 nt, Artificial Sequence
  Chemically synthesized
guaaucuacccuuauguuuauga

SEQ ID NO: 57055 - RNA, 23 nt, Artificial Sequence
  Chemically synthesized
acaucagcaacaaccucaaaauc

SEQ ID NO: 57056 - RNA, 23 nt, Artificial Sequence
  Chemically synthesized
cauuucuaaagugaccuuaucaa

SEQ ID NO: 57057 - RNA, 23 nt, Artificial Sequence
  Chemically synthesized
agaagucuggcaucauaaucaua

SEQ ID NO: 57058 - RNA, 23 nt, Artificial Sequence
  Chemically synthesized
cagguauaaauuugaacaaugca

SEQ ID NO: 57059 - RNA, 23 nt, Artificial Sequence
  Chemically synthesized
cguaucuauagagcuggcaugua

SEQ ID NO: 57060 - RNA, 23 nt, Artificial Sequence
  Chemically synthesized
cuaaugucuugcaaaauccaaua

SEQ ID NO: 57061 - RNA, 23 nt, Artificial Sequence
  Chemically synthesized
caaaguucaauuuagcuggauuu

SEQ ID NO: 57062 - RNA, 23 nt, Artificial Sequence
  Chemically synthesized
ggaacuggugauuuuggaagauc

SEQ ID NO: 57063 - RNA, 23 nt, Artificial Sequence
  Chemically synthesized
guauuuuuggaacuggugauuuu

SEQ ID NO: 57064 - RNA, 23 nt, Artificial Sequence
  Chemically synthesized
agaaaagcaagagacuguaugua

SEQ ID NO: 57065 - RNA, 23 nt, Artificial Sequence
  Chemically synthesized
gcacuuccucuuacuaugaauuc

SEQ ID NO: 57066 - RNA, 23 nt, Artificial Sequence
  Chemically synthesized
cucaaaaucaaucaauauccaga

SEQ ID NO: 57067 - RNA, 23 nt, Artificial Sequence
  Chemically synthesized
accucaaaaucaaucaauaucca

SEQ ID NO: 57068 - RNA, 23 nt, Artificial Sequence
  Chemically synthesized
guuaagggaugauggcuuuuaua

SEQ ID NO: 57069 - RNA, 23 nt, Artificial Sequence
  Chemically synthesized
aaaauauugguagacaucagcaa

SEQ ID NO: 57070 - RNA, 23 nt, Artificial Sequence
  Chemically synthesized
guaaaaugcugaccuauagaaaa

SEQ ID NO: 57071 - RNA, 23 nt, Artificial Sequence
  Chemically synthesized
ccuacaguaucaguggaaaagau

SEQ ID NO: 57072 - RNA, 23 nt, Artificial Sequence
  Chemically synthesized
ugaaauuuaggaugguucucacu

SEQ ID NO: 57073 - RNA, 23 nt, Artificial Sequence
  Chemically synthesized
gaauagucugcagguauaaauuu

SEQ ID NO: 57074 - RNA, 23 nt, Artificial Sequence
  Chemically synthesized
cagauauuuacugagaggaacua

SEQ ID NO: 57075 - RNA, 23 nt, Artificial Sequence
  Chemically synthesized
uggaacuggugauuuuggaagau

SEQ ID NO: 57076 - RNA, 23 nt, Artificial Sequence
  Chemically synthesized
ggcuuugggaauacuuggguuuu

SEQ ID NO: 57077 - RNA, 23 nt, Artificial Sequence
  Chemically synthesized
ucauauguggcuuugggaauacu

SEQ ID NO: 57078 - RNA, 23 nt, Artificial Sequence
  Chemically synthesized
ugauucauauguggcuuugggaa

SEQ ID NO: 57079 - RNA, 23 nt, Artificial Sequence
  Chemically synthesized
acgauggagauugggaaacuuaa

SEQ ID NO: 57080 - RNA, 23 nt, Artificial Sequence
  Chemically synthesized
ccucuacacacuugugauuccua

SEQ ID NO: 57081 - RNA, 23 nt, Artificial Sequence
  Chemically synthesized
agacuguauguauuuuuggaacu

SEQ ID NO: 57082 - RNA, 23 nt, Artificial Sequence
  Chemically synthesized
agacguaaucuacccuuauguuu

SEQ ID NO: 57083 - RNA, 23 nt, Artificial Sequence
  Chemically synthesized
gagacguaaucuacccuuauguu

SEQ ID NO: 57084 - RNA, 23 nt, Artificial Sequence
  Chemically synthesized
uguguuauaagagacguaaucua

SEQ ID NO: 57085 - RNA, 23 nt, Artificial Sequence
  Chemically synthesized
gcugugcugugugucuucuuguu

SEQ ID NO: 57086 - RNA, 23 nt, Artificial Sequence
  Chemically synthesized
cucuuacuaugaauucuucagaa

SEQ ID NO: 57087 - RNA, 23 nt, Artificial Sequence
  Chemically synthesized
gcaaagagugauggauauuguuc

SEQ ID NO: 57088 - RNA, 23 nt, Artificial Sequence
  Chemically synthesized
caauauccagaaucuaaugcaga

SEQ ID NO: 57089 - RNA, 23 nt, Artificial Sequence
  Chemically synthesized
cuaaacuucuuuacugcugauau

SEQ ID NO: 57090 - RNA, 23 nt, Artificial Sequence
  Chemically synthesized
cuuaagguagaaagaaugaguuu

SEQ ID NO: 57091 - RNA, 23 nt, Artificial Sequence
  Chemically synthesized
caggcuggucuagagaagucuuu

SEQ ID NO: 57092 - RNA, 23 nt, Artificial Sequence
  Chemically synthesized
gaaaaugucacuacucaccuaug

SEQ ID NO: 57093 - RNA, 23 nt, Artificial Sequence
  Chemically synthesized
gaucuucccacauaucaaaauaa

SEQ ID NO: 57094 - RNA, 23 nt, Artificial Sequence
  Chemically synthesized
ucuuugagaaauugacugacaua

SEQ ID NO: 57095 - RNA, 23 nt, Artificial Sequence
  Chemically synthesized
gucuuugagaaauugacugacau

SEQ ID NO: 57096 - RNA, 23 nt, Artificial Sequence
  Chemically synthesized
acaaaguucaauuuagcuggauu

SEQ ID NO: 57097 - RNA, 23 nt, Artificial Sequence
  Chemically synthesized
gggaaaggaacucaaaacacuag

SEQ ID NO: 57098 - RNA, 23 nt, Artificial Sequence
  Chemically synthesized
cauauguggcuuugggaauacuu

SEQ ID NO: 57099 - RNA, 23 nt, Artificial Sequence
  Chemically synthesized
agagacuguauguauuuuuggaa

SEQ ID NO: 57100 - RNA, 23 nt, Artificial Sequence
  Chemically synthesized
gauaauacauuucguauggcuau

SEQ ID NO: 57101 - RNA, 23 nt, Artificial Sequence
  Chemically synthesized
auauuguucguaaucuuggacuu

SEQ ID NO: 57102 - RNA, 23 nt, Artificial Sequence
  Chemically synthesized
agcaaagagugauggauauuguu

SEQ ID NO: 57103 - RNA, 23 nt, Artificial Sequence
  Chemically synthesized
ucaauauccagaaucuaaugcag

SEQ ID NO: 57104 - RNA, 23 nt, Artificial Sequence
  Chemically synthesized
gcacucugaugguuuuggcauaa

SEQ ID NO: 57105 - RNA, 23 nt, Artificial Sequence
  Chemically synthesized
caaaaaguuggacgacauugagu

SEQ ID NO: 57106 - RNA, 23 nt, Artificial Sequence
  Chemically synthesized
ccauuggaugaggguguugcuuu

SEQ ID NO: 57107 - RNA, 23 nt, Artificial Sequence
  Chemically synthesized
ccucuuuccuuauuaaacaugua

SEQ ID NO: 57108 - RNA, 23 nt, Artificial Sequence
  Chemically synthesized
auagaugaucgaaaauuacggaa

SEQ ID NO: 57109 - RNA, 23 nt, Artificial Sequence
  Chemically synthesized
gcuuuauuagguauaucugagga

SEQ ID NO: 57110 - RNA, 23 nt, Artificial Sequence
  Chemically synthesized
gcugaguuaagugaaaggaaaaa

SEQ ID NO: 57111 - RNA, 23 nt, Artificial Sequence
  Chemically synthesized
gggcugaguuaagugaaaggaaa

SEQ ID NO: 57112 - RNA, 23 nt, Artificial Sequence
  Chemically synthesized
guauguauuuuuggaacugguga

SEQ ID NO: 57113 - RNA, 23 nt, Artificial Sequence
  Chemically synthesized
guacgauggagauugggaaacuu

SEQ ID NO: 57114 - RNA, 23 nt, Artificial Sequence
  Chemically synthesized
cuguauguauuuuuggaacuggu

SEQ ID NO: 57115 - RNA, 23 nt, Artificial Sequence
  Chemically synthesized
cacuugugauuccuauucgauau

SEQ ID NO: 57116 - RNA, 23 nt, Artificial Sequence
  Chemically synthesized
gacuguauguauuuuuggaacug

SEQ ID NO: 57117 - RNA, 23 nt, Artificial Sequence
  Chemically synthesized
ccuucauguccucuacacacuug

SEQ ID NO: 57118 - RNA, 23 nt, Artificial Sequence
  Chemically synthesized
gaaaagcaagagacuguauguau

SEQ ID NO: 57119 - RNA, 23 nt, Artificial Sequence
  Chemically synthesized
acguaaucuacccuuauguuuau

SEQ ID NO: 57120 - RNA, 23 nt, Artificial Sequence
  Chemically synthesized
cuauuguguuauaagagacguaa

SEQ ID NO: 57121 - RNA, 23 nt, Artificial Sequence
  Chemically synthesized
ccacgugguaaaagcauuuaaca

SEQ ID NO: 57122 - RNA, 23 nt, Artificial Sequence
  Chemically synthesized
auguuaagggaugauggcuuuua

SEQ ID NO: 57123 - RNA, 23 nt, Artificial Sequence
  Chemically synthesized
cauguuaagggaugauggcuuuu

SEQ ID NO: 57124 - RNA, 23 nt, Artificial Sequence
  Chemically synthesized
acuaaacuucuuuacugcugaua

SEQ ID NO: 57125 - RNA, 23 nt, Artificial Sequence
  Chemically synthesized
aacuaaacuucuuuacugcugau

SEQ ID NO: 57126 - RNA, 23 nt, Artificial Sequence
  Chemically synthesized
ugggcgaacuguauuccuuuuaa

SEQ ID NO: 57127 - RNA, 23 nt, Artificial Sequence
  Chemically synthesized
acaacagaugaaaauaagugcuu

SEQ ID NO: 57128 - RNA, 23 nt, Artificial Sequence
  Chemically synthesized
acuuaagguagaaagaaugaguu

SEQ ID NO: 57129 - RNA, 23 nt, Artificial Sequence
  Chemically synthesized
aaaaauauugguagacaucagca

SEQ ID NO: 57130 - RNA, 23 nt, Artificial Sequence
  Chemically synthesized
ugagcauugguugauuaaaguuu

SEQ ID NO: 57131 - RNA, 23 nt, Artificial Sequence
  Chemically synthesized
acauugaguagagucaugguaua

SEQ ID NO: 57132 - RNA, 23 nt, Artificial Sequence
  Chemically synthesized
ugaucuucccacauaucaaaaua

SEQ ID NO: 57133 - RNA, 23 nt, Artificial Sequence
  Chemically synthesized
gaagucuggcaucauaaucauag

SEQ ID NO: 57134 - RNA, 23 nt, Artificial Sequence
  Chemically synthesized
agaaaacuuguauagaugcacuu

SEQ ID NO: 57135 - RNA, 23 nt, Artificial Sequence
  Chemically synthesized
agagaggugugaagauucaucau

SEQ ID NO: 57136 - RNA, 23 nt, Artificial Sequence
  Chemically synthesized
caaagaaggguugauaaaaguuc

SEQ ID NO: 57137 - RNA, 23 nt, Artificial Sequence
  Chemically synthesized
auacguaucuauagagcuggcau

SEQ ID NO: 57138 - RNA, 23 nt, Artificial Sequence
  Chemically synthesized
cuuuauuagguauaucugaggaa

SEQ ID NO: 57139 - RNA, 23 nt, Artificial Sequence
  Chemically synthesized
gggaaaggaacucaaaacacuag

SEQ ID NO: 57140 - RNA, 23 nt, Artificial Sequence
  Chemically synthesized
ugggaaaggaacucaaaacacua

SEQ ID NO: 57141 - RNA, 23 nt, Artificial Sequence
  Chemically synthesized
cugggaaaggaacucaaaacacu

SEQ ID NO: 57142 - RNA, 23 nt, Artificial Sequence
  Chemically synthesized
gcugggaaaggaacucaaaacac

SEQ ID NO: 57143 - RNA, 23 nt, Artificial Sequence
  Chemically synthesized
ggcugggaaaggaacucaaaaca

SEQ ID NO: 57144 - RNA, 23 nt, Artificial Sequence
  Chemically synthesized
uugauugauuuugagguuguugc

SEQ ID NO: 57145 - RNA, 23 nt, Artificial Sequence
  Chemically synthesized
ugauugauuuugagguuguugcu

SEQ ID NO: 57146 - RNA, 23 nt, Artificial Sequence
  Chemically synthesized
gauugauuuugagguuguugcug

SEQ ID NO: 57147 - RNA, 23 nt, Artificial Sequence
  Chemically synthesized
auugauuuugagguuguugcuga

SEQ ID NO: 57148 - RNA, 23 nt, Artificial Sequence
  Chemically synthesized
uugauuuugagguuguugcugau

SEQ ID NO: 57149 - RNA, 23 nt, Artificial Sequence
  Chemically synthesized
ccguaauuuucgaucaucuaugc

SEQ ID NO: 57150 - RNA, 23 nt, Artificial Sequence
  Chemically synthesized
cguaauuuucgaucaucuaugca

SEQ ID NO: 57151 - RNA, 23 nt, Artificial Sequence
  Chemically synthesized
guaauuuucgaucaucuaugcau

SEQ ID NO: 57152 - RNA, 23 nt, Artificial Sequence
  Chemically synthesized
uaauuuucgaucaucuaugcauu

SEQ ID NO: 57153 - RNA, 23 nt, Artificial Sequence
  Chemically synthesized
aauuuucgaucaucuaugcauug

SEQ ID NO: 57154 - RNA, 23 nt, Artificial Sequence
  Chemically synthesized
gcaauacuucuauuggauuuugc

SEQ ID NO: 57155 - RNA, 23 nt, Artificial Sequence
  Chemically synthesized
caauacuucuauuggauuuugca

SEQ ID NO: 57156 - RNA, 23 nt, Artificial Sequence
  Chemically synthesized
aauacuucuauuggauuuugcaa

SEQ ID NO: 57157 - RNA, 23 nt, Artificial Sequence
  Chemically synthesized
auacuucuauuggauuuugcaag

SEQ ID NO: 57158 - RNA, 23 nt, Artificial Sequence
  Chemically synthesized
uacuucuauuggauuuugcaaga

SEQ ID NO: 57159 - RNA, 23 nt, Artificial Sequence
  Chemically synthesized
guccaagauuacgaacaauaucc

SEQ ID NO: 57160 - RNA, 23 nt, Artificial Sequence
  Chemically synthesized
uccaagauuacgaacaauaucca

SEQ ID NO: 57161 - RNA, 23 nt, Artificial Sequence
  Chemically synthesized
ccaagauuacgaacaauauccau

SEQ ID NO: 57162 - RNA, 23 nt, Artificial Sequence
  Chemically synthesized
caagauuacgaacaauauccauc

SEQ ID NO: 57163 - RNA, 23 nt, Artificial Sequence
  Chemically synthesized
aagauuacgaacaauauccauca

SEQ ID NO: 57164 - RNA, 23 nt, Artificial Sequence
  Chemically synthesized
ugauaaggucacuuuagaaaugg

SEQ ID NO: 57165 - RNA, 23 nt, Artificial Sequence
  Chemically synthesized
gauaaggucacuuuagaaauggc

SEQ ID NO: 57166 - RNA, 23 nt, Artificial Sequence
  Chemically synthesized
auaaggucacuuuagaaauggcu

SEQ ID NO: 57167 - RNA, 23 nt, Artificial Sequence
  Chemically synthesized
uaaggucacuuuagaaauggcuu

SEQ ID NO: 57168 - RNA, 23 nt, Artificial Sequence
  Chemically synthesized
aaggucacuuuagaaauggcuug

SEQ ID NO: 57169 - RNA, 23 nt, Artificial Sequence
  Chemically synthesized
auaaaaaagacaaucuacaaugg

SEQ ID NO: 57170 - RNA, 23 nt, Artificial Sequence
  Chemically synthesized
uaaaaaagacaaucuacaauggu

SEQ ID NO: 57171 - RNA, 23 nt, Artificial Sequence
  Chemically synthesized
aaaaaagacaaucuacaauggug

SEQ ID NO: 57172 - RNA, 23 nt, Artificial Sequence
  Chemically synthesized
aaaaagacaaucuacaauggugc

SEQ ID NO: 57173 - RNA, 23 nt, Artificial Sequence
  Chemically synthesized
aaaagacaaucuacaauggugcg

SEQ ID NO: 57174 - RNA, 23 nt, Artificial Sequence
  Chemically synthesized
uauagucuacauguuuaauaagg

SEQ ID NO: 57175 - RNA, 23 nt, Artificial Sequence
  Chemically synthesized
auagucuacauguuuaauaagga

SEQ ID NO: 57176 - RNA, 23 nt, Artificial Sequence
  Chemically synthesized
uagucuacauguuuaauaaggaa

SEQ ID NO: 57177 - RNA, 23 nt, Artificial Sequence
  Chemically synthesized
agucuacauguuuaauaaggaaa

SEQ ID NO: 57178 - RNA, 23 nt, Artificial Sequence
  Chemically synthesized
gucuacauguuuaauaaggaaag

SEQ ID NO: 57179 - RNA, 23 nt, Artificial Sequence
  Chemically synthesized
ucugaauagcucaagacuucugc

SEQ ID NO: 57180 - RNA, 23 nt, Artificial Sequence
  Chemically synthesized
cugaauagcucaagacuucugca

SEQ ID NO: 57181 - RNA, 23 nt, Artificial Sequence
  Chemically synthesized
ugaauagcucaagacuucugcac

SEQ ID NO: 57182 - RNA, 23 nt, Artificial Sequence
  Chemically synthesized
gaauagcucaagacuucugcacc

SEQ ID NO: 57183 - RNA, 23 nt, Artificial Sequence
  Chemically synthesized
aauagcucaagacuucugcacca

SEQ ID NO: 57184 - RNA, 23 nt, Artificial Sequence
  Chemically synthesized
ccuaauaaagccuuuaucagugg

SEQ ID NO: 57185 - RNA, 23 nt, Artificial Sequence
  Chemically synthesized
cuaauaaagccuuuaucaguggu

SEQ ID NO: 57186 - RNA, 23 nt, Artificial Sequence
  Chemically synthesized
uaauaaagccuuuaucagugguc

SEQ ID NO: 57187 - RNA, 23 nt, Artificial Sequence
  Chemically synthesized
aauaaagccuuuaucagugguca

SEQ ID NO: 57188 - RNA, 23 nt, Artificial Sequence
  Chemically synthesized
auaaagccuuuaucaguggucac

SEQ ID NO: 57189 - RNA, 23 nt, Artificial Sequence
  Chemically synthesized
cuccuucuugaguauugccuggg

SEQ ID NO: 57190 - RNA, 23 nt, Artificial Sequence
  Chemically synthesized
uccuucuugaguauugccugggu

SEQ ID NO: 57191 - RNA, 23 nt, Artificial Sequence
  Chemically synthesized
ccuucuugaguauugccugggua

SEQ ID NO: 57192 - RNA, 23 nt, Artificial Sequence
  Chemically synthesized
cuucuugaguauugccuggguaa

SEQ ID NO: 57193 - RNA, 23 nt, Artificial Sequence
  Chemically synthesized
uucuugaguauugccuggguaac

SEQ ID NO: 57194 - RNA, 23 nt, Artificial Sequence
  Chemically synthesized
ugcaaccaguuauaaauaaacgc

SEQ ID NO: 57195 - RNA, 23 nt, Artificial Sequence
  Chemically synthesized
gcaaccaguuauaaauaaacgca

SEQ ID NO: 57196 - RNA, 23 nt, Artificial Sequence
  Chemically synthesized
caaccaguuauaaauaaacgcaa

SEQ ID NO: 57197 - RNA, 23 nt, Artificial Sequence
  Chemically synthesized
aaccaguuauaaauaaacgcaaa

SEQ ID NO: 57198 - RNA, 23 nt, Artificial Sequence
  Chemically synthesized
accaguuauaaauaaacgcaaau

SEQ ID NO: 57199 - RNA, 23 nt, Artificial Sequence
  Chemically synthesized
ggucacuuuagaaauggcuuggc

SEQ ID NO: 57200 - RNA, 23 nt, Artificial Sequence
  Chemically synthesized
gucacuuuagaaauggcuuggca

SEQ ID NO: 57201 - RNA, 23 nt, Artificial Sequence
  Chemically synthesized
ucacuuuagaaauggcuuggcaa

SEQ ID NO: 57202 - RNA, 23 nt, Artificial Sequence
  Chemically synthesized
cacuuuagaaauggcuuggcaac

SEQ ID NO: 57203 - RNA, 23 nt, Artificial Sequence
  Chemically synthesized
acuuuagaaauggcuuggcaaca

SEQ ID NO: 57204 - RNA, 23 nt, Artificial Sequence
  Chemically synthesized
uagaaaaauauccuggauuguug

SEQ ID NO: 57205 - RNA, 23 nt, Artificial Sequence
  Chemically synthesized
agaaaaauauccuggauuguuga

SEQ ID NO: 57206 - RNA, 23 nt, Artificial Sequence
  Chemically synthesized
gaaaaauauccuggauuguugau

SEQ ID NO: 57207 - RNA, 23 nt, Artificial Sequence
  Chemically synthesized
aaaaauauccuggauuguugaug

SEQ ID NO: 57208 - RNA, 23 nt, Artificial Sequence
  Chemically synthesized
aaaauauccuggauuguugaugu

SEQ ID NO: 57209 - RNA, 23 nt, Artificial Sequence
  Chemically synthesized
aaauauccuggauuguugauguu

SEQ ID NO: 57210 - RNA, 23 nt, Artificial Sequence
  Chemically synthesized
aauauccuggauuguugauguug

SEQ ID NO: 57211 - RNA, 23 nt, Artificial Sequence
  Chemically synthesized
auauccuggauuguugauguugu

SEQ ID NO: 57212 - RNA, 23 nt, Artificial Sequence
  Chemically synthesized
uauccuggauuguugauguuguu

SEQ ID NO: 57213 - RNA, 23 nt, Artificial Sequence
  Chemically synthesized
guggauugcuaugauuaugaugc

SEQ ID NO: 57214 - RNA, 23 nt, Artificial Sequence
  Chemically synthesized
uggauugcuaugauuaugaugcc

SEQ ID NO: 57215 - RNA, 23 nt, Artificial Sequence
  Chemically synthesized
ggauugcuaugauuaugaugcca

SEQ ID NO: 57216 - RNA, 23 nt, Artificial Sequence
  Chemically synthesized
gauugcuaugauuaugaugccag

SEQ ID NO: 57217 - RNA, 23 nt, Artificial Sequence
  Chemically synthesized
auugcuaugauuaugaugccaga

SEQ ID NO: 57218 - RNA, 23 nt, Artificial Sequence
  Chemically synthesized
cagaaaaaugccaaacucagugc

SEQ ID NO: 57219 - RNA, 23 nt, Artificial Sequence
  Chemically synthesized
agaaaaaugccaaacucagugcc

SEQ ID NO: 57220 - RNA, 23 nt, Artificial Sequence
  Chemically synthesized
gaaaaaugccaaacucagugccu

SEQ ID NO: 57221 - RNA, 23 nt, Artificial Sequence
  Chemically synthesized
aaaaaugccaaacucagugccuu

SEQ ID NO: 57222 - RNA, 23 nt, Artificial Sequence
  Chemically synthesized
aaaaugccaaacucagugccuuu

SEQ ID NO: 57223 - RNA, 23 nt, Artificial Sequence
  Chemically synthesized
uguguagaggacaugaaggaagg

SEQ ID NO: 57224 - RNA, 23 nt, Artificial Sequence
  Chemically synthesized
guguagaggacaugaaggaaggc

SEQ ID NO: 57225 - RNA, 23 nt, Artificial Sequence
  Chemically synthesized
uguagaggacaugaaggaaggca

SEQ ID NO: 57226 - RNA, 23 nt, Artificial Sequence
  Chemically synthesized
guagaggacaugaaggaaggcaa

SEQ ID NO: 57227 - RNA, 23 nt, Artificial Sequence
  Chemically synthesized
uagaggacaugaaggaaggcaaa

SEQ ID NO: 57228 - RNA, 23 nt, Artificial Sequence
  Chemically synthesized
cuuucuuuucauaaacauaaggg

SEQ ID NO: 57229 - RNA, 23 nt, Artificial Sequence
  Chemically synthesized
uuucuuuucauaaacauaagggu

SEQ ID NO: 57230 - RNA, 23 nt, Artificial Sequence
  Chemically synthesized
uucuuuucauaaacauaagggua

SEQ ID NO: 57231 - RNA, 23 nt, Artificial Sequence
  Chemically synthesized
ucuuuucauaaacauaaggguag

SEQ ID NO: 57232 - RNA, 23 nt, Artificial Sequence
  Chemically synthesized
cuuuucauaaacauaaggguaga

SEQ ID NO: 57233 - RNA, 23 nt, Artificial Sequence
  Chemically synthesized
uguuuaauaaggaaagagguuug

SEQ ID NO: 57234 - RNA, 23 nt, Artificial Sequence
  Chemically synthesized
guuuaauaaggaaagagguuuga

SEQ ID NO: 57235 - RNA, 23 nt, Artificial Sequence
  Chemically synthesized
uuuaauaaggaaagagguuugaa

SEQ ID NO: 57236 - RNA, 23 nt, Artificial Sequence
  Chemically synthesized
uuaauaaggaaagagguuugaaa

SEQ ID NO: 57237 - RNA, 23 nt, Artificial Sequence
  Chemically synthesized
uaauaaggaaagagguuugaaaa

SEQ ID NO: 57238 - RNA, 23 nt, Artificial Sequence
  Chemically synthesized
uugcuaugauuaugaugccagac

SEQ ID NO: 57239 - RNA, 23 nt, Artificial Sequence
  Chemically synthesized
ucuccuucuugaguauugccugg

SEQ ID NO: 57240 - RNA, 23 nt, Artificial Sequence
  Chemically synthesized
caaaaauacauacagucucuugc

SEQ ID NO: 57241 - RNA, 23 nt, Artificial Sequence
  Chemically synthesized
aaaaauacauacagucucuugcu

SEQ ID NO: 57242 - RNA, 23 nt, Artificial Sequence
  Chemically synthesized
aaaauacauacagucucuugcuu

SEQ ID NO: 57243 - RNA, 23 nt, Artificial Sequence
  Chemically synthesized
aaauacauacagucucuugcuuu

SEQ ID NO: 57244 - RNA, 23 nt, Artificial Sequence
  Chemically synthesized
aauacauacagucucuugcuuuu

SEQ ID NO: 57245 - RNA, 23 nt, Artificial Sequence
  Chemically synthesized
uuuucauaaacauaaggguagau

SEQ ID NO: 57246 - RNA, 23 nt, Artificial Sequence
  Chemically synthesized
uuucauaaacauaaggguagauu

SEQ ID NO: 57247 - RNA, 23 nt, Artificial Sequence
  Chemically synthesized
uucauaaacauaaggguagauua

SEQ ID NO: 57248 - RNA, 23 nt, Artificial Sequence
  Chemically synthesized
aagguacucugcauuagauucug

SEQ ID NO: 57249 - RNA, 23 nt, Artificial Sequence
  Chemically synthesized
agguacucugcauuagauucugg

SEQ ID NO: 57250 - RNA, 23 nt, Artificial Sequence
  Chemically synthesized
gguacucugcauuagauucugga

SEQ ID NO: 57251 - RNA, 23 nt, Artificial Sequence
  Chemically synthesized
guacucugcauuagauucuggau

SEQ ID NO: 57252 - RNA, 23 nt, Artificial Sequence
  Chemically synthesized
uacucugcauuagauucuggaua

SEQ ID NO: 57253 - RNA, 23 nt, Artificial Sequence
  Chemically synthesized
acucugcauuagauucuggauau

SEQ ID NO: 57254 - RNA, 23 nt, Artificial Sequence
  Chemically synthesized
gauauugauugauuuugagguug

SEQ ID NO: 57255 - RNA, 23 nt, Artificial Sequence
  Chemically synthesized
auauugauugauuuugagguugu

SEQ ID NO: 57256 - RNA, 23 nt, Artificial Sequence
  Chemically synthesized
uauugauugauuuugagguuguu

SEQ ID NO: 57257 - RNA, 23 nt, Artificial Sequence
  Chemically synthesized
auugauugauuuugagguuguug

SEQ ID NO: 57258 - RNA, 23 nt, Artificial Sequence
  Chemically synthesized
cacauuuauaaaagccaucaucc

SEQ ID NO: 57259 - RNA, 23 nt, Artificial Sequence
  Chemically synthesized
acauuuauaaaagccaucauccc

SEQ ID NO: 57260 - RNA, 23 nt, Artificial Sequence
  Chemically synthesized
cauuuauaaaagccaucaucccu

SEQ ID NO: 57261 - RNA, 23 nt, Artificial Sequence
  Chemically synthesized
auuuauaaaagccaucaucccuu

SEQ ID NO: 57262 - RNA, 23 nt, Artificial Sequence
  Chemically synthesized
uuuauaaaagccaucaucccuua

SEQ ID NO: 57263 - RNA, 23 nt, Artificial Sequence
  Chemically synthesized
aucuguuaaaaggaauacaguuc

SEQ ID NO: 57264 - RNA, 23 nt, Artificial Sequence
  Chemically synthesized
ucuguuaaaaggaauacaguucg

SEQ ID NO: 57265 - RNA, 23 nt, Artificial Sequence
  Chemically synthesized
cuguuaaaaggaauacaguucgc

SEQ ID NO: 57266 - RNA, 23 nt, Artificial Sequence
  Chemically synthesized
uguuaaaaggaauacaguucgcc

SEQ ID NO: 57267 - RNA, 23 nt, Artificial Sequence
  Chemically synthesized
guuaaaaggaauacaguucgccc

SEQ ID NO: 57268 - RNA, 23 nt, Artificial Sequence
  Chemically synthesized
ucuuucuaccuuaaguaaacugg

SEQ ID NO: 57269 - RNA, 23 nt, Artificial Sequence
  Chemically synthesized
cuuucuaccuuaaguaaacugga

SEQ ID NO: 57270 - RNA, 23 nt, Artificial Sequence
  Chemically synthesized
uuucuaccuuaaguaaacuggag

SEQ ID NO: 57271 - RNA, 23 nt, Artificial Sequence
  Chemically synthesized
uucuaccuuaaguaaacuggagg

SEQ ID NO: 57272 - RNA, 23 nt, Artificial Sequence
  Chemically synthesized
ucuaccuuaaguaaacuggagga

SEQ ID NO: 57273 - RNA, 23 nt, Artificial Sequence
  Chemically synthesized
aggagucagcuguguuaauaugg

SEQ ID NO: 57274 - RNA, 23 nt, Artificial Sequence
  Chemically synthesized
ggagucagcuguguuaauauggu

SEQ ID NO: 57275 - RNA, 23 nt, Artificial Sequence
  Chemically synthesized
gagucagcuguguuaauaugguc

SEQ ID NO: 57276 - RNA, 23 nt, Artificial Sequence
  Chemically synthesized
agucagcuguguuaauaugguca

SEQ ID NO: 57277 - RNA, 23 nt, Artificial Sequence
  Chemically synthesized
gucagcuguguuaauauggucaa

SEQ ID NO: 57278 - RNA, 23 nt, Artificial Sequence
  Chemically synthesized
gagguuguugcugaugucuacca

SEQ ID NO: 57279 - RNA, 23 nt, Artificial Sequence
  Chemically synthesized
agguuguugcugaugucuaccaa

SEQ ID NO: 57280 - RNA, 23 nt, Artificial Sequence
  Chemically synthesized
gguuguugcugaugucuaccaau

SEQ ID NO: 57281 - RNA, 23 nt, Artificial Sequence
  Chemically synthesized
guuguugcugaugucuaccaaua

SEQ ID NO: 57282 - RNA, 23 nt, Artificial Sequence
  Chemically synthesized
uuguugcugaugucuaccaauau

SEQ ID NO: 57283 - RNA, 23 nt, Artificial Sequence
  Chemically synthesized
cuucuuuaacaaaaagagcaugg

SEQ ID NO: 57284 - RNA, 23 nt, Artificial Sequence
  Chemically synthesized
uucuuuaacaaaaagagcauggu

SEQ ID NO: 57285 - RNA, 23 nt, Artificial Sequence
  Chemically synthesized
ucuuuaacaaaaagagcaugguu

SEQ ID NO: 57286 - RNA, 23 nt, Artificial Sequence
  Chemically synthesized
cuuuaacaaaaagagcaugguua

SEQ ID NO: 57287 - RNA, 23 nt, Artificial Sequence
  Chemically synthesized
uuuaacaaaaagagcaugguuaa

SEQ ID NO: 57288 - RNA, 23 nt, Artificial Sequence
  Chemically synthesized
gcucaaguaaaagagcaguaucc

SEQ ID NO: 57289 - RNA, 23 nt, Artificial Sequence
  Chemically synthesized
cucaaguaaaagagcaguaucca

SEQ ID NO: 57290 - RNA, 23 nt, Artificial Sequence
  Chemically synthesized
ucaaguaaaagagcaguauccag

SEQ ID NO: 57291 - RNA, 23 nt, Artificial Sequence
  Chemically synthesized
caaguaaaagagcaguauccagc

SEQ ID NO: 57292 - RNA, 23 nt, Artificial Sequence
  Chemically synthesized
aaguaaaagagcaguauccagcc

SEQ ID NO: 57293 - RNA, 23 nt, Artificial Sequence
  Chemically synthesized
aaagacaaucuacaauggugcga

SEQ ID NO: 57294 - RNA, 23 nt, Artificial Sequence
  Chemically synthesized
aagacaaucuacaauggugcgau

SEQ ID NO: 57295 - RNA, 23 nt, Artificial Sequence
  Chemically synthesized
agacaaucuacaauggugcgaug

SEQ ID NO: 57296 - RNA, 23 nt, Artificial Sequence
  Chemically synthesized
aauaaggaaagagguuugaaaaa

SEQ ID NO: 57297 - RNA, 23 nt, Artificial Sequence
  Chemically synthesized
uagcuugcugucuaaaauucugg

SEQ ID NO: 57298 - RNA, 23 nt, Artificial Sequence
  Chemically synthesized
agcuugcugucuaaaauucuggu

SEQ ID NO: 57299 - RNA, 23 nt, Artificial Sequence
  Chemically synthesized
gcuugcugucuaaaauucugguu

SEQ ID NO: 57300 - RNA, 23 nt, Artificial Sequence
  Chemically synthesized
cuugcugucuaaaauucugguuu

SEQ ID NO: 57301 - RNA, 23 nt, Artificial Sequence
  Chemically synthesized
uugcugucuaaaauucugguuuc

SEQ ID NO: 57302 - RNA, 23 nt, Artificial Sequence
  Chemically synthesized
uuuauagaggaagaauuacaugc

SEQ ID NO: 57303 - RNA, 23 nt, Artificial Sequence
  Chemically synthesized
uuauagaggaagaauuacaugcc

SEQ ID NO: 57304 - RNA, 23 nt, Artificial Sequence
  Chemically synthesized
uauagaggaagaauuacaugcca

SEQ ID NO: 57305 - RNA, 23 nt, Artificial Sequence
  Chemically synthesized
auagaggaagaauuacaugccag

SEQ ID NO: 57306 - RNA, 23 nt, Artificial Sequence
  Chemically synthesized
uagaggaagaauuacaugccagc

SEQ ID NO: 57307 - RNA, 23 nt, Artificial Sequence
  Chemically synthesized
ccucagauauaccuaauaaagcc

SEQ ID NO: 57308 - RNA, 23 nt, Artificial Sequence
  Chemically synthesized
cucagauauaccuaauaaagccu

SEQ ID NO: 57309 - RNA, 23 nt, Artificial Sequence
  Chemically synthesized
ucagauauaccuaauaaagccuu

SEQ ID NO: 57310 - RNA, 23 nt, Artificial Sequence
  Chemically synthesized
cagauauaccuaauaaagccuuu

SEQ ID NO: 57311 - RNA, 23 nt, Artificial Sequence
  Chemically synthesized
agauauaccuaauaaagccuuua

SEQ ID NO: 57312 - RNA, 23 nt, Artificial Sequence
  Chemically synthesized
accuaauaaagccuuuaucagug

SEQ ID NO: 57313 - RNA, 23 nt, Artificial Sequence
  Chemically synthesized
auggaaauagccauacgaaaugu

SEQ ID NO: 57314 - RNA, 23 nt, Artificial Sequence
  Chemically synthesized
uggaaauagccauacgaaaugua

SEQ ID NO: 57315 - RNA, 23 nt, Artificial Sequence
  Chemically synthesized
ggaaauagccauacgaaauguau

SEQ ID NO: 57316 - RNA, 23 nt, Artificial Sequence
  Chemically synthesized
gaaauagccauacgaaauguauu

SEQ ID NO: 57317 - RNA, 23 nt, Artificial Sequence
  Chemically synthesized
aaauagccauacgaaauguauua

SEQ ID NO: 57318 - RNA, 23 nt, Artificial Sequence
  Chemically synthesized
acuguuuugcauaacauagguga

SEQ ID NO: 57319 - RNA, 23 nt, Artificial Sequence
  Chemically synthesized
cuguuuugcauaacauaggugag

SEQ ID NO: 57320 - RNA, 23 nt, Artificial Sequence
  Chemically synthesized
uguuuugcauaacauaggugagu

SEQ ID NO: 57321 - RNA, 23 nt, Artificial Sequence
  Chemically synthesized
guuuugcauaacauaggugagua

SEQ ID NO: 57322 - RNA, 23 nt, Artificial Sequence
  Chemically synthesized
uuuugcauaacauaggugaguag

SEQ ID NO: 57323 - RNA, 23 nt, Artificial Sequence
  Chemically synthesized
ugcauaacauaggugaguaguga

SEQ ID NO: 57324 - RNA, 23 nt, Artificial Sequence
  Chemically synthesized
gcauaacauaggugaguagugac

SEQ ID NO: 57325 - RNA, 23 nt, Artificial Sequence
  Chemically synthesized
cauaacauaggugaguagugaca

SEQ ID NO: 57326 - RNA, 23 nt, Artificial Sequence
  Chemically synthesized
auaacauaggugaguagugacau

SEQ ID NO: 57327 - RNA, 23 nt, Artificial Sequence
  Chemically synthesized
uaacauaggugaguagugacauu

SEQ ID NO: 57328 - RNA, 23 nt, Artificial Sequence
  Chemically synthesized
cagaaaaacagugagaaccaucc

SEQ ID NO: 57329 - RNA, 23 nt, Artificial Sequence
  Chemically synthesized
agaaaaacagugagaaccauccu

SEQ ID NO: 57330 - RNA, 23 nt, Artificial Sequence
  Chemically synthesized
gaaaaacagugagaaccauccua

SEQ ID NO: 57331 - RNA, 23 nt, Artificial Sequence
  Chemically synthesized
aaaaacagugagaaccauccuaa

SEQ ID NO: 57332 - RNA, 23 nt, Artificial Sequence
  Chemically synthesized
aaaacagugagaaccauccuaaa

SEQ ID NO: 57333 - RNA, 23 nt, Artificial Sequence
  Chemically synthesized
uaauacuuaaccuaauauagugc

SEQ ID NO: 57334 - RNA, 23 nt, Artificial Sequence
  Chemically synthesized
aauacuuaaccuaauauagugca

SEQ ID NO: 57335 - RNA, 23 nt, Artificial Sequence
  Chemically synthesized
auacuuaaccuaauauagugcaa

SEQ ID NO: 57336 - RNA, 23 nt, Artificial Sequence
  Chemically synthesized
uacuuaaccuaauauagugcaau

SEQ ID NO: 57337 - RNA, 23 nt, Artificial Sequence
  Chemically synthesized
acuuaaccuaauauagugcaauu

SEQ ID NO: 57338 - RNA, 23 nt, Artificial Sequence
  Chemically synthesized
cauuucacuagaauucaucaugg

SEQ ID NO: 57339 - RNA, 23 nt, Artificial Sequence
  Chemically synthesized
auuucacuagaauucaucauggu

SEQ ID NO: 57340 - RNA, 23 nt, Artificial Sequence
  Chemically synthesized
uuucacuagaauucaucauggua

SEQ ID NO: 57341 - RNA, 23 nt, Artificial Sequence
  Chemically synthesized
uucacuagaauucaucaugguaa

SEQ ID NO: 57342 - RNA, 23 nt, Artificial Sequence
  Chemically synthesized
ucacuagaauucaucaugguaau

SEQ ID NO: 57343 - RNA, 23 nt, Artificial Sequence
  Chemically synthesized
aaaaaacaacaaaaaccucauuc

SEQ ID NO: 57344 - RNA, 23 nt, Artificial Sequence
  Chemically synthesized
aaaaacaacaaaaaccucauucc

SEQ ID NO: 57345 - RNA, 23 nt, Artificial Sequence
  Chemically synthesized
aaaacaacaaaaaccucauuccc

SEQ ID NO: 57346 - RNA, 23 nt, Artificial Sequence
  Chemically synthesized
aaacaacaaaaaccucauucccu

SEQ ID NO: 57347 - RNA, 23 nt, Artificial Sequence
  Chemically synthesized
aacaacaaaaaccucauucccuu

SEQ ID NO: 57348 - RNA, 23 nt, Artificial Sequence
  Chemically synthesized
acaacaaaaaccucauucccuuu

SEQ ID NO: 57349 - RNA, 23 nt, Artificial Sequence
  Chemically synthesized
gugcaucuauacaaguuuucucc

SEQ ID NO: 57350 - RNA, 23 nt, Artificial Sequence
  Chemically synthesized
ugcaucuauacaaguuuucucca

SEQ ID NO: 57351 - RNA, 23 nt, Artificial Sequence
  Chemically synthesized
gcaucuauacaaguuuucuccau

SEQ ID NO: 57352 - RNA, 23 nt, Artificial Sequence
  Chemically synthesized
caucuauacaaguuuucuccaua

SEQ ID NO: 57353 - RNA, 23 nt, Artificial Sequence
  Chemically synthesized
aucuauacaaguuuucuccauaa

SEQ ID NO: 57354 - RNA, 23 nt, Artificial Sequence
  Chemically synthesized
cuuuuucuaguguuuugaguucc

SEQ ID NO: 57355 - RNA, 23 nt, Artificial Sequence
  Chemically synthesized
uuuuucuaguguuuugaguuccu

SEQ ID NO: 57356 - RNA, 23 nt, Artificial Sequence
  Chemically synthesized
uuuucuaguguuuugaguuccuu

SEQ ID NO: 57357 - RNA, 23 nt, Artificial Sequence
  Chemically synthesized
uuucuaguguuuugaguuccuuu

SEQ ID NO: 57358 - RNA, 23 nt, Artificial Sequence
  Chemically synthesized
uucuaguguuuugaguuccuuuc

SEQ ID NO: 57359 - RNA, 23 nt, Artificial Sequence
  Chemically synthesized
aaacuugaucaccagcacagugc

SEQ ID NO: 57360 - RNA, 23 nt, Artificial Sequence
  Chemically synthesized
aacuugaucaccagcacagugca

SEQ ID NO: 57361 - RNA, 23 nt, Artificial Sequence
  Chemically synthesized
acuugaucaccagcacagugcaa

SEQ ID NO: 57362 - RNA, 23 nt, Artificial Sequence
  Chemically synthesized
cuugaucaccagcacagugcaag

SEQ ID NO: 57363 - RNA, 23 nt, Artificial Sequence
  Chemically synthesized
uugaucaccagcacagugcaagg

SEQ ID NO: 57364 - RNA, 23 nt, Artificial Sequence
  Chemically synthesized
cacagugcaaggaaugauaagcc

SEQ ID NO: 57365 - RNA, 23 nt, Artificial Sequence
  Chemically synthesized
acagugcaaggaaugauaagccc

SEQ ID NO: 57366 - RNA, 23 nt, Artificial Sequence
  Chemically synthesized
cagugcaaggaaugauaagcccu

SEQ ID NO: 57367 - RNA, 23 nt, Artificial Sequence
  Chemically synthesized
agugcaaggaaugauaagcccua

SEQ ID NO: 57368 - RNA, 23 nt, Artificial Sequence
  Chemically synthesized
gugcaaggaaugauaagcccuaa

SEQ ID NO: 57369 - RNA, 23 nt, Artificial Sequence
  Chemically synthesized
ugcaaggaaugauaagcccuaac

SEQ ID NO: 57370 - RNA, 23 nt, Artificial Sequence
  Chemically synthesized
guuauuggaaagauacgauuugg

SEQ ID NO: 57371 - RNA, 23 nt, Artificial Sequence
  Chemically synthesized
uuauuggaaagauacgauuugga

SEQ ID NO: 57372 - RNA, 23 nt, Artificial Sequence
  Chemically synthesized
uauuggaaagauacgauuuggaa

SEQ ID NO: 57373 - RNA, 23 nt, Artificial Sequence
  Chemically synthesized
auuggaaagauacgauuuggaau

SEQ ID NO: 57374 - RNA, 23 nt, Artificial Sequence
  Chemically synthesized
uuggaaagauacgauuuggaaug

SEQ ID NO: 57375 - RNA, 23 nt, Artificial Sequence
  Chemically synthesized
uagaaaaacaagaagacacacag

SEQ ID NO: 57376 - RNA, 23 nt, Artificial Sequence
  Chemically synthesized
agaaaaacaagaagacacacagc

SEQ ID NO: 57377 - RNA, 23 nt, Artificial Sequence
  Chemically synthesized
gaaaaacaagaagacacacagca

SEQ ID NO: 57378 - RNA, 23 nt, Artificial Sequence
  Chemically synthesized
aaaaacaagaagacacacagcac

SEQ ID NO: 57379 - RNA, 23 nt, Artificial Sequence
  Chemically synthesized
aaaacaagaagacacacagcaca

SEQ ID NO: 57380 - RNA, 23 nt, Artificial Sequence
  Chemically synthesized
cuccacauuggaaauagcugcag

SEQ ID NO: 57381 - RNA, 23 nt, Artificial Sequence
  Chemically synthesized
uccacauuggaaauagcugcagg

SEQ ID NO: 57382 - RNA, 23 nt, Artificial Sequence
  Chemically synthesized
ccacauuggaaauagcugcaggg

SEQ ID NO: 57383 - RNA, 23 nt, Artificial Sequence
  Chemically synthesized
cacauuggaaauagcugcagggg

SEQ ID NO: 57384 - RNA, 23 nt, Artificial Sequence
  Chemically synthesized
acauuggaaauagcugcaggggg

SEQ ID NO: 57385 - RNA, 23 nt, Artificial Sequence
  Chemically synthesized
caagguacucugcauuagauucu

SEQ ID NO: 57386 - RNA, 23 nt, Artificial Sequence
  Chemically synthesized
uuauaaaagccaucaucccuuaa

SEQ ID NO: 57387 - RNA, 23 nt, Artificial Sequence
  Chemically synthesized
cagcuauuaugccaaaaccauca

SEQ ID NO: 57388 - RNA, 23 nt, Artificial Sequence
  Chemically synthesized
agcuauuaugccaaaaccaucag

SEQ ID NO: 57389 - RNA, 23 nt, Artificial Sequence
  Chemically synthesized
gcuauuaugccaaaaccaucaga

SEQ ID NO: 57390 - RNA, 23 nt, Artificial Sequence
  Chemically synthesized
cuauuaugccaaaaccaucagag

SEQ ID NO: 57391 - RNA, 23 nt, Artificial Sequence
  Chemically synthesized
uauuaugccaaaaccaucagagu

SEQ ID NO: 57392 - RNA, 23 nt, Artificial Sequence
  Chemically synthesized
cagguagagcauuuuuacuaggc

SEQ ID NO: 57393 - RNA, 23 nt, Artificial Sequence
  Chemically synthesized
agguagagcauuuuuacuaggcu

SEQ ID NO: 57394 - RNA, 23 nt, Artificial Sequence
  Chemically synthesized
gguagagcauuuuuacuaggcua

SEQ ID NO: 57395 - RNA, 23 nt, Artificial Sequence
  Chemically synthesized
guagagcauuuuuacuaggcuau

SEQ ID NO: 57396 - RNA, 23 nt, Artificial Sequence
  Chemically synthesized
uagagcauuuuuacuaggcuaua

SEQ ID NO: 57397 - RNA, 23 nt, Artificial Sequence
  Chemically synthesized
ugguuaacuccaaagacuucucu

SEQ ID NO: 57398 - RNA, 23 nt, Artificial Sequence
  Chemically synthesized
gguuaacuccaaagacuucucua

SEQ ID NO: 57399 - RNA, 23 nt, Artificial Sequence
  Chemically synthesized
guuaacuccaaagacuucucuag

SEQ ID NO: 57400 - RNA, 23 nt, Artificial Sequence
  Chemically synthesized
uuaacuccaaagacuucucuaga

SEQ ID NO: 57401 - RNA, 23 nt, Artificial Sequence
  Chemically synthesized
uaacuccaaagacuucucuagac

SEQ ID NO: 57402 - RNA, 23 nt, Artificial Sequence
  Chemically synthesized
aggucacuuuagaaauggcuugg

SEQ ID NO: 57403 - RNA, 23 nt, Artificial Sequence
  Chemically synthesized
aaggaaagagguuugaaaaaugc

SEQ ID NO: 57404 - RNA, 23 nt, Artificial Sequence
  Chemically synthesized
aggaaagagguuugaaaaaugcc

SEQ ID NO: 57405 - RNA, 23 nt, Artificial Sequence
  Chemically synthesized
ggaaagagguuugaaaaaugccu

SEQ ID NO: 57406 - RNA, 23 nt, Artificial Sequence
  Chemically synthesized
gaaagagguuugaaaaaugccua

SEQ ID NO: 57407 - RNA, 23 nt, Artificial Sequence
  Chemically synthesized
aaagagguuugaaaaaugccuau

SEQ ID NO: 57408 - RNA, 23 nt, Artificial Sequence
  Chemically synthesized
gcagaaaaaugccaaacucagug

SEQ ID NO: 57409 - RNA, 23 nt, Artificial Sequence
  Chemically synthesized
cucagugccuuuuaguuauuuug

SEQ ID NO: 57410 - RNA, 23 nt, Artificial Sequence
  Chemically synthesized
ucagugccuuuuaguuauuuuga

SEQ ID NO: 57411 - RNA, 23 nt, Artificial Sequence
  Chemically synthesized
cagugccuuuuaguuauuuugau

SEQ ID NO: 57412 - RNA, 23 nt, Artificial Sequence
  Chemically synthesized
agugccuuuuaguuauuuugaua

SEQ ID NO: 57413 - RNA, 23 nt, Artificial Sequence
  Chemically synthesized
gugccuuuuaguuauuuugauau

SEQ ID NO: 57414 - RNA, 23 nt, Artificial Sequence
  Chemically synthesized
agacuaagacagauauagaagcu

SEQ ID NO: 57415 - RNA, 23 nt, Artificial Sequence
  Chemically synthesized
gacuaagacagauauagaagcua

SEQ ID NO: 57416 - RNA, 23 nt, Artificial Sequence
  Chemically synthesized
acuaagacagauauagaagcuac

SEQ ID NO: 57417 - RNA, 23 nt, Artificial Sequence
  Chemically synthesized
cuaagacagauauagaagcuacu

SEQ ID NO: 57418 - RNA, 23 nt, Artificial Sequence
  Chemically synthesized
uaagacagauauagaagcuacuu

SEQ ID NO: 57419 - RNA, 23 nt, Artificial Sequence
  Chemically synthesized
gaucaagaacuuuuaucaacccu

SEQ ID NO: 57420 - RNA, 23 nt, Artificial Sequence
  Chemically synthesized
aucaagaacuuuuaucaacccuu

SEQ ID NO: 57421 - RNA, 23 nt, Artificial Sequence
  Chemically synthesized
ucaagaacuuuuaucaacccuuc

SEQ ID NO: 57422 - RNA, 23 nt, Artificial Sequence
  Chemically synthesized
caagaacuuuuaucaacccuucu

SEQ ID NO: 57423 - RNA, 23 nt, Artificial Sequence
  Chemically synthesized
aagaacuuuuaucaacccuucuu

SEQ ID NO: 57424 - RNA, 23 nt, Artificial Sequence
  Chemically synthesized
ggauaucccuccauuuuuauuca

SEQ ID NO: 57425 - RNA, 23 nt, Artificial Sequence
  Chemically synthesized
gauaucccuccauuuuuauucag

SEQ ID NO: 57426 - RNA, 23 nt, Artificial Sequence
  Chemically synthesized
auaucccuccauuuuuauucagu

SEQ ID NO: 57427 - RNA, 23 nt, Artificial Sequence
  Chemically synthesized
uaucccuccauuuuuauucaguc

SEQ ID NO: 57428 - RNA, 23 nt, Artificial Sequence
  Chemically synthesized
aucccuccauuuuuauucagucu

SEQ ID NO: 57429 - RNA, 23 nt, Artificial Sequence
  Chemically synthesized
gaggaagaauuacaugccagcuc

SEQ ID NO: 57430 - RNA, 23 nt, Artificial Sequence
  Chemically synthesized
aggaagaauuacaugccagcucu

SEQ ID NO: 57431 - RNA, 23 nt, Artificial Sequence
  Chemically synthesized
ggaagaauuacaugccagcucua

SEQ ID NO: 57432 - RNA, 23 nt, Artificial Sequence
  Chemically synthesized
gaagaauuacaugccagcucuau

SEQ ID NO: 57433 - RNA, 23 nt, Artificial Sequence
  Chemically synthesized
aagaauuacaugccagcucuaua

SEQ ID NO: 57434 - RNA, 23 nt, Artificial Sequence
  Chemically synthesized
agaauuacaugccagcucuauag

SEQ ID NO: 57435 - RNA, 23 nt, Artificial Sequence
  Chemically synthesized
gaauuacaugccagcucuauaga

SEQ ID NO: 57436 - RNA, 23 nt, Artificial Sequence
  Chemically synthesized
aauuacaugccagcucuauagau

SEQ ID NO: 57437 - RNA, 23 nt, Artificial Sequence
  Chemically synthesized
auuacaugccagcucuauagaua

SEQ ID NO: 57438 - RNA, 23 nt, Artificial Sequence
  Chemically synthesized
uuacaugccagcucuauagauac

SEQ ID NO: 57439 - RNA, 23 nt, Artificial Sequence
  Chemically synthesized
auuggauuuugcaagacauuagg

SEQ ID NO: 57440 - RNA, 23 nt, Artificial Sequence
  Chemically synthesized
uuggauuuugcaagacauuaggu

SEQ ID NO: 57441 - RNA, 23 nt, Artificial Sequence
  Chemically synthesized
uggauuuugcaagacauuagguc

SEQ ID NO: 57442 - RNA, 23 nt, Artificial Sequence
  Chemically synthesized
ggauuuugcaagacauuagguca

SEQ ID NO: 57443 - RNA, 23 nt, Artificial Sequence
  Chemically synthesized
gauuuugcaagacauuaggucau

SEQ ID NO: 57444 - RNA, 23 nt, Artificial Sequence
  Chemically synthesized
ugauuaggacaaacuugaucacc

SEQ ID NO: 57445 - RNA, 23 nt, Artificial Sequence
  Chemically synthesized
gauuaggacaaacuugaucacca

SEQ ID NO: 57446 - RNA, 23 nt, Artificial Sequence
  Chemically synthesized
auuaggacaaacuugaucaccag

SEQ ID NO: 57447 - RNA, 23 nt, Artificial Sequence
  Chemically synthesized
uuaggacaaacuugaucaccagc

SEQ ID NO: 57448 - RNA, 23 nt, Artificial Sequence
  Chemically synthesized
uaggacaaacuugaucaccagca

SEQ ID NO: 57449 - RNA, 23 nt, Artificial Sequence
  Chemically synthesized
agccacauaugaaucacugagcc

SEQ ID NO: 57450 - RNA, 23 nt, Artificial Sequence
  Chemically synthesized
gccacauaugaaucacugagcca

SEQ ID NO: 57451 - RNA, 23 nt, Artificial Sequence
  Chemically synthesized
ccacauaugaaucacugagccag

SEQ ID NO: 57452 - RNA, 23 nt, Artificial Sequence
  Chemically synthesized
cacauaugaaucacugagccagg

SEQ ID NO: 57453 - RNA, 23 nt, Artificial Sequence
  Chemically synthesized
acauaugaaucacugagccaggc

SEQ ID NO: 57454 - RNA, 23 nt, Artificial Sequence
  Chemically synthesized
auucuccuucuugaguauugccu

SEQ ID NO: 57455 - RNA, 23 nt, Artificial Sequence
  Chemically synthesized
uucuccuucuugaguauugccug

SEQ ID NO: 57456 - RNA, 23 nt, Artificial Sequence
  Chemically synthesized
acauaauaucgaauaggaaucac

SEQ ID NO: 57457 - RNA, 23 nt, Artificial Sequence
  Chemically synthesized
cauaauaucgaauaggaaucaca

SEQ ID NO: 57458 - RNA, 23 nt, Artificial Sequence
  Chemically synthesized
auaauaucgaauaggaaucacaa

SEQ ID NO: 57459 - RNA, 23 nt, Artificial Sequence
  Chemically synthesized
uaauaucgaauaggaaucacaag

SEQ ID NO: 57460 - RNA, 23 nt, Artificial Sequence
  Chemically synthesized
aauaucgaauaggaaucacaagu

SEQ ID NO: 57461 - RNA, 23 nt, Artificial Sequence
  Chemically synthesized
ccuccacauuggaaauagcugca

SEQ ID NO: 57462 - RNA, 23 nt, Artificial Sequence
  Chemically synthesized
ucugaagaauucauaguaagagg

SEQ ID NO: 57463 - RNA, 23 nt, Artificial Sequence
  Chemically synthesized
cugaagaauucauaguaagagga

SEQ ID NO: 57464 - RNA, 23 nt, Artificial Sequence
  Chemically synthesized
ugaagaauucauaguaagaggaa

SEQ ID NO: 57465 - RNA, 23 nt, Artificial Sequence
  Chemically synthesized
gaagaauucauaguaagaggaag

SEQ ID NO: 57466 - RNA, 23 nt, Artificial Sequence
  Chemically synthesized
aagaauucauaguaagaggaagu

SEQ ID NO: 57467 - RNA, 23 nt, Artificial Sequence
  Chemically synthesized
agauuacgaacaauauccaucac

SEQ ID NO: 57468 - RNA, 23 nt, Artificial Sequence
  Chemically synthesized
gauuacgaacaauauccaucacu

SEQ ID NO: 57469 - RNA, 23 nt, Artificial Sequence
  Chemically synthesized
auuacgaacaauauccaucacuc

SEQ ID NO: 57470 - RNA, 23 nt, Artificial Sequence
  Chemically synthesized
uuacgaacaauauccaucacucu

SEQ ID NO: 57471 - RNA, 23 nt, Artificial Sequence
  Chemically synthesized
cauuagauucuggauauugauug

SEQ ID NO: 57472 - RNA, 23 nt, Artificial Sequence
  Chemically synthesized
auuagauucuggauauugauuga

SEQ ID NO: 57473 - RNA, 23 nt, Artificial Sequence
  Chemically synthesized
uuagauucuggauauugauugau

SEQ ID NO: 57474 - RNA, 23 nt, Artificial Sequence
  Chemically synthesized
uagauucuggauauugauugauu

SEQ ID NO: 57475 - RNA, 23 nt, Artificial Sequence
  Chemically synthesized
agauucuggauauugauugauuu

SEQ ID NO: 57476 - RNA, 23 nt, Artificial Sequence
  Chemically synthesized
uuucaucuguuguaaacucauuc

SEQ ID NO: 57477 - RNA, 23 nt, Artificial Sequence
  Chemically synthesized
uucaucuguuguaaacucauucu

SEQ ID NO: 57478 - RNA, 23 nt, Artificial Sequence
  Chemically synthesized
ucaucuguuguaaacucauucuu

SEQ ID NO: 57479 - RNA, 23 nt, Artificial Sequence
  Chemically synthesized
caucuguuguaaacucauucuuu

SEQ ID NO: 57480 - RNA, 23 nt, Artificial Sequence
  Chemically synthesized
aucuguuguaaacucauucuuuc

SEQ ID NO: 57481 - RNA, 23 nt, Artificial Sequence
  Chemically synthesized
uucuuucuaccuuaaguaaacug

SEQ ID NO: 57482 - RNA, 23 nt, Artificial Sequence
  Chemically synthesized
cugaugucuaccaauauuuuucc

SEQ ID NO: 57483 - RNA, 23 nt, Artificial Sequence
  Chemically synthesized
ugaugucuaccaauauuuuucca

SEQ ID NO: 57484 - RNA, 23 nt, Artificial Sequence
  Chemically synthesized
gaugucuaccaauauuuuuccau

SEQ ID NO: 57485 - RNA, 23 nt, Artificial Sequence
  Chemically synthesized
augucuaccaauauuuuuccauu

SEQ ID NO: 57486 - RNA, 23 nt, Artificial Sequence
  Chemically synthesized
ugucuaccaauauuuuuccauug

SEQ ID NO: 57487 - RNA, 23 nt, Artificial Sequence
  Chemically synthesized
uucauuuuuuucuauaggucagc

SEQ ID NO: 57488 - RNA, 23 nt, Artificial Sequence
  Chemically synthesized
ucauuuuuuucuauaggucagca

SEQ ID NO: 57489 - RNA, 23 nt, Artificial Sequence
  Chemically synthesized
cauuuuuuucuauaggucagcau

SEQ ID NO: 57490 - RNA, 23 nt, Artificial Sequence
  Chemically synthesized
auuuuuuucuauaggucagcauu

SEQ ID NO: 57491 - RNA, 23 nt, Artificial Sequence
  Chemically synthesized
uuuuuuucuauaggucagcauuu

SEQ ID NO: 57492 - RNA, 23 nt, Artificial Sequence
  Chemically synthesized
auggauggcauuuucuauuuucg

SEQ ID NO: 57493 - RNA, 23 nt, Artificial Sequence
  Chemically synthesized
uggauggcauuuucuauuuucgg

SEQ ID NO: 57494 - RNA, 23 nt, Artificial Sequence
  Chemically synthesized
ggauggcauuuucuauuuucggu

SEQ ID NO: 57495 - RNA, 23 nt, Artificial Sequence
  Chemically synthesized
gauggcauuuucuauuuucggug

SEQ ID NO: 57496 - RNA, 23 nt, Artificial Sequence
  Chemically synthesized
auggcauuuucuauuuucgguga

SEQ ID NO: 57497 - RNA, 23 nt, Artificial Sequence
  Chemically synthesized
augguuaacuccaaagacuucuc

SEQ ID NO: 57498 - RNA, 23 nt, Artificial Sequence
  Chemically synthesized
cucaaugucguccaacuuuuugu

SEQ ID NO: 57499 - RNA, 23 nt, Artificial Sequence
  Chemically synthesized
ucaaugucguccaacuuuuugua

SEQ ID NO: 57500 - RNA, 23 nt, Artificial Sequence
  Chemically synthesized
caaugucguccaacuuuuuguau

SEQ ID NO: 57501 - RNA, 23 nt, Artificial Sequence
  Chemically synthesized
aaugucguccaacuuuuuguauc

SEQ ID NO: 57502 - RNA, 23 nt, Artificial Sequence
  Chemically synthesized
augucguccaacuuuuuguaucc

SEQ ID NO: 57503 - RNA, 23 nt, Artificial Sequence
  Chemically synthesized
cuuuagaaauggcuuggcaacau

SEQ ID NO: 57504 - RNA, 23 nt, Artificial Sequence
  Chemically synthesized
auccuggauuguugauguuguuu

SEQ ID NO: 57505 - RNA, 23 nt, Artificial Sequence
  Chemically synthesized
uuuuaguuauuuugauauguggg

SEQ ID NO: 57506 - RNA, 23 nt, Artificial Sequence
  Chemically synthesized
uuuaguuauuuugauauguggga

SEQ ID NO: 57507 - RNA, 23 nt, Artificial Sequence
  Chemically synthesized
uuaguuauuuugauaugugggaa

SEQ ID NO: 57508 - RNA, 23 nt, Artificial Sequence
  Chemically synthesized
uaguuauuuugauaugugggaag

SEQ ID NO: 57509 - RNA, 23 nt, Artificial Sequence
  Chemically synthesized
aguuauuuugauaugugggaaga

SEQ ID NO: 57510 - RNA, 23 nt, Artificial Sequence
  Chemically synthesized
guuauuuugauaugugggaagau

SEQ ID NO: 57511 - RNA, 23 nt, Artificial Sequence
  Chemically synthesized
ugagaaccauccuaaauuucagc

SEQ ID NO: 57512 - RNA, 23 nt, Artificial Sequence
  Chemically synthesized
gagaaccauccuaaauuucagca

SEQ ID NO: 57513 - RNA, 23 nt, Artificial Sequence
  Chemically synthesized
agaaccauccuaaauuucagcaa

SEQ ID NO: 57514 - RNA, 23 nt, Artificial Sequence
  Chemically synthesized
gaaccauccuaaauuucagcaag

SEQ ID NO: 57515 - RNA, 23 nt, Artificial Sequence
  Chemically synthesized
aaccauccuaaauuucagcaagg

SEQ ID NO: 57516 - RNA, 23 nt, Artificial Sequence
  Chemically synthesized
cacauaaugaugaaucuucacac

SEQ ID NO: 57517 - RNA, 23 nt, Artificial Sequence
  Chemically synthesized
acauaaugaugaaucuucacacc

SEQ ID NO: 57518 - RNA, 23 nt, Artificial Sequence
  Chemically synthesized
cauaaugaugaaucuucacaccu

SEQ ID NO: 57519 - RNA, 23 nt, Artificial Sequence
  Chemically synthesized
auaaugaugaaucuucacaccuc

SEQ ID NO: 57520 - RNA, 23 nt, Artificial Sequence
  Chemically synthesized
uaaugaugaaucuucacaccucu

SEQ ID NO: 57521 - RNA, 23 nt, Artificial Sequence
  Chemically synthesized
auuuucgaucaucuaugcauugu

SEQ ID NO: 57522 - RNA, 23 nt, Artificial Sequence
  Chemically synthesized
uuuucgaucaucuaugcauuguu

SEQ ID NO: 57523 - RNA, 23 nt, Artificial Sequence
  Chemically synthesized
auauagaagcuacuuauuuacac

SEQ ID NO: 57524 - RNA, 23 nt, Artificial Sequence
  Chemically synthesized
uauagaagcuacuuauuuacacu

SEQ ID NO: 57525 - RNA, 23 nt, Artificial Sequence
  Chemically synthesized
auagaagcuacuuauuuacacua

SEQ ID NO: 57526 - RNA, 23 nt, Artificial Sequence
  Chemically synthesized
uagaagcuacuuauuuacacuag

SEQ ID NO: 57527 - RNA, 23 nt, Artificial Sequence
  Chemically synthesized
agaagcuacuuauuuacacuaga

SEQ ID NO: 57528 - RNA, 23 nt, Artificial Sequence
  Chemically synthesized
ugaucaagaacuuuuaucaaccc

SEQ ID NO: 57529 - RNA, 23 nt, Artificial Sequence
  Chemically synthesized
aacuuuuaucaacccuucuuugc

SEQ ID NO: 57530 - RNA, 23 nt, Artificial Sequence
  Chemically synthesized
acuuuuaucaacccuucuuugcu

SEQ ID NO: 57531 - RNA, 23 nt, Artificial Sequence
  Chemically synthesized
cuuuuaucaacccuucuuugcuu

SEQ ID NO: 57532 - RNA, 23 nt, Artificial Sequence
  Chemically synthesized
uuuuaucaacccuucuuugcuua

SEQ ID NO: 57533 - RNA, 23 nt, Artificial Sequence
  Chemically synthesized
uuuaucaacccuucuuugcuuau

SEQ ID NO: 57534 - RNA, 23 nt, Artificial Sequence
  Chemically synthesized
uuuuuauucagucuuuccuauac

SEQ ID NO: 57535 - RNA, 23 nt, Artificial Sequence
  Chemically synthesized
uuuuauucagucuuuccuauacc

SEQ ID NO: 57536 - RNA, 23 nt, Artificial Sequence
  Chemically synthesized
uuuauucagucuuuccuauaccu

SEQ ID NO: 57537 - RNA, 23 nt, Artificial Sequence
  Chemically synthesized
uuauucagucuuuccuauaccua

SEQ ID NO: 57538 - RNA, 23 nt, Artificial Sequence
  Chemically synthesized
uauucagucuuuccuauaccuau

SEQ ID NO: 57539 - RNA, 23 nt, Artificial Sequence
  Chemically synthesized
auucagucuuuccuauaccuauu

SEQ ID NO: 57540 - RNA, 23 nt, Artificial Sequence
  Chemically synthesized
acuucuauuggauuuugcaagac

SEQ ID NO: 57541 - RNA, 23 nt, Artificial Sequence
  Chemically synthesized
cuucuauuggauuuugcaagaca

SEQ ID NO: 57542 - RNA, 23 nt, Artificial Sequence
  Chemically synthesized
uucuauuggauuuugcaagacau

SEQ ID NO: 57543 - RNA, 23 nt, Artificial Sequence
  Chemically synthesized
ugagauaaaaugguguucucuuc

SEQ ID NO: 57544 - RNA, 23 nt, Artificial Sequence
  Chemically synthesized
gagauaaaaugguguucucuucc

SEQ ID NO: 57545 - RNA, 23 nt, Artificial Sequence
  Chemically synthesized
agauaaaaugguguucucuucca

SEQ ID NO: 57546 - RNA, 23 nt, Artificial Sequence
  Chemically synthesized
gauaaaaugguguucucuuccag

SEQ ID NO: 57547 - RNA, 23 nt, Artificial Sequence
  Chemically synthesized
auaaaaugguguucucuuccagu

SEQ ID NO: 57548 - RNA, 23 nt, Artificial Sequence
  Chemically synthesized
uaaaaugguguucucuuccagua

SEQ ID NO: 57549 - RNA, 23 nt, Artificial Sequence
  Chemically synthesized
agucaauuucucaaagacaagca

SEQ ID NO: 57550 - RNA, 23 nt, Artificial Sequence
  Chemically synthesized
gucaauuucucaaagacaagcaa

SEQ ID NO: 57551 - RNA, 23 nt, Artificial Sequence
  Chemically synthesized
ucaauuucucaaagacaagcaau

SEQ ID NO: 57552 - RNA, 23 nt, Artificial Sequence
  Chemically synthesized
caauuucucaaagacaagcaaug

SEQ ID NO: 57553 - RNA, 23 nt, Artificial Sequence
  Chemically synthesized
aauuucucaaagacaagcaaugu

SEQ ID NO: 57554 - RNA, 23 nt, Artificial Sequence
  Chemically synthesized
ucaaaaccauaguucagaaaucc

SEQ ID NO: 57555 - RNA, 23 nt, Artificial Sequence
  Chemically synthesized
caaaaccauaguucagaaaucca

SEQ ID NO: 57556 - RNA, 23 nt, Artificial Sequence
  Chemically synthesized
aaaaccauaguucagaaauccag

SEQ ID NO: 57557 - RNA, 23 nt, Artificial Sequence
  Chemically synthesized
aaaccauaguucagaaauccagc

SEQ ID NO: 57558 - RNA, 23 nt, Artificial Sequence
  Chemically synthesized
aaccauaguucagaaauccagcu

SEQ ID NO: 57559 - RNA, 23 nt, Artificial Sequence
  Chemically synthesized
gcuuuuucuaguguuuugaguuc

SEQ ID NO: 57560 - RNA, 23 nt, Artificial Sequence
  Chemically synthesized
auccuuguaaggguguugucuac

SEQ ID NO: 57561 - RNA, 23 nt, Artificial Sequence
  Chemically synthesized
uccuuguaaggguguugucuaca

SEQ ID NO: 57562 - RNA, 23 nt, Artificial Sequence
  Chemically synthesized
ccuuguaaggguguugucuacac

SEQ ID NO: 57563 - RNA, 23 nt, Artificial Sequence
  Chemically synthesized
cuuguaaggguguugucuacaca

SEQ ID NO: 57564 - RNA, 23 nt, Artificial Sequence
  Chemically synthesized
uuguaaggguguugucuacacau

SEQ ID NO: 57565 - RNA, 23 nt, Artificial Sequence
  Chemically synthesized
cauuuucaaucccagugaucuuc

SEQ ID NO: 57566 - RNA, 23 nt, Artificial Sequence
  Chemically synthesized
auuuucaaucccagugaucuucc

SEQ ID NO: 57567 - RNA, 23 nt, Artificial Sequence
  Chemically synthesized
uuuucaaucccagugaucuucca

SEQ ID NO: 57568 - RNA, 23 nt, Artificial Sequence
  Chemically synthesized
uuucaaucccagugaucuuccaa

SEQ ID NO: 57569 - RNA, 23 nt, Artificial Sequence
  Chemically synthesized
uucaaucccagugaucuuccaaa

SEQ ID NO: 57570 - RNA, 23 nt, Artificial Sequence
  Chemically synthesized
agauuugaagggcugaggaaucu

SEQ ID NO: 57571 - RNA, 23 nt, Artificial Sequence
  Chemically synthesized
gauuugaagggcugaggaaucuc

SEQ ID NO: 57572 - RNA, 23 nt, Artificial Sequence
  Chemically synthesized
auuugaagggcugaggaaucucu

SEQ ID NO: 57573 - RNA, 23 nt, Artificial Sequence
  Chemically synthesized
uuugaagggcugaggaaucucuu

SEQ ID NO: 57574 - RNA, 23 nt, Artificial Sequence
  Chemically synthesized
uugaagggcugaggaaucucuuc

SEQ ID NO: 57575 - RNA, 23 nt, Artificial Sequence
  Chemically synthesized
ucccaaagccacauaugaaucac

SEQ ID NO: 57576 - RNA, 23 nt, Artificial Sequence
  Chemically synthesized
cccaaagccacauaugaaucacu

SEQ ID NO: 57577 - RNA, 23 nt, Artificial Sequence
  Chemically synthesized
ccaaagccacauaugaaucacug

SEQ ID NO: 57578 - RNA, 23 nt, Artificial Sequence
  Chemically synthesized
caaagccacauaugaaucacuga

SEQ ID NO: 57579 - RNA, 23 nt, Artificial Sequence
  Chemically synthesized
aaagccacauaugaaucacugag

SEQ ID NO: 57580 - RNA, 23 nt, Artificial Sequence
  Chemically synthesized
cauaugaaucacugagccaggcu

SEQ ID NO: 57581 - RNA, 23 nt, Artificial Sequence
  Chemically synthesized
auaugaaucacugagccaggcug

SEQ ID NO: 57582 - RNA, 23 nt, Artificial Sequence
  Chemically synthesized
uggaaagauacgauuuggaaugg

SEQ ID NO: 57583 - RNA, 23 nt, Artificial Sequence
  Chemically synthesized
ggaaagauacgauuuggaaugga

SEQ ID NO: 57584 - RNA, 23 nt, Artificial Sequence
  Chemically synthesized
gaaagauacgauuuggaauggaa

SEQ ID NO: 57585 - RNA, 23 nt, Artificial Sequence
  Chemically synthesized
aaagauacgauuuggaauggaaa

SEQ ID NO: 57586 - RNA, 23 nt, Artificial Sequence
  Chemically synthesized
aagauacgauuuggaauggaaau

SEQ ID NO: 57587 - RNA, 23 nt, Artificial Sequence
  Chemically synthesized
uacgauuuggaauggaaauagcc

SEQ ID NO: 57588 - RNA, 23 nt, Artificial Sequence
  Chemically synthesized
acgauuuggaauggaaauagcca

SEQ ID NO: 57589 - RNA, 23 nt, Artificial Sequence
  Chemically synthesized
cgauuuggaauggaaauagccau

SEQ ID NO: 57590 - RNA, 23 nt, Artificial Sequence
  Chemically synthesized
gauuuggaauggaaauagccaua

SEQ ID NO: 57591 - RNA, 23 nt, Artificial Sequence
  Chemically synthesized
auuuggaauggaaauagccauac

SEQ ID NO: 57592 - RNA, 23 nt, Artificial Sequence
  Chemically synthesized
acaauagaaaaacaagaagacac

SEQ ID NO: 57593 - RNA, 23 nt, Artificial Sequence
  Chemically synthesized
caauagaaaaacaagaagacaca

SEQ ID NO: 57594 - RNA, 23 nt, Artificial Sequence
  Chemically synthesized
aauagaaaaacaagaagacacac

SEQ ID NO: 57595 - RNA, 23 nt, Artificial Sequence
  Chemically synthesized
auagaaaaacaagaagacacaca

SEQ ID NO: 57596 - RNA, 23 nt, Artificial Sequence
  Chemically synthesized
cauuggaaauagcugcagggggu

SEQ ID NO: 57597 - RNA, 23 nt, Artificial Sequence
  Chemically synthesized
ucuguuguaaacucauucuuucu

SEQ ID NO: 57598 - RNA, 23 nt, Artificial Sequence
  Chemically synthesized
guuguaaacucauucuuucuacc

SEQ ID NO: 57599 - RNA, 23 nt, Artificial Sequence
  Chemically synthesized
uuguaaacucauucuuucuaccu

SEQ ID NO: 57600 - RNA, 23 nt, Artificial Sequence
  Chemically synthesized
uguaaacucauucuuucuaccuu

SEQ ID NO: 57601 - RNA, 23 nt, Artificial Sequence
  Chemically synthesized
guaaacucauucuuucuaccuua

SEQ ID NO: 57602 - RNA, 23 nt, Artificial Sequence
  Chemically synthesized
uaaacucauucuuucuaccuuaa

SEQ ID NO: 57603 - RNA, 23 nt, Artificial Sequence
  Chemically synthesized
auuaugccaaaaccaucagagug

SEQ ID NO: 57604 - RNA, 23 nt, Artificial Sequence
  Chemically synthesized
ccaguuauaaauaaacgcaaauu

SEQ ID NO: 57605 - RNA, 23 nt, Artificial Sequence
  Chemically synthesized
uuauagaaaaauauccuggauug

SEQ ID NO: 57606 - RNA, 23 nt, Artificial Sequence
  Chemically synthesized
uauagaaaaauauccuggauugu

SEQ ID NO: 57607 - RNA, 23 nt, Artificial Sequence
  Chemically synthesized
auagaaaaauauccuggauuguu

SEQ ID NO: 57608 - RNA, 23 nt, Artificial Sequence
  Chemically synthesized
aaugaugaaucuucacaccucuc

SEQ ID NO: 57609 - RNA, 23 nt, Artificial Sequence
  Chemically synthesized
ugauuuuccguaauuuucgauca

SEQ ID NO: 57610 - RNA, 23 nt, Artificial Sequence
  Chemically synthesized
gauuuuccguaauuuucgaucau

SEQ ID NO: 57611 - RNA, 23 nt, Artificial Sequence
  Chemically synthesized
auuuuccguaauuuucgaucauc

SEQ ID NO: 57612 - RNA, 23 nt, Artificial Sequence
  Chemically synthesized
uuuuccguaauuuucgaucaucu

SEQ ID NO: 57613 - RNA, 23 nt, Artificial Sequence
  Chemically synthesized
uuuccguaauuuucgaucaucua

SEQ ID NO: 57614 - RNA, 23 nt, Artificial Sequence
  Chemically synthesized
gcauuguucaaauuuauaccugc

SEQ ID NO: 57615 - RNA, 23 nt, Artificial Sequence
  Chemically synthesized
cauuguucaaauuuauaccugca

SEQ ID NO: 57616 - RNA, 23 nt, Artificial Sequence
  Chemically synthesized
auuguucaaauuuauaccugcag

SEQ ID NO: 57617 - RNA, 23 nt, Artificial Sequence
  Chemically synthesized
uuguucaaauuuauaccugcaga

SEQ ID NO: 57618 - RNA, 23 nt, Artificial Sequence
  Chemically synthesized
uguucaaauuuauaccugcagac

SEQ ID NO: 57619 - RNA, 23 nt, Artificial Sequence
  Chemically synthesized
aauuuauaccugcagacuauuca

SEQ ID NO: 57620 - RNA, 23 nt, Artificial Sequence
  Chemically synthesized
auuuauaccugcagacuauucau

SEQ ID NO: 57621 - RNA, 23 nt, Artificial Sequence
  Chemically synthesized
uuuauaccugcagacuauucauu

SEQ ID NO: 57622 - RNA, 23 nt, Artificial Sequence
  Chemically synthesized
uuauaccugcagacuauucauuu

SEQ ID NO: 57623 - RNA, 23 nt, Artificial Sequence
  Chemically synthesized
uauaccugcagacuauucauuua

SEQ ID NO: 57624 - RNA, 23 nt, Artificial Sequence
  Chemically synthesized
auaauagacuaagacagauauag

SEQ ID NO: 57625 - RNA, 23 nt, Artificial Sequence
  Chemically synthesized
uaauagacuaagacagauauaga

SEQ ID NO: 57626 - RNA, 23 nt, Artificial Sequence
  Chemically synthesized
aauagacuaagacagauauagaa

SEQ ID NO: 57627 - RNA, 23 nt, Artificial Sequence
  Chemically synthesized
auagacuaagacagauauagaag

SEQ ID NO: 57628 - RNA, 23 nt, Artificial Sequence
  Chemically synthesized
uagacuaagacagauauagaagc

SEQ ID NO: 57629 - RNA, 23 nt, Artificial Sequence
  Chemically synthesized
acaaugcaagugaaauccaaggg

SEQ ID NO: 57630 - RNA, 23 nt, Artificial Sequence
  Chemically synthesized
caaugcaagugaaauccaagggg

SEQ ID NO: 57631 - RNA, 23 nt, Artificial Sequence
  Chemically synthesized
aaugcaagugaaauccaagggga

SEQ ID NO: 57632 - RNA, 23 nt, Artificial Sequence
  Chemically synthesized
augcaagugaaauccaaggggau

SEQ ID NO: 57633 - RNA, 23 nt, Artificial Sequence
  Chemically synthesized
ugcaagugaaauccaaggggaua

SEQ ID NO: 57634 - RNA, 23 nt, Artificial Sequence
  Chemically synthesized
ucauuucacuagaauucaucaug

SEQ ID NO: 57635 - RNA, 23 nt, Artificial Sequence
  Chemically synthesized
gauauaccuaauaaagccuuuau

SEQ ID NO: 57636 - RNA, 23 nt, Artificial Sequence
  Chemically synthesized
accauaguucagaaauccagcua

SEQ ID NO: 57637 - RNA, 23 nt, Artificial Sequence
  Chemically synthesized
ccauaguucagaaauccagcuaa

SEQ ID NO: 57638 - RNA, 23 nt, Artificial Sequence
  Chemically synthesized
cauaguucagaaauccagcuaaa

SEQ ID NO: 57639 - RNA, 23 nt, Artificial Sequence
  Chemically synthesized
auaguucagaaauccagcuaaau

SEQ ID NO: 57640 - RNA, 23 nt, Artificial Sequence
  Chemically synthesized
gauuuuccauucaaugcuuuuuc

SEQ ID NO: 57641 - RNA, 23 nt, Artificial Sequence
  Chemically synthesized
auuuuccauucaaugcuuuuucu

SEQ ID NO: 57642 - RNA, 23 nt, Artificial Sequence
  Chemically synthesized
uuuuccauucaaugcuuuuucua

SEQ ID NO: 57643 - RNA, 23 nt, Artificial Sequence
  Chemically synthesized
uuuccauucaaugcuuuuucuag

SEQ ID NO: 57644 - RNA, 23 nt, Artificial Sequence
  Chemically synthesized
aaucuccaucguacauaauaucg

SEQ ID NO: 57645 - RNA, 23 nt, Artificial Sequence
  Chemically synthesized
auaccuaauaaagccuuuaucag

SEQ ID NO: 57646 - RNA, 23 nt, Artificial Sequence
  Chemically synthesized
uugcaaccaguuauaaauaaacg

SEQ ID NO: 57647 - RNA, 23 nt, Artificial Sequence
  Chemically synthesized
uauauuacguaaggccagauuca

SEQ ID NO: 57648 - RNA, 23 nt, Artificial Sequence
  Chemically synthesized
auggcaugauuaggacaaacuug

SEQ ID NO: 57649 - RNA, 23 nt, Artificial Sequence
  Chemically synthesized
aucuccaucguacauaauaucga

SEQ ID NO: 57650 - RNA, 23 nt, Artificial Sequence
  Chemically synthesized
gaaaauauauuacguaaggccag

SEQ ID NO: 57651 - RNA, 23 nt, Artificial Sequence
  Chemically synthesized
auauauuacguaaggccagauuc

SEQ ID NO: 57652 - RNA, 23 nt, Artificial Sequence
  Chemically synthesized
aacucagugccuuuuaguuauuu

SEQ ID NO: 57653 - RNA, 23 nt, Artificial Sequence
  Chemically synthesized
uuucgaucaucuaugcauuguuc

SEQ ID NO: 57654 - RNA, 23 nt, Artificial Sequence
  Chemically synthesized
uauuuauguuugccuuuacuucc

SEQ ID NO: 57655 - RNA, 23 nt, Artificial Sequence
  Chemically synthesized
aaucucuucccaccguacaccag

SEQ ID NO: 57656 - RNA, 23 nt, Artificial Sequence
  Chemically synthesized
uaucgaauaggaaucacaagugu

SEQ ID NO: 57657 - RNA, 23 nt, Artificial Sequence
  Chemically synthesized
auacgauuuggaauggaaauagc

SEQ ID NO: 57658 - RNA, 23 nt, Artificial Sequence
  Chemically synthesized
uagccauacgaaauguauuaucu

SEQ ID NO: 57659 - RNA, 23 nt, Artificial Sequence
  Chemically synthesized
ucauaaacauaaggguagauuac

SEQ ID NO: 57660 - RNA, 23 nt, Artificial Sequence
  Chemically synthesized
gauuuugagguuguugcugaugu

SEQ ID NO: 57661 - RNA, 23 nt, Artificial Sequence
  Chemically synthesized
uugauaaggucacuuuagaaaug

SEQ ID NO: 57662 - RNA, 23 nt, Artificial Sequence
  Chemically synthesized
uaugauuaugaugccagacuucu

SEQ ID NO: 57663 - RNA, 23 nt, Artificial Sequence
  Chemically synthesized
ugcauuguucaaauuuauaccug

SEQ ID NO: 57664 - RNA, 23 nt, Artificial Sequence
  Chemically synthesized
uacaugccagcucuauagauacg

SEQ ID NO: 57665 - RNA, 23 nt, Artificial Sequence
  Chemically synthesized
uauuggauuuugcaagacauuag

SEQ ID NO: 57666 - RNA, 23 nt, Artificial Sequence
  Chemically synthesized
aaauccagcuaaauugaacuuug

SEQ ID NO: 57667 - RNA, 23 nt, Artificial Sequence
  Chemically synthesized
gaucuuccaaaaucaccaguucc

SEQ ID NO: 57668 - RNA, 23 nt, Artificial Sequence
  Chemically synthesized
aaaaucaccaguuccaaaaauac

SEQ ID NO: 57669 - RNA, 23 nt, Artificial Sequence
  Chemically synthesized
uacauacagucucuugcuuuucu

SEQ ID NO: 57670 - RNA, 23 nt, Artificial Sequence
  Chemically synthesized
gaauucauaguaagaggaagugc

SEQ ID NO: 57671 - RNA, 23 nt, Artificial Sequence
  Chemically synthesized
ucuggauauugauugauuuugag

SEQ ID NO: 57672 - RNA, 23 nt, Artificial Sequence
  Chemically synthesized
uggauauugauugauuuugaggu

SEQ ID NO: 57673 - RNA, 23 nt, Artificial Sequence
  Chemically synthesized
uauaaaagccaucaucccuuaac

SEQ ID NO: 57674 - RNA, 23 nt, Artificial Sequence
  Chemically synthesized
uugcugaugucuaccaauauuuu

SEQ ID NO: 57675 - RNA, 23 nt, Artificial Sequence
  Chemically synthesized
uuuucuauaggucagcauuuuac

SEQ ID NO: 57676 - RNA, 23 nt, Artificial Sequence
  Chemically synthesized
aucuuuuccacugauacuguagg

SEQ ID NO: 57677 - RNA, 23 nt, Artificial Sequence
  Chemically synthesized
agugagaaccauccuaaauuuca

SEQ ID NO: 57678 - RNA, 23 nt, Artificial Sequence
  Chemically synthesized
aaauuuauaccugcagacuauuc

SEQ ID NO: 57679 - RNA, 23 nt, Artificial Sequence
  Chemically synthesized
uaguuccucucaguaaauaucug

SEQ ID NO: 57680 - RNA, 23 nt, Artificial Sequence
  Chemically synthesized
aucuuccaaaaucaccaguucca

SEQ ID NO: 57681 - RNA, 23 nt, Artificial Sequence
  Chemically synthesized
aaaacccaaguauucccaaagcc

SEQ ID NO: 57682 - RNA, 23 nt, Artificial Sequence
  Chemically synthesized
aguauucccaaagccacauauga

SEQ ID NO: 57683 - RNA, 23 nt, Artificial Sequence
  Chemically synthesized
uucccaaagccacauaugaauca

SEQ ID NO: 57684 - RNA, 23 nt, Artificial Sequence
  Chemically synthesized
uuaaguuucccaaucuccaucgu

SEQ ID NO: 57685 - RNA, 23 nt, Artificial Sequence
  Chemically synthesized
uaggaaucacaaguguguagagg

SEQ ID NO: 57686 - RNA, 23 nt, Artificial Sequence
  Chemically synthesized
aguuccaaaaauacauacagucu

SEQ ID NO: 57687 - RNA, 23 nt, Artificial Sequence
  Chemically synthesized
aaacauaaggguagauuacgucu

SEQ ID NO: 57688 - RNA, 23 nt, Artificial Sequence
  Chemically synthesized
aacauaaggguagauuacgucuc

SEQ ID NO: 57689 - RNA, 23 nt, Artificial Sequence
  Chemically synthesized
uagauuacgucucuuauaacaca

SEQ ID NO: 57690 - RNA, 23 nt, Artificial Sequence
  Chemically synthesized
aacaagaagacacacagcacagc

SEQ ID NO: 57691 - RNA, 23 nt, Artificial Sequence
  Chemically synthesized
uucugaagaauucauaguaagag

SEQ ID NO: 57692 - RNA, 23 nt, Artificial Sequence
  Chemically synthesized
gaacaauauccaucacucuuugc

SEQ ID NO: 57693 - RNA, 23 nt, Artificial Sequence
  Chemically synthesized
ucugcauuagauucuggauauug

SEQ ID NO: 57694 - RNA, 23 nt, Artificial Sequence
  Chemically synthesized
auaucagcaguaaagaaguuuag

SEQ ID NO: 57695 - RNA, 23 nt, Artificial Sequence
  Chemically synthesized
aaacucauucuuucuaccuuaag

SEQ ID NO: 57696 - RNA, 23 nt, Artificial Sequence
  Chemically synthesized
aaagacuucucuagaccagccug

SEQ ID NO: 57697 - RNA, 23 nt, Artificial Sequence
  Chemically synthesized
cauaggugaguagugacauuuuc

SEQ ID NO: 57698 - RNA, 23 nt, Artificial Sequence
  Chemically synthesized
uuauuuugauaugugggaagauc

SEQ ID NO: 57699 - RNA, 23 nt, Artificial Sequence
  Chemically synthesized
uaugucagucaauuucucaaaga

SEQ ID NO: 57700 - RNA, 23 nt, Artificial Sequence
  Chemically synthesized
augucagucaauuucucaaagac

SEQ ID NO: 57701 - RNA, 23 nt, Artificial Sequence
  Chemically synthesized
aauccagcuaaauugaacuuugu

SEQ ID NO: 57702 - RNA, 23 nt, Artificial Sequence
  Chemically synthesized
cuaguguuuugaguuccuuuccc

SEQ ID NO: 57703 - RNA, 23 nt, Artificial Sequence
  Chemically synthesized
aaguauucccaaagccacauaug

SEQ ID NO: 57704 - RNA, 23 nt, Artificial Sequence
  Chemically synthesized
uuccaaaaauacauacagucucu

SEQ ID NO: 57705 - RNA, 23 nt, Artificial Sequence
  Chemically synthesized
auagccauacgaaauguauuauc

SEQ ID NO: 57706 - RNA, 23 nt, Artificial Sequence
  Chemically synthesized
aaguccaagauuacgaacaauau

SEQ ID NO: 57707 - RNA, 23 nt, Artificial Sequence
  Chemically synthesized
aacaauauccaucacucuuugcu

SEQ ID NO: 57708 - RNA, 23 nt, Artificial Sequence
  Chemically synthesized
cugcauuagauucuggauauuga

SEQ ID NO: 57709 - RNA, 23 nt, Artificial Sequence
  Chemically synthesized
uuaugccaaaaccaucagagugc

SEQ ID NO: 57710 - RNA, 23 nt, Artificial Sequence
  Chemically synthesized
acucaaugucguccaacuuuuug

SEQ ID NO: 57711 - RNA, 23 nt, Artificial Sequence
  Chemically synthesized
aaagcaacacccucauccaaugg

SEQ ID NO: 57712 - RNA, 23 nt, Artificial Sequence
  Chemically synthesized
uacauguuuaauaaggaaagagg

SEQ ID NO: 57713 - RNA, 23 nt, Artificial Sequence
  Chemically synthesized
uuccguaauuuucgaucaucuau

SEQ ID NO: 57714 - RNA, 23 nt, Artificial Sequence
  Chemically synthesized
uccucagauauaccuaauaaagc

SEQ ID NO: 57715 - RNA, 23 nt, Artificial Sequence
  Chemically synthesized
uuuuuccuuucacuuaacucagc

SEQ ID NO: 57716 - RNA, 23 nt, Artificial Sequence
  Chemically synthesized
uuuccuuucacuuaacucagccc

SEQ ID NO: 57717 - RNA, 23 nt, Artificial Sequence
  Chemically synthesized
ucaccaguuccaaaaauacauac

SEQ ID NO: 57718 - RNA, 23 nt, Artificial Sequence
  Chemically synthesized
aaguuucccaaucuccaucguac

SEQ ID NO: 57719 - RNA, 23 nt, Artificial Sequence
  Chemically synthesized
accaguuccaaaaauacauacag

SEQ ID NO: 57720 - RNA, 23 nt, Artificial Sequence
  Chemically synthesized
auaucgaauaggaaucacaagug

SEQ ID NO: 57721 - RNA, 23 nt, Artificial Sequence
  Chemically synthesized
caguuccaaaaauacauacaguc

SEQ ID NO: 57722 - RNA, 23 nt, Artificial Sequence
  Chemically synthesized
caaguguguagaggacaugaagg

SEQ ID NO: 57723 - RNA, 23 nt, Artificial Sequence
  Chemically synthesized
auacauacagucucuugcuuuuc

SEQ ID NO: 57724 - RNA, 23 nt, Artificial Sequence
  Chemically synthesized
auaaacauaaggguagauuacgu

SEQ ID NO: 57725 - RNA, 23 nt, Artificial Sequence
  Chemically synthesized
uuacgucucuuauaacacaauag

SEQ ID NO: 57726 - RNA, 23 nt, Artificial Sequence
  Chemically synthesized
uguuaaaugcuuuuaccacgugg

SEQ ID NO: 57727 - RNA, 23 nt, Artificial Sequence
  Chemically synthesized
uaaaagccaucaucccuuaacau

SEQ ID NO: 57728 - RNA, 23 nt, Artificial Sequence
  Chemically synthesized
aaaagccaucaucccuuaacaug

SEQ ID NO: 57729 - RNA, 23 nt, Artificial Sequence
  Chemically synthesized
uaucagcaguaaagaaguuuagu

SEQ ID NO: 57730 - RNA, 23 nt, Artificial Sequence
  Chemically synthesized
aucagcaguaaagaaguuuaguu

SEQ ID NO: 57731 - RNA, 23 nt, Artificial Sequence
  Chemically synthesized
uuaaaaggaauacaguucgccca

SEQ ID NO: 57732 - RNA, 23 nt, Artificial Sequence
  Chemically synthesized
aagcacuuauuuucaucuguugu

SEQ ID NO: 57733 - RNA, 23 nt, Artificial Sequence
  Chemically synthesized
aacucauucuuucuaccuuaagu

SEQ ID NO: 57734 - RNA, 23 nt, Artificial Sequence
  Chemically synthesized
ugcugaugucuaccaauauuuuu

SEQ ID NO: 57735 - RNA, 23 nt, Artificial Sequence
  Chemically synthesized
aaacuuuaaucaaccaaugcuca

SEQ ID NO: 57736 - RNA, 23 nt, Artificial Sequence
  Chemically synthesized
uauaccaugacucuacucaaugu

SEQ ID NO: 57737 - RNA, 23 nt, Artificial Sequence
  Chemically synthesized
uauuuugauaugugggaagauca

SEQ ID NO: 57738 - RNA, 23 nt, Artificial Sequence
  Chemically synthesized
cuaugauuaugaugccagacuuc

SEQ ID NO: 57739 - RNA, 23 nt, Artificial Sequence
  Chemically synthesized
aagugcaucuauacaaguuuucu

SEQ ID NO: 57740 - RNA, 23 nt, Artificial Sequence
  Chemically synthesized
augaugaaucuucacaccucucu

SEQ ID NO: 57741 - RNA, 23 nt, Artificial Sequence
  Chemically synthesized
gaacuuuuaucaacccuucuuug

SEQ ID NO: 57742 - RNA, 23 nt, Artificial Sequence
  Chemically synthesized
augccagcucuauagauacguau

SEQ ID NO: 57743 - RNA, 23 nt, Artificial Sequence
  Chemically synthesized
uuccucagauauaccuaauaaag

SEQ ID NO: 57744 - RNA, 23 nt, Artificial Sequence
  Chemically synthesized
cuaguguuuugaguuccuuuccc

SEQ ID NO: 57745 - RNA, 23 nt, Artificial Sequence
  Chemically synthesized
uaguguuuugaguuccuuuccca

SEQ ID NO: 57746 - RNA, 23 nt, Artificial Sequence
  Chemically synthesized
aguguuuugaguuccuuucccag

SEQ ID NO: 57747 - RNA, 23 nt, Artificial Sequence
  Chemically synthesized
guguuuugaguuccuuucccagc

SEQ ID NO: 57748 - RNA, 23 nt, Artificial Sequence
  Chemically synthesized
uguuuugaguuccuuucccagcc

SEQ ID NO: 57749 - RNA, 23 nt, Artificial Sequence
  Chemically synthesized
ccacaaaagagaaaaacgucaag

SEQ ID NO: 57750 - RNA, 23 nt, Artificial Sequence
  Chemically synthesized
uccacaaaagagaaaaacgucaa

SEQ ID NO: 57751 - RNA, 23 nt, Artificial Sequence
  Chemically synthesized
cuccacaaaagagaaaaacguca

SEQ ID NO: 57752 - RNA, 23 nt, Artificial Sequence
  Chemically synthesized
ucuccacaaaagagaaaaacguc

SEQ ID NO: 57753 - RNA, 23 nt, Artificial Sequence
  Chemically synthesized
cucuccacaaaagagaaaaacgu

SEQ ID NO: 57754 - RNA, 23 nt, Artificial Sequence
  Chemically synthesized
cgacagaacucagugcuaucucg

SEQ ID NO: 57755 - RNA, 23 nt, Artificial Sequence
  Chemically synthesized
ccgacagaacucagugcuaucuc

SEQ ID NO: 57756 - RNA, 23 nt, Artificial Sequence
  Chemically synthesized
cccgacagaacucagugcuaucu

SEQ ID NO: 57757 - RNA, 23 nt, Artificial Sequence
  Chemically synthesized
ucccgacagaacucagugcuauc

SEQ ID NO: 57758 - RNA, 23 nt, Artificial Sequence
  Chemically synthesized
gucccgacagaacucagugcuau

SEQ ID NO: 57759 - RNA, 23 nt, Artificial Sequence
  Chemically synthesized
ugacgagaaugaaaagguuguau

SEQ ID NO: 57760 - RNA, 23 nt, Artificial Sequence
  Chemically synthesized
uugacgagaaugaaaagguugua

SEQ ID NO: 57761 - RNA, 23 nt, Artificial Sequence
  Chemically synthesized
cuugacgagaaugaaaagguugu

SEQ ID NO: 57762 - RNA, 23 nt, Artificial Sequence
  Chemically synthesized
ccuugacgagaaugaaaagguug

SEQ ID NO: 57763 - RNA, 23 nt, Artificial Sequence
  Chemically synthesized
accuugacgagaaugaaaagguu

SEQ ID NO: 57764 - RNA, 23 nt, Artificial Sequence
  Chemically synthesized
gcuguaccuugacgagaaugaaa

SEQ ID NO: 57765 - RNA, 23 nt, Artificial Sequence
  Chemically synthesized
ugcuguaccuugacgagaaugaa

SEQ ID NO: 57766 - RNA, 23 nt, Artificial Sequence
  Chemically synthesized
augcuguaccuugacgagaauga

SEQ ID NO: 57767 - RNA, 23 nt, Artificial Sequence
  Chemically synthesized
gaugcuguaccuugacgagaaug

SEQ ID NO: 57768 - RNA, 23 nt, Artificial Sequence
  Chemically synthesized
cgaugcuguaccuugacgagaau

SEQ ID NO: 57769 - RNA, 23 nt, Artificial Sequence
  Chemically synthesized
cggagauucuucuuuaauuuaag

SEQ ID NO: 57770 - RNA, 23 nt, Artificial Sequence
  Chemically synthesized
ccggagauucuucuuuaauuuaa

SEQ ID NO: 57771 - RNA, 23 nt, Artificial Sequence
  Chemically synthesized
cccggagauucuucuuuaauuua

SEQ ID NO: 57772 - RNA, 23 nt, Artificial Sequence
  Chemically synthesized
acccggagauucuucuuuaauuu

SEQ ID NO: 57773 - RNA, 23 nt, Artificial Sequence
  Chemically synthesized
aacccggagauucuucuuuaauu

SEQ ID NO: 57774 - RNA, 23 nt, Artificial Sequence
  Chemically synthesized
agaaaaacgucaagccaaacaca

SEQ ID NO: 57775 - RNA, 23 nt, Artificial Sequence
  Chemically synthesized
gagaaaaacgucaagccaaacac

SEQ ID NO: 57776 - RNA, 23 nt, Artificial Sequence
  Chemically synthesized
agagaaaaacgucaagccaaaca

SEQ ID NO: 57777 - RNA, 23 nt, Artificial Sequence
  Chemically synthesized
aagagaaaaacgucaagccaaac

SEQ ID NO: 57778 - RNA, 23 nt, Artificial Sequence
  Chemically synthesized
aaagagaaaaacgucaagccaaa

SEQ ID NO: 57779 - RNA, 23 nt, Artificial Sequence
  Chemically synthesized
ccaagagacauguuaggauaagc

SEQ ID NO: 57780 - RNA, 23 nt, Artificial Sequence
  Chemically synthesized
uccaagagacauguuaggauaag

SEQ ID NO: 57781 - RNA, 23 nt, Artificial Sequence
  Chemically synthesized
cuccaagagacauguuaggauaa

SEQ ID NO: 57782 - RNA, 23 nt, Artificial Sequence
  Chemically synthesized
ucuccaagagacauguuaggaua

SEQ ID NO: 57783 - RNA, 23 nt, Artificial Sequence
  Chemically synthesized
gucuccaagagacauguuaggau

SEQ ID NO: 57784 - RNA, 23 nt, Artificial Sequence
  Chemically synthesized
gcaacagccaacucgaaauuccc

SEQ ID NO: 57785 - RNA, 23 nt, Artificial Sequence
  Chemically synthesized
ugcaacagccaacucgaaauucc

SEQ ID NO: 57786 - RNA, 23 nt, Artificial Sequence
  Chemically synthesized
cugcaacagccaacucgaaauuc

SEQ ID NO: 57787 - RNA, 23 nt, Artificial Sequence
  Chemically synthesized
ccugcaacagccaacucgaaauu

SEQ ID NO: 57788 - RNA, 23 nt, Artificial Sequence
  Chemically synthesized
accugcaacagccaacucgaaau

SEQ ID NO: 57789 - RNA, 23 nt, Artificial Sequence
  Chemically synthesized
caacccggagauucuucuuuaau

SEQ ID NO: 57790 - RNA, 23 nt, Artificial Sequence
  Chemically synthesized
acaacccggagauucuucuuuaa

SEQ ID NO: 57791 - RNA, 23 nt, Artificial Sequence
  Chemically synthesized
gaaacgagugggaaaacaacccg

SEQ ID NO: 57792 - RNA, 23 nt, Artificial Sequence
  Chemically synthesized
agaaacgagugggaaaacaaccc

SEQ ID NO: 57793 - RNA, 23 nt, Artificial Sequence
  Chemically synthesized
cagaaacgagugggaaaacaacc

SEQ ID NO: 57794 - RNA, 23 nt, Artificial Sequence
  Chemically synthesized
ccagaaacgagugggaaaacaac

SEQ ID NO: 57795 - RNA, 23 nt, Artificial Sequence
  Chemically synthesized
accagaaacgagugggaaaacaa

SEQ ID NO: 57796 - RNA, 23 nt, Artificial Sequence
  Chemically synthesized
uaccagaaacgagugggaaaaca

SEQ ID NO: 57797 - RNA, 23 nt, Artificial Sequence
  Chemically synthesized
ggaagaacuaccagaaacgagug

SEQ ID NO: 57798 - RNA, 23 nt, Artificial Sequence
  Chemically synthesized
uggaagaacuaccagaaacgagu

SEQ ID NO: 57799 - RNA, 23 nt, Artificial Sequence
  Chemically synthesized
uuggaagaacuaccagaaacgag

SEQ ID NO: 57800 - RNA, 23 nt, Artificial Sequence
  Chemically synthesized
uuuggaagaacuaccagaaacga

SEQ ID NO: 57801 - RNA, 23 nt, Artificial Sequence
  Chemically synthesized
cuuuggaagaacuaccagaaacg

SEQ ID NO: 57802 - RNA, 23 nt, Artificial Sequence
  Chemically synthesized
uaccuugacgagaaugaaaaggu

SEQ ID NO: 57803 - RNA, 23 nt, Artificial Sequence
  Chemically synthesized
guaccuugacgagaaugaaaagg

SEQ ID NO: 57804 - RNA, 23 nt, Artificial Sequence
  Chemically synthesized
uguaccuugacgagaaugaaaag

SEQ ID NO: 57805 - RNA, 23 nt, Artificial Sequence
  Chemically synthesized
cuguaccuugacgagaaugaaaa

SEQ ID NO: 57806 - RNA, 23 nt, Artificial Sequence
  Chemically synthesized
ucgaugcuguaccuugacgagaa

SEQ ID NO: 57807 - RNA, 23 nt, Artificial Sequence
  Chemically synthesized
gcaagcaggugggaaaguuuuga

SEQ ID NO: 57808 - RNA, 23 nt, Artificial Sequence
  Chemically synthesized
ugcaagcaggugggaaaguuuug

SEQ ID NO: 57809 - RNA, 23 nt, Artificial Sequence
  Chemically synthesized
augcaagcaggugggaaaguuuu

SEQ ID NO: 57810 - RNA, 23 nt, Artificial Sequence
  Chemically synthesized
aaugcaagcaggugggaaaguuu

SEQ ID NO: 57811 - RNA, 23 nt, Artificial Sequence
  Chemically synthesized
gaaugcaagcaggugggaaaguu

SEQ ID NO: 57812 - RNA, 23 nt, Artificial Sequence
  Chemically synthesized
ccagguuggugaaucagaaugca

SEQ ID NO: 57813 - RNA, 23 nt, Artificial Sequence
  Chemically synthesized
accagguuggugaaucagaaugc

SEQ ID NO: 57814 - RNA, 23 nt, Artificial Sequence
  Chemically synthesized
caccagguuggugaaucagaaug

SEQ ID NO: 57815 - RNA, 23 nt, Artificial Sequence
  Chemically synthesized
acaccagguuggugaaucagaau

SEQ ID NO: 57816 - RNA, 23 nt, Artificial Sequence
  Chemically synthesized
gacaccagguuggugaaucagaa

SEQ ID NO: 57817 - RNA, 23 nt, Artificial Sequence
  Chemically synthesized
ccaucaccgaauuaauauuuaug

SEQ ID NO: 57818 - RNA, 23 nt, Artificial Sequence
  Chemically synthesized
uccaucaccgaauuaauauuuau

SEQ ID NO: 57819 - RNA, 23 nt, Artificial Sequence
  Chemically synthesized
uuccaucaccgaauuaauauuua

SEQ ID NO: 57820 - RNA, 23 nt, Artificial Sequence
  Chemically synthesized
uuuccaucaccgaauuaauauuu

SEQ ID NO: 57821 - RNA, 23 nt, Artificial Sequence
  Chemically synthesized
guuuccaucaccgaauuaauauu

SEQ ID NO: 57822 - RNA, 23 nt, Artificial Sequence
  Chemically synthesized
cgagaacagaugcaagaugcuuu

SEQ ID NO: 57823 - RNA, 23 nt, Artificial Sequence
  Chemically synthesized
ccgagaacagaugcaagaugcuu

SEQ ID NO: 57824 - RNA, 23 nt, Artificial Sequence
  Chemically synthesized
uccgagaacagaugcaagaugcu

SEQ ID NO: 57825 - RNA, 23 nt, Artificial Sequence
  Chemically synthesized
uuccgagaacagaugcaagaugc

SEQ ID NO: 57826 - RNA, 23 nt, Artificial Sequence
  Chemically synthesized
uuuccgagaacagaugcaagaug

SEQ ID NO: 57827 - RNA, 23 nt, Artificial Sequence
  Chemically synthesized
ucaacucuguuaacucuaagauu

SEQ ID NO: 57828 - RNA, 23 nt, Artificial Sequence
  Chemically synthesized
gucaacucuguuaacucuaagau

SEQ ID NO: 57829 - RNA, 23 nt, Artificial Sequence
  Chemically synthesized
ggucaacucuguuaacucuaaga

SEQ ID NO: 57830 - RNA, 23 nt, Artificial Sequence
  Chemically synthesized
uggucaacucuguuaacucuaag

SEQ ID NO: 57831 - RNA, 23 nt, Artificial Sequence
  Chemically synthesized
uuggucaacucuguuaacucuaa

SEQ ID NO: 57832 - RNA, 23 nt, Artificial Sequence
  Chemically synthesized
cacuaaucaugccauuguucaga

SEQ ID NO: 57833 - RNA, 23 nt, Artificial Sequence
  Chemically synthesized
ccacuaaucaugccauuguucag

SEQ ID NO: 57834 - RNA, 23 nt, Artificial Sequence
  Chemically synthesized
uccacuaaucaugccauuguuca

SEQ ID NO: 57835 - RNA, 23 nt, Artificial Sequence
  Chemically synthesized
cuccacuaaucaugccauuguuc

SEQ ID NO: 57836 - RNA, 23 nt, Artificial Sequence
  Chemically synthesized
acuccacuaaucaugccauuguu

SEQ ID NO: 57837 - RNA, 23 nt, Artificial Sequence
  Chemically synthesized
gcaaagaaaaggaacggacauuc

SEQ ID NO: 57838 - RNA, 23 nt, Artificial Sequence
  Chemically synthesized
ggcaaagaaaaggaacggacauu

SEQ ID NO: 57839 - RNA, 23 nt, Artificial Sequence
  Chemically synthesized
aggcaaagaaaaggaacggacau

SEQ ID NO: 57840 - RNA, 23 nt, Artificial Sequence
  Chemically synthesized
gaggcaaagaaaaggaacggaca

SEQ ID NO: 57841 - RNA, 23 nt, Artificial Sequence
  Chemically synthesized
ggaggcaaagaaaaggaacggac

SEQ ID NO: 57842 - RNA, 23 nt, Artificial Sequence
  Chemically synthesized
gcuaguaacuuuuggccaugaug

SEQ ID NO: 57843 - RNA, 23 nt, Artificial Sequence
  Chemically synthesized
ugcuaguaacuuuuggccaugau

SEQ ID NO: 57844 - RNA, 23 nt, Artificial Sequence
  Chemically synthesized
uugcuaguaacuuuuggccauga

SEQ ID NO: 57845 - RNA, 23 nt, Artificial Sequence
  Chemically synthesized
auugcuaguaacuuuuggccaug

SEQ ID NO: 57846 - RNA, 23 nt, Artificial Sequence
  Chemically synthesized
cauugcuaguaacuuuuggccau

SEQ ID NO: 57847 - RNA, 23 nt, Artificial Sequence
  Chemically synthesized
ggucacagauaaggccauugcua

SEQ ID NO: 57848 - RNA, 23 nt, Artificial Sequence
  Chemically synthesized
uggucacagauaaggccauugcu

SEQ ID NO: 57849 - RNA, 23 nt, Artificial Sequence
  Chemically synthesized
cuggucacagauaaggccauugc

SEQ ID NO: 57850 - RNA, 23 nt, Artificial Sequence
  Chemically synthesized
gcuggucacagauaaggccauug

SEQ ID NO: 57851 - RNA, 23 nt, Artificial Sequence
  Chemically synthesized
agcuggucacagauaaggccauu

SEQ ID NO: 57852 - RNA, 23 nt, Artificial Sequence
  Chemically synthesized
caagagacauguuaggauaagca

SEQ ID NO: 57853 - RNA, 23 nt, Artificial Sequence
  Chemically synthesized
caacagccaacucgaaauucccc

SEQ ID NO: 57854 - RNA, 23 nt, Artificial Sequence
  Chemically synthesized
agaacuaccagaaacgaguggga

SEQ ID NO: 57855 - RNA, 23 nt, Artificial Sequence
  Chemically synthesized
aagaacuaccagaaacgaguggg

SEQ ID NO: 57856 - RNA, 23 nt, Artificial Sequence
  Chemically synthesized
gaagaacuaccagaaacgagugg

SEQ ID NO: 57857 - RNA, 23 nt, Artificial Sequence
  Chemically synthesized
gggcauccucuccacaaaagaga

SEQ ID NO: 57858 - RNA, 23 nt, Artificial Sequence
  Chemically synthesized
agggcauccucuccacaaaagag

SEQ ID NO: 57859 - RNA, 23 nt, Artificial Sequence
  Chemically synthesized
aagggcauccucuccacaaaaga

SEQ ID NO: 57860 - RNA, 23 nt, Artificial Sequence
  Chemically synthesized
aaagggcauccucuccacaaaag

SEQ ID NO: 57861 - RNA, 23 nt, Artificial Sequence
  Chemically synthesized
aaaagggcauccucuccacaaaa

SEQ ID NO: 57862 - RNA, 23 nt, Artificial Sequence
  Chemically synthesized
aggaggcaaagaaaaggaacgga

SEQ ID NO: 57863 - RNA, 23 nt, Artificial Sequence
  Chemically synthesized
ccagcgugaaaagagagacugcg

SEQ ID NO: 57864 - RNA, 23 nt, Artificial Sequence
  Chemically synthesized
cccagcgugaaaagagagacugc

SEQ ID NO: 57865 - RNA, 23 nt, Artificial Sequence
  Chemically synthesized
ucccagcgugaaaagagagacug

SEQ ID NO: 57866 - RNA, 23 nt, Artificial Sequence
  Chemically synthesized
uucccagcgugaaaagagagacu

SEQ ID NO: 57867 - RNA, 23 nt, Artificial Sequence
  Chemically synthesized
guucccagcgugaaaagagagac

SEQ ID NO: 57868 - RNA, 23 nt, Artificial Sequence
  Chemically synthesized
uguucccagcgugaaaagagaga

SEQ ID NO: 57869 - RNA, 23 nt, Artificial Sequence
  Chemically synthesized
gggacuucuugaacuugcaggga

SEQ ID NO: 57870 - RNA, 23 nt, Artificial Sequence
  Chemically synthesized
ggggacuucuugaacuugcaggg

SEQ ID NO: 57871 - RNA, 23 nt, Artificial Sequence
  Chemically synthesized
cucgaugcuguaccuugacgaga

SEQ ID NO: 57872 - RNA, 23 nt, Artificial Sequence
  Chemically synthesized
ucucgaugcuguaccuugacgag

SEQ ID NO: 57873 - RNA, 23 nt, Artificial Sequence
  Chemically synthesized
aucucgaugcuguaccuugacga

SEQ ID NO: 57874 - RNA, 23 nt, Artificial Sequence
  Chemically synthesized
aaaagagaaaaacgucaagccaa

SEQ ID NO: 57875 - RNA, 23 nt, Artificial Sequence
  Chemically synthesized
gaggaggcaaagaaaaggaacgg

SEQ ID NO: 57876 - RNA, 23 nt, Artificial Sequence
  Chemically synthesized
ggaggaggcaaagaaaaggaacg

SEQ ID NO: 57877 - RNA, 23 nt, Artificial Sequence
  Chemically synthesized
aggaggaggcaaagaaaaggaac

SEQ ID NO: 57878 - RNA, 23 nt, Artificial Sequence
  Chemically synthesized
aaggaggaggcaaagaaaaggaa

SEQ ID NO: 57879 - RNA, 23 nt, Artificial Sequence
  Chemically synthesized
agaaggaggaggcaaagaaaagg

SEQ ID NO: 57880 - RNA, 23 nt, Artificial Sequence
  Chemically synthesized
gagaaggaggaggcaaagaaaag

SEQ ID NO: 57881 - RNA, 23 nt, Artificial Sequence
  Chemically synthesized
ggagaaggaggaggcaaagaaaa

SEQ ID NO: 57882 - RNA, 23 nt, Artificial Sequence
  Chemically synthesized
gggagaaggaggaggcaaagaaa

SEQ ID NO: 57883 - RNA, 23 nt, Artificial Sequence
  Chemically synthesized
cgggagaaggaggaggcaaagaa

SEQ ID NO: 57884 - RNA, 23 nt, Artificial Sequence
  Chemically synthesized
ggaggagaaacaaggugucucca

SEQ ID NO: 57885 - RNA, 23 nt, Artificial Sequence
  Chemically synthesized
uggaggagaaacaaggugucucc

SEQ ID NO: 57886 - RNA, 23 nt, Artificial Sequence
  Chemically synthesized
uuggaggagaaacaaggugucuc

SEQ ID NO: 57887 - RNA, 23 nt, Artificial Sequence
  Chemically synthesized
cuuggaggagaaacaaggugucu

SEQ ID NO: 57888 - RNA, 23 nt, Artificial Sequence
  Chemically synthesized
acuuggaggagaaacaagguguc

SEQ ID NO: 57889 - RNA, 23 nt, Artificial Sequence
  Chemically synthesized
gaaaucauaaaaccugcaacagc

SEQ ID NO: 57890 - RNA, 23 nt, Artificial Sequence
  Chemically synthesized
ugaaaucauaaaaccugcaacag

SEQ ID NO: 57891 - RNA, 23 nt, Artificial Sequence
  Chemically synthesized
augaaaucauaaaaccugcaaca

SEQ ID NO: 57892 - RNA, 23 nt, Artificial Sequence
  Chemically synthesized
uaugaaaucauaaaaccugcaac

SEQ ID NO: 57893 - RNA, 23 nt, Artificial Sequence
  Chemically synthesized
uuaugaaaucauaaaaccugcaa

SEQ ID NO: 57894 - RNA, 23 nt, Artificial Sequence
  Chemically synthesized
uuuuccgagaacagaugcaagau

SEQ ID NO: 57895 - RNA, 23 nt, Artificial Sequence
  Chemically synthesized
ugaagaaucuuuggaagaacuac

SEQ ID NO: 57896 - RNA, 23 nt, Artificial Sequence
  Chemically synthesized
augaagaaucuuuggaagaacua

SEQ ID NO: 57897 - RNA, 23 nt, Artificial Sequence
  Chemically synthesized
caugaagaaucuuuggaagaacu

SEQ ID NO: 57898 - RNA, 23 nt, Artificial Sequence
  Chemically synthesized
ccaugaagaaucuuuggaagaac

SEQ ID NO: 57899 - RNA, 23 nt, Artificial Sequence
  Chemically synthesized
accaugaagaaucuuuggaagaa

SEQ ID NO: 57900 - RNA, 23 nt, Artificial Sequence
  Chemically synthesized
gugcuucuuagacggacugcggu

SEQ ID NO: 57901 - RNA, 23 nt, Artificial Sequence
  Chemically synthesized
cgugcuucuuagacggacugcgg

SEQ ID NO: 57902 - RNA, 23 nt, Artificial Sequence
  Chemically synthesized
gcgugcuucuuagacggacugcg

SEQ ID NO: 57903 - RNA, 23 nt, Artificial Sequence
  Chemically synthesized
cgcgugcuucuuagacggacugc

SEQ ID NO: 57904 - RNA, 23 nt, Artificial Sequence
  Chemically synthesized
ccgcgugcuucuuagacggacug

SEQ ID NO: 57905 - RNA, 23 nt, Artificial Sequence
  Chemically synthesized
accagaguuuuuccauguggacg

SEQ ID NO: 57906 - RNA, 23 nt, Artificial Sequence
  Chemically synthesized
gaccagaguuuuuccauguggac

SEQ ID NO: 57907 - RNA, 23 nt, Artificial Sequence
  Chemically synthesized
ugaccagaguuuuuccaugugga

SEQ ID NO: 57908 - RNA, 23 nt, Artificial Sequence
  Chemically synthesized
uugaccagaguuuuuccaugugg

SEQ ID NO: 57909 - RNA, 23 nt, Artificial Sequence
  Chemically synthesized
uuugaccagaguuuuuccaugug

SEQ ID NO: 57910 - RNA, 23 nt, Artificial Sequence
  Chemically synthesized
cuuugaccagaguuuuuccaugu

SEQ ID NO: 57911 - RNA, 23 nt, Artificial Sequence
  Chemically synthesized
acagaacucagugcuaucucgau

SEQ ID NO: 57912 - RNA, 23 nt, Artificial Sequence
  Chemically synthesized
gacagaacucagugcuaucucga

SEQ ID NO: 57913 - RNA, 23 nt, Artificial Sequence
  Chemically synthesized
ggguaucacgccuuuuacugcca

SEQ ID NO: 57914 - RNA, 23 nt, Artificial Sequence
  Chemically synthesized
gggguaucacgccuuuuacugcc

SEQ ID NO: 57915 - RNA, 23 nt, Artificial Sequence
  Chemically synthesized
cgggguaucacgccuuuuacugc

SEQ ID NO: 57916 - RNA, 23 nt, Artificial Sequence
  Chemically synthesized
ccgggguaucacgccuuuuacug

SEQ ID NO: 57917 - RNA, 23 nt, Artificial Sequence
  Chemically synthesized
cccgggguaucacgccuuuuacu

SEQ ID NO: 57918 - RNA, 23 nt, Artificial Sequence
  Chemically synthesized
ggguggaaugacuggauuguggc

SEQ ID NO: 57919 - RNA, 23 nt, Artificial Sequence
  Chemically synthesized
gggguggaaugacuggauugugg

SEQ ID NO: 57920 - RNA, 23 nt, Artificial Sequence
  Chemically synthesized
ugggguggaaugacuggauugug

SEQ ID NO: 57921 - RNA, 23 nt, Artificial Sequence
  Chemically synthesized
gugggguggaaugacuggauugu

SEQ ID NO: 57922 - RNA, 23 nt, Artificial Sequence
  Chemically synthesized
cgugggguggaaugacuggauug

SEQ ID NO: 57923 - RNA, 23 nt, Artificial Sequence
  Chemically synthesized
aagaaaaggaacggacauucggu

SEQ ID NO: 57924 - RNA, 23 nt, Artificial Sequence
  Chemically synthesized
aaagaaaaggaacggacauucgg

SEQ ID NO: 57925 - RNA, 23 nt, Artificial Sequence
  Chemically synthesized
caaagaaaaggaacggacauucg

SEQ ID NO: 57926 - RNA, 23 nt, Artificial Sequence
  Chemically synthesized
cuaguaacuuuuggccaugaugg

SEQ ID NO: 57927 - RNA, 23 nt, Artificial Sequence
  Chemically synthesized
cagcgugaaaagagagacugcgc

SEQ ID NO: 57928 - RNA, 23 nt, Artificial Sequence
  Chemically synthesized
uaggaaacaauagcaguuuccau

SEQ ID NO: 57929 - RNA, 23 nt, Artificial Sequence
  Chemically synthesized
uuaggaaacaauagcaguuucca

SEQ ID NO: 57930 - RNA, 23 nt, Artificial Sequence
  Chemically synthesized
uuuaggaaacaauagcaguuucc

SEQ ID NO: 57931 - RNA, 23 nt, Artificial Sequence
  Chemically synthesized
cuuuaggaaacaauagcaguuuc

SEQ ID NO: 57932 - RNA, 23 nt, Artificial Sequence
  Chemically synthesized
gcuuuaggaaacaauagcaguuu

SEQ ID NO: 57933 - RNA, 23 nt, Artificial Sequence
  Chemically synthesized
ugcuuuaggaaacaauagcaguu

SEQ ID NO: 57934 - RNA, 23 nt, Artificial Sequence
  Chemically synthesized
ccacggaggaguuuaucaccuca

SEQ ID NO: 57935 - RNA, 23 nt, Artificial Sequence
  Chemically synthesized
cccacggaggaguuuaucaccuc

SEQ ID NO: 57936 - RNA, 23 nt, Artificial Sequence
  Chemically synthesized
ccccacggaggaguuuaucaccu

SEQ ID NO: 57937 - RNA, 23 nt, Artificial Sequence
  Chemically synthesized
uccccacggaggaguuuaucacc

SEQ ID NO: 57938 - RNA, 23 nt, Artificial Sequence
  Chemically synthesized
auccccacggaggaguuuaucac

SEQ ID NO: 57939 - RNA, 23 nt, Artificial Sequence
  Chemically synthesized
aacaacccggagauucuucuuua

SEQ ID NO: 57940 - RNA, 23 nt, Artificial Sequence
  Chemically synthesized
ugaacuugcagggagaauaacuu

SEQ ID NO: 57941 - RNA, 23 nt, Artificial Sequence
  Chemically synthesized
uugaacuugcagggagaauaacu

SEQ ID NO: 57942 - RNA, 23 nt, Artificial Sequence
  Chemically synthesized
cuugaacuugcagggagaauaac

SEQ ID NO: 57943 - RNA, 23 nt, Artificial Sequence
  Chemically synthesized
ucuugaacuugcagggagaauaa

SEQ ID NO: 57944 - RNA, 23 nt, Artificial Sequence
  Chemically synthesized
uucuugaacuugcagggagaaua

SEQ ID NO: 57945 - RNA, 23 nt, Artificial Sequence
  Chemically synthesized
cgagaaugaaaagguuguauuaa

SEQ ID NO: 57946 - RNA, 23 nt, Artificial Sequence
  Chemically synthesized
acgagaaugaaaagguuguauua

SEQ ID NO: 57947 - RNA, 23 nt, Artificial Sequence
  Chemically synthesized
gacgagaaugaaaagguuguauu

SEQ ID NO: 57948 - RNA, 23 nt, Artificial Sequence
  Chemically synthesized
ggaaacgccuuaaguccagcugu

SEQ ID NO: 57949 - RNA, 23 nt, Artificial Sequence
  Chemically synthesized
cggaaacgccuuaaguccagcug

SEQ ID NO: 57950 - RNA, 23 nt, Artificial Sequence
  Chemically synthesized
gcggaaacgccuuaaguccagcu

SEQ ID NO: 57951 - RNA, 23 nt, Artificial Sequence
  Chemically synthesized
agcggaaacgccuuaaguccagc

SEQ ID NO: 57952 - RNA, 23 nt, Artificial Sequence
  Chemically synthesized
cagcggaaacgccuuaaguccag

SEQ ID NO: 57953 - RNA, 23 nt, Artificial Sequence
  Chemically synthesized
agagacauguuaggauaagcagg

SEQ ID NO: 57954 - RNA, 23 nt, Artificial Sequence
  Chemically synthesized
aagagacauguuaggauaagcag

SEQ ID NO: 57955 - RNA, 23 nt, Artificial Sequence
  Chemically synthesized
gaaggaggaggcaaagaaaagga

SEQ ID NO: 57956 - RNA, 23 nt, Artificial Sequence
  Chemically synthesized
gggaaaguuuugaugucaccccc

SEQ ID NO: 57957 - RNA, 23 nt, Artificial Sequence
  Chemically synthesized
ugggaaaguuuugaugucacccc

SEQ ID NO: 57958 - RNA, 23 nt, Artificial Sequence
  Chemically synthesized
gugggaaaguuuugaugucaccc

SEQ ID NO: 57959 - RNA, 23 nt, Artificial Sequence
  Chemically synthesized
ggugggaaaguuuugaugucacc

SEQ ID NO: 57960 - RNA, 23 nt, Artificial Sequence
  Chemically synthesized
aggugggaaaguuuugaugucac

SEQ ID NO: 57961 - RNA, 23 nt, Artificial Sequence
  Chemically synthesized
ugaaucagaaugcaagcaggugg

SEQ ID NO: 57962 - RNA, 23 nt, Artificial Sequence
  Chemically synthesized
gugaaucagaaugcaagcaggug

SEQ ID NO: 57963 - RNA, 23 nt, Artificial Sequence
  Chemically synthesized
ggugaaucagaaugcaagcaggu

SEQ ID NO: 57964 - RNA, 23 nt, Artificial Sequence
  Chemically synthesized
uggugaaucagaaugcaagcagg

SEQ ID NO: 57965 - RNA, 23 nt, Artificial Sequence
  Chemically synthesized
uuggugaaucagaaugcaagcag

SEQ ID NO: 57966 - RNA, 23 nt, Artificial Sequence
  Chemically synthesized
agcgugaaaagagagacugcgcg

SEQ ID NO: 57967 - RNA, 23 nt, Artificial Sequence
  Chemically synthesized
ccaccaugaagaaucuuuggaag

SEQ ID NO: 57968 - RNA, 23 nt, Artificial Sequence
  Chemically synthesized
uccaccaugaagaaucuuuggaa

SEQ ID NO: 57969 - RNA, 23 nt, Artificial Sequence
  Chemically synthesized
uuccaccaugaagaaucuuugga

SEQ ID NO: 57970 - RNA, 23 nt, Artificial Sequence
  Chemically synthesized
cuuccaccaugaagaaucuuugg

SEQ ID NO: 57971 - RNA, 23 nt, Artificial Sequence
  Chemically synthesized
gcuuccaccaugaagaaucuuug

SEQ ID NO: 57972 - RNA, 23 nt, Artificial Sequence
  Chemically synthesized
ccuuugaccagaguuuuuccaug

SEQ ID NO: 57973 - RNA, 23 nt, Artificial Sequence
  Chemically synthesized
agauuccuaaggcaugcuguguc

SEQ ID NO: 57974 - RNA, 23 nt, Artificial Sequence
  Chemically synthesized
aagauuccuaaggcaugcugugu

SEQ ID NO: 57975 - RNA, 23 nt, Artificial Sequence
  Chemically synthesized
uaagauuccuaaggcaugcugug

SEQ ID NO: 57976 - RNA, 23 nt, Artificial Sequence
  Chemically synthesized
cuaagauuccuaaggcaugcugu

SEQ ID NO: 57977 - RNA, 23 nt, Artificial Sequence
  Chemically synthesized
ucuaagauuccuaaggcaugcug

SEQ ID NO: 57978 - RNA, 23 nt, Artificial Sequence
  Chemically synthesized
cucuaagauuccuaaggcaugcu

SEQ ID NO: 57979 - RNA, 23 nt, Artificial Sequence
  Chemically synthesized
acucuaagauuccuaaggcaugc

SEQ ID NO: 57980 - RNA, 23 nt, Artificial Sequence
  Chemically synthesized
aacucuaagauuccuaaggcaug

SEQ ID NO: 57981 - RNA, 23 nt, Artificial Sequence
  Chemically synthesized
uaacucuaagauuccuaaggcau

SEQ ID NO: 57982 - RNA, 23 nt, Artificial Sequence
  Chemically synthesized
uuaacucuaagauuccuaaggca

SEQ ID NO: 57983 - RNA, 23 nt, Artificial Sequence
  Chemically synthesized
guuaacucuaagauuccuaaggc

SEQ ID NO: 57984 - RNA, 23 nt, Artificial Sequence
  Chemically synthesized
uguuaacucuaagauuccuaagg

SEQ ID NO: 57985 - RNA, 23 nt, Artificial Sequence
  Chemically synthesized
cuguuaacucuaagauuccuaag

SEQ ID NO: 57986 - RNA, 23 nt, Artificial Sequence
  Chemically synthesized
ucuguuaacucuaagauuccuaa

SEQ ID NO: 57987 - RNA, 23 nt, Artificial Sequence
  Chemically synthesized
cucuguuaacucuaagauuccua

SEQ ID NO: 57988 - RNA, 23 nt, Artificial Sequence
  Chemically synthesized
acucuguuaacucuaagauuccu

SEQ ID NO: 57989 - RNA, 23 nt, Artificial Sequence
  Chemically synthesized
aacucuguuaacucuaagauucc

SEQ ID NO: 57990 - RNA, 23 nt, Artificial Sequence
  Chemically synthesized
caacucuguuaacucuaagauuc

SEQ ID NO: 57991 - RNA, 23 nt, Artificial Sequence
  Chemically synthesized
gucaagccaaacacaaacagcgg

SEQ ID NO: 57992 - RNA, 23 nt, Artificial Sequence
  Chemically synthesized
cgucaagccaaacacaaacagcg

SEQ ID NO: 57993 - RNA, 23 nt, Artificial Sequence
  Chemically synthesized
acgucaagccaaacacaaacagc

SEQ ID NO: 57994 - RNA, 23 nt, Artificial Sequence
  Chemically synthesized
aacgucaagccaaacacaaacag

SEQ ID NO: 57995 - RNA, 23 nt, Artificial Sequence
  Chemically synthesized
aaacgucaagccaaacacaaaca

SEQ ID NO: 57996 - RNA, 23 nt, Artificial Sequence
  Chemically synthesized
caaaagagaaaaacgucaagcca

SEQ ID NO: 57997 - RNA, 23 nt, Artificial Sequence
  Chemically synthesized
acaaaagagaaaaacgucaagcc

SEQ ID NO: 57998 - RNA, 23 nt, Artificial Sequence
  Chemically synthesized
cacaaaagagaaaaacgucaagc

SEQ ID NO: 57999 - RNA, 23 nt, Artificial Sequence
  Chemically synthesized
ucacagauaaggccauugcuagu

SEQ ID NO: 58000 - RNA, 23 nt, Artificial Sequence
  Chemically synthesized
gucacagauaaggccauugcuag

SEQ ID NO: 58001 - RNA, 23 nt, Artificial Sequence
  Chemically synthesized
agacauguuaggauaagcagguc

SEQ ID NO: 58002 - RNA, 23 nt, Artificial Sequence
  Chemically synthesized
gagacauguuaggauaagcaggu

SEQ ID NO: 58003 - RNA, 23 nt, Artificial Sequence
  Chemically synthesized
gaacuugcagggagaauaacuug

SEQ ID NO: 58004 - RNA, 23 nt, Artificial Sequence
  Chemically synthesized
ggacuucuugaacuugcagggag

SEQ ID NO: 58005 - RNA, 23 nt, Artificial Sequence
  Chemically synthesized
ggacgcucuuucaauggacgugu

SEQ ID NO: 58006 - RNA, 23 nt, Artificial Sequence
  Chemically synthesized
uggacgcucuuucaauggacgug

SEQ ID NO: 58007 - RNA, 23 nt, Artificial Sequence
  Chemically synthesized
guggacgcucuuucaauggacgu

SEQ ID NO: 58008 - RNA, 23 nt, Artificial Sequence
  Chemically synthesized
uguggacgcucuuucaauggacg

SEQ ID NO: 58009 - RNA, 23 nt, Artificial Sequence
  Chemically synthesized
auguggacgcucuuucaauggac

SEQ ID NO: 58010 - RNA, 23 nt, Artificial Sequence
  Chemically synthesized
ccaugauggaaaagggcauccuc

SEQ ID NO: 58011 - RNA, 23 nt, Artificial Sequence
  Chemically synthesized
gccaugauggaaaagggcauccu

SEQ ID NO: 58012 - RNA, 23 nt, Artificial Sequence
  Chemically synthesized
ggccaugauggaaaagggcaucc

SEQ ID NO: 58013 - RNA, 23 nt, Artificial Sequence
  Chemically synthesized
uggccaugauggaaaagggcauc

SEQ ID NO: 58014 - RNA, 23 nt, Artificial Sequence
  Chemically synthesized
uuggccaugauggaaaagggcau

SEQ ID NO: 58015 - RNA, 23 nt, Artificial Sequence
  Chemically synthesized
guuggugaaucagaaugcaagca

SEQ ID NO: 58016 - RNA, 23 nt, Artificial Sequence
  Chemically synthesized
gguuggugaaucagaaugcaagc

SEQ ID NO: 58017 - RNA, 23 nt, Artificial Sequence
  Chemically synthesized
agguuggugaaucagaaugcaag

SEQ ID NO: 58018 - RNA, 23 nt, Artificial Sequence
  Chemically synthesized
cagguuggugaaucagaaugcaa

SEQ ID NO: 58019 - RNA, 23 nt, Artificial Sequence
  Chemically synthesized
agcuuccaccaugaagaaucuuu

SEQ ID NO: 58020 - RNA, 23 nt, Artificial Sequence
  Chemically synthesized
ccauguggacgcucuuucaaugg

SEQ ID NO: 58021 - RNA, 23 nt, Artificial Sequence
  Chemically synthesized
uccauguggacgcucuuucaaug

SEQ ID NO: 58022 - RNA, 23 nt, Artificial Sequence
  Chemically synthesized
uuccauguggacgcucuuucaau

SEQ ID NO: 58023 - RNA, 23 nt, Artificial Sequence
  Chemically synthesized
uuuccauguggacgcucuuucaa

SEQ ID NO: 58024 - RNA, 23 nt, Artificial Sequence
  Chemically synthesized
uuuuccauguggacgcucuuuca

SEQ ID NO: 58025 - RNA, 23 nt, Artificial Sequence
  Chemically synthesized
cuaucucgaugcuguaccuugac

SEQ ID NO: 58026 - RNA, 23 nt, Artificial Sequence
  Chemically synthesized
gcuaucucgaugcuguaccuuga

SEQ ID NO: 58027 - RNA, 23 nt, Artificial Sequence
  Chemically synthesized
ugcuaucucgaugcuguaccuug

SEQ ID NO: 58028 - RNA, 23 nt, Artificial Sequence
  Chemically synthesized
gugcuaucucgaugcuguaccuu

SEQ ID NO: 58029 - RNA, 23 nt, Artificial Sequence
  Chemically synthesized
agugcuaucucgaugcuguaccu

SEQ ID NO: 58030 - RNA, 23 nt, Artificial Sequence
  Chemically synthesized
uccuuugaccagaguuuuuccau

SEQ ID NO: 58031 - RNA, 23 nt, Artificial Sequence
  Chemically synthesized
guccuuugaccagaguuuuucca

SEQ ID NO: 58032 - RNA, 23 nt, Artificial Sequence
  Chemically synthesized
gguccuuugaccagaguuuuucc

SEQ ID NO: 58033 - RNA, 23 nt, Artificial Sequence
  Chemically synthesized
agguccuuugaccagaguuuuuc

SEQ ID NO: 58034 - RNA, 23 nt, Artificial Sequence
  Chemically synthesized
cagguccuuugaccagaguuuuu

SEQ ID NO: 58035 - RNA, 23 nt, Artificial Sequence
  Chemically synthesized
cugaacuccacuaaucaugccau

SEQ ID NO: 58036 - RNA, 23 nt, Artificial Sequence
  Chemically synthesized
ucugaacuccacuaaucaugcca

SEQ ID NO: 58037 - RNA, 23 nt, Artificial Sequence
  Chemically synthesized
aucugaacuccacuaaucaugcc

SEQ ID NO: 58038 - RNA, 23 nt, Artificial Sequence
  Chemically synthesized
caucugaacuccacuaaucaugc

SEQ ID NO: 58039 - RNA, 23 nt, Artificial Sequence
  Chemically synthesized
ucaucugaacuccacuaaucaug

SEQ ID NO: 58040 - RNA, 23 nt, Artificial Sequence
  Chemically synthesized
cucuggcugaucaucugaacucc

SEQ ID NO: 58041 - RNA, 23 nt, Artificial Sequence
  Chemically synthesized
ccucuggcugaucaucugaacuc

SEQ ID NO: 58042 - RNA, 23 nt, Artificial Sequence
  Chemically synthesized
uccucuggcugaucaucugaacu

SEQ ID NO: 58043 - RNA, 23 nt, Artificial Sequence
  Chemically synthesized
uuccucuggcugaucaucugaac

SEQ ID NO: 58044 - RNA, 23 nt, Artificial Sequence
  Chemically synthesized
uuuccucuggcugaucaucugaa

SEQ ID NO: 58045 - RNA, 23 nt, Artificial Sequence
  Chemically synthesized
guuaggauaagcaggucuuugca

SEQ ID NO: 58046 - RNA, 23 nt, Artificial Sequence
  Chemically synthesized
uguuaggauaagcaggucuuugc

SEQ ID NO: 58047 - RNA, 23 nt, Artificial Sequence
  Chemically synthesized
auguuaggauaagcaggucuuug

SEQ ID NO: 58048 - RNA, 23 nt, Artificial Sequence
  Chemically synthesized
cauguuaggauaagcaggucuuu

SEQ ID NO: 58049 - RNA, 23 nt, Artificial Sequence
  Chemically synthesized
acauguuaggauaagcaggucuu

SEQ ID NO: 58050 - RNA, 23 nt, Artificial Sequence
  Chemically synthesized
caggugggaaaguuuugauguca

SEQ ID NO: 58051 - RNA, 23 nt, Artificial Sequence
  Chemically synthesized
gcaggugggaaaguuuugauguc

SEQ ID NO: 58052 - RNA, 23 nt, Artificial Sequence
  Chemically synthesized
agcaggugggaaaguuuugaugu

SEQ ID NO: 58053 - RNA, 23 nt, Artificial Sequence
  Chemically synthesized
aagcaggugggaaaguuuugaug

SEQ ID NO: 58054 - RNA, 23 nt, Artificial Sequence
  Chemically synthesized
caagcaggugggaaaguuuugau

SEQ ID NO: 58055 - RNA, 23 nt, Artificial Sequence
  Chemically synthesized
uuuaugaaaucauaaaaccugca

SEQ ID NO: 58056 - RNA, 23 nt, Artificial Sequence
  Chemically synthesized
aguuuccaucaccgaauuaauau

SEQ ID NO: 58057 - RNA, 23 nt, Artificial Sequence
  Chemically synthesized
cuugcagggagaauaacuugcgc

SEQ ID NO: 58058 - RNA, 23 nt, Artificial Sequence
  Chemically synthesized
acuugcagggagaauaacuugcg

SEQ ID NO: 58059 - RNA, 23 nt, Artificial Sequence
  Chemically synthesized
aacuugcagggagaauaacuugc

SEQ ID NO: 58060 - RNA, 23 nt, Artificial Sequence
  Chemically synthesized
uaaagaacuaucaggacaugguu

SEQ ID NO: 58061 - RNA, 23 nt, Artificial Sequence
  Chemically synthesized
uuaaagaacuaucaggacauggu

SEQ ID NO: 58062 - RNA, 23 nt, Artificial Sequence
  Chemically synthesized
auuaaagaacuaucaggacaugg

SEQ ID NO: 58063 - RNA, 23 nt, Artificial Sequence
  Chemically synthesized
uauuaaagaacuaucaggacaug

SEQ ID NO: 58064 - RNA, 23 nt, Artificial Sequence
  Chemically synthesized
guauuaaagaacuaucaggacau

SEQ ID NO: 58065 - RNA, 23 nt, Artificial Sequence
  Chemically synthesized
uccuaaggcaugcugugucccga

SEQ ID NO: 58066 - RNA, 23 nt, Artificial Sequence
  Chemically synthesized
uuccuaaggcaugcugugucccg

SEQ ID NO: 58067 - RNA, 23 nt, Artificial Sequence
  Chemically synthesized
auuccuaaggcaugcuguguccc

SEQ ID NO: 58068 - RNA, 23 nt, Artificial Sequence
  Chemically synthesized
gauuccuaaggcaugcugugucc

SEQ ID NO: 58069 - RNA, 23 nt, Artificial Sequence
  Chemically synthesized
cugaucaucugaacuccacuaau

SEQ ID NO: 58070 - RNA, 23 nt, Artificial Sequence
  Chemically synthesized
gcugaucaucugaacuccacuaa

SEQ ID NO: 58071 - RNA, 23 nt, Artificial Sequence
  Chemically synthesized
ggcugaucaucugaacuccacua

SEQ ID NO: 58072 - RNA, 23 nt, Artificial Sequence
  Chemically synthesized
uggcugaucaucugaacuccacu

SEQ ID NO: 58073 - RNA, 23 nt, Artificial Sequence
  Chemically synthesized
cuggcugaucaucugaacuccac

SEQ ID NO: 58074 - RNA, 23 nt, Artificial Sequence
  Chemically synthesized
ucuggcugaucaucugaacucca

SEQ ID NO: 58075 - RNA, 23 nt, Artificial Sequence
  Chemically synthesized
cuuuuggccaugauggaaaaggg

SEQ ID NO: 58076 - RNA, 23 nt, Artificial Sequence
  Chemically synthesized
acuuuuggccaugauggaaaagg

SEQ ID NO: 58077 - RNA, 23 nt, Artificial Sequence
  Chemically synthesized
aacuuuuggccaugauggaaaag

SEQ ID NO: 58078 - RNA, 23 nt, Artificial Sequence
  Chemically synthesized
uaacuuuuggccaugauggaaaa

SEQ ID NO: 58079 - RNA, 23 nt, Artificial Sequence
  Chemically synthesized
guaacuuuuggccaugauggaaa

SEQ ID NO: 58080 - RNA, 23 nt, Artificial Sequence
  Chemically synthesized
agcagagcuucagguuuuccgag

SEQ ID NO: 58081 - RNA, 23 nt, Artificial Sequence
  Chemically synthesized
cagcagagcuucagguuuuccga

SEQ ID NO: 58082 - RNA, 23 nt, Artificial Sequence
  Chemically synthesized
ucagcagagcuucagguuuuccg

SEQ ID NO: 58083 - RNA, 23 nt, Artificial Sequence
  Chemically synthesized
cucagcagagcuucagguuuucc

SEQ ID NO: 58084 - RNA, 23 nt, Artificial Sequence
  Chemically synthesized
ccucagcagagcuucagguuuuc

SEQ ID NO: 58085 - RNA, 23 nt, Artificial Sequence
  Chemically synthesized
cccuacaugcuagaccuguaucg

SEQ ID NO: 58086 - RNA, 23 nt, Artificial Sequence
  Chemically synthesized
ccccuacaugcuagaccuguauc

SEQ ID NO: 58087 - RNA, 23 nt, Artificial Sequence
  Chemically synthesized
cccccuacaugcuagaccuguau

SEQ ID NO: 58088 - RNA, 23 nt, Artificial Sequence
  Chemically synthesized
ccccccuacaugcuagaccugua

SEQ ID NO: 58089 - RNA, 23 nt, Artificial Sequence
  Chemically synthesized
gccccccuacaugcuagaccugu

SEQ ID NO: 58090 - RNA, 23 nt, Artificial Sequence
  Chemically synthesized
aucaucugaacuccacuaaucau

SEQ ID NO: 58091 - RNA, 23 nt, Artificial Sequence
  Chemically synthesized
gaucaucugaacuccacuaauca

SEQ ID NO: 58092 - RNA, 23 nt, Artificial Sequence
  Chemically synthesized
ugaucaucugaacuccacuaauc

SEQ ID NO: 58093 - RNA, 23 nt, Artificial Sequence
  Chemically synthesized
ccacuuggaggagaaacaaggug

SEQ ID NO: 58094 - RNA, 23 nt, Artificial Sequence
  Chemically synthesized
cccacuuggaggagaaacaaggu

SEQ ID NO: 58095 - RNA, 23 nt, Artificial Sequence
  Chemically synthesized
gcccacuuggaggagaaacaagg

SEQ ID NO: 58096 - RNA, 23 nt, Artificial Sequence
  Chemically synthesized
ggcccacuuggaggagaaacaag

SEQ ID NO: 58097 - RNA, 23 nt, Artificial Sequence
  Chemically synthesized
uggcccacuuggaggagaaacaa

SEQ ID NO: 58098 - RNA, 23 nt, Artificial Sequence
  Chemically synthesized
aaacaacccggagauucuucuuu

SEQ ID NO: 58099 - RNA, 23 nt, Artificial Sequence
  Chemically synthesized
cauguggacgcucuuucaaugga

SEQ ID NO: 58100 - RNA, 23 nt, Artificial Sequence
  Chemically synthesized
gagaaugaaaagguuguauuaaa

SEQ ID NO: 58101 - RNA, 23 nt, Artificial Sequence
  Chemically synthesized
cccuuuguacguggacuucagug

SEQ ID NO: 58102 - RNA, 23 nt, Artificial Sequence
  Chemically synthesized
acccuuuguacguggacuucagu

SEQ ID NO: 58103 - RNA, 23 nt, Artificial Sequence
  Chemically synthesized
cacccuuuguacguggacuucag

SEQ ID NO: 58104 - RNA, 23 nt, Artificial Sequence
  Chemically synthesized
acacccuuuguacguggacuuca

SEQ ID NO: 58105 - RNA, 23 nt, Artificial Sequence
  Chemically synthesized
gacacccuuuguacguggacuuc

SEQ ID NO: 58106 - RNA, 23 nt, Artificial Sequence
  Chemically synthesized
cucuuucaauggacguguccccg

SEQ ID NO: 58107 - RNA, 23 nt, Artificial Sequence
  Chemically synthesized
gcucuuucaauggacgugucccc

SEQ ID NO: 58108 - RNA, 23 nt, Artificial Sequence
  Chemically synthesized
cgcucuuucaauggacguguccc

SEQ ID NO: 58109 - RNA, 23 nt, Artificial Sequence
  Chemically synthesized
acgcucuuucaauggacgugucc

SEQ ID NO: 58110 - RNA, 23 nt, Artificial Sequence
  Chemically synthesized
gacgcucuuucaauggacguguc

SEQ ID NO: 58111 - RNA, 23 nt, Artificial Sequence
  Chemically synthesized
cgcuaguacagcaaaauuaaaua

SEQ ID NO: 58112 - RNA, 23 nt, Artificial Sequence
  Chemically synthesized
ucgcuaguacagcaaaauuaaau

SEQ ID NO: 58113 - RNA, 23 nt, Artificial Sequence
  Chemically synthesized
gucgcuaguacagcaaaauuaaa

SEQ ID NO: 58114 - RNA, 23 nt, Artificial Sequence
  Chemically synthesized
ugucgcuaguacagcaaaauuaa

SEQ ID NO: 58115 - RNA, 23 nt, Artificial Sequence
  Chemically synthesized
gugucgcuaguacagcaaaauua

SEQ ID NO: 58116 - RNA, 23 nt, Artificial Sequence
  Chemically synthesized
acaugguuguggaggguuguggg

SEQ ID NO: 58117 - RNA, 23 nt, Artificial Sequence
  Chemically synthesized
gacaugguuguggaggguugugg

SEQ ID NO: 58118 - RNA, 23 nt, Artificial Sequence
  Chemically synthesized
ggacaugguuguggaggguugug

SEQ ID NO: 58119 - RNA, 23 nt, Artificial Sequence
  Chemically synthesized
aggacaugguuguggaggguugu

SEQ ID NO: 58120 - RNA, 23 nt, Artificial Sequence
  Chemically synthesized
caggacaugguuguggaggguug

SEQ ID NO: 58121 - RNA, 23 nt, Artificial Sequence
  Chemically synthesized
ccaaacacaaacagcggaaacgc

SEQ ID NO: 58122 - RNA, 23 nt, Artificial Sequence
  Chemically synthesized
gccaaacacaaacagcggaaacg

SEQ ID NO: 58123 - RNA, 23 nt, Artificial Sequence
  Chemically synthesized
agccaaacacaaacagcggaaac

SEQ ID NO: 58124 - RNA, 23 nt, Artificial Sequence
  Chemically synthesized
aagccaaacacaaacagcggaaa

SEQ ID NO: 58125 - RNA, 23 nt, Artificial Sequence
  Chemically synthesized
caagccaaacacaaacagcggaa

SEQ ID NO: 58126 - RNA, 23 nt, Artificial Sequence
  Chemically synthesized
aguaacuuuuggccaugauggaa

SEQ ID NO: 58127 - RNA, 23 nt, Artificial Sequence
  Chemically synthesized
uaguaacuuuuggccaugaugga

SEQ ID NO: 58128 - RNA, 23 nt, Artificial Sequence
  Chemically synthesized
ggccauugcuaguaacuuuuggc

SEQ ID NO: 58129 - RNA, 23 nt, Artificial Sequence
  Chemically synthesized
aggccauugcuaguaacuuuugg

SEQ ID NO: 58130 - RNA, 23 nt, Artificial Sequence
  Chemically synthesized
aaggccauugcuaguaacuuuug

SEQ ID NO: 58131 - RNA, 23 nt, Artificial Sequence
  Chemically synthesized
uaaggccauugcuaguaacuuuu

SEQ ID NO: 58132 - RNA, 23 nt, Artificial Sequence
  Chemically synthesized
auaaggccauugcuaguaacuuu

SEQ ID NO: 58133 - RNA, 23 nt, Artificial Sequence
  Chemically synthesized
uuuuccucuggcugaucaucuga

SEQ ID NO: 58134 - RNA, 23 nt, Artificial Sequence
  Chemically synthesized
cuuuuccucuggcugaucaucug

SEQ ID NO: 58135 - RNA, 23 nt, Artificial Sequence
  Chemically synthesized
accaagaugaacacagcugguca

SEQ ID NO: 58136 - RNA, 23 nt, Artificial Sequence
  Chemically synthesized
caccaagaugaacacagcugguc

SEQ ID NO: 58137 - RNA, 23 nt, Artificial Sequence
  Chemically synthesized
gcaccaagaugaacacagcuggu

SEQ ID NO: 58138 - RNA, 23 nt, Artificial Sequence
  Chemically synthesized
ugcaccaagaugaacacagcugg

SEQ ID NO: 58139 - RNA, 23 nt, Artificial Sequence
  Chemically synthesized
uugcaccaagaugaacacagcug

SEQ ID NO: 58140 - RNA, 23 nt, Artificial Sequence
  Chemically synthesized
agaugcuuuaggaaacaauagca

SEQ ID NO: 58141 - RNA, 23 nt, Artificial Sequence
  Chemically synthesized
aagaugcuuuaggaaacaauagc

SEQ ID NO: 58142 - RNA, 23 nt, Artificial Sequence
  Chemically synthesized
caagaugcuuuaggaaacaauag

SEQ ID NO: 58143 - RNA, 23 nt, Artificial Sequence
  Chemically synthesized
gcaagaugcuuuaggaaacaaua

SEQ ID NO: 58144 - RNA, 23 nt, Artificial Sequence
  Chemically synthesized
ugcaagaugcuuuaggaaacaau

SEQ ID NO: 58145 - RNA, 23 nt, Artificial Sequence
  Chemically synthesized
cuaccagaaacgagugggaaaac

SEQ ID NO: 58146 - RNA, 23 nt, Artificial Sequence
  Chemically synthesized
acuaccagaaacgagugggaaaa

SEQ ID NO: 58147 - RNA, 23 nt, Artificial Sequence
  Chemically synthesized
gguggaaugacuggauuguggcu

SEQ ID NO: 58148 - RNA, 23 nt, Artificial Sequence
  Chemically synthesized
augcuuuaggaaacaauagcagu

SEQ ID NO: 58149 - RNA, 23 nt, Artificial Sequence
  Chemically synthesized
gaugcuuuaggaaacaauagcag

SEQ ID NO: 58150 - RNA, 23 nt, Artificial Sequence
  Chemically synthesized
ggugucgcuaguacagcaaaauu

SEQ ID NO: 58151 - RNA, 23 nt, Artificial Sequence
  Chemically synthesized
gggugucgcuaguacagcaaaau

SEQ ID NO: 58152 - RNA, 23 nt, Artificial Sequence
  Chemically synthesized
ugggugucgcuaguacagcaaaa

SEQ ID NO: 58153 - RNA, 23 nt, Artificial Sequence
  Chemically synthesized
agaaugcccuuuuccucuggcug

SEQ ID NO: 58154 - RNA, 23 nt, Artificial Sequence
  Chemically synthesized
gagaaugcccuuuuccucuggcu

SEQ ID NO: 58155 - RNA, 23 nt, Artificial Sequence
  Chemically synthesized
ggagaaugcccuuuuccucuggc

SEQ ID NO: 58156 - RNA, 23 nt, Artificial Sequence
  Chemically synthesized
cggagaaugcccuuuuccucugg

SEQ ID NO: 58157 - RNA, 23 nt, Artificial Sequence
  Chemically synthesized
acggagaaugcccuuuuccucug

SEQ ID NO: 58158 - RNA, 23 nt, Artificial Sequence
  Chemically synthesized
gaacggacauucgguccuugcgc

SEQ ID NO: 58159 - RNA, 23 nt, Artificial Sequence
  Chemically synthesized
ggaacggacauucgguccuugcg

SEQ ID NO: 58160 - RNA, 23 nt, Artificial Sequence
  Chemically synthesized
aggaacggacauucgguccuugc

SEQ ID NO: 58161 - RNA, 23 nt, Artificial Sequence
  Chemically synthesized
aaggaacggacauucgguccuug

SEQ ID NO: 58162 - RNA, 23 nt, Artificial Sequence
  Chemically synthesized
aaaggaacggacauucgguccuu

SEQ ID NO: 58163 - RNA, 23 nt, Artificial Sequence
  Chemically synthesized
caaacacaaacagcggaaacgcc

SEQ ID NO: 58164 - RNA, 23 nt, Artificial Sequence
  Chemically synthesized
agaaucuuuggaagaacuaccag

SEQ ID NO: 58165 - RNA, 23 nt, Artificial Sequence
  Chemically synthesized
aagaaucuuuggaagaacuacca

SEQ ID NO: 58166 - RNA, 23 nt, Artificial Sequence
  Chemically synthesized
gaagaaucuuuggaagaacuacc

SEQ ID NO: 58167 - RNA, 23 nt, Artificial Sequence
  Chemically synthesized
cccuuuuccucuggcugaucauc

SEQ ID NO: 58168 - RNA, 23 nt, Artificial Sequence
  Chemically synthesized
gcccuuuuccucuggcugaucau

SEQ ID NO: 58169 - RNA, 23 nt, Artificial Sequence
  Chemically synthesized
ugcccuuuuccucuggcugauca

SEQ ID NO: 58170 - RNA, 23 nt, Artificial Sequence
  Chemically synthesized
augcccuuuuccucuggcugauc

SEQ ID NO: 58171 - RNA, 23 nt, Artificial Sequence
  Chemically synthesized
aaugcccuuuuccucuggcugau

SEQ ID NO: 58172 - RNA, 23 nt, Artificial Sequence
  Chemically synthesized
ucaagccaaacacaaacagcgga

SEQ ID NO: 58173 - RNA, 23 nt, Artificial Sequence
  Chemically synthesized
ccucuccacaaaagagaaaaacg

SEQ ID NO: 58174 - RNA, 23 nt, Artificial Sequence
  Chemically synthesized
uccucuccacaaaagagaaaaac

SEQ ID NO: 58175 - RNA, 23 nt, Artificial Sequence
  Chemically synthesized
auccucuccacaaaagagaaaaa

SEQ ID NO: 58176 - RNA, 23 nt, Artificial Sequence
  Chemically synthesized
cauccucuccacaaaagagaaaa

SEQ ID NO: 58177 - RNA, 23 nt, Artificial Sequence
  Chemically synthesized
gcauccucuccacaaaagagaaa

SEQ ID NO: 58178 - RNA, 23 nt, Artificial Sequence
  Chemically synthesized
acagaugcaagaugcuuuaggaa

SEQ ID NO: 58179 - RNA, 23 nt, Artificial Sequence
  Chemically synthesized
aacagaugcaagaugcuuuagga

SEQ ID NO: 58180 - RNA, 23 nt, Artificial Sequence
  Chemically synthesized
gaacagaugcaagaugcuuuagg

SEQ ID NO: 58181 - RNA, 23 nt, Artificial Sequence
  Chemically synthesized
agaacagaugcaagaugcuuuag

SEQ ID NO: 58182 - RNA, 23 nt, Artificial Sequence
  Chemically synthesized
gagaacagaugcaagaugcuuua

SEQ ID NO: 58183 - RNA, 23 nt, Artificial Sequence
  Chemically synthesized
gcuucagguuuuccgagaacaga

SEQ ID NO: 58184 - RNA, 23 nt, Artificial Sequence
  Chemically synthesized
agcuucagguuuuccgagaacag

SEQ ID NO: 58185 - RNA, 23 nt, Artificial Sequence
  Chemically synthesized
gagcuucagguuuuccgagaaca

SEQ ID NO: 58186 - RNA, 23 nt, Artificial Sequence
  Chemically synthesized
agagcuucagguuuuccgagaac

SEQ ID NO: 58187 - RNA, 23 nt, Artificial Sequence
  Chemically synthesized
cagagcuucagguuuuccgagaa

SEQ ID NO: 58188 - RNA, 23 nt, Artificial Sequence
  Chemically synthesized
aacuaccagaaacgagugggaaa

SEQ ID NO: 58189 - RNA, 23 nt, Artificial Sequence
  Chemically synthesized
gaacuaccagaaacgagugggaa

SEQ ID NO: 58190 - RNA, 23 nt, Artificial Sequence
  Chemically synthesized
gccauugcuaguaacuuuuggcc

SEQ ID NO: 58191 - RNA, 23 nt, Artificial Sequence
  Chemically synthesized
acagauaaggccauugcuaguaa

SEQ ID NO: 58192 - RNA, 23 nt, Artificial Sequence
  Chemically synthesized
cacagauaaggccauugcuagua

SEQ ID NO: 58193 - RNA, 23 nt, Artificial Sequence
  Chemically synthesized
cacagcuggucacagauaaggcc

SEQ ID NO: 58194 - RNA, 23 nt, Artificial Sequence
  Chemically synthesized
acacagcuggucacagauaaggc

SEQ ID NO: 58195 - RNA, 23 nt, Artificial Sequence
  Chemically synthesized
aacacagcuggucacagauaagg

SEQ ID NO: 58196 - RNA, 23 nt, Artificial Sequence
  Chemically synthesized
gaacacagcuggucacagauaag

SEQ ID NO: 58197 - RNA, 23 nt, Artificial Sequence
  Chemically synthesized
ugaacacagcuggucacagauaa

SEQ ID NO: 58198 - RNA, 23 nt, Artificial Sequence
  Chemically synthesized
gacuuuuggacaccagguuggug

SEQ ID NO: 58199 - RNA, 23 nt, Artificial Sequence
  Chemically synthesized
agacuuuuggacaccagguuggu

SEQ ID NO: 58200 - RNA, 23 nt, Artificial Sequence
  Chemically synthesized
cagacuuuuggacaccagguugg

SEQ ID NO: 58201 - RNA, 23 nt, Artificial Sequence
  Chemically synthesized
ccagacuuuuggacaccagguug

SEQ ID NO: 58202 - RNA, 23 nt, Artificial Sequence
  Chemically synthesized
accagacuuuuggacaccagguu

SEQ ID NO: 58203 - RNA, 23 nt, Artificial Sequence
  Chemically synthesized
gggaaaacaacccggagauucuu

SEQ ID NO: 58204 - RNA, 23 nt, Artificial Sequence
  Chemically synthesized
ugggaaaacaacccggagauucu

SEQ ID NO: 58205 - RNA, 23 nt, Artificial Sequence
  Chemically synthesized
gugggaaaacaacccggagauuc

SEQ ID NO: 58206 - RNA, 23 nt, Artificial Sequence
  Chemically synthesized
agugggaaaacaacccggagauu

SEQ ID NO: 58207 - RNA, 23 nt, Artificial Sequence
  Chemically synthesized
gagugggaaaacaacccggagau

SEQ ID NO: 58208 - RNA, 23 nt, Artificial Sequence
  Chemically synthesized
acguuggucaacucuguuaacuc

SEQ ID NO: 58209 - RNA, 23 nt, Artificial Sequence
  Chemically synthesized
gacguuggucaacucuguuaacu

SEQ ID NO: 58210 - RNA, 23 nt, Artificial Sequence
  Chemically synthesized
agacguuggucaacucuguuaac

SEQ ID NO: 58211 - RNA, 23 nt, Artificial Sequence
  Chemically synthesized
cagacguuggucaacucuguuaa

SEQ ID NO: 58212 - RNA, 23 nt, Artificial Sequence
  Chemically synthesized
ucagacguuggucaacucuguua

SEQ ID NO: 58213 - RNA, 23 nt, Artificial Sequence
  Chemically synthesized
gcuaguacagcaaaauuaaauac

SEQ ID NO: 58214 - RNA, 23 nt, Artificial Sequence
  Chemically synthesized
gugggugucgcuaguacagcaaa

SEQ ID NO: 58215 - RNA, 23 nt, Artificial Sequence
  Chemically synthesized
ugugggugucgcuaguacagcaa

SEQ ID NO: 58216 - RNA, 23 nt, Artificial Sequence
  Chemically synthesized
ugucccgacagaacucagugcua

SEQ ID NO: 58217 - RNA, 23 nt, Artificial Sequence
  Chemically synthesized
aacuccacuaaucaugccauugu

SEQ ID NO: 58218 - RNA, 23 nt, Artificial Sequence
  Chemically synthesized
gaacuccacuaaucaugccauug

SEQ ID NO: 58219 - RNA, 23 nt, Artificial Sequence
  Chemically synthesized
ugaacuccacuaaucaugccauu

SEQ ID NO: 58220 - RNA, 23 nt, Artificial Sequence
  Chemically synthesized
gauaaggccauugcuaguaacuu

SEQ ID NO: 58221 - RNA, 23 nt, Artificial Sequence
  Chemically synthesized
agauaaggccauugcuaguaacu

SEQ ID NO: 58222 - RNA, 23 nt, Artificial Sequence
  Chemically synthesized
cagauaaggccauugcuaguaac

SEQ ID NO: 58223 - RNA, 23 nt, Artificial Sequence
  Chemically synthesized
augaacacagcuggucacagaua

SEQ ID NO: 58224 - RNA, 23 nt, Artificial Sequence
  Chemically synthesized
gaccagacuuuuggacaccaggu

SEQ ID NO: 58225 - RNA, 23 nt, Artificial Sequence
  Chemically synthesized
ugaccagacuuuuggacaccagg

SEQ ID NO: 58226 - RNA, 23 nt, Artificial Sequence
  Chemically synthesized
gugaccagacuuuuggacaccag

SEQ ID NO: 58227 - RNA, 23 nt, Artificial Sequence
  Chemically synthesized
gcaguuuccaucaccgaauuaau

SEQ ID NO: 58228 - RNA, 23 nt, Artificial Sequence
  Chemically synthesized
agcaguuuccaucaccgaauuaa

SEQ ID NO: 58229 - RNA, 23 nt, Artificial Sequence
  Chemically synthesized
uagcaguuuccaucaccgaauua

SEQ ID NO: 58230 - RNA, 23 nt, Artificial Sequence
  Chemically synthesized
auagcaguuuccaucaccgaauu

SEQ ID NO: 58231 - RNA, 23 nt, Artificial Sequence
  Chemically synthesized
aauagcaguuuccaucaccgaau

SEQ ID NO: 58232 - RNA, 23 nt, Artificial Sequence
  Chemically synthesized
caccaugaagaaucuuuggaaga

SEQ ID NO: 58233 - RNA, 23 nt, Artificial Sequence
  Chemically synthesized
ccacggagaaugcccuuuuccuc

SEQ ID NO: 58234 - RNA, 23 nt, Artificial Sequence
  Chemically synthesized
gccacggagaaugcccuuuuccu

SEQ ID NO: 58235 - RNA, 23 nt, Artificial Sequence
  Chemically synthesized
ugccacggagaaugcccuuuucc

SEQ ID NO: 58236 - RNA, 23 nt, Artificial Sequence
  Chemically synthesized
cugccacggagaaugcccuuuuc

SEQ ID NO: 58237 - RNA, 23 nt, Artificial Sequence
  Chemically synthesized
acugccacggagaaugcccuuuu

SEQ ID NO: 58238 - RNA, 23 nt, Artificial Sequence
  Chemically synthesized
ucacgccuuuuacugccacggag

SEQ ID NO: 58239 - RNA, 23 nt, Artificial Sequence
  Chemically synthesized
aucacgccuuuuacugccacgga

SEQ ID NO: 58240 - RNA, 23 nt, Artificial Sequence
  Chemically synthesized
uaucacgccuuuuacugccacgg

SEQ ID NO: 58241 - RNA, 23 nt, Artificial Sequence
  Chemically synthesized
guaucacgccuuuuacugccacg

SEQ ID NO: 58242 - RNA, 23 nt, Artificial Sequence
  Chemically synthesized
gguaucacgccuuuuacugccac

SEQ ID NO: 58243 - RNA, 23 nt, Artificial Sequence
  Chemically synthesized
acagcggaaacgccuuaagucca

SEQ ID NO: 58244 - RNA, 23 nt, Artificial Sequence
  Chemically synthesized
aacagcggaaacgccuuaagucc

SEQ ID NO: 58245 - RNA, 23 nt, Artificial Sequence
  Chemically synthesized
aaacagcggaaacgccuuaaguc

SEQ ID NO: 58246 - RNA, 23 nt, Artificial Sequence
  Chemically synthesized
caaacagcggaaacgccuuaagu

SEQ ID NO: 58247 - RNA, 23 nt, Artificial Sequence
  Chemically synthesized
acaaacagcggaaacgccuuaag

SEQ ID NO: 58248 - RNA, 23 nt, Artificial Sequence
  Chemically synthesized
ggcauccucuccacaaaagagaa

SEQ ID NO: 58249 - RNA, 23 nt, Artificial Sequence
  Chemically synthesized
guggcccacuuggaggagaaaca

SEQ ID NO: 58250 - RNA, 23 nt, Artificial Sequence
  Chemically synthesized
gggagaauaacuugcgcacccca

SEQ ID NO: 58251 - RNA, 23 nt, Artificial Sequence
  Chemically synthesized
agggagaauaacuugcgcacccc

SEQ ID NO: 58252 - RNA, 23 nt, Artificial Sequence
  Chemically synthesized
cagggagaauaacuugcgcaccc

SEQ ID NO: 58253 - RNA, 23 nt, Artificial Sequence
  Chemically synthesized
gcagggagaauaacuugcgcacc

SEQ ID NO: 58254 - RNA, 23 nt, Artificial Sequence
  Chemically synthesized
ugcagggagaauaacuugcgcac

SEQ ID NO: 58255 - RNA, 23 nt, Artificial Sequence
  Chemically synthesized
ggaaaacaacccggagauucuuc

SEQ ID NO: 58256 - RNA, 23 nt, Artificial Sequence
  Chemically synthesized
ucuuuggaagaacuaccagaaac

SEQ ID NO: 58257 - RNA, 23 nt, Artificial Sequence
  Chemically synthesized
gaacuaucaggacaugguugugg

SEQ ID NO: 58258 - RNA, 23 nt, Artificial Sequence
  Chemically synthesized
agaacuaucaggacaugguugug

SEQ ID NO: 58259 - RNA, 23 nt, Artificial Sequence
  Chemically synthesized
aagaacuaucaggacaugguugu

SEQ ID NO: 58260 - RNA, 23 nt, Artificial Sequence
  Chemically synthesized
aaagaacuaucaggacaugguug

SEQ ID NO: 58261 - RNA, 23 nt, Artificial Sequence
  Chemically synthesized
ccagaguuuuuccauguggacgc

SEQ ID NO: 58262 - RNA, 23 nt, Artificial Sequence
  Chemically synthesized
cguuggucaacucuguuaacucu

SEQ ID NO: 58263 - RNA, 23 nt, Artificial Sequence
  Chemically synthesized
aaaacgucaagccaaacacaaac

SEQ ID NO: 58264 - RNA, 23 nt, Artificial Sequence
  Chemically synthesized
aaaaacgucaagccaaacacaaa

SEQ ID NO: 58265 - RNA, 23 nt, Artificial Sequence
  Chemically synthesized
ccauugcuaguaacuuuuggcca

SEQ ID NO: 58266 - RNA, 23 nt, Artificial Sequence
  Chemically synthesized
gcaggucuuugcaccaagaugaa

SEQ ID NO: 58267 - RNA, 23 nt, Artificial Sequence
  Chemically synthesized
agcaggucuuugcaccaagauga

SEQ ID NO: 58268 - RNA, 23 nt, Artificial Sequence
  Chemically synthesized
aagcaggucuuugcaccaagaug

SEQ ID NO: 58269 - RNA, 23 nt, Artificial Sequence
  Chemically synthesized
uaagcaggucuuugcaccaagau

SEQ ID NO: 58270 - RNA, 23 nt, Artificial Sequence
  Chemically synthesized
auaagcaggucuuugcaccaaga

SEQ ID NO: 58271 - RNA, 23 nt, Artificial Sequence
  Chemically synthesized
aaccugcaacagccaacucgaaa

SEQ ID NO: 58272 - RNA, 23 nt, Artificial Sequence
  Chemically synthesized
aaaccugcaacagccaacucgaa

SEQ ID NO: 58273 - RNA, 23 nt, Artificial Sequence
  Chemically synthesized
caguuuccaucaccgaauuaaua

SEQ ID NO: 58274 - RNA, 23 nt, Artificial Sequence
  Chemically synthesized
gguuuuccgagaacagaugcaag

SEQ ID NO: 58275 - RNA, 23 nt, Artificial Sequence
  Chemically synthesized
agguuuuccgagaacagaugcaa

SEQ ID NO: 58276 - RNA, 23 nt, Artificial Sequence
  Chemically synthesized
cagguuuuccgagaacagaugca

SEQ ID NO: 58277 - RNA, 23 nt, Artificial Sequence
  Chemically synthesized
ucagguuuuccgagaacagaugc

SEQ ID NO: 58278 - RNA, 23 nt, Artificial Sequence
  Chemically synthesized
uucagguuuuccgagaacagaug

SEQ ID NO: 58279 - RNA, 23 nt, Artificial Sequence
  Chemically synthesized
cuucagguuuuccgagaacagau

SEQ ID NO: 58280 - RNA, 23 nt, Artificial Sequence
  Chemically synthesized
gcagagcuucagguuuuccgaga

SEQ ID NO: 58281 - RNA, 23 nt, Artificial Sequence
  Chemically synthesized
ggaggaguuuaucaccucagcag

SEQ ID NO: 58282 - RNA, 23 nt, Artificial Sequence
  Chemically synthesized
cggaggaguuuaucaccucagca

SEQ ID NO: 58283 - RNA, 23 nt, Artificial Sequence
  Chemically synthesized
acggaggaguuuaucaccucagc

SEQ ID NO: 58284 - RNA, 23 nt, Artificial Sequence
  Chemically synthesized
cacggaggaguuuaucaccucag

SEQ ID NO: 58285 - RNA, 23 nt, Artificial Sequence
  Chemically synthesized
cuacaugcuagaccuguaucgca

SEQ ID NO: 58286 - RNA, 23 nt, Artificial Sequence
  Chemically synthesized
ccuacaugcuagaccuguaucgc

SEQ ID NO: 58287 - RNA, 23 nt, Artificial Sequence
  Chemically synthesized
cccgcgugcuucuuagacggacu

SEQ ID NO: 58288 - RNA, 23 nt, Artificial Sequence
  Chemically synthesized
ccauuguucagacguuggucaac

SEQ ID NO: 58289 - RNA, 23 nt, Artificial Sequence
  Chemically synthesized
gccauuguucagacguuggucaa

SEQ ID NO: 58290 - RNA, 23 nt, Artificial Sequence
  Chemically synthesized
ugccauuguucagacguugguca

SEQ ID NO: 58291 - RNA, 23 nt, Artificial Sequence
  Chemically synthesized
augccauuguucagacguugguc

SEQ ID NO: 58292 - RNA, 23 nt, Artificial Sequence
  Chemically synthesized
caugccauuguucagacguuggu

SEQ ID NO: 58293 - RNA, 23 nt, Artificial Sequence
  Chemically synthesized
ucaugccauuguucagacguugg

SEQ ID NO: 58294 - RNA, 23 nt, Artificial Sequence
  Chemically synthesized
aucaugccauuguucagacguug

SEQ ID NO: 58295 - RNA, 23 nt, Artificial Sequence
  Chemically synthesized
aaucaugccauuguucagacguu

SEQ ID NO: 58296 - RNA, 23 nt, Artificial Sequence
  Chemically synthesized
cuguaagagacacccuuuguacg

SEQ ID NO: 58297 - RNA, 23 nt, Artificial Sequence
  Chemically synthesized
gcuguaagagacacccuuuguac

SEQ ID NO: 58298 - RNA, 23 nt, Artificial Sequence
  Chemically synthesized
agcuguaagagacacccuuugua

SEQ ID NO: 58299 - RNA, 23 nt, Artificial Sequence
  Chemically synthesized
cagcuguaagagacacccuuugu

SEQ ID NO: 58300 - RNA, 23 nt, Artificial Sequence
  Chemically synthesized
ccagcuguaagagacacccuuug

SEQ ID NO: 58301 - RNA, 23 nt, Artificial Sequence
  Chemically synthesized
cgccuuaaguccagcuguaagag

SEQ ID NO: 58302 - RNA, 23 nt, Artificial Sequence
  Chemically synthesized
acgccuuaaguccagcuguaaga

SEQ ID NO: 58303 - RNA, 23 nt, Artificial Sequence
  Chemically synthesized
aacgccuuaaguccagcuguaag

SEQ ID NO: 58304 - RNA, 23 nt, Artificial Sequence
  Chemically synthesized
aaacgccuuaaguccagcuguaa

SEQ ID NO: 58305 - RNA, 23 nt, Artificial Sequence
  Chemically synthesized
gaaacgccuuaaguccagcugua

SEQ ID NO: 58306 - RNA, 23 nt, Artificial Sequence
  Chemically synthesized
agaaaaggaacggacauucgguc

SEQ ID NO: 58307 - RNA, 23 nt, Artificial Sequence
  Chemically synthesized
agaaacaaggugucuccaagaga

SEQ ID NO: 58308 - RNA, 23 nt, Artificial Sequence
  Chemically synthesized
gagaaacaaggugucuccaagag

SEQ ID NO: 58309 - RNA, 23 nt, Artificial Sequence
  Chemically synthesized
ggagaaacaaggugucuccaaga

SEQ ID NO: 58310 - RNA, 23 nt, Artificial Sequence
  Chemically synthesized
aggagaaacaaggugucuccaag

SEQ ID NO: 58311 - RNA, 23 nt, Artificial Sequence
  Chemically synthesized
gaggagaaacaaggugucuccaa

SEQ ID NO: 58312 - RNA, 23 nt, Artificial Sequence
  Chemically synthesized
gacacgccaaccauggauucgug

SEQ ID NO: 58313 - RNA, 23 nt, Artificial Sequence
  Chemically synthesized
ggacacgccaaccauggauucgu

SEQ ID NO: 58314 - RNA, 23 nt, Artificial Sequence
  Chemically synthesized
gggacacgccaaccauggauucg

SEQ ID NO: 58315 - RNA, 23 nt, Artificial Sequence
  Chemically synthesized
agggacacgccaaccauggauuc

SEQ ID NO: 58316 - RNA, 23 nt, Artificial Sequence
  Chemically synthesized
cagggacacgccaaccauggauu

SEQ ID NO: 58317 - RNA, 23 nt, Artificial Sequence
  Chemically synthesized
ggacaccagguuggugaaucaga

SEQ ID NO: 58318 - RNA, 23 nt, Artificial Sequence
  Chemically synthesized
uggacaccagguuggugaaucag

SEQ ID NO: 58319 - RNA, 23 nt, Artificial Sequence
  Chemically synthesized
uuggacaccagguuggugaauca

SEQ ID NO: 58320 - RNA, 23 nt, Artificial Sequence
  Chemically synthesized
uuuggacaccagguuggugaauc

SEQ ID NO: 58321 - RNA, 23 nt, Artificial Sequence
  Chemically synthesized
ggaaacaauagcaguuuccauca

SEQ ID NO: 58322 - RNA, 23 nt, Artificial Sequence
  Chemically synthesized
aggaaacaauagcaguuuccauc

SEQ ID NO: 58323 - RNA, 23 nt, Artificial Sequence
  Chemically synthesized
accucagcagagcuucagguuuu

SEQ ID NO: 58324 - RNA, 23 nt, Artificial Sequence
  Chemically synthesized
caccucagcagagcuucagguuu

SEQ ID NO: 58325 - RNA, 23 nt, Artificial Sequence
  Chemically synthesized
cagugcuaucucgaugcuguacc

SEQ ID NO: 58326 - RNA, 23 nt, Artificial Sequence
  Chemically synthesized
ucagugcuaucucgaugcuguac

SEQ ID NO: 58327 - RNA, 23 nt, Artificial Sequence
  Chemically synthesized
cucagugcuaucucgaugcugua

SEQ ID NO: 58328 - RNA, 23 nt, Artificial Sequence
  Chemically synthesized
guuggucaacucuguuaacucua

SEQ ID NO: 58329 - RNA, 23 nt, Artificial Sequence
  Chemically synthesized
uucagacguuggucaacucuguu

SEQ ID NO: 58330 - RNA, 23 nt, Artificial Sequence
  Chemically synthesized
ccagguccuuugaccagaguuuu

SEQ ID NO: 58331 - RNA, 23 nt, Artificial Sequence
  Chemically synthesized
gccagguccuuugaccagaguuu

SEQ ID NO: 58332 - RNA, 23 nt, Artificial Sequence
  Chemically synthesized
gaaaagggcauccucuccacaaa

SEQ ID NO: 58333 - RNA, 23 nt, Artificial Sequence
  Chemically synthesized
cagcuggucacagauaaggccau

SEQ ID NO: 58334 - RNA, 23 nt, Artificial Sequence
  Chemically synthesized
ggugucuccaagagacauguuag

SEQ ID NO: 58335 - RNA, 23 nt, Artificial Sequence
  Chemically synthesized
aggugucuccaagagacauguua

SEQ ID NO: 58336 - RNA, 23 nt, Artificial Sequence
  Chemically synthesized
aaggugucuccaagagacauguu

SEQ ID NO: 58337 - RNA, 23 nt, Artificial Sequence
  Chemically synthesized
caaggugucuccaagagacaugu

SEQ ID NO: 58338 - RNA, 23 nt, Artificial Sequence
  Chemically synthesized
acaaggugucuccaagagacaug

SEQ ID NO: 58339 - RNA, 23 nt, Artificial Sequence
  Chemically synthesized
gaaacaaggugucuccaagagac

SEQ ID NO: 58340 - RNA, 23 nt, Artificial Sequence
  Chemically synthesized
gcuguucccagcgugaaaagaga

SEQ ID NO: 58341 - RNA, 23 nt, Artificial Sequence
  Chemically synthesized
cgcuguucccagcgugaaaagag

SEQ ID NO: 58342 - RNA, 23 nt, Artificial Sequence
  Chemically synthesized
acgcuguucccagcgugaaaaga

SEQ ID NO: 58343 - RNA, 23 nt, Artificial Sequence
  Chemically synthesized
gacgcuguucccagcgugaaaag

SEQ ID NO: 58344 - RNA, 23 nt, Artificial Sequence
  Chemically synthesized
agacgcuguucccagcgugaaaa

SEQ ID NO: 58345 - RNA, 23 nt, Artificial Sequence
  Chemically synthesized
uccugagcgaguucgaguugcgg

SEQ ID NO: 58346 - RNA, 23 nt, Artificial Sequence
  Chemically synthesized
guccugagcgaguucgaguugcg

SEQ ID NO: 58347 - RNA, 23 nt, Artificial Sequence
  Chemically synthesized
gguccugagcgaguucgaguugc

SEQ ID NO: 58348 - RNA, 23 nt, Artificial Sequence
  Chemically synthesized
agguccugagcgaguucgaguug

SEQ ID NO: 58349 - RNA, 23 nt, Artificial Sequence
  Chemically synthesized
gagguccugagcgaguucgaguu

SEQ ID NO: 58350 - RNA, 23 nt, Artificial Sequence
  Chemically synthesized
cgccagguccuuugaccagaguu

SEQ ID NO: 58351 - RNA, 23 nt, Artificial Sequence
  Chemically synthesized
gcgccagguccuuugaccagagu

SEQ ID NO: 58352 - RNA, 23 nt, Artificial Sequence
  Chemically synthesized
agacacccuuuguacguggacuu

SEQ ID NO: 58353 - RNA, 23 nt, Artificial Sequence
  Chemically synthesized
gagacacccuuuguacguggacu

SEQ ID NO: 58354 - RNA, 23 nt, Artificial Sequence
  Chemically synthesized
agagacacccuuuguacguggac

SEQ ID NO: 58355 - RNA, 23 nt, Artificial Sequence
  Chemically synthesized
aagagacacccuuuguacgugga

SEQ ID NO: 58356 - RNA, 23 nt, Artificial Sequence
  Chemically synthesized
ugucuccaagagacauguuagga

SEQ ID NO: 58357 - RNA, 23 nt, Artificial Sequence
  Chemically synthesized
gugucuccaagagacauguuagg

SEQ ID NO: 58358 - RNA, 23 nt, Artificial Sequence
  Chemically synthesized
ccauggauucgugguggaagugg

SEQ ID NO: 58359 - RNA, 23 nt, Artificial Sequence
  Chemically synthesized
accauggauucgugguggaagug

SEQ ID NO: 58360 - RNA, 23 nt, Artificial Sequence
  Chemically synthesized
aaccauggauucgugguggaagu

SEQ ID NO: 58361 - RNA, 23 nt, Artificial Sequence
  Chemically synthesized
caaccauggauucgugguggaag

SEQ ID NO: 58362 - RNA, 23 nt, Artificial Sequence
  Chemically synthesized
ccaaccauggauucgugguggaa

SEQ ID NO: 58363 - RNA, 23 nt, Artificial Sequence
  Chemically synthesized
ggaguuuaucaccucagcagagc

SEQ ID NO: 58364 - RNA, 23 nt, Artificial Sequence
  Chemically synthesized
aggaguuuaucaccucagcagag

SEQ ID NO: 58365 - RNA, 23 nt, Artificial Sequence
  Chemically synthesized
gaggaguuuaucaccucagcaga

SEQ ID NO: 58366 - RNA, 23 nt, Artificial Sequence
  Chemically synthesized
cagcuuccaccaugaagaaucuu

SEQ ID NO: 58367 - RNA, 23 nt, Artificial Sequence
  Chemically synthesized
gcagcuuccaccaugaagaaucu

SEQ ID NO: 58368 - RNA, 23 nt, Artificial Sequence
  Chemically synthesized
cgcagcuuccaccaugaagaauc

SEQ ID NO: 58369 - RNA, 23 nt, Artificial Sequence
  Chemically synthesized
gcgcagcuuccaccaugaagaau

SEQ ID NO: 58370 - RNA, 23 nt, Artificial Sequence
  Chemically synthesized
ugcgcagcuuccaccaugaagaa

SEQ ID NO: 58371 - RNA, 23 nt, Artificial Sequence
  Chemically synthesized
ucagcauguucggccugaaacag

SEQ ID NO: 58372 - RNA, 23 nt, Artificial Sequence
  Chemically synthesized
cucagcauguucggccugaaaca

SEQ ID NO: 58373 - RNA, 23 nt, Artificial Sequence
  Chemically synthesized
gcucagcauguucggccugaaac

SEQ ID NO: 58374 - RNA, 23 nt, Artificial Sequence
  Chemically synthesized
ugcucagcauguucggccugaaa

SEQ ID NO: 58375 - RNA, 23 nt, Artificial Sequence
  Chemically synthesized
cugcucagcauguucggccugaa

SEQ ID NO: 58376 - RNA, 23 nt, Artificial Sequence
  Chemically synthesized
cagaguuuuuccauguggacgcu

SEQ ID NO: 58377 - RNA, 23 nt, Artificial Sequence
  Chemically synthesized
uccagcuguaagagacacccuuu

SEQ ID NO: 58378 - RNA, 23 nt, Artificial Sequence
  Chemically synthesized
guccagcuguaagagacacccuu

SEQ ID NO: 58379 - RNA, 23 nt, Artificial Sequence
  Chemically synthesized
cgugaccagacuuuuggacacca

SEQ ID NO: 58380 - RNA, 23 nt, Artificial Sequence
  Chemically synthesized
ccgugaccagacuuuuggacacc

SEQ ID NO: 58381 - RNA, 23 nt, Artificial Sequence
  Chemically synthesized
cccgugaccagacuuuuggacac

SEQ ID NO: 58382 - RNA, 23 nt, Artificial Sequence
  Chemically synthesized
guuuuccgagaacagaugcaaga

SEQ ID NO: 58383 - RNA, 23 nt, Artificial Sequence
  Chemically synthesized
gaguuuaucaccucagcagagcu

SEQ ID NO: 58384 - RNA, 23 nt, Artificial Sequence
  Chemically synthesized
cgagugggaaaacaacccggaga

SEQ ID NO: 58385 - RNA, 23 nt, Artificial Sequence
  Chemically synthesized
uugcagggagaauaacuugcgca

SEQ ID NO: 58386 - RNA, 23 nt, Artificial Sequence
  Chemically synthesized
gugcgcagcuuccaccaugaaga

SEQ ID NO: 58387 - RNA, 23 nt, Artificial Sequence
  Chemically synthesized
gcauguucggccugaaacagaga

SEQ ID NO: 58388 - RNA, 23 nt, Artificial Sequence
  Chemically synthesized
agcauguucggccugaaacagag

SEQ ID NO: 58389 - RNA, 23 nt, Artificial Sequence
  Chemically synthesized
cagcauguucggccugaaacaga

SEQ ID NO: 58390 - RNA, 23 nt, Artificial Sequence
  Chemically synthesized
acucagugcuaucucgaugcugu

SEQ ID NO: 58391 - RNA, 23 nt, Artificial Sequence
  Chemically synthesized
aacucagugcuaucucgaugcug

SEQ ID NO: 58392 - RNA, 23 nt, Artificial Sequence
  Chemically synthesized
gaacucagugcuaucucgaugcu

SEQ ID NO: 58393 - RNA, 23 nt, Artificial Sequence
  Chemically synthesized
gaugaacacagcuggucacagau

SEQ ID NO: 58394 - RNA, 23 nt, Artificial Sequence
  Chemically synthesized
agaugaacacagcuggucacaga

SEQ ID NO: 58395 - RNA, 23 nt, Artificial Sequence
  Chemically synthesized
ggucuuugcaccaagaugaacac

SEQ ID NO: 58396 - RNA, 23 nt, Artificial Sequence
  Chemically synthesized
aggucuuugcaccaagaugaaca

SEQ ID NO: 58397 - RNA, 23 nt, Artificial Sequence
  Chemically synthesized
caggucuuugcaccaagaugaac

SEQ ID NO: 58398 - RNA, 23 nt, Artificial Sequence
  Chemically synthesized
aacaaggugucuccaagagacau

SEQ ID NO: 58399 - RNA, 23 nt, Artificial Sequence
  Chemically synthesized
aaacaaggugucuccaagagaca

SEQ ID NO: 58400 - RNA, 23 nt, Artificial Sequence
  Chemically synthesized
gccaaccauggauucguggugga

SEQ ID NO: 58401 - RNA, 23 nt, Artificial Sequence
  Chemically synthesized
cgccaaccauggauucguggugg

SEQ ID NO: 58402 - RNA, 23 nt, Artificial Sequence
  Chemically synthesized
acgccaaccauggauucguggug

SEQ ID NO: 58403 - RNA, 23 nt, Artificial Sequence
  Chemically synthesized
ccccgugaccagacuuuuggaca

SEQ ID NO: 58404 - RNA, 23 nt, Artificial Sequence
  Chemically synthesized
uccccgugaccagacuuuuggac

SEQ ID NO: 58405 - RNA, 23 nt, Artificial Sequence
  Chemically synthesized
uuccccgugaccagacuuuugga

SEQ ID NO: 58406 - RNA, 23 nt, Artificial Sequence
  Chemically synthesized
caauagcaguuuccaucaccgaa

SEQ ID NO: 58407 - RNA, 23 nt, Artificial Sequence
  Chemically synthesized
acaauagcaguuuccaucaccga

SEQ ID NO: 58408 - RNA, 23 nt, Artificial Sequence
  Chemically synthesized
aacaauagcaguuuccaucaccg

SEQ ID NO: 58409 - RNA, 23 nt, Artificial Sequence
  Chemically synthesized
aaacaauagcaguuuccaucacc

SEQ ID NO: 58410 - RNA, 23 nt, Artificial Sequence
  Chemically synthesized
gaaacaauagcaguuuccaucac

SEQ ID NO: 58411 - RNA, 23 nt, Artificial Sequence
  Chemically synthesized
guucagacguuggucaacucugu

SEQ ID NO: 58412 - RNA, 23 nt, Artificial Sequence
  Chemically synthesized
cacggagaaugcccuuuuccucu

SEQ ID NO: 58413 - RNA, 23 nt, Artificial Sequence
  Chemically synthesized
gccuuaaguccagcuguaagaga

SEQ ID NO: 58414 - RNA, 23 nt, Artificial Sequence
  Chemically synthesized
gauaagcaggucuuugcaccaag

SEQ ID NO: 58415 - RNA, 23 nt, Artificial Sequence
  Chemically synthesized
ggauaagcaggucuuugcaccaa

SEQ ID NO: 58416 - RNA, 23 nt, Artificial Sequence
  Chemically synthesized
aggauaagcaggucuuugcacca

SEQ ID NO: 58417 - RNA, 23 nt, Artificial Sequence
  Chemically synthesized
uaggauaagcaggucuuugcacc

SEQ ID NO: 58418 - RNA, 23 nt, Artificial Sequence
  Chemically synthesized
uuaggauaagcaggucuuugcac

SEQ ID NO: 58419 - RNA, 23 nt, Artificial Sequence
  Chemically synthesized
cacgccaaccauggauucguggu

SEQ ID NO: 58420 - RNA, 23 nt, Artificial Sequence
  Chemically synthesized
ggaaaguuuugaugucacccccg

SEQ ID NO: 58421 - RNA, 23 nt, Artificial Sequence
  Chemically synthesized
uuuuggacaccagguuggugaau

SEQ ID NO: 58422 - RNA, 23 nt, Artificial Sequence
  Chemically synthesized
uauccccacggaggaguuuauca

SEQ ID NO: 58423 - RNA, 23 nt, Artificial Sequence
  Chemically synthesized
acacgccaaccauggauucgugg

SEQ ID NO: 58424 - RNA, 23 nt, Artificial Sequence
  Chemically synthesized
gcugucuucuagcguugcugcuu

SEQ ID NO: 58425 - RNA, 23 nt, Artificial Sequence
  Chemically synthesized
cgcugucuucuagcguugcugcu

SEQ ID NO: 58426 - RNA, 23 nt, Artificial Sequence
  Chemically synthesized
ccgcugucuucuagcguugcugc

SEQ ID NO: 58427 - RNA, 23 nt, Artificial Sequence
  Chemically synthesized
cccgcugucuucuagcguugcug

SEQ ID NO: 58428 - RNA, 23 nt, Artificial Sequence
  Chemically synthesized
acccgcugucuucuagcguugcu

SEQ ID NO: 58429 - RNA, 23 nt, Artificial Sequence
  Chemically synthesized
uuuuuccauguggacgcucuuuc

SEQ ID NO: 58430 - RNA, 23 nt, Artificial Sequence
  Chemically synthesized
guaagagacacccuuuguacgug

SEQ ID NO: 58431 - RNA, 23 nt, Artificial Sequence
  Chemically synthesized
uguaagagacacccuuuguacgu

SEQ ID NO: 58432 - RNA, 23 nt, Artificial Sequence
  Chemically synthesized
uuugcaccaagaugaacacagcu

SEQ ID NO: 58433 - RNA, 23 nt, Artificial Sequence
  Chemically synthesized
cuuugcaccaagaugaacacagc

SEQ ID NO: 58434 - RNA, 23 nt, Artificial Sequence
  Chemically synthesized
augcaagaugcuuuaggaaacaa

SEQ ID NO: 58435 - RNA, 23 nt, Artificial Sequence
  Chemically synthesized
gaugcaagaugcuuuaggaaaca

SEQ ID NO: 58436 - RNA, 23 nt, Artificial Sequence
  Chemically synthesized
agaugcaagaugcuuuaggaaac

SEQ ID NO: 58437 - RNA, 23 nt, Artificial Sequence
  Chemically synthesized
aaaacaacccggagauucuucuu

SEQ ID NO: 58438 - RNA, 23 nt, Artificial Sequence
  Chemically synthesized
ugauggaaaagggcauccucucc

SEQ ID NO: 58439 - RNA, 23 nt, Artificial Sequence
  Chemically synthesized
augauggaaaagggcauccucuc

SEQ ID NO: 58440 - RNA, 23 nt, Artificial Sequence
  Chemically synthesized
caugauggaaaagggcauccucu

SEQ ID NO: 58441 - RNA, 23 nt, Artificial Sequence
  Chemically synthesized
gucuccuaaaggucgaccauggu

SEQ ID NO: 58442 - RNA, 23 nt, Artificial Sequence
  Chemically synthesized
ggucuccuaaaggucgaccaugg

SEQ ID NO: 58443 - RNA, 23 nt, Artificial Sequence
  Chemically synthesized
cggucuccuaaaggucgaccaug

SEQ ID NO: 58444 - RNA, 23 nt, Artificial Sequence
  Chemically synthesized
gcggucuccuaaaggucgaccau

SEQ ID NO: 58445 - RNA, 23 nt, Artificial Sequence
  Chemically synthesized
ugcggucuccuaaaggucgacca

SEQ ID NO: 58446 - RNA, 23 nt, Artificial Sequence
  Chemically synthesized
ccaagaugaacacagcuggucac

SEQ ID NO: 58447 - RNA, 23 nt, Artificial Sequence
  Chemically synthesized
ggaaaagggcauccucuccacaa

SEQ ID NO: 58448 - RNA, 23 nt, Artificial Sequence
  Chemically synthesized
uggaaaagggcauccucuccaca

SEQ ID NO: 58449 - RNA, 23 nt, Artificial Sequence
  Chemically synthesized
auggaaaagggcauccucuccac

SEQ ID NO: 58450 - RNA, 23 nt, Artificial Sequence
  Chemically synthesized
gauggaaaagggcauccucucca

SEQ ID NO: 58451 - RNA, 23 nt, Artificial Sequence
  Chemically synthesized
ucuuugcaccaagaugaacacag

SEQ ID NO: 58452 - RNA, 23 nt, Artificial Sequence
  Chemically synthesized
gucuuugcaccaagaugaacaca

SEQ ID NO: 58453 - RNA, 23 nt, Artificial Sequence
  Chemically synthesized
cagaugcaagaugcuuuaggaaa

SEQ ID NO: 58454 - RNA, 23 nt, Artificial Sequence
  Chemically synthesized
cuucuugaacuugcagggagaau

SEQ ID NO: 58455 - RNA, 23 nt, Artificial Sequence
  Chemically synthesized
acuucuugaacuugcagggagaa

SEQ ID NO: 58456 - RNA, 23 nt, Artificial Sequence
  Chemically synthesized
agaaugcaagcaggugggaaagu

SEQ ID NO: 58457 - RNA, 23 nt, Artificial Sequence
  Chemically synthesized
ucagaaugcaagcaggugggaaa

SEQ ID NO: 58458 - RNA, 23 nt, Artificial Sequence
  Chemically synthesized
ucaggacaugguuguggaggguu

SEQ ID NO: 58459 - RNA, 23 nt, Artificial Sequence
  Chemically synthesized
agguuguauuaaagaacuaucag

SEQ ID NO: 58460 - RNA, 23 nt, Artificial Sequence
  Chemically synthesized
aaaccugcaacagccaacucgaa

SEQ ID NO: 58461 - RNA, 23 nt, Artificial Sequence
  Chemically synthesized
ucagugcuaucucgaugcuguac

SEQ ID NO: 58462 - RNA, 23 nt, Artificial Sequence
  Chemically synthesized
gccuuuuacugccacggagaaug

SEQ ID NO: 58463 - RNA, 23 nt, Artificial Sequence
  Chemically synthesized
guuuuuccauguggacgcucuuu

SEQ ID NO: 58464 - RNA, 23 nt, Artificial Sequence
  Chemically synthesized
cagaugcaagaugcuuuaggaaa

SEQ ID NO: 58465 - RNA, 23 nt, Artificial Sequence
  Chemically synthesized
uaagcaggucuuugcaccaagau

SEQ ID NO: 58466 - RNA, 23 nt, Artificial Sequence
  Chemically synthesized
gguuuuccgagaacagaugcaag

SEQ ID NO: 58467 - RNA, 23 nt, Artificial Sequence
  Chemically synthesized
gaaaaacgucaagccaaacacaa

SEQ ID NO: 58468 - RNA, 23 nt, Artificial Sequence
  Chemically synthesized
gaggagaaacaaggugucuccaa

SEQ ID NO: 58469 - RNA, 23 nt, Artificial Sequence
  Chemically synthesized
ggauaagcaggucuuugcaccaa

SEQ ID NO: 58470 - RNA, 23 nt, Artificial Sequence
  Chemically synthesized
ccagcuguaagagacacccuuug

SEQ ID NO: 58471 - RNA, 23 nt, Artificial Sequence
  Chemically synthesized
gccagguccuuugaccagaguuu

SEQ ID NO: 58472 - RNA, 23 nt, Artificial Sequence
  Chemically synthesized
ccaaccauggauucgugguggaa

SEQ ID NO: 58473 - RNA, 23 nt, Artificial Sequence
  Chemically synthesized
aguuuaucaccucagcagagcuu

SEQ ID NO: 58474 - RNA, 23 nt, Artificial Sequence
  Chemically synthesized
gccauuguucagacguuggucaa

SEQ ID NO: 58475 - RNA, 23 nt, Artificial Sequence
  Chemically synthesized
acgccuuuuacugccacggagaa

SEQ ID NO: 58476 - RNA, 23 nt, Artificial Sequence
  Chemically synthesized
acacaaacagcggaaacgccuua

SEQ ID NO: 58477 - RNA, 23 nt, Artificial Sequence
  Chemically synthesized
cggaggaguuuaucaccucagca

SEQ ID NO: 58478 - RNA, 23 nt, Artificial Sequence
  Chemically synthesized
aucuuuggaagaacuaccagaaa

SEQ ID NO: 58479 - RNA, 23 nt, Artificial Sequence
  Chemically synthesized
gcgcagcuuccaccaugaagaau

SEQ ID NO: 58480 - RNA, 23 nt, Artificial Sequence
  Chemically synthesized
aggugucuccaagagacauguua

SEQ ID NO: 58481 - RNA, 23 nt, Artificial Sequence
  Chemically synthesized
caauagcaguuuccaucaccgaa

SEQ ID NO: 58482 - RNA, 23 nt, Artificial Sequence
  Chemically synthesized
cagguuuuccgagaacagaugca

SEQ ID NO: 58483 - RNA, 23 nt, Artificial Sequence
  Chemically synthesized
ugcucagcauguucggccugaaa

SEQ ID NO: 58484 - RNA, 23 nt, Artificial Sequence
  Chemically synthesized
ccagguccuuugaccagaguuuu

SEQ ID NO: 58485 - RNA, 23 nt, Artificial Sequence
  Chemically synthesized
gcagagcuucagguuuuccgaga

SEQ ID NO: 58486 - RNA, 23 nt, Artificial Sequence
  Chemically synthesized
ggaggaguuuaucaccucagcag

SEQ ID NO: 58487 - RNA, 23 nt, Artificial Sequence
  Chemically synthesized
gaaucuuuggaagaacuaccaga

SEQ ID NO: 58488 - RNA, 23 nt, Artificial Sequence
  Chemically synthesized
gcauguucggccugaaacagaga

SEQ ID NO: 58489 - RNA, 23 nt, Artificial Sequence
  Chemically synthesized
gaaacgccuuaaguccagcugua

SEQ ID NO: 58490 - RNA, 23 nt, Artificial Sequence
  Chemically synthesized
cacaaacagcggaaacgccuuaa

SEQ ID NO: 58491 - RNA, 23 nt, Artificial Sequence
  Chemically synthesized
ggaaaagggcauccucuccacaa

SEQ ID NO: 58492 - RNA, 23 nt, Artificial Sequence
  Chemically synthesized
ggagaaacaaggugucuccaaga

SEQ ID NO: 58493 - RNA, 23 nt, Artificial Sequence
  Chemically synthesized
caaccauggauucgugguggaag

SEQ ID NO: 58494 - RNA, 23 nt, Artificial Sequence
  Chemically synthesized
cacggaggaguuuaucaccucag

SEQ ID NO: 58495 - RNA, 23 nt, Artificial Sequence
  Chemically synthesized
agacgcuguucccagcgugaaaa

SEQ ID NO: 58496 - RNA, 23 nt, Artificial Sequence
  Chemically synthesized
cagcuuccaccaugaagaaucuu

SEQ ID NO: 58497 - RNA, 23 nt, Artificial Sequence
  Chemically synthesized
cucagugcuaucucgaugcugua

SEQ ID NO: 58498 - RNA, 23 nt, Artificial Sequence
  Chemically synthesized
guccagcuguaagagacacccuu

SEQ ID NO: 58499 - RNA, 23 nt, Artificial Sequence
  Chemically synthesized
ccauugcuaguaacuuuuggcca

SEQ ID NO: 58500 - RNA, 23 nt, Artificial Sequence
  Chemically synthesized
gcaggucuuugcaccaagaugaa

SEQ ID NO: 58501 - RNA, 23 nt, Artificial Sequence
  Chemically synthesized
aaggugucuccaagagacauguu

SEQ ID NO: 58502 - RNA, 23 nt, Artificial Sequence
  Chemically synthesized
gagaaacaaggugucuccaagag

SEQ ID NO: 58503 - RNA, 23 nt, Artificial Sequence
  Chemically synthesized
caguuuccaucaccgaauuaaua

SEQ ID NO: 58504 - RNA, 23 nt, Artificial Sequence
  Chemically synthesized
ccauuguucagacguuggucaac

SEQ ID NO: 58505 - RNA, 23 nt, Artificial Sequence
  Chemically synthesized
agagacacccuuuguacguggac

SEQ ID NO: 58506 - RNA, 23 nt, Artificial Sequence
  Chemically synthesized
aucauaaaaccugcaacagccaa

SEQ ID NO: 58507 - RNA, 23 nt, Artificial Sequence
  Chemically synthesized
gaaacaauagcaguuuccaucac

SEQ ID NO: 58508 - RNA, 23 nt, Artificial Sequence
  Chemically synthesized
ggaaacaauagcaguuuccauca

SEQ ID NO: 58509 - RNA, 23 nt, Artificial Sequence
  Chemically synthesized
cuacaugcuagaccuguaucgca

SEQ ID NO: 58510 - RNA, 23 nt, Artificial Sequence
  Chemically synthesized
gaacucagugcuaucucgaugcu

SEQ ID NO: 58511 - RNA, 23 nt, Artificial Sequence
  Chemically synthesized
cguuggucaacucuguuaacucu

SEQ ID NO: 58512 - RNA, 23 nt, Artificial Sequence
  Chemically synthesized
cgccuuuuacugccacggagaau

SEQ ID NO: 58513 - RNA, 23 nt, Artificial Sequence
  Chemically synthesized
agacacccuuuguacguggacuu

SEQ ID NO: 58514 - RNA, 23 nt, Artificial Sequence
  Chemically synthesized
gaaacaaggugucuccaagagac

SEQ ID NO: 58515 - RNA, 23 nt, Artificial Sequence
  Chemically synthesized
aggaguuuaucaccucagcagag

SEQ ID NO: 58516 - RNA, 23 nt, Artificial Sequence
  Chemically synthesized
ggaaaacaacccggagauucuuc

SEQ ID NO: 58517 - RNA, 23 nt, Artificial Sequence
  Chemically synthesized
gcagcuuccaccaugaagaaucu

SEQ ID NO: 58518 - RNA, 23 nt, Artificial Sequence
  Chemically synthesized
cagcuggucacagauaaggccau

SEQ ID NO: 58519 - RNA, 23 nt, Artificial Sequence
  Chemically synthesized
cgugaccagacuuuuggacacca

SEQ ID NO: 58520 - RNA, 23 nt, Artificial Sequence
  Chemically synthesized
acaauagcaguuuccaucaccga

SEQ ID NO: 58521 - RNA, 23 nt, Artificial Sequence
  Chemically synthesized
caccucagcagagcuucagguuu

SEQ ID NO: 58522 - RNA, 23 nt, Artificial Sequence
  Chemically synthesized
gaguuuuuccauguggacgcucu

SEQ ID NO: 58523 - RNA, 23 nt, Artificial Sequence
  Chemically synthesized
agaguuuuuccauguggacgcuc

SEQ ID NO: 58524 - RNA, 23 nt, Artificial Sequence
  Chemically synthesized
ugccauuguucagacguugguca

SEQ ID NO: 58525 - RNA, 23 nt, Artificial Sequence
  Chemically synthesized
gccuuaaguccagcuguaagaga

SEQ ID NO: 58526 - RNA, 23 nt, Artificial Sequence
  Chemically synthesized
ccaagaugaacacagcuggucac

SEQ ID NO: 58527 - RNA, 23 nt, Artificial Sequence
  Chemically synthesized
caggucuuugcaccaagaugaac

SEQ ID NO: 58528 - RNA, 23 nt, Artificial Sequence
  Chemically synthesized
gacauguuaggauaagcaggucu

SEQ ID NO: 58529 - RNA, 23 nt, Artificial Sequence
  Chemically synthesized
acgcuguucccagcgugaaaaga

SEQ ID NO: 58530 - RNA, 23 nt, Artificial Sequence
  Chemically synthesized
ggacaccagguuggugaaucaga

SEQ ID NO: 58531 - RNA, 23 nt, Artificial Sequence
  Chemically synthesized
augcaagaugcuuuaggaaacaa

SEQ ID NO: 58532 - RNA, 23 nt, Artificial Sequence
  Chemically synthesized
ucaccucagcagagcuucagguu

SEQ ID NO: 58533 - RNA, 23 nt, Artificial Sequence
  Chemically synthesized
gaaaagggcauccucuccacaaa

SEQ ID NO: 58534 - RNA, 23 nt, Artificial Sequence
  Chemically synthesized
uggaaaagggcauccucuccaca

SEQ ID NO: 58535 - RNA, 23 nt, Artificial Sequence
  Chemically synthesized
accucagcagagcuucagguuuu

SEQ ID NO: 58536 - RNA, 23 nt, Artificial Sequence
  Chemically synthesized
gcugucuucuagcguugcugcuu

SEQ ID NO: 58537 - RNA, 23 nt, Artificial Sequence
  Chemically synthesized
cgcagcuuccaccaugaagaauc

SEQ ID NO: 58538 - RNA, 23 nt, Artificial Sequence
  Chemically synthesized
cgccuuaaguccagcuguaagag

SEQ ID NO: 58539 - RNA, 23 nt, Artificial Sequence
  Chemically synthesized
uggacaccagguuggugaaucag

SEQ ID NO: 58540 - RNA, 23 nt, Artificial Sequence
  Chemically synthesized
agcuguaagagacacccuuugua

SEQ ID NO: 58541 - RNA, 23 nt, Artificial Sequence
  Chemically synthesized
gucuuugcaccaagaugaacaca

SEQ ID NO: 58542 - RNA, 23 nt, Artificial Sequence
  Chemically synthesized
ugcgcagcuuccaccaugaagaa

SEQ ID NO: 58543 - RNA, 23 nt, Artificial Sequence
  Chemically synthesized
gaaugcccuuuuccucuggcuga

SEQ ID NO: 58544 - RNA, 23 nt, Artificial Sequence
  Chemically synthesized
cuugacguuuuucucuuuugugg

SEQ ID NO: 58545 - RNA, 23 nt, Artificial Sequence
  Chemically synthesized
uugacguuuuucucuuuugugga

SEQ ID NO: 58546 - RNA, 23 nt, Artificial Sequence
  Chemically synthesized
ugacguuuuucucuuuuguggag

SEQ ID NO: 58547 - RNA, 23 nt, Artificial Sequence
  Chemically synthesized
gacguuuuucucuuuuguggaga

SEQ ID NO: 58548 - RNA, 23 nt, Artificial Sequence
  Chemically synthesized
acguuuuucucuuuuguggagag

SEQ ID NO: 58549 - RNA, 23 nt, Artificial Sequence
  Chemically synthesized
cgagauagcacugaguucugucg

SEQ ID NO: 58550 - RNA, 23 nt, Artificial Sequence
  Chemically synthesized
gagauagcacugaguucugucgg

SEQ ID NO: 58551 - RNA, 23 nt, Artificial Sequence
  Chemically synthesized
agauagcacugaguucugucggg

SEQ ID NO: 58552 - RNA, 23 nt, Artificial Sequence
  Chemically synthesized
gauagcacugaguucugucggga

SEQ ID NO: 58553 - RNA, 23 nt, Artificial Sequence
  Chemically synthesized
auagcacugaguucugucgggac

SEQ ID NO: 58554 - RNA, 23 nt, Artificial Sequence
  Chemically synthesized
auacaaccuuuucauucucguca

SEQ ID NO: 58555 - RNA, 23 nt, Artificial Sequence
  Chemically synthesized
uacaaccuuuucauucucgucaa

SEQ ID NO: 58556 - RNA, 23 nt, Artificial Sequence
  Chemically synthesized
acaaccuuuucauucucgucaag

SEQ ID NO: 58557 - RNA, 23 nt, Artificial Sequence
  Chemically synthesized
caaccuuuucauucucgucaagg

SEQ ID NO: 58558 - RNA, 23 nt, Artificial Sequence
  Chemically synthesized
aaccuuuucauucucgucaaggu

SEQ ID NO: 58559 - RNA, 23 nt, Artificial Sequence
  Chemically synthesized
uuucauucucgucaagguacagc

SEQ ID NO: 58560 - RNA, 23 nt, Artificial Sequence
  Chemically synthesized
uucauucucgucaagguacagca

SEQ ID NO: 58561 - RNA, 23 nt, Artificial Sequence
  Chemically synthesized
ucauucucgucaagguacagcau

SEQ ID NO: 58562 - RNA, 23 nt, Artificial Sequence
  Chemically synthesized
cauucucgucaagguacagcauc

SEQ ID NO: 58563 - RNA, 23 nt, Artificial Sequence
  Chemically synthesized
auucucgucaagguacagcaucg

SEQ ID NO: 58564 - RNA, 23 nt, Artificial Sequence
  Chemically synthesized
cuuaaauuaaagaagaaucuccg

SEQ ID NO: 58565 - RNA, 23 nt, Artificial Sequence
  Chemically synthesized
uuaaauuaaagaagaaucuccgg

SEQ ID NO: 58566 - RNA, 23 nt, Artificial Sequence
  Chemically synthesized
uaaauuaaagaagaaucuccggg

SEQ ID NO: 58567 - RNA, 23 nt, Artificial Sequence
  Chemically synthesized
aaauuaaagaagaaucuccgggu

SEQ ID NO: 58568 - RNA, 23 nt, Artificial Sequence
  Chemically synthesized
aauuaaagaagaaucuccggguu

SEQ ID NO: 58569 - RNA, 23 nt, Artificial Sequence
  Chemically synthesized
uguguuuggcuugacguuuuucu

SEQ ID NO: 58570 - RNA, 23 nt, Artificial Sequence
  Chemically synthesized
guguuuggcuugacguuuuucuc

SEQ ID NO: 58571 - RNA, 23 nt, Artificial Sequence
  Chemically synthesized
uguuuggcuugacguuuuucucu

SEQ ID NO: 58572 - RNA, 23 nt, Artificial Sequence
  Chemically synthesized
guuuggcuugacguuuuucucuu

SEQ ID NO: 58573 - RNA, 23 nt, Artificial Sequence
  Chemically synthesized
uuuggcuugacguuuuucucuuu

SEQ ID NO: 58574 - RNA, 23 nt, Artificial Sequence
  Chemically synthesized
gcuuauccuaacaugucucuugg

SEQ ID NO: 58575 - RNA, 23 nt, Artificial Sequence
  Chemically synthesized
cuuauccuaacaugucucuugga

SEQ ID NO: 58576 - RNA, 23 nt, Artificial Sequence
  Chemically synthesized
uuauccuaacaugucucuuggag

SEQ ID NO: 58577 - RNA, 23 nt, Artificial Sequence
  Chemically synthesized
uauccuaacaugucucuuggaga

SEQ ID NO: 58578 - RNA, 23 nt, Artificial Sequence
  Chemically synthesized
auccuaacaugucucuuggagac

SEQ ID NO: 58579 - RNA, 23 nt, Artificial Sequence
  Chemically synthesized
gggaauuucgaguuggcuguugc

SEQ ID NO: 58580 - RNA, 23 nt, Artificial Sequence
  Chemically synthesized
ggaauuucgaguuggcuguugca

SEQ ID NO: 58581 - RNA, 23 nt, Artificial Sequence
  Chemically synthesized
gaauuucgaguuggcuguugcag

SEQ ID NO: 58582 - RNA, 23 nt, Artificial Sequence
  Chemically synthesized
aauuucgaguuggcuguugcagg

SEQ ID NO: 58583 - RNA, 23 nt, Artificial Sequence
  Chemically synthesized
auuucgaguuggcuguugcaggu

SEQ ID NO: 58584 - RNA, 23 nt, Artificial Sequence
  Chemically synthesized
auuaaagaagaaucuccggguug

SEQ ID NO: 58585 - RNA, 23 nt, Artificial Sequence
  Chemically synthesized
uuaaagaagaaucuccggguugu

SEQ ID NO: 58586 - RNA, 23 nt, Artificial Sequence
  Chemically synthesized
cggguuguuuucccacucguuuc

SEQ ID NO: 58587 - RNA, 23 nt, Artificial Sequence
  Chemically synthesized
ggguuguuuucccacucguuucu

SEQ ID NO: 58588 - RNA, 23 nt, Artificial Sequence
  Chemically synthesized
gguuguuuucccacucguuucug

SEQ ID NO: 58589 - RNA, 23 nt, Artificial Sequence
  Chemically synthesized
guuguuuucccacucguuucugg

SEQ ID NO: 58590 - RNA, 23 nt, Artificial Sequence
  Chemically synthesized
uuguuuucccacucguuucuggu

SEQ ID NO: 58591 - RNA, 23 nt, Artificial Sequence
  Chemically synthesized
uguuuucccacucguuucuggua

SEQ ID NO: 58592 - RNA, 23 nt, Artificial Sequence
  Chemically synthesized
cacucguuucugguaguucuucc

SEQ ID NO: 58593 - RNA, 23 nt, Artificial Sequence
  Chemically synthesized
acucguuucugguaguucuucca

SEQ ID NO: 58594 - RNA, 23 nt, Artificial Sequence
  Chemically synthesized
cucguuucugguaguucuuccaa

SEQ ID NO: 58595 - RNA, 23 nt, Artificial Sequence
  Chemically synthesized
ucguuucugguaguucuuccaaa

SEQ ID NO: 58596 - RNA, 23 nt, Artificial Sequence
  Chemically synthesized
cguuucugguaguucuuccaaag

SEQ ID NO: 58597 - RNA, 23 nt, Artificial Sequence
  Chemically synthesized
accuuuucauucucgucaaggua

SEQ ID NO: 58598 - RNA, 23 nt, Artificial Sequence
  Chemically synthesized
ccuuuucauucucgucaagguac

SEQ ID NO: 58599 - RNA, 23 nt, Artificial Sequence
  Chemically synthesized
cuuuucauucucgucaagguaca

SEQ ID NO: 58600 - RNA, 23 nt, Artificial Sequence
  Chemically synthesized
uuuucauucucgucaagguacag

SEQ ID NO: 58601 - RNA, 23 nt, Artificial Sequence
  Chemically synthesized
uucucgucaagguacagcaucga

SEQ ID NO: 58602 - RNA, 23 nt, Artificial Sequence
  Chemically synthesized
ucaaaacuuucccaccugcuugc

SEQ ID NO: 58603 - RNA, 23 nt, Artificial Sequence
  Chemically synthesized
caaaacuuucccaccugcuugca

SEQ ID NO: 58604 - RNA, 23 nt, Artificial Sequence
  Chemically synthesized
aaaacuuucccaccugcuugcau

SEQ ID NO: 58605 - RNA, 23 nt, Artificial Sequence
  Chemically synthesized
aaacuuucccaccugcuugcauu

SEQ ID NO: 58606 - RNA, 23 nt, Artificial Sequence
  Chemically synthesized
aacuuucccaccugcuugcauuc

SEQ ID NO: 58607 - RNA, 23 nt, Artificial Sequence
  Chemically synthesized
ugcauucugauucaccaaccugg

SEQ ID NO: 58608 - RNA, 23 nt, Artificial Sequence
  Chemically synthesized
gcauucugauucaccaaccuggu

SEQ ID NO: 58609 - RNA, 23 nt, Artificial Sequence
  Chemically synthesized
cauucugauucaccaaccuggug

SEQ ID NO: 58610 - RNA, 23 nt, Artificial Sequence
  Chemically synthesized
auucugauucaccaaccuggugu

SEQ ID NO: 58611 - RNA, 23 nt, Artificial Sequence
  Chemically synthesized
uucugauucaccaaccugguguc

SEQ ID NO: 58612 - RNA, 23 nt, Artificial Sequence
  Chemically synthesized
cauaaauauuaauucggugaugg

SEQ ID NO: 58613 - RNA, 23 nt, Artificial Sequence
  Chemically synthesized
auaaauauuaauucggugaugga

SEQ ID NO: 58614 - RNA, 23 nt, Artificial Sequence
  Chemically synthesized
uaaauauuaauucggugauggaa

SEQ ID NO: 58615 - RNA, 23 nt, Artificial Sequence
  Chemically synthesized
aaauauuaauucggugauggaaa

SEQ ID NO: 58616 - RNA, 23 nt, Artificial Sequence
  Chemically synthesized
aauauuaauucggugauggaaac

SEQ ID NO: 58617 - RNA, 23 nt, Artificial Sequence
  Chemically synthesized
aaagcaucuugcaucuguucucg

SEQ ID NO: 58618 - RNA, 23 nt, Artificial Sequence
  Chemically synthesized
aagcaucuugcaucuguucucgg

SEQ ID NO: 58619 - RNA, 23 nt, Artificial Sequence
  Chemically synthesized
agcaucuugcaucuguucucgga

SEQ ID NO: 58620 - RNA, 23 nt, Artificial Sequence
  Chemically synthesized
gcaucuugcaucuguucucggaa

SEQ ID NO: 58621 - RNA, 23 nt, Artificial Sequence
  Chemically synthesized
caucuugcaucuguucucggaaa

SEQ ID NO: 58622 - RNA, 23 nt, Artificial Sequence
  Chemically synthesized
aaucuuagaguuaacagaguuga

SEQ ID NO: 58623 - RNA, 23 nt, Artificial Sequence
  Chemically synthesized
aucuuagaguuaacagaguugac

SEQ ID NO: 58624 - RNA, 23 nt, Artificial Sequence
  Chemically synthesized
ucuuagaguuaacagaguugacc

SEQ ID NO: 58625 - RNA, 23 nt, Artificial Sequence
  Chemically synthesized
cuuagaguuaacagaguugacca

SEQ ID NO: 58626 - RNA, 23 nt, Artificial Sequence
  Chemically synthesized
uuagaguuaacagaguugaccaa

SEQ ID NO: 58627 - RNA, 23 nt, Artificial Sequence
  Chemically synthesized
ucugaacaauggcaugauuagug

SEQ ID NO: 58628 - RNA, 23 nt, Artificial Sequence
  Chemically synthesized
cugaacaauggcaugauuagugg

SEQ ID NO: 58629 - RNA, 23 nt, Artificial Sequence
  Chemically synthesized
ugaacaauggcaugauuagugga

SEQ ID NO: 58630 - RNA, 23 nt, Artificial Sequence
  Chemically synthesized
gaacaauggcaugauuaguggag

SEQ ID NO: 58631 - RNA, 23 nt, Artificial Sequence
  Chemically synthesized
aacaauggcaugauuaguggagu

SEQ ID NO: 58632 - RNA, 23 nt, Artificial Sequence
  Chemically synthesized
gaauguccguuccuuuucuuugc

SEQ ID NO: 58633 - RNA, 23 nt, Artificial Sequence
  Chemically synthesized
aauguccguuccuuuucuuugcc

SEQ ID NO: 58634 - RNA, 23 nt, Artificial Sequence
  Chemically synthesized
auguccguuccuuuucuuugccu

SEQ ID NO: 58635 - RNA, 23 nt, Artificial Sequence
  Chemically synthesized
uguccguuccuuuucuuugccuc

SEQ ID NO: 58636 - RNA, 23 nt, Artificial Sequence
  Chemically synthesized
guccguuccuuuucuuugccucc

SEQ ID NO: 58637 - RNA, 23 nt, Artificial Sequence
  Chemically synthesized
caucauggccaaaaguuacuagc

SEQ ID NO: 58638 - RNA, 23 nt, Artificial Sequence
  Chemically synthesized
aucauggccaaaaguuacuagca

SEQ ID NO: 58639 - RNA, 23 nt, Artificial Sequence
  Chemically synthesized
ucauggccaaaaguuacuagcaa

SEQ ID NO: 58640 - RNA, 23 nt, Artificial Sequence
  Chemically synthesized
cauggccaaaaguuacuagcaau

SEQ ID NO: 58641 - RNA, 23 nt, Artificial Sequence
  Chemically synthesized
auggccaaaaguuacuagcaaug

SEQ ID NO: 58642 - RNA, 23 nt, Artificial Sequence
  Chemically synthesized
uagcaauggccuuaucugugacc

SEQ ID NO: 58643 - RNA, 23 nt, Artificial Sequence
  Chemically synthesized
agcaauggccuuaucugugacca

SEQ ID NO: 58644 - RNA, 23 nt, Artificial Sequence
  Chemically synthesized
gcaauggccuuaucugugaccag

SEQ ID NO: 58645 - RNA, 23 nt, Artificial Sequence
  Chemically synthesized
caauggccuuaucugugaccagc

SEQ ID NO: 58646 - RNA, 23 nt, Artificial Sequence
  Chemically synthesized
aauggccuuaucugugaccagcu

SEQ ID NO: 58647 - RNA, 23 nt, Artificial Sequence
  Chemically synthesized
ugcuuauccuaacaugucucuug

SEQ ID NO: 58648 - RNA, 23 nt, Artificial Sequence
  Chemically synthesized
ggggaauuucgaguuggcuguug

SEQ ID NO: 58649 - RNA, 23 nt, Artificial Sequence
  Chemically synthesized
ucccacucguuucugguaguucu

SEQ ID NO: 58650 - RNA, 23 nt, Artificial Sequence
  Chemically synthesized
cccacucguuucugguaguucuu

SEQ ID NO: 58651 - RNA, 23 nt, Artificial Sequence
  Chemically synthesized
ccacucguuucugguaguucuuc

SEQ ID NO: 58652 - RNA, 23 nt, Artificial Sequence
  Chemically synthesized
ucucuuuuguggagaggaugccc

SEQ ID NO: 58653 - RNA, 23 nt, Artificial Sequence
  Chemically synthesized
cucuuuuguggagaggaugcccu

SEQ ID NO: 58654 - RNA, 23 nt, Artificial Sequence
  Chemically synthesized
ucuuuuguggagaggaugcccuu

SEQ ID NO: 58655 - RNA, 23 nt, Artificial Sequence
  Chemically synthesized
cuuuuguggagaggaugcccuuu

SEQ ID NO: 58656 - RNA, 23 nt, Artificial Sequence
  Chemically synthesized
uuuuguggagaggaugcccuuuu

SEQ ID NO: 58657 - RNA, 23 nt, Artificial Sequence
  Chemically synthesized
uccguuccuuuucuuugccuccu

SEQ ID NO: 58658 - RNA, 23 nt, Artificial Sequence
  Chemically synthesized
cgcagucucucuuuucacgcugg

SEQ ID NO: 58659 - RNA, 23 nt, Artificial Sequence
  Chemically synthesized
gcagucucucuuuucacgcuggg

SEQ ID NO: 58660 - RNA, 23 nt, Artificial Sequence
  Chemically synthesized
cagucucucuuuucacgcuggga

SEQ ID NO: 58661 - RNA, 23 nt, Artificial Sequence
  Chemically synthesized
agucucucuuuucacgcugggaa

SEQ ID NO: 58662 - RNA, 23 nt, Artificial Sequence
  Chemically synthesized
gucucucuuuucacgcugggaac

SEQ ID NO: 58663 - RNA, 23 nt, Artificial Sequence
  Chemically synthesized
ucucucuuuucacgcugggaaca

SEQ ID NO: 58664 - RNA, 23 nt, Artificial Sequence
  Chemically synthesized
ucccugcaaguucaagaaguccc

SEQ ID NO: 58665 - RNA, 23 nt, Artificial Sequence
  Chemically synthesized
cccugcaaguucaagaagucccc

SEQ ID NO: 58666 - RNA, 23 nt, Artificial Sequence
  Chemically synthesized
ucucgucaagguacagcaucgag

SEQ ID NO: 58667 - RNA, 23 nt, Artificial Sequence
  Chemically synthesized
cucgucaagguacagcaucgaga

SEQ ID NO: 58668 - RNA, 23 nt, Artificial Sequence
  Chemically synthesized
ucgucaagguacagcaucgagau

SEQ ID NO: 58669 - RNA, 23 nt, Artificial Sequence
  Chemically synthesized
uuggcuugacguuuuucucuuuu

SEQ ID NO: 58670 - RNA, 23 nt, Artificial Sequence
  Chemically synthesized
ccguuccuuuucuuugccuccuc

SEQ ID NO: 58671 - RNA, 23 nt, Artificial Sequence
  Chemically synthesized
cguuccuuuucuuugccuccucc

SEQ ID NO: 58672 - RNA, 23 nt, Artificial Sequence
  Chemically synthesized
guuccuuuucuuugccuccuccu

SEQ ID NO: 58673 - RNA, 23 nt, Artificial Sequence
  Chemically synthesized
uuccuuuucuuugccuccuccuu

SEQ ID NO: 58674 - RNA, 23 nt, Artificial Sequence
  Chemically synthesized
ccuuuucuuugccuccuccuucu

SEQ ID NO: 58675 - RNA, 23 nt, Artificial Sequence
  Chemically synthesized
cuuuucuuugccuccuccuucuc

SEQ ID NO: 58676 - RNA, 23 nt, Artificial Sequence
  Chemically synthesized
uuuucuuugccuccuccuucucc

SEQ ID NO: 58677 - RNA, 23 nt, Artificial Sequence
  Chemically synthesized
uuucuuugccuccuccuucuccc

SEQ ID NO: 58678 - RNA, 23 nt, Artificial Sequence
  Chemically synthesized
uucuuugccuccuccuucucccg

SEQ ID NO: 58679 - RNA, 23 nt, Artificial Sequence
  Chemically synthesized
uggagacaccuuguuucuccucc

SEQ ID NO: 58680 - RNA, 23 nt, Artificial Sequence
  Chemically synthesized
ggagacaccuuguuucuccucca

SEQ ID NO: 58681 - RNA, 23 nt, Artificial Sequence
  Chemically synthesized
gagacaccuuguuucuccuccaa

SEQ ID NO: 58682 - RNA, 23 nt, Artificial Sequence
  Chemically synthesized
agacaccuuguuucuccuccaag

SEQ ID NO: 58683 - RNA, 23 nt, Artificial Sequence
  Chemically synthesized
gacaccuuguuucuccuccaagu

SEQ ID NO: 58684 - RNA, 23 nt, Artificial Sequence
  Chemically synthesized
gcuguugcagguuuuaugauuuc

SEQ ID NO: 58685 - RNA, 23 nt, Artificial Sequence
  Chemically synthesized
cuguugcagguuuuaugauuuca

SEQ ID NO: 58686 - RNA, 23 nt, Artificial Sequence
  Chemically synthesized
uguugcagguuuuaugauuucau

SEQ ID NO: 58687 - RNA, 23 nt, Artificial Sequence
  Chemically synthesized
guugcagguuuuaugauuucaua

SEQ ID NO: 58688 - RNA, 23 nt, Artificial Sequence
  Chemically synthesized
uugcagguuuuaugauuucauaa

SEQ ID NO: 58689 - RNA, 23 nt, Artificial Sequence
  Chemically synthesized
aucuugcaucuguucucggaaaa

SEQ ID NO: 58690 - RNA, 23 nt, Artificial Sequence
  Chemically synthesized
guaguucuuccaaagauucuuca

SEQ ID NO: 58691 - RNA, 23 nt, Artificial Sequence
  Chemically synthesized
uaguucuuccaaagauucuucau

SEQ ID NO: 58692 - RNA, 23 nt, Artificial Sequence
  Chemically synthesized
aguucuuccaaagauucuucaug

SEQ ID NO: 58693 - RNA, 23 nt, Artificial Sequence
  Chemically synthesized
guucuuccaaagauucuucaugg

SEQ ID NO: 58694 - RNA, 23 nt, Artificial Sequence
  Chemically synthesized
uucuuccaaagauucuucauggu

SEQ ID NO: 58695 - RNA, 23 nt, Artificial Sequence
  Chemically synthesized
accgcaguccgucuaagaagcac

SEQ ID NO: 58696 - RNA, 23 nt, Artificial Sequence
  Chemically synthesized
ccgcaguccgucuaagaagcacg

SEQ ID NO: 58697 - RNA, 23 nt, Artificial Sequence
  Chemically synthesized
cgcaguccgucuaagaagcacgc

SEQ ID NO: 58698 - RNA, 23 nt, Artificial Sequence
  Chemically synthesized
gcaguccgucuaagaagcacgcg

SEQ ID NO: 58699 - RNA, 23 nt, Artificial Sequence
  Chemically synthesized
caguccgucuaagaagcacgcgg

SEQ ID NO: 58700 - RNA, 23 nt, Artificial Sequence
  Chemically synthesized
cguccacauggaaaaacucuggu

SEQ ID NO: 58701 - RNA, 23 nt, Artificial Sequence
  Chemically synthesized
guccacauggaaaaacucugguc

SEQ ID NO: 58702 - RNA, 23 nt, Artificial Sequence
  Chemically synthesized
uccacauggaaaaacucugguca

SEQ ID NO: 58703 - RNA, 23 nt, Artificial Sequence
  Chemically synthesized
ccacauggaaaaacucuggucaa

SEQ ID NO: 58704 - RNA, 23 nt, Artificial Sequence
  Chemically synthesized
cacauggaaaaacucuggucaaa

SEQ ID NO: 58705 - RNA, 23 nt, Artificial Sequence
  Chemically synthesized
acauggaaaaacucuggucaaag

SEQ ID NO: 58706 - RNA, 23 nt, Artificial Sequence
  Chemically synthesized
aucgagauagcacugaguucugu

SEQ ID NO: 58707 - RNA, 23 nt, Artificial Sequence
  Chemically synthesized
ucgagauagcacugaguucuguc

SEQ ID NO: 58708 - RNA, 23 nt, Artificial Sequence
  Chemically synthesized
uggcaguaaaaggcgugauaccc

SEQ ID NO: 58709 - RNA, 23 nt, Artificial Sequence
  Chemically synthesized
ggcaguaaaaggcgugauacccc

SEQ ID NO: 58710 - RNA, 23 nt, Artificial Sequence
  Chemically synthesized
gcaguaaaaggcgugauaccccg

SEQ ID NO: 58711 - RNA, 23 nt, Artificial Sequence
  Chemically synthesized
caguaaaaggcgugauaccccgg

SEQ ID NO: 58712 - RNA, 23 nt, Artificial Sequence
  Chemically synthesized
aguaaaaggcgugauaccccggg

SEQ ID NO: 58713 - RNA, 23 nt, Artificial Sequence
  Chemically synthesized
gccacaauccagucauuccaccc

SEQ ID NO: 58714 - RNA, 23 nt, Artificial Sequence
  Chemically synthesized
ccacaauccagucauuccacccc

SEQ ID NO: 58715 - RNA, 23 nt, Artificial Sequence
  Chemically synthesized
cacaauccagucauuccacccca

SEQ ID NO: 58716 - RNA, 23 nt, Artificial Sequence
  Chemically synthesized
acaauccagucauuccaccccac

SEQ ID NO: 58717 - RNA, 23 nt, Artificial Sequence
  Chemically synthesized
caauccagucauuccaccccacg

SEQ ID NO: 58718 - RNA, 23 nt, Artificial Sequence
  Chemically synthesized
accgaauguccguuccuuuucuu

SEQ ID NO: 58719 - RNA, 23 nt, Artificial Sequence
  Chemically synthesized
ccgaauguccguuccuuuucuuu

SEQ ID NO: 58720 - RNA, 23 nt, Artificial Sequence
  Chemically synthesized
cgaauguccguuccuuuucuuug

SEQ ID NO: 58721 - RNA, 23 nt, Artificial Sequence
  Chemically synthesized
ccaucauggccaaaaguuacuag

SEQ ID NO: 58722 - RNA, 23 nt, Artificial Sequence
  Chemically synthesized
gcgcagucucucuuuucacgcug

SEQ ID NO: 58723 - RNA, 23 nt, Artificial Sequence
  Chemically synthesized
auggaaacugcuauuguuuccua

SEQ ID NO: 58724 - RNA, 23 nt, Artificial Sequence
  Chemically synthesized
uggaaacugcuauuguuuccuaa

SEQ ID NO: 58725 - RNA, 23 nt, Artificial Sequence
  Chemically synthesized
ggaaacugcuauuguuuccuaaa

SEQ ID NO: 58726 - RNA, 23 nt, Artificial Sequence
  Chemically synthesized
gaaacugcuauuguuuccuaaag

SEQ ID NO: 58727 - RNA, 23 nt, Artificial Sequence
  Chemically synthesized
aaacugcuauuguuuccuaaagc

SEQ ID NO: 58728 - RNA, 23 nt, Artificial Sequence
  Chemically synthesized
aacugcuauuguuuccuaaagca

SEQ ID NO: 58729 - RNA, 23 nt, Artificial Sequence
  Chemically synthesized
ugaggugauaaacuccuccgugg

SEQ ID NO: 58730 - RNA, 23 nt, Artificial Sequence
  Chemically synthesized
gaggugauaaacuccuccguggg

SEQ ID NO: 58731 - RNA, 23 nt, Artificial Sequence
  Chemically synthesized
aggugauaaacuccuccgugggg

SEQ ID NO: 58732 - RNA, 23 nt, Artificial Sequence
  Chemically synthesized
ggugauaaacuccuccgugggga

SEQ ID NO: 58733 - RNA, 23 nt, Artificial Sequence
  Chemically synthesized
gugauaaacuccuccguggggau

SEQ ID NO: 58734 - RNA, 23 nt, Artificial Sequence
  Chemically synthesized
uaaagaagaaucuccggguuguu

SEQ ID NO: 58735 - RNA, 23 nt, Artificial Sequence
  Chemically synthesized
aaguuauucucccugcaaguuca

SEQ ID NO: 58736 - RNA, 23 nt, Artificial Sequence
  Chemically synthesized
aguuauucucccugcaaguucaa

SEQ ID NO: 58737 - RNA, 23 nt, Artificial Sequence
  Chemically synthesized
guuauucucccugcaaguucaag

SEQ ID NO: 58738 - RNA, 23 nt, Artificial Sequence
  Chemically synthesized
uuauucucccugcaaguucaaga

SEQ ID NO: 58739 - RNA, 23 nt, Artificial Sequence
  Chemically synthesized
uauucucccugcaaguucaagaa

SEQ ID NO: 58740 - RNA, 23 nt, Artificial Sequence
  Chemically synthesized
uuaauacaaccuuuucauucucg

SEQ ID NO: 58741 - RNA, 23 nt, Artificial Sequence
  Chemically synthesized
uaauacaaccuuuucauucucgu

SEQ ID NO: 58742 - RNA, 23 nt, Artificial Sequence
  Chemically synthesized
aauacaaccuuuucauucucguc

SEQ ID NO: 58743 - RNA, 23 nt, Artificial Sequence
  Chemically synthesized
acagcuggacuuaaggcguuucc

SEQ ID NO: 58744 - RNA, 23 nt, Artificial Sequence
  Chemically synthesized
cagcuggacuuaaggcguuuccg

SEQ ID NO: 58745 - RNA, 23 nt, Artificial Sequence
  Chemically synthesized
agcuggacuuaaggcguuuccgc

SEQ ID NO: 58746 - RNA, 23 nt, Artificial Sequence
  Chemically synthesized
gcuggacuuaaggcguuuccgcu

SEQ ID NO: 58747 - RNA, 23 nt, Artificial Sequence
  Chemically synthesized
cuggacuuaaggcguuuccgcug

SEQ ID NO: 58748 - RNA, 23 nt, Artificial Sequence
  Chemically synthesized
ccugcuuauccuaacaugucucu

SEQ ID NO: 58749 - RNA, 23 nt, Artificial Sequence
  Chemically synthesized
cugcuuauccuaacaugucucuu

SEQ ID NO: 58750 - RNA, 23 nt, Artificial Sequence
  Chemically synthesized
uccuuuucuuugccuccuccuuc

SEQ ID NO: 58751 - RNA, 23 nt, Artificial Sequence
  Chemically synthesized
gggggugacaucaaaacuuuccc

SEQ ID NO: 58752 - RNA, 23 nt, Artificial Sequence
  Chemically synthesized
ggggugacaucaaaacuuuccca

SEQ ID NO: 58753 - RNA, 23 nt, Artificial Sequence
  Chemically synthesized
gggugacaucaaaacuuucccac

SEQ ID NO: 58754 - RNA, 23 nt, Artificial Sequence
  Chemically synthesized
ggugacaucaaaacuuucccacc

SEQ ID NO: 58755 - RNA, 23 nt, Artificial Sequence
  Chemically synthesized
gugacaucaaaacuuucccaccu

SEQ ID NO: 58756 - RNA, 23 nt, Artificial Sequence
  Chemically synthesized
ccaccugcuugcauucugauuca

SEQ ID NO: 58757 - RNA, 23 nt, Artificial Sequence
  Chemically synthesized
caccugcuugcauucugauucac

SEQ ID NO: 58758 - RNA, 23 nt, Artificial Sequence
  Chemically synthesized
accugcuugcauucugauucacc

SEQ ID NO: 58759 - RNA, 23 nt, Artificial Sequence
  Chemically synthesized
ccugcuugcauucugauucacca

SEQ ID NO: 58760 - RNA, 23 nt, Artificial Sequence
  Chemically synthesized
cugcuugcauucugauucaccaa

SEQ ID NO: 58761 - RNA, 23 nt, Artificial Sequence
  Chemically synthesized
cgcgcagucucucuuuucacgcu

SEQ ID NO: 58762 - RNA, 23 nt, Artificial Sequence
  Chemically synthesized
cuuccaaagauucuucauggugg

SEQ ID NO: 58763 - RNA, 23 nt, Artificial Sequence
  Chemically synthesized
uuccaaagauucuucauggugga

SEQ ID NO: 58764 - RNA, 23 nt, Artificial Sequence
  Chemically synthesized
uccaaagauucuucaugguggaa

SEQ ID NO: 58765 - RNA, 23 nt, Artificial Sequence
  Chemically synthesized
ccaaagauucuucaugguggaag

SEQ ID NO: 58766 - RNA, 23 nt, Artificial Sequence
  Chemically synthesized
caaagauucuucaugguggaagc

SEQ ID NO: 58767 - RNA, 23 nt, Artificial Sequence
  Chemically synthesized
cauggaaaaacucuggucaaagg

SEQ ID NO: 58768 - RNA, 23 nt, Artificial Sequence
  Chemically synthesized
gacacagcaugccuuaggaaucu

SEQ ID NO: 58769 - RNA, 23 nt, Artificial Sequence
  Chemically synthesized
acacagcaugccuuaggaaucuu

SEQ ID NO: 58770 - RNA, 23 nt, Artificial Sequence
  Chemically synthesized
cacagcaugccuuaggaaucuua

SEQ ID NO: 58771 - RNA, 23 nt, Artificial Sequence
  Chemically synthesized
acagcaugccuuaggaaucuuag

SEQ ID NO: 58772 - RNA, 23 nt, Artificial Sequence
  Chemically synthesized
cagcaugccuuaggaaucuuaga

SEQ ID NO: 58773 - RNA, 23 nt, Artificial Sequence
  Chemically synthesized
agcaugccuuaggaaucuuagag

SEQ ID NO: 58774 - RNA, 23 nt, Artificial Sequence
  Chemically synthesized
gcaugccuuaggaaucuuagagu

SEQ ID NO: 58775 - RNA, 23 nt, Artificial Sequence
  Chemically synthesized
caugccuuaggaaucuuagaguu

SEQ ID NO: 58776 - RNA, 23 nt, Artificial Sequence
  Chemically synthesized
augccuuaggaaucuuagaguua

SEQ ID NO: 58777 - RNA, 23 nt, Artificial Sequence
  Chemically synthesized
ugccuuaggaaucuuagaguuaa

SEQ ID NO: 58778 - RNA, 23 nt, Artificial Sequence
  Chemically synthesized
gccuuaggaaucuuagaguuaac

SEQ ID NO: 58779 - RNA, 23 nt, Artificial Sequence
  Chemically synthesized
ccuuaggaaucuuagaguuaaca

SEQ ID NO: 58780 - RNA, 23 nt, Artificial Sequence
  Chemically synthesized
cuuaggaaucuuagaguuaacag

SEQ ID NO: 58781 - RNA, 23 nt, Artificial Sequence
  Chemically synthesized
uuaggaaucuuagaguuaacaga

SEQ ID NO: 58782 - RNA, 23 nt, Artificial Sequence
  Chemically synthesized
uaggaaucuuagaguuaacagag

SEQ ID NO: 58783 - RNA, 23 nt, Artificial Sequence
  Chemically synthesized
aggaaucuuagaguuaacagagu

SEQ ID NO: 58784 - RNA, 23 nt, Artificial Sequence
  Chemically synthesized
ggaaucuuagaguuaacagaguu

SEQ ID NO: 58785 - RNA, 23 nt, Artificial Sequence
  Chemically synthesized
gaaucuuagaguuaacagaguug

SEQ ID NO: 58786 - RNA, 23 nt, Artificial Sequence
  Chemically synthesized
ccgcuguuuguguuuggcuugac

SEQ ID NO: 58787 - RNA, 23 nt, Artificial Sequence
  Chemically synthesized
cgcuguuuguguuuggcuugacg

SEQ ID NO: 58788 - RNA, 23 nt, Artificial Sequence
  Chemically synthesized
gcuguuuguguuuggcuugacgu

SEQ ID NO: 58789 - RNA, 23 nt, Artificial Sequence
  Chemically synthesized
cuguuuguguuuggcuugacguu

SEQ ID NO: 58790 - RNA, 23 nt, Artificial Sequence
  Chemically synthesized
uguuuguguuuggcuugacguuu

SEQ ID NO: 58791 - RNA, 23 nt, Artificial Sequence
  Chemically synthesized
uggcuugacguuuuucucuuuug

SEQ ID NO: 58792 - RNA, 23 nt, Artificial Sequence
  Chemically synthesized
ggcuugacguuuuucucuuuugu

SEQ ID NO: 58793 - RNA, 23 nt, Artificial Sequence
  Chemically synthesized
gcuugacguuuuucucuuuugug

SEQ ID NO: 58794 - RNA, 23 nt, Artificial Sequence
  Chemically synthesized
acuagcaauggccuuaucuguga

SEQ ID NO: 58795 - RNA, 23 nt, Artificial Sequence
  Chemically synthesized
cuagcaauggccuuaucugugac

SEQ ID NO: 58796 - RNA, 23 nt, Artificial Sequence
  Chemically synthesized
gaccugcuuauccuaacaugucu

SEQ ID NO: 58797 - RNA, 23 nt, Artificial Sequence
  Chemically synthesized
accugcuuauccuaacaugucuc

SEQ ID NO: 58798 - RNA, 23 nt, Artificial Sequence
  Chemically synthesized
caaguuauucucccugcaaguuc

SEQ ID NO: 58799 - RNA, 23 nt, Artificial Sequence
  Chemically synthesized
cucccugcaaguucaagaagucc

SEQ ID NO: 58800 - RNA, 23 nt, Artificial Sequence
  Chemically synthesized
acacguccauugaaagagcgucc

SEQ ID NO: 58801 - RNA, 23 nt, Artificial Sequence
  Chemically synthesized
cacguccauugaaagagcgucca

SEQ ID NO: 58802 - RNA, 23 nt, Artificial Sequence
  Chemically synthesized
acguccauugaaagagcguccac

SEQ ID NO: 58803 - RNA, 23 nt, Artificial Sequence
  Chemically synthesized
cguccauugaaagagcguccaca

SEQ ID NO: 58804 - RNA, 23 nt, Artificial Sequence
  Chemically synthesized
guccauugaaagagcguccacau

SEQ ID NO: 58805 - RNA, 23 nt, Artificial Sequence
  Chemically synthesized
gaggaugcccuuuuccaucaugg

SEQ ID NO: 58806 - RNA, 23 nt, Artificial Sequence
  Chemically synthesized
aggaugcccuuuuccaucauggc

SEQ ID NO: 58807 - RNA, 23 nt, Artificial Sequence
  Chemically synthesized
ggaugcccuuuuccaucauggcc

SEQ ID NO: 58808 - RNA, 23 nt, Artificial Sequence
  Chemically synthesized
gaugcccuuuuccaucauggcca

SEQ ID NO: 58809 - RNA, 23 nt, Artificial Sequence
  Chemically synthesized
augcccuuuuccaucauggccaa

SEQ ID NO: 58810 - RNA, 23 nt, Artificial Sequence
  Chemically synthesized
ugcuugcauucugauucaccaac

SEQ ID NO: 58811 - RNA, 23 nt, Artificial Sequence
  Chemically synthesized
gcuugcauucugauucaccaacc

SEQ ID NO: 58812 - RNA, 23 nt, Artificial Sequence
  Chemically synthesized
cuugcauucugauucaccaaccu

SEQ ID NO: 58813 - RNA, 23 nt, Artificial Sequence
  Chemically synthesized
uugcauucugauucaccaaccug

SEQ ID NO: 58814 - RNA, 23 nt, Artificial Sequence
  Chemically synthesized
aaagauucuucaugguggaagcu

SEQ ID NO: 58815 - RNA, 23 nt, Artificial Sequence
  Chemically synthesized
ccauugaaagagcguccacaugg

SEQ ID NO: 58816 - RNA, 23 nt, Artificial Sequence
  Chemically synthesized
cauugaaagagcguccacaugga

SEQ ID NO: 58817 - RNA, 23 nt, Artificial Sequence
  Chemically synthesized
auugaaagagcguccacauggaa

SEQ ID NO: 58818 - RNA, 23 nt, Artificial Sequence
  Chemically synthesized
uugaaagagcguccacauggaaa

SEQ ID NO: 58819 - RNA, 23 nt, Artificial Sequence
  Chemically synthesized
ugaaagagcguccacauggaaaa

SEQ ID NO: 58820 - RNA, 23 nt, Artificial Sequence
  Chemically synthesized
gucaagguacagcaucgagauag

SEQ ID NO: 58821 - RNA, 23 nt, Artificial Sequence
  Chemically synthesized
ucaagguacagcaucgagauagc

SEQ ID NO: 58822 - RNA, 23 nt, Artificial Sequence
  Chemically synthesized
caagguacagcaucgagauagca

SEQ ID NO: 58823 - RNA, 23 nt, Artificial Sequence
  Chemically synthesized
aagguacagcaucgagauagcac

SEQ ID NO: 58824 - RNA, 23 nt, Artificial Sequence
  Chemically synthesized
agguacagcaucgagauagcacu

SEQ ID NO: 58825 - RNA, 23 nt, Artificial Sequence
  Chemically synthesized
auggaaaaacucuggucaaagga

SEQ ID NO: 58826 - RNA, 23 nt, Artificial Sequence
  Chemically synthesized
uggaaaaacucuggucaaaggac

SEQ ID NO: 58827 - RNA, 23 nt, Artificial Sequence
  Chemically synthesized
ggaaaaacucuggucaaaggacc

SEQ ID NO: 58828 - RNA, 23 nt, Artificial Sequence
  Chemically synthesized
gaaaaacucuggucaaaggaccu

SEQ ID NO: 58829 - RNA, 23 nt, Artificial Sequence
  Chemically synthesized
aaaaacucuggucaaaggaccug

SEQ ID NO: 58830 - RNA, 23 nt, Artificial Sequence
  Chemically synthesized
auggcaugauuaguggaguucag

SEQ ID NO: 58831 - RNA, 23 nt, Artificial Sequence
  Chemically synthesized
uggcaugauuaguggaguucaga

SEQ ID NO: 58832 - RNA, 23 nt, Artificial Sequence
  Chemically synthesized
ggcaugauuaguggaguucagau

SEQ ID NO: 58833 - RNA, 23 nt, Artificial Sequence
  Chemically synthesized
gcaugauuaguggaguucagaug

SEQ ID NO: 58834 - RNA, 23 nt, Artificial Sequence
  Chemically synthesized
caugauuaguggaguucagauga

SEQ ID NO: 58835 - RNA, 23 nt, Artificial Sequence
  Chemically synthesized
ggaguucagaugaucagccagag

SEQ ID NO: 58836 - RNA, 23 nt, Artificial Sequence
  Chemically synthesized
gaguucagaugaucagccagagg

SEQ ID NO: 58837 - RNA, 23 nt, Artificial Sequence
  Chemically synthesized
aguucagaugaucagccagagga

SEQ ID NO: 58838 - RNA, 23 nt, Artificial Sequence
  Chemically synthesized
guucagaugaucagccagaggaa

SEQ ID NO: 58839 - RNA, 23 nt, Artificial Sequence
  Chemically synthesized
uucagaugaucagccagaggaaa

SEQ ID NO: 58840 - RNA, 23 nt, Artificial Sequence
  Chemically synthesized
ugcaaagaccugcuuauccuaac

SEQ ID NO: 58841 - RNA, 23 nt, Artificial Sequence
  Chemically synthesized
gcaaagaccugcuuauccuaaca

SEQ ID NO: 58842 - RNA, 23 nt, Artificial Sequence
  Chemically synthesized
caaagaccugcuuauccuaacau

SEQ ID NO: 58843 - RNA, 23 nt, Artificial Sequence
  Chemically synthesized
aaagaccugcuuauccuaacaug

SEQ ID NO: 58844 - RNA, 23 nt, Artificial Sequence
  Chemically synthesized
aagaccugcuuauccuaacaugu

SEQ ID NO: 58845 - RNA, 23 nt, Artificial Sequence
  Chemically synthesized
ugacaucaaaacuuucccaccug

SEQ ID NO: 58846 - RNA, 23 nt, Artificial Sequence
  Chemically synthesized
gacaucaaaacuuucccaccugc

SEQ ID NO: 58847 - RNA, 23 nt, Artificial Sequence
  Chemically synthesized
acaucaaaacuuucccaccugcu

SEQ ID NO: 58848 - RNA, 23 nt, Artificial Sequence
  Chemically synthesized
caucaaaacuuucccaccugcuu

SEQ ID NO: 58849 - RNA, 23 nt, Artificial Sequence
  Chemically synthesized
aucaaaacuuucccaccugcuug

SEQ ID NO: 58850 - RNA, 23 nt, Artificial Sequence
  Chemically synthesized
ugcagguuuuaugauuucauaaa

SEQ ID NO: 58851 - RNA, 23 nt, Artificial Sequence
  Chemically synthesized
auauuaauucggugauggaaacu

SEQ ID NO: 58852 - RNA, 23 nt, Artificial Sequence
  Chemically synthesized
gcgcaaguuauucucccugcaag

SEQ ID NO: 58853 - RNA, 23 nt, Artificial Sequence
  Chemically synthesized
cgcaaguuauucucccugcaagu

SEQ ID NO: 58854 - RNA, 23 nt, Artificial Sequence
  Chemically synthesized
gcaaguuauucucccugcaaguu

SEQ ID NO: 58855 - RNA, 23 nt, Artificial Sequence
  Chemically synthesized
aaccauguccugauaguucuuua

SEQ ID NO: 58856 - RNA, 23 nt, Artificial Sequence
  Chemically synthesized
accauguccugauaguucuuuaa

SEQ ID NO: 58857 - RNA, 23 nt, Artificial Sequence
  Chemically synthesized
ccauguccugauaguucuuuaau

SEQ ID NO: 58858 - RNA, 23 nt, Artificial Sequence
  Chemically synthesized
cauguccugauaguucuuuaaua

SEQ ID NO: 58859 - RNA, 23 nt, Artificial Sequence
  Chemically synthesized
auguccugauaguucuuuaauac

SEQ ID NO: 58860 - RNA, 23 nt, Artificial Sequence
  Chemically synthesized
ucgggacacagcaugccuuagga

SEQ ID NO: 58861 - RNA, 23 nt, Artificial Sequence
  Chemically synthesized
cgggacacagcaugccuuaggaa

SEQ ID NO: 58862 - RNA, 23 nt, Artificial Sequence
  Chemically synthesized
gggacacagcaugccuuaggaau

SEQ ID NO: 58863 - RNA, 23 nt, Artificial Sequence
  Chemically synthesized
ggacacagcaugccuuaggaauc

SEQ ID NO: 58864 - RNA, 23 nt, Artificial Sequence
  Chemically synthesized
auuaguggaguucagaugaucag

SEQ ID NO: 58865 - RNA, 23 nt, Artificial Sequence
  Chemically synthesized
uuaguggaguucagaugaucagc

SEQ ID NO: 58866 - RNA, 23 nt, Artificial Sequence
  Chemically synthesized
uaguggaguucagaugaucagcc

SEQ ID NO: 58867 - RNA, 23 nt, Artificial Sequence
  Chemically synthesized
aguggaguucagaugaucagcca

SEQ ID NO: 58868 - RNA, 23 nt, Artificial Sequence
  Chemically synthesized
guggaguucagaugaucagccag

SEQ ID NO: 58869 - RNA, 23 nt, Artificial Sequence
  Chemically synthesized
uggaguucagaugaucagccaga

SEQ ID NO: 58870 - RNA, 23 nt, Artificial Sequence
  Chemically synthesized
cccuuuuccaucauggccaaaag

SEQ ID NO: 58871 - RNA, 23 nt, Artificial Sequence
  Chemically synthesized
ccuuuuccaucauggccaaaagu

SEQ ID NO: 58872 - RNA, 23 nt, Artificial Sequence
  Chemically synthesized
cuuuuccaucauggccaaaaguu

SEQ ID NO: 58873 - RNA, 23 nt, Artificial Sequence
  Chemically synthesized
uuuuccaucauggccaaaaguua

SEQ ID NO: 58874 - RNA, 23 nt, Artificial Sequence
  Chemically synthesized
uuuccaucauggccaaaaguuac

SEQ ID NO: 58875 - RNA, 23 nt, Artificial Sequence
  Chemically synthesized
cucggaaaaccugaagcucugcu

SEQ ID NO: 58876 - RNA, 23 nt, Artificial Sequence
  Chemically synthesized
ucggaaaaccugaagcucugcug

SEQ ID NO: 58877 - RNA, 23 nt, Artificial Sequence
  Chemically synthesized
cggaaaaccugaagcucugcuga

SEQ ID NO: 58878 - RNA, 23 nt, Artificial Sequence
  Chemically synthesized
ggaaaaccugaagcucugcugag

SEQ ID NO: 58879 - RNA, 23 nt, Artificial Sequence
  Chemically synthesized
gaaaaccugaagcucugcugagg

SEQ ID NO: 58880 - RNA, 23 nt, Artificial Sequence
  Chemically synthesized
cgauacaggucuagcauguaggg

SEQ ID NO: 58881 - RNA, 23 nt, Artificial Sequence
  Chemically synthesized
gauacaggucuagcauguagggg

SEQ ID NO: 58882 - RNA, 23 nt, Artificial Sequence
  Chemically synthesized
auacaggucuagcauguaggggg

SEQ ID NO: 58883 - RNA, 23 nt, Artificial Sequence
  Chemically synthesized
uacaggucuagcauguagggggg

SEQ ID NO: 58884 - RNA, 23 nt, Artificial Sequence
  Chemically synthesized
acaggucuagcauguaggggggc

SEQ ID NO: 58885 - RNA, 23 nt, Artificial Sequence
  Chemically synthesized
augauuaguggaguucagaugau

SEQ ID NO: 58886 - RNA, 23 nt, Artificial Sequence
  Chemically synthesized
ugauuaguggaguucagaugauc

SEQ ID NO: 58887 - RNA, 23 nt, Artificial Sequence
  Chemically synthesized
gauuaguggaguucagaugauca

SEQ ID NO: 58888 - RNA, 23 nt, Artificial Sequence
  Chemically synthesized
caccuuguuucuccuccaagugg

SEQ ID NO: 58889 - RNA, 23 nt, Artificial Sequence
  Chemically synthesized
accuuguuucuccuccaaguggg

SEQ ID NO: 58890 - RNA, 23 nt, Artificial Sequence
  Chemically synthesized
ccuuguuucuccuccaagugggc

SEQ ID NO: 58891 - RNA, 23 nt, Artificial Sequence
  Chemically synthesized
cuuguuucuccuccaagugggcc

SEQ ID NO: 58892 - RNA, 23 nt, Artificial Sequence
  Chemically synthesized
uuguuucuccuccaagugggcca

SEQ ID NO: 58893 - RNA, 23 nt, Artificial Sequence
  Chemically synthesized
aaagaagaaucuccggguuguuu

SEQ ID NO: 58894 - RNA, 23 nt, Artificial Sequence
  Chemically synthesized
uccauugaaagagcguccacaug

SEQ ID NO: 58895 - RNA, 23 nt, Artificial Sequence
  Chemically synthesized
uuuaauacaaccuuuucauucuc

SEQ ID NO: 58896 - RNA, 23 nt, Artificial Sequence
  Chemically synthesized
cacugaaguccacguacaaaggg

SEQ ID NO: 58897 - RNA, 23 nt, Artificial Sequence
  Chemically synthesized
acugaaguccacguacaaagggu

SEQ ID NO: 58898 - RNA, 23 nt, Artificial Sequence
  Chemically synthesized
cugaaguccacguacaaagggug

SEQ ID NO: 58899 - RNA, 23 nt, Artificial Sequence
  Chemically synthesized
ugaaguccacguacaaagggugu

SEQ ID NO: 58900 - RNA, 23 nt, Artificial Sequence
  Chemically synthesized
gaaguccacguacaaaggguguc

SEQ ID NO: 58901 - RNA, 23 nt, Artificial Sequence
  Chemically synthesized
cggggacacguccauugaaagag

SEQ ID NO: 58902 - RNA, 23 nt, Artificial Sequence
  Chemically synthesized
ggggacacguccauugaaagagc

SEQ ID NO: 58903 - RNA, 23 nt, Artificial Sequence
  Chemically synthesized
gggacacguccauugaaagagcg

SEQ ID NO: 58904 - RNA, 23 nt, Artificial Sequence
  Chemically synthesized
ggacacguccauugaaagagcgu

SEQ ID NO: 58905 - RNA, 23 nt, Artificial Sequence
  Chemically synthesized
gacacguccauugaaagagcguc

SEQ ID NO: 58906 - RNA, 23 nt, Artificial Sequence
  Chemically synthesized
uauuuaauuuugcuguacuagcg

SEQ ID NO: 58907 - RNA, 23 nt, Artificial Sequence
  Chemically synthesized
auuuaauuuugcuguacuagcga

SEQ ID NO: 58908 - RNA, 23 nt, Artificial Sequence
  Chemically synthesized
uuuaauuuugcuguacuagcgac

SEQ ID NO: 58909 - RNA, 23 nt, Artificial Sequence
  Chemically synthesized
uuaauuuugcuguacuagcgaca

SEQ ID NO: 58910 - RNA, 23 nt, Artificial Sequence
  Chemically synthesized
uaauuuugcuguacuagcgacac

SEQ ID NO: 58911 - RNA, 23 nt, Artificial Sequence
  Chemically synthesized
cccacaacccuccacaaccaugu

SEQ ID NO: 58912 - RNA, 23 nt, Artificial Sequence
  Chemically synthesized
ccacaacccuccacaaccauguc

SEQ ID NO: 58913 - RNA, 23 nt, Artificial Sequence
  Chemically synthesized
cacaacccuccacaaccaugucc

SEQ ID NO: 58914 - RNA, 23 nt, Artificial Sequence
  Chemically synthesized
acaacccuccacaaccauguccu

SEQ ID NO: 58915 - RNA, 23 nt, Artificial Sequence
  Chemically synthesized
caacccuccacaaccauguccug

SEQ ID NO: 58916 - RNA, 23 nt, Artificial Sequence
  Chemically synthesized
gcguuuccgcuguuuguguuugg

SEQ ID NO: 58917 - RNA, 23 nt, Artificial Sequence
  Chemically synthesized
cguuuccgcuguuuguguuuggc

SEQ ID NO: 58918 - RNA, 23 nt, Artificial Sequence
  Chemically synthesized
guuuccgcuguuuguguuuggcu

SEQ ID NO: 58919 - RNA, 23 nt, Artificial Sequence
  Chemically synthesized
uuuccgcuguuuguguuuggcuu

SEQ ID NO: 58920 - RNA, 23 nt, Artificial Sequence
  Chemically synthesized
uuccgcuguuuguguuuggcuug

SEQ ID NO: 58921 - RNA, 23 nt, Artificial Sequence
  Chemically synthesized
uuccaucauggccaaaaguuacu

SEQ ID NO: 58922 - RNA, 23 nt, Artificial Sequence
  Chemically synthesized
uccaucauggccaaaaguuacua

SEQ ID NO: 58923 - RNA, 23 nt, Artificial Sequence
  Chemically synthesized
gccaaaaguuacuagcaauggcc

SEQ ID NO: 58924 - RNA, 23 nt, Artificial Sequence
  Chemically synthesized
ccaaaaguuacuagcaauggccu

SEQ ID NO: 58925 - RNA, 23 nt, Artificial Sequence
  Chemically synthesized
caaaaguuacuagcaauggccuu

SEQ ID NO: 58926 - RNA, 23 nt, Artificial Sequence
  Chemically synthesized
aaaaguuacuagcaauggccuua

SEQ ID NO: 58927 - RNA, 23 nt, Artificial Sequence
  Chemically synthesized
aaaguuacuagcaauggccuuau

SEQ ID NO: 58928 - RNA, 23 nt, Artificial Sequence
  Chemically synthesized
ucagaugaucagccagaggaaaa

SEQ ID NO: 58929 - RNA, 23 nt, Artificial Sequence
  Chemically synthesized
cagaugaucagccagaggaaaag

SEQ ID NO: 58930 - RNA, 23 nt, Artificial Sequence
  Chemically synthesized
ugaccagcuguguucaucuuggu

SEQ ID NO: 58931 - RNA, 23 nt, Artificial Sequence
  Chemically synthesized
gaccagcuguguucaucuuggug

SEQ ID NO: 58932 - RNA, 23 nt, Artificial Sequence
  Chemically synthesized
accagcuguguucaucuuggugc

SEQ ID NO: 58933 - RNA, 23 nt, Artificial Sequence
  Chemically synthesized
ccagcuguguucaucuuggugca

SEQ ID NO: 58934 - RNA, 23 nt, Artificial Sequence
  Chemically synthesized
cagcuguguucaucuuggugcaa

SEQ ID NO: 58935 - RNA, 23 nt, Artificial Sequence
  Chemically synthesized
ugcuauuguuuccuaaagcaucu

SEQ ID NO: 58936 - RNA, 23 nt, Artificial Sequence
  Chemically synthesized
gcuauuguuuccuaaagcaucuu

SEQ ID NO: 58937 - RNA, 23 nt, Artificial Sequence
  Chemically synthesized
cuauuguuuccuaaagcaucuug

SEQ ID NO: 58938 - RNA, 23 nt, Artificial Sequence
  Chemically synthesized
uauuguuuccuaaagcaucuugc

SEQ ID NO: 58939 - RNA, 23 nt, Artificial Sequence
  Chemically synthesized
auuguuuccuaaagcaucuugca

SEQ ID NO: 58940 - RNA, 23 nt, Artificial Sequence
  Chemically synthesized
guuuucccacucguuucugguag

SEQ ID NO: 58941 - RNA, 23 nt, Artificial Sequence
  Chemically synthesized
uuuucccacucguuucugguagu

SEQ ID NO: 58942 - RNA, 23 nt, Artificial Sequence
  Chemically synthesized
agccacaauccagucauuccacc

SEQ ID NO: 58943 - RNA, 23 nt, Artificial Sequence
  Chemically synthesized
acugcuauuguuuccuaaagcau

SEQ ID NO: 58944 - RNA, 23 nt, Artificial Sequence
  Chemically synthesized
cugcuauuguuuccuaaagcauc

SEQ ID NO: 58945 - RNA, 23 nt, Artificial Sequence
  Chemically synthesized
aauuuugcuguacuagcgacacc

SEQ ID NO: 58946 - RNA, 23 nt, Artificial Sequence
  Chemically synthesized
auuuugcuguacuagcgacaccc

SEQ ID NO: 58947 - RNA, 23 nt, Artificial Sequence
  Chemically synthesized
uuuugcuguacuagcgacaccca

SEQ ID NO: 58948 - RNA, 23 nt, Artificial Sequence
  Chemically synthesized
cagccagaggaaaagggcauucu

SEQ ID NO: 58949 - RNA, 23 nt, Artificial Sequence
  Chemically synthesized
agccagaggaaaagggcauucuc

SEQ ID NO: 58950 - RNA, 23 nt, Artificial Sequence
  Chemically synthesized
gccagaggaaaagggcauucucc

SEQ ID NO: 58951 - RNA, 23 nt, Artificial Sequence
  Chemically synthesized
ccagaggaaaagggcauucuccg

SEQ ID NO: 58952 - RNA, 23 nt, Artificial Sequence
  Chemically synthesized
cagaggaaaagggcauucuccgu

SEQ ID NO: 58953 - RNA, 23 nt, Artificial Sequence
  Chemically synthesized
gcgcaaggaccgaauguccguuc

SEQ ID NO: 58954 - RNA, 23 nt, Artificial Sequence
  Chemically synthesized
cgcaaggaccgaauguccguucc

SEQ ID NO: 58955 - RNA, 23 nt, Artificial Sequence
  Chemically synthesized
gcaaggaccgaauguccguuccu

SEQ ID NO: 58956 - RNA, 23 nt, Artificial Sequence
  Chemically synthesized
caaggaccgaauguccguuccuu

SEQ ID NO: 58957 - RNA, 23 nt, Artificial Sequence
  Chemically synthesized
aaggaccgaauguccguuccuuu

SEQ ID NO: 58958 - RNA, 23 nt, Artificial Sequence
  Chemically synthesized
ggcguuuccgcuguuuguguuug

SEQ ID NO: 58959 - RNA, 23 nt, Artificial Sequence
  Chemically synthesized
cugguaguucuuccaaagauucu

SEQ ID NO: 58960 - RNA, 23 nt, Artificial Sequence
  Chemically synthesized
ugguaguucuuccaaagauucuu

SEQ ID NO: 58961 - RNA, 23 nt, Artificial Sequence
  Chemically synthesized
gguaguucuuccaaagauucuuc

SEQ ID NO: 58962 - RNA, 23 nt, Artificial Sequence
  Chemically synthesized
gaugaucagccagaggaaaaggg

SEQ ID NO: 58963 - RNA, 23 nt, Artificial Sequence
  Chemically synthesized
augaucagccagaggaaaagggc

SEQ ID NO: 58964 - RNA, 23 nt, Artificial Sequence
  Chemically synthesized
ugaucagccagaggaaaagggca

SEQ ID NO: 58965 - RNA, 23 nt, Artificial Sequence
  Chemically synthesized
gaucagccagaggaaaagggcau

SEQ ID NO: 58966 - RNA, 23 nt, Artificial Sequence
  Chemically synthesized
aucagccagaggaaaagggcauu

SEQ ID NO: 58967 - RNA, 23 nt, Artificial Sequence
  Chemically synthesized
uccgcuguuuguguuuggcuuga

SEQ ID NO: 58968 - RNA, 23 nt, Artificial Sequence
  Chemically synthesized
cguuuuucucuuuuguggagagg

SEQ ID NO: 58969 - RNA, 23 nt, Artificial Sequence
  Chemically synthesized
guuuuucucuuuuguggagagga

SEQ ID NO: 58970 - RNA, 23 nt, Artificial Sequence
  Chemically synthesized
uuuuucucuuuuguggagaggau

SEQ ID NO: 58971 - RNA, 23 nt, Artificial Sequence
  Chemically synthesized
uuuucucuuuuguggagaggaug

SEQ ID NO: 58972 - RNA, 23 nt, Artificial Sequence
  Chemically synthesized
uuucucuuuuguggagaggaugc

SEQ ID NO: 58973 - RNA, 23 nt, Artificial Sequence
  Chemically synthesized
uuccuaaagcaucuugcaucugu

SEQ ID NO: 58974 - RNA, 23 nt, Artificial Sequence
  Chemically synthesized
uccuaaagcaucuugcaucuguu

SEQ ID NO: 58975 - RNA, 23 nt, Artificial Sequence
  Chemically synthesized
ccuaaagcaucuugcaucuguuc

SEQ ID NO: 58976 - RNA, 23 nt, Artificial Sequence
  Chemically synthesized
cuaaagcaucuugcaucuguucu

SEQ ID NO: 58977 - RNA, 23 nt, Artificial Sequence
  Chemically synthesized
uaaagcaucuugcaucuguucuc

SEQ ID NO: 58978 - RNA, 23 nt, Artificial Sequence
  Chemically synthesized
ucuguucucggaaaaccugaagc

SEQ ID NO: 58979 - RNA, 23 nt, Artificial Sequence
  Chemically synthesized
cuguucucggaaaaccugaagcu

SEQ ID NO: 58980 - RNA, 23 nt, Artificial Sequence
  Chemically synthesized
uguucucggaaaaccugaagcuc

SEQ ID NO: 58981 - RNA, 23 nt, Artificial Sequence
  Chemically synthesized
guucucggaaaaccugaagcucu

SEQ ID NO: 58982 - RNA, 23 nt, Artificial Sequence
  Chemically synthesized
uucucggaaaaccugaagcucug

SEQ ID NO: 58983 - RNA, 23 nt, Artificial Sequence
  Chemically synthesized
uuucccacucguuucugguaguu

SEQ ID NO: 58984 - RNA, 23 nt, Artificial Sequence
  Chemically synthesized
uucccacucguuucugguaguuc

SEQ ID NO: 58985 - RNA, 23 nt, Artificial Sequence
  Chemically synthesized
ggccaaaaguuacuagcaauggc

SEQ ID NO: 58986 - RNA, 23 nt, Artificial Sequence
  Chemically synthesized
uuacuagcaauggccuuaucugu

SEQ ID NO: 58987 - RNA, 23 nt, Artificial Sequence
  Chemically synthesized
uacuagcaauggccuuaucugug

SEQ ID NO: 58988 - RNA, 23 nt, Artificial Sequence
  Chemically synthesized
ggccuuaucugugaccagcugug

SEQ ID NO: 58989 - RNA, 23 nt, Artificial Sequence
  Chemically synthesized
gccuuaucugugaccagcugugu

SEQ ID NO: 58990 - RNA, 23 nt, Artificial Sequence
  Chemically synthesized
ccuuaucugugaccagcuguguu

SEQ ID NO: 58991 - RNA, 23 nt, Artificial Sequence
  Chemically synthesized
cuuaucugugaccagcuguguuc

SEQ ID NO: 58992 - RNA, 23 nt, Artificial Sequence
  Chemically synthesized
uuaucugugaccagcuguguuca

SEQ ID NO: 58993 - RNA, 23 nt, Artificial Sequence
  Chemically synthesized
caccaaccugguguccaaaaguc

SEQ ID NO: 58994 - RNA, 23 nt, Artificial Sequence
  Chemically synthesized
accaaccugguguccaaaagucu

SEQ ID NO: 58995 - RNA, 23 nt, Artificial Sequence
  Chemically synthesized
ccaaccugguguccaaaagucug

SEQ ID NO: 58996 - RNA, 23 nt, Artificial Sequence
  Chemically synthesized
caaccugguguccaaaagucugg

SEQ ID NO: 58997 - RNA, 23 nt, Artificial Sequence
  Chemically synthesized
aaccugguguccaaaagucuggu

SEQ ID NO: 58998 - RNA, 23 nt, Artificial Sequence
  Chemically synthesized
aagaaucuccggguuguuuuccc

SEQ ID NO: 58999 - RNA, 23 nt, Artificial Sequence
  Chemically synthesized
agaaucuccggguuguuuuccca

SEQ ID NO: 59000 - RNA, 23 nt, Artificial Sequence
  Chemically synthesized
gaaucuccggguuguuuucccac

SEQ ID NO: 59001 - RNA, 23 nt, Artificial Sequence
  Chemically synthesized
aaucuccggguuguuuucccacu

SEQ ID NO: 59002 - RNA, 23 nt, Artificial Sequence
  Chemically synthesized
aucuccggguuguuuucccacuc

SEQ ID NO: 59003 - RNA, 23 nt, Artificial Sequence
  Chemically synthesized
gaguuaacagaguugaccaacgu

SEQ ID NO: 59004 - RNA, 23 nt, Artificial Sequence
  Chemically synthesized
aguuaacagaguugaccaacguc

SEQ ID NO: 59005 - RNA, 23 nt, Artificial Sequence
  Chemically synthesized
guuaacagaguugaccaacgucu

SEQ ID NO: 59006 - RNA, 23 nt, Artificial Sequence
  Chemically synthesized
uuaacagaguugaccaacgucug

SEQ ID NO: 59007 - RNA, 23 nt, Artificial Sequence
  Chemically synthesized
uaacagaguugaccaacgucuga

SEQ ID NO: 59008 - RNA, 23 nt, Artificial Sequence
  Chemically synthesized
guauuuaauuuugcuguacuagc

SEQ ID NO: 59009 - RNA, 23 nt, Artificial Sequence
  Chemically synthesized
uuugcuguacuagcgacacccac

SEQ ID NO: 59010 - RNA, 23 nt, Artificial Sequence
  Chemically synthesized
uugcuguacuagcgacacccaca

SEQ ID NO: 59011 - RNA, 23 nt, Artificial Sequence
  Chemically synthesized
uagcacugaguucugucgggaca

SEQ ID NO: 59012 - RNA, 23 nt, Artificial Sequence
  Chemically synthesized
acaauggcaugauuaguggaguu

SEQ ID NO: 59013 - RNA, 23 nt, Artificial Sequence
  Chemically synthesized
caauggcaugauuaguggaguuc

SEQ ID NO: 59014 - RNA, 23 nt, Artificial Sequence
  Chemically synthesized
aauggcaugauuaguggaguuca

SEQ ID NO: 59015 - RNA, 23 nt, Artificial Sequence
  Chemically synthesized
aaguuacuagcaauggccuuauc

SEQ ID NO: 59016 - RNA, 23 nt, Artificial Sequence
  Chemically synthesized
aguuacuagcaauggccuuaucu

SEQ ID NO: 59017 - RNA, 23 nt, Artificial Sequence
  Chemically synthesized
guuacuagcaauggccuuaucug

SEQ ID NO: 59018 - RNA, 23 nt, Artificial Sequence
  Chemically synthesized
uaucugugaccagcuguguucau

SEQ ID NO: 59019 - RNA, 23 nt, Artificial Sequence
  Chemically synthesized
accugguguccaaaagucugguc

SEQ ID NO: 59020 - RNA, 23 nt, Artificial Sequence
  Chemically synthesized
ccugguguccaaaagucugguca

SEQ ID NO: 59021 - RNA, 23 nt, Artificial Sequence
  Chemically synthesized
cugguguccaaaagucuggucac

SEQ ID NO: 59022 - RNA, 23 nt, Artificial Sequence
  Chemically synthesized
auuaauucggugauggaaacugc

SEQ ID NO: 59023 - RNA, 23 nt, Artificial Sequence
  Chemically synthesized
uuaauucggugauggaaacugcu

SEQ ID NO: 59024 - RNA, 23 nt, Artificial Sequence
  Chemically synthesized
uaauucggugauggaaacugcua

SEQ ID NO: 59025 - RNA, 23 nt, Artificial Sequence
  Chemically synthesized
aauucggugauggaaacugcuau

SEQ ID NO: 59026 - RNA, 23 nt, Artificial Sequence
  Chemically synthesized
auucggugauggaaacugcuauu

SEQ ID NO: 59027 - RNA, 23 nt, Artificial Sequence
  Chemically synthesized
ucuuccaaagauucuucauggug

SEQ ID NO: 59028 - RNA, 23 nt, Artificial Sequence
  Chemically synthesized
gaggaaaagggcauucuccgugg

SEQ ID NO: 59029 - RNA, 23 nt, Artificial Sequence
  Chemically synthesized
aggaaaagggcauucuccguggc

SEQ ID NO: 59030 - RNA, 23 nt, Artificial Sequence
  Chemically synthesized
ggaaaagggcauucuccguggca

SEQ ID NO: 59031 - RNA, 23 nt, Artificial Sequence
  Chemically synthesized
gaaaagggcauucuccguggcag

SEQ ID NO: 59032 - RNA, 23 nt, Artificial Sequence
  Chemically synthesized
aaaagggcauucuccguggcagu

SEQ ID NO: 59033 - RNA, 23 nt, Artificial Sequence
  Chemically synthesized
cuccguggcaguaaaaggcguga

SEQ ID NO: 59034 - RNA, 23 nt, Artificial Sequence
  Chemically synthesized
uccguggcaguaaaaggcgugau

SEQ ID NO: 59035 - RNA, 23 nt, Artificial Sequence
  Chemically synthesized
ccguggcaguaaaaggcgugaua

SEQ ID NO: 59036 - RNA, 23 nt, Artificial Sequence
  Chemically synthesized
cguggcaguaaaaggcgugauac

SEQ ID NO: 59037 - RNA, 23 nt, Artificial Sequence
  Chemically synthesized
guggcaguaaaaggcgugauacc

SEQ ID NO: 59038 - RNA, 23 nt, Artificial Sequence
  Chemically synthesized
uggacuuaaggcguuuccgcugu

SEQ ID NO: 59039 - RNA, 23 nt, Artificial Sequence
  Chemically synthesized
ggacuuaaggcguuuccgcuguu

SEQ ID NO: 59040 - RNA, 23 nt, Artificial Sequence
  Chemically synthesized
gacuuaaggcguuuccgcuguuu

SEQ ID NO: 59041 - RNA, 23 nt, Artificial Sequence
  Chemically synthesized
acuuaaggcguuuccgcuguuug

SEQ ID NO: 59042 - RNA, 23 nt, Artificial Sequence
  Chemically synthesized
cuuaaggcguuuccgcuguuugu

SEQ ID NO: 59043 - RNA, 23 nt, Artificial Sequence
  Chemically synthesized
uucucuuuuguggagaggaugcc

SEQ ID NO: 59044 - RNA, 23 nt, Artificial Sequence
  Chemically synthesized
uguuucuccuccaagugggccac

SEQ ID NO: 59045 - RNA, 23 nt, Artificial Sequence
  Chemically synthesized
uggggugcgcaaguuauucuccc

SEQ ID NO: 59046 - RNA, 23 nt, Artificial Sequence
  Chemically synthesized
ggggugcgcaaguuauucucccu

SEQ ID NO: 59047 - RNA, 23 nt, Artificial Sequence
  Chemically synthesized
gggugcgcaaguuauucucccug

SEQ ID NO: 59048 - RNA, 23 nt, Artificial Sequence
  Chemically synthesized
ggugcgcaaguuauucucccugc

SEQ ID NO: 59049 - RNA, 23 nt, Artificial Sequence
  Chemically synthesized
gugcgcaaguuauucucccugca

SEQ ID NO: 59050 - RNA, 23 nt, Artificial Sequence
  Chemically synthesized
gaagaaucuccggguuguuuucc

SEQ ID NO: 59051 - RNA, 23 nt, Artificial Sequence
  Chemically synthesized
guuucugguaguucuuccaaaga

SEQ ID NO: 59052 - RNA, 23 nt, Artificial Sequence
  Chemically synthesized
ccacaaccauguccugauaguuc

SEQ ID NO: 59053 - RNA, 23 nt, Artificial Sequence
  Chemically synthesized
cacaaccauguccugauaguucu

SEQ ID NO: 59054 - RNA, 23 nt, Artificial Sequence
  Chemically synthesized
acaaccauguccugauaguucuu

SEQ ID NO: 59055 - RNA, 23 nt, Artificial Sequence
  Chemically synthesized
caaccauguccugauaguucuuu

SEQ ID NO: 59056 - RNA, 23 nt, Artificial Sequence
  Chemically synthesized
gcguccacauggaaaaacucugg

SEQ ID NO: 59057 - RNA, 23 nt, Artificial Sequence
  Chemically synthesized
agaguuaacagaguugaccaacg

SEQ ID NO: 59058 - RNA, 23 nt, Artificial Sequence
  Chemically synthesized
guuuguguuuggcuugacguuuu

SEQ ID NO: 59059 - RNA, 23 nt, Artificial Sequence
  Chemically synthesized
uuuguguuuggcuugacguuuuu

SEQ ID NO: 59060 - RNA, 23 nt, Artificial Sequence
  Chemically synthesized
uggccaaaaguuacuagcaaugg

SEQ ID NO: 59061 - RNA, 23 nt, Artificial Sequence
  Chemically synthesized
uucaucuuggugcaaagaccugc

SEQ ID NO: 59062 - RNA, 23 nt, Artificial Sequence
  Chemically synthesized
ucaucuuggugcaaagaccugcu

SEQ ID NO: 59063 - RNA, 23 nt, Artificial Sequence
  Chemically synthesized
caucuuggugcaaagaccugcuu

SEQ ID NO: 59064 - RNA, 23 nt, Artificial Sequence
  Chemically synthesized
aucuuggugcaaagaccugcuua

SEQ ID NO: 59065 - RNA, 23 nt, Artificial Sequence
  Chemically synthesized
ucuuggugcaaagaccugcuuau

SEQ ID NO: 59066 - RNA, 23 nt, Artificial Sequence
  Chemically synthesized
uuucgaguuggcuguugcagguu

SEQ ID NO: 59067 - RNA, 23 nt, Artificial Sequence
  Chemically synthesized
uucgaguuggcuguugcagguuu

SEQ ID NO: 59068 - RNA, 23 nt, Artificial Sequence
  Chemically synthesized
uauuaauucggugauggaaacug

SEQ ID NO: 59069 - RNA, 23 nt, Artificial Sequence
  Chemically synthesized
cuugcaucuguucucggaaaacc

SEQ ID NO: 59070 - RNA, 23 nt, Artificial Sequence
  Chemically synthesized
uugcaucuguucucggaaaaccu

SEQ ID NO: 59071 - RNA, 23 nt, Artificial Sequence
  Chemically synthesized
ugcaucuguucucggaaaaccug

SEQ ID NO: 59072 - RNA, 23 nt, Artificial Sequence
  Chemically synthesized
gcaucuguucucggaaaaccuga

SEQ ID NO: 59073 - RNA, 23 nt, Artificial Sequence
  Chemically synthesized
caucuguucucggaaaaccugaa

SEQ ID NO: 59074 - RNA, 23 nt, Artificial Sequence
  Chemically synthesized
aucuguucucggaaaaccugaag

SEQ ID NO: 59075 - RNA, 23 nt, Artificial Sequence
  Chemically synthesized
ucucggaaaaccugaagcucugc

SEQ ID NO: 59076 - RNA, 23 nt, Artificial Sequence
  Chemically synthesized
cugcugaggugauaaacuccucc

SEQ ID NO: 59077 - RNA, 23 nt, Artificial Sequence
  Chemically synthesized
ugcugaggugauaaacuccuccg

SEQ ID NO: 59078 - RNA, 23 nt, Artificial Sequence
  Chemically synthesized
gcugaggugauaaacuccuccgu

SEQ ID NO: 59079 - RNA, 23 nt, Artificial Sequence
  Chemically synthesized
cugaggugauaaacuccuccgug

SEQ ID NO: 59080 - RNA, 23 nt, Artificial Sequence
  Chemically synthesized
ugcgauacaggucuagcauguag

SEQ ID NO: 59081 - RNA, 23 nt, Artificial Sequence
  Chemically synthesized
gcgauacaggucuagcauguagg

SEQ ID NO: 59082 - RNA, 23 nt, Artificial Sequence
  Chemically synthesized
aguccgucuaagaagcacgcggg

SEQ ID NO: 59083 - RNA, 23 nt, Artificial Sequence
  Chemically synthesized
guugaccaacgucugaacaaugg

SEQ ID NO: 59084 - RNA, 23 nt, Artificial Sequence
  Chemically synthesized
uugaccaacgucugaacaauggc

SEQ ID NO: 59085 - RNA, 23 nt, Artificial Sequence
  Chemically synthesized
ugaccaacgucugaacaauggca

SEQ ID NO: 59086 - RNA, 23 nt, Artificial Sequence
  Chemically synthesized
gaccaacgucugaacaauggcau

SEQ ID NO: 59087 - RNA, 23 nt, Artificial Sequence
  Chemically synthesized
accaacgucugaacaauggcaug

SEQ ID NO: 59088 - RNA, 23 nt, Artificial Sequence
  Chemically synthesized
ccaacgucugaacaauggcauga

SEQ ID NO: 59089 - RNA, 23 nt, Artificial Sequence
  Chemically synthesized
caacgucugaacaauggcaugau

SEQ ID NO: 59090 - RNA, 23 nt, Artificial Sequence
  Chemically synthesized
aacgucugaacaauggcaugauu

SEQ ID NO: 59091 - RNA, 23 nt, Artificial Sequence
  Chemically synthesized
cguacaaagggugucucuuacag

SEQ ID NO: 59092 - RNA, 23 nt, Artificial Sequence
  Chemically synthesized
guacaaagggugucucuuacagc

SEQ ID NO: 59093 - RNA, 23 nt, Artificial Sequence
  Chemically synthesized
uacaaagggugucucuuacagcu

SEQ ID NO: 59094 - RNA, 23 nt, Artificial Sequence
  Chemically synthesized
acaaagggugucucuuacagcug

SEQ ID NO: 59095 - RNA, 23 nt, Artificial Sequence
  Chemically synthesized
caaagggugucucuuacagcugg

SEQ ID NO: 59096 - RNA, 23 nt, Artificial Sequence
  Chemically synthesized
cucuuacagcuggacuuaaggcg

SEQ ID NO: 59097 - RNA, 23 nt, Artificial Sequence
  Chemically synthesized
ucuuacagcuggacuuaaggcgu

SEQ ID NO: 59098 - RNA, 23 nt, Artificial Sequence
  Chemically synthesized
cuuacagcuggacuuaaggcguu

SEQ ID NO: 59099 - RNA, 23 nt, Artificial Sequence
  Chemically synthesized
uuacagcuggacuuaaggcguuu

SEQ ID NO: 59100 - RNA, 23 nt, Artificial Sequence
  Chemically synthesized
uacagcuggacuuaaggcguuuc

SEQ ID NO: 59101 - RNA, 23 nt, Artificial Sequence
  Chemically synthesized
gaccgaauguccguuccuuuucu

SEQ ID NO: 59102 - RNA, 23 nt, Artificial Sequence
  Chemically synthesized
ucucuuggagacaccuuguuucu

SEQ ID NO: 59103 - RNA, 23 nt, Artificial Sequence
  Chemically synthesized
cucuuggagacaccuuguuucuc

SEQ ID NO: 59104 - RNA, 23 nt, Artificial Sequence
  Chemically synthesized
ucuuggagacaccuuguuucucc

SEQ ID NO: 59105 - RNA, 23 nt, Artificial Sequence
  Chemically synthesized
cuuggagacaccuuguuucuccu

SEQ ID NO: 59106 - RNA, 23 nt, Artificial Sequence
  Chemically synthesized
uuggagacaccuuguuucuccuc

SEQ ID NO: 59107 - RNA, 23 nt, Artificial Sequence
  Chemically synthesized
cacgaauccaugguuggcguguc

SEQ ID NO: 59108 - RNA, 23 nt, Artificial Sequence
  Chemically synthesized
acgaauccaugguuggcgugucc

SEQ ID NO: 59109 - RNA, 23 nt, Artificial Sequence
  Chemically synthesized
cgaauccaugguuggcguguccc

SEQ ID NO: 59110 - RNA, 23 nt, Artificial Sequence
  Chemically synthesized
gaauccaugguuggcgugucccu

SEQ ID NO: 59111 - RNA, 23 nt, Artificial Sequence
  Chemically synthesized
aauccaugguuggcgugucccug

SEQ ID NO: 59112 - RNA, 23 nt, Artificial Sequence
  Chemically synthesized
ucugauucaccaaccuggugucc

SEQ ID NO: 59113 - RNA, 23 nt, Artificial Sequence
  Chemically synthesized
cugauucaccaaccuggugucca

SEQ ID NO: 59114 - RNA, 23 nt, Artificial Sequence
  Chemically synthesized
ugauucaccaaccugguguccaa

SEQ ID NO: 59115 - RNA, 23 nt, Artificial Sequence
  Chemically synthesized
gauucaccaaccugguguccaaa

SEQ ID NO: 59116 - RNA, 23 nt, Artificial Sequence
  Chemically synthesized
ugauggaaacugcuauuguuucc

SEQ ID NO: 59117 - RNA, 23 nt, Artificial Sequence
  Chemically synthesized
gauggaaacugcuauuguuuccu

SEQ ID NO: 59118 - RNA, 23 nt, Artificial Sequence
  Chemically synthesized
aaaaccugaagcucugcugaggu

SEQ ID NO: 59119 - RNA, 23 nt, Artificial Sequence
  Chemically synthesized
aaaccugaagcucugcugaggug

SEQ ID NO: 59120 - RNA, 23 nt, Artificial Sequence
  Chemically synthesized
gguacagcaucgagauagcacug

SEQ ID NO: 59121 - RNA, 23 nt, Artificial Sequence
  Chemically synthesized
guacagcaucgagauagcacuga

SEQ ID NO: 59122 - RNA, 23 nt, Artificial Sequence
  Chemically synthesized
uacagcaucgagauagcacugag

SEQ ID NO: 59123 - RNA, 23 nt, Artificial Sequence
  Chemically synthesized
uagaguuaacagaguugaccaac

SEQ ID NO: 59124 - RNA, 23 nt, Artificial Sequence
  Chemically synthesized
aacagaguugaccaacgucugaa

SEQ ID NO: 59125 - RNA, 23 nt, Artificial Sequence
  Chemically synthesized
aaaacucuggucaaaggaccugg

SEQ ID NO: 59126 - RNA, 23 nt, Artificial Sequence
  Chemically synthesized
aaacucuggucaaaggaccuggc

SEQ ID NO: 59127 - RNA, 23 nt, Artificial Sequence
  Chemically synthesized
uuuguggagaggaugcccuuuuc

SEQ ID NO: 59128 - RNA, 23 nt, Artificial Sequence
  Chemically synthesized
auggccuuaucugugaccagcug

SEQ ID NO: 59129 - RNA, 23 nt, Artificial Sequence
  Chemically synthesized
cuaacaugucucuuggagacacc

SEQ ID NO: 59130 - RNA, 23 nt, Artificial Sequence
  Chemically synthesized
uaacaugucucuuggagacaccu

SEQ ID NO: 59131 - RNA, 23 nt, Artificial Sequence
  Chemically synthesized
aacaugucucuuggagacaccuu

SEQ ID NO: 59132 - RNA, 23 nt, Artificial Sequence
  Chemically synthesized
acaugucucuuggagacaccuug

SEQ ID NO: 59133 - RNA, 23 nt, Artificial Sequence
  Chemically synthesized
caugucucuuggagacaccuugu

SEQ ID NO: 59134 - RNA, 23 nt, Artificial Sequence
  Chemically synthesized
gucucuuggagacaccuuguuuc

SEQ ID NO: 59135 - RNA, 23 nt, Artificial Sequence
  Chemically synthesized
ucucuuuucacgcugggaacagc

SEQ ID NO: 59136 - RNA, 23 nt, Artificial Sequence
  Chemically synthesized
cucuuuucacgcugggaacagcg

SEQ ID NO: 59137 - RNA, 23 nt, Artificial Sequence
  Chemically synthesized
ucuuuucacgcugggaacagcgu

SEQ ID NO: 59138 - RNA, 23 nt, Artificial Sequence
  Chemically synthesized
cuuuucacgcugggaacagcguc

SEQ ID NO: 59139 - RNA, 23 nt, Artificial Sequence
  Chemically synthesized
uuuucacgcugggaacagcgucu

SEQ ID NO: 59140 - RNA, 23 nt, Artificial Sequence
  Chemically synthesized
ccgcaacucgaacucgcucagga

SEQ ID NO: 59141 - RNA, 23 nt, Artificial Sequence
  Chemically synthesized
cgcaacucgaacucgcucaggac

SEQ ID NO: 59142 - RNA, 23 nt, Artificial Sequence
  Chemically synthesized
gcaacucgaacucgcucaggacc

SEQ ID NO: 59143 - RNA, 23 nt, Artificial Sequence
  Chemically synthesized
caacucgaacucgcucaggaccu

SEQ ID NO: 59144 - RNA, 23 nt, Artificial Sequence
  Chemically synthesized
aacucgaacucgcucaggaccuc

SEQ ID NO: 59145 - RNA, 23 nt, Artificial Sequence
  Chemically synthesized
aacucuggucaaaggaccuggcg

SEQ ID NO: 59146 - RNA, 23 nt, Artificial Sequence
  Chemically synthesized
acucuggucaaaggaccuggcgc

SEQ ID NO: 59147 - RNA, 23 nt, Artificial Sequence
  Chemically synthesized
aaguccacguacaaagggugucu

SEQ ID NO: 59148 - RNA, 23 nt, Artificial Sequence
  Chemically synthesized
aguccacguacaaagggugucuc

SEQ ID NO: 59149 - RNA, 23 nt, Artificial Sequence
  Chemically synthesized
guccacguacaaagggugucucu

SEQ ID NO: 59150 - RNA, 23 nt, Artificial Sequence
  Chemically synthesized
uccacguacaaagggugucucuu

SEQ ID NO: 59151 - RNA, 23 nt, Artificial Sequence
  Chemically synthesized
uccuaacaugucucuuggagaca

SEQ ID NO: 59152 - RNA, 23 nt, Artificial Sequence
  Chemically synthesized
ccuaacaugucucuuggagacac

SEQ ID NO: 59153 - RNA, 23 nt, Artificial Sequence
  Chemically synthesized
ccacuuccaccacgaauccaugg

SEQ ID NO: 59154 - RNA, 23 nt, Artificial Sequence
  Chemically synthesized
cacuuccaccacgaauccauggu

SEQ ID NO: 59155 - RNA, 23 nt, Artificial Sequence
  Chemically synthesized
acuuccaccacgaauccaugguu

SEQ ID NO: 59156 - RNA, 23 nt, Artificial Sequence
  Chemically synthesized
cuuccaccacgaauccaugguug

SEQ ID NO: 59157 - RNA, 23 nt, Artificial Sequence
  Chemically synthesized
uuccaccacgaauccaugguugg

SEQ ID NO: 59158 - RNA, 23 nt, Artificial Sequence
  Chemically synthesized
gcucugcugaggugauaaacucc

SEQ ID NO: 59159 - RNA, 23 nt, Artificial Sequence
  Chemically synthesized
cucugcugaggugauaaacuccu

SEQ ID NO: 59160 - RNA, 23 nt, Artificial Sequence
  Chemically synthesized
ucugcugaggugauaaacuccuc

SEQ ID NO: 59161 - RNA, 23 nt, Artificial Sequence
  Chemically synthesized
aagauucuucaugguggaagcug

SEQ ID NO: 59162 - RNA, 23 nt, Artificial Sequence
  Chemically synthesized
agauucuucaugguggaagcugc

SEQ ID NO: 59163 - RNA, 23 nt, Artificial Sequence
  Chemically synthesized
gauucuucaugguggaagcugcg

SEQ ID NO: 59164 - RNA, 23 nt, Artificial Sequence
  Chemically synthesized
auucuucaugguggaagcugcgc

SEQ ID NO: 59165 - RNA, 23 nt, Artificial Sequence
  Chemically synthesized
uucuucaugguggaagcugcgca

SEQ ID NO: 59166 - RNA, 23 nt, Artificial Sequence
  Chemically synthesized
cuguuucaggccgaacaugcuga

SEQ ID NO: 59167 - RNA, 23 nt, Artificial Sequence
  Chemically synthesized
uguuucaggccgaacaugcugag

SEQ ID NO: 59168 - RNA, 23 nt, Artificial Sequence
  Chemically synthesized
guuucaggccgaacaugcugagc

SEQ ID NO: 59169 - RNA, 23 nt, Artificial Sequence
  Chemically synthesized
uuucaggccgaacaugcugagca

SEQ ID NO: 59170 - RNA, 23 nt, Artificial Sequence
  Chemically synthesized
uucaggccgaacaugcugagcag

SEQ ID NO: 59171 - RNA, 23 nt, Artificial Sequence
  Chemically synthesized
agcguccacauggaaaaacucug

SEQ ID NO: 59172 - RNA, 23 nt, Artificial Sequence
  Chemically synthesized
aaagggugucucuuacagcugga

SEQ ID NO: 59173 - RNA, 23 nt, Artificial Sequence
  Chemically synthesized
aagggugucucuuacagcuggac

SEQ ID NO: 59174 - RNA, 23 nt, Artificial Sequence
  Chemically synthesized
ugguguccaaaagucuggucacg

SEQ ID NO: 59175 - RNA, 23 nt, Artificial Sequence
  Chemically synthesized
gguguccaaaagucuggucacgg

SEQ ID NO: 59176 - RNA, 23 nt, Artificial Sequence
  Chemically synthesized
guguccaaaagucuggucacggg

SEQ ID NO: 59177 - RNA, 23 nt, Artificial Sequence
  Chemically synthesized
ucuugcaucuguucucggaaaac

SEQ ID NO: 59178 - RNA, 23 nt, Artificial Sequence
  Chemically synthesized
agcucugcugaggugauaaacuc

SEQ ID NO: 59179 - RNA, 23 nt, Artificial Sequence
  Chemically synthesized
ucuccggguuguuuucccacucg

SEQ ID NO: 59180 - RNA, 23 nt, Artificial Sequence
  Chemically synthesized
ugcgcaaguuauucucccugcaa

SEQ ID NO: 59181 - RNA, 23 nt, Artificial Sequence
  Chemically synthesized
ucuucaugguggaagcugcgcac

SEQ ID NO: 59182 - RNA, 23 nt, Artificial Sequence
  Chemically synthesized
ucucuguuucaggccgaacaugc

SEQ ID NO: 59183 - RNA, 23 nt, Artificial Sequence
  Chemically synthesized
cucuguuucaggccgaacaugcu

SEQ ID NO: 59184 - RNA, 23 nt, Artificial Sequence
  Chemically synthesized
ucuguuucaggccgaacaugcug

SEQ ID NO: 59185 - RNA, 23 nt, Artificial Sequence
  Chemically synthesized
acagcaucgagauagcacugagu

SEQ ID NO: 59186 - RNA, 23 nt, Artificial Sequence
  Chemically synthesized
cagcaucgagauagcacugaguu

SEQ ID NO: 59187 - RNA, 23 nt, Artificial Sequence
  Chemically synthesized
agcaucgagauagcacugaguuc

SEQ ID NO: 59188 - RNA, 23 nt, Artificial Sequence
  Chemically synthesized
aucugugaccagcuguguucauc

SEQ ID NO: 59189 - RNA, 23 nt, Artificial Sequence
  Chemically synthesized
ucugugaccagcuguguucaucu

SEQ ID NO: 59190 - RNA, 23 nt, Artificial Sequence
  Chemically synthesized
guguucaucuuggugcaaagacc

SEQ ID NO: 59191 - RNA, 23 nt, Artificial Sequence
  Chemically synthesized
uguucaucuuggugcaaagaccu

SEQ ID NO: 59192 - RNA, 23 nt, Artificial Sequence
  Chemically synthesized
guucaucuuggugcaaagaccug

SEQ ID NO: 59193 - RNA, 23 nt, Artificial Sequence
  Chemically synthesized
augucucuuggagacaccuuguu

SEQ ID NO: 59194 - RNA, 23 nt, Artificial Sequence
  Chemically synthesized
ugucucuuggagacaccuuguuu

SEQ ID NO: 59195 - RNA, 23 nt, Artificial Sequence
  Chemically synthesized
uccaccacgaauccaugguuggc

SEQ ID NO: 59196 - RNA, 23 nt, Artificial Sequence
  Chemically synthesized
ccaccacgaauccaugguuggcg

SEQ ID NO: 59197 - RNA, 23 nt, Artificial Sequence
  Chemically synthesized
caccacgaauccaugguuggcgu

SEQ ID NO: 59198 - RNA, 23 nt, Artificial Sequence
  Chemically synthesized
uguccaaaagucuggucacgggg

SEQ ID NO: 59199 - RNA, 23 nt, Artificial Sequence
  Chemically synthesized
guccaaaagucuggucacgggga

SEQ ID NO: 59200 - RNA, 23 nt, Artificial Sequence
  Chemically synthesized
uccaaaagucuggucacggggaa

SEQ ID NO: 59201 - RNA, 23 nt, Artificial Sequence
  Chemically synthesized
uucggugauggaaacugcuauug

SEQ ID NO: 59202 - RNA, 23 nt, Artificial Sequence
  Chemically synthesized
ucggugauggaaacugcuauugu

SEQ ID NO: 59203 - RNA, 23 nt, Artificial Sequence
  Chemically synthesized
cggugauggaaacugcuauuguu

SEQ ID NO: 59204 - RNA, 23 nt, Artificial Sequence
  Chemically synthesized
ggugauggaaacugcuauuguuu

SEQ ID NO: 59205 - RNA, 23 nt, Artificial Sequence
  Chemically synthesized
gugauggaaacugcuauuguuuc

SEQ ID NO: 59206 - RNA, 23 nt, Artificial Sequence
  Chemically synthesized
acagaguugaccaacgucugaac

SEQ ID NO: 59207 - RNA, 23 nt, Artificial Sequence
  Chemically synthesized
agaggaaaagggcauucuccgug

SEQ ID NO: 59208 - RNA, 23 nt, Artificial Sequence
  Chemically synthesized
ucucuuacagcuggacuuaaggc

SEQ ID NO: 59209 - RNA, 23 nt, Artificial Sequence
  Chemically synthesized
cuuggugcaaagaccugcuuauc

SEQ ID NO: 59210 - RNA, 23 nt, Artificial Sequence
  Chemically synthesized
uuggugcaaagaccugcuuaucc

SEQ ID NO: 59211 - RNA, 23 nt, Artificial Sequence
  Chemically synthesized
uggugcaaagaccugcuuauccu

SEQ ID NO: 59212 - RNA, 23 nt, Artificial Sequence
  Chemically synthesized
ggugcaaagaccugcuuauccua

SEQ ID NO: 59213 - RNA, 23 nt, Artificial Sequence
  Chemically synthesized
gugcaaagaccugcuuauccuaa

SEQ ID NO: 59214 - RNA, 23 nt, Artificial Sequence
  Chemically synthesized
accacgaauccaugguuggcgug

SEQ ID NO: 59215 - RNA, 23 nt, Artificial Sequence
  Chemically synthesized
cgggggugacaucaaaacuuucc

SEQ ID NO: 59216 - RNA, 23 nt, Artificial Sequence
  Chemically synthesized
auucaccaaccugguguccaaaa

SEQ ID NO: 59217 - RNA, 23 nt, Artificial Sequence
  Chemically synthesized
ugauaaacuccuccguggggaua

SEQ ID NO: 59218 - RNA, 23 nt, Artificial Sequence
  Chemically synthesized
ccacgaauccaugguuggcgugu

SEQ ID NO: 59219 - RNA, 23 nt, Artificial Sequence
  Chemically synthesized
aagcagcaacgcuagaagacagc

SEQ ID NO: 59220 - RNA, 23 nt, Artificial Sequence
  Chemically synthesized
agcagcaacgcuagaagacagcg

SEQ ID NO: 59221 - RNA, 23 nt, Artificial Sequence
  Chemically synthesized
gcagcaacgcuagaagacagcgg

SEQ ID NO: 59222 - RNA, 23 nt, Artificial Sequence
  Chemically synthesized
cagcaacgcuagaagacagcggg

SEQ ID NO: 59223 - RNA, 23 nt, Artificial Sequence
  Chemically synthesized
agcaacgcuagaagacagcgggu

SEQ ID NO: 59224 - RNA, 23 nt, Artificial Sequence
  Chemically synthesized
gaaagagcguccacauggaaaaa

SEQ ID NO: 59225 - RNA, 23 nt, Artificial Sequence
  Chemically synthesized
cacguacaaagggugucucuuac

SEQ ID NO: 59226 - RNA, 23 nt, Artificial Sequence
  Chemically synthesized
acguacaaagggugucucuuaca

SEQ ID NO: 59227 - RNA, 23 nt, Artificial Sequence
  Chemically synthesized
agcuguguucaucuuggugcaaa

SEQ ID NO: 59228 - RNA, 23 nt, Artificial Sequence
  Chemically synthesized
gcuguguucaucuuggugcaaag

SEQ ID NO: 59229 - RNA, 23 nt, Artificial Sequence
  Chemically synthesized
uuguuuccuaaagcaucuugcau

SEQ ID NO: 59230 - RNA, 23 nt, Artificial Sequence
  Chemically synthesized
uguuuccuaaagcaucuugcauc

SEQ ID NO: 59231 - RNA, 23 nt, Artificial Sequence
  Chemically synthesized
guuuccuaaagcaucuugcaucu

SEQ ID NO: 59232 - RNA, 23 nt, Artificial Sequence
  Chemically synthesized
aagaagaaucuccggguuguuuu

SEQ ID NO: 59233 - RNA, 23 nt, Artificial Sequence
  Chemically synthesized
ggagaggaugcccuuuuccauca

SEQ ID NO: 59234 - RNA, 23 nt, Artificial Sequence
  Chemically synthesized
gagaggaugcccuuuuccaucau

SEQ ID NO: 59235 - RNA, 23 nt, Artificial Sequence
  Chemically synthesized
agaggaugcccuuuuccaucaug

SEQ ID NO: 59236 - RNA, 23 nt, Artificial Sequence
  Chemically synthesized
accauggucgaccuuuaggagac

SEQ ID NO: 59237 - RNA, 23 nt, Artificial Sequence
  Chemically synthesized
ccauggucgaccuuuaggagacc

SEQ ID NO: 59238 - RNA, 23 nt, Artificial Sequence
  Chemically synthesized
cauggucgaccuuuaggagaccg

SEQ ID NO: 59239 - RNA, 23 nt, Artificial Sequence
  Chemically synthesized
auggucgaccuuuaggagaccgc

SEQ ID NO: 59240 - RNA, 23 nt, Artificial Sequence
  Chemically synthesized
uggucgaccuuuaggagaccgca

SEQ ID NO: 59241 - RNA, 23 nt, Artificial Sequence
  Chemically synthesized
gugaccagcuguguucaucuugg

SEQ ID NO: 59242 - RNA, 23 nt, Artificial Sequence
  Chemically synthesized
uuguggagaggaugcccuuuucc

SEQ ID NO: 59243 - RNA, 23 nt, Artificial Sequence
  Chemically synthesized
uguggagaggaugcccuuuucca

SEQ ID NO: 59244 - RNA, 23 nt, Artificial Sequence
  Chemically synthesized
guggagaggaugcccuuuuccau

SEQ ID NO: 59245 - RNA, 23 nt, Artificial Sequence
  Chemically synthesized
uggagaggaugcccuuuuccauc

SEQ ID NO: 59246 - RNA, 23 nt, Artificial Sequence
  Chemically synthesized
cuguguucaucuuggugcaaaga

SEQ ID NO: 59247 - RNA, 23 nt, Artificial Sequence
  Chemically synthesized
uguguucaucuuggugcaaagac

SEQ ID NO: 59248 - RNA, 23 nt, Artificial Sequence
  Chemically synthesized
uuuccuaaagcaucuugcaucug

SEQ ID NO: 59249 - RNA, 23 nt, Artificial Sequence
  Chemically synthesized
auucucccugcaaguucaagaag

SEQ ID NO: 59250 - RNA, 23 nt, Artificial Sequence
  Chemically synthesized
uucucccugcaaguucaagaagu

SEQ ID NO: 59251 - RNA, 23 nt, Artificial Sequence
  Chemically synthesized
acuuucccaccugcuugcauucu

SEQ ID NO: 59252 - RNA, 23 nt, Artificial Sequence
  Chemically synthesized
uuucccaccugcuugcauucuga

SEQ ID NO: 59253 - RNA, 23 nt, Artificial Sequence
  Chemically synthesized
aacccuccacaaccauguccuga

SEQ ID NO: 59254 - RNA, 23 nt, Artificial Sequence
  Chemically synthesized
cugauaguucuuuaauacaaccu

SEQ ID NO: 59255 - RNA, 23 nt, Artificial Sequence
  Chemically synthesized
uucgaguuggcuguugcagguuu

SEQ ID NO: 59256 - RNA, 23 nt, Artificial Sequence
  Chemically synthesized
guacagcaucgagauagcacuga

SEQ ID NO: 59257 - RNA, 23 nt, Artificial Sequence
  Chemically synthesized
cauucuccguggcaguaaaaggc

SEQ ID NO: 59258 - RNA, 23 nt, Artificial Sequence
  Chemically synthesized
aaagagcguccacauggaaaaac

SEQ ID NO: 59259 - RNA, 23 nt, Artificial Sequence
  Chemically synthesized
uuuccuaaagcaucuugcaucug

SEQ ID NO: 59260 - RNA, 23 nt, Artificial Sequence
  Chemically synthesized
aucuuggugcaaagaccugcuua

SEQ ID NO: 59261 - RNA, 23 nt, Artificial Sequence
  Chemically synthesized
cuugcaucuguucucggaaaacc

SEQ ID NO: 59262 - RNA, 23 nt, Artificial Sequence
  Chemically synthesized
uuguguuuggcuugacguuuuuc

SEQ ID NO: 59263 - RNA, 23 nt, Artificial Sequence
  Chemically synthesized
uuggagacaccuuguuucuccuc

SEQ ID NO: 59264 - RNA, 23 nt, Artificial Sequence
  Chemically synthesized
uuggugcaaagaccugcuuaucc

SEQ ID NO: 59265 - RNA, 23 nt, Artificial Sequence
  Chemically synthesized
caaagggugucucuuacagcugg

SEQ ID NO: 59266 - RNA, 23 nt, Artificial Sequence
  Chemically synthesized
aaacucuggucaaaggaccuggc

SEQ ID NO: 59267 - RNA, 23 nt, Artificial Sequence
  Chemically synthesized
uuccaccacgaauccaugguugg

SEQ ID NO: 59268 - RNA, 23 nt, Artificial Sequence
  Chemically synthesized
aagcucugcugaggugauaaacu

SEQ ID NO: 59269 - RNA, 23 nt, Artificial Sequence
  Chemically synthesized
uugaccaacgucugaacaauggc

SEQ ID NO: 59270 - RNA, 23 nt, Artificial Sequence
  Chemically synthesized
uucuccguggcaguaaaaggcgu

SEQ ID NO: 59271 - RNA, 23 nt, Artificial Sequence
  Chemically synthesized
uaaggcguuuccgcuguuugugu

SEQ ID NO: 59272 - RNA, 23 nt, Artificial Sequence
  Chemically synthesized
ugcugaggugauaaacuccuccg

SEQ ID NO: 59273 - RNA, 23 nt, Artificial Sequence
  Chemically synthesized
uuucugguaguucuuccaaagau

SEQ ID NO: 59274 - RNA, 23 nt, Artificial Sequence
  Chemically synthesized
auucuucaugguggaagcugcgc

SEQ ID NO: 59275 - RNA, 23 nt, Artificial Sequence
  Chemically synthesized
uaacaugucucuuggagacaccu

SEQ ID NO: 59276 - RNA, 23 nt, Artificial Sequence
  Chemically synthesized
uucggugauggaaacugcuauug

SEQ ID NO: 59277 - RNA, 23 nt, Artificial Sequence
  Chemically synthesized
ugcaucuguucucggaaaaccug

SEQ ID NO: 59278 - RNA, 23 nt, Artificial Sequence
  Chemically synthesized
uuucaggccgaacaugcugagca

SEQ ID NO: 59279 - RNA, 23 nt, Artificial Sequence
  Chemically synthesized
aaaacucuggucaaaggaccugg

SEQ ID NO: 59280 - RNA, 23 nt, Artificial Sequence
  Chemically synthesized
ucucggaaaaccugaagcucugc

SEQ ID NO: 59281 - RNA, 23 nt, Artificial Sequence
  Chemically synthesized
cugcugaggugauaaacuccucc

SEQ ID NO: 59282 - RNA, 23 nt, Artificial Sequence
  Chemically synthesized
ucugguaguucuuccaaagauuc

SEQ ID NO: 59283 - RNA, 23 nt, Artificial Sequence
  Chemically synthesized
ucucuguuucaggccgaacaugc

SEQ ID NO: 59284 - RNA, 23 nt, Artificial Sequence
  Chemically synthesized
uacagcuggacuuaaggcguuuc

SEQ ID NO: 59285 - RNA, 23 nt, Artificial Sequence
  Chemically synthesized
uuaaggcguuuccgcuguuugug

SEQ ID NO: 59286 - RNA, 23 nt, Artificial Sequence
  Chemically synthesized
uuguggagaggaugcccuuuucc

SEQ ID NO: 59287 - RNA, 23 nt, Artificial Sequence
  Chemically synthesized
ucuuggagacaccuuguuucucc

SEQ ID NO: 59288 - RNA, 23 nt, Artificial Sequence
  Chemically synthesized
cuuccaccacgaauccaugguug

SEQ ID NO: 59289 - RNA, 23 nt, Artificial Sequence
  Chemically synthesized
cugaggugauaaacuccuccgug

SEQ ID NO: 59290 - RNA, 23 nt, Artificial Sequence
  Chemically synthesized
uuuucacgcugggaacagcgucu

SEQ ID NO: 59291 - RNA, 23 nt, Artificial Sequence
  Chemically synthesized
aagauucuucaugguggaagcug

SEQ ID NO: 59292 - RNA, 23 nt, Artificial Sequence
  Chemically synthesized
uacagcaucgagauagcacugag

SEQ ID NO: 59293 - RNA, 23 nt, Artificial Sequence
  Chemically synthesized
aagggugucucuuacagcuggac

SEQ ID NO: 59294 - RNA, 23 nt, Artificial Sequence
  Chemically synthesized
uggccaaaaguuacuagcaaugg

SEQ ID NO: 59295 - RNA, 23 nt, Artificial Sequence
  Chemically synthesized
uucaucuuggugcaaagaccugc

SEQ ID NO: 59296 - RNA, 23 nt, Artificial Sequence
  Chemically synthesized
aacaugucucuuggagacaccuu

SEQ ID NO: 59297 - RNA, 23 nt, Artificial Sequence
  Chemically synthesized
cucuuggagacaccuuguuucuc

SEQ ID NO: 59298 - RNA, 23 nt, Artificial Sequence
  Chemically synthesized
uauuaauucggugauggaaacug

SEQ ID NO: 59299 - RNA, 23 nt, Artificial Sequence
  Chemically synthesized
guugaccaacgucugaacaaugg

SEQ ID NO: 59300 - RNA, 23 nt, Artificial Sequence
  Chemically synthesized
guccacguacaaagggugucucu

SEQ ID NO: 59301 - RNA, 23 nt, Artificial Sequence
  Chemically synthesized
uuggcuguugcagguuuuaugau

SEQ ID NO: 59302 - RNA, 23 nt, Artificial Sequence
  Chemically synthesized
gugauggaaacugcuauuguuuc

SEQ ID NO: 59303 - RNA, 23 nt, Artificial Sequence
  Chemically synthesized
ugauggaaacugcuauuguuucc

SEQ ID NO: 59304 - RNA, 23 nt, Artificial Sequence
  Chemically synthesized
ugcgauacaggucuagcauguag

SEQ ID NO: 59305 - RNA, 23 nt, Artificial Sequence
  Chemically synthesized
agcaucgagauagcacugaguuc

SEQ ID NO: 59306 - RNA, 23 nt, Artificial Sequence
  Chemically synthesized
agaguuaacagaguugaccaacg

SEQ ID NO: 59307 - RNA, 23 nt, Artificial Sequence
  Chemically synthesized
auucuccguggcaguaaaaggcg

SEQ ID NO: 59308 - RNA, 23 nt, Artificial Sequence
  Chemically synthesized
aaguccacguacaaagggugucu

SEQ ID NO: 59309 - RNA, 23 nt, Artificial Sequence
  Chemically synthesized
gucucuuggagacaccuuguuuc

SEQ ID NO: 59310 - RNA, 23 nt, Artificial Sequence
  Chemically synthesized
cucugcugaggugauaaacuccu

SEQ ID NO: 59311 - RNA, 23 nt, Artificial Sequence
  Chemically synthesized
gaagaaucuccggguuguuuucc

SEQ ID NO: 59312 - RNA, 23 nt, Artificial Sequence
  Chemically synthesized
agauucuucaugguggaagcugc

SEQ ID NO: 59313 - RNA, 23 nt, Artificial Sequence
  Chemically synthesized
auggccuuaucugugaccagcug

SEQ ID NO: 59314 - RNA, 23 nt, Artificial Sequence
  Chemically synthesized
ugguguccaaaagucuggucacg

SEQ ID NO: 59315 - RNA, 23 nt, Artificial Sequence
  Chemically synthesized
ucggugauggaaacugcuauugu

SEQ ID NO: 59316 - RNA, 23 nt, Artificial Sequence
  Chemically synthesized
aaaccugaagcucugcugaggug

SEQ ID NO: 59317 - RNA, 23 nt, Artificial Sequence
  Chemically synthesized
agagcguccacauggaaaaacuc

SEQ ID NO: 59318 - RNA, 23 nt, Artificial Sequence
  Chemically synthesized
gagcguccacauggaaaaacucu

SEQ ID NO: 59319 - RNA, 23 nt, Artificial Sequence
  Chemically synthesized
ugaccaacgucugaacaauggca

SEQ ID NO: 59320 - RNA, 23 nt, Artificial Sequence
  Chemically synthesized
ucucuuacagcuggacuuaaggc

SEQ ID NO: 59321 - RNA, 23 nt, Artificial Sequence
  Chemically synthesized
gugaccagcuguguucaucuugg

SEQ ID NO: 59322 - RNA, 23 nt, Artificial Sequence
  Chemically synthesized
guucaucuuggugcaaagaccug

SEQ ID NO: 59323 - RNA, 23 nt, Artificial Sequence
  Chemically synthesized
agaccugcuuauccuaacauguc

SEQ ID NO: 59324 - RNA, 23 nt, Artificial Sequence
  Chemically synthesized
ucuuuucacgcugggaacagcgu

SEQ ID NO: 59325 - RNA, 23 nt, Artificial Sequence
  Chemically synthesized
ucugauucaccaaccuggugucc

SEQ ID NO: 59326 - RNA, 23 nt, Artificial Sequence
  Chemically synthesized
uuguuuccuaaagcaucuugcau

SEQ ID NO: 59327 - RNA, 23 nt, Artificial Sequence
  Chemically synthesized
aaccugaagcucugcugagguga

SEQ ID NO: 59328 - RNA, 23 nt, Artificial Sequence
  Chemically synthesized
uuuguggagaggaugcccuuuuc

SEQ ID NO: 59329 - RNA, 23 nt, Artificial Sequence
  Chemically synthesized
uguggagaggaugcccuuuucca

SEQ ID NO: 59330 - RNA, 23 nt, Artificial Sequence
  Chemically synthesized
aaaaccugaagcucugcugaggu

SEQ ID NO: 59331 - RNA, 23 nt, Artificial Sequence
  Chemically synthesized
aagcagcaacgcuagaagacagc

SEQ ID NO: 59332 - RNA, 23 nt, Artificial Sequence
  Chemically synthesized
gauucuucaugguggaagcugcg

SEQ ID NO: 59333 - RNA, 23 nt, Artificial Sequence
  Chemically synthesized
cucuuacagcuggacuuaaggcg

SEQ ID NO: 59334 - RNA, 23 nt, Artificial Sequence
  Chemically synthesized
cugauucaccaaccuggugucca

SEQ ID NO: 59335 - RNA, 23 nt, Artificial Sequence
  Chemically synthesized
uacaaagggugucucuuacagcu

SEQ ID NO: 59336 - RNA, 23 nt, Artificial Sequence
  Chemically synthesized
uguguucaucuuggugcaaagac

SEQ ID NO: 59337 - RNA, 23 nt, Artificial Sequence
  Chemically synthesized
uucuucaugguggaagcugcgca

SEQ ID NO: 59338 - RNA, 23 nt, Artificial Sequence
  Chemically synthesized
ucagccagaggaaaagggcauuc

SEQ ID NO: 59339 - RNA, 23 nt, Artificial Sequence
  Chemically synthesized
gcggaguuuuaaacuuuaaauag

SEQ ID NO: 59340 - RNA, 23 nt, Artificial Sequence
  Chemically synthesized
agcggaguuuuaaacuuuaaaua

SEQ ID NO: 59341 - RNA, 23 nt, Artificial Sequence
  Chemically synthesized
cagcggaguuuuaaacuuuaaau

SEQ ID NO: 59342 - RNA, 23 nt, Artificial Sequence
  Chemically synthesized
gcagcggaguuuuaaacuuuaaa

SEQ ID NO: 59343 - RNA, 23 nt, Artificial Sequence
  Chemically synthesized
agcagcggaguuuuaaacuuuaa

SEQ ID NO: 59344 - RNA, 23 nt, Artificial Sequence
  Chemically synthesized
ucagcuacauaaacaguuuugua

SEQ ID NO: 59345 - RNA, 23 nt, Artificial Sequence
  Chemically synthesized
gucagcuacauaaacaguuuugu

SEQ ID NO: 59346 - RNA, 23 nt, Artificial Sequence
  Chemically synthesized
ugucagcuacauaaacaguuuug

SEQ ID NO: 59347 - RNA, 23 nt, Artificial Sequence
  Chemically synthesized
augucagcuacauaaacaguuuu

SEQ ID NO: 59348 - RNA, 23 nt, Artificial Sequence
  Chemically synthesized
caugucagcuacauaaacaguuu

SEQ ID NO: 59349 - RNA, 23 nt, Artificial Sequence
  Chemically synthesized
gaaaaaaggugcuguagaaagug

SEQ ID NO: 59350 - RNA, 23 nt, Artificial Sequence
  Chemically synthesized
agaaaaaaggugcuguagaaagu

SEQ ID NO: 59351 - RNA, 23 nt, Artificial Sequence
  Chemically synthesized
aagaaaaaaggugcuguagaaag

SEQ ID NO: 59352 - RNA, 23 nt, Artificial Sequence
  Chemically synthesized
gaagaaaaaaggugcuguagaaa

SEQ ID NO: 59353 - RNA, 23 nt, Artificial Sequence
  Chemically synthesized
agaagaaaaaaggugcuguagaa

SEQ ID NO: 59354 - RNA, 23 nt, Artificial Sequence
  Chemically synthesized
gaaccuuucucauggauuuuugu

SEQ ID NO: 59355 - RNA, 23 nt, Artificial Sequence
  Chemically synthesized
ugaaccuuucucauggauuuuug

SEQ ID NO: 59356 - RNA, 23 nt, Artificial Sequence
  Chemically synthesized
uugaaccuuucucauggauuuuu

SEQ ID NO: 59357 - RNA, 23 nt, Artificial Sequence
  Chemically synthesized
uuugaaccuuucucauggauuuu

SEQ ID NO: 59358 - RNA, 23 nt, Artificial Sequence
  Chemically synthesized
auuugaaccuuucucauggauuu

SEQ ID NO: 59359 - RNA, 23 nt, Artificial Sequence
  Chemically synthesized
gagaagaaaaaaggugcuguaga

SEQ ID NO: 59360 - RNA, 23 nt, Artificial Sequence
  Chemically synthesized
uggagaagaaaaaaggugcugua

SEQ ID NO: 59361 - RNA, 23 nt, Artificial Sequence
  Chemically synthesized
gccuuuucauuuuacuucauccu

SEQ ID NO: 59362 - RNA, 23 nt, Artificial Sequence
  Chemically synthesized
ugccuuuucauuuuacuucaucc

SEQ ID NO: 59363 - RNA, 23 nt, Artificial Sequence
  Chemically synthesized
uugccuuuucauuuuacuucauc

SEQ ID NO: 59364 - RNA, 23 nt, Artificial Sequence
  Chemically synthesized
cuugccuuuucauuuuacuucau

SEQ ID NO: 59365 - RNA, 23 nt, Artificial Sequence
  Chemically synthesized
acuugccuuuucauuuuacuuca

SEQ ID NO: 59366 - RNA, 23 nt, Artificial Sequence
  Chemically synthesized
cagcuacauaaacaguuuuguac

SEQ ID NO: 59367 - RNA, 23 nt, Artificial Sequence
  Chemically synthesized
gcaugucagcuacauaaacaguu

SEQ ID NO: 59368 - RNA, 23 nt, Artificial Sequence
  Chemically synthesized
accuuucucauggauuuuugugg

SEQ ID NO: 59369 - RNA, 23 nt, Artificial Sequence
  Chemically synthesized
aaccuuucucauggauuuuugug

SEQ ID NO: 59370 - RNA, 23 nt, Artificial Sequence
  Chemically synthesized
ggauucaaagaacuuagauuaua

SEQ ID NO: 59371 - RNA, 23 nt, Artificial Sequence
  Chemically synthesized
uggauucaaagaacuuagauuau

SEQ ID NO: 59372 - RNA, 23 nt, Artificial Sequence
  Chemically synthesized
guggauucaaagaacuuagauua

SEQ ID NO: 59373 - RNA, 23 nt, Artificial Sequence
  Chemically synthesized
aguggauucaaagaacuuagauu

SEQ ID NO: 59374 - RNA, 23 nt, Artificial Sequence
  Chemically synthesized
uaguggauucaaagaacuuagau

SEQ ID NO: 59375 - RNA, 23 nt, Artificial Sequence
  Chemically synthesized
caauuguggagaagaaaaaaggu

SEQ ID NO: 59376 - RNA, 23 nt, Artificial Sequence
  Chemically synthesized
ucaauuguggagaagaaaaaagg

SEQ ID NO: 59377 - RNA, 23 nt, Artificial Sequence
  Chemically synthesized
cucaauuguggagaagaaaaaag

SEQ ID NO: 59378 - RNA, 23 nt, Artificial Sequence
  Chemically synthesized
acucaauuguggagaagaaaaaa

SEQ ID NO: 59379 - RNA, 23 nt, Artificial Sequence
  Chemically synthesized
cacucaauuguggagaagaaaaa

SEQ ID NO: 59380 - RNA, 23 nt, Artificial Sequence
  Chemically synthesized
gagaucuagauacaggcuugaaa

SEQ ID NO: 59381 - RNA, 23 nt, Artificial Sequence
  Chemically synthesized
ggagaucuagauacaggcuugaa

SEQ ID NO: 59382 - RNA, 23 nt, Artificial Sequence
  Chemically synthesized
uggagaucuagauacaggcuuga

SEQ ID NO: 59383 - RNA, 23 nt, Artificial Sequence
  Chemically synthesized
cuggagaucuagauacaggcuug

SEQ ID NO: 59384 - RNA, 23 nt, Artificial Sequence
  Chemically synthesized
ccuggagaucuagauacaggcuu

SEQ ID NO: 59385 - RNA, 23 nt, Artificial Sequence
  Chemically synthesized
cagcagcggaguuuuaaacuuua

SEQ ID NO: 59386 - RNA, 23 nt, Artificial Sequence
  Chemically synthesized
acagcagcggaguuuuaaacuuu

SEQ ID NO: 59387 - RNA, 23 nt, Artificial Sequence
  Chemically synthesized
aacagcagcggaguuuuaaacuu

SEQ ID NO: 59388 - RNA, 23 nt, Artificial Sequence
  Chemically synthesized
cgaaccuacaucaucaguauccu

SEQ ID NO: 59389 - RNA, 23 nt, Artificial Sequence
  Chemically synthesized
gcgaaccuacaucaucaguaucc

SEQ ID NO: 59390 - RNA, 23 nt, Artificial Sequence
  Chemically synthesized
ugcgaaccuacaucaucaguauc

SEQ ID NO: 59391 - RNA, 23 nt, Artificial Sequence
  Chemically synthesized
cugcgaaccuacaucaucaguau

SEQ ID NO: 59392 - RNA, 23 nt, Artificial Sequence
  Chemically synthesized
gcugcgaaccuacaucaucagua

SEQ ID NO: 59393 - RNA, 23 nt, Artificial Sequence
  Chemically synthesized
ccagcaacuuugauguuugcacu

SEQ ID NO: 59394 - RNA, 23 nt, Artificial Sequence
  Chemically synthesized
accagcaacuuugauguuugcac

SEQ ID NO: 59395 - RNA, 23 nt, Artificial Sequence
  Chemically synthesized
gaccagcaacuuugauguuugca

SEQ ID NO: 59396 - RNA, 23 nt, Artificial Sequence
  Chemically synthesized
ugaccagcaacuuugauguuugc

SEQ ID NO: 59397 - RNA, 23 nt, Artificial Sequence
  Chemically synthesized
gugaccagcaacuuugauguuug

SEQ ID NO: 59398 - RNA, 23 nt, Artificial Sequence
  Chemically synthesized
ccaucacuuuuucaucauuccuc

SEQ ID NO: 59399 - RNA, 23 nt, Artificial Sequence
  Chemically synthesized
accaucacuuuuucaucauuccu

SEQ ID NO: 59400 - RNA, 23 nt, Artificial Sequence
  Chemically synthesized
uaccaucacuuuuucaucauucc

SEQ ID NO: 59401 - RNA, 23 nt, Artificial Sequence
  Chemically synthesized
uuaccaucacuuuuucaucauuc

SEQ ID NO: 59402 - RNA, 23 nt, Artificial Sequence
  Chemically synthesized
auuaccaucacuuuuucaucauu

SEQ ID NO: 59403 - RNA, 23 nt, Artificial Sequence
  Chemically synthesized
ccauccacuugcacaauaucauu

SEQ ID NO: 59404 - RNA, 23 nt, Artificial Sequence
  Chemically synthesized
uccauccacuugcacaauaucau

SEQ ID NO: 59405 - RNA, 23 nt, Artificial Sequence
  Chemically synthesized
uuccauccacuugcacaauauca

SEQ ID NO: 59406 - RNA, 23 nt, Artificial Sequence
  Chemically synthesized
uuuccauccacuugcacaauauc

SEQ ID NO: 59407 - RNA, 23 nt, Artificial Sequence
  Chemically synthesized
uuuuccauccacuugcacaauau

SEQ ID NO: 59408 - RNA, 23 nt, Artificial Sequence
  Chemically synthesized
ggacuugugcuacuauauuuuuu

SEQ ID NO: 59409 - RNA, 23 nt, Artificial Sequence
  Chemically synthesized
uggacuugugcuacuauauuuuu

SEQ ID NO: 59410 - RNA, 23 nt, Artificial Sequence
  Chemically synthesized
auggacuugugcuacuauauuuu

SEQ ID NO: 59411 - RNA, 23 nt, Artificial Sequence
  Chemically synthesized
aauggacuugugcuacuauauuu

SEQ ID NO: 59412 - RNA, 23 nt, Artificial Sequence
  Chemically synthesized
caauggacuugugcuacuauauu

SEQ ID NO: 59413 - RNA, 23 nt, Artificial Sequence
  Chemically synthesized
ucccuguguauccuauuauggau

SEQ ID NO: 59414 - RNA, 23 nt, Artificial Sequence
  Chemically synthesized
uucccuguguauccuauuaugga

SEQ ID NO: 59415 - RNA, 23 nt, Artificial Sequence
  Chemically synthesized
uuucccuguguauccuauuaugg

SEQ ID NO: 59416 - RNA, 23 nt, Artificial Sequence
  Chemically synthesized
uuuucccuguguauccuauuaug

SEQ ID NO: 59417 - RNA, 23 nt, Artificial Sequence
  Chemically synthesized
uuuuucccuguguauccuauuau

SEQ ID NO: 59418 - RNA, 23 nt, Artificial Sequence
  Chemically synthesized
ccaauaugguguuuacauuauau

SEQ ID NO: 59419 - RNA, 23 nt, Artificial Sequence
  Chemically synthesized
gccaauaugguguuuacauuaua

SEQ ID NO: 59420 - RNA, 23 nt, Artificial Sequence
  Chemically synthesized
ggccaauaugguguuuacauuau

SEQ ID NO: 59421 - RNA, 23 nt, Artificial Sequence
  Chemically synthesized
gggccaauaugguguuuacauua

SEQ ID NO: 59422 - RNA, 23 nt, Artificial Sequence
  Chemically synthesized
ugggccaauaugguguuuacauu

SEQ ID NO: 59423 - RNA, 23 nt, Artificial Sequence
  Chemically synthesized
agcuacuacucacauucauuuaa

SEQ ID NO: 59424 - RNA, 23 nt, Artificial Sequence
  Chemically synthesized
cagcuacuacucacauucauuua

SEQ ID NO: 59425 - RNA, 23 nt, Artificial Sequence
  Chemically synthesized
ucagcuacuacucacauucauuu

SEQ ID NO: 59426 - RNA, 23 nt, Artificial Sequence
  Chemically synthesized
cucagcuacuacucacauucauu

SEQ ID NO: 59427 - RNA, 23 nt, Artificial Sequence
  Chemically synthesized
ccucagcuacuacucacauucau

SEQ ID NO: 59428 - RNA, 23 nt, Artificial Sequence
  Chemically synthesized
gacuugugcuacuauauuuuuuu

SEQ ID NO: 59429 - RNA, 23 nt, Artificial Sequence
  Chemically synthesized
ggcuuagaaaacacaaagacauu

SEQ ID NO: 59430 - RNA, 23 nt, Artificial Sequence
  Chemically synthesized
aggcuuagaaaacacaaagacau

SEQ ID NO: 59431 - RNA, 23 nt, Artificial Sequence
  Chemically synthesized
gaggcuuagaaaacacaaagaca

SEQ ID NO: 59432 - RNA, 23 nt, Artificial Sequence
  Chemically synthesized
ugaggcuuagaaaacacaaagac

SEQ ID NO: 59433 - RNA, 23 nt, Artificial Sequence
  Chemically synthesized
augaggcuuagaaaacacaaaga

SEQ ID NO: 59434 - RNA, 23 nt, Artificial Sequence
  Chemically synthesized
agaucuagauacaggcuugaaag

SEQ ID NO: 59435 - RNA, 23 nt, Artificial Sequence
  Chemically synthesized
ggcuaauuacagugcagaacaaa

SEQ ID NO: 59436 - RNA, 23 nt, Artificial Sequence
  Chemically synthesized
gggcuaauuacagugcagaacaa

SEQ ID NO: 59437 - RNA, 23 nt, Artificial Sequence
  Chemically synthesized
ugggcuaauuacagugcagaaca

SEQ ID NO: 59438 - RNA, 23 nt, Artificial Sequence
  Chemically synthesized
cugggcuaauuacagugcagaac

SEQ ID NO: 59439 - RNA, 23 nt, Artificial Sequence
  Chemically synthesized
acugggcuaauuacagugcagaa

SEQ ID NO: 59440 - RNA, 23 nt, Artificial Sequence
  Chemically synthesized
ucagcacuuuucuuucauuaggg

SEQ ID NO: 59441 - RNA, 23 nt, Artificial Sequence
  Chemically synthesized
aucagcacuuuucuuucauuagg

SEQ ID NO: 59442 - RNA, 23 nt, Artificial Sequence
  Chemically synthesized
uaucagcacuuuucuuucauuag

SEQ ID NO: 59443 - RNA, 23 nt, Artificial Sequence
  Chemically synthesized
guaucagcacuuuucuuucauua

SEQ ID NO: 59444 - RNA, 23 nt, Artificial Sequence
  Chemically synthesized
gguaucagcacuuuucuuucauu

SEQ ID NO: 59445 - RNA, 23 nt, Artificial Sequence
  Chemically synthesized
agugaccagcaacuuugauguuu

SEQ ID NO: 59446 - RNA, 23 nt, Artificial Sequence
  Chemically synthesized
ggauacugguuuuguuaauuaug

SEQ ID NO: 59447 - RNA, 23 nt, Artificial Sequence
  Chemically synthesized
uggauacugguuuuguuaauuau

SEQ ID NO: 59448 - RNA, 23 nt, Artificial Sequence
  Chemically synthesized
auggauacugguuuuguuaauua

SEQ ID NO: 59449 - RNA, 23 nt, Artificial Sequence
  Chemically synthesized
uauggauacugguuuuguuaauu

SEQ ID NO: 59450 - RNA, 23 nt, Artificial Sequence
  Chemically synthesized
uuauggauacugguuuuguuaau

SEQ ID NO: 59451 - RNA, 23 nt, Artificial Sequence
  Chemically synthesized
cccuguguauccuauuauggaua

SEQ ID NO: 59452 - RNA, 23 nt, Artificial Sequence
  Chemically synthesized
cuaaaauguuuuucccuguguau

SEQ ID NO: 59453 - RNA, 23 nt, Artificial Sequence
  Chemically synthesized
ccuaaaauguuuuucccugugua

SEQ ID NO: 59454 - RNA, 23 nt, Artificial Sequence
  Chemically synthesized
uccuaaaauguuuuucccugugu

SEQ ID NO: 59455 - RNA, 23 nt, Artificial Sequence
  Chemically synthesized
cuccuaaaauguuuuucccugug

SEQ ID NO: 59456 - RNA, 23 nt, Artificial Sequence
  Chemically synthesized
ucuccuaaaauguuuuucccugu

SEQ ID NO: 59457 - RNA, 23 nt, Artificial Sequence
  Chemically synthesized
ccuuucucauggauuuuuguggu

SEQ ID NO: 59458 - RNA, 23 nt, Artificial Sequence
  Chemically synthesized
gcccacagaauaagauuuuccau

SEQ ID NO: 59459 - RNA, 23 nt, Artificial Sequence
  Chemically synthesized
ggcccacagaauaagauuuucca

SEQ ID NO: 59460 - RNA, 23 nt, Artificial Sequence
  Chemically synthesized
aggcccacagaauaagauuuucc

SEQ ID NO: 59461 - RNA, 23 nt, Artificial Sequence
  Chemically synthesized
aaggcccacagaauaagauuuuc

SEQ ID NO: 59462 - RNA, 23 nt, Artificial Sequence
  Chemically synthesized
caaggcccacagaauaagauuuu

SEQ ID NO: 59463 - RNA, 23 nt, Artificial Sequence
  Chemically synthesized
ugaacaucuuaggucuuuucaac

SEQ ID NO: 59464 - RNA, 23 nt, Artificial Sequence
  Chemically synthesized
cugaacaucuuaggucuuuucaa

SEQ ID NO: 59465 - RNA, 23 nt, Artificial Sequence
  Chemically synthesized
ccugaacaucuuaggucuuuuca

SEQ ID NO: 59466 - RNA, 23 nt, Artificial Sequence
  Chemically synthesized
uccugaacaucuuaggucuuuuc

SEQ ID NO: 59467 - RNA, 23 nt, Artificial Sequence
  Chemically synthesized
uuccugaacaucuuaggucuuuu

SEQ ID NO: 59468 - RNA, 23 nt, Artificial Sequence
  Chemically synthesized
ugguaauuguggcuaaauauuuu

SEQ ID NO: 59469 - RNA, 23 nt, Artificial Sequence
  Chemically synthesized
gugguaauuguggcuaaauauuu

SEQ ID NO: 59470 - RNA, 23 nt, Artificial Sequence
  Chemically synthesized
ggugguaauuguggcuaaauauu

SEQ ID NO: 59471 - RNA, 23 nt, Artificial Sequence
  Chemically synthesized
gggugguaauuguggcuaaauau

SEQ ID NO: 59472 - RNA, 23 nt, Artificial Sequence
  Chemically synthesized
cgggugguaauuguggcuaaaua

SEQ ID NO: 59473 - RNA, 23 nt, Artificial Sequence
  Chemically synthesized
guggagaagaaaaaaggugcugu

SEQ ID NO: 59474 - RNA, 23 nt, Artificial Sequence
  Chemically synthesized
uguggagaagaaaaaaggugcug

SEQ ID NO: 59475 - RNA, 23 nt, Artificial Sequence
  Chemically synthesized
uuguggagaagaaaaaaggugcu

SEQ ID NO: 59476 - RNA, 23 nt, Artificial Sequence
  Chemically synthesized
ucuagauacaggcuugaaagcau

SEQ ID NO: 59477 - RNA, 23 nt, Artificial Sequence
  Chemically synthesized
aucuagauacaggcuugaaagca

SEQ ID NO: 59478 - RNA, 23 nt, Artificial Sequence
  Chemically synthesized
gaucuagauacaggcuugaaagc

SEQ ID NO: 59479 - RNA, 23 nt, Artificial Sequence
  Chemically synthesized
accuggagaucuagauacaggcu

SEQ ID NO: 59480 - RNA, 23 nt, Artificial Sequence
  Chemically synthesized
ucauuuuacuucauccuccaagg

SEQ ID NO: 59481 - RNA, 23 nt, Artificial Sequence
  Chemically synthesized
uucauuuuacuucauccuccaag

SEQ ID NO: 59482 - RNA, 23 nt, Artificial Sequence
  Chemically synthesized
uuucauuuuacuucauccuccaa

SEQ ID NO: 59483 - RNA, 23 nt, Artificial Sequence
  Chemically synthesized
uuuucauuuuacuucauccucca

SEQ ID NO: 59484 - RNA, 23 nt, Artificial Sequence
  Chemically synthesized
cuuuucauuuuacuucauccucc

SEQ ID NO: 59485 - RNA, 23 nt, Artificial Sequence
  Chemically synthesized
aacugggcuaauuacagugcaga

SEQ ID NO: 59486 - RNA, 23 nt, Artificial Sequence
  Chemically synthesized
caauucuucuugccgcaauuaca

SEQ ID NO: 59487 - RNA, 23 nt, Artificial Sequence
  Chemically synthesized
acaauucuucuugccgcaauuac

SEQ ID NO: 59488 - RNA, 23 nt, Artificial Sequence
  Chemically synthesized
aacaauucuucuugccgcaauua

SEQ ID NO: 59489 - RNA, 23 nt, Artificial Sequence
  Chemically synthesized
aaacaauucuucuugccgcaauu

SEQ ID NO: 59490 - RNA, 23 nt, Artificial Sequence
  Chemically synthesized
gaaacaauucuucuugccgcaau

SEQ ID NO: 59491 - RNA, 23 nt, Artificial Sequence
  Chemically synthesized
gcguuaaggaucggguuaaggga

SEQ ID NO: 59492 - RNA, 23 nt, Artificial Sequence
  Chemically synthesized
ggcguuaaggaucggguuaaggg

SEQ ID NO: 59493 - RNA, 23 nt, Artificial Sequence
  Chemically synthesized
gggcguuaaggaucggguuaagg

SEQ ID NO: 59494 - RNA, 23 nt, Artificial Sequence
  Chemically synthesized
agggcguuaaggaucggguuaag

SEQ ID NO: 59495 - RNA, 23 nt, Artificial Sequence
  Chemically synthesized
aagggcguuaaggaucggguuaa

SEQ ID NO: 59496 - RNA, 23 nt, Artificial Sequence
  Chemically synthesized
cccuggccuugaauaucauugaa

SEQ ID NO: 59497 - RNA, 23 nt, Artificial Sequence
  Chemically synthesized
ucccuggccuugaauaucauuga

SEQ ID NO: 59498 - RNA, 23 nt, Artificial Sequence
  Chemically synthesized
gucccuggccuugaauaucauug

SEQ ID NO: 59499 - RNA, 23 nt, Artificial Sequence
  Chemically synthesized
ugucccuggccuugaauaucauu

SEQ ID NO: 59500 - RNA, 23 nt, Artificial Sequence
  Chemically synthesized
gugucccuggccuugaauaucau

SEQ ID NO: 59501 - RNA, 23 nt, Artificial Sequence
  Chemically synthesized
ugaagcagauugagauaaagaag

SEQ ID NO: 59502 - RNA, 23 nt, Artificial Sequence
  Chemically synthesized
uugaagcagauugagauaaagaa

SEQ ID NO: 59503 - RNA, 23 nt, Artificial Sequence
  Chemically synthesized
cuugaagcagauugagauaaaga

SEQ ID NO: 59504 - RNA, 23 nt, Artificial Sequence
  Chemically synthesized
acuugaagcagauugagauaaag

SEQ ID NO: 59505 - RNA, 23 nt, Artificial Sequence
  Chemically synthesized
cacuugaagcagauugagauaaa

SEQ ID NO: 59506 - RNA, 23 nt, Artificial Sequence
  Chemically synthesized
agcuacauaaacaguuuuguaca

SEQ ID NO: 59507 - RNA, 23 nt, Artificial Sequence
  Chemically synthesized
ugaacuauauguugaagacaucu

SEQ ID NO: 59508 - RNA, 23 nt, Artificial Sequence
  Chemically synthesized
uugaacuauauguugaagacauc

SEQ ID NO: 59509 - RNA, 23 nt, Artificial Sequence
  Chemically synthesized
uuugaacuauauguugaagacau

SEQ ID NO: 59510 - RNA, 23 nt, Artificial Sequence
  Chemically synthesized
auuugaacuauauguugaagaca

SEQ ID NO: 59511 - RNA, 23 nt, Artificial Sequence
  Chemically synthesized
uauuugaacuauauguugaagac

SEQ ID NO: 59512 - RNA, 23 nt, Artificial Sequence
  Chemically synthesized
ggagugaccagcaacuuugaugu

SEQ ID NO: 59513 - RNA, 23 nt, Artificial Sequence
  Chemically synthesized
uggagugaccagcaacuuugaug

SEQ ID NO: 59514 - RNA, 23 nt, Artificial Sequence
  Chemically synthesized
uuggagugaccagcaacuuugau

SEQ ID NO: 59515 - RNA, 23 nt, Artificial Sequence
  Chemically synthesized
uuuggagugaccagcaacuuuga

SEQ ID NO: 59516 - RNA, 23 nt, Artificial Sequence
  Chemically synthesized
uuuuggagugaccagcaacuuug

SEQ ID NO: 59517 - RNA, 23 nt, Artificial Sequence
  Chemically synthesized
cuauuauggauacugguuuuguu

SEQ ID NO: 59518 - RNA, 23 nt, Artificial Sequence
  Chemically synthesized
ccuauuauggauacugguuuugu

SEQ ID NO: 59519 - RNA, 23 nt, Artificial Sequence
  Chemically synthesized
uccuauuauggauacugguuuug

SEQ ID NO: 59520 - RNA, 23 nt, Artificial Sequence
  Chemically synthesized
auccuauuauggauacugguuuu

SEQ ID NO: 59521 - RNA, 23 nt, Artificial Sequence
  Chemically synthesized
uauccuauuauggauacugguuu

SEQ ID NO: 59522 - RNA, 23 nt, Artificial Sequence
  Chemically synthesized
uucuccuaaaauguuuuucccug

SEQ ID NO: 59523 - RNA, 23 nt, Artificial Sequence
  Chemically synthesized
cuacuacucacauucauuuaaug

SEQ ID NO: 59524 - RNA, 23 nt, Artificial Sequence
  Chemically synthesized
gcuacuacucacauucauuuaau

SEQ ID NO: 59525 - RNA, 23 nt, Artificial Sequence
  Chemically synthesized
ucauuccucagcuacuacucaca

SEQ ID NO: 59526 - RNA, 23 nt, Artificial Sequence
  Chemically synthesized
aucauuccucagcuacuacucac

SEQ ID NO: 59527 - RNA, 23 nt, Artificial Sequence
  Chemically synthesized
caucauuccucagcuacuacuca

SEQ ID NO: 59528 - RNA, 23 nt, Artificial Sequence
  Chemically synthesized
ucaucauuccucagcuacuacuc

SEQ ID NO: 59529 - RNA, 23 nt, Artificial Sequence
  Chemically synthesized
uucaucauuccucagcuacuacu

SEQ ID NO: 59530 - RNA, 23 nt, Artificial Sequence
  Chemically synthesized
acaucuuaggucuuuucaacaag

SEQ ID NO: 59531 - RNA, 23 nt, Artificial Sequence
  Chemically synthesized
aacaucuuaggucuuuucaacaa

SEQ ID NO: 59532 - RNA, 23 nt, Artificial Sequence
  Chemically synthesized
cuuccugaacaucuuaggucuuu

SEQ ID NO: 59533 - RNA, 23 nt, Artificial Sequence
  Chemically synthesized
gcgggugguaauuguggcuaaau

SEQ ID NO: 59534 - RNA, 23 nt, Artificial Sequence
  Chemically synthesized
agcgggugguaauuguggcuaaa

SEQ ID NO: 59535 - RNA, 23 nt, Artificial Sequence
  Chemically synthesized
gagcgggugguaauuguggcuaa

SEQ ID NO: 59536 - RNA, 23 nt, Artificial Sequence
  Chemically synthesized
ccacucaauuguggagaagaaaa

SEQ ID NO: 59537 - RNA, 23 nt, Artificial Sequence
  Chemically synthesized
acaugaauuacagccacuagcca

SEQ ID NO: 59538 - RNA, 23 nt, Artificial Sequence
  Chemically synthesized
gacaugaauuacagccacuagcc

SEQ ID NO: 59539 - RNA, 23 nt, Artificial Sequence
  Chemically synthesized
ggacaugaauuacagccacuagc

SEQ ID NO: 59540 - RNA, 23 nt, Artificial Sequence
  Chemically synthesized
uggacaugaauuacagccacuag

SEQ ID NO: 59541 - RNA, 23 nt, Artificial Sequence
  Chemically synthesized
cuggacaugaauuacagccacua

SEQ ID NO: 59542 - RNA, 23 nt, Artificial Sequence
  Chemically synthesized
gcaaaacugggcuaauuacagug

SEQ ID NO: 59543 - RNA, 23 nt, Artificial Sequence
  Chemically synthesized
agcaaaacugggcuaauuacagu

SEQ ID NO: 59544 - RNA, 23 nt, Artificial Sequence
  Chemically synthesized
gagcaaaacugggcuaauuacag

SEQ ID NO: 59545 - RNA, 23 nt, Artificial Sequence
  Chemically synthesized
ugagcaaaacugggcuaauuaca

SEQ ID NO: 59546 - RNA, 23 nt, Artificial Sequence
  Chemically synthesized
gugagcaaaacugggcuaauuac

SEQ ID NO: 59547 - RNA, 23 nt, Artificial Sequence
  Chemically synthesized
ggguccugcagaucauauuugug

SEQ ID NO: 59548 - RNA, 23 nt, Artificial Sequence
  Chemically synthesized
uggguccugcagaucauauuugu

SEQ ID NO: 59549 - RNA, 23 nt, Artificial Sequence
  Chemically synthesized
cuggguccugcagaucauauuug

SEQ ID NO: 59550 - RNA, 23 nt, Artificial Sequence
  Chemically synthesized
ucuggguccugcagaucauauuu

SEQ ID NO: 59551 - RNA, 23 nt, Artificial Sequence
  Chemically synthesized
uucuggguccugcagaucauauu

SEQ ID NO: 59552 - RNA, 23 nt, Artificial Sequence
  Chemically synthesized
cagcacuuuucuuucauuagggg

SEQ ID NO: 59553 - RNA, 23 nt, Artificial Sequence
  Chemically synthesized
gcuacauaaacaguuuuguacaa

SEQ ID NO: 59554 - RNA, 23 nt, Artificial Sequence
  Chemically synthesized
acagaagauuggugaaaaugcug

SEQ ID NO: 59555 - RNA, 23 nt, Artificial Sequence
  Chemically synthesized
cacagaagauuggugaaaaugcu

SEQ ID NO: 59556 - RNA, 23 nt, Artificial Sequence
  Chemically synthesized
ucacagaagauuggugaaaaugc

SEQ ID NO: 59557 - RNA, 23 nt, Artificial Sequence
  Chemically synthesized
aucacagaagauuggugaaaaug

SEQ ID NO: 59558 - RNA, 23 nt, Artificial Sequence
  Chemically synthesized
caucacagaagauuggugaaaau

SEQ ID NO: 59559 - RNA, 23 nt, Artificial Sequence
  Chemically synthesized
gccuuuuuuaaaacucaucacag

SEQ ID NO: 59560 - RNA, 23 nt, Artificial Sequence
  Chemically synthesized
ugccuuuuuuaaaacucaucaca

SEQ ID NO: 59561 - RNA, 23 nt, Artificial Sequence
  Chemically synthesized
augccuuuuuuaaaacucaucac

SEQ ID NO: 59562 - RNA, 23 nt, Artificial Sequence
  Chemically synthesized
aaugccuuuuuuaaaacucauca

SEQ ID NO: 59563 - RNA, 23 nt, Artificial Sequence
  Chemically synthesized
aaaugccuuuuuuaaaacucauc

SEQ ID NO: 59564 - RNA, 23 nt, Artificial Sequence
  Chemically synthesized
gagugaccagcaacuuugauguu

SEQ ID NO: 59565 - RNA, 23 nt, Artificial Sequence
  Chemically synthesized
aauuugaaccuuucucauggauu

SEQ ID NO: 59566 - RNA, 23 nt, Artificial Sequence
  Chemically synthesized
uuucaucauuccucagcuacuac

SEQ ID NO: 59567 - RNA, 23 nt, Artificial Sequence
  Chemically synthesized
uuuucaucauuccucagcuacua

SEQ ID NO: 59568 - RNA, 23 nt, Artificial Sequence
  Chemically synthesized
ccauuguuaaaauuugcacuuug

SEQ ID NO: 59569 - RNA, 23 nt, Artificial Sequence
  Chemically synthesized
uccauuguuaaaauuugcacuuu

SEQ ID NO: 59570 - RNA, 23 nt, Artificial Sequence
  Chemically synthesized
uuccauuguuaaaauuugcacuu

SEQ ID NO: 59571 - RNA, 23 nt, Artificial Sequence
  Chemically synthesized
auuccauuguuaaaauuugcacu

SEQ ID NO: 59572 - RNA, 23 nt, Artificial Sequence
  Chemically synthesized
cauuccauuguuaaaauuugcac

SEQ ID NO: 59573 - RNA, 23 nt, Artificial Sequence
  Chemically synthesized
guccuuaagucccugcuaaaaca

SEQ ID NO: 59574 - RNA, 23 nt, Artificial Sequence
  Chemically synthesized
uguccuuaagucccugcuaaaac

SEQ ID NO: 59575 - RNA, 23 nt, Artificial Sequence
  Chemically synthesized
uuguccuuaagucccugcuaaaa

SEQ ID NO: 59576 - RNA, 23 nt, Artificial Sequence
  Chemically synthesized
auuguccuuaagucccugcuaaa

SEQ ID NO: 59577 - RNA, 23 nt, Artificial Sequence
  Chemically synthesized
gauuguccuuaagucccugcuaa

SEQ ID NO: 59578 - RNA, 23 nt, Artificial Sequence
  Chemically synthesized
guaguggauucaaagaacuuaga

SEQ ID NO: 59579 - RNA, 23 nt, Artificial Sequence
  Chemically synthesized
gcauguugguauuuaaaguagug

SEQ ID NO: 59580 - RNA, 23 nt, Artificial Sequence
  Chemically synthesized
ugcauguugguauuuaaaguagu

SEQ ID NO: 59581 - RNA, 23 nt, Artificial Sequence
  Chemically synthesized
gugcauguugguauuuaaaguag

SEQ ID NO: 59582 - RNA, 23 nt, Artificial Sequence
  Chemically synthesized
ggugcauguugguauuuaaagua

SEQ ID NO: 59583 - RNA, 23 nt, Artificial Sequence
  Chemically synthesized
aggugcauguugguauuuaaagu

SEQ ID NO: 59584 - RNA, 23 nt, Artificial Sequence
  Chemically synthesized
gcuuagaaaacacaaagacauua

SEQ ID NO: 59585 - RNA, 23 nt, Artificial Sequence
  Chemically synthesized
caugaggcuuagaaaacacaaag

SEQ ID NO: 59586 - RNA, 23 nt, Artificial Sequence
  Chemically synthesized
ucaugaggcuuagaaaacacaaa

SEQ ID NO: 59587 - RNA, 23 nt, Artificial Sequence
  Chemically synthesized
ccagguguuaauuuugauccggu

SEQ ID NO: 59588 - RNA, 23 nt, Artificial Sequence
  Chemically synthesized
accagguguuaauuuugauccgg

SEQ ID NO: 59589 - RNA, 23 nt, Artificial Sequence
  Chemically synthesized
caccagguguuaauuuugauccg

SEQ ID NO: 59590 - RNA, 23 nt, Artificial Sequence
  Chemically synthesized
gcaccagguguuaauuuugaucc

SEQ ID NO: 59591 - RNA, 23 nt, Artificial Sequence
  Chemically synthesized
ugcaccagguguuaauuuugauc

SEQ ID NO: 59592 - RNA, 23 nt, Artificial Sequence
  Chemically synthesized
aacuugccuuuucauuuuacuuc

SEQ ID NO: 59593 - RNA, 23 nt, Artificial Sequence
  Chemically synthesized
gcacagccuuuugauuuccccga

SEQ ID NO: 59594 - RNA, 23 nt, Artificial Sequence
  Chemically synthesized
ugcacagccuuuugauuuccccg

SEQ ID NO: 59595 - RNA, 23 nt, Artificial Sequence
  Chemically synthesized
augcacagccuuuugauuucccc

SEQ ID NO: 59596 - RNA, 23 nt, Artificial Sequence
  Chemically synthesized
caugcacagccuuuugauuuccc

SEQ ID NO: 59597 - RNA, 23 nt, Artificial Sequence
  Chemically synthesized
ccaugcacagccuuuugauuucc

SEQ ID NO: 59598 - RNA, 23 nt, Artificial Sequence
  Chemically synthesized
cccaugcacagccuuuugauuuc

SEQ ID NO: 59599 - RNA, 23 nt, Artificial Sequence
  Chemically synthesized
ucccaugcacagccuuuugauuu

SEQ ID NO: 59600 - RNA, 23 nt, Artificial Sequence
  Chemically synthesized
cucccaugcacagccuuuugauu

SEQ ID NO: 59601 - RNA, 23 nt, Artificial Sequence
  Chemically synthesized
acucccaugcacagccuuuugau

SEQ ID NO: 59602 - RNA, 23 nt, Artificial Sequence
  Chemically synthesized
gggucucaaaaauaugcuuauuu

SEQ ID NO: 59603 - RNA, 23 nt, Artificial Sequence
  Chemically synthesized
ugggucucaaaaauaugcuuauu

SEQ ID NO: 59604 - RNA, 23 nt, Artificial Sequence
  Chemically synthesized
gugggucucaaaaauaugcuuau

SEQ ID NO: 59605 - RNA, 23 nt, Artificial Sequence
  Chemically synthesized
ugugggucucaaaaauaugcuua

SEQ ID NO: 59606 - RNA, 23 nt, Artificial Sequence
  Chemically synthesized
cugugggucucaaaaauaugcuu

SEQ ID NO: 59607 - RNA, 23 nt, Artificial Sequence
  Chemically synthesized
acugugggucucaaaaauaugcu

SEQ ID NO: 59608 - RNA, 23 nt, Artificial Sequence
  Chemically synthesized
gacugugggucucaaaaauaugc

SEQ ID NO: 59609 - RNA, 23 nt, Artificial Sequence
  Chemically synthesized
agacugugggucucaaaaauaug

SEQ ID NO: 59610 - RNA, 23 nt, Artificial Sequence
  Chemically synthesized
aagacugugggucucaaaaauau

SEQ ID NO: 59611 - RNA, 23 nt, Artificial Sequence
  Chemically synthesized
gaauaucauugaacucuucuaug

SEQ ID NO: 59612 - RNA, 23 nt, Artificial Sequence
  Chemically synthesized
ugaauaucauugaacucuucuau

SEQ ID NO: 59613 - RNA, 23 nt, Artificial Sequence
  Chemically synthesized
uugaauaucauugaacucuucua

SEQ ID NO: 59614 - RNA, 23 nt, Artificial Sequence
  Chemically synthesized
cuugaauaucauugaacucuucu

SEQ ID NO: 59615 - RNA, 23 nt, Artificial Sequence
  Chemically synthesized
ccuugaauaucauugaacucuuc

SEQ ID NO: 59616 - RNA, 23 nt, Artificial Sequence
  Chemically synthesized
agcaugguaaggugaaaaugcga

SEQ ID NO: 59617 - RNA, 23 nt, Artificial Sequence
  Chemically synthesized
gagcaugguaaggugaaaaugcg

SEQ ID NO: 59618 - RNA, 23 nt, Artificial Sequence
  Chemically synthesized
agagcaugguaaggugaaaaugc

SEQ ID NO: 59619 - RNA, 23 nt, Artificial Sequence
  Chemically synthesized
aagagcaugguaaggugaaaaug

SEQ ID NO: 59620 - RNA, 23 nt, Artificial Sequence
  Chemically synthesized
gaagagcaugguaaggugaaaau

SEQ ID NO: 59621 - RNA, 23 nt, Artificial Sequence
  Chemically synthesized
caaucucucaugugcgcuucugg

SEQ ID NO: 59622 - RNA, 23 nt, Artificial Sequence
  Chemically synthesized
ccaaucucucaugugcgcuucug

SEQ ID NO: 59623 - RNA, 23 nt, Artificial Sequence
  Chemically synthesized
cccaaucucucaugugcgcuucu

SEQ ID NO: 59624 - RNA, 23 nt, Artificial Sequence
  Chemically synthesized
ucccaaucucucaugugcgcuuc

SEQ ID NO: 59625 - RNA, 23 nt, Artificial Sequence
  Chemically synthesized
uucccaaucucucaugugcgcuu

SEQ ID NO: 59626 - RNA, 23 nt, Artificial Sequence
  Chemically synthesized
ggagaguguucuuuauucaauaa

SEQ ID NO: 59627 - RNA, 23 nt, Artificial Sequence
  Chemically synthesized
uggagaguguucuuuauucaaua

SEQ ID NO: 59628 - RNA, 23 nt, Artificial Sequence
  Chemically synthesized
cuggagaguguucuuuauucaau

SEQ ID NO: 59629 - RNA, 23 nt, Artificial Sequence
  Chemically synthesized
ucuggagaguguucuuuauucaa

SEQ ID NO: 59630 - RNA, 23 nt, Artificial Sequence
  Chemically synthesized
uucuggagaguguucuuuauuca

SEQ ID NO: 59631 - RNA, 23 nt, Artificial Sequence
  Chemically synthesized
cggucauguucagcuucauugca

SEQ ID NO: 59632 - RNA, 23 nt, Artificial Sequence
  Chemically synthesized
acggucauguucagcuucauugc

SEQ ID NO: 59633 - RNA, 23 nt, Artificial Sequence
  Chemically synthesized
uacggucauguucagcuucauug

SEQ ID NO: 59634 - RNA, 23 nt, Artificial Sequence
  Chemically synthesized
cuacggucauguucagcuucauu

SEQ ID NO: 59635 - RNA, 23 nt, Artificial Sequence
  Chemically synthesized
acuacggucauguucagcuucau

SEQ ID NO: 59636 - RNA, 23 nt, Artificial Sequence
  Chemically synthesized
uggugaaaaugcugaguaugaca

SEQ ID NO: 59637 - RNA, 23 nt, Artificial Sequence
  Chemically synthesized
uuggugaaaaugcugaguaugac

SEQ ID NO: 59638 - RNA, 23 nt, Artificial Sequence
  Chemically synthesized
auuggugaaaaugcugaguauga

SEQ ID NO: 59639 - RNA, 23 nt, Artificial Sequence
  Chemically synthesized
gauuggugaaaaugcugaguaug

SEQ ID NO: 59640 - RNA, 23 nt, Artificial Sequence
  Chemically synthesized
agauuggugaaaaugcugaguau

SEQ ID NO: 59641 - RNA, 23 nt, Artificial Sequence
  Chemically synthesized
ggauucaguaguacacauacaac

SEQ ID NO: 59642 - RNA, 23 nt, Artificial Sequence
  Chemically synthesized
gaggauucaguaguacacauaca

SEQ ID NO: 59643 - RNA, 23 nt, Artificial Sequence
  Chemically synthesized
agaggauucaguaguacacauac

SEQ ID NO: 59644 - RNA, 23 nt, Artificial Sequence
  Chemically synthesized
aagaggauucaguaguacacaua

SEQ ID NO: 59645 - RNA, 23 nt, Artificial Sequence
  Chemically synthesized
gcacuaagauuuuauuuggaaug

SEQ ID NO: 59646 - RNA, 23 nt, Artificial Sequence
  Chemically synthesized
ugcacuaagauuuuauuuggaau

SEQ ID NO: 59647 - RNA, 23 nt, Artificial Sequence
  Chemically synthesized
uugcacuaagauuuuauuuggaa

SEQ ID NO: 59648 - RNA, 23 nt, Artificial Sequence
  Chemically synthesized
uuugcacuaagauuuuauuugga

SEQ ID NO: 59649 - RNA, 23 nt, Artificial Sequence
  Chemically synthesized
guuugcacuaagauuuuauuugg

SEQ ID NO: 59650 - RNA, 23 nt, Artificial Sequence
  Chemically synthesized
ucauuaaugugagagacuuagaa

SEQ ID NO: 59651 - RNA, 23 nt, Artificial Sequence
  Chemically synthesized
gucauuaaugugagagacuuaga

SEQ ID NO: 59652 - RNA, 23 nt, Artificial Sequence
  Chemically synthesized
agucauuaaugugagagacuuag

SEQ ID NO: 59653 - RNA, 23 nt, Artificial Sequence
  Chemically synthesized
uagucauuaaugugagagacuua

SEQ ID NO: 59654 - RNA, 23 nt, Artificial Sequence
  Chemically synthesized
uuagucauuaaugugagagacuu

SEQ ID NO: 59655 - RNA, 23 nt, Artificial Sequence
  Chemically synthesized
gcacacuuuuuuuuucuccuaaa

SEQ ID NO: 59656 - RNA, 23 nt, Artificial Sequence
  Chemically synthesized
agcacacuuuuuuuuucuccuaa

SEQ ID NO: 59657 - RNA, 23 nt, Artificial Sequence
  Chemically synthesized
aagcacacuuuuuuuuucuccua

SEQ ID NO: 59658 - RNA, 23 nt, Artificial Sequence
  Chemically synthesized
aaagcacacuuuuuuuuucuccu

SEQ ID NO: 59659 - RNA, 23 nt, Artificial Sequence
  Chemically synthesized
uaaagcacacuuuuuuuuucucc

SEQ ID NO: 59660 - RNA, 23 nt, Artificial Sequence
  Chemically synthesized
cucauggauuuuugugguguggg

SEQ ID NO: 59661 - RNA, 23 nt, Artificial Sequence
  Chemically synthesized
ucucauggauuuuuguggugugg

SEQ ID NO: 59662 - RNA, 23 nt, Artificial Sequence
  Chemically synthesized
uucucauggauuuuuguggugug

SEQ ID NO: 59663 - RNA, 23 nt, Artificial Sequence
  Chemically synthesized
uuucucauggauuuuuguggugu

SEQ ID NO: 59664 - RNA, 23 nt, Artificial Sequence
  Chemically synthesized
cuuucucauggauuuuuguggug

SEQ ID NO: 59665 - RNA, 23 nt, Artificial Sequence
  Chemically synthesized
agcagauacaguauaaacucaca

SEQ ID NO: 59666 - RNA, 23 nt, Artificial Sequence
  Chemically synthesized
aagcagauacaguauaaacucac

SEQ ID NO: 59667 - RNA, 23 nt, Artificial Sequence
  Chemically synthesized
caagcagauacaguauaaacuca

SEQ ID NO: 59668 - RNA, 23 nt, Artificial Sequence
  Chemically synthesized
acaagcagauacaguauaaacuc

SEQ ID NO: 59669 - RNA, 23 nt, Artificial Sequence
  Chemically synthesized
uacaagcagauacaguauaaacu

SEQ ID NO: 59670 - RNA, 23 nt, Artificial Sequence
  Chemically synthesized
gaauaagauuuuccaugcauuug

SEQ ID NO: 59671 - RNA, 23 nt, Artificial Sequence
  Chemically synthesized
agaauaagauuuuccaugcauuu

SEQ ID NO: 59672 - RNA, 23 nt, Artificial Sequence
  Chemically synthesized
cagaauaagauuuuccaugcauu

SEQ ID NO: 59673 - RNA, 23 nt, Artificial Sequence
  Chemically synthesized
acagaauaagauuuuccaugcau

SEQ ID NO: 59674 - RNA, 23 nt, Artificial Sequence
  Chemically synthesized
cacagaauaagauuuuccaugca

SEQ ID NO: 59675 - RNA, 23 nt, Artificial Sequence
  Chemically synthesized
gaggugcauguugguauuuaaag

SEQ ID NO: 59676 - RNA, 23 nt, Artificial Sequence
  Chemically synthesized
agaggugcauguugguauuuaaa

SEQ ID NO: 59677 - RNA, 23 nt, Artificial Sequence
  Chemically synthesized
gagaggugcauguugguauuuaa

SEQ ID NO: 59678 - RNA, 23 nt, Artificial Sequence
  Chemically synthesized
cacaaagacauuagaauaccuag

SEQ ID NO: 59679 - RNA, 23 nt, Artificial Sequence
  Chemically synthesized
acacaaagacauuagaauaccua

SEQ ID NO: 59680 - RNA, 23 nt, Artificial Sequence
  Chemically synthesized
aacacaaagacauuagaauaccu

SEQ ID NO: 59681 - RNA, 23 nt, Artificial Sequence
  Chemically synthesized
aaacacaaagacauuagaauacc

SEQ ID NO: 59682 - RNA, 23 nt, Artificial Sequence
  Chemically synthesized
aaaacacaaagacauuagaauac

SEQ ID NO: 59683 - RNA, 23 nt, Artificial Sequence
  Chemically synthesized
gugcaccagguguuaauuuugau

SEQ ID NO: 59684 - RNA, 23 nt, Artificial Sequence
  Chemically synthesized
agugcaccagguguuaauuuuga

SEQ ID NO: 59685 - RNA, 23 nt, Artificial Sequence
  Chemically synthesized
aagugcaccagguguuaauuuug

SEQ ID NO: 59686 - RNA, 23 nt, Artificial Sequence
  Chemically synthesized
aaagugcaccagguguuaauuuu

SEQ ID NO: 59687 - RNA, 23 nt, Artificial Sequence
  Chemically synthesized
uccacucaauuguggagaagaaa

SEQ ID NO: 59688 - RNA, 23 nt, Artificial Sequence
  Chemically synthesized
caagauuccacucaauuguggag

SEQ ID NO: 59689 - RNA, 23 nt, Artificial Sequence
  Chemically synthesized
ucaagauuccacucaauugugga

SEQ ID NO: 59690 - RNA, 23 nt, Artificial Sequence
  Chemically synthesized
aucaagauuccacucaauugugg

SEQ ID NO: 59691 - RNA, 23 nt, Artificial Sequence
  Chemically synthesized
caucaagauuccacucaauugug

SEQ ID NO: 59692 - RNA, 23 nt, Artificial Sequence
  Chemically synthesized
gcaucaagauuccacucaauugu

SEQ ID NO: 59693 - RNA, 23 nt, Artificial Sequence
  Chemically synthesized
aacucccaugcacagccuuuuga

SEQ ID NO: 59694 - RNA, 23 nt, Artificial Sequence
  Chemically synthesized
uaauuacagugcagaacaaaauc

SEQ ID NO: 59695 - RNA, 23 nt, Artificial Sequence
  Chemically synthesized
cuaauuacagugcagaacaaaau

SEQ ID NO: 59696 - RNA, 23 nt, Artificial Sequence
  Chemically synthesized
gcuaauuacagugcagaacaaaa

SEQ ID NO: 59697 - RNA, 23 nt, Artificial Sequence
  Chemically synthesized
aaacugggcuaauuacagugcag

SEQ ID NO: 59698 - RNA, 23 nt, Artificial Sequence
  Chemically synthesized
aaaacugggcuaauuacagugca

SEQ ID NO: 59699 - RNA, 23 nt, Artificial Sequence
  Chemically synthesized
ugaagagcaugguaaggugaaaa

SEQ ID NO: 59700 - RNA, 23 nt, Artificial Sequence
  Chemically synthesized
uugaagagcaugguaaggugaaa

SEQ ID NO: 59701 - RNA, 23 nt, Artificial Sequence
  Chemically synthesized
guacgguauugaagagcauggua

SEQ ID NO: 59702 - RNA, 23 nt, Artificial Sequence
  Chemically synthesized
aguacgguauugaagagcauggu

SEQ ID NO: 59703 - RNA, 23 nt, Artificial Sequence
  Chemically synthesized
aaguacgguauugaagagcaugg

SEQ ID NO: 59704 - RNA, 23 nt, Artificial Sequence
  Chemically synthesized
caaguacgguauugaagagcaug

SEQ ID NO: 59705 - RNA, 23 nt, Artificial Sequence
  Chemically synthesized
ucaaguacgguauugaagagcau

SEQ ID NO: 59706 - RNA, 23 nt, Artificial Sequence
  Chemically synthesized
ccaaacagcagcggaguuuuaaa

SEQ ID NO: 59707 - RNA, 23 nt, Artificial Sequence
  Chemically synthesized
accaaacagcagcggaguuuuaa

SEQ ID NO: 59708 - RNA, 23 nt, Artificial Sequence
  Chemically synthesized
uaccaaacagcagcggaguuuua

SEQ ID NO: 59709 - RNA, 23 nt, Artificial Sequence
  Chemically synthesized
guaccaaacagcagcggaguuuu

SEQ ID NO: 59710 - RNA, 23 nt, Artificial Sequence
  Chemically synthesized
aguaccaaacagcagcggaguuu

SEQ ID NO: 59711 - RNA, 23 nt, Artificial Sequence
  Chemically synthesized
agaaguucaaguacgguauugaa

SEQ ID NO: 59712 - RNA, 23 nt, Artificial Sequence
  Chemically synthesized
aagaaguucaaguacgguauuga

SEQ ID NO: 59713 - RNA, 23 nt, Artificial Sequence
  Chemically synthesized
aaagaaguucaaguacgguauug

SEQ ID NO: 59714 - RNA, 23 nt, Artificial Sequence
  Chemically synthesized
uaaagaaguucaaguacgguauu

SEQ ID NO: 59715 - RNA, 23 nt, Artificial Sequence
  Chemically synthesized
auaaagaaguucaaguacgguau

SEQ ID NO: 59716 - RNA, 23 nt, Artificial Sequence
  Chemically synthesized
agcagauugagauaaagaaguuc

SEQ ID NO: 59717 - RNA, 23 nt, Artificial Sequence
  Chemically synthesized
aagcagauugagauaaagaaguu

SEQ ID NO: 59718 - RNA, 23 nt, Artificial Sequence
  Chemically synthesized
gaagcagauugagauaaagaagu

SEQ ID NO: 59719 - RNA, 23 nt, Artificial Sequence
  Chemically synthesized
gcagaucauauuugugucuguac

SEQ ID NO: 59720 - RNA, 23 nt, Artificial Sequence
  Chemically synthesized
ugcagaucauauuugugucugua

SEQ ID NO: 59721 - RNA, 23 nt, Artificial Sequence
  Chemically synthesized
cugcagaucauauuugugucugu

SEQ ID NO: 59722 - RNA, 23 nt, Artificial Sequence
  Chemically synthesized
ccugcagaucauauuugugucug

SEQ ID NO: 59723 - RNA, 23 nt, Artificial Sequence
  Chemically synthesized
uccugcagaucauauuugugucu

SEQ ID NO: 59724 - RNA, 23 nt, Artificial Sequence
  Chemically synthesized
gcacuuuucuuucauuaggggga

SEQ ID NO: 59725 - RNA, 23 nt, Artificial Sequence
  Chemically synthesized
agcacuuuucuuucauuaggggg

SEQ ID NO: 59726 - RNA, 23 nt, Artificial Sequence
  Chemically synthesized
guugugaaaaugucugcuaugac

SEQ ID NO: 59727 - RNA, 23 nt, Artificial Sequence
  Chemically synthesized
gguugugaaaaugucugcuauga

SEQ ID NO: 59728 - RNA, 23 nt, Artificial Sequence
  Chemically synthesized
ugguugugaaaaugucugcuaug

SEQ ID NO: 59729 - RNA, 23 nt, Artificial Sequence
  Chemically synthesized
cugguugugaaaaugucugcuau

SEQ ID NO: 59730 - RNA, 23 nt, Artificial Sequence
  Chemically synthesized
ccugguugugaaaaugucugcua

SEQ ID NO: 59731 - RNA, 23 nt, Artificial Sequence
  Chemically synthesized
ugcauguaauguagaccuagucc

SEQ ID NO: 59732 - RNA, 23 nt, Artificial Sequence
  Chemically synthesized
uugcauguaauguagaccuaguc

SEQ ID NO: 59733 - RNA, 23 nt, Artificial Sequence
  Chemically synthesized
auugcauguaauguagaccuagu

SEQ ID NO: 59734 - RNA, 23 nt, Artificial Sequence
  Chemically synthesized
cauugcauguaauguagaccuag

SEQ ID NO: 59735 - RNA, 23 nt, Artificial Sequence
  Chemically synthesized
ucauugcauguaauguagaccua

SEQ ID NO: 59736 - RNA, 23 nt, Artificial Sequence
  Chemically synthesized
ugcugaguaugacacuuuucuuc

SEQ ID NO: 59737 - RNA, 23 nt, Artificial Sequence
  Chemically synthesized
augcugaguaugacacuuuucuu

SEQ ID NO: 59738 - RNA, 23 nt, Artificial Sequence
  Chemically synthesized
aaugcugaguaugacacuuuucu

SEQ ID NO: 59739 - RNA, 23 nt, Artificial Sequence
  Chemically synthesized
aaaugcugaguaugacacuuuuc

SEQ ID NO: 59740 - RNA, 23 nt, Artificial Sequence
  Chemically synthesized
aaaaugcugaguaugacacuuuu

SEQ ID NO: 59741 - RNA, 23 nt, Artificial Sequence
  Chemically synthesized
ggcugucaguacuuuucauuuuc

SEQ ID NO: 59742 - RNA, 23 nt, Artificial Sequence
  Chemically synthesized
uggcugucaguacuuuucauuuu

SEQ ID NO: 59743 - RNA, 23 nt, Artificial Sequence
  Chemically synthesized
guggcugucaguacuuuucauuu

SEQ ID NO: 59744 - RNA, 23 nt, Artificial Sequence
  Chemically synthesized
uguggcugucaguacuuuucauu

SEQ ID NO: 59745 - RNA, 23 nt, Artificial Sequence
  Chemically synthesized
guguggcugucaguacuuuucau

SEQ ID NO: 59746 - RNA, 23 nt, Artificial Sequence
  Chemically synthesized
agguaucagcacuuuucuuucau

SEQ ID NO: 59747 - RNA, 23 nt, Artificial Sequence
  Chemically synthesized
gagguaucagcacuuuucuuuca

SEQ ID NO: 59748 - RNA, 23 nt, Artificial Sequence
  Chemically synthesized
cgagguaucagcacuuuucuuuc

SEQ ID NO: 59749 - RNA, 23 nt, Artificial Sequence
  Chemically synthesized
acgagguaucagcacuuuucuuu

SEQ ID NO: 59750 - RNA, 23 nt, Artificial Sequence
  Chemically synthesized
caacuuugauguuugcacuaaga

SEQ ID NO: 59751 - RNA, 23 nt, Artificial Sequence
  Chemically synthesized
gcaacuuugauguuugcacuaag

SEQ ID NO: 59752 - RNA, 23 nt, Artificial Sequence
  Chemically synthesized
agcaacuuugauguuugcacuaa

SEQ ID NO: 59753 - RNA, 23 nt, Artificial Sequence
  Chemically synthesized
cagcaacuuugauguuugcacua

SEQ ID NO: 59754 - RNA, 23 nt, Artificial Sequence
  Chemically synthesized
gccuaaaugaauuuugcaguaac

SEQ ID NO: 59755 - RNA, 23 nt, Artificial Sequence
  Chemically synthesized
ugccuaaaugaauuuugcaguaa

SEQ ID NO: 59756 - RNA, 23 nt, Artificial Sequence
  Chemically synthesized
gugccuaaaugaauuuugcagua

SEQ ID NO: 59757 - RNA, 23 nt, Artificial Sequence
  Chemically synthesized
ugugccuaaaugaauuuugcagu

SEQ ID NO: 59758 - RNA, 23 nt, Artificial Sequence
  Chemically synthesized
augugccuaaaugaauuuugcag

SEQ ID NO: 59759 - RNA, 23 nt, Artificial Sequence
  Chemically synthesized
gacuauuaaaugugccuaaauga

SEQ ID NO: 59760 - RNA, 23 nt, Artificial Sequence
  Chemically synthesized
ggacuauuaaaugugccuaaaug

SEQ ID NO: 59761 - RNA, 23 nt, Artificial Sequence
  Chemically synthesized
uggacuauuaaaugugccuaaau

SEQ ID NO: 59762 - RNA, 23 nt, Artificial Sequence
  Chemically synthesized
guggacuauuaaaugugccuaaa

SEQ ID NO: 59763 - RNA, 23 nt, Artificial Sequence
  Chemically synthesized
aguggacuauuaaaugugccuaa

SEQ ID NO: 59764 - RNA, 23 nt, Artificial Sequence
  Chemically synthesized
acaggcuuuagucauuaauguga

SEQ ID NO: 59765 - RNA, 23 nt, Artificial Sequence
  Chemically synthesized
aacaggcuuuagucauuaaugug

SEQ ID NO: 59766 - RNA, 23 nt, Artificial Sequence
  Chemically synthesized
aaacaggcuuuagucauuaaugu

SEQ ID NO: 59767 - RNA, 23 nt, Artificial Sequence
  Chemically synthesized
uaaacaggcuuuagucauuaaug

SEQ ID NO: 59768 - RNA, 23 nt, Artificial Sequence
  Chemically synthesized
guaaacaggcuuuagucauuaau

SEQ ID NO: 59769 - RNA, 23 nt, Artificial Sequence
  Chemically synthesized
ugaugcuugaaugauagaauuuu

SEQ ID NO: 59770 - RNA, 23 nt, Artificial Sequence
  Chemically synthesized
uugaugcuugaaugauagaauuu

SEQ ID NO: 59771 - RNA, 23 nt, Artificial Sequence
  Chemically synthesized
auugaugcuugaaugauagaauu

SEQ ID NO: 59772 - RNA, 23 nt, Artificial Sequence
  Chemically synthesized
cauugaugcuugaaugauagaau

SEQ ID NO: 59773 - RNA, 23 nt, Artificial Sequence
  Chemically synthesized
ucauugaugcuugaaugauagaa

SEQ ID NO: 59774 - RNA, 23 nt, Artificial Sequence
  Chemically synthesized
guuuuucccuguguauccuauua

SEQ ID NO: 59775 - RNA, 23 nt, Artificial Sequence
  Chemically synthesized
aaauguuuuucccuguguauccu

SEQ ID NO: 59776 - RNA, 23 nt, Artificial Sequence
  Chemically synthesized
aaaauguuuuucccuguguaucc

SEQ ID NO: 59777 - RNA, 23 nt, Artificial Sequence
  Chemically synthesized
uaaaauguuuuucccuguguauc

SEQ ID NO: 59778 - RNA, 23 nt, Artificial Sequence
  Chemically synthesized
uuucuccuaaaauguuuuucccu

SEQ ID NO: 59779 - RNA, 23 nt, Artificial Sequence
  Chemically synthesized
uuuucuccuaaaauguuuuuccc

SEQ ID NO: 59780 - RNA, 23 nt, Artificial Sequence
  Chemically synthesized
uacgagguaucagcacuuuucuu

SEQ ID NO: 59781 - RNA, 23 nt, Artificial Sequence
  Chemically synthesized
uuacgagguaucagcacuuuucu

SEQ ID NO: 59782 - RNA, 23 nt, Artificial Sequence
  Chemically synthesized
uuuacgagguaucagcacuuuuc

SEQ ID NO: 59783 - RNA, 23 nt, Artificial Sequence
  Chemically synthesized
ucauggauuuuuguggugugggc

SEQ ID NO: 59784 - RNA, 23 nt, Artificial Sequence
  Chemically synthesized
guacaagcagauacaguauaaac

SEQ ID NO: 59785 - RNA, 23 nt, Artificial Sequence
  Chemically synthesized
gguacaagcagauacaguauaaa

SEQ ID NO: 59786 - RNA, 23 nt, Artificial Sequence
  Chemically synthesized
ugguacaagcagauacaguauaa

SEQ ID NO: 59787 - RNA, 23 nt, Artificial Sequence
  Chemically synthesized
uugguacaagcagauacaguaua

SEQ ID NO: 59788 - RNA, 23 nt, Artificial Sequence
  Chemically synthesized
auugguacaagcagauacaguau

SEQ ID NO: 59789 - RNA, 23 nt, Artificial Sequence
  Chemically synthesized
cgaagaguuuguuuuguuuguca

SEQ ID NO: 59790 - RNA, 23 nt, Artificial Sequence
  Chemically synthesized
ucgaagaguuuguuuuguuuguc

SEQ ID NO: 59791 - RNA, 23 nt, Artificial Sequence
  Chemically synthesized
gucgaagaguuuguuuuguuugu

SEQ ID NO: 59792 - RNA, 23 nt, Artificial Sequence
  Chemically synthesized
ugucgaagaguuuguuuuguuug

SEQ ID NO: 59793 - RNA, 23 nt, Artificial Sequence
  Chemically synthesized
gugucgaagaguuuguuuuguuu

SEQ ID NO: 59794 - RNA, 23 nt, Artificial Sequence
  Chemically synthesized
cauuaccaucacuuuuucaucau

SEQ ID NO: 59795 - RNA, 23 nt, Artificial Sequence
  Chemically synthesized
acaauaucauuaccaucacuuuu

SEQ ID NO: 59796 - RNA, 23 nt, Artificial Sequence
  Chemically synthesized
cacaauaucauuaccaucacuuu

SEQ ID NO: 59797 - RNA, 23 nt, Artificial Sequence
  Chemically synthesized
gcacaauaucauuaccaucacuu

SEQ ID NO: 59798 - RNA, 23 nt, Artificial Sequence
  Chemically synthesized
ugcacaauaucauuaccaucacu

SEQ ID NO: 59799 - RNA, 23 nt, Artificial Sequence
  Chemically synthesized
uugcacaauaucauuaccaucac

SEQ ID NO: 59800 - RNA, 23 nt, Artificial Sequence
  Chemically synthesized
cccacagaauaagauuuuccaug

SEQ ID NO: 59801 - RNA, 23 nt, Artificial Sequence
  Chemically synthesized
acaaggcccacagaauaagauuu

SEQ ID NO: 59802 - RNA, 23 nt, Artificial Sequence
  Chemically synthesized
ucuuaggucuuuucaacaagaaa

SEQ ID NO: 59803 - RNA, 23 nt, Artificial Sequence
  Chemically synthesized
aucuuaggucuuuucaacaagaa

SEQ ID NO: 59804 - RNA, 23 nt, Artificial Sequence
  Chemically synthesized
caucuuaggucuuuucaacaaga

SEQ ID NO: 59805 - RNA, 23 nt, Artificial Sequence
  Chemically synthesized
gguaauuguggcuaaauauuuuu

SEQ ID NO: 59806 - RNA, 23 nt, Artificial Sequence
  Chemically synthesized
aguaguggauucaaagaacuuag

SEQ ID NO: 59807 - RNA, 23 nt, Artificial Sequence
  Chemically synthesized
gguauuuaaaguaguggauucaa

SEQ ID NO: 59808 - RNA, 23 nt, Artificial Sequence
  Chemically synthesized
ugguauuuaaaguaguggauuca

SEQ ID NO: 59809 - RNA, 23 nt, Artificial Sequence
  Chemically synthesized
uugguauuuaaaguaguggauuc

SEQ ID NO: 59810 - RNA, 23 nt, Artificial Sequence
  Chemically synthesized
guugguauuuaaaguaguggauu

SEQ ID NO: 59811 - RNA, 23 nt, Artificial Sequence
  Chemically synthesized
uguugguauuuaaaguaguggau

SEQ ID NO: 59812 - RNA, 23 nt, Artificial Sequence
  Chemically synthesized
acauuagaauaccuagguucacu

SEQ ID NO: 59813 - RNA, 23 nt, Artificial Sequence
  Chemically synthesized
gacauuagaauaccuagguucac

SEQ ID NO: 59814 - RNA, 23 nt, Artificial Sequence
  Chemically synthesized
agacauuagaauaccuagguuca

SEQ ID NO: 59815 - RNA, 23 nt, Artificial Sequence
  Chemically synthesized
aagacauuagaauaccuagguuc

SEQ ID NO: 59816 - RNA, 23 nt, Artificial Sequence
  Chemically synthesized
aaagacauuagaauaccuagguu

SEQ ID NO: 59817 - RNA, 23 nt, Artificial Sequence
  Chemically synthesized
caaagacauuagaauaccuaggu

SEQ ID NO: 59818 - RNA, 23 nt, Artificial Sequence
  Chemically synthesized
acaaagacauuagaauaccuagg

SEQ ID NO: 59819 - RNA, 23 nt, Artificial Sequence
  Chemically synthesized
agaaagugcaccagguguuaauu

SEQ ID NO: 59820 - RNA, 23 nt, Artificial Sequence
  Chemically synthesized
uagaaagugcaccagguguuaau

SEQ ID NO: 59821 - RNA, 23 nt, Artificial Sequence
  Chemically synthesized
guagaaagugcaccagguguuaa

SEQ ID NO: 59822 - RNA, 23 nt, Artificial Sequence
  Chemically synthesized
uguagaaagugcaccagguguua

SEQ ID NO: 59823 - RNA, 23 nt, Artificial Sequence
  Chemically synthesized
cuguagaaagugcaccagguguu

SEQ ID NO: 59824 - RNA, 23 nt, Artificial Sequence
  Chemically synthesized
ggaagcaccaucucuaacuccca

SEQ ID NO: 59825 - RNA, 23 nt, Artificial Sequence
  Chemically synthesized
gggaagcaccaucucuaacuccc

SEQ ID NO: 59826 - RNA, 23 nt, Artificial Sequence
  Chemically synthesized
cgggaagcaccaucucuaacucc

SEQ ID NO: 59827 - RNA, 23 nt, Artificial Sequence
  Chemically synthesized
gcgggaagcaccaucucuaacuc

SEQ ID NO: 59828 - RNA, 23 nt, Artificial Sequence
  Chemically synthesized
ggcgggaagcaccaucucuaacu

SEQ ID NO: 59829 - RNA, 23 nt, Artificial Sequence
  Chemically synthesized
gcagaacaaaaucgaauggggca

SEQ ID NO: 59830 - RNA, 23 nt, Artificial Sequence
  Chemically synthesized
ugcagaacaaaaucgaauggggc

SEQ ID NO: 59831 - RNA, 23 nt, Artificial Sequence
  Chemically synthesized
gugcagaacaaaaucgaaugggg

SEQ ID NO: 59832 - RNA, 23 nt, Artificial Sequence
  Chemically synthesized
agugcagaacaaaaucgaauggg

SEQ ID NO: 59833 - RNA, 23 nt, Artificial Sequence
  Chemically synthesized
cagugcagaacaaaaucgaaugg

SEQ ID NO: 59834 - RNA, 23 nt, Artificial Sequence
  Chemically synthesized
caagggcguuaaggaucggguua

SEQ ID NO: 59835 - RNA, 23 nt, Artificial Sequence
  Chemically synthesized
gaacucuucuauguuuucuucaa

SEQ ID NO: 59836 - RNA, 23 nt, Artificial Sequence
  Chemically synthesized
ugaacucuucuauguuuucuuca

SEQ ID NO: 59837 - RNA, 23 nt, Artificial Sequence
  Chemically synthesized
uugaacucuucuauguuuucuuc

SEQ ID NO: 59838 - RNA, 23 nt, Artificial Sequence
  Chemically synthesized
auugaacucuucuauguuuucuu

SEQ ID NO: 59839 - RNA, 23 nt, Artificial Sequence
  Chemically synthesized
ccuuuucauuuuacuucauccuc

SEQ ID NO: 59840 - RNA, 23 nt, Artificial Sequence
  Chemically synthesized
gcacuugaagcagauugagauaa

SEQ ID NO: 59841 - RNA, 23 nt, Artificial Sequence
  Chemically synthesized
acaaaaaagcuuuuacgagguau

SEQ ID NO: 59842 - RNA, 23 nt, Artificial Sequence
  Chemically synthesized
gaaagugcaccagguguuaauuu

SEQ ID NO: 59843 - RNA, 23 nt, Artificial Sequence
  Chemically synthesized
ccaguuucuccaaaugccuuuuu

SEQ ID NO: 59844 - RNA, 23 nt, Artificial Sequence
  Chemically synthesized
gcagauacaguauaaacucacaa

SEQ ID NO: 59845 - RNA, 23 nt, Artificial Sequence
  Chemically synthesized
gcaguaacugguauucuuggguu

SEQ ID NO: 59846 - RNA, 23 nt, Artificial Sequence
  Chemically synthesized
caaaaaagcuuuuacgagguauc

SEQ ID NO: 59847 - RNA, 23 nt, Artificial Sequence
  Chemically synthesized
gcagauugagauaaagaaguuca

SEQ ID NO: 59848 - RNA, 23 nt, Artificial Sequence
  Chemically synthesized
agacaucuaccaguuucuccaaa

SEQ ID NO: 59849 - RNA, 23 nt, Artificial Sequence
  Chemically synthesized
uguaaacaggcuuuagucauuaa

SEQ ID NO: 59850 - RNA, 23 nt, Artificial Sequence
  Chemically synthesized
ccagugguacaucuauggauuca

SEQ ID NO: 59851 - RNA, 23 nt, Artificial Sequence
  Chemically synthesized
agauaaagaaguucaaguacggu

SEQ ID NO: 59852 - RNA, 23 nt, Artificial Sequence
  Chemically synthesized
gacacuuuucuucuugcaugcau

SEQ ID NO: 59853 - RNA, 23 nt, Artificial Sequence
  Chemically synthesized
gaagguguggcugucaguacuuu

SEQ ID NO: 59854 - RNA, 23 nt, Artificial Sequence
  Chemically synthesized
ggaagguguggcugucaguacuu

SEQ ID NO: 59855 - RNA, 23 nt, Artificial Sequence
  Chemically synthesized
aacuuugauguuugcacuaagau

SEQ ID NO: 59856 - RNA, 23 nt, Artificial Sequence
  Chemically synthesized
acuuauaugugugucgaagaguu

SEQ ID NO: 59857 - RNA, 23 nt, Artificial Sequence
  Chemically synthesized
acuuuuucaucauuccucagcua

SEQ ID NO: 59858 - RNA, 23 nt, Artificial Sequence
  Chemically synthesized
ccacuugcacaauaucauuacca

SEQ ID NO: 59859 - RNA, 23 nt, Artificial Sequence
  Chemically synthesized
ucaacaagaaaaagacagaggau

SEQ ID NO: 59860 - RNA, 23 nt, Artificial Sequence
  Chemically synthesized
ugauacauagauaagggcuuuuu

SEQ ID NO: 59861 - RNA, 23 nt, Artificial Sequence
  Chemically synthesized
aaacuagcugcuggacaugaauu

SEQ ID NO: 59862 - RNA, 23 nt, Artificial Sequence
  Chemically synthesized
ccaucucuaacucccaugcacag

SEQ ID NO: 59863 - RNA, 23 nt, Artificial Sequence
  Chemically synthesized
ugguacaucuauggauucagcuu

SEQ ID NO: 59864 - RNA, 23 nt, Artificial Sequence
  Chemically synthesized
gauaaagaaguucaaguacggua

SEQ ID NO: 59865 - RNA, 23 nt, Artificial Sequence
  Chemically synthesized
cagauugagauaaagaaguucaa

SEQ ID NO: 59866 - RNA, 23 nt, Artificial Sequence
  Chemically synthesized
agaaacugaacaagaaagaggaa

SEQ ID NO: 59867 - RNA, 23 nt, Artificial Sequence
  Chemically synthesized
guguucuggagaguguucuuuau

SEQ ID NO: 59868 - RNA, 23 nt, Artificial Sequence
  Chemically synthesized
guauucuuggguuuuccuacuua

SEQ ID NO: 59869 - RNA, 23 nt, Artificial Sequence
  Chemically synthesized
cagauacaguauaaacucacaaa

SEQ ID NO: 59870 - RNA, 23 nt, Artificial Sequence
  Chemically synthesized
acauuuuuaagacaguugggaug

SEQ ID NO: 59871 - RNA, 23 nt, Artificial Sequence
  Chemically synthesized
caacaagaaaaagacagaggauu

SEQ ID NO: 59872 - RNA, 23 nt, Artificial Sequence
  Chemically synthesized
gugauacauagauaagggcuuuu

SEQ ID NO: 59873 - RNA, 23 nt, Artificial Sequence
  Chemically synthesized
uucaugaggcuuagaaaacacaa

SEQ ID NO: 59874 - RNA, 23 nt, Artificial Sequence
  Chemically synthesized
cagguguuaauuuugauccggug

SEQ ID NO: 59875 - RNA, 23 nt, Artificial Sequence
  Chemically synthesized
cuagcugcuggacaugaauuaca

SEQ ID NO: 59876 - RNA, 23 nt, Artificial Sequence
  Chemically synthesized
acaucuauggauucagcuugagu

SEQ ID NO: 59877 - RNA, 23 nt, Artificial Sequence
  Chemically synthesized
ucauguguucuaugugaugcgaa

SEQ ID NO: 59878 - RNA, 23 nt, Artificial Sequence
  Chemically synthesized
caaccugguugugaaaaugucug

SEQ ID NO: 59879 - RNA, 23 nt, Artificial Sequence
  Chemically synthesized
cacuuuucuucuugcaugcaugu

SEQ ID NO: 59880 - RNA, 23 nt, Artificial Sequence
  Chemically synthesized
cugaguaugacacuuuucuucuu

SEQ ID NO: 59881 - RNA, 23 nt, Artificial Sequence
  Chemically synthesized
caguuucuccaaaugccuuuuuu

SEQ ID NO: 59882 - RNA, 23 nt, Artificial Sequence
  Chemically synthesized
caguaacugguauucuuggguuu

SEQ ID NO: 59883 - RNA, 23 nt, Artificial Sequence
  Chemically synthesized
gaaaaaaugcuuagaguggacua

SEQ ID NO: 59884 - RNA, 23 nt, Artificial Sequence
  Chemically synthesized
ugguaucaguuuaaaauucagac

SEQ ID NO: 59885 - RNA, 23 nt, Artificial Sequence
  Chemically synthesized
ggauuguccuuaagucccugcua

SEQ ID NO: 59886 - RNA, 23 nt, Artificial Sequence
  Chemically synthesized
ccuaagaaugguucuguguaugu

SEQ ID NO: 59887 - RNA, 23 nt, Artificial Sequence
  Chemically synthesized
agagaggugcauguugguauuua

SEQ ID NO: 59888 - RNA, 23 nt, Artificial Sequence
  Chemically synthesized
ucugccuuucguuguaacacuca

SEQ ID NO: 59889 - RNA, 23 nt, Artificial Sequence
  Chemically synthesized
ugacacuuuucuucuugcaugca

SEQ ID NO: 59890 - RNA, 23 nt, Artificial Sequence
  Chemically synthesized
guaugacacuuuucuucuugcau

SEQ ID NO: 59891 - RNA, 23 nt, Artificial Sequence
  Chemically synthesized
cagaagauuggugaaaaugcuga

SEQ ID NO: 59892 - RNA, 23 nt, Artificial Sequence
  Chemically synthesized
gcaagagagguugaaagaggauu

SEQ ID NO: 59893 - RNA, 23 nt, Artificial Sequence
  Chemically synthesized
gacuuagaaaaaaugcuuagagu

SEQ ID NO: 59894 - RNA, 23 nt, Artificial Sequence
  Chemically synthesized
agacuuagaaaaaaugcuuagag

SEQ ID NO: 59895 - RNA, 23 nt, Artificial Sequence
  Chemically synthesized
agagacuuagaaaaaaugcuuag

SEQ ID NO: 59896 - RNA, 23 nt, Artificial Sequence
  Chemically synthesized
ggcuuuagucauuaaugugagag

SEQ ID NO: 59897 - RNA, 23 nt, Artificial Sequence
  Chemically synthesized
guauaaacucacaaacacagauu

SEQ ID NO: 59898 - RNA, 23 nt, Artificial Sequence
  Chemically synthesized
cuuauaugugugucgaagaguuu

SEQ ID NO: 59899 - RNA, 23 nt, Artificial Sequence
  Chemically synthesized
cuuuuucaucauuccucagcuac

SEQ ID NO: 59900 - RNA, 23 nt, Artificial Sequence
  Chemically synthesized
cauccacuugcacaauaucauua

SEQ ID NO: 59901 - RNA, 23 nt, Artificial Sequence
  Chemically synthesized
aaaauuugcacuuugaagguaag

SEQ ID NO: 59902 - RNA, 23 nt, Artificial Sequence
  Chemically synthesized
acaagaaaaagacagaggauugu

SEQ ID NO: 59903 - RNA, 23 nt, Artificial Sequence
  Chemically synthesized
aggugauacauagauaagggcuu

SEQ ID NO: 59904 - RNA, 23 nt, Artificial Sequence
  Chemically synthesized
cuuuuacgagguaucagcacuuu

SEQ ID NO: 59905 - RNA, 23 nt, Artificial Sequence
  Chemically synthesized
cuaaaaaacuagcugcuggacau

SEQ ID NO: 59906 - RNA, 23 nt, Artificial Sequence
  Chemically synthesized
gaacuugccuuuucauuuuacuu

SEQ ID NO: 59907 - RNA, 23 nt, Artificial Sequence
  Chemically synthesized
ggucucaaaaauaugcuuauuuc

SEQ ID NO: 59908 - RNA, 23 nt, Artificial Sequence
  Chemically synthesized
gugguacaucuauggauucagcu

SEQ ID NO: 59909 - RNA, 23 nt, Artificial Sequence
  Chemically synthesized
gccuucuugcugauccaguggua

SEQ ID NO: 59910 - RNA, 23 nt, Artificial Sequence
  Chemically synthesized
acaucaucaguauccucuucaag

SEQ ID NO: 59911 - RNA, 23 nt, Artificial Sequence
  Chemically synthesized
uacaucaucaguauccucuucaa

SEQ ID NO: 59912 - RNA, 23 nt, Artificial Sequence
  Chemically synthesized
ugagauaaagaaguucaaguacg

SEQ ID NO: 59913 - RNA, 23 nt, Artificial Sequence
  Chemically synthesized
agaacucaagguugcccaaacug

SEQ ID NO: 59914 - RNA, 23 nt, Artificial Sequence
  Chemically synthesized
gguccugcagaucauauuugugu

SEQ ID NO: 59915 - RNA, 23 nt, Artificial Sequence
  Chemically synthesized
cugcuaugacaagucuuucccaa

SEQ ID NO: 59916 - RNA, 23 nt, Artificial Sequence
  Chemically synthesized
agaucauguguucuggagagugu

SEQ ID NO: 59917 - RNA, 23 nt, Artificial Sequence
  Chemically synthesized
cuaccaguuucuccaaaugccuu

SEQ ID NO: 59918 - RNA, 23 nt, Artificial Sequence
  Chemically synthesized
gacaucuaccaguuucuccaaau

SEQ ID NO: 59919 - RNA, 23 nt, Artificial Sequence
  Chemically synthesized
agaaaaaaugcuuagaguggacu

SEQ ID NO: 59920 - RNA, 23 nt, Artificial Sequence
  Chemically synthesized
ucacuuuuucaucauuccucagc

SEQ ID NO: 59921 - RNA, 23 nt, Artificial Sequence
  Chemically synthesized
uaaauacuuccugaacaucuuag

SEQ ID NO: 59922 - RNA, 23 nt, Artificial Sequence
  Chemically synthesized
gaaauaauucuggccaggaauaa

SEQ ID NO: 59923 - RNA, 23 nt, Artificial Sequence
  Chemically synthesized
guaugugaaugagcgggugguaa

SEQ ID NO: 59924 - RNA, 23 nt, Artificial Sequence
  Chemically synthesized
agaaugguucuguguaugugaau

SEQ ID NO: 59925 - RNA, 23 nt, Artificial Sequence
  Chemically synthesized
agaguuccauuaggugauacaua

SEQ ID NO: 59926 - RNA, 23 nt, Artificial Sequence
  Chemically synthesized
cuucauccuccaaggaguucaau

SEQ ID NO: 59927 - RNA, 23 nt, Artificial Sequence
  Chemically synthesized
cauuguggaccagcgaccuucaa

SEQ ID NO: 59928 - RNA, 23 nt, Artificial Sequence
  Chemically synthesized
ucaagggcguuaaggaucggguu

SEQ ID NO: 59929 - RNA, 23 nt, Artificial Sequence
  Chemically synthesized
guauccucuucaagucuaucuuu

SEQ ID NO: 59930 - RNA, 23 nt, Artificial Sequence
  Chemically synthesized
caucaguauccucuucaagucua

SEQ ID NO: 59931 - RNA, 23 nt, Artificial Sequence
  Chemically synthesized
agauugagauaaagaaguucaag

SEQ ID NO: 59932 - RNA, 23 nt, Artificial Sequence
  Chemically synthesized
uguucuaugugaugcgaaaggaa

SEQ ID NO: 59933 - RNA, 23 nt, Artificial Sequence
  Chemically synthesized
cauguguucuaugugaugcgaaa

SEQ ID NO: 59934 - RNA, 23 nt, Artificial Sequence
  Chemically synthesized
gaagauuggugaaaaugcugagu

SEQ ID NO: 59935 - RNA, 23 nt, Artificial Sequence
  Chemically synthesized
agguguggcugucaguacuuuuc

SEQ ID NO: 59936 - RNA, 23 nt, Artificial Sequence
  Chemically synthesized
gguauucuuggguuuuccuacuu

SEQ ID NO: 59937 - RNA, 23 nt, Artificial Sequence
  Chemically synthesized
guaacugguauucuuggguuuuc

SEQ ID NO: 59938 - RNA, 23 nt, Artificial Sequence
  Chemically synthesized
aguaacugguauucuuggguuuu

SEQ ID NO: 59939 - RNA, 23 nt, Artificial Sequence
  Chemically synthesized
cuauuuaaaguuuaaaacuccgc

SEQ ID NO: 59940 - RNA, 23 nt, Artificial Sequence
  Chemically synthesized
uauuuaaaguuuaaaacuccgcu

SEQ ID NO: 59941 - RNA, 23 nt, Artificial Sequence
  Chemically synthesized
auuuaaaguuuaaaacuccgcug

SEQ ID NO: 59942 - RNA, 23 nt, Artificial Sequence
  Chemically synthesized
uuuaaaguuuaaaacuccgcugc

SEQ ID NO: 59943 - RNA, 23 nt, Artificial Sequence
  Chemically synthesized
uuaaaguuuaaaacuccgcugcu

SEQ ID NO: 59944 - RNA, 23 nt, Artificial Sequence
  Chemically synthesized
uacaaaacuguuuauguagcuga

SEQ ID NO: 59945 - RNA, 23 nt, Artificial Sequence
  Chemically synthesized
acaaaacuguuuauguagcugac

SEQ ID NO: 59946 - RNA, 23 nt, Artificial Sequence
  Chemically synthesized
caaaacuguuuauguagcugaca

SEQ ID NO: 59947 - RNA, 23 nt, Artificial Sequence
  Chemically synthesized
aaaacuguuuauguagcugacau

SEQ ID NO: 59948 - RNA, 23 nt, Artificial Sequence
  Chemically synthesized
aaacuguuuauguagcugacaug

SEQ ID NO: 59949 - RNA, 23 nt, Artificial Sequence
  Chemically synthesized
cacuuucuacagcaccuuuuuuc

SEQ ID NO: 59950 - RNA, 23 nt, Artificial Sequence
  Chemically synthesized
acuuucuacagcaccuuuuuucu

SEQ ID NO: 59951 - RNA, 23 nt, Artificial Sequence
  Chemically synthesized
cuuucuacagcaccuuuuuucuu

SEQ ID NO: 59952 - RNA, 23 nt, Artificial Sequence
  Chemically synthesized
uuucuacagcaccuuuuuucuuc

SEQ ID NO: 59953 - RNA, 23 nt, Artificial Sequence
  Chemically synthesized
uucuacagcaccuuuuuucuucu

SEQ ID NO: 59954 - RNA, 23 nt, Artificial Sequence
  Chemically synthesized
acaaaaauccaugagaaagguuc

SEQ ID NO: 59955 - RNA, 23 nt, Artificial Sequence
  Chemically synthesized
caaaaauccaugagaaagguuca

SEQ ID NO: 59956 - RNA, 23 nt, Artificial Sequence
  Chemically synthesized
aaaaauccaugagaaagguucaa

SEQ ID NO: 59957 - RNA, 23 nt, Artificial Sequence
  Chemically synthesized
aaaauccaugagaaagguucaaa

SEQ ID NO: 59958 - RNA, 23 nt, Artificial Sequence
  Chemically synthesized
aaauccaugagaaagguucaaau

SEQ ID NO: 59959 - RNA, 23 nt, Artificial Sequence
  Chemically synthesized
ucuacagcaccuuuuuucuucuc

SEQ ID NO: 59960 - RNA, 23 nt, Artificial Sequence
  Chemically synthesized
uacagcaccuuuuuucuucucca

SEQ ID NO: 59961 - RNA, 23 nt, Artificial Sequence
  Chemically synthesized
aggaugaaguaaaaugaaaaggc

SEQ ID NO: 59962 - RNA, 23 nt, Artificial Sequence
  Chemically synthesized
ggaugaaguaaaaugaaaaggca

SEQ ID NO: 59963 - RNA, 23 nt, Artificial Sequence
  Chemically synthesized
gaugaaguaaaaugaaaaggcaa

SEQ ID NO: 59964 - RNA, 23 nt, Artificial Sequence
  Chemically synthesized
augaaguaaaaugaaaaggcaag

SEQ ID NO: 59965 - RNA, 23 nt, Artificial Sequence
  Chemically synthesized
ugaaguaaaaugaaaaggcaagu

SEQ ID NO: 59966 - RNA, 23 nt, Artificial Sequence
  Chemically synthesized
guacaaaacuguuuauguagcug

SEQ ID NO: 59967 - RNA, 23 nt, Artificial Sequence
  Chemically synthesized
aacuguuuauguagcugacaugc

SEQ ID NO: 59968 - RNA, 23 nt, Artificial Sequence
  Chemically synthesized
ccacaaaaauccaugagaaaggu

SEQ ID NO: 59969 - RNA, 23 nt, Artificial Sequence
  Chemically synthesized
cacaaaaauccaugagaaagguu

SEQ ID NO: 59970 - RNA, 23 nt, Artificial Sequence
  Chemically synthesized
uauaaucuaaguucuuugaaucc

SEQ ID NO: 59971 - RNA, 23 nt, Artificial Sequence
  Chemically synthesized
auaaucuaaguucuuugaaucca

SEQ ID NO: 59972 - RNA, 23 nt, Artificial Sequence
  Chemically synthesized
uaaucuaaguucuuugaauccac

SEQ ID NO: 59973 - RNA, 23 nt, Artificial Sequence
  Chemically synthesized
aaucuaaguucuuugaauccacu

SEQ ID NO: 59974 - RNA, 23 nt, Artificial Sequence
  Chemically synthesized
aucuaaguucuuugaauccacua

SEQ ID NO: 59975 - RNA, 23 nt, Artificial Sequence
  Chemically synthesized
accuuuuuucuucuccacaauug

SEQ ID NO: 59976 - RNA, 23 nt, Artificial Sequence
  Chemically synthesized
ccuuuuuucuucuccacaauuga

SEQ ID NO: 59977 - RNA, 23 nt, Artificial Sequence
  Chemically synthesized
cuuuuuucuucuccacaauugag

SEQ ID NO: 59978 - RNA, 23 nt, Artificial Sequence
  Chemically synthesized
uuuuuucuucuccacaauugagu

SEQ ID NO: 59979 - RNA, 23 nt, Artificial Sequence
  Chemically synthesized
uuuuucuucuccacaauugagug

SEQ ID NO: 59980 - RNA, 23 nt, Artificial Sequence
  Chemically synthesized
uuucaagccuguaucuagaucuc

SEQ ID NO: 59981 - RNA, 23 nt, Artificial Sequence
  Chemically synthesized
uucaagccuguaucuagaucucc

SEQ ID NO: 59982 - RNA, 23 nt, Artificial Sequence
  Chemically synthesized
ucaagccuguaucuagaucucca

SEQ ID NO: 59983 - RNA, 23 nt, Artificial Sequence
  Chemically synthesized
caagccuguaucuagaucuccag

SEQ ID NO: 59984 - RNA, 23 nt, Artificial Sequence
  Chemically synthesized
aagccuguaucuagaucuccagg

SEQ ID NO: 59985 - RNA, 23 nt, Artificial Sequence
  Chemically synthesized
uaaaguuuaaaacuccgcugcug

SEQ ID NO: 59986 - RNA, 23 nt, Artificial Sequence
  Chemically synthesized
aaaguuuaaaacuccgcugcugu

SEQ ID NO: 59987 - RNA, 23 nt, Artificial Sequence
  Chemically synthesized
aaguuuaaaacuccgcugcuguu

SEQ ID NO: 59988 - RNA, 23 nt, Artificial Sequence
  Chemically synthesized
aggauacugaugauguagguucg

SEQ ID NO: 59989 - RNA, 23 nt, Artificial Sequence
  Chemically synthesized
ggauacugaugauguagguucgc

SEQ ID NO: 59990 - RNA, 23 nt, Artificial Sequence
  Chemically synthesized
gauacugaugauguagguucgca

SEQ ID NO: 59991 - RNA, 23 nt, Artificial Sequence
  Chemically synthesized
auacugaugauguagguucgcag

SEQ ID NO: 59992 - RNA, 23 nt, Artificial Sequence
  Chemically synthesized
uacugaugauguagguucgcagc

SEQ ID NO: 59993 - RNA, 23 nt, Artificial Sequence
  Chemically synthesized
agugcaaacaucaaaguugcugg

SEQ ID NO: 59994 - RNA, 23 nt, Artificial Sequence
  Chemically synthesized
gugcaaacaucaaaguugcuggu

SEQ ID NO: 59995 - RNA, 23 nt, Artificial Sequence
  Chemically synthesized
ugcaaacaucaaaguugcugguc

SEQ ID NO: 59996 - RNA, 23 nt, Artificial Sequence
  Chemically synthesized
gcaaacaucaaaguugcugguca

SEQ ID NO: 59997 - RNA, 23 nt, Artificial Sequence
  Chemically synthesized
caaacaucaaaguugcuggucac

SEQ ID NO: 59998 - RNA, 23 nt, Artificial Sequence
  Chemically synthesized
gaggaaugaugaaaaagugaugg

SEQ ID NO: 59999 - RNA, 23 nt, Artificial Sequence
  Chemically synthesized
aggaaugaugaaaaagugauggu

SEQ ID NO: 60000 - RNA, 23 nt, Artificial Sequence
  Chemically synthesized
ggaaugaugaaaaagugauggua

SEQ ID NO: 60001 - RNA, 23 nt, Artificial Sequence
  Chemically synthesized
gaaugaugaaaaagugaugguaa

SEQ ID NO: 60002 - RNA, 23 nt, Artificial Sequence
  Chemically synthesized
aaugaugaaaaagugaugguaau

SEQ ID NO: 60003 - RNA, 23 nt, Artificial Sequence
  Chemically synthesized
aaugauauugugcaaguggaugg

SEQ ID NO: 60004 - RNA, 23 nt, Artificial Sequence
  Chemically synthesized
augauauugugcaaguggaugga

SEQ ID NO: 60005 - RNA, 23 nt, Artificial Sequence
  Chemically synthesized
ugauauugugcaaguggauggaa

SEQ ID NO: 60006 - RNA, 23 nt, Artificial Sequence
  Chemically synthesized
gauauugugcaaguggauggaaa

SEQ ID NO: 60007 - RNA, 23 nt, Artificial Sequence
  Chemically synthesized
auauugugcaaguggauggaaaa

SEQ ID NO: 60008 - RNA, 23 nt, Artificial Sequence
  Chemically synthesized
aaaaaauauaguagcacaagucc

SEQ ID NO: 60009 - RNA, 23 nt, Artificial Sequence
  Chemically synthesized
aaaaauauaguagcacaagucca

SEQ ID NO: 60010 - RNA, 23 nt, Artificial Sequence
  Chemically synthesized
aaaauauaguagcacaaguccau

SEQ ID NO: 60011 - RNA, 23 nt, Artificial Sequence
  Chemically synthesized
aaauauaguagcacaaguccauu

SEQ ID NO: 60012 - RNA, 23 nt, Artificial Sequence
  Chemically synthesized
aauauaguagcacaaguccauug

SEQ ID NO: 60013 - RNA, 23 nt, Artificial Sequence
  Chemically synthesized
auccauaauaggauacacaggga

SEQ ID NO: 60014 - RNA, 23 nt, Artificial Sequence
  Chemically synthesized
uccauaauaggauacacagggaa

SEQ ID NO: 60015 - RNA, 23 nt, Artificial Sequence
  Chemically synthesized
ccauaauaggauacacagggaaa

SEQ ID NO: 60016 - RNA, 23 nt, Artificial Sequence
  Chemically synthesized
cauaauaggauacacagggaaaa

SEQ ID NO: 60017 - RNA, 23 nt, Artificial Sequence
  Chemically synthesized
auaauaggauacacagggaaaaa

SEQ ID NO: 60018 - RNA, 23 nt, Artificial Sequence
  Chemically synthesized
auauaauguaaacaccauauugg

SEQ ID NO: 60019 - RNA, 23 nt, Artificial Sequence
  Chemically synthesized
uauaauguaaacaccauauuggc

SEQ ID NO: 60020 - RNA, 23 nt, Artificial Sequence
  Chemically synthesized
auaauguaaacaccauauuggcc

SEQ ID NO: 60021 - RNA, 23 nt, Artificial Sequence
  Chemically synthesized
uaauguaaacaccauauuggccc

SEQ ID NO: 60022 - RNA, 23 nt, Artificial Sequence
  Chemically synthesized
aauguaaacaccauauuggccca

SEQ ID NO: 60023 - RNA, 23 nt, Artificial Sequence
  Chemically synthesized
uuaaaugaaugugaguaguagcu

SEQ ID NO: 60024 - RNA, 23 nt, Artificial Sequence
  Chemically synthesized
uaaaugaaugugaguaguagcug

SEQ ID NO: 60025 - RNA, 23 nt, Artificial Sequence
  Chemically synthesized
aaaugaaugugaguaguagcuga

SEQ ID NO: 60026 - RNA, 23 nt, Artificial Sequence
  Chemically synthesized
aaugaaugugaguaguagcugag

SEQ ID NO: 60027 - RNA, 23 nt, Artificial Sequence
  Chemically synthesized
augaaugugaguaguagcugagg

SEQ ID NO: 60028 - RNA, 23 nt, Artificial Sequence
  Chemically synthesized
aaaaaaauauaguagcacaaguc

SEQ ID NO: 60029 - RNA, 23 nt, Artificial Sequence
  Chemically synthesized
aaugucuuuguguuuucuaagcc

SEQ ID NO: 60030 - RNA, 23 nt, Artificial Sequence
  Chemically synthesized
augucuuuguguuuucuaagccu

SEQ ID NO: 60031 - RNA, 23 nt, Artificial Sequence
  Chemically synthesized
ugucuuuguguuuucuaagccuc

SEQ ID NO: 60032 - RNA, 23 nt, Artificial Sequence
  Chemically synthesized
gucuuuguguuuucuaagccuca

SEQ ID NO: 60033 - RNA, 23 nt, Artificial Sequence
  Chemically synthesized
ucuuuguguuuucuaagccucau

SEQ ID NO: 60034 - RNA, 23 nt, Artificial Sequence
  Chemically synthesized
cuuucaagccuguaucuagaucu

SEQ ID NO: 60035 - RNA, 23 nt, Artificial Sequence
  Chemically synthesized
uuuguucugcacuguaauuagcc

SEQ ID NO: 60036 - RNA, 23 nt, Artificial Sequence
  Chemically synthesized
uuguucugcacuguaauuagccc

SEQ ID NO: 60037 - RNA, 23 nt, Artificial Sequence
  Chemically synthesized
uguucugcacuguaauuagccca

SEQ ID NO: 60038 - RNA, 23 nt, Artificial Sequence
  Chemically synthesized
guucugcacuguaauuagcccag

SEQ ID NO: 60039 - RNA, 23 nt, Artificial Sequence
  Chemically synthesized
uucugcacuguaauuagcccagu

SEQ ID NO: 60040 - RNA, 23 nt, Artificial Sequence
  Chemically synthesized
cccuaaugaaagaaaagugcuga

SEQ ID NO: 60041 - RNA, 23 nt, Artificial Sequence
  Chemically synthesized
ccuaaugaaagaaaagugcugau

SEQ ID NO: 60042 - RNA, 23 nt, Artificial Sequence
  Chemically synthesized
cuaaugaaagaaaagugcugaua

SEQ ID NO: 60043 - RNA, 23 nt, Artificial Sequence
  Chemically synthesized
uaaugaaagaaaagugcugauac

SEQ ID NO: 60044 - RNA, 23 nt, Artificial Sequence
  Chemically synthesized
aaugaaagaaaagugcugauacc

SEQ ID NO: 60045 - RNA, 23 nt, Artificial Sequence
  Chemically synthesized
aaacaucaaaguugcuggucacu

SEQ ID NO: 60046 - RNA, 23 nt, Artificial Sequence
  Chemically synthesized
cauaauuaacaaaaccaguaucc

SEQ ID NO: 60047 - RNA, 23 nt, Artificial Sequence
  Chemically synthesized
auaauuaacaaaaccaguaucca

SEQ ID NO: 60048 - RNA, 23 nt, Artificial Sequence
  Chemically synthesized
uaauuaacaaaaccaguauccau

SEQ ID NO: 60049 - RNA, 23 nt, Artificial Sequence
  Chemically synthesized
aauuaacaaaaccaguauccaua

SEQ ID NO: 60050 - RNA, 23 nt, Artificial Sequence
  Chemically synthesized
auuaacaaaaccaguauccauaa

SEQ ID NO: 60051 - RNA, 23 nt, Artificial Sequence
  Chemically synthesized
uauccauaauaggauacacaggg

SEQ ID NO: 60052 - RNA, 23 nt, Artificial Sequence
  Chemically synthesized
auacacagggaaaaacauuuuag

SEQ ID NO: 60053 - RNA, 23 nt, Artificial Sequence
  Chemically synthesized
uacacagggaaaaacauuuuagg

SEQ ID NO: 60054 - RNA, 23 nt, Artificial Sequence
  Chemically synthesized
acacagggaaaaacauuuuagga

SEQ ID NO: 60055 - RNA, 23 nt, Artificial Sequence
  Chemically synthesized
cacagggaaaaacauuuuaggag

SEQ ID NO: 60056 - RNA, 23 nt, Artificial Sequence
  Chemically synthesized
acagggaaaaacauuuuaggaga

SEQ ID NO: 60057 - RNA, 23 nt, Artificial Sequence
  Chemically synthesized
accacaaaaauccaugagaaagg

SEQ ID NO: 60058 - RNA, 23 nt, Artificial Sequence
  Chemically synthesized
auggaaaaucuuauucugugggc

SEQ ID NO: 60059 - RNA, 23 nt, Artificial Sequence
  Chemically synthesized
uggaaaaucuuauucugugggcc

SEQ ID NO: 60060 - RNA, 23 nt, Artificial Sequence
  Chemically synthesized
ggaaaaucuuauucugugggccu

SEQ ID NO: 60061 - RNA, 23 nt, Artificial Sequence
  Chemically synthesized
gaaaaucuuauucugugggccuu

SEQ ID NO: 60062 - RNA, 23 nt, Artificial Sequence
  Chemically synthesized
aaaaucuuauucugugggccuug

SEQ ID NO: 60063 - RNA, 23 nt, Artificial Sequence
  Chemically synthesized
guugaaaagaccuaagauguuca

SEQ ID NO: 60064 - RNA, 23 nt, Artificial Sequence
  Chemically synthesized
uugaaaagaccuaagauguucag

SEQ ID NO: 60065 - RNA, 23 nt, Artificial Sequence
  Chemically synthesized
ugaaaagaccuaagauguucagg

SEQ ID NO: 60066 - RNA, 23 nt, Artificial Sequence
  Chemically synthesized
gaaaagaccuaagauguucagga

SEQ ID NO: 60067 - RNA, 23 nt, Artificial Sequence
  Chemically synthesized
aaaagaccuaagauguucaggaa

SEQ ID NO: 60068 - RNA, 23 nt, Artificial Sequence
  Chemically synthesized
aaaauauuuagccacaauuacca

SEQ ID NO: 60069 - RNA, 23 nt, Artificial Sequence
  Chemically synthesized
aaauauuuagccacaauuaccac

SEQ ID NO: 60070 - RNA, 23 nt, Artificial Sequence
  Chemically synthesized
aauauuuagccacaauuaccacc

SEQ ID NO: 60071 - RNA, 23 nt, Artificial Sequence
  Chemically synthesized
auauuuagccacaauuaccaccc

SEQ ID NO: 60072 - RNA, 23 nt, Artificial Sequence
  Chemically synthesized
uauuuagccacaauuaccacccg

SEQ ID NO: 60073 - RNA, 23 nt, Artificial Sequence
  Chemically synthesized
acagcaccuuuuuucuucuccac

SEQ ID NO: 60074 - RNA, 23 nt, Artificial Sequence
  Chemically synthesized
cagcaccuuuuuucuucuccaca

SEQ ID NO: 60075 - RNA, 23 nt, Artificial Sequence
  Chemically synthesized
agcaccuuuuuucuucuccacaa

SEQ ID NO: 60076 - RNA, 23 nt, Artificial Sequence
  Chemically synthesized
augcuuucaagccuguaucuaga

SEQ ID NO: 60077 - RNA, 23 nt, Artificial Sequence
  Chemically synthesized
ugcuuucaagccuguaucuagau

SEQ ID NO: 60078 - RNA, 23 nt, Artificial Sequence
  Chemically synthesized
gcuuucaagccuguaucuagauc

SEQ ID NO: 60079 - RNA, 23 nt, Artificial Sequence
  Chemically synthesized
agccuguaucuagaucuccaggu

SEQ ID NO: 60080 - RNA, 23 nt, Artificial Sequence
  Chemically synthesized
ccuuggaggaugaaguaaaauga

SEQ ID NO: 60081 - RNA, 23 nt, Artificial Sequence
  Chemically synthesized
cuuggaggaugaaguaaaaugaa

SEQ ID NO: 60082 - RNA, 23 nt, Artificial Sequence
  Chemically synthesized
uuggaggaugaaguaaaaugaaa

SEQ ID NO: 60083 - RNA, 23 nt, Artificial Sequence
  Chemically synthesized
uggaggaugaaguaaaaugaaaa

SEQ ID NO: 60084 - RNA, 23 nt, Artificial Sequence
  Chemically synthesized
ggaggaugaaguaaaaugaaaag

SEQ ID NO: 60085 - RNA, 23 nt, Artificial Sequence
  Chemically synthesized
ucugcacuguaauuagcccaguu

SEQ ID NO: 60086 - RNA, 23 nt, Artificial Sequence
  Chemically synthesized
uguaauugcggcaagaagaauug

SEQ ID NO: 60087 - RNA, 23 nt, Artificial Sequence
  Chemically synthesized
guaauugcggcaagaagaauugu

SEQ ID NO: 60088 - RNA, 23 nt, Artificial Sequence
  Chemically synthesized
uaauugcggcaagaagaauuguu

SEQ ID NO: 60089 - RNA, 23 nt, Artificial Sequence
  Chemically synthesized
aauugcggcaagaagaauuguuu

SEQ ID NO: 60090 - RNA, 23 nt, Artificial Sequence
  Chemically synthesized
auugcggcaagaagaauuguuuc

SEQ ID NO: 60091 - RNA, 23 nt, Artificial Sequence
  Chemically synthesized
ucccuuaacccgauccuuaacgc

SEQ ID NO: 60092 - RNA, 23 nt, Artificial Sequence
  Chemically synthesized
cccuuaacccgauccuuaacgcc

SEQ ID NO: 60093 - RNA, 23 nt, Artificial Sequence
  Chemically synthesized
ccuuaacccgauccuuaacgccc

SEQ ID NO: 60094 - RNA, 23 nt, Artificial Sequence
  Chemically synthesized
cuuaacccgauccuuaacgcccu

SEQ ID NO: 60095 - RNA, 23 nt, Artificial Sequence
  Chemically synthesized
uuaacccgauccuuaacgcccuu

SEQ ID NO: 60096 - RNA, 23 nt, Artificial Sequence
  Chemically synthesized
uucaaugauauucaaggccaggg

SEQ ID NO: 60097 - RNA, 23 nt, Artificial Sequence
  Chemically synthesized
ucaaugauauucaaggccaggga

SEQ ID NO: 60098 - RNA, 23 nt, Artificial Sequence
  Chemically synthesized
caaugauauucaaggccagggac

SEQ ID NO: 60099 - RNA, 23 nt, Artificial Sequence
  Chemically synthesized
aaugauauucaaggccagggaca

SEQ ID NO: 60100 - RNA, 23 nt, Artificial Sequence
  Chemically synthesized
augauauucaaggccagggacac

SEQ ID NO: 60101 - RNA, 23 nt, Artificial Sequence
  Chemically synthesized
cuucuuuaucucaaucugcuuca

SEQ ID NO: 60102 - RNA, 23 nt, Artificial Sequence
  Chemically synthesized
uucuuuaucucaaucugcuucaa

SEQ ID NO: 60103 - RNA, 23 nt, Artificial Sequence
  Chemically synthesized
ucuuuaucucaaucugcuucaag

SEQ ID NO: 60104 - RNA, 23 nt, Artificial Sequence
  Chemically synthesized
cuuuaucucaaucugcuucaagu

SEQ ID NO: 60105 - RNA, 23 nt, Artificial Sequence
  Chemically synthesized
uuuaucucaaucugcuucaagug

SEQ ID NO: 60106 - RNA, 23 nt, Artificial Sequence
  Chemically synthesized
uguacaaaacuguuuauguagcu

SEQ ID NO: 60107 - RNA, 23 nt, Artificial Sequence
  Chemically synthesized
agaugucuucaacauauaguuca

SEQ ID NO: 60108 - RNA, 23 nt, Artificial Sequence
  Chemically synthesized
gaugucuucaacauauaguucaa

SEQ ID NO: 60109 - RNA, 23 nt, Artificial Sequence
  Chemically synthesized
augucuucaacauauaguucaaa

SEQ ID NO: 60110 - RNA, 23 nt, Artificial Sequence
  Chemically synthesized
ugucuucaacauauaguucaaau

SEQ ID NO: 60111 - RNA, 23 nt, Artificial Sequence
  Chemically synthesized
gucuucaacauauaguucaaaua

SEQ ID NO: 60112 - RNA, 23 nt, Artificial Sequence
  Chemically synthesized
acaucaaaguugcuggucacucc

SEQ ID NO: 60113 - RNA, 23 nt, Artificial Sequence
  Chemically synthesized
caucaaaguugcuggucacucca

SEQ ID NO: 60114 - RNA, 23 nt, Artificial Sequence
  Chemically synthesized
aucaaaguugcuggucacuccaa

SEQ ID NO: 60115 - RNA, 23 nt, Artificial Sequence
  Chemically synthesized
ucaaaguugcuggucacuccaaa

SEQ ID NO: 60116 - RNA, 23 nt, Artificial Sequence
  Chemically synthesized
caaaguugcuggucacuccaaaa

SEQ ID NO: 60117 - RNA, 23 nt, Artificial Sequence
  Chemically synthesized
aacaaaaccaguauccauaauag

SEQ ID NO: 60118 - RNA, 23 nt, Artificial Sequence
  Chemically synthesized
acaaaaccaguauccauaauagg

SEQ ID NO: 60119 - RNA, 23 nt, Artificial Sequence
  Chemically synthesized
caaaaccaguauccauaauagga

SEQ ID NO: 60120 - RNA, 23 nt, Artificial Sequence
  Chemically synthesized
aaaaccaguauccauaauaggau

SEQ ID NO: 60121 - RNA, 23 nt, Artificial Sequence
  Chemically synthesized
aaaccaguauccauaauaggaua

SEQ ID NO: 60122 - RNA, 23 nt, Artificial Sequence
  Chemically synthesized
cagggaaaaacauuuuaggagaa

SEQ ID NO: 60123 - RNA, 23 nt, Artificial Sequence
  Chemically synthesized
cauuaaaugaaugugaguaguag

SEQ ID NO: 60124 - RNA, 23 nt, Artificial Sequence
  Chemically synthesized
auuaaaugaaugugaguaguagc

SEQ ID NO: 60125 - RNA, 23 nt, Artificial Sequence
  Chemically synthesized
ugugaguaguagcugaggaauga

SEQ ID NO: 60126 - RNA, 23 nt, Artificial Sequence
  Chemically synthesized
gugaguaguagcugaggaaugau

SEQ ID NO: 60127 - RNA, 23 nt, Artificial Sequence
  Chemically synthesized
ugaguaguagcugaggaaugaug

SEQ ID NO: 60128 - RNA, 23 nt, Artificial Sequence
  Chemically synthesized
gaguaguagcugaggaaugauga

SEQ ID NO: 60129 - RNA, 23 nt, Artificial Sequence
  Chemically synthesized
aguaguagcugaggaaugaugaa

SEQ ID NO: 60130 - RNA, 23 nt, Artificial Sequence
  Chemically synthesized
cuuguugaaaagaccuaagaugu

SEQ ID NO: 60131 - RNA, 23 nt, Artificial Sequence
  Chemically synthesized
uuguugaaaagaccuaagauguu

SEQ ID NO: 60132 - RNA, 23 nt, Artificial Sequence
  Chemically synthesized
aaagaccuaagauguucaggaag

SEQ ID NO: 60133 - RNA, 23 nt, Artificial Sequence
  Chemically synthesized
auuuagccacaauuaccacccgc

SEQ ID NO: 60134 - RNA, 23 nt, Artificial Sequence
  Chemically synthesized
uuuagccacaauuaccacccgcu

SEQ ID NO: 60135 - RNA, 23 nt, Artificial Sequence
  Chemically synthesized
uuagccacaauuaccacccgcuc

SEQ ID NO: 60136 - RNA, 23 nt, Artificial Sequence
  Chemically synthesized
uuuucuucuccacaauugagugg

SEQ ID NO: 60137 - RNA, 23 nt, Artificial Sequence
  Chemically synthesized
uggcuaguggcuguaauucaugu

SEQ ID NO: 60138 - RNA, 23 nt, Artificial Sequence
  Chemically synthesized
ggcuaguggcuguaauucauguc

SEQ ID NO: 60139 - RNA, 23 nt, Artificial Sequence
  Chemically synthesized
gcuaguggcuguaauucaugucc

SEQ ID NO: 60140 - RNA, 23 nt, Artificial Sequence
  Chemically synthesized
cuaguggcuguaauucaugucca

SEQ ID NO: 60141 - RNA, 23 nt, Artificial Sequence
  Chemically synthesized
uaguggcuguaauucauguccag

SEQ ID NO: 60142 - RNA, 23 nt, Artificial Sequence
  Chemically synthesized
cacuguaauuagcccaguuuugc

SEQ ID NO: 60143 - RNA, 23 nt, Artificial Sequence
  Chemically synthesized
acuguaauuagcccaguuuugcu

SEQ ID NO: 60144 - RNA, 23 nt, Artificial Sequence
  Chemically synthesized
cuguaauuagcccaguuuugcuc

SEQ ID NO: 60145 - RNA, 23 nt, Artificial Sequence
  Chemically synthesized
uguaauuagcccaguuuugcuca

SEQ ID NO: 60146 - RNA, 23 nt, Artificial Sequence
  Chemically synthesized
guaauuagcccaguuuugcucac

SEQ ID NO: 60147 - RNA, 23 nt, Artificial Sequence
  Chemically synthesized
cacaaauaugaucugcaggaccc

SEQ ID NO: 60148 - RNA, 23 nt, Artificial Sequence
  Chemically synthesized
acaaauaugaucugcaggaccca

SEQ ID NO: 60149 - RNA, 23 nt, Artificial Sequence
  Chemically synthesized
caaauaugaucugcaggacccag

SEQ ID NO: 60150 - RNA, 23 nt, Artificial Sequence
  Chemically synthesized
aaauaugaucugcaggacccaga

SEQ ID NO: 60151 - RNA, 23 nt, Artificial Sequence
  Chemically synthesized
aauaugaucugcaggacccagaa

SEQ ID NO: 60152 - RNA, 23 nt, Artificial Sequence
  Chemically synthesized
ccccuaaugaaagaaaagugcug

SEQ ID NO: 60153 - RNA, 23 nt, Artificial Sequence
  Chemically synthesized
uuguacaaaacuguuuauguagc

SEQ ID NO: 60154 - RNA, 23 nt, Artificial Sequence
  Chemically synthesized
cagcauuuucaccaaucuucugu

SEQ ID NO: 60155 - RNA, 23 nt, Artificial Sequence
  Chemically synthesized
agcauuuucaccaaucuucugug

SEQ ID NO: 60156 - RNA, 23 nt, Artificial Sequence
  Chemically synthesized
gcauuuucaccaaucuucuguga

SEQ ID NO: 60157 - RNA, 23 nt, Artificial Sequence
  Chemically synthesized
cauuuucaccaaucuucugugau

SEQ ID NO: 60158 - RNA, 23 nt, Artificial Sequence
  Chemically synthesized
auuuucaccaaucuucugugaug

SEQ ID NO: 60159 - RNA, 23 nt, Artificial Sequence
  Chemically synthesized
cugugaugaguuuuaaaaaaggc

SEQ ID NO: 60160 - RNA, 23 nt, Artificial Sequence
  Chemically synthesized
ugugaugaguuuuaaaaaaggca

SEQ ID NO: 60161 - RNA, 23 nt, Artificial Sequence
  Chemically synthesized
gugaugaguuuuaaaaaaggcau

SEQ ID NO: 60162 - RNA, 23 nt, Artificial Sequence
  Chemically synthesized
ugaugaguuuuaaaaaaggcauu

SEQ ID NO: 60163 - RNA, 23 nt, Artificial Sequence
  Chemically synthesized
gaugaguuuuaaaaaaggcauuu

SEQ ID NO: 60164 - RNA, 23 nt, Artificial Sequence
  Chemically synthesized
aacaucaaaguugcuggucacuc

SEQ ID NO: 60165 - RNA, 23 nt, Artificial Sequence
  Chemically synthesized
aauccaugagaaagguucaaauu

SEQ ID NO: 60166 - RNA, 23 nt, Artificial Sequence
  Chemically synthesized
guaguagcugaggaaugaugaaa

SEQ ID NO: 60167 - RNA, 23 nt, Artificial Sequence
  Chemically synthesized
uaguagcugaggaaugaugaaaa

SEQ ID NO: 60168 - RNA, 23 nt, Artificial Sequence
  Chemically synthesized
caaagugcaaauuuuaacaaugg

SEQ ID NO: 60169 - RNA, 23 nt, Artificial Sequence
  Chemically synthesized
aaagugcaaauuuuaacaaugga

SEQ ID NO: 60170 - RNA, 23 nt, Artificial Sequence
  Chemically synthesized
aagugcaaauuuuaacaauggaa

SEQ ID NO: 60171 - RNA, 23 nt, Artificial Sequence
  Chemically synthesized
agugcaaauuuuaacaauggaau

SEQ ID NO: 60172 - RNA, 23 nt, Artificial Sequence
  Chemically synthesized
gugcaaauuuuaacaauggaaug

SEQ ID NO: 60173 - RNA, 23 nt, Artificial Sequence
  Chemically synthesized
uguuuuagcagggacuuaaggac

SEQ ID NO: 60174 - RNA, 23 nt, Artificial Sequence
  Chemically synthesized
guuuuagcagggacuuaaggaca

SEQ ID NO: 60175 - RNA, 23 nt, Artificial Sequence
  Chemically synthesized
uuuuagcagggacuuaaggacaa

SEQ ID NO: 60176 - RNA, 23 nt, Artificial Sequence
  Chemically synthesized
uuuagcagggacuuaaggacaau

SEQ ID NO: 60177 - RNA, 23 nt, Artificial Sequence
  Chemically synthesized
uuagcagggacuuaaggacaauc

SEQ ID NO: 60178 - RNA, 23 nt, Artificial Sequence
  Chemically synthesized
ucuaaguucuuugaauccacuac

SEQ ID NO: 60179 - RNA, 23 nt, Artificial Sequence
  Chemically synthesized
cacuacuuuaaauaccaacaugc

SEQ ID NO: 60180 - RNA, 23 nt, Artificial Sequence
  Chemically synthesized
acuacuuuaaauaccaacaugca

SEQ ID NO: 60181 - RNA, 23 nt, Artificial Sequence
  Chemically synthesized
cuacuuuaaauaccaacaugcac

SEQ ID NO: 60182 - RNA, 23 nt, Artificial Sequence
  Chemically synthesized
uacuuuaaauaccaacaugcacc

SEQ ID NO: 60183 - RNA, 23 nt, Artificial Sequence
  Chemically synthesized
acuuuaaauaccaacaugcaccu

SEQ ID NO: 60184 - RNA, 23 nt, Artificial Sequence
  Chemically synthesized
uaaugucuuuguguuuucuaagc

SEQ ID NO: 60185 - RNA, 23 nt, Artificial Sequence
  Chemically synthesized
cuuuguguuuucuaagccucaug

SEQ ID NO: 60186 - RNA, 23 nt, Artificial Sequence
  Chemically synthesized
uuuguguuuucuaagccucauga

SEQ ID NO: 60187 - RNA, 23 nt, Artificial Sequence
  Chemically synthesized
accggaucaaaauuaacaccugg

SEQ ID NO: 60188 - RNA, 23 nt, Artificial Sequence
  Chemically synthesized
ccggaucaaaauuaacaccuggu

SEQ ID NO: 60189 - RNA, 23 nt, Artificial Sequence
  Chemically synthesized
cggaucaaaauuaacaccuggug

SEQ ID NO: 60190 - RNA, 23 nt, Artificial Sequence
  Chemically synthesized
ggaucaaaauuaacaccuggugc

SEQ ID NO: 60191 - RNA, 23 nt, Artificial Sequence
  Chemically synthesized
gaucaaaauuaacaccuggugca

SEQ ID NO: 60192 - RNA, 23 nt, Artificial Sequence
  Chemically synthesized
gaaguaaaaugaaaaggcaaguu

SEQ ID NO: 60193 - RNA, 23 nt, Artificial Sequence
  Chemically synthesized
ucggggaaaucaaaaggcugugc

SEQ ID NO: 60194 - RNA, 23 nt, Artificial Sequence
  Chemically synthesized
cggggaaaucaaaaggcugugca

SEQ ID NO: 60195 - RNA, 23 nt, Artificial Sequence
  Chemically synthesized
ggggaaaucaaaaggcugugcau

SEQ ID NO: 60196 - RNA, 23 nt, Artificial Sequence
  Chemically synthesized
gggaaaucaaaaggcugugcaug

SEQ ID NO: 60197 - RNA, 23 nt, Artificial Sequence
  Chemically synthesized
ggaaaucaaaaggcugugcaugg

SEQ ID NO: 60198 - RNA, 23 nt, Artificial Sequence
  Chemically synthesized
gaaaucaaaaggcugugcauggg

SEQ ID NO: 60199 - RNA, 23 nt, Artificial Sequence
  Chemically synthesized
aaaucaaaaggcugugcauggga

SEQ ID NO: 60200 - RNA, 23 nt, Artificial Sequence
  Chemically synthesized
aaucaaaaggcugugcaugggag

SEQ ID NO: 60201 - RNA, 23 nt, Artificial Sequence
  Chemically synthesized
aucaaaaggcugugcaugggagu

SEQ ID NO: 60202 - RNA, 23 nt, Artificial Sequence
  Chemically synthesized
aaauaagcauauuuuugagaccc

SEQ ID NO: 60203 - RNA, 23 nt, Artificial Sequence
  Chemically synthesized
aauaagcauauuuuugagaccca

SEQ ID NO: 60204 - RNA, 23 nt, Artificial Sequence
  Chemically synthesized
auaagcauauuuuugagacccac

SEQ ID NO: 60205 - RNA, 23 nt, Artificial Sequence
  Chemically synthesized
uaagcauauuuuugagacccaca

SEQ ID NO: 60206 - RNA, 23 nt, Artificial Sequence
  Chemically synthesized
aagcauauuuuugagacccacag

SEQ ID NO: 60207 - RNA, 23 nt, Artificial Sequence
  Chemically synthesized
agcauauuuuugagacccacagu

SEQ ID NO: 60208 - RNA, 23 nt, Artificial Sequence
  Chemically synthesized
gcauauuuuugagacccacaguc

SEQ ID NO: 60209 - RNA, 23 nt, Artificial Sequence
  Chemically synthesized
cauauuuuugagacccacagucu

SEQ ID NO: 60210 - RNA, 23 nt, Artificial Sequence
  Chemically synthesized
auauuuuugagacccacagucuu

SEQ ID NO: 60211 - RNA, 23 nt, Artificial Sequence
  Chemically synthesized
cauagaagaguucaaugauauuc

SEQ ID NO: 60212 - RNA, 23 nt, Artificial Sequence
  Chemically synthesized
auagaagaguucaaugauauuca

SEQ ID NO: 60213 - RNA, 23 nt, Artificial Sequence
  Chemically synthesized
uagaagaguucaaugauauucaa

SEQ ID NO: 60214 - RNA, 23 nt, Artificial Sequence
  Chemically synthesized
agaagaguucaaugauauucaag

SEQ ID NO: 60215 - RNA, 23 nt, Artificial Sequence
  Chemically synthesized
gaagaguucaaugauauucaagg

SEQ ID NO: 60216 - RNA, 23 nt, Artificial Sequence
  Chemically synthesized
ucgcauuuucaccuuaccaugcu

SEQ ID NO: 60217 - RNA, 23 nt, Artificial Sequence
  Chemically synthesized
cgcauuuucaccuuaccaugcuc

SEQ ID NO: 60218 - RNA, 23 nt, Artificial Sequence
  Chemically synthesized
gcauuuucaccuuaccaugcucu

SEQ ID NO: 60219 - RNA, 23 nt, Artificial Sequence
  Chemically synthesized
cauuuucaccuuaccaugcucuu

SEQ ID NO: 60220 - RNA, 23 nt, Artificial Sequence
  Chemically synthesized
auuuucaccuuaccaugcucuuc

SEQ ID NO: 60221 - RNA, 23 nt, Artificial Sequence
  Chemically synthesized
ccagaagcgcacaugagagauug

SEQ ID NO: 60222 - RNA, 23 nt, Artificial Sequence
  Chemically synthesized
cagaagcgcacaugagagauugg

SEQ ID NO: 60223 - RNA, 23 nt, Artificial Sequence
  Chemically synthesized
agaagcgcacaugagagauuggg

SEQ ID NO: 60224 - RNA, 23 nt, Artificial Sequence
  Chemically synthesized
gaagcgcacaugagagauuggga

SEQ ID NO: 60225 - RNA, 23 nt, Artificial Sequence
  Chemically synthesized
aagcgcacaugagagauugggaa

SEQ ID NO: 60226 - RNA, 23 nt, Artificial Sequence
  Chemically synthesized
uuauugaauaaagaacacucucc

SEQ ID NO: 60227 - RNA, 23 nt, Artificial Sequence
  Chemically synthesized
uauugaauaaagaacacucucca

SEQ ID NO: 60228 - RNA, 23 nt, Artificial Sequence
  Chemically synthesized
auugaauaaagaacacucuccag

SEQ ID NO: 60229 - RNA, 23 nt, Artificial Sequence
  Chemically synthesized
uugaauaaagaacacucuccaga

SEQ ID NO: 60230 - RNA, 23 nt, Artificial Sequence
  Chemically synthesized
ugaauaaagaacacucuccagaa

SEQ ID NO: 60231 - RNA, 23 nt, Artificial Sequence
  Chemically synthesized
ugcaaugaagcugaacaugaccg

SEQ ID NO: 60232 - RNA, 23 nt, Artificial Sequence
  Chemically synthesized
gcaaugaagcugaacaugaccgu

SEQ ID NO: 60233 - RNA, 23 nt, Artificial Sequence
  Chemically synthesized
caaugaagcugaacaugaccgua

SEQ ID NO: 60234 - RNA, 23 nt, Artificial Sequence
  Chemically synthesized
aaugaagcugaacaugaccguag

SEQ ID NO: 60235 - RNA, 23 nt, Artificial Sequence
  Chemically synthesized
augaagcugaacaugaccguagu

SEQ ID NO: 60236 - RNA, 23 nt, Artificial Sequence
  Chemically synthesized
ugucauacucagcauuuucacca

SEQ ID NO: 60237 - RNA, 23 nt, Artificial Sequence
  Chemically synthesized
gucauacucagcauuuucaccaa

SEQ ID NO: 60238 - RNA, 23 nt, Artificial Sequence
  Chemically synthesized
ucauacucagcauuuucaccaau

SEQ ID NO: 60239 - RNA, 23 nt, Artificial Sequence
  Chemically synthesized
cauacucagcauuuucaccaauc

SEQ ID NO: 60240 - RNA, 23 nt, Artificial Sequence
  Chemically synthesized
auacucagcauuuucaccaaucu

SEQ ID NO: 60241 - RNA, 23 nt, Artificial Sequence
  Chemically synthesized
guuguauguguacuacugaaucc

SEQ ID NO: 60242 - RNA, 23 nt, Artificial Sequence
  Chemically synthesized
uguauguguacuacugaauccuc

SEQ ID NO: 60243 - RNA, 23 nt, Artificial Sequence
  Chemically synthesized
guauguguacuacugaauccucu

SEQ ID NO: 60244 - RNA, 23 nt, Artificial Sequence
  Chemically synthesized
uauguguacuacugaauccucuu

SEQ ID NO: 60245 - RNA, 23 nt, Artificial Sequence
  Chemically synthesized
cauuccaaauaaaaucuuagugc

SEQ ID NO: 60246 - RNA, 23 nt, Artificial Sequence
  Chemically synthesized
auuccaaauaaaaucuuagugca

SEQ ID NO: 60247 - RNA, 23 nt, Artificial Sequence
  Chemically synthesized
uuccaaauaaaaucuuagugcaa

SEQ ID NO: 60248 - RNA, 23 nt, Artificial Sequence
  Chemically synthesized
uccaaauaaaaucuuagugcaaa

SEQ ID NO: 60249 - RNA, 23 nt, Artificial Sequence
  Chemically synthesized
ccaaauaaaaucuuagugcaaac

SEQ ID NO: 60250 - RNA, 23 nt, Artificial Sequence
  Chemically synthesized
uucuaagucucucacauuaauga

SEQ ID NO: 60251 - RNA, 23 nt, Artificial Sequence
  Chemically synthesized
ucuaagucucucacauuaaugac

SEQ ID NO: 60252 - RNA, 23 nt, Artificial Sequence
  Chemically synthesized
cuaagucucucacauuaaugacu

SEQ ID NO: 60253 - RNA, 23 nt, Artificial Sequence
  Chemically synthesized
uaagucucucacauuaaugacua

SEQ ID NO: 60254 - RNA, 23 nt, Artificial Sequence
  Chemically synthesized
aagucucucacauuaaugacuaa

SEQ ID NO: 60255 - RNA, 23 nt, Artificial Sequence
  Chemically synthesized
uuuaggagaaaaaaaaagugugc

SEQ ID NO: 60256 - RNA, 23 nt, Artificial Sequence
  Chemically synthesized
uuaggagaaaaaaaaagugugcu

SEQ ID NO: 60257 - RNA, 23 nt, Artificial Sequence
  Chemically synthesized
uaggagaaaaaaaaagugugcuu

SEQ ID NO: 60258 - RNA, 23 nt, Artificial Sequence
  Chemically synthesized
aggagaaaaaaaaagugugcuuu

SEQ ID NO: 60259 - RNA, 23 nt, Artificial Sequence
  Chemically synthesized
ggagaaaaaaaaagugugcuuua

SEQ ID NO: 60260 - RNA, 23 nt, Artificial Sequence
  Chemically synthesized
cccacaccacaaaaauccaugag

SEQ ID NO: 60261 - RNA, 23 nt, Artificial Sequence
  Chemically synthesized
ccacaccacaaaaauccaugaga

SEQ ID NO: 60262 - RNA, 23 nt, Artificial Sequence
  Chemically synthesized
cacaccacaaaaauccaugagaa

SEQ ID NO: 60263 - RNA, 23 nt, Artificial Sequence
  Chemically synthesized
acaccacaaaaauccaugagaaa

SEQ ID NO: 60264 - RNA, 23 nt, Artificial Sequence
  Chemically synthesized
caccacaaaaauccaugagaaag

SEQ ID NO: 60265 - RNA, 23 nt, Artificial Sequence
  Chemically synthesized
ugugaguuuauacuguaucugcu

SEQ ID NO: 60266 - RNA, 23 nt, Artificial Sequence
  Chemically synthesized
gugaguuuauacuguaucugcuu

SEQ ID NO: 60267 - RNA, 23 nt, Artificial Sequence
  Chemically synthesized
ugaguuuauacuguaucugcuug

SEQ ID NO: 60268 - RNA, 23 nt, Artificial Sequence
  Chemically synthesized
gaguuuauacuguaucugcuugu

SEQ ID NO: 60269 - RNA, 23 nt, Artificial Sequence
  Chemically synthesized
aguuuauacuguaucugcuugua

SEQ ID NO: 60270 - RNA, 23 nt, Artificial Sequence
  Chemically synthesized
caaaugcauggaaaaucuuauuc

SEQ ID NO: 60271 - RNA, 23 nt, Artificial Sequence
  Chemically synthesized
aaaugcauggaaaaucuuauucu

SEQ ID NO: 60272 - RNA, 23 nt, Artificial Sequence
  Chemically synthesized
aaugcauggaaaaucuuauucug

SEQ ID NO: 60273 - RNA, 23 nt, Artificial Sequence
  Chemically synthesized
augcauggaaaaucuuauucugu

SEQ ID NO: 60274 - RNA, 23 nt, Artificial Sequence
  Chemically synthesized
ugcauggaaaaucuuauucugug

SEQ ID NO: 60275 - RNA, 23 nt, Artificial Sequence
  Chemically synthesized
cuuuaaauaccaacaugcaccuc

SEQ ID NO: 60276 - RNA, 23 nt, Artificial Sequence
  Chemically synthesized
uuuaaauaccaacaugcaccucu

SEQ ID NO: 60277 - RNA, 23 nt, Artificial Sequence
  Chemically synthesized
uuaaauaccaacaugcaccucuc

SEQ ID NO: 60278 - RNA, 23 nt, Artificial Sequence
  Chemically synthesized
cuagguauucuaaugucuuugug

SEQ ID NO: 60279 - RNA, 23 nt, Artificial Sequence
  Chemically synthesized
uagguauucuaaugucuuugugu

SEQ ID NO: 60280 - RNA, 23 nt, Artificial Sequence
  Chemically synthesized
agguauucuaaugucuuuguguu

SEQ ID NO: 60281 - RNA, 23 nt, Artificial Sequence
  Chemically synthesized
gguauucuaaugucuuuguguuu

SEQ ID NO: 60282 - RNA, 23 nt, Artificial Sequence
  Chemically synthesized
guauucuaaugucuuuguguuuu

SEQ ID NO: 60283 - RNA, 23 nt, Artificial Sequence
  Chemically synthesized
aucaaaauuaacaccuggugcac

SEQ ID NO: 60284 - RNA, 23 nt, Artificial Sequence
  Chemically synthesized
ucaaaauuaacaccuggugcacu

SEQ ID NO: 60285 - RNA, 23 nt, Artificial Sequence
  Chemically synthesized
caaaauuaacaccuggugcacuu

SEQ ID NO: 60286 - RNA, 23 nt, Artificial Sequence
  Chemically synthesized
aaaauuaacaccuggugcacuuu

SEQ ID NO: 60287 - RNA, 23 nt, Artificial Sequence
  Chemically synthesized
uuucuucuccacaauugagugga

SEQ ID NO: 60288 - RNA, 23 nt, Artificial Sequence
  Chemically synthesized
cuccacaauugaguggaaucuug

SEQ ID NO: 60289 - RNA, 23 nt, Artificial Sequence
  Chemically synthesized
uccacaauugaguggaaucuuga

SEQ ID NO: 60290 - RNA, 23 nt, Artificial Sequence
  Chemically synthesized
ccacaauugaguggaaucuugau

SEQ ID NO: 60291 - RNA, 23 nt, Artificial Sequence
  Chemically synthesized
cacaauugaguggaaucuugaug

SEQ ID NO: 60292 - RNA, 23 nt, Artificial Sequence
  Chemically synthesized
acaauugaguggaaucuugaugc

SEQ ID NO: 60293 - RNA, 23 nt, Artificial Sequence
  Chemically synthesized
ucaaaaggcugugcaugggaguu

SEQ ID NO: 60294 - RNA, 23 nt, Artificial Sequence
  Chemically synthesized
gauuuuguucugcacuguaauua

SEQ ID NO: 60295 - RNA, 23 nt, Artificial Sequence
  Chemically synthesized
auuuuguucugcacuguaauuag

SEQ ID NO: 60296 - RNA, 23 nt, Artificial Sequence
  Chemically synthesized
uuuuguucugcacuguaauuagc

SEQ ID NO: 60297 - RNA, 23 nt, Artificial Sequence
  Chemically synthesized
cugcacuguaauuagcccaguuu

SEQ ID NO: 60298 - RNA, 23 nt, Artificial Sequence
  Chemically synthesized
ugcacuguaauuagcccaguuuu

SEQ ID NO: 60299 - RNA, 23 nt, Artificial Sequence
  Chemically synthesized
uuuucaccuuaccaugcucuuca

SEQ ID NO: 60300 - RNA, 23 nt, Artificial Sequence
  Chemically synthesized
uuucaccuuaccaugcucuucaa

SEQ ID NO: 60301 - RNA, 23 nt, Artificial Sequence
  Chemically synthesized
uaccaugcucuucaauaccguac

SEQ ID NO: 60302 - RNA, 23 nt, Artificial Sequence
  Chemically synthesized
accaugcucuucaauaccguacu

SEQ ID NO: 60303 - RNA, 23 nt, Artificial Sequence
  Chemically synthesized
ccaugcucuucaauaccguacuu

SEQ ID NO: 60304 - RNA, 23 nt, Artificial Sequence
  Chemically synthesized
caugcucuucaauaccguacuug

SEQ ID NO: 60305 - RNA, 23 nt, Artificial Sequence
  Chemically synthesized
augcucuucaauaccguacuuga

SEQ ID NO: 60306 - RNA, 23 nt, Artificial Sequence
  Chemically synthesized
uuuaaaacuccgcugcuguuugg

SEQ ID NO: 60307 - RNA, 23 nt, Artificial Sequence
  Chemically synthesized
uuaaaacuccgcugcuguuuggu

SEQ ID NO: 60308 - RNA, 23 nt, Artificial Sequence
  Chemically synthesized
uaaaacuccgcugcuguuuggua

SEQ ID NO: 60309 - RNA, 23 nt, Artificial Sequence
  Chemically synthesized
aaaacuccgcugcuguuugguac

SEQ ID NO: 60310 - RNA, 23 nt, Artificial Sequence
  Chemically synthesized
aaacuccgcugcuguuugguacu

SEQ ID NO: 60311 - RNA, 23 nt, Artificial Sequence
  Chemically synthesized
uucaauaccguacuugaacuucu

SEQ ID NO: 60312 - RNA, 23 nt, Artificial Sequence
  Chemically synthesized
ucaauaccguacuugaacuucuu

SEQ ID NO: 60313 - RNA, 23 nt, Artificial Sequence
  Chemically synthesized
caauaccguacuugaacuucuuu

SEQ ID NO: 60314 - RNA, 23 nt, Artificial Sequence
  Chemically synthesized
aauaccguacuugaacuucuuua

SEQ ID NO: 60315 - RNA, 23 nt, Artificial Sequence
  Chemically synthesized
auaccguacuugaacuucuuuau

SEQ ID NO: 60316 - RNA, 23 nt, Artificial Sequence
  Chemically synthesized
gaacuucuuuaucucaaucugcu

SEQ ID NO: 60317 - RNA, 23 nt, Artificial Sequence
  Chemically synthesized
aacuucuuuaucucaaucugcuu

SEQ ID NO: 60318 - RNA, 23 nt, Artificial Sequence
  Chemically synthesized
acuucuuuaucucaaucugcuuc

SEQ ID NO: 60319 - RNA, 23 nt, Artificial Sequence
  Chemically synthesized
guacagacacaaauaugaucugc

SEQ ID NO: 60320 - RNA, 23 nt, Artificial Sequence
  Chemically synthesized
uacagacacaaauaugaucugca

SEQ ID NO: 60321 - RNA, 23 nt, Artificial Sequence
  Chemically synthesized
acagacacaaauaugaucugcag

SEQ ID NO: 60322 - RNA, 23 nt, Artificial Sequence
  Chemically synthesized
cagacacaaauaugaucugcagg

SEQ ID NO: 60323 - RNA, 23 nt, Artificial Sequence
  Chemically synthesized
agacacaaauaugaucugcagga

SEQ ID NO: 60324 - RNA, 23 nt, Artificial Sequence
  Chemically synthesized
ucccccuaaugaaagaaaagugc

SEQ ID NO: 60325 - RNA, 23 nt, Artificial Sequence
  Chemically synthesized
cccccuaaugaaagaaaagugcu

SEQ ID NO: 60326 - RNA, 23 nt, Artificial Sequence
  Chemically synthesized
gucauagcagacauuuucacaac

SEQ ID NO: 60327 - RNA, 23 nt, Artificial Sequence
  Chemically synthesized
ucauagcagacauuuucacaacc

SEQ ID NO: 60328 - RNA, 23 nt, Artificial Sequence
  Chemically synthesized
cauagcagacauuuucacaacca

SEQ ID NO: 60329 - RNA, 23 nt, Artificial Sequence
  Chemically synthesized
auagcagacauuuucacaaccag

SEQ ID NO: 60330 - RNA, 23 nt, Artificial Sequence
  Chemically synthesized
uagcagacauuuucacaaccagg

SEQ ID NO: 60331 - RNA, 23 nt, Artificial Sequence
  Chemically synthesized
ggacuaggucuacauuacaugca

SEQ ID NO: 60332 - RNA, 23 nt, Artificial Sequence
  Chemically synthesized
gacuaggucuacauuacaugcaa

SEQ ID NO: 60333 - RNA, 23 nt, Artificial Sequence
  Chemically synthesized
acuaggucuacauuacaugcaau

SEQ ID NO: 60334 - RNA, 23 nt, Artificial Sequence
  Chemically synthesized
cuaggucuacauuacaugcaaug

SEQ ID NO: 60335 - RNA, 23 nt, Artificial Sequence
  Chemically synthesized
uaggucuacauuacaugcaauga

SEQ ID NO: 60336 - RNA, 23 nt, Artificial Sequence
  Chemically synthesized
gaagaaaagugucauacucagca

SEQ ID NO: 60337 - RNA, 23 nt, Artificial Sequence
  Chemically synthesized
aagaaaagugucauacucagcau

SEQ ID NO: 60338 - RNA, 23 nt, Artificial Sequence
  Chemically synthesized
agaaaagugucauacucagcauu

SEQ ID NO: 60339 - RNA, 23 nt, Artificial Sequence
  Chemically synthesized
gaaaagugucauacucagcauuu

SEQ ID NO: 60340 - RNA, 23 nt, Artificial Sequence
  Chemically synthesized
aaaagugucauacucagcauuuu

SEQ ID NO: 60341 - RNA, 23 nt, Artificial Sequence
  Chemically synthesized
gaaaaugaaaaguacugacagcc

SEQ ID NO: 60342 - RNA, 23 nt, Artificial Sequence
  Chemically synthesized
aaaaugaaaaguacugacagcca

SEQ ID NO: 60343 - RNA, 23 nt, Artificial Sequence
  Chemically synthesized
aaaugaaaaguacugacagccac

SEQ ID NO: 60344 - RNA, 23 nt, Artificial Sequence
  Chemically synthesized
aaugaaaaguacugacagccaca

SEQ ID NO: 60345 - RNA, 23 nt, Artificial Sequence
  Chemically synthesized
augaaaaguacugacagccacac

SEQ ID NO: 60346 - RNA, 23 nt, Artificial Sequence
  Chemically synthesized
augaaagaaaagugcugauaccu

SEQ ID NO: 60347 - RNA, 23 nt, Artificial Sequence
  Chemically synthesized
ugaaagaaaagugcugauaccuc

SEQ ID NO: 60348 - RNA, 23 nt, Artificial Sequence
  Chemically synthesized
gaaagaaaagugcugauaccucg

SEQ ID NO: 60349 - RNA, 23 nt, Artificial Sequence
  Chemically synthesized
aaagaaaagugcugauaccucgu

SEQ ID NO: 60350 - RNA, 23 nt, Artificial Sequence
  Chemically synthesized
ucuuagugcaaacaucaaaguug

SEQ ID NO: 60351 - RNA, 23 nt, Artificial Sequence
  Chemically synthesized
cuuagugcaaacaucaaaguugc

SEQ ID NO: 60352 - RNA, 23 nt, Artificial Sequence
  Chemically synthesized
uuagugcaaacaucaaaguugcu

SEQ ID NO: 60353 - RNA, 23 nt, Artificial Sequence
  Chemically synthesized
uagugcaaacaucaaaguugcug

SEQ ID NO: 60354 - RNA, 23 nt, Artificial Sequence
  Chemically synthesized
guuacugcaaaauucauuuaggc

SEQ ID NO: 60355 - RNA, 23 nt, Artificial Sequence
  Chemically synthesized
uuacugcaaaauucauuuaggca

SEQ ID NO: 60356 - RNA, 23 nt, Artificial Sequence
  Chemically synthesized
uacugcaaaauucauuuaggcac

SEQ ID NO: 60357 - RNA, 23 nt, Artificial Sequence
  Chemically synthesized
acugcaaaauucauuuaggcaca

SEQ ID NO: 60358 - RNA, 23 nt, Artificial Sequence
  Chemically synthesized
cugcaaaauucauuuaggcacau

SEQ ID NO: 60359 - RNA, 23 nt, Artificial Sequence
  Chemically synthesized
ucauuuaggcacauuuaauaguc

SEQ ID NO: 60360 - RNA, 23 nt, Artificial Sequence
  Chemically synthesized
cauuuaggcacauuuaauagucc

SEQ ID NO: 60361 - RNA, 23 nt, Artificial Sequence
  Chemically synthesized
auuuaggcacauuuaauagucca

SEQ ID NO: 60362 - RNA, 23 nt, Artificial Sequence
  Chemically synthesized
uuuaggcacauuuaauaguccac

SEQ ID NO: 60363 - RNA, 23 nt, Artificial Sequence
  Chemically synthesized
uuaggcacauuuaauaguccacu

SEQ ID NO: 60364 - RNA, 23 nt, Artificial Sequence
  Chemically synthesized
ucacauuaaugacuaaagccugu

SEQ ID NO: 60365 - RNA, 23 nt, Artificial Sequence
  Chemically synthesized
cacauuaaugacuaaagccuguu

SEQ ID NO: 60366 - RNA, 23 nt, Artificial Sequence
  Chemically synthesized
acauuaaugacuaaagccuguuu

SEQ ID NO: 60367 - RNA, 23 nt, Artificial Sequence
  Chemically synthesized
cauuaaugacuaaagccuguuua

SEQ ID NO: 60368 - RNA, 23 nt, Artificial Sequence
  Chemically synthesized
auuaaugacuaaagccuguuuac

SEQ ID NO: 60369 - RNA, 23 nt, Artificial Sequence
  Chemically synthesized
aaaauucuaucauucaagcauca

SEQ ID NO: 60370 - RNA, 23 nt, Artificial Sequence
  Chemically synthesized
aaauucuaucauucaagcaucaa

SEQ ID NO: 60371 - RNA, 23 nt, Artificial Sequence
  Chemically synthesized
aauucuaucauucaagcaucaau

SEQ ID NO: 60372 - RNA, 23 nt, Artificial Sequence
  Chemically synthesized
auucuaucauucaagcaucaaug

SEQ ID NO: 60373 - RNA, 23 nt, Artificial Sequence
  Chemically synthesized
uucuaucauucaagcaucaauga

SEQ ID NO: 60374 - RNA, 23 nt, Artificial Sequence
  Chemically synthesized
uaauaggauacacagggaaaaac

SEQ ID NO: 60375 - RNA, 23 nt, Artificial Sequence
  Chemically synthesized
aggauacacagggaaaaacauuu

SEQ ID NO: 60376 - RNA, 23 nt, Artificial Sequence
  Chemically synthesized
ggauacacagggaaaaacauuuu

SEQ ID NO: 60377 - RNA, 23 nt, Artificial Sequence
  Chemically synthesized
gauacacagggaaaaacauuuua

SEQ ID NO: 60378 - RNA, 23 nt, Artificial Sequence
  Chemically synthesized
agggaaaaacauuuuaggagaaa

SEQ ID NO: 60379 - RNA, 23 nt, Artificial Sequence
  Chemically synthesized
gggaaaaacauuuuaggagaaaa

SEQ ID NO: 60380 - RNA, 23 nt, Artificial Sequence
  Chemically synthesized
aagaaaagugcugauaccucgua

SEQ ID NO: 60381 - RNA, 23 nt, Artificial Sequence
  Chemically synthesized
agaaaagugcugauaccucguaa

SEQ ID NO: 60382 - RNA, 23 nt, Artificial Sequence
  Chemically synthesized
gaaaagugcugauaccucguaaa

SEQ ID NO: 60383 - RNA, 23 nt, Artificial Sequence
  Chemically synthesized
gcccacaccacaaaaauccauga

SEQ ID NO: 60384 - RNA, 23 nt, Artificial Sequence
  Chemically synthesized
guuuauacuguaucugcuuguac

SEQ ID NO: 60385 - RNA, 23 nt, Artificial Sequence
  Chemically synthesized
uuuauacuguaucugcuuguacc

SEQ ID NO: 60386 - RNA, 23 nt, Artificial Sequence
  Chemically synthesized
uuauacuguaucugcuuguacca

SEQ ID NO: 60387 - RNA, 23 nt, Artificial Sequence
  Chemically synthesized
uauacuguaucugcuuguaccaa

SEQ ID NO: 60388 - RNA, 23 nt, Artificial Sequence
  Chemically synthesized
auacuguaucugcuuguaccaau

SEQ ID NO: 60389 - RNA, 23 nt, Artificial Sequence
  Chemically synthesized
ugacaaacaaaacaaacucuucg

SEQ ID NO: 60390 - RNA, 23 nt, Artificial Sequence
  Chemically synthesized
gacaaacaaaacaaacucuucga

SEQ ID NO: 60391 - RNA, 23 nt, Artificial Sequence
  Chemically synthesized
acaaacaaaacaaacucuucgac

SEQ ID NO: 60392 - RNA, 23 nt, Artificial Sequence
  Chemically synthesized
caaacaaaacaaacucuucgaca

SEQ ID NO: 60393 - RNA, 23 nt, Artificial Sequence
  Chemically synthesized
aaacaaaacaaacucuucgacac

SEQ ID NO: 60394 - RNA, 23 nt, Artificial Sequence
  Chemically synthesized
augaugaaaaagugaugguaaug

SEQ ID NO: 60395 - RNA, 23 nt, Artificial Sequence
  Chemically synthesized
aaaagugaugguaaugauauugu

SEQ ID NO: 60396 - RNA, 23 nt, Artificial Sequence
  Chemically synthesized
aaagugaugguaaugauauugug

SEQ ID NO: 60397 - RNA, 23 nt, Artificial Sequence
  Chemically synthesized
aagugaugguaaugauauugugc

SEQ ID NO: 60398 - RNA, 23 nt, Artificial Sequence
  Chemically synthesized
agugaugguaaugauauugugca

SEQ ID NO: 60399 - RNA, 23 nt, Artificial Sequence
  Chemically synthesized
gugaugguaaugauauugugcaa

SEQ ID NO: 60400 - RNA, 23 nt, Artificial Sequence
  Chemically synthesized
cauggaaaaucuuauucuguggg

SEQ ID NO: 60401 - RNA, 23 nt, Artificial Sequence
  Chemically synthesized
aaaucuuauucugugggccuugu

SEQ ID NO: 60402 - RNA, 23 nt, Artificial Sequence
  Chemically synthesized
uuucuuguugaaaagaccuaaga

SEQ ID NO: 60403 - RNA, 23 nt, Artificial Sequence
  Chemically synthesized
uucuuguugaaaagaccuaagau

SEQ ID NO: 60404 - RNA, 23 nt, Artificial Sequence
  Chemically synthesized
ucuuguugaaaagaccuaagaug

SEQ ID NO: 60405 - RNA, 23 nt, Artificial Sequence
  Chemically synthesized
aaaaauauuuagccacaauuacc

SEQ ID NO: 60406 - RNA, 23 nt, Artificial Sequence
  Chemically synthesized
cuaaguucuuugaauccacuacu

SEQ ID NO: 60407 - RNA, 23 nt, Artificial Sequence
  Chemically synthesized
uugaauccacuacuuuaaauacc

SEQ ID NO: 60408 - RNA, 23 nt, Artificial Sequence
  Chemically synthesized
ugaauccacuacuuuaaauacca

SEQ ID NO: 60409 - RNA, 23 nt, Artificial Sequence
  Chemically synthesized
gaauccacuacuuuaaauaccaa

SEQ ID NO: 60410 - RNA, 23 nt, Artificial Sequence
  Chemically synthesized
aauccacuacuuuaaauaccaac

SEQ ID NO: 60411 - RNA, 23 nt, Artificial Sequence
  Chemically synthesized
auccacuacuuuaaauaccaaca

SEQ ID NO: 60412 - RNA, 23 nt, Artificial Sequence
  Chemically synthesized
agugaaccuagguauucuaaugu

SEQ ID NO: 60413 - RNA, 23 nt, Artificial Sequence
  Chemically synthesized
gugaaccuagguauucuaauguc

SEQ ID NO: 60414 - RNA, 23 nt, Artificial Sequence
  Chemically synthesized
ugaaccuagguauucuaaugucu

SEQ ID NO: 60415 - RNA, 23 nt, Artificial Sequence
  Chemically synthesized
gaaccuagguauucuaaugucuu

SEQ ID NO: 60416 - RNA, 23 nt, Artificial Sequence
  Chemically synthesized
aaccuagguauucuaaugucuuu

SEQ ID NO: 60417 - RNA, 23 nt, Artificial Sequence
  Chemically synthesized
accuagguauucuaaugucuuug

SEQ ID NO: 60418 - RNA, 23 nt, Artificial Sequence
  Chemically synthesized
ccuagguauucuaaugucuuugu

SEQ ID NO: 60419 - RNA, 23 nt, Artificial Sequence
  Chemically synthesized
aauuaacaccuggugcacuuucu

SEQ ID NO: 60420 - RNA, 23 nt, Artificial Sequence
  Chemically synthesized
auuaacaccuggugcacuuucua

SEQ ID NO: 60421 - RNA, 23 nt, Artificial Sequence
  Chemically synthesized
uuaacaccuggugcacuuucuac

SEQ ID NO: 60422 - RNA, 23 nt, Artificial Sequence
  Chemically synthesized
uaacaccuggugcacuuucuaca

SEQ ID NO: 60423 - RNA, 23 nt, Artificial Sequence
  Chemically synthesized
aacaccuggugcacuuucuacag

SEQ ID NO: 60424 - RNA, 23 nt, Artificial Sequence
  Chemically synthesized
ugggaguuagagauggugcuucc

SEQ ID NO: 60425 - RNA, 23 nt, Artificial Sequence
  Chemically synthesized
gggaguuagagauggugcuuccc

SEQ ID NO: 60426 - RNA, 23 nt, Artificial Sequence
  Chemically synthesized
ggaguuagagauggugcuucccg

SEQ ID NO: 60427 - RNA, 23 nt, Artificial Sequence
  Chemically synthesized
gaguuagagauggugcuucccgc

SEQ ID NO: 60428 - RNA, 23 nt, Artificial Sequence
  Chemically synthesized
aguuagagauggugcuucccgcc

SEQ ID NO: 60429 - RNA, 23 nt, Artificial Sequence
  Chemically synthesized
ugccccauucgauuuuguucugc

SEQ ID NO: 60430 - RNA, 23 nt, Artificial Sequence
  Chemically synthesized
gccccauucgauuuuguucugca

SEQ ID NO: 60431 - RNA, 23 nt, Artificial Sequence
  Chemically synthesized
ccccauucgauuuuguucugcac

SEQ ID NO: 60432 - RNA, 23 nt, Artificial Sequence
  Chemically synthesized
cccauucgauuuuguucugcacu

SEQ ID NO: 60433 - RNA, 23 nt, Artificial Sequence
  Chemically synthesized
ccauucgauuuuguucugcacug

SEQ ID NO: 60434 - RNA, 23 nt, Artificial Sequence
  Chemically synthesized
uaacccgauccuuaacgcccuug

SEQ ID NO: 60435 - RNA, 23 nt, Artificial Sequence
  Chemically synthesized
uugaagaaaacauagaagaguuc

SEQ ID NO: 60436 - RNA, 23 nt, Artificial Sequence
  Chemically synthesized
ugaagaaaacauagaagaguuca

SEQ ID NO: 60437 - RNA, 23 nt, Artificial Sequence
  Chemically synthesized
gaagaaaacauagaagaguucaa

SEQ ID NO: 60438 - RNA, 23 nt, Artificial Sequence
  Chemically synthesized
aagaaaacauagaagaguucaau

SEQ ID NO: 60439 - RNA, 23 nt, Artificial Sequence
  Chemically synthesized
gaggaugaaguaaaaugaaaagg

SEQ ID NO: 60440 - RNA, 23 nt, Artificial Sequence
  Chemically synthesized
uuaucucaaucugcuucaagugc

SEQ ID NO: 60441 - RNA, 23 nt, Artificial Sequence
  Chemically synthesized
auaccucguaaaagcuuuuuugu

SEQ ID NO: 60442 - RNA, 23 nt, Artificial Sequence
  Chemically synthesized
aaauuaacaccuggugcacuuuc

SEQ ID NO: 60443 - RNA, 23 nt, Artificial Sequence
  Chemically synthesized
aaaaaggcauuuggagaaacugg

SEQ ID NO: 60444 - RNA, 23 nt, Artificial Sequence
  Chemically synthesized
uugugaguuuauacuguaucugc

SEQ ID NO: 60445 - RNA, 23 nt, Artificial Sequence
  Chemically synthesized
aacccaagaauaccaguuacugc

SEQ ID NO: 60446 - RNA, 23 nt, Artificial Sequence
  Chemically synthesized
gauaccucguaaaagcuuuuuug

SEQ ID NO: 60447 - RNA, 23 nt, Artificial Sequence
  Chemically synthesized
ugaacuucuuuaucucaaucugc

SEQ ID NO: 60448 - RNA, 23 nt, Artificial Sequence
  Chemically synthesized
uuuggagaaacugguagaugucu

SEQ ID NO: 60449 - RNA, 23 nt, Artificial Sequence
  Chemically synthesized
uuaaugacuaaagccuguuuaca

SEQ ID NO: 60450 - RNA, 23 nt, Artificial Sequence
  Chemically synthesized
ugaauccauagauguaccacugg

SEQ ID NO: 60451 - RNA, 23 nt, Artificial Sequence
  Chemically synthesized
accguacuugaacuucuuuaucu

SEQ ID NO: 60452 - RNA, 23 nt, Artificial Sequence
  Chemically synthesized
augcaugcaagaagaaaaguguc

SEQ ID NO: 60453 - RNA, 23 nt, Artificial Sequence
  Chemically synthesized
aaaguacugacagccacaccuuc

SEQ ID NO: 60454 - RNA, 23 nt, Artificial Sequence
  Chemically synthesized
aaguacugacagccacaccuucc

SEQ ID NO: 60455 - RNA, 23 nt, Artificial Sequence
  Chemically synthesized
aucuuagugcaaacaucaaaguu

SEQ ID NO: 60456 - RNA, 23 nt, Artificial Sequence
  Chemically synthesized
aacucuucgacacacauauaagu

SEQ ID NO: 60457 - RNA, 23 nt, Artificial Sequence
  Chemically synthesized
uagcugaggaaugaugaaaaagu

SEQ ID NO: 60458 - RNA, 23 nt, Artificial Sequence
  Chemically synthesized
ugguaaugauauugugcaagugg

SEQ ID NO: 60459 - RNA, 23 nt, Artificial Sequence
  Chemically synthesized
auccucugucuuuuucuuguuga

SEQ ID NO: 60460 - RNA, 23 nt, Artificial Sequence
  Chemically synthesized
aaaaagcccuuaucuauguauca

SEQ ID NO: 60461 - RNA, 23 nt, Artificial Sequence
  Chemically synthesized
aauucauguccagcagcuaguuu

SEQ ID NO: 60462 - RNA, 23 nt, Artificial Sequence
  Chemically synthesized
cugugcaugggaguuagagaugg

SEQ ID NO: 60463 - RNA, 23 nt, Artificial Sequence
  Chemically synthesized
aagcugaauccauagauguacca

SEQ ID NO: 60464 - RNA, 23 nt, Artificial Sequence
  Chemically synthesized
uaccguacuugaacuucuuuauc

SEQ ID NO: 60465 - RNA, 23 nt, Artificial Sequence
  Chemically synthesized
uugaacuucuuuaucucaaucug

SEQ ID NO: 60466 - RNA, 23 nt, Artificial Sequence
  Chemically synthesized
uuccucuuucuuguucaguuucu

SEQ ID NO: 60467 - RNA, 23 nt, Artificial Sequence
  Chemically synthesized
auaaagaacacucuccagaacac

SEQ ID NO: 60468 - RNA, 23 nt, Artificial Sequence
  Chemically synthesized
uaaguaggaaaacccaagaauac

SEQ ID NO: 60469 - RNA, 23 nt, Artificial Sequence
  Chemically synthesized
uuugugaguuuauacuguaucug

SEQ ID NO: 60470 - RNA, 23 nt, Artificial Sequence
  Chemically synthesized
caucccaacugucuuaaaaaugu

SEQ ID NO: 60471 - RNA, 23 nt, Artificial Sequence
  Chemically synthesized
aauccucugucuuuuucuuguug

SEQ ID NO: 60472 - RNA, 23 nt, Artificial Sequence
  Chemically synthesized
aaaagcccuuaucuauguaucac

SEQ ID NO: 60473 - RNA, 23 nt, Artificial Sequence
  Chemically synthesized
uuguguuuucuaagccucaugaa

SEQ ID NO: 60474 - RNA, 23 nt, Artificial Sequence
  Chemically synthesized
caccggaucaaaauuaacaccug

SEQ ID NO: 60475 - RNA, 23 nt, Artificial Sequence
  Chemically synthesized
uguaauucauguccagcagcuag

SEQ ID NO: 60476 - RNA, 23 nt, Artificial Sequence
  Chemically synthesized
acucaagcugaauccauagaugu

SEQ ID NO: 60477 - RNA, 23 nt, Artificial Sequence
  Chemically synthesized
uucgcaucacauagaacacauga

SEQ ID NO: 60478 - RNA, 23 nt, Artificial Sequence
  Chemically synthesized
cagacauuuucacaaccagguug

SEQ ID NO: 60479 - RNA, 23 nt, Artificial Sequence
  Chemically synthesized
acaugcaugcaagaagaaaagug

SEQ ID NO: 60480 - RNA, 23 nt, Artificial Sequence
  Chemically synthesized
aagaagaaaagugucauacucag

SEQ ID NO: 60481 - RNA, 23 nt, Artificial Sequence
  Chemically synthesized
aaaaaaggcauuuggagaaacug

SEQ ID NO: 60482 - RNA, 23 nt, Artificial Sequence
  Chemically synthesized
aaacccaagaauaccaguuacug

SEQ ID NO: 60483 - RNA, 23 nt, Artificial Sequence
  Chemically synthesized
uaguccacucuaagcauuuuuuc

SEQ ID NO: 60484 - RNA, 23 nt, Artificial Sequence
  Chemically synthesized
gucugaauuuuaaacugauacca

SEQ ID NO: 60485 - RNA, 23 nt, Artificial Sequence
  Chemically synthesized
uagcagggacuuaaggacaaucc

SEQ ID NO: 60486 - RNA, 23 nt, Artificial Sequence
  Chemically synthesized
acauacacagaaccauucuuagg

SEQ ID NO: 60487 - RNA, 23 nt, Artificial Sequence
  Chemically synthesized
uaaauaccaacaugcaccucucu

SEQ ID NO: 60488 - RNA, 23 nt, Artificial Sequence
  Chemically synthesized
ugaguguuacaacgaaaggcaga

SEQ ID NO: 60489 - RNA, 23 nt, Artificial Sequence
  Chemically synthesized
ugcaugcaagaagaaaaguguca

SEQ ID NO: 60490 - RNA, 23 nt, Artificial Sequence
  Chemically synthesized
augcaagaagaaaagugucauac

SEQ ID NO: 60491 - RNA, 23 nt, Artificial Sequence
  Chemically synthesized
ucagcauuuucaccaaucuucug

SEQ ID NO: 60492 - RNA, 23 nt, Artificial Sequence
  Chemically synthesized
aauccucuuucaaccucucuugc

SEQ ID NO: 60493 - RNA, 23 nt, Artificial Sequence
  Chemically synthesized
acucuaagcauuuuuucuaaguc

SEQ ID NO: 60494 - RNA, 23 nt, Artificial Sequence
  Chemically synthesized
cucuaagcauuuuuucuaagucu

SEQ ID NO: 60495 - RNA, 23 nt, Artificial Sequence
  Chemically synthesized
cuaagcauuuuuucuaagucucu

SEQ ID NO: 60496 - RNA, 23 nt, Artificial Sequence
  Chemically synthesized
cucucacauuaaugacuaaagcc

SEQ ID NO: 60497 - RNA, 23 nt, Artificial Sequence
  Chemically synthesized
aaucuguguuugugaguuuauac

SEQ ID NO: 60498 - RNA, 23 nt, Artificial Sequence
  Chemically synthesized
aaacucuucgacacacauauaag

SEQ ID NO: 60499 - RNA, 23 nt, Artificial Sequence
  Chemically synthesized
guagcugaggaaugaugaaaaag

SEQ ID NO: 60500 - RNA, 23 nt, Artificial Sequence
  Chemically synthesized
uaaugauauugugcaaguggaug

SEQ ID NO: 60501 - RNA, 23 nt, Artificial Sequence
  Chemically synthesized
cuuaccuucaaagugcaaauuuu

SEQ ID NO: 60502 - RNA, 23 nt, Artificial Sequence
  Chemically synthesized
acaauccucugucuuuuucuugu

SEQ ID NO: 60503 - RNA, 23 nt, Artificial Sequence
  Chemically synthesized
aagcccuuaucuauguaucaccu

SEQ ID NO: 60504 - RNA, 23 nt, Artificial Sequence
  Chemically synthesized
aaagugcugauaccucguaaaag

SEQ ID NO: 60505 - RNA, 23 nt, Artificial Sequence
  Chemically synthesized
auguccagcagcuaguuuuuuag

SEQ ID NO: 60506 - RNA, 23 nt, Artificial Sequence
  Chemically synthesized
aaguaaaaugaaaaggcaaguuc

SEQ ID NO: 60507 - RNA, 23 nt, Artificial Sequence
  Chemically synthesized
gaaauaagcauauuuuugagacc

SEQ ID NO: 60508 - RNA, 23 nt, Artificial Sequence
  Chemically synthesized
agcugaauccauagauguaccac

SEQ ID NO: 60509 - RNA, 23 nt, Artificial Sequence
  Chemically synthesized
uaccacuggaucagcaagaaggc

SEQ ID NO: 60510 - RNA, 23 nt, Artificial Sequence
  Chemically synthesized
cuugaagaggauacugaugaugu

SEQ ID NO: 60511 - RNA, 23 nt, Artificial Sequence
  Chemically synthesized
uugaagaggauacugaugaugua

SEQ ID NO: 60512 - RNA, 23 nt, Artificial Sequence
  Chemically synthesized
cguacuugaacuucuuuaucuca

SEQ ID NO: 60513 - RNA, 23 nt, Artificial Sequence
  Chemically synthesized
caguuugggcaaccuugaguucu

SEQ ID NO: 60514 - RNA, 23 nt, Artificial Sequence
  Chemically synthesized
acacaaauaugaucugcaggacc

SEQ ID NO: 60515 - RNA, 23 nt, Artificial Sequence
  Chemically synthesized
uugggaaagacuugucauagcag

SEQ ID NO: 60516 - RNA, 23 nt, Artificial Sequence
  Chemically synthesized
acacucuccagaacacaugaucu

SEQ ID NO: 60517 - RNA, 23 nt, Artificial Sequence
  Chemically synthesized
aaggcauuuggagaaacugguag

SEQ ID NO: 60518 - RNA, 23 nt, Artificial Sequence
  Chemically synthesized
auuuggagaaacugguagauguc

SEQ ID NO: 60519 - RNA, 23 nt, Artificial Sequence
  Chemically synthesized
aguccacucuaagcauuuuuucu

SEQ ID NO: 60520 - RNA, 23 nt, Artificial Sequence
  Chemically synthesized
gcugaggaaugaugaaaaaguga

SEQ ID NO: 60521 - RNA, 23 nt, Artificial Sequence
  Chemically synthesized
cuaagauguucaggaaguauuua

SEQ ID NO: 60522 - RNA, 23 nt, Artificial Sequence
  Chemically synthesized
uuauuccuggccagaauuauuuc

SEQ ID NO: 60523 - RNA, 23 nt, Artificial Sequence
  Chemically synthesized
uuaccacccgcucauucacauac

SEQ ID NO: 60524 - RNA, 23 nt, Artificial Sequence
  Chemically synthesized
auucacauacacagaaccauucu

SEQ ID NO: 60525 - RNA, 23 nt, Artificial Sequence
  Chemically synthesized
uauguaucaccuaauggaacucu

SEQ ID NO: 60526 - RNA, 23 nt, Artificial Sequence
  Chemically synthesized
auugaacuccuuggaggaugaag

SEQ ID NO: 60527 - RNA, 23 nt, Artificial Sequence
  Chemically synthesized
uugaaggucgcugguccacaaug

SEQ ID NO: 60528 - RNA, 23 nt, Artificial Sequence
  Chemically synthesized
aacccgauccuuaacgcccuuga

SEQ ID NO: 60529 - RNA, 23 nt, Artificial Sequence
  Chemically synthesized
aaagauagacuugaagaggauac

SEQ ID NO: 60530 - RNA, 23 nt, Artificial Sequence
  Chemically synthesized
uagacuugaagaggauacugaug

SEQ ID NO: 60531 - RNA, 23 nt, Artificial Sequence
  Chemically synthesized
cuugaacuucuuuaucucaaucu

SEQ ID NO: 60532 - RNA, 23 nt, Artificial Sequence
  Chemically synthesized
uuccuuucgcaucacauagaaca

SEQ ID NO: 60533 - RNA, 23 nt, Artificial Sequence
  Chemically synthesized
uuucgcaucacauagaacacaug

SEQ ID NO: 60534 - RNA, 23 nt, Artificial Sequence
  Chemically synthesized
acucagcauuuucaccaaucuuc

SEQ ID NO: 60535 - RNA, 23 nt, Artificial Sequence
  Chemically synthesized
gaaaaguacugacagccacaccu

SEQ ID NO: 60536 - RNA, 23 nt, Artificial Sequence
  Chemically synthesized
aaguaggaaaacccaagaauacc

SEQ ID NO: 60537 - RNA, 23 nt, Artificial Sequence
  Chemically synthesized
gaaaacccaagaauaccaguuac

SEQ ID NO: 60538 - RNA, 23 nt, Artificial Sequence
  Chemically synthesized
aaaacccaagaauaccaguuacu

SEQ ID NO: 60539 - RNA, 23 nt, Artificial Sequence
  Chemically synthesized
uccaacuccuaccgcgauacaga

SEQ ID NO: 60540 - RNA, 23 nt, Artificial Sequence
  Chemically synthesized
uuccaacuccuaccgcgauacag

SEQ ID NO: 60541 - RNA, 23 nt, Artificial Sequence
  Chemically synthesized
auuccaacuccuaccgcgauaca

SEQ ID NO: 60542 - RNA, 23 nt, Artificial Sequence
  Chemically synthesized
cauuccaacuccuaccgcgauac

SEQ ID NO: 60543 - RNA, 23 nt, Artificial Sequence
  Chemically synthesized
ucauuccaacuccuaccgcgaua

SEQ ID NO: 60544 - RNA, 23 nt, Artificial Sequence
  Chemically synthesized
ucaugacagucagcaacaugaua

SEQ ID NO: 60545 - RNA, 23 nt, Artificial Sequence
  Chemically synthesized
aucaugacagucagcaacaugau

SEQ ID NO: 60546 - RNA, 23 nt, Artificial Sequence
  Chemically synthesized
aaucaugacagucagcaacauga

SEQ ID NO: 60547 - RNA, 23 nt, Artificial Sequence
  Chemically synthesized
gaaucaugacagucagcaacaug

SEQ ID NO: 60548 - RNA, 23 nt, Artificial Sequence
  Chemically synthesized
cgaaucaugacagucagcaacau

SEQ ID NO: 60549 - RNA, 23 nt, Artificial Sequence
  Chemically synthesized
cgauacagacccacagagugcca

SEQ ID NO: 60550 - RNA, 23 nt, Artificial Sequence
  Chemically synthesized
gcgauacagacccacagagugcc

SEQ ID NO: 60551 - RNA, 23 nt, Artificial Sequence
  Chemically synthesized
cgcgauacagacccacagagugc

SEQ ID NO: 60552 - RNA, 23 nt, Artificial Sequence
  Chemically synthesized
ccgcgauacagacccacagagug

SEQ ID NO: 60553 - RNA, 23 nt, Artificial Sequence
  Chemically synthesized
accgcgauacagacccacagagu

SEQ ID NO: 60554 - RNA, 23 nt, Artificial Sequence
  Chemically synthesized
gcaccucauuccaacuccuaccg

SEQ ID NO: 60555 - RNA, 23 nt, Artificial Sequence
  Chemically synthesized
ugcaccucauuccaacuccuacc

SEQ ID NO: 60556 - RNA, 23 nt, Artificial Sequence
  Chemically synthesized
cugcaccucauuccaacuccuac

SEQ ID NO: 60557 - RNA, 23 nt, Artificial Sequence
  Chemically synthesized
ccugcaccucauuccaacuccua

SEQ ID NO: 60558 - RNA, 23 nt, Artificial Sequence
  Chemically synthesized
cccugcaccucauuccaacuccu

SEQ ID NO: 60559 - RNA, 23 nt, Artificial Sequence
  Chemically synthesized
ccgaaucaugacagucagcaaca

SEQ ID NO: 60560 - RNA, 23 nt, Artificial Sequence
  Chemically synthesized
cccgaaucaugacagucagcaac

SEQ ID NO: 60561 - RNA, 23 nt, Artificial Sequence
  Chemically synthesized
gcccgaaucaugacagucagcaa

SEQ ID NO: 60562 - RNA, 23 nt, Artificial Sequence
  Chemically synthesized
agcccgaaucaugacagucagca

SEQ ID NO: 60563 - RNA, 23 nt, Artificial Sequence
  Chemically synthesized
cagaggccguauuacaaaugagc

SEQ ID NO: 60564 - RNA, 23 nt, Artificial Sequence
  Chemically synthesized
acagaggccguauuacaaaugag

SEQ ID NO: 60565 - RNA, 23 nt, Artificial Sequence
  Chemically synthesized
cacagaggccguauuacaaauga

SEQ ID NO: 60566 - RNA, 23 nt, Artificial Sequence
  Chemically synthesized
acacagaggccguauuacaaaug

SEQ ID NO: 60567 - RNA, 23 nt, Artificial Sequence
  Chemically synthesized
cacacagaggccguauuacaaau

SEQ ID NO: 60568 - RNA, 23 nt, Artificial Sequence
  Chemically synthesized
acaaaugagcccgaaucaugaca

SEQ ID NO: 60569 - RNA, 23 nt, Artificial Sequence
  Chemically synthesized
uacaaaugagcccgaaucaugac

SEQ ID NO: 60570 - RNA, 23 nt, Artificial Sequence
  Chemically synthesized
uuacaaaugagcccgaaucauga

SEQ ID NO: 60571 - RNA, 23 nt, Artificial Sequence
  Chemically synthesized
auuacaaaugagcccgaaucaug

SEQ ID NO: 60572 - RNA, 23 nt, Artificial Sequence
  Chemically synthesized
uauuacaaaugagcccgaaucau

SEQ ID NO: 60573 - RNA, 23 nt, Artificial Sequence
  Chemically synthesized
guauuacaaaugagcccgaauca

SEQ ID NO: 60574 - RNA, 23 nt, Artificial Sequence
  Chemically synthesized
cguauuacaaaugagcccgaauc

SEQ ID NO: 60575 - RNA, 23 nt, Artificial Sequence
  Chemically synthesized
ccguauuacaaaugagcccgaau

SEQ ID NO: 60576 - RNA, 23 nt, Artificial Sequence
  Chemically synthesized
gccguauuacaaaugagcccgaa

SEQ ID NO: 60577 - RNA, 23 nt, Artificial Sequence
  Chemically synthesized
ggccguauuacaaaugagcccga

SEQ ID NO: 60578 - RNA, 23 nt, Artificial Sequence
  Chemically synthesized
gaggccguauuacaaaugagccc

SEQ ID NO: 60579 - RNA, 23 nt, Artificial Sequence
  Chemically synthesized
agaggccguauuacaaaugagcc

SEQ ID NO: 60580 - RNA, 23 nt, Artificial Sequence
  Chemically synthesized
acacacagaggccguauuacaaa

SEQ ID NO: 60581 - RNA, 23 nt, Artificial Sequence
  Chemically synthesized
aggccguauuacaaaugagcccg

SEQ ID NO: 60582 - RNA, 23 nt, Artificial Sequence
  Chemically synthesized
caccucauuccaacuccuaccgc

SEQ ID NO: 60583 - RNA, 23 nt, Artificial Sequence
  Chemically synthesized
acccugcaccucauuccaacucc

SEQ ID NO: 60584 - RNA, 23 nt, Artificial Sequence
  Chemically synthesized
cacccugcaccucauuccaacuc

SEQ ID NO: 60585 - RNA, 23 nt, Artificial Sequence
  Chemically synthesized
ccacccugcaccucauuccaacu

SEQ ID NO: 60586 - RNA, 23 nt, Artificial Sequence
  Chemically synthesized
cccacccugcaccucauuccaac

SEQ ID NO: 60587 - RNA, 23 nt, Artificial Sequence
  Chemically synthesized
gcccacccugcaccucauuccaa

SEQ ID NO: 60588 - RNA, 23 nt, Artificial Sequence
  Chemically synthesized
ugacagucagcaacaugauaccu

SEQ ID NO: 60589 - RNA, 23 nt, Artificial Sequence
  Chemically synthesized
augacagucagcaacaugauacc

SEQ ID NO: 60590 - RNA, 23 nt, Artificial Sequence
  Chemically synthesized
caugacagucagcaacaugauac

SEQ ID NO: 60591 - RNA, 23 nt, Artificial Sequence
  Chemically synthesized
agaggucggaugucuacagcgac

SEQ ID NO: 60592 - RNA, 23 nt, Artificial Sequence
  Chemically synthesized
cagaggucggaugucuacagcga

SEQ ID NO: 60593 - RNA, 23 nt, Artificial Sequence
  Chemically synthesized
ucagaggucggaugucuacagcg

SEQ ID NO: 60594 - RNA, 23 nt, Artificial Sequence
  Chemically synthesized
gucagaggucggaugucuacagc

SEQ ID NO: 60595 - RNA, 23 nt, Artificial Sequence
  Chemically synthesized
ggucagaggucggaugucuacag

SEQ ID NO: 60596 - RNA, 23 nt, Artificial Sequence
  Chemically synthesized
aacacacagaggccguauuacaa

SEQ ID NO: 60597 - RNA, 23 nt, Artificial Sequence
  Chemically synthesized
caacacacagaggccguauuaca

SEQ ID NO: 60598 - RNA, 23 nt, Artificial Sequence
  Chemically synthesized
ucaacacacagaggccguauuac

SEQ ID NO: 60599 - RNA, 23 nt, Artificial Sequence
  Chemically synthesized
cucaacacacagaggccguauua

SEQ ID NO: 60600 - RNA, 23 nt, Artificial Sequence
  Chemically synthesized
gagcccgaaucaugacagucagc

SEQ ID NO: 60601 - RNA, 23 nt, Artificial Sequence
  Chemically synthesized
ugagcccgaaucaugacagucag

SEQ ID NO: 60602 - RNA, 23 nt, Artificial Sequence
  Chemically synthesized
augagcccgaaucaugacaguca

SEQ ID NO: 60603 - RNA, 23 nt, Artificial Sequence
  Chemically synthesized
gaaacagcguaucacugagaccg

SEQ ID NO: 60604 - RNA, 23 nt, Artificial Sequence
  Chemically synthesized
ggaaacagcguaucacugagacc

SEQ ID NO: 60605 - RNA, 23 nt, Artificial Sequence
  Chemically synthesized
cggaaacagcguaucacugagac

SEQ ID NO: 60606 - RNA, 23 nt, Artificial Sequence
  Chemically synthesized
ccggaaacagcguaucacugaga

SEQ ID NO: 60607 - RNA, 23 nt, Artificial Sequence
  Chemically synthesized
cccggaaacagcguaucacugag

SEQ ID NO: 60608 - RNA, 23 nt, Artificial Sequence
  Chemically synthesized
acagcgaccucaacacacagagg

SEQ ID NO: 60609 - RNA, 23 nt, Artificial Sequence
  Chemically synthesized
uacagcgaccucaacacacagag

SEQ ID NO: 60610 - RNA, 23 nt, Artificial Sequence
  Chemically synthesized
cuacagcgaccucaacacacaga

SEQ ID NO: 60611 - RNA, 23 nt, Artificial Sequence
  Chemically synthesized
ucuacagcgaccucaacacacag

SEQ ID NO: 60612 - RNA, 23 nt, Artificial Sequence
  Chemically synthesized
gucuacagcgaccucaacacaca

SEQ ID NO: 60613 - RNA, 23 nt, Artificial Sequence
  Chemically synthesized
ggugcugacagugcucauugccc

SEQ ID NO: 60614 - RNA, 23 nt, Artificial Sequence
  Chemically synthesized
uggugcugacagugcucauugcc

SEQ ID NO: 60615 - RNA, 23 nt, Artificial Sequence
  Chemically synthesized
cuggugcugacagugcucauugc

SEQ ID NO: 60616 - RNA, 23 nt, Artificial Sequence
  Chemically synthesized
ccuggugcugacagugcucauug

SEQ ID NO: 60617 - RNA, 23 nt, Artificial Sequence
  Chemically synthesized
accuggugcugacagugcucauu

SEQ ID NO: 60618 - RNA, 23 nt, Artificial Sequence
  Chemically synthesized
guaucacugagaccgagucgccu

SEQ ID NO: 60619 - RNA, 23 nt, Artificial Sequence
  Chemically synthesized
cguaucacugagaccgagucgcc

SEQ ID NO: 60620 - RNA, 23 nt, Artificial Sequence
  Chemically synthesized
gcguaucacugagaccgagucgc

SEQ ID NO: 60621 - RNA, 23 nt, Artificial Sequence
  Chemically synthesized
agcguaucacugagaccgagucg

SEQ ID NO: 60622 - RNA, 23 nt, Artificial Sequence
  Chemically synthesized
cagcguaucacugagaccgaguc

SEQ ID NO: 60623 - RNA, 23 nt, Artificial Sequence
  Chemically synthesized
ugagaccgagucgccuuaucagg

SEQ ID NO: 60624 - RNA, 23 nt, Artificial Sequence
  Chemically synthesized
cugagaccgagucgccuuaucag

SEQ ID NO: 60625 - RNA, 23 nt, Artificial Sequence
  Chemically synthesized
acugagaccgagucgccuuauca

SEQ ID NO: 60626 - RNA, 23 nt, Artificial Sequence
  Chemically synthesized
cacugagaccgagucgccuuauc

SEQ ID NO: 60627 - RNA, 23 nt, Artificial Sequence
  Chemically synthesized
ucacugagaccgagucgccuuau

SEQ ID NO: 60628 - RNA, 23 nt, Artificial Sequence
  Chemically synthesized
agcgauugcaguugcucuacggu

SEQ ID NO: 60629 - RNA, 23 nt, Artificial Sequence
  Chemically synthesized
gagcgauugcaguugcucuacgg

SEQ ID NO: 60630 - RNA, 23 nt, Artificial Sequence
  Chemically synthesized
agagcgauugcaguugcucuacg

SEQ ID NO: 60631 - RNA, 23 nt, Artificial Sequence
  Chemically synthesized
cagagcgauugcaguugcucuac

SEQ ID NO: 60632 - RNA, 23 nt, Artificial Sequence
  Chemically synthesized
ccagagcgauugcaguugcucua

SEQ ID NO: 60633 - RNA, 23 nt, Artificial Sequence
  Chemically synthesized
aaugagcccgaaucaugacaguc

SEQ ID NO: 60634 - RNA, 23 nt, Artificial Sequence
  Chemically synthesized
aaaugagcccgaaucaugacagu

SEQ ID NO: 60635 - RNA, 23 nt, Artificial Sequence
  Chemically synthesized
caaaugagcccgaaucaugacag

SEQ ID NO: 60636 - RNA, 23 nt, Artificial Sequence
  Chemically synthesized
acccggaaacagcguaucacuga

SEQ ID NO: 60637 - RNA, 23 nt, Artificial Sequence
  Chemically synthesized
gacccggaaacagcguaucacug

SEQ ID NO: 60638 - RNA, 23 nt, Artificial Sequence
  Chemically synthesized
cgacccggaaacagcguaucacu

SEQ ID NO: 60639 - RNA, 23 nt, Artificial Sequence
  Chemically synthesized
ccucaacacacagaggccguauu

SEQ ID NO: 60640 - RNA, 23 nt, Artificial Sequence
  Chemically synthesized
accucaacacacagaggccguau

SEQ ID NO: 60641 - RNA, 23 nt, Artificial Sequence
  Chemically synthesized
gaccucaacacacagaggccgua

SEQ ID NO: 60642 - RNA, 23 nt, Artificial Sequence
  Chemically synthesized
agcgaccucaacacacagaggcc

SEQ ID NO: 60643 - RNA, 23 nt, Artificial Sequence
  Chemically synthesized
cagcgaccucaacacacagaggc

SEQ ID NO: 60644 - RNA, 23 nt, Artificial Sequence
  Chemically synthesized
ugcaguugcucuacggugagccc

SEQ ID NO: 60645 - RNA, 23 nt, Artificial Sequence
  Chemically synthesized
uugcaguugcucuacggugagcc

SEQ ID NO: 60646 - RNA, 23 nt, Artificial Sequence
  Chemically synthesized
auugcaguugcucuacggugagc

SEQ ID NO: 60647 - RNA, 23 nt, Artificial Sequence
  Chemically synthesized
gauugcaguugcucuacggugag

SEQ ID NO: 60648 - RNA, 23 nt, Artificial Sequence
  Chemically synthesized
cgauugcaguugcucuacgguga

SEQ ID NO: 60649 - RNA, 23 nt, Artificial Sequence
  Chemically synthesized
gcgauugcaguugcucuacggug

SEQ ID NO: 60650 - RNA, 23 nt, Artificial Sequence
  Chemically synthesized
ugacagugcucauugcccuggcc

SEQ ID NO: 60651 - RNA, 23 nt, Artificial Sequence
  Chemically synthesized
cugacagugcucauugcccuggc

SEQ ID NO: 60652 - RNA, 23 nt, Artificial Sequence
  Chemically synthesized
gcugacagugcucauugcccugg

SEQ ID NO: 60653 - RNA, 23 nt, Artificial Sequence
  Chemically synthesized
ugcugacagugcucauugcccug

SEQ ID NO: 60654 - RNA, 23 nt, Artificial Sequence
  Chemically synthesized
gugcugacagugcucauugcccu

SEQ ID NO: 60655 - RNA, 23 nt, Artificial Sequence
  Chemically synthesized
cccagagcgauugcaguugcucu

SEQ ID NO: 60656 - RNA, 23 nt, Artificial Sequence
  Chemically synthesized
gcccagagcgauugcaguugcuc

SEQ ID NO: 60657 - RNA, 23 nt, Artificial Sequence
  Chemically synthesized
ggcccagagcgauugcaguugcu

SEQ ID NO: 60658 - RNA, 23 nt, Artificial Sequence
  Chemically synthesized
cucauuccaacuccuaccgcgau

SEQ ID NO: 60659 - RNA, 23 nt, Artificial Sequence
  Chemically synthesized
ucggaugucuacagcgaccucaa

SEQ ID NO: 60660 - RNA, 23 nt, Artificial Sequence
  Chemically synthesized
ggaugucuacagcgaccucaaca

SEQ ID NO: 60661 - RNA, 23 nt, Artificial Sequence
  Chemically synthesized
ucuguaucgcgguaggaguugga

SEQ ID NO: 60662 - RNA, 23 nt, Artificial Sequence
  Chemically synthesized
cuguaucgcgguaggaguuggaa

SEQ ID NO: 60663 - RNA, 23 nt, Artificial Sequence
  Chemically synthesized
uguaucgcgguaggaguuggaau

SEQ ID NO: 60664 - RNA, 23 nt, Artificial Sequence
  Chemically synthesized
guaucgcgguaggaguuggaaug

SEQ ID NO: 60665 - RNA, 23 nt, Artificial Sequence
  Chemically synthesized
uaucgcgguaggaguuggaauga

SEQ ID NO: 60666 - RNA, 23 nt, Artificial Sequence
  Chemically synthesized
uaucauguugcugacugucauga

SEQ ID NO: 60667 - RNA, 23 nt, Artificial Sequence
  Chemically synthesized
aucauguugcugacugucaugau

SEQ ID NO: 60668 - RNA, 23 nt, Artificial Sequence
  Chemically synthesized
ucauguugcugacugucaugauu

SEQ ID NO: 60669 - RNA, 23 nt, Artificial Sequence
  Chemically synthesized
cauguugcugacugucaugauuc

SEQ ID NO: 60670 - RNA, 23 nt, Artificial Sequence
  Chemically synthesized
auguugcugacugucaugauucg

SEQ ID NO: 60671 - RNA, 23 nt, Artificial Sequence
  Chemically synthesized
uggcacucugugggucuguaucg

SEQ ID NO: 60672 - RNA, 23 nt, Artificial Sequence
  Chemically synthesized
ggcacucugugggucuguaucgc

SEQ ID NO: 60673 - RNA, 23 nt, Artificial Sequence
  Chemically synthesized
gcacucugugggucuguaucgcg

SEQ ID NO: 60674 - RNA, 23 nt, Artificial Sequence
  Chemically synthesized
cacucugugggucuguaucgcgg

SEQ ID NO: 60675 - RNA, 23 nt, Artificial Sequence
  Chemically synthesized
acucugugggucuguaucgcggu

SEQ ID NO: 60676 - RNA, 23 nt, Artificial Sequence
  Chemically synthesized
cgguaggaguuggaaugaggugc

SEQ ID NO: 60677 - RNA, 23 nt, Artificial Sequence
  Chemically synthesized
gguaggaguuggaaugaggugca

SEQ ID NO: 60678 - RNA, 23 nt, Artificial Sequence
  Chemically synthesized
guaggaguuggaaugaggugcag

SEQ ID NO: 60679 - RNA, 23 nt, Artificial Sequence
  Chemically synthesized
uaggaguuggaaugaggugcagg

SEQ ID NO: 60680 - RNA, 23 nt, Artificial Sequence
  Chemically synthesized
aggaguuggaaugaggugcaggg

SEQ ID NO: 60681 - RNA, 23 nt, Artificial Sequence
  Chemically synthesized
uguugcugacugucaugauucgg

SEQ ID NO: 60682 - RNA, 23 nt, Artificial Sequence
  Chemically synthesized
guugcugacugucaugauucggg

SEQ ID NO: 60683 - RNA, 23 nt, Artificial Sequence
  Chemically synthesized
uugcugacugucaugauucgggc

SEQ ID NO: 60684 - RNA, 23 nt, Artificial Sequence
  Chemically synthesized
ugcugacugucaugauucgggcu

SEQ ID NO: 60685 - RNA, 23 nt, Artificial Sequence
  Chemically synthesized
gcucauuuguaauacggccucug

SEQ ID NO: 60686 - RNA, 23 nt, Artificial Sequence
  Chemically synthesized
cucauuuguaauacggccucugu

SEQ ID NO: 60687 - RNA, 23 nt, Artificial Sequence
  Chemically synthesized
ucauuuguaauacggccucugug

SEQ ID NO: 60688 - RNA, 23 nt, Artificial Sequence
  Chemically synthesized
cauuuguaauacggccucugugu

SEQ ID NO: 60689 - RNA, 23 nt, Artificial Sequence
  Chemically synthesized
auuuguaauacggccucugugug

SEQ ID NO: 60690 - RNA, 23 nt, Artificial Sequence
  Chemically synthesized
ugucaugauucgggcucauuugu

SEQ ID NO: 60691 - RNA, 23 nt, Artificial Sequence
  Chemically synthesized
gucaugauucgggcucauuugua

SEQ ID NO: 60692 - RNA, 23 nt, Artificial Sequence
  Chemically synthesized
ucaugauucgggcucauuuguaa

SEQ ID NO: 60693 - RNA, 23 nt, Artificial Sequence
  Chemically synthesized
caugauucgggcucauuuguaau

SEQ ID NO: 60694 - RNA, 23 nt, Artificial Sequence
  Chemically synthesized
augauucgggcucauuuguaaua

SEQ ID NO: 60695 - RNA, 23 nt, Artificial Sequence
  Chemically synthesized
ugauucgggcucauuuguaauac

SEQ ID NO: 60696 - RNA, 23 nt, Artificial Sequence
  Chemically synthesized
gauucgggcucauuuguaauacg

SEQ ID NO: 60697 - RNA, 23 nt, Artificial Sequence
  Chemically synthesized
auucgggcucauuuguaauacgg

SEQ ID NO: 60698 - RNA, 23 nt, Artificial Sequence
  Chemically synthesized
uucgggcucauuuguaauacggc

SEQ ID NO: 60699 - RNA, 23 nt, Artificial Sequence
  Chemically synthesized
ucgggcucauuuguaauacggcc

SEQ ID NO: 60700 - RNA, 23 nt, Artificial Sequence
  Chemically synthesized
gggcucauuuguaauacggccuc

SEQ ID NO: 60701 - RNA, 23 nt, Artificial Sequence
  Chemically synthesized
ggcucauuuguaauacggccucu

SEQ ID NO: 60702 - RNA, 23 nt, Artificial Sequence
  Chemically synthesized
uuuguaauacggccucugugugu

SEQ ID NO: 60703 - RNA, 23 nt, Artificial Sequence
  Chemically synthesized
cgggcucauuuguaauacggccu

SEQ ID NO: 60704 - RNA, 23 nt, Artificial Sequence
  Chemically synthesized
gcgguaggaguuggaaugaggug

SEQ ID NO: 60705 - RNA, 23 nt, Artificial Sequence
  Chemically synthesized
ggaguuggaaugaggugcagggu

SEQ ID NO: 60706 - RNA, 23 nt, Artificial Sequence
  Chemically synthesized
gaguuggaaugaggugcagggug

SEQ ID NO: 60707 - RNA, 23 nt, Artificial Sequence
  Chemically synthesized
aguuggaaugaggugcagggugg

SEQ ID NO: 60708 - RNA, 23 nt, Artificial Sequence
  Chemically synthesized
guuggaaugaggugcaggguggg

SEQ ID NO: 60709 - RNA, 23 nt, Artificial Sequence
  Chemically synthesized
uuggaaugaggugcagggugggc

SEQ ID NO: 60710 - RNA, 23 nt, Artificial Sequence
  Chemically synthesized
agguaucauguugcugacuguca

SEQ ID NO: 60711 - RNA, 23 nt, Artificial Sequence
  Chemically synthesized
gguaucauguugcugacugucau

SEQ ID NO: 60712 - RNA, 23 nt, Artificial Sequence
  Chemically synthesized
guaucauguugcugacugucaug

SEQ ID NO: 60713 - RNA, 23 nt, Artificial Sequence
  Chemically synthesized
gucgcuguagacauccgaccucu

SEQ ID NO: 60714 - RNA, 23 nt, Artificial Sequence
  Chemically synthesized
ucgcuguagacauccgaccucug

SEQ ID NO: 60715 - RNA, 23 nt, Artificial Sequence
  Chemically synthesized
cgcuguagacauccgaccucuga

SEQ ID NO: 60716 - RNA, 23 nt, Artificial Sequence
  Chemically synthesized
gcuguagacauccgaccucugac

SEQ ID NO: 60717 - RNA, 23 nt, Artificial Sequence
  Chemically synthesized
cuguagacauccgaccucugacc

SEQ ID NO: 60718 - RNA, 23 nt, Artificial Sequence
  Chemically synthesized
uuguaauacggccucuguguguu

SEQ ID NO: 60719 - RNA, 23 nt, Artificial Sequence
  Chemically synthesized
uguaauacggccucuguguguug

SEQ ID NO: 60720 - RNA, 23 nt, Artificial Sequence
  Chemically synthesized
guaauacggccucuguguguuga

SEQ ID NO: 60721 - RNA, 23 nt, Artificial Sequence
  Chemically synthesized
uaauacggccucuguguguugag

SEQ ID NO: 60722 - RNA, 23 nt, Artificial Sequence
  Chemically synthesized
gcugacugucaugauucgggcuc

SEQ ID NO: 60723 - RNA, 23 nt, Artificial Sequence
  Chemically synthesized
cugacugucaugauucgggcuca

SEQ ID NO: 60724 - RNA, 23 nt, Artificial Sequence
  Chemically synthesized
ugacugucaugauucgggcucau

SEQ ID NO: 60725 - RNA, 23 nt, Artificial Sequence
  Chemically synthesized
cggucucagugauacgcuguuuc

SEQ ID NO: 60726 - RNA, 23 nt, Artificial Sequence
  Chemically synthesized
ggucucagugauacgcuguuucc

SEQ ID NO: 60727 - RNA, 23 nt, Artificial Sequence
  Chemically synthesized
gucucagugauacgcuguuuccg

SEQ ID NO: 60728 - RNA, 23 nt, Artificial Sequence
  Chemically synthesized
ucucagugauacgcuguuuccgg

SEQ ID NO: 60729 - RNA, 23 nt, Artificial Sequence
  Chemically synthesized
cucagugauacgcuguuuccggg

SEQ ID NO: 60730 - RNA, 23 nt, Artificial Sequence
  Chemically synthesized
ccucuguguguugaggucgcugu

SEQ ID NO: 60731 - RNA, 23 nt, Artificial Sequence
  Chemically synthesized
cucuguguguugaggucgcugua

SEQ ID NO: 60732 - RNA, 23 nt, Artificial Sequence
  Chemically synthesized
ucuguguguugaggucgcuguag

SEQ ID NO: 60733 - RNA, 23 nt, Artificial Sequence
  Chemically synthesized
cuguguguugaggucgcuguaga

SEQ ID NO: 60734 - RNA, 23 nt, Artificial Sequence
  Chemically synthesized
uguguguugaggucgcuguagac

SEQ ID NO: 60735 - RNA, 23 nt, Artificial Sequence
  Chemically synthesized
gggcaaugagcacugucagcacc

SEQ ID NO: 60736 - RNA, 23 nt, Artificial Sequence
  Chemically synthesized
ggcaaugagcacugucagcacca

SEQ ID NO: 60737 - RNA, 23 nt, Artificial Sequence
  Chemically synthesized
gcaaugagcacugucagcaccag

SEQ ID NO: 60738 - RNA, 23 nt, Artificial Sequence
  Chemically synthesized
caaugagcacugucagcaccagg

SEQ ID NO: 60739 - RNA, 23 nt, Artificial Sequence
  Chemically synthesized
aaugagcacugucagcaccaggu

SEQ ID NO: 60740 - RNA, 23 nt, Artificial Sequence
  Chemically synthesized
aggcgacucggucucagugauac

SEQ ID NO: 60741 - RNA, 23 nt, Artificial Sequence
  Chemically synthesized
ggcgacucggucucagugauacg

SEQ ID NO: 60742 - RNA, 23 nt, Artificial Sequence
  Chemically synthesized
gcgacucggucucagugauacgc

SEQ ID NO: 60743 - RNA, 23 nt, Artificial Sequence
  Chemically synthesized
cgacucggucucagugauacgcu

SEQ ID NO: 60744 - RNA, 23 nt, Artificial Sequence
  Chemically synthesized
gacucggucucagugauacgcug

SEQ ID NO: 60745 - RNA, 23 nt, Artificial Sequence
  Chemically synthesized
ccugauaaggcgacucggucuca

SEQ ID NO: 60746 - RNA, 23 nt, Artificial Sequence
  Chemically synthesized
cugauaaggcgacucggucucag

SEQ ID NO: 60747 - RNA, 23 nt, Artificial Sequence
  Chemically synthesized
ugauaaggcgacucggucucagu

SEQ ID NO: 60748 - RNA, 23 nt, Artificial Sequence
  Chemically synthesized
gauaaggcgacucggucucagug

SEQ ID NO: 60749 - RNA, 23 nt, Artificial Sequence
  Chemically synthesized
auaaggcgacucggucucaguga

SEQ ID NO: 60750 - RNA, 23 nt, Artificial Sequence
  Chemically synthesized
accguagagcaacugcaaucgcu

SEQ ID NO: 60751 - RNA, 23 nt, Artificial Sequence
  Chemically synthesized
ccguagagcaacugcaaucgcuc

SEQ ID NO: 60752 - RNA, 23 nt, Artificial Sequence
  Chemically synthesized
cguagagcaacugcaaucgcucu

SEQ ID NO: 60753 - RNA, 23 nt, Artificial Sequence
  Chemically synthesized
guagagcaacugcaaucgcucug

SEQ ID NO: 60754 - RNA, 23 nt, Artificial Sequence
  Chemically synthesized
uagagcaacugcaaucgcucugg

SEQ ID NO: 60755 - RNA, 23 nt, Artificial Sequence
  Chemically synthesized
gacugucaugauucgggcucauu

SEQ ID NO: 60756 - RNA, 23 nt, Artificial Sequence
  Chemically synthesized
acugucaugauucgggcucauuu

SEQ ID NO: 60757 - RNA, 23 nt, Artificial Sequence
  Chemically synthesized
cugucaugauucgggcucauuug

SEQ ID NO: 60758 - RNA, 23 nt, Artificial Sequence
  Chemically synthesized
ucagugauacgcuguuuccgggu

SEQ ID NO: 60759 - RNA, 23 nt, Artificial Sequence
  Chemically synthesized
cagugauacgcuguuuccggguc

SEQ ID NO: 60760 - RNA, 23 nt, Artificial Sequence
  Chemically synthesized
agugauacgcuguuuccgggucg

SEQ ID NO: 60761 - RNA, 23 nt, Artificial Sequence
  Chemically synthesized
aauacggccucuguguguugagg

SEQ ID NO: 60762 - RNA, 23 nt, Artificial Sequence
  Chemically synthesized
auacggccucuguguguugaggu

SEQ ID NO: 60763 - RNA, 23 nt, Artificial Sequence
  Chemically synthesized
uacggccucuguguguugagguc

SEQ ID NO: 60764 - RNA, 23 nt, Artificial Sequence
  Chemically synthesized
ggccucuguguguugaggucgcu

SEQ ID NO: 60765 - RNA, 23 nt, Artificial Sequence
  Chemically synthesized
gccucuguguguugaggucgcug

SEQ ID NO: 60766 - RNA, 23 nt, Artificial Sequence
  Chemically synthesized
gggcucaccguagagcaacugca

SEQ ID NO: 60767 - RNA, 23 nt, Artificial Sequence
  Chemically synthesized
ggcucaccguagagcaacugcaa

SEQ ID NO: 60768 - RNA, 23 nt, Artificial Sequence
  Chemically synthesized
gcucaccguagagcaacugcaau

SEQ ID NO: 60769 - RNA, 23 nt, Artificial Sequence
  Chemically synthesized
cucaccguagagcaacugcaauc

SEQ ID NO: 60770 - RNA, 23 nt, Artificial Sequence
  Chemically synthesized
ucaccguagagcaacugcaaucg

SEQ ID NO: 60771 - RNA, 23 nt, Artificial Sequence
  Chemically synthesized
caccguagagcaacugcaaucgc

SEQ ID NO: 60772 - RNA, 23 nt, Artificial Sequence
  Chemically synthesized
ggccagggcaaugagcacuguca

SEQ ID NO: 60773 - RNA, 23 nt, Artificial Sequence
  Chemically synthesized
gccagggcaaugagcacugucag

SEQ ID NO: 60774 - RNA, 23 nt, Artificial Sequence
  Chemically synthesized
ccagggcaaugagcacugucagc

SEQ ID NO: 60775 - RNA, 23 nt, Artificial Sequence
  Chemically synthesized
cagggcaaugagcacugucagca

SEQ ID NO: 60776 - RNA, 23 nt, Artificial Sequence
  Chemically synthesized
agggcaaugagcacugucagcac

SEQ ID NO: 60777 - RNA, 23 nt, Artificial Sequence
  Chemically synthesized
agagcaacugcaaucgcucuggg

SEQ ID NO: 60778 - RNA, 23 nt, Artificial Sequence
  Chemically synthesized
gagcaacugcaaucgcucugggc

SEQ ID NO: 60779 - RNA, 23 nt, Artificial Sequence
  Chemically synthesized
agcaacugcaaucgcucugggcc

SEQ ID NO: 60780 - RNA, 23 nt, Artificial Sequence
  Chemically synthesized
aucgcgguaggaguuggaaugag

SEQ ID NO: 60781 - RNA, 23 nt, Artificial Sequence
  Chemically synthesized
uugaggucgcuguagacauccga

SEQ ID NO: 60782 - RNA, 23 nt, Artificial Sequence
  Chemically synthesized
uguugaggucgcuguagacaucc

SEQ ID NO: 60783 - RNA, 23 nt, Artificial Sequence
  Chemically synthesized
acaucucauuuuuccguaaaaau

SEQ ID NO: 60784 - RNA, 23 nt, Artificial Sequence
  Chemically synthesized
cacaucucauuuuuccguaaaaa

SEQ ID NO: 60785 - RNA, 23 nt, Artificial Sequence
  Chemically synthesized
ucacaucucauuuuuccguaaaa

SEQ ID NO: 60786 - RNA, 23 nt, Artificial Sequence
  Chemically synthesized
uucacaucucauuuuuccguaaa

SEQ ID NO: 60787 - RNA, 23 nt, Artificial Sequence
  Chemically synthesized
auucacaucucauuuuuccguaa

SEQ ID NO: 60788 - RNA, 23 nt, Artificial Sequence
  Chemically synthesized
acauuaagaagggcaaaaagugc

SEQ ID NO: 60789 - RNA, 23 nt, Artificial Sequence
  Chemically synthesized
aacauuaagaagggcaaaaagug

SEQ ID NO: 60790 - RNA, 23 nt, Artificial Sequence
  Chemically synthesized
gaacauuaagaagggcaaaaagu

SEQ ID NO: 60791 - RNA, 23 nt, Artificial Sequence
  Chemically synthesized
agaacauuaagaagggcaaaaag

SEQ ID NO: 60792 - RNA, 23 nt, Artificial Sequence
  Chemically synthesized
gagaacauuaagaagggcaaaaa

SEQ ID NO: 60793 - RNA, 23 nt, Artificial Sequence
  Chemically synthesized
gcaucuuauacgaguaauaugcc

SEQ ID NO: 60794 - RNA, 23 nt, Artificial Sequence
  Chemically synthesized
agcaucuuauacgaguaauaugc

SEQ ID NO: 60795 - RNA, 23 nt, Artificial Sequence
  Chemically synthesized
uagcaucuuauacgaguaauaug

SEQ ID NO: 60796 - RNA, 23 nt, Artificial Sequence
  Chemically synthesized
auagcaucuuauacgaguaauau

SEQ ID NO: 60797 - RNA, 23 nt, Artificial Sequence
  Chemically synthesized
gauagcaucuuauacgaguaaua

SEQ ID NO: 60798 - RNA, 23 nt, Artificial Sequence
  Chemically synthesized
gcaccagaauguauauuaaggug

SEQ ID NO: 60799 - RNA, 23 nt, Artificial Sequence
  Chemically synthesized
agcaccagaauguauauuaaggu

SEQ ID NO: 60800 - RNA, 23 nt, Artificial Sequence
  Chemically synthesized
cagcaccagaauguauauuaagg

SEQ ID NO: 60801 - RNA, 23 nt, Artificial Sequence
  Chemically synthesized
acagcaccagaauguauauuaag

SEQ ID NO: 60802 - RNA, 23 nt, Artificial Sequence
  Chemically synthesized
cacagcaccagaauguauauuaa

SEQ ID NO: 60803 - RNA, 23 nt, Artificial Sequence
  Chemically synthesized
gauucacaucucauuuuuccgua

SEQ ID NO: 60804 - RNA, 23 nt, Artificial Sequence
  Chemically synthesized
cgaguaauaugccugcuauuuga

SEQ ID NO: 60805 - RNA, 23 nt, Artificial Sequence
  Chemically synthesized
acgaguaauaugccugcuauuug

SEQ ID NO: 60806 - RNA, 23 nt, Artificial Sequence
  Chemically synthesized
uacgaguaauaugccugcuauuu

SEQ ID NO: 60807 - RNA, 23 nt, Artificial Sequence
  Chemically synthesized
auacgaguaauaugccugcuauu

SEQ ID NO: 60808 - RNA, 23 nt, Artificial Sequence
  Chemically synthesized
uauacgaguaauaugccugcuau

SEQ ID NO: 60809 - RNA, 23 nt, Artificial Sequence
  Chemically synthesized
ggaaaauuuuagcgugcucacug

SEQ ID NO: 60810 - RNA, 23 nt, Artificial Sequence
  Chemically synthesized
aggaaaauuuuagcgugcucacu

SEQ ID NO: 60811 - RNA, 23 nt, Artificial Sequence
  Chemically synthesized
aaggaaaauuuuagcgugcucac

SEQ ID NO: 60812 - RNA, 23 nt, Artificial Sequence
  Chemically synthesized
gaaggaaaauuuuagcgugcuca

SEQ ID NO: 60813 - RNA, 23 nt, Artificial Sequence
  Chemically synthesized
agaaggaaaauuuuagcgugcuc

SEQ ID NO: 60814 - RNA, 23 nt, Artificial Sequence
  Chemically synthesized
caucucauuuuuccguaaaaaug

SEQ ID NO: 60815 - RNA, 23 nt, Artificial Sequence
  Chemically synthesized
ugauucacaucucauuuuuccgu

SEQ ID NO: 60816 - RNA, 23 nt, Artificial Sequence
  Chemically synthesized
agagaacauuaagaagggcaaaa

SEQ ID NO: 60817 - RNA, 23 nt, Artificial Sequence
  Chemically synthesized
aagagaacauuaagaagggcaaa

SEQ ID NO: 60818 - RNA, 23 nt, Artificial Sequence
  Chemically synthesized
gaagagaacauuaagaagggcaa

SEQ ID NO: 60819 - RNA, 23 nt, Artificial Sequence
  Chemically synthesized
gugacucuauauagcugaucagu

SEQ ID NO: 60820 - RNA, 23 nt, Artificial Sequence
  Chemically synthesized
agugacucuauauagcugaucag

SEQ ID NO: 60821 - RNA, 23 nt, Artificial Sequence
  Chemically synthesized
gagugacucuauauagcugauca

SEQ ID NO: 60822 - RNA, 23 nt, Artificial Sequence
  Chemically synthesized
ugagugacucuauauagcugauc

SEQ ID NO: 60823 - RNA, 23 nt, Artificial Sequence
  Chemically synthesized
cugagugacucuauauagcugau

SEQ ID NO: 60824 - RNA, 23 nt, Artificial Sequence
  Chemically synthesized
cucaauuucugaacaccauaggu

SEQ ID NO: 60825 - RNA, 23 nt, Artificial Sequence
  Chemically synthesized
ccucaauuucugaacaccauagg

SEQ ID NO: 60826 - RNA, 23 nt, Artificial Sequence
  Chemically synthesized
gccucaauuucugaacaccauag

SEQ ID NO: 60827 - RNA, 23 nt, Artificial Sequence
  Chemically synthesized
agccucaauuucugaacaccaua

SEQ ID NO: 60828 - RNA, 23 nt, Artificial Sequence
  Chemically synthesized
uagccucaauuucugaacaccau

SEQ ID NO: 60829 - RNA, 23 nt, Artificial Sequence
  Chemically synthesized
gcagaaagguuaguaucaucaga

SEQ ID NO: 60830 - RNA, 23 nt, Artificial Sequence
  Chemically synthesized
agcagaaagguuaguaucaucag

SEQ ID NO: 60831 - RNA, 23 nt, Artificial Sequence
  Chemically synthesized
cagcagaaagguuaguaucauca

SEQ ID NO: 60832 - RNA, 23 nt, Artificial Sequence
  Chemically synthesized
ccagcagaaagguuaguaucauc

SEQ ID NO: 60833 - RNA, 23 nt, Artificial Sequence
  Chemically synthesized
accagcagaaagguuaguaucau

SEQ ID NO: 60834 - RNA, 23 nt, Artificial Sequence
  Chemically synthesized
agacuugacaguggaacuacauu

SEQ ID NO: 60835 - RNA, 23 nt, Artificial Sequence
  Chemically synthesized
aagacuugacaguggaacuacau

SEQ ID NO: 60836 - RNA, 23 nt, Artificial Sequence
  Chemically synthesized
uaagacuugacaguggaacuaca

SEQ ID NO: 60837 - RNA, 23 nt, Artificial Sequence
  Chemically synthesized
uuaagacuugacaguggaacuac

SEQ ID NO: 60838 - RNA, 23 nt, Artificial Sequence
  Chemically synthesized
guuaagacuugacaguggaacua

SEQ ID NO: 60839 - RNA, 23 nt, Artificial Sequence
  Chemically synthesized
ccacccaauucaaaacauugugc

SEQ ID NO: 60840 - RNA, 23 nt, Artificial Sequence
  Chemically synthesized
cccacccaauucaaaacauugug

SEQ ID NO: 60841 - RNA, 23 nt, Artificial Sequence
  Chemically synthesized
ucccacccaauucaaaacauugu

SEQ ID NO: 60842 - RNA, 23 nt, Artificial Sequence
  Chemically synthesized
uucccacccaauucaaaacauug

SEQ ID NO: 60843 - RNA, 23 nt, Artificial Sequence
  Chemically synthesized
auucccacccaauucaaaacauu

SEQ ID NO: 60844 - RNA, 23 nt, Artificial Sequence
  Chemically synthesized
gcauuuguuucuacuuugauaug

SEQ ID NO: 60845 - RNA, 23 nt, Artificial Sequence
  Chemically synthesized
agcauuuguuucuacuuugauau

SEQ ID NO: 60846 - RNA, 23 nt, Artificial Sequence
  Chemically synthesized
aagcauuuguuucuacuuugaua

SEQ ID NO: 60847 - RNA, 23 nt, Artificial Sequence
  Chemically synthesized
gaagcauuuguuucuacuuugau

SEQ ID NO: 60848 - RNA, 23 nt, Artificial Sequence
  Chemically synthesized
ggaagcauuuguuucuacuuuga

SEQ ID NO: 60849 - RNA, 23 nt, Artificial Sequence
  Chemically synthesized
cuauauagcugaucaguuuuuuc

SEQ ID NO: 60850 - RNA, 23 nt, Artificial Sequence
  Chemically synthesized
ucuauauagcugaucaguuuuuu

SEQ ID NO: 60851 - RNA, 23 nt, Artificial Sequence
  Chemically synthesized
cucuauauagcugaucaguuuuu

SEQ ID NO: 60852 - RNA, 23 nt, Artificial Sequence
  Chemically synthesized
acucuauauagcugaucaguuuu

SEQ ID NO: 60853 - RNA, 23 nt, Artificial Sequence
  Chemically synthesized
gacucuauauagcugaucaguuu

SEQ ID NO: 60854 - RNA, 23 nt, Artificial Sequence
  Chemically synthesized
agauagcaucuuauacgaguaau

SEQ ID NO: 60855 - RNA, 23 nt, Artificial Sequence
  Chemically synthesized
ccagaauguauauuaaggugugg

SEQ ID NO: 60856 - RNA, 23 nt, Artificial Sequence
  Chemically synthesized
accagaauguauauuaaggugug

SEQ ID NO: 60857 - RNA, 23 nt, Artificial Sequence
  Chemically synthesized
caccagaauguauauuaaggugu

SEQ ID NO: 60858 - RNA, 23 nt, Artificial Sequence
  Chemically synthesized
acacagcaccagaauguauauua

SEQ ID NO: 60859 - RNA, 23 nt, Artificial Sequence
  Chemically synthesized
gauucccacccaauucaaaacau

SEQ ID NO: 60860 - RNA, 23 nt, Artificial Sequence
  Chemically synthesized
agccagagagugagagacauuaa

SEQ ID NO: 60861 - RNA, 23 nt, Artificial Sequence
  Chemically synthesized
aagccagagagugagagacauua

SEQ ID NO: 60862 - RNA, 23 nt, Artificial Sequence
  Chemically synthesized
gaagccagagagugagagacauu

SEQ ID NO: 60863 - RNA, 23 nt, Artificial Sequence
  Chemically synthesized
ugaagccagagagugagagacau

SEQ ID NO: 60864 - RNA, 23 nt, Artificial Sequence
  Chemically synthesized
ccgacuggaagacacguuuggcc

SEQ ID NO: 60865 - RNA, 23 nt, Artificial Sequence
  Chemically synthesized
accgacuggaagacacguuuggc

SEQ ID NO: 60866 - RNA, 23 nt, Artificial Sequence
  Chemically synthesized
uaccgacuggaagacacguuugg

SEQ ID NO: 60867 - RNA, 23 nt, Artificial Sequence
  Chemically synthesized
uuaccgacuggaagacacguuug

SEQ ID NO: 60868 - RNA, 23 nt, Artificial Sequence
  Chemically synthesized
cuuaccgacuggaagacacguuu

SEQ ID NO: 60869 - RNA, 23 nt, Artificial Sequence
  Chemically synthesized
ggaagauguacggagacauggca

SEQ ID NO: 60870 - RNA, 23 nt, Artificial Sequence
  Chemically synthesized
aggaagauguacggagacauggc

SEQ ID NO: 60871 - RNA, 23 nt, Artificial Sequence
  Chemically synthesized
caggaagauguacggagacaugg

SEQ ID NO: 60872 - RNA, 23 nt, Artificial Sequence
  Chemically synthesized
acaggaagauguacggagacaug

SEQ ID NO: 60873 - RNA, 23 nt, Artificial Sequence
  Chemically synthesized
uacaggaagauguacggagacau

SEQ ID NO: 60874 - RNA, 23 nt, Artificial Sequence
  Chemically synthesized
gaccaaaaguuacauguuugcac

SEQ ID NO: 60875 - RNA, 23 nt, Artificial Sequence
  Chemically synthesized
ugaccaaaaguuacauguuugca

SEQ ID NO: 60876 - RNA, 23 nt, Artificial Sequence
  Chemically synthesized
gugaccaaaaguuacauguuugc

SEQ ID NO: 60877 - RNA, 23 nt, Artificial Sequence
  Chemically synthesized
ugugaccaaaaguuacauguuug

SEQ ID NO: 60878 - RNA, 23 nt, Artificial Sequence
  Chemically synthesized
gugugaccaaaaguuacauguuu

SEQ ID NO: 60879 - RNA, 23 nt, Artificial Sequence
  Chemically synthesized
ugacucuauauagcugaucaguu

SEQ ID NO: 60880 - RNA, 23 nt, Artificial Sequence
  Chemically synthesized
accuggaagagaacauuaagaag

SEQ ID NO: 60881 - RNA, 23 nt, Artificial Sequence
  Chemically synthesized
gaccuggaagagaacauuaagaa

SEQ ID NO: 60882 - RNA, 23 nt, Artificial Sequence
  Chemically synthesized
ugaccuggaagagaacauuaaga

SEQ ID NO: 60883 - RNA, 23 nt, Artificial Sequence
  Chemically synthesized
cugaccuggaagagaacauuaag

SEQ ID NO: 60884 - RNA, 23 nt, Artificial Sequence
  Chemically synthesized
gcugaccuggaagagaacauuaa

SEQ ID NO: 60885 - RNA, 23 nt, Artificial Sequence
  Chemically synthesized
ucaauguuagccucaauuucuga

SEQ ID NO: 60886 - RNA, 23 nt, Artificial Sequence
  Chemically synthesized
uucaauguuagccucaauuucug

SEQ ID NO: 60887 - RNA, 23 nt, Artificial Sequence
  Chemically synthesized
uuucaauguuagccucaauuucu

SEQ ID NO: 60888 - RNA, 23 nt, Artificial Sequence
  Chemically synthesized
auuucaauguuagccucaauuuc

SEQ ID NO: 60889 - RNA, 23 nt, Artificial Sequence
  Chemically synthesized
uauuucaauguuagccucaauuu

SEQ ID NO: 60890 - RNA, 23 nt, Artificial Sequence
  Chemically synthesized
ugauucgaaugacacuguucagg

SEQ ID NO: 60891 - RNA, 23 nt, Artificial Sequence
  Chemically synthesized
cugauucgaaugacacuguucag

SEQ ID NO: 60892 - RNA, 23 nt, Artificial Sequence
  Chemically synthesized
ucugauucgaaugacacuguuca

SEQ ID NO: 60893 - RNA, 23 nt, Artificial Sequence
  Chemically synthesized
uucugauucgaaugacacuguuc

SEQ ID NO: 60894 - RNA, 23 nt, Artificial Sequence
  Chemically synthesized
auucugauucgaaugacacuguu

SEQ ID NO: 60895 - RNA, 23 nt, Artificial Sequence
  Chemically synthesized
gaaguguaauugagaaggaaaau

SEQ ID NO: 60896 - RNA, 23 nt, Artificial Sequence
  Chemically synthesized
ugaaguguaauugagaaggaaaa

SEQ ID NO: 60897 - RNA, 23 nt, Artificial Sequence
  Chemically synthesized
uugaaguguaauugagaaggaaa

SEQ ID NO: 60898 - RNA, 23 nt, Artificial Sequence
  Chemically synthesized
uuugaaguguaauugagaaggaa

SEQ ID NO: 60899 - RNA, 23 nt, Artificial Sequence
  Chemically synthesized
auuugaaguguaauugagaagga

SEQ ID NO: 60900 - RNA, 23 nt, Artificial Sequence
  Chemically synthesized
gccugcuauuugaaguguaauug

SEQ ID NO: 60901 - RNA, 23 nt, Artificial Sequence
  Chemically synthesized
ugccugcuauuugaaguguaauu

SEQ ID NO: 60902 - RNA, 23 nt, Artificial Sequence
  Chemically synthesized
augccugcuauuugaaguguaau

SEQ ID NO: 60903 - RNA, 23 nt, Artificial Sequence
  Chemically synthesized
uaugccugcuauuugaaguguaa

SEQ ID NO: 60904 - RNA, 23 nt, Artificial Sequence
  Chemically synthesized
auaugccugcuauuugaagugua

SEQ ID NO: 60905 - RNA, 23 nt, Artificial Sequence
  Chemically synthesized
uuauacgaguaauaugccugcua

SEQ ID NO: 60906 - RNA, 23 nt, Artificial Sequence
  Chemically synthesized
ugacaguggaacuacauuaguac

SEQ ID NO: 60907 - RNA, 23 nt, Artificial Sequence
  Chemically synthesized
uugacaguggaacuacauuagua

SEQ ID NO: 60908 - RNA, 23 nt, Artificial Sequence
  Chemically synthesized
cuugacaguggaacuacauuagu

SEQ ID NO: 60909 - RNA, 23 nt, Artificial Sequence
  Chemically synthesized
acuugacaguggaacuacauuag

SEQ ID NO: 60910 - RNA, 23 nt, Artificial Sequence
  Chemically synthesized
gacuugacaguggaacuacauua

SEQ ID NO: 60911 - RNA, 23 nt, Artificial Sequence
  Chemically synthesized
ccaugucaaacaaauagucuauc

SEQ ID NO: 60912 - RNA, 23 nt, Artificial Sequence
  Chemically synthesized
gccaugucaaacaaauagucuau

SEQ ID NO: 60913 - RNA, 23 nt, Artificial Sequence
  Chemically synthesized
ugccaugucaaacaaauagucua

SEQ ID NO: 60914 - RNA, 23 nt, Artificial Sequence
  Chemically synthesized
gugccaugucaaacaaauagucu

SEQ ID NO: 60915 - RNA, 23 nt, Artificial Sequence
  Chemically synthesized
ugugccaugucaaacaaauaguc

SEQ ID NO: 60916 - RNA, 23 nt, Artificial Sequence
  Chemically synthesized
uugugccaugucaaacaaauagu

SEQ ID NO: 60917 - RNA, 23 nt, Artificial Sequence
  Chemically synthesized
ccagacccaacuaugauuagagc

SEQ ID NO: 60918 - RNA, 23 nt, Artificial Sequence
  Chemically synthesized
cccagacccaacuaugauuagag

SEQ ID NO: 60919 - RNA, 23 nt, Artificial Sequence
  Chemically synthesized
gcccagacccaacuaugauuaga

SEQ ID NO: 60920 - RNA, 23 nt, Artificial Sequence
  Chemically synthesized
ggcccagacccaacuaugauuag

SEQ ID NO: 60921 - RNA, 23 nt, Artificial Sequence
  Chemically synthesized
uggcccagacccaacuaugauua

SEQ ID NO: 60922 - RNA, 23 nt, Artificial Sequence
  Chemically synthesized
ccagagagugagagacauuaacu

SEQ ID NO: 60923 - RNA, 23 nt, Artificial Sequence
  Chemically synthesized
ugaagaagaacaugauguucauc

SEQ ID NO: 60924 - RNA, 23 nt, Artificial Sequence
  Chemically synthesized
augaagaagaacaugauguucau

SEQ ID NO: 60925 - RNA, 23 nt, Artificial Sequence
  Chemically synthesized
caugaagaagaacaugauguuca

SEQ ID NO: 60926 - RNA, 23 nt, Artificial Sequence
  Chemically synthesized
ucaugaagaagaacaugauguuc

SEQ ID NO: 60927 - RNA, 23 nt, Artificial Sequence
  Chemically synthesized
gucaugaagaagaacaugauguu

SEQ ID NO: 60928 - RNA, 23 nt, Artificial Sequence
  Chemically synthesized
gcuaaauucuguggaguauguac

SEQ ID NO: 60929 - RNA, 23 nt, Artificial Sequence
  Chemically synthesized
agcuaaauucuguggaguaugua

SEQ ID NO: 60930 - RNA, 23 nt, Artificial Sequence
  Chemically synthesized
gagcuaaauucuguggaguaugu

SEQ ID NO: 60931 - RNA, 23 nt, Artificial Sequence
  Chemically synthesized
cgagcuaaauucuguggaguaug

SEQ ID NO: 60932 - RNA, 23 nt, Artificial Sequence
  Chemically synthesized
ccgagcuaaauucuguggaguau

SEQ ID NO: 60933 - RNA, 23 nt, Artificial Sequence
  Chemically synthesized
accgagcuaaauucuguggagua

SEQ ID NO: 60934 - RNA, 23 nt, Artificial Sequence
  Chemically synthesized
uaccgagcuaaauucuguggagu

SEQ ID NO: 60935 - RNA, 23 nt, Artificial Sequence
  Chemically synthesized
auaccgagcuaaauucuguggag

SEQ ID NO: 60936 - RNA, 23 nt, Artificial Sequence
  Chemically synthesized
gcaggcugauuucuagguaggaa

SEQ ID NO: 60937 - RNA, 23 nt, Artificial Sequence
  Chemically synthesized
ggcaggcugauuucuagguagga

SEQ ID NO: 60938 - RNA, 23 nt, Artificial Sequence
  Chemically synthesized
uggcaggcugauuucuagguagg

SEQ ID NO: 60939 - RNA, 23 nt, Artificial Sequence
  Chemically synthesized
uuggcaggcugauuucuagguag

SEQ ID NO: 60940 - RNA, 23 nt, Artificial Sequence
  Chemically synthesized
cuuggcaggcugauuucuaggua

SEQ ID NO: 60941 - RNA, 23 nt, Artificial Sequence
  Chemically synthesized
accauagguagaauguaaagcuu

SEQ ID NO: 60942 - RNA, 23 nt, Artificial Sequence
  Chemically synthesized
caccauagguagaauguaaagcu

SEQ ID NO: 60943 - RNA, 23 nt, Artificial Sequence
  Chemically synthesized
acaccauagguagaauguaaagc

SEQ ID NO: 60944 - RNA, 23 nt, Artificial Sequence
  Chemically synthesized
aacaccauagguagaauguaaag

SEQ ID NO: 60945 - RNA, 23 nt, Artificial Sequence
  Chemically synthesized
gaacaccauagguagaauguaaa

SEQ ID NO: 60946 - RNA, 23 nt, Artificial Sequence
  Chemically synthesized
ucaauuucugaacaccauaggua

SEQ ID NO: 60947 - RNA, 23 nt, Artificial Sequence
  Chemically synthesized
auauuucaauguuagccucaauu

SEQ ID NO: 60948 - RNA, 23 nt, Artificial Sequence
  Chemically synthesized
aguuguuugugccuuuuuauuuu

SEQ ID NO: 60949 - RNA, 23 nt, Artificial Sequence
  Chemically synthesized
aaguuguuugugccuuuuuauuu

SEQ ID NO: 60950 - RNA, 23 nt, Artificial Sequence
  Chemically synthesized
aaaguuguuugugccuuuuuauu

SEQ ID NO: 60951 - RNA, 23 nt, Artificial Sequence
  Chemically synthesized
uaaaguuguuugugccuuuuuau

SEQ ID NO: 60952 - RNA, 23 nt, Artificial Sequence
  Chemically synthesized
uuaaaguuguuugugccuuuuua

SEQ ID NO: 60953 - RNA, 23 nt, Artificial Sequence
  Chemically synthesized
gagaaggaaaauuuuagcgugcu

SEQ ID NO: 60954 - RNA, 23 nt, Artificial Sequence
  Chemically synthesized
ccugcuauuugaaguguaauuga

SEQ ID NO: 60955 - RNA, 23 nt, Artificial Sequence
  Chemically synthesized
uacacagcaccagaauguauauu

SEQ ID NO: 60956 - RNA, 23 nt, Artificial Sequence
  Chemically synthesized
guacacagcaccagaauguauau

SEQ ID NO: 60957 - RNA, 23 nt, Artificial Sequence
  Chemically synthesized
aguacacagcaccagaauguaua

SEQ ID NO: 60958 - RNA, 23 nt, Artificial Sequence
  Chemically synthesized
gacauuaacucauuagacuggaa

SEQ ID NO: 60959 - RNA, 23 nt, Artificial Sequence
  Chemically synthesized
agacauuaacucauuagacugga

SEQ ID NO: 60960 - RNA, 23 nt, Artificial Sequence
  Chemically synthesized
gagacauuaacucauuagacugg

SEQ ID NO: 60961 - RNA, 23 nt, Artificial Sequence
  Chemically synthesized
agagacauuaacucauuagacug

SEQ ID NO: 60962 - RNA, 23 nt, Artificial Sequence
  Chemically synthesized
gagagacauuaacucauuagacu

SEQ ID NO: 60963 - RNA, 23 nt, Artificial Sequence
  Chemically synthesized
agagagugagagacauuaacuca

SEQ ID NO: 60964 - RNA, 23 nt, Artificial Sequence
  Chemically synthesized
cagagagugagagacauuaacuc

SEQ ID NO: 60965 - RNA, 23 nt, Artificial Sequence
  Chemically synthesized
gcgaggucaugaagaagaacaug

SEQ ID NO: 60966 - RNA, 23 nt, Artificial Sequence
  Chemically synthesized
ggcgaggucaugaagaagaacau

SEQ ID NO: 60967 - RNA, 23 nt, Artificial Sequence
  Chemically synthesized
cggcgaggucaugaagaagaaca

SEQ ID NO: 60968 - RNA, 23 nt, Artificial Sequence
  Chemically synthesized
acggcgaggucaugaagaagaac

SEQ ID NO: 60969 - RNA, 23 nt, Artificial Sequence
  Chemically synthesized
gacggcgaggucaugaagaagaa

SEQ ID NO: 60970 - RNA, 23 nt, Artificial Sequence
  Chemically synthesized
acugagugacucuauauagcuga

SEQ ID NO: 60971 - RNA, 23 nt, Artificial Sequence
  Chemically synthesized
aacugagugacucuauauagcug

SEQ ID NO: 60972 - RNA, 23 nt, Artificial Sequence
  Chemically synthesized
augaacaaauggccuuuauuaaa

SEQ ID NO: 60973 - RNA, 23 nt, Artificial Sequence
  Chemically synthesized
aaugaacaaauggccuuuauuaa

SEQ ID NO: 60974 - RNA, 23 nt, Artificial Sequence
  Chemically synthesized
uaaugaacaaauggccuuuauua

SEQ ID NO: 60975 - RNA, 23 nt, Artificial Sequence
  Chemically synthesized
uuaaugaacaaauggccuuuauu

SEQ ID NO: 60976 - RNA, 23 nt, Artificial Sequence
  Chemically synthesized
uuuaaugaacaaauggccuuuau

SEQ ID NO: 60977 - RNA, 23 nt, Artificial Sequence
  Chemically synthesized
ggaagagaacauuaagaagggca

SEQ ID NO: 60978 - RNA, 23 nt, Artificial Sequence
  Chemically synthesized
caauuucugaacaccauagguag

SEQ ID NO: 60979 - RNA, 23 nt, Artificial Sequence
  Chemically synthesized
gauauuucaauguuagccucaau

SEQ ID NO: 60980 - RNA, 23 nt, Artificial Sequence
  Chemically synthesized
gcauucuccagccaucaagagac

SEQ ID NO: 60981 - RNA, 23 nt, Artificial Sequence
  Chemically synthesized
ugcauucuccagccaucaagaga

SEQ ID NO: 60982 - RNA, 23 nt, Artificial Sequence
  Chemically synthesized
gugcauucuccagccaucaagag

SEQ ID NO: 60983 - RNA, 23 nt, Artificial Sequence
  Chemically synthesized
ugugcauucuccagccaucaaga

SEQ ID NO: 60984 - RNA, 23 nt, Artificial Sequence
  Chemically synthesized
augugcauucuccagccaucaag

SEQ ID NO: 60985 - RNA, 23 nt, Artificial Sequence
  Chemically synthesized
gaaaauuuuagcgugcucacuga

SEQ ID NO: 60986 - RNA, 23 nt, Artificial Sequence
  Chemically synthesized
ugagaaggaaaauuuuagcgugc

SEQ ID NO: 60987 - RNA, 23 nt, Artificial Sequence
  Chemically synthesized
cagauagcaucuuauacgaguaa

SEQ ID NO: 60988 - RNA, 23 nt, Artificial Sequence
  Chemically synthesized
ugaagaauguuaagacuugacag

SEQ ID NO: 60989 - RNA, 23 nt, Artificial Sequence
  Chemically synthesized
uugaagaauguuaagacuugaca

SEQ ID NO: 60990 - RNA, 23 nt, Artificial Sequence
  Chemically synthesized
uuugaagaauguuaagacuugac

SEQ ID NO: 60991 - RNA, 23 nt, Artificial Sequence
  Chemically synthesized
guuugaagaauguuaagacuuga

SEQ ID NO: 60992 - RNA, 23 nt, Artificial Sequence
  Chemically synthesized
gguuugaagaauguuaagacuug

SEQ ID NO: 60993 - RNA, 23 nt, Artificial Sequence
  Chemically synthesized
uuggcccagacccaacuaugauu

SEQ ID NO: 60994 - RNA, 23 nt, Artificial Sequence
  Chemically synthesized
gacuggaacuugaacugauucac

SEQ ID NO: 60995 - RNA, 23 nt, Artificial Sequence
  Chemically synthesized
agacuggaacuugaacugauuca

SEQ ID NO: 60996 - RNA, 23 nt, Artificial Sequence
  Chemically synthesized
uagacuggaacuugaacugauuc

SEQ ID NO: 60997 - RNA, 23 nt, Artificial Sequence
  Chemically synthesized
uuagacuggaacuugaacugauu

SEQ ID NO: 60998 - RNA, 23 nt, Artificial Sequence
  Chemically synthesized
auuagacuggaacuugaacugau

SEQ ID NO: 60999 - RNA, 23 nt, Artificial Sequence
  Chemically synthesized
ugagagacauuaacucauuagac

SEQ ID NO: 61000 - RNA, 23 nt, Artificial Sequence
  Chemically synthesized
cuacaggaagauguacggagaca

SEQ ID NO: 61001 - RNA, 23 nt, Artificial Sequence
  Chemically synthesized
acuacaggaagauguacggagac

SEQ ID NO: 61002 - RNA, 23 nt, Artificial Sequence
  Chemically synthesized
uacuacaggaagauguacggaga

SEQ ID NO: 61003 - RNA, 23 nt, Artificial Sequence
  Chemically synthesized
cauaccgagcuaaauucugugga

SEQ ID NO: 61004 - RNA, 23 nt, Artificial Sequence
  Chemically synthesized
ugaagacauaccgagcuaaauuc

SEQ ID NO: 61005 - RNA, 23 nt, Artificial Sequence
  Chemically synthesized
augaagacauaccgagcuaaauu

SEQ ID NO: 61006 - RNA, 23 nt, Artificial Sequence
  Chemically synthesized
caugaagacauaccgagcuaaau

SEQ ID NO: 61007 - RNA, 23 nt, Artificial Sequence
  Chemically synthesized
gcaugaagacauaccgagcuaaa

SEQ ID NO: 61008 - RNA, 23 nt, Artificial Sequence
  Chemically synthesized
agcaugaagacauaccgagcuaa

SEQ ID NO: 61009 - RNA, 23 nt, Artificial Sequence
  Chemically synthesized
ccuaucaaguuugagcuuucugg

SEQ ID NO: 61010 - RNA, 23 nt, Artificial Sequence
  Chemically synthesized
gccuaucaaguuugagcuuucug

SEQ ID NO: 61011 - RNA, 23 nt, Artificial Sequence
  Chemically synthesized
agccuaucaaguuugagcuuucu

SEQ ID NO: 61012 - RNA, 23 nt, Artificial Sequence
  Chemically synthesized
aagccuaucaaguuugagcuuuc

SEQ ID NO: 61013 - RNA, 23 nt, Artificial Sequence
  Chemically synthesized
caagccuaucaaguuugagcuuu

SEQ ID NO: 61014 - RNA, 23 nt, Artificial Sequence
  Chemically synthesized
ccaaaaucuccaagccuaucaag

SEQ ID NO: 61015 - RNA, 23 nt, Artificial Sequence
  Chemically synthesized
cccaaaaucuccaagccuaucaa

SEQ ID NO: 61016 - RNA, 23 nt, Artificial Sequence
  Chemically synthesized
ucccaaaaucuccaagccuauca

SEQ ID NO: 61017 - RNA, 23 nt, Artificial Sequence
  Chemically synthesized
cucccaaaaucuccaagccuauc

SEQ ID NO: 61018 - RNA, 23 nt, Artificial Sequence
  Chemically synthesized
acucccaaaaucuccaagccuau

SEQ ID NO: 61019 - RNA, 23 nt, Artificial Sequence
  Chemically synthesized
cuacuuugauaugacuguuuuuc

SEQ ID NO: 61020 - RNA, 23 nt, Artificial Sequence
  Chemically synthesized
ucuacuuugauaugacuguuuuu

SEQ ID NO: 61021 - RNA, 23 nt, Artificial Sequence
  Chemically synthesized
uucuacuuugauaugacuguuuu

SEQ ID NO: 61022 - RNA, 23 nt, Artificial Sequence
  Chemically synthesized
uuucuacuuugauaugacuguuu

SEQ ID NO: 61023 - RNA, 23 nt, Artificial Sequence
  Chemically synthesized
guuucuacuuugauaugacuguu

SEQ ID NO: 61024 - RNA, 23 nt, Artificial Sequence
  Chemically synthesized
gcaugaaauggauacuuauaugg

SEQ ID NO: 61025 - RNA, 23 nt, Artificial Sequence
  Chemically synthesized
agcaugaaauggauacuuauaug

SEQ ID NO: 61026 - RNA, 23 nt, Artificial Sequence
  Chemically synthesized
aagcaugaaauggauacuuauau

SEQ ID NO: 61027 - RNA, 23 nt, Artificial Sequence
  Chemically synthesized
aaagcaugaaauggauacuuaua

SEQ ID NO: 61028 - RNA, 23 nt, Artificial Sequence
  Chemically synthesized
caaagcaugaaauggauacuuau

SEQ ID NO: 61029 - RNA, 23 nt, Artificial Sequence
  Chemically synthesized
uaaagcuugucugaucguucaaa

SEQ ID NO: 61030 - RNA, 23 nt, Artificial Sequence
  Chemically synthesized
guaaagcuugucugaucguucaa

SEQ ID NO: 61031 - RNA, 23 nt, Artificial Sequence
  Chemically synthesized
uguaaagcuugucugaucguuca

SEQ ID NO: 61032 - RNA, 23 nt, Artificial Sequence
  Chemically synthesized
auguaaagcuugucugaucguuc

SEQ ID NO: 61033 - RNA, 23 nt, Artificial Sequence
  Chemically synthesized
aauguaaagcuugucugaucguu

SEQ ID NO: 61034 - RNA, 23 nt, Artificial Sequence
  Chemically synthesized
agaauguaaagcuugucugaucg

SEQ ID NO: 61035 - RNA, 23 nt, Artificial Sequence
  Chemically synthesized
uagaauguaaagcuugucugauc

SEQ ID NO: 61036 - RNA, 23 nt, Artificial Sequence
  Chemically synthesized
guagaauguaaagcuugucugau

SEQ ID NO: 61037 - RNA, 23 nt, Artificial Sequence
  Chemically synthesized
gguagaauguaaagcuugucuga

SEQ ID NO: 61038 - RNA, 23 nt, Artificial Sequence
  Chemically synthesized
agguagaauguaaagcuugucug

SEQ ID NO: 61039 - RNA, 23 nt, Artificial Sequence
  Chemically synthesized
uagguagaauguaaagcuugucu

SEQ ID NO: 61040 - RNA, 23 nt, Artificial Sequence
  Chemically synthesized
auagguagaauguaaagcuuguc

SEQ ID NO: 61041 - RNA, 23 nt, Artificial Sequence
  Chemically synthesized
cauagguagaauguaaagcuugu

SEQ ID NO: 61042 - RNA, 23 nt, Artificial Sequence
  Chemically synthesized
ccauagguagaauguaaagcuug

SEQ ID NO: 61043 - RNA, 23 nt, Artificial Sequence
  Chemically synthesized
agcugaccuggaagagaacauua

SEQ ID NO: 61044 - RNA, 23 nt, Artificial Sequence
  Chemically synthesized
aagcugaccuggaagagaacauu

SEQ ID NO: 61045 - RNA, 23 nt, Artificial Sequence
  Chemically synthesized
uuagccucaauuucugaacacca

SEQ ID NO: 61046 - RNA, 23 nt, Artificial Sequence
  Chemically synthesized
guuagccucaauuucugaacacc

SEQ ID NO: 61047 - RNA, 23 nt, Artificial Sequence
  Chemically synthesized
uuuaaaguuguuugugccuuuuu

SEQ ID NO: 61048 - RNA, 23 nt, Artificial Sequence
  Chemically synthesized
auuuaaaguuguuugugccuuuu

SEQ ID NO: 61049 - RNA, 23 nt, Artificial Sequence
  Chemically synthesized
auugagaaggaaaauuuuagcgu

SEQ ID NO: 61050 - RNA, 23 nt, Artificial Sequence
  Chemically synthesized
ucaucagauagcaucuuauacga

SEQ ID NO: 61051 - RNA, 23 nt, Artificial Sequence
  Chemically synthesized
aucaucagauagcaucuuauacg

SEQ ID NO: 61052 - RNA, 23 nt, Artificial Sequence
  Chemically synthesized
uaucaucagauagcaucuuauac

SEQ ID NO: 61053 - RNA, 23 nt, Artificial Sequence
  Chemically synthesized
guaucaucagauagcaucuuaua

SEQ ID NO: 61054 - RNA, 23 nt, Artificial Sequence
  Chemically synthesized
aguaucaucagauagcaucuuau

SEQ ID NO: 61055 - RNA, 23 nt, Artificial Sequence
  Chemically synthesized
ccguaaaaaugauuucaguagca

SEQ ID NO: 61056 - RNA, 23 nt, Artificial Sequence
  Chemically synthesized
uccguaaaaaugauuucaguagc

SEQ ID NO: 61057 - RNA, 23 nt, Artificial Sequence
  Chemically synthesized
uuccguaaaaaugauuucaguag

SEQ ID NO: 61058 - RNA, 23 nt, Artificial Sequence
  Chemically synthesized
uuuccguaaaaaugauuucagua

SEQ ID NO: 61059 - RNA, 23 nt, Artificial Sequence
  Chemically synthesized
uuuuccguaaaaaugauuucagu

SEQ ID NO: 61060 - RNA, 23 nt, Artificial Sequence
  Chemically synthesized
gagagugagagacauuaacucau

SEQ ID NO: 61061 - RNA, 23 nt, Artificial Sequence
  Chemically synthesized
gcuuaccgacuggaagacacguu

SEQ ID NO: 61062 - RNA, 23 nt, Artificial Sequence
  Chemically synthesized
agacauaccgagcuaaauucugu

SEQ ID NO: 61063 - RNA, 23 nt, Artificial Sequence
  Chemically synthesized
aagacauaccgagcuaaauucug

SEQ ID NO: 61064 - RNA, 23 nt, Artificial Sequence
  Chemically synthesized
gaagacauaccgagcuaaauucu

SEQ ID NO: 61065 - RNA, 23 nt, Artificial Sequence
  Chemically synthesized
cuaucaaguuugagcuuucuggc

SEQ ID NO: 61066 - RNA, 23 nt, Artificial Sequence
  Chemically synthesized
ccaagccuaucaaguuugagcuu

SEQ ID NO: 61067 - RNA, 23 nt, Artificial Sequence
  Chemically synthesized
ccaaaaguuacauguuugcaccu

SEQ ID NO: 61068 - RNA, 23 nt, Artificial Sequence
  Chemically synthesized
accaaaaguuacauguuugcacc

SEQ ID NO: 61069 - RNA, 23 nt, Artificial Sequence
  Chemically synthesized
agugugaccaaaaguuacauguu

SEQ ID NO: 61070 - RNA, 23 nt, Artificial Sequence
  Chemically synthesized
ggacaguuuauuuguugagagug

SEQ ID NO: 61071 - RNA, 23 nt, Artificial Sequence
  Chemically synthesized
cggacaguuuauuuguugagagu

SEQ ID NO: 61072 - RNA, 23 nt, Artificial Sequence
  Chemically synthesized
ucggacaguuuauuuguugagag

SEQ ID NO: 61073 - RNA, 23 nt, Artificial Sequence
  Chemically synthesized
uucggacaguuuauuuguugaga

SEQ ID NO: 61074 - RNA, 23 nt, Artificial Sequence
  Chemically synthesized
uuucggacaguuuauuuguugag

SEQ ID NO: 61075 - RNA, 23 nt, Artificial Sequence
  Chemically synthesized
gccuuuauuaaaaacugagugac

SEQ ID NO: 61076 - RNA, 23 nt, Artificial Sequence
  Chemically synthesized
ggccuuuauuaaaaacugaguga

SEQ ID NO: 61077 - RNA, 23 nt, Artificial Sequence
  Chemically synthesized
uggccuuuauuaaaaacugagug

SEQ ID NO: 61078 - RNA, 23 nt, Artificial Sequence
  Chemically synthesized
auggccuuuauuaaaaacugagu

SEQ ID NO: 61079 - RNA, 23 nt, Artificial Sequence
  Chemically synthesized
aauggccuuuauuaaaaacugag

SEQ ID NO: 61080 - RNA, 23 nt, Artificial Sequence
  Chemically synthesized
guuguuugugccuuuuuauuuuu

SEQ ID NO: 61081 - RNA, 23 nt, Artificial Sequence
  Chemically synthesized
aauuuaaaguuguuugugccuuu

SEQ ID NO: 61082 - RNA, 23 nt, Artificial Sequence
  Chemically synthesized
cauucugauucgaaugacacugu

SEQ ID NO: 61083 - RNA, 23 nt, Artificial Sequence
  Chemically synthesized
ccuuaagucagaacagcagacuc

SEQ ID NO: 61084 - RNA, 23 nt, Artificial Sequence
  Chemically synthesized
uccuuaagucagaacagcagacu

SEQ ID NO: 61085 - RNA, 23 nt, Artificial Sequence
  Chemically synthesized
uuccuuaagucagaacagcagac

SEQ ID NO: 61086 - RNA, 23 nt, Artificial Sequence
  Chemically synthesized
guuccuuaagucagaacagcaga

SEQ ID NO: 61087 - RNA, 23 nt, Artificial Sequence
  Chemically synthesized
uguuccuuaagucagaacagcag

SEQ ID NO: 61088 - RNA, 23 nt, Artificial Sequence
  Chemically synthesized
gaguaauaugccugcuauuugaa

SEQ ID NO: 61089 - RNA, 23 nt, Artificial Sequence
  Chemically synthesized
ucagauagcaucuuauacgagua

SEQ ID NO: 61090 - RNA, 23 nt, Artificial Sequence
  Chemically synthesized
gaagaauguuaagacuugacagu

SEQ ID NO: 61091 - RNA, 23 nt, Artificial Sequence
  Chemically synthesized
caguagcacaaguuauuuaaauc

SEQ ID NO: 61092 - RNA, 23 nt, Artificial Sequence
  Chemically synthesized
ucaguagcacaaguuauuuaaau

SEQ ID NO: 61093 - RNA, 23 nt, Artificial Sequence
  Chemically synthesized
uucaguagcacaaguuauuuaaa

SEQ ID NO: 61094 - RNA, 23 nt, Artificial Sequence
  Chemically synthesized
uuucaguagcacaaguuauuuaa

SEQ ID NO: 61095 - RNA, 23 nt, Artificial Sequence
  Chemically synthesized
auuucaguagcacaaguuauuua

SEQ ID NO: 61096 - RNA, 23 nt, Artificial Sequence
  Chemically synthesized
acuggaacuugaacugauucaca

SEQ ID NO: 61097 - RNA, 23 nt, Artificial Sequence
  Chemically synthesized
uuaacucauuagacuggaacuug

SEQ ID NO: 61098 - RNA, 23 nt, Artificial Sequence
  Chemically synthesized
auuaacucauuagacuggaacuu

SEQ ID NO: 61099 - RNA, 23 nt, Artificial Sequence
  Chemically synthesized
cauuaacucauuagacuggaacu

SEQ ID NO: 61100 - RNA, 23 nt, Artificial Sequence
  Chemically synthesized
acauuaacucauuagacuggaac

SEQ ID NO: 61101 - RNA, 23 nt, Artificial Sequence
  Chemically synthesized
cgacuggaagacacguuuggccc

SEQ ID NO: 61102 - RNA, 23 nt, Artificial Sequence
  Chemically synthesized
gacauaccgagcuaaauucugug

SEQ ID NO: 61103 - RNA, 23 nt, Artificial Sequence
  Chemically synthesized
gagagugugaccaaaaguuacau

SEQ ID NO: 61104 - RNA, 23 nt, Artificial Sequence
  Chemically synthesized
ugagagugugaccaaaaguuaca

SEQ ID NO: 61105 - RNA, 23 nt, Artificial Sequence
  Chemically synthesized
uugagagugugaccaaaaguuac

SEQ ID NO: 61106 - RNA, 23 nt, Artificial Sequence
  Chemically synthesized
guugagagugugaccaaaaguua

SEQ ID NO: 61107 - RNA, 23 nt, Artificial Sequence
  Chemically synthesized
gaagcugaccuggaagagaacau

SEQ ID NO: 61108 - RNA, 23 nt, Artificial Sequence
  Chemically synthesized
gcuauuugaaguguaauugagaa

SEQ ID NO: 61109 - RNA, 23 nt, Artificial Sequence
  Chemically synthesized
ugcuauuugaaguguaauugaga

SEQ ID NO: 61110 - RNA, 23 nt, Artificial Sequence
  Chemically synthesized
cugcuauuugaaguguaauugag

SEQ ID NO: 61111 - RNA, 23 nt, Artificial Sequence
  Chemically synthesized
gacaguggaacuacauuaguaca

SEQ ID NO: 61112 - RNA, 23 nt, Artificial Sequence
  Chemically synthesized
agaauguuaagacuugacagugg

SEQ ID NO: 61113 - RNA, 23 nt, Artificial Sequence
  Chemically synthesized
aagaauguuaagacuugacagug

SEQ ID NO: 61114 - RNA, 23 nt, Artificial Sequence
  Chemically synthesized
cugauucacaucucauuuuuccg

SEQ ID NO: 61115 - RNA, 23 nt, Artificial Sequence
  Chemically synthesized
acugauucacaucucauuuuucc

SEQ ID NO: 61116 - RNA, 23 nt, Artificial Sequence
  Chemically synthesized
aacugauucacaucucauuuuuc

SEQ ID NO: 61117 - RNA, 23 nt, Artificial Sequence
  Chemically synthesized
gaacugauucacaucucauuuuu

SEQ ID NO: 61118 - RNA, 23 nt, Artificial Sequence
  Chemically synthesized
ugaacugauucacaucucauuuu

SEQ ID NO: 61119 - RNA, 23 nt, Artificial Sequence
  Chemically synthesized
ugacggcgaggucaugaagaaga

SEQ ID NO: 61120 - RNA, 23 nt, Artificial Sequence
  Chemically synthesized
cugacggcgaggucaugaagaag

SEQ ID NO: 61121 - RNA, 23 nt, Artificial Sequence
  Chemically synthesized
ccugacggcgaggucaugaagaa

SEQ ID NO: 61122 - RNA, 23 nt, Artificial Sequence
  Chemically synthesized
cagcaugaagacauaccgagcua

SEQ ID NO: 61123 - RNA, 23 nt, Artificial Sequence
  Chemically synthesized
cuccaagccuaucaaguuugagc

SEQ ID NO: 61124 - RNA, 23 nt, Artificial Sequence
  Chemically synthesized
ucuccaagccuaucaaguuugag

SEQ ID NO: 61125 - RNA, 23 nt, Artificial Sequence
  Chemically synthesized
aucuccaagccuaucaaguuuga

SEQ ID NO: 61126 - RNA, 23 nt, Artificial Sequence
  Chemically synthesized
aaucuccaagccuaucaaguuug

SEQ ID NO: 61127 - RNA, 23 nt, Artificial Sequence
  Chemically synthesized
aaaucuccaagccuaucaaguuu

SEQ ID NO: 61128 - RNA, 23 nt, Artificial Sequence
  Chemically synthesized
guacucccaaaaucuccaagccu

SEQ ID NO: 61129 - RNA, 23 nt, Artificial Sequence
  Chemically synthesized
cguacucccaaaaucuccaagcc

SEQ ID NO: 61130 - RNA, 23 nt, Artificial Sequence
  Chemically synthesized
ccguacucccaaaaucuccaagc

SEQ ID NO: 61131 - RNA, 23 nt, Artificial Sequence
  Chemically synthesized
uccguacucccaaaaucuccaag

SEQ ID NO: 61132 - RNA, 23 nt, Artificial Sequence
  Chemically synthesized
auccguacucccaaaaucuccaa

SEQ ID NO: 61133 - RNA, 23 nt, Artificial Sequence
  Chemically synthesized
acaguuuauuuguugagagugug

SEQ ID NO: 61134 - RNA, 23 nt, Artificial Sequence
  Chemically synthesized
gacaguuuauuuguugagagugu

SEQ ID NO: 61135 - RNA, 23 nt, Artificial Sequence
  Chemically synthesized
uuuucggacaguuuauuuguuga

SEQ ID NO: 61136 - RNA, 23 nt, Artificial Sequence
  Chemically synthesized
uuuuaaugaacaaauggccuuua

SEQ ID NO: 61137 - RNA, 23 nt, Artificial Sequence
  Chemically synthesized
cuuuuaaugaacaaauggccuuu

SEQ ID NO: 61138 - RNA, 23 nt, Artificial Sequence
  Chemically synthesized
acuuuuaaugaacaaauggccuu

SEQ ID NO: 61139 - RNA, 23 nt, Artificial Sequence
  Chemically synthesized
gcugauuucuagguaggaaaugu

SEQ ID NO: 61140 - RNA, 23 nt, Artificial Sequence
  Chemically synthesized
ggcugauuucuagguaggaaaug

SEQ ID NO: 61141 - RNA, 23 nt, Artificial Sequence
  Chemically synthesized
aggcugauuucuagguaggaaau

SEQ ID NO: 61142 - RNA, 23 nt, Artificial Sequence
  Chemically synthesized
caggcugauuucuagguaggaaa

SEQ ID NO: 61143 - RNA, 23 nt, Artificial Sequence
  Chemically synthesized
acagauuguuugcaaaggggagg

SEQ ID NO: 61144 - RNA, 23 nt, Artificial Sequence
  Chemically synthesized
aacagauuguuugcaaaggggag

SEQ ID NO: 61145 - RNA, 23 nt, Artificial Sequence
  Chemically synthesized
aaacagauuguuugcaaagggga

SEQ ID NO: 61146 - RNA, 23 nt, Artificial Sequence
  Chemically synthesized
aaaacagauuguuugcaaagggg

SEQ ID NO: 61147 - RNA, 23 nt, Artificial Sequence
  Chemically synthesized
caaaacagauuguuugcaaaggg

SEQ ID NO: 61148 - RNA, 23 nt, Artificial Sequence
  Chemically synthesized
gaaugacacuguucaggaaucgg

SEQ ID NO: 61149 - RNA, 23 nt, Artificial Sequence
  Chemically synthesized
cgaaugacacuguucaggaaucg

SEQ ID NO: 61150 - RNA, 23 nt, Artificial Sequence
  Chemically synthesized
ucgaaugacacuguucaggaauc

SEQ ID NO: 61151 - RNA, 23 nt, Artificial Sequence
  Chemically synthesized
uucgaaugacacuguucaggaau

SEQ ID NO: 61152 - RNA, 23 nt, Artificial Sequence
  Chemically synthesized
auucgaaugacacuguucaggaa

SEQ ID NO: 61153 - RNA, 23 nt, Artificial Sequence
  Chemically synthesized
uaguaucaucagauagcaucuua

SEQ ID NO: 61154 - RNA, 23 nt, Artificial Sequence
  Chemically synthesized
agaaagguuaguaucaucagaua

SEQ ID NO: 61155 - RNA, 23 nt, Artificial Sequence
  Chemically synthesized
cagaaagguuaguaucaucagau

SEQ ID NO: 61156 - RNA, 23 nt, Artificial Sequence
  Chemically synthesized
gaauguauauuaagguguggcuu

SEQ ID NO: 61157 - RNA, 23 nt, Artificial Sequence
  Chemically synthesized
agaauguauauuaagguguggcu

SEQ ID NO: 61158 - RNA, 23 nt, Artificial Sequence
  Chemically synthesized
cagaauguauauuaagguguggc

SEQ ID NO: 61159 - RNA, 23 nt, Artificial Sequence
  Chemically synthesized
acaguggaacuacauuaguacac

SEQ ID NO: 61160 - RNA, 23 nt, Artificial Sequence
  Chemically synthesized
uuuggcccagacccaacuaugau

SEQ ID NO: 61161 - RNA, 23 nt, Artificial Sequence
  Chemically synthesized
ucauuagacuggaacuugaacug

SEQ ID NO: 61162 - RNA, 23 nt, Artificial Sequence
  Chemically synthesized
cucauuagacuggaacuugaacu

SEQ ID NO: 61163 - RNA, 23 nt, Artificial Sequence
  Chemically synthesized
acucauuagacuggaacuugaac

SEQ ID NO: 61164 - RNA, 23 nt, Artificial Sequence
  Chemically synthesized
aacucauuagacuggaacuugaa

SEQ ID NO: 61165 - RNA, 23 nt, Artificial Sequence
  Chemically synthesized
uaacucauuagacuggaacuuga

SEQ ID NO: 61166 - RNA, 23 nt, Artificial Sequence
  Chemically synthesized
aaaaucuccaagccuaucaaguu

SEQ ID NO: 61167 - RNA, 23 nt, Artificial Sequence
  Chemically synthesized
caaaaucuccaagccuaucaagu

SEQ ID NO: 61168 - RNA, 23 nt, Artificial Sequence
  Chemically synthesized
agagugugaccaaaaguuacaug

SEQ ID NO: 61169 - RNA, 23 nt, Artificial Sequence
  Chemically synthesized
caguuuauuuguugagaguguga

SEQ ID NO: 61170 - RNA, 23 nt, Artificial Sequence
  Chemically synthesized
cuagguaggaaaugugguagccu

SEQ ID NO: 61171 - RNA, 23 nt, Artificial Sequence
  Chemically synthesized
ucuagguaggaaaugugguagcc

SEQ ID NO: 61172 - RNA, 23 nt, Artificial Sequence
  Chemically synthesized
uucuagguaggaaaugugguagc

SEQ ID NO: 61173 - RNA, 23 nt, Artificial Sequence
  Chemically synthesized
uuucuagguaggaaaugugguag

SEQ ID NO: 61174 - RNA, 23 nt, Artificial Sequence
  Chemically synthesized
auuucuagguaggaaauguggua

SEQ ID NO: 61175 - RNA, 23 nt, Artificial Sequence
  Chemically synthesized
cugauuucuagguaggaaaugug

SEQ ID NO: 61176 - RNA, 23 nt, Artificial Sequence
  Chemically synthesized
ccuuggcaggcugauuucuaggu

SEQ ID NO: 61177 - RNA, 23 nt, Artificial Sequence
  Chemically synthesized
cugcucagauagaaugacagucc

SEQ ID NO: 61178 - RNA, 23 nt, Artificial Sequence
  Chemically synthesized
ucugcucagauagaaugacaguc

SEQ ID NO: 61179 - RNA, 23 nt, Artificial Sequence
  Chemically synthesized
uucugcucagauagaaugacagu

SEQ ID NO: 61180 - RNA, 23 nt, Artificial Sequence
  Chemically synthesized
auucugcucagauagaaugacag

SEQ ID NO: 61181 - RNA, 23 nt, Artificial Sequence
  Chemically synthesized
aauucugcucagauagaaugaca

SEQ ID NO: 61182 - RNA, 23 nt, Artificial Sequence
  Chemically synthesized
uaauuuaaaguuguuugugccuu

SEQ ID NO: 61183 - RNA, 23 nt, Artificial Sequence
  Chemically synthesized
guguaauugagaaggaaaauuuu

SEQ ID NO: 61184 - RNA, 23 nt, Artificial Sequence
  Chemically synthesized
aguguaauugagaaggaaaauuu

SEQ ID NO: 61185 - RNA, 23 nt, Artificial Sequence
  Chemically synthesized
aaguguaauugagaaggaaaauu

SEQ ID NO: 61186 - RNA, 23 nt, Artificial Sequence
  Chemically synthesized
aucagauagcaucuuauacgagu

SEQ ID NO: 61187 - RNA, 23 nt, Artificial Sequence
  Chemically synthesized
caucagauagcaucuuauacgag

SEQ ID NO: 61188 - RNA, 23 nt, Artificial Sequence
  Chemically synthesized
ugguuugaagaauguuaagacuu

SEQ ID NO: 61189 - RNA, 23 nt, Artificial Sequence
  Chemically synthesized
cugguuugaagaauguuaagacu

SEQ ID NO: 61190 - RNA, 23 nt, Artificial Sequence
  Chemically synthesized
acugguuugaagaauguuaagac

SEQ ID NO: 61191 - RNA, 23 nt, Artificial Sequence
  Chemically synthesized
cacugguuugaagaauguuaaga

SEQ ID NO: 61192 - RNA, 23 nt, Artificial Sequence
  Chemically synthesized
cagacacugguuugaagaauguu

SEQ ID NO: 61193 - RNA, 23 nt, Artificial Sequence
  Chemically synthesized
ccagacacugguuugaagaaugu

SEQ ID NO: 61194 - RNA, 23 nt, Artificial Sequence
  Chemically synthesized
cccagacacugguuugaagaaug

SEQ ID NO: 61195 - RNA, 23 nt, Artificial Sequence
  Chemically synthesized
ccccagacacugguuugaagaau

SEQ ID NO: 61196 - RNA, 23 nt, Artificial Sequence
  Chemically synthesized
accccagacacugguuugaagaa

SEQ ID NO: 61197 - RNA, 23 nt, Artificial Sequence
  Chemically synthesized
agauucccacccaauucaaaaca

SEQ ID NO: 61198 - RNA, 23 nt, Artificial Sequence
  Chemically synthesized
gauuucaguagcacaaguuauuu

SEQ ID NO: 61199 - RNA, 23 nt, Artificial Sequence
  Chemically synthesized
ugauuucaguagcacaaguuauu

SEQ ID NO: 61200 - RNA, 23 nt, Artificial Sequence
  Chemically synthesized
augauuucaguagcacaaguuau

SEQ ID NO: 61201 - RNA, 23 nt, Artificial Sequence
  Chemically synthesized
aaugauuucaguagcacaaguua

SEQ ID NO: 61202 - RNA, 23 nt, Artificial Sequence
  Chemically synthesized
aaaugauuucaguagcacaaguu

SEQ ID NO: 61203 - RNA, 23 nt, Artificial Sequence
  Chemically synthesized
aaaaugauuucaguagcacaagu

SEQ ID NO: 61204 - RNA, 23 nt, Artificial Sequence
  Chemically synthesized
acaucuuugaaucgcuguacuac

SEQ ID NO: 61205 - RNA, 23 nt, Artificial Sequence
  Chemically synthesized
gacaucuuugaaucgcuguacua

SEQ ID NO: 61206 - RNA, 23 nt, Artificial Sequence
  Chemically synthesized
ugacaucuuugaaucgcuguacu

SEQ ID NO: 61207 - RNA, 23 nt, Artificial Sequence
  Chemically synthesized
augacaucuuugaaucgcuguac

SEQ ID NO: 61208 - RNA, 23 nt, Artificial Sequence
  Chemically synthesized
aaugacaucuuugaaucgcugua

SEQ ID NO: 61209 - RNA, 23 nt, Artificial Sequence
  Chemically synthesized
uaaauucuguggaguauguaccg

SEQ ID NO: 61210 - RNA, 23 nt, Artificial Sequence
  Chemically synthesized
cuaaauucuguggaguauguacc

SEQ ID NO: 61211 - RNA, 23 nt, Artificial Sequence
  Chemically synthesized
gagugugaccaaaaguuacaugu

SEQ ID NO: 61212 - RNA, 23 nt, Artificial Sequence
  Chemically synthesized
uuuuucggacaguuuauuuguug

SEQ ID NO: 61213 - RNA, 23 nt, Artificial Sequence
  Chemically synthesized
caccuggaagcauuuguuucuac

SEQ ID NO: 61214 - RNA, 23 nt, Artificial Sequence
  Chemically synthesized
ucaccuggaagcauuuguuucua

SEQ ID NO: 61215 - RNA, 23 nt, Artificial Sequence
  Chemically synthesized
uucaccuggaagcauuuguuucu

SEQ ID NO: 61216 - RNA, 23 nt, Artificial Sequence
  Chemically synthesized
uuucaccuggaagcauuuguuuc

SEQ ID NO: 61217 - RNA, 23 nt, Artificial Sequence
  Chemically synthesized
uuuucaccuggaagcauuuguuu

SEQ ID NO: 61218 - RNA, 23 nt, Artificial Sequence
  Chemically synthesized
ugauuucuagguaggaaaugugg

SEQ ID NO: 61219 - RNA, 23 nt, Artificial Sequence
  Chemically synthesized
guaacaagccagauuuuuuaaaa

SEQ ID NO: 61220 - RNA, 23 nt, Artificial Sequence
  Chemically synthesized
uguaacaagccagauuuuuuaaa

SEQ ID NO: 61221 - RNA, 23 nt, Artificial Sequence
  Chemically synthesized
cuguaacaagccagauuuuuuaa

SEQ ID NO: 61222 - RNA, 23 nt, Artificial Sequence
  Chemically synthesized
ccuguaacaagccagauuuuuua

SEQ ID NO: 61223 - RNA, 23 nt, Artificial Sequence
  Chemically synthesized
gccuguaacaagccagauuuuuu

SEQ ID NO: 61224 - RNA, 23 nt, Artificial Sequence
  Chemically synthesized
gauucgaaugacacuguucagga

SEQ ID NO: 61225 - RNA, 23 nt, Artificial Sequence
  Chemically synthesized
acaagggccucuucugugacuuc

SEQ ID NO: 61226 - RNA, 23 nt, Artificial Sequence
  Chemically synthesized
cacaagggccucuucugugacuu

SEQ ID NO: 61227 - RNA, 23 nt, Artificial Sequence
  Chemically synthesized
gcacaagggccucuucugugacu

SEQ ID NO: 61228 - RNA, 23 nt, Artificial Sequence
  Chemically synthesized
cgcacaagggccucuucugugac

SEQ ID NO: 61229 - RNA, 23 nt, Artificial Sequence
  Chemically synthesized
ccgcacaagggccucuucuguga

SEQ ID NO: 61230 - RNA, 23 nt, Artificial Sequence
  Chemically synthesized
gcaugaagccagagagugagaga

SEQ ID NO: 61231 - RNA, 23 nt, Artificial Sequence
  Chemically synthesized
ggcaugaagccagagagugagag

SEQ ID NO: 61232 - RNA, 23 nt, Artificial Sequence
  Chemically synthesized
uggcaugaagccagagagugaga

SEQ ID NO: 61233 - RNA, 23 nt, Artificial Sequence
  Chemically synthesized
auggcaugaagccagagagugag

SEQ ID NO: 61234 - RNA, 23 nt, Artificial Sequence
  Chemically synthesized
cauggcaugaagccagagaguga

SEQ ID NO: 61235 - RNA, 23 nt, Artificial Sequence
  Chemically synthesized
acggagacauggcaugaagccag

SEQ ID NO: 61236 - RNA, 23 nt, Artificial Sequence
  Chemically synthesized
uacggagacauggcaugaagcca

SEQ ID NO: 61237 - RNA, 23 nt, Artificial Sequence
  Chemically synthesized
guacggagacauggcaugaagcc

SEQ ID NO: 61238 - RNA, 23 nt, Artificial Sequence
  Chemically synthesized
uguacggagacauggcaugaagc

SEQ ID NO: 61239 - RNA, 23 nt, Artificial Sequence
  Chemically synthesized
auguacggagacauggcaugaag

SEQ ID NO: 61240 - RNA, 23 nt, Artificial Sequence
  Chemically synthesized
uugcaccuuucuaguugaaaaua

SEQ ID NO: 61241 - RNA, 23 nt, Artificial Sequence
  Chemically synthesized
uuugcaccuuucuaguugaaaau

SEQ ID NO: 61242 - RNA, 23 nt, Artificial Sequence
  Chemically synthesized
guuugcaccuuucuaguugaaaa

SEQ ID NO: 61243 - RNA, 23 nt, Artificial Sequence
  Chemically synthesized
uguuugcaccuuucuaguugaaa

SEQ ID NO: 61244 - RNA, 23 nt, Artificial Sequence
  Chemically synthesized
auguuugcaccuuucuaguugaa

SEQ ID NO: 61245 - RNA, 23 nt, Artificial Sequence
  Chemically synthesized
acauguuugcaccuuucuaguug

SEQ ID NO: 61246 - RNA, 23 nt, Artificial Sequence
  Chemically synthesized
uacauguuugcaccuuucuaguu

SEQ ID NO: 61247 - RNA, 23 nt, Artificial Sequence
  Chemically synthesized
uuacauguuugcaccuuucuagu

SEQ ID NO: 61248 - RNA, 23 nt, Artificial Sequence
  Chemically synthesized
guuacauguuugcaccuuucuag

SEQ ID NO: 61249 - RNA, 23 nt, Artificial Sequence
  Chemically synthesized
aguuacauguuugcaccuuucua

SEQ ID NO: 61250 - RNA, 23 nt, Artificial Sequence
  Chemically synthesized
uuguugagagugugaccaaaagu

SEQ ID NO: 61251 - RNA, 23 nt, Artificial Sequence
  Chemically synthesized
uuuguugagagugugaccaaaag

SEQ ID NO: 61252 - RNA, 23 nt, Artificial Sequence
  Chemically synthesized
auuuguugagagugugaccaaaa

SEQ ID NO: 61253 - RNA, 23 nt, Artificial Sequence
  Chemically synthesized
uauuuguugagagugugaccaaa

SEQ ID NO: 61254 - RNA, 23 nt, Artificial Sequence
  Chemically synthesized
guuuuucggacaguuuauuuguu

SEQ ID NO: 61255 - RNA, 23 nt, Artificial Sequence
  Chemically synthesized
uguuucuacuuugauaugacugu

SEQ ID NO: 61256 - RNA, 23 nt, Artificial Sequence
  Chemically synthesized
uuguuucuacuuugauaugacug

SEQ ID NO: 61257 - RNA, 23 nt, Artificial Sequence
  Chemically synthesized
uuuguuucuacuuugauaugacu

SEQ ID NO: 61258 - RNA, 23 nt, Artificial Sequence
  Chemically synthesized
auuuguuucuacuuugauaugac

SEQ ID NO: 61259 - RNA, 23 nt, Artificial Sequence
  Chemically synthesized
ugcucagauagaaugacaguccg

SEQ ID NO: 61260 - RNA, 23 nt, Artificial Sequence
  Chemically synthesized
uggaagagaacauuaagaagggc

SEQ ID NO: 61261 - RNA, 23 nt, Artificial Sequence
  Chemically synthesized
cuggaagagaacauuaagaaggg

SEQ ID NO: 61262 - RNA, 23 nt, Artificial Sequence
  Chemically synthesized
ccuggaagagaacauuaagaagg

SEQ ID NO: 61263 - RNA, 23 nt, Artificial Sequence
  Chemically synthesized
ucaaagcaugaaauggauacuua

SEQ ID NO: 61264 - RNA, 23 nt, Artificial Sequence
  Chemically synthesized
uucaaagcaugaaauggauacuu

SEQ ID NO: 61265 - RNA, 23 nt, Artificial Sequence
  Chemically synthesized
guucaaagcaugaaauggauacu

SEQ ID NO: 61266 - RNA, 23 nt, Artificial Sequence
  Chemically synthesized
cguucaaagcaugaaauggauac

SEQ ID NO: 61267 - RNA, 23 nt, Artificial Sequence
  Chemically synthesized
acacuguucaggaaucggaaucc

SEQ ID NO: 61268 - RNA, 23 nt, Artificial Sequence
  Chemically synthesized
gacacuguucaggaaucggaauc

SEQ ID NO: 61269 - RNA, 23 nt, Artificial Sequence
  Chemically synthesized
ugacacuguucaggaaucggaau

SEQ ID NO: 61270 - RNA, 23 nt, Artificial Sequence
  Chemically synthesized
augacacuguucaggaaucggaa

SEQ ID NO: 61271 - RNA, 23 nt, Artificial Sequence
  Chemically synthesized
aaugacacuguucaggaaucgga

SEQ ID NO: 61272 - RNA, 23 nt, Artificial Sequence
  Chemically synthesized
guaauaugccugcuauuugaagu

SEQ ID NO: 61273 - RNA, 23 nt, Artificial Sequence
  Chemically synthesized
aguaauaugccugcuauuugaag

SEQ ID NO: 61274 - RNA, 23 nt, Artificial Sequence
  Chemically synthesized
cgcuguacuacaggaagauguac

SEQ ID NO: 61275 - RNA, 23 nt, Artificial Sequence
  Chemically synthesized
ucgcuguacuacaggaagaugua

SEQ ID NO: 61276 - RNA, 23 nt, Artificial Sequence
  Chemically synthesized
aucgcuguacuacaggaagaugu

SEQ ID NO: 61277 - RNA, 23 nt, Artificial Sequence
  Chemically synthesized
aaucgcuguacuacaggaagaug

SEQ ID NO: 61278 - RNA, 23 nt, Artificial Sequence
  Chemically synthesized
gaaucgcuguacuacaggaagau

SEQ ID NO: 61279 - RNA, 23 nt, Artificial Sequence
  Chemically synthesized
ucguucaaagcaugaaauggaua

SEQ ID NO: 61280 - RNA, 23 nt, Artificial Sequence
  Chemically synthesized
cgaagcugaccuggaagagaaca

SEQ ID NO: 61281 - RNA, 23 nt, Artificial Sequence
  Chemically synthesized
gcgaagcugaccuggaagagaac

SEQ ID NO: 61282 - RNA, 23 nt, Artificial Sequence
  Chemically synthesized
ugcgaagcugaccuggaagagaa

SEQ ID NO: 61283 - RNA, 23 nt, Artificial Sequence
  Chemically synthesized
caauguuagccucaauuucugaa

SEQ ID NO: 61284 - RNA, 23 nt, Artificial Sequence
  Chemically synthesized
ugauauuucaauguuagccucaa

SEQ ID NO: 61285 - RNA, 23 nt, Artificial Sequence
  Chemically synthesized
gaauguaaagcuugucugaucgu

SEQ ID NO: 61286 - RNA, 23 nt, Artificial Sequence
  Chemically synthesized
ccuuuauuaaaaacugagugacu

SEQ ID NO: 61287 - RNA, 23 nt, Artificial Sequence
  Chemically synthesized
ggauacuuauauggaaauucugc

SEQ ID NO: 61288 - RNA, 23 nt, Artificial Sequence
  Chemically synthesized
uggauacuuauauggaaauucug

SEQ ID NO: 61289 - RNA, 23 nt, Artificial Sequence
  Chemically synthesized
aauguuaagacuugacaguggaa

SEQ ID NO: 61290 - RNA, 23 nt, Artificial Sequence
  Chemically synthesized
guagcacaaguuauuuaaaucug

SEQ ID NO: 61291 - RNA, 23 nt, Artificial Sequence
  Chemically synthesized
guaaaaaugauuucaguagcaca

SEQ ID NO: 61292 - RNA, 23 nt, Artificial Sequence
  Chemically synthesized
gaagauguacggagacauggcau

SEQ ID NO: 61293 - RNA, 23 nt, Artificial Sequence
  Chemically synthesized
cuauuugaaguguaauugagaag

SEQ ID NO: 61294 - RNA, 23 nt, Artificial Sequence
  Chemically synthesized
gauguacggagacauggcaugaa

SEQ ID NO: 61295 - RNA, 23 nt, Artificial Sequence
  Chemically synthesized
caugaaauggauacuuauaugga

SEQ ID NO: 61296 - RNA, 23 nt, Artificial Sequence
  Chemically synthesized
cugaacaccauagguagaaugua

SEQ ID NO: 61297 - RNA, 23 nt, Artificial Sequence
  Chemically synthesized
ucugaacaccauagguagaaugu

SEQ ID NO: 61298 - RNA, 23 nt, Artificial Sequence
  Chemically synthesized
agacacugguuugaagaauguua

SEQ ID NO: 61299 - RNA, 23 nt, Artificial Sequence
  Chemically synthesized
gguuaguaucaucagauagcauc

SEQ ID NO: 61300 - RNA, 23 nt, Artificial Sequence
  Chemically synthesized
ggaacuacauuaguacacagcac

SEQ ID NO: 61301 - RNA, 23 nt, Artificial Sequence
  Chemically synthesized
acacugguuugaagaauguuaag

SEQ ID NO: 61302 - RNA, 23 nt, Artificial Sequence
  Chemically synthesized
cuugaacugauucacaucucauu

SEQ ID NO: 61303 - RNA, 23 nt, Artificial Sequence
  Chemically synthesized
ucaucaagaccugugccugccau

SEQ ID NO: 61304 - RNA, 23 nt, Artificial Sequence
  Chemically synthesized
gcaccuuucuaguugaaaauaaa

SEQ ID NO: 61305 - RNA, 23 nt, Artificial Sequence
  Chemically synthesized
ucaaaacauugugccaugucaaa

SEQ ID NO: 61306 - RNA, 23 nt, Artificial Sequence
  Chemically synthesized
acauuaguacacagcaccagaau

SEQ ID NO: 61307 - RNA, 23 nt, Artificial Sequence
  Chemically synthesized
ggaacuugaacugauucacaucu

SEQ ID NO: 61308 - RNA, 23 nt, Artificial Sequence
  Chemically synthesized
gagugagagacauuaacucauua

SEQ ID NO: 61309 - RNA, 23 nt, Artificial Sequence
  Chemically synthesized
caccuuucuaguugaaaauaaag

SEQ ID NO: 61310 - RNA, 23 nt, Artificial Sequence
  Chemically synthesized
ugcaccuuucuaguugaaaauaa

SEQ ID NO: 61311 - RNA, 23 nt, Artificial Sequence
  Chemically synthesized
gaaaugugguagccucacuuuua

SEQ ID NO: 61312 - RNA, 23 nt, Artificial Sequence
  Chemically synthesized
cgucaaaacagauuguuugcaaa

SEQ ID NO: 61313 - RNA, 23 nt, Artificial Sequence
  Chemically synthesized
uacauuaguacacagcaccagaa

SEQ ID NO: 61314 - RNA, 23 nt, Artificial Sequence
  Chemically synthesized
gacacugguuugaagaauguuaa

SEQ ID NO: 61315 - RNA, 23 nt, Artificial Sequence
  Chemically synthesized
ggaaaugugguagccucacuuuu

SEQ ID NO: 61316 - RNA, 23 nt, Artificial Sequence
  Chemically synthesized
acauugugccaugucaaacaaau

SEQ ID NO: 61317 - RNA, 23 nt, Artificial Sequence
  Chemically synthesized
cccaauucaaaacauugugccau

SEQ ID NO: 61318 - RNA, 23 nt, Artificial Sequence
  Chemically synthesized
acuugaacugauucacaucucau

SEQ ID NO: 61319 - RNA, 23 nt, Artificial Sequence
  Chemically synthesized
ugaaucgcuguacuacaggaaga

SEQ ID NO: 61320 - RNA, 23 nt, Artificial Sequence
  Chemically synthesized
gccucacuuuuaaugaacaaaug

SEQ ID NO: 61321 - RNA, 23 nt, Artificial Sequence
  Chemically synthesized
ugaacaccauagguagaauguaa

SEQ ID NO: 61322 - RNA, 23 nt, Artificial Sequence
  Chemically synthesized
gcaagugaauuugccuguaacaa

SEQ ID NO: 61323 - RNA, 23 nt, Artificial Sequence
  Chemically synthesized
gacauucugauucgaaugacacu

SEQ ID NO: 61324 - RNA, 23 nt, Artificial Sequence
  Chemically synthesized
guauauuaagguguggcuuuagg

SEQ ID NO: 61325 - RNA, 23 nt, Artificial Sequence
  Chemically synthesized
agagugagagacauuaacucauu

SEQ ID NO: 61326 - RNA, 23 nt, Artificial Sequence
  Chemically synthesized
ggucaugaagaagaacaugaugu

SEQ ID NO: 61327 - RNA, 23 nt, Artificial Sequence
  Chemically synthesized
caaauggccuuuauuaaaaacug

SEQ ID NO: 61328 - RNA, 23 nt, Artificial Sequence
  Chemically synthesized
agccucacuuuuaaugaacaaau

SEQ ID NO: 61329 - RNA, 23 nt, Artificial Sequence
  Chemically synthesized
aggaaaugugguagccucacuuu

SEQ ID NO: 61330 - RNA, 23 nt, Artificial Sequence
  Chemically synthesized
gucaaaacagauuguuugcaaag

SEQ ID NO: 61331 - RNA, 23 nt, Artificial Sequence
  Chemically synthesized
gggcaaaaagugcauccguacuc

SEQ ID NO: 61332 - RNA, 23 nt, Artificial Sequence
  Chemically synthesized
ggacagcuuguggcaagugaauu

SEQ ID NO: 61333 - RNA, 23 nt, Artificial Sequence
  Chemically synthesized
uggacagcuuguggcaagugaau

SEQ ID NO: 61334 - RNA, 23 nt, Artificial Sequence
  Chemically synthesized
ggaaucggaauccugucgauuag

SEQ ID NO: 61335 - RNA, 23 nt, Artificial Sequence
  Chemically synthesized
cugagucaaguuguuccuuaagu

SEQ ID NO: 61336 - RNA, 23 nt, Artificial Sequence
  Chemically synthesized
ccaucaagagacugagucaaguu

SEQ ID NO: 61337 - RNA, 23 nt, Artificial Sequence
  Chemically synthesized
cuggaacuugaacugauucacau

SEQ ID NO: 61338 - RNA, 23 nt, Artificial Sequence
  Chemically synthesized
agugagagacauuaacucauuag

SEQ ID NO: 61339 - RNA, 23 nt, Artificial Sequence
  Chemically synthesized
guacuacaggaagauguacggag

SEQ ID NO: 61340 - RNA, 23 nt, Artificial Sequence
  Chemically synthesized
gucccggagacaaugacaucuuu

SEQ ID NO: 61341 - RNA, 23 nt, Artificial Sequence
  Chemically synthesized
guagccucacuuuuaaugaacaa

SEQ ID NO: 61342 - RNA, 23 nt, Artificial Sequence
  Chemically synthesized
aagugcauccguacucccaaaau

SEQ ID NO: 61343 - RNA, 23 nt, Artificial Sequence
  Chemically synthesized
guggcaagugaauuugccuguaa

SEQ ID NO: 61344 - RNA, 23 nt, Artificial Sequence
  Chemically synthesized
ucggaauccugucgauuagacug

SEQ ID NO: 61345 - RNA, 23 nt, Artificial Sequence
  Chemically synthesized
caaguuguuccuuaagucagaac

SEQ ID NO: 61346 - RNA, 23 nt, Artificial Sequence
  Chemically synthesized
agguuaguaucaucagauagcau

SEQ ID NO: 61347 - RNA, 23 nt, Artificial Sequence
  Chemically synthesized
caaaaguuacauguuugcaccuu

SEQ ID NO: 61348 - RNA, 23 nt, Artificial Sequence
  Chemically synthesized
ggcaagugaauuugccuguaaca

SEQ ID NO: 61349 - RNA, 23 nt, Artificial Sequence
  Chemically synthesized
ugacauucugauucgaaugacac

SEQ ID NO: 61350 - RNA, 23 nt, Artificial Sequence
  Chemically synthesized
ugucaaacaaauagucuaucaac

SEQ ID NO: 61351 - RNA, 23 nt, Artificial Sequence
  Chemically synthesized
uccacccggguuaccaaugacaa

SEQ ID NO: 61352 - RNA, 23 nt, Artificial Sequence
  Chemically synthesized
aacauugugccaugucaaacaaa

SEQ ID NO: 61353 - RNA, 23 nt, Artificial Sequence
  Chemically synthesized
acguuuggcccagacccaacuau

SEQ ID NO: 61354 - RNA, 23 nt, Artificial Sequence
  Chemically synthesized
gcaccagcaugaagacauaccga

SEQ ID NO: 61355 - RNA, 23 nt, Artificial Sequence
  Chemically synthesized
ugacuguuuuucggacaguuuau

SEQ ID NO: 61356 - RNA, 23 nt, Artificial Sequence
  Chemically synthesized
agauagaaugacaguccgucaaa

SEQ ID NO: 61357 - RNA, 23 nt, Artificial Sequence
  Chemically synthesized
cugaucguucaaagcaugaaaug

SEQ ID NO: 61358 - RNA, 23 nt, Artificial Sequence
  Chemically synthesized
ucugaucguucaaagcaugaaau

SEQ ID NO: 61359 - RNA, 23 nt, Artificial Sequence
  Chemically synthesized
aggaaucggaauccugucgauua

SEQ ID NO: 61360 - RNA, 23 nt, Artificial Sequence
  Chemically synthesized
gagucaaguuguuccuuaaguca

SEQ ID NO: 61361 - RNA, 23 nt, Artificial Sequence
  Chemically synthesized
gccaucaagagacugagucaagu

SEQ ID NO: 61362 - RNA, 23 nt, Artificial Sequence
  Chemically synthesized
uuaguaucaucagauagcaucuu

SEQ ID NO: 61363 - RNA, 23 nt, Artificial Sequence
  Chemically synthesized
guaccagcagaaagguuaguauc

SEQ ID NO: 61364 - RNA, 23 nt, Artificial Sequence
  Chemically synthesized
uggaacuacauuaguacacagca

SEQ ID NO: 61365 - RNA, 23 nt, Artificial Sequence
  Chemically synthesized
aaaagauucccacccaauucaaa

SEQ ID NO: 61366 - RNA, 23 nt, Artificial Sequence
  Chemically synthesized
gugagagacauuaacucauuaga

SEQ ID NO: 61367 - RNA, 23 nt, Artificial Sequence
  Chemically synthesized
acaugauguucaucaagaccugu

SEQ ID NO: 61368 - RNA, 23 nt, Artificial Sequence
  Chemically synthesized
gaagaacaugauguucaucaaga

SEQ ID NO: 61369 - RNA, 23 nt, Artificial Sequence
  Chemically synthesized
agaagaacaugauguucaucaag

SEQ ID NO: 61370 - RNA, 23 nt, Artificial Sequence
  Chemically synthesized
gaagaagaacaugauguucauca

SEQ ID NO: 61371 - RNA, 23 nt, Artificial Sequence
  Chemically synthesized
ccagcaugaagacauaccgagcu

SEQ ID NO: 61372 - RNA, 23 nt, Artificial Sequence
  Chemically synthesized
caaguuugagcuuucuggcugca

SEQ ID NO: 61373 - RNA, 23 nt, Artificial Sequence
  Chemically synthesized
guguccuuggcaggcugauuucu

SEQ ID NO: 61374 - RNA, 23 nt, Artificial Sequence
  Chemically synthesized
caguguccuuggcaggcugauuu

SEQ ID NO: 61375 - RNA, 23 nt, Artificial Sequence
  Chemically synthesized
ccgucaaaacagauuguuugcaa

SEQ ID NO: 61376 - RNA, 23 nt, Artificial Sequence
  Chemically synthesized
ggaaauucugcucagauagaaug

SEQ ID NO: 61377 - RNA, 23 nt, Artificial Sequence
  Chemically synthesized
agggcaaaaagugcauccguacu

SEQ ID NO: 61378 - RNA, 23 nt, Artificial Sequence
  Chemically synthesized
uugccuguaacaagccagauuuu

SEQ ID NO: 61379 - RNA, 23 nt, Artificial Sequence
  Chemically synthesized
gugaauuugccuguaacaagcca

SEQ ID NO: 61380 - RNA, 23 nt, Artificial Sequence
  Chemically synthesized
gacagcuuguggcaagugaauuu

SEQ ID NO: 61381 - RNA, 23 nt, Artificial Sequence
  Chemically synthesized
cugucgauuagacuggacagcuu

SEQ ID NO: 61382 - RNA, 23 nt, Artificial Sequence
  Chemically synthesized
ucaggaaucggaauccugucgau

SEQ ID NO: 61383 - RNA, 23 nt, Artificial Sequence
  Chemically synthesized
auuuuuacggaaaaaugagaugu

SEQ ID NO: 61384 - RNA, 23 nt, Artificial Sequence
  Chemically synthesized
uuuuuacggaaaaaugagaugug

SEQ ID NO: 61385 - RNA, 23 nt, Artificial Sequence
  Chemically synthesized
uuuuacggaaaaaugagauguga

SEQ ID NO: 61386 - RNA, 23 nt, Artificial Sequence
  Chemically synthesized
uuuacggaaaaaugagaugugaa

SEQ ID NO: 61387 - RNA, 23 nt, Artificial Sequence
  Chemically synthesized
uuacggaaaaaugagaugugaau

SEQ ID NO: 61388 - RNA, 23 nt, Artificial Sequence
  Chemically synthesized
gcacuuuuugcccuucuuaaugu

SEQ ID NO: 61389 - RNA, 23 nt, Artificial Sequence
  Chemically synthesized
cacuuuuugcccuucuuaauguu

SEQ ID NO: 61390 - RNA, 23 nt, Artificial Sequence
  Chemically synthesized
acuuuuugcccuucuuaauguuc

SEQ ID NO: 61391 - RNA, 23 nt, Artificial Sequence
  Chemically synthesized
cuuuuugcccuucuuaauguucu

SEQ ID NO: 61392 - RNA, 23 nt, Artificial Sequence
  Chemically synthesized
uuuuugcccuucuuaauguucuc

SEQ ID NO: 61393 - RNA, 23 nt, Artificial Sequence
  Chemically synthesized
ggcauauuacucguauaagaugc

SEQ ID NO: 61394 - RNA, 23 nt, Artificial Sequence
  Chemically synthesized
gcauauuacucguauaagaugcu

SEQ ID NO: 61395 - RNA, 23 nt, Artificial Sequence
  Chemically synthesized
cauauuacucguauaagaugcua

SEQ ID NO: 61396 - RNA, 23 nt, Artificial Sequence
  Chemically synthesized
auauuacucguauaagaugcuau

SEQ ID NO: 61397 - RNA, 23 nt, Artificial Sequence
  Chemically synthesized
uauuacucguauaagaugcuauc

SEQ ID NO: 61398 - RNA, 23 nt, Artificial Sequence
  Chemically synthesized
caccuuaauauacauucuggugc

SEQ ID NO: 61399 - RNA, 23 nt, Artificial Sequence
  Chemically synthesized
accuuaauauacauucuggugcu

SEQ ID NO: 61400 - RNA, 23 nt, Artificial Sequence
  Chemically synthesized
ccuuaauauacauucuggugcug

SEQ ID NO: 61401 - RNA, 23 nt, Artificial Sequence
  Chemically synthesized
cuuaauauacauucuggugcugu

SEQ ID NO: 61402 - RNA, 23 nt, Artificial Sequence
  Chemically synthesized
uuaauauacauucuggugcugug

SEQ ID NO: 61403 - RNA, 23 nt, Artificial Sequence
  Chemically synthesized
uacggaaaaaugagaugugaauc

SEQ ID NO: 61404 - RNA, 23 nt, Artificial Sequence
  Chemically synthesized
ucaaauagcaggcauauuacucg

SEQ ID NO: 61405 - RNA, 23 nt, Artificial Sequence
  Chemically synthesized
caaauagcaggcauauuacucgu

SEQ ID NO: 61406 - RNA, 23 nt, Artificial Sequence
  Chemically synthesized
aaauagcaggcauauuacucgua

SEQ ID NO: 61407 - RNA, 23 nt, Artificial Sequence
  Chemically synthesized
aauagcaggcauauuacucguau

SEQ ID NO: 61408 - RNA, 23 nt, Artificial Sequence
  Chemically synthesized
auagcaggcauauuacucguaua

SEQ ID NO: 61409 - RNA, 23 nt, Artificial Sequence
  Chemically synthesized
cagugagcacgcuaaaauuuucc

SEQ ID NO: 61410 - RNA, 23 nt, Artificial Sequence
  Chemically synthesized
agugagcacgcuaaaauuuuccu

SEQ ID NO: 61411 - RNA, 23 nt, Artificial Sequence
  Chemically synthesized
gugagcacgcuaaaauuuuccuu

SEQ ID NO: 61412 - RNA, 23 nt, Artificial Sequence
  Chemically synthesized
ugagcacgcuaaaauuuuccuuc

SEQ ID NO: 61413 - RNA, 23 nt, Artificial Sequence
  Chemically synthesized
gagcacgcuaaaauuuuccuucu

SEQ ID NO: 61414 - RNA, 23 nt, Artificial Sequence
  Chemically synthesized
cauuuuuacggaaaaaugagaug

SEQ ID NO: 61415 - RNA, 23 nt, Artificial Sequence
  Chemically synthesized
acggaaaaaugagaugugaauca

SEQ ID NO: 61416 - RNA, 23 nt, Artificial Sequence
  Chemically synthesized
uuuugcccuucuuaauguucucu

SEQ ID NO: 61417 - RNA, 23 nt, Artificial Sequence
  Chemically synthesized
uuugcccuucuuaauguucucuu

SEQ ID NO: 61418 - RNA, 23 nt, Artificial Sequence
  Chemically synthesized
uugcccuucuuaauguucucuuc

SEQ ID NO: 61419 - RNA, 23 nt, Artificial Sequence
  Chemically synthesized
acugaucagcuauauagagucac

SEQ ID NO: 61420 - RNA, 23 nt, Artificial Sequence
  Chemically synthesized
cugaucagcuauauagagucacu

SEQ ID NO: 61421 - RNA, 23 nt, Artificial Sequence
  Chemically synthesized
ugaucagcuauauagagucacuc

SEQ ID NO: 61422 - RNA, 23 nt, Artificial Sequence
  Chemically synthesized
gaucagcuauauagagucacuca

SEQ ID NO: 61423 - RNA, 23 nt, Artificial Sequence
  Chemically synthesized
aucagcuauauagagucacucag

SEQ ID NO: 61424 - RNA, 23 nt, Artificial Sequence
  Chemically synthesized
accuaugguguucagaaauugag

SEQ ID NO: 61425 - RNA, 23 nt, Artificial Sequence
  Chemically synthesized
ccuaugguguucagaaauugagg

SEQ ID NO: 61426 - RNA, 23 nt, Artificial Sequence
  Chemically synthesized
cuaugguguucagaaauugaggc

SEQ ID NO: 61427 - RNA, 23 nt, Artificial Sequence
  Chemically synthesized
uaugguguucagaaauugaggcu

SEQ ID NO: 61428 - RNA, 23 nt, Artificial Sequence
  Chemically synthesized
augguguucagaaauugaggcua

SEQ ID NO: 61429 - RNA, 23 nt, Artificial Sequence
  Chemically synthesized
ucugaugauacuaaccuuucugc

SEQ ID NO: 61430 - RNA, 23 nt, Artificial Sequence
  Chemically synthesized
cugaugauacuaaccuuucugcu

SEQ ID NO: 61431 - RNA, 23 nt, Artificial Sequence
  Chemically synthesized
ugaugauacuaaccuuucugcug

SEQ ID NO: 61432 - RNA, 23 nt, Artificial Sequence
  Chemically synthesized
gaugauacuaaccuuucugcugg

SEQ ID NO: 61433 - RNA, 23 nt, Artificial Sequence
  Chemically synthesized
augauacuaaccuuucugcuggu

SEQ ID NO: 61434 - RNA, 23 nt, Artificial Sequence
  Chemically synthesized
aauguaguuccacugucaagucu

SEQ ID NO: 61435 - RNA, 23 nt, Artificial Sequence
  Chemically synthesized
auguaguuccacugucaagucuu

SEQ ID NO: 61436 - RNA, 23 nt, Artificial Sequence
  Chemically synthesized
uguaguuccacugucaagucuua

SEQ ID NO: 61437 - RNA, 23 nt, Artificial Sequence
  Chemically synthesized
guaguuccacugucaagucuuaa

SEQ ID NO: 61438 - RNA, 23 nt, Artificial Sequence
  Chemically synthesized
uaguuccacugucaagucuuaac

SEQ ID NO: 61439 - RNA, 23 nt, Artificial Sequence
  Chemically synthesized
gcacaauguuuugaauugggugg

SEQ ID NO: 61440 - RNA, 23 nt, Artificial Sequence
  Chemically synthesized
cacaauguuuugaauuggguggg

SEQ ID NO: 61441 - RNA, 23 nt, Artificial Sequence
  Chemically synthesized
acaauguuuugaauuggguggga

SEQ ID NO: 61442 - RNA, 23 nt, Artificial Sequence
  Chemically synthesized
caauguuuugaauugggugggaa

SEQ ID NO: 61443 - RNA, 23 nt, Artificial Sequence
  Chemically synthesized
aauguuuugaauugggugggaau

SEQ ID NO: 61444 - RNA, 23 nt, Artificial Sequence
  Chemically synthesized
cauaucaaaguagaaacaaaugc

SEQ ID NO: 61445 - RNA, 23 nt, Artificial Sequence
  Chemically synthesized
auaucaaaguagaaacaaaugcu

SEQ ID NO: 61446 - RNA, 23 nt, Artificial Sequence
  Chemically synthesized
uaucaaaguagaaacaaaugcuu

SEQ ID NO: 61447 - RNA, 23 nt, Artificial Sequence
  Chemically synthesized
aucaaaguagaaacaaaugcuuc

SEQ ID NO: 61448 - RNA, 23 nt, Artificial Sequence
  Chemically synthesized
ucaaaguagaaacaaaugcuucc

SEQ ID NO: 61449 - RNA, 23 nt, Artificial Sequence
  Chemically synthesized
gaaaaaacugaucagcuauauag

SEQ ID NO: 61450 - RNA, 23 nt, Artificial Sequence
  Chemically synthesized
aaaaaacugaucagcuauauaga

SEQ ID NO: 61451 - RNA, 23 nt, Artificial Sequence
  Chemically synthesized
aaaaacugaucagcuauauagag

SEQ ID NO: 61452 - RNA, 23 nt, Artificial Sequence
  Chemically synthesized
aaaacugaucagcuauauagagu

SEQ ID NO: 61453 - RNA, 23 nt, Artificial Sequence
  Chemically synthesized
aaacugaucagcuauauagaguc

SEQ ID NO: 61454 - RNA, 23 nt, Artificial Sequence
  Chemically synthesized
auuacucguauaagaugcuaucu

SEQ ID NO: 61455 - RNA, 23 nt, Artificial Sequence
  Chemically synthesized
ccacaccuuaauauacauucugg

SEQ ID NO: 61456 - RNA, 23 nt, Artificial Sequence
  Chemically synthesized
cacaccuuaauauacauucuggu

SEQ ID NO: 61457 - RNA, 23 nt, Artificial Sequence
  Chemically synthesized
acaccuuaauauacauucuggug

SEQ ID NO: 61458 - RNA, 23 nt, Artificial Sequence
  Chemically synthesized
uaauauacauucuggugcugugu

SEQ ID NO: 61459 - RNA, 23 nt, Artificial Sequence
  Chemically synthesized
auguuuugaauugggugggaauc

SEQ ID NO: 61460 - RNA, 23 nt, Artificial Sequence
  Chemically synthesized
uuaaugucucucacucucuggcu

SEQ ID NO: 61461 - RNA, 23 nt, Artificial Sequence
  Chemically synthesized
uaaugucucucacucucuggcuu

SEQ ID NO: 61462 - RNA, 23 nt, Artificial Sequence
  Chemically synthesized
aaugucucucacucucuggcuuc

SEQ ID NO: 61463 - RNA, 23 nt, Artificial Sequence
  Chemically synthesized
augucucucacucucuggcuuca

SEQ ID NO: 61464 - RNA, 23 nt, Artificial Sequence
  Chemically synthesized
ggccaaacgugucuuccagucgg

SEQ ID NO: 61465 - RNA, 23 nt, Artificial Sequence
  Chemically synthesized
gccaaacgugucuuccagucggu

SEQ ID NO: 61466 - RNA, 23 nt, Artificial Sequence
  Chemically synthesized
ccaaacgugucuuccagucggua

SEQ ID NO: 61467 - RNA, 23 nt, Artificial Sequence
  Chemically synthesized
caaacgugucuuccagucgguaa

SEQ ID NO: 61468 - RNA, 23 nt, Artificial Sequence
  Chemically synthesized
aaacgugucuuccagucgguaag

SEQ ID NO: 61469 - RNA, 23 nt, Artificial Sequence
  Chemically synthesized
ugccaugucuccguacaucuucc

SEQ ID NO: 61470 - RNA, 23 nt, Artificial Sequence
  Chemically synthesized
gccaugucuccguacaucuuccu

SEQ ID NO: 61471 - RNA, 23 nt, Artificial Sequence
  Chemically synthesized
ccaugucuccguacaucuuccug

SEQ ID NO: 61472 - RNA, 23 nt, Artificial Sequence
  Chemically synthesized
caugucuccguacaucuuccugu

SEQ ID NO: 61473 - RNA, 23 nt, Artificial Sequence
  Chemically synthesized
augucuccguacaucuuccugua

SEQ ID NO: 61474 - RNA, 23 nt, Artificial Sequence
  Chemically synthesized
gugcaaacauguaacuuuugguc

SEQ ID NO: 61475 - RNA, 23 nt, Artificial Sequence
  Chemically synthesized
ugcaaacauguaacuuuugguca

SEQ ID NO: 61476 - RNA, 23 nt, Artificial Sequence
  Chemically synthesized
gcaaacauguaacuuuuggucac

SEQ ID NO: 61477 - RNA, 23 nt, Artificial Sequence
  Chemically synthesized
caaacauguaacuuuuggucaca

SEQ ID NO: 61478 - RNA, 23 nt, Artificial Sequence
  Chemically synthesized
aaacauguaacuuuuggucacac

SEQ ID NO: 61479 - RNA, 23 nt, Artificial Sequence
  Chemically synthesized
aacugaucagcuauauagaguca

SEQ ID NO: 61480 - RNA, 23 nt, Artificial Sequence
  Chemically synthesized
cuucuuaauguucucuuccaggu

SEQ ID NO: 61481 - RNA, 23 nt, Artificial Sequence
  Chemically synthesized
uucuuaauguucucuuccagguc

SEQ ID NO: 61482 - RNA, 23 nt, Artificial Sequence
  Chemically synthesized
ucuuaauguucucuuccagguca

SEQ ID NO: 61483 - RNA, 23 nt, Artificial Sequence
  Chemically synthesized
cuuaauguucucuuccaggucag

SEQ ID NO: 61484 - RNA, 23 nt, Artificial Sequence
  Chemically synthesized
uuaauguucucuuccaggucagc

SEQ ID NO: 61485 - RNA, 23 nt, Artificial Sequence
  Chemically synthesized
ucagaaauugaggcuaacauuga

SEQ ID NO: 61486 - RNA, 23 nt, Artificial Sequence
  Chemically synthesized
cagaaauugaggcuaacauugaa

SEQ ID NO: 61487 - RNA, 23 nt, Artificial Sequence
  Chemically synthesized
agaaauugaggcuaacauugaaa

SEQ ID NO: 61488 - RNA, 23 nt, Artificial Sequence
  Chemically synthesized
gaaauugaggcuaacauugaaau

SEQ ID NO: 61489 - RNA, 23 nt, Artificial Sequence
  Chemically synthesized
aaauugaggcuaacauugaaaua

SEQ ID NO: 61490 - RNA, 23 nt, Artificial Sequence
  Chemically synthesized
ccugaacagugucauucgaauca

SEQ ID NO: 61491 - RNA, 23 nt, Artificial Sequence
  Chemically synthesized
cugaacagugucauucgaaucag

SEQ ID NO: 61492 - RNA, 23 nt, Artificial Sequence
  Chemically synthesized
ugaacagugucauucgaaucaga

SEQ ID NO: 61493 - RNA, 23 nt, Artificial Sequence
  Chemically synthesized
gaacagugucauucgaaucagaa

SEQ ID NO: 61494 - RNA, 23 nt, Artificial Sequence
  Chemically synthesized
aacagugucauucgaaucagaau

SEQ ID NO: 61495 - RNA, 23 nt, Artificial Sequence
  Chemically synthesized
auuuuccuucucaauuacacuuc

SEQ ID NO: 61496 - RNA, 23 nt, Artificial Sequence
  Chemically synthesized
uuuuccuucucaauuacacuuca

SEQ ID NO: 61497 - RNA, 23 nt, Artificial Sequence
  Chemically synthesized
uuuccuucucaauuacacuucaa

SEQ ID NO: 61498 - RNA, 23 nt, Artificial Sequence
  Chemically synthesized
uuccuucucaauuacacuucaaa

SEQ ID NO: 61499 - RNA, 23 nt, Artificial Sequence
  Chemically synthesized
uccuucucaauuacacuucaaau

SEQ ID NO: 61500 - RNA, 23 nt, Artificial Sequence
  Chemically synthesized
caauuacacuucaaauagcaggc

SEQ ID NO: 61501 - RNA, 23 nt, Artificial Sequence
  Chemically synthesized
aauuacacuucaaauagcaggca

SEQ ID NO: 61502 - RNA, 23 nt, Artificial Sequence
  Chemically synthesized
auuacacuucaaauagcaggcau

SEQ ID NO: 61503 - RNA, 23 nt, Artificial Sequence
  Chemically synthesized
uuacacuucaaauagcaggcaua

SEQ ID NO: 61504 - RNA, 23 nt, Artificial Sequence
  Chemically synthesized
uacacuucaaauagcaggcauau

SEQ ID NO: 61505 - RNA, 23 nt, Artificial Sequence
  Chemically synthesized
uagcaggcauauuacucguauaa

SEQ ID NO: 61506 - RNA, 23 nt, Artificial Sequence
  Chemically synthesized
guacuaauguaguuccacuguca

SEQ ID NO: 61507 - RNA, 23 nt, Artificial Sequence
  Chemically synthesized
uacuaauguaguuccacugucaa

SEQ ID NO: 61508 - RNA, 23 nt, Artificial Sequence
  Chemically synthesized
acuaauguaguuccacugucaag

SEQ ID NO: 61509 - RNA, 23 nt, Artificial Sequence
  Chemically synthesized
cuaauguaguuccacugucaagu

SEQ ID NO: 61510 - RNA, 23 nt, Artificial Sequence
  Chemically synthesized
uaauguaguuccacugucaaguc

SEQ ID NO: 61511 - RNA, 23 nt, Artificial Sequence
  Chemically synthesized
gauagacuauuuguuugacaugg

SEQ ID NO: 61512 - RNA, 23 nt, Artificial Sequence
  Chemically synthesized
auagacuauuuguuugacauggc

SEQ ID NO: 61513 - RNA, 23 nt, Artificial Sequence
  Chemically synthesized
uagacuauuuguuugacauggca

SEQ ID NO: 61514 - RNA, 23 nt, Artificial Sequence
  Chemically synthesized
agacuauuuguuugacauggcac

SEQ ID NO: 61515 - RNA, 23 nt, Artificial Sequence
  Chemically synthesized
gacuauuuguuugacauggcaca

SEQ ID NO: 61516 - RNA, 23 nt, Artificial Sequence
  Chemically synthesized
acuauuuguuugacauggcacaa

SEQ ID NO: 61517 - RNA, 23 nt, Artificial Sequence
  Chemically synthesized
gcucuaaucauaguugggucugg

SEQ ID NO: 61518 - RNA, 23 nt, Artificial Sequence
  Chemically synthesized
cucuaaucauaguugggucuggg

SEQ ID NO: 61519 - RNA, 23 nt, Artificial Sequence
  Chemically synthesized
ucuaaucauaguugggucugggc

SEQ ID NO: 61520 - RNA, 23 nt, Artificial Sequence
  Chemically synthesized
cuaaucauaguugggucugggcc

SEQ ID NO: 61521 - RNA, 23 nt, Artificial Sequence
  Chemically synthesized
uaaucauaguugggucugggcca

SEQ ID NO: 61522 - RNA, 23 nt, Artificial Sequence
  Chemically synthesized
aguuaaugucucucacucucugg

SEQ ID NO: 61523 - RNA, 23 nt, Artificial Sequence
  Chemically synthesized
gaugaacaucauguucuucuuca

SEQ ID NO: 61524 - RNA, 23 nt, Artificial Sequence
  Chemically synthesized
augaacaucauguucuucuucau

SEQ ID NO: 61525 - RNA, 23 nt, Artificial Sequence
  Chemically synthesized
ugaacaucauguucuucuucaug

SEQ ID NO: 61526 - RNA, 23 nt, Artificial Sequence
  Chemically synthesized
gaacaucauguucuucuucauga

SEQ ID NO: 61527 - RNA, 23 nt, Artificial Sequence
  Chemically synthesized
aacaucauguucuucuucaugac

SEQ ID NO: 61528 - RNA, 23 nt, Artificial Sequence
  Chemically synthesized
guacauacuccacagaauuuagc

SEQ ID NO: 61529 - RNA, 23 nt, Artificial Sequence
  Chemically synthesized
uacauacuccacagaauuuagcu

SEQ ID NO: 61530 - RNA, 23 nt, Artificial Sequence
  Chemically synthesized
acauacuccacagaauuuagcuc

SEQ ID NO: 61531 - RNA, 23 nt, Artificial Sequence
  Chemically synthesized
cauacuccacagaauuuagcucg

SEQ ID NO: 61532 - RNA, 23 nt, Artificial Sequence
  Chemically synthesized
auacuccacagaauuuagcucgg

SEQ ID NO: 61533 - RNA, 23 nt, Artificial Sequence
  Chemically synthesized
uacuccacagaauuuagcucggu

SEQ ID NO: 61534 - RNA, 23 nt, Artificial Sequence
  Chemically synthesized
acuccacagaauuuagcucggua

SEQ ID NO: 61535 - RNA, 23 nt, Artificial Sequence
  Chemically synthesized
cuccacagaauuuagcucgguau

SEQ ID NO: 61536 - RNA, 23 nt, Artificial Sequence
  Chemically synthesized
uuccuaccuagaaaucagccugc

SEQ ID NO: 61537 - RNA, 23 nt, Artificial Sequence
  Chemically synthesized
uccuaccuagaaaucagccugcc

SEQ ID NO: 61538 - RNA, 23 nt, Artificial Sequence
  Chemically synthesized
ccuaccuagaaaucagccugcca

SEQ ID NO: 61539 - RNA, 23 nt, Artificial Sequence
  Chemically synthesized
cuaccuagaaaucagccugccaa

SEQ ID NO: 61540 - RNA, 23 nt, Artificial Sequence
  Chemically synthesized
uaccuagaaaucagccugccaag

SEQ ID NO: 61541 - RNA, 23 nt, Artificial Sequence
  Chemically synthesized
aagcuuuacauucuaccuauggu

SEQ ID NO: 61542 - RNA, 23 nt, Artificial Sequence
  Chemically synthesized
agcuuuacauucuaccuauggug

SEQ ID NO: 61543 - RNA, 23 nt, Artificial Sequence
  Chemically synthesized
gcuuuacauucuaccuauggugu

SEQ ID NO: 61544 - RNA, 23 nt, Artificial Sequence
  Chemically synthesized
cuuuacauucuaccuaugguguu

SEQ ID NO: 61545 - RNA, 23 nt, Artificial Sequence
  Chemically synthesized
uuuacauucuaccuaugguguuc

SEQ ID NO: 61546 - RNA, 23 nt, Artificial Sequence
  Chemically synthesized
uaccuaugguguucagaaauuga

SEQ ID NO: 61547 - RNA, 23 nt, Artificial Sequence
  Chemically synthesized
aauugaggcuaacauugaaauau

SEQ ID NO: 61548 - RNA, 23 nt, Artificial Sequence
  Chemically synthesized
aaaauaaaaaggcacaaacaacu

SEQ ID NO: 61549 - RNA, 23 nt, Artificial Sequence
  Chemically synthesized
aaauaaaaaggcacaaacaacuu

SEQ ID NO: 61550 - RNA, 23 nt, Artificial Sequence
  Chemically synthesized
aauaaaaaggcacaaacaacuuu

SEQ ID NO: 61551 - RNA, 23 nt, Artificial Sequence
  Chemically synthesized
auaaaaaggcacaaacaacuuua

SEQ ID NO: 61552 - RNA, 23 nt, Artificial Sequence
  Chemically synthesized
uaaaaaggcacaaacaacuuuaa

SEQ ID NO: 61553 - RNA, 23 nt, Artificial Sequence
  Chemically synthesized
agcacgcuaaaauuuuccuucuc

SEQ ID NO: 61554 - RNA, 23 nt, Artificial Sequence
  Chemically synthesized
ucaauuacacuucaaauagcagg

SEQ ID NO: 61555 - RNA, 23 nt, Artificial Sequence
  Chemically synthesized
aauauacauucuggugcugugua

SEQ ID NO: 61556 - RNA, 23 nt, Artificial Sequence
  Chemically synthesized
auauacauucuggugcuguguac

SEQ ID NO: 61557 - RNA, 23 nt, Artificial Sequence
  Chemically synthesized
uauacauucuggugcuguguacu

SEQ ID NO: 61558 - RNA, 23 nt, Artificial Sequence
  Chemically synthesized
uuccagucuaaugaguuaauguc

SEQ ID NO: 61559 - RNA, 23 nt, Artificial Sequence
  Chemically synthesized
uccagucuaaugaguuaaugucu

SEQ ID NO: 61560 - RNA, 23 nt, Artificial Sequence
  Chemically synthesized
ccagucuaaugaguuaaugucuc

SEQ ID NO: 61561 - RNA, 23 nt, Artificial Sequence
  Chemically synthesized
cagucuaaugaguuaaugucucu

SEQ ID NO: 61562 - RNA, 23 nt, Artificial Sequence
  Chemically synthesized
agucuaaugaguuaaugucucuc

SEQ ID NO: 61563 - RNA, 23 nt, Artificial Sequence
  Chemically synthesized
ugaguuaaugucucucacucucu

SEQ ID NO: 61564 - RNA, 23 nt, Artificial Sequence
  Chemically synthesized
gaguuaaugucucucacucucug

SEQ ID NO: 61565 - RNA, 23 nt, Artificial Sequence
  Chemically synthesized
cauguucuucuucaugaccucgc

SEQ ID NO: 61566 - RNA, 23 nt, Artificial Sequence
  Chemically synthesized
auguucuucuucaugaccucgcc

SEQ ID NO: 61567 - RNA, 23 nt, Artificial Sequence
  Chemically synthesized
uguucuucuucaugaccucgccg

SEQ ID NO: 61568 - RNA, 23 nt, Artificial Sequence
  Chemically synthesized
guucuucuucaugaccucgccgu

SEQ ID NO: 61569 - RNA, 23 nt, Artificial Sequence
  Chemically synthesized
uucuucuucaugaccucgccguc

SEQ ID NO: 61570 - RNA, 23 nt, Artificial Sequence
  Chemically synthesized
ucagcuauauagagucacucagu

SEQ ID NO: 61571 - RNA, 23 nt, Artificial Sequence
  Chemically synthesized
cagcuauauagagucacucaguu

SEQ ID NO: 61572 - RNA, 23 nt, Artificial Sequence
  Chemically synthesized
uuuaauaaaggccauuuguucau

SEQ ID NO: 61573 - RNA, 23 nt, Artificial Sequence
  Chemically synthesized
uuaauaaaggccauuuguucauu

SEQ ID NO: 61574 - RNA, 23 nt, Artificial Sequence
  Chemically synthesized
uaauaaaggccauuuguucauua

SEQ ID NO: 61575 - RNA, 23 nt, Artificial Sequence
  Chemically synthesized
aauaaaggccauuuguucauuaa

SEQ ID NO: 61576 - RNA, 23 nt, Artificial Sequence
  Chemically synthesized
auaaaggccauuuguucauuaaa

SEQ ID NO: 61577 - RNA, 23 nt, Artificial Sequence
  Chemically synthesized
ugcccuucuuaauguucucuucc

SEQ ID NO: 61578 - RNA, 23 nt, Artificial Sequence
  Chemically synthesized
cuaccuaugguguucagaaauug

SEQ ID NO: 61579 - RNA, 23 nt, Artificial Sequence
  Chemically synthesized
auugaggcuaacauugaaauauc

SEQ ID NO: 61580 - RNA, 23 nt, Artificial Sequence
  Chemically synthesized
gucucuugauggcuggagaaugc

SEQ ID NO: 61581 - RNA, 23 nt, Artificial Sequence
  Chemically synthesized
ucucuugauggcuggagaaugca

SEQ ID NO: 61582 - RNA, 23 nt, Artificial Sequence
  Chemically synthesized
cucuugauggcuggagaaugcac

SEQ ID NO: 61583 - RNA, 23 nt, Artificial Sequence
  Chemically synthesized
ucuugauggcuggagaaugcaca

SEQ ID NO: 61584 - RNA, 23 nt, Artificial Sequence
  Chemically synthesized
cuugauggcuggagaaugcacau

SEQ ID NO: 61585 - RNA, 23 nt, Artificial Sequence
  Chemically synthesized
ucagugagcacgcuaaaauuuuc

SEQ ID NO: 61586 - RNA, 23 nt, Artificial Sequence
  Chemically synthesized
gcacgcuaaaauuuuccuucuca

SEQ ID NO: 61587 - RNA, 23 nt, Artificial Sequence
  Chemically synthesized
uuacucguauaagaugcuaucug

SEQ ID NO: 61588 - RNA, 23 nt, Artificial Sequence
  Chemically synthesized
cugucaagucuuaacauucuuca

SEQ ID NO: 61589 - RNA, 23 nt, Artificial Sequence
  Chemically synthesized
ugucaagucuuaacauucuucaa

SEQ ID NO: 61590 - RNA, 23 nt, Artificial Sequence
  Chemically synthesized
gucaagucuuaacauucuucaaa

SEQ ID NO: 61591 - RNA, 23 nt, Artificial Sequence
  Chemically synthesized
ucaagucuuaacauucuucaaac

SEQ ID NO: 61592 - RNA, 23 nt, Artificial Sequence
  Chemically synthesized
caagucuuaacauucuucaaacc

SEQ ID NO: 61593 - RNA, 23 nt, Artificial Sequence
  Chemically synthesized
aaucauaguugggucugggccaa

SEQ ID NO: 61594 - RNA, 23 nt, Artificial Sequence
  Chemically synthesized
gugaaucaguucaaguuccaguc

SEQ ID NO: 61595 - RNA, 23 nt, Artificial Sequence
  Chemically synthesized
ugaaucaguucaaguuccagucu

SEQ ID NO: 61596 - RNA, 23 nt, Artificial Sequence
  Chemically synthesized
gaaucaguucaaguuccagucua

SEQ ID NO: 61597 - RNA, 23 nt, Artificial Sequence
  Chemically synthesized
aaucaguucaaguuccagucuaa

SEQ ID NO: 61598 - RNA, 23 nt, Artificial Sequence
  Chemically synthesized
aucaguucaaguuccagucuaau

SEQ ID NO: 61599 - RNA, 23 nt, Artificial Sequence
  Chemically synthesized
gucuaaugaguuaaugucucuca

SEQ ID NO: 61600 - RNA, 23 nt, Artificial Sequence
  Chemically synthesized
ugucuccguacaucuuccuguag

SEQ ID NO: 61601 - RNA, 23 nt, Artificial Sequence
  Chemically synthesized
gucuccguacaucuuccuguagu

SEQ ID NO: 61602 - RNA, 23 nt, Artificial Sequence
  Chemically synthesized
ucuccguacaucuuccuguagua

SEQ ID NO: 61603 - RNA, 23 nt, Artificial Sequence
  Chemically synthesized
uccacagaauuuagcucgguaug

SEQ ID NO: 61604 - RNA, 23 nt, Artificial Sequence
  Chemically synthesized
gaauuuagcucgguaugucuuca

SEQ ID NO: 61605 - RNA, 23 nt, Artificial Sequence
  Chemically synthesized
aauuuagcucgguaugucuucau

SEQ ID NO: 61606 - RNA, 23 nt, Artificial Sequence
  Chemically synthesized
auuuagcucgguaugucuucaug

SEQ ID NO: 61607 - RNA, 23 nt, Artificial Sequence
  Chemically synthesized
uuuagcucgguaugucuucaugc

SEQ ID NO: 61608 - RNA, 23 nt, Artificial Sequence
  Chemically synthesized
uuagcucgguaugucuucaugcu

SEQ ID NO: 61609 - RNA, 23 nt, Artificial Sequence
  Chemically synthesized
ccagaaagcucaaacuugauagg

SEQ ID NO: 61610 - RNA, 23 nt, Artificial Sequence
  Chemically synthesized
cagaaagcucaaacuugauaggc

SEQ ID NO: 61611 - RNA, 23 nt, Artificial Sequence
  Chemically synthesized
agaaagcucaaacuugauaggcu

SEQ ID NO: 61612 - RNA, 23 nt, Artificial Sequence
  Chemically synthesized
gaaagcucaaacuugauaggcuu

SEQ ID NO: 61613 - RNA, 23 nt, Artificial Sequence
  Chemically synthesized
aaagcucaaacuugauaggcuug

SEQ ID NO: 61614 - RNA, 23 nt, Artificial Sequence
  Chemically synthesized
cuugauaggcuuggagauuuugg

SEQ ID NO: 61615 - RNA, 23 nt, Artificial Sequence
  Chemically synthesized
uugauaggcuuggagauuuuggg

SEQ ID NO: 61616 - RNA, 23 nt, Artificial Sequence
  Chemically synthesized
ugauaggcuuggagauuuuggga

SEQ ID NO: 61617 - RNA, 23 nt, Artificial Sequence
  Chemically synthesized
gauaggcuuggagauuuugggag

SEQ ID NO: 61618 - RNA, 23 nt, Artificial Sequence
  Chemically synthesized
auaggcuuggagauuuugggagu

SEQ ID NO: 61619 - RNA, 23 nt, Artificial Sequence
  Chemically synthesized
gaaaaacagucauaucaaaguag

SEQ ID NO: 61620 - RNA, 23 nt, Artificial Sequence
  Chemically synthesized
aaaaacagucauaucaaaguaga

SEQ ID NO: 61621 - RNA, 23 nt, Artificial Sequence
  Chemically synthesized
aaaacagucauaucaaaguagaa

SEQ ID NO: 61622 - RNA, 23 nt, Artificial Sequence
  Chemically synthesized
aaacagucauaucaaaguagaaa

SEQ ID NO: 61623 - RNA, 23 nt, Artificial Sequence
  Chemically synthesized
aacagucauaucaaaguagaaac

SEQ ID NO: 61624 - RNA, 23 nt, Artificial Sequence
  Chemically synthesized
ccauauaaguauccauuucaugc

SEQ ID NO: 61625 - RNA, 23 nt, Artificial Sequence
  Chemically synthesized
cauauaaguauccauuucaugcu

SEQ ID NO: 61626 - RNA, 23 nt, Artificial Sequence
  Chemically synthesized
auauaaguauccauuucaugcuu

SEQ ID NO: 61627 - RNA, 23 nt, Artificial Sequence
  Chemically synthesized
uauaaguauccauuucaugcuuu

SEQ ID NO: 61628 - RNA, 23 nt, Artificial Sequence
  Chemically synthesized
auaaguauccauuucaugcuuug

SEQ ID NO: 61629 - RNA, 23 nt, Artificial Sequence
  Chemically synthesized
uuugaacgaucagacaagcuuua

SEQ ID NO: 61630 - RNA, 23 nt, Artificial Sequence
  Chemically synthesized
uugaacgaucagacaagcuuuac

SEQ ID NO: 61631 - RNA, 23 nt, Artificial Sequence
  Chemically synthesized
ugaacgaucagacaagcuuuaca

SEQ ID NO: 61632 - RNA, 23 nt, Artificial Sequence
  Chemically synthesized
gaacgaucagacaagcuuuacau

SEQ ID NO: 61633 - RNA, 23 nt, Artificial Sequence
  Chemically synthesized
aacgaucagacaagcuuuacauu

SEQ ID NO: 61634 - RNA, 23 nt, Artificial Sequence
  Chemically synthesized
cgaucagacaagcuuuacauucu

SEQ ID NO: 61635 - RNA, 23 nt, Artificial Sequence
  Chemically synthesized
gaucagacaagcuuuacauucua

SEQ ID NO: 61636 - RNA, 23 nt, Artificial Sequence
  Chemically synthesized
aucagacaagcuuuacauucuac

SEQ ID NO: 61637 - RNA, 23 nt, Artificial Sequence
  Chemically synthesized
ucagacaagcuuuacauucuacc

SEQ ID NO: 61638 - RNA, 23 nt, Artificial Sequence
  Chemically synthesized
cagacaagcuuuacauucuaccu

SEQ ID NO: 61639 - RNA, 23 nt, Artificial Sequence
  Chemically synthesized
agacaagcuuuacauucuaccua

SEQ ID NO: 61640 - RNA, 23 nt, Artificial Sequence
  Chemically synthesized
gacaagcuuuacauucuaccuau

SEQ ID NO: 61641 - RNA, 23 nt, Artificial Sequence
  Chemically synthesized
acaagcuuuacauucuaccuaug

SEQ ID NO: 61642 - RNA, 23 nt, Artificial Sequence
  Chemically synthesized
caagcuuuacauucuaccuaugg

SEQ ID NO: 61643 - RNA, 23 nt, Artificial Sequence
  Chemically synthesized
uaauguucucuuccaggucagcu

SEQ ID NO: 61644 - RNA, 23 nt, Artificial Sequence
  Chemically synthesized
aauguucucuuccaggucagcuu

SEQ ID NO: 61645 - RNA, 23 nt, Artificial Sequence
  Chemically synthesized
ugguguucagaaauugaggcuaa

SEQ ID NO: 61646 - RNA, 23 nt, Artificial Sequence
  Chemically synthesized
gguguucagaaauugaggcuaac

SEQ ID NO: 61647 - RNA, 23 nt, Artificial Sequence
  Chemically synthesized
aaaaaggcacaaacaacuuuaaa

SEQ ID NO: 61648 - RNA, 23 nt, Artificial Sequence
  Chemically synthesized
aaaaggcacaaacaacuuuaaau

SEQ ID NO: 61649 - RNA, 23 nt, Artificial Sequence
  Chemically synthesized
acgcuaaaauuuuccuucucaau

SEQ ID NO: 61650 - RNA, 23 nt, Artificial Sequence
  Chemically synthesized
ucguauaagaugcuaucugauga

SEQ ID NO: 61651 - RNA, 23 nt, Artificial Sequence
  Chemically synthesized
cguauaagaugcuaucugaugau

SEQ ID NO: 61652 - RNA, 23 nt, Artificial Sequence
  Chemically synthesized
guauaagaugcuaucugaugaua

SEQ ID NO: 61653 - RNA, 23 nt, Artificial Sequence
  Chemically synthesized
uauaagaugcuaucugaugauac

SEQ ID NO: 61654 - RNA, 23 nt, Artificial Sequence
  Chemically synthesized
auaagaugcuaucugaugauacu

SEQ ID NO: 61655 - RNA, 23 nt, Artificial Sequence
  Chemically synthesized
ugcuacugaaaucauuuuuacgg

SEQ ID NO: 61656 - RNA, 23 nt, Artificial Sequence
  Chemically synthesized
gcuacugaaaucauuuuuacgga

SEQ ID NO: 61657 - RNA, 23 nt, Artificial Sequence
  Chemically synthesized
cuacugaaaucauuuuuacggaa

SEQ ID NO: 61658 - RNA, 23 nt, Artificial Sequence
  Chemically synthesized
uacugaaaucauuuuuacggaaa

SEQ ID NO: 61659 - RNA, 23 nt, Artificial Sequence
  Chemically synthesized
acugaaaucauuuuuacggaaaa

SEQ ID NO: 61660 - RNA, 23 nt, Artificial Sequence
  Chemically synthesized
augaguuaaugucucucacucuc

SEQ ID NO: 61661 - RNA, 23 nt, Artificial Sequence
  Chemically synthesized
aacgugucuuccagucgguaagc

SEQ ID NO: 61662 - RNA, 23 nt, Artificial Sequence
  Chemically synthesized
acagaauuuagcucgguaugucu

SEQ ID NO: 61663 - RNA, 23 nt, Artificial Sequence
  Chemically synthesized
cagaauuuagcucgguaugucuu

SEQ ID NO: 61664 - RNA, 23 nt, Artificial Sequence
  Chemically synthesized
agaauuuagcucgguaugucuuc

SEQ ID NO: 61665 - RNA, 23 nt, Artificial Sequence
  Chemically synthesized
gccagaaagcucaaacuugauag

SEQ ID NO: 61666 - RNA, 23 nt, Artificial Sequence
  Chemically synthesized
aagcucaaacuugauaggcuugg

SEQ ID NO: 61667 - RNA, 23 nt, Artificial Sequence
  Chemically synthesized
aggugcaaacauguaacuuuugg

SEQ ID NO: 61668 - RNA, 23 nt, Artificial Sequence
  Chemically synthesized
ggugcaaacauguaacuuuuggu

SEQ ID NO: 61669 - RNA, 23 nt, Artificial Sequence
  Chemically synthesized
aacauguaacuuuuggucacacu

SEQ ID NO: 61670 - RNA, 23 nt, Artificial Sequence
  Chemically synthesized
cacucucaacaaauaaacugucc

SEQ ID NO: 61671 - RNA, 23 nt, Artificial Sequence
  Chemically synthesized
acucucaacaaauaaacuguccg

SEQ ID NO: 61672 - RNA, 23 nt, Artificial Sequence
  Chemically synthesized
cucucaacaaauaaacuguccga

SEQ ID NO: 61673 - RNA, 23 nt, Artificial Sequence
  Chemically synthesized
ucucaacaaauaaacuguccgaa

SEQ ID NO: 61674 - RNA, 23 nt, Artificial Sequence
  Chemically synthesized
cucaacaaauaaacuguccgaaa

SEQ ID NO: 61675 - RNA, 23 nt, Artificial Sequence
  Chemically synthesized
gucacucaguuuuuaauaaaggc

SEQ ID NO: 61676 - RNA, 23 nt, Artificial Sequence
  Chemically synthesized
ucacucaguuuuuaauaaaggcc

SEQ ID NO: 61677 - RNA, 23 nt, Artificial Sequence
  Chemically synthesized
cacucaguuuuuaauaaaggcca

SEQ ID NO: 61678 - RNA, 23 nt, Artificial Sequence
  Chemically synthesized
acucaguuuuuaauaaaggccau

SEQ ID NO: 61679 - RNA, 23 nt, Artificial Sequence
  Chemically synthesized
cucaguuuuuaauaaaggccauu

SEQ ID NO: 61680 - RNA, 23 nt, Artificial Sequence
  Chemically synthesized
aaaaauaaaaaggcacaaacaac

SEQ ID NO: 61681 - RNA, 23 nt, Artificial Sequence
  Chemically synthesized
aaaggcacaaacaacuuuaaauu

SEQ ID NO: 61682 - RNA, 23 nt, Artificial Sequence
  Chemically synthesized
acagugucauucgaaucagaaug

SEQ ID NO: 61683 - RNA, 23 nt, Artificial Sequence
  Chemically synthesized
gagucugcuguucugacuuaagg

SEQ ID NO: 61684 - RNA, 23 nt, Artificial Sequence
  Chemically synthesized
agucugcuguucugacuuaagga

SEQ ID NO: 61685 - RNA, 23 nt, Artificial Sequence
  Chemically synthesized
gucugcuguucugacuuaaggaa

SEQ ID NO: 61686 - RNA, 23 nt, Artificial Sequence
  Chemically synthesized
ucugcuguucugacuuaaggaac

SEQ ID NO: 61687 - RNA, 23 nt, Artificial Sequence
  Chemically synthesized
cugcuguucugacuuaaggaaca

SEQ ID NO: 61688 - RNA, 23 nt, Artificial Sequence
  Chemically synthesized
uucaaauagcaggcauauuacuc

SEQ ID NO: 61689 - RNA, 23 nt, Artificial Sequence
  Chemically synthesized
uacucguauaagaugcuaucuga

SEQ ID NO: 61690 - RNA, 23 nt, Artificial Sequence
  Chemically synthesized
acugucaagucuuaacauucuuc

SEQ ID NO: 61691 - RNA, 23 nt, Artificial Sequence
  Chemically synthesized
gauuuaaauaacuugugcuacug

SEQ ID NO: 61692 - RNA, 23 nt, Artificial Sequence
  Chemically synthesized
auuuaaauaacuugugcuacuga

SEQ ID NO: 61693 - RNA, 23 nt, Artificial Sequence
  Chemically synthesized
uuuaaauaacuugugcuacugaa

SEQ ID NO: 61694 - RNA, 23 nt, Artificial Sequence
  Chemically synthesized
uuaaauaacuugugcuacugaaa

SEQ ID NO: 61695 - RNA, 23 nt, Artificial Sequence
  Chemically synthesized
uaaauaacuugugcuacugaaau

SEQ ID NO: 61696 - RNA, 23 nt, Artificial Sequence
  Chemically synthesized
ugugaaucaguucaaguuccagu

SEQ ID NO: 61697 - RNA, 23 nt, Artificial Sequence
  Chemically synthesized
caaguuccagucuaaugaguuaa

SEQ ID NO: 61698 - RNA, 23 nt, Artificial Sequence
  Chemically synthesized
aaguuccagucuaaugaguuaau

SEQ ID NO: 61699 - RNA, 23 nt, Artificial Sequence
  Chemically synthesized
aguuccagucuaaugaguuaaug

SEQ ID NO: 61700 - RNA, 23 nt, Artificial Sequence
  Chemically synthesized
guuccagucuaaugaguuaaugu

SEQ ID NO: 61701 - RNA, 23 nt, Artificial Sequence
  Chemically synthesized
gggccaaacgugucuuccagucg

SEQ ID NO: 61702 - RNA, 23 nt, Artificial Sequence
  Chemically synthesized
cacagaauuuagcucgguauguc

SEQ ID NO: 61703 - RNA, 23 nt, Artificial Sequence
  Chemically synthesized
auguaacuuuuggucacacucuc

SEQ ID NO: 61704 - RNA, 23 nt, Artificial Sequence
  Chemically synthesized
uguaacuuuuggucacacucuca

SEQ ID NO: 61705 - RNA, 23 nt, Artificial Sequence
  Chemically synthesized
guaacuuuuggucacacucucaa

SEQ ID NO: 61706 - RNA, 23 nt, Artificial Sequence
  Chemically synthesized
uaacuuuuggucacacucucaac

SEQ ID NO: 61707 - RNA, 23 nt, Artificial Sequence
  Chemically synthesized
auguucucuuccaggucagcuuc

SEQ ID NO: 61708 - RNA, 23 nt, Artificial Sequence
  Chemically synthesized
uucucaauuacacuucaaauagc

SEQ ID NO: 61709 - RNA, 23 nt, Artificial Sequence
  Chemically synthesized
ucucaauuacacuucaaauagca

SEQ ID NO: 61710 - RNA, 23 nt, Artificial Sequence
  Chemically synthesized
cucaauuacacuucaaauagcag

SEQ ID NO: 61711 - RNA, 23 nt, Artificial Sequence
  Chemically synthesized
uguacuaauguaguuccacuguc

SEQ ID NO: 61712 - RNA, 23 nt, Artificial Sequence
  Chemically synthesized
ccacugucaagucuuaacauucu

SEQ ID NO: 61713 - RNA, 23 nt, Artificial Sequence
  Chemically synthesized
cacugucaagucuuaacauucuu

SEQ ID NO: 61714 - RNA, 23 nt, Artificial Sequence
  Chemically synthesized
cggaaaaaugagaugugaaucag

SEQ ID NO: 61715 - RNA, 23 nt, Artificial Sequence
  Chemically synthesized
ggaaaaaugagaugugaaucagu

SEQ ID NO: 61716 - RNA, 23 nt, Artificial Sequence
  Chemically synthesized
gaaaaaugagaugugaaucaguu

SEQ ID NO: 61717 - RNA, 23 nt, Artificial Sequence
  Chemically synthesized
aaaaaugagaugugaaucaguuc

SEQ ID NO: 61718 - RNA, 23 nt, Artificial Sequence
  Chemically synthesized
aaaaugagaugugaaucaguuca

SEQ ID NO: 61719 - RNA, 23 nt, Artificial Sequence
  Chemically synthesized
ucuucuucaugaccucgccguca

SEQ ID NO: 61720 - RNA, 23 nt, Artificial Sequence
  Chemically synthesized
cuucuucaugaccucgccgucag

SEQ ID NO: 61721 - RNA, 23 nt, Artificial Sequence
  Chemically synthesized
uucuucaugaccucgccgucagg

SEQ ID NO: 61722 - RNA, 23 nt, Artificial Sequence
  Chemically synthesized
uagcucgguaugucuucaugcug

SEQ ID NO: 61723 - RNA, 23 nt, Artificial Sequence
  Chemically synthesized
gcucaaacuugauaggcuuggag

SEQ ID NO: 61724 - RNA, 23 nt, Artificial Sequence
  Chemically synthesized
cucaaacuugauaggcuuggaga

SEQ ID NO: 61725 - RNA, 23 nt, Artificial Sequence
  Chemically synthesized
ucaaacuugauaggcuuggagau

SEQ ID NO: 61726 - RNA, 23 nt, Artificial Sequence
  Chemically synthesized
caaacuugauaggcuuggagauu

SEQ ID NO: 61727 - RNA, 23 nt, Artificial Sequence
  Chemically synthesized
aaacuugauaggcuuggagauuu

SEQ ID NO: 61728 - RNA, 23 nt, Artificial Sequence
  Chemically synthesized
aggcuuggagauuuugggaguac

SEQ ID NO: 61729 - RNA, 23 nt, Artificial Sequence
  Chemically synthesized
ggcuuggagauuuugggaguacg

SEQ ID NO: 61730 - RNA, 23 nt, Artificial Sequence
  Chemically synthesized
gcuuggagauuuugggaguacgg

SEQ ID NO: 61731 - RNA, 23 nt, Artificial Sequence
  Chemically synthesized
cuuggagauuuugggaguacgga

SEQ ID NO: 61732 - RNA, 23 nt, Artificial Sequence
  Chemically synthesized
uuggagauuuugggaguacggau

SEQ ID NO: 61733 - RNA, 23 nt, Artificial Sequence
  Chemically synthesized
cacacucucaacaaauaaacugu

SEQ ID NO: 61734 - RNA, 23 nt, Artificial Sequence
  Chemically synthesized
acacucucaacaaauaaacuguc

SEQ ID NO: 61735 - RNA, 23 nt, Artificial Sequence
  Chemically synthesized
ucaacaaauaaacuguccgaaaa

SEQ ID NO: 61736 - RNA, 23 nt, Artificial Sequence
  Chemically synthesized
uaaaggccauuuguucauuaaaa

SEQ ID NO: 61737 - RNA, 23 nt, Artificial Sequence
  Chemically synthesized
aaaggccauuuguucauuaaaag

SEQ ID NO: 61738 - RNA, 23 nt, Artificial Sequence
  Chemically synthesized
aaggccauuuguucauuaaaagu

SEQ ID NO: 61739 - RNA, 23 nt, Artificial Sequence
  Chemically synthesized
acauuuccuaccuagaaaucagc

SEQ ID NO: 61740 - RNA, 23 nt, Artificial Sequence
  Chemically synthesized
cauuuccuaccuagaaaucagcc

SEQ ID NO: 61741 - RNA, 23 nt, Artificial Sequence
  Chemically synthesized
auuuccuaccuagaaaucagccu

SEQ ID NO: 61742 - RNA, 23 nt, Artificial Sequence
  Chemically synthesized
uuuccuaccuagaaaucagccug

SEQ ID NO: 61743 - RNA, 23 nt, Artificial Sequence
  Chemically synthesized
ccuccccuuugcaaacaaucugu

SEQ ID NO: 61744 - RNA, 23 nt, Artificial Sequence
  Chemically synthesized
cuccccuuugcaaacaaucuguu

SEQ ID NO: 61745 - RNA, 23 nt, Artificial Sequence
  Chemically synthesized
uccccuuugcaaacaaucuguuu

SEQ ID NO: 61746 - RNA, 23 nt, Artificial Sequence
  Chemically synthesized
ccccuuugcaaacaaucuguuuu

SEQ ID NO: 61747 - RNA, 23 nt, Artificial Sequence
  Chemically synthesized
cccuuugcaaacaaucuguuuug

SEQ ID NO: 61748 - RNA, 23 nt, Artificial Sequence
  Chemically synthesized
ccgauuccugaacagugucauuc

SEQ ID NO: 61749 - RNA, 23 nt, Artificial Sequence
  Chemically synthesized
cgauuccugaacagugucauucg

SEQ ID NO: 61750 - RNA, 23 nt, Artificial Sequence
  Chemically synthesized
gauuccugaacagugucauucga

SEQ ID NO: 61751 - RNA, 23 nt, Artificial Sequence
  Chemically synthesized
auuccugaacagugucauucgaa

SEQ ID NO: 61752 - RNA, 23 nt, Artificial Sequence
  Chemically synthesized
uuccugaacagugucauucgaau

SEQ ID NO: 61753 - RNA, 23 nt, Artificial Sequence
  Chemically synthesized
uaagaugcuaucugaugauacua

SEQ ID NO: 61754 - RNA, 23 nt, Artificial Sequence
  Chemically synthesized
uaucugaugauacuaaccuuucu

SEQ ID NO: 61755 - RNA, 23 nt, Artificial Sequence
  Chemically synthesized
aucugaugauacuaaccuuucug

SEQ ID NO: 61756 - RNA, 23 nt, Artificial Sequence
  Chemically synthesized
aagccacaccuuaauauacauuc

SEQ ID NO: 61757 - RNA, 23 nt, Artificial Sequence
  Chemically synthesized
agccacaccuuaauauacauucu

SEQ ID NO: 61758 - RNA, 23 nt, Artificial Sequence
  Chemically synthesized
gccacaccuuaauauacauucug

SEQ ID NO: 61759 - RNA, 23 nt, Artificial Sequence
  Chemically synthesized
guguacuaauguaguuccacugu

SEQ ID NO: 61760 - RNA, 23 nt, Artificial Sequence
  Chemically synthesized
aucauaguugggucugggccaaa

SEQ ID NO: 61761 - RNA, 23 nt, Artificial Sequence
  Chemically synthesized
caguucaaguuccagucuaauga

SEQ ID NO: 61762 - RNA, 23 nt, Artificial Sequence
  Chemically synthesized
aguucaaguuccagucuaaugag

SEQ ID NO: 61763 - RNA, 23 nt, Artificial Sequence
  Chemically synthesized
guucaaguuccagucuaaugagu

SEQ ID NO: 61764 - RNA, 23 nt, Artificial Sequence
  Chemically synthesized
uucaaguuccagucuaaugaguu

SEQ ID NO: 61765 - RNA, 23 nt, Artificial Sequence
  Chemically synthesized
ucaaguuccagucuaaugaguua

SEQ ID NO: 61766 - RNA, 23 nt, Artificial Sequence
  Chemically synthesized
aacuugauaggcuuggagauuuu

SEQ ID NO: 61767 - RNA, 23 nt, Artificial Sequence
  Chemically synthesized
acuugauaggcuuggagauuuug

SEQ ID NO: 61768 - RNA, 23 nt, Artificial Sequence
  Chemically synthesized
cauguaacuuuuggucacacucu

SEQ ID NO: 61769 - RNA, 23 nt, Artificial Sequence
  Chemically synthesized
ucacacucucaacaaauaaacug

SEQ ID NO: 61770 - RNA, 23 nt, Artificial Sequence
  Chemically synthesized
aggcuaccacauuuccuaccuag

SEQ ID NO: 61771 - RNA, 23 nt, Artificial Sequence
  Chemically synthesized
ggcuaccacauuuccuaccuaga

SEQ ID NO: 61772 - RNA, 23 nt, Artificial Sequence
  Chemically synthesized
gcuaccacauuuccuaccuagaa

SEQ ID NO: 61773 - RNA, 23 nt, Artificial Sequence
  Chemically synthesized
cuaccacauuuccuaccuagaaa

SEQ ID NO: 61774 - RNA, 23 nt, Artificial Sequence
  Chemically synthesized
uaccacauuuccuaccuagaaau

SEQ ID NO: 61775 - RNA, 23 nt, Artificial Sequence
  Chemically synthesized
cacauuuccuaccuagaaaucag

SEQ ID NO: 61776 - RNA, 23 nt, Artificial Sequence
  Chemically synthesized
accuagaaaucagccugccaagg

SEQ ID NO: 61777 - RNA, 23 nt, Artificial Sequence
  Chemically synthesized
ggacugucauucuaucugagcag

SEQ ID NO: 61778 - RNA, 23 nt, Artificial Sequence
  Chemically synthesized
gacugucauucuaucugagcaga

SEQ ID NO: 61779 - RNA, 23 nt, Artificial Sequence
  Chemically synthesized
acugucauucuaucugagcagaa

SEQ ID NO: 61780 - RNA, 23 nt, Artificial Sequence
  Chemically synthesized
cugucauucuaucugagcagaau

SEQ ID NO: 61781 - RNA, 23 nt, Artificial Sequence
  Chemically synthesized
ugucauucuaucugagcagaauu

SEQ ID NO: 61782 - RNA, 23 nt, Artificial Sequence
  Chemically synthesized
aaggcacaaacaacuuuaaauua

SEQ ID NO: 61783 - RNA, 23 nt, Artificial Sequence
  Chemically synthesized
aaaauuuuccuucucaauuacac

SEQ ID NO: 61784 - RNA, 23 nt, Artificial Sequence
  Chemically synthesized
aaauuuuccuucucaauuacacu

SEQ ID NO: 61785 - RNA, 23 nt, Artificial Sequence
  Chemically synthesized
aauuuuccuucucaauuacacuu

SEQ ID NO: 61786 - RNA, 23 nt, Artificial Sequence
  Chemically synthesized
acucguauaagaugcuaucugau

SEQ ID NO: 61787 - RNA, 23 nt, Artificial Sequence
  Chemically synthesized
cucguauaagaugcuaucugaug

SEQ ID NO: 61788 - RNA, 23 nt, Artificial Sequence
  Chemically synthesized
aagucuuaacauucuucaaacca

SEQ ID NO: 61789 - RNA, 23 nt, Artificial Sequence
  Chemically synthesized
agucuuaacauucuucaaaccag

SEQ ID NO: 61790 - RNA, 23 nt, Artificial Sequence
  Chemically synthesized
gucuuaacauucuucaaaccagu

SEQ ID NO: 61791 - RNA, 23 nt, Artificial Sequence
  Chemically synthesized
ucuuaacauucuucaaaccagug

SEQ ID NO: 61792 - RNA, 23 nt, Artificial Sequence
  Chemically synthesized
aacauucuucaaaccagugucug

SEQ ID NO: 61793 - RNA, 23 nt, Artificial Sequence
  Chemically synthesized
acauucuucaaaccagugucugg

SEQ ID NO: 61794 - RNA, 23 nt, Artificial Sequence
  Chemically synthesized
cauucuucaaaccagugucuggg

SEQ ID NO: 61795 - RNA, 23 nt, Artificial Sequence
  Chemically synthesized
auucuucaaaccagugucugggg

SEQ ID NO: 61796 - RNA, 23 nt, Artificial Sequence
  Chemically synthesized
uucuucaaaccagugucuggggu

SEQ ID NO: 61797 - RNA, 23 nt, Artificial Sequence
  Chemically synthesized
uguuuugaauugggugggaaucu

SEQ ID NO: 61798 - RNA, 23 nt, Artificial Sequence
  Chemically synthesized
aaauaacuugugcuacugaaauc

SEQ ID NO: 61799 - RNA, 23 nt, Artificial Sequence
  Chemically synthesized
aauaacuugugcuacugaaauca

SEQ ID NO: 61800 - RNA, 23 nt, Artificial Sequence
  Chemically synthesized
auaacuugugcuacugaaaucau

SEQ ID NO: 61801 - RNA, 23 nt, Artificial Sequence
  Chemically synthesized
uaacuugugcuacugaaaucauu

SEQ ID NO: 61802 - RNA, 23 nt, Artificial Sequence
  Chemically synthesized
aacuugugcuacugaaaucauuu

SEQ ID NO: 61803 - RNA, 23 nt, Artificial Sequence
  Chemically synthesized
acuugugcuacugaaaucauuuu

SEQ ID NO: 61804 - RNA, 23 nt, Artificial Sequence
  Chemically synthesized
guaguacagcgauucaaagaugu

SEQ ID NO: 61805 - RNA, 23 nt, Artificial Sequence
  Chemically synthesized
uaguacagcgauucaaagauguc

SEQ ID NO: 61806 - RNA, 23 nt, Artificial Sequence
  Chemically synthesized
aguacagcgauucaaagauguca

SEQ ID NO: 61807 - RNA, 23 nt, Artificial Sequence
  Chemically synthesized
guacagcgauucaaagaugucau

SEQ ID NO: 61808 - RNA, 23 nt, Artificial Sequence
  Chemically synthesized
uacagcgauucaaagaugucauu

SEQ ID NO: 61809 - RNA, 23 nt, Artificial Sequence
  Chemically synthesized
cgguacauacuccacagaauuua

SEQ ID NO: 61810 - RNA, 23 nt, Artificial Sequence
  Chemically synthesized
gguacauacuccacagaauuuag

SEQ ID NO: 61811 - RNA, 23 nt, Artificial Sequence
  Chemically synthesized
acauguaacuuuuggucacacuc

SEQ ID NO: 61812 - RNA, 23 nt, Artificial Sequence
  Chemically synthesized
caacaaauaaacuguccgaaaaa

SEQ ID NO: 61813 - RNA, 23 nt, Artificial Sequence
  Chemically synthesized
guagaaacaaaugcuuccaggug

SEQ ID NO: 61814 - RNA, 23 nt, Artificial Sequence
  Chemically synthesized
uagaaacaaaugcuuccagguga

SEQ ID NO: 61815 - RNA, 23 nt, Artificial Sequence
  Chemically synthesized
agaaacaaaugcuuccaggugaa

SEQ ID NO: 61816 - RNA, 23 nt, Artificial Sequence
  Chemically synthesized
gaaacaaaugcuuccaggugaaa

SEQ ID NO: 61817 - RNA, 23 nt, Artificial Sequence
  Chemically synthesized
aaacaaaugcuuccaggugaaaa

SEQ ID NO: 61818 - RNA, 23 nt, Artificial Sequence
  Chemically synthesized
ccacauuuccuaccuagaaauca

SEQ ID NO: 61819 - RNA, 23 nt, Artificial Sequence
  Chemically synthesized
uuuuaaaaaaucuggcuuguuac

SEQ ID NO: 61820 - RNA, 23 nt, Artificial Sequence
  Chemically synthesized
uuuaaaaaaucuggcuuguuaca

SEQ ID NO: 61821 - RNA, 23 nt, Artificial Sequence
  Chemically synthesized
uuaaaaaaucuggcuuguuacag

SEQ ID NO: 61822 - RNA, 23 nt, Artificial Sequence
  Chemically synthesized
uaaaaaaucuggcuuguuacagg

SEQ ID NO: 61823 - RNA, 23 nt, Artificial Sequence
  Chemically synthesized
aaaaaaucuggcuuguuacaggc

SEQ ID NO: 61824 - RNA, 23 nt, Artificial Sequence
  Chemically synthesized
uccugaacagugucauucgaauc

SEQ ID NO: 61825 - RNA, 23 nt, Artificial Sequence
  Chemically synthesized
gaagucacagaagaggcccuugu

SEQ ID NO: 61826 - RNA, 23 nt, Artificial Sequence
  Chemically synthesized
aagucacagaagaggcccuugug

SEQ ID NO: 61827 - RNA, 23 nt, Artificial Sequence
  Chemically synthesized
agucacagaagaggcccuugugc

SEQ ID NO: 61828 - RNA, 23 nt, Artificial Sequence
  Chemically synthesized
gucacagaagaggcccuugugcg

SEQ ID NO: 61829 - RNA, 23 nt, Artificial Sequence
  Chemically synthesized
ucacagaagaggcccuugugcgg

SEQ ID NO: 61830 - RNA, 23 nt, Artificial Sequence
  Chemically synthesized
ucucucacucucuggcuucaugc

SEQ ID NO: 61831 - RNA, 23 nt, Artificial Sequence
  Chemically synthesized
cucucacucucuggcuucaugcc

SEQ ID NO: 61832 - RNA, 23 nt, Artificial Sequence
  Chemically synthesized
ucucacucucuggcuucaugcca

SEQ ID NO: 61833 - RNA, 23 nt, Artificial Sequence
  Chemically synthesized
cucacucucuggcuucaugccau

SEQ ID NO: 61834 - RNA, 23 nt, Artificial Sequence
  Chemically synthesized
ucacucucuggcuucaugccaug

SEQ ID NO: 61835 - RNA, 23 nt, Artificial Sequence
  Chemically synthesized
cuggcuucaugccaugucuccgu

SEQ ID NO: 61836 - RNA, 23 nt, Artificial Sequence
  Chemically synthesized
uggcuucaugccaugucuccgua

SEQ ID NO: 61837 - RNA, 23 nt, Artificial Sequence
  Chemically synthesized
ggcuucaugccaugucuccguac

SEQ ID NO: 61838 - RNA, 23 nt, Artificial Sequence
  Chemically synthesized
gcuucaugccaugucuccguaca

SEQ ID NO: 61839 - RNA, 23 nt, Artificial Sequence
  Chemically synthesized
cuucaugccaugucuccguacau

SEQ ID NO: 61840 - RNA, 23 nt, Artificial Sequence
  Chemically synthesized
uauuuucaacuagaaaggugcaa

SEQ ID NO: 61841 - RNA, 23 nt, Artificial Sequence
  Chemically synthesized
auuuucaacuagaaaggugcaaa

SEQ ID NO: 61842 - RNA, 23 nt, Artificial Sequence
  Chemically synthesized
uuuucaacuagaaaggugcaaac

SEQ ID NO: 61843 - RNA, 23 nt, Artificial Sequence
  Chemically synthesized
uuucaacuagaaaggugcaaaca

SEQ ID NO: 61844 - RNA, 23 nt, Artificial Sequence
  Chemically synthesized
uucaacuagaaaggugcaaacau

SEQ ID NO: 61845 - RNA, 23 nt, Artificial Sequence
  Chemically synthesized
caacuagaaaggugcaaacaugu

SEQ ID NO: 61846 - RNA, 23 nt, Artificial Sequence
  Chemically synthesized
aacuagaaaggugcaaacaugua

SEQ ID NO: 61847 - RNA, 23 nt, Artificial Sequence
  Chemically synthesized
acuagaaaggugcaaacauguaa

SEQ ID NO: 61848 - RNA, 23 nt, Artificial Sequence
  Chemically synthesized
cuagaaaggugcaaacauguaac

SEQ ID NO: 61849 - RNA, 23 nt, Artificial Sequence
  Chemically synthesized
uagaaaggugcaaacauguaacu

SEQ ID NO: 61850 - RNA, 23 nt, Artificial Sequence
  Chemically synthesized
acuuuuggucacacucucaacaa

SEQ ID NO: 61851 - RNA, 23 nt, Artificial Sequence
  Chemically synthesized
cuuuuggucacacucucaacaaa

SEQ ID NO: 61852 - RNA, 23 nt, Artificial Sequence
  Chemically synthesized
uuuuggucacacucucaacaaau

SEQ ID NO: 61853 - RNA, 23 nt, Artificial Sequence
  Chemically synthesized
uuuggucacacucucaacaaaua

SEQ ID NO: 61854 - RNA, 23 nt, Artificial Sequence
  Chemically synthesized
aacaaauaaacuguccgaaaaac

SEQ ID NO: 61855 - RNA, 23 nt, Artificial Sequence
  Chemically synthesized
acagucauaucaaaguagaaaca

SEQ ID NO: 61856 - RNA, 23 nt, Artificial Sequence
  Chemically synthesized
cagucauaucaaaguagaaacaa

SEQ ID NO: 61857 - RNA, 23 nt, Artificial Sequence
  Chemically synthesized
agucauaucaaaguagaaacaaa

SEQ ID NO: 61858 - RNA, 23 nt, Artificial Sequence
  Chemically synthesized
gucauaucaaaguagaaacaaau

SEQ ID NO: 61859 - RNA, 23 nt, Artificial Sequence
  Chemically synthesized
cggacugucauucuaucugagca

SEQ ID NO: 61860 - RNA, 23 nt, Artificial Sequence
  Chemically synthesized
gcccuucuuaauguucucuucca

SEQ ID NO: 61861 - RNA, 23 nt, Artificial Sequence
  Chemically synthesized
cccuucuuaauguucucuuccag

SEQ ID NO: 61862 - RNA, 23 nt, Artificial Sequence
  Chemically synthesized
ccuucuuaauguucucuuccagg

SEQ ID NO: 61863 - RNA, 23 nt, Artificial Sequence
  Chemically synthesized
uaaguauccauuucaugcuuuga

SEQ ID NO: 61864 - RNA, 23 nt, Artificial Sequence
  Chemically synthesized
aaguauccauuucaugcuuugaa

SEQ ID NO: 61865 - RNA, 23 nt, Artificial Sequence
  Chemically synthesized
aguauccauuucaugcuuugaac

SEQ ID NO: 61866 - RNA, 23 nt, Artificial Sequence
  Chemically synthesized
guauccauuucaugcuuugaacg

SEQ ID NO: 61867 - RNA, 23 nt, Artificial Sequence
  Chemically synthesized
ggauuccgauuccugaacagugu

SEQ ID NO: 61868 - RNA, 23 nt, Artificial Sequence
  Chemically synthesized
gauuccgauuccugaacaguguc

SEQ ID NO: 61869 - RNA, 23 nt, Artificial Sequence
  Chemically synthesized
auuccgauuccugaacaguguca

SEQ ID NO: 61870 - RNA, 23 nt, Artificial Sequence
  Chemically synthesized
uuccgauuccugaacagugucau

SEQ ID NO: 61871 - RNA, 23 nt, Artificial Sequence
  Chemically synthesized
uccgauuccugaacagugucauu

SEQ ID NO: 61872 - RNA, 23 nt, Artificial Sequence
  Chemically synthesized
acuucaaauagcaggcauauuac

SEQ ID NO: 61873 - RNA, 23 nt, Artificial Sequence
  Chemically synthesized
cuucaaauagcaggcauauuacu

SEQ ID NO: 61874 - RNA, 23 nt, Artificial Sequence
  Chemically synthesized
guacaucuuccuguaguacagcg

SEQ ID NO: 61875 - RNA, 23 nt, Artificial Sequence
  Chemically synthesized
uacaucuuccuguaguacagcga

SEQ ID NO: 61876 - RNA, 23 nt, Artificial Sequence
  Chemically synthesized
acaucuuccuguaguacagcgau

SEQ ID NO: 61877 - RNA, 23 nt, Artificial Sequence
  Chemically synthesized
caucuuccuguaguacagcgauu

SEQ ID NO: 61878 - RNA, 23 nt, Artificial Sequence
  Chemically synthesized
aucuuccuguaguacagcgauuc

SEQ ID NO: 61879 - RNA, 23 nt, Artificial Sequence
  Chemically synthesized
uauccauuucaugcuuugaacga

SEQ ID NO: 61880 - RNA, 23 nt, Artificial Sequence
  Chemically synthesized
uguucucuuccaggucagcuucg

SEQ ID NO: 61881 - RNA, 23 nt, Artificial Sequence
  Chemically synthesized
guucucuuccaggucagcuucgc

SEQ ID NO: 61882 - RNA, 23 nt, Artificial Sequence
  Chemically synthesized
uucucuuccaggucagcuucgca

SEQ ID NO: 61883 - RNA, 23 nt, Artificial Sequence
  Chemically synthesized
uucagaaauugaggcuaacauug

SEQ ID NO: 61884 - RNA, 23 nt, Artificial Sequence
  Chemically synthesized
uugaggcuaacauugaaauauca

SEQ ID NO: 61885 - RNA, 23 nt, Artificial Sequence
  Chemically synthesized
acgaucagacaagcuuuacauuc

SEQ ID NO: 61886 - RNA, 23 nt, Artificial Sequence
  Chemically synthesized
agucacucaguuuuuaauaaagg

SEQ ID NO: 61887 - RNA, 23 nt, Artificial Sequence
  Chemically synthesized
gcagaauuuccauauaaguaucc

SEQ ID NO: 61888 - RNA, 23 nt, Artificial Sequence
  Chemically synthesized
cagaauuuccauauaaguaucca

SEQ ID NO: 61889 - RNA, 23 nt, Artificial Sequence
  Chemically synthesized
uuccacugucaagucuuaacauu

SEQ ID NO: 61890 - RNA, 23 nt, Artificial Sequence
  Chemically synthesized
cagauuuaaauaacuugugcuac

SEQ ID NO: 61891 - RNA, 23 nt, Artificial Sequence
  Chemically synthesized
ugugcuacugaaaucauuuuuac

SEQ ID NO: 61892 - RNA, 23 nt, Artificial Sequence
  Chemically synthesized
augccaugucuccguacaucuuc

SEQ ID NO: 61893 - RNA, 23 nt, Artificial Sequence
  Chemically synthesized
cuucucaauuacacuucaaauag

SEQ ID NO: 61894 - RNA, 23 nt, Artificial Sequence
  Chemically synthesized
uucaugccaugucuccguacauc

SEQ ID NO: 61895 - RNA, 23 nt, Artificial Sequence
  Chemically synthesized
uccauauaaguauccauuucaug

SEQ ID NO: 61896 - RNA, 23 nt, Artificial Sequence
  Chemically synthesized
uacauucuaccuaugguguucag

SEQ ID NO: 61897 - RNA, 23 nt, Artificial Sequence
  Chemically synthesized
acauucuaccuaugguguucaga

SEQ ID NO: 61898 - RNA, 23 nt, Artificial Sequence
  Chemically synthesized
uaacauucuucaaaccagugucu

SEQ ID NO: 61899 - RNA, 23 nt, Artificial Sequence
  Chemically synthesized
gaugcuaucugaugauacuaacc

SEQ ID NO: 61900 - RNA, 23 nt, Artificial Sequence
  Chemically synthesized
gugcuguguacuaauguaguucc

SEQ ID NO: 61901 - RNA, 23 nt, Artificial Sequence
  Chemically synthesized
cuuaacauucuucaaaccagugu

SEQ ID NO: 61902 - RNA, 23 nt, Artificial Sequence
  Chemically synthesized
aaugagaugugaaucaguucaag

SEQ ID NO: 61903 - RNA, 23 nt, Artificial Sequence
  Chemically synthesized
auggcaggcacaggucuugauga

SEQ ID NO: 61904 - RNA, 23 nt, Artificial Sequence
  Chemically synthesized
uuuauuuucaacuagaaaggugc

SEQ ID NO: 61905 - RNA, 23 nt, Artificial Sequence
  Chemically synthesized
uuugacauggcacaauguuuuga

SEQ ID NO: 61906 - RNA, 23 nt, Artificial Sequence
  Chemically synthesized
auucuggugcuguguacuaaugu

SEQ ID NO: 61907 - RNA, 23 nt, Artificial Sequence
  Chemically synthesized
agaugugaaucaguucaaguucc

SEQ ID NO: 61908 - RNA, 23 nt, Artificial Sequence
  Chemically synthesized
uaaugaguuaaugucucucacuc

SEQ ID NO: 61909 - RNA, 23 nt, Artificial Sequence
  Chemically synthesized
cuuuauuuucaacuagaaaggug

SEQ ID NO: 61910 - RNA, 23 nt, Artificial Sequence
  Chemically synthesized
uuauuuucaacuagaaaggugca

SEQ ID NO: 61911 - RNA, 23 nt, Artificial Sequence
  Chemically synthesized
uaaaagugaggcuaccacauuuc

SEQ ID NO: 61912 - RNA, 23 nt, Artificial Sequence
  Chemically synthesized
uuugcaaacaaucuguuuugacg

SEQ ID NO: 61913 - RNA, 23 nt, Artificial Sequence
  Chemically synthesized
uucuggugcuguguacuaaugua

SEQ ID NO: 61914 - RNA, 23 nt, Artificial Sequence
  Chemically synthesized
uuaacauucuucaaaccaguguc

SEQ ID NO: 61915 - RNA, 23 nt, Artificial Sequence
  Chemically synthesized
aaaagugaggcuaccacauuucc

SEQ ID NO: 61916 - RNA, 23 nt, Artificial Sequence
  Chemically synthesized
auuuguuugacauggcacaaugu

SEQ ID NO: 61917 - RNA, 23 nt, Artificial Sequence
  Chemically synthesized
auggcacaauguuuugaauuggg

SEQ ID NO: 61918 - RNA, 23 nt, Artificial Sequence
  Chemically synthesized
augagaugugaaucaguucaagu

SEQ ID NO: 61919 - RNA, 23 nt, Artificial Sequence
  Chemically synthesized
ucuuccuguaguacagcgauuca

SEQ ID NO: 61920 - RNA, 23 nt, Artificial Sequence
  Chemically synthesized
cauuuguucauuaaaagugaggc

SEQ ID NO: 61921 - RNA, 23 nt, Artificial Sequence
  Chemically synthesized
uuacauucuaccuaugguguuca

SEQ ID NO: 61922 - RNA, 23 nt, Artificial Sequence
  Chemically synthesized
uuguuacaggcaaauucacuugc

SEQ ID NO: 61923 - RNA, 23 nt, Artificial Sequence
  Chemically synthesized
agugucauucgaaucagaauguc

SEQ ID NO: 61924 - RNA, 23 nt, Artificial Sequence
  Chemically synthesized
ccuaaagccacaccuuaauauac

SEQ ID NO: 61925 - RNA, 23 nt, Artificial Sequence
  Chemically synthesized
aaugaguuaaugucucucacucu

SEQ ID NO: 61926 - RNA, 23 nt, Artificial Sequence
  Chemically synthesized
acaucauguucuucuucaugacc

SEQ ID NO: 61927 - RNA, 23 nt, Artificial Sequence
  Chemically synthesized
caguuuuuaauaaaggccauuug

SEQ ID NO: 61928 - RNA, 23 nt, Artificial Sequence
  Chemically synthesized
auuuguucauuaaaagugaggcu

SEQ ID NO: 61929 - RNA, 23 nt, Artificial Sequence
  Chemically synthesized
aaagugaggcuaccacauuuccu

SEQ ID NO: 61930 - RNA, 23 nt, Artificial Sequence
  Chemically synthesized
cuuugcaaacaaucuguuuugac

SEQ ID NO: 61931 - RNA, 23 nt, Artificial Sequence
  Chemically synthesized
gaguacggaugcacuuuuugccc

SEQ ID NO: 61932 - RNA, 23 nt, Artificial Sequence
  Chemically synthesized
aauucacuugccacaagcugucc

SEQ ID NO: 61933 - RNA, 23 nt, Artificial Sequence
  Chemically synthesized
auucacuugccacaagcugucca

SEQ ID NO: 61934 - RNA, 23 nt, Artificial Sequence
  Chemically synthesized
cuaaucgacaggauuccgauucc

SEQ ID NO: 61935 - RNA, 23 nt, Artificial Sequence
  Chemically synthesized
acuuaaggaacaacuugacucag

SEQ ID NO: 61936 - RNA, 23 nt, Artificial Sequence
  Chemically synthesized
aacuugacucagucucuugaugg

SEQ ID NO: 61937 - RNA, 23 nt, Artificial Sequence
  Chemically synthesized
augugaaucaguucaaguuccag

SEQ ID NO: 61938 - RNA, 23 nt, Artificial Sequence
  Chemically synthesized
cuaaugaguuaaugucucucacu

SEQ ID NO: 61939 - RNA, 23 nt, Artificial Sequence
  Chemically synthesized
cuccguacaucuuccuguaguac

SEQ ID NO: 61940 - RNA, 23 nt, Artificial Sequence
  Chemically synthesized
aaagaugucauugucuccgggac

SEQ ID NO: 61941 - RNA, 23 nt, Artificial Sequence
  Chemically synthesized
uuguucauuaaaagugaggcuac

SEQ ID NO: 61942 - RNA, 23 nt, Artificial Sequence
  Chemically synthesized
auuuugggaguacggaugcacuu

SEQ ID NO: 61943 - RNA, 23 nt, Artificial Sequence
  Chemically synthesized
uuacaggcaaauucacuugccac

SEQ ID NO: 61944 - RNA, 23 nt, Artificial Sequence
  Chemically synthesized
cagucuaaucgacaggauuccga

SEQ ID NO: 61945 - RNA, 23 nt, Artificial Sequence
  Chemically synthesized
guucugacuuaaggaacaacuug

SEQ ID NO: 61946 - RNA, 23 nt, Artificial Sequence
  Chemically synthesized
augcuaucugaugauacuaaccu

SEQ ID NO: 61947 - RNA, 23 nt, Artificial Sequence
  Chemically synthesized
aaggugcaaacauguaacuuuug

SEQ ID NO: 61948 - RNA, 23 nt, Artificial Sequence
  Chemically synthesized
uguuacaggcaaauucacuugcc

SEQ ID NO: 61949 - RNA, 23 nt, Artificial Sequence
  Chemically synthesized
gugucauucgaaucagaauguca

SEQ ID NO: 61950 - RNA, 23 nt, Artificial Sequence
  Chemically synthesized
guugauagacuauuuguuugaca

SEQ ID NO: 61951 - RNA, 23 nt, Artificial Sequence
  Chemically synthesized
uugucauugguaacccgggugga

SEQ ID NO: 61952 - RNA, 23 nt, Artificial Sequence
  Chemically synthesized
uuuguuugacauggcacaauguu

SEQ ID NO: 61953 - RNA, 23 nt, Artificial Sequence
  Chemically synthesized
auaguugggucugggccaaacgu

SEQ ID NO: 61954 - RNA, 23 nt, Artificial Sequence
  Chemically synthesized
ucgguaugucuucaugcuggugc

SEQ ID NO: 61955 - RNA, 23 nt, Artificial Sequence
  Chemically synthesized
auaaacuguccgaaaaacaguca

SEQ ID NO: 61956 - RNA, 23 nt, Artificial Sequence
  Chemically synthesized
uuugacggacugucauucuaucu

SEQ ID NO: 61957 - RNA, 23 nt, Artificial Sequence
  Chemically synthesized
cauuucaugcuuugaacgaucag

SEQ ID NO: 61958 - RNA, 23 nt, Artificial Sequence
  Chemically synthesized
auuucaugcuuugaacgaucaga

SEQ ID NO: 61959 - RNA, 23 nt, Artificial Sequence
  Chemically synthesized
uaaucgacaggauuccgauuccu

SEQ ID NO: 61960 - RNA, 23 nt, Artificial Sequence
  Chemically synthesized
ugacuuaaggaacaacuugacuc

SEQ ID NO: 61961 - RNA, 23 nt, Artificial Sequence
  Chemically synthesized
acuugacucagucucuugauggc

SEQ ID NO: 61962 - RNA, 23 nt, Artificial Sequence
  Chemically synthesized
aagaugcuaucugaugauacuaa

SEQ ID NO: 61963 - RNA, 23 nt, Artificial Sequence
  Chemically synthesized
gauacuaaccuuucugcugguac

SEQ ID NO: 61964 - RNA, 23 nt, Artificial Sequence
  Chemically synthesized
ugcuguguacuaauguaguucca

SEQ ID NO: 61965 - RNA, 23 nt, Artificial Sequence
  Chemically synthesized
uuugaauugggugggaaucuuuu

SEQ ID NO: 61966 - RNA, 23 nt, Artificial Sequence
  Chemically synthesized
ucuaaugaguuaaugucucucac

SEQ ID NO: 61967 - RNA, 23 nt, Artificial Sequence
  Chemically synthesized
acaggucuugaugaacaucaugu

SEQ ID NO: 61968 - RNA, 23 nt, Artificial Sequence
  Chemically synthesized
ucuugaugaacaucauguucuuc

SEQ ID NO: 61969 - RNA, 23 nt, Artificial Sequence
  Chemically synthesized
cuugaugaacaucauguucuucu

SEQ ID NO: 61970 - RNA, 23 nt, Artificial Sequence
  Chemically synthesized
ugaugaacaucauguucuucuuc

SEQ ID NO: 61971 - RNA, 23 nt, Artificial Sequence
  Chemically synthesized
agcucgguaugucuucaugcugg

SEQ ID NO: 61972 - RNA, 23 nt, Artificial Sequence
  Chemically synthesized
ugcagccagaaagcucaaacuug

SEQ ID NO: 61973 - RNA, 23 nt, Artificial Sequence
  Chemically synthesized
agaaaucagccugccaaggacac

SEQ ID NO: 61974 - RNA, 23 nt, Artificial Sequence
  Chemically synthesized
aaaucagccugccaaggacacug

SEQ ID NO: 61975 - RNA, 23 nt, Artificial Sequence
  Chemically synthesized
uugcaaacaaucuguuuugacgg

SEQ ID NO: 61976 - RNA, 23 nt, Artificial Sequence
  Chemically synthesized
cauucuaucugagcagaauuucc

SEQ ID NO: 61977 - RNA, 23 nt, Artificial Sequence
  Chemically synthesized
aguacggaugcacuuuuugcccu

SEQ ID NO: 61978 - RNA, 23 nt, Artificial Sequence
  Chemically synthesized
aaaaucuggcuuguuacaggcaa

SEQ ID NO: 61979 - RNA, 23 nt, Artificial Sequence
  Chemically synthesized
uggcuuguuacaggcaaauucac

SEQ ID NO: 61980 - RNA, 23 nt, Artificial Sequence
  Chemically synthesized
aaauucacuugccacaagcuguc

SEQ ID NO: 61981 - RNA, 23 nt, Artificial Sequence
  Chemically synthesized
aagcuguccagucuaaucgacag

SEQ ID NO: 61982 - RNA, 23 nt, Artificial Sequence
  Chemically synthesized
aucgacaggauuccgauuccuga

SEQ ID NO: 61983 - RNA, 23 nt, Artificial Sequence
  Chemically synthesized
gcaaaaugaaagagaacaugaaa

SEQ ID NO: 61984 - RNA, 23 nt, Artificial Sequence
  Chemically synthesized
agcaaaaugaaagagaacaugaa

SEQ ID NO: 61985 - RNA, 23 nt, Artificial Sequence
  Chemically synthesized
uagcaaaaugaaagagaacauga

SEQ ID NO: 61986 - RNA, 23 nt, Artificial Sequence
  Chemically synthesized
auagcaaaaugaaagagaacaug

SEQ ID NO: 61987 - RNA, 23 nt, Artificial Sequence
  Chemically synthesized
uauagcaaaaugaaagagaacau

SEQ ID NO: 61988 - RNA, 23 nt, Artificial Sequence
  Chemically synthesized
ccaaguaaguccaacgaaagcca

SEQ ID NO: 61989 - RNA, 23 nt, Artificial Sequence
  Chemically synthesized
uccaaguaaguccaacgaaagcc

SEQ ID NO: 61990 - RNA, 23 nt, Artificial Sequence
  Chemically synthesized
uuccaaguaaguccaacgaaagc

SEQ ID NO: 61991 - RNA, 23 nt, Artificial Sequence
  Chemically synthesized
cuuccaaguaaguccaacgaaag

SEQ ID NO: 61992 - RNA, 23 nt, Artificial Sequence
  Chemically synthesized
ccuuccaaguaaguccaacgaaa

SEQ ID NO: 61993 - RNA, 23 nt, Artificial Sequence
  Chemically synthesized
gcaaacuaucacuguauuuuaau

SEQ ID NO: 61994 - RNA, 23 nt, Artificial Sequence
  Chemically synthesized
ugcaaacuaucacuguauuuuaa

SEQ ID NO: 61995 - RNA, 23 nt, Artificial Sequence
  Chemically synthesized
augcaaacuaucacuguauuuua

SEQ ID NO: 61996 - RNA, 23 nt, Artificial Sequence
  Chemically synthesized
aaugcaaacuaucacuguauuuu

SEQ ID NO: 61997 - RNA, 23 nt, Artificial Sequence
  Chemically synthesized
aaaugcaaacuaucacuguauuu

SEQ ID NO: 61998 - RNA, 23 nt, Artificial Sequence
  Chemically synthesized
cuaaaagcuucaggguuaugucu

SEQ ID NO: 61999 - RNA, 23 nt, Artificial Sequence
  Chemically synthesized
acuaaaagcuucaggguuauguc

SEQ ID NO: 62000 - RNA, 23 nt, Artificial Sequence
  Chemically synthesized
aacuaaaagcuucaggguuaugu

SEQ ID NO: 62001 - RNA, 23 nt, Artificial Sequence
  Chemically synthesized
aaacuaaaagcuucaggguuaug

SEQ ID NO: 62002 - RNA, 23 nt, Artificial Sequence
  Chemically synthesized
uaaacuaaaagcuucaggguuau

SEQ ID NO: 62003 - RNA, 23 nt, Artificial Sequence
  Chemically synthesized
agaagauaaacaccugaaauuuc

SEQ ID NO: 62004 - RNA, 23 nt, Artificial Sequence
  Chemically synthesized
aagaagauaaacaccugaaauuu

SEQ ID NO: 62005 - RNA, 23 nt, Artificial Sequence
  Chemically synthesized
gaagaagauaaacaccugaaauu

SEQ ID NO: 62006 - RNA, 23 nt, Artificial Sequence
  Chemically synthesized
ggaagaagauaaacaccugaaau

SEQ ID NO: 62007 - RNA, 23 nt, Artificial Sequence
  Chemically synthesized
aggaagaagauaaacaccugaaa

SEQ ID NO: 62008 - RNA, 23 nt, Artificial Sequence
  Chemically synthesized
caccugaaauuucguauuucuca

SEQ ID NO: 62009 - RNA, 23 nt, Artificial Sequence
  Chemically synthesized
acaccugaaauuucguauuucuc

SEQ ID NO: 62010 - RNA, 23 nt, Artificial Sequence
  Chemically synthesized
aacaccugaaauuucguauuucu

SEQ ID NO: 62011 - RNA, 23 nt, Artificial Sequence
  Chemically synthesized
aaacaccugaaauuucguauuuc

SEQ ID NO: 62012 - RNA, 23 nt, Artificial Sequence
  Chemically synthesized
uaaacaccugaaauuucguauuu

SEQ ID NO: 62013 - RNA, 23 nt, Artificial Sequence
  Chemically synthesized
auaaacaccugaaauuucguauu

SEQ ID NO: 62014 - RNA, 23 nt, Artificial Sequence
  Chemically synthesized
cgacucugaugauguagaugaca

SEQ ID NO: 62015 - RNA, 23 nt, Artificial Sequence
  Chemically synthesized
acgacucugaugauguagaugac

SEQ ID NO: 62016 - RNA, 23 nt, Artificial Sequence
  Chemically synthesized
aacgacucugaugauguagauga

SEQ ID NO: 62017 - RNA, 23 nt, Artificial Sequence
  Chemically synthesized
gaacgacucugaugauguagaug

SEQ ID NO: 62018 - RNA, 23 nt, Artificial Sequence
  Chemically synthesized
cgaacgacucugaugauguagau

SEQ ID NO: 62019 - RNA, 23 nt, Artificial Sequence
  Chemically synthesized
guccagcaauuaauaaaacauaa

SEQ ID NO: 62020 - RNA, 23 nt, Artificial Sequence
  Chemically synthesized
uguccagcaauuaauaaaacaua

SEQ ID NO: 62021 - RNA, 23 nt, Artificial Sequence
  Chemically synthesized
uuguccagcaauuaauaaaacau

SEQ ID NO: 62022 - RNA, 23 nt, Artificial Sequence
  Chemically synthesized
guuguccagcaauuaauaaaaca

SEQ ID NO: 62023 - RNA, 23 nt, Artificial Sequence
  Chemically synthesized
gguuguccagcaauuaauaaaac

SEQ ID NO: 62024 - RNA, 23 nt, Artificial Sequence
  Chemically synthesized
uggugucaauugcuuauuuguuu

SEQ ID NO: 62025 - RNA, 23 nt, Artificial Sequence
  Chemically synthesized
guggugucaauugcuuauuuguu

SEQ ID NO: 62026 - RNA, 23 nt, Artificial Sequence
  Chemically synthesized
gguggugucaauugcuuauuugu

SEQ ID NO: 62027 - RNA, 23 nt, Artificial Sequence
  Chemically synthesized
ugguggugucaauugcuuauuug

SEQ ID NO: 62028 - RNA, 23 nt, Artificial Sequence
  Chemically synthesized
uugguggugucaauugcuuauuu

SEQ ID NO: 62029 - RNA, 23 nt, Artificial Sequence
  Chemically synthesized
guaaacuaaaagcuucaggguua

SEQ ID NO: 62030 - RNA, 23 nt, Artificial Sequence
  Chemically synthesized
gaaacucccuguaaacuaaaagc

SEQ ID NO: 62031 - RNA, 23 nt, Artificial Sequence
  Chemically synthesized
ggaaacucccuguaaacuaaaag

SEQ ID NO: 62032 - RNA, 23 nt, Artificial Sequence
  Chemically synthesized
uggaaacucccuguaaacuaaaa

SEQ ID NO: 62033 - RNA, 23 nt, Artificial Sequence
  Chemically synthesized
auggaaacucccuguaaacuaaa

SEQ ID NO: 62034 - RNA, 23 nt, Artificial Sequence
  Chemically synthesized
cauggaaacucccuguaaacuaa

SEQ ID NO: 62035 - RNA, 23 nt, Artificial Sequence
  Chemically synthesized
ucauggaaacucccuguaaacua

SEQ ID NO: 62036 - RNA, 23 nt, Artificial Sequence
  Chemically synthesized
gguugaauguguaucuauuugag

SEQ ID NO: 62037 - RNA, 23 nt, Artificial Sequence
  Chemically synthesized
ugguugaauguguaucuauuuga

SEQ ID NO: 62038 - RNA, 23 nt, Artificial Sequence
  Chemically synthesized
uugguugaauguguaucuauuug

SEQ ID NO: 62039 - RNA, 23 nt, Artificial Sequence
  Chemically synthesized
auugguugaauguguaucuauuu

SEQ ID NO: 62040 - RNA, 23 nt, Artificial Sequence
  Chemically synthesized
uauugguugaauguguaucuauu

SEQ ID NO: 62041 - RNA, 23 nt, Artificial Sequence
  Chemically synthesized
gaagauaaacaccugaaauuucg

SEQ ID NO: 62042 - RNA, 23 nt, Artificial Sequence
  Chemically synthesized
aaggaagaagauaaacaccugaa

SEQ ID NO: 62043 - RNA, 23 nt, Artificial Sequence
  Chemically synthesized
uaaggaagaagauaaacaccuga

SEQ ID NO: 62044 - RNA, 23 nt, Artificial Sequence
  Chemically synthesized
guaaggaagaagauaaacaccug

SEQ ID NO: 62045 - RNA, 23 nt, Artificial Sequence
  Chemically synthesized
ccaaaaguaaggaagaagauaaa

SEQ ID NO: 62046 - RNA, 23 nt, Artificial Sequence
  Chemically synthesized
cccaaaaguaaggaagaagauaa

SEQ ID NO: 62047 - RNA, 23 nt, Artificial Sequence
  Chemically synthesized
ccccaaaaguaaggaagaagaua

SEQ ID NO: 62048 - RNA, 23 nt, Artificial Sequence
  Chemically synthesized
accccaaaaguaaggaagaagau

SEQ ID NO: 62049 - RNA, 23 nt, Artificial Sequence
  Chemically synthesized
gaccccaaaaguaaggaagaaga

SEQ ID NO: 62050 - RNA, 23 nt, Artificial Sequence
  Chemically synthesized
ccaaugaugagagcaaugagcau

SEQ ID NO: 62051 - RNA, 23 nt, Artificial Sequence
  Chemically synthesized
gccaaugaugagagcaaugagca

SEQ ID NO: 62052 - RNA, 23 nt, Artificial Sequence
  Chemically synthesized
agccaaugaugagagcaaugagc

SEQ ID NO: 62053 - RNA, 23 nt, Artificial Sequence
  Chemically synthesized
aagccaaugaugagagcaaugag

SEQ ID NO: 62054 - RNA, 23 nt, Artificial Sequence
  Chemically synthesized
aaagccaaugaugagagcaauga

SEQ ID NO: 62055 - RNA, 23 nt, Artificial Sequence
  Chemically synthesized
ugauguagaugacacugaugauu

SEQ ID NO: 62056 - RNA, 23 nt, Artificial Sequence
  Chemically synthesized
augauguagaugacacugaugau

SEQ ID NO: 62057 - RNA, 23 nt, Artificial Sequence
  Chemically synthesized
gaugauguagaugacacugauga

SEQ ID NO: 62058 - RNA, 23 nt, Artificial Sequence
  Chemically synthesized
ugaugauguagaugacacugaug

SEQ ID NO: 62059 - RNA, 23 nt, Artificial Sequence
  Chemically synthesized
cugaugauguagaugacacugau

SEQ ID NO: 62060 - RNA, 23 nt, Artificial Sequence
  Chemically synthesized
agaauuugguggugucaauugcu

SEQ ID NO: 62061 - RNA, 23 nt, Artificial Sequence
  Chemically synthesized
aagaauuugguggugucaauugc

SEQ ID NO: 62062 - RNA, 23 nt, Artificial Sequence
  Chemically synthesized
uaagaauuugguggugucaauug

SEQ ID NO: 62063 - RNA, 23 nt, Artificial Sequence
  Chemically synthesized
auaagaauuugguggugucaauu

SEQ ID NO: 62064 - RNA, 23 nt, Artificial Sequence
  Chemically synthesized
aauaagaauuugguggugucaau

SEQ ID NO: 62065 - RNA, 23 nt, Artificial Sequence
  Chemically synthesized
ucccuguaaacuaaaagcuucag

SEQ ID NO: 62066 - RNA, 23 nt, Artificial Sequence
  Chemically synthesized
cucccuguaaacuaaaagcuuca

SEQ ID NO: 62067 - RNA, 23 nt, Artificial Sequence
  Chemically synthesized
acucccuguaaacuaaaagcuuc

SEQ ID NO: 62068 - RNA, 23 nt, Artificial Sequence
  Chemically synthesized
aacucccuguaaacuaaaagcuu

SEQ ID NO: 62069 - RNA, 23 nt, Artificial Sequence
  Chemically synthesized
aaacucccuguaaacuaaaagcu

SEQ ID NO: 62070 - RNA, 23 nt, Artificial Sequence
  Chemically synthesized
gcauuccgaugugauugauaguc

SEQ ID NO: 62071 - RNA, 23 nt, Artificial Sequence
  Chemically synthesized
agcauuccgaugugauugauagu

SEQ ID NO: 62072 - RNA, 23 nt, Artificial Sequence
  Chemically synthesized
gagcauuccgaugugauugauag

SEQ ID NO: 62073 - RNA, 23 nt, Artificial Sequence
  Chemically synthesized
ugagcauuccgaugugauugaua

SEQ ID NO: 62074 - RNA, 23 nt, Artificial Sequence
  Chemically synthesized
augagcauuccgaugugauugau

SEQ ID NO: 62075 - RNA, 23 nt, Artificial Sequence
  Chemically synthesized
ccagauuauauaagcggaaagcc

SEQ ID NO: 62076 - RNA, 23 nt, Artificial Sequence
  Chemically synthesized
uccagauuauauaagcggaaagc

SEQ ID NO: 62077 - RNA, 23 nt, Artificial Sequence
  Chemically synthesized
guccagauuauauaagcggaaag

SEQ ID NO: 62078 - RNA, 23 nt, Artificial Sequence
  Chemically synthesized
aguccagauuauauaagcggaaa

SEQ ID NO: 62079 - RNA, 23 nt, Artificial Sequence
  Chemically synthesized
caguccagauuauauaagcggaa

SEQ ID NO: 62080 - RNA, 23 nt, Artificial Sequence
  Chemically synthesized
ccaugagaauugcagugauuugc

SEQ ID NO: 62081 - RNA, 23 nt, Artificial Sequence
  Chemically synthesized
accaugagaauugcagugauuug

SEQ ID NO: 62082 - RNA, 23 nt, Artificial Sequence
  Chemically synthesized
uaccaugagaauugcagugauuu

SEQ ID NO: 62083 - RNA, 23 nt, Artificial Sequence
  Chemically synthesized
cuaccaugagaauugcagugauu

SEQ ID NO: 62084 - RNA, 23 nt, Artificial Sequence
  Chemically synthesized
acuaccaugagaauugcagugau

SEQ ID NO: 62085 - RNA, 23 nt, Artificial Sequence
  Chemically synthesized
ugaugaaucugaugaacugguca

SEQ ID NO: 62086 - RNA, 23 nt, Artificial Sequence
  Chemically synthesized
cugaugaaucugaugaacugguc

SEQ ID NO: 62087 - RNA, 23 nt, Artificial Sequence
  Chemically synthesized
ucugaugaaucugaugaacuggu

SEQ ID NO: 62088 - RNA, 23 nt, Artificial Sequence
  Chemically synthesized
uucugaugaaucugaugaacugg

SEQ ID NO: 62089 - RNA, 23 nt, Artificial Sequence
  Chemically synthesized
auucugaugaaucugaugaacug

SEQ ID NO: 62090 - RNA, 23 nt, Artificial Sequence
  Chemically synthesized
ggaugauauggaugaugaagaug

SEQ ID NO: 62091 - RNA, 23 nt, Artificial Sequence
  Chemically synthesized
uggaugauauggaugaugaagau

SEQ ID NO: 62092 - RNA, 23 nt, Artificial Sequence
  Chemically synthesized
auggaugauauggaugaugaaga

SEQ ID NO: 62093 - RNA, 23 nt, Artificial Sequence
  Chemically synthesized
cauggaugauauggaugaugaag

SEQ ID NO: 62094 - RNA, 23 nt, Artificial Sequence
  Chemically synthesized
acauggaugauauggaugaugaa

SEQ ID NO: 62095 - RNA, 23 nt, Artificial Sequence
  Chemically synthesized
gcagcagcauuuaaauucuggga

SEQ ID NO: 62096 - RNA, 23 nt, Artificial Sequence
  Chemically synthesized
ugcagcagcauuuaaauucuggg

SEQ ID NO: 62097 - RNA, 23 nt, Artificial Sequence
  Chemically synthesized
cugcagcagcauuuaaauucugg

SEQ ID NO: 62098 - RNA, 23 nt, Artificial Sequence
  Chemically synthesized
ucugcagcagcauuuaaauucug

SEQ ID NO: 62099 - RNA, 23 nt, Artificial Sequence
  Chemically synthesized
gucugcagcagcauuuaaauucu

SEQ ID NO: 62100 - RNA, 23 nt, Artificial Sequence
  Chemically synthesized
ugccauaccaguuaaacaggcug

SEQ ID NO: 62101 - RNA, 23 nt, Artificial Sequence
  Chemically synthesized
gugccauaccaguuaaacaggcu

SEQ ID NO: 62102 - RNA, 23 nt, Artificial Sequence
  Chemically synthesized
ugugccauaccaguuaaacaggc

SEQ ID NO: 62103 - RNA, 23 nt, Artificial Sequence
  Chemically synthesized
cugugccauaccaguuaaacagg

SEQ ID NO: 62104 - RNA, 23 nt, Artificial Sequence
  Chemically synthesized
ccugugccauaccaguuaaacag

SEQ ID NO: 62105 - RNA, 23 nt, Artificial Sequence
  Chemically synthesized
ucaggguuaugucuauguucauu

SEQ ID NO: 62106 - RNA, 23 nt, Artificial Sequence
  Chemically synthesized
uucaggguuaugucuauguucau

SEQ ID NO: 62107 - RNA, 23 nt, Artificial Sequence
  Chemically synthesized
cuucaggguuaugucuauguuca

SEQ ID NO: 62108 - RNA, 23 nt, Artificial Sequence
  Chemically synthesized
gcuucaggguuaugucuauguuc

SEQ ID NO: 62109 - RNA, 23 nt, Artificial Sequence
  Chemically synthesized
agcuucaggguuaugucuauguu

SEQ ID NO: 62110 - RNA, 23 nt, Artificial Sequence
  Chemically synthesized
aagcuucaggguuaugucuaugu

SEQ ID NO: 62111 - RNA, 23 nt, Artificial Sequence
  Chemically synthesized
aaagcuucaggguuaugucuaug

SEQ ID NO: 62112 - RNA, 23 nt, Artificial Sequence
  Chemically synthesized
aaaagcuucaggguuaugucuau

SEQ ID NO: 62113 - RNA, 23 nt, Artificial Sequence
  Chemically synthesized
ggucaaaaucuaagaaguuucgc

SEQ ID NO: 62114 - RNA, 23 nt, Artificial Sequence
  Chemically synthesized
aggucaaaaucuaagaaguuucg

SEQ ID NO: 62115 - RNA, 23 nt, Artificial Sequence
  Chemically synthesized
gaggucaaaaucuaagaaguuuc

SEQ ID NO: 62116 - RNA, 23 nt, Artificial Sequence
  Chemically synthesized
ugaggucaaaaucuaagaaguuu

SEQ ID NO: 62117 - RNA, 23 nt, Artificial Sequence
  Chemically synthesized
cugaggucaaaaucuaagaaguu

SEQ ID NO: 62118 - RNA, 23 nt, Artificial Sequence
  Chemically synthesized
ugaaucugaugaacuggucacug

SEQ ID NO: 62119 - RNA, 23 nt, Artificial Sequence
  Chemically synthesized
augaaucugaugaacuggucacu

SEQ ID NO: 62120 - RNA, 23 nt, Artificial Sequence
  Chemically synthesized
gaugaaucugaugaacuggucac

SEQ ID NO: 62121 - RNA, 23 nt, Artificial Sequence
  Chemically synthesized
uuugguggugucaauugcuuauu

SEQ ID NO: 62122 - RNA, 23 nt, Artificial Sequence
  Chemically synthesized
cccacuuaaaaagagaauauaac

SEQ ID NO: 62123 - RNA, 23 nt, Artificial Sequence
  Chemically synthesized
acccacuuaaaaagagaauauaa

SEQ ID NO: 62124 - RNA, 23 nt, Artificial Sequence
  Chemically synthesized
uacccacuuaaaaagagaauaua

SEQ ID NO: 62125 - RNA, 23 nt, Artificial Sequence
  Chemically synthesized
uuacccacuuaaaaagagaauau

SEQ ID NO: 62126 - RNA, 23 nt, Artificial Sequence
  Chemically synthesized
uuuacccacuuaaaaagagaaua

SEQ ID NO: 62127 - RNA, 23 nt, Artificial Sequence
  Chemically synthesized
gaagaaaugcaaacuaucacugu

SEQ ID NO: 62128 - RNA, 23 nt, Artificial Sequence
  Chemically synthesized
agaagaaaugcaaacuaucacug

SEQ ID NO: 62129 - RNA, 23 nt, Artificial Sequence
  Chemically synthesized
uagaagaaaugcaaacuaucacu

SEQ ID NO: 62130 - RNA, 23 nt, Artificial Sequence
  Chemically synthesized
auagaagaaaugcaaacuaucac

SEQ ID NO: 62131 - RNA, 23 nt, Artificial Sequence
  Chemically synthesized
uauagaagaaaugcaaacuauca

SEQ ID NO: 62132 - RNA, 23 nt, Artificial Sequence
  Chemically synthesized
ggguuaugucuauguucauucua

SEQ ID NO: 62133 - RNA, 23 nt, Artificial Sequence
  Chemically synthesized
aggguuaugucuauguucauucu

SEQ ID NO: 62134 - RNA, 23 nt, Artificial Sequence
  Chemically synthesized
caggguuaugucuauguucauuc

SEQ ID NO: 62135 - RNA, 23 nt, Artificial Sequence
  Chemically synthesized
cuauuugagucuggaaauaacua

SEQ ID NO: 62136 - RNA, 23 nt, Artificial Sequence
  Chemically synthesized
ucuauuugagucuggaaauaacu

SEQ ID NO: 62137 - RNA, 23 nt, Artificial Sequence
  Chemically synthesized
aucuauuugagucuggaaauaac

SEQ ID NO: 62138 - RNA, 23 nt, Artificial Sequence
  Chemically synthesized
uaucuauuugagucuggaaauaa

SEQ ID NO: 62139 - RNA, 23 nt, Artificial Sequence
  Chemically synthesized
guaucuauuugagucuggaaaua

SEQ ID NO: 62140 - RNA, 23 nt, Artificial Sequence
  Chemically synthesized
uuauagcaaaaugaaagagaaca

SEQ ID NO: 62141 - RNA, 23 nt, Artificial Sequence
  Chemically synthesized
gcaucuucugaggucaauuaaaa

SEQ ID NO: 62142 - RNA, 23 nt, Artificial Sequence
  Chemically synthesized
ugcaucuucugaggucaauuaaa

SEQ ID NO: 62143 - RNA, 23 nt, Artificial Sequence
  Chemically synthesized
gugcaucuucugaggucaauuaa

SEQ ID NO: 62144 - RNA, 23 nt, Artificial Sequence
  Chemically synthesized
agugcaucuucugaggucaauua

SEQ ID NO: 62145 - RNA, 23 nt, Artificial Sequence
  Chemically synthesized
uagugcaucuucugaggucaauu

SEQ ID NO: 62146 - RNA, 23 nt, Artificial Sequence
  Chemically synthesized
auagugcaucuucugaggucaau

SEQ ID NO: 62147 - RNA, 23 nt, Artificial Sequence
  Chemically synthesized
ccgaugugauugauagucaggaa

SEQ ID NO: 62148 - RNA, 23 nt, Artificial Sequence
  Chemically synthesized
uccgaugugauugauagucagga

SEQ ID NO: 62149 - RNA, 23 nt, Artificial Sequence
  Chemically synthesized
uuccgaugugauugauagucagg

SEQ ID NO: 62150 - RNA, 23 nt, Artificial Sequence
  Chemically synthesized
auuccgaugugauugauagucag

SEQ ID NO: 62151 - RNA, 23 nt, Artificial Sequence
  Chemically synthesized
cauuccgaugugauugauaguca

SEQ ID NO: 62152 - RNA, 23 nt, Artificial Sequence
  Chemically synthesized
ggaaagccaaugaugagagcaau

SEQ ID NO: 62153 - RNA, 23 nt, Artificial Sequence
  Chemically synthesized
cggaaagccaaugaugagagcaa

SEQ ID NO: 62154 - RNA, 23 nt, Artificial Sequence
  Chemically synthesized
gcggaaagccaaugaugagagca

SEQ ID NO: 62155 - RNA, 23 nt, Artificial Sequence
  Chemically synthesized
agcggaaagccaaugaugagagc

SEQ ID NO: 62156 - RNA, 23 nt, Artificial Sequence
  Chemically synthesized
aagcggaaagccaaugaugagag

SEQ ID NO: 62157 - RNA, 23 nt, Artificial Sequence
  Chemically synthesized
ggaguugaauggugcauacaagg

SEQ ID NO: 62158 - RNA, 23 nt, Artificial Sequence
  Chemically synthesized
aggaguugaauggugcauacaag

SEQ ID NO: 62159 - RNA, 23 nt, Artificial Sequence
  Chemically synthesized
gaggaguugaauggugcauacaa

SEQ ID NO: 62160 - RNA, 23 nt, Artificial Sequence
  Chemically synthesized
cgaggaguugaauggugcauaca

SEQ ID NO: 62161 - RNA, 23 nt, Artificial Sequence
  Chemically synthesized
gcgaggaguugaauggugcauac

SEQ ID NO: 62162 - RNA, 23 nt, Artificial Sequence
  Chemically synthesized
acugaggucaaaaucuaagaagu

SEQ ID NO: 62163 - RNA, 23 nt, Artificial Sequence
  Chemically synthesized
gacugaggucaaaaucuaagaag

SEQ ID NO: 62164 - RNA, 23 nt, Artificial Sequence
  Chemically synthesized
ggacugaggucaaaaucuaagaa

SEQ ID NO: 62165 - RNA, 23 nt, Artificial Sequence
  Chemically synthesized
cgaccaaggaaaacucacuacca

SEQ ID NO: 62166 - RNA, 23 nt, Artificial Sequence
  Chemically synthesized
ccgaccaaggaaaacucacuacc

SEQ ID NO: 62167 - RNA, 23 nt, Artificial Sequence
  Chemically synthesized
gccgaccaaggaaaacucacuac

SEQ ID NO: 62168 - RNA, 23 nt, Artificial Sequence
  Chemically synthesized
cgccgaccaaggaaaacucacua

SEQ ID NO: 62169 - RNA, 23 nt, Artificial Sequence
  Chemically synthesized
acgccgaccaaggaaaacucacu

SEQ ID NO: 62170 - RNA, 23 nt, Artificial Sequence
  Chemically synthesized
cauucugaugaaucugaugaacu

SEQ ID NO: 62171 - RNA, 23 nt, Artificial Sequence
  Chemically synthesized
ccauucugaugaaucugaugaac

SEQ ID NO: 62172 - RNA, 23 nt, Artificial Sequence
  Chemically synthesized
accauucugaugaaucugaugaa

SEQ ID NO: 62173 - RNA, 23 nt, Artificial Sequence
  Chemically synthesized
ucgaacgacucugaugauguaga

SEQ ID NO: 62174 - RNA, 23 nt, Artificial Sequence
  Chemically synthesized
cucgaacgacucugaugauguag

SEQ ID NO: 62175 - RNA, 23 nt, Artificial Sequence
  Chemically synthesized
acucgaacgacucugaugaugua

SEQ ID NO: 62176 - RNA, 23 nt, Artificial Sequence
  Chemically synthesized
ggcugauucuggaaguucugagg

SEQ ID NO: 62177 - RNA, 23 nt, Artificial Sequence
  Chemically synthesized
aggcugauucuggaaguucugag

SEQ ID NO: 62178 - RNA, 23 nt, Artificial Sequence
  Chemically synthesized
caggcugauucuggaaguucuga

SEQ ID NO: 62179 - RNA, 23 nt, Artificial Sequence
  Chemically synthesized
acaggcugauucuggaaguucug

SEQ ID NO: 62180 - RNA, 23 nt, Artificial Sequence
  Chemically synthesized
aacaggcugauucuggaaguucu

SEQ ID NO: 62181 - RNA, 23 nt, Artificial Sequence
  Chemically synthesized
ggugucaauugcuuauuuguuuu

SEQ ID NO: 62182 - RNA, 23 nt, Artificial Sequence
  Chemically synthesized
auuugguggugucaauugcuuau

SEQ ID NO: 62183 - RNA, 23 nt, Artificial Sequence
  Chemically synthesized
gguuaugucuauguucauucuau

SEQ ID NO: 62184 - RNA, 23 nt, Artificial Sequence
  Chemically synthesized
ggucaauuaaaaggagaaaaaau

SEQ ID NO: 62185 - RNA, 23 nt, Artificial Sequence
  Chemically synthesized
aggucaauuaaaaggagaaaaaa

SEQ ID NO: 62186 - RNA, 23 nt, Artificial Sequence
  Chemically synthesized
gaggucaauuaaaaggagaaaaa

SEQ ID NO: 62187 - RNA, 23 nt, Artificial Sequence
  Chemically synthesized
ugaggucaauuaaaaggagaaaa

SEQ ID NO: 62188 - RNA, 23 nt, Artificial Sequence
  Chemically synthesized
cugaggucaauuaaaaggagaaa

SEQ ID NO: 62189 - RNA, 23 nt, Artificial Sequence
  Chemically synthesized
caaaaguaaggaagaagauaaac

SEQ ID NO: 62190 - RNA, 23 nt, Artificial Sequence
  Chemically synthesized
cgaugugauugauagucaggaac

SEQ ID NO: 62191 - RNA, 23 nt, Artificial Sequence
  Chemically synthesized
gcaaugagcauuccgaugugauu

SEQ ID NO: 62192 - RNA, 23 nt, Artificial Sequence
  Chemically synthesized
agcaaugagcauuccgaugugau

SEQ ID NO: 62193 - RNA, 23 nt, Artificial Sequence
  Chemically synthesized
gagcaaugagcauuccgauguga

SEQ ID NO: 62194 - RNA, 23 nt, Artificial Sequence
  Chemically synthesized
agagcaaugagcauuccgaugug

SEQ ID NO: 62195 - RNA, 23 nt, Artificial Sequence
  Chemically synthesized
gagagcaaugagcauuccgaugu

SEQ ID NO: 62196 - RNA, 23 nt, Artificial Sequence
  Chemically synthesized
gcaguccagauuauauaagcgga

SEQ ID NO: 62197 - RNA, 23 nt, Artificial Sequence
  Chemically synthesized
agcaguccagauuauauaagcgg

SEQ ID NO: 62198 - RNA, 23 nt, Artificial Sequence
  Chemically synthesized
aagcaguccagauuauauaagcg

SEQ ID NO: 62199 - RNA, 23 nt, Artificial Sequence
  Chemically synthesized
caagcaguccagauuauauaagc

SEQ ID NO: 62200 - RNA, 23 nt, Artificial Sequence
  Chemically synthesized
acaagcaguccagauuauauaag

SEQ ID NO: 62201 - RNA, 23 nt, Artificial Sequence
  Chemically synthesized
ggacaguuaugaaacgagucagc

SEQ ID NO: 62202 - RNA, 23 nt, Artificial Sequence
  Chemically synthesized
aggacaguuaugaaacgagucag

SEQ ID NO: 62203 - RNA, 23 nt, Artificial Sequence
  Chemically synthesized
aaggacaguuaugaaacgaguca

SEQ ID NO: 62204 - RNA, 23 nt, Artificial Sequence
  Chemically synthesized
gaaggacaguuaugaaacgaguc

SEQ ID NO: 62205 - RNA, 23 nt, Artificial Sequence
  Chemically synthesized
ggaaggacaguuaugaaacgagu

SEQ ID NO: 62206 - RNA, 23 nt, Artificial Sequence
  Chemically synthesized
gggaaggacaguuaugaaacgag

SEQ ID NO: 62207 - RNA, 23 nt, Artificial Sequence
  Chemically synthesized
ugggaaggacaguuaugaaacga

SEQ ID NO: 62208 - RNA, 23 nt, Artificial Sequence
  Chemically synthesized
gugggaaggacaguuaugaaacg

SEQ ID NO: 62209 - RNA, 23 nt, Artificial Sequence
  Chemically synthesized
cgugggaaggacaguuaugaaac

SEQ ID NO: 62210 - RNA, 23 nt, Artificial Sequence
  Chemically synthesized
ccgugggaaggacaguuaugaaa

SEQ ID NO: 62211 - RNA, 23 nt, Artificial Sequence
  Chemically synthesized
gaccaaggaaaacucacuaccau

SEQ ID NO: 62212 - RNA, 23 nt, Artificial Sequence
  Chemically synthesized
guagaugacacugaugauucuca

SEQ ID NO: 62213 - RNA, 23 nt, Artificial Sequence
  Chemically synthesized
uguagaugacacugaugauucuc

SEQ ID NO: 62214 - RNA, 23 nt, Artificial Sequence
  Chemically synthesized
auguagaugacacugaugauucu

SEQ ID NO: 62215 - RNA, 23 nt, Artificial Sequence
  Chemically synthesized
gauguagaugacacugaugauuc

SEQ ID NO: 62216 - RNA, 23 nt, Artificial Sequence
  Chemically synthesized
ucugaugauguagaugacacuga

SEQ ID NO: 62217 - RNA, 23 nt, Artificial Sequence
  Chemically synthesized
cucugaugauguagaugacacug

SEQ ID NO: 62218 - RNA, 23 nt, Artificial Sequence
  Chemically synthesized
acucugaugauguagaugacacu

SEQ ID NO: 62219 - RNA, 23 nt, Artificial Sequence
  Chemically synthesized
cccuuccaaguaaguccaacgaa

SEQ ID NO: 62220 - RNA, 23 nt, Artificial Sequence
  Chemically synthesized
acauaaccuuuuuuacugccuaa

SEQ ID NO: 62221 - RNA, 23 nt, Artificial Sequence
  Chemically synthesized
aacauaaccuuuuuuacugccua

SEQ ID NO: 62222 - RNA, 23 nt, Artificial Sequence
  Chemically synthesized
aaacauaaccuuuuuuacugccu

SEQ ID NO: 62223 - RNA, 23 nt, Artificial Sequence
  Chemically synthesized
aaaacauaaccuuuuuuacugcc

SEQ ID NO: 62224 - RNA, 23 nt, Artificial Sequence
  Chemically synthesized
uaaaacauaaccuuuuuuacugc

SEQ ID NO: 62225 - RNA, 23 nt, Artificial Sequence
  Chemically synthesized
cgguuguccagcaauuaauaaaa

SEQ ID NO: 62226 - RNA, 23 nt, Artificial Sequence
  Chemically synthesized
acgguuguccagcaauuaauaaa

SEQ ID NO: 62227 - RNA, 23 nt, Artificial Sequence
  Chemically synthesized
cacgguuguccagcaauuaauaa

SEQ ID NO: 62228 - RNA, 23 nt, Artificial Sequence
  Chemically synthesized
ccacgguuguccagcaauuaaua

SEQ ID NO: 62229 - RNA, 23 nt, Artificial Sequence
  Chemically synthesized
cuauagaagaaaugcaaacuauc

SEQ ID NO: 62230 - RNA, 23 nt, Artificial Sequence
  Chemically synthesized
ucuauagaagaaaugcaaacuau

SEQ ID NO: 62231 - RNA, 23 nt, Artificial Sequence
  Chemically synthesized
uucuauagaagaaaugcaaacua

SEQ ID NO: 62232 - RNA, 23 nt, Artificial Sequence
  Chemically synthesized
auucuauagaagaaaugcaaacu

SEQ ID NO: 62233 - RNA, 23 nt, Artificial Sequence
  Chemically synthesized
cauucuauagaagaaaugcaaac

SEQ ID NO: 62234 - RNA, 23 nt, Artificial Sequence
  Chemically synthesized
guguaucuauuugagucuggaaa

SEQ ID NO: 62235 - RNA, 23 nt, Artificial Sequence
  Chemically synthesized
uguguaucuauuugagucuggaa

SEQ ID NO: 62236 - RNA, 23 nt, Artificial Sequence
  Chemically synthesized
auguguaucuauuugagucugga

SEQ ID NO: 62237 - RNA, 23 nt, Artificial Sequence
  Chemically synthesized
aauguguaucuauuugagucugg

SEQ ID NO: 62238 - RNA, 23 nt, Artificial Sequence
  Chemically synthesized
gaauguguaucuauuugagucug

SEQ ID NO: 62239 - RNA, 23 nt, Artificial Sequence
  Chemically synthesized
uuauugguugaauguguaucuau

SEQ ID NO: 62240 - RNA, 23 nt, Artificial Sequence
  Chemically synthesized
uuuauugguugaauguguaucua

SEQ ID NO: 62241 - RNA, 23 nt, Artificial Sequence
  Chemically synthesized
cucaguuuauugguugaaugugu

SEQ ID NO: 62242 - RNA, 23 nt, Artificial Sequence
  Chemically synthesized
ucucaguuuauugguugaaugug

SEQ ID NO: 62243 - RNA, 23 nt, Artificial Sequence
  Chemically synthesized
uucucaguuuauugguugaaugu

SEQ ID NO: 62244 - RNA, 23 nt, Artificial Sequence
  Chemically synthesized
uuucucaguuuauugguugaaug

SEQ ID NO: 62245 - RNA, 23 nt, Artificial Sequence
  Chemically synthesized
cuuucucaguuuauugguugaau

SEQ ID NO: 62246 - RNA, 23 nt, Artificial Sequence
  Chemically synthesized
caucuucugaggucaauuaaaag

SEQ ID NO: 62247 - RNA, 23 nt, Artificial Sequence
  Chemically synthesized
gauaaacaccugaaauuucguau

SEQ ID NO: 62248 - RNA, 23 nt, Artificial Sequence
  Chemically synthesized
agauaaacaccugaaauuucgua

SEQ ID NO: 62249 - RNA, 23 nt, Artificial Sequence
  Chemically synthesized
aguaaggaagaagauaaacaccu

SEQ ID NO: 62250 - RNA, 23 nt, Artificial Sequence
  Chemically synthesized
aaguaaggaagaagauaaacacc

SEQ ID NO: 62251 - RNA, 23 nt, Artificial Sequence
  Chemically synthesized
aaaguaaggaagaagauaaacac

SEQ ID NO: 62252 - RNA, 23 nt, Artificial Sequence
  Chemically synthesized
aaaaguaaggaagaagauaaaca

SEQ ID NO: 62253 - RNA, 23 nt, Artificial Sequence
  Chemically synthesized
gaaagccaaugaugagagcaaug

SEQ ID NO: 62254 - RNA, 23 nt, Artificial Sequence
  Chemically synthesized
uaagcggaaagccaaugaugaga

SEQ ID NO: 62255 - RNA, 23 nt, Artificial Sequence
  Chemically synthesized
acaguagacacauaugauggccg

SEQ ID NO: 62256 - RNA, 23 nt, Artificial Sequence
  Chemically synthesized
cacaguagacacauaugauggcc

SEQ ID NO: 62257 - RNA, 23 nt, Artificial Sequence
  Chemically synthesized
ccacaguagacacauaugauggc

SEQ ID NO: 62258 - RNA, 23 nt, Artificial Sequence
  Chemically synthesized
cccacaguagacacauaugaugg

SEQ ID NO: 62259 - RNA, 23 nt, Artificial Sequence
  Chemically synthesized
ccccacaguagacacauaugaug

SEQ ID NO: 62260 - RNA, 23 nt, Artificial Sequence
  Chemically synthesized
caaacgccgaccaaggaaaacuc

SEQ ID NO: 62261 - RNA, 23 nt, Artificial Sequence
  Chemically synthesized
ccaaacgccgaccaaggaaaacu

SEQ ID NO: 62262 - RNA, 23 nt, Artificial Sequence
  Chemically synthesized
gccaaacgccgaccaaggaaaac

SEQ ID NO: 62263 - RNA, 23 nt, Artificial Sequence
  Chemically synthesized
agccaaacgccgaccaaggaaaa

SEQ ID NO: 62264 - RNA, 23 nt, Artificial Sequence
  Chemically synthesized
cagccaaacgccgaccaaggaaa

SEQ ID NO: 62265 - RNA, 23 nt, Artificial Sequence
  Chemically synthesized
gacucugaugauguagaugacac

SEQ ID NO: 62266 - RNA, 23 nt, Artificial Sequence
  Chemically synthesized
cacauggaugauauggaugauga

SEQ ID NO: 62267 - RNA, 23 nt, Artificial Sequence
  Chemically synthesized
acccuuccaaguaaguccaacga

SEQ ID NO: 62268 - RNA, 23 nt, Artificial Sequence
  Chemically synthesized
gacccuuccaaguaaguccaacg

SEQ ID NO: 62269 - RNA, 23 nt, Artificial Sequence
  Chemically synthesized
agacccuuccaaguaaguccaac

SEQ ID NO: 62270 - RNA, 23 nt, Artificial Sequence
  Chemically synthesized
gagacccuuccaaguaaguccaa

SEQ ID NO: 62271 - RNA, 23 nt, Artificial Sequence
  Chemically synthesized
gaauuugguggugucaauugcuu

SEQ ID NO: 62272 - RNA, 23 nt, Artificial Sequence
  Chemically synthesized
guaauaagaauuuggugguguca

SEQ ID NO: 62273 - RNA, 23 nt, Artificial Sequence
  Chemically synthesized
uguaauaagaauuuggugguguc

SEQ ID NO: 62274 - RNA, 23 nt, Artificial Sequence
  Chemically synthesized
auguaauaagaauuugguggugu

SEQ ID NO: 62275 - RNA, 23 nt, Artificial Sequence
  Chemically synthesized
aauguaauaagaauuugguggug

SEQ ID NO: 62276 - RNA, 23 nt, Artificial Sequence
  Chemically synthesized
gaauguaauaagaauuugguggu

SEQ ID NO: 62277 - RNA, 23 nt, Artificial Sequence
  Chemically synthesized
guggugugaauaaaucuuuuauc

SEQ ID NO: 62278 - RNA, 23 nt, Artificial Sequence
  Chemically synthesized
uguggugugaauaaaucuuuuau

SEQ ID NO: 62279 - RNA, 23 nt, Artificial Sequence
  Chemically synthesized
uuguggugugaauaaaucuuuua

SEQ ID NO: 62280 - RNA, 23 nt, Artificial Sequence
  Chemically synthesized
uuuguggugugaauaaaucuuuu

SEQ ID NO: 62281 - RNA, 23 nt, Artificial Sequence
  Chemically synthesized
uuuuguggugugaauaaaucuuu

SEQ ID NO: 62282 - RNA, 23 nt, Artificial Sequence
  Chemically synthesized
uuuuacccacuuaaaaagagaau

SEQ ID NO: 62283 - RNA, 23 nt, Artificial Sequence
  Chemically synthesized
ugaauguguaucuauuugagucu

SEQ ID NO: 62284 - RNA, 23 nt, Artificial Sequence
  Chemically synthesized
ucaguuuauugguugaaugugua

SEQ ID NO: 62285 - RNA, 23 nt, Artificial Sequence
  Chemically synthesized
gcuucuuucucaguuuauugguu

SEQ ID NO: 62286 - RNA, 23 nt, Artificial Sequence
  Chemically synthesized
ugcuucuuucucaguuuauuggu

SEQ ID NO: 62287 - RNA, 23 nt, Artificial Sequence
  Chemically synthesized
augcuucuuucucaguuuauugg

SEQ ID NO: 62288 - RNA, 23 nt, Artificial Sequence
  Chemically synthesized
aaugcuucuuucucaguuuauug

SEQ ID NO: 62289 - RNA, 23 nt, Artificial Sequence
  Chemically synthesized
aaaugcuucuuucucaguuuauu

SEQ ID NO: 62290 - RNA, 23 nt, Artificial Sequence
  Chemically synthesized
ucacuuugcauuuagucaaaaga

SEQ ID NO: 62291 - RNA, 23 nt, Artificial Sequence
  Chemically synthesized
cucacuuugcauuuagucaaaag

SEQ ID NO: 62292 - RNA, 23 nt, Artificial Sequence
  Chemically synthesized
ucucacuuugcauuuagucaaaa

SEQ ID NO: 62293 - RNA, 23 nt, Artificial Sequence
  Chemically synthesized
uucucacuuugcauuuagucaaa

SEQ ID NO: 62294 - RNA, 23 nt, Artificial Sequence
  Chemically synthesized
uuucucacuuugcauuuagucaa

SEQ ID NO: 62295 - RNA, 23 nt, Artificial Sequence
  Chemically synthesized
ucugaggucaauuaaaaggagaa

SEQ ID NO: 62296 - RNA, 23 nt, Artificial Sequence
  Chemically synthesized
ugugauugauagucaggaacuuu

SEQ ID NO: 62297 - RNA, 23 nt, Artificial Sequence
  Chemically synthesized
augugauugauagucaggaacuu

SEQ ID NO: 62298 - RNA, 23 nt, Artificial Sequence
  Chemically synthesized
gaugugauugauagucaggaacu

SEQ ID NO: 62299 - RNA, 23 nt, Artificial Sequence
  Chemically synthesized
cagauuauauaagcggaaagcca

SEQ ID NO: 62300 - RNA, 23 nt, Artificial Sequence
  Chemically synthesized
ggacaucaccucacacauggaaa

SEQ ID NO: 62301 - RNA, 23 nt, Artificial Sequence
  Chemically synthesized
aggacaucaccucacacauggaa

SEQ ID NO: 62302 - RNA, 23 nt, Artificial Sequence
  Chemically synthesized
gaggacaucaccucacacaugga

SEQ ID NO: 62303 - RNA, 23 nt, Artificial Sequence
  Chemically synthesized
cgaggacaucaccucacacaugg

SEQ ID NO: 62304 - RNA, 23 nt, Artificial Sequence
  Chemically synthesized
acgaggacaucaccucacacaug

SEQ ID NO: 62305 - RNA, 23 nt, Artificial Sequence
  Chemically synthesized
ccgaggugauagugugguuuaug

SEQ ID NO: 62306 - RNA, 23 nt, Artificial Sequence
  Chemically synthesized
gccgaggugauagugugguuuau

SEQ ID NO: 62307 - RNA, 23 nt, Artificial Sequence
  Chemically synthesized
ggccgaggugauagugugguuua

SEQ ID NO: 62308 - RNA, 23 nt, Artificial Sequence
  Chemically synthesized
uggccgaggugauagugugguuu

SEQ ID NO: 62309 - RNA, 23 nt, Artificial Sequence
  Chemically synthesized
auggccgaggugauagugugguu

SEQ ID NO: 62310 - RNA, 23 nt, Artificial Sequence
  Chemically synthesized
uccccacaguagacacauaugau

SEQ ID NO: 62311 - RNA, 23 nt, Artificial Sequence
  Chemically synthesized
ccaaggaaaacucacuaccauga

SEQ ID NO: 62312 - RNA, 23 nt, Artificial Sequence
  Chemically synthesized
accaaggaaaacucacuaccaug

SEQ ID NO: 62313 - RNA, 23 nt, Artificial Sequence
  Chemically synthesized
ccacauggaugauauggaugaug

SEQ ID NO: 62314 - RNA, 23 nt, Artificial Sequence
  Chemically synthesized
accacauggaugauauggaugau

SEQ ID NO: 62315 - RNA, 23 nt, Artificial Sequence
  Chemically synthesized
gaccacauggaugauauggauga

SEQ ID NO: 62316 - RNA, 23 nt, Artificial Sequence
  Chemically synthesized
guaaguccaacgaaagccaugac

SEQ ID NO: 62317 - RNA, 23 nt, Artificial Sequence
  Chemically synthesized
aguaaguccaacgaaagccauga

SEQ ID NO: 62318 - RNA, 23 nt, Artificial Sequence
  Chemically synthesized
aaguaaguccaacgaaagccaug

SEQ ID NO: 62319 - RNA, 23 nt, Artificial Sequence
  Chemically synthesized
caaguaaguccaacgaaagccau

SEQ ID NO: 62320 - RNA, 23 nt, Artificial Sequence
  Chemically synthesized
gcauuuaaauucugggagggcuu

SEQ ID NO: 62321 - RNA, 23 nt, Artificial Sequence
  Chemically synthesized
agcauuuaaauucugggagggcu

SEQ ID NO: 62322 - RNA, 23 nt, Artificial Sequence
  Chemically synthesized
cagcauuuaaauucugggagggc

SEQ ID NO: 62323 - RNA, 23 nt, Artificial Sequence
  Chemically synthesized
gcagcauuuaaauucugggaggg

SEQ ID NO: 62324 - RNA, 23 nt, Artificial Sequence
  Chemically synthesized
agcagcauuuaaauucugggagg

SEQ ID NO: 62325 - RNA, 23 nt, Artificial Sequence
  Chemically synthesized
uaaaagcuucaggguuaugucua

SEQ ID NO: 62326 - RNA, 23 nt, Artificial Sequence
  Chemically synthesized
cuggaaauaacuaauguguuuga

SEQ ID NO: 62327 - RNA, 23 nt, Artificial Sequence
  Chemically synthesized
ucuggaaauaacuaauguguuug

SEQ ID NO: 62328 - RNA, 23 nt, Artificial Sequence
  Chemically synthesized
gucuggaaauaacuaauguguuu

SEQ ID NO: 62329 - RNA, 23 nt, Artificial Sequence
  Chemically synthesized
agucuggaaauaacuaauguguu

SEQ ID NO: 62330 - RNA, 23 nt, Artificial Sequence
  Chemically synthesized
gagucuggaaauaacuaaugugu

SEQ ID NO: 62331 - RNA, 23 nt, Artificial Sequence
  Chemically synthesized
ugagucuggaaauaacuaaugug

SEQ ID NO: 62332 - RNA, 23 nt, Artificial Sequence
  Chemically synthesized
uugagucuggaaauaacuaaugu

SEQ ID NO: 62333 - RNA, 23 nt, Artificial Sequence
  Chemically synthesized
uuugagucuggaaauaacuaaug

SEQ ID NO: 62334 - RNA, 23 nt, Artificial Sequence
  Chemically synthesized
auuugagucuggaaauaacuaau

SEQ ID NO: 62335 - RNA, 23 nt, Artificial Sequence
  Chemically synthesized
uauuugagucuggaaauaacuaa

SEQ ID NO: 62336 - RNA, 23 nt, Artificial Sequence
  Chemically synthesized
uguaucuauuugagucuggaaau

SEQ ID NO: 62337 - RNA, 23 nt, Artificial Sequence
  Chemically synthesized
ugaaagagaacaugaaaugcuuc

SEQ ID NO: 62338 - RNA, 23 nt, Artificial Sequence
  Chemically synthesized
augaaagagaacaugaaaugcuu

SEQ ID NO: 62339 - RNA, 23 nt, Artificial Sequence
  Chemically synthesized
aaugaaagagaacaugaaaugcu

SEQ ID NO: 62340 - RNA, 23 nt, Artificial Sequence
  Chemically synthesized
aaaugaaagagaacaugaaaugc

SEQ ID NO: 62341 - RNA, 23 nt, Artificial Sequence
  Chemically synthesized
aaaaugaaagagaacaugaaaug

SEQ ID NO: 62342 - RNA, 23 nt, Artificial Sequence
  Chemically synthesized
gauagugcaucuucugaggucaa

SEQ ID NO: 62343 - RNA, 23 nt, Artificial Sequence
  Chemically synthesized
gauugauagucaggaacuuucca

SEQ ID NO: 62344 - RNA, 23 nt, Artificial Sequence
  Chemically synthesized
ugauugauagucaggaacuuucc

SEQ ID NO: 62345 - RNA, 23 nt, Artificial Sequence
  Chemically synthesized
gugauugauagucaggaacuuuc

SEQ ID NO: 62346 - RNA, 23 nt, Artificial Sequence
  Chemically synthesized
caaugagcauuccgaugugauug

SEQ ID NO: 62347 - RNA, 23 nt, Artificial Sequence
  Chemically synthesized
auaagcggaaagccaaugaugag

SEQ ID NO: 62348 - RNA, 23 nt, Artificial Sequence
  Chemically synthesized
cacaagcaguccagauuauauaa

SEQ ID NO: 62349 - RNA, 23 nt, Artificial Sequence
  Chemically synthesized
ccacaagcaguccagauuauaua

SEQ ID NO: 62350 - RNA, 23 nt, Artificial Sequence
  Chemically synthesized
gccacaagcaguccagauuauau

SEQ ID NO: 62351 - RNA, 23 nt, Artificial Sequence
  Chemically synthesized
agccacaagcaguccagauuaua

SEQ ID NO: 62352 - RNA, 23 nt, Artificial Sequence
  Chemically synthesized
cagccacaagcaguccagauuau

SEQ ID NO: 62353 - RNA, 23 nt, Artificial Sequence
  Chemically synthesized
acagccacaagcaguccagauua

SEQ ID NO: 62354 - RNA, 23 nt, Artificial Sequence
  Chemically synthesized
cacagccacaagcaguccagauu

SEQ ID NO: 62355 - RNA, 23 nt, Artificial Sequence
  Chemically synthesized
ugaaacgagucagcuggaugacc

SEQ ID NO: 62356 - RNA, 23 nt, Artificial Sequence
  Chemically synthesized
augaaacgagucagcuggaugac

SEQ ID NO: 62357 - RNA, 23 nt, Artificial Sequence
  Chemically synthesized
uaugaaacgagucagcuggauga

SEQ ID NO: 62358 - RNA, 23 nt, Artificial Sequence
  Chemically synthesized
uuaugaaacgagucagcuggaug

SEQ ID NO: 62359 - RNA, 23 nt, Artificial Sequence
  Chemically synthesized
guuaugaaacgagucagcuggau

SEQ ID NO: 62360 - RNA, 23 nt, Artificial Sequence
  Chemically synthesized
acaguuaugaaacgagucagcug

SEQ ID NO: 62361 - RNA, 23 nt, Artificial Sequence
  Chemically synthesized
gacaguuaugaaacgagucagcu

SEQ ID NO: 62362 - RNA, 23 nt, Artificial Sequence
  Chemically synthesized
agcgaggaguugaauggugcaua

SEQ ID NO: 62363 - RNA, 23 nt, Artificial Sequence
  Chemically synthesized
cgaggugauagugugguuuaugg

SEQ ID NO: 62364 - RNA, 23 nt, Artificial Sequence
  Chemically synthesized
aaggaaaacucacuaccaugaga

SEQ ID NO: 62365 - RNA, 23 nt, Artificial Sequence
  Chemically synthesized
caaggaaaacucacuaccaugag

SEQ ID NO: 62366 - RNA, 23 nt, Artificial Sequence
  Chemically synthesized
cacauaugauggccgaggugaua

SEQ ID NO: 62367 - RNA, 23 nt, Artificial Sequence
  Chemically synthesized
acacauaugauggccgaggugau

SEQ ID NO: 62368 - RNA, 23 nt, Artificial Sequence
  Chemically synthesized
gacacauaugauggccgagguga

SEQ ID NO: 62369 - RNA, 23 nt, Artificial Sequence
  Chemically synthesized
agacacauaugauggccgaggug

SEQ ID NO: 62370 - RNA, 23 nt, Artificial Sequence
  Chemically synthesized
uagacacauaugauggccgaggu

SEQ ID NO: 62371 - RNA, 23 nt, Artificial Sequence
  Chemically synthesized
ugaacuggucacugauuuuccca

SEQ ID NO: 62372 - RNA, 23 nt, Artificial Sequence
  Chemically synthesized
augaacuggucacugauuuuccc

SEQ ID NO: 62373 - RNA, 23 nt, Artificial Sequence
  Chemically synthesized
gaugaacuggucacugauuuucc

SEQ ID NO: 62374 - RNA, 23 nt, Artificial Sequence
  Chemically synthesized
ugaugaacuggucacugauuuuc

SEQ ID NO: 62375 - RNA, 23 nt, Artificial Sequence
  Chemically synthesized
cugaugaacuggucacugauuuu

SEQ ID NO: 62376 - RNA, 23 nt, Artificial Sequence
  Chemically synthesized
agaugacacugaugauucucacc

SEQ ID NO: 62377 - RNA, 23 nt, Artificial Sequence
  Chemically synthesized
uagaugacacugaugauucucac

SEQ ID NO: 62378 - RNA, 23 nt, Artificial Sequence
  Chemically synthesized
gacucgaacgacucugaugaugu

SEQ ID NO: 62379 - RNA, 23 nt, Artificial Sequence
  Chemically synthesized
ugacucgaacgacucugaugaug

SEQ ID NO: 62380 - RNA, 23 nt, Artificial Sequence
  Chemically synthesized
uugacucgaacgacucugaugau

SEQ ID NO: 62381 - RNA, 23 nt, Artificial Sequence
  Chemically synthesized
cagcagcauuuaaauucugggag

SEQ ID NO: 62382 - RNA, 23 nt, Artificial Sequence
  Chemically synthesized
cuggaaguucugaggaaaagcag

SEQ ID NO: 62383 - RNA, 23 nt, Artificial Sequence
  Chemically synthesized
ucuggaaguucugaggaaaagca

SEQ ID NO: 62384 - RNA, 23 nt, Artificial Sequence
  Chemically synthesized
uucuggaaguucugaggaaaagc

SEQ ID NO: 62385 - RNA, 23 nt, Artificial Sequence
  Chemically synthesized
auucuggaaguucugaggaaaag

SEQ ID NO: 62386 - RNA, 23 nt, Artificial Sequence
  Chemically synthesized
gauucuggaaguucugaggaaaa

SEQ ID NO: 62387 - RNA, 23 nt, Artificial Sequence
  Chemically synthesized
caguuaaacaggcugauucugga

SEQ ID NO: 62388 - RNA, 23 nt, Artificial Sequence
  Chemically synthesized
ccaguuaaacaggcugauucugg

SEQ ID NO: 62389 - RNA, 23 nt, Artificial Sequence
  Chemically synthesized
accaguuaaacaggcugauucug

SEQ ID NO: 62390 - RNA, 23 nt, Artificial Sequence
  Chemically synthesized
uaccaguuaaacaggcugauucu

SEQ ID NO: 62391 - RNA, 23 nt, Artificial Sequence
  Chemically synthesized
auaccaguuaaacaggcugauuc

SEQ ID NO: 62392 - RNA, 23 nt, Artificial Sequence
  Chemically synthesized
gugauuaucuuuuugugguguga

SEQ ID NO: 62393 - RNA, 23 nt, Artificial Sequence
  Chemically synthesized
ugugauuaucuuuuuguggugug

SEQ ID NO: 62394 - RNA, 23 nt, Artificial Sequence
  Chemically synthesized
uugugauuaucuuuuuguggugu

SEQ ID NO: 62395 - RNA, 23 nt, Artificial Sequence
  Chemically synthesized
guugugauuaucuuuuuguggug

SEQ ID NO: 62396 - RNA, 23 nt, Artificial Sequence
  Chemically synthesized
caauuucucacuuugcauuuagu

SEQ ID NO: 62397 - RNA, 23 nt, Artificial Sequence
  Chemically synthesized
acaauuucucacuuugcauuuag

SEQ ID NO: 62398 - RNA, 23 nt, Artificial Sequence
  Chemically synthesized
uacaauuucucacuuugcauuua

SEQ ID NO: 62399 - RNA, 23 nt, Artificial Sequence
  Chemically synthesized
auacaauuucucacuuugcauuu

SEQ ID NO: 62400 - RNA, 23 nt, Artificial Sequence
  Chemically synthesized
aauacaauuucucacuuugcauu

SEQ ID NO: 62401 - RNA, 23 nt, Artificial Sequence
  Chemically synthesized
uucugaggucaauuaaaaggaga

SEQ ID NO: 62402 - RNA, 23 nt, Artificial Sequence
  Chemically synthesized
cuucugaggucaauuaaaaggag

SEQ ID NO: 62403 - RNA, 23 nt, Artificial Sequence
  Chemically synthesized
ucuucugaggucaauuaaaagga

SEQ ID NO: 62404 - RNA, 23 nt, Artificial Sequence
  Chemically synthesized
aucuucugaggucaauuaaaagg

SEQ ID NO: 62405 - RNA, 23 nt, Artificial Sequence
  Chemically synthesized
ucaugaauuagauagugcaucuu

SEQ ID NO: 62406 - RNA, 23 nt, Artificial Sequence
  Chemically synthesized
cucaugaauuagauagugcaucu

SEQ ID NO: 62407 - RNA, 23 nt, Artificial Sequence
  Chemically synthesized
ucucaugaauuagauagugcauc

SEQ ID NO: 62408 - RNA, 23 nt, Artificial Sequence
  Chemically synthesized
uucucaugaauuagauagugcau

SEQ ID NO: 62409 - RNA, 23 nt, Artificial Sequence
  Chemically synthesized
uuucucaugaauuagauagugca

SEQ ID NO: 62410 - RNA, 23 nt, Artificial Sequence
  Chemically synthesized
ugaagauaugcugguuguagacc

SEQ ID NO: 62411 - RNA, 23 nt, Artificial Sequence
  Chemically synthesized
augaagauaugcugguuguagac

SEQ ID NO: 62412 - RNA, 23 nt, Artificial Sequence
  Chemically synthesized
caugaagauaugcugguuguaga

SEQ ID NO: 62413 - RNA, 23 nt, Artificial Sequence
  Chemically synthesized
ccaugaagauaugcugguuguag

SEQ ID NO: 62414 - RNA, 23 nt, Artificial Sequence
  Chemically synthesized
gccaugaagauaugcugguugua

SEQ ID NO: 62415 - RNA, 23 nt, Artificial Sequence
  Chemically synthesized
ccaaagucagccgugaauuccac

SEQ ID NO: 62416 - RNA, 23 nt, Artificial Sequence
  Chemically synthesized
uccaaagucagccgugaauucca

SEQ ID NO: 62417 - RNA, 23 nt, Artificial Sequence
  Chemically synthesized
uuccaaagucagccgugaauucc

SEQ ID NO: 62418 - RNA, 23 nt, Artificial Sequence
  Chemically synthesized
uuuccaaagucagccgugaauuc

SEQ ID NO: 62419 - RNA, 23 nt, Artificial Sequence
  Chemically synthesized
cuuuccaaagucagccgugaauu

SEQ ID NO: 62420 - RNA, 23 nt, Artificial Sequence
  Chemically synthesized
aaugagcauuccgaugugauuga

SEQ ID NO: 62421 - RNA, 23 nt, Artificial Sequence
  Chemically synthesized
agauuauauaagcggaaagccaa

SEQ ID NO: 62422 - RNA, 23 nt, Artificial Sequence
  Chemically synthesized
caugagaauugcagugauuugcu

SEQ ID NO: 62423 - RNA, 23 nt, Artificial Sequence
  Chemically synthesized
aagcgaggaguugaauggugcau

SEQ ID NO: 62424 - RNA, 23 nt, Artificial Sequence
  Chemically synthesized
ggaaagcgaggaguugaauggug

SEQ ID NO: 62425 - RNA, 23 nt, Artificial Sequence
  Chemically synthesized
uggaaagcgaggaguugaauggu

SEQ ID NO: 62426 - RNA, 23 nt, Artificial Sequence
  Chemically synthesized
auggaaagcgaggaguugaaugg

SEQ ID NO: 62427 - RNA, 23 nt, Artificial Sequence
  Chemically synthesized
cauggaaagcgaggaguugaaug

SEQ ID NO: 62428 - RNA, 23 nt, Artificial Sequence
  Chemically synthesized
acauggaaagcgaggaguugaau

SEQ ID NO: 62429 - RNA, 23 nt, Artificial Sequence
  Chemically synthesized
cacauggaaagcgaggaguugaa

SEQ ID NO: 62430 - RNA, 23 nt, Artificial Sequence
  Chemically synthesized
acacauggaaagcgaggaguuga

SEQ ID NO: 62431 - RNA, 23 nt, Artificial Sequence
  Chemically synthesized
cacacauggaaagcgaggaguug

SEQ ID NO: 62432 - RNA, 23 nt, Artificial Sequence
  Chemically synthesized
ucacacauggaaagcgaggaguu

SEQ ID NO: 62433 - RNA, 23 nt, Artificial Sequence
  Chemically synthesized
augcuacagacgaggacaucacc

SEQ ID NO: 62434 - RNA, 23 nt, Artificial Sequence
  Chemically synthesized
gaugcuacagacgaggacaucac

SEQ ID NO: 62435 - RNA, 23 nt, Artificial Sequence
  Chemically synthesized
ugaugcuacagacgaggacauca

SEQ ID NO: 62436 - RNA, 23 nt, Artificial Sequence
  Chemically synthesized
cugaugcuacagacgaggacauc

SEQ ID NO: 62437 - RNA, 23 nt, Artificial Sequence
  Chemically synthesized
ccugaugcuacagacgaggacau

SEQ ID NO: 62438 - RNA, 23 nt, Artificial Sequence
  Chemically synthesized
cccugaugcuacagacgaggaca

SEQ ID NO: 62439 - RNA, 23 nt, Artificial Sequence
  Chemically synthesized
acccugaugcuacagacgaggac

SEQ ID NO: 62440 - RNA, 23 nt, Artificial Sequence
  Chemically synthesized
uggaaguucugaggaaaagcagc

SEQ ID NO: 62441 - RNA, 23 nt, Artificial Sequence
  Chemically synthesized
aauuugguggugucaauugcuua

SEQ ID NO: 62442 - RNA, 23 nt, Artificial Sequence
  Chemically synthesized
uguugugauuaucuuuuuguggu

SEQ ID NO: 62443 - RNA, 23 nt, Artificial Sequence
  Chemically synthesized
gaaaugcuucuuucucaguuuau

SEQ ID NO: 62444 - RNA, 23 nt, Artificial Sequence
  Chemically synthesized
uggacugaggucaaaaucuaaga

SEQ ID NO: 62445 - RNA, 23 nt, Artificial Sequence
  Chemically synthesized
aggugauagugugguuuauggac

SEQ ID NO: 62446 - RNA, 23 nt, Artificial Sequence
  Chemically synthesized
gaggugauagugugguuuaugga

SEQ ID NO: 62447 - RNA, 23 nt, Artificial Sequence
  Chemically synthesized
caccauucugaugaaucugauga

SEQ ID NO: 62448 - RNA, 23 nt, Artificial Sequence
  Chemically synthesized
ucaccauucugaugaaucugaug

SEQ ID NO: 62449 - RNA, 23 nt, Artificial Sequence
  Chemically synthesized
cucaccauucugaugaaucugau

SEQ ID NO: 62450 - RNA, 23 nt, Artificial Sequence
  Chemically synthesized
aacgccgaccaaggaaaacucac

SEQ ID NO: 62451 - RNA, 23 nt, Artificial Sequence
  Chemically synthesized
aaacgccgaccaaggaaaacuca

SEQ ID NO: 62452 - RNA, 23 nt, Artificial Sequence
  Chemically synthesized
ugagucucaccauucugaugaau

SEQ ID NO: 62453 - RNA, 23 nt, Artificial Sequence
  Chemically synthesized
augagucucaccauucugaugaa

SEQ ID NO: 62454 - RNA, 23 nt, Artificial Sequence
  Chemically synthesized
gaugagucucaccauucugauga

SEQ ID NO: 62455 - RNA, 23 nt, Artificial Sequence
  Chemically synthesized
ugaugagucucaccauucugaug

SEQ ID NO: 62456 - RNA, 23 nt, Artificial Sequence
  Chemically synthesized
cugaugagucucaccauucugau

SEQ ID NO: 62457 - RNA, 23 nt, Artificial Sequence
  Chemically synthesized
augauauggaugaugaagaugau

SEQ ID NO: 62458 - RNA, 23 nt, Artificial Sequence
  Chemically synthesized
gaugauauggaugaugaagauga

SEQ ID NO: 62459 - RNA, 23 nt, Artificial Sequence
  Chemically synthesized
ugauucuggaaguucugaggaaa

SEQ ID NO: 62460 - RNA, 23 nt, Artificial Sequence
  Chemically synthesized
caaaauacuuuuacccacuuaaa

SEQ ID NO: 62461 - RNA, 23 nt, Artificial Sequence
  Chemically synthesized
acaaaauacuuuuacccacuuaa

SEQ ID NO: 62462 - RNA, 23 nt, Artificial Sequence
  Chemically synthesized
aacaaaauacuuuuacccacuua

SEQ ID NO: 62463 - RNA, 23 nt, Artificial Sequence
  Chemically synthesized
aaacaaaauacuuuuacccacuu

SEQ ID NO: 62464 - RNA, 23 nt, Artificial Sequence
  Chemically synthesized
caaacaaaauacuuuuacccacu

SEQ ID NO: 62465 - RNA, 23 nt, Artificial Sequence
  Chemically synthesized
guuuauugguugaauguguaucu

SEQ ID NO: 62466 - RNA, 23 nt, Artificial Sequence
  Chemically synthesized
aguuuauugguugaauguguauc

SEQ ID NO: 62467 - RNA, 23 nt, Artificial Sequence
  Chemically synthesized
caguuuauugguugaauguguau

SEQ ID NO: 62468 - RNA, 23 nt, Artificial Sequence
  Chemically synthesized
ucuuucucaguuuauugguugaa

SEQ ID NO: 62469 - RNA, 23 nt, Artificial Sequence
  Chemically synthesized
aaauacaauuucucacuuugcau

SEQ ID NO: 62470 - RNA, 23 nt, Artificial Sequence
  Chemically synthesized
auggacugaggucaaaaucuaag

SEQ ID NO: 62471 - RNA, 23 nt, Artificial Sequence
  Chemically synthesized
uauggacugaggucaaaaucuaa

SEQ ID NO: 62472 - RNA, 23 nt, Artificial Sequence
  Chemically synthesized
ggaugaugaagaugaugaugacc

SEQ ID NO: 62473 - RNA, 23 nt, Artificial Sequence
  Chemically synthesized
uggaugaugaagaugaugaugac

SEQ ID NO: 62474 - RNA, 23 nt, Artificial Sequence
  Chemically synthesized
auggaugaugaagaugaugauga

SEQ ID NO: 62475 - RNA, 23 nt, Artificial Sequence
  Chemically synthesized
uauggaugaugaagaugaugaug

SEQ ID NO: 62476 - RNA, 23 nt, Artificial Sequence
  Chemically synthesized
auauggaugaugaagaugaugau

SEQ ID NO: 62477 - RNA, 23 nt, Artificial Sequence
  Chemically synthesized
agagacccuuccaaguaagucca

SEQ ID NO: 62478 - RNA, 23 nt, Artificial Sequence
  Chemically synthesized
cugauucuggaaguucugaggaa

SEQ ID NO: 62479 - RNA, 23 nt, Artificial Sequence
  Chemically synthesized
gcugauucuggaaguucugagga

SEQ ID NO: 62480 - RNA, 23 nt, Artificial Sequence
  Chemically synthesized
cuguguugguggaggaugucugc

SEQ ID NO: 62481 - RNA, 23 nt, Artificial Sequence
  Chemically synthesized
ccuguguugguggaggaugucug

SEQ ID NO: 62482 - RNA, 23 nt, Artificial Sequence
  Chemically synthesized
cccuguguugguggaggaugucu

SEQ ID NO: 62483 - RNA, 23 nt, Artificial Sequence
  Chemically synthesized
ucccuguguugguggaggauguc

SEQ ID NO: 62484 - RNA, 23 nt, Artificial Sequence
  Chemically synthesized
cucccuguguugguggaggaugu

SEQ ID NO: 62485 - RNA, 23 nt, Artificial Sequence
  Chemically synthesized
uuuuuguggugugaauaaaucuu

SEQ ID NO: 62486 - RNA, 23 nt, Artificial Sequence
  Chemically synthesized
aucuuuuuguggugugaauaaau

SEQ ID NO: 62487 - RNA, 23 nt, Artificial Sequence
  Chemically synthesized
uaucuuuuuguggugugaauaaa

SEQ ID NO: 62488 - RNA, 23 nt, Artificial Sequence
  Chemically synthesized
uuaucuuuuuguggugugaauaa

SEQ ID NO: 62489 - RNA, 23 nt, Artificial Sequence
  Chemically synthesized
auuaucuuuuuguggugugaaua

SEQ ID NO: 62490 - RNA, 23 nt, Artificial Sequence
  Chemically synthesized
gauuaucuuuuuguggugugaau

SEQ ID NO: 62491 - RNA, 23 nt, Artificial Sequence
  Chemically synthesized
ugaaaugcuucuuucucaguuua

SEQ ID NO: 62492 - RNA, 23 nt, Artificial Sequence
  Chemically synthesized
cacuaccaugagaauugcaguga

SEQ ID NO: 62493 - RNA, 23 nt, Artificial Sequence
  Chemically synthesized
caguuaugaaacgagucagcugg

SEQ ID NO: 62494 - RNA, 23 nt, Artificial Sequence
  Chemically synthesized
aaagcgaggaguugaauggugca

SEQ ID NO: 62495 - RNA, 23 nt, Artificial Sequence
  Chemically synthesized
cuuuuacccacuuaaaaagagaa

SEQ ID NO: 62496 - RNA, 23 nt, Artificial Sequence
  Chemically synthesized
gcaaacaaaauacuuuuacccac

SEQ ID NO: 62497 - RNA, 23 nt, Artificial Sequence
  Chemically synthesized
guagaagcaaacaaaauacuuuu

SEQ ID NO: 62498 - RNA, 23 nt, Artificial Sequence
  Chemically synthesized
uguagaagcaaacaaaauacuuu

SEQ ID NO: 62499 - RNA, 23 nt, Artificial Sequence
  Chemically synthesized
auguagaagcaaacaaaauacuu

SEQ ID NO: 62500 - RNA, 23 nt, Artificial Sequence
  Chemically synthesized
uauguagaagcaaacaaaauacu

SEQ ID NO: 62501 - RNA, 23 nt, Artificial Sequence
  Chemically synthesized
uuauguagaagcaaacaaaauac

SEQ ID NO: 62502 - RNA, 23 nt, Artificial Sequence
  Chemically synthesized
uuaguuuaguuuguggcuucaug

SEQ ID NO: 62503 - RNA, 23 nt, Artificial Sequence
  Chemically synthesized
auuaguuuaguuuguggcuucau

SEQ ID NO: 62504 - RNA, 23 nt, Artificial Sequence
  Chemically synthesized
aauuaguuuaguuuguggcuuca

SEQ ID NO: 62505 - RNA, 23 nt, Artificial Sequence
  Chemically synthesized
uaauuaguuuaguuuguggcuuc

SEQ ID NO: 62506 - RNA, 23 nt, Artificial Sequence
  Chemically synthesized
auaauuaguuuaguuuguggcuu

SEQ ID NO: 62507 - RNA, 23 nt, Artificial Sequence
  Chemically synthesized
uugaauguguaucuauuugaguc

SEQ ID NO: 62508 - RNA, 23 nt, Artificial Sequence
  Chemically synthesized
guugaauguguaucuauuugagu

SEQ ID NO: 62509 - RNA, 23 nt, Artificial Sequence
  Chemically synthesized
uucuuucucaguuuauugguuga

SEQ ID NO: 62510 - RNA, 23 nt, Artificial Sequence
  Chemically synthesized
cuucuuucucaguuuauugguug

SEQ ID NO: 62511 - RNA, 23 nt, Artificial Sequence
  Chemically synthesized
aagagaacaugaaaugcuucuuu

SEQ ID NO: 62512 - RNA, 23 nt, Artificial Sequence
  Chemically synthesized
aaagagaacaugaaaugcuucuu

SEQ ID NO: 62513 - RNA, 23 nt, Artificial Sequence
  Chemically synthesized
gaaagagaacaugaaaugcuucu

SEQ ID NO: 62514 - RNA, 23 nt, Artificial Sequence
  Chemically synthesized
auuucucaugaauuagauagugc

SEQ ID NO: 62515 - RNA, 23 nt, Artificial Sequence
  Chemically synthesized
uauuucucaugaauuagauagug

SEQ ID NO: 62516 - RNA, 23 nt, Artificial Sequence
  Chemically synthesized
gccgugggaaggacaguuaugaa

SEQ ID NO: 62517 - RNA, 23 nt, Artificial Sequence
  Chemically synthesized
gaaagcgaggaguugaauggugc

SEQ ID NO: 62518 - RNA, 23 nt, Artificial Sequence
  Chemically synthesized
ugauggccgaggugauagugugg

SEQ ID NO: 62519 - RNA, 23 nt, Artificial Sequence
  Chemically synthesized
augauggccgaggugauagugug

SEQ ID NO: 62520 - RNA, 23 nt, Artificial Sequence
  Chemically synthesized
uaugauggccgaggugauagugu

SEQ ID NO: 62521 - RNA, 23 nt, Artificial Sequence
  Chemically synthesized
auaugauggccgaggugauagug

SEQ ID NO: 62522 - RNA, 23 nt, Artificial Sequence
  Chemically synthesized
cauaugauggccgaggugauagu

SEQ ID NO: 62523 - RNA, 23 nt, Artificial Sequence
  Chemically synthesized
gaaaugcaaacuaucacuguauu

SEQ ID NO: 62524 - RNA, 23 nt, Artificial Sequence
  Chemically synthesized
agaaaugcaaacuaucacuguau

SEQ ID NO: 62525 - RNA, 23 nt, Artificial Sequence
  Chemically synthesized
guuuguggcuucauggaaacucc

SEQ ID NO: 62526 - RNA, 23 nt, Artificial Sequence
  Chemically synthesized
aguuuguggcuucauggaaacuc

SEQ ID NO: 62527 - RNA, 23 nt, Artificial Sequence
  Chemically synthesized
uaguuuguggcuucauggaaacu

SEQ ID NO: 62528 - RNA, 23 nt, Artificial Sequence
  Chemically synthesized
uuaguuuguggcuucauggaaac

SEQ ID NO: 62529 - RNA, 23 nt, Artificial Sequence
  Chemically synthesized
uuuaguuuguggcuucauggaaa
